United States Patent Application Publication US 2014/0004565 A1 - sequence listing, part 61

SEQ ID NO: 1464256 - RNA, 19 nt, Artificial Sequence
  Description of Artificial Sequence: Synthetic oligonucleotide
cucucgggcuuuggucagc

SEQ ID NO: 1464257 - RNA, 19 nt, Artificial Sequence
  Description of Artificial Sequence: Synthetic oligonucleotide
gcaagauccgucggcuuuc

SEQ ID NO: 1464258 - RNA, 19 nt, Artificial Sequence
  Description of Artificial Sequence: Synthetic oligonucleotide
gcuguaggcgguucagaua

SEQ ID NO: 1464259 - RNA, 19 nt, Artificial Sequence
  Description of Artificial Sequence: Synthetic oligonucleotide
caagcacgcaaggcccauc

SEQ ID NO: 1464260 - RNA, 19 nt, Artificial Sequence
  Description of Artificial Sequence: Synthetic oligonucleotide
auccgucggcuuucuugau

SEQ ID NO: 1464261 - RNA, 19 nt, Artificial Sequence
  Description of Artificial Sequence: Synthetic oligonucleotide
ccucgaugcggaagccaag

SEQ ID NO: 1464262 - RNA, 19 nt, Artificial Sequence
  Description of Artificial Sequence: Synthetic oligonucleotide
ggucccaccgccagcaucu

SEQ ID NO: 1464263 - RNA, 19 nt, Artificial Sequence
  Description of Artificial Sequence: Synthetic oligonucleotide
acguccugacacccaucuu

SEQ ID NO: 1464264 - RNA, 19 nt, Artificial Sequence
  Description of Artificial Sequence: Synthetic oligonucleotide
gcgcgguuuggugacagca

SEQ ID NO: 1464265 - RNA, 19 nt, Artificial Sequence
  Description of Artificial Sequence: Synthetic oligonucleotide
cccauuguuuccuuucccu

SEQ ID NO: 1464266 - RNA, 19 nt, Artificial Sequence
  Description of Artificial Sequence: Synthetic oligonucleotide
ccaucccgcuccacuacac

SEQ ID NO: 1464267 - RNA, 19 nt, Artificial Sequence
  Description of Artificial Sequence: Synthetic oligonucleotide
ugaccaugguucggaucuu

SEQ ID NO: 1464268 - RNA, 19 nt, Artificial Sequence
  Description of Artificial Sequence: Synthetic oligonucleotide
gucccucuagagaggugca

SEQ ID NO: 1464269 - RNA, 19 nt, Artificial Sequence
  Description of Artificial Sequence: Synthetic oligonucleotide
cagggucuccgaugaucca

SEQ ID NO: 1464270 - RNA, 19 nt, Artificial Sequence
  Description of Artificial Sequence: Synthetic oligonucleotide
gcgggguuccagucucuug

SEQ ID NO: 1464271 - RNA, 19 nt, Artificial Sequence
  Description of Artificial Sequence: Synthetic oligonucleotide
gcugcaagauccgucggcu

SEQ ID NO: 1464272 - RNA, 19 nt, Artificial Sequence
  Description of Artificial Sequence: Synthetic oligonucleotide
gcccgcagcuuugaaacuc

SEQ ID NO: 1464273 - RNA, 19 nt, Artificial Sequence
  Description of Artificial Sequence: Synthetic oligonucleotide
ggucuccgaugauccagga

SEQ ID NO: 1464274 - RNA, 19 nt, Artificial Sequence
  Description of Artificial Sequence: Synthetic oligonucleotide
ccgcagcuuugaaacuccc

SEQ ID NO: 1464275 - RNA, 19 nt, Artificial Sequence
  Description of Artificial Sequence: Synthetic oligonucleotide
cgcgguuuggugacagcac

SEQ ID NO: 1464276 - RNA, 19 nt, Artificial Sequence
  Description of Artificial Sequence: Synthetic oligonucleotide
gggaggggcguggucuugc

SEQ ID NO: 1464277 - RNA, 19 nt, Artificial Sequence
  Description of Artificial Sequence: Synthetic oligonucleotide
ugcgagccagcggccggga

SEQ ID NO: 1464278 - RNA, 19 nt, Artificial Sequence
  Description of Artificial Sequence: Synthetic oligonucleotide
cgaguccucgagcaacgac

SEQ ID NO: 1464279 - RNA, 19 nt, Artificial Sequence
  Description of Artificial Sequence: Synthetic oligonucleotide
cccucgaugcggaagccaa

SEQ ID NO: 1464280 - RNA, 19 nt, Artificial Sequence
  Description of Artificial Sequence: Synthetic oligonucleotide
cuucgcgccacugcaugua

SEQ ID NO: 1464281 - RNA, 19 nt, Artificial Sequence
  Description of Artificial Sequence: Synthetic oligonucleotide
ggguguccacuguagugua

SEQ ID NO: 1464282 - RNA, 19 nt, Artificial Sequence
  Description of Artificial Sequence: Synthetic oligonucleotide
caacgacgaggagccggug

SEQ ID NO: 1464283 - RNA, 19 nt, Artificial Sequence
  Description of Artificial Sequence: Synthetic oligonucleotide
cugucgcucagcagaucgu

SEQ ID NO: 1464284 - RNA, 19 nt, Artificial Sequence
  Description of Artificial Sequence: Synthetic oligonucleotide
cccgcgcagcacaucugcc

SEQ ID NO: 1464285 - RNA, 19 nt, Artificial Sequence
  Description of Artificial Sequence: Synthetic oligonucleotide
ggcaugcauuauggggaug

SEQ ID NO: 1464286 - RNA, 19 nt, Artificial Sequence
  Description of Artificial Sequence: Synthetic oligonucleotide
agcgggguuccagucucuu

SEQ ID NO: 1464287 - RNA, 19 nt, Artificial Sequence
  Description of Artificial Sequence: Synthetic oligonucleotide
gccggcccaagcagguggg

SEQ ID NO: 1464288 - RNA, 19 nt, Artificial Sequence
  Description of Artificial Sequence: Synthetic oligonucleotide
cacugucgcucagcagauc

SEQ ID NO: 1464289 - RNA, 19 nt, Artificial Sequence
  Description of Artificial Sequence: Synthetic oligonucleotide
ccaucggggaggggcgugg

SEQ ID NO: 1464290 - RNA, 19 nt, Artificial Sequence
  Description of Artificial Sequence: Synthetic oligonucleotide
cguccuccgaguccucgag

SEQ ID NO: 1464291 - RNA, 19 nt, Artificial Sequence
  Description of Artificial Sequence: Synthetic oligonucleotide
gcaucgccuugcaugaacu

SEQ ID NO: 1464292 - RNA, 19 nt, Artificial Sequence
  Description of Artificial Sequence: Synthetic oligonucleotide
gacaagggcucagcuucau

SEQ ID NO: 1464293 - RNA, 19 nt, Artificial Sequence
  Description of Artificial Sequence: Synthetic oligonucleotide
guagcgcgguuuggugaca

SEQ ID NO: 1464294 - RNA, 19 nt, Artificial Sequence
  Description of Artificial Sequence: Synthetic oligonucleotide
cacacccgcgcagcacauc

SEQ ID NO: 1464295 - RNA, 19 nt, Artificial Sequence
  Description of Artificial Sequence: Synthetic oligonucleotide
gcacguugccgcggcuccg

SEQ ID NO: 1464296 - RNA, 19 nt, Artificial Sequence
  Description of Artificial Sequence: Synthetic oligonucleotide
gguagaccaggaagucuua

SEQ ID NO: 1464297 - RNA, 19 nt, Artificial Sequence
  Description of Artificial Sequence: Synthetic oligonucleotide
gccccagcaaauagccauc

SEQ ID NO: 1464298 - RNA, 19 nt, Artificial Sequence
  Description of Artificial Sequence: Synthetic oligonucleotide
acacacccgcgcagcacau

SEQ ID NO: 1464299 - RNA, 19 nt, Artificial Sequence
  Description of Artificial Sequence: Synthetic oligonucleotide
ggcgguucagauaccuccu

SEQ ID NO: 1464300 - RNA, 19 nt, Artificial Sequence
  Description of Artificial Sequence: Synthetic oligonucleotide
gagcugccaaucaccucgu

SEQ ID NO: 1464301 - RNA, 19 nt, Artificial Sequence
  Description of Artificial Sequence: Synthetic oligonucleotide
cccucuagagaggugcaaa

SEQ ID NO: 1464302 - RNA, 19 nt, Artificial Sequence
  Description of Artificial Sequence: Synthetic oligonucleotide
cgaugcggaagccaagugu

SEQ ID NO: 1464303 - RNA, 19 nt, Artificial Sequence
  Description of Artificial Sequence: Synthetic oligonucleotide
gcaacgacgaggagccggu

SEQ ID NO: 1464304 - RNA, 19 nt, Artificial Sequence
  Description of Artificial Sequence: Synthetic oligonucleotide
cggcuaacugcacccagga

SEQ ID NO: 1464305 - RNA, 19 nt, Artificial Sequence
  Description of Artificial Sequence: Synthetic oligonucleotide
ggcguggucuugccaaaau

SEQ ID NO: 1464306 - RNA, 19 nt, Artificial Sequence
  Description of Artificial Sequence: Synthetic oligonucleotide
ggggcguggucuugccaaa

SEQ ID NO: 1464307 - RNA, 19 nt, Artificial Sequence
  Description of Artificial Sequence: Synthetic oligonucleotide
cgggguuccagucucuugu

SEQ ID NO: 1464308 - RNA, 19 nt, Artificial Sequence
  Description of Artificial Sequence: Synthetic oligonucleotide
caagauccgucggcuuucu

SEQ ID NO: 1464309 - RNA, 19 nt, Artificial Sequence
  Description of Artificial Sequence: Synthetic oligonucleotide
ggcaauggucauggacgaa

SEQ ID NO: 1464310 - RNA, 19 nt, Artificial Sequence
  Description of Artificial Sequence: Synthetic oligonucleotide
cugcaagauccgucggcuu

SEQ ID NO: 1464311 - RNA, 19 nt, Artificial Sequence
  Description of Artificial Sequence: Synthetic oligonucleotide
gacucaugaccggcagauu

SEQ ID NO: 1464312 - RNA, 19 nt, Artificial Sequence
  Description of Artificial Sequence: Synthetic oligonucleotide
cagccgcaccaggcaguag

SEQ ID NO: 1464313 - RNA, 19 nt, Artificial Sequence
  Description of Artificial Sequence: Synthetic oligonucleotide
ggcuuguguggaggccaac

SEQ ID NO: 1464314 - RNA, 19 nt, Artificial Sequence
  Description of Artificial Sequence: Synthetic oligonucleotide
gcccucgaugcggaagcca

SEQ ID NO: 1464315 - RNA, 19 nt, Artificial Sequence
  Description of Artificial Sequence: Synthetic oligonucleotide
ccacuguaguguagaggua

SEQ ID NO: 1464316 - RNA, 19 nt, Artificial Sequence
  Description of Artificial Sequence: Synthetic oligonucleotide
ggucaagggagaagcccau

SEQ ID NO: 1464317 - RNA, 19 nt, Artificial Sequence
  Description of Artificial Sequence: Synthetic oligonucleotide
ccuguaaacuagugucauu

SEQ ID NO: 1464318 - RNA, 19 nt, Artificial Sequence
  Description of Artificial Sequence: Synthetic oligonucleotide
gcucucggcuucguguagu

SEQ ID NO: 1464319 - RNA, 19 nt, Artificial Sequence
  Description of Artificial Sequence: Synthetic oligonucleotide
cgccuugcaugaacuccuc

SEQ ID NO: 1464320 - RNA, 19 nt, Artificial Sequence
  Description of Artificial Sequence: Synthetic oligonucleotide
gggcguggucuugccaaaa

SEQ ID NO: 1464321 - RNA, 19 nt, Artificial Sequence
  Description of Artificial Sequence: Synthetic oligonucleotide
ccagccggcccaagcaggu

SEQ ID NO: 1464322 - RNA, 19 nt, Artificial Sequence
  Description of Artificial Sequence: Synthetic oligonucleotide
ccuucgcgccacugcaugu

SEQ ID NO: 1464323 - RNA, 19 nt, Artificial Sequence
  Description of Artificial Sequence: Synthetic oligonucleotide
cagcaucgccuugcaugaa

SEQ ID NO: 1464324 - RNA, 19 nt, Artificial Sequence
  Description of Artificial Sequence: Synthetic oligonucleotide
ccgagcugcgcuucaggau

SEQ ID NO: 1464325 - RNA, 19 nt, Artificial Sequence
  Description of Artificial Sequence: Synthetic oligonucleotide
gcccggcuaacugcaccca

SEQ ID NO: 1464326 - RNA, 19 nt, Artificial Sequence
  Description of Artificial Sequence: Synthetic oligonucleotide
guguagugcuggagcugau

SEQ ID NO: 1464327 - RNA, 19 nt, Artificial Sequence
  Description of Artificial Sequence: Synthetic oligonucleotide
cggcagauugaccaugguu

SEQ ID NO: 1464328 - RNA, 19 nt, Artificial Sequence
  Description of Artificial Sequence: Synthetic oligonucleotide
caucggggaggggcguggu

SEQ ID NO: 1464329 - RNA, 19 nt, Artificial Sequence
  Description of Artificial Sequence: Synthetic oligonucleotide
ccgaguccucgagcaacga

SEQ ID NO: 1464330 - RNA, 19 nt, Artificial Sequence
  Description of Artificial Sequence: Synthetic oligonucleotide
gcccgcccagcgggguucc

SEQ ID NO: 1464331 - RNA, 19 nt, Artificial Sequence
  Description of Artificial Sequence: Synthetic oligonucleotide
ccacuacaccauggaaagu

SEQ ID NO: 1464332 - RNA, 19 nt, Artificial Sequence
  Description of Artificial Sequence: Synthetic oligonucleotide
ccggcagauugaccauggu

SEQ ID NO: 1464333 - RNA, 19 nt, Artificial Sequence
  Description of Artificial Sequence: Synthetic oligonucleotide
cggcuucguguaguuuuga

SEQ ID NO: 1464334 - RNA, 19 nt, Artificial Sequence
  Description of Artificial Sequence: Synthetic oligonucleotide
ccgcaccaggcaguagugu

SEQ ID NO: 1464335 - RNA, 19 nt, Artificial Sequence
  Description of Artificial Sequence: Synthetic oligonucleotide
ccggcccaagcagguggga

SEQ ID NO: 1464336 - RNA, 19 nt, Artificial Sequence
  Description of Artificial Sequence: Synthetic oligonucleotide
cguugccgcggcuccggcu

SEQ ID NO: 1464337 - RNA, 19 nt, Artificial Sequence
  Description of Artificial Sequence: Synthetic oligonucleotide
ccacugcauguagcgcggu

SEQ ID NO: 1464338 - RNA, 19 nt, Artificial Sequence
  Description of Artificial Sequence: Synthetic oligonucleotide
cccgcccagcgggguucca

SEQ ID NO: 1464339 - RNA, 19 nt, Artificial Sequence
  Description of Artificial Sequence: Synthetic oligonucleotide
agaaagacugaauauauuc

SEQ ID NO: 1464340 - RNA, 19 nt, Artificial Sequence
  Description of Artificial Sequence: Synthetic oligonucleotide
uggauuauaaauuuucucc

SEQ ID NO: 1464341 - RNA, 19 nt, Artificial Sequence
  Description of Artificial Sequence: Synthetic oligonucleotide
agaauuaguagauaagcac

SEQ ID NO: 1464342 - RNA, 19 nt, Artificial Sequence
  Description of Artificial Sequence: Synthetic oligonucleotide
gaaacaaccgcauacagug

SEQ ID NO: 1464343 - RNA, 19 nt, Artificial Sequence
  Description of Artificial Sequence: Synthetic oligonucleotide
aagauuuucuccuacaaga

SEQ ID NO: 1464344 - RNA, 19 nt, Artificial Sequence
  Description of Artificial Sequence: Synthetic oligonucleotide
uuacuaagaauauaccucg

SEQ ID NO: 1464345 - RNA, 19 nt, Artificial Sequence
  Description of Artificial Sequence: Synthetic oligonucleotide
uucaauauaugccauacca

SEQ ID NO: 1464346 - RNA, 19 nt, Artificial Sequence
  Description of Artificial Sequence: Synthetic oligonucleotide
uuguaaaccggccauauag

SEQ ID NO: 1464347 - RNA, 19 nt, Artificial Sequence
  Description of Artificial Sequence: Synthetic oligonucleotide
uugauugcuacuuuugugg

SEQ ID NO: 1464348 - RNA, 19 nt, Artificial Sequence
  Description of Artificial Sequence: Synthetic oligonucleotide
gauucaucaauucauggag

SEQ ID NO: 1464349 - RNA, 19 nt, Artificial Sequence
  Description of Artificial Sequence: Synthetic oligonucleotide
aaaccggccauauagugcg

SEQ ID NO: 1464350 - RNA, 19 nt, Artificial Sequence
  Description of Artificial Sequence: Synthetic oligonucleotide
uuaacuuguggcauaaacc

SEQ ID NO: 1464351 - RNA, 19 nt, Artificial Sequence
  Description of Artificial Sequence: Synthetic oligonucleotide
acugaauauauucaaaugu

SEQ ID NO: 1464352 - RNA, 19 nt, Artificial Sequence
  Description of Artificial Sequence: Synthetic oligonucleotide
ucucuuacuaagaauauac

SEQ ID NO: 1464353 - RNA, 19 nt, Artificial Sequence
  Description of Artificial Sequence: Synthetic oligonucleotide
uuuaaaacacucaugucac

SEQ ID NO: 1464354 - RNA, 19 nt, Artificial Sequence
  Description of Artificial Sequence: Synthetic oligonucleotide
uccuacaagaauauuagca

SEQ ID NO: 1464355 - RNA, 19 nt, Artificial Sequence
  Description of Artificial Sequence: Synthetic oligonucleotide
cugacuuuauuguaaaccg

SEQ ID NO: 1464356 - RNA, 19 nt, Artificial Sequence
  Description of Artificial Sequence: Synthetic oligonucleotide
ugaauauauucaaauguug

SEQ ID NO: 1464357 - RNA, 19 nt, Artificial Sequence
  Description of Artificial Sequence: Synthetic oligonucleotide
gauucaguaaugaaucugg

SEQ ID NO: 1464358 - RNA, 19 nt, Artificial Sequence
  Description of Artificial Sequence: Synthetic oligonucleotide
uaacuuguggcauaaacca

SEQ ID NO: 1464359 - RNA, 19 nt, Artificial Sequence
  Description of Artificial Sequence: Synthetic oligonucleotide
ucuuacuaagaauauaccu

SEQ ID NO: 1464360 - RNA, 19 nt, Artificial Sequence
  Description of Artificial Sequence: Synthetic oligonucleotide
cuuacuaagaauauaccuc

SEQ ID NO: 1464361 - RNA, 19 nt, Artificial Sequence
  Description of Artificial Sequence: Synthetic oligonucleotide
ucagaauuaguagauaagc

SEQ ID NO: 1464362 - RNA, 19 nt, Artificial Sequence
  Description of Artificial Sequence: Synthetic oligonucleotide
ugauuggaaauuuugcacc

SEQ ID NO: 1464363 - RNA, 19 nt, Artificial Sequence
  Description of Artificial Sequence: Synthetic oligonucleotide
aacuacaauaccauaguuc

SEQ ID NO: 1464364 - RNA, 19 nt, Artificial Sequence
  Description of Artificial Sequence: Synthetic oligonucleotide
gaauauaccucgcugauuc

SEQ ID NO: 1464365 - RNA, 19 nt, Artificial Sequence
  Description of Artificial Sequence: Synthetic oligonucleotide
auauauucaaauguugguc

SEQ ID NO: 1464366 - RNA, 19 nt, Artificial Sequence
  Description of Artificial Sequence: Synthetic oligonucleotide
uuugcauacaagauuuucu

SEQ ID NO: 1464367 - RNA, 19 nt, Artificial Sequence
  Description of Artificial Sequence: Synthetic oligonucleotide
uaaugcuucacauugucac

SEQ ID NO: 1464368 - RNA, 19 nt, Artificial Sequence
  Description of Artificial Sequence: Synthetic oligonucleotide
caauuaaucuugcuaagcc

SEQ ID NO: 1464369 - RNA, 19 nt, Artificial Sequence
  Description of Artificial Sequence: Synthetic oligonucleotide
uucacgauuuaccauaccu

SEQ ID NO: 1464370 - RNA, 19 nt, Artificial Sequence
  Description of Artificial Sequence: Synthetic oligonucleotide
uaagaauauaccucgcuga

SEQ ID NO: 1464371 - RNA, 19 nt, Artificial Sequence
  Description of Artificial Sequence: Synthetic oligonucleotide
uaguuuaaccucuagucgc

SEQ ID NO: 1464372 - RNA, 19 nt, Artificial Sequence
  Description of Artificial Sequence: Synthetic oligonucleotide
cuaguuuaaccucuagucg

SEQ ID NO: 1464373 - RNA, 19 nt, Artificial Sequence
  Description of Artificial Sequence: Synthetic oligonucleotide
ugcagaauuccaaaugacc

SEQ ID NO: 1464374 - RNA, 19 nt, Artificial Sequence
  Description of Artificial Sequence: Synthetic oligonucleotide
uuuugacauaaacucagug

SEQ ID NO: 1464375 - RNA, 19 nt, Artificial Sequence
  Description of Artificial Sequence: Synthetic oligonucleotide
uggaacaaguuuaucaugu

SEQ ID NO: 1464376 - RNA, 19 nt, Artificial Sequence
  Description of Artificial Sequence: Synthetic oligonucleotide
gagaucucgaugaauauag

SEQ ID NO: 1464377 - RNA, 19 nt, Artificial Sequence
  Description of Artificial Sequence: Synthetic oligonucleotide
uuuauuguaaaccggccau

SEQ ID NO: 1464378 - RNA, 19 nt, Artificial Sequence
  Description of Artificial Sequence: Synthetic oligonucleotide
ugcagaaugaagaguaucu

SEQ ID NO: 1464379 - RNA, 19 nt, Artificial Sequence
  Description of Artificial Sequence: Synthetic oligonucleotide
ucgagagggaauaagcacc

SEQ ID NO: 1464380 - RNA, 19 nt, Artificial Sequence
  Description of Artificial Sequence: Synthetic oligonucleotide
aauauaccucgcugauucc

SEQ ID NO: 1464381 - RNA, 19 nt, Artificial Sequence
  Description of Artificial Sequence: Synthetic oligonucleotide
gucgcaaagauucucgagg

SEQ ID NO: 1464382 - RNA, 19 nt, Artificial Sequence
  Description of Artificial Sequence: Synthetic oligonucleotide
cacgauuuaccauaccugg

SEQ ID NO: 1464383 - RNA, 19 nt, Artificial Sequence
  Description of Artificial Sequence: Synthetic oligonucleotide
ugaggaacucacaugaggu

SEQ ID NO: 1464384 - RNA, 19 nt, Artificial Sequence
  Description of Artificial Sequence: Synthetic oligonucleotide
aucgagagggaauaagcac

SEQ ID NO: 1464385 - RNA, 19 nt, Artificial Sequence
  Description of Artificial Sequence: Synthetic oligonucleotide
uguuggucucucaucaggg

SEQ ID NO: 1464386 - RNA, 19 nt, Artificial Sequence
  Description of Artificial Sequence: Synthetic oligonucleotide
auaaggacgacacucuucu

SEQ ID NO: 1464387 - RNA, 19 nt, Artificial Sequence
  Description of Artificial Sequence: Synthetic oligonucleotide
uuugauugcuacuuuugug

SEQ ID NO: 1464388 - RNA, 19 nt, Artificial Sequence
  Description of Artificial Sequence: Synthetic oligonucleotide
gacugaauauauucaaaug

SEQ ID NO: 1464389 - RNA, 19 nt, Artificial Sequence
  Description of Artificial Sequence: Synthetic oligonucleotide
uucuguagcagugaaguag

SEQ ID NO: 1464390 - RNA, 19 nt, Artificial Sequence
  Description of Artificial Sequence: Synthetic oligonucleotide
accauaguucacaugaagc

SEQ ID NO: 1464391 - RNA, 19 nt, Artificial Sequence
  Description of Artificial Sequence: Synthetic oligonucleotide
uaaugaaucuggaauucca

SEQ ID NO: 1464392 - RNA, 19 nt, Artificial Sequence
  Description of Artificial Sequence: Synthetic oligonucleotide
ucacaugaggucuucaugu

SEQ ID NO: 1464393 - RNA, 19 nt, Artificial Sequence
  Description of Artificial Sequence: Synthetic oligonucleotide
aaggacgacacucuucuca

SEQ ID NO: 1464394 - RNA, 19 nt, Artificial Sequence
  Description of Artificial Sequence: Synthetic oligonucleotide
augaggaacucacaugagg

SEQ ID NO: 1464395 - RNA, 19 nt, Artificial Sequence
  Description of Artificial Sequence: Synthetic oligonucleotide
agaguaucaaacugagcuc

SEQ ID NO: 1464396 - RNA, 19 nt, Artificial Sequence
  Description of Artificial Sequence: Synthetic oligonucleotide
aaugcuuaggaaaacuaca

SEQ ID NO: 1464397 - RNA, 19 nt, Artificial Sequence
  Description of Artificial Sequence: Synthetic oligonucleotide
uauucauugucuucaauua

SEQ ID NO: 1464398 - RNA, 19 nt, Artificial Sequence
  Description of Artificial Sequence: Synthetic oligonucleotide
aaguuuaucaugucuuaau

SEQ ID NO: 1464399 - RNA, 19 nt, Artificial Sequence
  Description of Artificial Sequence: Synthetic oligonucleotide
aaucuaacaaacucccuuu

SEQ ID NO: 1464400 - RNA, 19 nt, Artificial Sequence
  Description of Artificial Sequence: Synthetic oligonucleotide
uuaccauaccuggauaugg

SEQ ID NO: 1464401 - RNA, 19 nt, Artificial Sequence
  Description of Artificial Sequence: Synthetic oligonucleotide
ucacgauuuaccauaccug

SEQ ID NO: 1464402 - RNA, 19 nt, Artificial Sequence
  Description of Artificial Sequence: Synthetic oligonucleotide
uauagugcggccucaggag

SEQ ID NO: 1464403 - RNA, 19 nt, Artificial Sequence
  Description of Artificial Sequence: Synthetic oligonucleotide
gaauauuagcagcucggag

SEQ ID NO: 1464404 - RNA, 19 nt, Artificial Sequence
  Description of Artificial Sequence: Synthetic oligonucleotide
cuagucgcaaagauucucg

SEQ ID NO: 1464405 - RNA, 19 nt, Artificial Sequence
  Description of Artificial Sequence: Synthetic oligonucleotide
auauaugccauaccaucag

SEQ ID NO: 1464406 - RNA, 19 nt, Artificial Sequence
  Description of Artificial Sequence: Synthetic oligonucleotide
cuugcuaagccaaaaucug

SEQ ID NO: 1464407 - RNA, 19 nt, Artificial Sequence
  Description of Artificial Sequence: Synthetic oligonucleotide
caugucacgaacuguagac

SEQ ID NO: 1464408 - RNA, 19 nt, Artificial Sequence
  Description of Artificial Sequence: Synthetic oligonucleotide
ucgcaaagauucucgaggg

SEQ ID NO: 1464409 - RNA, 19 nt, Artificial Sequence
  Description of Artificial Sequence: Synthetic oligonucleotide
uaaaccggccauauagugc

SEQ ID NO: 1464410 - RNA, 19 nt, Artificial Sequence
  Description of Artificial Sequence: Synthetic oligonucleotide
aauaaggacgacacucuuc

SEQ ID NO: 1464411 - RNA, 19 nt, Artificial Sequence
  Description of Artificial Sequence: Synthetic oligonucleotide
aacaaccgcauacagugga

SEQ ID NO: 1464412 - RNA, 19 nt, Artificial Sequence
  Description of Artificial Sequence: Synthetic oligonucleotide
aaugaaucuggaauuccag

SEQ ID NO: 1464413 - RNA, 19 nt, Artificial Sequence
  Description of Artificial Sequence: Synthetic oligonucleotide
ucaauuaaucuugcuaagc

SEQ ID NO: 1464414 - RNA, 19 nt, Artificial Sequence
  Description of Artificial Sequence: Synthetic oligonucleotide
aguaaugaaucuggaauuc

SEQ ID NO: 1464415 - RNA, 19 nt, Artificial Sequence
  Description of Artificial Sequence: Synthetic oligonucleotide
auacaagauuuucuccuac

SEQ ID NO: 1464416 - RNA, 19 nt, Artificial Sequence
  Description of Artificial Sequence: Synthetic oligonucleotide
agauucucgagggauuucc

SEQ ID NO: 1464417 - RNA, 19 nt, Artificial Sequence
  Description of Artificial Sequence: Synthetic oligonucleotide
caaucacgaaucgagaggg

SEQ ID NO: 1464418 - RNA, 19 nt, Artificial Sequence
  Description of Artificial Sequence: Synthetic oligonucleotide
uuggauuauaaauuuucuc

SEQ ID NO: 1464419 - RNA, 19 nt, Artificial Sequence
  Description of Artificial Sequence: Synthetic oligonucleotide
ucuguguagugcuucacca

SEQ ID NO: 1464420 - RNA, 19 nt, Artificial Sequence
  Description of Artificial Sequence: Synthetic oligonucleotide
ucuguagcagugaaguagu

SEQ ID NO: 1464421 - RNA, 19 nt, Artificial Sequence
  Description of Artificial Sequence: Synthetic oligonucleotide
aagcuaaagaaugccauca

SEQ ID NO: 1464422 - RNA, 19 nt, Artificial Sequence
  Description of Artificial Sequence: Synthetic oligonucleotide
agugguuucacuuucucuu

SEQ ID NO: 1464423 - RNA, 19 nt, Artificial Sequence
  Description of Artificial Sequence: Synthetic oligonucleotide
uuaaaacacucaugucacg

SEQ ID NO: 1464424 - RNA, 19 nt, Artificial Sequence
  Description of Artificial Sequence: Synthetic oligonucleotide
gaaucgagagggaauaagc

SEQ ID NO: 1464425 - RNA, 19 nt, Artificial Sequence
  Description of Artificial Sequence: Synthetic oligonucleotide
aagaauauaccucgcugau

SEQ ID NO: 1464426 - RNA, 19 nt, Artificial Sequence
  Description of Artificial Sequence: Synthetic oligonucleotide
ucaauauaugccauaccau

SEQ ID NO: 1464427 - RNA, 19 nt, Artificial Sequence
  Description of Artificial Sequence: Synthetic oligonucleotide
auauaccucgcugauuccc

SEQ ID NO: 1464428 - RNA, 19 nt, Artificial Sequence
  Description of Artificial Sequence: Synthetic oligonucleotide
uugaccuaguuuaaccucu

SEQ ID NO: 1464429 - RNA, 19 nt, Artificial Sequence
  Description of Artificial Sequence: Synthetic oligonucleotide
ugcauacaagauuuucucc

SEQ ID NO: 1464430 - RNA, 19 nt, Artificial Sequence
  Description of Artificial Sequence: Synthetic oligonucleotide
acgaacuguagacaucagg

SEQ ID NO: 1464431 - RNA, 19 nt, Artificial Sequence
  Description of Artificial Sequence: Synthetic oligonucleotide
aauucauggagggauucug

SEQ ID NO: 1464432 - RNA, 19 nt, Artificial Sequence
  Description of Artificial Sequence: Synthetic oligonucleotide
cuucuugaaggaaagcuuc

SEQ ID NO: 1464433 - RNA, 19 nt, Artificial Sequence
  Description of Artificial Sequence: Synthetic oligonucleotide
uaccucaucccaaucacga

SEQ ID NO: 1464434 - RNA, 19 nt, Artificial Sequence
  Description of Artificial Sequence: Synthetic oligonucleotide
auguuggucucucaucagg

SEQ ID NO: 1464435 - RNA, 19 nt, Artificial Sequence
  Description of Artificial Sequence: Synthetic oligonucleotide
agcacuucacgauuuacca

SEQ ID NO: 1464436 - RNA, 19 nt, Artificial Sequence
  Description of Artificial Sequence: Synthetic oligonucleotide
uuugcuagaccuugagucu

SEQ ID NO: 1464437 - RNA, 19 nt, Artificial Sequence
  Description of Artificial Sequence: Synthetic oligonucleotide
uuucccaagcgucuuuugc

SEQ ID NO: 1464438 - RNA, 19 nt, Artificial Sequence
  Description of Artificial Sequence: Synthetic oligonucleotide
agcgucuuuugcuagaccu

SEQ ID NO: 1464439 - RNA, 19 nt, Artificial Sequence
  Description of Artificial Sequence: Synthetic oligonucleotide
cagaguaucaaacugagcu

SEQ ID NO: 1464440 - RNA, 19 nt, Artificial Sequence
  Description of Artificial Sequence: Synthetic oligonucleotide
acuuuauuguaaaccggcc

SEQ ID NO: 1464441 - RNA, 19 nt, Artificial Sequence
  Description of Artificial Sequence: Synthetic oligonucleotide
acuaagaauauaccucgcu

SEQ ID NO: 1464442 - RNA, 19 nt, Artificial Sequence
  Description of Artificial Sequence: Synthetic oligonucleotide
uuaccucaucccaaucacg

SEQ ID NO: 1464443 - RNA, 19 nt, Artificial Sequence
  Description of Artificial Sequence: Synthetic oligonucleotide
aaacucagugacaauauaa

SEQ ID NO: 1464444 - RNA, 19 nt, Artificial Sequence
  Description of Artificial Sequence: Synthetic oligonucleotide
aauuaguagauaagcacaa

SEQ ID NO: 1464445 - RNA, 19 nt, Artificial Sequence
  Description of Artificial Sequence: Synthetic oligonucleotide
aaucuugcuaagccaaaau

SEQ ID NO: 1464446 - RNA, 19 nt, Artificial Sequence
  Description of Artificial Sequence: Synthetic oligonucleotide
uauaugccauaccaucagc

SEQ ID NO: 1464447 - RNA, 19 nt, Artificial Sequence
  Description of Artificial Sequence: Synthetic oligonucleotide
agcagugaaguagucuucc

SEQ ID NO: 1464448 - RNA, 19 nt, Artificial Sequence
  Description of Artificial Sequence: Synthetic oligonucleotide
uguaaaccggccauauagu

SEQ ID NO: 1464449 - RNA, 19 nt, Artificial Sequence
  Description of Artificial Sequence: Synthetic oligonucleotide
ucacgaacuguagacauca

SEQ ID NO: 1464450 - RNA, 19 nt, Artificial Sequence
  Description of Artificial Sequence: Synthetic oligonucleotide
uuuucugaucagaauuagu

SEQ ID NO: 1464451 - RNA, 19 nt, Artificial Sequence
  Description of Artificial Sequence: Synthetic oligonucleotide
auauuagcagcucggagau

SEQ ID NO: 1464452 - RNA, 19 nt, Artificial Sequence
  Description of Artificial Sequence: Synthetic oligonucleotide
ucggagaucucgaugaaua

SEQ ID NO: 1464453 - RNA, 19 nt, Artificial Sequence
  Description of Artificial Sequence: Synthetic oligonucleotide
auuuaccauaccuggauau

SEQ ID NO: 1464454 - RNA, 19 nt, Artificial Sequence
  Description of Artificial Sequence: Synthetic oligonucleotide
aaucgagagggaauaagca

SEQ ID NO: 1464455 - RNA, 19 nt, Artificial Sequence
  Description of Artificial Sequence: Synthetic oligonucleotide
aaacuacaauaccauaguu

SEQ ID NO: 1464456 - RNA, 19 nt, Artificial Sequence
  Description of Artificial Sequence: Synthetic oligonucleotide
gaaugcuuaggaaaacuac

SEQ ID NO: 1464457 - RNA, 19 nt, Artificial Sequence
  Description of Artificial Sequence: Synthetic oligonucleotide
caucagggcaaauaaggac

SEQ ID NO: 1464458 - RNA, 19 nt, Artificial Sequence
  Description of Artificial Sequence: Synthetic oligonucleotide
auaucaaccagcuguggaa

SEQ ID NO: 1464459 - RNA, 19 nt, Artificial Sequence
  Description of Artificial Sequence: Synthetic oligonucleotide
ugacauaaacucagugaca

SEQ ID NO: 1464460 - RNA, 19 nt, Artificial Sequence
  Description of Artificial Sequence: Synthetic oligonucleotide
aggacaaggcauccuguac

SEQ ID NO: 1464461 - RNA, 19 nt, Artificial Sequence
  Description of Artificial Sequence: Synthetic oligonucleotide
gacauaaacucagugacaa

SEQ ID NO: 1464462 - RNA, 19 nt, Artificial Sequence
  Description of Artificial Sequence: Synthetic oligonucleotide
cuaacaaacucccuuuuga

SEQ ID NO: 1464463 - RNA, 19 nt, Artificial Sequence
  Description of Artificial Sequence: Synthetic oligonucleotide
cgaacuguagacaucaggg

SEQ ID NO: 1464464 - RNA, 19 nt, Artificial Sequence
  Description of Artificial Sequence: Synthetic oligonucleotide
uucaguaaugaaucuggaa

SEQ ID NO: 1464465 - RNA, 19 nt, Artificial Sequence
  Description of Artificial Sequence: Synthetic oligonucleotide
aagcgucuuuugcuagacc

SEQ ID NO: 1464466 - RNA, 19 nt, Artificial Sequence
  Description of Artificial Sequence: Synthetic oligonucleotide
ucaugucacgaacuguaga

SEQ ID NO: 1464467 - RNA, 19 nt, Artificial Sequence
  Description of Artificial Sequence: Synthetic oligonucleotide
guaaaccggccauauagug

SEQ ID NO: 1464468 - RNA, 19 nt, Artificial Sequence
  Description of Artificial Sequence: Synthetic oligonucleotide
cuuaccucaucccaaucac

SEQ ID NO: 1464469 - RNA, 19 nt, Artificial Sequence
  Description of Artificial Sequence: Synthetic oligonucleotide
ucuucagaaacaaccgcau

SEQ ID NO: 1464470 - RNA, 19 nt, Artificial Sequence
  Description of Artificial Sequence: Synthetic oligonucleotide
ucacuuucucuuacuaaga

SEQ ID NO: 1464471 - RNA, 19 nt, Artificial Sequence
  Description of Artificial Sequence: Synthetic oligonucleotide
acuuguggcauaaaccauc

SEQ ID NO: 1464472 - RNA, 19 nt, Artificial Sequence
  Description of Artificial Sequence: Synthetic oligonucleotide
uuuugcauacaagauuuuc

SEQ ID NO: 1464473 - RNA, 19 nt, Artificial Sequence
  Description of Artificial Sequence: Synthetic oligonucleotide
aaccgcauacaguggaaca

SEQ ID NO: 1464474 - RNA, 19 nt, Artificial Sequence
  Description of Artificial Sequence: Synthetic oligonucleotide
uauaccucgcugauuccca

SEQ ID NO: 1464475 - RNA, 19 nt, Artificial Sequence
  Description of Artificial Sequence: Synthetic oligonucleotide
uucacaugaagcccuuuaa

SEQ ID NO: 1464476 - RNA, 19 nt, Artificial Sequence
  Description of Artificial Sequence: Synthetic oligonucleotide
cagaauuccaaaugaccac

SEQ ID NO: 1464477 - RNA, 19 nt, Artificial Sequence
  Description of Artificial Sequence: Synthetic oligonucleotide
agaggauucaguaaugaau

SEQ ID NO: 1464478 - RNA, 19 nt, Artificial Sequence
  Description of Artificial Sequence: Synthetic oligonucleotide
auuaaucuugcuaagccaa

SEQ ID NO: 1464479 - RNA, 19 nt, Artificial Sequence
  Description of Artificial Sequence: Synthetic oligonucleotide
ccauaguucacaugaagcc

SEQ ID NO: 1464480 - RNA, 19 nt, Artificial Sequence
  Description of Artificial Sequence: Synthetic oligonucleotide
uagugcuucaccaguuucu

SEQ ID NO: 1464481 - RNA, 19 nt, Artificial Sequence
  Description of Artificial Sequence: Synthetic oligonucleotide
ugugcacacaggcuacuug

SEQ ID NO: 1464482 - RNA, 19 nt, Artificial Sequence
  Description of Artificial Sequence: Synthetic oligonucleotide
cagaauuaguagauaagca

SEQ ID NO: 1464483 - RNA, 19 nt, Artificial Sequence
  Description of Artificial Sequence: Synthetic oligonucleotide
uaucaaccagcuguggaag

SEQ ID NO: 1464484 - RNA, 19 nt, Artificial Sequence
  Description of Artificial Sequence: Synthetic oligonucleotide
uacuaagaauauaccucgc

SEQ ID NO: 1464485 - RNA, 19 nt, Artificial Sequence
  Description of Artificial Sequence: Synthetic oligonucleotide
uuguaccuggcuuuagugu

SEQ ID NO: 1464486 - RNA, 19 nt, Artificial Sequence
  Description of Artificial Sequence: Synthetic oligonucleotide
ucgagggauuucccaagcg

SEQ ID NO: 1464487 - RNA, 19 nt, Artificial Sequence
  Description of Artificial Sequence: Synthetic oligonucleotide
uuuaccauaccuggauaug

SEQ ID NO: 1464488 - RNA, 19 nt, Artificial Sequence
  Description of Artificial Sequence: Synthetic oligonucleotide
guggcauaaaccaucagca

SEQ ID NO: 1464489 - RNA, 19 nt, Artificial Sequence
  Description of Artificial Sequence: Synthetic oligonucleotide
accuaguuuaaccucuagu

SEQ ID NO: 1464490 - RNA, 19 nt, Artificial Sequence
  Description of Artificial Sequence: Synthetic oligonucleotide
agggaauaagcaccuuuag

SEQ ID NO: 1464491 - RNA, 19 nt, Artificial Sequence
  Description of Artificial Sequence: Synthetic oligonucleotide
cuugaccuaguuuaaccuc

SEQ ID NO: 1464492 - RNA, 19 nt, Artificial Sequence
  Description of Artificial Sequence: Synthetic oligonucleotide
guagucuuccaagaaagac

SEQ ID NO: 1464493 - RNA, 19 nt, Artificial Sequence
  Description of Artificial Sequence: Synthetic oligonucleotide
ugauugcuacuuuuguggu

SEQ ID NO: 1464494 - RNA, 19 nt, Artificial Sequence
  Description of Artificial Sequence: Synthetic oligonucleotide
aaccucuagucgcaaagau

SEQ ID NO: 1464495 - RNA, 19 nt, Artificial Sequence
  Description of Artificial Sequence: Synthetic oligonucleotide
agcccuuuaaaacacucau

SEQ ID NO: 1464496 - RNA, 19 nt, Artificial Sequence
  Description of Artificial Sequence: Synthetic oligonucleotide
ccucuagucgcaaagauuc

SEQ ID NO: 1464497 - RNA, 19 nt, Artificial Sequence
  Description of Artificial Sequence: Synthetic oligonucleotide
auucaaauguuggucucuc

SEQ ID NO: 1464498 - RNA, 19 nt, Artificial Sequence
  Description of Artificial Sequence: Synthetic oligonucleotide
agucgcaaagauucucgag

SEQ ID NO: 1464499 - RNA, 19 nt, Artificial Sequence
  Description of Artificial Sequence: Synthetic oligonucleotide
aggucuucauguuuuggca

SEQ ID NO: 1464500 - RNA, 19 nt, Artificial Sequence
  Description of Artificial Sequence: Synthetic oligonucleotide
gucagaguaucaaacugag

SEQ ID NO: 1464501 - RNA, 19 nt, Artificial Sequence
  Description of Artificial Sequence: Synthetic oligonucleotide
uuaaucuugcuaagccaaa

SEQ ID NO: 1464502 - RNA, 19 nt, Artificial Sequence
  Description of Artificial Sequence: Synthetic oligonucleotide
auaguucauucuuucaaua

SEQ ID NO: 1464503 - RNA, 19 nt, Artificial Sequence
  Description of Artificial Sequence: Synthetic oligonucleotide
uuagugguuucacuuucuc

SEQ ID NO: 1464504 - RNA, 19 nt, Artificial Sequence
  Description of Artificial Sequence: Synthetic oligonucleotide
acgacacucuucucaagag

SEQ ID NO: 1464505 - RNA, 19 nt, Artificial Sequence
  Description of Artificial Sequence: Synthetic oligonucleotide
ucucgagggauuucccaag

SEQ ID NO: 1464506 - RNA, 19 nt, Artificial Sequence
  Description of Artificial Sequence: Synthetic oligonucleotide
guaaugaaucuggaauucc

SEQ ID NO: 1464507 - RNA, 19 nt, Artificial Sequence
  Description of Artificial Sequence: Synthetic oligonucleotide
ugcuuaggaaaacuacaau

SEQ ID NO: 1464508 - RNA, 19 nt, Artificial Sequence
  Description of Artificial Sequence: Synthetic oligonucleotide
uauucaaauguuggucucu

SEQ ID NO: 1464509 - RNA, 19 nt, Artificial Sequence
  Description of Artificial Sequence: Synthetic oligonucleotide
cagaaacaaccgcauacag

SEQ ID NO: 1464510 - RNA, 19 nt, Artificial Sequence
  Description of Artificial Sequence: Synthetic oligonucleotide
acaugcagaaugaagagua

SEQ ID NO: 1464511 - RNA, 19 nt, Artificial Sequence
  Description of Artificial Sequence: Synthetic oligonucleotide
guggaacaaguuuaucaug

SEQ ID NO: 1464512 - RNA, 19 nt, Artificial Sequence
  Description of Artificial Sequence: Synthetic oligonucleotide
uuguaaugcuucacauugu

SEQ ID NO: 1464513 - RNA, 19 nt, Artificial Sequence
  Description of Artificial Sequence: Synthetic oligonucleotide
cauaaacucagugacaaua

SEQ ID NO: 1464514 - RNA, 19 nt, Artificial Sequence
  Description of Artificial Sequence: Synthetic oligonucleotide
aggaacucacaugaggucu

SEQ ID NO: 1464515 - RNA, 19 nt, Artificial Sequence
  Description of Artificial Sequence: Synthetic oligonucleotide
cucaagagacccucuuggc

SEQ ID NO: 1464516 - RNA, 19 nt, Artificial Sequence
  Description of Artificial Sequence: Synthetic oligonucleotide
guaucaaacugagcucugg

SEQ ID NO: 1464517 - RNA, 19 nt, Artificial Sequence
  Description of Artificial Sequence: Synthetic oligonucleotide
aaacaaccgcauacagugg

SEQ ID NO: 1464518 - RNA, 19 nt, Artificial Sequence
  Description of Artificial Sequence: Synthetic oligonucleotide
ugguacugugguucuguag

SEQ ID NO: 1464519 - RNA, 19 nt, Artificial Sequence
  Description of Artificial Sequence: Synthetic oligonucleotide
uucucgagggauuucccaa

SEQ ID NO: 1464520 - RNA, 19 nt, Artificial Sequence
  Description of Artificial Sequence: Synthetic oligonucleotide
uauuguaaaccggccauau

SEQ ID NO: 1464521 - RNA, 19 nt, Artificial Sequence
  Description of Artificial Sequence: Synthetic oligonucleotide
cuccuacaagaauauuagc

SEQ ID NO: 1464522 - RNA, 19 nt, Artificial Sequence
  Description of Artificial Sequence: Synthetic oligonucleotide
ucacgaaucgagagggaau

SEQ ID NO: 1464523 - RNA, 19 nt, Artificial Sequence
  Description of Artificial Sequence: Synthetic oligonucleotide
agagggaauaagcaccuuu

SEQ ID NO: 1464524 - RNA, 19 nt, Artificial Sequence
  Description of Artificial Sequence: Synthetic oligonucleotide
agaauauuagcagcucgga

SEQ ID NO: 1464525 - RNA, 19 nt, Artificial Sequence
  Description of Artificial Sequence: Synthetic oligonucleotide
aggauucaguaaugaaucu

SEQ ID NO: 1464526 - RNA, 19 nt, Artificial Sequence
  Description of Artificial Sequence: Synthetic oligonucleotide
cauauagugcggccucagg

SEQ ID NO: 1464527 - RNA, 19 nt, Artificial Sequence
  Description of Artificial Sequence: Synthetic oligonucleotide
guauucauugucuucaauu

SEQ ID NO: 1464528 - RNA, 19 nt, Artificial Sequence
  Description of Artificial Sequence: Synthetic oligonucleotide
gcuuaggaaaacuacaaua

SEQ ID NO: 1464529 - RNA, 19 nt, Artificial Sequence
  Description of Artificial Sequence: Synthetic oligonucleotide
cugcagaauuccaaaugac

SEQ ID NO: 1464530 - RNA, 19 nt, Artificial Sequence
  Description of Artificial Sequence: Synthetic oligonucleotide
auucucgagggauuuccca

SEQ ID NO: 1464531 - RNA, 19 nt, Artificial Sequence
  Description of Artificial Sequence: Synthetic oligonucleotide
auaaacucagugacaauau

SEQ ID NO: 1464532 - RNA, 19 nt, Artificial Sequence
  Description of Artificial Sequence: Synthetic oligonucleotide
agaaacaaccgcauacagu

SEQ ID NO: 1464533 - RNA, 19 nt, Artificial Sequence
  Description of Artificial Sequence: Synthetic oligonucleotide
ucuagucgcaaagauucuc

SEQ ID NO: 1464534 - RNA, 19 nt, Artificial Sequence
  Description of Artificial Sequence: Synthetic oligonucleotide
auacaguggaacaaguuua

SEQ ID NO: 1464535 - RNA, 19 nt, Artificial Sequence
  Description of Artificial Sequence: Synthetic oligonucleotide
accauaccuggauauggca

SEQ ID NO: 1464536 - RNA, 19 nt, Artificial Sequence
  Description of Artificial Sequence: Synthetic oligonucleotide
uuuuggcagaucugugcac

SEQ ID NO: 1464537 - RNA, 19 nt, Artificial Sequence
  Description of Artificial Sequence: Synthetic oligonucleotide
acuucacgauuuaccauac

SEQ ID NO: 1464538 - RNA, 19 nt, Artificial Sequence
  Description of Artificial Sequence: Synthetic oligonucleotide
aguuguuaacuuguggcau

SEQ ID NO: 1464539 - RNA, 19 nt, Artificial Sequence
  Description of Artificial Sequence: Synthetic oligonucleotide
ccaaucacgaaucgagagg

SEQ ID NO: 1464540 - RNA, 19 nt, Artificial Sequence
  Description of Artificial Sequence: Synthetic oligonucleotide
ugucugcagaauuccaaau

SEQ ID NO: 1464541 - RNA, 19 nt, Artificial Sequence
  Description of Artificial Sequence: Synthetic oligonucleotide
uaaucuugcuaagccaaaa

SEQ ID NO: 1464542 - RNA, 19 nt, Artificial Sequence
  Description of Artificial Sequence: Synthetic oligonucleotide
acacuucaccaaagcaucc

SEQ ID NO: 1464543 - RNA, 19 nt, Artificial Sequence
  Description of Artificial Sequence: Synthetic oligonucleotide
uagucgcaaagauucucga

SEQ ID NO: 1464544 - RNA, 19 nt, Artificial Sequence
  Description of Artificial Sequence: Synthetic oligonucleotide
cuuggauuauaaauuuucu

SEQ ID NO: 1464545 - RNA, 19 nt, Artificial Sequence
  Description of Artificial Sequence: Synthetic oligonucleotide
ucaauucauggagggauuc

SEQ ID NO: 1464546 - RNA, 19 nt, Artificial Sequence
  Description of Artificial Sequence: Synthetic oligonucleotide
cuagaccuugagucugggg

SEQ ID NO: 1464547 - RNA, 19 nt, Artificial Sequence
  Description of Artificial Sequence: Synthetic oligonucleotide
agggcaaauaaggacgaca

SEQ ID NO: 1464548 - RNA, 19 nt, Artificial Sequence
  Description of Artificial Sequence: Synthetic oligonucleotide
gaagcccuuuaaaacacuc

SEQ ID NO: 1464549 - RNA, 19 nt, Artificial Sequence
  Description of Artificial Sequence: Synthetic oligonucleotide
cacuucacgauuuaccaua

SEQ ID NO: 1464550 - RNA, 19 nt, Artificial Sequence
  Description of Artificial Sequence: Synthetic oligonucleotide
gaguaucaaacugagcucu

SEQ ID NO: 1464551 - RNA, 19 nt, Artificial Sequence
  Description of Artificial Sequence: Synthetic oligonucleotide
gauuuaccauaccuggaua

SEQ ID NO: 1464552 - RNA, 19 nt, Artificial Sequence
  Description of Artificial Sequence: Synthetic oligonucleotide
gaccuaguuuaaccucuag

SEQ ID NO: 1464553 - RNA, 19 nt, Artificial Sequence
  Description of Artificial Sequence: Synthetic oligonucleotide
gucaccccuuaccucaucc

SEQ ID NO: 1464554 - RNA, 19 nt, Artificial Sequence
  Description of Artificial Sequence: Synthetic oligonucleotide
cugaauauauucaaauguu

SEQ ID NO: 1464555 - RNA, 19 nt, Artificial Sequence
  Description of Artificial Sequence: Synthetic oligonucleotide
uagcagcucggagaucucg

SEQ ID NO: 1464556 - RNA, 19 nt, Artificial Sequence
  Description of Artificial Sequence: Synthetic oligonucleotide
caauaccauaguucacaug

SEQ ID NO: 1464557 - RNA, 19 nt, Artificial Sequence
  Description of Artificial Sequence: Synthetic oligonucleotide
uaccucgcugauucccagg

SEQ ID NO: 1464558 - RNA, 19 nt, Artificial Sequence
  Description of Artificial Sequence: Synthetic oligonucleotide
guagugcuucaccaguuuc

SEQ ID NO: 1464559 - RNA, 19 nt, Artificial Sequence
  Description of Artificial Sequence: Synthetic oligonucleotide
gauucucgagggauuuccc

SEQ ID NO: 1464560 - RNA, 19 nt, Artificial Sequence
  Description of Artificial Sequence: Synthetic oligonucleotide
aguuuaaccucuagucgca

SEQ ID NO: 1464561 - RNA, 19 nt, Artificial Sequence
  Description of Artificial Sequence: Synthetic oligonucleotide
agcuaaagaaugccaucau

SEQ ID NO: 1464562 - RNA, 19 nt, Artificial Sequence
  Description of Artificial Sequence: Synthetic oligonucleotide
uggcauaaaccaucagcau

SEQ ID NO: 1464563 - RNA, 19 nt, Artificial Sequence
  Description of Artificial Sequence: Synthetic oligonucleotide
uccccuuuguuaccaguuc

SEQ ID NO: 1464564 - RNA, 19 nt, Artificial Sequence
  Description of Artificial Sequence: Synthetic oligonucleotide
agaaugcuuaggaaaacua

SEQ ID NO: 1464565 - RNA, 19 nt, Artificial Sequence
  Description of Artificial Sequence: Synthetic oligonucleotide
cucgagggauuucccaagc

SEQ ID NO: 1464566 - RNA, 19 nt, Artificial Sequence
  Description of Artificial Sequence: Synthetic oligonucleotide
uuauuguaaaccggccaua

SEQ ID NO: 1464567 - RNA, 19 nt, Artificial Sequence
  Description of Artificial Sequence: Synthetic oligonucleotide
augcuuaggaaaacuacaa

SEQ ID NO: 1464568 - RNA, 19 nt, Artificial Sequence
  Description of Artificial Sequence: Synthetic oligonucleotide
aaacugagcucugguugug

SEQ ID NO: 1464569 - RNA, 19 nt, Artificial Sequence
  Description of Artificial Sequence: Synthetic oligonucleotide
aacuuguggcauaaaccau

SEQ ID NO: 1464570 - RNA, 19 nt, Artificial Sequence
  Description of Artificial Sequence: Synthetic oligonucleotide
accggccauauagugcggc

SEQ ID NO: 1464571 - RNA, 19 nt, Artificial Sequence
  Description of Artificial Sequence: Synthetic oligonucleotide
gggcaaauaaggacgacac

SEQ ID NO: 1464572 - RNA, 19 nt, Artificial Sequence
  Description of Artificial Sequence: Synthetic oligonucleotide
gagggaauaagcaccuuua

SEQ ID NO: 1464573 - RNA, 19 nt, Artificial Sequence
  Description of Artificial Sequence: Synthetic oligonucleotide
ucccaagcgucuuuugcua

SEQ ID NO: 1464574 - RNA, 19 nt, Artificial Sequence
  Description of Artificial Sequence: Synthetic oligonucleotide
cuucacgauuuaccauacc

SEQ ID NO: 1464575 - RNA, 19 nt, Artificial Sequence
  Description of Artificial Sequence: Synthetic oligonucleotide
guuaccaguucugucugca

SEQ ID NO: 1464576 - RNA, 19 nt, Artificial Sequence
  Description of Artificial Sequence: Synthetic oligonucleotide
ugguugguacugugguucu

SEQ ID NO: 1464577 - RNA, 19 nt, Artificial Sequence
  Description of Artificial Sequence: Synthetic oligonucleotide
auuguaaaccggccauaua

SEQ ID NO: 1464578 - RNA, 19 nt, Artificial Sequence
  Description of Artificial Sequence: Synthetic oligonucleotide
cugaucagaauuaguagau

SEQ ID NO: 1464579 - RNA, 19 nt, Artificial Sequence
  Description of Artificial Sequence: Synthetic oligonucleotide
cacaguuggacacacaguu

SEQ ID NO: 1464580 - RNA, 19 nt, Artificial Sequence
  Description of Artificial Sequence: Synthetic oligonucleotide
acauaaacucagugacaau

SEQ ID NO: 1464581 - RNA, 19 nt, Artificial Sequence
  Description of Artificial Sequence: Synthetic oligonucleotide
ugaccuaguuuaaccucua

SEQ ID NO: 1464582 - RNA, 19 nt, Artificial Sequence
  Description of Artificial Sequence: Synthetic oligonucleotide
aguaucaaacugagcucug

SEQ ID NO: 1464583 - RNA, 19 nt, Artificial Sequence
  Description of Artificial Sequence: Synthetic oligonucleotide
caagcgucuuuugcuagac

SEQ ID NO: 1464584 - RNA, 19 nt, Artificial Sequence
  Description of Artificial Sequence: Synthetic oligonucleotide
agggauuucccaagcgucu

SEQ ID NO: 1464585 - RNA, 19 nt, Artificial Sequence
  Description of Artificial Sequence: Synthetic oligonucleotide
cagaggauucaguaaugaa

SEQ ID NO: 1464586 - RNA, 19 nt, Artificial Sequence
  Description of Artificial Sequence: Synthetic oligonucleotide
accgcauacaguggaacaa

SEQ ID NO: 1464587 - RNA, 19 nt, Artificial Sequence
  Description of Artificial Sequence: Synthetic oligonucleotide
aaucacgaaucgagaggga

SEQ ID NO: 1464588 - RNA, 19 nt, Artificial Sequence
  Description of Artificial Sequence: Synthetic oligonucleotide
uucuggcaucauuguaccu

SEQ ID NO: 1464589 - RNA, 19 nt, Artificial Sequence
  Description of Artificial Sequence: Synthetic oligonucleotide
cuugagucugggguuucac

SEQ ID NO: 1464590 - RNA, 19 nt, Artificial Sequence
  Description of Artificial Sequence: Synthetic oligonucleotide
acgauuuaccauaccugga

SEQ ID NO: 1464591 - RNA, 19 nt, Artificial Sequence
  Description of Artificial Sequence: Synthetic oligonucleotide
agaauauaccucgcugauu

SEQ ID NO: 1464592 - RNA, 19 nt, Artificial Sequence
  Description of Artificial Sequence: Synthetic oligonucleotide
cacucuccccuuuguuacc

SEQ ID NO: 1464593 - RNA, 19 nt, Artificial Sequence
  Description of Artificial Sequence: Synthetic oligonucleotide
caaguuuaucaugucuuaa

SEQ ID NO: 1464594 - RNA, 19 nt, Artificial Sequence
  Description of Artificial Sequence: Synthetic oligonucleotide
cacgaacuguagacaucag

SEQ ID NO: 1464595 - RNA, 19 nt, Artificial Sequence
  Description of Artificial Sequence: Synthetic oligonucleotide
cuuuugacauaaacucagu

SEQ ID NO: 1464596 - RNA, 19 nt, Artificial Sequence
  Description of Artificial Sequence: Synthetic oligonucleotide
uaguucacaugaagcccuu

SEQ ID NO: 1464597 - RNA, 19 nt, Artificial Sequence
  Description of Artificial Sequence: Synthetic oligonucleotide
caccccuuaccucauccca

SEQ ID NO: 1464598 - RNA, 19 nt, Artificial Sequence
  Description of Artificial Sequence: Synthetic oligonucleotide
cacgaaucgagagggaaua

SEQ ID NO: 1464599 - RNA, 19 nt, Artificial Sequence
  Description of Artificial Sequence: Synthetic oligonucleotide
agaucucgaugaauauagu

SEQ ID NO: 1464600 - RNA, 19 nt, Artificial Sequence
  Description of Artificial Sequence: Synthetic oligonucleotide
auaccauaguucacaugaa

SEQ ID NO: 1464601 - RNA, 19 nt, Artificial Sequence
  Description of Artificial Sequence: Synthetic oligonucleotide
uugucaccccuuaccucau

SEQ ID NO: 1464602 - RNA, 19 nt, Artificial Sequence
  Description of Artificial Sequence: Synthetic oligonucleotide
accucuagucgcaaagauu

SEQ ID NO: 1464603 - RNA, 19 nt, Artificial Sequence
  Description of Artificial Sequence: Synthetic oligonucleotide
aaccggccauauagugcgg

SEQ ID NO: 1464604 - RNA, 19 nt, Artificial Sequence
  Description of Artificial Sequence: Synthetic oligonucleotide
gcagaggauucaguaauga

SEQ ID NO: 1464605 - RNA, 19 nt, Artificial Sequence
  Description of Artificial Sequence: Synthetic oligonucleotide
uccuguaccuuggcuccac

SEQ ID NO: 1464606 - RNA, 19 nt, Artificial Sequence
  Description of Artificial Sequence: Synthetic oligonucleotide
aggguccuucuuccaacaa

SEQ ID NO: 1464607 - RNA, 19 nt, Artificial Sequence
  Description of Artificial Sequence: Synthetic oligonucleotide
ggccauauagugcggccuc

SEQ ID NO: 1464608 - RNA, 19 nt, Artificial Sequence
  Description of Artificial Sequence: Synthetic oligonucleotide
uaccuggauauggcacucu

SEQ ID NO: 1464609 - RNA, 19 nt, Artificial Sequence
  Description of Artificial Sequence: Synthetic oligonucleotide
auauggcacucuccccuuu

SEQ ID NO: 1464610 - RNA, 19 nt, Artificial Sequence
  Description of Artificial Sequence: Synthetic oligonucleotide
ggagaucucgaugaauaua

SEQ ID NO: 1464611 - RNA, 19 nt, Artificial Sequence
  Description of Artificial Sequence: Synthetic oligonucleotide
acaaccgcauacaguggaa

SEQ ID NO: 1464612 - RNA, 19 nt, Artificial Sequence
  Description of Artificial Sequence: Synthetic oligonucleotide
gcaaagauucucgagggau

SEQ ID NO: 1464613 - RNA, 19 nt, Artificial Sequence
  Description of Artificial Sequence: Synthetic oligonucleotide
cccaagcgucuuuugcuag

SEQ ID NO: 1464614 - RNA, 19 nt, Artificial Sequence
  Description of Artificial Sequence: Synthetic oligonucleotide
cgaaucgagagggaauaag

SEQ ID NO: 1464615 - RNA, 19 nt, Artificial Sequence
  Description of Artificial Sequence: Synthetic oligonucleotide
acaggcuacuuggauuaua

SEQ ID NO: 1464616 - RNA, 19 nt, Artificial Sequence
  Description of Artificial Sequence: Synthetic oligonucleotide
acgaaucgagagggaauaa

SEQ ID NO: 1464617 - RNA, 19 nt, Artificial Sequence
  Description of Artificial Sequence: Synthetic oligonucleotide
gcuaagccaaaaucugcua

SEQ ID NO: 1464618 - RNA, 19 nt, Artificial Sequence
  Description of Artificial Sequence: Synthetic oligonucleotide
ccgcauacaguggaacaag

SEQ ID NO: 1464619 - RNA, 19 nt, Artificial Sequence
  Description of Artificial Sequence: Synthetic oligonucleotide
accccuuaccucaucccaa

SEQ ID NO: 1464620 - RNA, 19 nt, Artificial Sequence
  Description of Artificial Sequence: Synthetic oligonucleotide
ccggccauauagugcggcc

SEQ ID NO: 1464621 - RNA, 19 nt, Artificial Sequence
  Description of Artificial Sequence: Synthetic oligonucleotide
ggcaaauaaggacgacacu

SEQ ID NO: 1464622 - RNA, 19 nt, Artificial Sequence
  Description of Artificial Sequence: Synthetic oligonucleotide
cucuagucgcaaagauucu

SEQ ID NO: 1464623 - RNA, 19 nt, Artificial Sequence
  Description of Artificial Sequence: Synthetic oligonucleotide
cucgaugaauauaguucau

SEQ ID NO: 1464624 - RNA, 19 nt, Artificial Sequence
  Description of Artificial Sequence: Synthetic oligonucleotide
aguucacaugaagcccuuu

SEQ ID NO: 1464625 - RNA, 19 nt, Artificial Sequence
  Description of Artificial Sequence: Synthetic oligonucleotide
ccauauagugcggccucag

SEQ ID NO: 1464626 - RNA, 19 nt, Artificial Sequence
  Description of Artificial Sequence: Synthetic oligonucleotide
cacaugaggucuucauguu

SEQ ID NO: 1464627 - RNA, 19 nt, Artificial Sequence
  Description of Artificial Sequence: Synthetic oligonucleotide
cacucaugucacgaacugu

SEQ ID NO: 1464628 - RNA, 19 nt, Artificial Sequence
  Description of Artificial Sequence: Synthetic oligonucleotide
gaccuugagucugggguuu

SEQ ID NO: 1464629 - RNA, 19 nt, Artificial Sequence
  Description of Artificial Sequence: Synthetic oligonucleotide
cgauuuaccauaccuggau

SEQ ID NO: 1464630 - RNA, 19 nt, Artificial Sequence
  Description of Artificial Sequence: Synthetic oligonucleotide
ccuuuagugguuucacuuu

SEQ ID NO: 1464631 - RNA, 19 nt, Artificial Sequence
  Description of Artificial Sequence: Synthetic oligonucleotide
gagcucugguugugaugua

SEQ ID NO: 1464632 - RNA, 19 nt, Artificial Sequence
  Description of Artificial Sequence: Synthetic oligonucleotide
gccauauagugcggccuca

SEQ ID NO: 1464633 - RNA, 19 nt, Artificial Sequence
  Description of Artificial Sequence: Synthetic oligonucleotide
cccuuaccucaucccaauc

SEQ ID NO: 1464634 - RNA, 19 nt, Artificial Sequence
  Description of Artificial Sequence: Synthetic oligonucleotide
ccuuuguuaccaguucugu

SEQ ID NO: 1464635 - RNA, 19 nt, Artificial Sequence
  Description of Artificial Sequence: Synthetic oligonucleotide
caccauugucaaguuuccu

SEQ ID NO: 1464636 - RNA, 19 nt, Artificial Sequence
  Description of Artificial Sequence: Synthetic oligonucleotide
ggaacucacaugaggucuu

SEQ ID NO: 1464637 - RNA, 19 nt, Artificial Sequence
  Description of Artificial Sequence: Synthetic oligonucleotide
gggauuucccaagcgucuu

SEQ ID NO: 1464638 - RNA, 19 nt, Artificial Sequence
  Description of Artificial Sequence: Synthetic oligonucleotide
gcgucuuuugcuagaccuu

SEQ ID NO: 1464639 - RNA, 19 nt, Artificial Sequence
  Description of Artificial Sequence: Synthetic oligonucleotide
ccccuuaccucaucccaau

SEQ ID NO: 1464640 - RNA, 19 nt, Artificial Sequence
  Description of Artificial Sequence: Synthetic oligonucleotide
cggagaucucgaugaauau

SEQ ID NO: 1464641 - RNA, 19 nt, Artificial Sequence
  Description of Artificial Sequence: Synthetic oligonucleotide
auauaaguuagucaggacc

SEQ ID NO: 1464642 - RNA, 19 nt, Artificial Sequence
  Description of Artificial Sequence: Synthetic oligonucleotide
cagauugugacugagaucc

SEQ ID NO: 1464643 - RNA, 19 nt, Artificial Sequence
  Description of Artificial Sequence: Synthetic oligonucleotide
uauaaguuagucaggaccu

SEQ ID NO: 1464644 - RNA, 19 nt, Artificial Sequence
  Description of Artificial Sequence: Synthetic oligonucleotide
aaagcaccgggguugaugg

SEQ ID NO: 1464645 - RNA, 19 nt, Artificial Sequence
  Description of Artificial Sequence: Synthetic oligonucleotide
acuaccuuagggcuggagc

SEQ ID NO: 1464646 - RNA, 19 nt, Artificial Sequence
  Description of Artificial Sequence: Synthetic oligonucleotide
uguaggacuaccuuagggc

SEQ ID NO: 1464647 - RNA, 19 nt, Artificial Sequence
  Description of Artificial Sequence: Synthetic oligonucleotide
uggcauauuaaaauauaag

SEQ ID NO: 1464648 - RNA, 19 nt, Artificial Sequence
  Description of Artificial Sequence: Synthetic oligonucleotide
guugacgucacucaaggag

SEQ ID NO: 1464649 - RNA, 19 nt, Artificial Sequence
  Description of Artificial Sequence: Synthetic oligonucleotide
cugaaaacaccucagcucc

SEQ ID NO: 1464650 - RNA, 19 nt, Artificial Sequence
  Description of Artificial Sequence: Synthetic oligonucleotide
aaggcagugggcacgaugc

SEQ ID NO: 1464651 - RNA, 19 nt, Artificial Sequence
  Description of Artificial Sequence: Synthetic oligonucleotide
aaggcagauagucgagacc

SEQ ID NO: 1464652 - RNA, 19 nt, Artificial Sequence
  Description of Artificial Sequence: Synthetic oligonucleotide
aacacuuuguaaagcaggg

SEQ ID NO: 1464653 - RNA, 19 nt, Artificial Sequence
  Description of Artificial Sequence: Synthetic oligonucleotide
acuaacacuuuguaaagca

SEQ ID NO: 1464654 - RNA, 19 nt, Artificial Sequence
  Description of Artificial Sequence: Synthetic oligonucleotide
ucgguuauggcugagguug

SEQ ID NO: 1464655 - RNA, 19 nt, Artificial Sequence
  Description of Artificial Sequence: Synthetic oligonucleotide
aaauggguagauuuuguua

SEQ ID NO: 1464656 - RNA, 19 nt, Artificial Sequence
  Description of Artificial Sequence: Synthetic oligonucleotide
acuuagggacaacuggggc

SEQ ID NO: 1464657 - RNA, 19 nt, Artificial Sequence
  Description of Artificial Sequence: Synthetic oligonucleotide
acgaaagcuaucccuggcc

SEQ ID NO: 1464658 - RNA, 19 nt, Artificial Sequence
  Description of Artificial Sequence: Synthetic oligonucleotide
agauucaggcucugaaugg

SEQ ID NO: 1464659 - RNA, 19 nt, Artificial Sequence
  Description of Artificial Sequence: Synthetic oligonucleotide
uuggccuacacuaacacuu

SEQ ID NO: 1464660 - RNA, 19 nt, Artificial Sequence
  Description of Artificial Sequence: Synthetic oligonucleotide
uagauuuuguuacugggua

SEQ ID NO: 1464661 - RNA, 19 nt, Artificial Sequence
  Description of Artificial Sequence: Synthetic oligonucleotide
aggguaugcacccucccgc

SEQ ID NO: 1464662 - RNA, 19 nt, Artificial Sequence
  Description of Artificial Sequence: Synthetic oligonucleotide
agguugacgucacucaagg

SEQ ID NO: 1464663 - RNA, 19 nt, Artificial Sequence
  Description of Artificial Sequence: Synthetic oligonucleotide
aaagcuaucccuggcccac

SEQ ID NO: 1464664 - RNA, 19 nt, Artificial Sequence
  Description of Artificial Sequence: Synthetic oligonucleotide
ugugguauagccuggcccu

SEQ ID NO: 1464665 - RNA, 19 nt, Artificial Sequence
  Description of Artificial Sequence: Synthetic oligonucleotide
uuauggcugagguugacgu

SEQ ID NO: 1464666 - RNA, 19 nt, Artificial Sequence
  Description of Artificial Sequence: Synthetic oligonucleotide
cuaccuuagggcuggagcc

SEQ ID NO: 1464667 - RNA, 19 nt, Artificial Sequence
  Description of Artificial Sequence: Synthetic oligonucleotide
uuuacugagaugccaucac

SEQ ID NO: 1464668 - RNA, 19 nt, Artificial Sequence
  Description of Artificial Sequence: Synthetic oligonucleotide
ugaaugguagguacaggca

SEQ ID NO: 1464669 - RNA, 19 nt, Artificial Sequence
  Description of Artificial Sequence: Synthetic oligonucleotide
cauaguucugggaaaugag

SEQ ID NO: 1464670 - RNA, 19 nt, Artificial Sequence
  Description of Artificial Sequence: Synthetic oligonucleotide
uuguuacuggguauaggcc

SEQ ID NO: 1464671 - RNA, 19 nt, Artificial Sequence
  Description of Artificial Sequence: Synthetic oligonucleotide
ugggaaaggucuacggugc

SEQ ID NO: 1464672 - RNA, 19 nt, Artificial Sequence
  Description of Artificial Sequence: Synthetic oligonucleotide
agauagucgagaccucccg

SEQ ID NO: 1464673 - RNA, 19 nt, Artificial Sequence
  Description of Artificial Sequence: Synthetic oligonucleotide
uugugggaaaggucuacgg

SEQ ID NO: 1464674 - RNA, 19 nt, Artificial Sequence
  Description of Artificial Sequence: Synthetic oligonucleotide
ugucacaagaugucugggc

SEQ ID NO: 1464675 - RNA, 19 nt, Artificial Sequence
  Description of Artificial Sequence: Synthetic oligonucleotide
uuagggacaacuggggcag

SEQ ID NO: 1464676 - RNA, 19 nt, Artificial Sequence
  Description of Artificial Sequence: Synthetic oligonucleotide
agcagauugugacugagau

SEQ ID NO: 1464677 - RNA, 19 nt, Artificial Sequence
  Description of Artificial Sequence: Synthetic oligonucleotide
acccgacaggucuaguucc

SEQ ID NO: 1464678 - RNA, 19 nt, Artificial Sequence
  Description of Artificial Sequence: Synthetic oligonucleotide
uuuuguuacuggguauagg

SEQ ID NO: 1464679 - RNA, 19 nt, Artificial Sequence
  Description of Artificial Sequence: Synthetic oligonucleotide
ggcauauuaaaauauaagu

SEQ ID NO: 1464680 - RNA, 19 nt, Artificial Sequence
  Description of Artificial Sequence: Synthetic oligonucleotide
ugugggaaaggucuacggu

SEQ ID NO: 1464681 - RNA, 19 nt, Artificial Sequence
  Description of Artificial Sequence: Synthetic oligonucleotide
auucacggucucuagccgg

SEQ ID NO: 1464682 - RNA, 19 nt, Artificial Sequence
  Description of Artificial Sequence: Synthetic oligonucleotide
uggcccacaacuuuacuga

SEQ ID NO: 1464683 - RNA, 19 nt, Artificial Sequence
  Description of Artificial Sequence: Synthetic oligonucleotide
ucucuagccgguuggaaga

SEQ ID NO: 1464684 - RNA, 19 nt, Artificial Sequence
  Description of Artificial Sequence: Synthetic oligonucleotide
caguguaggacuaccuuag

SEQ ID NO: 1464685 - RNA, 19 nt, Artificial Sequence
  Description of Artificial Sequence: Synthetic oligonucleotide
ggcacuuagggacaacugg

SEQ ID NO: 1464686 - RNA, 19 nt, Artificial Sequence
  Description of Artificial Sequence: Synthetic oligonucleotide
acgucacucaaggaggagc

SEQ ID NO: 1464687 - RNA, 19 nt, Artificial Sequence
  Description of Artificial Sequence: Synthetic oligonucleotide
uuagucaggaccugagcaa

SEQ ID NO: 1464688 - RNA, 19 nt, Artificial Sequence
  Description of Artificial Sequence: Synthetic oligonucleotide
gguacaggcagacuggccc

SEQ ID NO: 1464689 - RNA, 19 nt, Artificial Sequence
  Description of Artificial Sequence: Synthetic oligonucleotide
accauuugucacaagaugu

SEQ ID NO: 1464690 - RNA, 19 nt, Artificial Sequence
  Description of Artificial Sequence: Synthetic oligonucleotide
agguacgaaagcuaucccu

SEQ ID NO: 1464691 - RNA, 19 nt, Artificial Sequence
  Description of Artificial Sequence: Synthetic oligonucleotide
aguccaggcaaaaggaagg

SEQ ID NO: 1464692 - RNA, 19 nt, Artificial Sequence
  Description of Artificial Sequence: Synthetic oligonucleotide
aaaggucuacggugcagug

SEQ ID NO: 1464693 - RNA, 19 nt, Artificial Sequence
  Description of Artificial Sequence: Synthetic oligonucleotide
caugaaagcaccgggguug

SEQ ID NO: 1464694 - RNA, 19 nt, Artificial Sequence
  Description of Artificial Sequence: Synthetic oligonucleotide
gagacaaauggguagauuu

SEQ ID NO: 1464695 - RNA, 19 nt, Artificial Sequence
  Description of Artificial Sequence: Synthetic oligonucleotide
uaacgcaggcgggagaagg

SEQ ID NO: 1464696 - RNA, 19 nt, Artificial Sequence
  Description of Artificial Sequence: Synthetic oligonucleotide
aggcagauagucgagaccu

SEQ ID NO: 1464697 - RNA, 19 nt, Artificial Sequence
  Description of Artificial Sequence: Synthetic oligonucleotide
uacgaaagcuaucccuggc

SEQ ID NO: 1464698 - RNA, 19 nt, Artificial Sequence
  Description of Artificial Sequence: Synthetic oligonucleotide
ucacaagaugucugggccc

SEQ ID NO: 1464699 - RNA, 19 nt, Artificial Sequence
  Description of Artificial Sequence: Synthetic oligonucleotide
guccacucgagucaggcug

SEQ ID NO: 1464700 - RNA, 19 nt, Artificial Sequence
  Description of Artificial Sequence: Synthetic oligonucleotide
gucucuagccgguuggaag

SEQ ID NO: 1464701 - RNA, 19 nt, Artificial Sequence
  Description of Artificial Sequence: Synthetic oligonucleotide
cuagccgguuggaagacag

SEQ ID NO: 1464702 - RNA, 19 nt, Artificial Sequence
  Description of Artificial Sequence: Synthetic oligonucleotide
guacgaaagcuaucccugg

SEQ ID NO: 1464703 - RNA, 19 nt, Artificial Sequence
  Description of Artificial Sequence: Synthetic oligonucleotide
ggaaaugagccauggagac

SEQ ID NO: 1464704 - RNA, 19 nt, Artificial Sequence
  Description of Artificial Sequence: Synthetic oligonucleotide
caccauuugucacaagaug

SEQ ID NO: 1464705 - RNA, 19 nt, Artificial Sequence
  Description of Artificial Sequence: Synthetic oligonucleotide
aggucccacacgcugucgc

SEQ ID NO: 1464706 - RNA, 19 nt, Artificial Sequence
  Description of Artificial Sequence: Synthetic oligonucleotide
aaguuagucaggaccugag

SEQ ID NO: 1464707 - RNA, 19 nt, Artificial Sequence
  Description of Artificial Sequence: Synthetic oligonucleotide
ucugaaugguagguacagg

SEQ ID NO: 1464708 - RNA, 19 nt, Artificial Sequence
  Description of Artificial Sequence: Synthetic oligonucleotide
auaagguugugggaaaggu

SEQ ID NO: 1464709 - RNA, 19 nt, Artificial Sequence
  Description of Artificial Sequence: Synthetic oligonucleotide
agucgguuauggcugaggu

SEQ ID NO: 1464710 - RNA, 19 nt, Artificial Sequence
  Description of Artificial Sequence: Synthetic oligonucleotide
ucgagucaggcugaaacug

SEQ ID NO: 1464711 - RNA, 19 nt, Artificial Sequence
  Description of Artificial Sequence: Synthetic oligonucleotide
cuuagggacaacuggggca

SEQ ID NO: 1464712 - RNA, 19 nt, Artificial Sequence
  Description of Artificial Sequence: Synthetic oligonucleotide
guagguacaggcagacugg

SEQ ID NO: 1464713 - RNA, 19 nt, Artificial Sequence
  Description of Artificial Sequence: Synthetic oligonucleotide
aacuuuacugagaugccau

SEQ ID NO: 1464714 - RNA, 19 nt, Artificial Sequence
  Description of Artificial Sequence: Synthetic oligonucleotide
uagucgagaccucccguag

SEQ ID NO: 1464715 - RNA, 19 nt, Artificial Sequence
  Description of Artificial Sequence: Synthetic oligonucleotide
agcaccaacagggaggaca

SEQ ID NO: 1464716 - RNA, 19 nt, Artificial Sequence
  Description of Artificial Sequence: Synthetic oligonucleotide
ugagguugacgucacucaa

SEQ ID NO: 1464717 - RNA, 19 nt, Artificial Sequence
  Description of Artificial Sequence: Synthetic oligonucleotide
auuuuguuacuggguauag

SEQ ID NO: 1464718 - RNA, 19 nt, Artificial Sequence
  Description of Artificial Sequence: Synthetic oligonucleotide
acaguguaggacuaccuua

SEQ ID NO: 1464719 - RNA, 19 nt, Artificial Sequence
  Description of Artificial Sequence: Synthetic oligonucleotide
aacgcaggcgggagaaggc

SEQ ID NO: 1464720 - RNA, 19 nt, Artificial Sequence
  Description of Artificial Sequence: Synthetic oligonucleotide
ucgggcacaguguggagcc

SEQ ID NO: 1464721 - RNA, 19 nt, Artificial Sequence
  Description of Artificial Sequence: Synthetic oligonucleotide
aaugguagguacaggcaga

SEQ ID NO: 1464722 - RNA, 19 nt, Artificial Sequence
  Description of Artificial Sequence: Synthetic oligonucleotide
uaaguuagucaggaccuga

SEQ ID NO: 1464723 - RNA, 19 nt, Artificial Sequence
  Description of Artificial Sequence: Synthetic oligonucleotide
aaaacauggccgaguuguc

SEQ ID NO: 1464724 - RNA, 19 nt, Artificial Sequence
  Description of Artificial Sequence: Synthetic oligonucleotide
ugagcagauugugacugag

SEQ ID NO: 1464725 - RNA, 19 nt, Artificial Sequence
  Description of Artificial Sequence: Synthetic oligonucleotide
gaaggcagugggcacgaug

SEQ ID NO: 1464726 - RNA, 19 nt, Artificial Sequence
  Description of Artificial Sequence: Synthetic oligonucleotide
auggccgaguugucugucc

SEQ ID NO: 1464727 - RNA, 19 nt, Artificial Sequence
  Description of Artificial Sequence: Synthetic oligonucleotide
agauuuuguuacuggguau

SEQ ID NO: 1464728 - RNA, 19 nt, Artificial Sequence
  Description of Artificial Sequence: Synthetic oligonucleotide
aaacauggccgaguugucu

SEQ ID NO: 1464729 - RNA, 19 nt, Artificial Sequence
  Description of Artificial Sequence: Synthetic oligonucleotide
uacccgacaggucuaguuc

SEQ ID NO: 1464730 - RNA, 19 nt, Artificial Sequence
  Description of Artificial Sequence: Synthetic oligonucleotide
uagucaggaccugagcaag

SEQ ID NO: 1464731 - RNA, 19 nt, Artificial Sequence
  Description of Artificial Sequence: Synthetic oligonucleotide
gaaagcaccgggguugaug

SEQ ID NO: 1464732 - RNA, 19 nt, Artificial Sequence
  Description of Artificial Sequence: Synthetic oligonucleotide
uugucacaagaugucuggg

SEQ ID NO: 1464733 - RNA, 19 nt, Artificial Sequence
  Description of Artificial Sequence: Synthetic oligonucleotide
cauucacggucucuagccg

SEQ ID NO: 1464734 - RNA, 19 nt, Artificial Sequence
  Description of Artificial Sequence: Synthetic oligonucleotide
ggguagauuuuguuacugg

SEQ ID NO: 1464735 - RNA, 19 nt, Artificial Sequence
  Description of Artificial Sequence: Synthetic oligonucleotide
uggguagauuuuguuacug

SEQ ID NO: 1464736 - RNA, 19 nt, Artificial Sequence
  Description of Artificial Sequence: Synthetic oligonucleotide
cagauagucgagaccuccc

SEQ ID NO: 1464737 - RNA, 19 nt, Artificial Sequence
  Description of Artificial Sequence: Synthetic oligonucleotide
cacgcugucgccucggcac

SEQ ID NO: 1464738 - RNA, 19 nt, Artificial Sequence
  Description of Artificial Sequence: Synthetic oligonucleotide
guugccgaggguaugcacc

SEQ ID NO: 1464739 - RNA, 19 nt, Artificial Sequence
  Description of Artificial Sequence: Synthetic oligonucleotide
guugugggaaaggucuacg

SEQ ID NO: 1464740 - RNA, 19 nt, Artificial Sequence
  Description of Artificial Sequence: Synthetic oligonucleotide
cacugacucauucacgguc

SEQ ID NO: 1464741 - RNA, 19 nt, Artificial Sequence
  Description of Artificial Sequence: Synthetic oligonucleotide
ugacgucacucaaggagga

SEQ ID NO: 1464742 - RNA, 19 nt, Artificial Sequence
  Description of Artificial Sequence: Synthetic oligonucleotide
uguaggcuggccagugaca

SEQ ID NO: 1464743 - RNA, 19 nt, Artificial Sequence
  Description of Artificial Sequence: Synthetic oligonucleotide
uaugcacccucccgcacca

SEQ ID NO: 1464744 - RNA, 19 nt, Artificial Sequence
  Description of Artificial Sequence: Synthetic oligonucleotide
agaugggcuguguccagag

SEQ ID NO: 1464745 - RNA, 19 nt, Artificial Sequence
  Description of Artificial Sequence: Synthetic oligonucleotide
gguacgaaagcuaucccug

SEQ ID NO: 1464746 - RNA, 19 nt, Artificial Sequence
  Description of Artificial Sequence: Synthetic oligonucleotide
agcgaggcgguggauaagg

SEQ ID NO: 1464747 - RNA, 19 nt, Artificial Sequence
  Description of Artificial Sequence: Synthetic oligonucleotide
ggaaggucucgggagaucg

SEQ ID NO: 1464748 - RNA, 19 nt, Artificial Sequence
  Description of Artificial Sequence: Synthetic oligonucleotide
guaggcuggccagugacag

SEQ ID NO: 1464749 - RNA, 19 nt, Artificial Sequence
  Description of Artificial Sequence: Synthetic oligonucleotide
acuggguauaggccccagg

SEQ ID NO: 1464750 - RNA, 19 nt, Artificial Sequence
  Description of Artificial Sequence: Synthetic oligonucleotide
aggucgagcgacuccaggu

SEQ ID NO: 1464751 - RNA, 19 nt, Artificial Sequence
  Description of Artificial Sequence: Synthetic oligonucleotide
cacuaacacuuuguaaagc

SEQ ID NO: 1464752 - RNA, 19 nt, Artificial Sequence
  Description of Artificial Sequence: Synthetic oligonucleotide
gaaagcuaucccuggccca

SEQ ID NO: 1464753 - RNA, 19 nt, Artificial Sequence
  Description of Artificial Sequence: Synthetic oligonucleotide
ugcacaucuuggccuacac

SEQ ID NO: 1464754 - RNA, 19 nt, Artificial Sequence
  Description of Artificial Sequence: Synthetic oligonucleotide
cagacugguacccgacagg

SEQ ID NO: 1464755 - RNA, 19 nt, Artificial Sequence
  Description of Artificial Sequence: Synthetic oligonucleotide
uggagcagcaucucaggua

SEQ ID NO: 1464756 - RNA, 19 nt, Artificial Sequence
  Description of Artificial Sequence: Synthetic oligonucleotide
gaggucgagcgacuccagg

SEQ ID NO: 1464757 - RNA, 19 nt, Artificial Sequence
  Description of Artificial Sequence: Synthetic oligonucleotide
aacgcaggggaaggucucg

SEQ ID NO: 1464758 - RNA, 19 nt, Artificial Sequence
  Description of Artificial Sequence: Synthetic oligonucleotide
uucacggucucuagccggu

SEQ ID NO: 1464759 - RNA, 19 nt, Artificial Sequence
  Description of Artificial Sequence: Synthetic oligonucleotide
guggauaagguugugggaa

SEQ ID NO: 1464760 - RNA, 19 nt, Artificial Sequence
  Description of Artificial Sequence: Synthetic oligonucleotide
gagguugacgucacucaag

SEQ ID NO: 1464761 - RNA, 19 nt, Artificial Sequence
  Description of Artificial Sequence: Synthetic oligonucleotide
ucaccuaggccuguagacu

SEQ ID NO: 1464762 - RNA, 19 nt, Artificial Sequence
  Description of Artificial Sequence: Synthetic oligonucleotide
ccagguacgaaagcuaucc

SEQ ID NO: 1464763 - RNA, 19 nt, Artificial Sequence
  Description of Artificial Sequence: Synthetic oligonucleotide
uagucgguuauggcugagg

SEQ ID NO: 1464764 - RNA, 19 nt, Artificial Sequence
  Description of Artificial Sequence: Synthetic oligonucleotide
caucuuggccuacacuaac

SEQ ID NO: 1464765 - RNA, 19 nt, Artificial Sequence
  Description of Artificial Sequence: Synthetic oligonucleotide
ccgguuggaagacaggucc

SEQ ID NO: 1464766 - RNA, 19 nt, Artificial Sequence
  Description of Artificial Sequence: Synthetic oligonucleotide
auagucgagaccucccgua

SEQ ID NO: 1464767 - RNA, 19 nt, Artificial Sequence
  Description of Artificial Sequence: Synthetic oligonucleotide
cauggggugcuaacuggag

SEQ ID NO: 1464768 - RNA, 19 nt, Artificial Sequence
  Description of Artificial Sequence: Synthetic oligonucleotide
uccacucgagucaggcuga

SEQ ID NO: 1464769 - RNA, 19 nt, Artificial Sequence
  Description of Artificial Sequence: Synthetic oligonucleotide
uaacuggaguacacucugu

SEQ ID NO: 1464770 - RNA, 19 nt, Artificial Sequence
  Description of Artificial Sequence: Synthetic oligonucleotide
agacugguacccgacaggu

SEQ ID NO: 1464771 - RNA, 19 nt, Artificial Sequence
  Description of Artificial Sequence: Synthetic oligonucleotide
caggccugggagcucacgg

SEQ ID NO: 1464772 - RNA, 19 nt, Artificial Sequence
  Description of Artificial Sequence: Synthetic oligonucleotide
guaggacuaccuuagggcu

SEQ ID NO: 1464773 - RNA, 19 nt, Artificial Sequence
  Description of Artificial Sequence: Synthetic oligonucleotide
agaucgggcacagugugga

SEQ ID NO: 1464774 - RNA, 19 nt, Artificial Sequence
  Description of Artificial Sequence: Synthetic oligonucleotide
caccuaggccuguagacuc

SEQ ID NO: 1464775 - RNA, 19 nt, Artificial Sequence
  Description of Artificial Sequence: Synthetic oligonucleotide
ggcacugcacaucuuggcc

SEQ ID NO: 1464776 - RNA, 19 nt, Artificial Sequence
  Description of Artificial Sequence: Synthetic oligonucleotide
cacaguguggagccgguuc

SEQ ID NO: 1464777 - RNA, 19 nt, Artificial Sequence
  Description of Artificial Sequence: Synthetic oligonucleotide
auggggugcuaacuggagu

SEQ ID NO: 1464778 - RNA, 19 nt, Artificial Sequence
  Description of Artificial Sequence: Synthetic oligonucleotide
agucaggaccugagcaagc

SEQ ID NO: 1464779 - RNA, 19 nt, Artificial Sequence
  Description of Artificial Sequence: Synthetic oligonucleotide
ugggugucuccacagugua

SEQ ID NO: 1464780 - RNA, 19 nt, Artificial Sequence
  Description of Artificial Sequence: Synthetic oligonucleotide
cagguaacgcaggggaagg

SEQ ID NO: 1464781 - RNA, 19 nt, Artificial Sequence
  Description of Artificial Sequence: Synthetic oligonucleotide
uagccgguuggaagacagg

SEQ ID NO: 1464782 - RNA, 19 nt, Artificial Sequence
  Description of Artificial Sequence: Synthetic oligonucleotide
uggguauaggccccaggua

SEQ ID NO: 1464783 - RNA, 19 nt, Artificial Sequence
  Description of Artificial Sequence: Synthetic oligonucleotide
ucgagaccucccguagucg

SEQ ID NO: 1464784 - RNA, 19 nt, Artificial Sequence
  Description of Artificial Sequence: Synthetic oligonucleotide
uauggcugagguugacguc

SEQ ID NO: 1464785 - RNA, 19 nt, Artificial Sequence
  Description of Artificial Sequence: Synthetic oligonucleotide
caacagggaggacaacaug

SEQ ID NO: 1464786 - RNA, 19 nt, Artificial Sequence
  Description of Artificial Sequence: Synthetic oligonucleotide
gagaucgggcacagugugg

SEQ ID NO: 1464787 - RNA, 19 nt, Artificial Sequence
  Description of Artificial Sequence: Synthetic oligonucleotide
ucgagcgacuccagguaac

SEQ ID NO: 1464788 - RNA, 19 nt, Artificial Sequence
  Description of Artificial Sequence: Synthetic oligonucleotide
cagguacgaaagcuauccc

SEQ ID NO: 1464789 - RNA, 19 nt, Artificial Sequence
  Description of Artificial Sequence: Synthetic oligonucleotide
aagucccucugcucauagu

SEQ ID NO: 1464790 - RNA, 19 nt, Artificial Sequence
  Description of Artificial Sequence: Synthetic oligonucleotide
ugaggucgagcgacuccag

SEQ ID NO: 1464791 - RNA, 19 nt, Artificial Sequence
  Description of Artificial Sequence: Synthetic oligonucleotide
cagagucugguuuggcauc

SEQ ID NO: 1464792 - RNA, 19 nt, Artificial Sequence
  Description of Artificial Sequence: Synthetic oligonucleotide
gaaggucucgggagaucgg

SEQ ID NO: 1464793 - RNA, 19 nt, Artificial Sequence
  Description of Artificial Sequence: Synthetic oligonucleotide
cgguggauaagguuguggg

SEQ ID NO: 1464794 - RNA, 19 nt, Artificial Sequence
  Description of Artificial Sequence: Synthetic oligonucleotide
gucgagaccucccguaguc

SEQ ID NO: 1464795 - RNA, 19 nt, Artificial Sequence
  Description of Artificial Sequence: Synthetic oligonucleotide
cauccaggcucagguaacg

SEQ ID NO: 1464796 - RNA, 19 nt, Artificial Sequence
  Description of Artificial Sequence: Synthetic oligonucleotide
gggaaaugagccauggaga

SEQ ID NO: 1464797 - RNA, 19 nt, Artificial Sequence
  Description of Artificial Sequence: Synthetic oligonucleotide
guagauuuuguuacugggu

SEQ ID NO: 1464798 - RNA, 19 nt, Artificial Sequence
  Description of Artificial Sequence: Synthetic oligonucleotide
agcaccgggguugauggug

SEQ ID NO: 1464799 - RNA, 19 nt, Artificial Sequence
  Description of Artificial Sequence: Synthetic oligonucleotide
aggaagggaccagagucug

SEQ ID NO: 1464800 - RNA, 19 nt, Artificial Sequence
  Description of Artificial Sequence: Synthetic oligonucleotide
ucccguagucgguuauggc

SEQ ID NO: 1464801 - RNA, 19 nt, Artificial Sequence
  Description of Artificial Sequence: Synthetic oligonucleotide
gguacggguaccagacugg

SEQ ID NO: 1464802 - RNA, 19 nt, Artificial Sequence
  Description of Artificial Sequence: Synthetic oligonucleotide
gaaaggucuacggugcagu

SEQ ID NO: 1464803 - RNA, 19 nt, Artificial Sequence
  Description of Artificial Sequence: Synthetic oligonucleotide
agucgagaccucccguagu

SEQ ID NO: 1464804 - RNA, 19 nt, Artificial Sequence
  Description of Artificial Sequence: Synthetic oligonucleotide
uaccuuagggcuggagcca

SEQ ID NO: 1464805 - RNA, 19 nt, Artificial Sequence
  Description of Artificial Sequence: Synthetic oligonucleotide
aguccacucgagucaggcu

SEQ ID NO: 1464806 - RNA, 19 nt, Artificial Sequence
  Description of Artificial Sequence: Synthetic oligonucleotide
agagucugguuuggcauca

SEQ ID NO: 1464807 - RNA, 19 nt, Artificial Sequence
  Description of Artificial Sequence: Synthetic oligonucleotide
ccucacacuggcauccagg

SEQ ID NO: 1464808 - RNA, 19 nt, Artificial Sequence
  Description of Artificial Sequence: Synthetic oligonucleotide
caacuuuacugagaugcca

SEQ ID NO: 1464809 - RNA, 19 nt, Artificial Sequence
  Description of Artificial Sequence: Synthetic oligonucleotide
cuccaggccacaccauuug

SEQ ID NO: 1464810 - RNA, 19 nt, Artificial Sequence
  Description of Artificial Sequence: Synthetic oligonucleotide
ccgguuccaggcuagauuc

SEQ ID NO: 1464811 - RNA, 19 nt, Artificial Sequence
  Description of Artificial Sequence: Synthetic oligonucleotide
gauagucgagaccucccgu

SEQ ID NO: 1464812 - RNA, 19 nt, Artificial Sequence
  Description of Artificial Sequence: Synthetic oligonucleotide
gaucgggcacaguguggag

SEQ ID NO: 1464813 - RNA, 19 nt, Artificial Sequence
  Description of Artificial Sequence: Synthetic oligonucleotide
agacaaauggguagauuuu

SEQ ID NO: 1464814 - RNA, 19 nt, Artificial Sequence
  Description of Artificial Sequence: Synthetic oligonucleotide
cagguugccgaggguaugc

SEQ ID NO: 1464815 - RNA, 19 nt, Artificial Sequence
  Description of Artificial Sequence: Synthetic oligonucleotide
acauggccgaguugucugu

SEQ ID NO: 1464816 - RNA, 19 nt, Artificial Sequence
  Description of Artificial Sequence: Synthetic oligonucleotide
gaagggaccagagucuggu

SEQ ID NO: 1464817 - RNA, 19 nt, Artificial Sequence
  Description of Artificial Sequence: Synthetic oligonucleotide
accgggguugaugguggcc

SEQ ID NO: 1464818 - RNA, 19 nt, Artificial Sequence
  Description of Artificial Sequence: Synthetic oligonucleotide
gguaccagacugguacccg

SEQ ID NO: 1464819 - RNA, 19 nt, Artificial Sequence
  Description of Artificial Sequence: Synthetic oligonucleotide
aggccugaaaacaccucag

SEQ ID NO: 1464820 - RNA, 19 nt, Artificial Sequence
  Description of Artificial Sequence: Synthetic oligonucleotide
guaccagacugguacccga

SEQ ID NO: 1464821 - RNA, 19 nt, Artificial Sequence
  Description of Artificial Sequence: Synthetic oligonucleotide
gccugacaaguccaggacc

SEQ ID NO: 1464822 - RNA, 19 nt, Artificial Sequence
  Description of Artificial Sequence: Synthetic oligonucleotide
ggauaagguugugggaaag

SEQ ID NO: 1464823 - RNA, 19 nt, Artificial Sequence
  Description of Artificial Sequence: Synthetic oligonucleotide
ccguagucgguuauggcug

SEQ ID NO: 1464824 - RNA, 19 nt, Artificial Sequence
  Description of Artificial Sequence: Synthetic oligonucleotide
cuaggccuguagacucugc

SEQ ID NO: 1464825 - RNA, 19 nt, Artificial Sequence
  Description of Artificial Sequence: Synthetic oligonucleotide
gcagauagucgagaccucc

SEQ ID NO: 1464826 - RNA, 19 nt, Artificial Sequence
  Description of Artificial Sequence: Synthetic oligonucleotide
uggccuacacuaacacuuu

SEQ ID NO: 1464827 - RNA, 19 nt, Artificial Sequence
  Description of Artificial Sequence: Synthetic oligonucleotide
aucuuggccuacacuaaca

SEQ ID NO: 1464828 - RNA, 19 nt, Artificial Sequence
  Description of Artificial Sequence: Synthetic oligonucleotide
gacgucacucaaggaggag

SEQ ID NO: 1464829 - RNA, 19 nt, Artificial Sequence
  Description of Artificial Sequence: Synthetic oligonucleotide
ggugcuaacuggaguacac

SEQ ID NO: 1464830 - RNA, 19 nt, Artificial Sequence
  Description of Artificial Sequence: Synthetic oligonucleotide
ggaggagcuggugaaaauc

SEQ ID NO: 1464831 - RNA, 19 nt, Artificial Sequence
  Description of Artificial Sequence: Synthetic oligonucleotide
cugaggucgagcgacucca

SEQ ID NO: 1464832 - RNA, 19 nt, Artificial Sequence
  Description of Artificial Sequence: Synthetic oligonucleotide
ucuagccgguuggaagaca

SEQ ID NO: 1464833 - RNA, 19 nt, Artificial Sequence
  Description of Artificial Sequence: Synthetic oligonucleotide
uggagccgguuccaggcua

SEQ ID NO: 1464834 - RNA, 19 nt, Artificial Sequence
  Description of Artificial Sequence: Synthetic oligonucleotide
aucucagguacggguacca

SEQ ID NO: 1464835 - RNA, 19 nt, Artificial Sequence
  Description of Artificial Sequence: Synthetic oligonucleotide
ccagacugguacccgacag

SEQ ID NO: 1464836 - RNA, 19 nt, Artificial Sequence
  Description of Artificial Sequence: Synthetic oligonucleotide
accuuagggcuggagccag

SEQ ID NO: 1464837 - RNA, 19 nt, Artificial Sequence
  Description of Artificial Sequence: Synthetic oligonucleotide
ugguacccgacaggucuag

SEQ ID NO: 1464838 - RNA, 19 nt, Artificial Sequence
  Description of Artificial Sequence: Synthetic oligonucleotide
aggcacuuagggacaacug

SEQ ID NO: 1464839 - RNA, 19 nt, Artificial Sequence
  Description of Artificial Sequence: Synthetic oligonucleotide
ggccaaaagucucuuccuc

SEQ ID NO: 1464840 - RNA, 19 nt, Artificial Sequence
  Description of Artificial Sequence: Synthetic oligonucleotide
ggaaaggucuacggugcag

SEQ ID NO: 1464841 - RNA, 19 nt, Artificial Sequence
  Description of Artificial Sequence: Synthetic oligonucleotide
gguauagccuggcccugcc

SEQ ID NO: 1464842 - RNA, 19 nt, Artificial Sequence
  Description of Artificial Sequence: Synthetic oligonucleotide
cagguaacgcaggcgggag

SEQ ID NO: 1464843 - RNA, 19 nt, Artificial Sequence
  Description of Artificial Sequence: Synthetic oligonucleotide
gaggccugccauccccaug

SEQ ID NO: 1464844 - RNA, 19 nt, Artificial Sequence
  Description of Artificial Sequence: Synthetic oligonucleotide
augaaagcaccgggguuga

SEQ ID NO: 1464845 - RNA, 19 nt, Artificial Sequence
  Description of Artificial Sequence: Synthetic oligonucleotide
gagcgacuccagguaacgc

SEQ ID NO: 1464846 - RNA, 19 nt, Artificial Sequence
  Description of Artificial Sequence: Synthetic oligonucleotide
cugcaaauuccuggguguc

SEQ ID NO: 1464847 - RNA, 19 nt, Artificial Sequence
  Description of Artificial Sequence: Synthetic oligonucleotide
gagcagauugugacugaga

SEQ ID NO: 1464848 - RNA, 19 nt, Artificial Sequence
  Description of Artificial Sequence: Synthetic oligonucleotide
uuacuggguauaggcccca

SEQ ID NO: 1464849 - RNA, 19 nt, Artificial Sequence
  Description of Artificial Sequence: Synthetic oligonucleotide
gcagauugugacugagauc

SEQ ID NO: 1464850 - RNA, 19 nt, Artificial Sequence
  Description of Artificial Sequence: Synthetic oligonucleotide
cacggucucuagccgguug

SEQ ID NO: 1464851 - RNA, 19 nt, Artificial Sequence
  Description of Artificial Sequence: Synthetic oligonucleotide
agcaucucagguacgggua

SEQ ID NO: 1464852 - RNA, 19 nt, Artificial Sequence
  Description of Artificial Sequence: Synthetic oligonucleotide
aagcaccgggguugauggu

SEQ ID NO: 1464853 - RNA, 19 nt, Artificial Sequence
  Description of Artificial Sequence: Synthetic oligonucleotide
guaacgcaggggaaggucu

SEQ ID NO: 1464854 - RNA, 19 nt, Artificial Sequence
  Description of Artificial Sequence: Synthetic oligonucleotide
cucgagucaggcugaaacu

SEQ ID NO: 1464855 - RNA, 19 nt, Artificial Sequence
  Description of Artificial Sequence: Synthetic oligonucleotide
guaaagcagggaggugaug

SEQ ID NO: 1464856 - RNA, 19 nt, Artificial Sequence
  Description of Artificial Sequence: Synthetic oligonucleotide
acacgcugucgccucggca

SEQ ID NO: 1464857 - RNA, 19 nt, Artificial Sequence
  Description of Artificial Sequence: Synthetic oligonucleotide
uacggguaccagacuggua

SEQ ID NO: 1464858 - RNA, 19 nt, Artificial Sequence
  Description of Artificial Sequence: Synthetic oligonucleotide
gcgacuccagguaacgcag

SEQ ID NO: 1464859 - RNA, 19 nt, Artificial Sequence
  Description of Artificial Sequence: Synthetic oligonucleotide
acgcaggggaaggucucgg

SEQ ID NO: 1464860 - RNA, 19 nt, Artificial Sequence
  Description of Artificial Sequence: Synthetic oligonucleotide
gguaacgcaggggaagguc

SEQ ID NO: 1464861 - RNA, 19 nt, Artificial Sequence
  Description of Artificial Sequence: Synthetic oligonucleotide
gcugaggucgagcgacucc

SEQ ID NO: 1464862 - RNA, 19 nt, Artificial Sequence
  Description of Artificial Sequence: Synthetic oligonucleotide
gucgagcgacuccagguaa

SEQ ID NO: 1464863 - RNA, 19 nt, Artificial Sequence
  Description of Artificial Sequence: Synthetic oligonucleotide
guauaggccccagguacga

SEQ ID NO: 1464864 - RNA, 19 nt, Artificial Sequence
  Description of Artificial Sequence: Synthetic oligonucleotide
agccagguugccgagggua

SEQ ID NO: 1464865 - RNA, 19 nt, Artificial Sequence
  Description of Artificial Sequence: Synthetic oligonucleotide
gugggugaggccugccauc

SEQ ID NO: 1464866 - RNA, 19 nt, Artificial Sequence
  Description of Artificial Sequence: Synthetic oligonucleotide
gugagcagauugugacuga

SEQ ID NO: 1464867 - RNA, 19 nt, Artificial Sequence
  Description of Artificial Sequence: Synthetic oligonucleotide
gcgguggauaagguugugg

SEQ ID NO: 1464868 - RNA, 19 nt, Artificial Sequence
  Description of Artificial Sequence: Synthetic oligonucleotide
cucagguaacgcaggggaa

SEQ ID NO: 1464869 - RNA, 19 nt, Artificial Sequence
  Description of Artificial Sequence: Synthetic oligonucleotide
gcaagcccaggccugaaaa

SEQ ID NO: 1464870 - RNA, 19 nt, Artificial Sequence
  Description of Artificial Sequence: Synthetic oligonucleotide
gccugaaaacaccucagcu

SEQ ID NO: 1464871 - RNA, 19 nt, Artificial Sequence
  Description of Artificial Sequence: Synthetic oligonucleotide
cgagaccucccguagucgg

SEQ ID NO: 1464872 - RNA, 19 nt, Artificial Sequence
  Description of Artificial Sequence: Synthetic oligonucleotide
cagcaucucagguacgggu

SEQ ID NO: 1464873 - RNA, 19 nt, Artificial Sequence
  Description of Artificial Sequence: Synthetic oligonucleotide
ggccuacacuaacacuuug

SEQ ID NO: 1464874 - RNA, 19 nt, Artificial Sequence
  Description of Artificial Sequence: Synthetic oligonucleotide
cucuagccgguuggaagac

SEQ ID NO: 1464875 - RNA, 19 nt, Artificial Sequence
  Description of Artificial Sequence: Synthetic oligonucleotide
gguugugggaaaggucuac

SEQ ID NO: 1464876 - RNA, 19 nt, Artificial Sequence
  Description of Artificial Sequence: Synthetic oligonucleotide
ggucccacacgcugucgcc

SEQ ID NO: 1464877 - RNA, 19 nt, Artificial Sequence
  Description of Artificial Sequence: Synthetic oligonucleotide
caggcuagauucaggcucu

SEQ ID NO: 1464878 - RNA, 19 nt, Artificial Sequence
  Description of Artificial Sequence: Synthetic oligonucleotide
gguaacgcaggcgggagaa

SEQ ID NO: 1464879 - RNA, 19 nt, Artificial Sequence
  Description of Artificial Sequence: Synthetic oligonucleotide
ccuauggccaggagcagca

SEQ ID NO: 1464880 - RNA, 19 nt, Artificial Sequence
  Description of Artificial Sequence: Synthetic oligonucleotide
aagcuaucccuggcccaca

SEQ ID NO: 1464881 - RNA, 19 nt, Artificial Sequence
  Description of Artificial Sequence: Synthetic oligonucleotide
ccuacacuaacacuuugua

SEQ ID NO: 1464882 - RNA, 19 nt, Artificial Sequence
  Description of Artificial Sequence: Synthetic oligonucleotide
guaacgcaggcgggagaag

SEQ ID NO: 1464883 - RNA, 19 nt, Artificial Sequence
  Description of Artificial Sequence: Synthetic oligonucleotide
guauagccuggcccugcca

SEQ ID NO: 1464884 - RNA, 19 nt, Artificial Sequence
  Description of Artificial Sequence: Synthetic oligonucleotide
guagucgguuauggcugag

SEQ ID NO: 1464885 - RNA, 19 nt, Artificial Sequence
  Description of Artificial Sequence: Synthetic oligonucleotide
ggagcgaggcgguggauaa

SEQ ID NO: 1464886 - RNA, 19 nt, Artificial Sequence
  Description of Artificial Sequence: Synthetic oligonucleotide
gguugccgaggguaugcac

SEQ ID NO: 1464887 - RNA, 19 nt, Artificial Sequence
  Description of Artificial Sequence: Synthetic oligonucleotide
cucgggagaucgggcacag

SEQ ID NO: 1464888 - RNA, 19 nt, Artificial Sequence
  Description of Artificial Sequence: Synthetic oligonucleotide
gagcuugggguugccugac

SEQ ID NO: 1464889 - RNA, 19 nt, Artificial Sequence
  Description of Artificial Sequence: Synthetic oligonucleotide
gugguauagccuggcccug

SEQ ID NO: 1464890 - RNA, 19 nt, Artificial Sequence
  Description of Artificial Sequence: Synthetic oligonucleotide
cacacgcugucgccucggc

SEQ ID NO: 1464891 - RNA, 19 nt, Artificial Sequence
  Description of Artificial Sequence: Synthetic oligonucleotide
gguaugcacccucccgcac

SEQ ID NO: 1464892 - RNA, 19 nt, Artificial Sequence
  Description of Artificial Sequence: Synthetic oligonucleotide
gcaccgggguugauggugg

SEQ ID NO: 1464893 - RNA, 19 nt, Artificial Sequence
  Description of Artificial Sequence: Synthetic oligonucleotide
cgacaggucuaguuccugc

SEQ ID NO: 1464894 - RNA, 19 nt, Artificial Sequence
  Description of Artificial Sequence: Synthetic oligonucleotide
agguaacgcaggggaaggu

SEQ ID NO: 1464895 - RNA, 19 nt, Artificial Sequence
  Description of Artificial Sequence: Synthetic oligonucleotide
cacugcacaucuuggccua

SEQ ID NO: 1464896 - RNA, 19 nt, Artificial Sequence
  Description of Artificial Sequence: Synthetic oligonucleotide
gguugacgucacucaagga

SEQ ID NO: 1464897 - RNA, 19 nt, Artificial Sequence
  Description of Artificial Sequence: Synthetic oligonucleotide
accucccguagucgguuau

SEQ ID NO: 1464898 - RNA, 19 nt, Artificial Sequence
  Description of Artificial Sequence: Synthetic oligonucleotide
guacccgacaggucuaguu

SEQ ID NO: 1464899 - RNA, 19 nt, Artificial Sequence
  Description of Artificial Sequence: Synthetic oligonucleotide
gagcgaggcgguggauaag

SEQ ID NO: 1464900 - RNA, 19 nt, Artificial Sequence
  Description of Artificial Sequence: Synthetic oligonucleotide
ggguaugcacccucccgca

SEQ ID NO: 1464901 - RNA, 19 nt, Artificial Sequence
  Description of Artificial Sequence: Synthetic oligonucleotide
cucugccuauggccaggag

SEQ ID NO: 1464902 - RNA, 19 nt, Artificial Sequence
  Description of Artificial Sequence: Synthetic oligonucleotide
cacaguguaggacuaccuu

SEQ ID NO: 1464903 - RNA, 19 nt, Artificial Sequence
  Description of Artificial Sequence: Synthetic oligonucleotide
ccgaggguaugcacccucc

SEQ ID NO: 1464904 - RNA, 19 nt, Artificial Sequence
  Description of Artificial Sequence: Synthetic oligonucleotide
gcuaacuggaguacacucu

SEQ ID NO: 1464905 - RNA, 19 nt, Artificial Sequence
  Description of Artificial Sequence: Synthetic oligonucleotide
acggugcagugcccggccu

SEQ ID NO: 1464906 - RNA, 19 nt, Artificial Sequence
  Description of Artificial Sequence: Synthetic oligonucleotide
ggucgagcgacuccaggua

SEQ ID NO: 1464907 - RNA, 19 nt, Artificial Sequence
  Description of Artificial Sequence: Synthetic oligonucleotide
agaccucccguagucgguu

SEQ ID NO: 1464908 - RNA, 19 nt, Artificial Sequence
  Description of Artificial Sequence: Synthetic oligonucleotide
caccgggguugaugguggc

SEQ ID NO: 1464909 - RNA, 19 nt, Artificial Sequence
  Description of Artificial Sequence: Synthetic oligonucleotide
accuaggccuguagacucu

SEQ ID NO: 1464910 - RNA, 19 nt, Artificial Sequence
  Description of Artificial Sequence: Synthetic oligonucleotide
cuguguccagagggauggg

SEQ ID NO: 1464911 - RNA, 19 nt, Artificial Sequence
  Description of Artificial Sequence: Synthetic oligonucleotide
ggagccgguuccaggcuag

SEQ ID NO: 1464912 - RNA, 19 nt, Artificial Sequence
  Description of Artificial Sequence: Synthetic oligonucleotide
gccccuggcugcaaauucc

SEQ ID NO: 1464913 - RNA, 19 nt, Artificial Sequence
  Description of Artificial Sequence: Synthetic oligonucleotide
gggaaaggucuacggugca

SEQ ID NO: 1464914 - RNA, 19 nt, Artificial Sequence
  Description of Artificial Sequence: Synthetic oligonucleotide
cgagcgacuccagguaacg

SEQ ID NO: 1464915 - RNA, 19 nt, Artificial Sequence
  Description of Artificial Sequence: Synthetic oligonucleotide
cuuagggcuggagccaggu

SEQ ID NO: 1464916 - RNA, 19 nt, Artificial Sequence
  Description of Artificial Sequence: Synthetic oligonucleotide
guacggguaccagacuggu

SEQ ID NO: 1464917 - RNA, 19 nt, Artificial Sequence
  Description of Artificial Sequence: Synthetic oligonucleotide
cccagguacgaaagcuauc

SEQ ID NO: 1464918 - RNA, 19 nt, Artificial Sequence
  Description of Artificial Sequence: Synthetic oligonucleotide
agguugugggaaaggucua

SEQ ID NO: 1464919 - RNA, 19 nt, Artificial Sequence
  Description of Artificial Sequence: Synthetic oligonucleotide
cugguacccgacaggucua

SEQ ID NO: 1464920 - RNA, 19 nt, Artificial Sequence
  Description of Artificial Sequence: Synthetic oligonucleotide
gccgaggguaugcacccuc

SEQ ID NO: 1464921 - RNA, 19 nt, Artificial Sequence
  Description of Artificial Sequence: Synthetic oligonucleotide
gggugcuaacuggaguaca

SEQ ID NO: 1464922 - RNA, 19 nt, Artificial Sequence
  Description of Artificial Sequence: Synthetic oligonucleotide
gcaggucccacacgcuguc

SEQ ID NO: 1464923 - RNA, 19 nt, Artificial Sequence
  Description of Artificial Sequence: Synthetic oligonucleotide
gucgguuauggcugagguu

SEQ ID NO: 1464924 - RNA, 19 nt, Artificial Sequence
  Description of Artificial Sequence: Synthetic oligonucleotide
aggcuagauucaggcucug

SEQ ID NO: 1464925 - RNA, 19 nt, Artificial Sequence
  Description of Artificial Sequence: Synthetic oligonucleotide
agccgguuccaggcuagau

SEQ ID NO: 1464926 - RNA, 19 nt, Artificial Sequence
  Description of Artificial Sequence: Synthetic oligonucleotide
gcuaucccuggcccacaac

SEQ ID NO: 1464927 - RNA, 19 nt, Artificial Sequence
  Description of Artificial Sequence: Synthetic oligonucleotide
gaccucccguagucgguua

SEQ ID NO: 1464928 - RNA, 19 nt, Artificial Sequence
  Description of Artificial Sequence: Synthetic oligonucleotide
gccuacacuaacacuuugu

SEQ ID NO: 1464929 - RNA, 19 nt, Artificial Sequence
  Description of Artificial Sequence: Synthetic oligonucleotide
cccaugaaagcaccggggu

SEQ ID NO: 1464930 - RNA, 19 nt, Artificial Sequence
  Description of Artificial Sequence: Synthetic oligonucleotide
gccgguuggaagacagguc

SEQ ID NO: 1464931 - RNA, 19 nt, Artificial Sequence
  Description of Artificial Sequence: Synthetic oligonucleotide
gcccacaacuuuacugaga

SEQ ID NO: 1464932 - RNA, 19 nt, Artificial Sequence
  Description of Artificial Sequence: Synthetic oligonucleotide
ccuaggccuguagacucug

SEQ ID NO: 1464933 - RNA, 19 nt, Artificial Sequence
  Description of Artificial Sequence: Synthetic oligonucleotide
ucacggucucuagccgguu

SEQ ID NO: 1464934 - RNA, 19 nt, Artificial Sequence
  Description of Artificial Sequence: Synthetic oligonucleotide
ccaacagggaggacaacau

SEQ ID NO: 1464935 - RNA, 19 nt, Artificial Sequence
  Description of Artificial Sequence: Synthetic oligonucleotide
caggucaguccaggcaaaa

SEQ ID NO: 1464936 - RNA, 19 nt, Artificial Sequence
  Description of Artificial Sequence: Synthetic oligonucleotide
ggucuaguuccugcagcaa

SEQ ID NO: 1464937 - RNA, 19 nt, Artificial Sequence
  Description of Artificial Sequence: Synthetic oligonucleotide
gggugaggccugccauccc

SEQ ID NO: 1464938 - RNA, 19 nt, Artificial Sequence
  Description of Artificial Sequence: Synthetic oligonucleotide
cccacacgcugucgccucg

SEQ ID NO: 1464939 - RNA, 19 nt, Artificial Sequence
  Description of Artificial Sequence: Synthetic oligonucleotide
gggagaucgggcacagugu

SEQ ID NO: 1464940 - RNA, 19 nt, Artificial Sequence
  Description of Artificial Sequence: Synthetic oligonucleotide
ggcagauagucgagaccuc

SEQ ID NO: 1464941 - RNA, 19 nt, Artificial Sequence
  Description of Artificial Sequence: Synthetic oligonucleotide
ucgggagaucgggcacagu

SEQ ID NO: 1464942 - RNA, 19 nt, Artificial Sequence
  Description of Artificial Sequence: Synthetic oligonucleotide
ccgaguugucuguccucug

SEQ ID NO: 1464943 - RNA, 19 nt, Artificial Sequence
  Description of Artificial Sequence: Synthetic oligonucleotide
ggucucuagccgguuggaa

SEQ ID NO: 1464944 - RNA, 19 nt, Artificial Sequence
  Description of Artificial Sequence: Synthetic oligonucleotide
ggaagccauggggugcuaa

SEQ ID NO: 1464945 - RNA, 19 nt, Artificial Sequence
  Description of Artificial Sequence: Synthetic oligonucleotide
gagccgguuccaggcuaga

SEQ ID NO: 1464946 - RNA, 19 nt, Artificial Sequence
  Description of Artificial Sequence: Synthetic oligonucleotide
caacuggggcagggcucag

SEQ ID NO: 1464947 - RNA, 19 nt, Artificial Sequence
  Description of Artificial Sequence: Synthetic oligonucleotide
gggaaggucucgggagauc

SEQ ID NO: 1464948 - RNA, 19 nt, Artificial Sequence
  Description of Artificial Sequence: Synthetic oligonucleotide
gccgguuccaggcuagauu

SEQ ID NO: 1464949 - RNA, 19 nt, Artificial Sequence
  Description of Artificial Sequence: Synthetic oligonucleotide
gcacugacucauucacggu

SEQ ID NO: 1464950 - RNA, 19 nt, Artificial Sequence
  Description of Artificial Sequence: Synthetic oligonucleotide
ccagguugccgaggguaug

SEQ ID NO: 1464951 - RNA, 19 nt, Artificial Sequence
  Description of Artificial Sequence: Synthetic oligonucleotide
ggagacaaauggguagauu

SEQ ID NO: 1464952 - RNA, 19 nt, Artificial Sequence
  Description of Artificial Sequence: Synthetic oligonucleotide
augcacccucccgcaccag

SEQ ID NO: 1464953 - RNA, 19 nt, Artificial Sequence
  Description of Artificial Sequence: Synthetic oligonucleotide
ccacacgcugucgccucgg

SEQ ID NO: 1464954 - RNA, 19 nt, Artificial Sequence
  Description of Artificial Sequence: Synthetic oligonucleotide
ccucccguagucgguuaug

SEQ ID NO: 1464955 - RNA, 19 nt, Artificial Sequence
  Description of Artificial Sequence: Synthetic oligonucleotide
ccgacaggucuaguuccug

SEQ ID NO: 1464956 - RNA, 19 nt, Artificial Sequence
  Description of Artificial Sequence: Synthetic oligonucleotide
gggcccaagcugcugcagu

SEQ ID NO: 1464957 - RNA, 19 nt, Artificial Sequence
  Description of Artificial Sequence: Synthetic oligonucleotide
gggguugaugguggccaga

SEQ ID NO: 1464958 - RNA, 19 nt, Artificial Sequence
  Description of Artificial Sequence: Synthetic oligonucleotide
gcgccggcacugcacaucu

SEQ ID NO: 1464959 - RNA, 19 nt, Artificial Sequence
  Description of Artificial Sequence: Synthetic oligonucleotide
cacucgagucaggcugaaa

SEQ ID NO: 1464960 - RNA, 19 nt, Artificial Sequence
  Description of Artificial Sequence: Synthetic oligonucleotide
gggagcucacggaagccau

SEQ ID NO: 1464961 - RNA, 19 nt, Artificial Sequence
  Description of Artificial Sequence: Synthetic oligonucleotide
cagcaccaacagggaggac

SEQ ID NO: 1464962 - RNA, 19 nt, Artificial Sequence
  Description of Artificial Sequence: Synthetic oligonucleotide
ccaugaaagcaccgggguu

SEQ ID NO: 1464963 - RNA, 19 nt, Artificial Sequence
  Description of Artificial Sequence: Synthetic oligonucleotide
cccgacaggucuaguuccu

SEQ ID NO: 1464964 - RNA, 19 nt, Artificial Sequence
  Description of Artificial Sequence: Synthetic oligonucleotide
gguacccgacaggucuagu

SEQ ID NO: 1464965 - RNA, 19 nt, Artificial Sequence
  Description of Artificial Sequence: Synthetic oligonucleotide
gcgaggcgguggauaaggu

SEQ ID NO: 1464966 - RNA, 19 nt, Artificial Sequence
  Description of Artificial Sequence: Synthetic oligonucleotide
cggucucuagccgguugga

SEQ ID NO: 1464967 - RNA, 19 nt, Artificial Sequence
  Description of Artificial Sequence: Synthetic oligonucleotide
ggaugggcacaggcacaau

SEQ ID NO: 1464968 - RNA, 19 nt, Artificial Sequence
  Description of Artificial Sequence: Synthetic oligonucleotide
gggccccuggcugcaaauu

SEQ ID NO: 1464969 - RNA, 19 nt, Artificial Sequence
  Description of Artificial Sequence: Synthetic oligonucleotide
ccacucgagucaggcugaa

SEQ ID NO: 1464970 - RNA, 19 nt, Artificial Sequence
  Description of Artificial Sequence: Synthetic oligonucleotide
cccgcaccaggcgccggca

SEQ ID NO: 1464971 - RNA, 19 nt, Artificial Sequence
  Description of Artificial Sequence: Synthetic oligonucleotide
cgccggcacugcacaucuu

SEQ ID NO: 1464972 - RNA, 19 nt, Artificial Sequence
  Description of Artificial Sequence: Synthetic oligonucleotide
ugaagauuaacugagaugc

SEQ ID NO: 1464973 - RNA, 19 nt, Artificial Sequence
  Description of Artificial Sequence: Synthetic oligonucleotide
augagauggacccugaugc

SEQ ID NO: 1464974 - RNA, 19 nt, Artificial Sequence
  Description of Artificial Sequence: Synthetic oligonucleotide
aauguaugaacuugggagg

SEQ ID NO: 1464975 - RNA, 19 nt, Artificial Sequence
  Description of Artificial Sequence: Synthetic oligonucleotide
caauguaugaacuugggag

SEQ ID NO: 1464976 - RNA, 19 nt, Artificial Sequence
  Description of Artificial Sequence: Synthetic oligonucleotide
auagacacgagcuugcucg

SEQ ID NO: 1464977 - RNA, 19 nt, Artificial Sequence
  Description of Artificial Sequence: Synthetic oligonucleotide
aagcaggucugauauaugc

SEQ ID NO: 1464978 - RNA, 19 nt, Artificial Sequence
  Description of Artificial Sequence: Synthetic oligonucleotide
uuaacuaacccucugacaa

SEQ ID NO: 1464979 - RNA, 19 nt, Artificial Sequence
  Description of Artificial Sequence: Synthetic oligonucleotide
ugugugauuaacaucaaga

SEQ ID NO: 1464980 - RNA, 19 nt, Artificial Sequence
  Description of Artificial Sequence: Synthetic oligonucleotide
aaaagcacauugcaguuuc

SEQ ID NO: 1464981 - RNA, 19 nt, Artificial Sequence
  Description of Artificial Sequence: Synthetic oligonucleotide
aaugacauaaacccgaguu

SEQ ID NO: 1464982 - RNA, 19 nt, Artificial Sequence
  Description of Artificial Sequence: Synthetic oligonucleotide
uaauacuccucucagcugg

SEQ ID NO: 1464983 - RNA, 19 nt, Artificial Sequence
  Description of Artificial Sequence: Synthetic oligonucleotide
ucaacaauaacguaagaaa

SEQ ID NO: 1464984 - RNA, 19 nt, Artificial Sequence
  Description of Artificial Sequence: Synthetic oligonucleotide
uguaagacuuucuugggag

SEQ ID NO: 1464985 - RNA, 19 nt, Artificial Sequence
  Description of Artificial Sequence: Synthetic oligonucleotide
ucugacucaacaauaacgu

SEQ ID NO: 1464986 - RNA, 19 nt, Artificial Sequence
  Description of Artificial Sequence: Synthetic oligonucleotide
aaggaauacacuuccauau

SEQ ID NO: 1464987 - RNA, 19 nt, Artificial Sequence
  Description of Artificial Sequence: Synthetic oligonucleotide
aaugaagauuaacugagau

SEQ ID NO: 1464988 - RNA, 19 nt, Artificial Sequence
  Description of Artificial Sequence: Synthetic oligonucleotide
guuuaagugaguuugagaa

SEQ ID NO: 1464989 - RNA, 19 nt, Artificial Sequence
  Description of Artificial Sequence: Synthetic oligonucleotide
aacagaucgaaagucagag

SEQ ID NO: 1464990 - RNA, 19 nt, Artificial Sequence
  Description of Artificial Sequence: Synthetic oligonucleotide
cucugacucaacaauaacg

SEQ ID NO: 1464991 - RNA, 19 nt, Artificial Sequence
  Description of Artificial Sequence: Synthetic oligonucleotide
ucuuacaagaaucccacac

SEQ ID NO: 1464992 - RNA, 19 nt, Artificial Sequence
  Description of Artificial Sequence: Synthetic oligonucleotide
uaauggguacguaagaacu

SEQ ID NO: 1464993 - RNA, 19 nt, Artificial Sequence
  Description of Artificial Sequence: Synthetic oligonucleotide
ugugauuaacaucaagaga

SEQ ID NO: 1464994 - RNA, 19 nt, Artificial Sequence
  Description of Artificial Sequence: Synthetic oligonucleotide
cuguuuuacucucugacgg

SEQ ID NO: 1464995 - RNA, 19 nt, Artificial Sequence
  Description of Artificial Sequence: Synthetic oligonucleotide
auaucaugccaucucuugc

SEQ ID NO: 1464996 - RNA, 19 nt, Artificial Sequence
  Description of Artificial Sequence: Synthetic oligonucleotide
uacaacaugacaguguuca

SEQ ID NO: 1464997 - RNA, 19 nt, Artificial Sequence
  Description of Artificial Sequence: Synthetic oligonucleotide
uacguaagaacucaguaaa

SEQ ID NO: 1464998 - RNA, 19 nt, Artificial Sequence
  Description of Artificial Sequence: Synthetic oligonucleotide
auaaacccgaguuaaacca

SEQ ID NO: 1464999 - RNA, 19 nt, Artificial Sequence
  Description of Artificial Sequence: Synthetic oligonucleotide
cagaucgaaagucagagag

SEQ ID NO: 1465000 - RNA, 19 nt, Artificial Sequence
  Description of Artificial Sequence: Synthetic oligonucleotide
ugaaucuaaaccuuagauc

SEQ ID NO: 1465001 - RNA, 19 nt, Artificial Sequence
  Description of Artificial Sequence: Synthetic oligonucleotide
ugacucaacaauaacguaa

SEQ ID NO: 1465002 - RNA, 19 nt, Artificial Sequence
  Description of Artificial Sequence: Synthetic oligonucleotide
aacuaacccucugacaacc

SEQ ID NO: 1465003 - RNA, 19 nt, Artificial Sequence
  Description of Artificial Sequence: Synthetic oligonucleotide
uccuuagacgcacacgugg

SEQ ID NO: 1465004 - RNA, 19 nt, Artificial Sequence
  Description of Artificial Sequence: Synthetic oligonucleotide
agggauauacaaguaauac

SEQ ID NO: 1465005 - RNA, 19 nt, Artificial Sequence
  Description of Artificial Sequence: Synthetic oligonucleotide
auugcaagcacagugagca

SEQ ID NO: 1465006 - RNA, 19 nt, Artificial Sequence
  Description of Artificial Sequence: Synthetic oligonucleotide
uguccuuagacgcacacgu

SEQ ID NO: 1465007 - RNA, 19 nt, Artificial Sequence
  Description of Artificial Sequence: Synthetic oligonucleotide
gugauuaacaucaagagaa

SEQ ID NO: 1465008 - RNA, 19 nt, Artificial Sequence
  Description of Artificial Sequence: Synthetic oligonucleotide
uuacaagaaucccacacac

SEQ ID NO: 1465009 - RNA, 19 nt, Artificial Sequence
  Description of Artificial Sequence: Synthetic oligonucleotide
agugaguuugagaagcucc

SEQ ID NO: 1465010 - RNA, 19 nt, Artificial Sequence
  Description of Artificial Sequence: Synthetic oligonucleotide
uuuaagugaguuugagaag

SEQ ID NO: 1465011 - RNA, 19 nt, Artificial Sequence
  Description of Artificial Sequence: Synthetic oligonucleotide
ugucuuacaagaaucccac

SEQ ID NO: 1465012 - RNA, 19 nt, Artificial Sequence
  Description of Artificial Sequence: Synthetic oligonucleotide
cuugcucggaacaggaucg

SEQ ID NO: 1465013 - RNA, 19 nt, Artificial Sequence
  Description of Artificial Sequence: Synthetic oligonucleotide
uuaaugacauaaacccgag

SEQ ID NO: 1465014 - RNA, 19 nt, Artificial Sequence
  Description of Artificial Sequence: Synthetic oligonucleotide
augccaacuguccuuagac

SEQ ID NO: 1465015 - RNA, 19 nt, Artificial Sequence
  Description of Artificial Sequence: Synthetic oligonucleotide
aucgaggggagccagacag

SEQ ID NO: 1465016 - RNA, 19 nt, Artificial Sequence
  Description of Artificial Sequence: Synthetic oligonucleotide
aagcacacgaauccacuuc

SEQ ID NO: 1465017 - RNA, 19 nt, Artificial Sequence
  Description of Artificial Sequence: Synthetic oligonucleotide
acauaaacccgaguuaaac

SEQ ID NO: 1465018 - RNA, 19 nt, Artificial Sequence
  Description of Artificial Sequence: Synthetic oligonucleotide
cucuuaauuucuugaaggc

SEQ ID NO: 1465019 - RNA, 19 nt, Artificial Sequence
  Description of Artificial Sequence: Synthetic oligonucleotide
augaagauuaacugagaug

SEQ ID NO: 1465020 - RNA, 19 nt, Artificial Sequence
  Description of Artificial Sequence: Synthetic oligonucleotide
ugcaauguaugaacuuggg

SEQ ID NO: 1465021 - RNA, 19 nt, Artificial Sequence
  Description of Artificial Sequence: Synthetic oligonucleotide
cucggaacaggaucgaggg

SEQ ID NO: 1465022 - RNA, 19 nt, Artificial Sequence
  Description of Artificial Sequence: Synthetic oligonucleotide
aguuaaaccaaagacaguu

SEQ ID NO: 1465023 - RNA, 19 nt, Artificial Sequence
  Description of Artificial Sequence: Synthetic oligonucleotide
uccuaagcaggucugauau

SEQ ID NO: 1465024 - RNA, 19 nt, Artificial Sequence
  Description of Artificial Sequence: Synthetic oligonucleotide
uucauugugaaaguuucug

SEQ ID NO: 1465025 - RNA, 19 nt, Artificial Sequence
  Description of Artificial Sequence: Synthetic oligonucleotide
aacucaguaaacugacaga

SEQ ID NO: 1465026 - RNA, 19 nt, Artificial Sequence
  Description of Artificial Sequence: Synthetic oligonucleotide
ggauauacaaguaauacuc

SEQ ID NO: 1465027 - RNA, 19 nt, Artificial Sequence
  Description of Artificial Sequence: Synthetic oligonucleotide
ucugccguuaacuaacccu

SEQ ID NO: 1465028 - RNA, 19 nt, Artificial Sequence
  Description of Artificial Sequence: Synthetic oligonucleotide
gauauaugcugucuuacaa

SEQ ID NO: 1465029 - RNA, 19 nt, Artificial Sequence
  Description of Artificial Sequence: Synthetic oligonucleotide
uggauguucccguuaauac

SEQ ID NO: 1465030 - RNA, 19 nt, Artificial Sequence
  Description of Artificial Sequence: Synthetic oligonucleotide
aauggguacguaagaacuc

SEQ ID NO: 1465031 - RNA, 19 nt, Artificial Sequence
  Description of Artificial Sequence: Synthetic oligonucleotide
guguugaacucuuuggggc

SEQ ID NO: 1465032 - RNA, 19 nt, Artificial Sequence
  Description of Artificial Sequence: Synthetic oligonucleotide
uccacuacuagugggcugg

SEQ ID NO: 1465033 - RNA, 19 nt, Artificial Sequence
  Description of Artificial Sequence: Synthetic oligonucleotide
ugugggacauuuucuuagg

SEQ ID NO: 1465034 - RNA, 19 nt, Artificial Sequence
  Description of Artificial Sequence: Synthetic oligonucleotide
agagcaguccucaagugac

SEQ ID NO: 1465035 - RNA, 19 nt, Artificial Sequence
  Description of Artificial Sequence: Synthetic oligonucleotide
uaacguaagaaaccuuuaa

SEQ ID NO: 1465036 - RNA, 19 nt, Artificial Sequence
  Description of Artificial Sequence: Synthetic oligonucleotide
gaccugcuugccuuaaugg

SEQ ID NO: 1465037 - RNA, 19 nt, Artificial Sequence
  Description of Artificial Sequence: Synthetic oligonucleotide
gaagcuccacuacuagugg

SEQ ID NO: 1465038 - RNA, 19 nt, Artificial Sequence
  Description of Artificial Sequence: Synthetic oligonucleotide
uaugaacuugggaggauga

SEQ ID NO: 1465039 - RNA, 19 nt, Artificial Sequence
  Description of Artificial Sequence: Synthetic oligonucleotide
acuccuauggauguucccg

SEQ ID NO: 1465040 - RNA, 19 nt, Artificial Sequence
  Description of Artificial Sequence: Synthetic oligonucleotide
uaaagcacacgaauccacu

SEQ ID NO: 1465041 - RNA, 19 nt, Artificial Sequence
  Description of Artificial Sequence: Synthetic oligonucleotide
uggggcuugaaauucccag

SEQ ID NO: 1465042 - RNA, 19 nt, Artificial Sequence
  Description of Artificial Sequence: Synthetic oligonucleotide
cauaucaugccaucucuug

SEQ ID NO: 1465043 - RNA, 19 nt, Artificial Sequence
  Description of Artificial Sequence: Synthetic oligonucleotide
uggagagcaguccucaagu

SEQ ID NO: 1465044 - RNA, 19 nt, Artificial Sequence
  Description of Artificial Sequence: Synthetic oligonucleotide
uucccguuaauacuccucu

SEQ ID NO: 1465045 - RNA, 19 nt, Artificial Sequence
  Description of Artificial Sequence: Synthetic oligonucleotide
uaacccucugacaaccuug

SEQ ID NO: 1465046 - RNA, 19 nt, Artificial Sequence
  Description of Artificial Sequence: Synthetic oligonucleotide
ugaaaguuucugcacuccu

SEQ ID NO: 1465047 - RNA, 19 nt, Artificial Sequence
  Description of Artificial Sequence: Synthetic oligonucleotide
ugacauaaacccgaguuaa

SEQ ID NO: 1465048 - RNA, 19 nt, Artificial Sequence
  Description of Artificial Sequence: Synthetic oligonucleotide
gauguucccguuaauacuc

SEQ ID NO: 1465049 - RNA, 19 nt, Artificial Sequence
  Description of Artificial Sequence: Synthetic oligonucleotide
uguagacccaugccaacug

SEQ ID NO: 1465050 - RNA, 19 nt, Artificial Sequence
  Description of Artificial Sequence: Synthetic oligonucleotide
agaucucugacucaacaau

SEQ ID NO: 1465051 - RNA, 19 nt, Artificial Sequence
  Description of Artificial Sequence: Synthetic oligonucleotide
cauugugaaaguuucugca

SEQ ID NO: 1465052 - RNA, 19 nt, Artificial Sequence
  Description of Artificial Sequence: Synthetic oligonucleotide
aaucuaaaccuuagaucuc

SEQ ID NO: 1465053 - RNA, 19 nt, Artificial Sequence
  Description of Artificial Sequence: Synthetic oligonucleotide
cgaguuaaaccaaagacag

SEQ ID NO: 1465054 - RNA, 19 nt, Artificial Sequence
  Description of Artificial Sequence: Synthetic oligonucleotide
uucguucuggggccaaagg

SEQ ID NO: 1465055 - RNA, 19 nt, Artificial Sequence
  Description of Artificial Sequence: Synthetic oligonucleotide
agaagcuccacuacuagug

SEQ ID NO: 1465056 - RNA, 19 nt, Artificial Sequence
  Description of Artificial Sequence: Synthetic oligonucleotide
ucugauauaugcugucuua

SEQ ID NO: 1465057 - RNA, 19 nt, Artificial Sequence
  Description of Artificial Sequence: Synthetic oligonucleotide
aagacaguuuaagugaguu

SEQ ID NO: 1465058 - RNA, 19 nt, Artificial Sequence
  Description of Artificial Sequence: Synthetic oligonucleotide
uuaucagguguacaucauc

SEQ ID NO: 1465059 - RNA, 19 nt, Artificial Sequence
  Description of Artificial Sequence: Synthetic oligonucleotide
auuaacaucaagagaagua

SEQ ID NO: 1465060 - RNA, 19 nt, Artificial Sequence
  Description of Artificial Sequence: Synthetic oligonucleotide
acucaguaaacugacagaa

SEQ ID NO: 1465061 - RNA, 19 nt, Artificial Sequence
  Description of Artificial Sequence: Synthetic oligonucleotide
gacuuggguagcaucagag

SEQ ID NO: 1465062 - RNA, 19 nt, Artificial Sequence
  Description of Artificial Sequence: Synthetic oligonucleotide
ucuucucacagaguggcca

SEQ ID NO: 1465063 - RNA, 19 nt, Artificial Sequence
  Description of Artificial Sequence: Synthetic oligonucleotide
uuccauaucaugccaucuc

SEQ ID NO: 1465064 - RNA, 19 nt, Artificial Sequence
  Description of Artificial Sequence: Synthetic oligonucleotide
ucugacgggagccuuggaa

SEQ ID NO: 1465065 - RNA, 19 nt, Artificial Sequence
  Description of Artificial Sequence: Synthetic oligonucleotide
cuuacaagaaucccacaca

SEQ ID NO: 1465066 - RNA, 19 nt, Artificial Sequence
  Description of Artificial Sequence: Synthetic oligonucleotide
acuacuagugggcuggcau

SEQ ID NO: 1465067 - RNA, 19 nt, Artificial Sequence
  Description of Artificial Sequence: Synthetic oligonucleotide
cucagucuggcuucugugc

SEQ ID NO: 1465068 - RNA, 19 nt, Artificial Sequence
  Description of Artificial Sequence: Synthetic oligonucleotide
cacauagacacgagcuugc

SEQ ID NO: 1465069 - RNA, 19 nt, Artificial Sequence
  Description of Artificial Sequence: Synthetic oligonucleotide
cuuggagcgucgacgacgc

SEQ ID NO: 1465070 - RNA, 19 nt, Artificial Sequence
  Description of Artificial Sequence: Synthetic oligonucleotide
ggugcugcaauguaugaac

SEQ ID NO: 1465071 - RNA, 19 nt, Artificial Sequence
  Description of Artificial Sequence: Synthetic oligonucleotide
aggucugauauaugcuguc

SEQ ID NO: 1465072 - RNA, 19 nt, Artificial Sequence
  Description of Artificial Sequence: Synthetic oligonucleotide
uaaacccgaguuaaaccaa

SEQ ID NO: 1465073 - RNA, 19 nt, Artificial Sequence
  Description of Artificial Sequence: Synthetic oligonucleotide
uugagcuggcugcugggag

SEQ ID NO: 1465074 - RNA, 19 nt, Artificial Sequence
  Description of Artificial Sequence: Synthetic oligonucleotide
aggucugccguuaacuaac

SEQ ID NO: 1465075 - RNA, 19 nt, Artificial Sequence
  Description of Artificial Sequence: Synthetic oligonucleotide
ucugacaaccuugcauuag

SEQ ID NO: 1465076 - RNA, 19 nt, Artificial Sequence
  Description of Artificial Sequence: Synthetic oligonucleotide
aucuaaaccuuagaucucu

SEQ ID NO: 1465077 - RNA, 19 nt, Artificial Sequence
  Description of Artificial Sequence: Synthetic oligonucleotide
ugccuuaauggguacguaa

SEQ ID NO: 1465078 - RNA, 19 nt, Artificial Sequence
  Description of Artificial Sequence: Synthetic oligonucleotide
augcugucuuacaagaauc

SEQ ID NO: 1465079 - RNA, 19 nt, Artificial Sequence
  Description of Artificial Sequence: Synthetic oligonucleotide
cugacgggagccuuggaac

SEQ ID NO: 1465080 - RNA, 19 nt, Artificial Sequence
  Description of Artificial Sequence: Synthetic oligonucleotide
agagaaguagaggucucuc

SEQ ID NO: 1465081 - RNA, 19 nt, Artificial Sequence
  Description of Artificial Sequence: Synthetic oligonucleotide
gauggacccugaugcaucc

SEQ ID NO: 1465082 - RNA, 19 nt, Artificial Sequence
  Description of Artificial Sequence: Synthetic oligonucleotide
augacauaaacccgaguua

SEQ ID NO: 1465083 - RNA, 19 nt, Artificial Sequence
  Description of Artificial Sequence: Synthetic oligonucleotide
agagaucacuggcuguaag

SEQ ID NO: 1465084 - RNA, 19 nt, Artificial Sequence
  Description of Artificial Sequence: Synthetic oligonucleotide
auccacauagacacgagcu

SEQ ID NO: 1465085 - RNA, 19 nt, Artificial Sequence
  Description of Artificial Sequence: Synthetic oligonucleotide
cugauauaugcugucuuac

SEQ ID NO: 1465086 - RNA, 19 nt, Artificial Sequence
  Description of Artificial Sequence: Synthetic oligonucleotide
uaagcaggucugauauaug

SEQ ID NO: 1465087 - RNA, 19 nt, Artificial Sequence
  Description of Artificial Sequence: Synthetic oligonucleotide
uggcaucuacaacaugaca

SEQ ID NO: 1465088 - RNA, 19 nt, Artificial Sequence
  Description of Artificial Sequence: Synthetic oligonucleotide
agacuuggagcgucgacga

SEQ ID NO: 1465089 - RNA, 19 nt, Artificial Sequence
  Description of Artificial Sequence: Synthetic oligonucleotide
ugguuuuagguuucauguc

SEQ ID NO: 1465090 - RNA, 19 nt, Artificial Sequence
  Description of Artificial Sequence: Synthetic oligonucleotide
uggguacguaagaacucag

SEQ ID NO: 1465091 - RNA, 19 nt, Artificial Sequence
  Description of Artificial Sequence: Synthetic oligonucleotide
aagagaaguagaggucucu

SEQ ID NO: 1465092 - RNA, 19 nt, Artificial Sequence
  Description of Artificial Sequence: Synthetic oligonucleotide
uaacuaacccucugacaac

SEQ ID NO: 1465093 - RNA, 19 nt, Artificial Sequence
  Description of Artificial Sequence: Synthetic oligonucleotide
ucauuaucagguguacauc

SEQ ID NO: 1465094 - RNA, 19 nt, Artificial Sequence
  Description of Artificial Sequence: Synthetic oligonucleotide
aauacuccucucagcuggg

SEQ ID NO: 1465095 - RNA, 19 nt, Artificial Sequence
  Description of Artificial Sequence: Synthetic oligonucleotide
agugaccuucguucugggg

SEQ ID NO: 1465096 - RNA, 19 nt, Artificial Sequence
  Description of Artificial Sequence: Synthetic oligonucleotide
ucggaacaggaucgagggg

SEQ ID NO: 1465097 - RNA, 19 nt, Artificial Sequence
  Description of Artificial Sequence: Synthetic oligonucleotide
uagacacgagcuugcucgg

SEQ ID NO: 1465098 - RNA, 19 nt, Artificial Sequence
  Description of Artificial Sequence: Synthetic oligonucleotide
ugagauggacccugaugca

SEQ ID NO: 1465099 - RNA, 19 nt, Artificial Sequence
  Description of Artificial Sequence: Synthetic oligonucleotide
uggacccugaugcauccac

SEQ ID NO: 1465100 - RNA, 19 nt, Artificial Sequence
  Description of Artificial Sequence: Synthetic oligonucleotide
cuggcaucuacaacaugac

SEQ ID NO: 1465101 - RNA, 19 nt, Artificial Sequence
  Description of Artificial Sequence: Synthetic oligonucleotide
acaacaugacaguguucag

SEQ ID NO: 1465102 - RNA, 19 nt, Artificial Sequence
  Description of Artificial Sequence: Synthetic oligonucleotide
ugaugcauccacucuuaau

SEQ ID NO: 1465103 - RNA, 19 nt, Artificial Sequence
  Description of Artificial Sequence: Synthetic oligonucleotide
guaugaacuugggaggaug

SEQ ID NO: 1465104 - RNA, 19 nt, Artificial Sequence
  Description of Artificial Sequence: Synthetic oligonucleotide
acguaagaacucaguaaac

SEQ ID NO: 1465105 - RNA, 19 nt, Artificial Sequence
  Description of Artificial Sequence: Synthetic oligonucleotide
acccgaguuaaaccaaaga

SEQ ID NO: 1465106 - RNA, 19 nt, Artificial Sequence
  Description of Artificial Sequence: Synthetic oligonucleotide
uuguagacccaugccaacu

SEQ ID NO: 1465107 - RNA, 19 nt, Artificial Sequence
  Description of Artificial Sequence: Synthetic oligonucleotide
guuucugcacuccuaugga

SEQ ID NO: 1465108 - RNA, 19 nt, Artificial Sequence
  Description of Artificial Sequence: Synthetic oligonucleotide
acgaauccacuucucauua

SEQ ID NO: 1465109 - RNA, 19 nt, Artificial Sequence
  Description of Artificial Sequence: Synthetic oligonucleotide
ugacgggagccuuggaacu

SEQ ID NO: 1465110 - RNA, 19 nt, Artificial Sequence
  Description of Artificial Sequence: Synthetic oligonucleotide
agauggacccugaugcauc

SEQ ID NO: 1465111 - RNA, 19 nt, Artificial Sequence
  Description of Artificial Sequence: Synthetic oligonucleotide
uggagcgucgacgacgcug

SEQ ID NO: 1465112 - RNA, 19 nt, Artificial Sequence
  Description of Artificial Sequence: Synthetic oligonucleotide
cuuaauggguacguaagaa

SEQ ID NO: 1465113 - RNA, 19 nt, Artificial Sequence
  Description of Artificial Sequence: Synthetic oligonucleotide
cguaagaaaccuuuaauga

SEQ ID NO: 1465114 - RNA, 19 nt, Artificial Sequence
  Description of Artificial Sequence: Synthetic oligonucleotide
ucucugacgggagccuugg

SEQ ID NO: 1465115 - RNA, 19 nt, Artificial Sequence
  Description of Artificial Sequence: Synthetic oligonucleotide
acgcacacgugguuuuagg

SEQ ID NO: 1465116 - RNA, 19 nt, Artificial Sequence
  Description of Artificial Sequence: Synthetic oligonucleotide
auggguacguaagaacuca

SEQ ID NO: 1465117 - RNA, 19 nt, Artificial Sequence
  Description of Artificial Sequence: Synthetic oligonucleotide
cuuguagacccaugccaac

SEQ ID NO: 1465118 - RNA, 19 nt, Artificial Sequence
  Description of Artificial Sequence: Synthetic oligonucleotide
cucauuaucagguguacau

SEQ ID NO: 1465119 - RNA, 19 nt, Artificial Sequence
  Description of Artificial Sequence: Synthetic oligonucleotide
gcugcaauguaugaacuug

SEQ ID NO: 1465120 - RNA, 19 nt, Artificial Sequence
  Description of Artificial Sequence: Synthetic oligonucleotide
cugaaucuaaaccuuagau

SEQ ID NO: 1465121 - RNA, 19 nt, Artificial Sequence
  Description of Artificial Sequence: Synthetic oligonucleotide
uucucauuaucagguguac

SEQ ID NO: 1465122 - RNA, 19 nt, Artificial Sequence
  Description of Artificial Sequence: Synthetic oligonucleotide
gggcuugaaauucccagcc

SEQ ID NO: 1465123 - RNA, 19 nt, Artificial Sequence
  Description of Artificial Sequence: Synthetic oligonucleotide
auguaugaacuugggagga

SEQ ID NO: 1465124 - RNA, 19 nt, Artificial Sequence
  Description of Artificial Sequence: Synthetic oligonucleotide
cuucucacagaguggccac

SEQ ID NO: 1465125 - RNA, 19 nt, Artificial Sequence
  Description of Artificial Sequence: Synthetic oligonucleotide
aacccgaguuaaaccaaag

SEQ ID NO: 1465126 - RNA, 19 nt, Artificial Sequence
  Description of Artificial Sequence: Synthetic oligonucleotide
cuacuagugggcuggcauc

SEQ ID NO: 1465127 - RNA, 19 nt, Artificial Sequence
  Description of Artificial Sequence: Synthetic oligonucleotide
cacauccuaagcaggucug

SEQ ID NO: 1465128 - RNA, 19 nt, Artificial Sequence
  Description of Artificial Sequence: Synthetic oligonucleotide
uccucaagugaccuucguu

SEQ ID NO: 1465129 - RNA, 19 nt, Artificial Sequence
  Description of Artificial Sequence: Synthetic oligonucleotide
ccgaguuaaaccaaagaca

SEQ ID NO: 1465130 - RNA, 19 nt, Artificial Sequence
  Description of Artificial Sequence: Synthetic oligonucleotide
uacuagugggcuggcaucu

SEQ ID NO: 1465131 - RNA, 19 nt, Artificial Sequence
  Description of Artificial Sequence: Synthetic oligonucleotide
guaagacuuucuugggaga

SEQ ID NO: 1465132 - RNA, 19 nt, Artificial Sequence
  Description of Artificial Sequence: Synthetic oligonucleotide
uggcuucagauuucauugu

SEQ ID NO: 1465133 - RNA, 19 nt, Artificial Sequence
  Description of Artificial Sequence: Synthetic oligonucleotide
gaugcuguggugcugcaau

SEQ ID NO: 1465134 - RNA, 19 nt, Artificial Sequence
  Description of Artificial Sequence: Synthetic oligonucleotide
agacaguuuaagugaguuu

SEQ ID NO: 1465135 - RNA, 19 nt, Artificial Sequence
  Description of Artificial Sequence: Synthetic oligonucleotide
cuucucauuaucaggugua

SEQ ID NO: 1465136 - RNA, 19 nt, Artificial Sequence
  Description of Artificial Sequence: Synthetic oligonucleotide
agccagacagaguucuggu

SEQ ID NO: 1465137 - RNA, 19 nt, Artificial Sequence
  Description of Artificial Sequence: Synthetic oligonucleotide
ugacaaccuugcauuaguu

SEQ ID NO: 1465138 - RNA, 19 nt, Artificial Sequence
  Description of Artificial Sequence: Synthetic oligonucleotide
gcuugaaauucccagccca

SEQ ID NO: 1465139 - RNA, 19 nt, Artificial Sequence
  Description of Artificial Sequence: Synthetic oligonucleotide
gugaaaguuucugcacucc

SEQ ID NO: 1465140 - RNA, 19 nt, Artificial Sequence
  Description of Artificial Sequence: Synthetic oligonucleotide
guuuuacucucugacggga

SEQ ID NO: 1465141 - RNA, 19 nt, Artificial Sequence
  Description of Artificial Sequence: Synthetic oligonucleotide
cuguaagacuuucuuggga

SEQ ID NO: 1465142 - RNA, 19 nt, Artificial Sequence
  Description of Artificial Sequence: Synthetic oligonucleotide
uguucccguuaauacuccu

SEQ ID NO: 1465143 - RNA, 19 nt, Artificial Sequence
  Description of Artificial Sequence: Synthetic oligonucleotide
ugcacuccuauggauguuc

SEQ ID NO: 1465144 - RNA, 19 nt, Artificial Sequence
  Description of Artificial Sequence: Synthetic oligonucleotide
acgcacauggcuugcccug

SEQ ID NO: 1465145 - RNA, 19 nt, Artificial Sequence
  Description of Artificial Sequence: Synthetic oligonucleotide
gggauauacaaguaauacu

SEQ ID NO: 1465146 - RNA, 19 nt, Artificial Sequence
  Description of Artificial Sequence: Synthetic oligonucleotide
aaacccgaguuaaaccaaa

SEQ ID NO: 1465147 - RNA, 19 nt, Artificial Sequence
  Description of Artificial Sequence: Synthetic oligonucleotide
ggcuucagauuucauugug

SEQ ID NO: 1465148 - RNA, 19 nt, Artificial Sequence
  Description of Artificial Sequence: Synthetic oligonucleotide
cuguccuuagacgcacacg

SEQ ID NO: 1465149 - RNA, 19 nt, Artificial Sequence
  Description of Artificial Sequence: Synthetic oligonucleotide
cuauggauguucccguuaa

SEQ ID NO: 1465150 - RNA, 19 nt, Artificial Sequence
  Description of Artificial Sequence: Synthetic oligonucleotide
uauggauguucccguuaau

SEQ ID NO: 1465151 - RNA, 19 nt, Artificial Sequence
  Description of Artificial Sequence: Synthetic oligonucleotide
caggagacuuggagcgucg

SEQ ID NO: 1465152 - RNA, 19 nt, Artificial Sequence
  Description of Artificial Sequence: Synthetic oligonucleotide
cuagugggcuggcaucuac

SEQ ID NO: 1465153 - RNA, 19 nt, Artificial Sequence
  Description of Artificial Sequence: Synthetic oligonucleotide
aucucugacucaacaauaa

SEQ ID NO: 1465154 - RNA, 19 nt, Artificial Sequence
  Description of Artificial Sequence: Synthetic oligonucleotide
gccuuaauggguacguaag

SEQ ID NO: 1465155 - RNA, 19 nt, Artificial Sequence
  Description of Artificial Sequence: Synthetic oligonucleotide
uugcacuggcacuccuugc

SEQ ID NO: 1465156 - RNA, 19 nt, Artificial Sequence
  Description of Artificial Sequence: Synthetic oligonucleotide
cacuccuauggauguuccc

SEQ ID NO: 1465157 - RNA, 19 nt, Artificial Sequence
  Description of Artificial Sequence: Synthetic oligonucleotide
augacugccccugugugau

SEQ ID NO: 1465158 - RNA, 19 nt, Artificial Sequence
  Description of Artificial Sequence: Synthetic oligonucleotide
gcaauguaugaacuuggga

SEQ ID NO: 1465159 - RNA, 19 nt, Artificial Sequence
  Description of Artificial Sequence: Synthetic oligonucleotide
ugaaggcaguuuguaggcu

SEQ ID NO: 1465160 - RNA, 19 nt, Artificial Sequence
  Description of Artificial Sequence: Synthetic oligonucleotide
auaacguaagaaaccuuua

SEQ ID NO: 1465161 - RNA, 19 nt, Artificial Sequence
  Description of Artificial Sequence: Synthetic oligonucleotide
gacgacgcuggguucucac

SEQ ID NO: 1465162 - RNA, 19 nt, Artificial Sequence
  Description of Artificial Sequence: Synthetic oligonucleotide
gaugccagucuccagucau

SEQ ID NO: 1465163 - RNA, 19 nt, Artificial Sequence
  Description of Artificial Sequence: Synthetic oligonucleotide
gacacgagcuugcucggaa

SEQ ID NO: 1465164 - RNA, 19 nt, Artificial Sequence
  Description of Artificial Sequence: Synthetic oligonucleotide
agacuuucuugggagacuu

SEQ ID NO: 1465165 - RNA, 19 nt, Artificial Sequence
  Description of Artificial Sequence: Synthetic oligonucleotide
uguaggcucuccuccucuc

SEQ ID NO: 1465166 - RNA, 19 nt, Artificial Sequence
  Description of Artificial Sequence: Synthetic oligonucleotide
agcaggucugauauaugcu

SEQ ID NO: 1465167 - RNA, 19 nt, Artificial Sequence
  Description of Artificial Sequence: Synthetic oligonucleotide
gcucggaacaggaucgagg

SEQ ID NO: 1465168 - RNA, 19 nt, Artificial Sequence
  Description of Artificial Sequence: Synthetic oligonucleotide
gacagaguucuggugugca

SEQ ID NO: 1465169 - RNA, 19 nt, Artificial Sequence
  Description of Artificial Sequence: Synthetic oligonucleotide
uguaugaacuugggaggau

SEQ ID NO: 1465170 - RNA, 19 nt, Artificial Sequence
  Description of Artificial Sequence: Synthetic oligonucleotide
gacgcacacgugguuuuag

SEQ ID NO: 1465171 - RNA, 19 nt, Artificial Sequence
  Description of Artificial Sequence: Synthetic oligonucleotide
agcaguccucaagugaccu

SEQ ID NO: 1465172 - RNA, 19 nt, Artificial Sequence
  Description of Artificial Sequence: Synthetic oligonucleotide
cuaagcaggucugauauau

SEQ ID NO: 1465173 - RNA, 19 nt, Artificial Sequence
  Description of Artificial Sequence: Synthetic oligonucleotide
cacuugugccuucuccaac

SEQ ID NO: 1465174 - RNA, 19 nt, Artificial Sequence
  Description of Artificial Sequence: Synthetic oligonucleotide
acgagcuugcucggaacag

SEQ ID NO: 1465175 - RNA, 19 nt, Artificial Sequence
  Description of Artificial Sequence: Synthetic oligonucleotide
auuaucagguguacaucau

SEQ ID NO: 1465176 - RNA, 19 nt, Artificial Sequence
  Description of Artificial Sequence: Synthetic oligonucleotide
ccguuaauacuccucucag

SEQ ID NO: 1465177 - RNA, 19 nt, Artificial Sequence
  Description of Artificial Sequence: Synthetic oligonucleotide
ugcucggaacaggaucgag

SEQ ID NO: 1465178 - RNA, 19 nt, Artificial Sequence
  Description of Artificial Sequence: Synthetic oligonucleotide
gguguacaucaucucugcc

SEQ ID NO: 1465179 - RNA, 19 nt, Artificial Sequence
  Description of Artificial Sequence: Synthetic oligonucleotide
ucgugaagacuuccuugua

SEQ ID NO: 1465180 - RNA, 19 nt, Artificial Sequence
  Description of Artificial Sequence: Synthetic oligonucleotide
uagccugacagguccucaa

SEQ ID NO: 1465181 - RNA, 19 nt, Artificial Sequence
  Description of Artificial Sequence: Synthetic oligonucleotide
uagacgcacacgugguuuu

SEQ ID NO: 1465182 - RNA, 19 nt, Artificial Sequence
  Description of Artificial Sequence: Synthetic oligonucleotide
ucgaggggagccagacaga

SEQ ID NO: 1465183 - RNA, 19 nt, Artificial Sequence
  Description of Artificial Sequence: Synthetic oligonucleotide
cucucugacgggagccuug

SEQ ID NO: 1465184 - RNA, 19 nt, Artificial Sequence
  Description of Artificial Sequence: Synthetic oligonucleotide
cguuaacuaacccucugac

SEQ ID NO: 1465185 - RNA, 19 nt, Artificial Sequence
  Description of Artificial Sequence: Synthetic oligonucleotide
aucgaaagucagagagauc

SEQ ID NO: 1465186 - RNA, 19 nt, Artificial Sequence
  Description of Artificial Sequence: Synthetic oligonucleotide
gucugccguuaacuaaccc

SEQ ID NO: 1465187 - RNA, 19 nt, Artificial Sequence
  Description of Artificial Sequence: Synthetic oligonucleotide
ucccguuaauacuccucuc

SEQ ID NO: 1465188 - RNA, 19 nt, Artificial Sequence
  Description of Artificial Sequence: Synthetic oligonucleotide
ggccaaaggagggacauuc

SEQ ID NO: 1465189 - RNA, 19 nt, Artificial Sequence
  Description of Artificial Sequence: Synthetic oligonucleotide
cuccacuacuagugggcug

SEQ ID NO: 1465190 - RNA, 19 nt, Artificial Sequence
  Description of Artificial Sequence: Synthetic oligonucleotide
agaaucccacacaccccac

SEQ ID NO: 1465191 - RNA, 19 nt, Artificial Sequence
  Description of Artificial Sequence: Synthetic oligonucleotide
acacgugguuuuagguuuc

SEQ ID NO: 1465192 - RNA, 19 nt, Artificial Sequence
  Description of Artificial Sequence: Synthetic oligonucleotide
gacgggagccuuggaacug

SEQ ID NO: 1465193 - RNA, 19 nt, Artificial Sequence
  Description of Artificial Sequence: Synthetic oligonucleotide
acauccuaagcaggucuga

SEQ ID NO: 1465194 - RNA, 19 nt, Artificial Sequence
  Description of Artificial Sequence: Synthetic oligonucleotide
ugcuugccuuaauggguac

SEQ ID NO: 1465195 - RNA, 19 nt, Artificial Sequence
  Description of Artificial Sequence: Synthetic oligonucleotide
gacauaaacccgaguuaaa

SEQ ID NO: 1465196 - RNA, 19 nt, Artificial Sequence
  Description of Artificial Sequence: Synthetic oligonucleotide
guucccguuaauacuccuc

SEQ ID NO: 1465197 - RNA, 19 nt, Artificial Sequence
  Description of Artificial Sequence: Synthetic oligonucleotide
uuugaccugcuugccuuaa

SEQ ID NO: 1465198 - RNA, 19 nt, Artificial Sequence
  Description of Artificial Sequence: Synthetic oligonucleotide
uacucucugacgggagccu

SEQ ID NO: 1465199 - RNA, 19 nt, Artificial Sequence
  Description of Artificial Sequence: Synthetic oligonucleotide
acgacgcuggguucucacu

SEQ ID NO: 1465200 - RNA, 19 nt, Artificial Sequence
  Description of Artificial Sequence: Synthetic oligonucleotide
cugagaugccaagagaagu

SEQ ID NO: 1465201 - RNA, 19 nt, Artificial Sequence
  Description of Artificial Sequence: Synthetic oligonucleotide
cugacucaacaauaacgua

SEQ ID NO: 1465202 - RNA, 19 nt, Artificial Sequence
  Description of Artificial Sequence: Synthetic oligonucleotide
ucggguggcucagucuggc

SEQ ID NO: 1465203 - RNA, 19 nt, Artificial Sequence
  Description of Artificial Sequence: Synthetic oligonucleotide
gauggagagcaguccucaa

SEQ ID NO: 1465204 - RNA, 19 nt, Artificial Sequence
  Description of Artificial Sequence: Synthetic oligonucleotide
cugacaaccuugcauuagu

SEQ ID NO: 1465205 - RNA, 19 nt, Artificial Sequence
  Description of Artificial Sequence: Synthetic oligonucleotide
gguggcucagucuggcuuc

SEQ ID NO: 1465206 - RNA, 19 nt, Artificial Sequence
  Description of Artificial Sequence: Synthetic oligonucleotide
cagaguggccaccaggucu

SEQ ID NO: 1465207 - RNA, 19 nt, Artificial Sequence
  Description of Artificial Sequence: Synthetic oligonucleotide
cacgagcuugcucggaaca

SEQ ID NO: 1465208 - RNA, 19 nt, Artificial Sequence
  Description of Artificial Sequence: Synthetic oligonucleotide
cugcuugccuuaaugggua

SEQ ID NO: 1465209 - RNA, 19 nt, Artificial Sequence
  Description of Artificial Sequence: Synthetic oligonucleotide
acuuccuuguagacccaug

SEQ ID NO: 1465210 - RNA, 19 nt, Artificial Sequence
  Description of Artificial Sequence: Synthetic oligonucleotide
gaacaggaucgaggggagc

SEQ ID NO: 1465211 - RNA, 19 nt, Artificial Sequence
  Description of Artificial Sequence: Synthetic oligonucleotide
cacacgugguuuuagguuu

SEQ ID NO: 1465212 - RNA, 19 nt, Artificial Sequence
  Description of Artificial Sequence: Synthetic oligonucleotide
caggucugccguuaacuaa

SEQ ID NO: 1465213 - RNA, 19 nt, Artificial Sequence
  Description of Artificial Sequence: Synthetic oligonucleotide
ggaacaggaucgaggggag

SEQ ID NO: 1465214 - RNA, 19 nt, Artificial Sequence
  Description of Artificial Sequence: Synthetic oligonucleotide
gacuuggagcgucgacgac

SEQ ID NO: 1465215 - RNA, 19 nt, Artificial Sequence
  Description of Artificial Sequence: Synthetic oligonucleotide
gacccaugccaacuguccu

SEQ ID NO: 1465216 - RNA, 19 nt, Artificial Sequence
  Description of Artificial Sequence: Synthetic oligonucleotide
acaggaucgaggggagcca

SEQ ID NO: 1465217 - RNA, 19 nt, Artificial Sequence
  Description of Artificial Sequence: Synthetic oligonucleotide
gccguuaacuaacccucug

SEQ ID NO: 1465218 - RNA, 19 nt, Artificial Sequence
  Description of Artificial Sequence: Synthetic oligonucleotide
gcuugccuuaauggguacg

SEQ ID NO: 1465219 - RNA, 19 nt, Artificial Sequence
  Description of Artificial Sequence: Synthetic oligonucleotide
cuggcuuagcuuggaaaca

SEQ ID NO: 1465220 - RNA, 19 nt, Artificial Sequence
  Description of Artificial Sequence: Synthetic oligonucleotide
caggaucgaggggagccag

SEQ ID NO: 1465221 - RNA, 19 nt, Artificial Sequence
  Description of Artificial Sequence: Synthetic oligonucleotide
cuugccuuaauggguacgu

SEQ ID NO: 1465222 - RNA, 19 nt, Artificial Sequence
  Description of Artificial Sequence: Synthetic oligonucleotide
gucugauauaugcugucuu

SEQ ID NO: 1465223 - RNA, 19 nt, Artificial Sequence
  Description of Artificial Sequence: Synthetic oligonucleotide
gguagcaucagagggcucu

SEQ ID NO: 1465224 - RNA, 19 nt, Artificial Sequence
  Description of Artificial Sequence: Synthetic oligonucleotide
cccguuaauacuccucuca

SEQ ID NO: 1465225 - RNA, 19 nt, Artificial Sequence
  Description of Artificial Sequence: Synthetic oligonucleotide
gugauggagagcaguccuc

SEQ ID NO: 1465226 - RNA, 19 nt, Artificial Sequence
  Description of Artificial Sequence: Synthetic oligonucleotide
caccccaccgaugccaguc

SEQ ID NO: 1465227 - RNA, 19 nt, Artificial Sequence
  Description of Artificial Sequence: Synthetic oligonucleotide
guccuuagacgcacacgug

SEQ ID NO: 1465228 - RNA, 19 nt, Artificial Sequence
  Description of Artificial Sequence: Synthetic oligonucleotide
ccuuaauggguacguaaga

SEQ ID NO: 1465229 - RNA, 19 nt, Artificial Sequence
  Description of Artificial Sequence: Synthetic oligonucleotide
gucuucucacagaguggcc

SEQ ID NO: 1465230 - RNA, 19 nt, Artificial Sequence
  Description of Artificial Sequence: Synthetic oligonucleotide
acuaacccucugacaaccu

SEQ ID NO: 1465231 - RNA, 19 nt, Artificial Sequence
  Description of Artificial Sequence: Synthetic oligonucleotide
cacgaauccacuucucauu

SEQ ID NO: 1465232 - RNA, 19 nt, Artificial Sequence
  Description of Artificial Sequence: Synthetic oligonucleotide
gaguuaaaccaaagacagu

SEQ ID NO: 1465233 - RNA, 19 nt, Artificial Sequence
  Description of Artificial Sequence: Synthetic oligonucleotide
guagacccaugccaacugu

SEQ ID NO: 1465234 - RNA, 19 nt, Artificial Sequence
  Description of Artificial Sequence: Synthetic oligonucleotide
uugcucggaacaggaucga

SEQ ID NO: 1465235 - RNA, 19 nt, Artificial Sequence
  Description of Artificial Sequence: Synthetic oligonucleotide
uugccuuaauggguacgua

SEQ ID NO: 1465236 - RNA, 19 nt, Artificial Sequence
  Description of Artificial Sequence: Synthetic oligonucleotide
ugcucccggggacccggcc

SEQ ID NO: 1465237 - RNA, 19 nt, Artificial Sequence
  Description of Artificial Sequence: Synthetic oligonucleotide
gacugccccugugugauua

SEQ ID NO: 1465238 - RNA, 19 nt, Artificial Sequence
  Description of Artificial Sequence: Synthetic oligonucleotide
accccaccgaugccagucu

SEQ ID NO: 1465239 - RNA, 19 nt, Artificial Sequence
  Description of Artificial Sequence: Synthetic oligonucleotide
gagauggacccugaugcau

SEQ ID NO: 1465240 - RNA, 19 nt, Artificial Sequence
  Description of Artificial Sequence: Synthetic oligonucleotide
gucggguggcucagucugg

SEQ ID NO: 1465241 - RNA, 19 nt, Artificial Sequence
  Description of Artificial Sequence: Synthetic oligonucleotide
cuccuauggauguucccgu

SEQ ID NO: 1465242 - RNA, 19 nt, Artificial Sequence
  Description of Artificial Sequence: Synthetic oligonucleotide
gagagaucacuggcuguaa

SEQ ID NO: 1465243 - RNA, 19 nt, Artificial Sequence
  Description of Artificial Sequence: Synthetic oligonucleotide
cucuuuggggcuugaaauu

SEQ ID NO: 1465244 - RNA, 19 nt, Artificial Sequence
  Description of Artificial Sequence: Synthetic oligonucleotide
caccgaugccagucuccag

SEQ ID NO: 1465245 - RNA, 19 nt, Artificial Sequence
  Description of Artificial Sequence: Synthetic oligonucleotide
acgggagccuuggaacuga

SEQ ID NO: 1465246 - RNA, 19 nt, Artificial Sequence
  Description of Artificial Sequence: Synthetic oligonucleotide
ggugcucccggggacccgg

SEQ ID NO: 1465247 - RNA, 19 nt, Artificial Sequence
  Description of Artificial Sequence: Synthetic oligonucleotide
cgucggguggcucagucug

SEQ ID NO: 1465248 - RNA, 19 nt, Artificial Sequence
  Description of Artificial Sequence: Synthetic oligonucleotide
agcgucgacgacgcugggu

SEQ ID NO: 1465249 - RNA, 19 nt, Artificial Sequence
  Description of Artificial Sequence: Synthetic oligonucleotide
cuuugaccugcuugccuua

SEQ ID NO: 1465250 - RNA, 19 nt, Artificial Sequence
  Description of Artificial Sequence: Synthetic oligonucleotide
gacccggccccgucggauc

SEQ ID NO: 1465251 - RNA, 19 nt, Artificial Sequence
  Description of Artificial Sequence: Synthetic oligonucleotide
gagcgucgacgacgcuggg

SEQ ID NO: 1465252 - RNA, 19 nt, Artificial Sequence
  Description of Artificial Sequence: Synthetic oligonucleotide
gcagaccugaaaaggaaua

SEQ ID NO: 1465253 - RNA, 19 nt, Artificial Sequence
  Description of Artificial Sequence: Synthetic oligonucleotide
agacacgagcuugcucgga

SEQ ID NO: 1465254 - RNA, 19 nt, Artificial Sequence
  Description of Artificial Sequence: Synthetic oligonucleotide
acugccccugugugauuaa

SEQ ID NO: 1465255 - RNA, 19 nt, Artificial Sequence
  Description of Artificial Sequence: Synthetic oligonucleotide
gcugccgucggguggcuca

SEQ ID NO: 1465256 - RNA, 19 nt, Artificial Sequence
  Description of Artificial Sequence: Synthetic oligonucleotide
cugaugcauccacucuuaa

SEQ ID NO: 1465257 - RNA, 19 nt, Artificial Sequence
  Description of Artificial Sequence: Synthetic oligonucleotide
ggucugccguuaacuaacc

SEQ ID NO: 1465258 - RNA, 19 nt, Artificial Sequence
  Description of Artificial Sequence: Synthetic oligonucleotide
cugccccugugugauuaac

SEQ ID NO: 1465259 - RNA, 19 nt, Artificial Sequence
  Description of Artificial Sequence: Synthetic oligonucleotide
cgacgcuggguucucacug

SEQ ID NO: 1465260 - RNA, 19 nt, Artificial Sequence
  Description of Artificial Sequence: Synthetic oligonucleotide
acauuuucuuagggauaua

SEQ ID NO: 1465261 - RNA, 19 nt, Artificial Sequence
  Description of Artificial Sequence: Synthetic oligonucleotide
cguaagaacucaguaaacu

SEQ ID NO: 1465262 - RNA, 19 nt, Artificial Sequence
  Description of Artificial Sequence: Synthetic oligonucleotide
uuggagcgucgacgacgcu

SEQ ID NO: 1465263 - RNA, 19 nt, Artificial Sequence
  Description of Artificial Sequence: Synthetic oligonucleotide
acgugguuuuagguuucau

SEQ ID NO: 1465264 - RNA, 19 nt, Artificial Sequence
  Description of Artificial Sequence: Synthetic oligonucleotide
gccuacacacgcacauggc

SEQ ID NO: 1465265 - RNA, 19 nt, Artificial Sequence
  Description of Artificial Sequence: Synthetic oligonucleotide
acucucugacgggagccuu

SEQ ID NO: 1465266 - RNA, 19 nt, Artificial Sequence
  Description of Artificial Sequence: Synthetic oligonucleotide
ccgaugccagucuccaguc

SEQ ID NO: 1465267 - RNA, 19 nt, Artificial Sequence
  Description of Artificial Sequence: Synthetic oligonucleotide
cuaacccucugacaaccuu

SEQ ID NO: 1465268 - RNA, 19 nt, Artificial Sequence
  Description of Artificial Sequence: Synthetic oligonucleotide
ucgacgacgcuggguucuc

SEQ ID NO: 1465269 - RNA, 19 nt, Artificial Sequence
  Description of Artificial Sequence: Synthetic oligonucleotide
gucgacgacgcuggguucu

SEQ ID NO: 1465270 - RNA, 19 nt, Artificial Sequence
  Description of Artificial Sequence: Synthetic oligonucleotide
cuuagacgcacacgugguu

SEQ ID NO: 1465271 - RNA, 19 nt, Artificial Sequence
  Description of Artificial Sequence: Synthetic oligonucleotide
aggaucgaggggagccaga

SEQ ID NO: 1465272 - RNA, 19 nt, Artificial Sequence
  Description of Artificial Sequence: Synthetic oligonucleotide
ccugaugcauccacucuua

SEQ ID NO: 1465273 - RNA, 19 nt, Artificial Sequence
  Description of Artificial Sequence: Synthetic oligonucleotide
agacgcacacgugguuuua

SEQ ID NO: 1465274 - RNA, 19 nt, Artificial Sequence
  Description of Artificial Sequence: Synthetic oligonucleotide
cacgugguuuuagguuuca

SEQ ID NO: 1465275 - RNA, 19 nt, Artificial Sequence
  Description of Artificial Sequence: Synthetic oligonucleotide
gaccuucguucuggggcca

SEQ ID NO: 1465276 - RNA, 19 nt, Artificial Sequence
  Description of Artificial Sequence: Synthetic oligonucleotide
ccaggucugccguuaacua

SEQ ID NO: 1465277 - RNA, 19 nt, Artificial Sequence
  Description of Artificial Sequence: Synthetic oligonucleotide
ccuuagacgcacacguggu

SEQ ID NO: 1465278 - RNA, 19 nt, Artificial Sequence
  Description of Artificial Sequence: Synthetic oligonucleotide
cccacacaccccaccgaug

SEQ ID NO: 1465279 - RNA, 19 nt, Artificial Sequence
  Description of Artificial Sequence: Synthetic oligonucleotide
cacuacuagugggcuggca

SEQ ID NO: 1465280 - RNA, 19 nt, Artificial Sequence
  Description of Artificial Sequence: Synthetic oligonucleotide
cauccuaagcaggucugau

SEQ ID NO: 1465281 - RNA, 19 nt, Artificial Sequence
  Description of Artificial Sequence: Synthetic oligonucleotide
ggguacguaagaacucagu

SEQ ID NO: 1465282 - RNA, 19 nt, Artificial Sequence
  Description of Artificial Sequence: Synthetic oligonucleotide
ccacuugugccuucuccaa

SEQ ID NO: 1465283 - RNA, 19 nt, Artificial Sequence
  Description of Artificial Sequence: Synthetic oligonucleotide
gccgucggguggcucaguc

SEQ ID NO: 1465284 - RNA, 19 nt, Artificial Sequence
  Description of Artificial Sequence: Synthetic oligonucleotide
cuggcacuccuugccuaca

SEQ ID NO: 1465285 - RNA, 19 nt, Artificial Sequence
  Description of Artificial Sequence: Synthetic oligonucleotide
ccuugccuacacacgcaca

SEQ ID NO: 1465286 - RNA, 19 nt, Artificial Sequence
  Description of Artificial Sequence: Synthetic oligonucleotide
gggagccuuggaacugaac

SEQ ID NO: 1465287 - RNA, 19 nt, Artificial Sequence
  Description of Artificial Sequence: Synthetic oligonucleotide
cucugacgggagccuugga

SEQ ID NO: 1465288 - RNA, 19 nt, Artificial Sequence
  Description of Artificial Sequence: Synthetic oligonucleotide
gcuccacuacuagugggcu

SEQ ID NO: 1465289 - RNA, 19 nt, Artificial Sequence
  Description of Artificial Sequence: Synthetic oligonucleotide
ugcugccgucggguggcuc

SEQ ID NO: 1465290 - RNA, 19 nt, Artificial Sequence
  Description of Artificial Sequence: Synthetic oligonucleotide
ggcuugcccuggcuuagcu

SEQ ID NO: 1465291 - RNA, 19 nt, Artificial Sequence
  Description of Artificial Sequence: Synthetic oligonucleotide
ggggagccagacagaguuc

SEQ ID NO: 1465292 - RNA, 19 nt, Artificial Sequence
  Description of Artificial Sequence: Synthetic oligonucleotide
ccauaucaugccaucucuu

SEQ ID NO: 1465293 - RNA, 19 nt, Artificial Sequence
  Description of Artificial Sequence: Synthetic oligonucleotide
ggacccugaugcauccacu

SEQ ID NO: 1465294 - RNA, 19 nt, Artificial Sequence
  Description of Artificial Sequence: Synthetic oligonucleotide
ccacuacuagugggcuggc

SEQ ID NO: 1465295 - RNA, 19 nt, Artificial Sequence
  Description of Artificial Sequence: Synthetic oligonucleotide
ccccaccgaugccagucuc

SEQ ID NO: 1465296 - RNA, 19 nt, Artificial Sequence
  Description of Artificial Sequence: Synthetic oligonucleotide
cccaugccaacuguccuua

SEQ ID NO: 1465297 - RNA, 19 nt, Artificial Sequence
  Description of Artificial Sequence: Synthetic oligonucleotide
gcccuggcuuagcuuggaa

SEQ ID NO: 1465298 - RNA, 19 nt, Artificial Sequence
  Description of Artificial Sequence: Synthetic oligonucleotide
cugcacuccuauggauguu

SEQ ID NO: 1465299 - RNA, 19 nt, Artificial Sequence
  Description of Artificial Sequence: Synthetic oligonucleotide
ccgucggguggcucagucu

SEQ ID NO: 1465300 - RNA, 19 nt, Artificial Sequence
  Description of Artificial Sequence: Synthetic oligonucleotide
cgggagccuuggaacugaa

SEQ ID NO: 1465301 - RNA, 19 nt, Artificial Sequence
  Description of Artificial Sequence: Synthetic oligonucleotide
uuucaauucauccaggcug

SEQ ID NO: 1465302 - RNA, 19 nt, Artificial Sequence
  Description of Artificial Sequence: Synthetic oligonucleotide
aagccaagcuaucacgucc

SEQ ID NO: 1465303 - RNA, 19 nt, Artificial Sequence
  Description of Artificial Sequence: Synthetic oligonucleotide
aggagaugcaacuagguuc

SEQ ID NO: 1465304 - RNA, 19 nt, Artificial Sequence
  Description of Artificial Sequence: Synthetic oligonucleotide
gaugcaacuagguuccugg

SEQ ID NO: 1465305 - RNA, 19 nt, Artificial Sequence
  Description of Artificial Sequence: Synthetic oligonucleotide
auagcagcaucucagaucu

SEQ ID NO: 1465306 - RNA, 19 nt, Artificial Sequence
  Description of Artificial Sequence: Synthetic oligonucleotide
aggagaagcccauacgugc

SEQ ID NO: 1465307 - RNA, 19 nt, Artificial Sequence
  Description of Artificial Sequence: Synthetic oligonucleotide
ugcgugugcagccugaccg

SEQ ID NO: 1465308 - RNA, 19 nt, Artificial Sequence
  Description of Artificial Sequence: Synthetic oligonucleotide
gaaaggggcacccucaaag

SEQ ID NO: 1465309 - RNA, 19 nt, Artificial Sequence
  Description of Artificial Sequence: Synthetic oligonucleotide
uauguccuaaccucgaggc

SEQ ID NO: 1465310 - RNA, 19 nt, Artificial Sequence
  Description of Artificial Sequence: Synthetic oligonucleotide
aucuaagaggccuugcagg

SEQ ID NO: 1465311 - RNA, 19 nt, Artificial Sequence
  Description of Artificial Sequence: Synthetic oligonucleotide
ugggcauccauucaucucc

SEQ ID NO: 1465312 - RNA, 19 nt, Artificial Sequence
  Description of Artificial Sequence: Synthetic oligonucleotide
cacaacguccccuacagcc

SEQ ID NO: 1465313 - RNA, 19 nt, Artificial Sequence
  Description of Artificial Sequence: Synthetic oligonucleotide
uugugagacacucugcgug

SEQ ID NO: 1465314 - RNA, 19 nt, Artificial Sequence
  Description of Artificial Sequence: Synthetic oligonucleotide
cauugugagacacucugcg

SEQ ID NO: 1465315 - RNA, 19 nt, Artificial Sequence
  Description of Artificial Sequence: Synthetic oligonucleotide
uucaagcggauuuugggag

SEQ ID NO: 1465316 - RNA, 19 nt, Artificial Sequence
  Description of Artificial Sequence: Synthetic oligonucleotide
agaguagauggagacaggc

SEQ ID NO: 1465317 - RNA, 19 nt, Artificial Sequence
  Description of Artificial Sequence: Synthetic oligonucleotide
aaagccaagcuaucacguc

SEQ ID NO: 1465318 - RNA, 19 nt, Artificial Sequence
  Description of Artificial Sequence: Synthetic oligonucleotide
cucaagugcacagacaccg

SEQ ID NO: 1465319 - RNA, 19 nt, Artificial Sequence
  Description of Artificial Sequence: Synthetic oligonucleotide
auacgugcaauuugguuuc

SEQ ID NO: 1465320 - RNA, 19 nt, Artificial Sequence
  Description of Artificial Sequence: Synthetic oligonucleotide
guaagucugagaugggagg

SEQ ID NO: 1465321 - RNA, 19 nt, Artificial Sequence
  Description of Artificial Sequence: Synthetic oligonucleotide
ucuaagaggccuugcaggc

SEQ ID NO: 1465322 - RNA, 19 nt, Artificial Sequence
  Description of Artificial Sequence: Synthetic oligonucleotide
ucuggaugggaucuugacc

SEQ ID NO: 1465323 - RNA, 19 nt, Artificial Sequence
  Description of Artificial Sequence: Synthetic oligonucleotide
aggaaggugcccuguaccc

SEQ ID NO: 1465324 - RNA, 19 nt, Artificial Sequence
  Description of Artificial Sequence: Synthetic oligonucleotide
gucacaguaggugacauag

SEQ ID NO: 1465325 - RNA, 19 nt, Artificial Sequence
  Description of Artificial Sequence: Synthetic oligonucleotide
gacaccguacauccaaggg

SEQ ID NO: 1465326 - RNA, 19 nt, Artificial Sequence
  Description of Artificial Sequence: Synthetic oligonucleotide
aguggcucuagcugaauag

SEQ ID NO: 1465327 - RNA, 19 nt, Artificial Sequence
  Description of Artificial Sequence: Synthetic oligonucleotide
gggguugucagccagaggc

SEQ ID NO: 1465328 - RNA, 19 nt, Artificial Sequence
  Description of Artificial Sequence: Synthetic oligonucleotide
uucaauucauccaggcugu

SEQ ID NO: 1465329 - RNA, 19 nt, Artificial Sequence
  Description of Artificial Sequence: Synthetic oligonucleotide
uugacgaccuguuccaccc

SEQ ID NO: 1465330 - RNA, 19 nt, Artificial Sequence
  Description of Artificial Sequence: Synthetic oligonucleotide
caagcuaucacgucccaug

SEQ ID NO: 1465331 - RNA, 19 nt, Artificial Sequence
  Description of Artificial Sequence: Synthetic oligonucleotide
cuggaugggaucuugacca

SEQ ID NO: 1465332 - RNA, 19 nt, Artificial Sequence
  Description of Artificial Sequence: Synthetic oligonucleotide
acaagaaaagccaagcuau

SEQ ID NO: 1465333 - RNA, 19 nt, Artificial Sequence
  Description of Artificial Sequence: Synthetic oligonucleotide
gagccaugcacucuggaug

SEQ ID NO: 1465334 - RNA, 19 nt, Artificial Sequence
  Description of Artificial Sequence: Synthetic oligonucleotide
gaugaaggaacggaggcac

SEQ ID NO: 1465335 - RNA, 19 nt, Artificial Sequence
  Description of Artificial Sequence: Synthetic oligonucleotide
  modified_base (16)..(16): a, c, u, g, unknown or other
gagacaggccaaaagngac

SEQ ID NO: 1465336 - RNA, 19 nt, Artificial Sequence
  Description of Artificial Sequence: Synthetic oligonucleotide
ucccauguuugccuugagg

SEQ ID NO: 1465337 - RNA, 19 nt, Artificial Sequence
  Description of Artificial Sequence: Synthetic oligonucleotide
ucaagcggauuuugggagg

SEQ ID NO: 1465338 - RNA, 19 nt, Artificial Sequence
  Description of Artificial Sequence: Synthetic oligonucleotide
aaggaacggaggcacuguc

SEQ ID NO: 1465339 - RNA, 19 nt, Artificial Sequence
  Description of Artificial Sequence: Synthetic oligonucleotide
ggcgguaagucugagaugg

SEQ ID NO: 1465340 - RNA, 19 nt, Artificial Sequence
  Description of Artificial Sequence: Synthetic oligonucleotide
cugguauguccuaaccucg

SEQ ID NO: 1465341 - RNA, 19 nt, Artificial Sequence
  Description of Artificial Sequence: Synthetic oligonucleotide
gauuuugggaggcgguaag

SEQ ID NO: 1465342 - RNA, 19 nt, Artificial Sequence
  Description of Artificial Sequence: Synthetic oligonucleotide
ucucagaucuaagaggccu

SEQ ID NO: 1465343 - RNA, 19 nt, Artificial Sequence
  Description of Artificial Sequence: Synthetic oligonucleotide
aagugcacagacaccguac

SEQ ID NO: 1465344 - RNA, 19 nt, Artificial Sequence
  Description of Artificial Sequence: Synthetic oligonucleotide
guacaaucugcucuccucc

SEQ ID NO: 1465345 - RNA, 19 nt, Artificial Sequence
  Description of Artificial Sequence: Synthetic oligonucleotide
gcaucucagaucuaagagg

SEQ ID NO: 1465346 - RNA, 19 nt, Artificial Sequence
  Description of Artificial Sequence: Synthetic oligonucleotide
gaauggaaugcccgcuggg

SEQ ID NO: 1465347 - RNA, 19 nt, Artificial Sequence
  Description of Artificial Sequence: Synthetic oligonucleotide
ucggcaauccagcaggauc

SEQ ID NO: 1465348 - RNA, 19 nt, Artificial Sequence
  Description of Artificial Sequence: Synthetic oligonucleotide
agccgguggggcuucaagc

SEQ ID NO: 1465349 - RNA, 19 nt, Artificial Sequence
  Description of Artificial Sequence: Synthetic oligonucleotide
cacacagacucacugguac

SEQ ID NO: 1465350 - RNA, 19 nt, Artificial Sequence
  Description of Artificial Sequence: Synthetic oligonucleotide
aagcuaucacgucccaugu

SEQ ID NO: 1465351 - RNA, 19 nt, Artificial Sequence
  Description of Artificial Sequence: Synthetic oligonucleotide
acacucugcgugugcagcc

SEQ ID NO: 1465352 - RNA, 19 nt, Artificial Sequence
  Description of Artificial Sequence: Synthetic oligonucleotide
auguccuaaccucgaggcc

SEQ ID NO: 1465353 - RNA, 19 nt, Artificial Sequence
  Description of Artificial Sequence: Synthetic oligonucleotide
ucuggcgagugucagcaga

SEQ ID NO: 1465354 - RNA, 19 nt, Artificial Sequence
  Description of Artificial Sequence: Synthetic oligonucleotide
uggcucuagcugaauagcc

SEQ ID NO: 1465355 - RNA, 19 nt, Artificial Sequence
  Description of Artificial Sequence: Synthetic oligonucleotide
aucacgucccauguuugcc

SEQ ID NO: 1465356 - RNA, 19 nt, Artificial Sequence
  Description of Artificial Sequence: Synthetic oligonucleotide
gcuucaagcggauuuuggg

SEQ ID NO: 1465357 - RNA, 19 nt, Artificial Sequence
  Description of Artificial Sequence: Synthetic oligonucleotide
aauggaaugcccgcugggu

SEQ ID NO: 1465358 - RNA, 19 nt, Artificial Sequence
  Description of Artificial Sequence: Synthetic oligonucleotide
ugugcagccugaccgugag

SEQ ID NO: 1465359 - RNA, 19 nt, Artificial Sequence
  Description of Artificial Sequence: Synthetic oligonucleotide
agacaccguacauccaagg

SEQ ID NO: 1465360 - RNA, 19 nt, Artificial Sequence
  Description of Artificial Sequence: Synthetic oligonucleotide
cagaagacaaguccuccag

SEQ ID NO: 1465361 - RNA, 19 nt, Artificial Sequence
  Description of Artificial Sequence: Synthetic oligonucleotide
acagacaccguacauccaa

SEQ ID NO: 1465362 - RNA, 19 nt, Artificial Sequence
  Description of Artificial Sequence: Synthetic oligonucleotide
ugaaccagaugauuucaau

SEQ ID NO: 1465363 - RNA, 19 nt, Artificial Sequence
  Description of Artificial Sequence: Synthetic oligonucleotide
ugucuggcgagugucagca

SEQ ID NO: 1465364 - RNA, 19 nt, Artificial Sequence
  Description of Artificial Sequence: Synthetic oligonucleotide
aaggagaagcccauacgug

SEQ ID NO: 1465365 - RNA, 19 nt, Artificial Sequence
  Description of Artificial Sequence: Synthetic oligonucleotide
uaucacgucccauguuugc

SEQ ID NO: 1465366 - RNA, 19 nt, Artificial Sequence
  Description of Artificial Sequence: Synthetic oligonucleotide
ugucacuucugaaccagau

SEQ ID NO: 1465367 - RNA, 19 nt, Artificial Sequence
  Description of Artificial Sequence: Synthetic oligonucleotide
cagucgacaagaaaagcca

SEQ ID NO: 1465368 - RNA, 19 nt, Artificial Sequence
  Description of Artificial Sequence: Synthetic oligonucleotide
acauugugagacacucugc

SEQ ID NO: 1465369 - RNA, 19 nt, Artificial Sequence
  Description of Artificial Sequence: Synthetic oligonucleotide
cauucuguagagacuucug

SEQ ID NO: 1465370 - RNA, 19 nt, Artificial Sequence
  Description of Artificial Sequence: Synthetic oligonucleotide
agggcagucgacaagaaaa

SEQ ID NO: 1465371 - RNA, 19 nt, Artificial Sequence
  Description of Artificial Sequence: Synthetic oligonucleotide
uuugguuuccucaggccuu

SEQ ID NO: 1465372 - RNA, 19 nt, Artificial Sequence
  Description of Artificial Sequence: Synthetic oligonucleotide
cagucacacauugugagac

SEQ ID NO: 1465373 - RNA, 19 nt, Artificial Sequence
  Description of Artificial Sequence: Synthetic oligonucleotide
cuucaagcggauuuuggga

SEQ ID NO: 1465374 - RNA, 19 nt, Artificial Sequence
  Description of Artificial Sequence: Synthetic oligonucleotide
ggagaugcaacuagguucc

SEQ ID NO: 1465375 - RNA, 19 nt, Artificial Sequence
  Description of Artificial Sequence: Synthetic oligonucleotide
auugugagacacucugcgu

SEQ ID NO: 1465376 - RNA, 19 nt, Artificial Sequence
  Description of Artificial Sequence: Synthetic oligonucleotide
cuggccaugacaguugaug

SEQ ID NO: 1465377 - RNA, 19 nt, Artificial Sequence
  Description of Artificial Sequence: Synthetic oligonucleotide
gucagcagaagaugaagga

SEQ ID NO: 1465378 - RNA, 19 nt, Artificial Sequence
  Description of Artificial Sequence: Synthetic oligonucleotide
gaagguagaggugguauga

SEQ ID NO: 1465379 - RNA, 19 nt, Artificial Sequence
  Description of Artificial Sequence: Synthetic oligonucleotide
gguagaggugguaugagug

SEQ ID NO: 1465380 - RNA, 19 nt, Artificial Sequence
  Description of Artificial Sequence: Synthetic oligonucleotide
gaggcgguaagucugagau

SEQ ID NO: 1465381 - RNA, 19 nt, Artificial Sequence
  Description of Artificial Sequence: Synthetic oligonucleotide
aggaucccagcgaagcugc

SEQ ID NO: 1465382 - RNA, 19 nt, Artificial Sequence
  Description of Artificial Sequence: Synthetic oligonucleotide
gaguagauggagacaggcc

SEQ ID NO: 1465383 - RNA, 19 nt, Artificial Sequence
  Description of Artificial Sequence: Synthetic oligonucleotide
agccaagcuaucacguccc

SEQ ID NO: 1465384 - RNA, 19 nt, Artificial Sequence
  Description of Artificial Sequence: Synthetic oligonucleotide
ugcaucacuucuccaguuc

SEQ ID NO: 1465385 - RNA, 19 nt, Artificial Sequence
  Description of Artificial Sequence: Synthetic oligonucleotide
gacauagcagcaucucaga

SEQ ID NO: 1465386 - RNA, 19 nt, Artificial Sequence
  Description of Artificial Sequence: Synthetic oligonucleotide
agcccauacgugcaauuug

SEQ ID NO: 1465387 - RNA, 19 nt, Artificial Sequence
  Description of Artificial Sequence: Synthetic oligonucleotide
ugguauguccuaaccucga

SEQ ID NO: 1465388 - RNA, 19 nt, Artificial Sequence
  Description of Artificial Sequence: Synthetic oligonucleotide
aaugcccgcuggguggucg

SEQ ID NO: 1465389 - RNA, 19 nt, Artificial Sequence
  Description of Artificial Sequence: Synthetic oligonucleotide
gagcugguauguccuaacc

SEQ ID NO: 1465390 - RNA, 19 nt, Artificial Sequence
  Description of Artificial Sequence: Synthetic oligonucleotide
gcagucgacaagaaaagcc

SEQ ID NO: 1465391 - RNA, 19 nt, Artificial Sequence
  Description of Artificial Sequence: Synthetic oligonucleotide
gugcaauuugguuuccuca

SEQ ID NO: 1465392 - RNA, 19 nt, Artificial Sequence
  Description of Artificial Sequence: Synthetic oligonucleotide
cauacgugcaauuugguuu

SEQ ID NO: 1465393 - RNA, 19 nt, Artificial Sequence
  Description of Artificial Sequence: Synthetic oligonucleotide
  modified_base (11)..(11): a, c, u, g, unknown or other
aggccaaaagngaccagac

SEQ ID NO: 1465394 - RNA, 19 nt, Artificial Sequence
  Description of Artificial Sequence: Synthetic oligonucleotide
cuaucacgucccauguuug

SEQ ID NO: 1465395 - RNA, 19 nt, Artificial Sequence
  Description of Artificial Sequence: Synthetic oligonucleotide
  modified_base (14)..(14): a, c, u, g, unknown or other
uaaccucgaggccnguuuu

SEQ ID NO: 1465396 - RNA, 19 nt, Artificial Sequence
  Description of Artificial Sequence: Synthetic oligonucleotide
ucagaucuaagaggccuug

SEQ ID NO: 1465397 - RNA, 19 nt, Artificial Sequence
  Description of Artificial Sequence: Synthetic oligonucleotide
gaaggugcccuguacccca

SEQ ID NO: 1465398 - RNA, 19 nt, Artificial Sequence
  Description of Artificial Sequence: Synthetic oligonucleotide
acacaacguccccuacagc

SEQ ID NO: 1465399 - RNA, 19 nt, Artificial Sequence
  Description of Artificial Sequence: Synthetic oligonucleotide
ucacgucccauguuugccu

SEQ ID NO: 1465400 - RNA, 19 nt, Artificial Sequence
  Description of Artificial Sequence: Synthetic oligonucleotide
gaugacagagggguuguca

SEQ ID NO: 1465401 - RNA, 19 nt, Artificial Sequence
  Description of Artificial Sequence: Synthetic oligonucleotide
uccccgucacaguagguga

SEQ ID NO: 1465402 - RNA, 19 nt, Artificial Sequence
  Description of Artificial Sequence: Synthetic oligonucleotide
cuggcucaagugcacagac

SEQ ID NO: 1465403 - RNA, 19 nt, Artificial Sequence
  Description of Artificial Sequence: Synthetic oligonucleotide
ggaauggaaugcccgcugg

SEQ ID NO: 1465404 - RNA, 19 nt, Artificial Sequence
  Description of Artificial Sequence: Synthetic oligonucleotide
agcggauuuugggaggcgg

SEQ ID NO: 1465405 - RNA, 19 nt, Artificial Sequence
  Description of Artificial Sequence: Synthetic oligonucleotide
ucaccggaacuuccagaag

SEQ ID NO: 1465406 - RNA, 19 nt, Artificial Sequence
  Description of Artificial Sequence: Synthetic oligonucleotide
aucccagcgaagcugcgcu

SEQ ID NO: 1465407 - RNA, 19 nt, Artificial Sequence
  Description of Artificial Sequence: Synthetic oligonucleotide
ucccucgcuaccucuaagu

SEQ ID NO: 1465408 - RNA, 19 nt, Artificial Sequence
  Description of Artificial Sequence: Synthetic oligonucleotide
gacacucugcgugugcagc

SEQ ID NO: 1465409 - RNA, 19 nt, Artificial Sequence
  Description of Artificial Sequence: Synthetic oligonucleotide
gugacauagcagcaucuca

SEQ ID NO: 1465410 - RNA, 19 nt, Artificial Sequence
  Description of Artificial Sequence: Synthetic oligonucleotide
uggacgagucagcuucagc

SEQ ID NO: 1465411 - RNA, 19 nt, Artificial Sequence
  Description of Artificial Sequence: Synthetic oligonucleotide
accggaacuuccagaagac

SEQ ID NO: 1465412 - RNA, 19 nt, Artificial Sequence
  Description of Artificial Sequence: Synthetic oligonucleotide
ucaagugcacagacaccgu

SEQ ID NO: 1465413 - RNA, 19 nt, Artificial Sequence
  Description of Artificial Sequence: Synthetic oligonucleotide
cucgcuaccucuaaguccu

SEQ ID NO: 1465414 - RNA, 19 nt, Artificial Sequence
  Description of Artificial Sequence: Synthetic oligonucleotide
gacgaccuguuccacccgc

SEQ ID NO: 1465415 - RNA, 19 nt, Artificial Sequence
  Description of Artificial Sequence: Synthetic oligonucleotide
gcaacuagguuccuggcuc

SEQ ID NO: 1465416 - RNA, 19 nt, Artificial Sequence
  Description of Artificial Sequence: Synthetic oligonucleotide
gguacaaucugcucuccuc

SEQ ID NO: 1465417 - RNA, 19 nt, Artificial Sequence
  Description of Artificial Sequence: Synthetic oligonucleotide
caccggaacuuccagaaga

SEQ ID NO: 1465418 - RNA, 19 nt, Artificial Sequence
  Description of Artificial Sequence: Synthetic oligonucleotide
aggugguaugagugguggg

SEQ ID NO: 1465419 - RNA, 19 nt, Artificial Sequence
  Description of Artificial Sequence: Synthetic oligonucleotide
gagcaggcgagcuggccag

SEQ ID NO: 1465420 - RNA, 19 nt, Artificial Sequence
  Description of Artificial Sequence: Synthetic oligonucleotide
gaaccagaugauuucaauu

SEQ ID NO: 1465421 - RNA, 19 nt, Artificial Sequence
  Description of Artificial Sequence: Synthetic oligonucleotide
agguguuccucagccauag

SEQ ID NO: 1465422 - RNA, 19 nt, Artificial Sequence
  Description of Artificial Sequence: Synthetic oligonucleotide
ccuguacaaaggcucaugc

SEQ ID NO: 1465423 - RNA, 19 nt, Artificial Sequence
  Description of Artificial Sequence: Synthetic oligonucleotide
aucucagaucuaagaggcc

SEQ ID NO: 1465424 - RNA, 19 nt, Artificial Sequence
  Description of Artificial Sequence: Synthetic oligonucleotide
agcugaauagccagggcca

SEQ ID NO: 1465425 - RNA, 19 nt, Artificial Sequence
  Description of Artificial Sequence: Synthetic oligonucleotide
cucgccgcagcucacggug

SEQ ID NO: 1465426 - RNA, 19 nt, Artificial Sequence
  Description of Artificial Sequence: Synthetic oligonucleotide
  modified_base (9)..(9): a, c, u, g, unknown or other
ucgaggccnguuuucaguu

SEQ ID NO: 1465427 - RNA, 19 nt, Artificial Sequence
  Description of Artificial Sequence: Synthetic oligonucleotide
  modified_base (13)..(13): a, c, u, g, unknown or other
aaccucgaggccnguuuuc

SEQ ID NO: 1465428 - RNA, 19 nt, Artificial Sequence
  Description of Artificial Sequence: Synthetic oligonucleotide
ggaacggaggcacugucac

SEQ ID NO: 1465429 - RNA, 19 nt, Artificial Sequence
  Description of Artificial Sequence: Synthetic oligonucleotide
uaccagcucagcccuguac

SEQ ID NO: 1465430 - RNA, 19 nt, Artificial Sequence
  Description of Artificial Sequence: Synthetic oligonucleotide
uuucggcaauccagcagga

SEQ ID NO: 1465431 - RNA, 19 nt, Artificial Sequence
  Description of Artificial Sequence: Synthetic oligonucleotide
  modified_base (7)..(7): a, c, u, g, unknown or other
gaggccnguuuucaguucu

SEQ ID NO: 1465432 - RNA, 19 nt, Artificial Sequence
  Description of Artificial Sequence: Synthetic oligonucleotide
gucaccagaugacaggucu

SEQ ID NO: 1465433 - RNA, 19 nt, Artificial Sequence
  Description of Artificial Sequence: Synthetic oligonucleotide
agaugacaggucuccugug

SEQ ID NO: 1465434 - RNA, 19 nt, Artificial Sequence
  Description of Artificial Sequence: Synthetic oligonucleotide
cacggagccaugcacucug

SEQ ID NO: 1465435 - RNA, 19 nt, Artificial Sequence
  Description of Artificial Sequence: Synthetic oligonucleotide
ucaccagaugacaggucuc

SEQ ID NO: 1465436 - RNA, 19 nt, Artificial Sequence
  Description of Artificial Sequence: Synthetic oligonucleotide
cagacaccguacauccaag

SEQ ID NO: 1465437 - RNA, 19 nt, Artificial Sequence
  Description of Artificial Sequence: Synthetic oligonucleotide
guggcucuagcugaauagc

SEQ ID NO: 1465438 - RNA, 19 nt, Artificial Sequence
  Description of Artificial Sequence: Synthetic oligonucleotide
uacaaaggcucaugcucuc

SEQ ID NO: 1465439 - RNA, 19 nt, Artificial Sequence
  Description of Artificial Sequence: Synthetic oligonucleotide
caagcggauuuugggaggc

SEQ ID NO: 1465440 - RNA, 19 nt, Artificial Sequence
  Description of Artificial Sequence: Synthetic oligonucleotide
gaacggaggcacugucacc

SEQ ID NO: 1465441 - RNA, 19 nt, Artificial Sequence
  Description of Artificial Sequence: Synthetic oligonucleotide
uggcucaagugcacagaca

SEQ ID NO: 1465442 - RNA, 19 nt, Artificial Sequence
  Description of Artificial Sequence: Synthetic oligonucleotide
cauccauucaucuccugua

SEQ ID NO: 1465443 - RNA, 19 nt, Artificial Sequence
  Description of Artificial Sequence: Synthetic oligonucleotide
gaauguggaggagaugcaa

SEQ ID NO: 1465444 - RNA, 19 nt, Artificial Sequence
  Description of Artificial Sequence: Synthetic oligonucleotide
gguauguccuaaccucgag

SEQ ID NO: 1465445 - RNA, 19 nt, Artificial Sequence
  Description of Artificial Sequence: Synthetic oligonucleotide
uguaccagcucagcccugu

SEQ ID NO: 1465446 - RNA, 19 nt, Artificial Sequence
  Description of Artificial Sequence: Synthetic oligonucleotide
ucuccugugucuggagaug

SEQ ID NO: 1465447 - RNA, 19 nt, Artificial Sequence
  Description of Artificial Sequence: Synthetic oligonucleotide
uggucgggucaccaccacc

SEQ ID NO: 1465448 - RNA, 19 nt, Artificial Sequence
  Description of Artificial Sequence: Synthetic oligonucleotide
ggacgagucagcuucagcu

SEQ ID NO: 1465449 - RNA, 19 nt, Artificial Sequence
  Description of Artificial Sequence: Synthetic oligonucleotide
gcccauacgugcaauuugg

SEQ ID NO: 1465450 - RNA, 19 nt, Artificial Sequence
  Description of Artificial Sequence: Synthetic oligonucleotide
  modified_base (4)..(4): a, c, u, g, unknown or other
gccnguuuucaguucugcc

SEQ ID NO: 1465451 - RNA, 19 nt, Artificial Sequence
  Description of Artificial Sequence: Synthetic oligonucleotide
aagcccauacgugcaauuu

SEQ ID NO: 1465452 - RNA, 19 nt, Artificial Sequence
  Description of Artificial Sequence: Synthetic oligonucleotide
uuccucagccauagugggu

SEQ ID NO: 1465453 - RNA, 19 nt, Artificial Sequence
  Description of Artificial Sequence: Synthetic oligonucleotide
gggacccgugcuuugagug

SEQ ID NO: 1465454 - RNA, 19 nt, Artificial Sequence
  Description of Artificial Sequence: Synthetic oligonucleotide
ggaggcugauccuucucag

SEQ ID NO: 1465455 - RNA, 19 nt, Artificial Sequence
  Description of Artificial Sequence: Synthetic oligonucleotide
ccucgcuaccucuaagucc

SEQ ID NO: 1465456 - RNA, 19 nt, Artificial Sequence
  Description of Artificial Sequence: Synthetic oligonucleotide
aagcggauuuugggaggcg

SEQ ID NO: 1465457 - RNA, 19 nt, Artificial Sequence
  Description of Artificial Sequence: Synthetic oligonucleotide
gaagcugcgcucgccgcag

SEQ ID NO: 1465458 - RNA, 19 nt, Artificial Sequence
  Description of Artificial Sequence: Synthetic oligonucleotide
agaugcaacuagguuccug

SEQ ID NO: 1465459 - RNA, 19 nt, Artificial Sequence
  Description of Artificial Sequence: Synthetic oligonucleotide
guccccuacagccaccguc

SEQ ID NO: 1465460 - RNA, 19 nt, Artificial Sequence
  Description of Artificial Sequence: Synthetic oligonucleotide
caccgguaaccgcagccgg

SEQ ID NO: 1465461 - RNA, 19 nt, Artificial Sequence
  Description of Artificial Sequence: Synthetic oligonucleotide
  modified_base (9)..(9): a, c, u, g, unknown or other
gccaaaagngaccagacuu

SEQ ID NO: 1465462 - RNA, 19 nt, Artificial Sequence
  Description of Artificial Sequence: Synthetic oligonucleotide
acccucaaaguaggguggg

SEQ ID NO: 1465463 - RNA, 19 nt, Artificial Sequence
  Description of Artificial Sequence: Synthetic oligonucleotide
caccguacauccaagggcu

SEQ ID NO: 1465464 - RNA, 19 nt, Artificial Sequence
  Description of Artificial Sequence: Synthetic oligonucleotide
uccacccgcaccgguaacc

SEQ ID NO: 1465465 - RNA, 19 nt, Artificial Sequence
  Description of Artificial Sequence: Synthetic oligonucleotide
ggacccgugcuuugagugg

SEQ ID NO: 1465466 - RNA, 19 nt, Artificial Sequence
  Description of Artificial Sequence: Synthetic oligonucleotide
ggucgggucaccaccaccc

SEQ ID NO: 1465467 - RNA, 19 nt, Artificial Sequence
  Description of Artificial Sequence: Synthetic oligonucleotide
gcagaagaugaaggaacgg

SEQ ID NO: 1465468 - RNA, 19 nt, Artificial Sequence
  Description of Artificial Sequence: Synthetic oligonucleotide
ugaccaccagccgcgcccg

SEQ ID NO: 1465469 - RNA, 19 nt, Artificial Sequence
  Description of Artificial Sequence: Synthetic oligonucleotide
gagucagcuucagcuuggg

SEQ ID NO: 1465470 - RNA, 19 nt, Artificial Sequence
  Description of Artificial Sequence: Synthetic oligonucleotide
cggcaauccagcaggaucc

SEQ ID NO: 1465471 - RNA, 19 nt, Artificial Sequence
  Description of Artificial Sequence: Synthetic oligonucleotide
cugucuggcgagugucagc

SEQ ID NO: 1465472 - RNA, 19 nt, Artificial Sequence
  Description of Artificial Sequence: Synthetic oligonucleotide
gaugggaucuugaccaccu

SEQ ID NO: 1465473 - RNA, 19 nt, Artificial Sequence
  Description of Artificial Sequence: Synthetic oligonucleotide
uggaugggaucuugaccac

SEQ ID NO: 1465474 - RNA, 19 nt, Artificial Sequence
  Description of Artificial Sequence: Synthetic oligonucleotide
aucccucgcuaccucuaag

SEQ ID NO: 1465475 - RNA, 19 nt, Artificial Sequence
  Description of Artificial Sequence: Synthetic oligonucleotide
cagaucuaagaggccuugc

SEQ ID NO: 1465476 - RNA, 19 nt, Artificial Sequence
  Description of Artificial Sequence: Synthetic oligonucleotide
aggcgguaagucugagaug

SEQ ID NO: 1465477 - RNA, 19 nt, Artificial Sequence
  Description of Artificial Sequence: Synthetic oligonucleotide
guaccccacacaacguccc

SEQ ID NO: 1465478 - RNA, 19 nt, Artificial Sequence
  Description of Artificial Sequence: Synthetic oligonucleotide
gggaauggaaugcccgcug

SEQ ID NO: 1465479 - RNA, 19 nt, Artificial Sequence
  Description of Artificial Sequence: Synthetic oligonucleotide
  modified_base (10)..(10): a, c, u, g, unknown or other
cucgaggccnguuuucagu

SEQ ID NO: 1465480 - RNA, 19 nt, Artificial Sequence
  Description of Artificial Sequence: Synthetic oligonucleotide
gaggagaugcaacuagguu

SEQ ID NO: 1465481 - RNA, 19 nt, Artificial Sequence
  Description of Artificial Sequence: Synthetic oligonucleotide
caucccucagccggugggg

SEQ ID NO: 1465482 - RNA, 19 nt, Artificial Sequence
  Description of Artificial Sequence: Synthetic oligonucleotide
gaguggcucuagcugaaua

SEQ ID NO: 1465483 - RNA, 19 nt, Artificial Sequence
  Description of Artificial Sequence: Synthetic oligonucleotide
gggcagucgacaagaaaag

SEQ ID NO: 1465484 - RNA, 19 nt, Artificial Sequence
  Description of Artificial Sequence: Synthetic oligonucleotide
acguccccuacagccaccg

SEQ ID NO: 1465485 - RNA, 19 nt, Artificial Sequence
  Description of Artificial Sequence: Synthetic oligonucleotide
ugggcuccacaucccucgc

SEQ ID NO: 1465486 - RNA, 19 nt, Artificial Sequence
  Description of Artificial Sequence: Synthetic oligonucleotide
ggccaugacaguugaugac

SEQ ID NO: 1465487 - RNA, 19 nt, Artificial Sequence
  Description of Artificial Sequence: Synthetic oligonucleotide
aggaacugucuggcgagug

SEQ ID NO: 1465488 - RNA, 19 nt, Artificial Sequence
  Description of Artificial Sequence: Synthetic oligonucleotide
acucugcgugugcagccug

SEQ ID NO: 1465489 - RNA, 19 nt, Artificial Sequence
  Description of Artificial Sequence: Synthetic oligonucleotide
aaggugcccuguaccccac

SEQ ID NO: 1465490 - RNA, 19 nt, Artificial Sequence
  Description of Artificial Sequence: Synthetic oligonucleotide
  modified_base (18)..(18): a, c, u, g, unknown or other
guccuaaccucgaggccng

SEQ ID NO: 1465491 - RNA, 19 nt, Artificial Sequence
  Description of Artificial Sequence: Synthetic oligonucleotide
  modified_base (12)..(12): a, c, u, g, unknown or other
accucgaggccnguuuuca

SEQ ID NO: 1465492 - RNA, 19 nt, Artificial Sequence
  Description of Artificial Sequence: Synthetic oligonucleotide
ggguggucgggucaccacc

SEQ ID NO: 1465493 - RNA, 19 nt, Artificial Sequence
  Description of Artificial Sequence: Synthetic oligonucleotide
uggcgagugucagcagaag

SEQ ID NO: 1465494 - RNA, 19 nt, Artificial Sequence
  Description of Artificial Sequence: Synthetic oligonucleotide
caacuagguuccuggcuca

SEQ ID NO: 1465495 - RNA, 19 nt, Artificial Sequence
  Description of Artificial Sequence: Synthetic oligonucleotide
gacccgugcuuugagugga

SEQ ID NO: 1465496 - RNA, 19 nt, Artificial Sequence
  Description of Artificial Sequence: Synthetic oligonucleotide
ggcagucgacaagaaaagc

SEQ ID NO: 1465497 - RNA, 19 nt, Artificial Sequence
  Description of Artificial Sequence: Synthetic oligonucleotide
ggcgagugucagcagaaga

SEQ ID NO: 1465498 - RNA, 19 nt, Artificial Sequence
  Description of Artificial Sequence: Synthetic oligonucleotide
ggugacauagcagcaucuc

SEQ ID NO: 1465499 - RNA, 19 nt, Artificial Sequence
  Description of Artificial Sequence: Synthetic oligonucleotide
augcccgcuggguggucgg

SEQ ID NO: 1465500 - RNA, 19 nt, Artificial Sequence
  Description of Artificial Sequence: Synthetic oligonucleotide
caggcugucggugcugcac

SEQ ID NO: 1465501 - RNA, 19 nt, Artificial Sequence
  Description of Artificial Sequence: Synthetic oligonucleotide
accagccgcgcccguugac

SEQ ID NO: 1465502 - RNA, 19 nt, Artificial Sequence
  Description of Artificial Sequence: Synthetic oligonucleotide
aggaacggaggcacuguca

SEQ ID NO: 1465503 - RNA, 19 nt, Artificial Sequence
  Description of Artificial Sequence: Synthetic oligonucleotide
aacuagguuccuggcucaa

SEQ ID NO: 1465504 - RNA, 19 nt, Artificial Sequence
  Description of Artificial Sequence: Synthetic oligonucleotide
caagugcacagacaccgua

SEQ ID NO: 1465505 - RNA, 19 nt, Artificial Sequence
  Description of Artificial Sequence: Synthetic oligonucleotide
gcaaagagagcaggcgagc

SEQ ID NO: 1465506 - RNA, 19 nt, Artificial Sequence
  Description of Artificial Sequence: Synthetic oligonucleotide
gcaccgguaaccgcagccg

SEQ ID NO: 1465507 - RNA, 19 nt, Artificial Sequence
  Description of Artificial Sequence: Synthetic oligonucleotide
ucguccucaccggaacuuc

SEQ ID NO: 1465508 - RNA, 19 nt, Artificial Sequence
  Description of Artificial Sequence: Synthetic oligonucleotide
  modified_base (2)..(2): a, c, u, g, unknown or other
cnguuuucaguucugccuu

SEQ ID NO: 1465509 - RNA, 19 nt, Artificial Sequence
  Description of Artificial Sequence: Synthetic oligonucleotide
cagggacccgugcuuugag

SEQ ID NO: 1465510 - RNA, 19 nt, Artificial Sequence
  Description of Artificial Sequence: Synthetic oligonucleotide
agcuaucacgucccauguu

SEQ ID NO: 1465511 - RNA, 19 nt, Artificial Sequence
  Description of Artificial Sequence: Synthetic oligonucleotide
guuccacccgcaccgguaa

SEQ ID NO: 1465512 - RNA, 19 nt, Artificial Sequence
  Description of Artificial Sequence: Synthetic oligonucleotide
agccugaccgugaggggag

SEQ ID NO: 1465513 - RNA, 19 nt, Artificial Sequence
  Description of Artificial Sequence: Synthetic oligonucleotide
cuggcgagugucagcagaa

SEQ ID NO: 1465514 - RNA, 19 nt, Artificial Sequence
  Description of Artificial Sequence: Synthetic oligonucleotide
agcccuguacaaaggcuca

SEQ ID NO: 1465515 - RNA, 19 nt, Artificial Sequence
  Description of Artificial Sequence: Synthetic oligonucleotide
cagccgguggggcuucaag

SEQ ID NO: 1465516 - RNA, 19 nt, Artificial Sequence
  Description of Artificial Sequence: Synthetic oligonucleotide
gcuaucacgucccauguuu

SEQ ID NO: 1465517 - RNA, 19 nt, Artificial Sequence
  Description of Artificial Sequence: Synthetic oligonucleotide
acgucccauguuugccuug

SEQ ID NO: 1465518 - RNA, 19 nt, Artificial Sequence
  Description of Artificial Sequence: Synthetic oligonucleotide
ggcacccacugcugguagg

SEQ ID NO: 1465519 - RNA, 19 nt, Artificial Sequence
  Description of Artificial Sequence: Synthetic oligonucleotide
ugaccaccuuggaggcugu

SEQ ID NO: 1465520 - RNA, 19 nt, Artificial Sequence
  Description of Artificial Sequence: Synthetic oligonucleotide
gaaggaacggaggcacugu

SEQ ID NO: 1465521 - RNA, 19 nt, Artificial Sequence
  Description of Artificial Sequence: Synthetic oligonucleotide
  modified_base (5)..(5): a, c, u, g, unknown or other
ggccnguuuucaguucugc

SEQ ID NO: 1465522 - RNA, 19 nt, Artificial Sequence
  Description of Artificial Sequence: Synthetic oligonucleotide
  modified_base (7)..(7): a, c, u, g, unknown or other
caaaagngaccagacuuuu

SEQ ID NO: 1465523 - RNA, 19 nt, Artificial Sequence
  Description of Artificial Sequence: Synthetic oligonucleotide
ggugcccuguaccccacac

SEQ ID NO: 1465524 - RNA, 19 nt, Artificial Sequence
  Description of Artificial Sequence: Synthetic oligonucleotide
uuccacccgcaccgguaac

SEQ ID NO: 1465525 - RNA, 19 nt, Artificial Sequence
  Description of Artificial Sequence: Synthetic oligonucleotide
gucccauguuugccuugag

SEQ ID NO: 1465526 - RNA, 19 nt, Artificial Sequence
  Description of Artificial Sequence: Synthetic oligonucleotide
  modified_base (10)..(10): a, c, u, g, unknown or other
ggccaaaagngaccagacu

SEQ ID NO: 1465527 - RNA, 19 nt, Artificial Sequence
  Description of Artificial Sequence: Synthetic oligonucleotide
cuggacgagucagcuucag

SEQ ID NO: 1465528 - RNA, 19 nt, Artificial Sequence
  Description of Artificial Sequence: Synthetic oligonucleotide
ggaggcacuggacgaguca

SEQ ID NO: 1465529 - RNA, 19 nt, Artificial Sequence
  Description of Artificial Sequence: Synthetic oligonucleotide
agcucacggugaccaccag

SEQ ID NO: 1465530 - RNA, 19 nt, Artificial Sequence
  Description of Artificial Sequence: Synthetic oligonucleotide
acgugcaauuugguuuccu

SEQ ID NO: 1465531 - RNA, 19 nt, Artificial Sequence
  Description of Artificial Sequence: Synthetic oligonucleotide
ccguacauccaagggcugg

SEQ ID NO: 1465532 - RNA, 19 nt, Artificial Sequence
  Description of Artificial Sequence: Synthetic oligonucleotide
  modified_base (15)..(15): a, c, u, g, unknown or other
cuaaccucgaggccnguuu

SEQ ID NO: 1465533 - RNA, 19 nt, Artificial Sequence
  Description of Artificial Sequence: Synthetic oligonucleotide
gucuggcgagugucagcag

SEQ ID NO: 1465534 - RNA, 19 nt, Artificial Sequence
  Description of Artificial Sequence: Synthetic oligonucleotide
cuccagcccauggguagag

SEQ ID NO: 1465535 - RNA, 19 nt, Artificial Sequence
  Description of Artificial Sequence: Synthetic oligonucleotide
guaggugacauagcagcau

SEQ ID NO: 1465536 - RNA, 19 nt, Artificial Sequence
  Description of Artificial Sequence: Synthetic oligonucleotide
caaagagagcaggcgagcu

SEQ ID NO: 1465537 - RNA, 19 nt, Artificial Sequence
  Description of Artificial Sequence: Synthetic oligonucleotide
cugcgcucgccgcagcuca

SEQ ID NO: 1465538 - RNA, 19 nt, Artificial Sequence
  Description of Artificial Sequence: Synthetic oligonucleotide
cacccgcaccgguaaccgc

SEQ ID NO: 1465539 - RNA, 19 nt, Artificial Sequence
  Description of Artificial Sequence: Synthetic oligonucleotide
gcucaagugcacagacacc

SEQ ID NO: 1465540 - RNA, 19 nt, Artificial Sequence
  Description of Artificial Sequence: Synthetic oligonucleotide
acuggacgagucagcuuca

SEQ ID NO: 1465541 - RNA, 19 nt, Artificial Sequence
  Description of Artificial Sequence: Synthetic oligonucleotide
augggaucuugaccaccuu

SEQ ID NO: 1465542 - RNA, 19 nt, Artificial Sequence
  Description of Artificial Sequence: Synthetic oligonucleotide
ucgcuaccucuaaguccug

SEQ ID NO: 1465543 - RNA, 19 nt, Artificial Sequence
  Description of Artificial Sequence: Synthetic oligonucleotide
cccagcgaagcugcgcucg

SEQ ID NO: 1465544 - RNA, 19 nt, Artificial Sequence
  Description of Artificial Sequence: Synthetic oligonucleotide
cgagugucagcagaagaug

SEQ ID NO: 1465545 - RNA, 19 nt, Artificial Sequence
  Description of Artificial Sequence: Synthetic oligonucleotide
cucugcgugugcagccuga

SEQ ID NO: 1465546 - RNA, 19 nt, Artificial Sequence
  Description of Artificial Sequence: Synthetic oligonucleotide
caccguccuuccaucuuca

SEQ ID NO: 1465547 - RNA, 19 nt, Artificial Sequence
  Description of Artificial Sequence: Synthetic oligonucleotide
cagggcagucgacaagaaa

SEQ ID NO: 1465548 - RNA, 19 nt, Artificial Sequence
  Description of Artificial Sequence: Synthetic oligonucleotide
acggagccaugcacucugg

SEQ ID NO: 1465549 - RNA, 19 nt, Artificial Sequence
  Description of Artificial Sequence: Synthetic oligonucleotide
ggaggcgguaagucugaga

SEQ ID NO: 1465550 - RNA, 19 nt, Artificial Sequence
  Description of Artificial Sequence: Synthetic oligonucleotide
  modified_base (11)..(11): a, c, u, g, unknown or other
ccucgaggccnguuuucag

SEQ ID NO: 1465551 - RNA, 19 nt, Artificial Sequence
  Description of Artificial Sequence: Synthetic oligonucleotide
ccauguuugccuugaggaa

SEQ ID NO: 1465552 - RNA, 19 nt, Artificial Sequence
  Description of Artificial Sequence: Synthetic oligonucleotide
gaccgugaggggaggaacu

SEQ ID NO: 1465553 - RNA, 19 nt, Artificial Sequence
  Description of Artificial Sequence: Synthetic oligonucleotide
  modified_base (6)..(6): a, c, u, g, unknown or other
aggccnguuuucaguucug

SEQ ID NO: 1465554 - RNA, 19 nt, Artificial Sequence
  Description of Artificial Sequence: Synthetic oligonucleotide
cucccagggcagucgacaa

SEQ ID NO: 1465555 - RNA, 19 nt, Artificial Sequence
  Description of Artificial Sequence: Synthetic oligonucleotide
cccucgcuaccucuaaguc

SEQ ID NO: 1465556 - RNA, 19 nt, Artificial Sequence
  Description of Artificial Sequence: Synthetic oligonucleotide
ugcccgcuggguggucggg

SEQ ID NO: 1465557 - RNA, 19 nt, Artificial Sequence
  Description of Artificial Sequence: Synthetic oligonucleotide
accguacauccaagggcug

SEQ ID NO: 1465558 - RNA, 19 nt, Artificial Sequence
  Description of Artificial Sequence: Synthetic oligonucleotide
cgcaccgguaaccgcagcc

SEQ ID NO: 1465559 - RNA, 19 nt, Artificial Sequence
  Description of Artificial Sequence: Synthetic oligonucleotide
ggcauccauucaucuccug

SEQ ID NO: 1465560 - RNA, 19 nt, Artificial Sequence
  Description of Artificial Sequence: Synthetic oligonucleotide
ccguugacgaccuguucca

SEQ ID NO: 1465561 - RNA, 19 nt, Artificial Sequence
  Description of Artificial Sequence: Synthetic oligonucleotide
caucccucgcuaccucuaa

SEQ ID NO: 1465562 - RNA, 19 nt, Artificial Sequence
  Description of Artificial Sequence: Synthetic oligonucleotide
acgaccuguuccacccgca

SEQ ID NO: 1465563 - RNA, 19 nt, Artificial Sequence
  Description of Artificial Sequence: Synthetic oligonucleotide
gguggucgggucaccacca

SEQ ID NO: 1465564 - RNA, 19 nt, Artificial Sequence
  Description of Artificial Sequence: Synthetic oligonucleotide
ugguuuccucaggccuuca

SEQ ID NO: 1465565 - RNA, 19 nt, Artificial Sequence
  Description of Artificial Sequence: Synthetic oligonucleotide
acaucccucgcuaccucua

SEQ ID NO: 1465566 - RNA, 19 nt, Artificial Sequence
  Description of Artificial Sequence: Synthetic oligonucleotide
  modified_base (8)..(8): a, c, u, g, unknown or other
ccaaaagngaccagacuuu

SEQ ID NO: 1465567 - RNA, 19 nt, Artificial Sequence
  Description of Artificial Sequence: Synthetic oligonucleotide
ccacccgcaccgguaaccg

SEQ ID NO: 1465568 - RNA, 19 nt, Artificial Sequence
  Description of Artificial Sequence: Synthetic oligonucleotide
cccuguacaaaggcucaug

SEQ ID NO: 1465569 - RNA, 19 nt, Artificial Sequence
  Description of Artificial Sequence: Synthetic oligonucleotide
aggugcccuguaccccaca

SEQ ID NO: 1465570 - RNA, 19 nt, Artificial Sequence
  Description of Artificial Sequence: Synthetic oligonucleotide
cagccgcgcccguugacga

SEQ ID NO: 1465571 - RNA, 19 nt, Artificial Sequence
  Description of Artificial Sequence: Synthetic oligonucleotide
ccacacaacguccccuaca

SEQ ID NO: 1465572 - RNA, 19 nt, Artificial Sequence
  Description of Artificial Sequence: Synthetic oligonucleotide
gugcacagacaccguacau

SEQ ID NO: 1465573 - RNA, 19 nt, Artificial Sequence
  Description of Artificial Sequence: Synthetic oligonucleotide
gcgguaagucugagauggg

SEQ ID NO: 1465574 - RNA, 19 nt, Artificial Sequence
  Description of Artificial Sequence: Synthetic oligonucleotide
ccccgucacaguaggugac

SEQ ID NO: 1465575 - RNA, 19 nt, Artificial Sequence
  Description of Artificial Sequence: Synthetic oligonucleotide
caucguccucaccggaacu

SEQ ID NO: 1465576 - RNA, 19 nt, Artificial Sequence
  Description of Artificial Sequence: Synthetic oligonucleotide
  modified_base (17)..(17): a, c, u, g, unknown or other
uccuaaccucgaggccngu

SEQ ID NO: 1465577 - RNA, 19 nt, Artificial Sequence
  Description of Artificial Sequence: Synthetic oligonucleotide
gccgcgcccguugacgacc

SEQ ID NO: 1465578 - RNA, 19 nt, Artificial Sequence
  Description of Artificial Sequence: Synthetic oligonucleotide
cugcaucacuucuccaguu

SEQ ID NO: 1465579 - RNA, 19 nt, Artificial Sequence
  Description of Artificial Sequence: Synthetic oligonucleotide
cccgcaccgguaaccgcag

SEQ ID NO: 1465580 - RNA, 19 nt, Artificial Sequence
  Description of Artificial Sequence: Synthetic oligonucleotide
guaccagcucagcccugua

SEQ ID NO: 1465581 - RNA, 19 nt, Artificial Sequence
  Description of Artificial Sequence: Synthetic oligonucleotide
gccaagcuaucacguccca

SEQ ID NO: 1465582 - RNA, 19 nt, Artificial Sequence
  Description of Artificial Sequence: Synthetic oligonucleotide
gucgggucaccaccacccu

SEQ ID NO: 1465583 - RNA, 19 nt, Artificial Sequence
  Description of Artificial Sequence: Synthetic oligonucleotide
ccauacgugcaauuugguu

SEQ ID NO: 1465584 - RNA, 19 nt, Artificial Sequence
  Description of Artificial Sequence: Synthetic oligonucleotide
cccacacaacguccccuac

SEQ ID NO: 1465585 - RNA, 19 nt, Artificial Sequence
  Description of Artificial Sequence: Synthetic oligonucleotide
cuaaguccuggcugccauu

SEQ ID NO: 1465586 - RNA, 19 nt, Artificial Sequence
  Description of Artificial Sequence: Synthetic oligonucleotide
gggaggcgguaagucugag

SEQ ID NO: 1465587 - RNA, 19 nt, Artificial Sequence
  Description of Artificial Sequence: Synthetic oligonucleotide
ccacaucccucgcuaccuc

SEQ ID NO: 1465588 - RNA, 19 nt, Artificial Sequence
  Description of Artificial Sequence: Synthetic oligonucleotide
ccgcagcucacggugacca

SEQ ID NO: 1465589 - RNA, 19 nt, Artificial Sequence
  Description of Artificial Sequence: Synthetic oligonucleotide
  modified_base (8)..(8): a, c, u, g, unknown or other
cgaggccnguuuucaguuc

SEQ ID NO: 1465590 - RNA, 19 nt, Artificial Sequence
  Description of Artificial Sequence: Synthetic oligonucleotide
gcccguugacgaccuguuc

SEQ ID NO: 1465591 - RNA, 19 nt, Artificial Sequence
  Description of Artificial Sequence: Synthetic oligonucleotide
cacgucccauguuugccuu

SEQ ID NO: 1465592 - RNA, 19 nt, Artificial Sequence
  Description of Artificial Sequence: Synthetic oligonucleotide
gagaugcaacuagguuccu

SEQ ID NO: 1465593 - RNA, 19 nt, Artificial Sequence
  Description of Artificial Sequence: Synthetic oligonucleotide
gccugaccgugaggggagg

SEQ ID NO: 1465594 - RNA, 19 nt, Artificial Sequence
  Description of Artificial Sequence: Synthetic oligonucleotide
gcugucggugcugcacaca

SEQ ID NO: 1465595 - RNA, 19 nt, Artificial Sequence
  Description of Artificial Sequence: Synthetic oligonucleotide
ccucgugggcauccauuca

SEQ ID NO: 1465596 - RNA, 19 nt, Artificial Sequence
  Description of Artificial Sequence: Synthetic oligonucleotide
cacucugcgugugcagccu

SEQ ID NO: 1465597 - RNA, 19 nt, Artificial Sequence
  Description of Artificial Sequence: Synthetic oligonucleotide
gcgugugcagccugaccgu

SEQ ID NO: 1465598 - RNA, 19 nt, Artificial Sequence
  Description of Artificial Sequence: Synthetic oligonucleotide
cgguggggcuucaagcgga

SEQ ID NO: 1465599 - RNA, 19 nt, Artificial Sequence
  Description of Artificial Sequence: Synthetic oligonucleotide
cgugugcagccugaccgug

SEQ ID NO: 1465600 - RNA, 19 nt, Artificial Sequence
  Description of Artificial Sequence: Synthetic oligonucleotide
acccgugcuuugaguggaa

SEQ ID NO: 1465601 - RNA, 19 nt, Artificial Sequence
  Description of Artificial Sequence: Synthetic oligonucleotide
cccauacgugcaauuuggu

SEQ ID NO: 1465602 - RNA, 19 nt, Artificial Sequence
  Description of Artificial Sequence: Synthetic oligonucleotide
gcggauuuugggaggcggu

SEQ ID NO: 1465603 - RNA, 19 nt, Artificial Sequence
  Description of Artificial Sequence: Synthetic oligonucleotide
uucccgccucaggcaccug

SEQ ID NO: 1465604 - RNA, 19 nt, Artificial Sequence
  Description of Artificial Sequence: Synthetic oligonucleotide
ccccacacaacguccccua

SEQ ID NO: 1465605 - RNA, 19 nt, Artificial Sequence
  Description of Artificial Sequence: Synthetic oligonucleotide
ggaaaccucuugaggucau

SEQ ID NO: 1465606 - RNA, 19 nt, Artificial Sequence
  Description of Artificial Sequence: Synthetic oligonucleotide
ccagggacccgugcuuuga

SEQ ID NO: 1465607 - RNA, 19 nt, Artificial Sequence
  Description of Artificial Sequence: Synthetic oligonucleotide
cgucccauguuugccuuga

SEQ ID NO: 1465608 - RNA, 19 nt, Artificial Sequence
  Description of Artificial Sequence: Synthetic oligonucleotide
ccgcaccgguaaccgcagc

SEQ ID NO: 1465609 - RNA, 19 nt, Artificial Sequence
  Description of Artificial Sequence: Synthetic oligonucleotide
gcgcccguugacgaccugu

SEQ ID NO: 1465610 - RNA, 19 nt, Artificial Sequence
  Description of Artificial Sequence: Synthetic oligonucleotide
ccugaccgugaggggagga

SEQ ID NO: 1465611 - RNA, 19 nt, Artificial Sequence
  Description of Artificial Sequence: Synthetic oligonucleotide
cucagccgguggggcuuca

SEQ ID NO: 1465612 - RNA, 19 nt, Artificial Sequence
  Description of Artificial Sequence: Synthetic oligonucleotide
  modified_base (16)..(16): a, c, u, g, unknown or other
ccuaaccucgaggccnguu

SEQ ID NO: 1465613 - RNA, 19 nt, Artificial Sequence
  Description of Artificial Sequence: Synthetic oligonucleotide
ccgugaggggaggaacugu

SEQ ID NO: 1465614 - RNA, 19 nt, Artificial Sequence
  Description of Artificial Sequence: Synthetic oligonucleotide
cggugaccaccagccgcgc

SEQ ID NO: 1465615 - RNA, 19 nt, Artificial Sequence
  Description of Artificial Sequence: Synthetic oligonucleotide
ccuggccaugacaguugau

SEQ ID NO: 1465616 - RNA, 19 nt, Artificial Sequence
  Description of Artificial Sequence: Synthetic oligonucleotide
cccgugcuuugaguggaau

SEQ ID NO: 1465617 - RNA, 19 nt, Artificial Sequence
  Description of Artificial Sequence: Synthetic oligonucleotide
cgcccguugacgaccuguu

SEQ ID NO: 1465618 - RNA, 19 nt, Artificial Sequence
  Description of Artificial Sequence: Synthetic oligonucleotide
ccgcgcccguugacgaccu

SEQ ID NO: 1465619 - RNA, 19 nt, Artificial Sequence
  Description of Artificial Sequence: Synthetic oligonucleotide
cguccccuacagccaccgu

SEQ ID NO: 1465620 - RNA, 19 nt, Artificial Sequence
  Description of Artificial Sequence: Synthetic oligonucleotide
uuaaauuuuaaccugaggu

SEQ ID NO: 1465621 - RNA, 19 nt, Artificial Sequence
  Description of Artificial Sequence: Synthetic oligonucleotide
aacaaaaccuaauauagug

SEQ ID NO: 1465622 - RNA, 19 nt, Artificial Sequence
  Description of Artificial Sequence: Synthetic oligonucleotide
aagcuuuagaguaagaacc

SEQ ID NO: 1465623 - RNA, 19 nt, Artificial Sequence
  Description of Artificial Sequence: Synthetic oligonucleotide
cugaauauaagcaucaacc

SEQ ID NO: 1465624 - RNA, 19 nt, Artificial Sequence
  Description of Artificial Sequence: Synthetic oligonucleotide
aaugcuccugaauauaagc

SEQ ID NO: 1465625 - RNA, 19 nt, Artificial Sequence
  Description of Artificial Sequence: Synthetic oligonucleotide
uguacuuugagagaaaagg

SEQ ID NO: 1465626 - RNA, 19 nt, Artificial Sequence
  Description of Artificial Sequence: Synthetic oligonucleotide
auuaccuccaacuuuaguc

SEQ ID NO: 1465627 - RNA, 19 nt, Artificial Sequence
  Description of Artificial Sequence: Synthetic oligonucleotide
uugacuauauguaugaaca

SEQ ID NO: 1465628 - RNA, 19 nt, Artificial Sequence
  Description of Artificial Sequence: Synthetic oligonucleotide
aguuaaaacaaugaaacuc

SEQ ID NO: 1465629 - RNA, 19 nt, Artificial Sequence
  Description of Artificial Sequence: Synthetic oligonucleotide
uuuaaagaggaccugcuag

SEQ ID NO: 1465630 - RNA, 19 nt, Artificial Sequence
  Description of Artificial Sequence: Synthetic oligonucleotide
aaccuuauucaacaaacgg

SEQ ID NO: 1465631 - RNA, 19 nt, Artificial Sequence
  Description of Artificial Sequence: Synthetic oligonucleotide
uguaugaacaacaccauug

SEQ ID NO: 1465632 - RNA, 19 nt, Artificial Sequence
  Description of Artificial Sequence: Synthetic oligonucleotide
uaugcuauaaaauucucca

SEQ ID NO: 1465633 - RNA, 19 nt, Artificial Sequence
  Description of Artificial Sequence: Synthetic oligonucleotide
uaguaaauaaucuccacag

SEQ ID NO: 1465634 - RNA, 19 nt, Artificial Sequence
  Description of Artificial Sequence: Synthetic oligonucleotide
aaauuucgauaagagaugc

SEQ ID NO: 1465635 - RNA, 19 nt, Artificial Sequence
  Description of Artificial Sequence: Synthetic oligonucleotide
uuuuagaaugcaguaaugg

SEQ ID NO: 1465636 - RNA, 19 nt, Artificial Sequence
  Description of Artificial Sequence: Synthetic oligonucleotide
auaacaaaaccuaauauag

SEQ ID NO: 1465637 - RNA, 19 nt, Artificial Sequence
  Description of Artificial Sequence: Synthetic oligonucleotide
acaaucuaaaacuacuguc

SEQ ID NO: 1465638 - RNA, 19 nt, Artificial Sequence
  Description of Artificial Sequence: Synthetic oligonucleotide
aaugucagugagcauagag

SEQ ID NO: 1465639 - RNA, 19 nt, Artificial Sequence
  Description of Artificial Sequence: Synthetic oligonucleotide
auugacuauauguaugaac

SEQ ID NO: 1465640 - RNA, 19 nt, Artificial Sequence
  Description of Artificial Sequence: Synthetic oligonucleotide
uuaauugacuauauguaug

SEQ ID NO: 1465641 - RNA, 19 nt, Artificial Sequence
  Description of Artificial Sequence: Synthetic oligonucleotide
aaaccuaauauagugcuuc

SEQ ID NO: 1465642 - RNA, 19 nt, Artificial Sequence
  Description of Artificial Sequence: Synthetic oligonucleotide
ugagaaaugugucacugag

SEQ ID NO: 1465643 - RNA, 19 nt, Artificial Sequence
  Description of Artificial Sequence: Synthetic oligonucleotide
aaaucuaaccaaaauaaca

SEQ ID NO: 1465644 - RNA, 19 nt, Artificial Sequence
  Description of Artificial Sequence: Synthetic oligonucleotide
ucuagauaguaaauaaucu

SEQ ID NO: 1465645 - RNA, 19 nt, Artificial Sequence
  Description of Artificial Sequence: Synthetic oligonucleotide
uucuagauaguaaauaauc

SEQ ID NO: 1465646 - RNA, 19 nt, Artificial Sequence
  Description of Artificial Sequence: Synthetic oligonucleotide
ugaacaacaccauugaaaa

SEQ ID NO: 1465647 - RNA, 19 nt, Artificial Sequence
  Description of Artificial Sequence: Synthetic oligonucleotide
gaugcagcuaguaauaucc

SEQ ID NO: 1465648 - RNA, 19 nt, Artificial Sequence
  Description of Artificial Sequence: Synthetic oligonucleotide
uaagcaucaaccuuauuca

SEQ ID NO: 1465649 - RNA, 19 nt, Artificial Sequence
  Description of Artificial Sequence: Synthetic oligonucleotide
auagguaaaugucagugag

SEQ ID NO: 1465650 - RNA, 19 nt, Artificial Sequence
  Description of Artificial Sequence: Synthetic oligonucleotide
aacaaucuaaaacuacugu

SEQ ID NO: 1465651 - RNA, 19 nt, Artificial Sequence
  Description of Artificial Sequence: Synthetic oligonucleotide
uauauguaugaacaacacc

SEQ ID NO: 1465652 - RNA, 19 nt, Artificial Sequence
  Description of Artificial Sequence: Synthetic oligonucleotide
cuaguaauauccauucuag

SEQ ID NO: 1465653 - RNA, 19 nt, Artificial Sequence
  Description of Artificial Sequence: Synthetic oligonucleotide
ucaagcauuaccuccaacu

SEQ ID NO: 1465654 - RNA, 19 nt, Artificial Sequence
  Description of Artificial Sequence: Synthetic oligonucleotide
aguaaacaccauuaaauca

SEQ ID NO: 1465655 - RNA, 19 nt, Artificial Sequence
  Description of Artificial Sequence: Synthetic oligonucleotide
uacuuugagagaaaaggug

SEQ ID NO: 1465656 - RNA, 19 nt, Artificial Sequence
  Description of Artificial Sequence: Synthetic oligonucleotide
aguaagaacccuguaaagg

SEQ ID NO: 1465657 - RNA, 19 nt, Artificial Sequence
  Description of Artificial Sequence: Synthetic oligonucleotide
gaauagguaaaugucagug

SEQ ID NO: 1465658 - RNA, 19 nt, Artificial Sequence
  Description of Artificial Sequence: Synthetic oligonucleotide
aauauaagcaucaaccuua

SEQ ID NO: 1465659 - RNA, 19 nt, Artificial Sequence
  Description of Artificial Sequence: Synthetic oligonucleotide
uuagaaugcaguaauggua

SEQ ID NO: 1465660 - RNA, 19 nt, Artificial Sequence
  Description of Artificial Sequence: Synthetic oligonucleotide
aaucuaaccaaaauaacaa

SEQ ID NO: 1465661 - RNA, 19 nt, Artificial Sequence
  Description of Artificial Sequence: Synthetic oligonucleotide
cuguaaaggaguaaacacc

SEQ ID NO: 1465662 - RNA, 19 nt, Artificial Sequence
  Description of Artificial Sequence: Synthetic oligonucleotide
auaugcauguuuucucccc

SEQ ID NO: 1465663 - RNA, 19 nt, Artificial Sequence
  Description of Artificial Sequence: Synthetic oligonucleotide
cuuauuacuaguugugaac

SEQ ID NO: 1465664 - RNA, 19 nt, Artificial Sequence
  Description of Artificial Sequence: Synthetic oligonucleotide
aauuuuaaccugagguuac

SEQ ID NO: 1465665 - RNA, 19 nt, Artificial Sequence
  Description of Artificial Sequence: Synthetic oligonucleotide
uucgauaagagaugcagcu

SEQ ID NO: 1465666 - RNA, 19 nt, Artificial Sequence
  Description of Artificial Sequence: Synthetic oligonucleotide
uuuagaguaagaacccugu

SEQ ID NO: 1465667 - RNA, 19 nt, Artificial Sequence
  Description of Artificial Sequence: Synthetic oligonucleotide
acaaaaccuaauauagugc

SEQ ID NO: 1465668 - RNA, 19 nt, Artificial Sequence
  Description of Artificial Sequence: Synthetic oligonucleotide
aaaauuucgauaagagaug

SEQ ID NO: 1465669 - RNA, 19 nt, Artificial Sequence
  Description of Artificial Sequence: Synthetic oligonucleotide
uaaauuuuaaccugagguu

SEQ ID NO: 1465670 - RNA, 19 nt, Artificial Sequence
  Description of Artificial Sequence: Synthetic oligonucleotide
aauuuaaguaugcuauaaa

SEQ ID NO: 1465671 - RNA, 19 nt, Artificial Sequence
  Description of Artificial Sequence: Synthetic oligonucleotide
caaaauuucgauaagagau

SEQ ID NO: 1465672 - RNA, 19 nt, Artificial Sequence
  Description of Artificial Sequence: Synthetic oligonucleotide
ucaaaguuacuccacugcu

SEQ ID NO: 1465673 - RNA, 19 nt, Artificial Sequence
  Description of Artificial Sequence: Synthetic oligonucleotide
agcucuaaaauaugcaugu

SEQ ID NO: 1465674 - RNA, 19 nt, Artificial Sequence
  Description of Artificial Sequence: Synthetic oligonucleotide
uuacgugucaauacacuug

SEQ ID NO: 1465675 - RNA, 19 nt, Artificial Sequence
  Description of Artificial Sequence: Synthetic oligonucleotide
aaucuaaaacuacugucau

SEQ ID NO: 1465676 - RNA, 19 nt, Artificial Sequence
  Description of Artificial Sequence: Synthetic oligonucleotide
uuacuguucuuauuacuag

SEQ ID NO: 1465677 - RNA, 19 nt, Artificial Sequence
  Description of Artificial Sequence: Synthetic oligonucleotide
uuauuacuaguugugaacu

SEQ ID NO: 1465678 - RNA, 19 nt, Artificial Sequence
  Description of Artificial Sequence: Synthetic oligonucleotide
auuaaaucaucaucguccu

SEQ ID NO: 1465679 - RNA, 19 nt, Artificial Sequence
  Description of Artificial Sequence: Synthetic oligonucleotide
ucuucaagcauuaccucca

SEQ ID NO: 1465680 - RNA, 19 nt, Artificial Sequence
  Description of Artificial Sequence: Synthetic oligonucleotide
uuucgauaagagaugcagc

SEQ ID NO: 1465681 - RNA, 19 nt, Artificial Sequence
  Description of Artificial Sequence: Synthetic oligonucleotide
uuuuacucgguccaucuuc

SEQ ID NO: 1465682 - RNA, 19 nt, Artificial Sequence
  Description of Artificial Sequence: Synthetic oligonucleotide
aaugcaucugauucccaug

SEQ ID NO: 1465683 - RNA, 19 nt, Artificial Sequence
  Description of Artificial Sequence: Synthetic oligonucleotide
aaauuuaaguaugcuauaa

SEQ ID NO: 1465684 - RNA, 19 nt, Artificial Sequence
  Description of Artificial Sequence: Synthetic oligonucleotide
accuuauucaacaaacggg

SEQ ID NO: 1465685 - RNA, 19 nt, Artificial Sequence
  Description of Artificial Sequence: Synthetic oligonucleotide
gaaaauuuaaguaugcuau

SEQ ID NO: 1465686 - RNA, 19 nt, Artificial Sequence
  Description of Artificial Sequence: Synthetic oligonucleotide
agaguaagaacccuguaaa

SEQ ID NO: 1465687 - RNA, 19 nt, Artificial Sequence
  Description of Artificial Sequence: Synthetic oligonucleotide
uauucaacaaacgggaguc

SEQ ID NO: 1465688 - RNA, 19 nt, Artificial Sequence
  Description of Artificial Sequence: Synthetic oligonucleotide
uaagaacccuguaaaggag

SEQ ID NO: 1465689 - RNA, 19 nt, Artificial Sequence
  Description of Artificial Sequence: Synthetic oligonucleotide
uacgugucaauacacuuga

SEQ ID NO: 1465690 - RNA, 19 nt, Artificial Sequence
  Description of Artificial Sequence: Synthetic oligonucleotide
aacaaaugcuccugaauau

SEQ ID NO: 1465691 - RNA, 19 nt, Artificial Sequence
  Description of Artificial Sequence: Synthetic oligonucleotide
uagaguaagaacccuguaa

SEQ ID NO: 1465692 - RNA, 19 nt, Artificial Sequence
  Description of Artificial Sequence: Synthetic oligonucleotide
uauccauugggaaucauuu

SEQ ID NO: 1465693 - RNA, 19 nt, Artificial Sequence
  Description of Artificial Sequence: Synthetic oligonucleotide
aaugggguuuguuuaauuu

SEQ ID NO: 1465694 - RNA, 19 nt, Artificial Sequence
  Description of Artificial Sequence: Synthetic oligonucleotide
uacacucaaaguuacucca

SEQ ID NO: 1465695 - RNA, 19 nt, Artificial Sequence
  Description of Artificial Sequence: Synthetic oligonucleotide
aacaccauuaaaucaucau

SEQ ID NO: 1465696 - RNA, 19 nt, Artificial Sequence
  Description of Artificial Sequence: Synthetic oligonucleotide
cagaauagguaaaugucag

SEQ ID NO: 1465697 - RNA, 19 nt, Artificial Sequence
  Description of Artificial Sequence: Synthetic oligonucleotide
aaguaugcuauaaaauucu

SEQ ID NO: 1465698 - RNA, 19 nt, Artificial Sequence
  Description of Artificial Sequence: Synthetic oligonucleotide
auuaccuuuguguacaauu

SEQ ID NO: 1465699 - RNA, 19 nt, Artificial Sequence
  Description of Artificial Sequence: Synthetic oligonucleotide
ucugaguuagcgucuacug

SEQ ID NO: 1465700 - RNA, 19 nt, Artificial Sequence
  Description of Artificial Sequence: Synthetic oligonucleotide
gcaaacguuaucuucaagc

SEQ ID NO: 1465701 - RNA, 19 nt, Artificial Sequence
  Description of Artificial Sequence: Synthetic oligonucleotide
uuaccuccaacuuuagucu

SEQ ID NO: 1465702 - RNA, 19 nt, Artificial Sequence
  Description of Artificial Sequence: Synthetic oligonucleotide
caucugauucccauguggg

SEQ ID NO: 1465703 - RNA, 19 nt, Artificial Sequence
  Description of Artificial Sequence: Synthetic oligonucleotide
ucuuauuacuaguugugaa

SEQ ID NO: 1465704 - RNA, 19 nt, Artificial Sequence
  Description of Artificial Sequence: Synthetic oligonucleotide
cugagguuaccucagacug

SEQ ID NO: 1465705 - RNA, 19 nt, Artificial Sequence
  Description of Artificial Sequence: Synthetic oligonucleotide
ucuuaggagaaauggggca

SEQ ID NO: 1465706 - RNA, 19 nt, Artificial Sequence
  Description of Artificial Sequence: Synthetic oligonucleotide
aagauucaauaaaauuuuc

SEQ ID NO: 1465707 - RNA, 19 nt, Artificial Sequence
  Description of Artificial Sequence: Synthetic oligonucleotide
uccaacuuuagucucggaa

SEQ ID NO: 1465708 - RNA, 19 nt, Artificial Sequence
  Description of Artificial Sequence: Synthetic oligonucleotide
uuuguaacaaaugcuccug

SEQ ID NO: 1465709 - RNA, 19 nt, Artificial Sequence
  Description of Artificial Sequence: Synthetic oligonucleotide
uugauuaccuuuguguaca

SEQ ID NO: 1465710 - RNA, 19 nt, Artificial Sequence
  Description of Artificial Sequence: Synthetic oligonucleotide
ucuccaguuaaauuuuaac

SEQ ID NO: 1465711 - RNA, 19 nt, Artificial Sequence
  Description of Artificial Sequence: Synthetic oligonucleotide
acuauauguaugaacaaca

SEQ ID NO: 1465712 - RNA, 19 nt, Artificial Sequence
  Description of Artificial Sequence: Synthetic oligonucleotide
cucaaaguuacuccacugc

SEQ ID NO: 1465713 - RNA, 19 nt, Artificial Sequence
  Description of Artificial Sequence: Synthetic oligonucleotide
aaacacacgaccaaugcau

SEQ ID NO: 1465714 - RNA, 19 nt, Artificial Sequence
  Description of Artificial Sequence: Synthetic oligonucleotide
cuuuagaguaagaacccug

SEQ ID NO: 1465715 - RNA, 19 nt, Artificial Sequence
  Description of Artificial Sequence: Synthetic oligonucleotide
accaaugcaucugauuccc

SEQ ID NO: 1465716 - RNA, 19 nt, Artificial Sequence
  Description of Artificial Sequence: Synthetic oligonucleotide
agucaugcggguuacaaau

SEQ ID NO: 1465717 - RNA, 19 nt, Artificial Sequence
  Description of Artificial Sequence: Synthetic oligonucleotide
uaagagaugcagcuaguaa

SEQ ID NO: 1465718 - RNA, 19 nt, Artificial Sequence
  Description of Artificial Sequence: Synthetic oligonucleotide
aucaacaaucuaaaacuac

SEQ ID NO: 1465719 - RNA, 19 nt, Artificial Sequence
  Description of Artificial Sequence: Synthetic oligonucleotide
gaugcuacgcugcacccag

SEQ ID NO: 1465720 - RNA, 19 nt, Artificial Sequence
  Description of Artificial Sequence: Synthetic oligonucleotide
aaaggaguaaacaccauua

SEQ ID NO: 1465721 - RNA, 19 nt, Artificial Sequence
  Description of Artificial Sequence: Synthetic oligonucleotide
ucaugagagguucaguaau

SEQ ID NO: 1465722 - RNA, 19 nt, Artificial Sequence
  Description of Artificial Sequence: Synthetic oligonucleotide
acuaguugugaacuguacu

SEQ ID NO: 1465723 - RNA, 19 nt, Artificial Sequence
  Description of Artificial Sequence: Synthetic oligonucleotide
uccuuauaaauuuggcaac

SEQ ID NO: 1465724 - RNA, 19 nt, Artificial Sequence
  Description of Artificial Sequence: Synthetic oligonucleotide
cuucuuuacgugucaauac

SEQ ID NO: 1465725 - RNA, 19 nt, Artificial Sequence
  Description of Artificial Sequence: Synthetic oligonucleotide
uaaaggaguaaacaccauu

SEQ ID NO: 1465726 - RNA, 19 nt, Artificial Sequence
  Description of Artificial Sequence: Synthetic oligonucleotide
auaaucuccacagaccugu

SEQ ID NO: 1465727 - RNA, 19 nt, Artificial Sequence
  Description of Artificial Sequence: Synthetic oligonucleotide
gacuauauguaugaacaac

SEQ ID NO: 1465728 - RNA, 19 nt, Artificial Sequence
  Description of Artificial Sequence: Synthetic oligonucleotide
aaacguuaucuucaagcau

SEQ ID NO: 1465729 - RNA, 19 nt, Artificial Sequence
  Description of Artificial Sequence: Synthetic oligonucleotide
aacugguccuauuagucau

SEQ ID NO: 1465730 - RNA, 19 nt, Artificial Sequence
  Description of Artificial Sequence: Synthetic oligonucleotide
aacguuaucuucaagcauu

SEQ ID NO: 1465731 - RNA, 19 nt, Artificial Sequence
  Description of Artificial Sequence: Synthetic oligonucleotide
uauccauucuagauaguaa

SEQ ID NO: 1465732 - RNA, 19 nt, Artificial Sequence
  Description of Artificial Sequence: Synthetic oligonucleotide
acuguauaaacguaacauu

SEQ ID NO: 1465733 - RNA, 19 nt, Artificial Sequence
  Description of Artificial Sequence: Synthetic oligonucleotide
uauuacuaguugugaacug

SEQ ID NO: 1465734 - RNA, 19 nt, Artificial Sequence
  Description of Artificial Sequence: Synthetic oligonucleotide
caagcaaacguuaucuuca

SEQ ID NO: 1465735 - RNA, 19 nt, Artificial Sequence
  Description of Artificial Sequence: Synthetic oligonucleotide
auccauucuagauaguaaa

SEQ ID NO: 1465736 - RNA, 19 nt, Artificial Sequence
  Description of Artificial Sequence: Synthetic oligonucleotide
aguugauuaccuuugugua

SEQ ID NO: 1465737 - RNA, 19 nt, Artificial Sequence
  Description of Artificial Sequence: Synthetic oligonucleotide
gguucaguaauuaaauagc

SEQ ID NO: 1465738 - RNA, 19 nt, Artificial Sequence
  Description of Artificial Sequence: Synthetic oligonucleotide
aguugugaacuguacuuug

SEQ ID NO: 1465739 - RNA, 19 nt, Artificial Sequence
  Description of Artificial Sequence: Synthetic oligonucleotide
cuuauucaacaaacgggag

SEQ ID NO: 1465740 - RNA, 19 nt, Artificial Sequence
  Description of Artificial Sequence: Synthetic oligonucleotide
aguaaauaaucuccacaga

SEQ ID NO: 1465741 - RNA, 19 nt, Artificial Sequence
  Description of Artificial Sequence: Synthetic oligonucleotide
uccaacugacacauggacu

SEQ ID NO: 1465742 - RNA, 19 nt, Artificial Sequence
  Description of Artificial Sequence: Synthetic oligonucleotide
uuaccuuuguguacaauuu

SEQ ID NO: 1465743 - RNA, 19 nt, Artificial Sequence
  Description of Artificial Sequence: Synthetic oligonucleotide
uuagcgucuacuggugugg

SEQ ID NO: 1465744 - RNA, 19 nt, Artificial Sequence
  Description of Artificial Sequence: Synthetic oligonucleotide
aaggaguaaacaccauuaa

SEQ ID NO: 1465745 - RNA, 19 nt, Artificial Sequence
  Description of Artificial Sequence: Synthetic oligonucleotide
ugcaauguggcaaguugca

SEQ ID NO: 1465746 - RNA, 19 nt, Artificial Sequence
  Description of Artificial Sequence: Synthetic oligonucleotide
uagguaaaugucagugagc

SEQ ID NO: 1465747 - RNA, 19 nt, Artificial Sequence
  Description of Artificial Sequence: Synthetic oligonucleotide
auuuuaaccugagguuacc

SEQ ID NO: 1465748 - RNA, 19 nt, Artificial Sequence
  Description of Artificial Sequence: Synthetic oligonucleotide
acuuugagagaaaaggugu

SEQ ID NO: 1465749 - RNA, 19 nt, Artificial Sequence
  Description of Artificial Sequence: Synthetic oligonucleotide
uuuggcaacuauuucugau

SEQ ID NO: 1465750 - RNA, 19 nt, Artificial Sequence
  Description of Artificial Sequence: Synthetic oligonucleotide
ugaggccuaacagaauagg

SEQ ID NO: 1465751 - RNA, 19 nt, Artificial Sequence
  Description of Artificial Sequence: Synthetic oligonucleotide
aagaggaccugcuagccuu

SEQ ID NO: 1465752 - RNA, 19 nt, Artificial Sequence
  Description of Artificial Sequence: Synthetic oligonucleotide
uaauauagugcuucauuuu

SEQ ID NO: 1465753 - RNA, 19 nt, Artificial Sequence
  Description of Artificial Sequence: Synthetic oligonucleotide
caaacguuaucuucaagca

SEQ ID NO: 1465754 - RNA, 19 nt, Artificial Sequence
  Description of Artificial Sequence: Synthetic oligonucleotide
uuuaaccugagguuaccuc

SEQ ID NO: 1465755 - RNA, 19 nt, Artificial Sequence
  Description of Artificial Sequence: Synthetic oligonucleotide
guaaaugucagugagcaua

SEQ ID NO: 1465756 - RNA, 19 nt, Artificial Sequence
  Description of Artificial Sequence: Synthetic oligonucleotide
gagucucccauacaacuug

SEQ ID NO: 1465757 - RNA, 19 nt, Artificial Sequence
  Description of Artificial Sequence: Synthetic oligonucleotide
aguuaauugacuauaugua

SEQ ID NO: 1465758 - RNA, 19 nt, Artificial Sequence
  Description of Artificial Sequence: Synthetic oligonucleotide
guaugcuauaaaauucucc

SEQ ID NO: 1465759 - RNA, 19 nt, Artificial Sequence
  Description of Artificial Sequence: Synthetic oligonucleotide
guugauuaccuuuguguac

SEQ ID NO: 1465760 - RNA, 19 nt, Artificial Sequence
  Description of Artificial Sequence: Synthetic oligonucleotide
guccuauuagucaugcggg

SEQ ID NO: 1465761 - RNA, 19 nt, Artificial Sequence
  Description of Artificial Sequence: Synthetic oligonucleotide
uguuucaugagagguucag

SEQ ID NO: 1465762 - RNA, 19 nt, Artificial Sequence
  Description of Artificial Sequence: Synthetic oligonucleotide
agaccuguuuuacucgguc

SEQ ID NO: 1465763 - RNA, 19 nt, Artificial Sequence
  Description of Artificial Sequence: Synthetic oligonucleotide
aaaugcuggaagcucuaaa

SEQ ID NO: 1465764 - RNA, 19 nt, Artificial Sequence
  Description of Artificial Sequence: Synthetic oligonucleotide
acauggacuagucccaacu

SEQ ID NO: 1465765 - RNA, 19 nt, Artificial Sequence
  Description of Artificial Sequence: Synthetic oligonucleotide
uaguaauauccauucuaga

SEQ ID NO: 1465766 - RNA, 19 nt, Artificial Sequence
  Description of Artificial Sequence: Synthetic oligonucleotide
gaagucgaacaucacagaa

SEQ ID NO: 1465767 - RNA, 19 nt, Artificial Sequence
  Description of Artificial Sequence: Synthetic oligonucleotide
auuacuaguugugaacugu

SEQ ID NO: 1465768 - RNA, 19 nt, Artificial Sequence
  Description of Artificial Sequence: Synthetic oligonucleotide
uucuuauuacuaguuguga

SEQ ID NO: 1465769 - RNA, 19 nt, Artificial Sequence
  Description of Artificial Sequence: Synthetic oligonucleotide
ucaugcggguuacaaauaa

SEQ ID NO: 1465770 - RNA, 19 nt, Artificial Sequence
  Description of Artificial Sequence: Synthetic oligonucleotide
aaccuaauauagugcuuca

SEQ ID NO: 1465771 - RNA, 19 nt, Artificial Sequence
  Description of Artificial Sequence: Synthetic oligonucleotide
gacuagucccaacuuuucc

SEQ ID NO: 1465772 - RNA, 19 nt, Artificial Sequence
  Description of Artificial Sequence: Synthetic oligonucleotide
ggcauuuuaauuuggcaac

SEQ ID NO: 1465773 - RNA, 19 nt, Artificial Sequence
  Description of Artificial Sequence: Synthetic oligonucleotide
aaaugcuccugaauauaag

SEQ ID NO: 1465774 - RNA, 19 nt, Artificial Sequence
  Description of Artificial Sequence: Synthetic oligonucleotide
acagccaucaacaaucuaa

SEQ ID NO: 1465775 - RNA, 19 nt, Artificial Sequence
  Description of Artificial Sequence: Synthetic oligonucleotide
caaguuaauugacuauaug

SEQ ID NO: 1465776 - RNA, 19 nt, Artificial Sequence
  Description of Artificial Sequence: Synthetic oligonucleotide
gugucaauacacuugaggu

SEQ ID NO: 1465777 - RNA, 19 nt, Artificial Sequence
  Description of Artificial Sequence: Synthetic oligonucleotide
guaugaacaacaccauuga

SEQ ID NO: 1465778 - RNA, 19 nt, Artificial Sequence
  Description of Artificial Sequence: Synthetic oligonucleotide
cagcuaguaauauccauuc

SEQ ID NO: 1465779 - RNA, 19 nt, Artificial Sequence
  Description of Artificial Sequence: Synthetic oligonucleotide
cuuaggagaaauggggcag

SEQ ID NO: 1465780 - RNA, 19 nt, Artificial Sequence
  Description of Artificial Sequence: Synthetic oligonucleotide
ccuguaaaggaguaaacac

SEQ ID NO: 1465781 - RNA, 19 nt, Artificial Sequence
  Description of Artificial Sequence: Synthetic oligonucleotide
acaacuugcaaaauuucga

SEQ ID NO: 1465782 - RNA, 19 nt, Artificial Sequence
  Description of Artificial Sequence: Synthetic oligonucleotide
ucugauucccaugugggaa

SEQ ID NO: 1465783 - RNA, 19 nt, Artificial Sequence
  Description of Artificial Sequence: Synthetic oligonucleotide
agcaucaaccuuauucaac

SEQ ID NO: 1465784 - RNA, 19 nt, Artificial Sequence
  Description of Artificial Sequence: Synthetic oligonucleotide
gaguguuacacucaaaguu

SEQ ID NO: 1465785 - RNA, 19 nt, Artificial Sequence
  Description of Artificial Sequence: Synthetic oligonucleotide
uugagguuucuucucguaa

SEQ ID NO: 1465786 - RNA, 19 nt, Artificial Sequence
  Description of Artificial Sequence: Synthetic oligonucleotide
agauaguaaauaaucucca

SEQ ID NO: 1465787 - RNA, 19 nt, Artificial Sequence
  Description of Artificial Sequence: Synthetic oligonucleotide
accugagguuaccucagac

SEQ ID NO: 1465788 - RNA, 19 nt, Artificial Sequence
  Description of Artificial Sequence: Synthetic oligonucleotide
uccauucuagauaguaaau

SEQ ID NO: 1465789 - RNA, 19 nt, Artificial Sequence
  Description of Artificial Sequence: Synthetic oligonucleotide
ccaacuuuagucucggaag

SEQ ID NO: 1465790 - RNA, 19 nt, Artificial Sequence
  Description of Artificial Sequence: Synthetic oligonucleotide
cucguaaaccucuuccaug

SEQ ID NO: 1465791 - RNA, 19 nt, Artificial Sequence
  Description of Artificial Sequence: Synthetic oligonucleotide
accauuaaaucaucaucgu

SEQ ID NO: 1465792 - RNA, 19 nt, Artificial Sequence
  Description of Artificial Sequence: Synthetic oligonucleotide
aucuaaccaaaauaacaaa

SEQ ID NO: 1465793 - RNA, 19 nt, Artificial Sequence
  Description of Artificial Sequence: Synthetic oligonucleotide
aggaguaaacaccauuaaa

SEQ ID NO: 1465794 - RNA, 19 nt, Artificial Sequence
  Description of Artificial Sequence: Synthetic oligonucleotide
aacccuguaaaggaguaaa

SEQ ID NO: 1465795 - RNA, 19 nt, Artificial Sequence
  Description of Artificial Sequence: Synthetic oligonucleotide
aguuaaauuuuaaccugag

SEQ ID NO: 1465796 - RNA, 19 nt, Artificial Sequence
  Description of Artificial Sequence: Synthetic oligonucleotide
cacagaccuguuuuacucg

SEQ ID NO: 1465797 - RNA, 19 nt, Artificial Sequence
  Description of Artificial Sequence: Synthetic oligonucleotide
cuaacagaauagguaaaug

SEQ ID NO: 1465798 - RNA, 19 nt, Artificial Sequence
  Description of Artificial Sequence: Synthetic oligonucleotide
ggaaaauuuaaguaugcua

SEQ ID NO: 1465799 - RNA, 19 nt, Artificial Sequence
  Description of Artificial Sequence: Synthetic oligonucleotide
uacuaguugugaacuguac

SEQ ID NO: 1465800 - RNA, 19 nt, Artificial Sequence
  Description of Artificial Sequence: Synthetic oligonucleotide
cauucucccagaugcuacg

SEQ ID NO: 1465801 - RNA, 19 nt, Artificial Sequence
  Description of Artificial Sequence: Synthetic oligonucleotide
gaccuguuuuacucggucc

SEQ ID NO: 1465802 - RNA, 19 nt, Artificial Sequence
  Description of Artificial Sequence: Synthetic oligonucleotide
aucaaccuuauucaacaaa

SEQ ID NO: 1465803 - RNA, 19 nt, Artificial Sequence
  Description of Artificial Sequence: Synthetic oligonucleotide
uugcugggcaagcaaacgu

SEQ ID NO: 1465804 - RNA, 19 nt, Artificial Sequence
  Description of Artificial Sequence: Synthetic oligonucleotide
ugaagucgaacaucacaga

SEQ ID NO: 1465805 - RNA, 19 nt, Artificial Sequence
  Description of Artificial Sequence: Synthetic oligonucleotide
uuacuaguugugaacugua

SEQ ID NO: 1465806 - RNA, 19 nt, Artificial Sequence
  Description of Artificial Sequence: Synthetic oligonucleotide
uuuagucucggaagcuuaa

SEQ ID NO: 1465807 - RNA, 19 nt, Artificial Sequence
  Description of Artificial Sequence: Synthetic oligonucleotide
cuguucuuauuacuaguug

SEQ ID NO: 1465808 - RNA, 19 nt, Artificial Sequence
  Description of Artificial Sequence: Synthetic oligonucleotide
accuguuuuacucggucca

SEQ ID NO: 1465809 - RNA, 19 nt, Artificial Sequence
  Description of Artificial Sequence: Synthetic oligonucleotide
aguaugcuauaaaauucuc

SEQ ID NO: 1465810 - RNA, 19 nt, Artificial Sequence
  Description of Artificial Sequence: Synthetic oligonucleotide
ugacuauauguaugaacaa

SEQ ID NO: 1465811 - RNA, 19 nt, Artificial Sequence
  Description of Artificial Sequence: Synthetic oligonucleotide
cagaauuuaaagaggaccu

SEQ ID NO: 1465812 - RNA, 19 nt, Artificial Sequence
  Description of Artificial Sequence: Synthetic oligonucleotide
aauaaucuccacagaccug

SEQ ID NO: 1465813 - RNA, 19 nt, Artificial Sequence
  Description of Artificial Sequence: Synthetic oligonucleotide
uggacuagucccaacuuuu

SEQ ID NO: 1465814 - RNA, 19 nt, Artificial Sequence
  Description of Artificial Sequence: Synthetic oligonucleotide
aacacacgaccaaugcauc

SEQ ID NO: 1465815 - RNA, 19 nt, Artificial Sequence
  Description of Artificial Sequence: Synthetic oligonucleotide
acacuguauaaacguaaca

SEQ ID NO: 1465816 - RNA, 19 nt, Artificial Sequence
  Description of Artificial Sequence: Synthetic oligonucleotide
guuagcgucuacuggugug

SEQ ID NO: 1465817 - RNA, 19 nt, Artificial Sequence
  Description of Artificial Sequence: Synthetic oligonucleotide
gagguuaccucagacugug

SEQ ID NO: 1465818 - RNA, 19 nt, Artificial Sequence
  Description of Artificial Sequence: Synthetic oligonucleotide
aucaucguccucugcccac

SEQ ID NO: 1465819 - RNA, 19 nt, Artificial Sequence
  Description of Artificial Sequence: Synthetic oligonucleotide
uuagucaugcggguuacaa

SEQ ID NO: 1465820 - RNA, 19 nt, Artificial Sequence
  Description of Artificial Sequence: Synthetic oligonucleotide
aaaugggguuuguuuaauu

SEQ ID NO: 1465821 - RNA, 19 nt, Artificial Sequence
  Description of Artificial Sequence: Synthetic oligonucleotide
cuccaacugacacauggac

SEQ ID NO: 1465822 - RNA, 19 nt, Artificial Sequence
  Description of Artificial Sequence: Synthetic oligonucleotide
aagcaucaaccuuauucaa

SEQ ID NO: 1465823 - RNA, 19 nt, Artificial Sequence
  Description of Artificial Sequence: Synthetic oligonucleotide
gagguuucuucucguaaac

SEQ ID NO: 1465824 - RNA, 19 nt, Artificial Sequence
  Description of Artificial Sequence: Synthetic oligonucleotide
aguguuacacucaaaguua

SEQ ID NO: 1465825 - RNA, 19 nt, Artificial Sequence
  Description of Artificial Sequence: Synthetic oligonucleotide
ccaguuaaauuuuaaccug

SEQ ID NO: 1465826 - RNA, 19 nt, Artificial Sequence
  Description of Artificial Sequence: Synthetic oligonucleotide
aagaacccuguaaaggagu

SEQ ID NO: 1465827 - RNA, 19 nt, Artificial Sequence
  Description of Artificial Sequence: Synthetic oligonucleotide
uuuuaaccugagguuaccu

SEQ ID NO: 1465828 - RNA, 19 nt, Artificial Sequence
  Description of Artificial Sequence: Synthetic oligonucleotide
ugagguuaccucagacugu

SEQ ID NO: 1465829 - RNA, 19 nt, Artificial Sequence
  Description of Artificial Sequence: Synthetic oligonucleotide
uacucgguccaucuucaac

SEQ ID NO: 1465830 - RNA, 19 nt, Artificial Sequence
  Description of Artificial Sequence: Synthetic oligonucleotide
aagguguaaaugggguuug

SEQ ID NO: 1465831 - RNA, 19 nt, Artificial Sequence
  Description of Artificial Sequence: Synthetic oligonucleotide
guaaacaccauuaaaucau

SEQ ID NO: 1465832 - RNA, 19 nt, Artificial Sequence
  Description of Artificial Sequence: Synthetic oligonucleotide
acaaacgggagucucccau

SEQ ID NO: 1465833 - RNA, 19 nt, Artificial Sequence
  Description of Artificial Sequence: Synthetic oligonucleotide
ugcggguuacaaauaacuu

SEQ ID NO: 1465834 - RNA, 19 nt, Artificial Sequence
  Description of Artificial Sequence: Synthetic oligonucleotide
aagcaaacguuaucuucaa

SEQ ID NO: 1465835 - RNA, 19 nt, Artificial Sequence
  Description of Artificial Sequence: Synthetic oligonucleotide
acgggagucucccauacaa

SEQ ID NO: 1465836 - RNA, 19 nt, Artificial Sequence
  Description of Artificial Sequence: Synthetic oligonucleotide
uguguacaauuugccauug

SEQ ID NO: 1465837 - RNA, 19 nt, Artificial Sequence
  Description of Artificial Sequence: Synthetic oligonucleotide
cauugcugggcaagcaaac

SEQ ID NO: 1465838 - RNA, 19 nt, Artificial Sequence
  Description of Artificial Sequence: Synthetic oligonucleotide
uccuauuagucaugcgggu

SEQ ID NO: 1465839 - RNA, 19 nt, Artificial Sequence
  Description of Artificial Sequence: Synthetic oligonucleotide
auagagggcuucuguggag

SEQ ID NO: 1465840 - RNA, 19 nt, Artificial Sequence
  Description of Artificial Sequence: Synthetic oligonucleotide
cugacacauggacuagucc

SEQ ID NO: 1465841 - RNA, 19 nt, Artificial Sequence
  Description of Artificial Sequence: Synthetic oligonucleotide
gaacaucacagaacugccc

SEQ ID NO: 1465842 - RNA, 19 nt, Artificial Sequence
  Description of Artificial Sequence: Synthetic oligonucleotide
acaaugaaacucauccacu

SEQ ID NO: 1465843 - RNA, 19 nt, Artificial Sequence
  Description of Artificial Sequence: Synthetic oligonucleotide
uucugaguuagcgucuacu

SEQ ID NO: 1465844 - RNA, 19 nt, Artificial Sequence
  Description of Artificial Sequence: Synthetic oligonucleotide
uuagucucggaagcuuaag

SEQ ID NO: 1465845 - RNA, 19 nt, Artificial Sequence
  Description of Artificial Sequence: Synthetic oligonucleotide
cuaauauagugcuucauuu

SEQ ID NO: 1465846 - RNA, 19 nt, Artificial Sequence
  Description of Artificial Sequence: Synthetic oligonucleotide
acugacacauggacuaguc

SEQ ID NO: 1465847 - RNA, 19 nt, Artificial Sequence
  Description of Artificial Sequence: Synthetic oligonucleotide
augcggguuacaaauaacu

SEQ ID NO: 1465848 - RNA, 19 nt, Artificial Sequence
  Description of Artificial Sequence: Synthetic oligonucleotide
caacaaacgggagucuccc

SEQ ID NO: 1465849 - RNA, 19 nt, Artificial Sequence
  Description of Artificial Sequence: Synthetic oligonucleotide
auucucccagaugcuacgc

SEQ ID NO: 1465850 - RNA, 19 nt, Artificial Sequence
  Description of Artificial Sequence: Synthetic oligonucleotide
uucaacaaacgggagucuc

SEQ ID NO: 1465851 - RNA, 19 nt, Artificial Sequence
  Description of Artificial Sequence: Synthetic oligonucleotide
cuacgcugcacccaguuga

SEQ ID NO: 1465852 - RNA, 19 nt, Artificial Sequence
  Description of Artificial Sequence: Synthetic oligonucleotide
ucggaagcuuaagaaauuc

SEQ ID NO: 1465853 - RNA, 19 nt, Artificial Sequence
  Description of Artificial Sequence: Synthetic oligonucleotide
acacucaaaguuacuccac

SEQ ID NO: 1465854 - RNA, 19 nt, Artificial Sequence
  Description of Artificial Sequence: Synthetic oligonucleotide
ccaugugggaaguucacag

SEQ ID NO: 1465855 - RNA, 19 nt, Artificial Sequence
  Description of Artificial Sequence: Synthetic oligonucleotide
uuaccucagacugugcaau

SEQ ID NO: 1465856 - RNA, 19 nt, Artificial Sequence
  Description of Artificial Sequence: Synthetic oligonucleotide
ugggcaagcaaacguuauc

SEQ ID NO: 1465857 - RNA, 19 nt, Artificial Sequence
  Description of Artificial Sequence: Synthetic oligonucleotide
agcaaacguuaucuucaag

SEQ ID NO: 1465858 - RNA, 19 nt, Artificial Sequence
  Description of Artificial Sequence: Synthetic oligonucleotide
caugcggguuacaaauaac

SEQ ID NO: 1465859 - RNA, 19 nt, Artificial Sequence
  Description of Artificial Sequence: Synthetic oligonucleotide
gcuaguaauauccauucua

SEQ ID NO: 1465860 - RNA, 19 nt, Artificial Sequence
  Description of Artificial Sequence: Synthetic oligonucleotide
aaguuacuccacugcucca

SEQ ID NO: 1465861 - RNA, 19 nt, Artificial Sequence
  Description of Artificial Sequence: Synthetic oligonucleotide
acacacgaccaaugcaucu

SEQ ID NO: 1465862 - RNA, 19 nt, Artificial Sequence
  Description of Artificial Sequence: Synthetic oligonucleotide
gugcaauguggcaaguugc

SEQ ID NO: 1465863 - RNA, 19 nt, Artificial Sequence
  Description of Artificial Sequence: Synthetic oligonucleotide
aacaaacgggagucuccca

SEQ ID NO: 1465864 - RNA, 19 nt, Artificial Sequence
  Description of Artificial Sequence: Synthetic oligonucleotide
uggcaaguugcagucuucc

SEQ ID NO: 1465865 - RNA, 19 nt, Artificial Sequence
  Description of Artificial Sequence: Synthetic oligonucleotide
ucaauacacuugagguuuc

SEQ ID NO: 1465866 - RNA, 19 nt, Artificial Sequence
  Description of Artificial Sequence: Synthetic oligonucleotide
uauuagucaugcggguuac

SEQ ID NO: 1465867 - RNA, 19 nt, Artificial Sequence
  Description of Artificial Sequence: Synthetic oligonucleotide
agcuaguaauauccauucu

SEQ ID NO: 1465868 - RNA, 19 nt, Artificial Sequence
  Description of Artificial Sequence: Synthetic oligonucleotide
aacugacacauggacuagu

SEQ ID NO: 1465869 - RNA, 19 nt, Artificial Sequence
  Description of Artificial Sequence: Synthetic oligonucleotide
ggccuaacagaauagguaa

SEQ ID NO: 1465870 - RNA, 19 nt, Artificial Sequence
  Description of Artificial Sequence: Synthetic oligonucleotide
ucuguccaguuaaaacaau

SEQ ID NO: 1465871 - RNA, 19 nt, Artificial Sequence
  Description of Artificial Sequence: Synthetic oligonucleotide
ggaguaaacaccauuaaau

SEQ ID NO: 1465872 - RNA, 19 nt, Artificial Sequence
  Description of Artificial Sequence: Synthetic oligonucleotide
ugcugggcaagcaaacguu

SEQ ID NO: 1465873 - RNA, 19 nt, Artificial Sequence
  Description of Artificial Sequence: Synthetic oligonucleotide
aguuagcgucuacuggugu

SEQ ID NO: 1465874 - RNA, 19 nt, Artificial Sequence
  Description of Artificial Sequence: Synthetic oligonucleotide
uagucaugcggguuacaaa

SEQ ID NO: 1465875 - RNA, 19 nt, Artificial Sequence
  Description of Artificial Sequence: Synthetic oligonucleotide
cauagagggcuucugugga

SEQ ID NO: 1465876 - RNA, 19 nt, Artificial Sequence
  Description of Artificial Sequence: Synthetic oligonucleotide
cuauuagucaugcggguua

SEQ ID NO: 1465877 - RNA, 19 nt, Artificial Sequence
  Description of Artificial Sequence: Synthetic oligonucleotide
cuaguugugaacuguacuu

SEQ ID NO: 1465878 - RNA, 19 nt, Artificial Sequence
  Description of Artificial Sequence: Synthetic oligonucleotide
guuaccucagacugugcaa

SEQ ID NO: 1465879 - RNA, 19 nt, Artificial Sequence
  Description of Artificial Sequence: Synthetic oligonucleotide
uaguugugaacuguacuuu

SEQ ID NO: 1465880 - RNA, 19 nt, Artificial Sequence
  Description of Artificial Sequence: Synthetic oligonucleotide
cagaagauucaauaaaauu

SEQ ID NO: 1465881 - RNA, 19 nt, Artificial Sequence
  Description of Artificial Sequence: Synthetic oligonucleotide
agacugugcaauguggcaa

SEQ ID NO: 1465882 - RNA, 19 nt, Artificial Sequence
  Description of Artificial Sequence: Synthetic oligonucleotide
cagaugcuacgcugcaccc

SEQ ID NO: 1465883 - RNA, 19 nt, Artificial Sequence
  Description of Artificial Sequence: Synthetic oligonucleotide
gcaaguugcagucuuccuc

SEQ ID NO: 1465884 - RNA, 19 nt, Artificial Sequence
  Description of Artificial Sequence: Synthetic oligonucleotide
agucccaaguuaauugacu

SEQ ID NO: 1465885 - RNA, 19 nt, Artificial Sequence
  Description of Artificial Sequence: Synthetic oligonucleotide
acccuguaaaggaguaaac

SEQ ID NO: 1465886 - RNA, 19 nt, Artificial Sequence
  Description of Artificial Sequence: Synthetic oligonucleotide
uaccucagacugugcaaug

SEQ ID NO: 1465887 - RNA, 19 nt, Artificial Sequence
  Description of Artificial Sequence: Synthetic oligonucleotide
uaaaugggguuuguuuaau

SEQ ID NO: 1465888 - RNA, 19 nt, Artificial Sequence
  Description of Artificial Sequence: Synthetic oligonucleotide
auaagagaugcagcuagua

SEQ ID NO: 1465889 - RNA, 19 nt, Artificial Sequence
  Description of Artificial Sequence: Synthetic oligonucleotide
cccacuuuuccuuagggca

SEQ ID NO: 1465890 - RNA, 19 nt, Artificial Sequence
  Description of Artificial Sequence: Synthetic oligonucleotide
guaacaaaugcuccugaau

SEQ ID NO: 1465891 - RNA, 19 nt, Artificial Sequence
  Description of Artificial Sequence: Synthetic oligonucleotide
gaguuagcgucuacuggug

SEQ ID NO: 1465892 - RNA, 19 nt, Artificial Sequence
  Description of Artificial Sequence: Synthetic oligonucleotide
cuuuacgugucaauacacu

SEQ ID NO: 1465893 - RNA, 19 nt, Artificial Sequence
  Description of Artificial Sequence: Synthetic oligonucleotide
auauccauugggaaucauu

SEQ ID NO: 1465894 - RNA, 19 nt, Artificial Sequence
  Description of Artificial Sequence: Synthetic oligonucleotide
caauguggcaaguugcagu

SEQ ID NO: 1465895 - RNA, 19 nt, Artificial Sequence
  Description of Artificial Sequence: Synthetic oligonucleotide
guugugaacuguacuuuga

SEQ ID NO: 1465896 - RNA, 19 nt, Artificial Sequence
  Description of Artificial Sequence: Synthetic oligonucleotide
caugugggaaguucacaga

SEQ ID NO: 1465897 - RNA, 19 nt, Artificial Sequence
  Description of Artificial Sequence: Synthetic oligonucleotide
cuuuagucucggaagcuua

SEQ ID NO: 1465898 - RNA, 19 nt, Artificial Sequence
  Description of Artificial Sequence: Synthetic oligonucleotide
acgaccaaugcaucugauu

SEQ ID NO: 1465899 - RNA, 19 nt, Artificial Sequence
  Description of Artificial Sequence: Synthetic oligonucleotide
ucgauaagagaugcagcua

SEQ ID NO: 1465900 - RNA, 19 nt, Artificial Sequence
  Description of Artificial Sequence: Synthetic oligonucleotide
ggaagcucuaaaauaugca

SEQ ID NO: 1465901 - RNA, 19 nt, Artificial Sequence
  Description of Artificial Sequence: Synthetic oligonucleotide
uggcaacagaagauucaau

SEQ ID NO: 1465902 - RNA, 19 nt, Artificial Sequence
  Description of Artificial Sequence: Synthetic oligonucleotide
cagccaucaacaaucuaaa

SEQ ID NO: 1465903 - RNA, 19 nt, Artificial Sequence
  Description of Artificial Sequence: Synthetic oligonucleotide
ugauuaccuuuguguacaa

SEQ ID NO: 1465904 - RNA, 19 nt, Artificial Sequence
  Description of Artificial Sequence: Synthetic oligonucleotide
uccauucucccagaugcua

SEQ ID NO: 1465905 - RNA, 19 nt, Artificial Sequence
  Description of Artificial Sequence: Synthetic oligonucleotide
uaggagaaauggggcagga

SEQ ID NO: 1465906 - RNA, 19 nt, Artificial Sequence
  Description of Artificial Sequence: Synthetic oligonucleotide
cagauggccacagaccuga

SEQ ID NO: 1465907 - RNA, 19 nt, Artificial Sequence
  Description of Artificial Sequence: Synthetic oligonucleotide
aaaugucagugagcauaga

SEQ ID NO: 1465908 - RNA, 19 nt, Artificial Sequence
  Description of Artificial Sequence: Synthetic oligonucleotide
uauaagcaucaaccuuauu

SEQ ID NO: 1465909 - RNA, 19 nt, Artificial Sequence
  Description of Artificial Sequence: Synthetic oligonucleotide
auucaacaaacgggagucu

SEQ ID NO: 1465910 - RNA, 19 nt, Artificial Sequence
  Description of Artificial Sequence: Synthetic oligonucleotide
ccugaagucgaacaucaca

SEQ ID NO: 1465911 - RNA, 19 nt, Artificial Sequence
  Description of Artificial Sequence: Synthetic oligonucleotide
agccaucaacaaucuaaaa

SEQ ID NO: 1465912 - RNA, 19 nt, Artificial Sequence
  Description of Artificial Sequence: Synthetic oligonucleotide
ucgguccaucuucaacuuc

SEQ ID NO: 1465913 - RNA, 19 nt, Artificial Sequence
  Description of Artificial Sequence: Synthetic oligonucleotide
caucaaauuuuguguauau

SEQ ID NO: 1465914 - RNA, 19 nt, Artificial Sequence
  Description of Artificial Sequence: Synthetic oligonucleotide
caccauugaaaaucacaaa

SEQ ID NO: 1465915 - RNA, 19 nt, Artificial Sequence
  Description of Artificial Sequence: Synthetic oligonucleotide
cacauggacuagucccaac

SEQ ID NO: 1465916 - RNA, 19 nt, Artificial Sequence
  Description of Artificial Sequence: Synthetic oligonucleotide
gaggccuaacagaauaggu

SEQ ID NO: 1465917 - RNA, 19 nt, Artificial Sequence
  Description of Artificial Sequence: Synthetic oligonucleotide
ccauucucccagaugcuac

SEQ ID NO: 1465918 - RNA, 19 nt, Artificial Sequence
  Description of Artificial Sequence: Synthetic oligonucleotide
gcccacuuuuccuuagggc

SEQ ID NO: 1465919 - RNA, 19 nt, Artificial Sequence
  Description of Artificial Sequence: Synthetic oligonucleotide
agaugcuacgcugcaccca

SEQ ID NO: 1465920 - RNA, 19 nt, Artificial Sequence
  Description of Artificial Sequence: Synthetic oligonucleotide
ggaguguuacacucaaagu

SEQ ID NO: 1465921 - RNA, 19 nt, Artificial Sequence
  Description of Artificial Sequence: Synthetic oligonucleotide
gauaagagaugcagcuagu

SEQ ID NO: 1465922 - RNA, 19 nt, Artificial Sequence
  Description of Artificial Sequence: Synthetic oligonucleotide
cuugagguuucuucucgua

SEQ ID NO: 1465923 - RNA, 19 nt, Artificial Sequence
  Description of Artificial Sequence: Synthetic oligonucleotide
accugaagucgaacaucac

SEQ ID NO: 1465924 - RNA, 19 nt, Artificial Sequence
  Description of Artificial Sequence: Synthetic oligonucleotide
agaacccuguaaaggagua

SEQ ID NO: 1465925 - RNA, 19 nt, Artificial Sequence
  Description of Artificial Sequence: Synthetic oligonucleotide
ugccauugcugggcaagca

SEQ ID NO: 1465926 - RNA, 19 nt, Artificial Sequence
  Description of Artificial Sequence: Synthetic oligonucleotide
uuacucgguccaucuucaa

SEQ ID NO: 1465927 - RNA, 19 nt, Artificial Sequence
  Description of Artificial Sequence: Synthetic oligonucleotide
uagcgucuacugguguggc

SEQ ID NO: 1465928 - RNA, 19 nt, Artificial Sequence
  Description of Artificial Sequence: Synthetic oligonucleotide
caucaaccuuauucaacaa

SEQ ID NO: 1465929 - RNA, 19 nt, Artificial Sequence
  Description of Artificial Sequence: Synthetic oligonucleotide
caaugcaucugauucccau

SEQ ID NO: 1465930 - RNA, 19 nt, Artificial Sequence
  Description of Artificial Sequence: Synthetic oligonucleotide
auuugccauugcugggcaa

SEQ ID NO: 1465931 - RNA, 19 nt, Artificial Sequence
  Description of Artificial Sequence: Synthetic oligonucleotide
gcaauguggcaaguugcag

SEQ ID NO: 1465932 - RNA, 19 nt, Artificial Sequence
  Description of Artificial Sequence: Synthetic oligonucleotide
agguuaccucagacugugc

SEQ ID NO: 1465933 - RNA, 19 nt, Artificial Sequence
  Description of Artificial Sequence: Synthetic oligonucleotide
caagcauuaccuccaacuu

SEQ ID NO: 1465934 - RNA, 19 nt, Artificial Sequence
  Description of Artificial Sequence: Synthetic oligonucleotide
cacucaaaguuacuccacu

SEQ ID NO: 1465935 - RNA, 19 nt, Artificial Sequence
  Description of Artificial Sequence: Synthetic oligonucleotide
caucaucguccucugccca

SEQ ID NO: 1465936 - RNA, 19 nt, Artificial Sequence
  Description of Artificial Sequence: Synthetic oligonucleotide
gucgaacaucacagaacug

SEQ ID NO: 1465937 - RNA, 19 nt, Artificial Sequence
  Description of Artificial Sequence: Synthetic oligonucleotide
auuagucaugcggguuaca

SEQ ID NO: 1465938 - RNA, 19 nt, Artificial Sequence
  Description of Artificial Sequence: Synthetic oligonucleotide
caucguccucugcccacag

SEQ ID NO: 1465939 - RNA, 19 nt, Artificial Sequence
  Description of Artificial Sequence: Synthetic oligonucleotide
ugguagugacugaggccua

SEQ ID NO: 1465940 - RNA, 19 nt, Artificial Sequence
  Description of Artificial Sequence: Synthetic oligonucleotide
cccuguaaaggaguaaaca

SEQ ID NO: 1465941 - RNA, 19 nt, Artificial Sequence
  Description of Artificial Sequence: Synthetic oligonucleotide
gggcaagcaaacguuaucu

SEQ ID NO: 1465942 - RNA, 19 nt, Artificial Sequence
  Description of Artificial Sequence: Synthetic oligonucleotide
guuucaugagagguucagu

SEQ ID NO: 1465943 - RNA, 19 nt, Artificial Sequence
  Description of Artificial Sequence: Synthetic oligonucleotide
ccuccaacuuuagucucgg

SEQ ID NO: 1465944 - RNA, 19 nt, Artificial Sequence
  Description of Artificial Sequence: Synthetic oligonucleotide
gcggguuacaaauaacuuu

SEQ ID NO: 1465945 - RNA, 19 nt, Artificial Sequence
  Description of Artificial Sequence: Synthetic oligonucleotide
ccauucuagauaguaaaua

SEQ ID NO: 1465946 - RNA, 19 nt, Artificial Sequence
  Description of Artificial Sequence: Synthetic oligonucleotide
acgugucaauacacuugag

SEQ ID NO: 1465947 - RNA, 19 nt, Artificial Sequence
  Description of Artificial Sequence: Synthetic oligonucleotide
cagaccugaagucgaacau

SEQ ID NO: 1465948 - RNA, 19 nt, Artificial Sequence
  Description of Artificial Sequence: Synthetic oligonucleotide
auguggcaaguugcagucu

SEQ ID NO: 1465949 - RNA, 19 nt, Artificial Sequence
  Description of Artificial Sequence: Synthetic oligonucleotide
ccuaauauagugcuucauu

SEQ ID NO: 1465950 - RNA, 19 nt, Artificial Sequence
  Description of Artificial Sequence: Synthetic oligonucleotide
cccaaguuaauugacuaua

SEQ ID NO: 1465951 - RNA, 19 nt, Artificial Sequence
  Description of Artificial Sequence: Synthetic oligonucleotide
ggacuagucccaacuuuuc

SEQ ID NO: 1465952 - RNA, 19 nt, Artificial Sequence
  Description of Artificial Sequence: Synthetic oligonucleotide
gccauugcugggcaagcaa

SEQ ID NO: 1465953 - RNA, 19 nt, Artificial Sequence
  Description of Artificial Sequence: Synthetic oligonucleotide
guggcaaguugcagucuuc

SEQ ID NO: 1465954 - RNA, 19 nt, Artificial Sequence
  Description of Artificial Sequence: Synthetic oligonucleotide
gauuaccuuuguguacaau

SEQ ID NO: 1465955 - RNA, 19 nt, Artificial Sequence
  Description of Artificial Sequence: Synthetic oligonucleotide
guuuuacucgguccaucuu

SEQ ID NO: 1465956 - RNA, 19 nt, Artificial Sequence
  Description of Artificial Sequence: Synthetic oligonucleotide
ggacuuucuuaggagaaau

SEQ ID NO: 1465957 - RNA, 19 nt, Artificial Sequence
  Description of Artificial Sequence: Synthetic oligonucleotide
cucggaagcuuaagaaauu

SEQ ID NO: 1465958 - RNA, 19 nt, Artificial Sequence
  Description of Artificial Sequence: Synthetic oligonucleotide
ccugagguuaccucagacu

SEQ ID NO: 1465959 - RNA, 19 nt, Artificial Sequence
  Description of Artificial Sequence: Synthetic oligonucleotide
ccaaguuaauugacuauau

SEQ ID NO: 1465960 - RNA, 19 nt, Artificial Sequence
  Description of Artificial Sequence: Synthetic oligonucleotide
cugggcaagcaaacguuau

SEQ ID NO: 1465961 - RNA, 19 nt, Artificial Sequence
  Description of Artificial Sequence: Synthetic oligonucleotide
augucucuguccaguuaaa

SEQ ID NO: 1465962 - RNA, 19 nt, Artificial Sequence
  Description of Artificial Sequence: Synthetic oligonucleotide
gucuacugguguggcaaaa

SEQ ID NO: 1465963 - RNA, 19 nt, Artificial Sequence
  Description of Artificial Sequence: Synthetic oligonucleotide
cccacagcggacuuucuua

SEQ ID NO: 1465964 - RNA, 19 nt, Artificial Sequence
  Description of Artificial Sequence: Synthetic oligonucleotide
cuccaacuuuagucucgga

SEQ ID NO: 1465965 - RNA, 19 nt, Artificial Sequence
  Description of Artificial Sequence: Synthetic oligonucleotide
cguaaaccucuuccaugag

SEQ ID NO: 1465966 - RNA, 19 nt, Artificial Sequence
  Description of Artificial Sequence: Synthetic oligonucleotide
ggcaaguugcagucuuccu

SEQ ID NO: 1465967 - RNA, 19 nt, Artificial Sequence
  Description of Artificial Sequence: Synthetic oligonucleotide
gguaaaugucagugagcau

SEQ ID NO: 1465968 - RNA, 19 nt, Artificial Sequence
  Description of Artificial Sequence: Synthetic oligonucleotide
gccuaacagaauagguaaa

SEQ ID NO: 1465969 - RNA, 19 nt, Artificial Sequence
  Description of Artificial Sequence: Synthetic oligonucleotide
gguagugacugaggccuaa

SEQ ID NO: 1465970 - RNA, 19 nt, Artificial Sequence
  Description of Artificial Sequence: Synthetic oligonucleotide
cacagccaucaacaaucua

SEQ ID NO: 1465971 - RNA, 19 nt, Artificial Sequence
  Description of Artificial Sequence: Synthetic oligonucleotide
ggcaagcaaacguuaucuu

SEQ ID NO: 1465972 - RNA, 19 nt, Artificial Sequence
  Description of Artificial Sequence: Synthetic oligonucleotide
cucgguccaucuucaacuu

SEQ ID NO: 1465973 - RNA, 19 nt, Artificial Sequence
  Description of Artificial Sequence: Synthetic oligonucleotide
gcugggcaagcaaacguua

SEQ ID NO: 1465974 - RNA, 19 nt, Artificial Sequence
  Description of Artificial Sequence: Synthetic oligonucleotide
cccaugugggaaguucaca

SEQ ID NO: 1465975 - RNA, 19 nt, Artificial Sequence
  Description of Artificial Sequence: Synthetic oligonucleotide
augcuacgcugcacccagu

SEQ ID NO: 1465976 - RNA, 19 nt, Artificial Sequence
  Description of Artificial Sequence: Synthetic oligonucleotide
ccuauuagucaugcggguu

SEQ ID NO: 1465977 - RNA, 19 nt, Artificial Sequence
  Description of Artificial Sequence: Synthetic oligonucleotide
cgucuacugguguggcaaa

SEQ ID NO: 1465978 - RNA, 19 nt, Artificial Sequence
  Description of Artificial Sequence: Synthetic oligonucleotide
aauauuguuugagagcucc

SEQ ID NO: 1465979 - RNA, 19 nt, Artificial Sequence
  Description of Artificial Sequence: Synthetic oligonucleotide
uuaguaaagaaaaggagcc

SEQ ID NO: 1465980 - RNA, 19 nt, Artificial Sequence
  Description of Artificial Sequence: Synthetic oligonucleotide
aagcuaaacauuugcaugg

SEQ ID NO: 1465981 - RNA, 19 nt, Artificial Sequence
  Description of Artificial Sequence: Synthetic oligonucleotide
uguaaaauggcaaaaugac

SEQ ID NO: 1465982 - RNA, 19 nt, Artificial Sequence
  Description of Artificial Sequence: Synthetic oligonucleotide
aaagauacucuguauauga

SEQ ID NO: 1465983 - RNA, 19 nt, Artificial Sequence
  Description of Artificial Sequence: Synthetic oligonucleotide
agaaaauugaaggaauucc

SEQ ID NO: 1465984 - RNA, 19 nt, Artificial Sequence
  Description of Artificial Sequence: Synthetic oligonucleotide
aagcucaugacccaaguuc

SEQ ID NO: 1465985 - RNA, 19 nt, Artificial Sequence
  Description of Artificial Sequence: Synthetic oligonucleotide
aaauuaccccuuuaucacc

SEQ ID NO: 1465986 - RNA, 19 nt, Artificial Sequence
  Description of Artificial Sequence: Synthetic oligonucleotide
aagaaaaggagccacucug

SEQ ID NO: 1465987 - RNA, 19 nt, Artificial Sequence
  Description of Artificial Sequence: Synthetic oligonucleotide
guaauauucucccucaugc

SEQ ID NO: 1465988 - RNA, 19 nt, Artificial Sequence
  Description of Artificial Sequence: Synthetic oligonucleotide
aagaaacgcacuugaaggg

SEQ ID NO: 1465989 - RNA, 19 nt, Artificial Sequence
  Description of Artificial Sequence: Synthetic oligonucleotide
agcuaagcuaaacauuugc

SEQ ID NO: 1465990 - RNA, 19 nt, Artificial Sequence
  Description of Artificial Sequence: Synthetic oligonucleotide
aaaucuucgaaauucuuua

SEQ ID NO: 1465991 - RNA, 19 nt, Artificial Sequence
  Description of Artificial Sequence: Synthetic oligonucleotide
augaaaacugcaugaaccg

SEQ ID NO: 1465992 - RNA, 19 nt, Artificial Sequence
  Description of Artificial Sequence: Synthetic oligonucleotide
uguuuuacgcuccacuugc

SEQ ID NO: 1465993 - RNA, 19 nt, Artificial Sequence
  Description of Artificial Sequence: Synthetic oligonucleotide
aacauuugcauggcgauag

SEQ ID NO: 1465994 - RNA, 19 nt, Artificial Sequence
  Description of Artificial Sequence: Synthetic oligonucleotide
agaauauuguuugagagcu

SEQ ID NO: 1465995 - RNA, 19 nt, Artificial Sequence
  Description of Artificial Sequence: Synthetic oligonucleotide
gaugucuuuauucucggug

SEQ ID NO: 1465996 - RNA, 19 nt, Artificial Sequence
  Description of Artificial Sequence: Synthetic oligonucleotide
uauucuugcacacucugcu

SEQ ID NO: 1465997 - RNA, 19 nt, Artificial Sequence
  Description of Artificial Sequence: Synthetic oligonucleotide
cuugacuaguguuuuacgc

SEQ ID NO: 1465998 - RNA, 19 nt, Artificial Sequence
  Description of Artificial Sequence: Synthetic oligonucleotide
ucuucgaaauucuuuauaa

SEQ ID NO: 1465999 - RNA, 19 nt, Artificial Sequence
  Description of Artificial Sequence: Synthetic oligonucleotide
uucggugucacuaaucuuc

SEQ ID NO: 1466000 - RNA, 19 nt, Artificial Sequence
  Description of Artificial Sequence: Synthetic oligonucleotide
ugagcuaagcuaaacauuu

SEQ ID NO: 1466001 - RNA, 19 nt, Artificial Sequence
  Description of Artificial Sequence: Synthetic oligonucleotide
aacaccuuaaggcugcccu

SEQ ID NO: 1466002 - RNA, 19 nt, Artificial Sequence
  Description of Artificial Sequence: Synthetic oligonucleotide
ucgguguuaguaaagaaaa

SEQ ID NO: 1466003 - RNA, 19 nt, Artificial Sequence
  Description of Artificial Sequence: Synthetic oligonucleotide
guaaauuuuccauaaaucu

SEQ ID NO: 1466004 - RNA, 19 nt, Artificial Sequence
  Description of Artificial Sequence: Synthetic oligonucleotide
uguaauauucucccucaug

SEQ ID NO: 1466005 - RNA, 19 nt, Artificial Sequence
  Description of Artificial Sequence: Synthetic oligonucleotide
uaaaccucgaugcauccug

SEQ ID NO: 1466006 - RNA, 19 nt, Artificial Sequence
  Description of Artificial Sequence: Synthetic oligonucleotide
acaccaaagcucaugaccc

SEQ ID NO: 1466007 - RNA, 19 nt, Artificial Sequence
  Description of Artificial Sequence: Synthetic oligonucleotide
gaaauuacugagucagagc

SEQ ID NO: 1466008 - RNA, 19 nt, Artificial Sequence
  Description of Artificial Sequence: Synthetic oligonucleotide
cucuguauaugaaauuacc

SEQ ID NO: 1466009 - RNA, 19 nt, Artificial Sequence
  Description of Artificial Sequence: Synthetic oligonucleotide
aaugcucucuccaacugac

SEQ ID NO: 1466010 - RNA, 19 nt, Artificial Sequence
  Description of Artificial Sequence: Synthetic oligonucleotide
cacccauaaaccucgaugc

SEQ ID NO: 1466011 - RNA, 19 nt, Artificial Sequence
  Description of Artificial Sequence: Synthetic oligonucleotide
gguguuaguaaagaaaagg

SEQ ID NO: 1466012 - RNA, 19 nt, Artificial Sequence
  Description of Artificial Sequence: Synthetic oligonucleotide
uccuucuuuacgcauuucc

SEQ ID NO: 1466013 - RNA, 19 nt, Artificial Sequence
  Description of Artificial Sequence: Synthetic oligonucleotide
ucuuuucccaaagaaacgc

SEQ ID NO: 1466014 - RNA, 19 nt, Artificial Sequence
  Description of Artificial Sequence: Synthetic oligonucleotide
uccgagaaacuccucgugg

SEQ ID NO: 1466015 - RNA, 19 nt, Artificial Sequence
  Description of Artificial Sequence: Synthetic oligonucleotide
ugaaauucagacccuuaga

SEQ ID NO: 1466016 - RNA, 19 nt, Artificial Sequence
  Description of Artificial Sequence: Synthetic oligonucleotide
uuggauuccugacaguaca

SEQ ID NO: 1466017 - RNA, 19 nt, Artificial Sequence
  Description of Artificial Sequence: Synthetic oligonucleotide
aagaaaagauacucuguau

SEQ ID NO: 1466018 - RNA, 19 nt, Artificial Sequence
  Description of Artificial Sequence: Synthetic oligonucleotide
ugaagggucguguuaauuc

SEQ ID NO: 1466019 - RNA, 19 nt, Artificial Sequence
  Description of Artificial Sequence: Synthetic oligonucleotide
cuucuuuacgcauuuccag

SEQ ID NO: 1466020 - RNA, 19 nt, Artificial Sequence
  Description of Artificial Sequence: Synthetic oligonucleotide
uugacuaguguuuuacgcu

SEQ ID NO: 1466021 - RNA, 19 nt, Artificial Sequence
  Description of Artificial Sequence: Synthetic oligonucleotide
aguugcuacuuucacagcu

SEQ ID NO: 1466022 - RNA, 19 nt, Artificial Sequence
  Description of Artificial Sequence: Synthetic oligonucleotide
caauacuccgagaaacucc

SEQ ID NO: 1466023 - RNA, 19 nt, Artificial Sequence
  Description of Artificial Sequence: Synthetic oligonucleotide
ucuugacuaguguuuuacg

SEQ ID NO: 1466024 - RNA, 19 nt, Artificial Sequence
  Description of Artificial Sequence: Synthetic oligonucleotide
gaagggucguguuaauucc

SEQ ID NO: 1466025 - RNA, 19 nt, Artificial Sequence
  Description of Artificial Sequence: Synthetic oligonucleotide
uuuacgcuccacuugcuca

SEQ ID NO: 1466026 - RNA, 19 nt, Artificial Sequence
  Description of Artificial Sequence: Synthetic oligonucleotide
ucucacgggacgaugagcu

SEQ ID NO: 1466027 - RNA, 19 nt, Artificial Sequence
  Description of Artificial Sequence: Synthetic oligonucleotide
guuuugugaggauuguaag

SEQ ID NO: 1466028 - RNA, 19 nt, Artificial Sequence
  Description of Artificial Sequence: Synthetic oligonucleotide
uuuacgcagagaaaguuuu

SEQ ID NO: 1466029 - RNA, 19 nt, Artificial Sequence
  Description of Artificial Sequence: Synthetic oligonucleotide
guuaauuccaggcucuuuc

SEQ ID NO: 1466030 - RNA, 19 nt, Artificial Sequence
  Description of Artificial Sequence: Synthetic oligonucleotide
uugaacuucuguuuguaaa

SEQ ID NO: 1466031 - RNA, 19 nt, Artificial Sequence
  Description of Artificial Sequence: Synthetic oligonucleotide
aauacuccgagaaacuccu

SEQ ID NO: 1466032 - RNA, 19 nt, Artificial Sequence
  Description of Artificial Sequence: Synthetic oligonucleotide
aauuuaccaagaaauuacu

SEQ ID NO: 1466033 - RNA, 19 nt, Artificial Sequence
  Description of Artificial Sequence: Synthetic oligonucleotide
gaagacaguguccagaaua

SEQ ID NO: 1466034 - RNA, 19 nt, Artificial Sequence
  Description of Artificial Sequence: Synthetic oligonucleotide
guggcugaggcauucgucg

SEQ ID NO: 1466035 - RNA, 19 nt, Artificial Sequence
  Description of Artificial Sequence: Synthetic oligonucleotide
uucaauacuccgagaaacu

SEQ ID NO: 1466036 - RNA, 19 nt, Artificial Sequence
  Description of Artificial Sequence: Synthetic oligonucleotide
agcuugacgaacuccuuuc

SEQ ID NO: 1466037 - RNA, 19 nt, Artificial Sequence
  Description of Artificial Sequence: Synthetic oligonucleotide
uucuuuacgcauuuccagu

SEQ ID NO: 1466038 - RNA, 19 nt, Artificial Sequence
  Description of Artificial Sequence: Synthetic oligonucleotide
cucgauauccuuucucgcc

SEQ ID NO: 1466039 - RNA, 19 nt, Artificial Sequence
  Description of Artificial Sequence: Synthetic oligonucleotide
uuucucgccagcuucuuga

SEQ ID NO: 1466040 - RNA, 19 nt, Artificial Sequence
  Description of Artificial Sequence: Synthetic oligonucleotide
uacugaaaagaggaagucc

SEQ ID NO: 1466041 - RNA, 19 nt, Artificial Sequence
  Description of Artificial Sequence: Synthetic oligonucleotide
ucgauauccuuucucgcca

SEQ ID NO: 1466042 - RNA, 19 nt, Artificial Sequence
  Description of Artificial Sequence: Synthetic oligonucleotide
aaaauugaaggaauuccau

SEQ ID NO: 1466043 - RNA, 19 nt, Artificial Sequence
  Description of Artificial Sequence: Synthetic oligonucleotide
ugcugcggcacccauaaac

SEQ ID NO: 1466044 - RNA, 19 nt, Artificial Sequence
  Description of Artificial Sequence: Synthetic oligonucleotide
uaguguuuuacgcuccacu

SEQ ID NO: 1466045 - RNA, 19 nt, Artificial Sequence
  Description of Artificial Sequence: Synthetic oligonucleotide
augacccaaguucagucuc

SEQ ID NO: 1466046 - RNA, 19 nt, Artificial Sequence
  Description of Artificial Sequence: Synthetic oligonucleotide
uuuuggauuccugacagua

SEQ ID NO: 1466047 - RNA, 19 nt, Artificial Sequence
  Description of Artificial Sequence: Synthetic oligonucleotide
uugcauggcgauagcaaag

SEQ ID NO: 1466048 - RNA, 19 nt, Artificial Sequence
  Description of Artificial Sequence: Synthetic oligonucleotide
ucguguuaauuccaggcuc

SEQ ID NO: 1466049 - RNA, 19 nt, Artificial Sequence
  Description of Artificial Sequence: Synthetic oligonucleotide
uuuggauuccugacaguac

SEQ ID NO: 1466050 - RNA, 19 nt, Artificial Sequence
  Description of Artificial Sequence: Synthetic oligonucleotide
acuuucacagcucucuuaa

SEQ ID NO: 1466051 - RNA, 19 nt, Artificial Sequence
  Description of Artificial Sequence: Synthetic oligonucleotide
agauacucuguauaugaaa

SEQ ID NO: 1466052 - RNA, 19 nt, Artificial Sequence
  Description of Artificial Sequence: Synthetic oligonucleotide
aaucuucgaaauucuuuau

SEQ ID NO: 1466053 - RNA, 19 nt, Artificial Sequence
  Description of Artificial Sequence: Synthetic oligonucleotide
ugacuaguguuuuacgcuc

SEQ ID NO: 1466054 - RNA, 19 nt, Artificial Sequence
  Description of Artificial Sequence: Synthetic oligonucleotide
cuuaaggcugcccucgcgc

SEQ ID NO: 1466055 - RNA, 19 nt, Artificial Sequence
  Description of Artificial Sequence: Synthetic oligonucleotide
uuugagagcuccuguccag

SEQ ID NO: 1466056 - RNA, 19 nt, Artificial Sequence
  Description of Artificial Sequence: Synthetic oligonucleotide
uaauauucucccucaugcu

SEQ ID NO: 1466057 - RNA, 19 nt, Artificial Sequence
  Description of Artificial Sequence: Synthetic oligonucleotide
uucuccucuuuucccaaag

SEQ ID NO: 1466058 - RNA, 19 nt, Artificial Sequence
  Description of Artificial Sequence: Synthetic oligonucleotide
uuacgcauuuccaguauuc

SEQ ID NO: 1466059 - RNA, 19 nt, Artificial Sequence
  Description of Artificial Sequence: Synthetic oligonucleotide
aagaucuugaagacagugu

SEQ ID NO: 1466060 - RNA, 19 nt, Artificial Sequence
  Description of Artificial Sequence: Synthetic oligonucleotide
cuuaaacuccgccagucuc

SEQ ID NO: 1466061 - RNA, 19 nt, Artificial Sequence
  Description of Artificial Sequence: Synthetic oligonucleotide
ugaaaacugcaugaaccgc

SEQ ID NO: 1466062 - RNA, 19 nt, Artificial Sequence
  Description of Artificial Sequence: Synthetic oligonucleotide
ucuuaaacuccgccagucu

SEQ ID NO: 1466063 - RNA, 19 nt, Artificial Sequence
  Description of Artificial Sequence: Synthetic oligonucleotide
cauaaaccucgaugcaucc

SEQ ID NO: 1466064 - RNA, 19 nt, Artificial Sequence
  Description of Artificial Sequence: Synthetic oligonucleotide
cacagcucucuuaaacucc

SEQ ID NO: 1466065 - RNA, 19 nt, Artificial Sequence
  Description of Artificial Sequence: Synthetic oligonucleotide
gauucggugucacuaaucu

SEQ ID NO: 1466066 - RNA, 19 nt, Artificial Sequence
  Description of Artificial Sequence: Synthetic oligonucleotide
ggucguguuaauuccaggc

SEQ ID NO: 1466067 - RNA, 19 nt, Artificial Sequence
  Description of Artificial Sequence: Synthetic oligonucleotide
aguguuuuacgcuccacuu

SEQ ID NO: 1466068 - RNA, 19 nt, Artificial Sequence
  Description of Artificial Sequence: Synthetic oligonucleotide
cauguaauauucucccuca

SEQ ID NO: 1466069 - RNA, 19 nt, Artificial Sequence
  Description of Artificial Sequence: Synthetic oligonucleotide
agcuaaacauuugcauggc

SEQ ID NO: 1466070 - RNA, 19 nt, Artificial Sequence
  Description of Artificial Sequence: Synthetic oligonucleotide
gacaguacauccucgauau

SEQ ID NO: 1466071 - RNA, 19 nt, Artificial Sequence
  Description of Artificial Sequence: Synthetic oligonucleotide
aaacgcacuugaagggucg

SEQ ID NO: 1466072 - RNA, 19 nt, Artificial Sequence
  Description of Artificial Sequence: Synthetic oligonucleotide
uacuuaggaucuucugcag

SEQ ID NO: 1466073 - RNA, 19 nt, Artificial Sequence
  Description of Artificial Sequence: Synthetic oligonucleotide
uugacgaacuccuuucuuu

SEQ ID NO: 1466074 - RNA, 19 nt, Artificial Sequence
  Description of Artificial Sequence: Synthetic oligonucleotide
gguaggaggagagaacugg

SEQ ID NO: 1466075 - RNA, 19 nt, Artificial Sequence
  Description of Artificial Sequence: Synthetic oligonucleotide
uccaaacuaaugcucucuc

SEQ ID NO: 1466076 - RNA, 19 nt, Artificial Sequence
  Description of Artificial Sequence: Synthetic oligonucleotide
gagagaacuggcuccccag

SEQ ID NO: 1466077 - RNA, 19 nt, Artificial Sequence
  Description of Artificial Sequence: Synthetic oligonucleotide
uuuuacgcuccacuugcuc

SEQ ID NO: 1466078 - RNA, 19 nt, Artificial Sequence
  Description of Artificial Sequence: Synthetic oligonucleotide
gacucgguacggcucgucg

SEQ ID NO: 1466079 - RNA, 19 nt, Artificial Sequence
  Description of Artificial Sequence: Synthetic oligonucleotide
gacaacuuuucucucacgu

SEQ ID NO: 1466080 - RNA, 19 nt, Artificial Sequence
  Description of Artificial Sequence: Synthetic oligonucleotide
aaagcucaugacccaaguu

SEQ ID NO: 1466081 - RNA, 19 nt, Artificial Sequence
  Description of Artificial Sequence: Synthetic oligonucleotide
ucaauacuccgagaaacuc

SEQ ID NO: 1466082 - RNA, 19 nt, Artificial Sequence
  Description of Artificial Sequence: Synthetic oligonucleotide
acauuugcauggcgauagc

SEQ ID NO: 1466083 - RNA, 19 nt, Artificial Sequence
  Description of Artificial Sequence: Synthetic oligonucleotide
ugacaacuuuucucucacg

SEQ ID NO: 1466084 - RNA, 19 nt, Artificial Sequence
  Description of Artificial Sequence: Synthetic oligonucleotide
ugaacucauccaaacuaau

SEQ ID NO: 1466085 - RNA, 19 nt, Artificial Sequence
  Description of Artificial Sequence: Synthetic oligonucleotide
cugacaacuuuucucucac

SEQ ID NO: 1466086 - RNA, 19 nt, Artificial Sequence
  Description of Artificial Sequence: Synthetic oligonucleotide
gauacucuguauaugaaau

SEQ ID NO: 1466087 - RNA, 19 nt, Artificial Sequence
  Description of Artificial Sequence: Synthetic oligonucleotide
ucccucaugcuccagggau

SEQ ID NO: 1466088 - RNA, 19 nt, Artificial Sequence
  Description of Artificial Sequence: Synthetic oligonucleotide
agcgcuucuccccgcagac

SEQ ID NO: 1466089 - RNA, 19 nt, Artificial Sequence
  Description of Artificial Sequence: Synthetic oligonucleotide
ucugcgccaacaccuuaag

SEQ ID NO: 1466090 - RNA, 19 nt, Artificial Sequence
  Description of Artificial Sequence: Synthetic oligonucleotide
uuuacgcauuuccaguauu

SEQ ID NO: 1466091 - RNA, 19 nt, Artificial Sequence
  Description of Artificial Sequence: Synthetic oligonucleotide
acucgguacggcucgucgg

SEQ ID NO: 1466092 - RNA, 19 nt, Artificial Sequence
  Description of Artificial Sequence: Synthetic oligonucleotide
auggaacccagugugaggu

SEQ ID NO: 1466093 - RNA, 19 nt, Artificial Sequence
  Description of Artificial Sequence: Synthetic oligonucleotide
cucgguguuaguaaagaaa

SEQ ID NO: 1466094 - RNA, 19 nt, Artificial Sequence
  Description of Artificial Sequence: Synthetic oligonucleotide
acaccuuaaggcugcccuc

SEQ ID NO: 1466095 - RNA, 19 nt, Artificial Sequence
  Description of Artificial Sequence: Synthetic oligonucleotide
ucucuuaaacuccgccagu

SEQ ID NO: 1466096 - RNA, 19 nt, Artificial Sequence
  Description of Artificial Sequence: Synthetic oligonucleotide
uguuuacgcagagaaaguu

SEQ ID NO: 1466097 - RNA, 19 nt, Artificial Sequence
  Description of Artificial Sequence: Synthetic oligonucleotide
acgaugagcuaagcuaaac

SEQ ID NO: 1466098 - RNA, 19 nt, Artificial Sequence
  Description of Artificial Sequence: Synthetic oligonucleotide
gcacccauaaaccucgaug

SEQ ID NO: 1466099 - RNA, 19 nt, Artificial Sequence
  Description of Artificial Sequence: Synthetic oligonucleotide
gagaaacuccucguggcug

SEQ ID NO: 1466100 - RNA, 19 nt, Artificial Sequence
  Description of Artificial Sequence: Synthetic oligonucleotide
agaaacgcacuugaagggu

SEQ ID NO: 1466101 - RNA, 19 nt, Artificial Sequence
  Description of Artificial Sequence: Synthetic oligonucleotide
acaacggcugccacagggc

SEQ ID NO: 1466102 - RNA, 19 nt, Artificial Sequence
  Description of Artificial Sequence: Synthetic oligonucleotide
guuugagagcuccugucca

SEQ ID NO: 1466103 - RNA, 19 nt, Artificial Sequence
  Description of Artificial Sequence: Synthetic oligonucleotide
auucgucgccauccaaguc

SEQ ID NO: 1466104 - RNA, 19 nt, Artificial Sequence
  Description of Artificial Sequence: Synthetic oligonucleotide
cagaccgccgccaucuuug

SEQ ID NO: 1466105 - RNA, 19 nt, Artificial Sequence
  Description of Artificial Sequence: Synthetic oligonucleotide
acuugaagggucguguuaa

SEQ ID NO: 1466106 - RNA, 19 nt, Artificial Sequence
  Description of Artificial Sequence: Synthetic oligonucleotide
ucucgguguuaguaaagaa

SEQ ID NO: 1466107 - RNA, 19 nt, Artificial Sequence
  Description of Artificial Sequence: Synthetic oligonucleotide
uuccaguauucuugcacac

SEQ ID NO: 1466108 - RNA, 19 nt, Artificial Sequence
  Description of Artificial Sequence: Synthetic oligonucleotide
ucccacgguaggaggagag

SEQ ID NO: 1466109 - RNA, 19 nt, Artificial Sequence
  Description of Artificial Sequence: Synthetic oligonucleotide
ugcggcacccauaaaccuc

SEQ ID NO: 1466110 - RNA, 19 nt, Artificial Sequence
  Description of Artificial Sequence: Synthetic oligonucleotide
uucugcgccaacaccuuaa

SEQ ID NO: 1466111 - RNA, 19 nt, Artificial Sequence
  Description of Artificial Sequence: Synthetic oligonucleotide
gcaugaaccgcuguuuacg

SEQ ID NO: 1466112 - RNA, 19 nt, Artificial Sequence
  Description of Artificial Sequence: Synthetic oligonucleotide
uggugagauggcuugucaa

SEQ ID NO: 1466113 - RNA, 19 nt, Artificial Sequence
  Description of Artificial Sequence: Synthetic oligonucleotide
agggccgggacucgguacg

SEQ ID NO: 1466114 - RNA, 19 nt, Artificial Sequence
  Description of Artificial Sequence: Synthetic oligonucleotide
auacucuguauaugaaauu

SEQ ID NO: 1466115 - RNA, 19 nt, Artificial Sequence
  Description of Artificial Sequence: Synthetic oligonucleotide
accuuaaggcugcccucgc

SEQ ID NO: 1466116 - RNA, 19 nt, Artificial Sequence
  Description of Artificial Sequence: Synthetic oligonucleotide
uuacgcuccacuugcucaa

SEQ ID NO: 1466117 - RNA, 19 nt, Artificial Sequence
  Description of Artificial Sequence: Synthetic oligonucleotide
acuaguguuuuacgcucca

SEQ ID NO: 1466118 - RNA, 19 nt, Artificial Sequence
  Description of Artificial Sequence: Synthetic oligonucleotide
ugacccaaguucagucucu

SEQ ID NO: 1466119 - RNA, 19 nt, Artificial Sequence
  Description of Artificial Sequence: Synthetic oligonucleotide
aaccgcuguuuacgcagag

SEQ ID NO: 1466120 - RNA, 19 nt, Artificial Sequence
  Description of Artificial Sequence: Synthetic oligonucleotide
aguacauccucgauauccu

SEQ ID NO: 1466121 - RNA, 19 nt, Artificial Sequence
  Description of Artificial Sequence: Synthetic oligonucleotide
uuaucacccaggucucuaa

SEQ ID NO: 1466122 - RNA, 19 nt, Artificial Sequence
  Description of Artificial Sequence: Synthetic oligonucleotide
aagauacucuguauaugaa

SEQ ID NO: 1466123 - RNA, 19 nt, Artificial Sequence
  Description of Artificial Sequence: Synthetic oligonucleotide
agcucaugacccaaguuca

SEQ ID NO: 1466124 - RNA, 19 nt, Artificial Sequence
  Description of Artificial Sequence: Synthetic oligonucleotide
agucucacgggacgaugag

SEQ ID NO: 1466125 - RNA, 19 nt, Artificial Sequence
  Description of Artificial Sequence: Synthetic oligonucleotide
gacuaguguuuuacgcucc

SEQ ID NO: 1466126 - RNA, 19 nt, Artificial Sequence
  Description of Artificial Sequence: Synthetic oligonucleotide
agauggcuugucaagaaaa

SEQ ID NO: 1466127 - RNA, 19 nt, Artificial Sequence
  Description of Artificial Sequence: Synthetic oligonucleotide
auggcgauagcaaagucuu

SEQ ID NO: 1466128 - RNA, 19 nt, Artificial Sequence
  Description of Artificial Sequence: Synthetic oligonucleotide
caccuuaaggcugcccucg

SEQ ID NO: 1466129 - RNA, 19 nt, Artificial Sequence
  Description of Artificial Sequence: Synthetic oligonucleotide
cuguccaguugcuacuuuc

SEQ ID NO: 1466130 - RNA, 19 nt, Artificial Sequence
  Description of Artificial Sequence: Synthetic oligonucleotide
gaaacgcacuugaaggguc

SEQ ID NO: 1466131 - RNA, 19 nt, Artificial Sequence
  Description of Artificial Sequence: Synthetic oligonucleotide
cucgguacggcucgucggc

SEQ ID NO: 1466132 - RNA, 19 nt, Artificial Sequence
  Description of Artificial Sequence: Synthetic oligonucleotide
auccaaacuaaugcucucu

SEQ ID NO: 1466133 - RNA, 19 nt, Artificial Sequence
  Description of Artificial Sequence: Synthetic oligonucleotide
gggacgaugagcuaagcua

SEQ ID NO: 1466134 - RNA, 19 nt, Artificial Sequence
  Description of Artificial Sequence: Synthetic oligonucleotide
acgaacuccuuucuuucaa

SEQ ID NO: 1466135 - RNA, 19 nt, Artificial Sequence
  Description of Artificial Sequence: Synthetic oligonucleotide
uuuaucacccaggucucua

SEQ ID NO: 1466136 - RNA, 19 nt, Artificial Sequence
  Description of Artificial Sequence: Synthetic oligonucleotide
cucuuaaacuccgccaguc

SEQ ID NO: 1466137 - RNA, 19 nt, Artificial Sequence
  Description of Artificial Sequence: Synthetic oligonucleotide
uaucacccaggucucuaaa

SEQ ID NO: 1466138 - RNA, 19 nt, Artificial Sequence
  Description of Artificial Sequence: Synthetic oligonucleotide
cauccaaacuaaugcucuc

SEQ ID NO: 1466139 - RNA, 19 nt, Artificial Sequence
  Description of Artificial Sequence: Synthetic oligonucleotide
caacggcugccacagggcc

SEQ ID NO: 1466140 - RNA, 19 nt, Artificial Sequence
  Description of Artificial Sequence: Synthetic oligonucleotide
ucacgggacgaugagcuaa

SEQ ID NO: 1466141 - RNA, 19 nt, Artificial Sequence
  Description of Artificial Sequence: Synthetic oligonucleotide
agaugucuuuauucucggu

SEQ ID NO: 1466142 - RNA, 19 nt, Artificial Sequence
  Description of Artificial Sequence: Synthetic oligonucleotide
acccauaaaccucgaugca

SEQ ID NO: 1466143 - RNA, 19 nt, Artificial Sequence
  Description of Artificial Sequence: Synthetic oligonucleotide
cccuuuaucacccaggucu

SEQ ID NO: 1466144 - RNA, 19 nt, Artificial Sequence
  Description of Artificial Sequence: Synthetic oligonucleotide
uaaacuccgccagucucac

SEQ ID NO: 1466145 - RNA, 19 nt, Artificial Sequence
  Description of Artificial Sequence: Synthetic oligonucleotide
gguuuugugaggauuguaa

SEQ ID NO: 1466146 - RNA, 19 nt, Artificial Sequence
  Description of Artificial Sequence: Synthetic oligonucleotide
auucucgguguuaguaaag

SEQ ID NO: 1466147 - RNA, 19 nt, Artificial Sequence
  Description of Artificial Sequence: Synthetic oligonucleotide
caagccgccagccgagcgc

SEQ ID NO: 1466148 - RNA, 19 nt, Artificial Sequence
  Description of Artificial Sequence: Synthetic oligonucleotide
ccauaaaccucgaugcauc

SEQ ID NO: 1466149 - RNA, 19 nt, Artificial Sequence
  Description of Artificial Sequence: Synthetic oligonucleotide
augaaccgcuguuuacgca

SEQ ID NO: 1466150 - RNA, 19 nt, Artificial Sequence
  Description of Artificial Sequence: Synthetic oligonucleotide
aagggucguguuaauucca

SEQ ID NO: 1466151 - RNA, 19 nt, Artificial Sequence
  Description of Artificial Sequence: Synthetic oligonucleotide
auguaauauucucccucau

SEQ ID NO: 1466152 - RNA, 19 nt, Artificial Sequence
  Description of Artificial Sequence: Synthetic oligonucleotide
ugaagacaguguccagaau

SEQ ID NO: 1466153 - RNA, 19 nt, Artificial Sequence
  Description of Artificial Sequence: Synthetic oligonucleotide
gagcuaagcuaaacauuug

SEQ ID NO: 1466154 - RNA, 19 nt, Artificial Sequence
  Description of Artificial Sequence: Synthetic oligonucleotide
uucagacccuuagaaaauu

SEQ ID NO: 1466155 - RNA, 19 nt, Artificial Sequence
  Description of Artificial Sequence: Synthetic oligonucleotide
cacgggacgaugagcuaag

SEQ ID NO: 1466156 - RNA, 19 nt, Artificial Sequence
  Description of Artificial Sequence: Synthetic oligonucleotide
uccgccagucucacgggac

SEQ ID NO: 1466157 - RNA, 19 nt, Artificial Sequence
  Description of Artificial Sequence: Synthetic oligonucleotide
ucgucgccauccaagucaa

SEQ ID NO: 1466158 - RNA, 19 nt, Artificial Sequence
  Description of Artificial Sequence: Synthetic oligonucleotide
augagcuaagcuaaacauu

SEQ ID NO: 1466159 - RNA, 19 nt, Artificial Sequence
  Description of Artificial Sequence: Synthetic oligonucleotide
ugaggcauucgucgccauc

SEQ ID NO: 1466160 - RNA, 19 nt, Artificial Sequence
  Description of Artificial Sequence: Synthetic oligonucleotide
cuccgagaaacuccucgug

SEQ ID NO: 1466161 - RNA, 19 nt, Artificial Sequence
  Description of Artificial Sequence: Synthetic oligonucleotide
aaaccucgaugcauccugu

SEQ ID NO: 1466162 - RNA, 19 nt, Artificial Sequence
  Description of Artificial Sequence: Synthetic oligonucleotide
cugcgccaacaccuuaagg

SEQ ID NO: 1466163 - RNA, 19 nt, Artificial Sequence
  Description of Artificial Sequence: Synthetic oligonucleotide
guccaguugcuacuuucac

SEQ ID NO: 1466164 - RNA, 19 nt, Artificial Sequence
  Description of Artificial Sequence: Synthetic oligonucleotide
gucguguuaauuccaggcu

SEQ ID NO: 1466165 - RNA, 19 nt, Artificial Sequence
  Description of Artificial Sequence: Synthetic oligonucleotide
gugagauggcuugucaaga

SEQ ID NO: 1466166 - RNA, 19 nt, Artificial Sequence
  Description of Artificial Sequence: Synthetic oligonucleotide
cuuucucgccagcuucuug

SEQ ID NO: 1466167 - RNA, 19 nt, Artificial Sequence
  Description of Artificial Sequence: Synthetic oligonucleotide
gcuaagcuaaacauuugca

SEQ ID NO: 1466168 - RNA, 19 nt, Artificial Sequence
  Description of Artificial Sequence: Synthetic oligonucleotide
ggugucacuaaucuucacu

SEQ ID NO: 1466169 - RNA, 19 nt, Artificial Sequence
  Description of Artificial Sequence: Synthetic oligonucleotide
gcccuuugcagcuuguuuc

SEQ ID NO: 1466170 - RNA, 19 nt, Artificial Sequence
  Description of Artificial Sequence: Synthetic oligonucleotide
gcauucgucgccauccaag

SEQ ID NO: 1466171 - RNA, 19 nt, Artificial Sequence
  Description of Artificial Sequence: Synthetic oligonucleotide
gaauauuguuugagagcuc

SEQ ID NO: 1466172 - RNA, 19 nt, Artificial Sequence
  Description of Artificial Sequence: Synthetic oligonucleotide
agggucguguuaauuccag

SEQ ID NO: 1466173 - RNA, 19 nt, Artificial Sequence
  Description of Artificial Sequence: Synthetic oligonucleotide
accucgaugcauccuguuu

SEQ ID NO: 1466174 - RNA, 19 nt, Artificial Sequence
  Description of Artificial Sequence: Synthetic oligonucleotide
auucggugucacuaaucuu

SEQ ID NO: 1466175 - RNA, 19 nt, Artificial Sequence
  Description of Artificial Sequence: Synthetic oligonucleotide
agcuucuugacuaguguuu

SEQ ID NO: 1466176 - RNA, 19 nt, Artificial Sequence
  Description of Artificial Sequence: Synthetic oligonucleotide
uugaagggucguguuaauu

SEQ ID NO: 1466177 - RNA, 19 nt, Artificial Sequence
  Description of Artificial Sequence: Synthetic oligonucleotide
ggggugucauguaauauuc

SEQ ID NO: 1466178 - RNA, 19 nt, Artificial Sequence
  Description of Artificial Sequence: Synthetic oligonucleotide
gcugcggcacccauaaacc

SEQ ID NO: 1466179 - RNA, 19 nt, Artificial Sequence
  Description of Artificial Sequence: Synthetic oligonucleotide
gggucguguuaauuccagg

SEQ ID NO: 1466180 - RNA, 19 nt, Artificial Sequence
  Description of Artificial Sequence: Synthetic oligonucleotide
acuggucccaagucauuuu

SEQ ID NO: 1466181 - RNA, 19 nt, Artificial Sequence
  Description of Artificial Sequence: Synthetic oligonucleotide
gugugagguuuugugagga

SEQ ID NO: 1466182 - RNA, 19 nt, Artificial Sequence
  Description of Artificial Sequence: Synthetic oligonucleotide
auauuguuugagagcuccu

SEQ ID NO: 1466183 - RNA, 19 nt, Artificial Sequence
  Description of Artificial Sequence: Synthetic oligonucleotide
gcggcacccauaaaccucg

SEQ ID NO: 1466184 - RNA, 19 nt, Artificial Sequence
  Description of Artificial Sequence: Synthetic oligonucleotide
cuaguguuuuacgcuccac

SEQ ID NO: 1466185 - RNA, 19 nt, Artificial Sequence
  Description of Artificial Sequence: Synthetic oligonucleotide
ccugccagcgccacgccgg

SEQ ID NO: 1466186 - RNA, 19 nt, Artificial Sequence
  Description of Artificial Sequence: Synthetic oligonucleotide
ggacucccacgguaggagg

SEQ ID NO: 1466187 - RNA, 19 nt, Artificial Sequence
  Description of Artificial Sequence: Synthetic oligonucleotide
cuucgaaauucuuuauaau

SEQ ID NO: 1466188 - RNA, 19 nt, Artificial Sequence
  Description of Artificial Sequence: Synthetic oligonucleotide
acucccacgguaggaggag

SEQ ID NO: 1466189 - RNA, 19 nt, Artificial Sequence
  Description of Artificial Sequence: Synthetic oligonucleotide
cuugacucccuuaaugcuu

SEQ ID NO: 1466190 - RNA, 19 nt, Artificial Sequence
  Description of Artificial Sequence: Synthetic oligonucleotide
ugggacucccacgguagga

SEQ ID NO: 1466191 - RNA, 19 nt, Artificial Sequence
  Description of Artificial Sequence: Synthetic oligonucleotide
aagccgccagccgagcgcu

SEQ ID NO: 1466192 - RNA, 19 nt, Artificial Sequence
  Description of Artificial Sequence: Synthetic oligonucleotide
gcagccuuccgccccaagc

SEQ ID NO: 1466193 - RNA, 19 nt, Artificial Sequence
  Description of Artificial Sequence: Synthetic oligonucleotide
gucucacgggacgaugagc

SEQ ID NO: 1466194 - RNA, 19 nt, Artificial Sequence
  Description of Artificial Sequence: Synthetic oligonucleotide
ucgucggccggccgcgagc

SEQ ID NO: 1466195 - RNA, 19 nt, Artificial Sequence
  Description of Artificial Sequence: Synthetic oligonucleotide
ggacgaugagcuaagcuaa

SEQ ID NO: 1466196 - RNA, 19 nt, Artificial Sequence
  Description of Artificial Sequence: Synthetic oligonucleotide
caugacccaaguucagucu

SEQ ID NO: 1466197 - RNA, 19 nt, Artificial Sequence
  Description of Artificial Sequence: Synthetic oligonucleotide
ucccggggugucauguaau

SEQ ID NO: 1466198 - RNA, 19 nt, Artificial Sequence
  Description of Artificial Sequence: Synthetic oligonucleotide
cugggauucggugucacua

SEQ ID NO: 1466199 - RNA, 19 nt, Artificial Sequence
  Description of Artificial Sequence: Synthetic oligonucleotide
gacucccacgguaggagga

SEQ ID NO: 1466200 - RNA, 19 nt, Artificial Sequence
  Description of Artificial Sequence: Synthetic oligonucleotide
gcugguuccugggauucgg

SEQ ID NO: 1466201 - RNA, 19 nt, Artificial Sequence
  Description of Artificial Sequence: Synthetic oligonucleotide
cauucgucgccauccaagu

SEQ ID NO: 1466202 - RNA, 19 nt, Artificial Sequence
  Description of Artificial Sequence: Synthetic oligonucleotide
acgggacgaugagcuaagc

SEQ ID NO: 1466203 - RNA, 19 nt, Artificial Sequence
  Description of Artificial Sequence: Synthetic oligonucleotide
cuuucacgcggccgugcug

SEQ ID NO: 1466204 - RNA, 19 nt, Artificial Sequence
  Description of Artificial Sequence: Synthetic oligonucleotide
cacgcggccgugcugccac

SEQ ID NO: 1466205 - RNA, 19 nt, Artificial Sequence
  Description of Artificial Sequence: Synthetic oligonucleotide
cacuugcucaaacauuacu

SEQ ID NO: 1466206 - RNA, 19 nt, Artificial Sequence
  Description of Artificial Sequence: Synthetic oligonucleotide
cuguuuacgcagagaaagu

SEQ ID NO: 1466207 - RNA, 19 nt, Artificial Sequence
  Description of Artificial Sequence: Synthetic oligonucleotide
gcugccacgccgcuccugc

SEQ ID NO: 1466208 - RNA, 19 nt, Artificial Sequence
  Description of Artificial Sequence: Synthetic oligonucleotide
cugcauccagcauuuuaaa

SEQ ID NO: 1466209 - RNA, 19 nt, Artificial Sequence
  Description of Artificial Sequence: Synthetic oligonucleotide
gggacucccacgguaggag

SEQ ID NO: 1466210 - RNA, 19 nt, Artificial Sequence
  Description of Artificial Sequence: Synthetic oligonucleotide
caaagcucaugacccaagu

SEQ ID NO: 1466211 - RNA, 19 nt, Artificial Sequence
  Description of Artificial Sequence: Synthetic oligonucleotide
cgugcugccacgccgcucc

SEQ ID NO: 1466212 - RNA, 19 nt, Artificial Sequence
  Description of Artificial Sequence: Synthetic oligonucleotide
cucaugaaauucagacccu

SEQ ID NO: 1466213 - RNA, 19 nt, Artificial Sequence
  Description of Artificial Sequence: Synthetic oligonucleotide
gaaccgcuguuuacgcaga

SEQ ID NO: 1466214 - RNA, 19 nt, Artificial Sequence
  Description of Artificial Sequence: Synthetic oligonucleotide
cagggccgggacucgguac

SEQ ID NO: 1466215 - RNA, 19 nt, Artificial Sequence
  Description of Artificial Sequence: Synthetic oligonucleotide
cgguguuaguaaagaaaag

SEQ ID NO: 1466216 - RNA, 19 nt, Artificial Sequence
  Description of Artificial Sequence: Synthetic oligonucleotide
gagucagagcuggugagau

SEQ ID NO: 1466217 - RNA, 19 nt, Artificial Sequence
  Description of Artificial Sequence: Synthetic oligonucleotide
accgcuguuuacgcagaga

SEQ ID NO: 1466218 - RNA, 19 nt, Artificial Sequence
  Description of Artificial Sequence: Synthetic oligonucleotide
gcgcgcagcugcuuucacg

SEQ ID NO: 1466219 - RNA, 19 nt, Artificial Sequence
  Description of Artificial Sequence: Synthetic oligonucleotide
cugcaugaaccgcuguuua

SEQ ID NO: 1466220 - RNA, 19 nt, Artificial Sequence
  Description of Artificial Sequence: Synthetic oligonucleotide
gaggaagucccgggguguc

SEQ ID NO: 1466221 - RNA, 19 nt, Artificial Sequence
  Description of Artificial Sequence: Synthetic oligonucleotide
gacgaugagcuaagcuaaa

SEQ ID NO: 1466222 - RNA, 19 nt, Artificial Sequence
  Description of Artificial Sequence: Synthetic oligonucleotide
acgcacuugaagggucgug

SEQ ID NO: 1466223 - RNA, 19 nt, Artificial Sequence
  Description of Artificial Sequence: Synthetic oligonucleotide
ccgcuguuuacgcagagaa

SEQ ID NO: 1466224 - RNA, 19 nt, Artificial Sequence
  Description of Artificial Sequence: Synthetic oligonucleotide
cgcagcugcuuucacgcgg

SEQ ID NO: 1466225 - RNA, 19 nt, Artificial Sequence
  Description of Artificial Sequence: Synthetic oligonucleotide
cucgcgcgcagcugcuuuc

SEQ ID NO: 1466226 - RNA, 19 nt, Artificial Sequence
  Description of Artificial Sequence: Synthetic oligonucleotide
gcucaugacccaaguucag

SEQ ID NO: 1466227 - RNA, 19 nt, Artificial Sequence
  Description of Artificial Sequence: Synthetic oligonucleotide
ucgcgcgcagcugcuuuca

SEQ ID NO: 1466228 - RNA, 19 nt, Artificial Sequence
  Description of Artificial Sequence: Synthetic oligonucleotide
aaagggcccuuugcagcuu

SEQ ID NO: 1466229 - RNA, 19 nt, Artificial Sequence
  Description of Artificial Sequence: Synthetic oligonucleotide
aggaagucccgggguguca

SEQ ID NO: 1466230 - RNA, 19 nt, Artificial Sequence
  Description of Artificial Sequence: Synthetic oligonucleotide
cugccagcgccacgccggc

SEQ ID NO: 1466231 - RNA, 19 nt, Artificial Sequence
  Description of Artificial Sequence: Synthetic oligonucleotide
ccaagccgccagccgagcg

SEQ ID NO: 1466232 - RNA, 19 nt, Artificial Sequence
  Description of Artificial Sequence: Synthetic oligonucleotide
cucgucggccggccgcgag

SEQ ID NO: 1466233 - RNA, 19 nt, Artificial Sequence
  Description of Artificial Sequence: Synthetic oligonucleotide
cugccacgccgcuccugcc

SEQ ID NO: 1466234 - RNA, 19 nt, Artificial Sequence
  Description of Artificial Sequence: Synthetic oligonucleotide
cugcggcacccauaaaccu

SEQ ID NO: 1466235 - RNA, 19 nt, Artificial Sequence
  Description of Artificial Sequence: Synthetic oligonucleotide
gcugaggcauucgucgcca

SEQ ID NO: 1466236 - RNA, 19 nt, Artificial Sequence
  Description of Artificial Sequence: Synthetic oligonucleotide
gcgcagcugcuuucacgcg

SEQ ID NO: 1466237 - RNA, 19 nt, Artificial Sequence
  Description of Artificial Sequence: Synthetic oligonucleotide
agcgccacgccggccacaa

SEQ ID NO: 1466238 - RNA, 19 nt, Artificial Sequence
  Description of Artificial Sequence: Synthetic oligonucleotide
cugcuuucacgcggccgug

SEQ ID NO: 1466239 - RNA, 19 nt, Artificial Sequence
  Description of Artificial Sequence: Synthetic oligonucleotide
cuugaagggucguguuaau

SEQ ID NO: 1466240 - RNA, 19 nt, Artificial Sequence
  Description of Artificial Sequence: Synthetic oligonucleotide
cuacuuucacagcucucuu

SEQ ID NO: 1466241 - RNA, 19 nt, Artificial Sequence
  Description of Artificial Sequence: Synthetic oligonucleotide
acgcggccgugcugccacg

SEQ ID NO: 1466242 - RNA, 19 nt, Artificial Sequence
  Description of Artificial Sequence: Synthetic oligonucleotide
ccagucucacgggacgaug

SEQ ID NO: 1466243 - RNA, 19 nt, Artificial Sequence
  Description of Artificial Sequence: Synthetic oligonucleotide
cuuuaucacccaggucucu

SEQ ID NO: 1466244 - RNA, 19 nt, Artificial Sequence
  Description of Artificial Sequence: Synthetic oligonucleotide
guacggcucgucggccggc

SEQ ID NO: 1466245 - RNA, 19 nt, Artificial Sequence
  Description of Artificial Sequence: Synthetic oligonucleotide
cucacgggacgaugagcua

SEQ ID NO: 1466246 - RNA, 19 nt, Artificial Sequence
  Description of Artificial Sequence: Synthetic oligonucleotide
ggcauucgucgccauccaa

SEQ ID NO: 1466247 - RNA, 19 nt, Artificial Sequence
  Description of Artificial Sequence: Synthetic oligonucleotide
ggccgugcugccacgccgc

SEQ ID NO: 1466248 - RNA, 19 nt, Artificial Sequence
  Description of Artificial Sequence: Synthetic oligonucleotide
gaacccagugugagguuuu

SEQ ID NO: 1466249 - RNA, 19 nt, Artificial Sequence
  Description of Artificial Sequence: Synthetic oligonucleotide
ccgggacucgguacggcuc

SEQ ID NO: 1466250 - RNA, 19 nt, Artificial Sequence
  Description of Artificial Sequence: Synthetic oligonucleotide
ccucgaugcauccuguuuu

SEQ ID NO: 1466251 - RNA, 19 nt, Artificial Sequence
  Description of Artificial Sequence: Synthetic oligonucleotide
cucccacgguaggaggaga

SEQ ID NO: 1466252 - RNA, 19 nt, Artificial Sequence
  Description of Artificial Sequence: Synthetic oligonucleotide
cuugcuuacuuaggaucuu

SEQ ID NO: 1466253 - RNA, 19 nt, Artificial Sequence
  Description of Artificial Sequence: Synthetic oligonucleotide
gcuuucacgcggccgugcu

SEQ ID NO: 1466254 - RNA, 19 nt, Artificial Sequence
  Description of Artificial Sequence: Synthetic oligonucleotide
gggauucggugucacuaau

SEQ ID NO: 1466255 - RNA, 19 nt, Artificial Sequence
  Description of Artificial Sequence: Synthetic oligonucleotide
cugcccucgcgcgcagcug

SEQ ID NO: 1466256 - RNA, 19 nt, Artificial Sequence
  Description of Artificial Sequence: Synthetic oligonucleotide
ggcccuuugcagcuuguuu

SEQ ID NO: 1466257 - RNA, 19 nt, Artificial Sequence
  Description of Artificial Sequence: Synthetic oligonucleotide
gggccgggacucgguacgg

SEQ ID NO: 1466258 - RNA, 19 nt, Artificial Sequence
  Description of Artificial Sequence: Synthetic oligonucleotide
cccauaaaccucgaugcau

SEQ ID NO: 1466259 - RNA, 19 nt, Artificial Sequence
  Description of Artificial Sequence: Synthetic oligonucleotide
gagcccgcgccgcagccuu

SEQ ID NO: 1466260 - RNA, 19 nt, Artificial Sequence
  Description of Artificial Sequence: Synthetic oligonucleotide
ccacagggccgggacucgg

SEQ ID NO: 1466261 - RNA, 19 nt, Artificial Sequence
  Description of Artificial Sequence: Synthetic oligonucleotide
cacagggccgggacucggu

SEQ ID NO: 1466262 - RNA, 19 nt, Artificial Sequence
  Description of Artificial Sequence: Synthetic oligonucleotide
gccgggacucgguacggcu

SEQ ID NO: 1466263 - RNA, 19 nt, Artificial Sequence
  Description of Artificial Sequence: Synthetic oligonucleotide
cgccauccaagucaaagau

SEQ ID NO: 1466264 - RNA, 19 nt, Artificial Sequence
  Description of Artificial Sequence: Synthetic oligonucleotide
ggccgggacucgguacggc

SEQ ID NO: 1466265 - RNA, 19 nt, Artificial Sequence
  Description of Artificial Sequence: Synthetic oligonucleotide
ggacucgguacggcucguc

SEQ ID NO: 1466266 - RNA, 19 nt, Artificial Sequence
  Description of Artificial Sequence: Synthetic oligonucleotide
ggcacccauaaaccucgau

SEQ ID NO: 1466267 - RNA, 19 nt, Artificial Sequence
  Description of Artificial Sequence: Synthetic oligonucleotide
cggggugucauguaauauu

SEQ ID NO: 1466268 - RNA, 19 nt, Artificial Sequence
  Description of Artificial Sequence: Synthetic oligonucleotide
cuuccgccccaagccgcca

SEQ ID NO: 1466269 - RNA, 19 nt, Artificial Sequence
  Description of Artificial Sequence: Synthetic oligonucleotide
cgagcgcuucuccccgcag

SEQ ID NO: 1466270 - RNA, 19 nt, Artificial Sequence
  Description of Artificial Sequence: Synthetic oligonucleotide
cgccgcagccuuccgcccc

SEQ ID NO: 1466271 - RNA, 19 nt, Artificial Sequence
  Description of Artificial Sequence: Synthetic oligonucleotide
gccgccagccgagcgcuuc

SEQ ID NO: 1466272 - RNA, 19 nt, Artificial Sequence
  Description of Artificial Sequence: Synthetic oligonucleotide
cugaggcauucgucgccau

SEQ ID NO: 1466273 - RNA, 19 nt, Artificial Sequence
  Description of Artificial Sequence: Synthetic oligonucleotide
cccacgguaggaggagaga

SEQ ID NO: 1466274 - RNA, 19 nt, Artificial Sequence
  Description of Artificial Sequence: Synthetic oligonucleotide
ccgccccaagccgccagcc

SEQ ID NO: 1466275 - RNA, 19 nt, Artificial Sequence
  Description of Artificial Sequence: Synthetic oligonucleotide
cccgcagaccgccgccauc

SEQ ID NO: 1466276 - RNA, 19 nt, Artificial Sequence
  Description of Artificial Sequence: Synthetic oligonucleotide
cgggacgaugagcuaagcu

SEQ ID NO: 1466277 - RNA, 19 nt, Artificial Sequence
  Description of Artificial Sequence: Synthetic oligonucleotide
ccugggauucggugucacu

SEQ ID NO: 1466278 - RNA, 19 nt, Artificial Sequence
  Description of Artificial Sequence: Synthetic oligonucleotide
gcagaccgccgccaucuuu

SEQ ID NO: 1466279 - RNA, 19 nt, Artificial Sequence
  Description of Artificial Sequence: Synthetic oligonucleotide
cugcugcggcacccauaaa

SEQ ID NO: 1466280 - RNA, 19 nt, Artificial Sequence
  Description of Artificial Sequence: Synthetic oligonucleotide
ccgcagaccgccgccaucu

SEQ ID NO: 1466281 - RNA, 19 nt, Artificial Sequence
  Description of Artificial Sequence: Synthetic oligonucleotide
cgcgcgcagcugcuuucac

SEQ ID NO: 1466282 - RNA, 19 nt, Artificial Sequence
  Description of Artificial Sequence: Synthetic oligonucleotide
ccggggugucauguaauau

SEQ ID NO: 1466283 - RNA, 19 nt, Artificial Sequence
  Description of Artificial Sequence: Synthetic oligonucleotide
ccgugcugccacgccgcuc

SEQ ID NO: 1466284 - RNA, 19 nt, Artificial Sequence
  Description of Artificial Sequence: Synthetic oligonucleotide
cggccgcgagcccgcgccg

SEQ ID NO: 1466285 - RNA, 19 nt, Artificial Sequence
  Description of Artificial Sequence: Synthetic oligonucleotide
gccgugcugccacgccgcu

SEQ ID NO: 1466286 - RNA, 19 nt, Artificial Sequence
  Description of Artificial Sequence: Synthetic oligonucleotide
gggcccuuugcagcuuguu

SEQ ID NO: 1466287 - RNA, 19 nt, Artificial Sequence
  Description of Artificial Sequence: Synthetic oligonucleotide
gcgccacgccggccacaac

SEQ ID NO: 1466288 - RNA, 19 nt, Artificial Sequence
  Description of Artificial Sequence: Synthetic oligonucleotide
ccucgcgcgcagcugcuuu

SEQ ID NO: 1466289 - RNA, 19 nt, Artificial Sequence
  Description of Artificial Sequence: Synthetic oligonucleotide
agccgccagccgagcgcuu

SEQ ID NO: 1466290 - RNA, 19 nt, Artificial Sequence
  Description of Artificial Sequence: Synthetic oligonucleotide
gcucgucggccggccgcga

SEQ ID NO: 1466291 - RNA, 19 nt, Artificial Sequence
  Description of Artificial Sequence: Synthetic oligonucleotide
gcccucgcgcgcagcugcu

SEQ ID NO: 1466292 - RNA, 19 nt, Artificial Sequence
  Description of Artificial Sequence: Synthetic oligonucleotide
cgcagaccgccgccaucuu

SEQ ID NO: 1466293 - RNA, 19 nt, Artificial Sequence
  Description of Artificial Sequence: Synthetic oligonucleotide
  modified_base (6)..(6): a, c, u, g, unknown or other
aaaagngacuuguuugagc

SEQ ID NO: 1466294 - RNA, 19 nt, Artificial Sequence
  Description of Artificial Sequence: Synthetic oligonucleotide
acuuguuugagcuugugcg

SEQ ID NO: 1466295 - RNA, 19 nt, Artificial Sequence
  Description of Artificial Sequence: Synthetic oligonucleotide
  modified_base (5)..(5): a, c, u, g, unknown or other
aaagngacuuguuugagcu

SEQ ID NO: 1466296 - RNA, 19 nt, Artificial Sequence
  Description of Artificial Sequence: Synthetic oligonucleotide
uauauuuguucguuggucg

SEQ ID NO: 1466297 - RNA, 19 nt, Artificial Sequence
  Description of Artificial Sequence: Synthetic oligonucleotide
auuaguuuuauaguucagc

SEQ ID NO: 1466298 - RNA, 19 nt, Artificial Sequence
  Description of Artificial Sequence: Synthetic oligonucleotide
aaggacaacaucucgaaga

SEQ ID NO: 1466299 - RNA, 19 nt, Artificial Sequence
  Description of Artificial Sequence: Synthetic oligonucleotide
aagauguugaguuuugcga

SEQ ID NO: 1466300 - RNA, 19 nt, Artificial Sequence
  Description of Artificial Sequence: Synthetic oligonucleotide
accauaauugccuccaagg

SEQ ID NO: 1466301 - RNA, 19 nt, Artificial Sequence
  Description of Artificial Sequence: Synthetic oligonucleotide
gaagauguugaguuuugcg

SEQ ID NO: 1466302 - RNA, 19 nt, Artificial Sequence
  Description of Artificial Sequence: Synthetic oligonucleotide
gauuguguaauuauucugc

SEQ ID NO: 1466303 - RNA, 19 nt, Artificial Sequence
  Description of Artificial Sequence: Synthetic oligonucleotide
cuccgaauuaguuuuauag

SEQ ID NO: 1466304 - RNA, 19 nt, Artificial Sequence
  Description of Artificial Sequence: Synthetic oligonucleotide
aaggguaaagguucuugac

SEQ ID NO: 1466305 - RNA, 19 nt, Artificial Sequence
  Description of Artificial Sequence: Synthetic oligonucleotide
uuaggguagaagauauagg

SEQ ID NO: 1466306 - RNA, 19 nt, Artificial Sequence
  Description of Artificial Sequence: Synthetic oligonucleotide
gacacuuggagaaacagcc

SEQ ID NO: 1466307 - RNA, 19 nt, Artificial Sequence
  Description of Artificial Sequence: Synthetic oligonucleotide
uggauaaacuuccuggccc

SEQ ID NO: 1466308 - RNA, 19 nt, Artificial Sequence
  Description of Artificial Sequence: Synthetic oligonucleotide
aguuccuugucaaaguucc

SEQ ID NO: 1466309 - RNA, 19 nt, Artificial Sequence
  Description of Artificial Sequence: Synthetic oligonucleotide
aagucguucugcucugugc

SEQ ID NO: 1466310 - RNA, 19 nt, Artificial Sequence
  Description of Artificial Sequence: Synthetic oligonucleotide
cuaauaaaggggcuuuugg

SEQ ID NO: 1466311 - RNA, 19 nt, Artificial Sequence
  Description of Artificial Sequence: Synthetic oligonucleotide
agagacagaccauugugac

SEQ ID NO: 1466312 - RNA, 19 nt, Artificial Sequence
  Description of Artificial Sequence: Synthetic oligonucleotide
uuagccuacucccucaggc

SEQ ID NO: 1466313 - RNA, 19 nt, Artificial Sequence
  Description of Artificial Sequence: Synthetic oligonucleotide
agacagaccauugugacuc

SEQ ID NO: 1466314 - RNA, 19 nt, Artificial Sequence
  Description of Artificial Sequence: Synthetic oligonucleotide
ucuugaguagccagcagag

SEQ ID NO: 1466315 - RNA, 19 nt, Artificial Sequence
  Description of Artificial Sequence: Synthetic oligonucleotide
auugccaaagaacuaauaa

SEQ ID NO: 1466316 - RNA, 19 nt, Artificial Sequence
  Description of Artificial Sequence: Synthetic oligonucleotide
aguuuugcgacuccauuuc

SEQ ID NO: 1466317 - RNA, 19 nt, Artificial Sequence
  Description of Artificial Sequence: Synthetic oligonucleotide
uuucgguagucacagaacu

SEQ ID NO: 1466318 - RNA, 19 nt, Artificial Sequence
  Description of Artificial Sequence: Synthetic oligonucleotide
cuuaggguagaagauauag

SEQ ID NO: 1466319 - RNA, 19 nt, Artificial Sequence
  Description of Artificial Sequence: Synthetic oligonucleotide
agcacagacgagccgaacc

SEQ ID NO: 1466320 - RNA, 19 nt, Artificial Sequence
  Description of Artificial Sequence: Synthetic oligonucleotide
caugaaggcaggcucaucc

SEQ ID NO: 1466321 - RNA, 19 nt, Artificial Sequence
  Description of Artificial Sequence: Synthetic oligonucleotide
gaacucuacacccuugggc

SEQ ID NO: 1466322 - RNA, 19 nt, Artificial Sequence
  Description of Artificial Sequence: Synthetic oligonucleotide
guguaauuauucugcaagg

SEQ ID NO: 1466323 - RNA, 19 nt, Artificial Sequence
  Description of Artificial Sequence: Synthetic oligonucleotide
ugggguaggaaaccugugg

SEQ ID NO: 1466324 - RNA, 19 nt, Artificial Sequence
  Description of Artificial Sequence: Synthetic oligonucleotide
uuauucugcaaggacaaca

SEQ ID NO: 1466325 - RNA, 19 nt, Artificial Sequence
  Description of Artificial Sequence: Synthetic oligonucleotide
auaaaggggcuuuugggug

SEQ ID NO: 1466326 - RNA, 19 nt, Artificial Sequence
  Description of Artificial Sequence: Synthetic oligonucleotide
agggugaccaucgugacgg

SEQ ID NO: 1466327 - RNA, 19 nt, Artificial Sequence
  Description of Artificial Sequence: Synthetic oligonucleotide
uguuuauauuuguucguug

SEQ ID NO: 1466328 - RNA, 19 nt, Artificial Sequence
  Description of Artificial Sequence: Synthetic oligonucleotide
uccgaauuaguuuuauagu

SEQ ID NO: 1466329 - RNA, 19 nt, Artificial Sequence
  Description of Artificial Sequence: Synthetic oligonucleotide
cuuguuugagcuugugcgg

SEQ ID NO: 1466330 - RNA, 19 nt, Artificial Sequence
  Description of Artificial Sequence: Synthetic oligonucleotide
uaaaggggcuuuugggugg

SEQ ID NO: 1466331 - RNA, 19 nt, Artificial Sequence
  Description of Artificial Sequence: Synthetic oligonucleotide
ccaaguucaagaaaggggc

SEQ ID NO: 1466332 - RNA, 19 nt, Artificial Sequence
  Description of Artificial Sequence: Synthetic oligonucleotide
aauuauucugcaaggacaa

SEQ ID NO: 1466333 - RNA, 19 nt, Artificial Sequence
  Description of Artificial Sequence: Synthetic oligonucleotide
auaauugccuccaaggcug

SEQ ID NO: 1466334 - RNA, 19 nt, Artificial Sequence
  Description of Artificial Sequence: Synthetic oligonucleotide
ugcaaggacaacaucucga

SEQ ID NO: 1466335 - RNA, 19 nt, Artificial Sequence
  Description of Artificial Sequence: Synthetic oligonucleotide
uguaauuauucugcaagga

SEQ ID NO: 1466336 - RNA, 19 nt, Artificial Sequence
  Description of Artificial Sequence: Synthetic oligonucleotide
caauccugggacuucacag

SEQ ID NO: 1466337 - RNA, 19 nt, Artificial Sequence
  Description of Artificial Sequence: Synthetic oligonucleotide
aucucgaagauccaauccu

SEQ ID NO: 1466338 - RNA, 19 nt, Artificial Sequence
  Description of Artificial Sequence: Synthetic oligonucleotide
gaacuuucgguagucacag

SEQ ID NO: 1466339 - RNA, 19 nt, Artificial Sequence
  Description of Artificial Sequence: Synthetic oligonucleotide
  modified_base (7)..(7): a, c, u, g, unknown or other
gaaaagngacuuguuugag

SEQ ID NO: 1466340 - RNA, 19 nt, Artificial Sequence
  Description of Artificial Sequence: Synthetic oligonucleotide
ccuuauuuagccuacuccc

SEQ ID NO: 1466341 - RNA, 19 nt, Artificial Sequence
  Description of Artificial Sequence: Synthetic oligonucleotide
aaguucaagaaaggggcag

SEQ ID NO: 1466342 - RNA, 19 nt, Artificial Sequence
  Description of Artificial Sequence: Synthetic oligonucleotide
  modified_base (9)..(9): a, c, u, g, unknown or other
gggaaaagngacuuguuug

SEQ ID NO: 1466343 - RNA, 19 nt, Artificial Sequence
  Description of Artificial Sequence: Synthetic oligonucleotide
uuauauuuguucguugguc

SEQ ID NO: 1466344 - RNA, 19 nt, Artificial Sequence
  Description of Artificial Sequence: Synthetic oligonucleotide
ucucgaagauccaauccug

SEQ ID NO: 1466345 - RNA, 19 nt, Artificial Sequence
  Description of Artificial Sequence: Synthetic oligonucleotide
uccaaggagaacuuucggu

SEQ ID NO: 1466346 - RNA, 19 nt, Artificial Sequence
  Description of Artificial Sequence: Synthetic oligonucleotide
gacgagccgaaccacaggc

SEQ ID NO: 1466347 - RNA, 19 nt, Artificial Sequence
  Description of Artificial Sequence: Synthetic oligonucleotide
uggagaaacagcccaggcu

SEQ ID NO: 1466348 - RNA, 19 nt, Artificial Sequence
  Description of Artificial Sequence: Synthetic oligonucleotide
aaagaaggcaguggggaug

SEQ ID NO: 1466349 - RNA, 19 nt, Artificial Sequence
  Description of Artificial Sequence: Synthetic oligonucleotide
  modified_base (3)..(3): a, c, u, g, unknown or other
agngacuuguuugagcuug

SEQ ID NO: 1466350 - RNA, 19 nt, Artificial Sequence
  Description of Artificial Sequence: Synthetic oligonucleotide
uguugauuguguaauuauu

SEQ ID NO: 1466351 - RNA, 19 nt, Artificial Sequence
  Description of Artificial Sequence: Synthetic oligonucleotide
gauauaggcacagccacac

SEQ ID NO: 1466352 - RNA, 19 nt, Artificial Sequence
  Description of Artificial Sequence: Synthetic oligonucleotide
guugauuguguaauuauuc

SEQ ID NO: 1466353 - RNA, 19 nt, Artificial Sequence
  Description of Artificial Sequence: Synthetic oligonucleotide
aucuugaguagccagcaga

SEQ ID NO: 1466354 - RNA, 19 nt, Artificial Sequence
  Description of Artificial Sequence: Synthetic oligonucleotide
ugugcgcagugucagagac

SEQ ID NO: 1466355 - RNA, 19 nt, Artificial Sequence
  Description of Artificial Sequence: Synthetic oligonucleotide
aguuggucacacugcacgg

SEQ ID NO: 1466356 - RNA, 19 nt, Artificial Sequence
  Description of Artificial Sequence: Synthetic oligonucleotide
acuuucgguagucacagaa

SEQ ID NO: 1466357 - RNA, 19 nt, Artificial Sequence
  Description of Artificial Sequence: Synthetic oligonucleotide
gacuuguuugagcuugugc

SEQ ID NO: 1466358 - RNA, 19 nt, Artificial Sequence
  Description of Artificial Sequence: Synthetic oligonucleotide
ugcgacuccauuucuuuug

SEQ ID NO: 1466359 - RNA, 19 nt, Artificial Sequence
  Description of Artificial Sequence: Synthetic oligonucleotide
uggucguuucccaggaaag

SEQ ID NO: 1466360 - RNA, 19 nt, Artificial Sequence
  Description of Artificial Sequence: Synthetic oligonucleotide
aaucgggaggggaaggagg

SEQ ID NO: 1466361 - RNA, 19 nt, Artificial Sequence
  Description of Artificial Sequence: Synthetic oligonucleotide
uuguugauuguguaauuau

SEQ ID NO: 1466362 - RNA, 19 nt, Artificial Sequence
  Description of Artificial Sequence: Synthetic oligonucleotide
ucucaguacagucaccaua

SEQ ID NO: 1466363 - RNA, 19 nt, Artificial Sequence
  Description of Artificial Sequence: Synthetic oligonucleotide
uauuuagccuacucccuca

SEQ ID NO: 1466364 - RNA, 19 nt, Artificial Sequence
  Description of Artificial Sequence: Synthetic oligonucleotide
ucggccauuuccaccacag

SEQ ID NO: 1466365 - RNA, 19 nt, Artificial Sequence
  Description of Artificial Sequence: Synthetic oligonucleotide
caaggagaacuuucgguag

SEQ ID NO: 1466366 - RNA, 19 nt, Artificial Sequence
  Description of Artificial Sequence: Synthetic oligonucleotide
aaagcaguguucagaagca

SEQ ID NO: 1466367 - RNA, 19 nt, Artificial Sequence
  Description of Artificial Sequence: Synthetic oligonucleotide
agaccauugugacucccgg

SEQ ID NO: 1466368 - RNA, 19 nt, Artificial Sequence
  Description of Artificial Sequence: Synthetic oligonucleotide
aaggagaacuuucgguagu

SEQ ID NO: 1466369 - RNA, 19 nt, Artificial Sequence
  Description of Artificial Sequence: Synthetic oligonucleotide
caucucgaagauccaaucc

SEQ ID NO: 1466370 - RNA, 19 nt, Artificial Sequence
  Description of Artificial Sequence: Synthetic oligonucleotide
guacuuggaaggguaaagg

SEQ ID NO: 1466371 - RNA, 19 nt, Artificial Sequence
  Description of Artificial Sequence: Synthetic oligonucleotide
uaaagguucuugacaggga

SEQ ID NO: 1466372 - RNA, 19 nt, Artificial Sequence
  Description of Artificial Sequence: Synthetic oligonucleotide
uuuagccuacucccucagg

SEQ ID NO: 1466373 - RNA, 19 nt, Artificial Sequence
  Description of Artificial Sequence: Synthetic oligonucleotide
cucgaagauccaauccugg

SEQ ID NO: 1466374 - RNA, 19 nt, Artificial Sequence
  Description of Artificial Sequence: Synthetic oligonucleotide
aggacaacucuccucucuc

SEQ ID NO: 1466375 - RNA, 19 nt, Artificial Sequence
  Description of Artificial Sequence: Synthetic oligonucleotide
  modified_base (18)..(18): a, c, u, g, unknown or other
cugauccaagggaaaagng

SEQ ID NO: 1466376 - RNA, 19 nt, Artificial Sequence
  Description of Artificial Sequence: Synthetic oligonucleotide
uguucguuggucguuuccc

SEQ ID NO: 1466377 - RNA, 19 nt, Artificial Sequence
  Description of Artificial Sequence: Synthetic oligonucleotide
cuggauaaacuuccuggcc

SEQ ID NO: 1466378 - RNA, 19 nt, Artificial Sequence
  Description of Artificial Sequence: Synthetic oligonucleotide
accaucgugacggagggag

SEQ ID NO: 1466379 - RNA, 19 nt, Artificial Sequence
  Description of Artificial Sequence: Synthetic oligonucleotide
agccuacucccucaggcac

SEQ ID NO: 1466380 - RNA, 19 nt, Artificial Sequence
  Description of Artificial Sequence: Synthetic oligonucleotide
uagucacagaacucuacac

SEQ ID NO: 1466381 - RNA, 19 nt, Artificial Sequence
  Description of Artificial Sequence: Synthetic oligonucleotide
auauuuguucguuggucgu

SEQ ID NO: 1466382 - RNA, 19 nt, Artificial Sequence
  Description of Artificial Sequence: Synthetic oligonucleotide
ucguuggucguuucccagg

SEQ ID NO: 1466383 - RNA, 19 nt, Artificial Sequence
  Description of Artificial Sequence: Synthetic oligonucleotide
guagaagauauaggcacag

SEQ ID NO: 1466384 - RNA, 19 nt, Artificial Sequence
  Description of Artificial Sequence: Synthetic oligonucleotide
ugggugagaggacaacucu

SEQ ID NO: 1466385 - RNA, 19 nt, Artificial Sequence
  Description of Artificial Sequence: Synthetic oligonucleotide
cuuucgguagucacagaac

SEQ ID NO: 1466386 - RNA, 19 nt, Artificial Sequence
  Description of Artificial Sequence: Synthetic oligonucleotide
guaggguggggacagaauc

SEQ ID NO: 1466387 - RNA, 19 nt, Artificial Sequence
  Description of Artificial Sequence: Synthetic oligonucleotide
acuaauaaaggggcuuuug

SEQ ID NO: 1466388 - RNA, 19 nt, Artificial Sequence
  Description of Artificial Sequence: Synthetic oligonucleotide
aagaacuaauaaaggggcu

SEQ ID NO: 1466389 - RNA, 19 nt, Artificial Sequence
  Description of Artificial Sequence: Synthetic oligonucleotide
cucaguacagucaccauaa

SEQ ID NO: 1466390 - RNA, 19 nt, Artificial Sequence
  Description of Artificial Sequence: Synthetic oligonucleotide
  modified_base (8)..(8): a, c, u, g, unknown or other
ggaaaagngacuuguuuga

SEQ ID NO: 1466391 - RNA, 19 nt, Artificial Sequence
  Description of Artificial Sequence: Synthetic oligonucleotide
guagucacagaacucuaca

SEQ ID NO: 1466392 - RNA, 19 nt, Artificial Sequence
  Description of Artificial Sequence: Synthetic oligonucleotide
ugaguuuugcgacuccauu

SEQ ID NO: 1466393 - RNA, 19 nt, Artificial Sequence
  Description of Artificial Sequence: Synthetic oligonucleotide
caggccgcaaguugaagcc

SEQ ID NO: 1466394 - RNA, 19 nt, Artificial Sequence
  Description of Artificial Sequence: Synthetic oligonucleotide
uuugcgacuccauuucuuu

SEQ ID NO: 1466395 - RNA, 19 nt, Artificial Sequence
  Description of Artificial Sequence: Synthetic oligonucleotide
accaguaccggcuucugaa

SEQ ID NO: 1466396 - RNA, 19 nt, Artificial Sequence
  Description of Artificial Sequence: Synthetic oligonucleotide
ggagugaaugcacaccugc

SEQ ID NO: 1466397 - RNA, 19 nt, Artificial Sequence
  Description of Artificial Sequence: Synthetic oligonucleotide
ucguuucccaggaaaguuc

SEQ ID NO: 1466398 - RNA, 19 nt, Artificial Sequence
  Description of Artificial Sequence: Synthetic oligonucleotide
uucguuggucguuucccag

SEQ ID NO: 1466399 - RNA, 19 nt, Artificial Sequence
  Description of Artificial Sequence: Synthetic oligonucleotide
ugagaggacaacucuccuc

SEQ ID NO: 1466400 - RNA, 19 nt, Artificial Sequence
  Description of Artificial Sequence: Synthetic oligonucleotide
ucauuagcugcuguucucu

SEQ ID NO: 1466401 - RNA, 19 nt, Artificial Sequence
  Description of Artificial Sequence: Synthetic oligonucleotide
uuguguaauuauucugcaa

SEQ ID NO: 1466402 - RNA, 19 nt, Artificial Sequence
  Description of Artificial Sequence: Synthetic oligonucleotide
ccacccaaguucaagaaag

SEQ ID NO: 1466403 - RNA, 19 nt, Artificial Sequence
  Description of Artificial Sequence: Synthetic oligonucleotide
uuguucguuggucguuucc

SEQ ID NO: 1466404 - RNA, 19 nt, Artificial Sequence
  Description of Artificial Sequence: Synthetic oligonucleotide
aguugaagccaccgucauc

SEQ ID NO: 1466405 - RNA, 19 nt, Artificial Sequence
  Description of Artificial Sequence: Synthetic oligonucleotide
aagaaggcaguggggaugu

SEQ ID NO: 1466406 - RNA, 19 nt, Artificial Sequence
  Description of Artificial Sequence: Synthetic oligonucleotide
ccuaggguugcauaggcag

SEQ ID NO: 1466407 - RNA, 19 nt, Artificial Sequence
  Description of Artificial Sequence: Synthetic oligonucleotide
aacaucucgaagauccaau

SEQ ID NO: 1466408 - RNA, 19 nt, Artificial Sequence
  Description of Artificial Sequence: Synthetic oligonucleotide
uguugaguuuugcgacucc

SEQ ID NO: 1466409 - RNA, 19 nt, Artificial Sequence
  Description of Artificial Sequence: Synthetic oligonucleotide
uuguuuauauuuguucguu

SEQ ID NO: 1466410 - RNA, 19 nt, Artificial Sequence
  Description of Artificial Sequence: Synthetic oligonucleotide
aguaccggcuucugaaccu

SEQ ID NO: 1466411 - RNA, 19 nt, Artificial Sequence
  Description of Artificial Sequence: Synthetic oligonucleotide
uaggguugcauaggcaggc

SEQ ID NO: 1466412 - RNA, 19 nt, Artificial Sequence
  Description of Artificial Sequence: Synthetic oligonucleotide
agaacuaauaaaggggcuu

SEQ ID NO: 1466413 - RNA, 19 nt, Artificial Sequence
  Description of Artificial Sequence: Synthetic oligonucleotide
uuguuugagcuugugcgga

SEQ ID NO: 1466414 - RNA, 19 nt, Artificial Sequence
  Description of Artificial Sequence: Synthetic oligonucleotide
cacccaaguucaagaaagg

SEQ ID NO: 1466415 - RNA, 19 nt, Artificial Sequence
  Description of Artificial Sequence: Synthetic oligonucleotide
ucucuggucaugggguagg

SEQ ID NO: 1466416 - RNA, 19 nt, Artificial Sequence
  Description of Artificial Sequence: Synthetic oligonucleotide
uuggaaggguaaagguucu

SEQ ID NO: 1466417 - RNA, 19 nt, Artificial Sequence
  Description of Artificial Sequence: Synthetic oligonucleotide
uuuugcgacuccauuucuu

SEQ ID NO: 1466418 - RNA, 19 nt, Artificial Sequence
  Description of Artificial Sequence: Synthetic oligonucleotide
agaacuuucgguagucaca

SEQ ID NO: 1466419 - RNA, 19 nt, Artificial Sequence
  Description of Artificial Sequence: Synthetic oligonucleotide
acaacucuccucucucaug

SEQ ID NO: 1466420 - RNA, 19 nt, Artificial Sequence
  Description of Artificial Sequence: Synthetic oligonucleotide
uucgguagucacagaacuc

SEQ ID NO: 1466421 - RNA, 19 nt, Artificial Sequence
  Description of Artificial Sequence: Synthetic oligonucleotide
auguugaguuuugcgacuc

SEQ ID NO: 1466422 - RNA, 19 nt, Artificial Sequence
  Description of Artificial Sequence: Synthetic oligonucleotide
uuccuugucaaaguuccaa

SEQ ID NO: 1466423 - RNA, 19 nt, Artificial Sequence
  Description of Artificial Sequence: Synthetic oligonucleotide
uggaagcaggagugaaugc

SEQ ID NO: 1466424 - RNA, 19 nt, Artificial Sequence
  Description of Artificial Sequence: Synthetic oligonucleotide
ccauaauugccuccaaggc

SEQ ID NO: 1466425 - RNA, 19 nt, Artificial Sequence
  Description of Artificial Sequence: Synthetic oligonucleotide
gguaaagguucuugacagg

SEQ ID NO: 1466426 - RNA, 19 nt, Artificial Sequence
  Description of Artificial Sequence: Synthetic oligonucleotide
uugaguuuugcgacuccau

SEQ ID NO: 1466427 - RNA, 19 nt, Artificial Sequence
  Description of Artificial Sequence: Synthetic oligonucleotide
acacugcacggcuuccgac

SEQ ID NO: 1466428 - RNA, 19 nt, Artificial Sequence
  Description of Artificial Sequence: Synthetic oligonucleotide
aggagggugaccaucguga

SEQ ID NO: 1466429 - RNA, 19 nt, Artificial Sequence
  Description of Artificial Sequence: Synthetic oligonucleotide
cacuuggagaaacagccca

SEQ ID NO: 1466430 - RNA, 19 nt, Artificial Sequence
  Description of Artificial Sequence: Synthetic oligonucleotide
ggcacugcagaauccagug

SEQ ID NO: 1466431 - RNA, 19 nt, Artificial Sequence
  Description of Artificial Sequence: Synthetic oligonucleotide
cagacgagccgaaccacag

SEQ ID NO: 1466432 - RNA, 19 nt, Artificial Sequence
  Description of Artificial Sequence: Synthetic oligonucleotide
uagaagauauaggcacagc

SEQ ID NO: 1466433 - RNA, 19 nt, Artificial Sequence
  Description of Artificial Sequence: Synthetic oligonucleotide
gaagguggcgcggcgaggc

SEQ ID NO: 1466434 - RNA, 19 nt, Artificial Sequence
  Description of Artificial Sequence: Synthetic oligonucleotide
agacgagccgaaccacagg

SEQ ID NO: 1466435 - RNA, 19 nt, Artificial Sequence
  Description of Artificial Sequence: Synthetic oligonucleotide
caguaccggcuucugaacc

SEQ ID NO: 1466436 - RNA, 19 nt, Artificial Sequence
  Description of Artificial Sequence: Synthetic oligonucleotide
uuccgagccuuguuuauau

SEQ ID NO: 1466437 - RNA, 19 nt, Artificial Sequence
  Description of Artificial Sequence: Synthetic oligonucleotide
cauaauugccuccaaggcu

SEQ ID NO: 1466438 - RNA, 19 nt, Artificial Sequence
  Description of Artificial Sequence: Synthetic oligonucleotide
guccuggagaccaguaccg

SEQ ID NO: 1466439 - RNA, 19 nt, Artificial Sequence
  Description of Artificial Sequence: Synthetic oligonucleotide
  modified_base (4)..(4): a, c, u, g, unknown or other
aagngacuuguuugagcuu

SEQ ID NO: 1466440 - RNA, 19 nt, Artificial Sequence
  Description of Artificial Sequence: Synthetic oligonucleotide
uuuuccgagccuuguuuau

SEQ ID NO: 1466441 - RNA, 19 nt, Artificial Sequence
  Description of Artificial Sequence: Synthetic oligonucleotide
ccgucauccaugaaggcag

SEQ ID NO: 1466442 - RNA, 19 nt, Artificial Sequence
  Description of Artificial Sequence: Synthetic oligonucleotide
ucguccuggagaccaguac

SEQ ID NO: 1466443 - RNA, 19 nt, Artificial Sequence
  Description of Artificial Sequence: Synthetic oligonucleotide
gaaucgggaggggaaggag

SEQ ID NO: 1466444 - RNA, 19 nt, Artificial Sequence
  Description of Artificial Sequence: Synthetic oligonucleotide
aauugccaaagaacuaaua

SEQ ID NO: 1466445 - RNA, 19 nt, Artificial Sequence
  Description of Artificial Sequence: Synthetic oligonucleotide
uagccuacucccucaggca

SEQ ID NO: 1466446 - RNA, 19 nt, Artificial Sequence
  Description of Artificial Sequence: Synthetic oligonucleotide
cucauuagcugcuguucuc

SEQ ID NO: 1466447 - RNA, 19 nt, Artificial Sequence
  Description of Artificial Sequence: Synthetic oligonucleotide
ucccucgcaccccuggccc

SEQ ID NO: 1466448 - RNA, 19 nt, Artificial Sequence
  Description of Artificial Sequence: Synthetic oligonucleotide
aguucaagaaaggggcaga

SEQ ID NO: 1466449 - RNA, 19 nt, Artificial Sequence
  Description of Artificial Sequence: Synthetic oligonucleotide
aggguagaagauauaggca

SEQ ID NO: 1466450 - RNA, 19 nt, Artificial Sequence
  Description of Artificial Sequence: Synthetic oligonucleotide
agcaguguucagaagcaug

SEQ ID NO: 1466451 - RNA, 19 nt, Artificial Sequence
  Description of Artificial Sequence: Synthetic oligonucleotide
ggugagaggacaacucucc

SEQ ID NO: 1466452 - RNA, 19 nt, Artificial Sequence
  Description of Artificial Sequence: Synthetic oligonucleotide
guaggaaaccuguggccac

SEQ ID NO: 1466453 - RNA, 19 nt, Artificial Sequence
  Description of Artificial Sequence: Synthetic oligonucleotide
ugcggaaagcaguguucag

SEQ ID NO: 1466454 - RNA, 19 nt, Artificial Sequence
  Description of Artificial Sequence: Synthetic oligonucleotide
auugugacucccggcagug

SEQ ID NO: 1466455 - RNA, 19 nt, Artificial Sequence
  Description of Artificial Sequence: Synthetic oligonucleotide
gugacggagggagacuccg

SEQ ID NO: 1466456 - RNA, 19 nt, Artificial Sequence
  Description of Artificial Sequence: Synthetic oligonucleotide
guugcauaggcaggcggag

SEQ ID NO: 1466457 - RNA, 19 nt, Artificial Sequence
  Description of Artificial Sequence: Synthetic oligonucleotide
gucaccauaauugccucca

SEQ ID NO: 1466458 - RNA, 19 nt, Artificial Sequence
  Description of Artificial Sequence: Synthetic oligonucleotide
ugagccgggcagcucagaa

SEQ ID NO: 1466459 - RNA, 19 nt, Artificial Sequence
  Description of Artificial Sequence: Synthetic oligonucleotide
uccuggagaccaguaccgg

SEQ ID NO: 1466460 - RNA, 19 nt, Artificial Sequence
  Description of Artificial Sequence: Synthetic oligonucleotide
cauaggcaggcggaggggc

SEQ ID NO: 1466461 - RNA, 19 nt, Artificial Sequence
  Description of Artificial Sequence: Synthetic oligonucleotide
guuguugauuguguaauua

SEQ ID NO: 1466462 - RNA, 19 nt, Artificial Sequence
  Description of Artificial Sequence: Synthetic oligonucleotide
aacuaauaaaggggcuuuu

SEQ ID NO: 1466463 - RNA, 19 nt, Artificial Sequence
  Description of Artificial Sequence: Synthetic oligonucleotide
caaguucaagaaaggggca

SEQ ID NO: 1466464 - RNA, 19 nt, Artificial Sequence
  Description of Artificial Sequence: Synthetic oligonucleotide
cuuauuuagccuacucccu

SEQ ID NO: 1466465 - RNA, 19 nt, Artificial Sequence
  Description of Artificial Sequence: Synthetic oligonucleotide
cgaauuaguuuuauaguuc

SEQ ID NO: 1466466 - RNA, 19 nt, Artificial Sequence
  Description of Artificial Sequence: Synthetic oligonucleotide
gaagaagauguugaguuuu

SEQ ID NO: 1466467 - RNA, 19 nt, Artificial Sequence
  Description of Artificial Sequence: Synthetic oligonucleotide
uggccccuuauuuagccua

SEQ ID NO: 1466468 - RNA, 19 nt, Artificial Sequence
  Description of Artificial Sequence: Synthetic oligonucleotide
cugaagguggcgcggcgag

SEQ ID NO: 1466469 - RNA, 19 nt, Artificial Sequence
  Description of Artificial Sequence: Synthetic oligonucleotide
ugacucccggcaguggaag

SEQ ID NO: 1466470 - RNA, 19 nt, Artificial Sequence
  Description of Artificial Sequence: Synthetic oligonucleotide
uggccccucguccuggaga

SEQ ID NO: 1466471 - RNA, 19 nt, Artificial Sequence
  Description of Artificial Sequence: Synthetic oligonucleotide
gacagaaucgggaggggaa

SEQ ID NO: 1466472 - RNA, 19 nt, Artificial Sequence
  Description of Artificial Sequence: Synthetic oligonucleotide
uaauugccuccaaggcugu

SEQ ID NO: 1466473 - RNA, 19 nt, Artificial Sequence
  Description of Artificial Sequence: Synthetic oligonucleotide
guugaguuuugcgacucca

SEQ ID NO: 1466474 - RNA, 19 nt, Artificial Sequence
  Description of Artificial Sequence: Synthetic oligonucleotide
gaguuuugcgacuccauuu

SEQ ID NO: 1466475 - RNA, 19 nt, Artificial Sequence
  Description of Artificial Sequence: Synthetic oligonucleotide
ggaagcaggagugaaugca

SEQ ID NO: 1466476 - RNA, 19 nt, Artificial Sequence
  Description of Artificial Sequence: Synthetic oligonucleotide
caucgugacggagggagac

SEQ ID NO: 1466477 - RNA, 19 nt, Artificial Sequence
  Description of Artificial Sequence: Synthetic oligonucleotide
uauuuguucguuggucguu

SEQ ID NO: 1466478 - RNA, 19 nt, Artificial Sequence
  Description of Artificial Sequence: Synthetic oligonucleotide
cugugucucugaagguggc

SEQ ID NO: 1466479 - RNA, 19 nt, Artificial Sequence
  Description of Artificial Sequence: Synthetic oligonucleotide
caucuugaguagccagcag

SEQ ID NO: 1466480 - RNA, 19 nt, Artificial Sequence
  Description of Artificial Sequence: Synthetic oligonucleotide
ucugaagguggcgcggcga

SEQ ID NO: 1466481 - RNA, 19 nt, Artificial Sequence
  Description of Artificial Sequence: Synthetic oligonucleotide
guuggucacacugcacggc

SEQ ID NO: 1466482 - RNA, 19 nt, Artificial Sequence
  Description of Artificial Sequence: Synthetic oligonucleotide
aacuuucgguagucacaga

SEQ ID NO: 1466483 - RNA, 19 nt, Artificial Sequence
  Description of Artificial Sequence: Synthetic oligonucleotide
cugcguguacuuggaaggg

SEQ ID NO: 1466484 - RNA, 19 nt, Artificial Sequence
  Description of Artificial Sequence: Synthetic oligonucleotide
cacagagggccaucuugag

SEQ ID NO: 1466485 - RNA, 19 nt, Artificial Sequence
  Description of Artificial Sequence: Synthetic oligonucleotide
uuuguucguuggucguuuc

SEQ ID NO: 1466486 - RNA, 19 nt, Artificial Sequence
  Description of Artificial Sequence: Synthetic oligonucleotide
cacccuugggcuuagggua

SEQ ID NO: 1466487 - RNA, 19 nt, Artificial Sequence
  Description of Artificial Sequence: Synthetic oligonucleotide
agauauaggcacagccaca

SEQ ID NO: 1466488 - RNA, 19 nt, Artificial Sequence
  Description of Artificial Sequence: Synthetic oligonucleotide
uuccgacacuuggagaaac

SEQ ID NO: 1466489 - RNA, 19 nt, Artificial Sequence
  Description of Artificial Sequence: Synthetic oligonucleotide
ggguugcauaggcaggcgg

SEQ ID NO: 1466490 - RNA, 19 nt, Artificial Sequence
  Description of Artificial Sequence: Synthetic oligonucleotide
ccggcaguggaagacaucc

SEQ ID NO: 1466491 - RNA, 19 nt, Artificial Sequence
  Description of Artificial Sequence: Synthetic oligonucleotide
guucguuggucguuuccca

SEQ ID NO: 1466492 - RNA, 19 nt, Artificial Sequence
  Description of Artificial Sequence: Synthetic oligonucleotide
uucucaguacagucaccau

SEQ ID NO: 1466493 - RNA, 19 nt, Artificial Sequence
  Description of Artificial Sequence: Synthetic oligonucleotide
auuuguucguuggucguuu

SEQ ID NO: 1466494 - RNA, 19 nt, Artificial Sequence
  Description of Artificial Sequence: Synthetic oligonucleotide
agaaucgggaggggaagga

SEQ ID NO: 1466495 - RNA, 19 nt, Artificial Sequence
  Description of Artificial Sequence: Synthetic oligonucleotide
aacuuccuggccccuuauu

SEQ ID NO: 1466496 - RNA, 19 nt, Artificial Sequence
  Description of Artificial Sequence: Synthetic oligonucleotide
gagccgaaccacaggcucc

SEQ ID NO: 1466497 - RNA, 19 nt, Artificial Sequence
  Description of Artificial Sequence: Synthetic oligonucleotide
gacggagggagacuccgaa

SEQ ID NO: 1466498 - RNA, 19 nt, Artificial Sequence
  Description of Artificial Sequence: Synthetic oligonucleotide
uggcugauccaagggaaaa

SEQ ID NO: 1466499 - RNA, 19 nt, Artificial Sequence
  Description of Artificial Sequence: Synthetic oligonucleotide
ugcguguacuuggaagggu

SEQ ID NO: 1466500 - RNA, 19 nt, Artificial Sequence
  Description of Artificial Sequence: Synthetic oligonucleotide
caugggguaggaaaccugu

SEQ ID NO: 1466501 - RNA, 19 nt, Artificial Sequence
  Description of Artificial Sequence: Synthetic oligonucleotide
ucaguacagucaccauaau

SEQ ID NO: 1466502 - RNA, 19 nt, Artificial Sequence
  Description of Artificial Sequence: Synthetic oligonucleotide
  modified_base (12)..(12): a, c, u, g, unknown or other
caagggaaaagngacuugu

SEQ ID NO: 1466503 - RNA, 19 nt, Artificial Sequence
  Description of Artificial Sequence: Synthetic oligonucleotide
ucgugacggagggagacuc

SEQ ID NO: 1466504 - RNA, 19 nt, Artificial Sequence
  Description of Artificial Sequence: Synthetic oligonucleotide
acuccgaauuaguuuuaua

SEQ ID NO: 1466505 - RNA, 19 nt, Artificial Sequence
  Description of Artificial Sequence: Synthetic oligonucleotide
gagacagaccauugugacu

SEQ ID NO: 1466506 - RNA, 19 nt, Artificial Sequence
  Description of Artificial Sequence: Synthetic oligonucleotide
uuuccgagccuuguuuaua

SEQ ID NO: 1466507 - RNA, 19 nt, Artificial Sequence
  Description of Artificial Sequence: Synthetic oligonucleotide
uccaauccugggacuucac

SEQ ID NO: 1466508 - RNA, 19 nt, Artificial Sequence
  Description of Artificial Sequence: Synthetic oligonucleotide
uugugacucccggcagugg

SEQ ID NO: 1466509 - RNA, 19 nt, Artificial Sequence
  Description of Artificial Sequence: Synthetic oligonucleotide
acagaacucuacacccuug

SEQ ID NO: 1466510 - RNA, 19 nt, Artificial Sequence
  Description of Artificial Sequence: Synthetic oligonucleotide
acaccaggccgcaaguuga

SEQ ID NO: 1466511 - RNA, 19 nt, Artificial Sequence
  Description of Artificial Sequence: Synthetic oligonucleotide
aagcaguguucagaagcau

SEQ ID NO: 1466512 - RNA, 19 nt, Artificial Sequence
  Description of Artificial Sequence: Synthetic oligonucleotide
ugcacggcuuccgacacuu

SEQ ID NO: 1466513 - RNA, 19 nt, Artificial Sequence
  Description of Artificial Sequence: Synthetic oligonucleotide
  modified_base (19)..(19): a, c, u, g, unknown or other
gcugauccaagggaaaagn

SEQ ID NO: 1466514 - RNA, 19 nt, Artificial Sequence
  Description of Artificial Sequence: Synthetic oligonucleotide
uugcgacuccauuucuuuu

SEQ ID NO: 1466515 - RNA, 19 nt, Artificial Sequence
  Description of Artificial Sequence: Synthetic oligonucleotide
ucuacacccuugggcuuag

SEQ ID NO: 1466516 - RNA, 19 nt, Artificial Sequence
  Description of Artificial Sequence: Synthetic oligonucleotide
gugcggaaagcaguguuca

SEQ ID NO: 1466517 - RNA, 19 nt, Artificial Sequence
  Description of Artificial Sequence: Synthetic oligonucleotide
ccuggccccuuauuuagcc

SEQ ID NO: 1466518 - RNA, 19 nt, Artificial Sequence
  Description of Artificial Sequence: Synthetic oligonucleotide
gguagucacagaacucuac

SEQ ID NO: 1466519 - RNA, 19 nt, Artificial Sequence
  Description of Artificial Sequence: Synthetic oligonucleotide
aggguugcauaggcaggcg

SEQ ID NO: 1466520 - RNA, 19 nt, Artificial Sequence
  Description of Artificial Sequence: Synthetic oligonucleotide
ggccaaucucuggucaugg

SEQ ID NO: 1466521 - RNA, 19 nt, Artificial Sequence
  Description of Artificial Sequence: Synthetic oligonucleotide
cgagccuuguuuauauuug

SEQ ID NO: 1466522 - RNA, 19 nt, Artificial Sequence
  Description of Artificial Sequence: Synthetic oligonucleotide
uggagaccaguaccggcuu

SEQ ID NO: 1466523 - RNA, 19 nt, Artificial Sequence
  Description of Artificial Sequence: Synthetic oligonucleotide
acagacgagccgaaccaca

SEQ ID NO: 1466524 - RNA, 19 nt, Artificial Sequence
  Description of Artificial Sequence: Synthetic oligonucleotide
ggccuaggguugcauaggc

SEQ ID NO: 1466525 - RNA, 19 nt, Artificial Sequence
  Description of Artificial Sequence: Synthetic oligonucleotide
caugagccgggcagcucag

SEQ ID NO: 1466526 - RNA, 19 nt, Artificial Sequence
  Description of Artificial Sequence: Synthetic oligonucleotide
gcacagacgagccgaacca

SEQ ID NO: 1466527 - RNA, 19 nt, Artificial Sequence
  Description of Artificial Sequence: Synthetic oligonucleotide
ggcugauccaagggaaaag

SEQ ID NO: 1466528 - RNA, 19 nt, Artificial Sequence
  Description of Artificial Sequence: Synthetic oligonucleotide
ccuggagaccaguaccggc

SEQ ID NO: 1466529 - RNA, 19 nt, Artificial Sequence
  Description of Artificial Sequence: Synthetic oligonucleotide
gcaggagugaaugcacacc

SEQ ID NO: 1466530 - RNA, 19 nt, Artificial Sequence
  Description of Artificial Sequence: Synthetic oligonucleotide
cgacacuuggagaaacagc

SEQ ID NO: 1466531 - RNA, 19 nt, Artificial Sequence
  Description of Artificial Sequence: Synthetic oligonucleotide
guaguuggucacacugcac

SEQ ID NO: 1466532 - RNA, 19 nt, Artificial Sequence
  Description of Artificial Sequence: Synthetic oligonucleotide
gacaacucuccucucucau

SEQ ID NO: 1466533 - RNA, 19 nt, Artificial Sequence
  Description of Artificial Sequence: Synthetic oligonucleotide
gcuugugcggaaagcagug

SEQ ID NO: 1466534 - RNA, 19 nt, Artificial Sequence
  Description of Artificial Sequence: Synthetic oligonucleotide
ccaggaaaguuccuuguca

SEQ ID NO: 1466535 - RNA, 19 nt, Artificial Sequence
  Description of Artificial Sequence: Synthetic oligonucleotide
ggucaugggguaggaaacc

SEQ ID NO: 1466536 - RNA, 19 nt, Artificial Sequence
  Description of Artificial Sequence: Synthetic oligonucleotide
agggagacuccgaauuagu

SEQ ID NO: 1466537 - RNA, 19 nt, Artificial Sequence
  Description of Artificial Sequence: Synthetic oligonucleotide
aggccaaucucuggucaug

SEQ ID NO: 1466538 - RNA, 19 nt, Artificial Sequence
  Description of Artificial Sequence: Synthetic oligonucleotide
uaccggcuucugaaccugu

SEQ ID NO: 1466539 - RNA, 19 nt, Artificial Sequence
  Description of Artificial Sequence: Synthetic oligonucleotide
cacagacgagccgaaccac

SEQ ID NO: 1466540 - RNA, 19 nt, Artificial Sequence
  Description of Artificial Sequence: Synthetic oligonucleotide
uggaggccacuucccucgc

SEQ ID NO: 1466541 - RNA, 19 nt, Artificial Sequence
  Description of Artificial Sequence: Synthetic oligonucleotide
gaauugccaaagaacuaau

SEQ ID NO: 1466542 - RNA, 19 nt, Artificial Sequence
  Description of Artificial Sequence: Synthetic oligonucleotide
acggagggagacuccgaau

SEQ ID NO: 1466543 - RNA, 19 nt, Artificial Sequence
  Description of Artificial Sequence: Synthetic oligonucleotide
guuuugcgacuccauuucu

SEQ ID NO: 1466544 - RNA, 19 nt, Artificial Sequence
  Description of Artificial Sequence: Synthetic oligonucleotide
ggagacuccgaauuaguuu

SEQ ID NO: 1466545 - RNA, 19 nt, Artificial Sequence
  Description of Artificial Sequence: Synthetic oligonucleotide
ggagggugaccaucgugac

SEQ ID NO: 1466546 - RNA, 19 nt, Artificial Sequence
  Description of Artificial Sequence: Synthetic oligonucleotide
cuugaguagccagcagaga

SEQ ID NO: 1466547 - RNA, 19 nt, Artificial Sequence
  Description of Artificial Sequence: Synthetic oligonucleotide
agccgaaccacaggcucca

SEQ ID NO: 1466548 - RNA, 19 nt, Artificial Sequence
  Description of Artificial Sequence: Synthetic oligonucleotide
ccgaauuaguuuuauaguu

SEQ ID NO: 1466549 - RNA, 19 nt, Artificial Sequence
  Description of Artificial Sequence: Synthetic oligonucleotide
ccgacacuuggagaaacag

SEQ ID NO: 1466550 - RNA, 19 nt, Artificial Sequence
  Description of Artificial Sequence: Synthetic oligonucleotide
cacugccauucucaguaca

SEQ ID NO: 1466551 - RNA, 19 nt, Artificial Sequence
  Description of Artificial Sequence: Synthetic oligonucleotide
guuuuauaguucagcuccu

SEQ ID NO: 1466552 - RNA, 19 nt, Artificial Sequence
  Description of Artificial Sequence: Synthetic oligonucleotide
ggacugugaugaccaggag

SEQ ID NO: 1466553 - RNA, 19 nt, Artificial Sequence
  Description of Artificial Sequence: Synthetic oligonucleotide
aucgugacggagggagacu

SEQ ID NO: 1466554 - RNA, 19 nt, Artificial Sequence
  Description of Artificial Sequence: Synthetic oligonucleotide
ggacaacucuccucucuca

SEQ ID NO: 1466555 - RNA, 19 nt, Artificial Sequence
  Description of Artificial Sequence: Synthetic oligonucleotide
gagaccaguaccggcuucu

SEQ ID NO: 1466556 - RNA, 19 nt, Artificial Sequence
  Description of Artificial Sequence: Synthetic oligonucleotide
gcggaaagcaguguucaga

SEQ ID NO: 1466557 - RNA, 19 nt, Artificial Sequence
  Description of Artificial Sequence: Synthetic oligonucleotide
gaaugcacaccugcugcgu

SEQ ID NO: 1466558 - RNA, 19 nt, Artificial Sequence
  Description of Artificial Sequence: Synthetic oligonucleotide
ccauugugacucccggcag

SEQ ID NO: 1466559 - RNA, 19 nt, Artificial Sequence
  Description of Artificial Sequence: Synthetic oligonucleotide
ggccccucguccuggagac

SEQ ID NO: 1466560 - RNA, 19 nt, Artificial Sequence
  Description of Artificial Sequence: Synthetic oligonucleotide
agaccaguaccggcuucug

SEQ ID NO: 1466561 - RNA, 19 nt, Artificial Sequence
  Description of Artificial Sequence: Synthetic oligonucleotide
caguacagucaccauaauu

SEQ ID NO: 1466562 - RNA, 19 nt, Artificial Sequence
  Description of Artificial Sequence: Synthetic oligonucleotide
ccggcuucugaaccugugc

SEQ ID NO: 1466563 - RNA, 19 nt, Artificial Sequence
  Description of Artificial Sequence: Synthetic oligonucleotide
aggggccuaggguugcaua

SEQ ID NO: 1466564 - RNA, 19 nt, Artificial Sequence
  Description of Artificial Sequence: Synthetic oligonucleotide
ccaguaccggcuucugaac

SEQ ID NO: 1466565 - RNA, 19 nt, Artificial Sequence
  Description of Artificial Sequence: Synthetic oligonucleotide
gugagaggacaacucuccu

SEQ ID NO: 1466566 - RNA, 19 nt, Artificial Sequence
  Description of Artificial Sequence: Synthetic oligonucleotide
cauugugacucccggcagu

SEQ ID NO: 1466567 - RNA, 19 nt, Artificial Sequence
  Description of Artificial Sequence: Synthetic oligonucleotide
ggggcagacaucugugucu

SEQ ID NO: 1466568 - RNA, 19 nt, Artificial Sequence
  Description of Artificial Sequence: Synthetic oligonucleotide
aggccgcaaguugaagcca

SEQ ID NO: 1466569 - RNA, 19 nt, Artificial Sequence
  Description of Artificial Sequence: Synthetic oligonucleotide
cugugcgcagugucagaga

SEQ ID NO: 1466570 - RNA, 19 nt, Artificial Sequence
  Description of Artificial Sequence: Synthetic oligonucleotide
ccgcaaguugaagccaccg

SEQ ID NO: 1466571 - RNA, 19 nt, Artificial Sequence
  Description of Artificial Sequence: Synthetic oligonucleotide
ggacagaaucgggagggga

SEQ ID NO: 1466572 - RNA, 19 nt, Artificial Sequence
  Description of Artificial Sequence: Synthetic oligonucleotide
ggcgaggccaaucucuggu

SEQ ID NO: 1466573 - RNA, 19 nt, Artificial Sequence
  Description of Artificial Sequence: Synthetic oligonucleotide
acgagccgaaccacaggcu

SEQ ID NO: 1466574 - RNA, 19 nt, Artificial Sequence
  Description of Artificial Sequence: Synthetic oligonucleotide
gucguuucccaggaaaguu

SEQ ID NO: 1466575 - RNA, 19 nt, Artificial Sequence
  Description of Artificial Sequence: Synthetic oligonucleotide
ccccuuauuuagccuacuc

SEQ ID NO: 1466576 - RNA, 19 nt, Artificial Sequence
  Description of Artificial Sequence: Synthetic oligonucleotide
ccuugucaaaguuccaagu

SEQ ID NO: 1466577 - RNA, 19 nt, Artificial Sequence
  Description of Artificial Sequence: Synthetic oligonucleotide
gccacacuucuugaucaug

SEQ ID NO: 1466578 - RNA, 19 nt, Artificial Sequence
  Description of Artificial Sequence: Synthetic oligonucleotide
gacuccgaauuaguuuuau

SEQ ID NO: 1466579 - RNA, 19 nt, Artificial Sequence
  Description of Artificial Sequence: Synthetic oligonucleotide
ggguggggacagaaucggg

SEQ ID NO: 1466580 - RNA, 19 nt, Artificial Sequence
  Description of Artificial Sequence: Synthetic oligonucleotide
cacagaacucuacacccuu

SEQ ID NO: 1466581 - RNA, 19 nt, Artificial Sequence
  Description of Artificial Sequence: Synthetic oligonucleotide
  modified_base (2)..(2): a, c, u, g, unknown or other
gngacuuguuugagcuugu

SEQ ID NO: 1466582 - RNA, 19 nt, Artificial Sequence
  Description of Artificial Sequence: Synthetic oligonucleotide
agguggcgcggcgaggcca

SEQ ID NO: 1466583 - RNA, 19 nt, Artificial Sequence
  Description of Artificial Sequence: Synthetic oligonucleotide
ggccgcaaguugaagccac

SEQ ID NO: 1466584 - RNA, 19 nt, Artificial Sequence
  Description of Artificial Sequence: Synthetic oligonucleotide
ccaauccugggacuucaca

SEQ ID NO: 1466585 - RNA, 19 nt, Artificial Sequence
  Description of Artificial Sequence: Synthetic oligonucleotide
cucggccauuuccaccaca

SEQ ID NO: 1466586 - RNA, 19 nt, Artificial Sequence
  Description of Artificial Sequence: Synthetic oligonucleotide
gcgaggccaaucucugguc

SEQ ID NO: 1466587 - RNA, 19 nt, Artificial Sequence
  Description of Artificial Sequence: Synthetic oligonucleotide
cuggccccucguccuggag

SEQ ID NO: 1466588 - RNA, 19 nt, Artificial Sequence
  Description of Artificial Sequence: Synthetic oligonucleotide
aggaaaccuguggccacuu

SEQ ID NO: 1466589 - RNA, 19 nt, Artificial Sequence
  Description of Artificial Sequence: Synthetic oligonucleotide
cucccggcaguggaagaca

SEQ ID NO: 1466590 - RNA, 19 nt, Artificial Sequence
  Description of Artificial Sequence: Synthetic oligonucleotide
ccuacucccucaggcacac

SEQ ID NO: 1466591 - RNA, 19 nt, Artificial Sequence
  Description of Artificial Sequence: Synthetic oligonucleotide
gugacucccggcaguggaa

SEQ ID NO: 1466592 - RNA, 19 nt, Artificial Sequence
  Description of Artificial Sequence: Synthetic oligonucleotide
caccaggccgcaaguugaa

SEQ ID NO: 1466593 - RNA, 19 nt, Artificial Sequence
  Description of Artificial Sequence: Synthetic oligonucleotide
cugccauucucaguacagu

SEQ ID NO: 1466594 - RNA, 19 nt, Artificial Sequence
  Description of Artificial Sequence: Synthetic oligonucleotide
cacuucccucgcaccccug

SEQ ID NO: 1466595 - RNA, 19 nt, Artificial Sequence
  Description of Artificial Sequence: Synthetic oligonucleotide
cuacacccuugggcuuagg

SEQ ID NO: 1466596 - RNA, 19 nt, Artificial Sequence
  Description of Artificial Sequence: Synthetic oligonucleotide
ggccccuuauuuagccuac

SEQ ID NO: 1466597 - RNA, 19 nt, Artificial Sequence
  Description of Artificial Sequence: Synthetic oligonucleotide
gugcgcagugucagagaca

SEQ ID NO: 1466598 - RNA, 19 nt, Artificial Sequence
  Description of Artificial Sequence: Synthetic oligonucleotide
gcguguacuuggaagggua

SEQ ID NO: 1466599 - RNA, 19 nt, Artificial Sequence
  Description of Artificial Sequence: Synthetic oligonucleotide
cuggccccuuauuuagccu

SEQ ID NO: 1466600 - RNA, 19 nt, Artificial Sequence
  Description of Artificial Sequence: Synthetic oligonucleotide
gcgacuccauuucuuuugu

SEQ ID NO: 1466601 - RNA, 19 nt, Artificial Sequence
  Description of Artificial Sequence: Synthetic oligonucleotide
ccuggccccugucacugug

SEQ ID NO: 1466602 - RNA, 19 nt, Artificial Sequence
  Description of Artificial Sequence: Synthetic oligonucleotide
gaccaucgugacggaggga

SEQ ID NO: 1466603 - RNA, 19 nt, Artificial Sequence
  Description of Artificial Sequence: Synthetic oligonucleotide
cuugugcggaaagcagugu

SEQ ID NO: 1466604 - RNA, 19 nt, Artificial Sequence
  Description of Artificial Sequence: Synthetic oligonucleotide
ggcgcggcgaggccaaucu

SEQ ID NO: 1466605 - RNA, 19 nt, Artificial Sequence
  Description of Artificial Sequence: Synthetic oligonucleotide
cccacccaaguucaagaaa

SEQ ID NO: 1466606 - RNA, 19 nt, Artificial Sequence
  Description of Artificial Sequence: Synthetic oligonucleotide
uggcgcggcgaggccaauc

SEQ ID NO: 1466607 - RNA, 19 nt, Artificial Sequence
  Description of Artificial Sequence: Synthetic oligonucleotide
cuacucccucaggcacacc

SEQ ID NO: 1466608 - RNA, 19 nt, Artificial Sequence
  Description of Artificial Sequence: Synthetic oligonucleotide
gggagacuccgaauuaguu

SEQ ID NO: 1466609 - RNA, 19 nt, Artificial Sequence
  Description of Artificial Sequence: Synthetic oligonucleotide
cccucgcaccccuggcccc

SEQ ID NO: 1466610 - RNA, 19 nt, Artificial Sequence
  Description of Artificial Sequence: Synthetic oligonucleotide
ccccucguccuggagacca

SEQ ID NO: 1466611 - RNA, 19 nt, Artificial Sequence
  Description of Artificial Sequence: Synthetic oligonucleotide
ccaucgugacggagggaga

SEQ ID NO: 1466612 - RNA, 19 nt, Artificial Sequence
  Description of Artificial Sequence: Synthetic oligonucleotide
cggcgaggccaaucucugg

SEQ ID NO: 1466613 - RNA, 19 nt, Artificial Sequence
  Description of Artificial Sequence: Synthetic oligonucleotide
cccggcaguggaagacauc

SEQ ID NO: 1466614 - RNA, 19 nt, Artificial Sequence
  Description of Artificial Sequence: Synthetic oligonucleotide
gggccgucagggccaggga

SEQ ID NO: 1466615 - RNA, 19 nt, Artificial Sequence
  Description of Artificial Sequence: Synthetic oligonucleotide
gcccaugcaccaucacccu

SEQ ID NO: 1466616 - RNA, 19 nt, Artificial Sequence
  Description of Artificial Sequence: Synthetic oligonucleotide
gguggcgcggcgaggccaa

SEQ ID NO: 1466617 - RNA, 19 nt, Artificial Sequence
  Description of Artificial Sequence: Synthetic oligonucleotide
cggagggagacuccgaauu

SEQ ID NO: 1466618 - RNA, 19 nt, Artificial Sequence
  Description of Artificial Sequence: Synthetic oligonucleotide
cucgcaccccuggccccuc

SEQ ID NO: 1466619 - RNA, 19 nt, Artificial Sequence
  Description of Artificial Sequence: Synthetic oligonucleotide
ggacuucacagagggccau

SEQ ID NO: 1466620 - RNA, 19 nt, Artificial Sequence
  Description of Artificial Sequence: Synthetic oligonucleotide
gcgcggcgaggccaaucuc

SEQ ID NO: 1466621 - RNA, 19 nt, Artificial Sequence
  Description of Artificial Sequence: Synthetic oligonucleotide
gccccuuauuuagccuacu

SEQ ID NO: 1466622 - RNA, 19 nt, Artificial Sequence
  Description of Artificial Sequence: Synthetic oligonucleotide
ccucguccuggagaccagu

SEQ ID NO: 1466623 - RNA, 19 nt, Artificial Sequence
  Description of Artificial Sequence: Synthetic oligonucleotide
ccucgcaccccuggccccu

SEQ ID NO: 1466624 - RNA, 19 nt, Artificial Sequence
  Description of Artificial Sequence: Synthetic oligonucleotide
guggcgcggcgaggccaau

SEQ ID NO: 1466625 - RNA, 19 nt, Artificial Sequence
  Description of Artificial Sequence: Synthetic oligonucleotide
gacaauaucucauacacgg

SEQ ID NO: 1466626 - RNA, 19 nt, Artificial Sequence
  Description of Artificial Sequence: Synthetic oligonucleotide
agagaauucaaaccaaggg

SEQ ID NO: 1466627 - RNA, 19 nt, Artificial Sequence
  Description of Artificial Sequence: Synthetic oligonucleotide
aagggaguaagguagguag

SEQ ID NO: 1466628 - RNA, 19 nt, Artificial Sequence
  Description of Artificial Sequence: Synthetic oligonucleotide
cucauuuuagcacaggcgg

SEQ ID NO: 1466629 - RNA, 19 nt, Artificial Sequence
  Description of Artificial Sequence: Synthetic oligonucleotide
ucugaaagagucuuuagcu

SEQ ID NO: 1466630 - RNA, 19 nt, Artificial Sequence
  Description of Artificial Sequence: Synthetic oligonucleotide
uuagcaguggacaggaugc

SEQ ID NO: 1466631 - RNA, 19 nt, Artificial Sequence
  Description of Artificial Sequence: Synthetic oligonucleotide
ucugagcauacucugaaag

SEQ ID NO: 1466632 - RNA, 19 nt, Artificial Sequence
  Description of Artificial Sequence: Synthetic oligonucleotide
aaaagguccggucucgguc

SEQ ID NO: 1466633 - RNA, 19 nt, Artificial Sequence
  Description of Artificial Sequence: Synthetic oligonucleotide
uacacgggaaacauaacag

SEQ ID NO: 1466634 - RNA, 19 nt, Artificial Sequence
  Description of Artificial Sequence: Synthetic oligonucleotide
cuuagauccacccacuggc

SEQ ID NO: 1466635 - RNA, 19 nt, Artificial Sequence
  Description of Artificial Sequence: Synthetic oligonucleotide
uuuagcaguggacaggaug

SEQ ID NO: 1466636 - RNA, 19 nt, Artificial Sequence
  Description of Artificial Sequence: Synthetic oligonucleotide
ugucucugcccuuagaucc

SEQ ID NO: 1466637 - RNA, 19 nt, Artificial Sequence
  Description of Artificial Sequence: Synthetic oligonucleotide
aaaagaacugcuucugcga

SEQ ID NO: 1466638 - RNA, 19 nt, Artificial Sequence
  Description of Artificial Sequence: Synthetic oligonucleotide
uucgaugccggguauaucc

SEQ ID NO: 1466639 - RNA, 19 nt, Artificial Sequence
  Description of Artificial Sequence: Synthetic oligonucleotide
cagacaauaucucauacac

SEQ ID NO: 1466640 - RNA, 19 nt, Artificial Sequence
  Description of Artificial Sequence: Synthetic oligonucleotide
aaccagaauaaccagcaga

SEQ ID NO: 1466641 - RNA, 19 nt, Artificial Sequence
  Description of Artificial Sequence: Synthetic oligonucleotide
ggcaaauccacucugagcc

SEQ ID NO: 1466642 - RNA, 19 nt, Artificial Sequence
  Description of Artificial Sequence: Synthetic oligonucleotide
guaagguagguagagaagg

SEQ ID NO: 1466643 - RNA, 19 nt, Artificial Sequence
  Description of Artificial Sequence: Synthetic oligonucleotide
ucuuacuaugacuaucacc

SEQ ID NO: 1466644 - RNA, 19 nt, Artificial Sequence
  Description of Artificial Sequence: Synthetic oligonucleotide
ucuaggaugugcauagaug

SEQ ID NO: 1466645 - RNA, 19 nt, Artificial Sequence
  Description of Artificial Sequence: Synthetic oligonucleotide
acuagaagcccauuccaac

SEQ ID NO: 1466646 - RNA, 19 nt, Artificial Sequence
  Description of Artificial Sequence: Synthetic oligonucleotide
uuaaaagaacugcuucugc

SEQ ID NO: 1466647 - RNA, 19 nt, Artificial Sequence
  Description of Artificial Sequence: Synthetic oligonucleotide
ucgguccgaauacagaagg

SEQ ID NO: 1466648 - RNA, 19 nt, Artificial Sequence
  Description of Artificial Sequence: Synthetic oligonucleotide
ugugcauagauguuggaaa

SEQ ID NO: 1466649 - RNA, 19 nt, Artificial Sequence
  Description of Artificial Sequence: Synthetic oligonucleotide
ugggaaggcauaaagcaug

SEQ ID NO: 1466650 - RNA, 19 nt, Artificial Sequence
  Description of Artificial Sequence: Synthetic oligonucleotide
agagucuggagccucgugg

SEQ ID NO: 1466651 - RNA, 19 nt, Artificial Sequence
  Description of Artificial Sequence: Synthetic oligonucleotide
agcagacaauaucucauac

SEQ ID NO: 1466652 - RNA, 19 nt, Artificial Sequence
  Description of Artificial Sequence: Synthetic oligonucleotide
uacuaugacuaucaccaug

SEQ ID NO: 1466653 - RNA, 19 nt, Artificial Sequence
  Description of Artificial Sequence: Synthetic oligonucleotide
acacgggaaacauaacagg

SEQ ID NO: 1466654 - RNA, 19 nt, Artificial Sequence
  Description of Artificial Sequence: Synthetic oligonucleotide
gaugauugcguucacucuc

SEQ ID NO: 1466655 - RNA, 19 nt, Artificial Sequence
  Description of Artificial Sequence: Synthetic oligonucleotide
cuagaagcccauuccaacc

SEQ ID NO: 1466656 - RNA, 19 nt, Artificial Sequence
  Description of Artificial Sequence: Synthetic oligonucleotide
aaguaggagaccagguucg

SEQ ID NO: 1466657 - RNA, 19 nt, Artificial Sequence
  Description of Artificial Sequence: Synthetic oligonucleotide
cuuggcuauacuccggucc

SEQ ID NO: 1466658 - RNA, 19 nt, Artificial Sequence
  Description of Artificial Sequence: Synthetic oligonucleotide
uauacuccgguccccaucu

SEQ ID NO: 1466659 - RNA, 19 nt, Artificial Sequence
  Description of Artificial Sequence: Synthetic oligonucleotide
uccgaacuuuuacugaggc

SEQ ID NO: 1466660 - RNA, 19 nt, Artificial Sequence
  Description of Artificial Sequence: Synthetic oligonucleotide
ucggcuacgaucaggggug

SEQ ID NO: 1466661 - RNA, 19 nt, Artificial Sequence
  Description of Artificial Sequence: Synthetic oligonucleotide
uguuucugcgguccgaacu

SEQ ID NO: 1466662 - RNA, 19 nt, Artificial Sequence
  Description of Artificial Sequence: Synthetic oligonucleotide
ucuccuuucggcuacgauc

SEQ ID NO: 1466663 - RNA, 19 nt, Artificial Sequence
  Description of Artificial Sequence: Synthetic oligonucleotide
gaagcccucauuuuagcac

SEQ ID NO: 1466664 - RNA, 19 nt, Artificial Sequence
  Description of Artificial Sequence: Synthetic oligonucleotide
uucggcuacgaucaggggu

SEQ ID NO: 1466665 - RNA, 19 nt, Artificial Sequence
  Description of Artificial Sequence: Synthetic oligonucleotide
uccgaauacagaaggugug

SEQ ID NO: 1466666 - RNA, 19 nt, Artificial Sequence
  Description of Artificial Sequence: Synthetic oligonucleotide
ucauuuuagcacaggcggc

SEQ ID NO: 1466667 - RNA, 19 nt, Artificial Sequence
  Description of Artificial Sequence: Synthetic oligonucleotide
cucaaugguccgaugauug

SEQ ID NO: 1466668 - RNA, 19 nt, Artificial Sequence
  Description of Artificial Sequence: Synthetic oligonucleotide
auaaccagcagagaauuca

SEQ ID NO: 1466669 - RNA, 19 nt, Artificial Sequence
  Description of Artificial Sequence: Synthetic oligonucleotide
gcuucugcgacccaaaggc

SEQ ID NO: 1466670 - RNA, 19 nt, Artificial Sequence
  Description of Artificial Sequence: Synthetic oligonucleotide
ucaaaccaagggaguaagg

SEQ ID NO: 1466671 - RNA, 19 nt, Artificial Sequence
  Description of Artificial Sequence: Synthetic oligonucleotide
aaagucgcagggugggaag

SEQ ID NO: 1466672 - RNA, 19 nt, Artificial Sequence
  Description of Artificial Sequence: Synthetic oligonucleotide
uuggcuauacuccgguccc

SEQ ID NO: 1466673 - RNA, 19 nt, Artificial Sequence
  Description of Artificial Sequence: Synthetic oligonucleotide
ggguauauccaucagcgag

SEQ ID NO: 1466674 - RNA, 19 nt, Artificial Sequence
  Description of Artificial Sequence: Synthetic oligonucleotide
uugaggagaccgcugauaa

SEQ ID NO: 1466675 - RNA, 19 nt, Artificial Sequence
  Description of Artificial Sequence: Synthetic oligonucleotide
gaguaagguagguagagaa

SEQ ID NO: 1466676 - RNA, 19 nt, Artificial Sequence
  Description of Artificial Sequence: Synthetic oligonucleotide
acuaugacuaucaccaugu

SEQ ID NO: 1466677 - RNA, 19 nt, Artificial Sequence
  Description of Artificial Sequence: Synthetic oligonucleotide
acauaacaggaguuucuuc

SEQ ID NO: 1466678 - RNA, 19 nt, Artificial Sequence
  Description of Artificial Sequence: Synthetic oligonucleotide
aaacauaacaggaguuucu

SEQ ID NO: 1466679 - RNA, 19 nt, Artificial Sequence
  Description of Artificial Sequence: Synthetic oligonucleotide
auugcguucacucucucua

SEQ ID NO: 1466680 - RNA, 19 nt, Artificial Sequence
  Description of Artificial Sequence: Synthetic oligonucleotide
uuuucccaugggaagaguc

SEQ ID NO: 1466681 - RNA, 19 nt, Artificial Sequence
  Description of Artificial Sequence: Synthetic oligonucleotide
aauucaaaccaagggagua

SEQ ID NO: 1466682 - RNA, 19 nt, Artificial Sequence
  Description of Artificial Sequence: Synthetic oligonucleotide
guggucuuugaggagaccg

SEQ ID NO: 1466683 - RNA, 19 nt, Artificial Sequence
  Description of Artificial Sequence: Synthetic oligonucleotide
uuuagcacaggcggcuugg

SEQ ID NO: 1466684 - RNA, 19 nt, Artificial Sequence
  Description of Artificial Sequence: Synthetic oligonucleotide
gugcauagauguuggaaag

SEQ ID NO: 1466685 - RNA, 19 nt, Artificial Sequence
  Description of Artificial Sequence: Synthetic oligonucleotide
ugucugagcauacucugaa

SEQ ID NO: 1466686 - RNA, 19 nt, Artificial Sequence
  Description of Artificial Sequence: Synthetic oligonucleotide
aaagcaugcccgugcuguc

SEQ ID NO: 1466687 - RNA, 19 nt, Artificial Sequence
  Description of Artificial Sequence: Synthetic oligonucleotide
caauaucucauacacggga

SEQ ID NO: 1466688 - RNA, 19 nt, Artificial Sequence
  Description of Artificial Sequence: Synthetic oligonucleotide
agugguucuccuuucggcu

SEQ ID NO: 1466689 - RNA, 19 nt, Artificial Sequence
  Description of Artificial Sequence: Synthetic oligonucleotide
gaacuuuuacugaggcugg

SEQ ID NO: 1466690 - RNA, 19 nt, Artificial Sequence
  Description of Artificial Sequence: Synthetic oligonucleotide
aauaaccagcagagaauuc

SEQ ID NO: 1466691 - RNA, 19 nt, Artificial Sequence
  Description of Artificial Sequence: Synthetic oligonucleotide
uuuacugaggcugguccag

SEQ ID NO: 1466692 - RNA, 19 nt, Artificial Sequence
  Description of Artificial Sequence: Synthetic oligonucleotide
uauccaucagcgagcagcu

SEQ ID NO: 1466693 - RNA, 19 nt, Artificial Sequence
  Description of Artificial Sequence: Synthetic oligonucleotide
gagaccagguucgaagccg

SEQ ID NO: 1466694 - RNA, 19 nt, Artificial Sequence
  Description of Artificial Sequence: Synthetic oligonucleotide
aauaucucauacacgggaa

SEQ ID NO: 1466695 - RNA, 19 nt, Artificial Sequence
  Description of Artificial Sequence: Synthetic oligonucleotide
aucagcgagcagcucauag

SEQ ID NO: 1466696 - RNA, 19 nt, Artificial Sequence
  Description of Artificial Sequence: Synthetic oligonucleotide
uccacucugagccugcgau

SEQ ID NO: 1466697 - RNA, 19 nt, Artificial Sequence
  Description of Artificial Sequence: Synthetic oligonucleotide
cuaggaugugcauagaugu

SEQ ID NO: 1466698 - RNA, 19 nt, Artificial Sequence
  Description of Artificial Sequence: Synthetic oligonucleotide
ccggguauauccaucagcg

SEQ ID NO: 1466699 - RNA, 19 nt, Artificial Sequence
  Description of Artificial Sequence: Synthetic oligonucleotide
caaugguccgaugauugcg

SEQ ID NO: 1466700 - RNA, 19 nt, Artificial Sequence
  Description of Artificial Sequence: Synthetic oligonucleotide
uggcaaauccacucugagc

SEQ ID NO: 1466701 - RNA, 19 nt, Artificial Sequence
  Description of Artificial Sequence: Synthetic oligonucleotide
uccuaucccgcacucuaag

SEQ ID NO: 1466702 - RNA, 19 nt, Artificial Sequence
  Description of Artificial Sequence: Synthetic oligonucleotide
uuuuagcacaggcggcuug

SEQ ID NO: 1466703 - RNA, 19 nt, Artificial Sequence
  Description of Artificial Sequence: Synthetic oligonucleotide
aggaugugcauagauguug

SEQ ID NO: 1466704 - RNA, 19 nt, Artificial Sequence
  Description of Artificial Sequence: Synthetic oligonucleotide
uuagauccacccacuggca

SEQ ID NO: 1466705 - RNA, 19 nt, Artificial Sequence
  Description of Artificial Sequence: Synthetic oligonucleotide
gcugggaaaagucgcaggg

SEQ ID NO: 1466706 - RNA, 19 nt, Artificial Sequence
  Description of Artificial Sequence: Synthetic oligonucleotide
ucagcgagcagcucauagu

SEQ ID NO: 1466707 - RNA, 19 nt, Artificial Sequence
  Description of Artificial Sequence: Synthetic oligonucleotide
aguaagguagguagagaag

SEQ ID NO: 1466708 - RNA, 19 nt, Artificial Sequence
  Description of Artificial Sequence: Synthetic oligonucleotide
cuccuuucggcuacgauca

SEQ ID NO: 1466709 - RNA, 19 nt, Artificial Sequence
  Description of Artificial Sequence: Synthetic oligonucleotide
agacaauaucucauacacg

SEQ ID NO: 1466710 - RNA, 19 nt, Artificial Sequence
  Description of Artificial Sequence: Synthetic oligonucleotide
ugcuugaugcgacggguga

SEQ ID NO: 1466711 - RNA, 19 nt, Artificial Sequence
  Description of Artificial Sequence: Synthetic oligonucleotide
aaaggcuccuccgcuugcg

SEQ ID NO: 1466712 - RNA, 19 nt, Artificial Sequence
  Description of Artificial Sequence: Synthetic oligonucleotide
caggaagcccucauuuuag

SEQ ID NO: 1466713 - RNA, 19 nt, Artificial Sequence
  Description of Artificial Sequence: Synthetic oligonucleotide
aaugguccgaugauugcgu

SEQ ID NO: 1466714 - RNA, 19 nt, Artificial Sequence
  Description of Artificial Sequence: Synthetic oligonucleotide
gguccgaacuuuuacugag

SEQ ID NO: 1466715 - RNA, 19 nt, Artificial Sequence
  Description of Artificial Sequence: Synthetic oligonucleotide
cacgggaaacauaacagga

SEQ ID NO: 1466716 - RNA, 19 nt, Artificial Sequence
  Description of Artificial Sequence: Synthetic oligonucleotide
ccuucuaggaugugcauag

SEQ ID NO: 1466717 - RNA, 19 nt, Artificial Sequence
  Description of Artificial Sequence: Synthetic oligonucleotide
aaaagucgcagggugggaa

SEQ ID NO: 1466718 - RNA, 19 nt, Artificial Sequence
  Description of Artificial Sequence: Synthetic oligonucleotide
ccucauuuuagcacaggcg

SEQ ID NO: 1466719 - RNA, 19 nt, Artificial Sequence
  Description of Artificial Sequence: Synthetic oligonucleotide
ugagcuguccuuccacggu

SEQ ID NO: 1466720 - RNA, 19 nt, Artificial Sequence
  Description of Artificial Sequence: Synthetic oligonucleotide
ucucauacacgggaaacau

SEQ ID NO: 1466721 - RNA, 19 nt, Artificial Sequence
  Description of Artificial Sequence: Synthetic oligonucleotide
acaauaucucauacacggg

SEQ ID NO: 1466722 - RNA, 19 nt, Artificial Sequence
  Description of Artificial Sequence: Synthetic oligonucleotide
gcacugagcggcuauagcc

SEQ ID NO: 1466723 - RNA, 19 nt, Artificial Sequence
  Description of Artificial Sequence: Synthetic oligonucleotide
gagaccgcugauaacuccc

SEQ ID NO: 1466724 - RNA, 19 nt, Artificial Sequence
  Description of Artificial Sequence: Synthetic oligonucleotide
agaauaaccagcagagaau

SEQ ID NO: 1466725 - RNA, 19 nt, Artificial Sequence
  Description of Artificial Sequence: Synthetic oligonucleotide
gaugcgacgggugaccuca

SEQ ID NO: 1466726 - RNA, 19 nt, Artificial Sequence
  Description of Artificial Sequence: Synthetic oligonucleotide
cagcgagcagcucauagug

SEQ ID NO: 1466727 - RNA, 19 nt, Artificial Sequence
  Description of Artificial Sequence: Synthetic oligonucleotide
uccaccgugggcauccccu

SEQ ID NO: 1466728 - RNA, 19 nt, Artificial Sequence
  Description of Artificial Sequence: Synthetic oligonucleotide
ugcgguccgaacuuuuacu

SEQ ID NO: 1466729 - RNA, 19 nt, Artificial Sequence
  Description of Artificial Sequence: Synthetic oligonucleotide
gcggcuauagcccuccagg

SEQ ID NO: 1466730 - RNA, 19 nt, Artificial Sequence
  Description of Artificial Sequence: Synthetic oligonucleotide
gcuauagcccuccaggcug

SEQ ID NO: 1466731 - RNA, 19 nt, Artificial Sequence
  Description of Artificial Sequence: Synthetic oligonucleotide
gguauauccaucagcgagc

SEQ ID NO: 1466732 - RNA, 19 nt, Artificial Sequence
  Description of Artificial Sequence: Synthetic oligonucleotide
gacgggugaccucauccag

SEQ ID NO: 1466733 - RNA, 19 nt, Artificial Sequence
  Description of Artificial Sequence: Synthetic oligonucleotide
uugcguucacucucucuag

SEQ ID NO: 1466734 - RNA, 19 nt, Artificial Sequence
  Description of Artificial Sequence: Synthetic oligonucleotide
ggaaaagucgcaggguggg

SEQ ID NO: 1466735 - RNA, 19 nt, Artificial Sequence
  Description of Artificial Sequence: Synthetic oligonucleotide
aagucgcagggugggaagg

SEQ ID NO: 1466736 - RNA, 19 nt, Artificial Sequence
  Description of Artificial Sequence: Synthetic oligonucleotide
guguggagggguccuaucc

SEQ ID NO: 1466737 - RNA, 19 nt, Artificial Sequence
  Description of Artificial Sequence: Synthetic oligonucleotide
acgggaaacauaacaggag

SEQ ID NO: 1466738 - RNA, 19 nt, Artificial Sequence
  Description of Artificial Sequence: Synthetic oligonucleotide
gcaaucuuuagcuggguca

SEQ ID NO: 1466739 - RNA, 19 nt, Artificial Sequence
  Description of Artificial Sequence: Synthetic oligonucleotide
cuugaugcgacgggugacc

SEQ ID NO: 1466740 - RNA, 19 nt, Artificial Sequence
  Description of Artificial Sequence: Synthetic oligonucleotide
guagguagagaagggagca

SEQ ID NO: 1466741 - RNA, 19 nt, Artificial Sequence
  Description of Artificial Sequence: Synthetic oligonucleotide
cugagcauacucugaaaga

SEQ ID NO: 1466742 - RNA, 19 nt, Artificial Sequence
  Description of Artificial Sequence: Synthetic oligonucleotide
gaggagaccgcugauaacu

SEQ ID NO: 1466743 - RNA, 19 nt, Artificial Sequence
  Description of Artificial Sequence: Synthetic oligonucleotide
uuucggcuacgaucagggg

SEQ ID NO: 1466744 - RNA, 19 nt, Artificial Sequence
  Description of Artificial Sequence: Synthetic oligonucleotide
uccagguuucgaugccggg

SEQ ID NO: 1466745 - RNA, 19 nt, Artificial Sequence
  Description of Artificial Sequence: Synthetic oligonucleotide
cucgguccgaauacagaag

SEQ ID NO: 1466746 - RNA, 19 nt, Artificial Sequence
  Description of Artificial Sequence: Synthetic oligonucleotide
ugcgguccgagccucgcug

SEQ ID NO: 1466747 - RNA, 19 nt, Artificial Sequence
  Description of Artificial Sequence: Synthetic oligonucleotide
ugcguucacucucucuagu

SEQ ID NO: 1466748 - RNA, 19 nt, Artificial Sequence
  Description of Artificial Sequence: Synthetic oligonucleotide
aagguccggucucgguccg

SEQ ID NO: 1466749 - RNA, 19 nt, Artificial Sequence
  Description of Artificial Sequence: Synthetic oligonucleotide
ucgaugccggguauaucca

SEQ ID NO: 1466750 - RNA, 19 nt, Artificial Sequence
  Description of Artificial Sequence: Synthetic oligonucleotide
gugucucuuacuaugacua

SEQ ID NO: 1466751 - RNA, 19 nt, Artificial Sequence
  Description of Artificial Sequence: Synthetic oligonucleotide
augccggguauauccauca

SEQ ID NO: 1466752 - RNA, 19 nt, Artificial Sequence
  Description of Artificial Sequence: Synthetic oligonucleotide
agcaugcccgugcugucuc

SEQ ID NO: 1466753 - RNA, 19 nt, Artificial Sequence
  Description of Artificial Sequence: Synthetic oligonucleotide
aggcauaaagcaugcccgu

SEQ ID NO: 1466754 - RNA, 19 nt, Artificial Sequence
  Description of Artificial Sequence: Synthetic oligonucleotide
uccuuccacggucacugga

SEQ ID NO: 1466755 - RNA, 19 nt, Artificial Sequence
  Description of Artificial Sequence: Synthetic oligonucleotide
gagccugcgaucugggcca

SEQ ID NO: 1466756 - RNA, 19 nt, Artificial Sequence
  Description of Artificial Sequence: Synthetic oligonucleotide
gcugauaacucccuggucu

SEQ ID NO: 1466757 - RNA, 19 nt, Artificial Sequence
  Description of Artificial Sequence: Synthetic oligonucleotide
uauauccaucagcgagcag

SEQ ID NO: 1466758 - RNA, 19 nt, Artificial Sequence
  Description of Artificial Sequence: Synthetic oligonucleotide
uccggucucgguccgaaua

SEQ ID NO: 1466759 - RNA, 19 nt, Artificial Sequence
  Description of Artificial Sequence: Synthetic oligonucleotide
caaauccacucugagccug

SEQ ID NO: 1466760 - RNA, 19 nt, Artificial Sequence
  Description of Artificial Sequence: Synthetic oligonucleotide
uggucucguguuuuggcuc

SEQ ID NO: 1466761 - RNA, 19 nt, Artificial Sequence
  Description of Artificial Sequence: Synthetic oligonucleotide
ugauaacucccuggucucc

SEQ ID NO: 1466762 - RNA, 19 nt, Artificial Sequence
  Description of Artificial Sequence: Synthetic oligonucleotide
augcccgugcugucucugc

SEQ ID NO: 1466763 - RNA, 19 nt, Artificial Sequence
  Description of Artificial Sequence: Synthetic oligonucleotide
gaaaggcuccuccgcuugc

SEQ ID NO: 1466764 - RNA, 19 nt, Artificial Sequence
  Description of Artificial Sequence: Synthetic oligonucleotide
agucgcagggugggaaggc

SEQ ID NO: 1466765 - RNA, 19 nt, Artificial Sequence
  Description of Artificial Sequence: Synthetic oligonucleotide
cauccagguuucgaugccg

SEQ ID NO: 1466766 - RNA, 19 nt, Artificial Sequence
  Description of Artificial Sequence: Synthetic oligonucleotide
ugucucuuacuaugacuau

SEQ ID NO: 1466767 - RNA, 19 nt, Artificial Sequence
  Description of Artificial Sequence: Synthetic oligonucleotide
ugacuaucaccaugugcuc

SEQ ID NO: 1466768 - RNA, 19 nt, Artificial Sequence
  Description of Artificial Sequence: Synthetic oligonucleotide
ggucccuucacuggagugg

SEQ ID NO: 1466769 - RNA, 19 nt, Artificial Sequence
  Description of Artificial Sequence: Synthetic oligonucleotide
cugguccagucgaaggcgc

SEQ ID NO: 1466770 - RNA, 19 nt, Artificial Sequence
  Description of Artificial Sequence: Synthetic oligonucleotide
ugagcggcuauagcccucc

SEQ ID NO: 1466771 - RNA, 19 nt, Artificial Sequence
  Description of Artificial Sequence: Synthetic oligonucleotide
aacuuuuacugaggcuggu

SEQ ID NO: 1466772 - RNA, 19 nt, Artificial Sequence
  Description of Artificial Sequence: Synthetic oligonucleotide
uuacuaugacuaucaccau

SEQ ID NO: 1466773 - RNA, 19 nt, Artificial Sequence
  Description of Artificial Sequence: Synthetic oligonucleotide
cuaaggucagcauccaggu

SEQ ID NO: 1466774 - RNA, 19 nt, Artificial Sequence
  Description of Artificial Sequence: Synthetic oligonucleotide
cucuuacuaugacuaucac

SEQ ID NO: 1466775 - RNA, 19 nt, Artificial Sequence
  Description of Artificial Sequence: Synthetic oligonucleotide
agcggcuauagcccuccag

SEQ ID NO: 1466776 - RNA, 19 nt, Artificial Sequence
  Description of Artificial Sequence: Synthetic oligonucleotide
guauauccaucagcgagca

SEQ ID NO: 1466777 - RNA, 19 nt, Artificial Sequence
  Description of Artificial Sequence: Synthetic oligonucleotide
augccaccaaaugaaccag

SEQ ID NO: 1466778 - RNA, 19 nt, Artificial Sequence
  Description of Artificial Sequence: Synthetic oligonucleotide
cucuaaggucagcauccag

SEQ ID NO: 1466779 - RNA, 19 nt, Artificial Sequence
  Description of Artificial Sequence: Synthetic oligonucleotide
caguggacaggaugccacc

SEQ ID NO: 1466780 - RNA, 19 nt, Artificial Sequence
  Description of Artificial Sequence: Synthetic oligonucleotide
ucugcgguccgaacuuuua

SEQ ID NO: 1466781 - RNA, 19 nt, Artificial Sequence
  Description of Artificial Sequence: Synthetic oligonucleotide
uccccugcuugaugcgacg

SEQ ID NO: 1466782 - RNA, 19 nt, Artificial Sequence
  Description of Artificial Sequence: Synthetic oligonucleotide
gagcuguccuuccacgguc

SEQ ID NO: 1466783 - RNA, 19 nt, Artificial Sequence
  Description of Artificial Sequence: Synthetic oligonucleotide
cuaugacuaucaccaugug

SEQ ID NO: 1466784 - RNA, 19 nt, Artificial Sequence
  Description of Artificial Sequence: Synthetic oligonucleotide
ugccggguauauccaucag

SEQ ID NO: 1466785 - RNA, 19 nt, Artificial Sequence
  Description of Artificial Sequence: Synthetic oligonucleotide
gcgacccaaaggcagcugg

SEQ ID NO: 1466786 - RNA, 19 nt, Artificial Sequence
  Description of Artificial Sequence: Synthetic oligonucleotide
auagcgggucuccucugcu

SEQ ID NO: 1466787 - RNA, 19 nt, Artificial Sequence
  Description of Artificial Sequence: Synthetic oligonucleotide
cauccccucagugccaggc

SEQ ID NO: 1466788 - RNA, 19 nt, Artificial Sequence
  Description of Artificial Sequence: Synthetic oligonucleotide
guccgaacuuuuacugagg

SEQ ID NO: 1466789 - RNA, 19 nt, Artificial Sequence
  Description of Artificial Sequence: Synthetic oligonucleotide
uucuccuuucggcuacgau

SEQ ID NO: 1466790 - RNA, 19 nt, Artificial Sequence
  Description of Artificial Sequence: Synthetic oligonucleotide
gaauucaaaccaagggagu

SEQ ID NO: 1466791 - RNA, 19 nt, Artificial Sequence
  Description of Artificial Sequence: Synthetic oligonucleotide
accgugggcauccccucag

SEQ ID NO: 1466792 - RNA, 19 nt, Artificial Sequence
  Description of Artificial Sequence: Synthetic oligonucleotide
aagccgccucuguaggccu

SEQ ID NO: 1466793 - RNA, 19 nt, Artificial Sequence
  Description of Artificial Sequence: Synthetic oligonucleotide
ucccgcacucuaaggucag

SEQ ID NO: 1466794 - RNA, 19 nt, Artificial Sequence
  Description of Artificial Sequence: Synthetic oligonucleotide
cugcuugaugcgacgggug

SEQ ID NO: 1466795 - RNA, 19 nt, Artificial Sequence
  Description of Artificial Sequence: Synthetic oligonucleotide
cucagugccgacuggaggu

SEQ ID NO: 1466796 - RNA, 19 nt, Artificial Sequence
  Description of Artificial Sequence: Synthetic oligonucleotide
cugcgguccgaacuuuuac

SEQ ID NO: 1466797 - RNA, 19 nt, Artificial Sequence
  Description of Artificial Sequence: Synthetic oligonucleotide
cucgagcuugcccaauguc

SEQ ID NO: 1466798 - RNA, 19 nt, Artificial Sequence
  Description of Artificial Sequence: Synthetic oligonucleotide
aagcaugcccgugcugucu

SEQ ID NO: 1466799 - RNA, 19 nt, Artificial Sequence
  Description of Artificial Sequence: Synthetic oligonucleotide
augauugcguucacucucu

SEQ ID NO: 1466800 - RNA, 19 nt, Artificial Sequence
  Description of Artificial Sequence: Synthetic oligonucleotide
uugcgccucucuucccagg

SEQ ID NO: 1466801 - RNA, 19 nt, Artificial Sequence
  Description of Artificial Sequence: Synthetic oligonucleotide
uccgaugauugcguucacu

SEQ ID NO: 1466802 - RNA, 19 nt, Artificial Sequence
  Description of Artificial Sequence: Synthetic oligonucleotide
gcgguccgaacuuuuacug

SEQ ID NO: 1466803 - RNA, 19 nt, Artificial Sequence
  Description of Artificial Sequence: Synthetic oligonucleotide
ugguccgaugauugcguuc

SEQ ID NO: 1466804 - RNA, 19 nt, Artificial Sequence
  Description of Artificial Sequence: Synthetic oligonucleotide
gcgacgggugaccucaucc

SEQ ID NO: 1466805 - RNA, 19 nt, Artificial Sequence
  Description of Artificial Sequence: Synthetic oligonucleotide
aggagaccgcugauaacuc

SEQ ID NO: 1466806 - RNA, 19 nt, Artificial Sequence
  Description of Artificial Sequence: Synthetic oligonucleotide
gccggguauauccaucagc

SEQ ID NO: 1466807 - RNA, 19 nt, Artificial Sequence
  Description of Artificial Sequence: Synthetic oligonucleotide
ggagaccgcugauaacucc

SEQ ID NO: 1466808 - RNA, 19 nt, Artificial Sequence
  Description of Artificial Sequence: Synthetic oligonucleotide
guccgagccucgcugugag

SEQ ID NO: 1466809 - RNA, 19 nt, Artificial Sequence
  Description of Artificial Sequence: Synthetic oligonucleotide
gguccgaugauugcguuca

SEQ ID NO: 1466810 - RNA, 19 nt, Artificial Sequence
  Description of Artificial Sequence: Synthetic oligonucleotide
ccgaauacagaaggugugg

SEQ ID NO: 1466811 - RNA, 19 nt, Artificial Sequence
  Description of Artificial Sequence: Synthetic oligonucleotide
gugugggcuaggcaguguc

SEQ ID NO: 1466812 - RNA, 19 nt, Artificial Sequence
  Description of Artificial Sequence: Synthetic oligonucleotide
gauugcguucacucucucu

SEQ ID NO: 1466813 - RNA, 19 nt, Artificial Sequence
  Description of Artificial Sequence: Synthetic oligonucleotide
ccuaucccgcacucuaagg

SEQ ID NO: 1466814 - RNA, 19 nt, Artificial Sequence
  Description of Artificial Sequence: Synthetic oligonucleotide
gcacucuaaggucagcauc

SEQ ID NO: 1466815 - RNA, 19 nt, Artificial Sequence
  Description of Artificial Sequence: Synthetic oligonucleotide
gcugguccagucgaaggcg

SEQ ID NO: 1466816 - RNA, 19 nt, Artificial Sequence
  Description of Artificial Sequence: Synthetic oligonucleotide
ugauugcguucacucucuc

SEQ ID NO: 1466817 - RNA, 19 nt, Artificial Sequence
  Description of Artificial Sequence: Synthetic oligonucleotide
cugcugggaaaagucgcag

SEQ ID NO: 1466818 - RNA, 19 nt, Artificial Sequence
  Description of Artificial Sequence: Synthetic oligonucleotide
cuaaggaguugcugccuga

SEQ ID NO: 1466819 - RNA, 19 nt, Artificial Sequence
  Description of Artificial Sequence: Synthetic oligonucleotide
agggguccuaucccgcacu

SEQ ID NO: 1466820 - RNA, 19 nt, Artificial Sequence
  Description of Artificial Sequence: Synthetic oligonucleotide
agaauacagcagacaauau

SEQ ID NO: 1466821 - RNA, 19 nt, Artificial Sequence
  Description of Artificial Sequence: Synthetic oligonucleotide
cugagccugcgaucugggc

SEQ ID NO: 1466822 - RNA, 19 nt, Artificial Sequence
  Description of Artificial Sequence: Synthetic oligonucleotide
gagggguccuaucccgcac

SEQ ID NO: 1466823 - RNA, 19 nt, Artificial Sequence
  Description of Artificial Sequence: Synthetic oligonucleotide
uccuuucggcuacgaucag

SEQ ID NO: 1466824 - RNA, 19 nt, Artificial Sequence
  Description of Artificial Sequence: Synthetic oligonucleotide
uuagcacaggcggcuuggc

SEQ ID NO: 1466825 - RNA, 19 nt, Artificial Sequence
  Description of Artificial Sequence: Synthetic oligonucleotide
cuccccugcuugaugcgac

SEQ ID NO: 1466826 - RNA, 19 nt, Artificial Sequence
  Description of Artificial Sequence: Synthetic oligonucleotide
cauaaagcaugcccgugcu

SEQ ID NO: 1466827 - RNA, 19 nt, Artificial Sequence
  Description of Artificial Sequence: Synthetic oligonucleotide
aucccgcacucuaagguca

SEQ ID NO: 1466828 - RNA, 19 nt, Artificial Sequence
  Description of Artificial Sequence: Synthetic oligonucleotide
guccgaauacagaaggugu

SEQ ID NO: 1466829 - RNA, 19 nt, Artificial Sequence
  Description of Artificial Sequence: Synthetic oligonucleotide
caacccagcugcaaugucu

SEQ ID NO: 1466830 - RNA, 19 nt, Artificial Sequence
  Description of Artificial Sequence: Synthetic oligonucleotide
ucgcagggugggaaggcau

SEQ ID NO: 1466831 - RNA, 19 nt, Artificial Sequence
  Description of Artificial Sequence: Synthetic oligonucleotide
ggcaaucuuuagcuggguc

SEQ ID NO: 1466832 - RNA, 19 nt, Artificial Sequence
  Description of Artificial Sequence: Synthetic oligonucleotide
cagaucuaagaacucaguu

SEQ ID NO: 1466833 - RNA, 19 nt, Artificial Sequence
  Description of Artificial Sequence: Synthetic oligonucleotide
cauuuuagcacaggcggcu

SEQ ID NO: 1466834 - RNA, 19 nt, Artificial Sequence
  Description of Artificial Sequence: Synthetic oligonucleotide
cuggggauagcgggucucc

SEQ ID NO: 1466835 - RNA, 19 nt, Artificial Sequence
  Description of Artificial Sequence: Synthetic oligonucleotide
agggaguaagguagguaga

SEQ ID NO: 1466836 - RNA, 19 nt, Artificial Sequence
  Description of Artificial Sequence: Synthetic oligonucleotide
gaaaagucgcaggguggga

SEQ ID NO: 1466837 - RNA, 19 nt, Artificial Sequence
  Description of Artificial Sequence: Synthetic oligonucleotide
gauaacucccuggucuccu

SEQ ID NO: 1466838 - RNA, 19 nt, Artificial Sequence
  Description of Artificial Sequence: Synthetic oligonucleotide
uucugcgguccgaacuuuu

SEQ ID NO: 1466839 - RNA, 19 nt, Artificial Sequence
  Description of Artificial Sequence: Synthetic oligonucleotide
auacuccgguccccaucuc

SEQ ID NO: 1466840 - RNA, 19 nt, Artificial Sequence
  Description of Artificial Sequence: Synthetic oligonucleotide
agcgcucaccacuccggcu

SEQ ID NO: 1466841 - RNA, 19 nt, Artificial Sequence
  Description of Artificial Sequence: Synthetic oligonucleotide
agccucgugguggugguga

SEQ ID NO: 1466842 - RNA, 19 nt, Artificial Sequence
  Description of Artificial Sequence: Synthetic oligonucleotide
cucguguuuuggcucuuca

SEQ ID NO: 1466843 - RNA, 19 nt, Artificial Sequence
  Description of Artificial Sequence: Synthetic oligonucleotide
uacgaucaggggugcgguc

SEQ ID NO: 1466844 - RNA, 19 nt, Artificial Sequence
  Description of Artificial Sequence: Synthetic oligonucleotide
gagcauacucugaaagagu

SEQ ID NO: 1466845 - RNA, 19 nt, Artificial Sequence
  Description of Artificial Sequence: Synthetic oligonucleotide
aguaggagaccagguucga

SEQ ID NO: 1466846 - RNA, 19 nt, Artificial Sequence
  Description of Artificial Sequence: Synthetic oligonucleotide
ggucucgguccgaauacag

SEQ ID NO: 1466847 - RNA, 19 nt, Artificial Sequence
  Description of Artificial Sequence: Synthetic oligonucleotide
uuucgaugccggguauauc

SEQ ID NO: 1466848 - RNA, 19 nt, Artificial Sequence
  Description of Artificial Sequence: Synthetic oligonucleotide
cagguuucgaugccgggua

SEQ ID NO: 1466849 - RNA, 19 nt, Artificial Sequence
  Description of Artificial Sequence: Synthetic oligonucleotide
cagcgcucaccacuccggc

SEQ ID NO: 1466850 - RNA, 19 nt, Artificial Sequence
  Description of Artificial Sequence: Synthetic oligonucleotide
caccacuccggcugcgcac

SEQ ID NO: 1466851 - RNA, 19 nt, Artificial Sequence
  Description of Artificial Sequence: Synthetic oligonucleotide
cucauacacgggaaacaua

SEQ ID NO: 1466852 - RNA, 19 nt, Artificial Sequence
  Description of Artificial Sequence: Synthetic oligonucleotide
agcucauagugcacaggga

SEQ ID NO: 1466853 - RNA, 19 nt, Artificial Sequence
  Description of Artificial Sequence: Synthetic oligonucleotide
guuucugcgguccgaacuu

SEQ ID NO: 1466854 - RNA, 19 nt, Artificial Sequence
  Description of Artificial Sequence: Synthetic oligonucleotide
uggcuauacuccggucccc

SEQ ID NO: 1466855 - RNA, 19 nt, Artificial Sequence
  Description of Artificial Sequence: Synthetic oligonucleotide
ggcgcugggcaaucuuuag

SEQ ID NO: 1466856 - RNA, 19 nt, Artificial Sequence
  Description of Artificial Sequence: Synthetic oligonucleotide
auccacucugagccugcga

SEQ ID NO: 1466857 - RNA, 19 nt, Artificial Sequence
  Description of Artificial Sequence: Synthetic oligonucleotide
auuuuagcacaggcggcuu

SEQ ID NO: 1466858 - RNA, 19 nt, Artificial Sequence
  Description of Artificial Sequence: Synthetic oligonucleotide
gguccaguccccuuccaaa

SEQ ID NO: 1466859 - RNA, 19 nt, Artificial Sequence
  Description of Artificial Sequence: Synthetic oligonucleotide
ggcauaaagcaugcccgug

SEQ ID NO: 1466860 - RNA, 19 nt, Artificial Sequence
  Description of Artificial Sequence: Synthetic oligonucleotide
gugguucuccuuucggcua

SEQ ID NO: 1466861 - RNA, 19 nt, Artificial Sequence
  Description of Artificial Sequence: Synthetic oligonucleotide
gccggcuguugcuaaggag

SEQ ID NO: 1466862 - RNA, 19 nt, Artificial Sequence
  Description of Artificial Sequence: Synthetic oligonucleotide
ggaaacauaacaggaguuu

SEQ ID NO: 1466863 - RNA, 19 nt, Artificial Sequence
  Description of Artificial Sequence: Synthetic oligonucleotide
cucaccacuccggcugcgc

SEQ ID NO: 1466864 - RNA, 19 nt, Artificial Sequence
  Description of Artificial Sequence: Synthetic oligonucleotide
agguuucgaugccggguau

SEQ ID NO: 1466865 - RNA, 19 nt, Artificial Sequence
  Description of Artificial Sequence: Synthetic oligonucleotide
augguccgaugauugcguu

SEQ ID NO: 1466866 - RNA, 19 nt, Artificial Sequence
  Description of Artificial Sequence: Synthetic oligonucleotide
accacuccggcugcgcacu

SEQ ID NO: 1466867 - RNA, 19 nt, Artificial Sequence
  Description of Artificial Sequence: Synthetic oligonucleotide
gucucgguccgaauacaga

SEQ ID NO: 1466868 - RNA, 19 nt, Artificial Sequence
  Description of Artificial Sequence: Synthetic oligonucleotide
ccuuucggcuacgaucagg

SEQ ID NO: 1466869 - RNA, 19 nt, Artificial Sequence
  Description of Artificial Sequence: Synthetic oligonucleotide
ggaguaagguagguagaga

SEQ ID NO: 1466870 - RNA, 19 nt, Artificial Sequence
  Description of Artificial Sequence: Synthetic oligonucleotide
gcguucacucucucuaguc

SEQ ID NO: 1466871 - RNA, 19 nt, Artificial Sequence
  Description of Artificial Sequence: Synthetic oligonucleotide
gcuaggcagugucucuuac

SEQ ID NO: 1466872 - RNA, 19 nt, Artificial Sequence
  Description of Artificial Sequence: Synthetic oligonucleotide
uggggauagcgggucuccu

SEQ ID NO: 1466873 - RNA, 19 nt, Artificial Sequence
  Description of Artificial Sequence: Synthetic oligonucleotide
agaccgcugauaacucccu

SEQ ID NO: 1466874 - RNA, 19 nt, Artificial Sequence
  Description of Artificial Sequence: Synthetic oligonucleotide
agguucgaagccgccucug

SEQ ID NO: 1466875 - RNA, 19 nt, Artificial Sequence
  Description of Artificial Sequence: Synthetic oligonucleotide
cugagcggcuauagcccuc

SEQ ID NO: 1466876 - RNA, 19 nt, Artificial Sequence
  Description of Artificial Sequence: Synthetic oligonucleotide
gaccagguucgaagccgcc

SEQ ID NO: 1466877 - RNA, 19 nt, Artificial Sequence
  Description of Artificial Sequence: Synthetic oligonucleotide
agcuguccuuccacgguca

SEQ ID NO: 1466878 - RNA, 19 nt, Artificial Sequence
  Description of Artificial Sequence: Synthetic oligonucleotide
gggauagcgggucuccucu

SEQ ID NO: 1466879 - RNA, 19 nt, Artificial Sequence
  Description of Artificial Sequence: Synthetic oligonucleotide
guuucgaugccggguauau

SEQ ID NO: 1466880 - RNA, 19 nt, Artificial Sequence
  Description of Artificial Sequence: Synthetic oligonucleotide
auccaucagcgagcagcuc

SEQ ID NO: 1466881 - RNA, 19 nt, Artificial Sequence
  Description of Artificial Sequence: Synthetic oligonucleotide
caggcggcuuggcugcgug

SEQ ID NO: 1466882 - RNA, 19 nt, Artificial Sequence
  Description of Artificial Sequence: Synthetic oligonucleotide
ucgaaggcgcugggcaauc

SEQ ID NO: 1466883 - RNA, 19 nt, Artificial Sequence
  Description of Artificial Sequence: Synthetic oligonucleotide
ggcuccccugcuugaugcg

SEQ ID NO: 1466884 - RNA, 19 nt, Artificial Sequence
  Description of Artificial Sequence: Synthetic oligonucleotide
gcuugcgccucucuuccca

SEQ ID NO: 1466885 - RNA, 19 nt, Artificial Sequence
  Description of Artificial Sequence: Synthetic oligonucleotide
cccagcgcucaccacuccg

SEQ ID NO: 1466886 - RNA, 19 nt, Artificial Sequence
  Description of Artificial Sequence: Synthetic oligonucleotide
ccgcuugcgccucucuucc

SEQ ID NO: 1466887 - RNA, 19 nt, Artificial Sequence
  Description of Artificial Sequence: Synthetic oligonucleotide
ggggauagcgggucuccuc

SEQ ID NO: 1466888 - RNA, 19 nt, Artificial Sequence
  Description of Artificial Sequence: Synthetic oligonucleotide
ugcugccggaagugugguc

SEQ ID NO: 1466889 - RNA, 19 nt, Artificial Sequence
  Description of Artificial Sequence: Synthetic oligonucleotide
ccggucucgguccgaauac

SEQ ID NO: 1466890 - RNA, 19 nt, Artificial Sequence
  Description of Artificial Sequence: Synthetic oligonucleotide
cugccucaaugguccgaug

SEQ ID NO: 1466891 - RNA, 19 nt, Artificial Sequence
  Description of Artificial Sequence: Synthetic oligonucleotide
guaggagaccagguucgaa

SEQ ID NO: 1466892 - RNA, 19 nt, Artificial Sequence
  Description of Artificial Sequence: Synthetic oligonucleotide
ggagggguccuaucccgca

SEQ ID NO: 1466893 - RNA, 19 nt, Artificial Sequence
  Description of Artificial Sequence: Synthetic oligonucleotide
cuccgguccccaucuccuc

SEQ ID NO: 1466894 - RNA, 19 nt, Artificial Sequence
  Description of Artificial Sequence: Synthetic oligonucleotide
ggucucguguuuuggcucu

SEQ ID NO: 1466895 - RNA, 19 nt, Artificial Sequence
  Description of Artificial Sequence: Synthetic oligonucleotide
ggcuauagcccuccaggcu

SEQ ID NO: 1466896 - RNA, 19 nt, Artificial Sequence
  Description of Artificial Sequence: Synthetic oligonucleotide
cugcguggaggcggcggcg

SEQ ID NO: 1466897 - RNA, 19 nt, Artificial Sequence
  Description of Artificial Sequence: Synthetic oligonucleotide
gguucuccuuucggcuacg

SEQ ID NO: 1466898 - RNA, 19 nt, Artificial Sequence
  Description of Artificial Sequence: Synthetic oligonucleotide
cuauagcccuccaggcugu

SEQ ID NO: 1466899 - RNA, 19 nt, Artificial Sequence
  Description of Artificial Sequence: Synthetic oligonucleotide
ugcgcacugagcggcuaua

SEQ ID NO: 1466900 - RNA, 19 nt, Artificial Sequence
  Description of Artificial Sequence: Synthetic oligonucleotide
gcugccggaaguguggucu

SEQ ID NO: 1466901 - RNA, 19 nt, Artificial Sequence
  Description of Artificial Sequence: Synthetic oligonucleotide
gucgcagggugggaaggca

SEQ ID NO: 1466902 - RNA, 19 nt, Artificial Sequence
  Description of Artificial Sequence: Synthetic oligonucleotide
cagugccgacuggagguac

SEQ ID NO: 1466903 - RNA, 19 nt, Artificial Sequence
  Description of Artificial Sequence: Synthetic oligonucleotide
ccggcugcgcacugagcgg

SEQ ID NO: 1466904 - RNA, 19 nt, Artificial Sequence
  Description of Artificial Sequence: Synthetic oligonucleotide
gcuuggcuauacuccgguc

SEQ ID NO: 1466905 - RNA, 19 nt, Artificial Sequence
  Description of Artificial Sequence: Synthetic oligonucleotide
ggcuauacuccggucccca

SEQ ID NO: 1466906 - RNA, 19 nt, Artificial Sequence
  Description of Artificial Sequence: Synthetic oligonucleotide
guccgaugauugcguucac

SEQ ID NO: 1466907 - RNA, 19 nt, Artificial Sequence
  Description of Artificial Sequence: Synthetic oligonucleotide
gccgacuggagguacugcu

SEQ ID NO: 1466908 - RNA, 19 nt, Artificial Sequence
  Description of Artificial Sequence: Synthetic oligonucleotide
cugggaaaagucgcagggu

SEQ ID NO: 1466909 - RNA, 19 nt, Artificial Sequence
  Description of Artificial Sequence: Synthetic oligonucleotide
ccacucugagccugcgauc

SEQ ID NO: 1466910 - RNA, 19 nt, Artificial Sequence
  Description of Artificial Sequence: Synthetic oligonucleotide
gcacaggugugggcuaggc

SEQ ID NO: 1466911 - RNA, 19 nt, Artificial Sequence
  Description of Artificial Sequence: Synthetic oligonucleotide
ggcuacgaucaggggugcg

SEQ ID NO: 1466912 - RNA, 19 nt, Artificial Sequence
  Description of Artificial Sequence: Synthetic oligonucleotide
gcgcacugagcggcuauag

SEQ ID NO: 1466913 - RNA, 19 nt, Artificial Sequence
  Description of Artificial Sequence: Synthetic oligonucleotide
guccuaucccgcacucuaa

SEQ ID NO: 1466914 - RNA, 19 nt, Artificial Sequence
  Description of Artificial Sequence: Synthetic oligonucleotide
ucccuucacuggagugguu

SEQ ID NO: 1466915 - RNA, 19 nt, Artificial Sequence
  Description of Artificial Sequence: Synthetic oligonucleotide
ccccagaucuaagaacuca

SEQ ID NO: 1466916 - RNA, 19 nt, Artificial Sequence
  Description of Artificial Sequence: Synthetic oligonucleotide
gcuguccuuccacggucac

SEQ ID NO: 1466917 - RNA, 19 nt, Artificial Sequence
  Description of Artificial Sequence: Synthetic oligonucleotide
ggugcgguccgagccucgc

SEQ ID NO: 1466918 - RNA, 19 nt, Artificial Sequence
  Description of Artificial Sequence: Synthetic oligonucleotide
gggguccuaucccgcacuc

SEQ ID NO: 1466919 - RNA, 19 nt, Artificial Sequence
  Description of Artificial Sequence: Synthetic oligonucleotide
ggcggcuuggcugcgugga

SEQ ID NO: 1466920 - RNA, 19 nt, Artificial Sequence
  Description of Artificial Sequence: Synthetic oligonucleotide
gguagagaagggagcagau

SEQ ID NO: 1466921 - RNA, 19 nt, Artificial Sequence
  Description of Artificial Sequence: Synthetic oligonucleotide
gaucaggggugcgguccga

SEQ ID NO: 1466922 - RNA, 19 nt, Artificial Sequence
  Description of Artificial Sequence: Synthetic oligonucleotide
ccaacccagcugcaauguc

SEQ ID NO: 1466923 - RNA, 19 nt, Artificial Sequence
  Description of Artificial Sequence: Synthetic oligonucleotide
auagcccuccaggcuguuu

SEQ ID NO: 1466924 - RNA, 19 nt, Artificial Sequence
  Description of Artificial Sequence: Synthetic oligonucleotide
cgaauacagaaggugugga

SEQ ID NO: 1466925 - RNA, 19 nt, Artificial Sequence
  Description of Artificial Sequence: Synthetic oligonucleotide
caccgugggcauccccuca

SEQ ID NO: 1466926 - RNA, 19 nt, Artificial Sequence
  Description of Artificial Sequence: Synthetic oligonucleotide
uauagcccuccaggcuguu

SEQ ID NO: 1466927 - RNA, 19 nt, Artificial Sequence
  Description of Artificial Sequence: Synthetic oligonucleotide
ccccugcuugaugcgacgg

SEQ ID NO: 1466928 - RNA, 19 nt, Artificial Sequence
  Description of Artificial Sequence: Synthetic oligonucleotide
gcggcuuggcugcguggag

SEQ ID NO: 1466929 - RNA, 19 nt, Artificial Sequence
  Description of Artificial Sequence: Synthetic oligonucleotide
ugccggaaguguggucuuu

SEQ ID NO: 1466930 - RNA, 19 nt, Artificial Sequence
  Description of Artificial Sequence: Synthetic oligonucleotide
uggcugcguggaggcggcg

SEQ ID NO: 1466931 - RNA, 19 nt, Artificial Sequence
  Description of Artificial Sequence: Synthetic oligonucleotide
gcauacucugaaagagucu

SEQ ID NO: 1466932 - RNA, 19 nt, Artificial Sequence
  Description of Artificial Sequence: Synthetic oligonucleotide
gagcggcuauagcccucca

SEQ ID NO: 1466933 - RNA, 19 nt, Artificial Sequence
  Description of Artificial Sequence: Synthetic oligonucleotide
cagguucgaagccgccucu

SEQ ID NO: 1466934 - RNA, 19 nt, Artificial Sequence
  Description of Artificial Sequence: Synthetic oligonucleotide
gguuucgaugccggguaua

SEQ ID NO: 1466935 - RNA, 19 nt, Artificial Sequence
  Description of Artificial Sequence: Synthetic oligonucleotide
cgacgggugaccucaucca

SEQ ID NO: 1466936 - RNA, 19 nt, Artificial Sequence
  Description of Artificial Sequence: Synthetic oligonucleotide
agccgccucuguaggccug

SEQ ID NO: 1466937 - RNA, 19 nt, Artificial Sequence
  Description of Artificial Sequence: Synthetic oligonucleotide
ccgaacuuuuacugaggcu

SEQ ID NO: 1466938 - RNA, 19 nt, Artificial Sequence
  Description of Artificial Sequence: Synthetic oligonucleotide
cgaugauugcguucacucu

SEQ ID NO: 1466939 - RNA, 19 nt, Artificial Sequence
  Description of Artificial Sequence: Synthetic oligonucleotide
ccgcugauaacucccuggu

SEQ ID NO: 1466940 - RNA, 19 nt, Artificial Sequence
  Description of Artificial Sequence: Synthetic oligonucleotide
cgagccucgcugugagcug

SEQ ID NO: 1466941 - RNA, 19 nt, Artificial Sequence
  Description of Artificial Sequence: Synthetic oligonucleotide
gccccagaucuaagaacuc

SEQ ID NO: 1466942 - RNA, 19 nt, Artificial Sequence
  Description of Artificial Sequence: Synthetic oligonucleotide
cggguauauccaucagcga

SEQ ID NO: 1466943 - RNA, 19 nt, Artificial Sequence
  Description of Artificial Sequence: Synthetic oligonucleotide
ccagguuucgaugccgggu

SEQ ID NO: 1466944 - RNA, 19 nt, Artificial Sequence
  Description of Artificial Sequence: Synthetic oligonucleotide
gccucgcugugagcugucc

SEQ ID NO: 1466945 - RNA, 19 nt, Artificial Sequence
  Description of Artificial Sequence: Synthetic oligonucleotide
cacuccggcugcgcacuga

SEQ ID NO: 1466946 - RNA, 19 nt, Artificial Sequence
  Description of Artificial Sequence: Synthetic oligonucleotide
gggugcgguccgagccucg

SEQ ID NO: 1466947 - RNA, 19 nt, Artificial Sequence
  Description of Artificial Sequence: Synthetic oligonucleotide
gugcgguccgagccucgcu

SEQ ID NO: 1466948 - RNA, 19 nt, Artificial Sequence
  Description of Artificial Sequence: Synthetic oligonucleotide
gcuauacuccgguccccau

SEQ ID NO: 1466949 - RNA, 19 nt, Artificial Sequence
  Description of Artificial Sequence: Synthetic oligonucleotide
ggggugcgguccgagccuc

SEQ ID NO: 1466950 - RNA, 19 nt, Artificial Sequence
  Description of Artificial Sequence: Synthetic oligonucleotide
cccgcacucuaaggucagc

SEQ ID NO: 1466951 - RNA, 19 nt, Artificial Sequence
  Description of Artificial Sequence: Synthetic oligonucleotide
cugcgcacugagcggcuau

SEQ ID NO: 1466952 - RNA, 19 nt, Artificial Sequence
  Description of Artificial Sequence: Synthetic oligonucleotide
caucagcgagcagcucaua

SEQ ID NO: 1466953 - RNA, 19 nt, Artificial Sequence
  Description of Artificial Sequence: Synthetic oligonucleotide
gcccuuagauccacccacu

SEQ ID NO: 1466954 - RNA, 19 nt, Artificial Sequence
  Description of Artificial Sequence: Synthetic oligonucleotide
cugccggaaguguggucuu

SEQ ID NO: 1466955 - RNA, 19 nt, Artificial Sequence
  Description of Artificial Sequence: Synthetic oligonucleotide
gcgguccgagccucgcugu

SEQ ID NO: 1466956 - RNA, 19 nt, Artificial Sequence
  Description of Artificial Sequence: Synthetic oligonucleotide
augcgacgggugaccucau

SEQ ID NO: 1466957 - RNA, 19 nt, Artificial Sequence
  Description of Artificial Sequence: Synthetic oligonucleotide
cccgugcugucucugcccu

SEQ ID NO: 1466958 - RNA, 19 nt, Artificial Sequence
  Description of Artificial Sequence: Synthetic oligonucleotide
ccucgcugugagcuguccu

SEQ ID NO: 1466959 - RNA, 19 nt, Artificial Sequence
  Description of Artificial Sequence: Synthetic oligonucleotide
guccggucucgguccgaau

SEQ ID NO: 1466960 - RNA, 19 nt, Artificial Sequence
  Description of Artificial Sequence: Synthetic oligonucleotide
cgguccgaauacagaaggu

SEQ ID NO: 1466961 - RNA, 19 nt, Artificial Sequence
  Description of Artificial Sequence: Synthetic oligonucleotide
cggcuacgaucaggggugc

SEQ ID NO: 1466962 - RNA, 19 nt, Artificial Sequence
  Description of Artificial Sequence: Synthetic oligonucleotide
gucucguguuuuggcucuu

SEQ ID NO: 1466963 - RNA, 19 nt, Artificial Sequence
  Description of Artificial Sequence: Synthetic oligonucleotide
ccgccucuguaggccuggc

SEQ ID NO: 1466964 - RNA, 19 nt, Artificial Sequence
  Description of Artificial Sequence: Synthetic oligonucleotide
gccucguggugguggugau

SEQ ID NO: 1466965 - RNA, 19 nt, Artificial Sequence
  Description of Artificial Sequence: Synthetic oligonucleotide
cuccucgagcuugcccaau

SEQ ID NO: 1466966 - RNA, 19 nt, Artificial Sequence
  Description of Artificial Sequence: Synthetic oligonucleotide
cgccucuguaggccuggcu

SEQ ID NO: 1466967 - RNA, 19 nt, Artificial Sequence
  Description of Artificial Sequence: Synthetic oligonucleotide
cgaaggcgcugggcaaucu

SEQ ID NO: 1466968 - RNA, 19 nt, Artificial Sequence
  Description of Artificial Sequence: Synthetic oligonucleotide
ccgugcugucucugcccuu

SEQ ID NO: 1466969 - RNA, 19 nt, Artificial Sequence
  Description of Artificial Sequence: Synthetic oligonucleotide
uaaaaugguacaaagagag

SEQ ID NO: 1466970 - RNA, 19 nt, Artificial Sequence
  Description of Artificial Sequence: Synthetic oligonucleotide
aguaaaaugguacaaagag

SEQ ID NO: 1466971 - RNA, 19 nt, Artificial Sequence
  Description of Artificial Sequence: Synthetic oligonucleotide
aagaugagaauauaggcuc

SEQ ID NO: 1466972 - RNA, 19 nt, Artificial Sequence
  Description of Artificial Sequence: Synthetic oligonucleotide
aaggaugcaaacuuccugc

SEQ ID NO: 1466973 - RNA, 19 nt, Artificial Sequence
  Description of Artificial Sequence: Synthetic oligonucleotide
uuuaauggcaaacuuaucu

SEQ ID NO: 1466974 - RNA, 19 nt, Artificial Sequence
  Description of Artificial Sequence: Synthetic oligonucleotide
uuaucugauacuacaaugg

SEQ ID NO: 1466975 - RNA, 19 nt, Artificial Sequence
  Description of Artificial Sequence: Synthetic oligonucleotide
agaauauaggcucaagggc

SEQ ID NO: 1466976 - RNA, 19 nt, Artificial Sequence
  Description of Artificial Sequence: Synthetic oligonucleotide
aaucccaucuccaugagcc

SEQ ID NO: 1466977 - RNA, 19 nt, Artificial Sequence
  Description of Artificial Sequence: Synthetic oligonucleotide
aauacaugcuaauuuaaug

SEQ ID NO: 1466978 - RNA, 19 nt, Artificial Sequence
  Description of Artificial Sequence: Synthetic oligonucleotide
gagaauauaggcucaaggg

SEQ ID NO: 1466979 - RNA, 19 nt, Artificial Sequence
  Description of Artificial Sequence: Synthetic oligonucleotide
uaaauaagaagacuacugc

SEQ ID NO: 1466980 - RNA, 19 nt, Artificial Sequence
  Description of Artificial Sequence: Synthetic oligonucleotide
aaauugagagagcaucagc

SEQ ID NO: 1466981 - RNA, 19 nt, Artificial Sequence
  Description of Artificial Sequence: Synthetic oligonucleotide
aaauaagaagacuacugca

SEQ ID NO: 1466982 - RNA, 19 nt, Artificial Sequence
  Description of Artificial Sequence: Synthetic oligonucleotide
aacauguuaggaacgacgc

SEQ ID NO: 1466983 - RNA, 19 nt, Artificial Sequence
  Description of Artificial Sequence: Synthetic oligonucleotide
aacacuggcgccaagaauc

SEQ ID NO: 1466984 - RNA, 19 nt, Artificial Sequence
  Description of Artificial Sequence: Synthetic oligonucleotide
agauaaguccacuuauggc

SEQ ID NO: 1466985 - RNA, 19 nt, Artificial Sequence
  Description of Artificial Sequence: Synthetic oligonucleotide
uuguuugaggcccucaggg

SEQ ID NO: 1466986 - RNA, 19 nt, Artificial Sequence
  Description of Artificial Sequence: Synthetic oligonucleotide
aacgucuuguuugugaugg

SEQ ID NO: 1466987 - RNA, 19 nt, Artificial Sequence
  Description of Artificial Sequence: Synthetic oligonucleotide
gagauaaguccacuuaugg

SEQ ID NO: 1466988 - RNA, 19 nt, Artificial Sequence
  Description of Artificial Sequence: Synthetic oligonucleotide
augugaacauguuaggaac

SEQ ID NO: 1466989 - RNA, 19 nt, Artificial Sequence
  Description of Artificial Sequence: Synthetic oligonucleotide
uaugcgaagaacuucuggc

SEQ ID NO: 1466990 - RNA, 19 nt, Artificial Sequence
  Description of Artificial Sequence: Synthetic oligonucleotide
aaacgaauacugcacagcu

SEQ ID NO: 1466991 - RNA, 19 nt, Artificial Sequence
  Description of Artificial Sequence: Synthetic oligonucleotide
aauaaagauagaaaauaca

SEQ ID NO: 1466992 - RNA, 19 nt, Artificial Sequence
  Description of Artificial Sequence: Synthetic oligonucleotide
uuaggaacgacgcuucucc

SEQ ID NO: 1466993 - RNA, 19 nt, Artificial Sequence
  Description of Artificial Sequence: Synthetic oligonucleotide
ucaaacaaggcugacaaga

SEQ ID NO: 1466994 - RNA, 19 nt, Artificial Sequence
  Description of Artificial Sequence: Synthetic oligonucleotide
aacacuuugcggucauagc

SEQ ID NO: 1466995 - RNA, 19 nt, Artificial Sequence
  Description of Artificial Sequence: Synthetic oligonucleotide
aauagugaaacacguccug

SEQ ID NO: 1466996 - RNA, 19 nt, Artificial Sequence
  Description of Artificial Sequence: Synthetic oligonucleotide
acaauccagauguaggaac

SEQ ID NO: 1466997 - RNA, 19 nt, Artificial Sequence
  Description of Artificial Sequence: Synthetic oligonucleotide
ugugaacauguuaggaacg

SEQ ID NO: 1466998 - RNA, 19 nt, Artificial Sequence
  Description of Artificial Sequence: Synthetic oligonucleotide
uacaaagagagcaaacacu

SEQ ID NO: 1466999 - RNA, 19 nt, Artificial Sequence
  Description of Artificial Sequence: Synthetic oligonucleotide
aauugagagagcaucagcu

SEQ ID NO: 1467000 - RNA, 19 nt, Artificial Sequence
  Description of Artificial Sequence: Synthetic oligonucleotide
augguaaccaucuuggagu

SEQ ID NO: 1467001 - RNA, 19 nt, Artificial Sequence
  Description of Artificial Sequence: Synthetic oligonucleotide
aauauaggcucaagggccc

SEQ ID NO: 1467002 - RNA, 19 nt, Artificial Sequence
  Description of Artificial Sequence: Synthetic oligonucleotide
auaaauaagaagacuacug

SEQ ID NO: 1467003 - RNA, 19 nt, Artificial Sequence
  Description of Artificial Sequence: Synthetic oligonucleotide
aacacguccugucugaggu

SEQ ID NO: 1467004 - RNA, 19 nt, Artificial Sequence
  Description of Artificial Sequence: Synthetic oligonucleotide
aauccagaaggcaaauuac

SEQ ID NO: 1467005 - RNA, 19 nt, Artificial Sequence
  Description of Artificial Sequence: Synthetic oligonucleotide
aaaucccaucuccaugagc

SEQ ID NO: 1467006 - RNA, 19 nt, Artificial Sequence
  Description of Artificial Sequence: Synthetic oligonucleotide
uacaugcuaauuuaauggc

SEQ ID NO: 1467007 - RNA, 19 nt, Artificial Sequence
  Description of Artificial Sequence: Synthetic oligonucleotide
aggugaaaagcugaagucc

SEQ ID NO: 1467008 - RNA, 19 nt, Artificial Sequence
  Description of Artificial Sequence: Synthetic oligonucleotide
gaacauguuaggaacgacg

SEQ ID NO: 1467009 - RNA, 19 nt, Artificial Sequence
  Description of Artificial Sequence: Synthetic oligonucleotide
aacauggucccgccgggcc

SEQ ID NO: 1467010 - RNA, 19 nt, Artificial Sequence
  Description of Artificial Sequence: Synthetic oligonucleotide
aaaucaacgucuuguuugu

SEQ ID NO: 1467011 - RNA, 19 nt, Artificial Sequence
  Description of Artificial Sequence: Synthetic oligonucleotide
cccaauauauaaaucaacg

SEQ ID NO: 1467012 - RNA, 19 nt, Artificial Sequence
  Description of Artificial Sequence: Synthetic oligonucleotide
cacuugggcaaauugagag

SEQ ID NO: 1467013 - RNA, 19 nt, Artificial Sequence
  Description of Artificial Sequence: Synthetic oligonucleotide
gaaaagccgauuccaauug

SEQ ID NO: 1467014 - RNA, 19 nt, Artificial Sequence
  Description of Artificial Sequence: Synthetic oligonucleotide
uccacuuauggcuacaauc

SEQ ID NO: 1467015 - RNA, 19 nt, Artificial Sequence
  Description of Artificial Sequence: Synthetic oligonucleotide
uccaauugaucauuccucc

SEQ ID NO: 1467016 - RNA, 19 nt, Artificial Sequence
  Description of Artificial Sequence: Synthetic oligonucleotide
uauauaaaucaacgucuug

SEQ ID NO: 1467017 - RNA, 19 nt, Artificial Sequence
  Description of Artificial Sequence: Synthetic oligonucleotide
ugaaugucagugcugcagc

SEQ ID NO: 1467018 - RNA, 19 nt, Artificial Sequence
  Description of Artificial Sequence: Synthetic oligonucleotide
auaugcgaagaacuucugg

SEQ ID NO: 1467019 - RNA, 19 nt, Artificial Sequence
  Description of Artificial Sequence: Synthetic oligonucleotide
uugauaguugauauuucgu

SEQ ID NO: 1467020 - RNA, 19 nt, Artificial Sequence
  Description of Artificial Sequence: Synthetic oligonucleotide
uauggcuacaauccagaug

SEQ ID NO: 1467021 - RNA, 19 nt, Artificial Sequence
  Description of Artificial Sequence: Synthetic oligonucleotide
gacucuucgacagaggggc

SEQ ID NO: 1467022 - RNA, 19 nt, Artificial Sequence
  Description of Artificial Sequence: Synthetic oligonucleotide
ugauacuacaaugguaacc

SEQ ID NO: 1467023 - RNA, 19 nt, Artificial Sequence
  Description of Artificial Sequence: Synthetic oligonucleotide
auuauucuuccgcauacca

SEQ ID NO: 1467024 - RNA, 19 nt, Artificial Sequence
  Description of Artificial Sequence: Synthetic oligonucleotide
uucgucgcugacuaagggg

SEQ ID NO: 1467025 - RNA, 19 nt, Artificial Sequence
  Description of Artificial Sequence: Synthetic oligonucleotide
gaauuugugccacuuggac

SEQ ID NO: 1467026 - RNA, 19 nt, Artificial Sequence
  Description of Artificial Sequence: Synthetic oligonucleotide
gaaggaugcaaacuuccug

SEQ ID NO: 1467027 - RNA, 19 nt, Artificial Sequence
  Description of Artificial Sequence: Synthetic oligonucleotide
acugucauucaacagcugu

SEQ ID NO: 1467028 - RNA, 19 nt, Artificial Sequence
  Description of Artificial Sequence: Synthetic oligonucleotide
acacuuugcggucauagca

SEQ ID NO: 1467029 - RNA, 19 nt, Artificial Sequence
  Description of Artificial Sequence: Synthetic oligonucleotide
guuugugauggacaacggg

SEQ ID NO: 1467030 - RNA, 19 nt, Artificial Sequence
  Description of Artificial Sequence: Synthetic oligonucleotide
gauauuucgucgcugacua

SEQ ID NO: 1467031 - RNA, 19 nt, Artificial Sequence
  Description of Artificial Sequence: Synthetic oligonucleotide
agucaaggcaaauuauucu

SEQ ID NO: 1467032 - RNA, 19 nt, Artificial Sequence
  Description of Artificial Sequence: Synthetic oligonucleotide
ucuccaaacugagaaaggc

SEQ ID NO: 1467033 - RNA, 19 nt, Artificial Sequence
  Description of Artificial Sequence: Synthetic oligonucleotide
gcugacaagacccaggagc

SEQ ID NO: 1467034 - RNA, 19 nt, Artificial Sequence
  Description of Artificial Sequence: Synthetic oligonucleotide
cugacaagacccaggagcc

SEQ ID NO: 1467035 - RNA, 19 nt, Artificial Sequence
  Description of Artificial Sequence: Synthetic oligonucleotide
agccgauuccaauugauca

SEQ ID NO: 1467036 - RNA, 19 nt, Artificial Sequence
  Description of Artificial Sequence: Synthetic oligonucleotide
ucuuguuugugauggacaa

SEQ ID NO: 1467037 - RNA, 19 nt, Artificial Sequence
  Description of Artificial Sequence: Synthetic oligonucleotide
uguuugugauggacaacgg

SEQ ID NO: 1467038 - RNA, 19 nt, Artificial Sequence
  Description of Artificial Sequence: Synthetic oligonucleotide
cuugggcaaauugagagag

SEQ ID NO: 1467039 - RNA, 19 nt, Artificial Sequence
  Description of Artificial Sequence: Synthetic oligonucleotide
ucuugagaccaccuggacu

SEQ ID NO: 1467040 - RNA, 19 nt, Artificial Sequence
  Description of Artificial Sequence: Synthetic oligonucleotide
aggaugaggucaaacaagg

SEQ ID NO: 1467041 - RNA, 19 nt, Artificial Sequence
  Description of Artificial Sequence: Synthetic oligonucleotide
aguuaaggacaguguaggg

SEQ ID NO: 1467042 - RNA, 19 nt, Artificial Sequence
  Description of Artificial Sequence: Synthetic oligonucleotide
auugagagagcaucagcug

SEQ ID NO: 1467043 - RNA, 19 nt, Artificial Sequence
  Description of Artificial Sequence: Synthetic oligonucleotide
gcgccaagaauccagaagg

SEQ ID NO: 1467044 - RNA, 19 nt, Artificial Sequence
  Description of Artificial Sequence: Synthetic oligonucleotide
gaaacuugcagggagggga

SEQ ID NO: 1467045 - RNA, 19 nt, Artificial Sequence
  Description of Artificial Sequence: Synthetic oligonucleotide
acacgccggagauaagucc

SEQ ID NO: 1467046 - RNA, 19 nt, Artificial Sequence
  Description of Artificial Sequence: Synthetic oligonucleotide
gaggugaaaagcugaaguc

SEQ ID NO: 1467047 - RNA, 19 nt, Artificial Sequence
  Description of Artificial Sequence: Synthetic oligonucleotide
aaaguaucuuucaagucaa

SEQ ID NO: 1467048 - RNA, 19 nt, Artificial Sequence
  Description of Artificial Sequence: Synthetic oligonucleotide
ugaucauuccucccugcug

SEQ ID NO: 1467049 - RNA, 19 nt, Artificial Sequence
  Description of Artificial Sequence: Synthetic oligonucleotide
ucaagucaaggcaaauuau

SEQ ID NO: 1467050 - RNA, 19 nt, Artificial Sequence
  Description of Artificial Sequence: Synthetic oligonucleotide
ugaaacacguccugucuga

SEQ ID NO: 1467051 - RNA, 19 nt, Artificial Sequence
  Description of Artificial Sequence: Synthetic oligonucleotide
ugggcaaauugagagagca

SEQ ID NO: 1467052 - RNA, 19 nt, Artificial Sequence
  Description of Artificial Sequence: Synthetic oligonucleotide
aaaagccgauuccaauuga

SEQ ID NO: 1467053 - RNA, 19 nt, Artificial Sequence
  Description of Artificial Sequence: Synthetic oligonucleotide
ugcugaaugucagugcugc

SEQ ID NO: 1467054 - RNA, 19 nt, Artificial Sequence
  Description of Artificial Sequence: Synthetic oligonucleotide
ccacuuauggcuacaaucc

SEQ ID NO: 1467055 - RNA, 19 nt, Artificial Sequence
  Description of Artificial Sequence: Synthetic oligonucleotide
ugaggucaaacaaggcuga

SEQ ID NO: 1467056 - RNA, 19 nt, Artificial Sequence
  Description of Artificial Sequence: Synthetic oligonucleotide
ugcuaauuuaauggcaaac

SEQ ID NO: 1467057 - RNA, 19 nt, Artificial Sequence
  Description of Artificial Sequence: Synthetic oligonucleotide
agugaaacacguccugucu

SEQ ID NO: 1467058 - RNA, 19 nt, Artificial Sequence
  Description of Artificial Sequence: Synthetic oligonucleotide
guugauauuucgucgcuga

SEQ ID NO: 1467059 - RNA, 19 nt, Artificial Sequence
  Description of Artificial Sequence: Synthetic oligonucleotide
aucaacgucuuguuuguga

SEQ ID NO: 1467060 - RNA, 19 nt, Artificial Sequence
  Description of Artificial Sequence: Synthetic oligonucleotide
cugcgugcuauaaaacugc

SEQ ID NO: 1467061 - RNA, 19 nt, Artificial Sequence
  Description of Artificial Sequence: Synthetic oligonucleotide
ugauauuucgucgcugacu

SEQ ID NO: 1467062 - RNA, 19 nt, Artificial Sequence
  Description of Artificial Sequence: Synthetic oligonucleotide
gaaacucgcaacugucaug

SEQ ID NO: 1467063 - RNA, 19 nt, Artificial Sequence
  Description of Artificial Sequence: Synthetic oligonucleotide
agggacgcgaagcaccugg

SEQ ID NO: 1467064 - RNA, 19 nt, Artificial Sequence
  Description of Artificial Sequence: Synthetic oligonucleotide
uacugagaagaggacaagc

SEQ ID NO: 1467065 - RNA, 19 nt, Artificial Sequence
  Description of Artificial Sequence: Synthetic oligonucleotide
acagaauagugaaacacgu

SEQ ID NO: 1467066 - RNA, 19 nt, Artificial Sequence
  Description of Artificial Sequence: Synthetic oligonucleotide
ucaacgucuuguuugugau

SEQ ID NO: 1467067 - RNA, 19 nt, Artificial Sequence
  Description of Artificial Sequence: Synthetic oligonucleotide
gacaguuguccccuucugc

SEQ ID NO: 1467068 - RNA, 19 nt, Artificial Sequence
  Description of Artificial Sequence: Synthetic oligonucleotide
aacgacgcuucuccaaacu

SEQ ID NO: 1467069 - RNA, 19 nt, Artificial Sequence
  Description of Artificial Sequence: Synthetic oligonucleotide
cugaagucccaauauauaa

SEQ ID NO: 1467070 - RNA, 19 nt, Artificial Sequence
  Description of Artificial Sequence: Synthetic oligonucleotide
uguuugaggcccucagggc

SEQ ID NO: 1467071 - RNA, 19 nt, Artificial Sequence
  Description of Artificial Sequence: Synthetic oligonucleotide
uguaggguggggaccaccu

SEQ ID NO: 1467072 - RNA, 19 nt, Artificial Sequence
  Description of Artificial Sequence: Synthetic oligonucleotide
uugaucauuccucccugcu

SEQ ID NO: 1467073 - RNA, 19 nt, Artificial Sequence
  Description of Artificial Sequence: Synthetic oligonucleotide
cuacaauccagauguagga

SEQ ID NO: 1467074 - RNA, 19 nt, Artificial Sequence
  Description of Artificial Sequence: Synthetic oligonucleotide
cuuauggcuacaauccaga

SEQ ID NO: 1467075 - RNA, 19 nt, Artificial Sequence
  Description of Artificial Sequence: Synthetic oligonucleotide
aagccgauuccaauugauc

SEQ ID NO: 1467076 - RNA, 19 nt, Artificial Sequence
  Description of Artificial Sequence: Synthetic oligonucleotide
caugcuaauuuaauggcaa

SEQ ID NO: 1467077 - RNA, 19 nt, Artificial Sequence
  Description of Artificial Sequence: Synthetic oligonucleotide
gcaagagacucuucgacag

SEQ ID NO: 1467078 - RNA, 19 nt, Artificial Sequence
  Description of Artificial Sequence: Synthetic oligonucleotide
cauuguuugaggcccucag

SEQ ID NO: 1467079 - RNA, 19 nt, Artificial Sequence
  Description of Artificial Sequence: Synthetic oligonucleotide
agaaacucgcaacugucau

SEQ ID NO: 1467080 - RNA, 19 nt, Artificial Sequence
  Description of Artificial Sequence: Synthetic oligonucleotide
caugugaacauguuaggaa

SEQ ID NO: 1467081 - RNA, 19 nt, Artificial Sequence
  Description of Artificial Sequence: Synthetic oligonucleotide
auaaaucaacgucuuguuu

SEQ ID NO: 1467082 - RNA, 19 nt, Artificial Sequence
  Description of Artificial Sequence: Synthetic oligonucleotide
uggauguccacuguggcuc

SEQ ID NO: 1467083 - RNA, 19 nt, Artificial Sequence
  Description of Artificial Sequence: Synthetic oligonucleotide
acuuauggcuacaauccag

SEQ ID NO: 1467084 - RNA, 19 nt, Artificial Sequence
  Description of Artificial Sequence: Synthetic oligonucleotide
gucugcgugguccucaggc

SEQ ID NO: 1467085 - RNA, 19 nt, Artificial Sequence
  Description of Artificial Sequence: Synthetic oligonucleotide
aggucauaugcgaagaacu

SEQ ID NO: 1467086 - RNA, 19 nt, Artificial Sequence
  Description of Artificial Sequence: Synthetic oligonucleotide
acgggcccagaauuugugc

SEQ ID NO: 1467087 - RNA, 19 nt, Artificial Sequence
  Description of Artificial Sequence: Synthetic oligonucleotide
gaagucccaauauauaaau

SEQ ID NO: 1467088 - RNA, 19 nt, Artificial Sequence
  Description of Artificial Sequence: Synthetic oligonucleotide
ugcgugcuauaaaacugcc

SEQ ID NO: 1467089 - RNA, 19 nt, Artificial Sequence
  Description of Artificial Sequence: Synthetic oligonucleotide
uugcggucauagcacacgc

SEQ ID NO: 1467090 - RNA, 19 nt, Artificial Sequence
  Description of Artificial Sequence: Synthetic oligonucleotide
gacgcuucuccaaacugag

SEQ ID NO: 1467091 - RNA, 19 nt, Artificial Sequence
  Description of Artificial Sequence: Synthetic oligonucleotide
ugccacagaaacucgcaac

SEQ ID NO: 1467092 - RNA, 19 nt, Artificial Sequence
  Description of Artificial Sequence: Synthetic oligonucleotide
uagugaaacacguccuguc

SEQ ID NO: 1467093 - RNA, 19 nt, Artificial Sequence
  Description of Artificial Sequence: Synthetic oligonucleotide
aaggacaguguaggguggg

SEQ ID NO: 1467094 - RNA, 19 nt, Artificial Sequence
  Description of Artificial Sequence: Synthetic oligonucleotide
ucauagcacacgccggaga

SEQ ID NO: 1467095 - RNA, 19 nt, Artificial Sequence
  Description of Artificial Sequence: Synthetic oligonucleotide
acagaggggccuuguagag

SEQ ID NO: 1467096 - RNA, 19 nt, Artificial Sequence
  Description of Artificial Sequence: Synthetic oligonucleotide
uugauauuucgucgcugac

SEQ ID NO: 1467097 - RNA, 19 nt, Artificial Sequence
  Description of Artificial Sequence: Synthetic oligonucleotide
ucccguaucuucuuucaaa

SEQ ID NO: 1467098 - RNA, 19 nt, Artificial Sequence
  Description of Artificial Sequence: Synthetic oligonucleotide
acuugggcaaauugagaga

SEQ ID NO: 1467099 - RNA, 19 nt, Artificial Sequence
  Description of Artificial Sequence: Synthetic oligonucleotide
ugucaugcaugugaacaug

SEQ ID NO: 1467100 - RNA, 19 nt, Artificial Sequence
  Description of Artificial Sequence: Synthetic oligonucleotide
gcggucauagcacacgccg

SEQ ID NO: 1467101 - RNA, 19 nt, Artificial Sequence
  Description of Artificial Sequence: Synthetic oligonucleotide
cacuuggacucuuggaaug

SEQ ID NO: 1467102 - RNA, 19 nt, Artificial Sequence
  Description of Artificial Sequence: Synthetic oligonucleotide
uggugaaccuggaacacuu

SEQ ID NO: 1467103 - RNA, 19 nt, Artificial Sequence
  Description of Artificial Sequence: Synthetic oligonucleotide
gaggucauaugcgaagaac

SEQ ID NO: 1467104 - RNA, 19 nt, Artificial Sequence
  Description of Artificial Sequence: Synthetic oligonucleotide
uguaggaaccagaggugaa

SEQ ID NO: 1467105 - RNA, 19 nt, Artificial Sequence
  Description of Artificial Sequence: Synthetic oligonucleotide
aauccagauguaggaacca

SEQ ID NO: 1467106 - RNA, 19 nt, Artificial Sequence
  Description of Artificial Sequence: Synthetic oligonucleotide
cagaaacuugcagggaggg

SEQ ID NO: 1467107 - RNA, 19 nt, Artificial Sequence
  Description of Artificial Sequence: Synthetic oligonucleotide
auuucgucgcugacuaagg

SEQ ID NO: 1467108 - RNA, 19 nt, Artificial Sequence
  Description of Artificial Sequence: Synthetic oligonucleotide
cagaauagugaaacacguc

SEQ ID NO: 1467109 - RNA, 19 nt, Artificial Sequence
  Description of Artificial Sequence: Synthetic oligonucleotide
cuucugcgugcuauaaaac

SEQ ID NO: 1467110 - RNA, 19 nt, Artificial Sequence
  Description of Artificial Sequence: Synthetic oligonucleotide
guaaccaucuuggaguuaa

SEQ ID NO: 1467111 - RNA, 19 nt, Artificial Sequence
  Description of Artificial Sequence: Synthetic oligonucleotide
ggaguuaaggacaguguag

SEQ ID NO: 1467112 - RNA, 19 nt, Artificial Sequence
  Description of Artificial Sequence: Synthetic oligonucleotide
acaugcuaauuuaauggca

SEQ ID NO: 1467113 - RNA, 19 nt, Artificial Sequence
  Description of Artificial Sequence: Synthetic oligonucleotide
auagugaaacacguccugu

SEQ ID NO: 1467114 - RNA, 19 nt, Artificial Sequence
  Description of Artificial Sequence: Synthetic oligonucleotide
ugaaaagcugaagucccaa

SEQ ID NO: 1467115 - RNA, 19 nt, Artificial Sequence
  Description of Artificial Sequence: Synthetic oligonucleotide
acgacgcuucuccaaacug

SEQ ID NO: 1467116 - RNA, 19 nt, Artificial Sequence
  Description of Artificial Sequence: Synthetic oligonucleotide
acauguuaggaacgacgcu

SEQ ID NO: 1467117 - RNA, 19 nt, Artificial Sequence
  Description of Artificial Sequence: Synthetic oligonucleotide
acuuugcggucauagcaca

SEQ ID NO: 1467118 - RNA, 19 nt, Artificial Sequence
  Description of Artificial Sequence: Synthetic oligonucleotide
auguuaggaacgacgcuuc

SEQ ID NO: 1467119 - RNA, 19 nt, Artificial Sequence
  Description of Artificial Sequence: Synthetic oligonucleotide
ggagcaguaaaaugguaca

SEQ ID NO: 1467120 - RNA, 19 nt, Artificial Sequence
  Description of Artificial Sequence: Synthetic oligonucleotide
aggaccaucuugauaguug

SEQ ID NO: 1467121 - RNA, 19 nt, Artificial Sequence
  Description of Artificial Sequence: Synthetic oligonucleotide
uucuugagaccaccuggac

SEQ ID NO: 1467122 - RNA, 19 nt, Artificial Sequence
  Description of Artificial Sequence: Synthetic oligonucleotide
uggacaacgggcccagaau

SEQ ID NO: 1467123 - RNA, 19 nt, Artificial Sequence
  Description of Artificial Sequence: Synthetic oligonucleotide
aaagccgauuccaauugau

SEQ ID NO: 1467124 - RNA, 19 nt, Artificial Sequence
  Description of Artificial Sequence: Synthetic oligonucleotide
ugcuccucagaaacuugca

SEQ ID NO: 1467125 - RNA, 19 nt, Artificial Sequence
  Description of Artificial Sequence: Synthetic oligonucleotide
auccccucuggaaaauccc

SEQ ID NO: 1467126 - RNA, 19 nt, Artificial Sequence
  Description of Artificial Sequence: Synthetic oligonucleotide
ugcgugguccucaggcugc

SEQ ID NO: 1467127 - RNA, 19 nt, Artificial Sequence
  Description of Artificial Sequence: Synthetic oligonucleotide
agaaacuugcagggagggg

SEQ ID NO: 1467128 - RNA, 19 nt, Artificial Sequence
  Description of Artificial Sequence: Synthetic oligonucleotide
uggaggucauaugcgaaga

SEQ ID NO: 1467129 - RNA, 19 nt, Artificial Sequence
  Description of Artificial Sequence: Synthetic oligonucleotide
uugggcaaauugagagagc

SEQ ID NO: 1467130 - RNA, 19 nt, Artificial Sequence
  Description of Artificial Sequence: Synthetic oligonucleotide
ugaacauguuaggaacgac

SEQ ID NO: 1467131 - RNA, 19 nt, Artificial Sequence
  Description of Artificial Sequence: Synthetic oligonucleotide
uguuaggaacgacgcuucu

SEQ ID NO: 1467132 - RNA, 19 nt, Artificial Sequence
  Description of Artificial Sequence: Synthetic oligonucleotide
acagugaugccaaacgaau

SEQ ID NO: 1467133 - RNA, 19 nt, Artificial Sequence
  Description of Artificial Sequence: Synthetic oligonucleotide
acacuggcgccaagaaucc

SEQ ID NO: 1467134 - RNA, 19 nt, Artificial Sequence
  Description of Artificial Sequence: Synthetic oligonucleotide
acucgcaacugucaugcau

SEQ ID NO: 1467135 - RNA, 19 nt, Artificial Sequence
  Description of Artificial Sequence: Synthetic oligonucleotide
agacucuucgacagagggg

SEQ ID NO: 1467136 - RNA, 19 nt, Artificial Sequence
  Description of Artificial Sequence: Synthetic oligonucleotide
gaaugucagugcugcagca

SEQ ID NO: 1467137 - RNA, 19 nt, Artificial Sequence
  Description of Artificial Sequence: Synthetic oligonucleotide
aggaugcaaacuuccugcu

SEQ ID NO: 1467138 - RNA, 19 nt, Artificial Sequence
  Description of Artificial Sequence: Synthetic oligonucleotide
cuggaaaaucccaucucca

SEQ ID NO: 1467139 - RNA, 19 nt, Artificial Sequence
  Description of Artificial Sequence: Synthetic oligonucleotide
aucccaucuccaugagccg

SEQ ID NO: 1467140 - RNA, 19 nt, Artificial Sequence
  Description of Artificial Sequence: Synthetic oligonucleotide
gucauaugcgaagaacuuc

SEQ ID NO: 1467141 - RNA, 19 nt, Artificial Sequence
  Description of Artificial Sequence: Synthetic oligonucleotide
cauaugcgaagaacuucug

SEQ ID NO: 1467142 - RNA, 19 nt, Artificial Sequence
  Description of Artificial Sequence: Synthetic oligonucleotide
gacaagacccaggagccca

SEQ ID NO: 1467143 - RNA, 19 nt, Artificial Sequence
  Description of Artificial Sequence: Synthetic oligonucleotide
ggcgccaagaauccagaag

SEQ ID NO: 1467144 - RNA, 19 nt, Artificial Sequence
  Description of Artificial Sequence: Synthetic oligonucleotide
augcuaauuuaauggcaaa

SEQ ID NO: 1467145 - RNA, 19 nt, Artificial Sequence
  Description of Artificial Sequence: Synthetic oligonucleotide
ugauggacaacgggcccag

SEQ ID NO: 1467146 - RNA, 19 nt, Artificial Sequence
  Description of Artificial Sequence: Synthetic oligonucleotide
ugcggucauagcacacgcc

SEQ ID NO: 1467147 - RNA, 19 nt, Artificial Sequence
  Description of Artificial Sequence: Synthetic oligonucleotide
gaaacacguccugucugag

SEQ ID NO: 1467148 - RNA, 19 nt, Artificial Sequence
  Description of Artificial Sequence: Synthetic oligonucleotide
aucuuucaagucaaggcaa

SEQ ID NO: 1467149 - RNA, 19 nt, Artificial Sequence
  Description of Artificial Sequence: Synthetic oligonucleotide
auggacaacgggcccagaa

SEQ ID NO: 1467150 - RNA, 19 nt, Artificial Sequence
  Description of Artificial Sequence: Synthetic oligonucleotide
aaucaacgucuuguuugug

SEQ ID NO: 1467151 - RNA, 19 nt, Artificial Sequence
  Description of Artificial Sequence: Synthetic oligonucleotide
cacagugaugccaaacgaa

SEQ ID NO: 1467152 - RNA, 19 nt, Artificial Sequence
  Description of Artificial Sequence: Synthetic oligonucleotide
ugcaaacuuccugcucccg

SEQ ID NO: 1467153 - RNA, 19 nt, Artificial Sequence
  Description of Artificial Sequence: Synthetic oligonucleotide
acaacgggcccagaauuug

SEQ ID NO: 1467154 - RNA, 19 nt, Artificial Sequence
  Description of Artificial Sequence: Synthetic oligonucleotide
cuuugcggucauagcacac

SEQ ID NO: 1467155 - RNA, 19 nt, Artificial Sequence
  Description of Artificial Sequence: Synthetic oligonucleotide
gcaucaugacaguuguccc

SEQ ID NO: 1467156 - RNA, 19 nt, Artificial Sequence
  Description of Artificial Sequence: Synthetic oligonucleotide
uccugucugaggucacaug

SEQ ID NO: 1467157 - RNA, 19 nt, Artificial Sequence
  Description of Artificial Sequence: Synthetic oligonucleotide
ccaaacgaauacugcacag

SEQ ID NO: 1467158 - RNA, 19 nt, Artificial Sequence
  Description of Artificial Sequence: Synthetic oligonucleotide
ucgcaacugucaugcaugu

SEQ ID NO: 1467159 - RNA, 19 nt, Artificial Sequence
  Description of Artificial Sequence: Synthetic oligonucleotide
gugcuauaaaacugccaca

SEQ ID NO: 1467160 - RNA, 19 nt, Artificial Sequence
  Description of Artificial Sequence: Synthetic oligonucleotide
agaugagaauauaggcuca

SEQ ID NO: 1467161 - RNA, 19 nt, Artificial Sequence
  Description of Artificial Sequence: Synthetic oligonucleotide
gaugagaauauaggcucaa

SEQ ID NO: 1467162 - RNA, 19 nt, Artificial Sequence
  Description of Artificial Sequence: Synthetic oligonucleotide
ucgcuggcagguucugaag

SEQ ID NO: 1467163 - RNA, 19 nt, Artificial Sequence
  Description of Artificial Sequence: Synthetic oligonucleotide
gaacgacgcuucuccaaac

SEQ ID NO: 1467164 - RNA, 19 nt, Artificial Sequence
  Description of Artificial Sequence: Synthetic oligonucleotide
cagcugugcugaaugucag

SEQ ID NO: 1467165 - RNA, 19 nt, Artificial Sequence
  Description of Artificial Sequence: Synthetic oligonucleotide
ggcuacaauccagauguag

SEQ ID NO: 1467166 - RNA, 19 nt, Artificial Sequence
  Description of Artificial Sequence: Synthetic oligonucleotide
ucuuggaauggagcaguaa

SEQ ID NO: 1467167 - RNA, 19 nt, Artificial Sequence
  Description of Artificial Sequence: Synthetic oligonucleotide
augguacaaagagagcaaa

SEQ ID NO: 1467168 - RNA, 19 nt, Artificial Sequence
  Description of Artificial Sequence: Synthetic oligonucleotide
cacacgccggagauaaguc

SEQ ID NO: 1467169 - RNA, 19 nt, Artificial Sequence
  Description of Artificial Sequence: Synthetic oligonucleotide
cccucuacugagaagagga

SEQ ID NO: 1467170 - RNA, 19 nt, Artificial Sequence
  Description of Artificial Sequence: Synthetic oligonucleotide
agagacucuucgacagagg

SEQ ID NO: 1467171 - RNA, 19 nt, Artificial Sequence
  Description of Artificial Sequence: Synthetic oligonucleotide
gagucugcgugguccucag

SEQ ID NO: 1467172 - RNA, 19 nt, Artificial Sequence
  Description of Artificial Sequence: Synthetic oligonucleotide
acgcgaagcaccuggugaa

SEQ ID NO: 1467173 - RNA, 19 nt, Artificial Sequence
  Description of Artificial Sequence: Synthetic oligonucleotide
ccaauugaucauuccuccc

SEQ ID NO: 1467174 - RNA, 19 nt, Artificial Sequence
  Description of Artificial Sequence: Synthetic oligonucleotide
gcuaauuuaauggcaaacu

SEQ ID NO: 1467175 - RNA, 19 nt, Artificial Sequence
  Description of Artificial Sequence: Synthetic oligonucleotide
guuaggaacgacgcuucuc

SEQ ID NO: 1467176 - RNA, 19 nt, Artificial Sequence
  Description of Artificial Sequence: Synthetic oligonucleotide
guuguccccuucugcgugc

SEQ ID NO: 1467177 - RNA, 19 nt, Artificial Sequence
  Description of Artificial Sequence: Synthetic oligonucleotide
gagcaguaaaaugguacaa

SEQ ID NO: 1467178 - RNA, 19 nt, Artificial Sequence
  Description of Artificial Sequence: Synthetic oligonucleotide
cugcgugguccucaggcug

SEQ ID NO: 1467179 - RNA, 19 nt, Artificial Sequence
  Description of Artificial Sequence: Synthetic oligonucleotide
cacuuauggcuacaaucca

SEQ ID NO: 1467180 - RNA, 19 nt, Artificial Sequence
  Description of Artificial Sequence: Synthetic oligonucleotide
uucaacagcugugcugaau

SEQ ID NO: 1467181 - RNA, 19 nt, Artificial Sequence
  Description of Artificial Sequence: Synthetic oligonucleotide
caacugucaugcaugugaa

SEQ ID NO: 1467182 - RNA, 19 nt, Artificial Sequence
  Description of Artificial Sequence: Synthetic oligonucleotide
aacucgcaacugucaugca

SEQ ID NO: 1467183 - RNA, 19 nt, Artificial Sequence
  Description of Artificial Sequence: Synthetic oligonucleotide
aucccaacccugaccucgc

SEQ ID NO: 1467184 - RNA, 19 nt, Artificial Sequence
  Description of Artificial Sequence: Synthetic oligonucleotide
accaccuggacuggagucu

SEQ ID NO: 1467185 - RNA, 19 nt, Artificial Sequence
  Description of Artificial Sequence: Synthetic oligonucleotide
caaugguaaccaucuugga

SEQ ID NO: 1467186 - RNA, 19 nt, Artificial Sequence
  Description of Artificial Sequence: Synthetic oligonucleotide
ggucauagcacacgccgga

SEQ ID NO: 1467187 - RNA, 19 nt, Artificial Sequence
  Description of Artificial Sequence: Synthetic oligonucleotide
uagagcccgcuggagccgg

SEQ ID NO: 1467188 - RNA, 19 nt, Artificial Sequence
  Description of Artificial Sequence: Synthetic oligonucleotide
gcauggaggucauaugcga

SEQ ID NO: 1467189 - RNA, 19 nt, Artificial Sequence
  Description of Artificial Sequence: Synthetic oligonucleotide
gccucacuugggcaaauug

SEQ ID NO: 1467190 - RNA, 19 nt, Artificial Sequence
  Description of Artificial Sequence: Synthetic oligonucleotide
accgaggaccaucuugaua

SEQ ID NO: 1467191 - RNA, 19 nt, Artificial Sequence
  Description of Artificial Sequence: Synthetic oligonucleotide
gccaaacgaauacugcaca

SEQ ID NO: 1467192 - RNA, 19 nt, Artificial Sequence
  Description of Artificial Sequence: Synthetic oligonucleotide
ugccgccucacuugggcaa

SEQ ID NO: 1467193 - RNA, 19 nt, Artificial Sequence
  Description of Artificial Sequence: Synthetic oligonucleotide
ccuucugcgugcuauaaaa

SEQ ID NO: 1467194 - RNA, 19 nt, Artificial Sequence
  Description of Artificial Sequence: Synthetic oligonucleotide
cauguuaggaacgacgcuu

SEQ ID NO: 1467195 - RNA, 19 nt, Artificial Sequence
  Description of Artificial Sequence: Synthetic oligonucleotide
acucuucgacagaggggcc

SEQ ID NO: 1467196 - RNA, 19 nt, Artificial Sequence
  Description of Artificial Sequence: Synthetic oligonucleotide
ggaaaagccgauuccaauu

SEQ ID NO: 1467197 - RNA, 19 nt, Artificial Sequence
  Description of Artificial Sequence: Synthetic oligonucleotide
ggaacgacgcuucuccaaa

SEQ ID NO: 1467198 - RNA, 19 nt, Artificial Sequence
  Description of Artificial Sequence: Synthetic oligonucleotide
ccuccaaaucuggaagucg

SEQ ID NO: 1467199 - RNA, 19 nt, Artificial Sequence
  Description of Artificial Sequence: Synthetic oligonucleotide
cucgcuggcagguucugaa

SEQ ID NO: 1467200 - RNA, 19 nt, Artificial Sequence
  Description of Artificial Sequence: Synthetic oligonucleotide
gaacauggucccgccgggc

SEQ ID NO: 1467201 - RNA, 19 nt, Artificial Sequence
  Description of Artificial Sequence: Synthetic oligonucleotide
cauugaggucauuguuuga

SEQ ID NO: 1467202 - RNA, 19 nt, Artificial Sequence
  Description of Artificial Sequence: Synthetic oligonucleotide
gacggcauggaggucauau

SEQ ID NO: 1467203 - RNA, 19 nt, Artificial Sequence
  Description of Artificial Sequence: Synthetic oligonucleotide
uggcggggacacaccacug

SEQ ID NO: 1467204 - RNA, 19 nt, Artificial Sequence
  Description of Artificial Sequence: Synthetic oligonucleotide
agucugcgugguccucagg

SEQ ID NO: 1467205 - RNA, 19 nt, Artificial Sequence
  Description of Artificial Sequence: Synthetic oligonucleotide
ucgacagaggggccuugua

SEQ ID NO: 1467206 - RNA, 19 nt, Artificial Sequence
  Description of Artificial Sequence: Synthetic oligonucleotide
gcuauaaaacugccacaga

SEQ ID NO: 1467207 - RNA, 19 nt, Artificial Sequence
  Description of Artificial Sequence: Synthetic oligonucleotide
cagaggggccuuguagagc

SEQ ID NO: 1467208 - RNA, 19 nt, Artificial Sequence
  Description of Artificial Sequence: Synthetic oligonucleotide
uccgcauaccagccuccaa

SEQ ID NO: 1467209 - RNA, 19 nt, Artificial Sequence
  Description of Artificial Sequence: Synthetic oligonucleotide
cagugaugccaaacgaaua

SEQ ID NO: 1467210 - RNA, 19 nt, Artificial Sequence
  Description of Artificial Sequence: Synthetic oligonucleotide
uucgacagaggggccuugu

SEQ ID NO: 1467211 - RNA, 19 nt, Artificial Sequence
  Description of Artificial Sequence: Synthetic oligonucleotide
uguccacuguggcucccau

SEQ ID NO: 1467212 - RNA, 19 nt, Artificial Sequence
  Description of Artificial Sequence: Synthetic oligonucleotide
uuccgcauaccagccucca

SEQ ID NO: 1467213 - RNA, 19 nt, Artificial Sequence
  Description of Artificial Sequence: Synthetic oligonucleotide
cauagcacacgccggagau

SEQ ID NO: 1467214 - RNA, 19 nt, Artificial Sequence
  Description of Artificial Sequence: Synthetic oligonucleotide
gccacagaaacucgcaacu

SEQ ID NO: 1467215 - RNA, 19 nt, Artificial Sequence
  Description of Artificial Sequence: Synthetic oligonucleotide
uggcgccaagaauccagaa

SEQ ID NO: 1467216 - RNA, 19 nt, Artificial Sequence
  Description of Artificial Sequence: Synthetic oligonucleotide
acgucuuguuugugaugga

SEQ ID NO: 1467217 - RNA, 19 nt, Artificial Sequence
  Description of Artificial Sequence: Synthetic oligonucleotide
aguguaggguggggaccac

SEQ ID NO: 1467218 - RNA, 19 nt, Artificial Sequence
  Description of Artificial Sequence: Synthetic oligonucleotide
acgccggagauaaguccac

SEQ ID NO: 1467219 - RNA, 19 nt, Artificial Sequence
  Description of Artificial Sequence: Synthetic oligonucleotide
cuggcgccaagaauccaga

SEQ ID NO: 1467220 - RNA, 19 nt, Artificial Sequence
  Description of Artificial Sequence: Synthetic oligonucleotide
cucccaucccaacccugac

SEQ ID NO: 1467221 - RNA, 19 nt, Artificial Sequence
  Description of Artificial Sequence: Synthetic oligonucleotide
ggaagucguucuugacggc

SEQ ID NO: 1467222 - RNA, 19 nt, Artificial Sequence
  Description of Artificial Sequence: Synthetic oligonucleotide
ggcaaccugcuccucagaa

SEQ ID NO: 1467223 - RNA, 19 nt, Artificial Sequence
  Description of Artificial Sequence: Synthetic oligonucleotide
cugucaugcaugugaacau

SEQ ID NO: 1467224 - RNA, 19 nt, Artificial Sequence
  Description of Artificial Sequence: Synthetic oligonucleotide
gccaagaauccagaaggca

SEQ ID NO: 1467225 - RNA, 19 nt, Artificial Sequence
  Description of Artificial Sequence: Synthetic oligonucleotide
cuuggacucuuggaaugga

SEQ ID NO: 1467226 - RNA, 19 nt, Artificial Sequence
  Description of Artificial Sequence: Synthetic oligonucleotide
cucugccgccucacuuggg

SEQ ID NO: 1467227 - RNA, 19 nt, Artificial Sequence
  Description of Artificial Sequence: Synthetic oligonucleotide
gugaugccaaacgaauacu

SEQ ID NO: 1467228 - RNA, 19 nt, Artificial Sequence
  Description of Artificial Sequence: Synthetic oligonucleotide
gcucccguaucuucuuuca

SEQ ID NO: 1467229 - RNA, 19 nt, Artificial Sequence
  Description of Artificial Sequence: Synthetic oligonucleotide
ggacgcgaagcaccuggug

SEQ ID NO: 1467230 - RNA, 19 nt, Artificial Sequence
  Description of Artificial Sequence: Synthetic oligonucleotide
uccccuucugcgugcuaua

SEQ ID NO: 1467231 - RNA, 19 nt, Artificial Sequence
  Description of Artificial Sequence: Synthetic oligonucleotide
ccagcaagagacucuucga

SEQ ID NO: 1467232 - RNA, 19 nt, Artificial Sequence
  Description of Artificial Sequence: Synthetic oligonucleotide
ggccuuguagagcccgcug

SEQ ID NO: 1467233 - RNA, 19 nt, Artificial Sequence
  Description of Artificial Sequence: Synthetic oligonucleotide
ccucugccgccucacuugg

SEQ ID NO: 1467234 - RNA, 19 nt, Artificial Sequence
  Description of Artificial Sequence: Synthetic oligonucleotide
ccaugagccgggcaaccug

SEQ ID NO: 1467235 - RNA, 19 nt, Artificial Sequence
  Description of Artificial Sequence: Synthetic oligonucleotide
uggcuacaauccagaugua

SEQ ID NO: 1467236 - RNA, 19 nt, Artificial Sequence
  Description of Artificial Sequence: Synthetic oligonucleotide
acguccugucugaggucac

SEQ ID NO: 1467237 - RNA, 19 nt, Artificial Sequence
  Description of Artificial Sequence: Synthetic oligonucleotide
ggacaguguagggugggga

SEQ ID NO: 1467238 - RNA, 19 nt, Artificial Sequence
  Description of Artificial Sequence: Synthetic oligonucleotide
caacagcugugcugaaugu

SEQ ID NO: 1467239 - RNA, 19 nt, Artificial Sequence
  Description of Artificial Sequence: Synthetic oligonucleotide
auagcacacgccggagaua

SEQ ID NO: 1467240 - RNA, 19 nt, Artificial Sequence
  Description of Artificial Sequence: Synthetic oligonucleotide
ccacagaaacucgcaacug

SEQ ID NO: 1467241 - RNA, 19 nt, Artificial Sequence
  Description of Artificial Sequence: Synthetic oligonucleotide
ggacaacgggcccagaauu

SEQ ID NO: 1467242 - RNA, 19 nt, Artificial Sequence
  Description of Artificial Sequence: Synthetic oligonucleotide
gcaaacuuccugcucccgu

SEQ ID NO: 1467243 - RNA, 19 nt, Artificial Sequence
  Description of Artificial Sequence: Synthetic oligonucleotide
cucuuggaauggagcagua

SEQ ID NO: 1467244 - RNA, 19 nt, Artificial Sequence
  Description of Artificial Sequence: Synthetic oligonucleotide
ggcccagaauuugugccac

SEQ ID NO: 1467245 - RNA, 19 nt, Artificial Sequence
  Description of Artificial Sequence: Synthetic oligonucleotide
ggggaccagcaagagacuc

SEQ ID NO: 1467246 - RNA, 19 nt, Artificial Sequence
  Description of Artificial Sequence: Synthetic oligonucleotide
gacaacgggcccagaauuu

SEQ ID NO: 1467247 - RNA, 19 nt, Artificial Sequence
  Description of Artificial Sequence: Synthetic oligonucleotide
gccuccaaaucuggaaguc

SEQ ID NO: 1467248 - RNA, 19 nt, Artificial Sequence
  Description of Artificial Sequence: Synthetic oligonucleotide
caguuguccccuucugcgu

SEQ ID NO: 1467249 - RNA, 19 nt, Artificial Sequence
  Description of Artificial Sequence: Synthetic oligonucleotide
ggggaaaagccgauuccaa

SEQ ID NO: 1467250 - RNA, 19 nt, Artificial Sequence
  Description of Artificial Sequence: Synthetic oligonucleotide
ccgcauaccagccuccaaa

SEQ ID NO: 1467251 - RNA, 19 nt, Artificial Sequence
  Description of Artificial Sequence: Synthetic oligonucleotide
cgacgcuucuccaaacuga

SEQ ID NO: 1467252 - RNA, 19 nt, Artificial Sequence
  Description of Artificial Sequence: Synthetic oligonucleotide
acgcuucuccaaacugaga

SEQ ID NO: 1467253 - RNA, 19 nt, Artificial Sequence
  Description of Artificial Sequence: Synthetic oligonucleotide
ggggacacaccacugucau

SEQ ID NO: 1467254 - RNA, 19 nt, Artificial Sequence
  Description of Artificial Sequence: Synthetic oligonucleotide
gaggaccaucuugauaguu

SEQ ID NO: 1467255 - RNA, 19 nt, Artificial Sequence
  Description of Artificial Sequence: Synthetic oligonucleotide
ggucauaugcgaagaacuu

SEQ ID NO: 1467256 - RNA, 19 nt, Artificial Sequence
  Description of Artificial Sequence: Synthetic oligonucleotide
ccggagauaaguccacuua

SEQ ID NO: 1467257 - RNA, 19 nt, Artificial Sequence
  Description of Artificial Sequence: Synthetic oligonucleotide
guccacuuauggcuacaau

SEQ ID NO: 1467258 - RNA, 19 nt, Artificial Sequence
  Description of Artificial Sequence: Synthetic oligonucleotide
gcgugcuauaaaacugcca

SEQ ID NO: 1467259 - RNA, 19 nt, Artificial Sequence
  Description of Artificial Sequence: Synthetic oligonucleotide
gcucccaucccaacccuga

SEQ ID NO: 1467260 - RNA, 19 nt, Artificial Sequence
  Description of Artificial Sequence: Synthetic oligonucleotide
cccguaucuucuuucaaau

SEQ ID NO: 1467261 - RNA, 19 nt, Artificial Sequence
  Description of Artificial Sequence: Synthetic oligonucleotide
cucuucgacagaggggccu

SEQ ID NO: 1467262 - RNA, 19 nt, Artificial Sequence
  Description of Artificial Sequence: Synthetic oligonucleotide
gauggacaacgggcccaga

SEQ ID NO: 1467263 - RNA, 19 nt, Artificial Sequence
  Description of Artificial Sequence: Synthetic oligonucleotide
uugugccacuuggacucuu

SEQ ID NO: 1467264 - RNA, 19 nt, Artificial Sequence
  Description of Artificial Sequence: Synthetic oligonucleotide
gcacacgccggagauaagu

SEQ ID NO: 1467265 - RNA, 19 nt, Artificial Sequence
  Description of Artificial Sequence: Synthetic oligonucleotide
agcacacgccggagauaag

SEQ ID NO: 1467266 - RNA, 19 nt, Artificial Sequence
  Description of Artificial Sequence: Synthetic oligonucleotide
gaccgaggaccaucuugau

SEQ ID NO: 1467267 - RNA, 19 nt, Artificial Sequence
  Description of Artificial Sequence: Synthetic oligonucleotide
ggcucccaucccaacccug

SEQ ID NO: 1467268 - RNA, 19 nt, Artificial Sequence
  Description of Artificial Sequence: Synthetic oligonucleotide
ccguaucuucuuucaaaua

SEQ ID NO: 1467269 - RNA, 19 nt, Artificial Sequence
  Description of Artificial Sequence: Synthetic oligonucleotide
ggcggggacacaccacugu

SEQ ID NO: 1467270 - RNA, 19 nt, Artificial Sequence
  Description of Artificial Sequence: Synthetic oligonucleotide
cgcuggcagguucugaaga

SEQ ID NO: 1467271 - RNA, 19 nt, Artificial Sequence
  Description of Artificial Sequence: Synthetic oligonucleotide
cagggacgcgaagcaccug

SEQ ID NO: 1467272 - RNA, 19 nt, Artificial Sequence
  Description of Artificial Sequence: Synthetic oligonucleotide
cacuggcgccaagaaucca

SEQ ID NO: 1467273 - RNA, 19 nt, Artificial Sequence
  Description of Artificial Sequence: Synthetic oligonucleotide
cggagauaaguccacuuau

SEQ ID NO: 1467274 - RNA, 19 nt, Artificial Sequence
  Description of Artificial Sequence: Synthetic oligonucleotide
ccgauuccaauugaucauu

SEQ ID NO: 1467275 - RNA, 19 nt, Artificial Sequence
  Description of Artificial Sequence: Synthetic oligonucleotide
gccgccucacuugggcaaa

SEQ ID NO: 1467276 - RNA, 19 nt, Artificial Sequence
  Description of Artificial Sequence: Synthetic oligonucleotide
gggacgcgaagcaccuggu

SEQ ID NO: 1467277 - RNA, 19 nt, Artificial Sequence
  Description of Artificial Sequence: Synthetic oligonucleotide
ccccuucugcgugcuauaa

SEQ ID NO: 1467278 - RNA, 19 nt, Artificial Sequence
  Description of Artificial Sequence: Synthetic oligonucleotide
cgaggaccaucuugauagu

SEQ ID NO: 1467279 - RNA, 19 nt, Artificial Sequence
  Description of Artificial Sequence: Synthetic oligonucleotide
cgccucacuugggcaaauu

SEQ ID NO: 1467280 - RNA, 19 nt, Artificial Sequence
  Description of Artificial Sequence: Synthetic oligonucleotide
ugucugaacacuaggaccg

SEQ ID NO: 1467281 - RNA, 19 nt, Artificial Sequence
  Description of Artificial Sequence: Synthetic oligonucleotide
aacacuaggaccguucagc

SEQ ID NO: 1467282 - RNA, 19 nt, Artificial Sequence
  Description of Artificial Sequence: Synthetic oligonucleotide
ucugcaauaugucugacac

SEQ ID NO: 1467283 - RNA, 19 nt, Artificial Sequence
  Description of Artificial Sequence: Synthetic oligonucleotide
uguacuacaguuugcgggg

SEQ ID NO: 1467284 - RNA, 19 nt, Artificial Sequence
  Description of Artificial Sequence: Synthetic oligonucleotide
agaucgguaaaacagaccu

SEQ ID NO: 1467285 - RNA, 19 nt, Artificial Sequence
  Description of Artificial Sequence: Synthetic oligonucleotide
acugcuuaaugccuguugc

SEQ ID NO: 1467286 - RNA, 19 nt, Artificial Sequence
  Description of Artificial Sequence: Synthetic oligonucleotide
uucugaauacgcaugaacu

SEQ ID NO: 1467287 - RNA, 19 nt, Artificial Sequence
  Description of Artificial Sequence: Synthetic oligonucleotide
uuuaccaccacugaagucu

SEQ ID NO: 1467288 - RNA, 19 nt, Artificial Sequence
  Description of Artificial Sequence: Synthetic oligonucleotide
aaacagaccugucugagga

SEQ ID NO: 1467289 - RNA, 19 nt, Artificial Sequence
  Description of Artificial Sequence: Synthetic oligonucleotide
auucugaauacgcaugaac

SEQ ID NO: 1467290 - RNA, 19 nt, Artificial Sequence
  Description of Artificial Sequence: Synthetic oligonucleotide
uuaaagugcacuccggugu

SEQ ID NO: 1467291 - RNA, 19 nt, Artificial Sequence
  Description of Artificial Sequence: Synthetic oligonucleotide
uuuaguauaacaaguuaua

SEQ ID NO: 1467292 - RNA, 19 nt, Artificial Sequence
  Description of Artificial Sequence: Synthetic oligonucleotide
auaacaaguuauaaguuuc

SEQ ID NO: 1467293 - RNA, 19 nt, Artificial Sequence
  Description of Artificial Sequence: Synthetic oligonucleotide
uggaugauaaucucuguug

SEQ ID NO: 1467294 - RNA, 19 nt, Artificial Sequence
  Description of Artificial Sequence: Synthetic oligonucleotide
cuguacuacaguuugcggg

SEQ ID NO: 1467295 - RNA, 19 nt, Artificial Sequence
  Description of Artificial Sequence: Synthetic oligonucleotide
uuaggaacagaacugccac

SEQ ID NO: 1467296 - RNA, 19 nt, Artificial Sequence
  Description of Artificial Sequence: Synthetic oligonucleotide
ucuacauuugugucaaucu

SEQ ID NO: 1467297 - RNA, 19 nt, Artificial Sequence
  Description of Artificial Sequence: Synthetic oligonucleotide
ucugaauacgcaugaacug

SEQ ID NO: 1467298 - RNA, 19 nt, Artificial Sequence
  Description of Artificial Sequence: Synthetic oligonucleotide
augauaaucucuguuggac

SEQ ID NO: 1467299 - RNA, 19 nt, Artificial Sequence
  Description of Artificial Sequence: Synthetic oligonucleotide
aguucaagaagcccacugg

SEQ ID NO: 1467300 - RNA, 19 nt, Artificial Sequence
  Description of Artificial Sequence: Synthetic oligonucleotide
cauuaagguaggaagcugc

SEQ ID NO: 1467301 - RNA, 19 nt, Artificial Sequence
  Description of Artificial Sequence: Synthetic oligonucleotide
gagauaugcuuguaacugg

SEQ ID NO: 1467302 - RNA, 19 nt, Artificial Sequence
  Description of Artificial Sequence: Synthetic oligonucleotide
uuuaaagugcacuccggug

SEQ ID NO: 1467303 - RNA, 19 nt, Artificial Sequence
  Description of Artificial Sequence: Synthetic oligonucleotide
uguugcauaauguggguga

SEQ ID NO: 1467304 - RNA, 19 nt, Artificial Sequence
  Description of Artificial Sequence: Synthetic oligonucleotide
uguuucucugaugaagugg

SEQ ID NO: 1467305 - RNA, 19 nt, Artificial Sequence
  Description of Artificial Sequence: Synthetic oligonucleotide
ugccuguugcauaaugugg

SEQ ID NO: 1467306 - RNA, 19 nt, Artificial Sequence
  Description of Artificial Sequence: Synthetic oligonucleotide
ugcauaaugugggugauug

SEQ ID NO: 1467307 - RNA, 19 nt, Artificial Sequence
  Description of Artificial Sequence: Synthetic oligonucleotide
agaggguaaagcuccugcc

SEQ ID NO: 1467308 - RNA, 19 nt, Artificial Sequence
  Description of Artificial Sequence: Synthetic oligonucleotide
auaugcucuacauuugugu

SEQ ID NO: 1467309 - RNA, 19 nt, Artificial Sequence
  Description of Artificial Sequence: Synthetic oligonucleotide
acuaggaccguucagcaga

SEQ ID NO: 1467310 - RNA, 19 nt, Artificial Sequence
  Description of Artificial Sequence: Synthetic oligonucleotide
aauacgcaugaacuggccu

SEQ ID NO: 1467311 - RNA, 19 nt, Artificial Sequence
  Description of Artificial Sequence: Synthetic oligonucleotide
ucuacauuucgccaucccu

SEQ ID NO: 1467312 - RNA, 19 nt, Artificial Sequence
  Description of Artificial Sequence: Synthetic oligonucleotide
uuggguuauaauuggcugc

SEQ ID NO: 1467313 - RNA, 19 nt, Artificial Sequence
  Description of Artificial Sequence: Synthetic oligonucleotide
gugccauuaagguaggaag

SEQ ID NO: 1467314 - RNA, 19 nt, Artificial Sequence
  Description of Artificial Sequence: Synthetic oligonucleotide
gguaaaacagaccugucug

SEQ ID NO: 1467315 - RNA, 19 nt, Artificial Sequence
  Description of Artificial Sequence: Synthetic oligonucleotide
aaagcaguaugacugcuua

SEQ ID NO: 1467316 - RNA, 19 nt, Artificial Sequence
  Description of Artificial Sequence: Synthetic oligonucleotide
gacuuuaccaccacugaag

SEQ ID NO: 1467317 - RNA, 19 nt, Artificial Sequence
  Description of Artificial Sequence: Synthetic oligonucleotide
cugaauacgcaugaacugg

SEQ ID NO: 1467318 - RNA, 19 nt, Artificial Sequence
  Description of Artificial Sequence: Synthetic oligonucleotide
cuuggguuauaauuggcug

SEQ ID NO: 1467319 - RNA, 19 nt, Artificial Sequence
  Description of Artificial Sequence: Synthetic oligonucleotide
uugguaaccaagcaggcuu

SEQ ID NO: 1467320 - RNA, 19 nt, Artificial Sequence
  Description of Artificial Sequence: Synthetic oligonucleotide
aucugcguguaguuugugc

SEQ ID NO: 1467321 - RNA, 19 nt, Artificial Sequence
  Description of Artificial Sequence: Synthetic oligonucleotide
ggagugacaaggaauagcg

SEQ ID NO: 1467322 - RNA, 19 nt, Artificial Sequence
  Description of Artificial Sequence: Synthetic oligonucleotide
uagaggguaaagcuccugc

SEQ ID NO: 1467323 - RNA, 19 nt, Artificial Sequence
  Description of Artificial Sequence: Synthetic oligonucleotide
agugacaaggaauagcgua

SEQ ID NO: 1467324 - RNA, 19 nt, Artificial Sequence
  Description of Artificial Sequence: Synthetic oligonucleotide
cuacauuucgccaucccug

SEQ ID NO: 1467325 - RNA, 19 nt, Artificial Sequence
  Description of Artificial Sequence: Synthetic oligonucleotide
uuaguauaacaaguuauaa

SEQ ID NO: 1467326 - RNA, 19 nt, Artificial Sequence
  Description of Artificial Sequence: Synthetic oligonucleotide
ugggguugcacguagauuu

SEQ ID NO: 1467327 - RNA, 19 nt, Artificial Sequence
  Description of Artificial Sequence: Synthetic oligonucleotide
cuggcuaaguuucugcugc

SEQ ID NO: 1467328 - RNA, 19 nt, Artificial Sequence
  Description of Artificial Sequence: Synthetic oligonucleotide
ucugcguguaguuugugcu

SEQ ID NO: 1467329 - RNA, 19 nt, Artificial Sequence
  Description of Artificial Sequence: Synthetic oligonucleotide
ucuuucuggucguuagggg

SEQ ID NO: 1467330 - RNA, 19 nt, Artificial Sequence
  Description of Artificial Sequence: Synthetic oligonucleotide
acagcagauggacuugaac

SEQ ID NO: 1467331 - RNA, 19 nt, Artificial Sequence
  Description of Artificial Sequence: Synthetic oligonucleotide
gugucugaacacuaggacc

SEQ ID NO: 1467332 - RNA, 19 nt, Artificial Sequence
  Description of Artificial Sequence: Synthetic oligonucleotide
ugaggauccaaugugucca

SEQ ID NO: 1467333 - RNA, 19 nt, Artificial Sequence
  Description of Artificial Sequence: Synthetic oligonucleotide
gugacgucagcuuaggaac

SEQ ID NO: 1467334 - RNA, 19 nt, Artificial Sequence
  Description of Artificial Sequence: Synthetic oligonucleotide
ugggugauuguuccagggg

SEQ ID NO: 1467335 - RNA, 19 nt, Artificial Sequence
  Description of Artificial Sequence: Synthetic oligonucleotide
uuaguugacugugacugag

SEQ ID NO: 1467336 - RNA, 19 nt, Artificial Sequence
  Description of Artificial Sequence: Synthetic oligonucleotide
auggacuugaacaggacuc

SEQ ID NO: 1467337 - RNA, 19 nt, Artificial Sequence
  Description of Artificial Sequence: Synthetic oligonucleotide
auuaagguaggaagcugcc

SEQ ID NO: 1467338 - RNA, 19 nt, Artificial Sequence
  Description of Artificial Sequence: Synthetic oligonucleotide
guaccuguacuacaguuug

SEQ ID NO: 1467339 - RNA, 19 nt, Artificial Sequence
  Description of Artificial Sequence: Synthetic oligonucleotide
ugggagauaugcuuguaac

SEQ ID NO: 1467340 - RNA, 19 nt, Artificial Sequence
  Description of Artificial Sequence: Synthetic oligonucleotide
uaugcucuacauuuguguc

SEQ ID NO: 1467341 - RNA, 19 nt, Artificial Sequence
  Description of Artificial Sequence: Synthetic oligonucleotide
guuaucuuuguaacagagg

SEQ ID NO: 1467342 - RNA, 19 nt, Artificial Sequence
  Description of Artificial Sequence: Synthetic oligonucleotide
ugguaaaagcaguaugacu

SEQ ID NO: 1467343 - RNA, 19 nt, Artificial Sequence
  Description of Artificial Sequence: Synthetic oligonucleotide
auaauuggcugcuccaccu

SEQ ID NO: 1467344 - RNA, 19 nt, Artificial Sequence
  Description of Artificial Sequence: Synthetic oligonucleotide
auacgcaugaacuggccug

SEQ ID NO: 1467345 - RNA, 19 nt, Artificial Sequence
  Description of Artificial Sequence: Synthetic oligonucleotide
ugaacacuaggaccguuca

SEQ ID NO: 1467346 - RNA, 19 nt, Artificial Sequence
  Description of Artificial Sequence: Synthetic oligonucleotide
aggguaaagcuccugccuc

SEQ ID NO: 1467347 - RNA, 19 nt, Artificial Sequence
  Description of Artificial Sequence: Synthetic oligonucleotide
cuacauuugugucaaucug

SEQ ID NO: 1467348 - RNA, 19 nt, Artificial Sequence
  Description of Artificial Sequence: Synthetic oligonucleotide
cacuguguuugguaaaagc

SEQ ID NO: 1467349 - RNA, 19 nt, Artificial Sequence
  Description of Artificial Sequence: Synthetic oligonucleotide
cauugcuguaucaucauca

SEQ ID NO: 1467350 - RNA, 19 nt, Artificial Sequence
  Description of Artificial Sequence: Synthetic oligonucleotide
aucuuucuggucguuaggg

SEQ ID NO: 1467351 - RNA, 19 nt, Artificial Sequence
  Description of Artificial Sequence: Synthetic oligonucleotide
gcuuaguugacugugacug

SEQ ID NO: 1467352 - RNA, 19 nt, Artificial Sequence
  Description of Artificial Sequence: Synthetic oligonucleotide
uacauuucgccaucccugc

SEQ ID NO: 1467353 - RNA, 19 nt, Artificial Sequence
  Description of Artificial Sequence: Synthetic oligonucleotide
aucgguaaaacagaccugu

SEQ ID NO: 1467354 - RNA, 19 nt, Artificial Sequence
  Description of Artificial Sequence: Synthetic oligonucleotide
accuguacuacaguuugcg

SEQ ID NO: 1467355 - RNA, 19 nt, Artificial Sequence
  Description of Artificial Sequence: Synthetic oligonucleotide
aauaugucugacacugcug

SEQ ID NO: 1467356 - RNA, 19 nt, Artificial Sequence
  Description of Artificial Sequence: Synthetic oligonucleotide
ugaacuggccugucgcagg

SEQ ID NO: 1467357 - RNA, 19 nt, Artificial Sequence
  Description of Artificial Sequence: Synthetic oligonucleotide
ugugcugugcaucuggcuu

SEQ ID NO: 1467358 - RNA, 19 nt, Artificial Sequence
  Description of Artificial Sequence: Synthetic oligonucleotide
aaugccuguugcauaaugu

SEQ ID NO: 1467359 - RNA, 19 nt, Artificial Sequence
  Description of Artificial Sequence: Synthetic oligonucleotide
uucaguucaagaagcccac

SEQ ID NO: 1467360 - RNA, 19 nt, Artificial Sequence
  Description of Artificial Sequence: Synthetic oligonucleotide
auaaugugggugauuguuc

SEQ ID NO: 1467361 - RNA, 19 nt, Artificial Sequence
  Description of Artificial Sequence: Synthetic oligonucleotide
ugggauggacuuuaccacc

SEQ ID NO: 1467362 - RNA, 19 nt, Artificial Sequence
  Description of Artificial Sequence: Synthetic oligonucleotide
augccuguugcauaaugug

SEQ ID NO: 1467363 - RNA, 19 nt, Artificial Sequence
  Description of Artificial Sequence: Synthetic oligonucleotide
uggacuuuaccaccacuga

SEQ ID NO: 1467364 - RNA, 19 nt, Artificial Sequence
  Description of Artificial Sequence: Synthetic oligonucleotide
gugacugagccacauguug

SEQ ID NO: 1467365 - RNA, 19 nt, Artificial Sequence
  Description of Artificial Sequence: Synthetic oligonucleotide
gguuauaauuggcugcucc

SEQ ID NO: 1467366 - RNA, 19 nt, Artificial Sequence
  Description of Artificial Sequence: Synthetic oligonucleotide
ggugaaguuguucaguuca

SEQ ID NO: 1467367 - RNA, 19 nt, Artificial Sequence
  Description of Artificial Sequence: Synthetic oligonucleotide
aaggaauagcguacugggg

SEQ ID NO: 1467368 - RNA, 19 nt, Artificial Sequence
  Description of Artificial Sequence: Synthetic oligonucleotide
ggagauaugcuuguaacug

SEQ ID NO: 1467369 - RNA, 19 nt, Artificial Sequence
  Description of Artificial Sequence: Synthetic oligonucleotide
gaugauaaucucuguugga

SEQ ID NO: 1467370 - RNA, 19 nt, Artificial Sequence
  Description of Artificial Sequence: Synthetic oligonucleotide
ggcuuuaaagugcacuccg

SEQ ID NO: 1467371 - RNA, 19 nt, Artificial Sequence
  Description of Artificial Sequence: Synthetic oligonucleotide
gggaguuugggguugcacg

SEQ ID NO: 1467372 - RNA, 19 nt, Artificial Sequence
  Description of Artificial Sequence: Synthetic oligonucleotide
aggcuuuaaagugcacucc

SEQ ID NO: 1467373 - RNA, 19 nt, Artificial Sequence
  Description of Artificial Sequence: Synthetic oligonucleotide
ucuuuggcuaccacgggau

SEQ ID NO: 1467374 - RNA, 19 nt, Artificial Sequence
  Description of Artificial Sequence: Synthetic oligonucleotide
aguuuaggaagcugcugug

SEQ ID NO: 1467375 - RNA, 19 nt, Artificial Sequence
  Description of Artificial Sequence: Synthetic oligonucleotide
acauuugugucaaucugag

SEQ ID NO: 1467376 - RNA, 19 nt, Artificial Sequence
  Description of Artificial Sequence: Synthetic oligonucleotide
gacugcuuaaugccuguug

SEQ ID NO: 1467377 - RNA, 19 nt, Artificial Sequence
  Description of Artificial Sequence: Synthetic oligonucleotide
aggaccguucagcagagcu

SEQ ID NO: 1467378 - RNA, 19 nt, Artificial Sequence
  Description of Artificial Sequence: Synthetic oligonucleotide
caggcuuuaaagugcacuc

SEQ ID NO: 1467379 - RNA, 19 nt, Artificial Sequence
  Description of Artificial Sequence: Synthetic oligonucleotide
ucugaggauccaauguguc

SEQ ID NO: 1467380 - RNA, 19 nt, Artificial Sequence
  Description of Artificial Sequence: Synthetic oligonucleotide
cucaguuccaaguuccuca

SEQ ID NO: 1467381 - RNA, 19 nt, Artificial Sequence
  Description of Artificial Sequence: Synthetic oligonucleotide
aguuuucacuugcagcuga

SEQ ID NO: 1467382 - RNA, 19 nt, Artificial Sequence
  Description of Artificial Sequence: Synthetic oligonucleotide
cagcuuaggaacagaacug

SEQ ID NO: 1467383 - RNA, 19 nt, Artificial Sequence
  Description of Artificial Sequence: Synthetic oligonucleotide
cauaugcucuacauuugug

SEQ ID NO: 1467384 - RNA, 19 nt, Artificial Sequence
  Description of Artificial Sequence: Synthetic oligonucleotide
uuguaacuggugacgucag

SEQ ID NO: 1467385 - RNA, 19 nt, Artificial Sequence
  Description of Artificial Sequence: Synthetic oligonucleotide
aguuugggguugcacguag

SEQ ID NO: 1467386 - RNA, 19 nt, Artificial Sequence
  Description of Artificial Sequence: Synthetic oligonucleotide
ugugccauuaagguaggaa

SEQ ID NO: 1467387 - RNA, 19 nt, Artificial Sequence
  Description of Artificial Sequence: Synthetic oligonucleotide
guuauaaguuucccuggac

SEQ ID NO: 1467388 - RNA, 19 nt, Artificial Sequence
  Description of Artificial Sequence: Synthetic oligonucleotide
augcuuguaacuggugacg

SEQ ID NO: 1467389 - RNA, 19 nt, Artificial Sequence
  Description of Artificial Sequence: Synthetic oligonucleotide
uucacagcaaguaccugua

SEQ ID NO: 1467390 - RNA, 19 nt, Artificial Sequence
  Description of Artificial Sequence: Synthetic oligonucleotide
aggacucucuacauuucgc

SEQ ID NO: 1467391 - RNA, 19 nt, Artificial Sequence
  Description of Artificial Sequence: Synthetic oligonucleotide
gauccacuaccauaugcuc

SEQ ID NO: 1467392 - RNA, 19 nt, Artificial Sequence
  Description of Artificial Sequence: Synthetic oligonucleotide
agcaaguaccuguacuaca

SEQ ID NO: 1467393 - RNA, 19 nt, Artificial Sequence
  Description of Artificial Sequence: Synthetic oligonucleotide
gugggugauuguuccaggg

SEQ ID NO: 1467394 - RNA, 19 nt, Artificial Sequence
  Description of Artificial Sequence: Synthetic oligonucleotide
uccuuggguuauaauuggc

SEQ ID NO: 1467395 - RNA, 19 nt, Artificial Sequence
  Description of Artificial Sequence: Synthetic oligonucleotide
augcucuacauuuguguca

SEQ ID NO: 1467396 - RNA, 19 nt, Artificial Sequence
  Description of Artificial Sequence: Synthetic oligonucleotide
aaguuucugcugcuuaguu

SEQ ID NO: 1467397 - RNA, 19 nt, Artificial Sequence
  Description of Artificial Sequence: Synthetic oligonucleotide
uuaccaccacugaagucug

SEQ ID NO: 1467398 - RNA, 19 nt, Artificial Sequence
  Description of Artificial Sequence: Synthetic oligonucleotide
uaauuggcugcuccaccug

SEQ ID NO: 1467399 - RNA, 19 nt, Artificial Sequence
  Description of Artificial Sequence: Synthetic oligonucleotide
uccggugucugaacacuag

SEQ ID NO: 1467400 - RNA, 19 nt, Artificial Sequence
  Description of Artificial Sequence: Synthetic oligonucleotide
uguaacuggugacgucagc

SEQ ID NO: 1467401 - RNA, 19 nt, Artificial Sequence
  Description of Artificial Sequence: Synthetic oligonucleotide
auuuggagcuugcugcagu

SEQ ID NO: 1467402 - RNA, 19 nt, Artificial Sequence
  Description of Artificial Sequence: Synthetic oligonucleotide
ucaguuccaaguuccucac

SEQ ID NO: 1467403 - RNA, 19 nt, Artificial Sequence
  Description of Artificial Sequence: Synthetic oligonucleotide
acucucuacauuucgccau

SEQ ID NO: 1467404 - RNA, 19 nt, Artificial Sequence
  Description of Artificial Sequence: Synthetic oligonucleotide
cagaucgguaaaacagacc

SEQ ID NO: 1467405 - RNA, 19 nt, Artificial Sequence
  Description of Artificial Sequence: Synthetic oligonucleotide
caguucaagaagcccacug

SEQ ID NO: 1467406 - RNA, 19 nt, Artificial Sequence
  Description of Artificial Sequence: Synthetic oligonucleotide
uggucguuaggggagggcc

SEQ ID NO: 1467407 - RNA, 19 nt, Artificial Sequence
  Description of Artificial Sequence: Synthetic oligonucleotide
ccaagcaggcuuuaaagug

SEQ ID NO: 1467408 - RNA, 19 nt, Artificial Sequence
  Description of Artificial Sequence: Synthetic oligonucleotide
gggcagaucgguaaaacag

SEQ ID NO: 1467409 - RNA, 19 nt, Artificial Sequence
  Description of Artificial Sequence: Synthetic oligonucleotide
gacaaggaauagcguacug

SEQ ID NO: 1467410 - RNA, 19 nt, Artificial Sequence
  Description of Artificial Sequence: Synthetic oligonucleotide
ugcucuacauuugugucaa

SEQ ID NO: 1467411 - RNA, 19 nt, Artificial Sequence
  Description of Artificial Sequence: Synthetic oligonucleotide
aagacgcugggauggacuu

SEQ ID NO: 1467412 - RNA, 19 nt, Artificial Sequence
  Description of Artificial Sequence: Synthetic oligonucleotide
gugacaaggaauagcguac

SEQ ID NO: 1467413 - RNA, 19 nt, Artificial Sequence
  Description of Artificial Sequence: Synthetic oligonucleotide
acacuaggaccguucagca

SEQ ID NO: 1467414 - RNA, 19 nt, Artificial Sequence
  Description of Artificial Sequence: Synthetic oligonucleotide
cugaacacuaggaccguuc

SEQ ID NO: 1467415 - RNA, 19 nt, Artificial Sequence
  Description of Artificial Sequence: Synthetic oligonucleotide
agcguacuggggaauggcc

SEQ ID NO: 1467416 - RNA, 19 nt, Artificial Sequence
  Description of Artificial Sequence: Synthetic oligonucleotide
agcgccauuuggcucuggg

SEQ ID NO: 1467417 - RNA, 19 nt, Artificial Sequence
  Description of Artificial Sequence: Synthetic oligonucleotide
cauuugugucaaucugagc

SEQ ID NO: 1467418 - RNA, 19 nt, Artificial Sequence
  Description of Artificial Sequence: Synthetic oligonucleotide
ugcuuaaugccuguugcau

SEQ ID NO: 1467419 - RNA, 19 nt, Artificial Sequence
  Description of Artificial Sequence: Synthetic oligonucleotide
ggacucucuacauuucgcc

SEQ ID NO: 1467420 - RNA, 19 nt, Artificial Sequence
  Description of Artificial Sequence: Synthetic oligonucleotide
agcaguaugacugcuuaau

SEQ ID NO: 1467421 - RNA, 19 nt, Artificial Sequence
  Description of Artificial Sequence: Synthetic oligonucleotide
agccacauguuggagcagg

SEQ ID NO: 1467422 - RNA, 19 nt, Artificial Sequence
  Description of Artificial Sequence: Synthetic oligonucleotide
gauaugcuuguaacuggug

SEQ ID NO: 1467423 - RNA, 19 nt, Artificial Sequence
  Description of Artificial Sequence: Synthetic oligonucleotide
gccugaaugggagauaugc

SEQ ID NO: 1467424 - RNA, 19 nt, Artificial Sequence
  Description of Artificial Sequence: Synthetic oligonucleotide
uuaagguaggaagcugccu

SEQ ID NO: 1467425 - RNA, 19 nt, Artificial Sequence
  Description of Artificial Sequence: Synthetic oligonucleotide
ggcaucugcguguaguuug

SEQ ID NO: 1467426 - RNA, 19 nt, Artificial Sequence
  Description of Artificial Sequence: Synthetic oligonucleotide
aagaagcccacugggcucu

SEQ ID NO: 1467427 - RNA, 19 nt, Artificial Sequence
  Description of Artificial Sequence: Synthetic oligonucleotide
augggagauaugcuuguaa

SEQ ID NO: 1467428 - RNA, 19 nt, Artificial Sequence
  Description of Artificial Sequence: Synthetic oligonucleotide
auagcguacuggggaaugg

SEQ ID NO: 1467429 - RNA, 19 nt, Artificial Sequence
  Description of Artificial Sequence: Synthetic oligonucleotide
agauaugcuuguaacuggu

SEQ ID NO: 1467430 - RNA, 19 nt, Artificial Sequence
  Description of Artificial Sequence: Synthetic oligonucleotide
cuggggaauggccuggaug

SEQ ID NO: 1467431 - RNA, 19 nt, Artificial Sequence
  Description of Artificial Sequence: Synthetic oligonucleotide
cuguuggacucucuucagc

SEQ ID NO: 1467432 - RNA, 19 nt, Artificial Sequence
  Description of Artificial Sequence: Synthetic oligonucleotide
cauguuggagcaggguccg

SEQ ID NO: 1467433 - RNA, 19 nt, Artificial Sequence
  Description of Artificial Sequence: Synthetic oligonucleotide
ugacaaggaauagcguacu

SEQ ID NO: 1467434 - RNA, 19 nt, Artificial Sequence
  Description of Artificial Sequence: Synthetic oligonucleotide
uaccuguacuacaguuugc

SEQ ID NO: 1467435 - RNA, 19 nt, Artificial Sequence
  Description of Artificial Sequence: Synthetic oligonucleotide
uggacuugaacaggacucu

SEQ ID NO: 1467436 - RNA, 19 nt, Artificial Sequence
  Description of Artificial Sequence: Synthetic oligonucleotide
ggugacgucagcuuaggaa

SEQ ID NO: 1467437 - RNA, 19 nt, Artificial Sequence
  Description of Artificial Sequence: Synthetic oligonucleotide
ugcuuguaacuggugacgu

SEQ ID NO: 1467438 - RNA, 19 nt, Artificial Sequence
  Description of Artificial Sequence: Synthetic oligonucleotide
gaucgguaaaacagaccug

SEQ ID NO: 1467439 - RNA, 19 nt, Artificial Sequence
  Description of Artificial Sequence: Synthetic oligonucleotide
cugugucgcagucugugac

SEQ ID NO: 1467440 - RNA, 19 nt, Artificial Sequence
  Description of Artificial Sequence: Synthetic oligonucleotide
cuaggaccguucagcagag

SEQ ID NO: 1467441 - RNA, 19 nt, Artificial Sequence
  Description of Artificial Sequence: Synthetic oligonucleotide
aagcccacugggcucuacu

SEQ ID NO: 1467442 - RNA, 19 nt, Artificial Sequence
  Description of Artificial Sequence: Synthetic oligonucleotide
aagcaggcuuuaaagugca

SEQ ID NO: 1467443 - RNA, 19 nt, Artificial Sequence
  Description of Artificial Sequence: Synthetic oligonucleotide
cugcuuaguugacugugac

SEQ ID NO: 1467444 - RNA, 19 nt, Artificial Sequence
  Description of Artificial Sequence: Synthetic oligonucleotide
cucuacauuucgccauccc

SEQ ID NO: 1467445 - RNA, 19 nt, Artificial Sequence
  Description of Artificial Sequence: Synthetic oligonucleotide
ccacauuggagcuggagug

SEQ ID NO: 1467446 - RNA, 19 nt, Artificial Sequence
  Description of Artificial Sequence: Synthetic oligonucleotide
uccauugcuguaucaucau

SEQ ID NO: 1467447 - RNA, 19 nt, Artificial Sequence
  Description of Artificial Sequence: Synthetic oligonucleotide
uaacuggugacgucagcuu

SEQ ID NO: 1467448 - RNA, 19 nt, Artificial Sequence
  Description of Artificial Sequence: Synthetic oligonucleotide
aacagaccugucugaggau

SEQ ID NO: 1467449 - RNA, 19 nt, Artificial Sequence
  Description of Artificial Sequence: Synthetic oligonucleotide
gacgucagcuuaggaacag

SEQ ID NO: 1467450 - RNA, 19 nt, Artificial Sequence
  Description of Artificial Sequence: Synthetic oligonucleotide
auaaucucuguuggacucu

SEQ ID NO: 1467451 - RNA, 19 nt, Artificial Sequence
  Description of Artificial Sequence: Synthetic oligonucleotide
aagugcacuccggugucug

SEQ ID NO: 1467452 - RNA, 19 nt, Artificial Sequence
  Description of Artificial Sequence: Synthetic oligonucleotide
gucuuuggcuaccacggga

SEQ ID NO: 1467453 - RNA, 19 nt, Artificial Sequence
  Description of Artificial Sequence: Synthetic oligonucleotide
aaguggggagcgccauuug

SEQ ID NO: 1467454 - RNA, 19 nt, Artificial Sequence
  Description of Artificial Sequence: Synthetic oligonucleotide
gaacagaacugccaccagu

SEQ ID NO: 1467455 - RNA, 19 nt, Artificial Sequence
  Description of Artificial Sequence: Synthetic oligonucleotide
acuggugacgucagcuuag

SEQ ID NO: 1467456 - RNA, 19 nt, Artificial Sequence
  Description of Artificial Sequence: Synthetic oligonucleotide
uggugaaguuguucaguuc

SEQ ID NO: 1467457 - RNA, 19 nt, Artificial Sequence
  Description of Artificial Sequence: Synthetic oligonucleotide
gcaguaugacugcuuaaug

SEQ ID NO: 1467458 - RNA, 19 nt, Artificial Sequence
  Description of Artificial Sequence: Synthetic oligonucleotide
uacgcaugaacuggccugu

SEQ ID NO: 1467459 - RNA, 19 nt, Artificial Sequence
  Description of Artificial Sequence: Synthetic oligonucleotide
ucgguaaaacagaccuguc

SEQ ID NO: 1467460 - RNA, 19 nt, Artificial Sequence
  Description of Artificial Sequence: Synthetic oligonucleotide
uaacugugggaggcuggcg

SEQ ID NO: 1467461 - RNA, 19 nt, Artificial Sequence
  Description of Artificial Sequence: Synthetic oligonucleotide
accaccacguggguagagg

SEQ ID NO: 1467462 - RNA, 19 nt, Artificial Sequence
  Description of Artificial Sequence: Synthetic oligonucleotide
gggugauuguuccagggga

SEQ ID NO: 1467463 - RNA, 19 nt, Artificial Sequence
  Description of Artificial Sequence: Synthetic oligonucleotide
gaaugggagauaugcuugu

SEQ ID NO: 1467464 - RNA, 19 nt, Artificial Sequence
  Description of Artificial Sequence: Synthetic oligonucleotide
cauuucgccaucccugcca

SEQ ID NO: 1467465 - RNA, 19 nt, Artificial Sequence
  Description of Artificial Sequence: Synthetic oligonucleotide
cacuaggaccguucagcag

SEQ ID NO: 1467466 - RNA, 19 nt, Artificial Sequence
  Description of Artificial Sequence: Synthetic oligonucleotide
uagcguacuggggaauggc

SEQ ID NO: 1467467 - RNA, 19 nt, Artificial Sequence
  Description of Artificial Sequence: Synthetic oligonucleotide
cuuuaaagugcacuccggu

SEQ ID NO: 1467468 - RNA, 19 nt, Artificial Sequence
  Description of Artificial Sequence: Synthetic oligonucleotide
gccuacauucugaauacgc

SEQ ID NO: 1467469 - RNA, 19 nt, Artificial Sequence
  Description of Artificial Sequence: Synthetic oligonucleotide
uuucugcugcuuaguugac

SEQ ID NO: 1467470 - RNA, 19 nt, Artificial Sequence
  Description of Artificial Sequence: Synthetic oligonucleotide
gaugaaguggggagcgcca

SEQ ID NO: 1467471 - RNA, 19 nt, Artificial Sequence
  Description of Artificial Sequence: Synthetic oligonucleotide
cucucuacauuucgccauc

SEQ ID NO: 1467472 - RNA, 19 nt, Artificial Sequence
  Description of Artificial Sequence: Synthetic oligonucleotide
cugacuggugaaguuguuc

SEQ ID NO: 1467473 - RNA, 19 nt, Artificial Sequence
  Description of Artificial Sequence: Synthetic oligonucleotide
cuuaguugacugugacuga

SEQ ID NO: 1467474 - RNA, 19 nt, Artificial Sequence
  Description of Artificial Sequence: Synthetic oligonucleotide
acaggacucucuacauuuc

SEQ ID NO: 1467475 - RNA, 19 nt, Artificial Sequence
  Description of Artificial Sequence: Synthetic oligonucleotide
ucuggucguuaggggaggg

SEQ ID NO: 1467476 - RNA, 19 nt, Artificial Sequence
  Description of Artificial Sequence: Synthetic oligonucleotide
guaacuggugacgucagcu

SEQ ID NO: 1467477 - RNA, 19 nt, Artificial Sequence
  Description of Artificial Sequence: Synthetic oligonucleotide
cugugacugagccacaugu

SEQ ID NO: 1467478 - RNA, 19 nt, Artificial Sequence
  Description of Artificial Sequence: Synthetic oligonucleotide
ggauccuuggguuauaauu

SEQ ID NO: 1467479 - RNA, 19 nt, Artificial Sequence
  Description of Artificial Sequence: Synthetic oligonucleotide
gucagcuuaggaacagaac

SEQ ID NO: 1467480 - RNA, 19 nt, Artificial Sequence
  Description of Artificial Sequence: Synthetic oligonucleotide
uacuaccacauuggagcug

SEQ ID NO: 1467481 - RNA, 19 nt, Artificial Sequence
  Description of Artificial Sequence: Synthetic oligonucleotide
aaugggagauaugcuugua

SEQ ID NO: 1467482 - RNA, 19 nt, Artificial Sequence
  Description of Artificial Sequence: Synthetic oligonucleotide
gauggacuuuaccaccacu

SEQ ID NO: 1467483 - RNA, 19 nt, Artificial Sequence
  Description of Artificial Sequence: Synthetic oligonucleotide
ugcacuccggugucugaac

SEQ ID NO: 1467484 - RNA, 19 nt, Artificial Sequence
  Description of Artificial Sequence: Synthetic oligonucleotide
aaagugcacuccggugucu

SEQ ID NO: 1467485 - RNA, 19 nt, Artificial Sequence
  Description of Artificial Sequence: Synthetic oligonucleotide
cagcaaguaccuguacuac

SEQ ID NO: 1467486 - RNA, 19 nt, Artificial Sequence
  Description of Artificial Sequence: Synthetic oligonucleotide
ccuguacuacaguuugcgg

SEQ ID NO: 1467487 - RNA, 19 nt, Artificial Sequence
  Description of Artificial Sequence: Synthetic oligonucleotide
ucgcagucugugacugagc

SEQ ID NO: 1467488 - RNA, 19 nt, Artificial Sequence
  Description of Artificial Sequence: Synthetic oligonucleotide
cacuccggugucugaacac

SEQ ID NO: 1467489 - RNA, 19 nt, Artificial Sequence
  Description of Artificial Sequence: Synthetic oligonucleotide
gcuggcuaaguuucugcug

SEQ ID NO: 1467490 - RNA, 19 nt, Artificial Sequence
  Description of Artificial Sequence: Synthetic oligonucleotide
acuccggugucugaacacu

SEQ ID NO: 1467491 - RNA, 19 nt, Artificial Sequence
  Description of Artificial Sequence: Synthetic oligonucleotide
uugccggcuguuucucuga

SEQ ID NO: 1467492 - RNA, 19 nt, Artificial Sequence
  Description of Artificial Sequence: Synthetic oligonucleotide
ucaguucaagaagcccacu

SEQ ID NO: 1467493 - RNA, 19 nt, Artificial Sequence
  Description of Artificial Sequence: Synthetic oligonucleotide
gaccguucagcagagcucu

SEQ ID NO: 1467494 - RNA, 19 nt, Artificial Sequence
  Description of Artificial Sequence: Synthetic oligonucleotide
cuggugacgucagcuuagg

SEQ ID NO: 1467495 - RNA, 19 nt, Artificial Sequence
  Description of Artificial Sequence: Synthetic oligonucleotide
uggcuaaguuucugcugcu

SEQ ID NO: 1467496 - RNA, 19 nt, Artificial Sequence
  Description of Artificial Sequence: Synthetic oligonucleotide
ggagucaguuucugaugcc

SEQ ID NO: 1467497 - RNA, 19 nt, Artificial Sequence
  Description of Artificial Sequence: Synthetic oligonucleotide
ggaauagcguacuggggaa

SEQ ID NO: 1467498 - RNA, 19 nt, Artificial Sequence
  Description of Artificial Sequence: Synthetic oligonucleotide
guagaggguaaagcuccug

SEQ ID NO: 1467499 - RNA, 19 nt, Artificial Sequence
  Description of Artificial Sequence: Synthetic oligonucleotide
ggacuuuaccaccacugaa

SEQ ID NO: 1467500 - RNA, 19 nt, Artificial Sequence
  Description of Artificial Sequence: Synthetic oligonucleotide
aggauccuuggguuauaau

SEQ ID NO: 1467501 - RNA, 19 nt, Artificial Sequence
  Description of Artificial Sequence: Synthetic oligonucleotide
accacguggguagagggua

SEQ ID NO: 1467502 - RNA, 19 nt, Artificial Sequence
  Description of Artificial Sequence: Synthetic oligonucleotide
ggcagaucgguaaaacaga

SEQ ID NO: 1467503 - RNA, 19 nt, Artificial Sequence
  Description of Artificial Sequence: Synthetic oligonucleotide
gacgcugggauggacuuua

SEQ ID NO: 1467504 - RNA, 19 nt, Artificial Sequence
  Description of Artificial Sequence: Synthetic oligonucleotide
acguggguagaggguaaag

SEQ ID NO: 1467505 - RNA, 19 nt, Artificial Sequence
  Description of Artificial Sequence: Synthetic oligonucleotide
aggcuggcgccccucaaau

SEQ ID NO: 1467506 - RNA, 19 nt, Artificial Sequence
  Description of Artificial Sequence: Synthetic oligonucleotide
gcgccauuuggcucugggg

SEQ ID NO: 1467507 - RNA, 19 nt, Artificial Sequence
  Description of Artificial Sequence: Synthetic oligonucleotide
guccgcuggggcugggaag

SEQ ID NO: 1467508 - RNA, 19 nt, Artificial Sequence
  Description of Artificial Sequence: Synthetic oligonucleotide
uugggguugcacguagauu

SEQ ID NO: 1467509 - RNA, 19 nt, Artificial Sequence
  Description of Artificial Sequence: Synthetic oligonucleotide
ggggcugugccauuaaggu

SEQ ID NO: 1467510 - RNA, 19 nt, Artificial Sequence
  Description of Artificial Sequence: Synthetic oligonucleotide
acgggaugcugugugugcu

SEQ ID NO: 1467511 - RNA, 19 nt, Artificial Sequence
  Description of Artificial Sequence: Synthetic oligonucleotide
gggagauaugcuuguaacu

SEQ ID NO: 1467512 - RNA, 19 nt, Artificial Sequence
  Description of Artificial Sequence: Synthetic oligonucleotide
aacagcagauggacuugaa

SEQ ID NO: 1467513 - RNA, 19 nt, Artificial Sequence
  Description of Artificial Sequence: Synthetic oligonucleotide
ccggugucugaacacuagg

SEQ ID NO: 1467514 - RNA, 19 nt, Artificial Sequence
  Description of Artificial Sequence: Synthetic oligonucleotide
cugaugaaguggggagcgc

SEQ ID NO: 1467515 - RNA, 19 nt, Artificial Sequence
  Description of Artificial Sequence: Synthetic oligonucleotide
guuuaggaagcugcugugu

SEQ ID NO: 1467516 - RNA, 19 nt, Artificial Sequence
  Description of Artificial Sequence: Synthetic oligonucleotide
ggaguuugggguugcacgu

SEQ ID NO: 1467517 - RNA, 19 nt, Artificial Sequence
  Description of Artificial Sequence: Synthetic oligonucleotide
cuacuaccacauuggagcu

SEQ ID NO: 1467518 - RNA, 19 nt, Artificial Sequence
  Description of Artificial Sequence: Synthetic oligonucleotide
cacauuggagcuggaguga

SEQ ID NO: 1467519 - RNA, 19 nt, Artificial Sequence
  Description of Artificial Sequence: Synthetic oligonucleotide
cuggaugauaaucucuguu

SEQ ID NO: 1467520 - RNA, 19 nt, Artificial Sequence
  Description of Artificial Sequence: Synthetic oligonucleotide
cauuggagcuggagugaca

SEQ ID NO: 1467521 - RNA, 19 nt, Artificial Sequence
  Description of Artificial Sequence: Synthetic oligonucleotide
agcccacugggcucuacua

SEQ ID NO: 1467522 - RNA, 19 nt, Artificial Sequence
  Description of Artificial Sequence: Synthetic oligonucleotide
caucugcaauaugucugac

SEQ ID NO: 1467523 - RNA, 19 nt, Artificial Sequence
  Description of Artificial Sequence: Synthetic oligonucleotide
cuggucguuaggggagggc

SEQ ID NO: 1467524 - RNA, 19 nt, Artificial Sequence
  Description of Artificial Sequence: Synthetic oligonucleotide
gaggcuggcgccccucaaa

SEQ ID NO: 1467525 - RNA, 19 nt, Artificial Sequence
  Description of Artificial Sequence: Synthetic oligonucleotide
gcuuaaugccuguugcaua

SEQ ID NO: 1467526 - RNA, 19 nt, Artificial Sequence
  Description of Artificial Sequence: Synthetic oligonucleotide
ugccaccaguuaucuuugu

SEQ ID NO: 1467527 - RNA, 19 nt, Artificial Sequence
  Description of Artificial Sequence: Synthetic oligonucleotide
cacuaccauaugcucuaca

SEQ ID NO: 1467528 - RNA, 19 nt, Artificial Sequence
  Description of Artificial Sequence: Synthetic oligonucleotide
uugcauaaugugggugauu

SEQ ID NO: 1467529 - RNA, 19 nt, Artificial Sequence
  Description of Artificial Sequence: Synthetic oligonucleotide
gaacugccaccaguuaucu

SEQ ID NO: 1467530 - RNA, 19 nt, Artificial Sequence
  Description of Artificial Sequence: Synthetic oligonucleotide
gcuggcgccccucaaaugu

SEQ ID NO: 1467531 - RNA, 19 nt, Artificial Sequence
  Description of Artificial Sequence: Synthetic oligonucleotide
ugccggcuguuucucugau

SEQ ID NO: 1467532 - RNA, 19 nt, Artificial Sequence
  Description of Artificial Sequence: Synthetic oligonucleotide
gcuuguaacuggugacguc

SEQ ID NO: 1467533 - RNA, 19 nt, Artificial Sequence
  Description of Artificial Sequence: Synthetic oligonucleotide
gaaguggggagcgccauuu

SEQ ID NO: 1467534 - RNA, 19 nt, Artificial Sequence
  Description of Artificial Sequence: Synthetic oligonucleotide
gccacauguuggagcaggg

SEQ ID NO: 1467535 - RNA, 19 nt, Artificial Sequence
  Description of Artificial Sequence: Synthetic oligonucleotide
ugacugcuuaaugccuguu

SEQ ID NO: 1467536 - RNA, 19 nt, Artificial Sequence
  Description of Artificial Sequence: Synthetic oligonucleotide
cugagaggggcugggcuca

SEQ ID NO: 1467537 - RNA, 19 nt, Artificial Sequence
  Description of Artificial Sequence: Synthetic oligonucleotide
gagccacauguuggagcag

SEQ ID NO: 1467538 - RNA, 19 nt, Artificial Sequence
  Description of Artificial Sequence: Synthetic oligonucleotide
ugacugagucagggcagau

SEQ ID NO: 1467539 - RNA, 19 nt, Artificial Sequence
  Description of Artificial Sequence: Synthetic oligonucleotide
ggaccguucagcagagcuc

SEQ ID NO: 1467540 - RNA, 19 nt, Artificial Sequence
  Description of Artificial Sequence: Synthetic oligonucleotide
gggagcgccauuuggcucu

SEQ ID NO: 1467541 - RNA, 19 nt, Artificial Sequence
  Description of Artificial Sequence: Synthetic oligonucleotide
acgcaugaacuggccuguc

SEQ ID NO: 1467542 - RNA, 19 nt, Artificial Sequence
  Description of Artificial Sequence: Synthetic oligonucleotide
ggggagggccaacagcaga

SEQ ID NO: 1467543 - RNA, 19 nt, Artificial Sequence
  Description of Artificial Sequence: Synthetic oligonucleotide
cgcaugaacuggccugucg

SEQ ID NO: 1467544 - RNA, 19 nt, Artificial Sequence
  Description of Artificial Sequence: Synthetic oligonucleotide
gccauuaagguaggaagcu

SEQ ID NO: 1467545 - RNA, 19 nt, Artificial Sequence
  Description of Artificial Sequence: Synthetic oligonucleotide
cucacccuccucaguucca

SEQ ID NO: 1467546 - RNA, 19 nt, Artificial Sequence
  Description of Artificial Sequence: Synthetic oligonucleotide
caucugcguguaguuugug

SEQ ID NO: 1467547 - RNA, 19 nt, Artificial Sequence
  Description of Artificial Sequence: Synthetic oligonucleotide
gaggauccaauguguccau

SEQ ID NO: 1467548 - RNA, 19 nt, Artificial Sequence
  Description of Artificial Sequence: Synthetic oligonucleotide
gcagucugugacugagcca

SEQ ID NO: 1467549 - RNA, 19 nt, Artificial Sequence
  Description of Artificial Sequence: Synthetic oligonucleotide
caucuggcuugggcugugc

SEQ ID NO: 1467550 - RNA, 19 nt, Artificial Sequence
  Description of Artificial Sequence: Synthetic oligonucleotide
gcacuccggugucugaaca

SEQ ID NO: 1467551 - RNA, 19 nt, Artificial Sequence
  Description of Artificial Sequence: Synthetic oligonucleotide
gucguuaggggagggccaa

SEQ ID NO: 1467552 - RNA, 19 nt, Artificial Sequence
  Description of Artificial Sequence: Synthetic oligonucleotide
gaguuugggguugcacgua

SEQ ID NO: 1467553 - RNA, 19 nt, Artificial Sequence
  Description of Artificial Sequence: Synthetic oligonucleotide
uaggaccguucagcagagc

SEQ ID NO: 1467554 - RNA, 19 nt, Artificial Sequence
  Description of Artificial Sequence: Synthetic oligonucleotide
guugcauaaugugggugau

SEQ ID NO: 1467555 - RNA, 19 nt, Artificial Sequence
  Description of Artificial Sequence: Synthetic oligonucleotide
gaauagcguacuggggaau

SEQ ID NO: 1467556 - RNA, 19 nt, Artificial Sequence
  Description of Artificial Sequence: Synthetic oligonucleotide
ggggagcgccauuuggcuc

SEQ ID NO: 1467557 - RNA, 19 nt, Artificial Sequence
  Description of Artificial Sequence: Synthetic oligonucleotide
cuccggugucugaacacua

SEQ ID NO: 1467558 - RNA, 19 nt, Artificial Sequence
  Description of Artificial Sequence: Synthetic oligonucleotide
caccaccacguggguagag

SEQ ID NO: 1467559 - RNA, 19 nt, Artificial Sequence
  Description of Artificial Sequence: Synthetic oligonucleotide
ggucguuaggggagggcca

SEQ ID NO: 1467560 - RNA, 19 nt, Artificial Sequence
  Description of Artificial Sequence: Synthetic oligonucleotide
ggaagacgcugggauggac

SEQ ID NO: 1467561 - RNA, 19 nt, Artificial Sequence
  Description of Artificial Sequence: Synthetic oligonucleotide
gccaccaguuaucuuugua

SEQ ID NO: 1467562 - RNA, 19 nt, Artificial Sequence
  Description of Artificial Sequence: Synthetic oligonucleotide
ggcuggcgccccucaaaug

SEQ ID NO: 1467563 - RNA, 19 nt, Artificial Sequence
  Description of Artificial Sequence: Synthetic oligonucleotide
agaggauccuuggguuaua

SEQ ID NO: 1467564 - RNA, 19 nt, Artificial Sequence
  Description of Artificial Sequence: Synthetic oligonucleotide
ccucaguuccaaguuccuc

SEQ ID NO: 1467565 - RNA, 19 nt, Artificial Sequence
  Description of Artificial Sequence: Synthetic oligonucleotide
cgucagcuuaggaacagaa

SEQ ID NO: 1467566 - RNA, 19 nt, Artificial Sequence
  Description of Artificial Sequence: Synthetic oligonucleotide
cguguaguuugugcuggag

SEQ ID NO: 1467567 - RNA, 19 nt, Artificial Sequence
  Description of Artificial Sequence: Synthetic oligonucleotide
gccggcuguuucucugaug

SEQ ID NO: 1467568 - RNA, 19 nt, Artificial Sequence
  Description of Artificial Sequence: Synthetic oligonucleotide
caccacguggguagagggu

SEQ ID NO: 1467569 - RNA, 19 nt, Artificial Sequence
  Description of Artificial Sequence: Synthetic oligonucleotide
gguugauuuggagcuugcu

SEQ ID NO: 1467570 - RNA, 19 nt, Artificial Sequence
  Description of Artificial Sequence: Synthetic oligonucleotide
cagaggauccuuggguuau

SEQ ID NO: 1467571 - RNA, 19 nt, Artificial Sequence
  Description of Artificial Sequence: Synthetic oligonucleotide
gagcgccauuuggcucugg

SEQ ID NO: 1467572 - RNA, 19 nt, Artificial Sequence
  Description of Artificial Sequence: Synthetic oligonucleotide
accguucagcagagcucug

SEQ ID NO: 1467573 - RNA, 19 nt, Artificial Sequence
  Description of Artificial Sequence: Synthetic oligonucleotide
gcucaguuccauccuccgu

SEQ ID NO: 1467574 - RNA, 19 nt, Artificial Sequence
  Description of Artificial Sequence: Synthetic oligonucleotide
gcguacuggggaauggccu

SEQ ID NO: 1467575 - RNA, 19 nt, Artificial Sequence
  Description of Artificial Sequence: Synthetic oligonucleotide
gucugaacacuaggaccgu

SEQ ID NO: 1467576 - RNA, 19 nt, Artificial Sequence
  Description of Artificial Sequence: Synthetic oligonucleotide
ggccugaaugggagauaug

SEQ ID NO: 1467577 - RNA, 19 nt, Artificial Sequence
  Description of Artificial Sequence: Synthetic oligonucleotide
cacguggguagaggguaaa

SEQ ID NO: 1467578 - RNA, 19 nt, Artificial Sequence
  Description of Artificial Sequence: Synthetic oligonucleotide
gcgccccucaaauguuauc

SEQ ID NO: 1467579 - RNA, 19 nt, Artificial Sequence
  Description of Artificial Sequence: Synthetic oligonucleotide
caaccucacccuccucagu

SEQ ID NO: 1467580 - RNA, 19 nt, Artificial Sequence
  Description of Artificial Sequence: Synthetic oligonucleotide
ggcuugccggcuguuucuc

SEQ ID NO: 1467581 - RNA, 19 nt, Artificial Sequence
  Description of Artificial Sequence: Synthetic oligonucleotide
ggcacuccugcugcuucca

SEQ ID NO: 1467582 - RNA, 19 nt, Artificial Sequence
  Description of Artificial Sequence: Synthetic oligonucleotide
gcaucuggcuugggcugug

SEQ ID NO: 1467583 - RNA, 19 nt, Artificial Sequence
  Description of Artificial Sequence: Synthetic oligonucleotide
gcaucugcguguaguuugu

SEQ ID NO: 1467584 - RNA, 19 nt, Artificial Sequence
  Description of Artificial Sequence: Synthetic oligonucleotide
cuggccugucgcaggcacu

SEQ ID NO: 1467585 - RNA, 19 nt, Artificial Sequence
  Description of Artificial Sequence: Synthetic oligonucleotide
ccguucagcagagcucuga

SEQ ID NO: 1467586 - RNA, 19 nt, Artificial Sequence
  Description of Artificial Sequence: Synthetic oligonucleotide
ggagcgccauuuggcucug

SEQ ID NO: 1467587 - RNA, 19 nt, Artificial Sequence
  Description of Artificial Sequence: Synthetic oligonucleotide
cuggcgccccucaaauguu

SEQ ID NO: 1467588 - RNA, 19 nt, Artificial Sequence
  Description of Artificial Sequence: Synthetic oligonucleotide
aggguccgcuggggcuggg

SEQ ID NO: 1467589 - RNA, 19 nt, Artificial Sequence
  Description of Artificial Sequence: Synthetic oligonucleotide
cgccccucaaauguuaucu

SEQ ID NO: 1467590 - RNA, 19 nt, Artificial Sequence
  Description of Artificial Sequence: Synthetic oligonucleotide
gcuugccggcuguuucucu

SEQ ID NO: 1467591 - RNA, 19 nt, Artificial Sequence
  Description of Artificial Sequence: Synthetic oligonucleotide
ggcuaaguuucugcugcuu

SEQ ID NO: 1467592 - RNA, 19 nt, Artificial Sequence
  Description of Artificial Sequence: Synthetic oligonucleotide
gggguugcacguagauuuu

SEQ ID NO: 1467593 - RNA, 19 nt, Artificial Sequence
  Description of Artificial Sequence: Synthetic oligonucleotide
ggguccgcuggggcuggga

SEQ ID NO: 1467594 - RNA, 19 nt, Artificial Sequence
  Description of Artificial Sequence: Synthetic oligonucleotide
gcucuacauuugugucaau

SEQ ID NO: 1467595 - RNA, 19 nt, Artificial Sequence
  Description of Artificial Sequence: Synthetic oligonucleotide
gauguuauagcccaccgug

SEQ ID NO: 1467596 - RNA, 19 nt, Artificial Sequence
  Description of Artificial Sequence: Synthetic oligonucleotide
aagaacacaaguuguuguc

SEQ ID NO: 1467597 - RNA, 19 nt, Artificial Sequence
  Description of Artificial Sequence: Synthetic oligonucleotide
uuuacuguaccccaaccgc

SEQ ID NO: 1467598 - RNA, 19 nt, Artificial Sequence
  Description of Artificial Sequence: Synthetic oligonucleotide
cauauaagaagguagucuc

SEQ ID NO: 1467599 - RNA, 19 nt, Artificial Sequence
  Description of Artificial Sequence: Synthetic oligonucleotide
gauaccaaaggcucgggcc

SEQ ID NO: 1467600 - RNA, 19 nt, Artificial Sequence
  Description of Artificial Sequence: Synthetic oligonucleotide
uguuauagcccaccguggg

SEQ ID NO: 1467601 - RNA, 19 nt, Artificial Sequence
  Description of Artificial Sequence: Synthetic oligonucleotide
aaguuguuguccugccucc

SEQ ID NO: 1467602 - RNA, 19 nt, Artificial Sequence
  Description of Artificial Sequence: Synthetic oligonucleotide
agaccuaccuccuaucaac

SEQ ID NO: 1467603 - RNA, 19 nt, Artificial Sequence
  Description of Artificial Sequence: Synthetic oligonucleotide
uuggguacgacguucacca

SEQ ID NO: 1467604 - RNA, 19 nt, Artificial Sequence
  Description of Artificial Sequence: Synthetic oligonucleotide
ugaguagacauaucucccg

SEQ ID NO: 1467605 - RNA, 19 nt, Artificial Sequence
  Description of Artificial Sequence: Synthetic oligonucleotide
auaagaagguagucucucc

SEQ ID NO: 1467606 - RNA, 19 nt, Artificial Sequence
  Description of Artificial Sequence: Synthetic oligonucleotide
aaucccaggccuuucagca

SEQ ID NO: 1467607 - RNA, 19 nt, Artificial Sequence
  Description of Artificial Sequence: Synthetic oligonucleotide
uaguccacgugcaagaaca

SEQ ID NO: 1467608 - RNA, 19 nt, Artificial Sequence
  Description of Artificial Sequence: Synthetic oligonucleotide
aagaggaaugacuucacaa

SEQ ID NO: 1467609 - RNA, 19 nt, Artificial Sequence
  Description of Artificial Sequence: Synthetic oligonucleotide
acacuagagggucuagucc

SEQ ID NO: 1467610 - RNA, 19 nt, Artificial Sequence
  Description of Artificial Sequence: Synthetic oligonucleotide
auaaaguccauggagggag

SEQ ID NO: 1467611 - RNA, 19 nt, Artificial Sequence
  Description of Artificial Sequence: Synthetic oligonucleotide
cuuaaauaggccaggcccc

SEQ ID NO: 1467612 - RNA, 19 nt, Artificial Sequence
  Description of Artificial Sequence: Synthetic oligonucleotide
aaaagucaugcuaugggag

SEQ ID NO: 1467613 - RNA, 19 nt, Artificial Sequence
  Description of Artificial Sequence: Synthetic oligonucleotide
ucugcaacaggucucuccc

SEQ ID NO: 1467614 - RNA, 19 nt, Artificial Sequence
  Description of Artificial Sequence: Synthetic oligonucleotide
gugagggaggcuuaaauag

SEQ ID NO: 1467615 - RNA, 19 nt, Artificial Sequence
  Description of Artificial Sequence: Synthetic oligonucleotide
ugugacagaaucccaggcc

SEQ ID NO: 1467616 - RNA, 19 nt, Artificial Sequence
  Description of Artificial Sequence: Synthetic oligonucleotide
cuuauagucgggcagcuug

SEQ ID NO: 1467617 - RNA, 19 nt, Artificial Sequence
  Description of Artificial Sequence: Synthetic oligonucleotide
uuaugagcagguucugggg

SEQ ID NO: 1467618 - RNA, 19 nt, Artificial Sequence
  Description of Artificial Sequence: Synthetic oligonucleotide
ggcagguuacacuagaggg

SEQ ID NO: 1467619 - RNA, 19 nt, Artificial Sequence
  Description of Artificial Sequence: Synthetic oligonucleotide
agaacacaaguuguugucc

SEQ ID NO: 1467620 - RNA, 19 nt, Artificial Sequence
  Description of Artificial Sequence: Synthetic oligonucleotide
uuauagucgggcagcuugg

SEQ ID NO: 1467621 - RNA, 19 nt, Artificial Sequence
  Description of Artificial Sequence: Synthetic oligonucleotide
ccuaucaacauauaagaag

SEQ ID NO: 1467622 - RNA, 19 nt, Artificial Sequence
  Description of Artificial Sequence: Synthetic oligonucleotide
ugagaugcgcugcacgggg

SEQ ID NO: 1467623 - RNA, 19 nt, Artificial Sequence
  Description of Artificial Sequence: Synthetic oligonucleotide
uaagaagguagucucucca

SEQ ID NO: 1467624 - RNA, 19 nt, Artificial Sequence
  Description of Artificial Sequence: Synthetic oligonucleotide
cuaugcagcacguugcggc

SEQ ID NO: 1467625 - RNA, 19 nt, Artificial Sequence
  Description of Artificial Sequence: Synthetic oligonucleotide
agagaaguaggggugcugc

SEQ ID NO: 1467626 - RNA, 19 nt, Artificial Sequence
  Description of Artificial Sequence: Synthetic oligonucleotide
uagacauaucucccggagg

SEQ ID NO: 1467627 - RNA, 19 nt, Artificial Sequence
  Description of Artificial Sequence: Synthetic oligonucleotide
acucagauguuauagccca

SEQ ID NO: 1467628 - RNA, 19 nt, Artificial Sequence
  Description of Artificial Sequence: Synthetic oligonucleotide
uugagcuuggguacgacgu

SEQ ID NO: 1467629 - RNA, 19 nt, Artificial Sequence
  Description of Artificial Sequence: Synthetic oligonucleotide
ucagcagaguaacagcgca

SEQ ID NO: 1467630 - RNA, 19 nt, Artificial Sequence
  Description of Artificial Sequence: Synthetic oligonucleotide
uagcuuggaauacaggccu

SEQ ID NO: 1467631 - RNA, 19 nt, Artificial Sequence
  Description of Artificial Sequence: Synthetic oligonucleotide
gaguagacauaucucccgg

SEQ ID NO: 1467632 - RNA, 19 nt, Artificial Sequence
  Description of Artificial Sequence: Synthetic oligonucleotide
auaagguggaaguggcagg

SEQ ID NO: 1467633 - RNA, 19 nt, Artificial Sequence
  Description of Artificial Sequence: Synthetic oligonucleotide
uguccugccuccaaaaguc

SEQ ID NO: 1467634 - RNA, 19 nt, Artificial Sequence
  Description of Artificial Sequence: Synthetic oligonucleotide
uggguagggcuuauagucg

SEQ ID NO: 1467635 - RNA, 19 nt, Artificial Sequence
  Description of Artificial Sequence: Synthetic oligonucleotide
cuccuaucaacauauaaga

SEQ ID NO: 1467636 - RNA, 19 nt, Artificial Sequence
  Description of Artificial Sequence: Synthetic oligonucleotide
agaguaacucuacccuggc

SEQ ID NO: 1467637 - RNA, 19 nt, Artificial Sequence
  Description of Artificial Sequence: Synthetic oligonucleotide
aaggagccaauuuaugaaa

SEQ ID NO: 1467638 - RNA, 19 nt, Artificial Sequence
  Description of Artificial Sequence: Synthetic oligonucleotide
agaguaacagcgcacggga

SEQ ID NO: 1467639 - RNA, 19 nt, Artificial Sequence
  Description of Artificial Sequence: Synthetic oligonucleotide
agaggaaugacuucacaau

SEQ ID NO: 1467640 - RNA, 19 nt, Artificial Sequence
  Description of Artificial Sequence: Synthetic oligonucleotide
auggacguggaguacagcu

SEQ ID NO: 1467641 - RNA, 19 nt, Artificial Sequence
  Description of Artificial Sequence: Synthetic oligonucleotide
cauaagguggaaguggcag

SEQ ID NO: 1467642 - RNA, 19 nt, Artificial Sequence
  Description of Artificial Sequence: Synthetic oligonucleotide
uagucgggcagcuugguca

SEQ ID NO: 1467643 - RNA, 19 nt, Artificial Sequence
  Description of Artificial Sequence: Synthetic oligonucleotide
cauuggguagggcuuauag

SEQ ID NO: 1467644 - RNA, 19 nt, Artificial Sequence
  Description of Artificial Sequence: Synthetic oligonucleotide
aauaaaguccauggaggga

SEQ ID NO: 1467645 - RNA, 19 nt, Artificial Sequence
  Description of Artificial Sequence: Synthetic oligonucleotide
ucuuuuacuguaccccaac

SEQ ID NO: 1467646 - RNA, 19 nt, Artificial Sequence
  Description of Artificial Sequence: Synthetic oligonucleotide
uauucacuguaccaacagu

SEQ ID NO: 1467647 - RNA, 19 nt, Artificial Sequence
  Description of Artificial Sequence: Synthetic oligonucleotide
uaucaacauauaagaaggu

SEQ ID NO: 1467648 - RNA, 19 nt, Artificial Sequence
  Description of Artificial Sequence: Synthetic oligonucleotide
uauaagaagguagucucuc

SEQ ID NO: 1467649 - RNA, 19 nt, Artificial Sequence
  Description of Artificial Sequence: Synthetic oligonucleotide
uguggcauugagcuugggu

SEQ ID NO: 1467650 - RNA, 19 nt, Artificial Sequence
  Description of Artificial Sequence: Synthetic oligonucleotide
uuggaauacaggccuguac

SEQ ID NO: 1467651 - RNA, 19 nt, Artificial Sequence
  Description of Artificial Sequence: Synthetic oligonucleotide
gggguuacaccucaguagg

SEQ ID NO: 1467652 - RNA, 19 nt, Artificial Sequence
  Description of Artificial Sequence: Synthetic oligonucleotide
uguaccaacaguggauagc

SEQ ID NO: 1467653 - RNA, 19 nt, Artificial Sequence
  Description of Artificial Sequence: Synthetic oligonucleotide
uggucaguagguauucacu

SEQ ID NO: 1467654 - RNA, 19 nt, Artificial Sequence
  Description of Artificial Sequence: Synthetic oligonucleotide
aagucaugcuaugggagag

SEQ ID NO: 1467655 - RNA, 19 nt, Artificial Sequence
  Description of Artificial Sequence: Synthetic oligonucleotide
uccuaucaacauauaagaa

SEQ ID NO: 1467656 - RNA, 19 nt, Artificial Sequence
  Description of Artificial Sequence: Synthetic oligonucleotide
aacucuacccuggcugggc

SEQ ID NO: 1467657 - RNA, 19 nt, Artificial Sequence
  Description of Artificial Sequence: Synthetic oligonucleotide
uacacuagagggucuaguc

SEQ ID NO: 1467658 - RNA, 19 nt, Artificial Sequence
  Description of Artificial Sequence: Synthetic oligonucleotide
uacuguaccccaaccgcag

SEQ ID NO: 1467659 - RNA, 19 nt, Artificial Sequence
  Description of Artificial Sequence: Synthetic oligonucleotide
ccuccuaucaacauauaag

SEQ ID NO: 1467660 - RNA, 19 nt, Artificial Sequence
  Description of Artificial Sequence: Synthetic oligonucleotide
gagggucuaguccacgugc

SEQ ID NO: 1467661 - RNA, 19 nt, Artificial Sequence
  Description of Artificial Sequence: Synthetic oligonucleotide
cuuuuacuguaccccaacc

SEQ ID NO: 1467662 - RNA, 19 nt, Artificial Sequence
  Description of Artificial Sequence: Synthetic oligonucleotide
gauggaaagagcccuaccu

SEQ ID NO: 1467663 - RNA, 19 nt, Artificial Sequence
  Description of Artificial Sequence: Synthetic oligonucleotide
uuauagcccaccgugggca

SEQ ID NO: 1467664 - RNA, 19 nt, Artificial Sequence
  Description of Artificial Sequence: Synthetic oligonucleotide
aagaagguagucucuccau

SEQ ID NO: 1467665 - RNA, 19 nt, Artificial Sequence
  Description of Artificial Sequence: Synthetic oligonucleotide
agaagguagucucuccaug

SEQ ID NO: 1467666 - RNA, 19 nt, Artificial Sequence
  Description of Artificial Sequence: Synthetic oligonucleotide
agcacguugcggcugugac

SEQ ID NO: 1467667 - RNA, 19 nt, Artificial Sequence
  Description of Artificial Sequence: Synthetic oligonucleotide
ugugagggaggcuuaaaua

SEQ ID NO: 1467668 - RNA, 19 nt, Artificial Sequence
  Description of Artificial Sequence: Synthetic oligonucleotide
uuguugguagcuuggaaua

SEQ ID NO: 1467669 - RNA, 19 nt, Artificial Sequence
  Description of Artificial Sequence: Synthetic oligonucleotide
caaaagucaugcuauggga

SEQ ID NO: 1467670 - RNA, 19 nt, Artificial Sequence
  Description of Artificial Sequence: Synthetic oligonucleotide
acguucaccagggaugucg

SEQ ID NO: 1467671 - RNA, 19 nt, Artificial Sequence
  Description of Artificial Sequence: Synthetic oligonucleotide
cacaugucgauggacgugg

SEQ ID NO: 1467672 - RNA, 19 nt, Artificial Sequence
  Description of Artificial Sequence: Synthetic oligonucleotide
guagguauucacuguacca

SEQ ID NO: 1467673 - RNA, 19 nt, Artificial Sequence
  Description of Artificial Sequence: Synthetic oligonucleotide
uagguauucacuguaccaa

SEQ ID NO: 1467674 - RNA, 19 nt, Artificial Sequence
  Description of Artificial Sequence: Synthetic oligonucleotide
agggcuuauagucgggcag

SEQ ID NO: 1467675 - RNA, 19 nt, Artificial Sequence
  Description of Artificial Sequence: Synthetic oligonucleotide
uccacaucauucccgggga

SEQ ID NO: 1467676 - RNA, 19 nt, Artificial Sequence
  Description of Artificial Sequence: Synthetic oligonucleotide
uucuaaccagcucagcaua

SEQ ID NO: 1467677 - RNA, 19 nt, Artificial Sequence
  Description of Artificial Sequence: Synthetic oligonucleotide
ucagcauaagguggaagug

SEQ ID NO: 1467678 - RNA, 19 nt, Artificial Sequence
  Description of Artificial Sequence: Synthetic oligonucleotide
cacguugcggcugugacag

SEQ ID NO: 1467679 - RNA, 19 nt, Artificial Sequence
  Description of Artificial Sequence: Synthetic oligonucleotide
cacgggauaccaaaggcuc

SEQ ID NO: 1467680 - RNA, 19 nt, Artificial Sequence
  Description of Artificial Sequence: Synthetic oligonucleotide
accgcagggguccccagcc

SEQ ID NO: 1467681 - RNA, 19 nt, Artificial Sequence
  Description of Artificial Sequence: Synthetic oligonucleotide
aaacgcgggccagaguaac

SEQ ID NO: 1467682 - RNA, 19 nt, Artificial Sequence
  Description of Artificial Sequence: Synthetic oligonucleotide
uacgacguucaccagggau

SEQ ID NO: 1467683 - RNA, 19 nt, Artificial Sequence
  Description of Artificial Sequence: Synthetic oligonucleotide
ugggcgguaccacagcgug

SEQ ID NO: 1467684 - RNA, 19 nt, Artificial Sequence
  Description of Artificial Sequence: Synthetic oligonucleotide
ggucaguagguauucacug

SEQ ID NO: 1467685 - RNA, 19 nt, Artificial Sequence
  Description of Artificial Sequence: Synthetic oligonucleotide
gcugucaaaauauuucuuc

SEQ ID NO: 1467686 - RNA, 19 nt, Artificial Sequence
  Description of Artificial Sequence: Synthetic oligonucleotide
uuccuguuuaugagcaggu

SEQ ID NO: 1467687 - RNA, 19 nt, Artificial Sequence
  Description of Artificial Sequence: Synthetic oligonucleotide
ucagucggggucccuagca

SEQ ID NO: 1467688 - RNA, 19 nt, Artificial Sequence
  Description of Artificial Sequence: Synthetic oligonucleotide
gaggcuuaaauaggccagg

SEQ ID NO: 1467689 - RNA, 19 nt, Artificial Sequence
  Description of Artificial Sequence: Synthetic oligonucleotide
agcuuggucauggcgggcc

SEQ ID NO: 1467690 - RNA, 19 nt, Artificial Sequence
  Description of Artificial Sequence: Synthetic oligonucleotide
uggcauugagcuuggguac

SEQ ID NO: 1467691 - RNA, 19 nt, Artificial Sequence
  Description of Artificial Sequence: Synthetic oligonucleotide
uggaaagagcccuaccuuu

SEQ ID NO: 1467692 - RNA, 19 nt, Artificial Sequence
  Description of Artificial Sequence: Synthetic oligonucleotide
aagguucuaaccagcucag

SEQ ID NO: 1467693 - RNA, 19 nt, Artificial Sequence
  Description of Artificial Sequence: Synthetic oligonucleotide
cagaguaacagcgcacggg

SEQ ID NO: 1467694 - RNA, 19 nt, Artificial Sequence
  Description of Artificial Sequence: Synthetic oligonucleotide
gccacuguuccucagucgg

SEQ ID NO: 1467695 - RNA, 19 nt, Artificial Sequence
  Description of Artificial Sequence: Synthetic oligonucleotide
gucccuaugcagcacguug

SEQ ID NO: 1467696 - RNA, 19 nt, Artificial Sequence
  Description of Artificial Sequence: Synthetic oligonucleotide
cacuagagggucuagucca

SEQ ID NO: 1467697 - RNA, 19 nt, Artificial Sequence
  Description of Artificial Sequence: Synthetic oligonucleotide
ucuaaccagcucagcauaa

SEQ ID NO: 1467698 - RNA, 19 nt, Artificial Sequence
  Description of Artificial Sequence: Synthetic oligonucleotide
aggcuuaaauaggccaggc

SEQ ID NO: 1467699 - RNA, 19 nt, Artificial Sequence
  Description of Artificial Sequence: Synthetic oligonucleotide
aguaacagcgcacgggaua

SEQ ID NO: 1467700 - RNA, 19 nt, Artificial Sequence
  Description of Artificial Sequence: Synthetic oligonucleotide
uuaaauaggccaggcccca

SEQ ID NO: 1467701 - RNA, 19 nt, Artificial Sequence
  Description of Artificial Sequence: Synthetic oligonucleotide
aguggcagguuacacuaga

SEQ ID NO: 1467702 - RNA, 19 nt, Artificial Sequence
  Description of Artificial Sequence: Synthetic oligonucleotide
accuccuaucaacauauaa

SEQ ID NO: 1467703 - RNA, 19 nt, Artificial Sequence
  Description of Artificial Sequence: Synthetic oligonucleotide
cacagcgugaccaccucag

SEQ ID NO: 1467704 - RNA, 19 nt, Artificial Sequence
  Description of Artificial Sequence: Synthetic oligonucleotide
gguacgacguucaccaggg

SEQ ID NO: 1467705 - RNA, 19 nt, Artificial Sequence
  Description of Artificial Sequence: Synthetic oligonucleotide
uucuuuuacuguaccccaa

SEQ ID NO: 1467706 - RNA, 19 nt, Artificial Sequence
  Description of Artificial Sequence: Synthetic oligonucleotide
ugcacgggguuacaccuca

SEQ ID NO: 1467707 - RNA, 19 nt, Artificial Sequence
  Description of Artificial Sequence: Synthetic oligonucleotide
auagucgggcagcuugguc

SEQ ID NO: 1467708 - RNA, 19 nt, Artificial Sequence
  Description of Artificial Sequence: Synthetic oligonucleotide
cuuggguacgacguucacc

SEQ ID NO: 1467709 - RNA, 19 nt, Artificial Sequence
  Description of Artificial Sequence: Synthetic oligonucleotide
uguuguccugccuccaaaa

SEQ ID NO: 1467710 - RNA, 19 nt, Artificial Sequence
  Description of Artificial Sequence: Synthetic oligonucleotide
auguuauagcccaccgugg

SEQ ID NO: 1467711 - RNA, 19 nt, Artificial Sequence
  Description of Artificial Sequence: Synthetic oligonucleotide
uaugcagcacguugcggcu

SEQ ID NO: 1467712 - RNA, 19 nt, Artificial Sequence
  Description of Artificial Sequence: Synthetic oligonucleotide
accccaaccgcaggggucc

SEQ ID NO: 1467713 - RNA, 19 nt, Artificial Sequence
  Description of Artificial Sequence: Synthetic oligonucleotide
caacauauaagaagguagu

SEQ ID NO: 1467714 - RNA, 19 nt, Artificial Sequence
  Description of Artificial Sequence: Synthetic oligonucleotide
uagggcuuauagucgggca

SEQ ID NO: 1467715 - RNA, 19 nt, Artificial Sequence
  Description of Artificial Sequence: Synthetic oligonucleotide
cauggcgggccacuguucc

SEQ ID NO: 1467716 - RNA, 19 nt, Artificial Sequence
  Description of Artificial Sequence: Synthetic oligonucleotide
aaaguccauggagggagug

SEQ ID NO: 1467717 - RNA, 19 nt, Artificial Sequence
  Description of Artificial Sequence: Synthetic oligonucleotide
auggaaagagcccuaccuu

SEQ ID NO: 1467718 - RNA, 19 nt, Artificial Sequence
  Description of Artificial Sequence: Synthetic oligonucleotide
aacagcgcacgggauacca

SEQ ID NO: 1467719 - RNA, 19 nt, Artificial Sequence
  Description of Artificial Sequence: Synthetic oligonucleotide
ccuucuuuuacuguacccc

SEQ ID NO: 1467720 - RNA, 19 nt, Artificial Sequence
  Description of Artificial Sequence: Synthetic oligonucleotide
acuguaccccaaccgcagg

SEQ ID NO: 1467721 - RNA, 19 nt, Artificial Sequence
  Description of Artificial Sequence: Synthetic oligonucleotide
cuguaccccaaccgcaggg

SEQ ID NO: 1467722 - RNA, 19 nt, Artificial Sequence
  Description of Artificial Sequence: Synthetic oligonucleotide
guaacagcgcacgggauac

SEQ ID NO: 1467723 - RNA, 19 nt, Artificial Sequence
  Description of Artificial Sequence: Synthetic oligonucleotide
cgugcaagaacacaaguug

SEQ ID NO: 1467724 - RNA, 19 nt, Artificial Sequence
  Description of Artificial Sequence: Synthetic oligonucleotide
auauaagaagguagucucu

SEQ ID NO: 1467725 - RNA, 19 nt, Artificial Sequence
  Description of Artificial Sequence: Synthetic oligonucleotide
agggcugaacuuggcacgc

SEQ ID NO: 1467726 - RNA, 19 nt, Artificial Sequence
  Description of Artificial Sequence: Synthetic oligonucleotide
uuacacuagagggucuagu

SEQ ID NO: 1467727 - RNA, 19 nt, Artificial Sequence
  Description of Artificial Sequence: Synthetic oligonucleotide
caguagguauucacuguac

SEQ ID NO: 1467728 - RNA, 19 nt, Artificial Sequence
  Description of Artificial Sequence: Synthetic oligonucleotide
agagggucuaguccacgug

SEQ ID NO: 1467729 - RNA, 19 nt, Artificial Sequence
  Description of Artificial Sequence: Synthetic oligonucleotide
ucgauggacguggaguaca

SEQ ID NO: 1467730 - RNA, 19 nt, Artificial Sequence
  Description of Artificial Sequence: Synthetic oligonucleotide
accacaugucgauggacgu

SEQ ID NO: 1467731 - RNA, 19 nt, Artificial Sequence
  Description of Artificial Sequence: Synthetic oligonucleotide
gucuaguccacgugcaaga

SEQ ID NO: 1467732 - RNA, 19 nt, Artificial Sequence
  Description of Artificial Sequence: Synthetic oligonucleotide
cuggaccugugccucagcc

SEQ ID NO: 1467733 - RNA, 19 nt, Artificial Sequence
  Description of Artificial Sequence: Synthetic oligonucleotide
uaaaguccauggagggagu

SEQ ID NO: 1467734 - RNA, 19 nt, Artificial Sequence
  Description of Artificial Sequence: Synthetic oligonucleotide
uccugaucacagaacucaa

SEQ ID NO: 1467735 - RNA, 19 nt, Artificial Sequence
  Description of Artificial Sequence: Synthetic oligonucleotide
guaccccuggaccugugcc

SEQ ID NO: 1467736 - RNA, 19 nt, Artificial Sequence
  Description of Artificial Sequence: Synthetic oligonucleotide
gucaugcuaugggagaggc

SEQ ID NO: 1467737 - RNA, 19 nt, Artificial Sequence
  Description of Artificial Sequence: Synthetic oligonucleotide
caggucccuaugcagcacg

SEQ ID NO: 1467738 - RNA, 19 nt, Artificial Sequence
  Description of Artificial Sequence: Synthetic oligonucleotide
acauccggugggcgguacc

SEQ ID NO: 1467739 - RNA, 19 nt, Artificial Sequence
  Description of Artificial Sequence: Synthetic oligonucleotide
caugcuaugggagaggccu

SEQ ID NO: 1467740 - RNA, 19 nt, Artificial Sequence
  Description of Artificial Sequence: Synthetic oligonucleotide
ggaggcuuaaauaggccag

SEQ ID NO: 1467741 - RNA, 19 nt, Artificial Sequence
  Description of Artificial Sequence: Synthetic oligonucleotide
gaugucguagcuggguaca

SEQ ID NO: 1467742 - RNA, 19 nt, Artificial Sequence
  Description of Artificial Sequence: Synthetic oligonucleotide
ugaacuuggcacgcccuca

SEQ ID NO: 1467743 - RNA, 19 nt, Artificial Sequence
  Description of Artificial Sequence: Synthetic oligonucleotide
cuaguccacgugcaagaac

SEQ ID NO: 1467744 - RNA, 19 nt, Artificial Sequence
  Description of Artificial Sequence: Synthetic oligonucleotide
caagaggguaccccuggac

SEQ ID NO: 1467745 - RNA, 19 nt, Artificial Sequence
  Description of Artificial Sequence: Synthetic oligonucleotide
caguggauagccaggacaa

SEQ ID NO: 1467746 - RNA, 19 nt, Artificial Sequence
  Description of Artificial Sequence: Synthetic oligonucleotide
acguggaguacagcuuggc

SEQ ID NO: 1467747 - RNA, 19 nt, Artificial Sequence
  Description of Artificial Sequence: Synthetic oligonucleotide
uaacucuacccuggcuggg

SEQ ID NO: 1467748 - RNA, 19 nt, Artificial Sequence
  Description of Artificial Sequence: Synthetic oligonucleotide
gugacagaaucccaggccu

SEQ ID NO: 1467749 - RNA, 19 nt, Artificial Sequence
  Description of Artificial Sequence: Synthetic oligonucleotide
cuaaccagcucagcauaag

SEQ ID NO: 1467750 - RNA, 19 nt, Artificial Sequence
  Description of Artificial Sequence: Synthetic oligonucleotide
uccaugcccagaacucaga

SEQ ID NO: 1467751 - RNA, 19 nt, Artificial Sequence
  Description of Artificial Sequence: Synthetic oligonucleotide
ugccaagaggguaccccug

SEQ ID NO: 1467752 - RNA, 19 nt, Artificial Sequence
  Description of Artificial Sequence: Synthetic oligonucleotide
acuagagggucuaguccac

SEQ ID NO: 1467753 - RNA, 19 nt, Artificial Sequence
  Description of Artificial Sequence: Synthetic oligonucleotide
cagccuacuugagacagug

SEQ ID NO: 1467754 - RNA, 19 nt, Artificial Sequence
  Description of Artificial Sequence: Synthetic oligonucleotide
uggacguggaguacagcuu

SEQ ID NO: 1467755 - RNA, 19 nt, Artificial Sequence
  Description of Artificial Sequence: Synthetic oligonucleotide
ggcuuaaauaggccaggcc

SEQ ID NO: 1467756 - RNA, 19 nt, Artificial Sequence
  Description of Artificial Sequence: Synthetic oligonucleotide
uggaaguggcagguuacac

SEQ ID NO: 1467757 - RNA, 19 nt, Artificial Sequence
  Description of Artificial Sequence: Synthetic oligonucleotide
gggaggcuuaaauaggcca

SEQ ID NO: 1467758 - RNA, 19 nt, Artificial Sequence
  Description of Artificial Sequence: Synthetic oligonucleotide
gucacuaugcagggcauca

SEQ ID NO: 1467759 - RNA, 19 nt, Artificial Sequence
  Description of Artificial Sequence: Synthetic oligonucleotide
ggugggcgguaccacagcg

SEQ ID NO: 1467760 - RNA, 19 nt, Artificial Sequence
  Description of Artificial Sequence: Synthetic oligonucleotide
gacguggaguacagcuugg

SEQ ID NO: 1467761 - RNA, 19 nt, Artificial Sequence
  Description of Artificial Sequence: Synthetic oligonucleotide
acgggguuacaccucagua

SEQ ID NO: 1467762 - RNA, 19 nt, Artificial Sequence
  Description of Artificial Sequence: Synthetic oligonucleotide
guagggcuuauagucgggc

SEQ ID NO: 1467763 - RNA, 19 nt, Artificial Sequence
  Description of Artificial Sequence: Synthetic oligonucleotide
agguggaaguggcagguua

SEQ ID NO: 1467764 - RNA, 19 nt, Artificial Sequence
  Description of Artificial Sequence: Synthetic oligonucleotide
cccauuccuguuuaugagc

SEQ ID NO: 1467765 - RNA, 19 nt, Artificial Sequence
  Description of Artificial Sequence: Synthetic oligonucleotide
agucggggucccuagcagu

SEQ ID NO: 1467766 - RNA, 19 nt, Artificial Sequence
  Description of Artificial Sequence: Synthetic oligonucleotide
aggaaugacuucacaauuu

SEQ ID NO: 1467767 - RNA, 19 nt, Artificial Sequence
  Description of Artificial Sequence: Synthetic oligonucleotide
acccuucagagccacccca

SEQ ID NO: 1467768 - RNA, 19 nt, Artificial Sequence
  Description of Artificial Sequence: Synthetic oligonucleotide
cugagaugcgcugcacggg

SEQ ID NO: 1467769 - RNA, 19 nt, Artificial Sequence
  Description of Artificial Sequence: Synthetic oligonucleotide
gacauaucucccggagggc

SEQ ID NO: 1467770 - RNA, 19 nt, Artificial Sequence
  Description of Artificial Sequence: Synthetic oligonucleotide
guugguagcuuggaauaca

SEQ ID NO: 1467771 - RNA, 19 nt, Artificial Sequence
  Description of Artificial Sequence: Synthetic oligonucleotide
guuacacuagagggucuag

SEQ ID NO: 1467772 - RNA, 19 nt, Artificial Sequence
  Description of Artificial Sequence: Synthetic oligonucleotide
acagaaucccaggccuuuc

SEQ ID NO: 1467773 - RNA, 19 nt, Artificial Sequence
  Description of Artificial Sequence: Synthetic oligonucleotide
acgggauaccaaaggcucg

SEQ ID NO: 1467774 - RNA, 19 nt, Artificial Sequence
  Description of Artificial Sequence: Synthetic oligonucleotide
ugagcuuggguacgacguu

SEQ ID NO: 1467775 - RNA, 19 nt, Artificial Sequence
  Description of Artificial Sequence: Synthetic oligonucleotide
guucuaaccagcucagcau

SEQ ID NO: 1467776 - RNA, 19 nt, Artificial Sequence
  Description of Artificial Sequence: Synthetic oligonucleotide
cugaacuuggcacgcccuc

SEQ ID NO: 1467777 - RNA, 19 nt, Artificial Sequence
  Description of Artificial Sequence: Synthetic oligonucleotide
ggaaaggagccaauuuaug

SEQ ID NO: 1467778 - RNA, 19 nt, Artificial Sequence
  Description of Artificial Sequence: Synthetic oligonucleotide
ggauaccaaaggcucgggc

SEQ ID NO: 1467779 - RNA, 19 nt, Artificial Sequence
  Description of Artificial Sequence: Synthetic oligonucleotide
acgcgggccagaguaacuc

SEQ ID NO: 1467780 - RNA, 19 nt, Artificial Sequence
  Description of Artificial Sequence: Synthetic oligonucleotide
accaccauaucagcagacu

SEQ ID NO: 1467781 - RNA, 19 nt, Artificial Sequence
  Description of Artificial Sequence: Synthetic oligonucleotide
ugacagaaucccaggccuu

SEQ ID NO: 1467782 - RNA, 19 nt, Artificial Sequence
  Description of Artificial Sequence: Synthetic oligonucleotide
ggucuaguccacgugcaag

SEQ ID NO: 1467783 - RNA, 19 nt, Artificial Sequence
  Description of Artificial Sequence: Synthetic oligonucleotide
gccaagaggguaccccugg

SEQ ID NO: 1467784 - RNA, 19 nt, Artificial Sequence
  Description of Artificial Sequence: Synthetic oligonucleotide
uaccccaaccgcagggguc

SEQ ID NO: 1467785 - RNA, 19 nt, Artificial Sequence
  Description of Artificial Sequence: Synthetic oligonucleotide
aaaccaacgucagcuucuu

SEQ ID NO: 1467786 - RNA, 19 nt, Artificial Sequence
  Description of Artificial Sequence: Synthetic oligonucleotide
uccggugggcgguaccaca

SEQ ID NO: 1467787 - RNA, 19 nt, Artificial Sequence
  Description of Artificial Sequence: Synthetic oligonucleotide
uauagucgggcagcuuggu

SEQ ID NO: 1467788 - RNA, 19 nt, Artificial Sequence
  Description of Artificial Sequence: Synthetic oligonucleotide
aggagccaauuuaugaaau

SEQ ID NO: 1467789 - RNA, 19 nt, Artificial Sequence
  Description of Artificial Sequence: Synthetic oligonucleotide
gccggcugaccacaugucg

SEQ ID NO: 1467790 - RNA, 19 nt, Artificial Sequence
  Description of Artificial Sequence: Synthetic oligonucleotide
agagaggccgccccgcauu

SEQ ID NO: 1467791 - RNA, 19 nt, Artificial Sequence
  Description of Artificial Sequence: Synthetic oligonucleotide
ccaccauaucagcagacug

SEQ ID NO: 1467792 - RNA, 19 nt, Artificial Sequence
  Description of Artificial Sequence: Synthetic oligonucleotide
cuaugcagggcaucaugaa

SEQ ID NO: 1467793 - RNA, 19 nt, Artificial Sequence
  Description of Artificial Sequence: Synthetic oligonucleotide
accuaccuccuaucaacau

SEQ ID NO: 1467794 - RNA, 19 nt, Artificial Sequence
  Description of Artificial Sequence: Synthetic oligonucleotide
acacgcuucagagccacaa

SEQ ID NO: 1467795 - RNA, 19 nt, Artificial Sequence
  Description of Artificial Sequence: Synthetic oligonucleotide
ggcauugagcuuggguacg

SEQ ID NO: 1467796 - RNA, 19 nt, Artificial Sequence
  Description of Artificial Sequence: Synthetic oligonucleotide
agagcccuaccuuucccuu

SEQ ID NO: 1467797 - RNA, 19 nt, Artificial Sequence
  Description of Artificial Sequence: Synthetic oligonucleotide
ggaugucguagcuggguac

SEQ ID NO: 1467798 - RNA, 19 nt, Artificial Sequence
  Description of Artificial Sequence: Synthetic oligonucleotide
ggguacauuggguagggcu

SEQ ID NO: 1467799 - RNA, 19 nt, Artificial Sequence
  Description of Artificial Sequence: Synthetic oligonucleotide
gaccuaccuccuaucaaca

SEQ ID NO: 1467800 - RNA, 19 nt, Artificial Sequence
  Description of Artificial Sequence: Synthetic oligonucleotide
augcgcugcacgggguuac

SEQ ID NO: 1467801 - RNA, 19 nt, Artificial Sequence
  Description of Artificial Sequence: Synthetic oligonucleotide
acgucagcuucuugucacu

SEQ ID NO: 1467802 - RNA, 19 nt, Artificial Sequence
  Description of Artificial Sequence: Synthetic oligonucleotide
gcgcacgggauaccaaagg

SEQ ID NO: 1467803 - RNA, 19 nt, Artificial Sequence
  Description of Artificial Sequence: Synthetic oligonucleotide
uggguacgacguucaccag

SEQ ID NO: 1467804 - RNA, 19 nt, Artificial Sequence
  Description of Artificial Sequence: Synthetic oligonucleotide
cgggguuacaccucaguag

SEQ ID NO: 1467805 - RNA, 19 nt, Artificial Sequence
  Description of Artificial Sequence: Synthetic oligonucleotide
gagcccuaccuuucccuuc

SEQ ID NO: 1467806 - RNA, 19 nt, Artificial Sequence
  Description of Artificial Sequence: Synthetic oligonucleotide
ccccauuccuguuuaugag

SEQ ID NO: 1467807 - RNA, 19 nt, Artificial Sequence
  Description of Artificial Sequence: Synthetic oligonucleotide
caccucaguagguucugca

SEQ ID NO: 1467808 - RNA, 19 nt, Artificial Sequence
  Description of Artificial Sequence: Synthetic oligonucleotide
cuacuugagacagugggau

SEQ ID NO: 1467809 - RNA, 19 nt, Artificial Sequence
  Description of Artificial Sequence: Synthetic oligonucleotide
cucagucggggucccuagc

SEQ ID NO: 1467810 - RNA, 19 nt, Artificial Sequence
  Description of Artificial Sequence: Synthetic oligonucleotide
caacgucagcuucuuguca

SEQ ID NO: 1467811 - RNA, 19 nt, Artificial Sequence
  Description of Artificial Sequence: Synthetic oligonucleotide
aggacauccggugggcggu

SEQ ID NO: 1467812 - RNA, 19 nt, Artificial Sequence
  Description of Artificial Sequence: Synthetic oligonucleotide
agcgcacgggauaccaaag

SEQ ID NO: 1467813 - RNA, 19 nt, Artificial Sequence
  Description of Artificial Sequence: Synthetic oligonucleotide
ggaaguggcagguuacacu

SEQ ID NO: 1467814 - RNA, 19 nt, Artificial Sequence
  Description of Artificial Sequence: Synthetic oligonucleotide
guuguuguccugccuccaa

SEQ ID NO: 1467815 - RNA, 19 nt, Artificial Sequence
  Description of Artificial Sequence: Synthetic oligonucleotide
ccaacgucagcuucuuguc

SEQ ID NO: 1467816 - RNA, 19 nt, Artificial Sequence
  Description of Artificial Sequence: Synthetic oligonucleotide
gccagaguaacucuacccu

SEQ ID NO: 1467817 - RNA, 19 nt, Artificial Sequence
  Description of Artificial Sequence: Synthetic oligonucleotide
uugagacagugggauggaa

SEQ ID NO: 1467818 - RNA, 19 nt, Artificial Sequence
  Description of Artificial Sequence: Synthetic oligonucleotide
cagaaucccaggccuuuca

SEQ ID NO: 1467819 - RNA, 19 nt, Artificial Sequence
  Description of Artificial Sequence: Synthetic oligonucleotide
aguuguuguccugccucca

SEQ ID NO: 1467820 - RNA, 19 nt, Artificial Sequence
  Description of Artificial Sequence: Synthetic oligonucleotide
aacgcgggccagaguaacu

SEQ ID NO: 1467821 - RNA, 19 nt, Artificial Sequence
  Description of Artificial Sequence: Synthetic oligonucleotide
ugggcauggucaguaggua

SEQ ID NO: 1467822 - RNA, 19 nt, Artificial Sequence
  Description of Artificial Sequence: Synthetic oligonucleotide
uuccugccaagaggguacc

SEQ ID NO: 1467823 - RNA, 19 nt, Artificial Sequence
  Description of Artificial Sequence: Synthetic oligonucleotide
ccacgugcaagaacacaag

SEQ ID NO: 1467824 - RNA, 19 nt, Artificial Sequence
  Description of Artificial Sequence: Synthetic oligonucleotide
gguagggcuuauagucggg

SEQ ID NO: 1467825 - RNA, 19 nt, Artificial Sequence
  Description of Artificial Sequence: Synthetic oligonucleotide
uccuguuuaugagcagguu

SEQ ID NO: 1467826 - RNA, 19 nt, Artificial Sequence
  Description of Artificial Sequence: Synthetic oligonucleotide
cauugagcuuggguacgac

SEQ ID NO: 1467827 - RNA, 19 nt, Artificial Sequence
  Description of Artificial Sequence: Synthetic oligonucleotide
agcuccccauuccuguuua

SEQ ID NO: 1467828 - RNA, 19 nt, Artificial Sequence
  Description of Artificial Sequence: Synthetic oligonucleotide
caccauugcagcugucaaa

SEQ ID NO: 1467829 - RNA, 19 nt, Artificial Sequence
  Description of Artificial Sequence: Synthetic oligonucleotide
agggucuaguccacgugca

SEQ ID NO: 1467830 - RNA, 19 nt, Artificial Sequence
  Description of Artificial Sequence: Synthetic oligonucleotide
agcuuggguacgacguuca

SEQ ID NO: 1467831 - RNA, 19 nt, Artificial Sequence
  Description of Artificial Sequence: Synthetic oligonucleotide
cagaccuaccuccuaucaa

SEQ ID NO: 1467832 - RNA, 19 nt, Artificial Sequence
  Description of Artificial Sequence: Synthetic oligonucleotide
cccuaugcagcacguugcg

SEQ ID NO: 1467833 - RNA, 19 nt, Artificial Sequence
  Description of Artificial Sequence: Synthetic oligonucleotide
ccuacuugagacaguggga

SEQ ID NO: 1467834 - RNA, 19 nt, Artificial Sequence
  Description of Artificial Sequence: Synthetic oligonucleotide
cgcacgggauaccaaaggc

SEQ ID NO: 1467835 - RNA, 19 nt, Artificial Sequence
  Description of Artificial Sequence: Synthetic oligonucleotide
uaacagcgcacgggauacc

SEQ ID NO: 1467836 - RNA, 19 nt, Artificial Sequence
  Description of Artificial Sequence: Synthetic oligonucleotide
uggucauggcgggccacug

SEQ ID NO: 1467837 - RNA, 19 nt, Artificial Sequence
  Description of Artificial Sequence: Synthetic oligonucleotide
agcuuggaauacaggccug

SEQ ID NO: 1467838 - RNA, 19 nt, Artificial Sequence
  Description of Artificial Sequence: Synthetic oligonucleotide
gguaccccuggaccugugc

SEQ ID NO: 1467839 - RNA, 19 nt, Artificial Sequence
  Description of Artificial Sequence: Synthetic oligonucleotide
ugcuaugggagaggccuuu

SEQ ID NO: 1467840 - RNA, 19 nt, Artificial Sequence
  Description of Artificial Sequence: Synthetic oligonucleotide
agccaggacaagguucuaa

SEQ ID NO: 1467841 - RNA, 19 nt, Artificial Sequence
  Description of Artificial Sequence: Synthetic oligonucleotide
agccccaguuuccuucuuu

SEQ ID NO: 1467842 - RNA, 19 nt, Artificial Sequence
  Description of Artificial Sequence: Synthetic oligonucleotide
cagcgcacgggauaccaaa

SEQ ID NO: 1467843 - RNA, 19 nt, Artificial Sequence
  Description of Artificial Sequence: Synthetic oligonucleotide
uaccuccuaucaacauaua

SEQ ID NO: 1467844 - RNA, 19 nt, Artificial Sequence
  Description of Artificial Sequence: Synthetic oligonucleotide
cacgugcaagaacacaagu

SEQ ID NO: 1467845 - RNA, 19 nt, Artificial Sequence
  Description of Artificial Sequence: Synthetic oligonucleotide
accgugggcauggucagua

SEQ ID NO: 1467846 - RNA, 19 nt, Artificial Sequence
  Description of Artificial Sequence: Synthetic oligonucleotide
ugccucaggcuuguuggua

SEQ ID NO: 1467847 - RNA, 19 nt, Artificial Sequence
  Description of Artificial Sequence: Synthetic oligonucleotide
uccugccaagaggguaccc

SEQ ID NO: 1467848 - RNA, 19 nt, Artificial Sequence
  Description of Artificial Sequence: Synthetic oligonucleotide
gaacuuggcacgcccucau

SEQ ID NO: 1467849 - RNA, 19 nt, Artificial Sequence
  Description of Artificial Sequence: Synthetic oligonucleotide
agccggcugaccacauguc

SEQ ID NO: 1467850 - RNA, 19 nt, Artificial Sequence
  Description of Artificial Sequence: Synthetic oligonucleotide
ugcccagaacucagauguu

SEQ ID NO: 1467851 - RNA, 19 nt, Artificial Sequence
  Description of Artificial Sequence: Synthetic oligonucleotide
gucgauggacguggaguac

SEQ ID NO: 1467852 - RNA, 19 nt, Artificial Sequence
  Description of Artificial Sequence: Synthetic oligonucleotide
gcugcacgggguuacaccu

SEQ ID NO: 1467853 - RNA, 19 nt, Artificial Sequence
  Description of Artificial Sequence: Synthetic oligonucleotide
cugcacgggguuacaccuc

SEQ ID NO: 1467854 - RNA, 19 nt, Artificial Sequence
  Description of Artificial Sequence: Synthetic oligonucleotide
guacauuggguagggcuua

SEQ ID NO: 1467855 - RNA, 19 nt, Artificial Sequence
  Description of Artificial Sequence: Synthetic oligonucleotide
cccgcauuagccagcucug

SEQ ID NO: 1467856 - RNA, 19 nt, Artificial Sequence
  Description of Artificial Sequence: Synthetic oligonucleotide
cugugagggaggcuuaaau

SEQ ID NO: 1467857 - RNA, 19 nt, Artificial Sequence
  Description of Artificial Sequence: Synthetic oligonucleotide
ccuccaaaagucaugcuau

SEQ ID NO: 1467858 - RNA, 19 nt, Artificial Sequence
  Description of Artificial Sequence: Synthetic oligonucleotide
cccggagggcugaacuugg

SEQ ID NO: 1467859 - RNA, 19 nt, Artificial Sequence
  Description of Artificial Sequence: Synthetic oligonucleotide
cuuggcacgcccucaucgu

SEQ ID NO: 1467860 - RNA, 19 nt, Artificial Sequence
  Description of Artificial Sequence: Synthetic oligonucleotide
gccgccccgcauuagccag

SEQ ID NO: 1467861 - RNA, 19 nt, Artificial Sequence
  Description of Artificial Sequence: Synthetic oligonucleotide
cauggucaguagguauuca

SEQ ID NO: 1467862 - RNA, 19 nt, Artificial Sequence
  Description of Artificial Sequence: Synthetic oligonucleotide
ccuaugcagcacguugcgg

SEQ ID NO: 1467863 - RNA, 19 nt, Artificial Sequence
  Description of Artificial Sequence: Synthetic oligonucleotide
agguuacacuagagggucu

SEQ ID NO: 1467864 - RNA, 19 nt, Artificial Sequence
  Description of Artificial Sequence: Synthetic oligonucleotide
ggagaggccuuuccaaccu

SEQ ID NO: 1467865 - RNA, 19 nt, Artificial Sequence
  Description of Artificial Sequence: Synthetic oligonucleotide
cauccggugggcgguacca

SEQ ID NO: 1467866 - RNA, 19 nt, Artificial Sequence
  Description of Artificial Sequence: Synthetic oligonucleotide
gcauggucaguagguauuc

SEQ ID NO: 1467867 - RNA, 19 nt, Artificial Sequence
  Description of Artificial Sequence: Synthetic oligonucleotide
cagccggcugaccacaugu

SEQ ID NO: 1467868 - RNA, 19 nt, Artificial Sequence
  Description of Artificial Sequence: Synthetic oligonucleotide
gggaugucguagcugggua

SEQ ID NO: 1467869 - RNA, 19 nt, Artificial Sequence
  Description of Artificial Sequence: Synthetic oligonucleotide
gguuacacuagagggucua

SEQ ID NO: 1467870 - RNA, 19 nt, Artificial Sequence
  Description of Artificial Sequence: Synthetic oligonucleotide
gguccugaucacagaacuc

SEQ ID NO: 1467871 - RNA, 19 nt, Artificial Sequence
  Description of Artificial Sequence: Synthetic oligonucleotide
ccuaccuccuaucaacaua

SEQ ID NO: 1467872 - RNA, 19 nt, Artificial Sequence
  Description of Artificial Sequence: Synthetic oligonucleotide
ccagaccuaccuccuauca

SEQ ID NO: 1467873 - RNA, 19 nt, Artificial Sequence
  Description of Artificial Sequence: Synthetic oligonucleotide
gagaggccgccccgcauua

SEQ ID NO: 1467874 - RNA, 19 nt, Artificial Sequence
  Description of Artificial Sequence: Synthetic oligonucleotide
augucguagcuggguacau

SEQ ID NO: 1467875 - RNA, 19 nt, Artificial Sequence
  Description of Artificial Sequence: Synthetic oligonucleotide
ggagccaauuuaugaaauu

SEQ ID NO: 1467876 - RNA, 19 nt, Artificial Sequence
  Description of Artificial Sequence: Synthetic oligonucleotide
gacauccggugggcgguac

SEQ ID NO: 1467877 - RNA, 19 nt, Artificial Sequence
  Description of Artificial Sequence: Synthetic oligonucleotide
aggguaccccuggaccugu

SEQ ID NO: 1467878 - RNA, 19 nt, Artificial Sequence
  Description of Artificial Sequence: Synthetic oligonucleotide
aggucccuaugcagcacgu

SEQ ID NO: 1467879 - RNA, 19 nt, Artificial Sequence
  Description of Artificial Sequence: Synthetic oligonucleotide
ccggcugaccacaugucga

SEQ ID NO: 1467880 - RNA, 19 nt, Artificial Sequence
  Description of Artificial Sequence: Synthetic oligonucleotide
agaggccgccccgcauuag

SEQ ID NO: 1467881 - RNA, 19 nt, Artificial Sequence
  Description of Artificial Sequence: Synthetic oligonucleotide
ucucucccuguggcauuga

SEQ ID NO: 1467882 - RNA, 19 nt, Artificial Sequence
  Description of Artificial Sequence: Synthetic oligonucleotide
gcuuggguacgacguucac

SEQ ID NO: 1467883 - RNA, 19 nt, Artificial Sequence
  Description of Artificial Sequence: Synthetic oligonucleotide
acgcccucaucgucaucau

SEQ ID NO: 1467884 - RNA, 19 nt, Artificial Sequence
  Description of Artificial Sequence: Synthetic oligonucleotide
cagcuuggucauggcgggc

SEQ ID NO: 1467885 - RNA, 19 nt, Artificial Sequence
  Description of Artificial Sequence: Synthetic oligonucleotide
caccagaccuaccuccuau

SEQ ID NO: 1467886 - RNA, 19 nt, Artificial Sequence
  Description of Artificial Sequence: Synthetic oligonucleotide
cccaaagaggacauccggu

SEQ ID NO: 1467887 - RNA, 19 nt, Artificial Sequence
  Description of Artificial Sequence: Synthetic oligonucleotide
guacgacguucaccaggga

SEQ ID NO: 1467888 - RNA, 19 nt, Artificial Sequence
  Description of Artificial Sequence: Synthetic oligonucleotide
acauuggguagggcuuaua

SEQ ID NO: 1467889 - RNA, 19 nt, Artificial Sequence
  Description of Artificial Sequence: Synthetic oligonucleotide
gcacgggauaccaaaggcu

SEQ ID NO: 1467890 - RNA, 19 nt, Artificial Sequence
  Description of Artificial Sequence: Synthetic oligonucleotide
acagcgcacgggauaccaa

SEQ ID NO: 1467891 - RNA, 19 nt, Artificial Sequence
  Description of Artificial Sequence: Synthetic oligonucleotide
cacgggguuacaccucagu

SEQ ID NO: 1467892 - RNA, 19 nt, Artificial Sequence
  Description of Artificial Sequence: Synthetic oligonucleotide
gcauugagcuuggguacga

SEQ ID NO: 1467893 - RNA, 19 nt, Artificial Sequence
  Description of Artificial Sequence: Synthetic oligonucleotide
gggucuaguccacgugcaa

SEQ ID NO: 1467894 - RNA, 19 nt, Artificial Sequence
  Description of Artificial Sequence: Synthetic oligonucleotide
gacguucaccagggauguc

SEQ ID NO: 1467895 - RNA, 19 nt, Artificial Sequence
  Description of Artificial Sequence: Synthetic oligonucleotide
gggcauggucaguagguau

SEQ ID NO: 1467896 - RNA, 19 nt, Artificial Sequence
  Description of Artificial Sequence: Synthetic oligonucleotide
cacacgcuucagagccaca

SEQ ID NO: 1467897 - RNA, 19 nt, Artificial Sequence
  Description of Artificial Sequence: Synthetic oligonucleotide
gagaugcgcugcacggggu

SEQ ID NO: 1467898 - RNA, 19 nt, Artificial Sequence
  Description of Artificial Sequence: Synthetic oligonucleotide
ccgcauuagccagcucugc

SEQ ID NO: 1467899 - RNA, 19 nt, Artificial Sequence
  Description of Artificial Sequence: Synthetic oligonucleotide
ccgugggcauggucaguag

SEQ ID NO: 1467900 - RNA, 19 nt, Artificial Sequence
  Description of Artificial Sequence: Synthetic oligonucleotide
acguugcggcugugacaga

SEQ ID NO: 1467901 - RNA, 19 nt, Artificial Sequence
  Description of Artificial Sequence: Synthetic oligonucleotide
cagcacguugcggcuguga

SEQ ID NO: 1467902 - RNA, 19 nt, Artificial Sequence
  Description of Artificial Sequence: Synthetic oligonucleotide
ccggggaagagaggccgcc

SEQ ID NO: 1467903 - RNA, 19 nt, Artificial Sequence
  Description of Artificial Sequence: Synthetic oligonucleotide
ccaagaggguaccccugga

SEQ ID NO: 1467904 - RNA, 19 nt, Artificial Sequence
  Description of Artificial Sequence: Synthetic oligonucleotide
guugcggcugugacagaau

SEQ ID NO: 1467905 - RNA, 19 nt, Artificial Sequence
  Description of Artificial Sequence: Synthetic oligonucleotide
gugggcgguaccacagcgu

SEQ ID NO: 1467906 - RNA, 19 nt, Artificial Sequence
  Description of Artificial Sequence: Synthetic oligonucleotide
gggucccuagcagucgaaa

SEQ ID NO: 1467907 - RNA, 19 nt, Artificial Sequence
  Description of Artificial Sequence: Synthetic oligonucleotide
ggcgggccacuguuccuca

SEQ ID NO: 1467908 - RNA, 19 nt, Artificial Sequence
  Description of Artificial Sequence: Synthetic oligonucleotide
caggggucagagagccuau

SEQ ID NO: 1467909 - RNA, 19 nt, Artificial Sequence
  Description of Artificial Sequence: Synthetic oligonucleotide
ccgccccgcauuagccagc

SEQ ID NO: 1467910 - RNA, 19 nt, Artificial Sequence
  Description of Artificial Sequence: Synthetic oligonucleotide
ggguuacaccucaguaggu

SEQ ID NO: 1467911 - RNA, 19 nt, Artificial Sequence
  Description of Artificial Sequence: Synthetic oligonucleotide
cguugcggcugugacagaa

SEQ ID NO: 1467912 - RNA, 19 nt, Artificial Sequence
  Description of Artificial Sequence: Synthetic oligonucleotide
gcgggccagaguaacucua

SEQ ID NO: 1467913 - RNA, 19 nt, Artificial Sequence
  Description of Artificial Sequence: Synthetic oligonucleotide
cggugggcgguaccacagc

SEQ ID NO: 1467914 - RNA, 19 nt, Artificial Sequence
  Description of Artificial Sequence: Synthetic oligonucleotide
gggcgguaccacagcguga

SEQ ID NO: 1467915 - RNA, 19 nt, Artificial Sequence
  Description of Artificial Sequence: Synthetic oligonucleotide
gcgcugcacgggguuacac

SEQ ID NO: 1467916 - RNA, 19 nt, Artificial Sequence
  Description of Artificial Sequence: Synthetic oligonucleotide
cguucaccagggaugucgu

SEQ ID NO: 1467917 - RNA, 19 nt, Artificial Sequence
  Description of Artificial Sequence: Synthetic oligonucleotide
ggguaccccuggaccugug

SEQ ID NO: 1467918 - RNA, 19 nt, Artificial Sequence
  Description of Artificial Sequence: Synthetic oligonucleotide
cgacguucaccagggaugu

SEQ ID NO: 1467919 - RNA, 19 nt, Artificial Sequence
  Description of Artificial Sequence: Synthetic oligonucleotide
ggacauccggugggcggua

SEQ ID NO: 1467920 - RNA, 19 nt, Artificial Sequence
  Description of Artificial Sequence: Synthetic oligonucleotide
ggucccuaugcagcacguu

SEQ ID NO: 1467921 - RNA, 19 nt, Artificial Sequence
  Description of Artificial Sequence: Synthetic oligonucleotide
gcuccccauuccuguuuau

SEQ ID NO: 1467922 - RNA, 19 nt, Artificial Sequence
  Description of Artificial Sequence: Synthetic oligonucleotide
caccgugggcauggucagu

SEQ ID NO: 1467923 - RNA, 19 nt, Artificial Sequence
  Description of Artificial Sequence: Synthetic oligonucleotide
cccuuccugccaagagggu

SEQ ID NO: 1467924 - RNA, 19 nt, Artificial Sequence
  Description of Artificial Sequence: Synthetic oligonucleotide
gccccgcauuagccagcuc

SEQ ID NO: 1467925 - RNA, 19 nt, Artificial Sequence
  Description of Artificial Sequence: Synthetic oligonucleotide
cgccccgcauuagccagcu

SEQ ID NO: 1467926 - RNA, 19 nt, Artificial Sequence
  Description of Artificial Sequence: Synthetic oligonucleotide
aagaauaggcuacauaacc

SEQ ID NO: 1467927 - RNA, 19 nt, Artificial Sequence
  Description of Artificial Sequence: Synthetic oligonucleotide
aaaacugcagugcugaggc

SEQ ID NO: 1467928 - RNA, 19 nt, Artificial Sequence
  Description of Artificial Sequence: Synthetic oligonucleotide
cuuaauguaguaaugaacc

SEQ ID NO: 1467929 - RNA, 19 nt, Artificial Sequence
  Description of Artificial Sequence: Synthetic oligonucleotide
uguaacugcauuaaaacug

SEQ ID NO: 1467930 - RNA, 19 nt, Artificial Sequence
  Description of Artificial Sequence: Synthetic oligonucleotide
aaagcaacaugacucacac

SEQ ID NO: 1467931 - RNA, 19 nt, Artificial Sequence
  Description of Artificial Sequence: Synthetic oligonucleotide
aaauguguauugcaccucc

SEQ ID NO: 1467932 - RNA, 19 nt, Artificial Sequence
  Description of Artificial Sequence: Synthetic oligonucleotide
ugaugaguaauucaaauac

SEQ ID NO: 1467933 - RNA, 19 nt, Artificial Sequence
  Description of Artificial Sequence: Synthetic oligonucleotide
uauaguuacaccacuagug

SEQ ID NO: 1467934 - RNA, 19 nt, Artificial Sequence
  Description of Artificial Sequence: Synthetic oligonucleotide
agcuacaauagucauauac

SEQ ID NO: 1467935 - RNA, 19 nt, Artificial Sequence
  Description of Artificial Sequence: Synthetic oligonucleotide
auuaauccaggguuaaugc

SEQ ID NO: 1467936 - RNA, 19 nt, Artificial Sequence
  Description of Artificial Sequence: Synthetic oligonucleotide
ucucuuauuauucacagaa

SEQ ID NO: 1467937 - RNA, 19 nt, Artificial Sequence
  Description of Artificial Sequence: Synthetic oligonucleotide
ucuuauuauucacagaaga

SEQ ID NO: 1467938 - RNA, 19 nt, Artificial Sequence
  Description of Artificial Sequence: Synthetic oligonucleotide
aguucuuaaccuuuacucc

SEQ ID NO: 1467939 - RNA, 19 nt, Artificial Sequence
  Description of Artificial Sequence: Synthetic oligonucleotide
uuaagauucacaagaaacu

SEQ ID NO: 1467940 - RNA, 19 nt, Artificial Sequence
  Description of Artificial Sequence: Synthetic oligonucleotide
guaguaaugaaccuugucc

SEQ ID NO: 1467941 - RNA, 19 nt, Artificial Sequence
  Description of Artificial Sequence: Synthetic oligonucleotide
auauucaaacuguugaguc

SEQ ID NO: 1467942 - RNA, 19 nt, Artificial Sequence
  Description of Artificial Sequence: Synthetic oligonucleotide
uuaaacaccgcuauucgug

SEQ ID NO: 1467943 - RNA, 19 nt, Artificial Sequence
  Description of Artificial Sequence: Synthetic oligonucleotide
caaagcaauaccuaguuac

SEQ ID NO: 1467944 - RNA, 19 nt, Artificial Sequence
  Description of Artificial Sequence: Synthetic oligonucleotide
acugucacagcuaaaaggc

SEQ ID NO: 1467945 - RNA, 19 nt, Artificial Sequence
  Description of Artificial Sequence: Synthetic oligonucleotide
aagccaauaccauacuuuc

SEQ ID NO: 1467946 - RNA, 19 nt, Artificial Sequence
  Description of Artificial Sequence: Synthetic oligonucleotide
ugauccuaaucccugaugc

SEQ ID NO: 1467947 - RNA, 19 nt, Artificial Sequence
  Description of Artificial Sequence: Synthetic oligonucleotide
aaaaggcauguuaagauuc

SEQ ID NO: 1467948 - RNA, 19 nt, Artificial Sequence
  Description of Artificial Sequence: Synthetic oligonucleotide
uguauaguuacaccacuag

SEQ ID NO: 1467949 - RNA, 19 nt, Artificial Sequence
  Description of Artificial Sequence: Synthetic oligonucleotide
ugucccacaguuauuaaag

SEQ ID NO: 1467950 - RNA, 19 nt, Artificial Sequence
  Description of Artificial Sequence: Synthetic oligonucleotide
uuuucuucguaaaugaaau

SEQ ID NO: 1467951 - RNA, 19 nt, Artificial Sequence
  Description of Artificial Sequence: Synthetic oligonucleotide
agcaacaugacucacacaa

SEQ ID NO: 1467952 - RNA, 19 nt, Artificial Sequence
  Description of Artificial Sequence: Synthetic oligonucleotide
uauuauucacagaagaaua

SEQ ID NO: 1467953 - RNA, 19 nt, Artificial Sequence
  Description of Artificial Sequence: Synthetic oligonucleotide
aagauucacaagaaacugc

SEQ ID NO: 1467954 - RNA, 19 nt, Artificial Sequence
  Description of Artificial Sequence: Synthetic oligonucleotide
cauguuaagauucacaaga

SEQ ID NO: 1467955 - RNA, 19 nt, Artificial Sequence
  Description of Artificial Sequence: Synthetic oligonucleotide
auucaacugaaccucacuc

SEQ ID NO: 1467956 - RNA, 19 nt, Artificial Sequence
  Description of Artificial Sequence: Synthetic oligonucleotide
aauaccauacuuuccgggu

SEQ ID NO: 1467957 - RNA, 19 nt, Artificial Sequence
  Description of Artificial Sequence: Synthetic oligonucleotide
uccagaaaugauuuccagg

SEQ ID NO: 1467958 - RNA, 19 nt, Artificial Sequence
  Description of Artificial Sequence: Synthetic oligonucleotide
acaaaacucagguagaaaa

SEQ ID NO: 1467959 - RNA, 19 nt, Artificial Sequence
  Description of Artificial Sequence: Synthetic oligonucleotide
uacaucuuaaagcaacaug

SEQ ID NO: 1467960 - RNA, 19 nt, Artificial Sequence
  Description of Artificial Sequence: Synthetic oligonucleotide
uuauucacagaagaauagg

SEQ ID NO: 1467961 - RNA, 19 nt, Artificial Sequence
  Description of Artificial Sequence: Synthetic oligonucleotide
acugcauuaaaacugcagu

SEQ ID NO: 1467962 - RNA, 19 nt, Artificial Sequence
  Description of Artificial Sequence: Synthetic oligonucleotide
gagaccaucaucaagccug

SEQ ID NO: 1467963 - RNA, 19 nt, Artificial Sequence
  Description of Artificial Sequence: Synthetic oligonucleotide
acuguaagcacugccauac

SEQ ID NO: 1467964 - RNA, 19 nt, Artificial Sequence
  Description of Artificial Sequence: Synthetic oligonucleotide
uucuucguaaaugaaaucu

SEQ ID NO: 1467965 - RNA, 19 nt, Artificial Sequence
  Description of Artificial Sequence: Synthetic oligonucleotide
uaguaaugaaccuuguccu

SEQ ID NO: 1467966 - RNA, 19 nt, Artificial Sequence
  Description of Artificial Sequence: Synthetic oligonucleotide
guaaaugaaaucuaguaua

SEQ ID NO: 1467967 - RNA, 19 nt, Artificial Sequence
  Description of Artificial Sequence: Synthetic oligonucleotide
aacuguugagucuuaaaau

SEQ ID NO: 1467968 - RNA, 19 nt, Artificial Sequence
  Description of Artificial Sequence: Synthetic oligonucleotide
acaucuuaaagcaacauga

SEQ ID NO: 1467969 - RNA, 19 nt, Artificial Sequence
  Description of Artificial Sequence: Synthetic oligonucleotide
uuauuauucacagaagaau

SEQ ID NO: 1467970 - RNA, 19 nt, Artificial Sequence
  Description of Artificial Sequence: Synthetic oligonucleotide
uuuacuggacaaauccuug

SEQ ID NO: 1467971 - RNA, 19 nt, Artificial Sequence
  Description of Artificial Sequence: Synthetic oligonucleotide
uuaaugccaauaaucacaa

SEQ ID NO: 1467972 - RNA, 19 nt, Artificial Sequence
  Description of Artificial Sequence: Synthetic oligonucleotide
ucuggucuguaaaugacug

SEQ ID NO: 1467973 - RNA, 19 nt, Artificial Sequence
  Description of Artificial Sequence: Synthetic oligonucleotide
uugaccuagacucaaggaa

SEQ ID NO: 1467974 - RNA, 19 nt, Artificial Sequence
  Description of Artificial Sequence: Synthetic oligonucleotide
uuauuaaaggacgggaucu

SEQ ID NO: 1467975 - RNA, 19 nt, Artificial Sequence
  Description of Artificial Sequence: Synthetic oligonucleotide
uucguaaccgggaucauac

SEQ ID NO: 1467976 - RNA, 19 nt, Artificial Sequence
  Description of Artificial Sequence: Synthetic oligonucleotide
aauguccagauugaagguc

SEQ ID NO: 1467977 - RNA, 19 nt, Artificial Sequence
  Description of Artificial Sequence: Synthetic oligonucleotide
ugcauuaaaacugcagugc

SEQ ID NO: 1467978 - RNA, 19 nt, Artificial Sequence
  Description of Artificial Sequence: Synthetic oligonucleotide
uaaacaccgcuauucgugg

SEQ ID NO: 1467979 - RNA, 19 nt, Artificial Sequence
  Description of Artificial Sequence: Synthetic oligonucleotide
ucguaaaugaaaucuagua

SEQ ID NO: 1467980 - RNA, 19 nt, Artificial Sequence
  Description of Artificial Sequence: Synthetic oligonucleotide
auggguuuucacuguaagc

SEQ ID NO: 1467981 - RNA, 19 nt, Artificial Sequence
  Description of Artificial Sequence: Synthetic oligonucleotide
cauuaaacaccgcuauucg

SEQ ID NO: 1467982 - RNA, 19 nt, Artificial Sequence
  Description of Artificial Sequence: Synthetic oligonucleotide
auaguuacaccacuagugu

SEQ ID NO: 1467983 - RNA, 19 nt, Artificial Sequence
  Description of Artificial Sequence: Synthetic oligonucleotide
uguaagcacugccauacgc

SEQ ID NO: 1467984 - RNA, 19 nt, Artificial Sequence
  Description of Artificial Sequence: Synthetic oligonucleotide
uucagcuuaauguaguaau

SEQ ID NO: 1467985 - RNA, 19 nt, Artificial Sequence
  Description of Artificial Sequence: Synthetic oligonucleotide
aggguuaaugccaauaauc

SEQ ID NO: 1467986 - RNA, 19 nt, Artificial Sequence
  Description of Artificial Sequence: Synthetic oligonucleotide
aaugaaccuuguccugggc

SEQ ID NO: 1467987 - RNA, 19 nt, Artificial Sequence
  Description of Artificial Sequence: Synthetic oligonucleotide
cuucguaaaugaaaucuag

SEQ ID NO: 1467988 - RNA, 19 nt, Artificial Sequence
  Description of Artificial Sequence: Synthetic oligonucleotide
caguuggucucuuaggucc

SEQ ID NO: 1467989 - RNA, 19 nt, Artificial Sequence
  Description of Artificial Sequence: Synthetic oligonucleotide
guuaaugccaauaaucaca

SEQ ID NO: 1467990 - RNA, 19 nt, Artificial Sequence
  Description of Artificial Sequence: Synthetic oligonucleotide
aauaccuaguuacaugcuu

SEQ ID NO: 1467991 - RNA, 19 nt, Artificial Sequence
  Description of Artificial Sequence: Synthetic oligonucleotide
caacaugacucacacaagc

SEQ ID NO: 1467992 - RNA, 19 nt, Artificial Sequence
  Description of Artificial Sequence: Synthetic oligonucleotide
uugagucuuaaaauuacau

SEQ ID NO: 1467993 - RNA, 19 nt, Artificial Sequence
  Description of Artificial Sequence: Synthetic oligonucleotide
uuaauguaguaaugaaccu

SEQ ID NO: 1467994 - RNA, 19 nt, Artificial Sequence
  Description of Artificial Sequence: Synthetic oligonucleotide
augugauucaacugaaccu

SEQ ID NO: 1467995 - RNA, 19 nt, Artificial Sequence
  Description of Artificial Sequence: Synthetic oligonucleotide
uacaccacuaguguaacug

SEQ ID NO: 1467996 - RNA, 19 nt, Artificial Sequence
  Description of Artificial Sequence: Synthetic oligonucleotide
uucacaagaaacugcuucu

SEQ ID NO: 1467997 - RNA, 19 nt, Artificial Sequence
  Description of Artificial Sequence: Synthetic oligonucleotide
cuguuagcccguuugaagc

SEQ ID NO: 1467998 - RNA, 19 nt, Artificial Sequence
  Description of Artificial Sequence: Synthetic oligonucleotide
uauucaaacuguugagucu

SEQ ID NO: 1467999 - RNA, 19 nt, Artificial Sequence
  Description of Artificial Sequence: Synthetic oligonucleotide
acggacauuucauacagca

SEQ ID NO: 1468000 - RNA, 19 nt, Artificial Sequence
  Description of Artificial Sequence: Synthetic oligonucleotide
ugugauucaacugaaccuc

SEQ ID NO: 1468001 - RNA, 19 nt, Artificial Sequence
  Description of Artificial Sequence: Synthetic oligonucleotide
cugacauggguuuucacug

SEQ ID NO: 1468002 - RNA, 19 nt, Artificial Sequence
  Description of Artificial Sequence: Synthetic oligonucleotide
cacaguuauuaaaggacgg

SEQ ID NO: 1468003 - RNA, 19 nt, Artificial Sequence
  Description of Artificial Sequence: Synthetic oligonucleotide
uucguaaaugaaaucuagu

SEQ ID NO: 1468004 - RNA, 19 nt, Artificial Sequence
  Description of Artificial Sequence: Synthetic oligonucleotide
caugacucacacaagcuug

SEQ ID NO: 1468005 - RNA, 19 nt, Artificial Sequence
  Description of Artificial Sequence: Synthetic oligonucleotide
auuauucacagaagaauag

SEQ ID NO: 1468006 - RNA, 19 nt, Artificial Sequence
  Description of Artificial Sequence: Synthetic oligonucleotide
aaaauaagacccacuguca

SEQ ID NO: 1468007 - RNA, 19 nt, Artificial Sequence
  Description of Artificial Sequence: Synthetic oligonucleotide
aauccuugcugccuggcgu

SEQ ID NO: 1468008 - RNA, 19 nt, Artificial Sequence
  Description of Artificial Sequence: Synthetic oligonucleotide
aaagcuggaaugaugagua

SEQ ID NO: 1468009 - RNA, 19 nt, Artificial Sequence
  Description of Artificial Sequence: Synthetic oligonucleotide
ugaccuagacucaaggaaa

SEQ ID NO: 1468010 - RNA, 19 nt, Artificial Sequence
  Description of Artificial Sequence: Synthetic oligonucleotide
aaacaccgcuauucguggc

SEQ ID NO: 1468011 - RNA, 19 nt, Artificial Sequence
  Description of Artificial Sequence: Synthetic oligonucleotide
uguuaagauucacaagaaa

SEQ ID NO: 1468012 - RNA, 19 nt, Artificial Sequence
  Description of Artificial Sequence: Synthetic oligonucleotide
uuuggaacgccaccaggag

SEQ ID NO: 1468013 - RNA, 19 nt, Artificial Sequence
  Description of Artificial Sequence: Synthetic oligonucleotide
ucuuagguccuucagcuua

SEQ ID NO: 1468014 - RNA, 19 nt, Artificial Sequence
  Description of Artificial Sequence: Synthetic oligonucleotide
caauaccauacuuuccggg

SEQ ID NO: 1468015 - RNA, 19 nt, Artificial Sequence
  Description of Artificial Sequence: Synthetic oligonucleotide
auacuuuccggguaaggug

SEQ ID NO: 1468016 - RNA, 19 nt, Artificial Sequence
  Description of Artificial Sequence: Synthetic oligonucleotide
ugucagcugccauuaaucc

SEQ ID NO: 1468017 - RNA, 19 nt, Artificial Sequence
  Description of Artificial Sequence: Synthetic oligonucleotide
uacuuuccggguaaggugu

SEQ ID NO: 1468018 - RNA, 19 nt, Artificial Sequence
  Description of Artificial Sequence: Synthetic oligonucleotide
guuauuaaaggacgggauc

SEQ ID NO: 1468019 - RNA, 19 nt, Artificial Sequence
  Description of Artificial Sequence: Synthetic oligonucleotide
gcaauaccuaguuacaugc

SEQ ID NO: 1468020 - RNA, 19 nt, Artificial Sequence
  Description of Artificial Sequence: Synthetic oligonucleotide
caacuacacagguucaugc

SEQ ID NO: 1468021 - RNA, 19 nt, Artificial Sequence
  Description of Artificial Sequence: Synthetic oligonucleotide
guaaugaaccuuguccugg

SEQ ID NO: 1468022 - RNA, 19 nt, Artificial Sequence
  Description of Artificial Sequence: Synthetic oligonucleotide
ucuugugcgagcuguaggu

SEQ ID NO: 1468023 - RNA, 19 nt, Artificial Sequence
  Description of Artificial Sequence: Synthetic oligonucleotide
aaaccucacggacauuuca

SEQ ID NO: 1468024 - RNA, 19 nt, Artificial Sequence
  Description of Artificial Sequence: Synthetic oligonucleotide
cauuaauccaggguuaaug

SEQ ID NO: 1468025 - RNA, 19 nt, Artificial Sequence
  Description of Artificial Sequence: Synthetic oligonucleotide
uggucuguaaaugacugug

SEQ ID NO: 1468026 - RNA, 19 nt, Artificial Sequence
  Description of Artificial Sequence: Synthetic oligonucleotide
uuuccauuaaacaccgcua

SEQ ID NO: 1468027 - RNA, 19 nt, Artificial Sequence
  Description of Artificial Sequence: Synthetic oligonucleotide
uacaauagucauauaccaa

SEQ ID NO: 1468028 - RNA, 19 nt, Artificial Sequence
  Description of Artificial Sequence: Synthetic oligonucleotide
acucaguccugacaugaac

SEQ ID NO: 1468029 - RNA, 19 nt, Artificial Sequence
  Description of Artificial Sequence: Synthetic oligonucleotide
acaguuauuaaaggacggg

SEQ ID NO: 1468030 - RNA, 19 nt, Artificial Sequence
  Description of Artificial Sequence: Synthetic oligonucleotide
uuacugaaaauuucauaaa

SEQ ID NO: 1468031 - RNA, 19 nt, Artificial Sequence
  Description of Artificial Sequence: Synthetic oligonucleotide
aacugcauuaaaacugcag

SEQ ID NO: 1468032 - RNA, 19 nt, Artificial Sequence
  Description of Artificial Sequence: Synthetic oligonucleotide
guaacugcauuaaaacugc

SEQ ID NO: 1468033 - RNA, 19 nt, Artificial Sequence
  Description of Artificial Sequence: Synthetic oligonucleotide
uccacugcccauuuggaac

SEQ ID NO: 1468034 - RNA, 19 nt, Artificial Sequence
  Description of Artificial Sequence: Synthetic oligonucleotide
uccuaaucccugaugcaag

SEQ ID NO: 1468035 - RNA, 19 nt, Artificial Sequence
  Description of Artificial Sequence: Synthetic oligonucleotide
ucuucguaaaugaaaucua

SEQ ID NO: 1468036 - RNA, 19 nt, Artificial Sequence
  Description of Artificial Sequence: Synthetic oligonucleotide
uuacuggacaaauccuugc

SEQ ID NO: 1468037 - RNA, 19 nt, Artificial Sequence
  Description of Artificial Sequence: Synthetic oligonucleotide
uuaaaggacgggaucuggu

SEQ ID NO: 1468038 - RNA, 19 nt, Artificial Sequence
  Description of Artificial Sequence: Synthetic oligonucleotide
cuuaaagcaacaugacuca

SEQ ID NO: 1468039 - RNA, 19 nt, Artificial Sequence
  Description of Artificial Sequence: Synthetic oligonucleotide
auuaaacaccgcuauucgu

SEQ ID NO: 1468040 - RNA, 19 nt, Artificial Sequence
  Description of Artificial Sequence: Synthetic oligonucleotide
guucuuaaccuuuacucca

SEQ ID NO: 1468041 - RNA, 19 nt, Artificial Sequence
  Description of Artificial Sequence: Synthetic oligonucleotide
aguaaugaaccuuguccug

SEQ ID NO: 1468042 - RNA, 19 nt, Artificial Sequence
  Description of Artificial Sequence: Synthetic oligonucleotide
agcuaaaaggcauguuaag

SEQ ID NO: 1468043 - RNA, 19 nt, Artificial Sequence
  Description of Artificial Sequence: Synthetic oligonucleotide
cuguguuccgcucaaugcc

SEQ ID NO: 1468044 - RNA, 19 nt, Artificial Sequence
  Description of Artificial Sequence: Synthetic oligonucleotide
gacaaauccuugcugccug

SEQ ID NO: 1468045 - RNA, 19 nt, Artificial Sequence
  Description of Artificial Sequence: Synthetic oligonucleotide
ccaauaaucacaaugucca

SEQ ID NO: 1468046 - RNA, 19 nt, Artificial Sequence
  Description of Artificial Sequence: Synthetic oligonucleotide
accgggaucauacuuuucu

SEQ ID NO: 1468047 - RNA, 19 nt, Artificial Sequence
  Description of Artificial Sequence: Synthetic oligonucleotide
aaagcaaguuuucuucgua

SEQ ID NO: 1468048 - RNA, 19 nt, Artificial Sequence
  Description of Artificial Sequence: Synthetic oligonucleotide
aaagcaauaccuaguuaca

SEQ ID NO: 1468049 - RNA, 19 nt, Artificial Sequence
  Description of Artificial Sequence: Synthetic oligonucleotide
guuggugaagccaauacca

SEQ ID NO: 1468050 - RNA, 19 nt, Artificial Sequence
  Description of Artificial Sequence: Synthetic oligonucleotide
aagcaaguuuucuucguaa

SEQ ID NO: 1468051 - RNA, 19 nt, Artificial Sequence
  Description of Artificial Sequence: Synthetic oligonucleotide
aguuucugugucugggauc

SEQ ID NO: 1468052 - RNA, 19 nt, Artificial Sequence
  Description of Artificial Sequence: Synthetic oligonucleotide
caucuuaaagcaacaugac

SEQ ID NO: 1468053 - RNA, 19 nt, Artificial Sequence
  Description of Artificial Sequence: Synthetic oligonucleotide
agauucacaagaaacugcu

SEQ ID NO: 1468054 - RNA, 19 nt, Artificial Sequence
  Description of Artificial Sequence: Synthetic oligonucleotide
uccugacaugaacagacac

SEQ ID NO: 1468055 - RNA, 19 nt, Artificial Sequence
  Description of Artificial Sequence: Synthetic oligonucleotide
uuugcauccucuugugcga

SEQ ID NO: 1468056 - RNA, 19 nt, Artificial Sequence
  Description of Artificial Sequence: Synthetic oligonucleotide
aauaggcuacauaaccucu

SEQ ID NO: 1468057 - RNA, 19 nt, Artificial Sequence
  Description of Artificial Sequence: Synthetic oligonucleotide
uugauccuaaucccugaug

SEQ ID NO: 1468058 - RNA, 19 nt, Artificial Sequence
  Description of Artificial Sequence: Synthetic oligonucleotide
uacauaaccucuguggaau

SEQ ID NO: 1468059 - RNA, 19 nt, Artificial Sequence
  Description of Artificial Sequence: Synthetic oligonucleotide
uuacaugcuuuacacgguc

SEQ ID NO: 1468060 - RNA, 19 nt, Artificial Sequence
  Description of Artificial Sequence: Synthetic oligonucleotide
gaaaacaccuacuuuuccu

SEQ ID NO: 1468061 - RNA, 19 nt, Artificial Sequence
  Description of Artificial Sequence: Synthetic oligonucleotide
aacaccgcuauucguggcu

SEQ ID NO: 1468062 - RNA, 19 nt, Artificial Sequence
  Description of Artificial Sequence: Synthetic oligonucleotide
uccugugucccacaguuau

SEQ ID NO: 1468063 - RNA, 19 nt, Artificial Sequence
  Description of Artificial Sequence: Synthetic oligonucleotide
gcauuuuccauuaaacacc

SEQ ID NO: 1468064 - RNA, 19 nt, Artificial Sequence
  Description of Artificial Sequence: Synthetic oligonucleotide
ucacacaagcuugaccuag

SEQ ID NO: 1468065 - RNA, 19 nt, Artificial Sequence
  Description of Artificial Sequence: Synthetic oligonucleotide
ggcaugacguagcagagag

SEQ ID NO: 1468066 - RNA, 19 nt, Artificial Sequence
  Description of Artificial Sequence: Synthetic oligonucleotide
ugacucuaccacacaacug

SEQ ID NO: 1468067 - RNA, 19 nt, Artificial Sequence
  Description of Artificial Sequence: Synthetic oligonucleotide
guaggucaaauguguauug

SEQ ID NO: 1468068 - RNA, 19 nt, Artificial Sequence
  Description of Artificial Sequence: Synthetic oligonucleotide
uacaugcuuuacacggucc

SEQ ID NO: 1468069 - RNA, 19 nt, Artificial Sequence
  Description of Artificial Sequence: Synthetic oligonucleotide
uguguuccgcucaaugccu

SEQ ID NO: 1468070 - RNA, 19 nt, Artificial Sequence
  Description of Artificial Sequence: Synthetic oligonucleotide
gaagaauaggcuacauaac

SEQ ID NO: 1468071 - RNA, 19 nt, Artificial Sequence
  Description of Artificial Sequence: Synthetic oligonucleotide
accaucaucaagccuggcu

SEQ ID NO: 1468072 - RNA, 19 nt, Artificial Sequence
  Description of Artificial Sequence: Synthetic oligonucleotide
uuaaaacugcagugcugag

SEQ ID NO: 1468073 - RNA, 19 nt, Artificial Sequence
  Description of Artificial Sequence: Synthetic oligonucleotide
cauuuggaacgccaccagg

SEQ ID NO: 1468074 - RNA, 19 nt, Artificial Sequence
  Description of Artificial Sequence: Synthetic oligonucleotide
gacucacacaagcuugacc

SEQ ID NO: 1468075 - RNA, 19 nt, Artificial Sequence
  Description of Artificial Sequence: Synthetic oligonucleotide
aguugacucuaccacacaa

SEQ ID NO: 1468076 - RNA, 19 nt, Artificial Sequence
  Description of Artificial Sequence: Synthetic oligonucleotide
uuggaacgccaccaggagc

SEQ ID NO: 1468077 - RNA, 19 nt, Artificial Sequence
  Description of Artificial Sequence: Synthetic oligonucleotide
ucugcacuaggauccuucc

SEQ ID NO: 1468078 - RNA, 19 nt, Artificial Sequence
  Description of Artificial Sequence: Synthetic oligonucleotide
uauuaaaggacgggaucug

SEQ ID NO: 1468079 - RNA, 19 nt, Artificial Sequence
  Description of Artificial Sequence: Synthetic oligonucleotide
ucaugcaguugacucuacc

SEQ ID NO: 1468080 - RNA, 19 nt, Artificial Sequence
  Description of Artificial Sequence: Synthetic oligonucleotide
agguagaaaacaccuacuu

SEQ ID NO: 1468081 - RNA, 19 nt, Artificial Sequence
  Description of Artificial Sequence: Synthetic oligonucleotide
cuccauguauaguuacacc

SEQ ID NO: 1468082 - RNA, 19 nt, Artificial Sequence
  Description of Artificial Sequence: Synthetic oligonucleotide
ggcucuuggaaacugagca

SEQ ID NO: 1468083 - RNA, 19 nt, Artificial Sequence
  Description of Artificial Sequence: Synthetic oligonucleotide
ugccaauaaucacaauguc

SEQ ID NO: 1468084 - RNA, 19 nt, Artificial Sequence
  Description of Artificial Sequence: Synthetic oligonucleotide
ucacuguaagcacugccau

SEQ ID NO: 1468085 - RNA, 19 nt, Artificial Sequence
  Description of Artificial Sequence: Synthetic oligonucleotide
caugcaguugacucuacca

SEQ ID NO: 1468086 - RNA, 19 nt, Artificial Sequence
  Description of Artificial Sequence: Synthetic oligonucleotide
uucugcacuaggauccuuc

SEQ ID NO: 1468087 - RNA, 19 nt, Artificial Sequence
  Description of Artificial Sequence: Synthetic oligonucleotide
uaggcuacauaaccucugu

SEQ ID NO: 1468088 - RNA, 19 nt, Artificial Sequence
  Description of Artificial Sequence: Synthetic oligonucleotide
ggcauguuaagauucacaa

SEQ ID NO: 1468089 - RNA, 19 nt, Artificial Sequence
  Description of Artificial Sequence: Synthetic oligonucleotide
aaaggcauguuaagauuca

SEQ ID NO: 1468090 - RNA, 19 nt, Artificial Sequence
  Description of Artificial Sequence: Synthetic oligonucleotide
aaauucaguugauccuaau

SEQ ID NO: 1468091 - RNA, 19 nt, Artificial Sequence
  Description of Artificial Sequence: Synthetic oligonucleotide
acaugacucacacaagcuu

SEQ ID NO: 1468092 - RNA, 19 nt, Artificial Sequence
  Description of Artificial Sequence: Synthetic oligonucleotide
acuaguguaacugcauuaa

SEQ ID NO: 1468093 - RNA, 19 nt, Artificial Sequence
  Description of Artificial Sequence: Synthetic oligonucleotide
aaccagcaauauucaaacu

SEQ ID NO: 1468094 - RNA, 19 nt, Artificial Sequence
  Description of Artificial Sequence: Synthetic oligonucleotide
auuuggaacgccaccagga

SEQ ID NO: 1468095 - RNA, 19 nt, Artificial Sequence
  Description of Artificial Sequence: Synthetic oligonucleotide
cucuugugcgagcuguagg

SEQ ID NO: 1468096 - RNA, 19 nt, Artificial Sequence
  Description of Artificial Sequence: Synthetic oligonucleotide
gccaauaaucacaaugucc

SEQ ID NO: 1468097 - RNA, 19 nt, Artificial Sequence
  Description of Artificial Sequence: Synthetic oligonucleotide
aguuacaccacuaguguaa

SEQ ID NO: 1468098 - RNA, 19 nt, Artificial Sequence
  Description of Artificial Sequence: Synthetic oligonucleotide
caguugauccuaaucccug

SEQ ID NO: 1468099 - RNA, 19 nt, Artificial Sequence
  Description of Artificial Sequence: Synthetic oligonucleotide
uccugcacgucuguguucc

SEQ ID NO: 1468100 - RNA, 19 nt, Artificial Sequence
  Description of Artificial Sequence: Synthetic oligonucleotide
aagcacugccauacgcggc

SEQ ID NO: 1468101 - RNA, 19 nt, Artificial Sequence
  Description of Artificial Sequence: Synthetic oligonucleotide
ccguuugaagcaaagcugc

SEQ ID NO: 1468102 - RNA, 19 nt, Artificial Sequence
  Description of Artificial Sequence: Synthetic oligonucleotide
gcuugaccuagacucaagg

SEQ ID NO: 1468103 - RNA, 19 nt, Artificial Sequence
  Description of Artificial Sequence: Synthetic oligonucleotide
agccaauaccauacuuucc

SEQ ID NO: 1468104 - RNA, 19 nt, Artificial Sequence
  Description of Artificial Sequence: Synthetic oligonucleotide
uacgcggcuucguaaccgg

SEQ ID NO: 1468105 - RNA, 19 nt, Artificial Sequence
  Description of Artificial Sequence: Synthetic oligonucleotide
auucguggcugguauuucu

SEQ ID NO: 1468106 - RNA, 19 nt, Artificial Sequence
  Description of Artificial Sequence: Synthetic oligonucleotide
gauccuaaucccugaugca

SEQ ID NO: 1468107 - RNA, 19 nt, Artificial Sequence
  Description of Artificial Sequence: Synthetic oligonucleotide
uggaagauggcaugacgua

SEQ ID NO: 1468108 - RNA, 19 nt, Artificial Sequence
  Description of Artificial Sequence: Synthetic oligonucleotide
aaaauucaguugauccuaa

SEQ ID NO: 1468109 - RNA, 19 nt, Artificial Sequence
  Description of Artificial Sequence: Synthetic oligonucleotide
cuugaccuagacucaagga

SEQ ID NO: 1468110 - RNA, 19 nt, Artificial Sequence
  Description of Artificial Sequence: Synthetic oligonucleotide
aguacaucuuaaagcaaca

SEQ ID NO: 1468111 - RNA, 19 nt, Artificial Sequence
  Description of Artificial Sequence: Synthetic oligonucleotide
ucuuggaaacugagcacau

SEQ ID NO: 1468112 - RNA, 19 nt, Artificial Sequence
  Description of Artificial Sequence: Synthetic oligonucleotide
uccggguaaggugugguca

SEQ ID NO: 1468113 - RNA, 19 nt, Artificial Sequence
  Description of Artificial Sequence: Synthetic oligonucleotide
uaguuacaccacuagugua

SEQ ID NO: 1468114 - RNA, 19 nt, Artificial Sequence
  Description of Artificial Sequence: Synthetic oligonucleotide
agcccguuugaagcaaagc

SEQ ID NO: 1468115 - RNA, 19 nt, Artificial Sequence
  Description of Artificial Sequence: Synthetic oligonucleotide
uagguccuucagcuuaaug

SEQ ID NO: 1468116 - RNA, 19 nt, Artificial Sequence
  Description of Artificial Sequence: Synthetic oligonucleotide
accuaguuacaugcuuuac

SEQ ID NO: 1468117 - RNA, 19 nt, Artificial Sequence
  Description of Artificial Sequence: Synthetic oligonucleotide
auacgcggcuucguaaccg

SEQ ID NO: 1468118 - RNA, 19 nt, Artificial Sequence
  Description of Artificial Sequence: Synthetic oligonucleotide
ugugucauccacugcccau

SEQ ID NO: 1468119 - RNA, 19 nt, Artificial Sequence
  Description of Artificial Sequence: Synthetic oligonucleotide
ugcuuuacacggucccaug

SEQ ID NO: 1468120 - RNA, 19 nt, Artificial Sequence
  Description of Artificial Sequence: Synthetic oligonucleotide
uagcccguuugaagcaaag

SEQ ID NO: 1468121 - RNA, 19 nt, Artificial Sequence
  Description of Artificial Sequence: Synthetic oligonucleotide
ugcacgucuguguuccgcu

SEQ ID NO: 1468122 - RNA, 19 nt, Artificial Sequence
  Description of Artificial Sequence: Synthetic oligonucleotide
guauaguuacaccacuagu

SEQ ID NO: 1468123 - RNA, 19 nt, Artificial Sequence
  Description of Artificial Sequence: Synthetic oligonucleotide
caguuauuaaaggacggga

SEQ ID NO: 1468124 - RNA, 19 nt, Artificial Sequence
  Description of Artificial Sequence: Synthetic oligonucleotide
cucacggacauuucauaca

SEQ ID NO: 1468125 - RNA, 19 nt, Artificial Sequence
  Description of Artificial Sequence: Synthetic oligonucleotide
uaccuaguuacaugcuuua

SEQ ID NO: 1468126 - RNA, 19 nt, Artificial Sequence
  Description of Artificial Sequence: Synthetic oligonucleotide
acugccauacgcggcuucg

SEQ ID NO: 1468127 - RNA, 19 nt, Artificial Sequence
  Description of Artificial Sequence: Synthetic oligonucleotide
auaccauacuuuccgggua

SEQ ID NO: 1468128 - RNA, 19 nt, Artificial Sequence
  Description of Artificial Sequence: Synthetic oligonucleotide
guugacucuaccacacaac

SEQ ID NO: 1468129 - RNA, 19 nt, Artificial Sequence
  Description of Artificial Sequence: Synthetic oligonucleotide
ugcccauuuggaacgccac

SEQ ID NO: 1468130 - RNA, 19 nt, Artificial Sequence
  Description of Artificial Sequence: Synthetic oligonucleotide
guugagucuuaaaauuaca

SEQ ID NO: 1468131 - RNA, 19 nt, Artificial Sequence
  Description of Artificial Sequence: Synthetic oligonucleotide
gacacuuccagaaaugauu

SEQ ID NO: 1468132 - RNA, 19 nt, Artificial Sequence
  Description of Artificial Sequence: Synthetic oligonucleotide
gauucaacugaaccucacu

SEQ ID NO: 1468133 - RNA, 19 nt, Artificial Sequence
  Description of Artificial Sequence: Synthetic oligonucleotide
auccuaaucccugaugcaa

SEQ ID NO: 1468134 - RNA, 19 nt, Artificial Sequence
  Description of Artificial Sequence: Synthetic oligonucleotide
ccauuaaacaccgcuauuc

SEQ ID NO: 1468135 - RNA, 19 nt, Artificial Sequence
  Description of Artificial Sequence: Synthetic oligonucleotide
aagcaacaugacucacaca

SEQ ID NO: 1468136 - RNA, 19 nt, Artificial Sequence
  Description of Artificial Sequence: Synthetic oligonucleotide
gauucacucugacaugggu

SEQ ID NO: 1468137 - RNA, 19 nt, Artificial Sequence
  Description of Artificial Sequence: Synthetic oligonucleotide
cagaaaugauuuccagguc

SEQ ID NO: 1468138 - RNA, 19 nt, Artificial Sequence
  Description of Artificial Sequence: Synthetic oligonucleotide
ggcacuucagagcacccgc

SEQ ID NO: 1468139 - RNA, 19 nt, Artificial Sequence
  Description of Artificial Sequence: Synthetic oligonucleotide
cuucagagcacccgcaaaa

SEQ ID NO: 1468140 - RNA, 19 nt, Artificial Sequence
  Description of Artificial Sequence: Synthetic oligonucleotide
cuuaaccuuuacuccaaaa

SEQ ID NO: 1468141 - RNA, 19 nt, Artificial Sequence
  Description of Artificial Sequence: Synthetic oligonucleotide
uaaccgggaucauacuuuu

SEQ ID NO: 1468142 - RNA, 19 nt, Artificial Sequence
  Description of Artificial Sequence: Synthetic oligonucleotide
cccguuugaagcaaagcug

SEQ ID NO: 1468143 - RNA, 19 nt, Artificial Sequence
  Description of Artificial Sequence: Synthetic oligonucleotide
aaccucacggacauuucau

SEQ ID NO: 1468144 - RNA, 19 nt, Artificial Sequence
  Description of Artificial Sequence: Synthetic oligonucleotide
cauacgcggcuucguaacc

SEQ ID NO: 1468145 - RNA, 19 nt, Artificial Sequence
  Description of Artificial Sequence: Synthetic oligonucleotide
uccaggguuaaugccaaua

SEQ ID NO: 1468146 - RNA, 19 nt, Artificial Sequence
  Description of Artificial Sequence: Synthetic oligonucleotide
auuuuccauuaaacaccgc

SEQ ID NO: 1468147 - RNA, 19 nt, Artificial Sequence
  Description of Artificial Sequence: Synthetic oligonucleotide
ccagaaaugauuuccaggu

SEQ ID NO: 1468148 - RNA, 19 nt, Artificial Sequence
  Description of Artificial Sequence: Synthetic oligonucleotide
gaagccaauaccauacuuu

SEQ ID NO: 1468149 - RNA, 19 nt, Artificial Sequence
  Description of Artificial Sequence: Synthetic oligonucleotide
ccaauaccauacuuuccgg

SEQ ID NO: 1468150 - RNA, 19 nt, Artificial Sequence
  Description of Artificial Sequence: Synthetic oligonucleotide
acgggaucuggucuguaaa

SEQ ID NO: 1468151 - RNA, 19 nt, Artificial Sequence
  Description of Artificial Sequence: Synthetic oligonucleotide
ggcacuggaagauggcaug

SEQ ID NO: 1468152 - RNA, 19 nt, Artificial Sequence
  Description of Artificial Sequence: Synthetic oligonucleotide
uuagcccguuugaagcaaa

SEQ ID NO: 1468153 - RNA, 19 nt, Artificial Sequence
  Description of Artificial Sequence: Synthetic oligonucleotide
agcuggaaugaugaguaau

SEQ ID NO: 1468154 - RNA, 19 nt, Artificial Sequence
  Description of Artificial Sequence: Synthetic oligonucleotide
agaccaucaucaagccugg

SEQ ID NO: 1468155 - RNA, 19 nt, Artificial Sequence
  Description of Artificial Sequence: Synthetic oligonucleotide
cuguaagcacugccauacg

SEQ ID NO: 1468156 - RNA, 19 nt, Artificial Sequence
  Description of Artificial Sequence: Synthetic oligonucleotide
auaccuaguuacaugcuuu

SEQ ID NO: 1468157 - RNA, 19 nt, Artificial Sequence
  Description of Artificial Sequence: Synthetic oligonucleotide
uuuccggguaagguguggu

SEQ ID NO: 1468158 - RNA, 19 nt, Artificial Sequence
  Description of Artificial Sequence: Synthetic oligonucleotide
aggcacuucagagcacccg

SEQ ID NO: 1468159 - RNA, 19 nt, Artificial Sequence
  Description of Artificial Sequence: Synthetic oligonucleotide
aagcuggaaugaugaguaa

SEQ ID NO: 1468160 - RNA, 19 nt, Artificial Sequence
  Description of Artificial Sequence: Synthetic oligonucleotide
aagcuugaccuagacucaa

SEQ ID NO: 1468161 - RNA, 19 nt, Artificial Sequence
  Description of Artificial Sequence: Synthetic oligonucleotide
cauguauaguuacaccacu

SEQ ID NO: 1468162 - RNA, 19 nt, Artificial Sequence
  Description of Artificial Sequence: Synthetic oligonucleotide
acugcccauuuggaacgcc

SEQ ID NO: 1468163 - RNA, 19 nt, Artificial Sequence
  Description of Artificial Sequence: Synthetic oligonucleotide
auggcaugacguagcagag

SEQ ID NO: 1468164 - RNA, 19 nt, Artificial Sequence
  Description of Artificial Sequence: Synthetic oligonucleotide
aacgccaccaggagcugcu

SEQ ID NO: 1468165 - RNA, 19 nt, Artificial Sequence
  Description of Artificial Sequence: Synthetic oligonucleotide
uucaaacuguugagucuua

SEQ ID NO: 1468166 - RNA, 19 nt, Artificial Sequence
  Description of Artificial Sequence: Synthetic oligonucleotide
ggucucuuagguccuucag

SEQ ID NO: 1468167 - RNA, 19 nt, Artificial Sequence
  Description of Artificial Sequence: Synthetic oligonucleotide
gacccacugucacagcuaa

SEQ ID NO: 1468168 - RNA, 19 nt, Artificial Sequence
  Description of Artificial Sequence: Synthetic oligonucleotide
cacggacauuucauacagc

SEQ ID NO: 1468169 - RNA, 19 nt, Artificial Sequence
  Description of Artificial Sequence: Synthetic oligonucleotide
ccuaguuacaugcuuuaca

SEQ ID NO: 1468170 - RNA, 19 nt, Artificial Sequence
  Description of Artificial Sequence: Synthetic oligonucleotide
gugucccacaguuauuaaa

SEQ ID NO: 1468171 - RNA, 19 nt, Artificial Sequence
  Description of Artificial Sequence: Synthetic oligonucleotide
cuuguggggcugaagccca

SEQ ID NO: 1468172 - RNA, 19 nt, Artificial Sequence
  Description of Artificial Sequence: Synthetic oligonucleotide
cacuaguguaacugcauua

SEQ ID NO: 1468173 - RNA, 19 nt, Artificial Sequence
  Description of Artificial Sequence: Synthetic oligonucleotide
ccucacggacauuucauac

SEQ ID NO: 1468174 - RNA, 19 nt, Artificial Sequence
  Description of Artificial Sequence: Synthetic oligonucleotide
cauacuuuccggguaaggu

SEQ ID NO: 1468175 - RNA, 19 nt, Artificial Sequence
  Description of Artificial Sequence: Synthetic oligonucleotide
cacaacugcuccauguaua

SEQ ID NO: 1468176 - RNA, 19 nt, Artificial Sequence
  Description of Artificial Sequence: Synthetic oligonucleotide
caugacguagcagagaguu

SEQ ID NO: 1468177 - RNA, 19 nt, Artificial Sequence
  Description of Artificial Sequence: Synthetic oligonucleotide
cugccauuaauccaggguu

SEQ ID NO: 1468178 - RNA, 19 nt, Artificial Sequence
  Description of Artificial Sequence: Synthetic oligonucleotide
aaccgggaucauacuuuuc

SEQ ID NO: 1468179 - RNA, 19 nt, Artificial Sequence
  Description of Artificial Sequence: Synthetic oligonucleotide
uauucguggcugguauuuc

SEQ ID NO: 1468180 - RNA, 19 nt, Artificial Sequence
  Description of Artificial Sequence: Synthetic oligonucleotide
ucguaaccgggaucauacu

SEQ ID NO: 1468181 - RNA, 19 nt, Artificial Sequence
  Description of Artificial Sequence: Synthetic oligonucleotide
auguauaguuacaccacua

SEQ ID NO: 1468182 - RNA, 19 nt, Artificial Sequence
  Description of Artificial Sequence: Synthetic oligonucleotide
gcucaaugccuuucaguug

SEQ ID NO: 1468183 - RNA, 19 nt, Artificial Sequence
  Description of Artificial Sequence: Synthetic oligonucleotide
cguuccaccauguugguga

SEQ ID NO: 1468184 - RNA, 19 nt, Artificial Sequence
  Description of Artificial Sequence: Synthetic oligonucleotide
ggcuucguaaccgggauca

SEQ ID NO: 1468185 - RNA, 19 nt, Artificial Sequence
  Description of Artificial Sequence: Synthetic oligonucleotide
accucacggacauuucaua

SEQ ID NO: 1468186 - RNA, 19 nt, Artificial Sequence
  Description of Artificial Sequence: Synthetic oligonucleotide
cuuagguccuucagcuuaa

SEQ ID NO: 1468187 - RNA, 19 nt, Artificial Sequence
  Description of Artificial Sequence: Synthetic oligonucleotide
gaccuagacucaaggaaaa

SEQ ID NO: 1468188 - RNA, 19 nt, Artificial Sequence
  Description of Artificial Sequence: Synthetic oligonucleotide
uuccggguaaggugugguc

SEQ ID NO: 1468189 - RNA, 19 nt, Artificial Sequence
  Description of Artificial Sequence: Synthetic oligonucleotide
gcacuaggauccuuccacc

SEQ ID NO: 1468190 - RNA, 19 nt, Artificial Sequence
  Description of Artificial Sequence: Synthetic oligonucleotide
gcucuuggaaacugagcac

SEQ ID NO: 1468191 - RNA, 19 nt, Artificial Sequence
  Description of Artificial Sequence: Synthetic oligonucleotide
caccgcuauucguggcugg

SEQ ID NO: 1468192 - RNA, 19 nt, Artificial Sequence
  Description of Artificial Sequence: Synthetic oligonucleotide
gugauucaacugaaccuca

SEQ ID NO: 1468193 - RNA, 19 nt, Artificial Sequence
  Description of Artificial Sequence: Synthetic oligonucleotide
ccauacgcggcuucguaac

SEQ ID NO: 1468194 - RNA, 19 nt, Artificial Sequence
  Description of Artificial Sequence: Synthetic oligonucleotide
accauacuuuccggguaag

SEQ ID NO: 1468195 - RNA, 19 nt, Artificial Sequence
  Description of Artificial Sequence: Synthetic oligonucleotide
ugagcacaucuggcacugg

SEQ ID NO: 1468196 - RNA, 19 nt, Artificial Sequence
  Description of Artificial Sequence: Synthetic oligonucleotide
ccagcaauauucaaacugu

SEQ ID NO: 1468197 - RNA, 19 nt, Artificial Sequence
  Description of Artificial Sequence: Synthetic oligonucleotide
gcccguuugaagcaaagcu

SEQ ID NO: 1468198 - RNA, 19 nt, Artificial Sequence
  Description of Artificial Sequence: Synthetic oligonucleotide
acaccgcuauucguggcug

SEQ ID NO: 1468199 - RNA, 19 nt, Artificial Sequence
  Description of Artificial Sequence: Synthetic oligonucleotide
cuguaggucaaauguguau

SEQ ID NO: 1468200 - RNA, 19 nt, Artificial Sequence
  Description of Artificial Sequence: Synthetic oligonucleotide
acguagcagagaguuucug

SEQ ID NO: 1468201 - RNA, 19 nt, Artificial Sequence
  Description of Artificial Sequence: Synthetic oligonucleotide
agcuguuagcccguuugaa

SEQ ID NO: 1468202 - RNA, 19 nt, Artificial Sequence
  Description of Artificial Sequence: Synthetic oligonucleotide
uccguuccaccauguuggu

SEQ ID NO: 1468203 - RNA, 19 nt, Artificial Sequence
  Description of Artificial Sequence: Synthetic oligonucleotide
guaagguguggucauccau

SEQ ID NO: 1468204 - RNA, 19 nt, Artificial Sequence
  Description of Artificial Sequence: Synthetic oligonucleotide
agcuugaccuagacucaag

SEQ ID NO: 1468205 - RNA, 19 nt, Artificial Sequence
  Description of Artificial Sequence: Synthetic oligonucleotide
cagguagaaaacaccuacu

SEQ ID NO: 1468206 - RNA, 19 nt, Artificial Sequence
  Description of Artificial Sequence: Synthetic oligonucleotide
cagugcaguacaucuuaaa

SEQ ID NO: 1468207 - RNA, 19 nt, Artificial Sequence
  Description of Artificial Sequence: Synthetic oligonucleotide
uccucuugugcgagcugua

SEQ ID NO: 1468208 - RNA, 19 nt, Artificial Sequence
  Description of Artificial Sequence: Synthetic oligonucleotide
guaaccgggaucauacuuu

SEQ ID NO: 1468209 - RNA, 19 nt, Artificial Sequence
  Description of Artificial Sequence: Synthetic oligonucleotide
ugcgagcuguaggucaaau

SEQ ID NO: 1468210 - RNA, 19 nt, Artificial Sequence
  Description of Artificial Sequence: Synthetic oligonucleotide
aggguagugcauguccuuu

SEQ ID NO: 1468211 - RNA, 19 nt, Artificial Sequence
  Description of Artificial Sequence: Synthetic oligonucleotide
caauaccuaguuacaugcu

SEQ ID NO: 1468212 - RNA, 19 nt, Artificial Sequence
  Description of Artificial Sequence: Synthetic oligonucleotide
guugauccuaaucccugau

SEQ ID NO: 1468213 - RNA, 19 nt, Artificial Sequence
  Description of Artificial Sequence: Synthetic oligonucleotide
acauggguuuucacuguaa

SEQ ID NO: 1468214 - RNA, 19 nt, Artificial Sequence
  Description of Artificial Sequence: Synthetic oligonucleotide
guuagcccguuugaagcaa

SEQ ID NO: 1468215 - RNA, 19 nt, Artificial Sequence
  Description of Artificial Sequence: Synthetic oligonucleotide
ggcgucguccguuccacca

SEQ ID NO: 1468216 - RNA, 19 nt, Artificial Sequence
  Description of Artificial Sequence: Synthetic oligonucleotide
ccauacuuuccggguaagg

SEQ ID NO: 1468217 - RNA, 19 nt, Artificial Sequence
  Description of Artificial Sequence: Synthetic oligonucleotide
cuggcgucguccguuccac

SEQ ID NO: 1468218 - RNA, 19 nt, Artificial Sequence
  Description of Artificial Sequence: Synthetic oligonucleotide
accgcuauucguggcuggu

SEQ ID NO: 1468219 - RNA, 19 nt, Artificial Sequence
  Description of Artificial Sequence: Synthetic oligonucleotide
cugcacuaggauccuucca

SEQ ID NO: 1468220 - RNA, 19 nt, Artificial Sequence
  Description of Artificial Sequence: Synthetic oligonucleotide
acuuuccggguaaggugug

SEQ ID NO: 1468221 - RNA, 19 nt, Artificial Sequence
  Description of Artificial Sequence: Synthetic oligonucleotide
ucguccguuccaccauguu

SEQ ID NO: 1468222 - RNA, 19 nt, Artificial Sequence
  Description of Artificial Sequence: Synthetic oligonucleotide
cacuaggauccuuccaccu

SEQ ID NO: 1468223 - RNA, 19 nt, Artificial Sequence
  Description of Artificial Sequence: Synthetic oligonucleotide
cacuguaagcacugccaua

SEQ ID NO: 1468224 - RNA, 19 nt, Artificial Sequence
  Description of Artificial Sequence: Synthetic oligonucleotide
uggcgucguccguuccacc

SEQ ID NO: 1468225 - RNA, 19 nt, Artificial Sequence
  Description of Artificial Sequence: Synthetic oligonucleotide
cggaauucuuuacuggaca

SEQ ID NO: 1468226 - RNA, 19 nt, Artificial Sequence
  Description of Artificial Sequence: Synthetic oligonucleotide
cuggucuguaaaugacugu

SEQ ID NO: 1468227 - RNA, 19 nt, Artificial Sequence
  Description of Artificial Sequence: Synthetic oligonucleotide
cuucguaaccgggaucaua

SEQ ID NO: 1468228 - RNA, 19 nt, Artificial Sequence
  Description of Artificial Sequence: Synthetic oligonucleotide
caguccugacaugaacaga

SEQ ID NO: 1468229 - RNA, 19 nt, Artificial Sequence
  Description of Artificial Sequence: Synthetic oligonucleotide
caggguuaaugccaauaau

SEQ ID NO: 1468230 - RNA, 19 nt, Artificial Sequence
  Description of Artificial Sequence: Synthetic oligonucleotide
cacucaguccugacaugaa

SEQ ID NO: 1468231 - RNA, 19 nt, Artificial Sequence
  Description of Artificial Sequence: Synthetic oligonucleotide
gaccaucaucaagccuggc

SEQ ID NO: 1468232 - RNA, 19 nt, Artificial Sequence
  Description of Artificial Sequence: Synthetic oligonucleotide
cacugccauacgcggcuuc

SEQ ID NO: 1468233 - RNA, 19 nt, Artificial Sequence
  Description of Artificial Sequence: Synthetic oligonucleotide
agacccacugucacagcua

SEQ ID NO: 1468234 - RNA, 19 nt, Artificial Sequence
  Description of Artificial Sequence: Synthetic oligonucleotide
acgcggcuucguaaccggg

SEQ ID NO: 1468235 - RNA, 19 nt, Artificial Sequence
  Description of Artificial Sequence: Synthetic oligonucleotide
gccauacgcggcuucguaa

SEQ ID NO: 1468236 - RNA, 19 nt, Artificial Sequence
  Description of Artificial Sequence: Synthetic oligonucleotide
ccagauugaaggucaaaau

SEQ ID NO: 1468237 - RNA, 19 nt, Artificial Sequence
  Description of Artificial Sequence: Synthetic oligonucleotide
augacguagcagagaguuu

SEQ ID NO: 1468238 - RNA, 19 nt, Artificial Sequence
  Description of Artificial Sequence: Synthetic oligonucleotide
ccucuugugcgagcuguag

SEQ ID NO: 1468239 - RNA, 19 nt, Artificial Sequence
  Description of Artificial Sequence: Synthetic oligonucleotide
ggacaaauccuugcugccu

SEQ ID NO: 1468240 - RNA, 19 nt, Artificial Sequence
  Description of Artificial Sequence: Synthetic oligonucleotide
gugcugaggcagagcucag

SEQ ID NO: 1468241 - RNA, 19 nt, Artificial Sequence
  Description of Artificial Sequence: Synthetic oligonucleotide
cuccugugucccacaguua

SEQ ID NO: 1468242 - RNA, 19 nt, Artificial Sequence
  Description of Artificial Sequence: Synthetic oligonucleotide
gcacgucuguguuccgcuc

SEQ ID NO: 1468243 - RNA, 19 nt, Artificial Sequence
  Description of Artificial Sequence: Synthetic oligonucleotide
cuuccaccuucccggaauu

SEQ ID NO: 1468244 - RNA, 19 nt, Artificial Sequence
  Description of Artificial Sequence: Synthetic oligonucleotide
cagcagugcaguacaucuu

SEQ ID NO: 1468245 - RNA, 19 nt, Artificial Sequence
  Description of Artificial Sequence: Synthetic oligonucleotide
cgucguccguuccaccaug

SEQ ID NO: 1468246 - RNA, 19 nt, Artificial Sequence
  Description of Artificial Sequence: Synthetic oligonucleotide
gucguccguuccaccaugu

SEQ ID NO: 1468247 - RNA, 19 nt, Artificial Sequence
  Description of Artificial Sequence: Synthetic oligonucleotide
gcggcuucguaaccgggau

SEQ ID NO: 1468248 - RNA, 19 nt, Artificial Sequence
  Description of Artificial Sequence: Synthetic oligonucleotide
gcuauucguggcugguauu

SEQ ID NO: 1468249 - RNA, 19 nt, Artificial Sequence
  Description of Artificial Sequence: Synthetic oligonucleotide
ccguuccaccauguuggug

SEQ ID NO: 1468250 - RNA, 19 nt, Artificial Sequence
  Description of Artificial Sequence: Synthetic oligonucleotide
ccacuaguguaacugcauu

SEQ ID NO: 1468251 - RNA, 19 nt, Artificial Sequence
  Description of Artificial Sequence: Synthetic oligonucleotide
cgcggcuucguaaccggga

SEQ ID NO: 1468252 - RNA, 19 nt, Artificial Sequence
  Description of Artificial Sequence: Synthetic oligonucleotide
cguaaccgggaucauacuu

SEQ ID NO: 1468253 - RNA, 19 nt, Artificial Sequence
  Description of Artificial Sequence: Synthetic oligonucleotide
guuggucucuuagguccuu

SEQ ID NO: 1468254 - RNA, 19 nt, Artificial Sequence
  Description of Artificial Sequence: Synthetic oligonucleotide
guguuccgcucaaugccuu

SEQ ID NO: 1468255 - RNA, 19 nt, Artificial Sequence
  Description of Artificial Sequence: Synthetic oligonucleotide
cgcuauucguggcugguau

SEQ ID NO: 1468256 - RNA, 19 nt, Artificial Sequence
  Description of Artificial Sequence: Synthetic oligonucleotide
acgccaccaggagcugcuu

SEQ ID NO: 1468257 - RNA, 19 nt, Artificial Sequence
  Description of Artificial Sequence: Synthetic oligonucleotide
ccgggaucauacuuuucuu

SEQ ID NO: 1468258 - RNA, 19 nt, Artificial Sequence
  Description of Artificial Sequence: Synthetic oligonucleotide
ccggguaagguguggucau

SEQ ID NO: 1468259 - RNA, 19 nt, Artificial Sequence
  Description of Artificial Sequence: Synthetic oligonucleotide
cggcuucguaaccgggauc

SEQ ID NO: 1468260 - RNA, 19 nt, Artificial Sequence
  Description of Artificial Sequence: Synthetic oligonucleotide
gcaugacguagcagagagu

SEQ ID NO: 1468261 - RNA, 19 nt, Artificial Sequence
  Description of Artificial Sequence: Synthetic oligonucleotide
gcgucguccguuccaccau

SEQ ID NO: 1468262 - RNA, 19 nt, Artificial Sequence
  Description of Artificial Sequence: Synthetic oligonucleotide
cgggaucuggucuguaaau

SEQ ID NO: 1468263 - RNA, 19 nt, Artificial Sequence
  Description of Artificial Sequence: Synthetic oligonucleotide
cggguaagguguggucauc

SEQ ID NO: 1468264 - RNA, 19 nt, Artificial Sequence
  Description of Artificial Sequence: Synthetic oligonucleotide
gcccaaauuccaaguucuu

SEQ ID NO: 1468265 - RNA, 19 nt, Artificial Sequence
  Description of Artificial Sequence: Synthetic oligonucleotide
ccgcuauucguggcuggua

SEQ ID NO: 1468266 - RNA, 19 nt, Artificial Sequence
  Description of Artificial Sequence: Synthetic oligonucleotide
gcuucguaaccgggaucau

SEQ ID NO: 1468267 - RNA, 19 nt, Artificial Sequence
  Description of Artificial Sequence: Synthetic oligonucleotide
cgucuguguuccgcucaau

SEQ ID NO: 1468268 - RNA, 19 nt, Artificial Sequence
  Description of Artificial Sequence: Synthetic oligonucleotide
cuuagaaggauucucaagg

SEQ ID NO: 1468269 - RNA, 19 nt, Artificial Sequence
  Description of Artificial Sequence: Synthetic oligonucleotide
gagugagucagacaacucg

SEQ ID NO: 1468270 - RNA, 19 nt, Artificial Sequence
  Description of Artificial Sequence: Synthetic oligonucleotide
uuagaaggauucucaaggg

SEQ ID NO: 1468271 - RNA, 19 nt, Artificial Sequence
  Description of Artificial Sequence: Synthetic oligonucleotide
gaguauguuaccuucuggc

SEQ ID NO: 1468272 - RNA, 19 nt, Artificial Sequence
  Description of Artificial Sequence: Synthetic oligonucleotide
ucaaagguuggguuguagg

SEQ ID NO: 1468273 - RNA, 19 nt, Artificial Sequence
  Description of Artificial Sequence: Synthetic oligonucleotide
uccugagugagucagacaa

SEQ ID NO: 1468274 - RNA, 19 nt, Artificial Sequence
  Description of Artificial Sequence: Synthetic oligonucleotide
ugcgcuugaacuuggcucg

SEQ ID NO: 1468275 - RNA, 19 nt, Artificial Sequence
  Description of Artificial Sequence: Synthetic oligonucleotide
ucuugaaccugucucggag

SEQ ID NO: 1468276 - RNA, 19 nt, Artificial Sequence
  Description of Artificial Sequence: Synthetic oligonucleotide
uuguacuugcgcuugaacu

SEQ ID NO: 1468277 - RNA, 19 nt, Artificial Sequence
  Description of Artificial Sequence: Synthetic oligonucleotide
cacaucucccgaaacaugg

SEQ ID NO: 1468278 - RNA, 19 nt, Artificial Sequence
  Description of Artificial Sequence: Synthetic oligonucleotide
aagggguuucuggagacgc

SEQ ID NO: 1468279 - RNA, 19 nt, Artificial Sequence
  Description of Artificial Sequence: Synthetic oligonucleotide
gagggcuugacauggaggc

SEQ ID NO: 1468280 - RNA, 19 nt, Artificial Sequence
  Description of Artificial Sequence: Synthetic oligonucleotide
uuuucugagucuuucucac

SEQ ID NO: 1468281 - RNA, 19 nt, Artificial Sequence
  Description of Artificial Sequence: Synthetic oligonucleotide
ugugcgaggaugucuuugg

SEQ ID NO: 1468282 - RNA, 19 nt, Artificial Sequence
  Description of Artificial Sequence: Synthetic oligonucleotide
aaaaugcauccugaccggc

SEQ ID NO: 1468283 - RNA, 19 nt, Artificial Sequence
  Description of Artificial Sequence: Synthetic oligonucleotide
gagucagacaacucggagc

SEQ ID NO: 1468284 - RNA, 19 nt, Artificial Sequence
  Description of Artificial Sequence: Synthetic oligonucleotide
ucgaucauauuccucuucu

SEQ ID NO: 1468285 - RNA, 19 nt, Artificial Sequence
  Description of Artificial Sequence: Synthetic oligonucleotide
aaaugcauccugaccggcc

SEQ ID NO: 1468286 - RNA, 19 nt, Artificial Sequence
  Description of Artificial Sequence: Synthetic oligonucleotide
agcucuugaaccugucucg

SEQ ID NO: 1468287 - RNA, 19 nt, Artificial Sequence
  Description of Artificial Sequence: Synthetic oligonucleotide
ucgaccucuaugcccagcg

SEQ ID NO: 1468288 - RNA, 19 nt, Artificial Sequence
  Description of Artificial Sequence: Synthetic oligonucleotide
uauguuaccuucuggcuuc

SEQ ID NO: 1468289 - RNA, 19 nt, Artificial Sequence
  Description of Artificial Sequence: Synthetic oligonucleotide
ucaagggcaaggucaaccc

SEQ ID NO: 1468290 - RNA, 19 nt, Artificial Sequence
  Description of Artificial Sequence: Synthetic oligonucleotide
aguauguuaccuucuggcu

SEQ ID NO: 1468291 - RNA, 19 nt, Artificial Sequence
  Description of Artificial Sequence: Synthetic oligonucleotide
gguuguuuggguuccagag

SEQ ID NO: 1468292 - RNA, 19 nt, Artificial Sequence
  Description of Artificial Sequence: Synthetic oligonucleotide
cuuggauccaguguccacg

SEQ ID NO: 1468293 - RNA, 19 nt, Artificial Sequence
  Description of Artificial Sequence: Synthetic oligonucleotide
ugagucuuucucacgcugc

SEQ ID NO: 1468294 - RNA, 19 nt, Artificial Sequence
  Description of Artificial Sequence: Synthetic oligonucleotide
uguacuugcgcuugaacuu

SEQ ID NO: 1468295 - RNA, 19 nt, Artificial Sequence
  Description of Artificial Sequence: Synthetic oligonucleotide
cuugaacuuggcucguucc

SEQ ID NO: 1468296 - RNA, 19 nt, Artificial Sequence
  Description of Artificial Sequence: Synthetic oligonucleotide
gacgcugagacuucuucug

SEQ ID NO: 1468297 - RNA, 19 nt, Artificial Sequence
  Description of Artificial Sequence: Synthetic oligonucleotide
uguccagaggguuguuugg

SEQ ID NO: 1468298 - RNA, 19 nt, Artificial Sequence
  Description of Artificial Sequence: Synthetic oligonucleotide
uugcgcuugaacuuggcuc

SEQ ID NO: 1468299 - RNA, 19 nt, Artificial Sequence
  Description of Artificial Sequence: Synthetic oligonucleotide
auagaagggccgcucaaug

SEQ ID NO: 1468300 - RNA, 19 nt, Artificial Sequence
  Description of Artificial Sequence: Synthetic oligonucleotide
uuucgcgccgcgcuucucg

SEQ ID NO: 1468301 - RNA, 19 nt, Artificial Sequence
  Description of Artificial Sequence: Synthetic oligonucleotide
uggucgaccucuaugccca

SEQ ID NO: 1468302 - RNA, 19 nt, Artificial Sequence
  Description of Artificial Sequence: Synthetic oligonucleotide
caacggcuuguccagaggg

SEQ ID NO: 1468303 - RNA, 19 nt, Artificial Sequence
  Description of Artificial Sequence: Synthetic oligonucleotide
ucucccgaaacauggacuc

SEQ ID NO: 1468304 - RNA, 19 nt, Artificial Sequence
  Description of Artificial Sequence: Synthetic oligonucleotide
ucuggagacgcugagacuu

SEQ ID NO: 1468305 - RNA, 19 nt, Artificial Sequence
  Description of Artificial Sequence: Synthetic oligonucleotide
gaacuuggcucguucccgg

SEQ ID NO: 1468306 - RNA, 19 nt, Artificial Sequence
  Description of Artificial Sequence: Synthetic oligonucleotide
gaagagcuuuucauugggg

SEQ ID NO: 1468307 - RNA, 19 nt, Artificial Sequence
  Description of Artificial Sequence: Synthetic oligonucleotide
agaggguuguuuggguucc

SEQ ID NO: 1468308 - RNA, 19 nt, Artificial Sequence
  Description of Artificial Sequence: Synthetic oligonucleotide
gaaggagcgcuucuccacc

SEQ ID NO: 1468309 - RNA, 19 nt, Artificial Sequence
  Description of Artificial Sequence: Synthetic oligonucleotide
ucgccaguuucucccauag

SEQ ID NO: 1468310 - RNA, 19 nt, Artificial Sequence
  Description of Artificial Sequence: Synthetic oligonucleotide
gaccucuaugcccagcggc

SEQ ID NO: 1468311 - RNA, 19 nt, Artificial Sequence
  Description of Artificial Sequence: Synthetic oligonucleotide
ucggccaacaagccaccgg

SEQ ID NO: 1468312 - RNA, 19 nt, Artificial Sequence
  Description of Artificial Sequence: Synthetic oligonucleotide
aaggucaacccgaaggggu

SEQ ID NO: 1468313 - RNA, 19 nt, Artificial Sequence
  Description of Artificial Sequence: Synthetic oligonucleotide
uuguaggaggcucccgcag

SEQ ID NO: 1468314 - RNA, 19 nt, Artificial Sequence
  Description of Artificial Sequence: Synthetic oligonucleotide
cucaagggcaaggucaacc

SEQ ID NO: 1468315 - RNA, 19 nt, Artificial Sequence
  Description of Artificial Sequence: Synthetic oligonucleotide
guuagccucugccagucgc

SEQ ID NO: 1468316 - RNA, 19 nt, Artificial Sequence
  Description of Artificial Sequence: Synthetic oligonucleotide
uugacauggaggcguggug

SEQ ID NO: 1468317 - RNA, 19 nt, Artificial Sequence
  Description of Artificial Sequence: Synthetic oligonucleotide
caaagguuggguuguagga

SEQ ID NO: 1468318 - RNA, 19 nt, Artificial Sequence
  Description of Artificial Sequence: Synthetic oligonucleotide
cuggucgaccucuaugccc

SEQ ID NO: 1468319 - RNA, 19 nt, Artificial Sequence
  Description of Artificial Sequence: Synthetic oligonucleotide
gcgaggaugucuuugggag

SEQ ID NO: 1468320 - RNA, 19 nt, Artificial Sequence
  Description of Artificial Sequence: Synthetic oligonucleotide
cucggaguauguuaccuuc

SEQ ID NO: 1468321 - RNA, 19 nt, Artificial Sequence
  Description of Artificial Sequence: Synthetic oligonucleotide
cucagagcgggguccaccg

SEQ ID NO: 1468322 - RNA, 19 nt, Artificial Sequence
  Description of Artificial Sequence: Synthetic oligonucleotide
gugaucuucaaagguuggg

SEQ ID NO: 1468323 - RNA, 19 nt, Artificial Sequence
  Description of Artificial Sequence: Synthetic oligonucleotide
ggccuuuagaagcagggcc

SEQ ID NO: 1468324 - RNA, 19 nt, Artificial Sequence
  Description of Artificial Sequence: Synthetic oligonucleotide
gaaccugucucggaguaug

SEQ ID NO: 1468325 - RNA, 19 nt, Artificial Sequence
  Description of Artificial Sequence: Synthetic oligonucleotide
ugcgaggaugucuuuggga

SEQ ID NO: 1468326 - RNA, 19 nt, Artificial Sequence
  Description of Artificial Sequence: Synthetic oligonucleotide
ugcucuacggugggcaggg

SEQ ID NO: 1468327 - RNA, 19 nt, Artificial Sequence
  Description of Artificial Sequence: Synthetic oligonucleotide
uuucucccauagcugcucc

SEQ ID NO: 1468328 - RNA, 19 nt, Artificial Sequence
  Description of Artificial Sequence: Synthetic oligonucleotide
ugggccuugaucccacgca

SEQ ID NO: 1468329 - RNA, 19 nt, Artificial Sequence
  Description of Artificial Sequence: Synthetic oligonucleotide
ucaucggccccaucgucag

SEQ ID NO: 1468330 - RNA, 19 nt, Artificial Sequence
  Description of Artificial Sequence: Synthetic oligonucleotide
aagggcaaggucaacccga

SEQ ID NO: 1468331 - RNA, 19 nt, Artificial Sequence
  Description of Artificial Sequence: Synthetic oligonucleotide
acccagguccucuuguuug

SEQ ID NO: 1468332 - RNA, 19 nt, Artificial Sequence
  Description of Artificial Sequence: Synthetic oligonucleotide
guaggaggcucccgcaggg

SEQ ID NO: 1468333 - RNA, 19 nt, Artificial Sequence
  Description of Artificial Sequence: Synthetic oligonucleotide
gaguccgcggggcuuuucg

SEQ ID NO: 1468334 - RNA, 19 nt, Artificial Sequence
  Description of Artificial Sequence: Synthetic oligonucleotide
aucccacgcagccugaaga

SEQ ID NO: 1468335 - RNA, 19 nt, Artificial Sequence
  Description of Artificial Sequence: Synthetic oligonucleotide
uugaaccugucucggagua

SEQ ID NO: 1468336 - RNA, 19 nt, Artificial Sequence
  Description of Artificial Sequence: Synthetic oligonucleotide
cuuggucugcuccagaaaa

SEQ ID NO: 1468337 - RNA, 19 nt, Artificial Sequence
  Description of Artificial Sequence: Synthetic oligonucleotide
agacgcugagacuucuucu

SEQ ID NO: 1468338 - RNA, 19 nt, Artificial Sequence
  Description of Artificial Sequence: Synthetic oligonucleotide
ucggaguauguuaccuucu

SEQ ID NO: 1468339 - RNA, 19 nt, Artificial Sequence
  Description of Artificial Sequence: Synthetic oligonucleotide
acuuggcucguucccgggg

SEQ ID NO: 1468340 - RNA, 19 nt, Artificial Sequence
  Description of Artificial Sequence: Synthetic oligonucleotide
caagggcaaggucaacccg

SEQ ID NO: 1468341 - RNA, 19 nt, Artificial Sequence
  Description of Artificial Sequence: Synthetic oligonucleotide
guggcagcuugcucuacgg

SEQ ID NO: 1468342 - RNA, 19 nt, Artificial Sequence
  Description of Artificial Sequence: Synthetic oligonucleotide
gaccuuagaaggauucuca

SEQ ID NO: 1468343 - RNA, 19 nt, Artificial Sequence
  Description of Artificial Sequence: Synthetic oligonucleotide
uggguuccagaggucauag

SEQ ID NO: 1468344 - RNA, 19 nt, Artificial Sequence
  Description of Artificial Sequence: Synthetic oligonucleotide
aguccgcggggcuuuucgc

SEQ ID NO: 1468345 - RNA, 19 nt, Artificial Sequence
  Description of Artificial Sequence: Synthetic oligonucleotide
uguuagccucugccagucg

SEQ ID NO: 1468346 - RNA, 19 nt, Artificial Sequence
  Description of Artificial Sequence: Synthetic oligonucleotide
caacaagccaccgguggcg

SEQ ID NO: 1468347 - RNA, 19 nt, Artificial Sequence
  Description of Artificial Sequence: Synthetic oligonucleotide
ugagugagucagacaacuc

SEQ ID NO: 1468348 - RNA, 19 nt, Artificial Sequence
  Description of Artificial Sequence: Synthetic oligonucleotide
gguuguaggaggcucccgc

SEQ ID NO: 1468349 - RNA, 19 nt, Artificial Sequence
  Description of Artificial Sequence: Synthetic oligonucleotide
ucuuacuucccgccgccau

SEQ ID NO: 1468350 - RNA, 19 nt, Artificial Sequence
  Description of Artificial Sequence: Synthetic oligonucleotide
uccugaccggccaacggcu

SEQ ID NO: 1468351 - RNA, 19 nt, Artificial Sequence
  Description of Artificial Sequence: Synthetic oligonucleotide
cuuggcucguucccggggc

SEQ ID NO: 1468352 - RNA, 19 nt, Artificial Sequence
  Description of Artificial Sequence: Synthetic oligonucleotide
auuggggaccuggugugcg

SEQ ID NO: 1468353 - RNA, 19 nt, Artificial Sequence
  Description of Artificial Sequence: Synthetic oligonucleotide
gagccuccgggccaccugg

SEQ ID NO: 1468354 - RNA, 19 nt, Artificial Sequence
  Description of Artificial Sequence: Synthetic oligonucleotide
gccaacaagccaccggugg

SEQ ID NO: 1468355 - RNA, 19 nt, Artificial Sequence
  Description of Artificial Sequence: Synthetic oligonucleotide
caaggucaacccgaagggg

SEQ ID NO: 1468356 - RNA, 19 nt, Artificial Sequence
  Description of Artificial Sequence: Synthetic oligonucleotide
agccgagcugcccucagug

SEQ ID NO: 1468357 - RNA, 19 nt, Artificial Sequence
  Description of Artificial Sequence: Synthetic oligonucleotide
uggugugcgaggaugucuu

SEQ ID NO: 1468358 - RNA, 19 nt, Artificial Sequence
  Description of Artificial Sequence: Synthetic oligonucleotide
agacaacucggagcugagc

SEQ ID NO: 1468359 - RNA, 19 nt, Artificial Sequence
  Description of Artificial Sequence: Synthetic oligonucleotide
gccgccaucuucugaaagg

SEQ ID NO: 1468360 - RNA, 19 nt, Artificial Sequence
  Description of Artificial Sequence: Synthetic oligonucleotide
uuuggguuccagaggucau

SEQ ID NO: 1468361 - RNA, 19 nt, Artificial Sequence
  Description of Artificial Sequence: Synthetic oligonucleotide
ugucucggaguauguuacc

SEQ ID NO: 1468362 - RNA, 19 nt, Artificial Sequence
  Description of Artificial Sequence: Synthetic oligonucleotide
cauccugaccggccaacgg

SEQ ID NO: 1468363 - RNA, 19 nt, Artificial Sequence
  Description of Artificial Sequence: Synthetic oligonucleotide
ggcagcuugcucuacggug

SEQ ID NO: 1468364 - RNA, 19 nt, Artificial Sequence
  Description of Artificial Sequence: Synthetic oligonucleotide
ucccgaaacauggacuccu

SEQ ID NO: 1468365 - RNA, 19 nt, Artificial Sequence
  Description of Artificial Sequence: Synthetic oligonucleotide
ucccgcaggggucaccucu

SEQ ID NO: 1468366 - RNA, 19 nt, Artificial Sequence
  Description of Artificial Sequence: Synthetic oligonucleotide
ccuuagaaggauucucaag

SEQ ID NO: 1468367 - RNA, 19 nt, Artificial Sequence
  Description of Artificial Sequence: Synthetic oligonucleotide
guacuugcgcuugaacuug

SEQ ID NO: 1468368 - RNA, 19 nt, Artificial Sequence
  Description of Artificial Sequence: Synthetic oligonucleotide
auggaggcgugguggccgc

SEQ ID NO: 1468369 - RNA, 19 nt, Artificial Sequence
  Description of Artificial Sequence: Synthetic oligonucleotide
guccagaggguuguuuggg

SEQ ID NO: 1468370 - RNA, 19 nt, Artificial Sequence
  Description of Artificial Sequence: Synthetic oligonucleotide
cuguagcccgcguuuggcc

SEQ ID NO: 1468371 - RNA, 19 nt, Artificial Sequence
  Description of Artificial Sequence: Synthetic oligonucleotide
aagagcuccugaugcugaa

SEQ ID NO: 1468372 - RNA, 19 nt, Artificial Sequence
  Description of Artificial Sequence: Synthetic oligonucleotide
cacuccuuucuucuugguc

SEQ ID NO: 1468373 - RNA, 19 nt, Artificial Sequence
  Description of Artificial Sequence: Synthetic oligonucleotide
guccgcggggcuuuucgcg

SEQ ID NO: 1468374 - RNA, 19 nt, Artificial Sequence
  Description of Artificial Sequence: Synthetic oligonucleotide
gaccuggugugcgaggaug

SEQ ID NO: 1468375 - RNA, 19 nt, Artificial Sequence
  Description of Artificial Sequence: Synthetic oligonucleotide
cucuaugcccagcggcucc

SEQ ID NO: 1468376 - RNA, 19 nt, Artificial Sequence
  Description of Artificial Sequence: Synthetic oligonucleotide
cuuccgccgugccagcucc

SEQ ID NO: 1468377 - RNA, 19 nt, Artificial Sequence
  Description of Artificial Sequence: Synthetic oligonucleotide
uugcucuacggugggcagg

SEQ ID NO: 1468378 - RNA, 19 nt, Artificial Sequence
  Description of Artificial Sequence: Synthetic oligonucleotide
cuuacuucccgccgccauc

SEQ ID NO: 1468379 - RNA, 19 nt, Artificial Sequence
  Description of Artificial Sequence: Synthetic oligonucleotide
cucgaucauauuccucuuc

SEQ ID NO: 1468380 - RNA, 19 nt, Artificial Sequence
  Description of Artificial Sequence: Synthetic oligonucleotide
cacuuuguacuugcgcuug

SEQ ID NO: 1468381 - RNA, 19 nt, Artificial Sequence
  Description of Artificial Sequence: Synthetic oligonucleotide
ucucggaguauguuaccuu

SEQ ID NO: 1468382 - RNA, 19 nt, Artificial Sequence
  Description of Artificial Sequence: Synthetic oligonucleotide
uccgcggggcuuuucgcgc

SEQ ID NO: 1468383 - RNA, 19 nt, Artificial Sequence
  Description of Artificial Sequence: Synthetic oligonucleotide
uccguccucuucuccacac

SEQ ID NO: 1468384 - RNA, 19 nt, Artificial Sequence
  Description of Artificial Sequence: Synthetic oligonucleotide
cagagcgggguccaccgag

SEQ ID NO: 1468385 - RNA, 19 nt, Artificial Sequence
  Description of Artificial Sequence: Synthetic oligonucleotide
ggcucgaucauauuccucu

SEQ ID NO: 1468386 - RNA, 19 nt, Artificial Sequence
  Description of Artificial Sequence: Synthetic oligonucleotide
cucacgcugcaccuccacc

SEQ ID NO: 1468387 - RNA, 19 nt, Artificial Sequence
  Description of Artificial Sequence: Synthetic oligonucleotide
guuguaggaggcucccgca

SEQ ID NO: 1468388 - RNA, 19 nt, Artificial Sequence
  Description of Artificial Sequence: Synthetic oligonucleotide
aucucccgaaacauggacu

SEQ ID NO: 1468389 - RNA, 19 nt, Artificial Sequence
  Description of Artificial Sequence: Synthetic oligonucleotide
cuccugaugcugaagccga

SEQ ID NO: 1468390 - RNA, 19 nt, Artificial Sequence
  Description of Artificial Sequence: Synthetic oligonucleotide
uguuuggguuccagagguc

SEQ ID NO: 1468391 - RNA, 19 nt, Artificial Sequence
  Description of Artificial Sequence: Synthetic oligonucleotide
ugauguccuguagcccgcg

SEQ ID NO: 1468392 - RNA, 19 nt, Artificial Sequence
  Description of Artificial Sequence: Synthetic oligonucleotide
guauguuaccuucuggcuu

SEQ ID NO: 1468393 - RNA, 19 nt, Artificial Sequence
  Description of Artificial Sequence: Synthetic oligonucleotide
ggaaggagcgcuucuccac

SEQ ID NO: 1468394 - RNA, 19 nt, Artificial Sequence
  Description of Artificial Sequence: Synthetic oligonucleotide
gccuggugaucuucaaagg

SEQ ID NO: 1468395 - RNA, 19 nt, Artificial Sequence
  Description of Artificial Sequence: Synthetic oligonucleotide
gguuucuggagacgcugag

SEQ ID NO: 1468396 - RNA, 19 nt, Artificial Sequence
  Description of Artificial Sequence: Synthetic oligonucleotide
acaagccaccgguggcgcg

SEQ ID NO: 1468397 - RNA, 19 nt, Artificial Sequence
  Description of Artificial Sequence: Synthetic oligonucleotide
aacggcuuguccagagggu

SEQ ID NO: 1468398 - RNA, 19 nt, Artificial Sequence
  Description of Artificial Sequence: Synthetic oligonucleotide
ggggccucggccaacaagc

SEQ ID NO: 1468399 - RNA, 19 nt, Artificial Sequence
  Description of Artificial Sequence: Synthetic oligonucleotide
gaagccgagcugcccucag

SEQ ID NO: 1468400 - RNA, 19 nt, Artificial Sequence
  Description of Artificial Sequence: Synthetic oligonucleotide
uggcagcuugcucuacggu

SEQ ID NO: 1468401 - RNA, 19 nt, Artificial Sequence
  Description of Artificial Sequence: Synthetic oligonucleotide
ucgcuccagcuuuucugag

SEQ ID NO: 1468402 - RNA, 19 nt, Artificial Sequence
  Description of Artificial Sequence: Synthetic oligonucleotide
caguguccacgaagaagag

SEQ ID NO: 1468403 - RNA, 19 nt, Artificial Sequence
  Description of Artificial Sequence: Synthetic oligonucleotide
cuuucgccugagcuucuug

SEQ ID NO: 1468404 - RNA, 19 nt, Artificial Sequence
  Description of Artificial Sequence: Synthetic oligonucleotide
gccuugaucccacgcagcc

SEQ ID NO: 1468405 - RNA, 19 nt, Artificial Sequence
  Description of Artificial Sequence: Synthetic oligonucleotide
cgcguuuggccuuuggugc

SEQ ID NO: 1468406 - RNA, 19 nt, Artificial Sequence
  Description of Artificial Sequence: Synthetic oligonucleotide
agggccagugggugagguc

SEQ ID NO: 1468407 - RNA, 19 nt, Artificial Sequence
  Description of Artificial Sequence: Synthetic oligonucleotide
gguccaccgagcuggcccg

SEQ ID NO: 1468408 - RNA, 19 nt, Artificial Sequence
  Description of Artificial Sequence: Synthetic oligonucleotide
accucuaugcccagcggcu

SEQ ID NO: 1468409 - RNA, 19 nt, Artificial Sequence
  Description of Artificial Sequence: Synthetic oligonucleotide
gugaggucucaucggcccc

SEQ ID NO: 1468410 - RNA, 19 nt, Artificial Sequence
  Description of Artificial Sequence: Synthetic oligonucleotide
cugccagucgccgcaggcg

SEQ ID NO: 1468411 - RNA, 19 nt, Artificial Sequence
  Description of Artificial Sequence: Synthetic oligonucleotide
caagccaccgguggcgcgc

SEQ ID NO: 1468412 - RNA, 19 nt, Artificial Sequence
  Description of Artificial Sequence: Synthetic oligonucleotide
gggccuugaucccacgcag

SEQ ID NO: 1468413 - RNA, 19 nt, Artificial Sequence
  Description of Artificial Sequence: Synthetic oligonucleotide
gugugcgaggaugucuuug

SEQ ID NO: 1468414 - RNA, 19 nt, Artificial Sequence
  Description of Artificial Sequence: Synthetic oligonucleotide
cagcucacccugcuucgcc

SEQ ID NO: 1468415 - RNA, 19 nt, Artificial Sequence
  Description of Artificial Sequence: Synthetic oligonucleotide
cagccgcgcuucuuguucc

SEQ ID NO: 1468416 - RNA, 19 nt, Artificial Sequence
  Description of Artificial Sequence: Synthetic oligonucleotide
ccaacaagccaccgguggc

SEQ ID NO: 1468417 - RNA, 19 nt, Artificial Sequence
  Description of Artificial Sequence: Synthetic oligonucleotide
gucaccucuacugcaggca

SEQ ID NO: 1468418 - RNA, 19 nt, Artificial Sequence
  Description of Artificial Sequence: Synthetic oligonucleotide
gugggccuuuagaagcagg

SEQ ID NO: 1468419 - RNA, 19 nt, Artificial Sequence
  Description of Artificial Sequence: Synthetic oligonucleotide
gcucuugaaccugucucgg

SEQ ID NO: 1468420 - RNA, 19 nt, Artificial Sequence
  Description of Artificial Sequence: Synthetic oligonucleotide
uucgcgccgcgcuucucgc

SEQ ID NO: 1468421 - RNA, 19 nt, Artificial Sequence
  Description of Artificial Sequence: Synthetic oligonucleotide
ucccggggcucgaucauau

SEQ ID NO: 1468422 - RNA, 19 nt, Artificial Sequence
  Description of Artificial Sequence: Synthetic oligonucleotide
cugagugagucagacaacu

SEQ ID NO: 1468423 - RNA, 19 nt, Artificial Sequence
  Description of Artificial Sequence: Synthetic oligonucleotide
ggaccuuagaaggauucuc

SEQ ID NO: 1468424 - RNA, 19 nt, Artificial Sequence
  Description of Artificial Sequence: Synthetic oligonucleotide
uggcuucaggguccugagu

SEQ ID NO: 1468425 - RNA, 19 nt, Artificial Sequence
  Description of Artificial Sequence: Synthetic oligonucleotide
gcugagcugcacaucaaug

SEQ ID NO: 1468426 - RNA, 19 nt, Artificial Sequence
  Description of Artificial Sequence: Synthetic oligonucleotide
guccucaccgucagacucc

SEQ ID NO: 1468427 - RNA, 19 nt, Artificial Sequence
  Description of Artificial Sequence: Synthetic oligonucleotide
gcacaucaaugucaggguc

SEQ ID NO: 1468428 - RNA, 19 nt, Artificial Sequence
  Description of Artificial Sequence: Synthetic oligonucleotide
cuggugaucuucaaagguu

SEQ ID NO: 1468429 - RNA, 19 nt, Artificial Sequence
  Description of Artificial Sequence: Synthetic oligonucleotide
uucucgccgccgcucuuac

SEQ ID NO: 1468430 - RNA, 19 nt, Artificial Sequence
  Description of Artificial Sequence: Synthetic oligonucleotide
cagugggugaggucucauc

SEQ ID NO: 1468431 - RNA, 19 nt, Artificial Sequence
  Description of Artificial Sequence: Synthetic oligonucleotide
agggccgcucaaugauguc

SEQ ID NO: 1468432 - RNA, 19 nt, Artificial Sequence
  Description of Artificial Sequence: Synthetic oligonucleotide
ccgcguuuggccuuuggug

SEQ ID NO: 1468433 - RNA, 19 nt, Artificial Sequence
  Description of Artificial Sequence: Synthetic oligonucleotide
agccgcgcuucuuguuccg

SEQ ID NO: 1468434 - RNA, 19 nt, Artificial Sequence
  Description of Artificial Sequence: Synthetic oligonucleotide
ggcauuggggaccuggugu

SEQ ID NO: 1468435 - RNA, 19 nt, Artificial Sequence
  Description of Artificial Sequence: Synthetic oligonucleotide
caucgucagccgccggcgg

SEQ ID NO: 1468436 - RNA, 19 nt, Artificial Sequence
  Description of Artificial Sequence: Synthetic oligonucleotide
gagacuucuucuggaccca

SEQ ID NO: 1468437 - RNA, 19 nt, Artificial Sequence
  Description of Artificial Sequence: Synthetic oligonucleotide
uuggguuccagaggucaua

SEQ ID NO: 1468438 - RNA, 19 nt, Artificial Sequence
  Description of Artificial Sequence: Synthetic oligonucleotide
ugaccggccaacggcuugu

SEQ ID NO: 1468439 - RNA, 19 nt, Artificial Sequence
  Description of Artificial Sequence: Synthetic oligonucleotide
ugaagccgagcugcccuca

SEQ ID NO: 1468440 - RNA, 19 nt, Artificial Sequence
  Description of Artificial Sequence: Synthetic oligonucleotide
cauuggggaccuggugugc

SEQ ID NO: 1468441 - RNA, 19 nt, Artificial Sequence
  Description of Artificial Sequence: Synthetic oligonucleotide
aaccugucucggaguaugu

SEQ ID NO: 1468442 - RNA, 19 nt, Artificial Sequence
  Description of Artificial Sequence: Synthetic oligonucleotide
cuggagacgcugagacuuc

SEQ ID NO: 1468443 - RNA, 19 nt, Artificial Sequence
  Description of Artificial Sequence: Synthetic oligonucleotide
cggggcucgaucauauucc

SEQ ID NO: 1468444 - RNA, 19 nt, Artificial Sequence
  Description of Artificial Sequence: Synthetic oligonucleotide
cugaccggccaacggcuug

SEQ ID NO: 1468445 - RNA, 19 nt, Artificial Sequence
  Description of Artificial Sequence: Synthetic oligonucleotide
cuugaaccugucucggagu

SEQ ID NO: 1468446 - RNA, 19 nt, Artificial Sequence
  Description of Artificial Sequence: Synthetic oligonucleotide
ccgaaacauggacuccugg

SEQ ID NO: 1468447 - RNA, 19 nt, Artificial Sequence
  Description of Artificial Sequence: Synthetic oligonucleotide
cucccgaaacauggacucc

SEQ ID NO: 1468448 - RNA, 19 nt, Artificial Sequence
  Description of Artificial Sequence: Synthetic oligonucleotide
gugagucagacaacucgga

SEQ ID NO: 1468449 - RNA, 19 nt, Artificial Sequence
  Description of Artificial Sequence: Synthetic oligonucleotide
cucuugaaccugucucgga

SEQ ID NO: 1468450 - RNA, 19 nt, Artificial Sequence
  Description of Artificial Sequence: Synthetic oligonucleotide
gccaacggcuuguccagag

SEQ ID NO: 1468451 - RNA, 19 nt, Artificial Sequence
  Description of Artificial Sequence: Synthetic oligonucleotide
ugaaccugucucggaguau

SEQ ID NO: 1468452 - RNA, 19 nt, Artificial Sequence
  Description of Artificial Sequence: Synthetic oligonucleotide
gggguuucuggagacgcug

SEQ ID NO: 1468453 - RNA, 19 nt, Artificial Sequence
  Description of Artificial Sequence: Synthetic oligonucleotide
gggccgcucaaugaugucc

SEQ ID NO: 1468454 - RNA, 19 nt, Artificial Sequence
  Description of Artificial Sequence: Synthetic oligonucleotide
cuucccgccgccaucuucu

SEQ ID NO: 1468455 - RNA, 19 nt, Artificial Sequence
  Description of Artificial Sequence: Synthetic oligonucleotide
gcucuuacuucccgccgcc

SEQ ID NO: 1468456 - RNA, 19 nt, Artificial Sequence
  Description of Artificial Sequence: Synthetic oligonucleotide
ucaacccgaagggguuucu

SEQ ID NO: 1468457 - RNA, 19 nt, Artificial Sequence
  Description of Artificial Sequence: Synthetic oligonucleotide
gaagcagggccuggugauc

SEQ ID NO: 1468458 - RNA, 19 nt, Artificial Sequence
  Description of Artificial Sequence: Synthetic oligonucleotide
cacgcagccugaagagcuc

SEQ ID NO: 1468459 - RNA, 19 nt, Artificial Sequence
  Description of Artificial Sequence: Synthetic oligonucleotide
caccgagcuggcccgcagc

SEQ ID NO: 1468460 - RNA, 19 nt, Artificial Sequence
  Description of Artificial Sequence: Synthetic oligonucleotide
ccaagaagccagaguccgc

SEQ ID NO: 1468461 - RNA, 19 nt, Artificial Sequence
  Description of Artificial Sequence: Synthetic oligonucleotide
ucguucccggggcucgauc

SEQ ID NO: 1468462 - RNA, 19 nt, Artificial Sequence
  Description of Artificial Sequence: Synthetic oligonucleotide
accuggugugcgaggaugu

SEQ ID NO: 1468463 - RNA, 19 nt, Artificial Sequence
  Description of Artificial Sequence: Synthetic oligonucleotide
guccugagugagucagaca

SEQ ID NO: 1468464 - RNA, 19 nt, Artificial Sequence
  Description of Artificial Sequence: Synthetic oligonucleotide
cucggccaacaagccaccg

SEQ ID NO: 1468465 - RNA, 19 nt, Artificial Sequence
  Description of Artificial Sequence: Synthetic oligonucleotide
gcgagcagccuucucccgc

SEQ ID NO: 1468466 - RNA, 19 nt, Artificial Sequence
  Description of Artificial Sequence: Synthetic oligonucleotide
ggguuguuuggguuccaga

SEQ ID NO: 1468467 - RNA, 19 nt, Artificial Sequence
  Description of Artificial Sequence: Synthetic oligonucleotide
ucgucagccgccggcggcu

SEQ ID NO: 1468468 - RNA, 19 nt, Artificial Sequence
  Description of Artificial Sequence: Synthetic oligonucleotide
ucucaagggcaaggucaac

SEQ ID NO: 1468469 - RNA, 19 nt, Artificial Sequence
  Description of Artificial Sequence: Synthetic oligonucleotide
ccggggcucgaucauauuc

SEQ ID NO: 1468470 - RNA, 19 nt, Artificial Sequence
  Description of Artificial Sequence: Synthetic oligonucleotide
ccauagcugcuccuuucgc

SEQ ID NO: 1468471 - RNA, 19 nt, Artificial Sequence
  Description of Artificial Sequence: Synthetic oligonucleotide
ccugagugagucagacaac

SEQ ID NO: 1468472 - RNA, 19 nt, Artificial Sequence
  Description of Artificial Sequence: Synthetic oligonucleotide
ccaacggcuuguccagagg

SEQ ID NO: 1468473 - RNA, 19 nt, Artificial Sequence
  Description of Artificial Sequence: Synthetic oligonucleotide
ucccgccgccaucuucuga

SEQ ID NO: 1468474 - RNA, 19 nt, Artificial Sequence
  Description of Artificial Sequence: Synthetic oligonucleotide
caacccgaagggguuucug

SEQ ID NO: 1468475 - RNA, 19 nt, Artificial Sequence
  Description of Artificial Sequence: Synthetic oligonucleotide
gucucggaguauguuaccu

SEQ ID NO: 1468476 - RNA, 19 nt, Artificial Sequence
  Description of Artificial Sequence: Synthetic oligonucleotide
guccuguagcccgcguuug

SEQ ID NO: 1468477 - RNA, 19 nt, Artificial Sequence
  Description of Artificial Sequence: Synthetic oligonucleotide
cacacaucucccgaaacau

SEQ ID NO: 1468478 - RNA, 19 nt, Artificial Sequence
  Description of Artificial Sequence: Synthetic oligonucleotide
agccagaguccgcggggcu

SEQ ID NO: 1468479 - RNA, 19 nt, Artificial Sequence
  Description of Artificial Sequence: Synthetic oligonucleotide
agccgggccugugccuugc

SEQ ID NO: 1468480 - RNA, 19 nt, Artificial Sequence
  Description of Artificial Sequence: Synthetic oligonucleotide
cccaucgucagccgccggc

SEQ ID NO: 1468481 - RNA, 19 nt, Artificial Sequence
  Description of Artificial Sequence: Synthetic oligonucleotide
ugaucccacgcagccugaa

SEQ ID NO: 1468482 - RNA, 19 nt, Artificial Sequence
  Description of Artificial Sequence: Synthetic oligonucleotide
ccugucucggaguauguua

SEQ ID NO: 1468483 - RNA, 19 nt, Artificial Sequence
  Description of Artificial Sequence: Synthetic oligonucleotide
uucccgccgccaucuucug

SEQ ID NO: 1468484 - RNA, 19 nt, Artificial Sequence
  Description of Artificial Sequence: Synthetic oligonucleotide
aggucaacccgaagggguu

SEQ ID NO: 1468485 - RNA, 19 nt, Artificial Sequence
  Description of Artificial Sequence: Synthetic oligonucleotide
gucaacccgaagggguuuc

SEQ ID NO: 1468486 - RNA, 19 nt, Artificial Sequence
  Description of Artificial Sequence: Synthetic oligonucleotide
cgaagggguuucuggagac

SEQ ID NO: 1468487 - RNA, 19 nt, Artificial Sequence
  Description of Artificial Sequence: Synthetic oligonucleotide
ccaucgucagccgccggcg

SEQ ID NO: 1468488 - RNA, 19 nt, Artificial Sequence
  Description of Artificial Sequence: Synthetic oligonucleotide
ggcucguucccggggcucg

SEQ ID NO: 1468489 - RNA, 19 nt, Artificial Sequence
  Description of Artificial Sequence: Synthetic oligonucleotide
agaguccgcggggcuuuuc

SEQ ID NO: 1468490 - RNA, 19 nt, Artificial Sequence
  Description of Artificial Sequence: Synthetic oligonucleotide
ccagccgcgcuucuuguuc

SEQ ID NO: 1468491 - RNA, 19 nt, Artificial Sequence
  Description of Artificial Sequence: Synthetic oligonucleotide
cggaguauguuaccuucug

SEQ ID NO: 1468492 - RNA, 19 nt, Artificial Sequence
  Description of Artificial Sequence: Synthetic oligonucleotide
gggugaggucucaucggcc

SEQ ID NO: 1468493 - RNA, 19 nt, Artificial Sequence
  Description of Artificial Sequence: Synthetic oligonucleotide
cuacugcaggcaccuggga

SEQ ID NO: 1468494 - RNA, 19 nt, Artificial Sequence
  Description of Artificial Sequence: Synthetic oligonucleotide
cgagcuggcccgcagcccc

SEQ ID NO: 1468495 - RNA, 19 nt, Artificial Sequence
  Description of Artificial Sequence: Synthetic oligonucleotide
auguuaccuucuggcuuca

SEQ ID NO: 1468496 - RNA, 19 nt, Artificial Sequence
  Description of Artificial Sequence: Synthetic oligonucleotide
aagccaccgguggcgcgcu

SEQ ID NO: 1468497 - RNA, 19 nt, Artificial Sequence
  Description of Artificial Sequence: Synthetic oligonucleotide
cucgccgccgcucuuacuu

SEQ ID NO: 1468498 - RNA, 19 nt, Artificial Sequence
  Description of Artificial Sequence: Synthetic oligonucleotide
ggggcuuguuagccucugc

SEQ ID NO: 1468499 - RNA, 19 nt, Artificial Sequence
  Description of Artificial Sequence: Synthetic oligonucleotide
ucucgccgccgcucuuacu

SEQ ID NO: 1468500 - RNA, 19 nt, Artificial Sequence
  Description of Artificial Sequence: Synthetic oligonucleotide
gggccugugccuugcgcac

SEQ ID NO: 1468501 - RNA, 19 nt, Artificial Sequence
  Description of Artificial Sequence: Synthetic oligonucleotide
ccgcucuuacuucccgccg

SEQ ID NO: 1468502 - RNA, 19 nt, Artificial Sequence
  Description of Artificial Sequence: Synthetic oligonucleotide
ccugguacuugagccgccc

SEQ ID NO: 1468503 - RNA, 19 nt, Artificial Sequence
  Description of Artificial Sequence: Synthetic oligonucleotide
aggcgugguggccgccuca

SEQ ID NO: 1468504 - RNA, 19 nt, Artificial Sequence
  Description of Artificial Sequence: Synthetic oligonucleotide
uccuuccgccgugccagcu

SEQ ID NO: 1468505 - RNA, 19 nt, Artificial Sequence
  Description of Artificial Sequence: Synthetic oligonucleotide
cgcucuuacuucccgccgc

SEQ ID NO: 1468506 - RNA, 19 nt, Artificial Sequence
  Description of Artificial Sequence: Synthetic oligonucleotide
gagccgggccugugccuug

SEQ ID NO: 1468507 - RNA, 19 nt, Artificial Sequence
  Description of Artificial Sequence: Synthetic oligonucleotide
cccgaaacauggacuccug

SEQ ID NO: 1468508 - RNA, 19 nt, Artificial Sequence
  Description of Artificial Sequence: Synthetic oligonucleotide
uuccgccgugccagcucca

SEQ ID NO: 1468509 - RNA, 19 nt, Artificial Sequence
  Description of Artificial Sequence: Synthetic oligonucleotide
ggccuugaucccacgcagc

SEQ ID NO: 1468510 - RNA, 19 nt, Artificial Sequence
  Description of Artificial Sequence: Synthetic oligonucleotide
ccgaagggguuucuggaga

SEQ ID NO: 1468511 - RNA, 19 nt, Artificial Sequence
  Description of Artificial Sequence: Synthetic oligonucleotide
caccugggagggcuugaca

SEQ ID NO: 1468512 - RNA, 19 nt, Artificial Sequence
  Description of Artificial Sequence: Synthetic oligonucleotide
ggcuugacauggaggcgug

SEQ ID NO: 1468513 - RNA, 19 nt, Artificial Sequence
  Description of Artificial Sequence: Synthetic oligonucleotide
cuggugugcgaggaugucu

SEQ ID NO: 1468514 - RNA, 19 nt, Artificial Sequence
  Description of Artificial Sequence: Synthetic oligonucleotide
gggcuugacauggaggcgu

SEQ ID NO: 1468515 - RNA, 19 nt, Artificial Sequence
  Description of Artificial Sequence: Synthetic oligonucleotide
gccugcggggcuuguuagc

SEQ ID NO: 1468516 - RNA, 19 nt, Artificial Sequence
  Description of Artificial Sequence: Synthetic oligonucleotide
uuuucgcgccgcgcuucuc

SEQ ID NO: 1468517 - RNA, 19 nt, Artificial Sequence
  Description of Artificial Sequence: Synthetic oligonucleotide
cagccugcggggcuuguua

SEQ ID NO: 1468518 - RNA, 19 nt, Artificial Sequence
  Description of Artificial Sequence: Synthetic oligonucleotide
ccucagagcgggguccacc

SEQ ID NO: 1468519 - RNA, 19 nt, Artificial Sequence
  Description of Artificial Sequence: Synthetic oligonucleotide
agcuugcgagcagccuucu

SEQ ID NO: 1468520 - RNA, 19 nt, Artificial Sequence
  Description of Artificial Sequence: Synthetic oligonucleotide
cccgcagcuugcgagcagc

SEQ ID NO: 1468521 - RNA, 19 nt, Artificial Sequence
  Description of Artificial Sequence: Synthetic oligonucleotide
uggcucguucccggggcuc

SEQ ID NO: 1468522 - RNA, 19 nt, Artificial Sequence
  Description of Artificial Sequence: Synthetic oligonucleotide
ggggcuuuucgcgccgcgc

SEQ ID NO: 1468523 - RNA, 19 nt, Artificial Sequence
  Description of Artificial Sequence: Synthetic oligonucleotide
uccgccgugccagcuccau

SEQ ID NO: 1468524 - RNA, 19 nt, Artificial Sequence
  Description of Artificial Sequence: Synthetic oligonucleotide
gugccuugcgcaccucccu

SEQ ID NO: 1468525 - RNA, 19 nt, Artificial Sequence
  Description of Artificial Sequence: Synthetic oligonucleotide
ugcaggcaccugggagggc

SEQ ID NO: 1468526 - RNA, 19 nt, Artificial Sequence
  Description of Artificial Sequence: Synthetic oligonucleotide
gggccuggugaucuucaaa

SEQ ID NO: 1468527 - RNA, 19 nt, Artificial Sequence
  Description of Artificial Sequence: Synthetic oligonucleotide
ggucgaccucuaugcccag

SEQ ID NO: 1468528 - RNA, 19 nt, Artificial Sequence
  Description of Artificial Sequence: Synthetic oligonucleotide
ccguccucuucuccacacc

SEQ ID NO: 1468529 - RNA, 19 nt, Artificial Sequence
  Description of Artificial Sequence: Synthetic oligonucleotide
ggccaacaagccaccggug

SEQ ID NO: 1468530 - RNA, 19 nt, Artificial Sequence
  Description of Artificial Sequence: Synthetic oligonucleotide
gcuuuucgcgccgcgcuuc

SEQ ID NO: 1468531 - RNA, 19 nt, Artificial Sequence
  Description of Artificial Sequence: Synthetic oligonucleotide
ggggcucgaucauauuccu

SEQ ID NO: 1468532 - RNA, 19 nt, Artificial Sequence
  Description of Artificial Sequence: Synthetic oligonucleotide
cucuuacuucccgccgcca

SEQ ID NO: 1468533 - RNA, 19 nt, Artificial Sequence
  Description of Artificial Sequence: Synthetic oligonucleotide
uggaggcgugguggccgcc

SEQ ID NO: 1468534 - RNA, 19 nt, Artificial Sequence
  Description of Artificial Sequence: Synthetic oligonucleotide
gccccaucgucagccgccg

SEQ ID NO: 1468535 - RNA, 19 nt, Artificial Sequence
  Description of Artificial Sequence: Synthetic oligonucleotide
ggaggcucccgcagggguc

SEQ ID NO: 1468536 - RNA, 19 nt, Artificial Sequence
  Description of Artificial Sequence: Synthetic oligonucleotide
ccgccaucuucugaaagga

SEQ ID NO: 1468537 - RNA, 19 nt, Artificial Sequence
  Description of Artificial Sequence: Synthetic oligonucleotide
cgaccucuaugcccagcgg

SEQ ID NO: 1468538 - RNA, 19 nt, Artificial Sequence
  Description of Artificial Sequence: Synthetic oligonucleotide
cuuuucgcgccgcgcuucu

SEQ ID NO: 1468539 - RNA, 19 nt, Artificial Sequence
  Description of Artificial Sequence: Synthetic oligonucleotide
aggaacuggucgaccucua

SEQ ID NO: 1468540 - RNA, 19 nt, Artificial Sequence
  Description of Artificial Sequence: Synthetic oligonucleotide
cgcgccgcgcuucucgccg

SEQ ID NO: 1468541 - RNA, 19 nt, Artificial Sequence
  Description of Artificial Sequence: Synthetic oligonucleotide
cguucccggggcucgauca

SEQ ID NO: 1468542 - RNA, 19 nt, Artificial Sequence
  Description of Artificial Sequence: Synthetic oligonucleotide
gccgcgcuucuuguuccgg

SEQ ID NO: 1468543 - RNA, 19 nt, Artificial Sequence
  Description of Artificial Sequence: Synthetic oligonucleotide
ccgcagcuugcgagcagcc

SEQ ID NO: 1468544 - RNA, 19 nt, Artificial Sequence
  Description of Artificial Sequence: Synthetic oligonucleotide
gggccucggccaacaagcc

SEQ ID NO: 1468545 - RNA, 19 nt, Artificial Sequence
  Description of Artificial Sequence: Synthetic oligonucleotide
agccaccgguggcgcgcuc

SEQ ID NO: 1468546 - RNA, 19 nt, Artificial Sequence
  Description of Artificial Sequence: Synthetic oligonucleotide
gcccgcguuuggccuuugg

SEQ ID NO: 1468547 - RNA, 19 nt, Artificial Sequence
  Description of Artificial Sequence: Synthetic oligonucleotide
gccgccucagagcgggguc

SEQ ID NO: 1468548 - RNA, 19 nt, Artificial Sequence
  Description of Artificial Sequence: Synthetic oligonucleotide
ggcgugguggccgccucac

SEQ ID NO: 1468549 - RNA, 19 nt, Artificial Sequence
  Description of Artificial Sequence: Synthetic oligonucleotide
gugccagcuccaugagccu

SEQ ID NO: 1468550 - RNA, 19 nt, Artificial Sequence
  Description of Artificial Sequence: Synthetic oligonucleotide
ccuuccgccgugccagcuc

SEQ ID NO: 1468551 - RNA, 19 nt, Artificial Sequence
  Description of Artificial Sequence: Synthetic oligonucleotide
ggaacuggucgaccucuau

SEQ ID NO: 1468552 - RNA, 19 nt, Artificial Sequence
  Description of Artificial Sequence: Synthetic oligonucleotide
gccaccgguggcgcgcucc

SEQ ID NO: 1468553 - RNA, 19 nt, Artificial Sequence
  Description of Artificial Sequence: Synthetic oligonucleotide
cacccgcagcuugcgagca

SEQ ID NO: 1468554 - RNA, 19 nt, Artificial Sequence
  Description of Artificial Sequence: Synthetic oligonucleotide
cucccgcaggggucaccuc

SEQ ID NO: 1468555 - RNA, 19 nt, Artificial Sequence
  Description of Artificial Sequence: Synthetic oligonucleotide
ccaugagccuccgggccac

SEQ ID NO: 1468556 - RNA, 19 nt, Artificial Sequence
  Description of Artificial Sequence: Synthetic oligonucleotide
gaccggccaacggcuuguc

SEQ ID NO: 1468557 - RNA, 19 nt, Artificial Sequence
  Description of Artificial Sequence: Synthetic oligonucleotide
gggcucgaucauauuccuc

SEQ ID NO: 1468558 - RNA, 19 nt, Artificial Sequence
  Description of Artificial Sequence: Synthetic oligonucleotide
gcuugcgagcagccuucuc

SEQ ID NO: 1468559 - RNA, 19 nt, Artificial Sequence
  Description of Artificial Sequence: Synthetic oligonucleotide
cgccgcucuuacuucccgc

SEQ ID NO: 1468560 - RNA, 19 nt, Artificial Sequence
  Description of Artificial Sequence: Synthetic oligonucleotide
uagcccgcguuuggccuuu

SEQ ID NO: 1468561 - RNA, 19 nt, Artificial Sequence
  Description of Artificial Sequence: Synthetic oligonucleotide
cagguccucuuguuugguu

SEQ ID NO: 1468562 - RNA, 19 nt, Artificial Sequence
  Description of Artificial Sequence: Synthetic oligonucleotide
ccaccgagcuggcccgcag

SEQ ID NO: 1468563 - RNA, 19 nt, Artificial Sequence
  Description of Artificial Sequence: Synthetic oligonucleotide
agcugucgcuccagcuuuu

SEQ ID NO: 1468564 - RNA, 19 nt, Artificial Sequence
  Description of Artificial Sequence: Synthetic oligonucleotide
cuucgccaguuucucccau

SEQ ID NO: 1468565 - RNA, 19 nt, Artificial Sequence
  Description of Artificial Sequence: Synthetic oligonucleotide
gccgggccugugccuugcg

SEQ ID NO: 1468566 - RNA, 19 nt, Artificial Sequence
  Description of Artificial Sequence: Synthetic oligonucleotide
gcucgaucauauuccucuu

SEQ ID NO: 1468567 - RNA, 19 nt, Artificial Sequence
  Description of Artificial Sequence: Synthetic oligonucleotide
gcugguccucaccgucaga

SEQ ID NO: 1468568 - RNA, 19 nt, Artificial Sequence
  Description of Artificial Sequence: Synthetic oligonucleotide
ggacccagguccucuuguu

SEQ ID NO: 1468569 - RNA, 19 nt, Artificial Sequence
  Description of Artificial Sequence: Synthetic oligonucleotide
cggccaacaagccaccggu

SEQ ID NO: 1468570 - RNA, 19 nt, Artificial Sequence
  Description of Artificial Sequence: Synthetic oligonucleotide
gccgcgcuucucgccgccg

SEQ ID NO: 1468571 - RNA, 19 nt, Artificial Sequence
  Description of Artificial Sequence: Synthetic oligonucleotide
cccgcguuuggccuuuggu

SEQ ID NO: 1468572 - RNA, 19 nt, Artificial Sequence
  Description of Artificial Sequence: Synthetic oligonucleotide
cggggcuuuucgcgccgcg

SEQ ID NO: 1468573 - RNA, 19 nt, Artificial Sequence
  Description of Artificial Sequence: Synthetic oligonucleotide
gcgccgcgcuucucgccgc

SEQ ID NO: 1468574 - RNA, 19 nt, Artificial Sequence
  Description of Artificial Sequence: Synthetic oligonucleotide
ccccaucgucagccgccgg

SEQ ID NO: 1468575 - RNA, 19 nt, Artificial Sequence
  Description of Artificial Sequence: Synthetic oligonucleotide
ggccaacggcuuguccaga

SEQ ID NO: 1468576 - RNA, 19 nt, Artificial Sequence
  Description of Artificial Sequence: Synthetic oligonucleotide
ggcuuuucgcgccgcgcuu

SEQ ID NO: 1468577 - RNA, 19 nt, Artificial Sequence
  Description of Artificial Sequence: Synthetic oligonucleotide
cggccccaucgucagccgc

SEQ ID NO: 1468578 - RNA, 19 nt, Artificial Sequence
  Description of Artificial Sequence: Synthetic oligonucleotide
gcgcaccucccugggcagc

SEQ ID NO: 1468579 - RNA, 19 nt, Artificial Sequence
  Description of Artificial Sequence: Synthetic oligonucleotide
ggugugcgaggaugucuuu

SEQ ID NO: 1468580 - RNA, 19 nt, Artificial Sequence
  Description of Artificial Sequence: Synthetic oligonucleotide
gccgccucacuccuuucuu

SEQ ID NO: 1468581 - RNA, 19 nt, Artificial Sequence
  Description of Artificial Sequence: Synthetic oligonucleotide
gcgcuucucgccgccgcuc

SEQ ID NO: 1468582 - RNA, 19 nt, Artificial Sequence
  Description of Artificial Sequence: Synthetic oligonucleotide
ggucaacccgaagggguuu

SEQ ID NO: 1468583 - RNA, 19 nt, Artificial Sequence
  Description of Artificial Sequence: Synthetic oligonucleotide
ggaccuggugugcgaggau

SEQ ID NO: 1468584 - RNA, 19 nt, Artificial Sequence
  Description of Artificial Sequence: Synthetic oligonucleotide
gcucuacggugggcagggc

SEQ ID NO: 1468585 - RNA, 19 nt, Artificial Sequence
  Description of Artificial Sequence: Synthetic oligonucleotide
agcccgcguuuggccuuug

SEQ ID NO: 1468586 - RNA, 19 nt, Artificial Sequence
  Description of Artificial Sequence: Synthetic oligonucleotide
gcggggcuuuucgcgccgc

SEQ ID NO: 1468587 - RNA, 19 nt, Artificial Sequence
  Description of Artificial Sequence: Synthetic oligonucleotide
ccuugaucccacgcagccu

SEQ ID NO: 1468588 - RNA, 19 nt, Artificial Sequence
  Description of Artificial Sequence: Synthetic oligonucleotide
ccgguggcgcgcuccugca

SEQ ID NO: 1468589 - RNA, 19 nt, Artificial Sequence
  Description of Artificial Sequence: Synthetic oligonucleotide
ccgcucaaugauguccugu

SEQ ID NO: 1468590 - RNA, 19 nt, Artificial Sequence
  Description of Artificial Sequence: Synthetic oligonucleotide
cccgcaggggucaccucua

SEQ ID NO: 1468591 - RNA, 19 nt, Artificial Sequence
  Description of Artificial Sequence: Synthetic oligonucleotide
gcucguucccggggcucga

SEQ ID NO: 1468592 - RNA, 19 nt, Artificial Sequence
  Description of Artificial Sequence: Synthetic oligonucleotide
cucguucccggggcucgau

SEQ ID NO: 1468593 - RNA, 19 nt, Artificial Sequence
  Description of Artificial Sequence: Synthetic oligonucleotide
ccgccgccaucuucugaaa

SEQ ID NO: 1468594 - RNA, 19 nt, Artificial Sequence
  Description of Artificial Sequence: Synthetic oligonucleotide
gcgcuugaacuuggcucgu

SEQ ID NO: 1468595 - RNA, 19 nt, Artificial Sequence
  Description of Artificial Sequence: Synthetic oligonucleotide
gcggggcuuguuagccucu

SEQ ID NO: 1468596 - RNA, 19 nt, Artificial Sequence
  Description of Artificial Sequence: Synthetic oligonucleotide
ccugaccggccaacggcuu

SEQ ID NO: 1468597 - RNA, 19 nt, Artificial Sequence
  Description of Artificial Sequence: Synthetic oligonucleotide
ccagaguccgcggggcuuu

SEQ ID NO: 1468598 - RNA, 19 nt, Artificial Sequence
  Description of Artificial Sequence: Synthetic oligonucleotide
gccggcggcuccacacagu

SEQ ID NO: 1468599 - RNA, 19 nt, Artificial Sequence
  Description of Artificial Sequence: Synthetic oligonucleotide
ccagugggugaggucucau

SEQ ID NO: 1468600 - RNA, 19 nt, Artificial Sequence
  Description of Artificial Sequence: Synthetic oligonucleotide
cgucagccgccggcggcuc

SEQ ID NO: 1468601 - RNA, 19 nt, Artificial Sequence
  Description of Artificial Sequence: Synthetic oligonucleotide
cagaguccgcggggcuuuu

SEQ ID NO: 1468602 - RNA, 19 nt, Artificial Sequence
  Description of Artificial Sequence: Synthetic oligonucleotide
cggcggcuccacacagucu

SEQ ID NO: 1468603 - RNA, 19 nt, Artificial Sequence
  Description of Artificial Sequence: Synthetic oligonucleotide
gccccagccugcggggcuu

SEQ ID NO: 1468604 - RNA, 19 nt, Artificial Sequence
  Description of Artificial Sequence: Synthetic oligonucleotide
cgccgccucagagcggggu

SEQ ID NO: 1468605 - RNA, 19 nt, Artificial Sequence
  Description of Artificial Sequence: Synthetic oligonucleotide
cgcuugaacuuggcucguu

SEQ ID NO: 1468606 - RNA, 19 nt, Artificial Sequence
  Description of Artificial Sequence: Synthetic oligonucleotide
aaagaagaaccuuuaaguc

SEQ ID NO: 1468607 - RNA, 19 nt, Artificial Sequence
  Description of Artificial Sequence: Synthetic oligonucleotide
aaugucacugaccaugccc

SEQ ID NO: 1468608 - RNA, 19 nt, Artificial Sequence
  Description of Artificial Sequence: Synthetic oligonucleotide
uuauucaugaucuuggggc

SEQ ID NO: 1468609 - RNA, 19 nt, Artificial Sequence
  Description of Artificial Sequence: Synthetic oligonucleotide
ugaucuuuaugucugagag

SEQ ID NO: 1468610 - RNA, 19 nt, Artificial Sequence
  Description of Artificial Sequence: Synthetic oligonucleotide
agauauggaggucacaacc

SEQ ID NO: 1468611 - RNA, 19 nt, Artificial Sequence
  Description of Artificial Sequence: Synthetic oligonucleotide
ugauuuucauuccucauag

SEQ ID NO: 1468612 - RNA, 19 nt, Artificial Sequence
  Description of Artificial Sequence: Synthetic oligonucleotide
uccaauuauaucuaggaac

SEQ ID NO: 1468613 - RNA, 19 nt, Artificial Sequence
  Description of Artificial Sequence: Synthetic oligonucleotide
aagaagaaccuuuaagucu

SEQ ID NO: 1468614 - RNA, 19 nt, Artificial Sequence
  Description of Artificial Sequence: Synthetic oligonucleotide
aaugggaugucaugaacuc

SEQ ID NO: 1468615 - RNA, 19 nt, Artificial Sequence
  Description of Artificial Sequence: Synthetic oligonucleotide
ugaauuggaauaccagugg

SEQ ID NO: 1468616 - RNA, 19 nt, Artificial Sequence
  Description of Artificial Sequence: Synthetic oligonucleotide
acgggugugaaguagaagg

SEQ ID NO: 1468617 - RNA, 19 nt, Artificial Sequence
  Description of Artificial Sequence: Synthetic oligonucleotide
aguucaugcagcuuuggac

SEQ ID NO: 1468618 - RNA, 19 nt, Artificial Sequence
  Description of Artificial Sequence: Synthetic oligonucleotide
ugaaguagaagguuauucc

SEQ ID NO: 1468619 - RNA, 19 nt, Artificial Sequence
  Description of Artificial Sequence: Synthetic oligonucleotide
uacaacaugacacauuuau

SEQ ID NO: 1468620 - RNA, 19 nt, Artificial Sequence
  Description of Artificial Sequence: Synthetic oligonucleotide
uuaaugguugugucaaagg

SEQ ID NO: 1468621 - RNA, 19 nt, Artificial Sequence
  Description of Artificial Sequence: Synthetic oligonucleotide
gaccaauuggaccacaaag

SEQ ID NO: 1468622 - RNA, 19 nt, Artificial Sequence
  Description of Artificial Sequence: Synthetic oligonucleotide
uguucuuucaagauccaga

SEQ ID NO: 1468623 - RNA, 19 nt, Artificial Sequence
  Description of Artificial Sequence: Synthetic oligonucleotide
gaaguagaagguuauuccc

SEQ ID NO: 1468624 - RNA, 19 nt, Artificial Sequence
  Description of Artificial Sequence: Synthetic oligonucleotide
caacaugacacauuuauuc

SEQ ID NO: 1468625 - RNA, 19 nt, Artificial Sequence
  Description of Artificial Sequence: Synthetic oligonucleotide
accuccaagagucucuucc

SEQ ID NO: 1468626 - RNA, 19 nt, Artificial Sequence
  Description of Artificial Sequence: Synthetic oligonucleotide
gaauuggaauaccaguggg

SEQ ID NO: 1468627 - RNA, 19 nt, Artificial Sequence
  Description of Artificial Sequence: Synthetic oligonucleotide
ucgaauagggucuuuacac

SEQ ID NO: 1468628 - RNA, 19 nt, Artificial Sequence
  Description of Artificial Sequence: Synthetic oligonucleotide
ugcgggaaagaccugaugc

SEQ ID NO: 1468629 - RNA, 19 nt, Artificial Sequence
  Description of Artificial Sequence: Synthetic oligonucleotide
uauagaagaggccuucagc

SEQ ID NO: 1468630 - RNA, 19 nt, Artificial Sequence
  Description of Artificial Sequence: Synthetic oligonucleotide
augucaugaacucuugagg

SEQ ID NO: 1468631 - RNA, 19 nt, Artificial Sequence
  Description of Artificial Sequence: Synthetic oligonucleotide
acacaaaacacauguguuc

SEQ ID NO: 1468632 - RNA, 19 nt, Artificial Sequence
  Description of Artificial Sequence: Synthetic oligonucleotide
cucaggaggaacaaguacc

SEQ ID NO: 1468633 - RNA, 19 nt, Artificial Sequence
  Description of Artificial Sequence: Synthetic oligonucleotide
ugugucaaaggcaaacaca

SEQ ID NO: 1468634 - RNA, 19 nt, Artificial Sequence
  Description of Artificial Sequence: Synthetic oligonucleotide
acaaguaccaggguucugc

SEQ ID NO: 1468635 - RNA, 19 nt, Artificial Sequence
  Description of Artificial Sequence: Synthetic oligonucleotide
ugucaugaacucuugaggu

SEQ ID NO: 1468636 - RNA, 19 nt, Artificial Sequence
  Description of Artificial Sequence: Synthetic oligonucleotide
guucaugcagcuuuggacc

SEQ ID NO: 1468637 - RNA, 19 nt, Artificial Sequence
  Description of Artificial Sequence: Synthetic oligonucleotide
uuuucauuccucauaggaa

SEQ ID NO: 1468638 - RNA, 19 nt, Artificial Sequence
  Description of Artificial Sequence: Synthetic oligonucleotide
uuuaaugguugugucaaag

SEQ ID NO: 1468639 - RNA, 19 nt, Artificial Sequence
  Description of Artificial Sequence: Synthetic oligonucleotide
aggaauaccaucccaggag

SEQ ID NO: 1468640 - RNA, 19 nt, Artificial Sequence
  Description of Artificial Sequence: Synthetic oligonucleotide
uuaguacauaaauaaauuu

SEQ ID NO: 1468641 - RNA, 19 nt, Artificial Sequence
  Description of Artificial Sequence: Synthetic oligonucleotide
ugcccuuagagauacucgg

SEQ ID NO: 1468642 - RNA, 19 nt, Artificial Sequence
  Description of Artificial Sequence: Synthetic oligonucleotide
aauuuuggagccggacucc

SEQ ID NO: 1468643 - RNA, 19 nt, Artificial Sequence
  Description of Artificial Sequence: Synthetic oligonucleotide
uuuuacuccucccauguuc

SEQ ID NO: 1468644 - RNA, 19 nt, Artificial Sequence
  Description of Artificial Sequence: Synthetic oligonucleotide
gaauucuuaagauggguga

SEQ ID NO: 1468645 - RNA, 19 nt, Artificial Sequence
  Description of Artificial Sequence: Synthetic oligonucleotide
uuaagaugggugauuuuca

SEQ ID NO: 1468646 - RNA, 19 nt, Artificial Sequence
  Description of Artificial Sequence: Synthetic oligonucleotide
uacaguuuaaucugcugug

SEQ ID NO: 1468647 - RNA, 19 nt, Artificial Sequence
  Description of Artificial Sequence: Synthetic oligonucleotide
aauggauucuggugagauc

SEQ ID NO: 1468648 - RNA, 19 nt, Artificial Sequence
  Description of Artificial Sequence: Synthetic oligonucleotide
guaauugccaacaggcugg

SEQ ID NO: 1468649 - RNA, 19 nt, Artificial Sequence
  Description of Artificial Sequence: Synthetic oligonucleotide
aguacaauuuuggagccgg

SEQ ID NO: 1468650 - RNA, 19 nt, Artificial Sequence
  Description of Artificial Sequence: Synthetic oligonucleotide
ugugcuuauagaagaggcc

SEQ ID NO: 1468651 - RNA, 19 nt, Artificial Sequence
  Description of Artificial Sequence: Synthetic oligonucleotide
uuaguacaauuuuggagcc

SEQ ID NO: 1468652 - RNA, 19 nt, Artificial Sequence
  Description of Artificial Sequence: Synthetic oligonucleotide
cuuuaugucugagagcagg

SEQ ID NO: 1468653 - RNA, 19 nt, Artificial Sequence
  Description of Artificial Sequence: Synthetic oligonucleotide
uggguuuaguacaauuuug

SEQ ID NO: 1468654 - RNA, 19 nt, Artificial Sequence
  Description of Artificial Sequence: Synthetic oligonucleotide
uucauucagccccagagaa

SEQ ID NO: 1468655 - RNA, 19 nt, Artificial Sequence
  Description of Artificial Sequence: Synthetic oligonucleotide
aagaccugaugcacaaugc

SEQ ID NO: 1468656 - RNA, 19 nt, Artificial Sequence
  Description of Artificial Sequence: Synthetic oligonucleotide
uuuacuccucccauguucu

SEQ ID NO: 1468657 - RNA, 19 nt, Artificial Sequence
  Description of Artificial Sequence: Synthetic oligonucleotide
uguccaauuaaaagcugca

SEQ ID NO: 1468658 - RNA, 19 nt, Artificial Sequence
  Description of Artificial Sequence: Synthetic oligonucleotide
caucaaauuugauguagag

SEQ ID NO: 1468659 - RNA, 19 nt, Artificial Sequence
  Description of Artificial Sequence: Synthetic oligonucleotide
caaauuugauguagagucc

SEQ ID NO: 1468660 - RNA, 19 nt, Artificial Sequence
  Description of Artificial Sequence: Synthetic oligonucleotide
cuguccaauuaaaagcugc

SEQ ID NO: 1468661 - RNA, 19 nt, Artificial Sequence
  Description of Artificial Sequence: Synthetic oligonucleotide
aaugguugugucaaaggca

SEQ ID NO: 1468662 - RNA, 19 nt, Artificial Sequence
  Description of Artificial Sequence: Synthetic oligonucleotide
uagaagguuauucccuccc

SEQ ID NO: 1468663 - RNA, 19 nt, Artificial Sequence
  Description of Artificial Sequence: Synthetic oligonucleotide
uugaggugcccuuagagau

SEQ ID NO: 1468664 - RNA, 19 nt, Artificial Sequence
  Description of Artificial Sequence: Synthetic oligonucleotide
uguaaagcagauucucuuc

SEQ ID NO: 1468665 - RNA, 19 nt, Artificial Sequence
  Description of Artificial Sequence: Synthetic oligonucleotide
uuuacacaccaacacgggu

SEQ ID NO: 1468666 - RNA, 19 nt, Artificial Sequence
  Description of Artificial Sequence: Synthetic oligonucleotide
aggccuucagcugaaaugg

SEQ ID NO: 1468667 - RNA, 19 nt, Artificial Sequence
  Description of Artificial Sequence: Synthetic oligonucleotide
ucagggugugcuuauagaa

SEQ ID NO: 1468668 - RNA, 19 nt, Artificial Sequence
  Description of Artificial Sequence: Synthetic oligonucleotide
uugugucaaaggcaaacac

SEQ ID NO: 1468669 - RNA, 19 nt, Artificial Sequence
  Description of Artificial Sequence: Synthetic oligonucleotide
uauucaugaucuuggggcu

SEQ ID NO: 1468670 - RNA, 19 nt, Artificial Sequence
  Description of Artificial Sequence: Synthetic oligonucleotide
uggaauaccaguggggaug

SEQ ID NO: 1468671 - RNA, 19 nt, Artificial Sequence
  Description of Artificial Sequence: Synthetic oligonucleotide
aauaccaguggggauguca

SEQ ID NO: 1468672 - RNA, 19 nt, Artificial Sequence
  Description of Artificial Sequence: Synthetic oligonucleotide
cuuuacacaccaacacggg

SEQ ID NO: 1468673 - RNA, 19 nt, Artificial Sequence
  Description of Artificial Sequence: Synthetic oligonucleotide
cuacacagaagcacauucc

SEQ ID NO: 1468674 - RNA, 19 nt, Artificial Sequence
  Description of Artificial Sequence: Synthetic oligonucleotide
gugaauuggaauaccagug

SEQ ID NO: 1468675 - RNA, 19 nt, Artificial Sequence
  Description of Artificial Sequence: Synthetic oligonucleotide
gaggucacaaccuccaaga

SEQ ID NO: 1468676 - RNA, 19 nt, Artificial Sequence
  Description of Artificial Sequence: Synthetic oligonucleotide
uuccaauuauaucuaggaa

SEQ ID NO: 1468677 - RNA, 19 nt, Artificial Sequence
  Description of Artificial Sequence: Synthetic oligonucleotide
uuauaucuaggaacuguuc

SEQ ID NO: 1468678 - RNA, 19 nt, Artificial Sequence
  Description of Artificial Sequence: Synthetic oligonucleotide
caucuaugguuucaguggc

SEQ ID NO: 1468679 - RNA, 19 nt, Artificial Sequence
  Description of Artificial Sequence: Synthetic oligonucleotide
ucuaugguuucaguggcgc

SEQ ID NO: 1468680 - RNA, 19 nt, Artificial Sequence
  Description of Artificial Sequence: Synthetic oligonucleotide
aaguucaugcagcuuugga

SEQ ID NO: 1468681 - RNA, 19 nt, Artificial Sequence
  Description of Artificial Sequence: Synthetic oligonucleotide
auuugauguagaguccagg

SEQ ID NO: 1468682 - RNA, 19 nt, Artificial Sequence
  Description of Artificial Sequence: Synthetic oligonucleotide
uuguaaagcagauucucuu

SEQ ID NO: 1468683 - RNA, 19 nt, Artificial Sequence
  Description of Artificial Sequence: Synthetic oligonucleotide
uuaagucuguguuggcggc

SEQ ID NO: 1468684 - RNA, 19 nt, Artificial Sequence
  Description of Artificial Sequence: Synthetic oligonucleotide
ucuaggugaauuggaauac

SEQ ID NO: 1468685 - RNA, 19 nt, Artificial Sequence
  Description of Artificial Sequence: Synthetic oligonucleotide
acugaccaugcccacauca

SEQ ID NO: 1468686 - RNA, 19 nt, Artificial Sequence
  Description of Artificial Sequence: Synthetic oligonucleotide
aauucuuaagaugggugau

SEQ ID NO: 1468687 - RNA, 19 nt, Artificial Sequence
  Description of Artificial Sequence: Synthetic oligonucleotide
gaagguuauucccucccug

SEQ ID NO: 1468688 - RNA, 19 nt, Artificial Sequence
  Description of Artificial Sequence: Synthetic oligonucleotide
aagucacugcgggaaagac

SEQ ID NO: 1468689 - RNA, 19 nt, Artificial Sequence
  Description of Artificial Sequence: Synthetic oligonucleotide
ggaauaccaucccaggagg

SEQ ID NO: 1468690 - RNA, 19 nt, Artificial Sequence
  Description of Artificial Sequence: Synthetic oligonucleotide
ucuguccaauuaaaagcug

SEQ ID NO: 1468691 - RNA, 19 nt, Artificial Sequence
  Description of Artificial Sequence: Synthetic oligonucleotide
uccgaaugggaugucauga

SEQ ID NO: 1468692 - RNA, 19 nt, Artificial Sequence
  Description of Artificial Sequence: Synthetic oligonucleotide
agguaugcacaucaaauuu

SEQ ID NO: 1468693 - RNA, 19 nt, Artificial Sequence
  Description of Artificial Sequence: Synthetic oligonucleotide
accaacacgggugugaagu

SEQ ID NO: 1468694 - RNA, 19 nt, Artificial Sequence
  Description of Artificial Sequence: Synthetic oligonucleotide
ugugcaauccagagaggac

SEQ ID NO: 1468695 - RNA, 19 nt, Artificial Sequence
  Description of Artificial Sequence: Synthetic oligonucleotide
gugugcuuauagaagaggc

SEQ ID NO: 1468696 - RNA, 19 nt, Artificial Sequence
  Description of Artificial Sequence: Synthetic oligonucleotide
ugucccagccacacgagcu

SEQ ID NO: 1468697 - RNA, 19 nt, Artificial Sequence
  Description of Artificial Sequence: Synthetic oligonucleotide
ggguuuaguacaauuuugg

SEQ ID NO: 1468698 - RNA, 19 nt, Artificial Sequence
  Description of Artificial Sequence: Synthetic oligonucleotide
ugaucuuggggcucuuaug

SEQ ID NO: 1468699 - RNA, 19 nt, Artificial Sequence
  Description of Artificial Sequence: Synthetic oligonucleotide
uguguggaaauggauucug

SEQ ID NO: 1468700 - RNA, 19 nt, Artificial Sequence
  Description of Artificial Sequence: Synthetic oligonucleotide
acucggcuggcaucuaugg

SEQ ID NO: 1468701 - RNA, 19 nt, Artificial Sequence
  Description of Artificial Sequence: Synthetic oligonucleotide
cucccuguuagucaugcug

SEQ ID NO: 1468702 - RNA, 19 nt, Artificial Sequence
  Description of Artificial Sequence: Synthetic oligonucleotide
aucaugugcaauccagaga

SEQ ID NO: 1468703 - RNA, 19 nt, Artificial Sequence
  Description of Artificial Sequence: Synthetic oligonucleotide
accaauuggaccacaaaga

SEQ ID NO: 1468704 - RNA, 19 nt, Artificial Sequence
  Description of Artificial Sequence: Synthetic oligonucleotide
agucacugcgggaaagacc

SEQ ID NO: 1468705 - RNA, 19 nt, Artificial Sequence
  Description of Artificial Sequence: Synthetic oligonucleotide
agaagguaugcacaucaaa

SEQ ID NO: 1468706 - RNA, 19 nt, Artificial Sequence
  Description of Artificial Sequence: Synthetic oligonucleotide
aaggcccacaguucgaaua

SEQ ID NO: 1468707 - RNA, 19 nt, Artificial Sequence
  Description of Artificial Sequence: Synthetic oligonucleotide
gaagcaugggguccagaug

SEQ ID NO: 1468708 - RNA, 19 nt, Artificial Sequence
  Description of Artificial Sequence: Synthetic oligonucleotide
uggaauguaucuguacagu

SEQ ID NO: 1468709 - RNA, 19 nt, Artificial Sequence
  Description of Artificial Sequence: Synthetic oligonucleotide
uggagccggacuccgaaug

SEQ ID NO: 1468710 - RNA, 19 nt, Artificial Sequence
  Description of Artificial Sequence: Synthetic oligonucleotide
ugcuuuuacuccucccaug

SEQ ID NO: 1468711 - RNA, 19 nt, Artificial Sequence
  Description of Artificial Sequence: Synthetic oligonucleotide
gucaugaacucuugaggug

SEQ ID NO: 1468712 - RNA, 19 nt, Artificial Sequence
  Description of Artificial Sequence: Synthetic oligonucleotide
aguuuaaucugcugugauu

SEQ ID NO: 1468713 - RNA, 19 nt, Artificial Sequence
  Description of Artificial Sequence: Synthetic oligonucleotide
uuucaagauccagaagaga

SEQ ID NO: 1468714 - RNA, 19 nt, Artificial Sequence
  Description of Artificial Sequence: Synthetic oligonucleotide
augucagauauggagguca

SEQ ID NO: 1468715 - RNA, 19 nt, Artificial Sequence
  Description of Artificial Sequence: Synthetic oligonucleotide
agagauacucggcuggcau

SEQ ID NO: 1468716 - RNA, 19 nt, Artificial Sequence
  Description of Artificial Sequence: Synthetic oligonucleotide
gagagagaagcaugggguc

SEQ ID NO: 1468717 - RNA, 19 nt, Artificial Sequence
  Description of Artificial Sequence: Synthetic oligonucleotide
gguacaucaacuggggacc

SEQ ID NO: 1468718 - RNA, 19 nt, Artificial Sequence
  Description of Artificial Sequence: Synthetic oligonucleotide
ucggcuggcaucuaugguu

SEQ ID NO: 1468719 - RNA, 19 nt, Artificial Sequence
  Description of Artificial Sequence: Synthetic oligonucleotide
augaggucaaacucuuuaa

SEQ ID NO: 1468720 - RNA, 19 nt, Artificial Sequence
  Description of Artificial Sequence: Synthetic oligonucleotide
gaccugaugcacaaugcug

SEQ ID NO: 1468721 - RNA, 19 nt, Artificial Sequence
  Description of Artificial Sequence: Synthetic oligonucleotide
guagaagguuauucccucc

SEQ ID NO: 1468722 - RNA, 19 nt, Artificial Sequence
  Description of Artificial Sequence: Synthetic oligonucleotide
uacaauuuuggagccggac

SEQ ID NO: 1468723 - RNA, 19 nt, Artificial Sequence
  Description of Artificial Sequence: Synthetic oligonucleotide
guucgaauagggucuuuac

SEQ ID NO: 1468724 - RNA, 19 nt, Artificial Sequence
  Description of Artificial Sequence: Synthetic oligonucleotide
ugucagauauggaggucac

SEQ ID NO: 1468725 - RNA, 19 nt, Artificial Sequence
  Description of Artificial Sequence: Synthetic oligonucleotide
acagccuauuuuccaagcu

SEQ ID NO: 1468726 - RNA, 19 nt, Artificial Sequence
  Description of Artificial Sequence: Synthetic oligonucleotide
uaguacaauuuuggagccg

SEQ ID NO: 1468727 - RNA, 19 nt, Artificial Sequence
  Description of Artificial Sequence: Synthetic oligonucleotide
uucuuaagaugggugauuu

SEQ ID NO: 1468728 - RNA, 19 nt, Artificial Sequence
  Description of Artificial Sequence: Synthetic oligonucleotide
uuagucaugcuggccagcu

SEQ ID NO: 1468729 - RNA, 19 nt, Artificial Sequence
  Description of Artificial Sequence: Synthetic oligonucleotide
cucuaggugaauuggaaua

SEQ ID NO: 1468730 - RNA, 19 nt, Artificial Sequence
  Description of Artificial Sequence: Synthetic oligonucleotide
caacagccuauuuuccaag

SEQ ID NO: 1468731 - RNA, 19 nt, Artificial Sequence
  Description of Artificial Sequence: Synthetic oligonucleotide
aucagggugugcuuauaga

SEQ ID NO: 1468732 - RNA, 19 nt, Artificial Sequence
  Description of Artificial Sequence: Synthetic oligonucleotide
uagaccaguguguggaaau

SEQ ID NO: 1468733 - RNA, 19 nt, Artificial Sequence
  Description of Artificial Sequence: Synthetic oligonucleotide
auuuuggagccggacuccg

SEQ ID NO: 1468734 - RNA, 19 nt, Artificial Sequence
  Description of Artificial Sequence: Synthetic oligonucleotide
uuuggcugucuuccaauua

SEQ ID NO: 1468735 - RNA, 19 nt, Artificial Sequence
  Description of Artificial Sequence: Synthetic oligonucleotide
guaugcacaucaaauuuga

SEQ ID NO: 1468736 - RNA, 19 nt, Artificial Sequence
  Description of Artificial Sequence: Synthetic oligonucleotide
uacucggcuggcaucuaug

SEQ ID NO: 1468737 - RNA, 19 nt, Artificial Sequence
  Description of Artificial Sequence: Synthetic oligonucleotide
caggaauggagguuuuauc

SEQ ID NO: 1468738 - RNA, 19 nt, Artificial Sequence
  Description of Artificial Sequence: Synthetic oligonucleotide
agguuauucccucccugug

SEQ ID NO: 1468739 - RNA, 19 nt, Artificial Sequence
  Description of Artificial Sequence: Synthetic oligonucleotide
auaccaguggggaugucag

SEQ ID NO: 1468740 - RNA, 19 nt, Artificial Sequence
  Description of Artificial Sequence: Synthetic oligonucleotide
agauacucggcuggcaucu

SEQ ID NO: 1468741 - RNA, 19 nt, Artificial Sequence
  Description of Artificial Sequence: Synthetic oligonucleotide
gcuuuggaccaauuggacc

SEQ ID NO: 1468742 - RNA, 19 nt, Artificial Sequence
  Description of Artificial Sequence: Synthetic oligonucleotide
gguuauucccucccugugc

SEQ ID NO: 1468743 - RNA, 19 nt, Artificial Sequence
  Description of Artificial Sequence: Synthetic oligonucleotide
caauccagagaggaccacc

SEQ ID NO: 1468744 - RNA, 19 nt, Artificial Sequence
  Description of Artificial Sequence: Synthetic oligonucleotide
ugaacucuugaggugcccu

SEQ ID NO: 1468745 - RNA, 19 nt, Artificial Sequence
  Description of Artificial Sequence: Synthetic oligonucleotide
acucuugaggugcccuuag

SEQ ID NO: 1468746 - RNA, 19 nt, Artificial Sequence
  Description of Artificial Sequence: Synthetic oligonucleotide
cauuccucauaggaacugc

SEQ ID NO: 1468747 - RNA, 19 nt, Artificial Sequence
  Description of Artificial Sequence: Synthetic oligonucleotide
uaugcacaucaaauuugau

SEQ ID NO: 1468748 - RNA, 19 nt, Artificial Sequence
  Description of Artificial Sequence: Synthetic oligonucleotide
cagauauggaggucacaac

SEQ ID NO: 1468749 - RNA, 19 nt, Artificial Sequence
  Description of Artificial Sequence: Synthetic oligonucleotide
ggggugguacaucaacugg

SEQ ID NO: 1468750 - RNA, 19 nt, Artificial Sequence
  Description of Artificial Sequence: Synthetic oligonucleotide
guaccaggguucugcagag

SEQ ID NO: 1468751 - RNA, 19 nt, Artificial Sequence
  Description of Artificial Sequence: Synthetic oligonucleotide
ggugugcuuauagaagagg

SEQ ID NO: 1468752 - RNA, 19 nt, Artificial Sequence
  Description of Artificial Sequence: Synthetic oligonucleotide
ugcuuauagaagaggccuu

SEQ ID NO: 1468753 - RNA, 19 nt, Artificial Sequence
  Description of Artificial Sequence: Synthetic oligonucleotide
gggugguacaucaacuggg

SEQ ID NO: 1468754 - RNA, 19 nt, Artificial Sequence
  Description of Artificial Sequence: Synthetic oligonucleotide
caaaccucuguccaauuaa

SEQ ID NO: 1468755 - RNA, 19 nt, Artificial Sequence
  Description of Artificial Sequence: Synthetic oligonucleotide
ggugaauuggaauaccagu

SEQ ID NO: 1468756 - RNA, 19 nt, Artificial Sequence
  Description of Artificial Sequence: Synthetic oligonucleotide
gugcccuuagagauacucg

SEQ ID NO: 1468757 - RNA, 19 nt, Artificial Sequence
  Description of Artificial Sequence: Synthetic oligonucleotide
uggggcucuuaugagguca

SEQ ID NO: 1468758 - RNA, 19 nt, Artificial Sequence
  Description of Artificial Sequence: Synthetic oligonucleotide
ggaggucacaaccuccaag

SEQ ID NO: 1468759 - RNA, 19 nt, Artificial Sequence
  Description of Artificial Sequence: Synthetic oligonucleotide
gucacugcgggaaagaccu

SEQ ID NO: 1468760 - RNA, 19 nt, Artificial Sequence
  Description of Artificial Sequence: Synthetic oligonucleotide
gagaguucuuccagggcug

SEQ ID NO: 1468761 - RNA, 19 nt, Artificial Sequence
  Description of Artificial Sequence: Synthetic oligonucleotide
cacaguucgaauagggucu

SEQ ID NO: 1468762 - RNA, 19 nt, Artificial Sequence
  Description of Artificial Sequence: Synthetic oligonucleotide
gauauggaggucacaaccu

SEQ ID NO: 1468763 - RNA, 19 nt, Artificial Sequence
  Description of Artificial Sequence: Synthetic oligonucleotide
uaggaacuguucugacacc

SEQ ID NO: 1468764 - RNA, 19 nt, Artificial Sequence
  Description of Artificial Sequence: Synthetic oligonucleotide
uggaccaauuggaccacaa

SEQ ID NO: 1468765 - RNA, 19 nt, Artificial Sequence
  Description of Artificial Sequence: Synthetic oligonucleotide
guguggaaauggauucugg

SEQ ID NO: 1468766 - RNA, 19 nt, Artificial Sequence
  Description of Artificial Sequence: Synthetic oligonucleotide
uggauucuggugagaucug

SEQ ID NO: 1468767 - RNA, 19 nt, Artificial Sequence
  Description of Artificial Sequence: Synthetic oligonucleotide
cugcuuacagccuuccuaa

SEQ ID NO: 1468768 - RNA, 19 nt, Artificial Sequence
  Description of Artificial Sequence: Synthetic oligonucleotide
guugugucaaaggcaaaca

SEQ ID NO: 1468769 - RNA, 19 nt, Artificial Sequence
  Description of Artificial Sequence: Synthetic oligonucleotide
gaccaugcccacaucagga

SEQ ID NO: 1468770 - RNA, 19 nt, Artificial Sequence
  Description of Artificial Sequence: Synthetic oligonucleotide
gcugcaagcugguuggccc

SEQ ID NO: 1468771 - RNA, 19 nt, Artificial Sequence
  Description of Artificial Sequence: Synthetic oligonucleotide
cagagaguucuuccagggc

SEQ ID NO: 1468772 - RNA, 19 nt, Artificial Sequence
  Description of Artificial Sequence: Synthetic oligonucleotide
ugcuuugucccuccaucau

SEQ ID NO: 1468773 - RNA, 19 nt, Artificial Sequence
  Description of Artificial Sequence: Synthetic oligonucleotide
aauggagguuuuauccuuu

SEQ ID NO: 1468774 - RNA, 19 nt, Artificial Sequence
  Description of Artificial Sequence: Synthetic oligonucleotide
uuuuggagccggacuccga

SEQ ID NO: 1468775 - RNA, 19 nt, Artificial Sequence
  Description of Artificial Sequence: Synthetic oligonucleotide
cucccauguucuuucaaga

SEQ ID NO: 1468776 - RNA, 19 nt, Artificial Sequence
  Description of Artificial Sequence: Synthetic oligonucleotide
aucuaugguuucaguggcg

SEQ ID NO: 1468777 - RNA, 19 nt, Artificial Sequence
  Description of Artificial Sequence: Synthetic oligonucleotide
gugcuuauagaagaggccu

SEQ ID NO: 1468778 - RNA, 19 nt, Artificial Sequence
  Description of Artificial Sequence: Synthetic oligonucleotide
cacgguugccaggaugugg

SEQ ID NO: 1468779 - RNA, 19 nt, Artificial Sequence
  Description of Artificial Sequence: Synthetic oligonucleotide
ugaggugcccuuagagaua

SEQ ID NO: 1468780 - RNA, 19 nt, Artificial Sequence
  Description of Artificial Sequence: Synthetic oligonucleotide
agccuauuuuccaagcuau

SEQ ID NO: 1468781 - RNA, 19 nt, Artificial Sequence
  Description of Artificial Sequence: Synthetic oligonucleotide
ccucauaggaacugcuuac

SEQ ID NO: 1468782 - RNA, 19 nt, Artificial Sequence
  Description of Artificial Sequence: Synthetic oligonucleotide
cuuugucccuccaucaugu

SEQ ID NO: 1468783 - RNA, 19 nt, Artificial Sequence
  Description of Artificial Sequence: Synthetic oligonucleotide
gagccggacuccgaauggg

SEQ ID NO: 1468784 - RNA, 19 nt, Artificial Sequence
  Description of Artificial Sequence: Synthetic oligonucleotide
gaagucacugcgggaaaga

SEQ ID NO: 1468785 - RNA, 19 nt, Artificial Sequence
  Description of Artificial Sequence: Synthetic oligonucleotide
aguucgaauagggucuuua

SEQ ID NO: 1468786 - RNA, 19 nt, Artificial Sequence
  Description of Artificial Sequence: Synthetic oligonucleotide
uuuggaccaauuggaccac

SEQ ID NO: 1468787 - RNA, 19 nt, Artificial Sequence
  Description of Artificial Sequence: Synthetic oligonucleotide
ccucccauguucuuucaag

SEQ ID NO: 1468788 - RNA, 19 nt, Artificial Sequence
  Description of Artificial Sequence: Synthetic oligonucleotide
gagagaagcauggggucca

SEQ ID NO: 1468789 - RNA, 19 nt, Artificial Sequence
  Description of Artificial Sequence: Synthetic oligonucleotide
agaccaguguguggaaaug

SEQ ID NO: 1468790 - RNA, 19 nt, Artificial Sequence
  Description of Artificial Sequence: Synthetic oligonucleotide
acgguugccaggauguggu

SEQ ID NO: 1468791 - RNA, 19 nt, Artificial Sequence
  Description of Artificial Sequence: Synthetic oligonucleotide
gaugucagauauggagguc

SEQ ID NO: 1468792 - RNA, 19 nt, Artificial Sequence
  Description of Artificial Sequence: Synthetic oligonucleotide
ugguuucaguggcgcaggc

SEQ ID NO: 1468793 - RNA, 19 nt, Artificial Sequence
  Description of Artificial Sequence: Synthetic oligonucleotide
gcucuuaugaggucaaacu

SEQ ID NO: 1468794 - RNA, 19 nt, Artificial Sequence
  Description of Artificial Sequence: Synthetic oligonucleotide
gaauggagguuuuauccuu

SEQ ID NO: 1468795 - RNA, 19 nt, Artificial Sequence
  Description of Artificial Sequence: Synthetic oligonucleotide
ggaaagaccugaugcacaa

SEQ ID NO: 1468796 - RNA, 19 nt, Artificial Sequence
  Description of Artificial Sequence: Synthetic oligonucleotide
uauucccucccugugccau

SEQ ID NO: 1468797 - RNA, 19 nt, Artificial Sequence
  Description of Artificial Sequence: Synthetic oligonucleotide
auucuuaagaugggugauu

SEQ ID NO: 1468798 - RNA, 19 nt, Artificial Sequence
  Description of Artificial Sequence: Synthetic oligonucleotide
ggagccggacuccgaaugg

SEQ ID NO: 1468799 - RNA, 19 nt, Artificial Sequence
  Description of Artificial Sequence: Synthetic oligonucleotide
ccuuagagauacucggcug

SEQ ID NO: 1468800 - RNA, 19 nt, Artificial Sequence
  Description of Artificial Sequence: Synthetic oligonucleotide
uaauugccaacaggcugga

SEQ ID NO: 1468801 - RNA, 19 nt, Artificial Sequence
  Description of Artificial Sequence: Synthetic oligonucleotide
accaugcccacaucaggaa

SEQ ID NO: 1468802 - RNA, 19 nt, Artificial Sequence
  Description of Artificial Sequence: Synthetic oligonucleotide
cacgagcuccugcagcuac

SEQ ID NO: 1468803 - RNA, 19 nt, Artificial Sequence
  Description of Artificial Sequence: Synthetic oligonucleotide
ggcuuauuuggguuuagua

SEQ ID NO: 1468804 - RNA, 19 nt, Artificial Sequence
  Description of Artificial Sequence: Synthetic oligonucleotide
cuuccagggcugagcaaug

SEQ ID NO: 1468805 - RNA, 19 nt, Artificial Sequence
  Description of Artificial Sequence: Synthetic oligonucleotide
augggaugucaugaacucu

SEQ ID NO: 1468806 - RNA, 19 nt, Artificial Sequence
  Description of Artificial Sequence: Synthetic oligonucleotide
gaaauggauucuggugaga

SEQ ID NO: 1468807 - RNA, 19 nt, Artificial Sequence
  Description of Artificial Sequence: Synthetic oligonucleotide
ccagcucuaggugaauugg

SEQ ID NO: 1468808 - RNA, 19 nt, Artificial Sequence
  Description of Artificial Sequence: Synthetic oligonucleotide
gcuuacagccuuccuaauc

SEQ ID NO: 1468809 - RNA, 19 nt, Artificial Sequence
  Description of Artificial Sequence: Synthetic oligonucleotide
uggcuuauuuggguuuagu

SEQ ID NO: 1468810 - RNA, 19 nt, Artificial Sequence
  Description of Artificial Sequence: Synthetic oligonucleotide
caagcugguuggcccagug

SEQ ID NO: 1468811 - RNA, 19 nt, Artificial Sequence
  Description of Artificial Sequence: Synthetic oligonucleotide
uucaguggcgcaggcuugu

SEQ ID NO: 1468812 - RNA, 19 nt, Artificial Sequence
  Description of Artificial Sequence: Synthetic oligonucleotide
uccucccauguucuuucaa

SEQ ID NO: 1468813 - RNA, 19 nt, Artificial Sequence
  Description of Artificial Sequence: Synthetic oligonucleotide
uccuaaucagggugugcuu

SEQ ID NO: 1468814 - RNA, 19 nt, Artificial Sequence
  Description of Artificial Sequence: Synthetic oligonucleotide
caaguaccaggguucugca

SEQ ID NO: 1468815 - RNA, 19 nt, Artificial Sequence
  Description of Artificial Sequence: Synthetic oligonucleotide
uaccaguggggaugucaga

SEQ ID NO: 1468816 - RNA, 19 nt, Artificial Sequence
  Description of Artificial Sequence: Synthetic oligonucleotide
ccaauuggaccacaaagaa

SEQ ID NO: 1468817 - RNA, 19 nt, Artificial Sequence
  Description of Artificial Sequence: Synthetic oligonucleotide
guuagucaugcuggccagc

SEQ ID NO: 1468818 - RNA, 19 nt, Artificial Sequence
  Description of Artificial Sequence: Synthetic oligonucleotide
ggugcccuuagagauacuc

SEQ ID NO: 1468819 - RNA, 19 nt, Artificial Sequence
  Description of Artificial Sequence: Synthetic oligonucleotide
guacaucaacuggggaccc

SEQ ID NO: 1468820 - RNA, 19 nt, Artificial Sequence
  Description of Artificial Sequence: Synthetic oligonucleotide
gacuccgaaugggauguca

SEQ ID NO: 1468821 - RNA, 19 nt, Artificial Sequence
  Description of Artificial Sequence: Synthetic oligonucleotide
cagccuauuuuccaagcua

SEQ ID NO: 1468822 - RNA, 19 nt, Artificial Sequence
  Description of Artificial Sequence: Synthetic oligonucleotide
ggcucuuaugaggucaaac

SEQ ID NO: 1468823 - RNA, 19 nt, Artificial Sequence
  Description of Artificial Sequence: Synthetic oligonucleotide
gcccacaguucgaauaggg

SEQ ID NO: 1468824 - RNA, 19 nt, Artificial Sequence
  Description of Artificial Sequence: Synthetic oligonucleotide
uacaucaacuggggaccca

SEQ ID NO: 1468825 - RNA, 19 nt, Artificial Sequence
  Description of Artificial Sequence: Synthetic oligonucleotide
gcuuuuacuccucccaugu

SEQ ID NO: 1468826 - RNA, 19 nt, Artificial Sequence
  Description of Artificial Sequence: Synthetic oligonucleotide
uagucaugcuggccagcuc

SEQ ID NO: 1468827 - RNA, 19 nt, Artificial Sequence
  Description of Artificial Sequence: Synthetic oligonucleotide
gcuauguucuuccuggaau

SEQ ID NO: 1468828 - RNA, 19 nt, Artificial Sequence
  Description of Artificial Sequence: Synthetic oligonucleotide
uguuggcggcaaaccucug

SEQ ID NO: 1468829 - RNA, 19 nt, Artificial Sequence
  Description of Artificial Sequence: Synthetic oligonucleotide
cacgggugugaaguagaag

SEQ ID NO: 1468830 - RNA, 19 nt, Artificial Sequence
  Description of Artificial Sequence: Synthetic oligonucleotide
gcugaguguagcucugauc

SEQ ID NO: 1468831 - RNA, 19 nt, Artificial Sequence
  Description of Artificial Sequence: Synthetic oligonucleotide
cugcgggaaagaccugaug

SEQ ID NO: 1468832 - RNA, 19 nt, Artificial Sequence
  Description of Artificial Sequence: Synthetic oligonucleotide
caguguguggaaauggauu

SEQ ID NO: 1468833 - RNA, 19 nt, Artificial Sequence
  Description of Artificial Sequence: Synthetic oligonucleotide
ugcuuacagccuuccuaau

SEQ ID NO: 1468834 - RNA, 19 nt, Artificial Sequence
  Description of Artificial Sequence: Synthetic oligonucleotide
gagaagguaugcacaucaa

SEQ ID NO: 1468835 - RNA, 19 nt, Artificial Sequence
  Description of Artificial Sequence: Synthetic oligonucleotide
cacaccaacacggguguga

SEQ ID NO: 1468836 - RNA, 19 nt, Artificial Sequence
  Description of Artificial Sequence: Synthetic oligonucleotide
uuggagccggacuccgaau

SEQ ID NO: 1468837 - RNA, 19 nt, Artificial Sequence
  Description of Artificial Sequence: Synthetic oligonucleotide
cugugccauuccaccacug

SEQ ID NO: 1468838 - RNA, 19 nt, Artificial Sequence
  Description of Artificial Sequence: Synthetic oligonucleotide
gcgggaaagaccugaugca

SEQ ID NO: 1468839 - RNA, 19 nt, Artificial Sequence
  Description of Artificial Sequence: Synthetic oligonucleotide
acaccaacacgggugugaa

SEQ ID NO: 1468840 - RNA, 19 nt, Artificial Sequence
  Description of Artificial Sequence: Synthetic oligonucleotide
ggucacaaccuccaagagu

SEQ ID NO: 1468841 - RNA, 19 nt, Artificial Sequence
  Description of Artificial Sequence: Synthetic oligonucleotide
caacuggggacccaggaau

SEQ ID NO: 1468842 - RNA, 19 nt, Artificial Sequence
  Description of Artificial Sequence: Synthetic oligonucleotide
gucccagccacacgagcuc

SEQ ID NO: 1468843 - RNA, 19 nt, Artificial Sequence
  Description of Artificial Sequence: Synthetic oligonucleotide
uaaucagggugugcuuaua

SEQ ID NO: 1468844 - RNA, 19 nt, Artificial Sequence
  Description of Artificial Sequence: Synthetic oligonucleotide
ggugagaucugaggaucug

SEQ ID NO: 1468845 - RNA, 19 nt, Artificial Sequence
  Description of Artificial Sequence: Synthetic oligonucleotide
gaguguagcucugaucuuu

SEQ ID NO: 1468846 - RNA, 19 nt, Artificial Sequence
  Description of Artificial Sequence: Synthetic oligonucleotide
cuggcuuauuuggguuuag

SEQ ID NO: 1468847 - RNA, 19 nt, Artificial Sequence
  Description of Artificial Sequence: Synthetic oligonucleotide
caccaacacgggugugaag

SEQ ID NO: 1468848 - RNA, 19 nt, Artificial Sequence
  Description of Artificial Sequence: Synthetic oligonucleotide
gggaaagaccugaugcaca

SEQ ID NO: 1468849 - RNA, 19 nt, Artificial Sequence
  Description of Artificial Sequence: Synthetic oligonucleotide
guuggcggcaaaccucugu

SEQ ID NO: 1468850 - RNA, 19 nt, Artificial Sequence
  Description of Artificial Sequence: Synthetic oligonucleotide
aguguagcucugaucuuua

SEQ ID NO: 1468851 - RNA, 19 nt, Artificial Sequence
  Description of Artificial Sequence: Synthetic oligonucleotide
cugcaagcugguuggccca

SEQ ID NO: 1468852 - RNA, 19 nt, Artificial Sequence
  Description of Artificial Sequence: Synthetic oligonucleotide
gcaaugaggcugaguguag

SEQ ID NO: 1468853 - RNA, 19 nt, Artificial Sequence
  Description of Artificial Sequence: Synthetic oligonucleotide
cacugcgggaaagaccuga

SEQ ID NO: 1468854 - RNA, 19 nt, Artificial Sequence
  Description of Artificial Sequence: Synthetic oligonucleotide
uuacuccucccauguucuu

SEQ ID NO: 1468855 - RNA, 19 nt, Artificial Sequence
  Description of Artificial Sequence: Synthetic oligonucleotide
cuaaucagggugugcuuau

SEQ ID NO: 1468856 - RNA, 19 nt, Artificial Sequence
  Description of Artificial Sequence: Synthetic oligonucleotide
gcccaguguccauccacgg

SEQ ID NO: 1468857 - RNA, 19 nt, Artificial Sequence
  Description of Artificial Sequence: Synthetic oligonucleotide
auguaucuguacaguuuaa

SEQ ID NO: 1468858 - RNA, 19 nt, Artificial Sequence
  Description of Artificial Sequence: Synthetic oligonucleotide
cugguuggcccagugucca

SEQ ID NO: 1468859 - RNA, 19 nt, Artificial Sequence
  Description of Artificial Sequence: Synthetic oligonucleotide
guguuggcggcaaaccucu

SEQ ID NO: 1468860 - RNA, 19 nt, Artificial Sequence
  Description of Artificial Sequence: Synthetic oligonucleotide
gcaaaccucuguccaauua

SEQ ID NO: 1468861 - RNA, 19 nt, Artificial Sequence
  Description of Artificial Sequence: Synthetic oligonucleotide
gucagauauggaggucaca

SEQ ID NO: 1468862 - RNA, 19 nt, Artificial Sequence
  Description of Artificial Sequence: Synthetic oligonucleotide
cucuugaggugcccuuaga

SEQ ID NO: 1468863 - RNA, 19 nt, Artificial Sequence
  Description of Artificial Sequence: Synthetic oligonucleotide
guacaauuuuggagccgga

SEQ ID NO: 1468864 - RNA, 19 nt, Artificial Sequence
  Description of Artificial Sequence: Synthetic oligonucleotide
auacaacaugacacauuua

SEQ ID NO: 1468865 - RNA, 19 nt, Artificial Sequence
  Description of Artificial Sequence: Synthetic oligonucleotide
gccuauuuuccaagcuaug

SEQ ID NO: 1468866 - RNA, 19 nt, Artificial Sequence
  Description of Artificial Sequence: Synthetic oligonucleotide
acugcgggaaagaccugau

SEQ ID NO: 1468867 - RNA, 19 nt, Artificial Sequence
  Description of Artificial Sequence: Synthetic oligonucleotide
agccggacuccgaauggga

SEQ ID NO: 1468868 - RNA, 19 nt, Artificial Sequence
  Description of Artificial Sequence: Synthetic oligonucleotide
acacgggugugaaguagaa

SEQ ID NO: 1468869 - RNA, 19 nt, Artificial Sequence
  Description of Artificial Sequence: Synthetic oligonucleotide
cccugugccauuccaccac

SEQ ID NO: 1468870 - RNA, 19 nt, Artificial Sequence
  Description of Artificial Sequence: Synthetic oligonucleotide
accaaggcccacaguucga

SEQ ID NO: 1468871 - RNA, 19 nt, Artificial Sequence
  Description of Artificial Sequence: Synthetic oligonucleotide
aucugaggaucugcuuuua

SEQ ID NO: 1468872 - RNA, 19 nt, Artificial Sequence
  Description of Artificial Sequence: Synthetic oligonucleotide
gcucuaggugaauuggaau

SEQ ID NO: 1468873 - RNA, 19 nt, Artificial Sequence
  Description of Artificial Sequence: Synthetic oligonucleotide
acacaccaacacgggugug

SEQ ID NO: 1468874 - RNA, 19 nt, Artificial Sequence
  Description of Artificial Sequence: Synthetic oligonucleotide
cgggaaagaccugaugcac

SEQ ID NO: 1468875 - RNA, 19 nt, Artificial Sequence
  Description of Artificial Sequence: Synthetic oligonucleotide
cacugaccaugcccacauc

SEQ ID NO: 1468876 - RNA, 19 nt, Artificial Sequence
  Description of Artificial Sequence: Synthetic oligonucleotide
gaauaccaguggggauguc

SEQ ID NO: 1468877 - RNA, 19 nt, Artificial Sequence
  Description of Artificial Sequence: Synthetic oligonucleotide
gaaagaccugaugcacaau

SEQ ID NO: 1468878 - RNA, 19 nt, Artificial Sequence
  Description of Artificial Sequence: Synthetic oligonucleotide
cucggcuggcaucuauggu

SEQ ID NO: 1468879 - RNA, 19 nt, Artificial Sequence
  Description of Artificial Sequence: Synthetic oligonucleotide
gcggcaaaccucuguccaa

SEQ ID NO: 1468880 - RNA, 19 nt, Artificial Sequence
  Description of Artificial Sequence: Synthetic oligonucleotide
uggcaucaccaaggcccac

SEQ ID NO: 1468881 - RNA, 19 nt, Artificial Sequence
  Description of Artificial Sequence: Synthetic oligonucleotide
gucaugcuggccagcucua

SEQ ID NO: 1468882 - RNA, 19 nt, Artificial Sequence
  Description of Artificial Sequence: Synthetic oligonucleotide
cccacaguucgaauagggu

SEQ ID NO: 1468883 - RNA, 19 nt, Artificial Sequence
  Description of Artificial Sequence: Synthetic oligonucleotide
ggcuggcaucuaugguuuc

SEQ ID NO: 1468884 - RNA, 19 nt, Artificial Sequence
  Description of Artificial Sequence: Synthetic oligonucleotide
gggugugaaguagaagguu

SEQ ID NO: 1468885 - RNA, 19 nt, Artificial Sequence
  Description of Artificial Sequence: Synthetic oligonucleotide
gccauuccaccacuggcuu

SEQ ID NO: 1468886 - RNA, 19 nt, Artificial Sequence
  Description of Artificial Sequence: Synthetic oligonucleotide
ggcgcaggcuuguguccca

SEQ ID NO: 1468887 - RNA, 19 nt, Artificial Sequence
  Description of Artificial Sequence: Synthetic oligonucleotide
ccaggaauggagguuuuau

SEQ ID NO: 1468888 - RNA, 19 nt, Artificial Sequence
  Description of Artificial Sequence: Synthetic oligonucleotide
ccaaggcccacaguucgaa

SEQ ID NO: 1468889 - RNA, 19 nt, Artificial Sequence
  Description of Artificial Sequence: Synthetic oligonucleotide
gcgcaggcuugugucccag

SEQ ID NO: 1468890 - RNA, 19 nt, Artificial Sequence
  Description of Artificial Sequence: Synthetic oligonucleotide
ccacgguugccaggaugug

SEQ ID NO: 1468891 - RNA, 19 nt, Artificial Sequence
  Description of Artificial Sequence: Synthetic oligonucleotide
cuggagcuccuugcuuugu

SEQ ID NO: 1468892 - RNA, 19 nt, Artificial Sequence
  Description of Artificial Sequence: Synthetic oligonucleotide
aggugcccuuagagauacu

SEQ ID NO: 1468893 - RNA, 19 nt, Artificial Sequence
  Description of Artificial Sequence: Synthetic oligonucleotide
ccugugccauuccaccacu

SEQ ID NO: 1468894 - RNA, 19 nt, Artificial Sequence
  Description of Artificial Sequence: Synthetic oligonucleotide
cggacuccgaaugggaugu

SEQ ID NO: 1468895 - RNA, 19 nt, Artificial Sequence
  Description of Artificial Sequence: Synthetic oligonucleotide
ggacuccgaaugggauguc

SEQ ID NO: 1468896 - RNA, 19 nt, Artificial Sequence
  Description of Artificial Sequence: Synthetic oligonucleotide
gcucccuguuagucaugcu

SEQ ID NO: 1468897 - RNA, 19 nt, Artificial Sequence
  Description of Artificial Sequence: Synthetic oligonucleotide
gggcucuuaugaggucaaa

SEQ ID NO: 1468898 - RNA, 19 nt, Artificial Sequence
  Description of Artificial Sequence: Synthetic oligonucleotide
gccggacuccgaaugggau

SEQ ID NO: 1468899 - RNA, 19 nt, Artificial Sequence
  Description of Artificial Sequence: Synthetic oligonucleotide
cccaggaauggagguuuua

SEQ ID NO: 1468900 - RNA, 19 nt, Artificial Sequence
  Description of Artificial Sequence: Synthetic oligonucleotide
cggcuggcaucuaugguuu

SEQ ID NO: 1468901 - RNA, 19 nt, Artificial Sequence
  Description of Artificial Sequence: Synthetic oligonucleotide
caguucgaauagggucuuu

SEQ ID NO: 1468902 - RNA, 19 nt, Artificial Sequence
  Description of Artificial Sequence: Synthetic oligonucleotide
cgguugccaggauguggua

SEQ ID NO: 1468903 - RNA, 19 nt, Artificial Sequence
  Description of Artificial Sequence: Synthetic oligonucleotide
uaaacaaugaguauagucc

SEQ ID NO: 1468904 - RNA, 19 nt, Artificial Sequence
  Description of Artificial Sequence: Synthetic oligonucleotide
aaacaaugaguauaguccc

SEQ ID NO: 1468905 - RNA, 19 nt, Artificial Sequence
  Description of Artificial Sequence: Synthetic oligonucleotide
aaccuuucggccuugaggg

SEQ ID NO: 1468906 - RNA, 19 nt, Artificial Sequence
  Description of Artificial Sequence: Synthetic oligonucleotide
uauuguauggggcaaaagc

SEQ ID NO: 1468907 - RNA, 19 nt, Artificial Sequence
  Description of Artificial Sequence: Synthetic oligonucleotide
uccagauagucacagacgc

SEQ ID NO: 1468908 - RNA, 19 nt, Artificial Sequence
  Description of Artificial Sequence: Synthetic oligonucleotide
auagcgaccugacacaggg

SEQ ID NO: 1468909 - RNA, 19 nt, Artificial Sequence
  Description of Artificial Sequence: Synthetic oligonucleotide
uuucugaucacaugcuccg

SEQ ID NO: 1468910 - RNA, 19 nt, Artificial Sequence
  Description of Artificial Sequence: Synthetic oligonucleotide
aaugaguauagucccgcag

SEQ ID NO: 1468911 - RNA, 19 nt, Artificial Sequence
  Description of Artificial Sequence: Synthetic oligonucleotide
agcuccagaaccuuucggc

SEQ ID NO: 1468912 - RNA, 19 nt, Artificial Sequence
  Description of Artificial Sequence: Synthetic oligonucleotide
gaaccuuucggccuugagg

SEQ ID NO: 1468913 - RNA, 19 nt, Artificial Sequence
  Description of Artificial Sequence: Synthetic oligonucleotide
aaggcuuauuguauggggc

SEQ ID NO: 1468914 - RNA, 19 nt, Artificial Sequence
  Description of Artificial Sequence: Synthetic oligonucleotide
gacgauagcgaccugacac

SEQ ID NO: 1468915 - RNA, 19 nt, Artificial Sequence
  Description of Artificial Sequence: Synthetic oligonucleotide
agcgaccugacacagggcc

SEQ ID NO: 1468916 - RNA, 19 nt, Artificial Sequence
  Description of Artificial Sequence: Synthetic oligonucleotide
guaaacaaugaguauaguc

SEQ ID NO: 1468917 - RNA, 19 nt, Artificial Sequence
  Description of Artificial Sequence: Synthetic oligonucleotide
uuuugcaagacggacacug

SEQ ID NO: 1468918 - RNA, 19 nt, Artificial Sequence
  Description of Artificial Sequence: Synthetic oligonucleotide
gacaguagcgguccggugg

SEQ ID NO: 1468919 - RNA, 19 nt, Artificial Sequence
  Description of Artificial Sequence: Synthetic oligonucleotide
uccguguacuuucugauca

SEQ ID NO: 1468920 - RNA, 19 nt, Artificial Sequence
  Description of Artificial Sequence: Synthetic oligonucleotide
agguggacgguccugaggg

SEQ ID NO: 1468921 - RNA, 19 nt, Artificial Sequence
  Description of Artificial Sequence: Synthetic oligonucleotide
gcugccgucagucacaucg

SEQ ID NO: 1468922 - RNA, 19 nt, Artificial Sequence
  Description of Artificial Sequence: Synthetic oligonucleotide
  modified_base (6)..(6): a, c, u, g, unknown or other
uccaunuuuccccauggcu

SEQ ID NO: 1468923 - RNA, 19 nt, Artificial Sequence
  Description of Artificial Sequence: Synthetic oligonucleotide
uggggcagaauucugugag

SEQ ID NO: 1468924 - RNA, 19 nt, Artificial Sequence
  Description of Artificial Sequence: Synthetic oligonucleotide
uguuaagguggcauaguug

SEQ ID NO: 1468925 - RNA, 19 nt, Artificial Sequence
  Description of Artificial Sequence: Synthetic oligonucleotide
aguuguagcccaguggggc

SEQ ID NO: 1468926 - RNA, 19 nt, Artificial Sequence
  Description of Artificial Sequence: Synthetic oligonucleotide
acagacgagucccaugugg

SEQ ID NO: 1468927 - RNA, 19 nt, Artificial Sequence
  Description of Artificial Sequence: Synthetic oligonucleotide
agacgcuagcuucauaggg

SEQ ID NO: 1468928 - RNA, 19 nt, Artificial Sequence
  Description of Artificial Sequence: Synthetic oligonucleotide
uguuggcaagaacagacga

SEQ ID NO: 1468929 - RNA, 19 nt, Artificial Sequence
  Description of Artificial Sequence: Synthetic oligonucleotide
acaaugaguauagucccgc

SEQ ID NO: 1468930 - RNA, 19 nt, Artificial Sequence
  Description of Artificial Sequence: Synthetic oligonucleotide
caucgguguacccagaggc

SEQ ID NO: 1468931 - RNA, 19 nt, Artificial Sequence
  Description of Artificial Sequence: Synthetic oligonucleotide
ucauaggguauccaggauc

SEQ ID NO: 1468932 - RNA, 19 nt, Artificial Sequence
  Description of Artificial Sequence: Synthetic oligonucleotide
uguugguuuguguuaaggu

SEQ ID NO: 1468933 - RNA, 19 nt, Artificial Sequence
  Description of Artificial Sequence: Synthetic oligonucleotide
agguggaaaguauggcugc

SEQ ID NO: 1468934 - RNA, 19 nt, Artificial Sequence
  Description of Artificial Sequence: Synthetic oligonucleotide
gaugagucgucucuuccag

SEQ ID NO: 1468935 - RNA, 19 nt, Artificial Sequence
  Description of Artificial Sequence: Synthetic oligonucleotide
aacgggagguguugugccc

SEQ ID NO: 1468936 - RNA, 19 nt, Artificial Sequence
  Description of Artificial Sequence: Synthetic oligonucleotide
auggagugacgauagcgac

SEQ ID NO: 1468937 - RNA, 19 nt, Artificial Sequence
  Description of Artificial Sequence: Synthetic oligonucleotide
agacggacacugcagacuc

SEQ ID NO: 1468938 - RNA, 19 nt, Artificial Sequence
  Description of Artificial Sequence: Synthetic oligonucleotide
uauagucccgcagucuucg

SEQ ID NO: 1468939 - RNA, 19 nt, Artificial Sequence
  Description of Artificial Sequence: Synthetic oligonucleotide
aaaaccccgggcugugaac

SEQ ID NO: 1468940 - RNA, 19 nt, Artificial Sequence
  Description of Artificial Sequence: Synthetic oligonucleotide
cuuggcgucgcacauuccg

SEQ ID NO: 1468941 - RNA, 19 nt, Artificial Sequence
  Description of Artificial Sequence: Synthetic oligonucleotide
agcuucauaggguauccag

SEQ ID NO: 1468942 - RNA, 19 nt, Artificial Sequence
  Description of Artificial Sequence: Synthetic oligonucleotide
aaacgggccccacuuggcg

SEQ ID NO: 1468943 - RNA, 19 nt, Artificial Sequence
  Description of Artificial Sequence: Synthetic oligonucleotide
guaaacgggccccacuugg

SEQ ID NO: 1468944 - RNA, 19 nt, Artificial Sequence
  Description of Artificial Sequence: Synthetic oligonucleotide
augaguauagucccgcagu

SEQ ID NO: 1468945 - RNA, 19 nt, Artificial Sequence
  Description of Artificial Sequence: Synthetic oligonucleotide
ugugagaacaggugccugc

SEQ ID NO: 1468946 - RNA, 19 nt, Artificial Sequence
  Description of Artificial Sequence: Synthetic oligonucleotide
aacaaugaguauagucccg

SEQ ID NO: 1468947 - RNA, 19 nt, Artificial Sequence
  Description of Artificial Sequence: Synthetic oligonucleotide
ugugaacgguuucccaggg

SEQ ID NO: 1468948 - RNA, 19 nt, Artificial Sequence
  Description of Artificial Sequence: Synthetic oligonucleotide
ugcuaacacguucugccag

SEQ ID NO: 1468949 - RNA, 19 nt, Artificial Sequence
  Description of Artificial Sequence: Synthetic oligonucleotide
gacaguguaguuguagccc

SEQ ID NO: 1468950 - RNA, 19 nt, Artificial Sequence
  Description of Artificial Sequence: Synthetic oligonucleotide
uuguugguuuguguuaagg

SEQ ID NO: 1468951 - RNA, 19 nt, Artificial Sequence
  Description of Artificial Sequence: Synthetic oligonucleotide
aaaccccgggcugugaacg

SEQ ID NO: 1468952 - RNA, 19 nt, Artificial Sequence
  Description of Artificial Sequence: Synthetic oligonucleotide
agacacguggacccugagc

SEQ ID NO: 1468953 - RNA, 19 nt, Artificial Sequence
  Description of Artificial Sequence: Synthetic oligonucleotide
aacugaguccagcugggga

SEQ ID NO: 1468954 - RNA, 19 nt, Artificial Sequence
  Description of Artificial Sequence: Synthetic oligonucleotide
aguuccgcuaccguggagg

SEQ ID NO: 1468955 - RNA, 19 nt, Artificial Sequence
  Description of Artificial Sequence: Synthetic oligonucleotide
aaagacaguagcgguccgg

SEQ ID NO: 1468956 - RNA, 19 nt, Artificial Sequence
  Description of Artificial Sequence: Synthetic oligonucleotide
ggugccaguauccuggcgg

SEQ ID NO: 1468957 - RNA, 19 nt, Artificial Sequence
  Description of Artificial Sequence: Synthetic oligonucleotide
cugcgcacagaccucaugg

SEQ ID NO: 1468958 - RNA, 19 nt, Artificial Sequence
  Description of Artificial Sequence: Synthetic oligonucleotide
acagugaaggcuuauugua

SEQ ID NO: 1468959 - RNA, 19 nt, Artificial Sequence
  Description of Artificial Sequence: Synthetic oligonucleotide
gaccgugucugucucaccc

SEQ ID NO: 1468960 - RNA, 19 nt, Artificial Sequence
  Description of Artificial Sequence: Synthetic oligonucleotide
agacgagucccauguggcc

SEQ ID NO: 1468961 - RNA, 19 nt, Artificial Sequence
  Description of Artificial Sequence: Synthetic oligonucleotide
ccauagaugguuuugcaag

SEQ ID NO: 1468962 - RNA, 19 nt, Artificial Sequence
  Description of Artificial Sequence: Synthetic oligonucleotide
aagucuuguugguuugugu

SEQ ID NO: 1468963 - RNA, 19 nt, Artificial Sequence
  Description of Artificial Sequence: Synthetic oligonucleotide
gaugccgugagggauguug

SEQ ID NO: 1468964 - RNA, 19 nt, Artificial Sequence
  Description of Artificial Sequence: Synthetic oligonucleotide
uuguguuaagguggcauag

SEQ ID NO: 1468965 - RNA, 19 nt, Artificial Sequence
  Description of Artificial Sequence: Synthetic oligonucleotide
  modified_base (14)..(14): a, c, u, g, unknown or other
ugagcaccuccaunuuucc

SEQ ID NO: 1468966 - RNA, 19 nt, Artificial Sequence
  Description of Artificial Sequence: Synthetic oligonucleotide
gucacaucgguguacccag

SEQ ID NO: 1468967 - RNA, 19 nt, Artificial Sequence
  Description of Artificial Sequence: Synthetic oligonucleotide
uguuguaaacaaugaguau

SEQ ID NO: 1468968 - RNA, 19 nt, Artificial Sequence
  Description of Artificial Sequence: Synthetic oligonucleotide
cauugcaguacauggccag

SEQ ID NO: 1468969 - RNA, 19 nt, Artificial Sequence
  Description of Artificial Sequence: Synthetic oligonucleotide
uuugcaagacggacacugc

SEQ ID NO: 1468970 - RNA, 19 nt, Artificial Sequence
  Description of Artificial Sequence: Synthetic oligonucleotide
agaauucugugagaacagg

SEQ ID NO: 1468971 - RNA, 19 nt, Artificial Sequence
  Description of Artificial Sequence: Synthetic oligonucleotide
uggagugacgauagcgacc

SEQ ID NO: 1468972 - RNA, 19 nt, Artificial Sequence
  Description of Artificial Sequence: Synthetic oligonucleotide
ugaguauagucccgcaguc

SEQ ID NO: 1468973 - RNA, 19 nt, Artificial Sequence
  Description of Artificial Sequence: Synthetic oligonucleotide
uuggcgucgcacauuccgg

SEQ ID NO: 1468974 - RNA, 19 nt, Artificial Sequence
  Description of Artificial Sequence: Synthetic oligonucleotide
accucauggugccaguauc

SEQ ID NO: 1468975 - RNA, 19 nt, Artificial Sequence
  Description of Artificial Sequence: Synthetic oligonucleotide
gauagucacagacgcuagc

SEQ ID NO: 1468976 - RNA, 19 nt, Artificial Sequence
  Description of Artificial Sequence: Synthetic oligonucleotide
uugcaagacggacacugca

SEQ ID NO: 1468977 - RNA, 19 nt, Artificial Sequence
  Description of Artificial Sequence: Synthetic oligonucleotide
uuuguguuaagguggcaua

SEQ ID NO: 1468978 - RNA, 19 nt, Artificial Sequence
  Description of Artificial Sequence: Synthetic oligonucleotide
ucacccgugguguuggaug

SEQ ID NO: 1468979 - RNA, 19 nt, Artificial Sequence
  Description of Artificial Sequence: Synthetic oligonucleotide
acaguagcgguccgguggg

SEQ ID NO: 1468980 - RNA, 19 nt, Artificial Sequence
  Description of Artificial Sequence: Synthetic oligonucleotide
gauggagugacgauagcga

SEQ ID NO: 1468981 - RNA, 19 nt, Artificial Sequence
  Description of Artificial Sequence: Synthetic oligonucleotide
cuucauaggguauccagga

SEQ ID NO: 1468982 - RNA, 19 nt, Artificial Sequence
  Description of Artificial Sequence: Synthetic oligonucleotide
acaguguaguuguagccca

SEQ ID NO: 1468983 - RNA, 19 nt, Artificial Sequence
  Description of Artificial Sequence: Synthetic oligonucleotide
gacagagacaggccugaag

SEQ ID NO: 1468984 - RNA, 19 nt, Artificial Sequence
  Description of Artificial Sequence: Synthetic oligonucleotide
gguggcauaguugacagug

SEQ ID NO: 1468985 - RNA, 19 nt, Artificial Sequence
  Description of Artificial Sequence: Synthetic oligonucleotide
  modified_base (5)..(5): a, c, u, g, unknown or other
ccaunuuuccccauggcug

SEQ ID NO: 1468986 - RNA, 19 nt, Artificial Sequence
  Description of Artificial Sequence: Synthetic oligonucleotide
acggacacugcagacuccc

SEQ ID NO: 1468987 - RNA, 19 nt, Artificial Sequence
  Description of Artificial Sequence: Synthetic oligonucleotide
uuauuguauggggcaaaag

SEQ ID NO: 1468988 - RNA, 19 nt, Artificial Sequence
  Description of Artificial Sequence: Synthetic oligonucleotide
acaucgguguacccagagg

SEQ ID NO: 1468989 - RNA, 19 nt, Artificial Sequence
  Description of Artificial Sequence: Synthetic oligonucleotide
ucagucacaucgguguacc

SEQ ID NO: 1468990 - RNA, 19 nt, Artificial Sequence
  Description of Artificial Sequence: Synthetic oligonucleotide
cagacgagucccauguggc

SEQ ID NO: 1468991 - RNA, 19 nt, Artificial Sequence
  Description of Artificial Sequence: Synthetic oligonucleotide
aggcuuauuguauggggca

SEQ ID NO: 1468992 - RNA, 19 nt, Artificial Sequence
  Description of Artificial Sequence: Synthetic oligonucleotide
gugucugucucacccgugg

SEQ ID NO: 1468993 - RNA, 19 nt, Artificial Sequence
  Description of Artificial Sequence: Synthetic oligonucleotide
ucccuggaugccgugaggg

SEQ ID NO: 1468994 - RNA, 19 nt, Artificial Sequence
  Description of Artificial Sequence: Synthetic oligonucleotide
uuggauguucccacuguaa

SEQ ID NO: 1468995 - RNA, 19 nt, Artificial Sequence
  Description of Artificial Sequence: Synthetic oligonucleotide
gaacagacgagucccaugu

SEQ ID NO: 1468996 - RNA, 19 nt, Artificial Sequence
  Description of Artificial Sequence: Synthetic oligonucleotide
agaacagacgagucccaug

SEQ ID NO: 1468997 - RNA, 19 nt, Artificial Sequence
  Description of Artificial Sequence: Synthetic oligonucleotide
aagacggacacugcagacu

SEQ ID NO: 1468998 - RNA, 19 nt, Artificial Sequence
  Description of Artificial Sequence: Synthetic oligonucleotide
ucggccuugaggguuaucu

SEQ ID NO: 1468999 - RNA, 19 nt, Artificial Sequence
  Description of Artificial Sequence: Synthetic oligonucleotide
ucugucucacccguggugu

SEQ ID NO: 1469000 - RNA, 19 nt, Artificial Sequence
  Description of Artificial Sequence: Synthetic oligonucleotide
uccuccguguacuuucuga

SEQ ID NO: 1469001 - RNA, 19 nt, Artificial Sequence
  Description of Artificial Sequence: Synthetic oligonucleotide
ugaagggucacugcggcuc

SEQ ID NO: 1469002 - RNA, 19 nt, Artificial Sequence
  Description of Artificial Sequence: Synthetic oligonucleotide
uaaacgggccccacuuggc

SEQ ID NO: 1469003 - RNA, 19 nt, Artificial Sequence
  Description of Artificial Sequence: Synthetic oligonucleotide
ugguguuggauguucccac

SEQ ID NO: 1469004 - RNA, 19 nt, Artificial Sequence
  Description of Artificial Sequence: Synthetic oligonucleotide
ggagcgaugacugaaguca

SEQ ID NO: 1469005 - RNA, 19 nt, Artificial Sequence
  Description of Artificial Sequence: Synthetic oligonucleotide
  modified_base (7)..(7): a, c, u, g, unknown or other
cuccaunuuuccccauggc

SEQ ID NO: 1469006 - RNA, 19 nt, Artificial Sequence
  Description of Artificial Sequence: Synthetic oligonucleotide
gucgauggagugacgauag

SEQ ID NO: 1469007 - RNA, 19 nt, Artificial Sequence
  Description of Artificial Sequence: Synthetic oligonucleotide
aguccagcuggggaggucg

SEQ ID NO: 1469008 - RNA, 19 nt, Artificial Sequence
  Description of Artificial Sequence: Synthetic oligonucleotide
ggcaagaacagacgagucc

SEQ ID NO: 1469009 - RNA, 19 nt, Artificial Sequence
  Description of Artificial Sequence: Synthetic oligonucleotide
aguggggccaaguccacga

SEQ ID NO: 1469010 - RNA, 19 nt, Artificial Sequence
  Description of Artificial Sequence: Synthetic oligonucleotide
uccgcuaccguggaggcac

SEQ ID NO: 1469011 - RNA, 19 nt, Artificial Sequence
  Description of Artificial Sequence: Synthetic oligonucleotide
acgauagcgaccugacaca

SEQ ID NO: 1469012 - RNA, 19 nt, Artificial Sequence
  Description of Artificial Sequence: Synthetic oligonucleotide
gcagaauucugugagaaca

SEQ ID NO: 1469013 - RNA, 19 nt, Artificial Sequence
  Description of Artificial Sequence: Synthetic oligonucleotide
uuggucgauggagugacga

SEQ ID NO: 1469014 - RNA, 19 nt, Artificial Sequence
  Description of Artificial Sequence: Synthetic oligonucleotide
gcugugaacgguuucccag

SEQ ID NO: 1469015 - RNA, 19 nt, Artificial Sequence
  Description of Artificial Sequence: Synthetic oligonucleotide
gggagagacacguggaccc

SEQ ID NO: 1469016 - RNA, 19 nt, Artificial Sequence
  Description of Artificial Sequence: Synthetic oligonucleotide
agucuucguggccugggag

SEQ ID NO: 1469017 - RNA, 19 nt, Artificial Sequence
  Description of Artificial Sequence: Synthetic oligonucleotide
agugacgauagcgaccuga

SEQ ID NO: 1469018 - RNA, 19 nt, Artificial Sequence
  Description of Artificial Sequence: Synthetic oligonucleotide
aucgguguacccagaggcc

SEQ ID NO: 1469019 - RNA, 19 nt, Artificial Sequence
  Description of Artificial Sequence: Synthetic oligonucleotide
ucauuccacacgaccgugu

SEQ ID NO: 1469020 - RNA, 19 nt, Artificial Sequence
  Description of Artificial Sequence: Synthetic oligonucleotide
aacagacgagucccaugug

SEQ ID NO: 1469021 - RNA, 19 nt, Artificial Sequence
  Description of Artificial Sequence: Synthetic oligonucleotide
cagacgcuagcuucauagg

SEQ ID NO: 1469022 - RNA, 19 nt, Artificial Sequence
  Description of Artificial Sequence: Synthetic oligonucleotide
uauccuggcggaacugagu

SEQ ID NO: 1469023 - RNA, 19 nt, Artificial Sequence
  Description of Artificial Sequence: Synthetic oligonucleotide
agguguugugccccagggg

SEQ ID NO: 1469024 - RNA, 19 nt, Artificial Sequence
  Description of Artificial Sequence: Synthetic oligonucleotide
ucugugagaacaggugccu

SEQ ID NO: 1469025 - RNA, 19 nt, Artificial Sequence
  Description of Artificial Sequence: Synthetic oligonucleotide
agucacaucgguguaccca

SEQ ID NO: 1469026 - RNA, 19 nt, Artificial Sequence
  Description of Artificial Sequence: Synthetic oligonucleotide
  modified_base (9)..(9): a, c, u, g, unknown or other
accuccaunuuuccccaug

SEQ ID NO: 1469027 - RNA, 19 nt, Artificial Sequence
  Description of Artificial Sequence: Synthetic oligonucleotide
ggauaugcaggcagguugg

SEQ ID NO: 1469028 - RNA, 19 nt, Artificial Sequence
  Description of Artificial Sequence: Synthetic oligonucleotide
uguguuaagguggcauagu

SEQ ID NO: 1469029 - RNA, 19 nt, Artificial Sequence
  Description of Artificial Sequence: Synthetic oligonucleotide
uucauaggguauccaggau

SEQ ID NO: 1469030 - RNA, 19 nt, Artificial Sequence
  Description of Artificial Sequence: Synthetic oligonucleotide
aggguauccaggauccauc

SEQ ID NO: 1469031 - RNA, 19 nt, Artificial Sequence
  Description of Artificial Sequence: Synthetic oligonucleotide
agaaccuuucggccuugag

SEQ ID NO: 1469032 - RNA, 19 nt, Artificial Sequence
  Description of Artificial Sequence: Synthetic oligonucleotide
accgugucugucucacccg

SEQ ID NO: 1469033 - RNA, 19 nt, Artificial Sequence
  Description of Artificial Sequence: Synthetic oligonucleotide
uguucagccuggguugcag

SEQ ID NO: 1469034 - RNA, 19 nt, Artificial Sequence
  Description of Artificial Sequence: Synthetic oligonucleotide
uagucccgcagucuucgug

SEQ ID NO: 1469035 - RNA, 19 nt, Artificial Sequence
  Description of Artificial Sequence: Synthetic oligonucleotide
caagacggacacugcagac

SEQ ID NO: 1469036 - RNA, 19 nt, Artificial Sequence
  Description of Artificial Sequence: Synthetic oligonucleotide
acagaccucauggugccag

SEQ ID NO: 1469037 - RNA, 19 nt, Artificial Sequence
  Description of Artificial Sequence: Synthetic oligonucleotide
guauggcugcacuugguga

SEQ ID NO: 1469038 - RNA, 19 nt, Artificial Sequence
  Description of Artificial Sequence: Synthetic oligonucleotide
aacgggccccacuuggcgu

SEQ ID NO: 1469039 - RNA, 19 nt, Artificial Sequence
  Description of Artificial Sequence: Synthetic oligonucleotide
uggggccaaguccacgacc

SEQ ID NO: 1469040 - RNA, 19 nt, Artificial Sequence
  Description of Artificial Sequence: Synthetic oligonucleotide
gauagcgaccugacacagg

SEQ ID NO: 1469041 - RNA, 19 nt, Artificial Sequence
  Description of Artificial Sequence: Synthetic oligonucleotide
aaccccgggcugugaacgg

SEQ ID NO: 1469042 - RNA, 19 nt, Artificial Sequence
  Description of Artificial Sequence: Synthetic oligonucleotide
ucgguguacccagaggcca

SEQ ID NO: 1469043 - RNA, 19 nt, Artificial Sequence
  Description of Artificial Sequence: Synthetic oligonucleotide
acgaccgugucugucucac

SEQ ID NO: 1469044 - RNA, 19 nt, Artificial Sequence
  Description of Artificial Sequence: Synthetic oligonucleotide
ugacgauagcgaccugaca

SEQ ID NO: 1469045 - RNA, 19 nt, Artificial Sequence
  Description of Artificial Sequence: Synthetic oligonucleotide
auaugcaggcagguugguc

SEQ ID NO: 1469046 - RNA, 19 nt, Artificial Sequence
  Description of Artificial Sequence: Synthetic oligonucleotide
uggcaagaacagacgaguc

SEQ ID NO: 1469047 - RNA, 19 nt, Artificial Sequence
  Description of Artificial Sequence: Synthetic oligonucleotide
gcuggaguggaacaaggac

SEQ ID NO: 1469048 - RNA, 19 nt, Artificial Sequence
  Description of Artificial Sequence: Synthetic oligonucleotide
gaugcccuggccuggggca

SEQ ID NO: 1469049 - RNA, 19 nt, Artificial Sequence
  Description of Artificial Sequence: Synthetic oligonucleotide
cacaucgguguacccagag

SEQ ID NO: 1469050 - RNA, 19 nt, Artificial Sequence
  Description of Artificial Sequence: Synthetic oligonucleotide
aggugcgagaggcuggagu

SEQ ID NO: 1469051 - RNA, 19 nt, Artificial Sequence
  Description of Artificial Sequence: Synthetic oligonucleotide
acgaccuggaugccccggg

SEQ ID NO: 1469052 - RNA, 19 nt, Artificial Sequence
  Description of Artificial Sequence: Synthetic oligonucleotide
agccuggugggccccaaag

SEQ ID NO: 1469053 - RNA, 19 nt, Artificial Sequence
  Description of Artificial Sequence: Synthetic oligonucleotide
  modified_base (4)..(4): a, c, u, g, unknown or other
caunuuuccccauggcugu

SEQ ID NO: 1469054 - RNA, 19 nt, Artificial Sequence
  Description of Artificial Sequence: Synthetic oligonucleotide
ugggccccaaagacaguag

SEQ ID NO: 1469055 - RNA, 19 nt, Artificial Sequence
  Description of Artificial Sequence: Synthetic oligonucleotide
acacgaccgugucugucuc

SEQ ID NO: 1469056 - RNA, 19 nt, Artificial Sequence
  Description of Artificial Sequence: Synthetic oligonucleotide
caucucggucuuguggugg

SEQ ID NO: 1469057 - RNA, 19 nt, Artificial Sequence
  Description of Artificial Sequence: Synthetic oligonucleotide
cacuuggcgucgcacauuc

SEQ ID NO: 1469058 - RNA, 19 nt, Artificial Sequence
  Description of Artificial Sequence: Synthetic oligonucleotide
uccagaaccuuucggccuu

SEQ ID NO: 1469059 - RNA, 19 nt, Artificial Sequence
  Description of Artificial Sequence: Synthetic oligonucleotide
uggguaaacgggccccacu

SEQ ID NO: 1469060 - RNA, 19 nt, Artificial Sequence
  Description of Artificial Sequence: Synthetic oligonucleotide
ccacuguaaagaugagucg

SEQ ID NO: 1469061 - RNA, 19 nt, Artificial Sequence
  Description of Artificial Sequence: Synthetic oligonucleotide
guagcgguccggugggugc

SEQ ID NO: 1469062 - RNA, 19 nt, Artificial Sequence
  Description of Artificial Sequence: Synthetic oligonucleotide
uggcgucgcacauuccggc

SEQ ID NO: 1469063 - RNA, 19 nt, Artificial Sequence
  Description of Artificial Sequence: Synthetic oligonucleotide
uggaacgggagguguugug

SEQ ID NO: 1469064 - RNA, 19 nt, Artificial Sequence
  Description of Artificial Sequence: Synthetic oligonucleotide
ugcgcacagaccucauggu

SEQ ID NO: 1469065 - RNA, 19 nt, Artificial Sequence
  Description of Artificial Sequence: Synthetic oligonucleotide
gagucgucucuuccaggcc

SEQ ID NO: 1469066 - RNA, 19 nt, Artificial Sequence
  Description of Artificial Sequence: Synthetic oligonucleotide
cagguuggucgauggagug

SEQ ID NO: 1469067 - RNA, 19 nt, Artificial Sequence
  Description of Artificial Sequence: Synthetic oligonucleotide
cacguggacccugagcacc

SEQ ID NO: 1469068 - RNA, 19 nt, Artificial Sequence
  Description of Artificial Sequence: Synthetic oligonucleotide
auuccacacgaccgugucu

SEQ ID NO: 1469069 - RNA, 19 nt, Artificial Sequence
  Description of Artificial Sequence: Synthetic oligonucleotide
gaacugaguccagcugggg

SEQ ID NO: 1469070 - RNA, 19 nt, Artificial Sequence
  Description of Artificial Sequence: Synthetic oligonucleotide
ucgauggagugacgauagc

SEQ ID NO: 1469071 - RNA, 19 nt, Artificial Sequence
  Description of Artificial Sequence: Synthetic oligonucleotide
uauggggcaaaagccuggu

SEQ ID NO: 1469072 - RNA, 19 nt, Artificial Sequence
  Description of Artificial Sequence: Synthetic oligonucleotide
gcagguagcacugccgggg

SEQ ID NO: 1469073 - RNA, 19 nt, Artificial Sequence
  Description of Artificial Sequence: Synthetic oligonucleotide
cagauagucacagacgcua

SEQ ID NO: 1469074 - RNA, 19 nt, Artificial Sequence
  Description of Artificial Sequence: Synthetic oligonucleotide
ggcagguuggucgauggag

SEQ ID NO: 1469075 - RNA, 19 nt, Artificial Sequence
  Description of Artificial Sequence: Synthetic oligonucleotide
cauccuuguucccauugca

SEQ ID NO: 1469076 - RNA, 19 nt, Artificial Sequence
  Description of Artificial Sequence: Synthetic oligonucleotide
cugccgucagucacaucgg

SEQ ID NO: 1469077 - RNA, 19 nt, Artificial Sequence
  Description of Artificial Sequence: Synthetic oligonucleotide
guuucccagggcuggggug

SEQ ID NO: 1469078 - RNA, 19 nt, Artificial Sequence
  Description of Artificial Sequence: Synthetic oligonucleotide
gaccuggccccagacagug

SEQ ID NO: 1469079 - RNA, 19 nt, Artificial Sequence
  Description of Artificial Sequence: Synthetic oligonucleotide
cucugcuaacacguucugc

SEQ ID NO: 1469080 - RNA, 19 nt, Artificial Sequence
  Description of Artificial Sequence: Synthetic oligonucleotide
guuccgcuaccguggaggc

SEQ ID NO: 1469081 - RNA, 19 nt, Artificial Sequence
  Description of Artificial Sequence: Synthetic oligonucleotide
  modified_base (2)..(2): a, c, u, g, unknown or other
unuuuccccauggcugugu

SEQ ID NO: 1469082 - RNA, 19 nt, Artificial Sequence
  Description of Artificial Sequence: Synthetic oligonucleotide
  modified_base (8)..(8): a, c, u, g, unknown or other
ccuccaunuuuccccaugg

SEQ ID NO: 1469083 - RNA, 19 nt, Artificial Sequence
  Description of Artificial Sequence: Synthetic oligonucleotide
uggcccgucagguuccggu

SEQ ID NO: 1469084 - RNA, 19 nt, Artificial Sequence
  Description of Artificial Sequence: Synthetic oligonucleotide
uccuggcggaacugagucc

SEQ ID NO: 1469085 - RNA, 19 nt, Artificial Sequence
  Description of Artificial Sequence: Synthetic oligonucleotide
aucacaugcuccggcucgg

SEQ ID NO: 1469086 - RNA, 19 nt, Artificial Sequence
  Description of Artificial Sequence: Synthetic oligonucleotide
acgcuagcuucauagggua

SEQ ID NO: 1469087 - RNA, 19 nt, Artificial Sequence
  Description of Artificial Sequence: Synthetic oligonucleotide
cuccguguacuuucugauc

SEQ ID NO: 1469088 - RNA, 19 nt, Artificial Sequence
  Description of Artificial Sequence: Synthetic oligonucleotide
ggugccugcgcacagaccu

SEQ ID NO: 1469089 - RNA, 19 nt, Artificial Sequence
  Description of Artificial Sequence: Synthetic oligonucleotide
gguguugugccccaggggu

SEQ ID NO: 1469090 - RNA, 19 nt, Artificial Sequence
  Description of Artificial Sequence: Synthetic oligonucleotide
gaacgguuucccagggcug

SEQ ID NO: 1469091 - RNA, 19 nt, Artificial Sequence
  Description of Artificial Sequence: Synthetic oligonucleotide
ugucucacccgugguguug

SEQ ID NO: 1469092 - RNA, 19 nt, Artificial Sequence
  Description of Artificial Sequence: Synthetic oligonucleotide
cacuggguaaacgggcccc

SEQ ID NO: 1469093 - RNA, 19 nt, Artificial Sequence
  Description of Artificial Sequence: Synthetic oligonucleotide
gguuggucgauggagugac

SEQ ID NO: 1469094 - RNA, 19 nt, Artificial Sequence
  Description of Artificial Sequence: Synthetic oligonucleotide
aguguaguuguagcccagu

SEQ ID NO: 1469095 - RNA, 19 nt, Artificial Sequence
  Description of Artificial Sequence: Synthetic oligonucleotide
guuaucuggcagguagcac

SEQ ID NO: 1469096 - RNA, 19 nt, Artificial Sequence
  Description of Artificial Sequence: Synthetic oligonucleotide
gugacgauagcgaccugac

SEQ ID NO: 1469097 - RNA, 19 nt, Artificial Sequence
  Description of Artificial Sequence: Synthetic oligonucleotide
uggucgauggagugacgau

SEQ ID NO: 1469098 - RNA, 19 nt, Artificial Sequence
  Description of Artificial Sequence: Synthetic oligonucleotide
guuggauguucccacugua

SEQ ID NO: 1469099 - RNA, 19 nt, Artificial Sequence
  Description of Artificial Sequence: Synthetic oligonucleotide
ugccgucagucacaucggu

SEQ ID NO: 1469100 - RNA, 19 nt, Artificial Sequence
  Description of Artificial Sequence: Synthetic oligonucleotide
ggaacgggagguguugugc

SEQ ID NO: 1469101 - RNA, 19 nt, Artificial Sequence
  Description of Artificial Sequence: Synthetic oligonucleotide
caaugaguauagucccgca

SEQ ID NO: 1469102 - RNA, 19 nt, Artificial Sequence
  Description of Artificial Sequence: Synthetic oligonucleotide
cacuguaaagaugagucgu

SEQ ID NO: 1469103 - RNA, 19 nt, Artificial Sequence
  Description of Artificial Sequence: Synthetic oligonucleotide
gacgcuagcuucauagggu

SEQ ID NO: 1469104 - RNA, 19 nt, Artificial Sequence
  Description of Artificial Sequence: Synthetic oligonucleotide
guccggugggugcuugggg

SEQ ID NO: 1469105 - RNA, 19 nt, Artificial Sequence
  Description of Artificial Sequence: Synthetic oligonucleotide
guuuguguuaagguggcau

SEQ ID NO: 1469106 - RNA, 19 nt, Artificial Sequence
  Description of Artificial Sequence: Synthetic oligonucleotide
ucacaucgguguacccaga

SEQ ID NO: 1469107 - RNA, 19 nt, Artificial Sequence
  Description of Artificial Sequence: Synthetic oligonucleotide
gagcgaugacugaagucac

SEQ ID NO: 1469108 - RNA, 19 nt, Artificial Sequence
  Description of Artificial Sequence: Synthetic oligonucleotide
gugaacgguuucccagggc

SEQ ID NO: 1469109 - RNA, 19 nt, Artificial Sequence
  Description of Artificial Sequence: Synthetic oligonucleotide
gguaaacgggccccacuug

SEQ ID NO: 1469110 - RNA, 19 nt, Artificial Sequence
  Description of Artificial Sequence: Synthetic oligonucleotide
gugguguuggauguuccca

SEQ ID NO: 1469111 - RNA, 19 nt, Artificial Sequence
  Description of Artificial Sequence: Synthetic oligonucleotide
auuggggucuggguagcca

SEQ ID NO: 1469112 - RNA, 19 nt, Artificial Sequence
  Description of Artificial Sequence: Synthetic oligonucleotide
cacugccggggaaaacccc

SEQ ID NO: 1469113 - RNA, 19 nt, Artificial Sequence
  Description of Artificial Sequence: Synthetic oligonucleotide
gucagucacaucgguguac

SEQ ID NO: 1469114 - RNA, 19 nt, Artificial Sequence
  Description of Artificial Sequence: Synthetic oligonucleotide
uagcgaccugacacagggc

SEQ ID NO: 1469115 - RNA, 19 nt, Artificial Sequence
  Description of Artificial Sequence: Synthetic oligonucleotide
cugcuaacacguucugcca

SEQ ID NO: 1469116 - RNA, 19 nt, Artificial Sequence
  Description of Artificial Sequence: Synthetic oligonucleotide
caggugccugcgcacagac

SEQ ID NO: 1469117 - RNA, 19 nt, Artificial Sequence
  Description of Artificial Sequence: Synthetic oligonucleotide
gcaagacggacacugcaga

SEQ ID NO: 1469118 - RNA, 19 nt, Artificial Sequence
  Description of Artificial Sequence: Synthetic oligonucleotide
uaacacguucugccaggua

SEQ ID NO: 1469119 - RNA, 19 nt, Artificial Sequence
  Description of Artificial Sequence: Synthetic oligonucleotide
gaacaggugccugcgcaca

SEQ ID NO: 1469120 - RNA, 19 nt, Artificial Sequence
  Description of Artificial Sequence: Synthetic oligonucleotide
guggaaaguauggcugcac

SEQ ID NO: 1469121 - RNA, 19 nt, Artificial Sequence
  Description of Artificial Sequence: Synthetic oligonucleotide
  modified_base (3)..(3): a, c, u, g, unknown or other
aunuuuccccauggcugug

SEQ ID NO: 1469122 - RNA, 19 nt, Artificial Sequence
  Description of Artificial Sequence: Synthetic oligonucleotide
ggguauccaggauccauca

SEQ ID NO: 1469123 - RNA, 19 nt, Artificial Sequence
  Description of Artificial Sequence: Synthetic oligonucleotide
ucuccccauagaugguuuu

SEQ ID NO: 1469124 - RNA, 19 nt, Artificial Sequence
  Description of Artificial Sequence: Synthetic oligonucleotide
guauuggggucuggguagc

SEQ ID NO: 1469125 - RNA, 19 nt, Artificial Sequence
  Description of Artificial Sequence: Synthetic oligonucleotide
aaaagccuggugggcccca

SEQ ID NO: 1469126 - RNA, 19 nt, Artificial Sequence
  Description of Artificial Sequence: Synthetic oligonucleotide
cacguucugccagguauug

SEQ ID NO: 1469127 - RNA, 19 nt, Artificial Sequence
  Description of Artificial Sequence: Synthetic oligonucleotide
ugccugcgcacagaccuca

SEQ ID NO: 1469128 - RNA, 19 nt, Artificial Sequence
  Description of Artificial Sequence: Synthetic oligonucleotide
agguuggucgauggaguga

SEQ ID NO: 1469129 - RNA, 19 nt, Artificial Sequence
  Description of Artificial Sequence: Synthetic oligonucleotide
ucgcacauuccggcagaag

SEQ ID NO: 1469130 - RNA, 19 nt, Artificial Sequence
  Description of Artificial Sequence: Synthetic oligonucleotide
gcagguggaaaguauggcu

SEQ ID NO: 1469131 - RNA, 19 nt, Artificial Sequence
  Description of Artificial Sequence: Synthetic oligonucleotide
gguuaucuggcagguagca

SEQ ID NO: 1469132 - RNA, 19 nt, Artificial Sequence
  Description of Artificial Sequence: Synthetic oligonucleotide
gugccaguauccuggcgga

SEQ ID NO: 1469133 - RNA, 19 nt, Artificial Sequence
  Description of Artificial Sequence: Synthetic oligonucleotide
aguccacgaccuggaugcc

SEQ ID NO: 1469134 - RNA, 19 nt, Artificial Sequence
  Description of Artificial Sequence: Synthetic oligonucleotide
ggagugacgauagcgaccu

SEQ ID NO: 1469135 - RNA, 19 nt, Artificial Sequence
  Description of Artificial Sequence: Synthetic oligonucleotide
guguuaagguggcauaguu

SEQ ID NO: 1469136 - RNA, 19 nt, Artificial Sequence
  Description of Artificial Sequence: Synthetic oligonucleotide
gacgagucccauguggccu

SEQ ID NO: 1469137 - RNA, 19 nt, Artificial Sequence
  Description of Artificial Sequence: Synthetic oligonucleotide
guauagucccgcagucuuc

SEQ ID NO: 1469138 - RNA, 19 nt, Artificial Sequence
  Description of Artificial Sequence: Synthetic oligonucleotide
gcgcacagaccucauggug

SEQ ID NO: 1469139 - RNA, 19 nt, Artificial Sequence
  Description of Artificial Sequence: Synthetic oligonucleotide
gccuugaggguuaucuggc

SEQ ID NO: 1469140 - RNA, 19 nt, Artificial Sequence
  Description of Artificial Sequence: Synthetic oligonucleotide
gcccaguggggccaagucc

SEQ ID NO: 1469141 - RNA, 19 nt, Artificial Sequence
  Description of Artificial Sequence: Synthetic oligonucleotide
caucaccuagccacuccca

SEQ ID NO: 1469142 - RNA, 19 nt, Artificial Sequence
  Description of Artificial Sequence: Synthetic oligonucleotide
guuggucgauggagugacg

SEQ ID NO: 1469143 - RNA, 19 nt, Artificial Sequence
  Description of Artificial Sequence: Synthetic oligonucleotide
accuuucggccuugagggu

SEQ ID NO: 1469144 - RNA, 19 nt, Artificial Sequence
  Description of Artificial Sequence: Synthetic oligonucleotide
acuuggcgucgcacauucc

SEQ ID NO: 1469145 - RNA, 19 nt, Artificial Sequence
  Description of Artificial Sequence: Synthetic oligonucleotide
gggagcgaugacugaaguc

SEQ ID NO: 1469146 - RNA, 19 nt, Artificial Sequence
  Description of Artificial Sequence: Synthetic oligonucleotide
aggugccugcgcacagacc

SEQ ID NO: 1469147 - RNA, 19 nt, Artificial Sequence
  Description of Artificial Sequence: Synthetic oligonucleotide
cacacgaccgugucugucu

SEQ ID NO: 1469148 - RNA, 19 nt, Artificial Sequence
  Description of Artificial Sequence: Synthetic oligonucleotide
auagucccgcagucuucgu

SEQ ID NO: 1469149 - RNA, 19 nt, Artificial Sequence
  Description of Artificial Sequence: Synthetic oligonucleotide
gaguauagucccgcagucu

SEQ ID NO: 1469150 - RNA, 19 nt, Artificial Sequence
  Description of Artificial Sequence: Synthetic oligonucleotide
augccgugagggauguugu

SEQ ID NO: 1469151 - RNA, 19 nt, Artificial Sequence
  Description of Artificial Sequence: Synthetic oligonucleotide
gcggaacugaguccagcug

SEQ ID NO: 1469152 - RNA, 19 nt, Artificial Sequence
  Description of Artificial Sequence: Synthetic oligonucleotide
guccacgaccuggaugccc

SEQ ID NO: 1469153 - RNA, 19 nt, Artificial Sequence
  Description of Artificial Sequence: Synthetic oligonucleotide
agcgaugacugaagucacu

SEQ ID NO: 1469154 - RNA, 19 nt, Artificial Sequence
  Description of Artificial Sequence: Synthetic oligonucleotide
ugccgugagggauguugua

SEQ ID NO: 1469155 - RNA, 19 nt, Artificial Sequence
  Description of Artificial Sequence: Synthetic oligonucleotide
guugugccccagggguugg

SEQ ID NO: 1469156 - RNA, 19 nt, Artificial Sequence
  Description of Artificial Sequence: Synthetic oligonucleotide
gcgucgcacauuccggcag

SEQ ID NO: 1469157 - RNA, 19 nt, Artificial Sequence
  Description of Artificial Sequence: Synthetic oligonucleotide
gggugcugccgucagucac

SEQ ID NO: 1469158 - RNA, 19 nt, Artificial Sequence
  Description of Artificial Sequence: Synthetic oligonucleotide
ggguuaucuggcagguagc

SEQ ID NO: 1469159 - RNA, 19 nt, Artificial Sequence
  Description of Artificial Sequence: Synthetic oligonucleotide
gggcagaauucugugagaa

SEQ ID NO: 1469160 - RNA, 19 nt, Artificial Sequence
  Description of Artificial Sequence: Synthetic oligonucleotide
auaggguauccaggaucca

SEQ ID NO: 1469161 - RNA, 19 nt, Artificial Sequence
  Description of Artificial Sequence: Synthetic oligonucleotide
cacuguuggcaagaacaga

SEQ ID NO: 1469162 - RNA, 19 nt, Artificial Sequence
  Description of Artificial Sequence: Synthetic oligonucleotide
caguauccuggcggaacug

SEQ ID NO: 1469163 - RNA, 19 nt, Artificial Sequence
  Description of Artificial Sequence: Synthetic oligonucleotide
guguacccagaggccacag

SEQ ID NO: 1469164 - RNA, 19 nt, Artificial Sequence
  Description of Artificial Sequence: Synthetic oligonucleotide
gccacucccagacgaugcc

SEQ ID NO: 1469165 - RNA, 19 nt, Artificial Sequence
  Description of Artificial Sequence: Synthetic oligonucleotide
ugccagguauuggggucug

SEQ ID NO: 1469166 - RNA, 19 nt, Artificial Sequence
  Description of Artificial Sequence: Synthetic oligonucleotide
ggaaaguauggcugcacuu

SEQ ID NO: 1469167 - RNA, 19 nt, Artificial Sequence
  Description of Artificial Sequence: Synthetic oligonucleotide
cccauagaugguuuugcaa

SEQ ID NO: 1469168 - RNA, 19 nt, Artificial Sequence
  Description of Artificial Sequence: Synthetic oligonucleotide
gccggggaaaaccccgggc

SEQ ID NO: 1469169 - RNA, 19 nt, Artificial Sequence
  Description of Artificial Sequence: Synthetic oligonucleotide
uagcgguccggugggugcu

SEQ ID NO: 1469170 - RNA, 19 nt, Artificial Sequence
  Description of Artificial Sequence: Synthetic oligonucleotide
uuccgcuaccguggaggca

SEQ ID NO: 1469171 - RNA, 19 nt, Artificial Sequence
  Description of Artificial Sequence: Synthetic oligonucleotide
ucucacccgugguguugga

SEQ ID NO: 1469172 - RNA, 19 nt, Artificial Sequence
  Description of Artificial Sequence: Synthetic oligonucleotide
acacguucugccagguauu

SEQ ID NO: 1469173 - RNA, 19 nt, Artificial Sequence
  Description of Artificial Sequence: Synthetic oligonucleotide
cgugagggauguuguaaac

SEQ ID NO: 1469174 - RNA, 19 nt, Artificial Sequence
  Description of Artificial Sequence: Synthetic oligonucleotide
ggucgauggagugacgaua

SEQ ID NO: 1469175 - RNA, 19 nt, Artificial Sequence
  Description of Artificial Sequence: Synthetic oligonucleotide
  modified_base (11)..(11): a, c, u, g, unknown or other
gcaccuccaunuuucccca

SEQ ID NO: 1469176 - RNA, 19 nt, Artificial Sequence
  Description of Artificial Sequence: Synthetic oligonucleotide
aaagccuggugggccccaa

SEQ ID NO: 1469177 - RNA, 19 nt, Artificial Sequence
  Description of Artificial Sequence: Synthetic oligonucleotide
acgguccugagggcaggag

SEQ ID NO: 1469178 - RNA, 19 nt, Artificial Sequence
  Description of Artificial Sequence: Synthetic oligonucleotide
agguagcacugccggggaa

SEQ ID NO: 1469179 - RNA, 19 nt, Artificial Sequence
  Description of Artificial Sequence: Synthetic oligonucleotide
guagcacugccggggaaaa

SEQ ID NO: 1469180 - RNA, 19 nt, Artificial Sequence
  Description of Artificial Sequence: Synthetic oligonucleotide
ccgugguguuggauguucc

SEQ ID NO: 1469181 - RNA, 19 nt, Artificial Sequence
  Description of Artificial Sequence: Synthetic oligonucleotide
acguggacccugagcaccu

SEQ ID NO: 1469182 - RNA, 19 nt, Artificial Sequence
  Description of Artificial Sequence: Synthetic oligonucleotide
cacucccagacgaugcccu

SEQ ID NO: 1469183 - RNA, 19 nt, Artificial Sequence
  Description of Artificial Sequence: Synthetic oligonucleotide
ccgucagucacaucggugu

SEQ ID NO: 1469184 - RNA, 19 nt, Artificial Sequence
  Description of Artificial Sequence: Synthetic oligonucleotide
uguagcccaguggggccaa

SEQ ID NO: 1469185 - RNA, 19 nt, Artificial Sequence
  Description of Artificial Sequence: Synthetic oligonucleotide
cuggguaaacgggccccac

SEQ ID NO: 1469186 - RNA, 19 nt, Artificial Sequence
  Description of Artificial Sequence: Synthetic oligonucleotide
cagucuucguggccuggga

SEQ ID NO: 1469187 - RNA, 19 nt, Artificial Sequence
  Description of Artificial Sequence: Synthetic oligonucleotide
ccuggcggaacugagucca

SEQ ID NO: 1469188 - RNA, 19 nt, Artificial Sequence
  Description of Artificial Sequence: Synthetic oligonucleotide
gcacugccggggaaaaccc

SEQ ID NO: 1469189 - RNA, 19 nt, Artificial Sequence
  Description of Artificial Sequence: Synthetic oligonucleotide
caguuccgcuaccguggag

SEQ ID NO: 1469190 - RNA, 19 nt, Artificial Sequence
  Description of Artificial Sequence: Synthetic oligonucleotide
ggcggaacugaguccagcu

SEQ ID NO: 1469191 - RNA, 19 nt, Artificial Sequence
  Description of Artificial Sequence: Synthetic oligonucleotide
ccguguacuuucugaucac

SEQ ID NO: 1469192 - RNA, 19 nt, Artificial Sequence
  Description of Artificial Sequence: Synthetic oligonucleotide
gacaggccugaagggucac

SEQ ID NO: 1469193 - RNA, 19 nt, Artificial Sequence
  Description of Artificial Sequence: Synthetic oligonucleotide
agccauggcccgucagguu

SEQ ID NO: 1469194 - RNA, 19 nt, Artificial Sequence
  Description of Artificial Sequence: Synthetic oligonucleotide
gguguuggauguucccacu

SEQ ID NO: 1469195 - RNA, 19 nt, Artificial Sequence
  Description of Artificial Sequence: Synthetic oligonucleotide
gccgucagucacaucggug

SEQ ID NO: 1469196 - RNA, 19 nt, Artificial Sequence
  Description of Artificial Sequence: Synthetic oligonucleotide
caaggacuggcugccugga

SEQ ID NO: 1469197 - RNA, 19 nt, Artificial Sequence
  Description of Artificial Sequence: Synthetic oligonucleotide
ggcuuauuguauggggcaa

SEQ ID NO: 1469198 - RNA, 19 nt, Artificial Sequence
  Description of Artificial Sequence: Synthetic oligonucleotide
agaccuggccccagacagu

SEQ ID NO: 1469199 - RNA, 19 nt, Artificial Sequence
  Description of Artificial Sequence: Synthetic oligonucleotide
ugccaguauccuggcggaa

SEQ ID NO: 1469200 - RNA, 19 nt, Artificial Sequence
  Description of Artificial Sequence: Synthetic oligonucleotide
gggaaaaccccgggcugug

SEQ ID NO: 1469201 - RNA, 19 nt, Artificial Sequence
  Description of Artificial Sequence: Synthetic oligonucleotide
ggcgucgcacauuccggca

SEQ ID NO: 1469202 - RNA, 19 nt, Artificial Sequence
  Description of Artificial Sequence: Synthetic oligonucleotide
ggcuggaguggaacaagga

SEQ ID NO: 1469203 - RNA, 19 nt, Artificial Sequence
  Description of Artificial Sequence: Synthetic oligonucleotide
ggaucucauuccacacgac

SEQ ID NO: 1469204 - RNA, 19 nt, Artificial Sequence
  Description of Artificial Sequence: Synthetic oligonucleotide
cgauagcgaccugacacag

SEQ ID NO: 1469205 - RNA, 19 nt, Artificial Sequence
  Description of Artificial Sequence: Synthetic oligonucleotide
cagggccaguuccgcuacc

SEQ ID NO: 1469206 - RNA, 19 nt, Artificial Sequence
  Description of Artificial Sequence: Synthetic oligonucleotide
cgggcugugaacgguuucc

SEQ ID NO: 1469207 - RNA, 19 nt, Artificial Sequence
  Description of Artificial Sequence: Synthetic oligonucleotide
gacgguccugagggcagga

SEQ ID NO: 1469208 - RNA, 19 nt, Artificial Sequence
  Description of Artificial Sequence: Synthetic oligonucleotide
aaggcccgcuggggaagga

SEQ ID NO: 1469209 - RNA, 19 nt, Artificial Sequence
  Description of Artificial Sequence: Synthetic oligonucleotide
ggggugcuccggucccugg

SEQ ID NO: 1469210 - RNA, 19 nt, Artificial Sequence
  Description of Artificial Sequence: Synthetic oligonucleotide
ccuugaggguuaucuggca

SEQ ID NO: 1469211 - RNA, 19 nt, Artificial Sequence
  Description of Artificial Sequence: Synthetic oligonucleotide
ccgugagggauguuguaaa

SEQ ID NO: 1469212 - RNA, 19 nt, Artificial Sequence
  Description of Artificial Sequence: Synthetic oligonucleotide
cacgaccgugucugucuca

SEQ ID NO: 1469213 - RNA, 19 nt, Artificial Sequence
  Description of Artificial Sequence: Synthetic oligonucleotide
cuaacacguucugccaggu

SEQ ID NO: 1469214 - RNA, 19 nt, Artificial Sequence
  Description of Artificial Sequence: Synthetic oligonucleotide
ggcccgucagguuccgguc

SEQ ID NO: 1469215 - RNA, 19 nt, Artificial Sequence
  Description of Artificial Sequence: Synthetic oligonucleotide
cuaccguggaggcacuguu

SEQ ID NO: 1469216 - RNA, 19 nt, Artificial Sequence
  Description of Artificial Sequence: Synthetic oligonucleotide
ccguggaggcacuguuggc

SEQ ID NO: 1469217 - RNA, 19 nt, Artificial Sequence
  Description of Artificial Sequence: Synthetic oligonucleotide
ccuggccccagacagugaa

SEQ ID NO: 1469218 - RNA, 19 nt, Artificial Sequence
  Description of Artificial Sequence: Synthetic oligonucleotide
uuucggccuugaggguuau

SEQ ID NO: 1469219 - RNA, 19 nt, Artificial Sequence
  Description of Artificial Sequence: Synthetic oligonucleotide
gguuuguguuaagguggca

SEQ ID NO: 1469220 - RNA, 19 nt, Artificial Sequence
  Description of Artificial Sequence: Synthetic oligonucleotide
gcagguuggucgauggagu

SEQ ID NO: 1469221 - RNA, 19 nt, Artificial Sequence
  Description of Artificial Sequence: Synthetic oligonucleotide
ccggcagaagcuggaaguc

SEQ ID NO: 1469222 - RNA, 19 nt, Artificial Sequence
  Description of Artificial Sequence: Synthetic oligonucleotide
cggggaaaaccccgggcug

SEQ ID NO: 1469223 - RNA, 19 nt, Artificial Sequence
  Description of Artificial Sequence: Synthetic oligonucleotide
ggcgucccacagccauggg

SEQ ID NO: 1469224 - RNA, 19 nt, Artificial Sequence
  Description of Artificial Sequence: Synthetic oligonucleotide
uucggccuugaggguuauc

SEQ ID NO: 1469225 - RNA, 19 nt, Artificial Sequence
  Description of Artificial Sequence: Synthetic oligonucleotide
gguauccaggauccaucau

SEQ ID NO: 1469226 - RNA, 19 nt, Artificial Sequence
  Description of Artificial Sequence: Synthetic oligonucleotide
gucgcacauuccggcagaa

SEQ ID NO: 1469227 - RNA, 19 nt, Artificial Sequence
  Description of Artificial Sequence: Synthetic oligonucleotide
guagcccaguggggccaag

SEQ ID NO: 1469228 - RNA, 19 nt, Artificial Sequence
  Description of Artificial Sequence: Synthetic oligonucleotide
gugccugcgcacagaccuc

SEQ ID NO: 1469229 - RNA, 19 nt, Artificial Sequence
  Description of Artificial Sequence: Synthetic oligonucleotide
ugcugccgucagucacauc

SEQ ID NO: 1469230 - RNA, 19 nt, Artificial Sequence
  Description of Artificial Sequence: Synthetic oligonucleotide
ccuccguguacuuucugau

SEQ ID NO: 1469231 - RNA, 19 nt, Artificial Sequence
  Description of Artificial Sequence: Synthetic oligonucleotide
ccggggaaaaccccgggcu

SEQ ID NO: 1469232 - RNA, 19 nt, Artificial Sequence
  Description of Artificial Sequence: Synthetic oligonucleotide
ccagauagucacagacgcu

SEQ ID NO: 1469233 - RNA, 19 nt, Artificial Sequence
  Description of Artificial Sequence: Synthetic oligonucleotide
cagaaccuuucggccuuga

SEQ ID NO: 1469234 - RNA, 19 nt, Artificial Sequence
  Description of Artificial Sequence: Synthetic oligonucleotide
cuucguggccugggagaga

SEQ ID NO: 1469235 - RNA, 19 nt, Artificial Sequence
  Description of Artificial Sequence: Synthetic oligonucleotide
cgaccuggaugccccgggc

SEQ ID NO: 1469236 - RNA, 19 nt, Artificial Sequence
  Description of Artificial Sequence: Synthetic oligonucleotide
ccagggguuggugguguuc

SEQ ID NO: 1469237 - RNA, 19 nt, Artificial Sequence
  Description of Artificial Sequence: Synthetic oligonucleotide
ccaguuccgcuaccgugga

SEQ ID NO: 1469238 - RNA, 19 nt, Artificial Sequence
  Description of Artificial Sequence: Synthetic oligonucleotide
  modified_base (10)..(10): a, c, u, g, unknown or other
caccuccaunuuuccccau

SEQ ID NO: 1469239 - RNA, 19 nt, Artificial Sequence
  Description of Artificial Sequence: Synthetic oligonucleotide
ccgggcugugaacgguuuc

SEQ ID NO: 1469240 - RNA, 19 nt, Artificial Sequence
  Description of Artificial Sequence: Synthetic oligonucleotide
ccgcagucuucguggccug

SEQ ID NO: 1469241 - RNA, 19 nt, Artificial Sequence
  Description of Artificial Sequence: Synthetic oligonucleotide
cgaccgugucugucucacc

SEQ ID NO: 1469242 - RNA, 19 nt, Artificial Sequence
  Description of Artificial Sequence: Synthetic oligonucleotide
gccccacuuggcgucgcac

SEQ ID NO: 1469243 - RNA, 19 nt, Artificial Sequence
  Description of Artificial Sequence: Synthetic oligonucleotide
cuggguagccauggcccgu

SEQ ID NO: 1469244 - RNA, 19 nt, Artificial Sequence
  Description of Artificial Sequence: Synthetic oligonucleotide
gcuguggccccaggugcga

SEQ ID NO: 1469245 - RNA, 19 nt, Artificial Sequence
  Description of Artificial Sequence: Synthetic oligonucleotide
ccuggaugccgugagggau

SEQ ID NO: 1469246 - RNA, 19 nt, Artificial Sequence
  Description of Artificial Sequence: Synthetic oligonucleotide
cugucucacccgugguguu

SEQ ID NO: 1469247 - RNA, 19 nt, Artificial Sequence
  Description of Artificial Sequence: Synthetic oligonucleotide
cccgcagucuucguggccu

SEQ ID NO: 1469248 - RNA, 19 nt, Artificial Sequence
  Description of Artificial Sequence: Synthetic oligonucleotide
cgguccggugggugcuugg

SEQ ID NO: 1469249 - RNA, 19 nt, Artificial Sequence
  Description of Artificial Sequence: Synthetic oligonucleotide
gggccaguuccgcuaccgu

SEQ ID NO: 1469250 - RNA, 19 nt, Artificial Sequence
  Description of Artificial Sequence: Synthetic oligonucleotide
cgucgcacauuccggcaga

SEQ ID NO: 1469251 - RNA, 19 nt, Artificial Sequence
  Description of Artificial Sequence: Synthetic oligonucleotide
gugcugccgucagucacau

SEQ ID NO: 1469252 - RNA, 19 nt, Artificial Sequence
  Description of Artificial Sequence: Synthetic oligonucleotide
agcgguccggugggugcuu

SEQ ID NO: 1469253 - RNA, 19 nt, Artificial Sequence
  Description of Artificial Sequence: Synthetic oligonucleotide
cuggaugccccgggcuacu

SEQ ID NO: 1469254 - RNA, 19 nt, Artificial Sequence
  Description of Artificial Sequence: Synthetic oligonucleotide
gcgguccggugggugcuug

SEQ ID NO: 1469255 - RNA, 19 nt, Artificial Sequence
  Description of Artificial Sequence: Synthetic oligonucleotide
ccuuucggccuugaggguu

SEQ ID NO: 1469256 - RNA, 19 nt, Artificial Sequence
  Description of Artificial Sequence: Synthetic oligonucleotide
cgucagucacaucggugua

SEQ ID NO: 1469257 - RNA, 19 nt, Artificial Sequence
  Description of Artificial Sequence: Synthetic oligonucleotide
cccgcuggggaaggaggca

SEQ ID NO: 1469258 - RNA, 19 nt, Artificial Sequence
  Description of Artificial Sequence: Synthetic oligonucleotide
cgggccccacuuggcgucg

SEQ ID NO: 1469259 - RNA, 19 nt, Artificial Sequence
  Description of Artificial Sequence: Synthetic oligonucleotide
ggugggccccaaagacagu

SEQ ID NO: 1469260 - RNA, 19 nt, Artificial Sequence
  Description of Artificial Sequence: Synthetic oligonucleotide
caguagcgguccggugggu

SEQ ID NO: 1469261 - RNA, 19 nt, Artificial Sequence
  Description of Artificial Sequence: Synthetic oligonucleotide
cgcuaccguggaggcacug

SEQ ID NO: 1469262 - RNA, 19 nt, Artificial Sequence
  Description of Artificial Sequence: Synthetic oligonucleotide
cgcuagcuucauaggguau

SEQ ID NO: 1469263 - RNA, 19 nt, Artificial Sequence
  Description of Artificial Sequence: Synthetic oligonucleotide
cguggacccugagcaccuc

SEQ ID NO: 1469264 - RNA, 19 nt, Artificial Sequence
  Description of Artificial Sequence: Synthetic oligonucleotide
cccgggcugugaacgguuu

SEQ ID NO: 1469265 - RNA, 19 nt, Artificial Sequence
  Description of Artificial Sequence: Synthetic oligonucleotide
ccccgggcugugaacgguu

SEQ ID NO: 1469266 - RNA, 19 nt, Artificial Sequence
  Description of Artificial Sequence: Synthetic oligonucleotide
cgacagagacaggccugaa

SEQ ID NO: 1469267 - RNA, 19 nt, Artificial Sequence
  Description of Artificial Sequence: Synthetic oligonucleotide
ccgcuaccguggaggcacu

SEQ ID NO: 1469268 - RNA, 19 nt, Artificial Sequence
  Description of Artificial Sequence: Synthetic oligonucleotide
ggaugccgugagggauguu

SEQ ID NO: 1469269 - RNA, 19 nt, Artificial Sequence
  Description of Artificial Sequence: Synthetic oligonucleotide
  modified_base (3)..(3): a, c, u, g, unknown or other
aancugaacugauggagag

SEQ ID NO: 1469270 - RNA, 19 nt, Artificial Sequence
  Description of Artificial Sequence: Synthetic oligonucleotide
  modified_base (5)..(5): a, c, u, g, unknown or other
gaaancugaacugauggag

SEQ ID NO: 1469271 - RNA, 19 nt, Artificial Sequence
  Description of Artificial Sequence: Synthetic oligonucleotide
  modified_base (7)..(7): a, c, u, g, unknown or other
gggaaancugaacugaugg

SEQ ID NO: 1469272 - RNA, 19 nt, Artificial Sequence
  Description of Artificial Sequence: Synthetic oligonucleotide
ugguuguugggccaggugc

SEQ ID NO: 1469273 - RNA, 19 nt, Artificial Sequence
  Description of Artificial Sequence: Synthetic oligonucleotide
aacugauggagaggaaccc

SEQ ID NO: 1469274 - RNA, 19 nt, Artificial Sequence
  Description of Artificial Sequence: Synthetic oligonucleotide
aaauuaagcauuggucuca

SEQ ID NO: 1469275 - RNA, 19 nt, Artificial Sequence
  Description of Artificial Sequence: Synthetic oligonucleotide
  modified_base (4)..(4): a, c, u, g, unknown or other
aaancugaacugauggaga

SEQ ID NO: 1469276 - RNA, 19 nt, Artificial Sequence
  Description of Artificial Sequence: Synthetic oligonucleotide
caaauuaagcauuggucuc

SEQ ID NO: 1469277 - RNA, 19 nt, Artificial Sequence
  Description of Artificial Sequence: Synthetic oligonucleotide
uggagaggaacccuacuac

SEQ ID NO: 1469278 - RNA, 19 nt, Artificial Sequence
  Description of Artificial Sequence: Synthetic oligonucleotide
aauuaagcauuggucucag

SEQ ID NO: 1469279 - RNA, 19 nt, Artificial Sequence
  Description of Artificial Sequence: Synthetic oligonucleotide
gaacugauggagaggaacc

SEQ ID NO: 1469280 - RNA, 19 nt, Artificial Sequence
  Description of Artificial Sequence: Synthetic oligonucleotide
  modified_base (2)..(2): a, c, u, g, unknown or other
ancugaacugauggagagg

SEQ ID NO: 1469281 - RNA, 19 nt, Artificial Sequence
  Description of Artificial Sequence: Synthetic oligonucleotide
gagaggaacccuacuaccc

SEQ ID NO: 1469282 - RNA, 19 nt, Artificial Sequence
  Description of Artificial Sequence: Synthetic oligonucleotide
agaggaacccuacuacccu

SEQ ID NO: 1469283 - RNA, 19 nt, Artificial Sequence
  Description of Artificial Sequence: Synthetic oligonucleotide
cccaaauuaagcauugguc

SEQ ID NO: 1469284 - RNA, 19 nt, Artificial Sequence
  Description of Artificial Sequence: Synthetic oligonucleotide
ugauggagaggaacccuac

SEQ ID NO: 1469285 - RNA, 19 nt, Artificial Sequence
  Description of Artificial Sequence: Synthetic oligonucleotide
aaacugguuguugggccag

SEQ ID NO: 1469286 - RNA, 19 nt, Artificial Sequence
  Description of Artificial Sequence: Synthetic oligonucleotide
auggagaggaacccuacua

SEQ ID NO: 1469287 - RNA, 19 nt, Artificial Sequence
  Description of Artificial Sequence: Synthetic oligonucleotide
ggagaggaacccuacuacc

SEQ ID NO: 1469288 - RNA, 19 nt, Artificial Sequence
  Description of Artificial Sequence: Synthetic oligonucleotide
ccaaauuaagcauuggucu

SEQ ID NO: 1469289 - RNA, 19 nt, Artificial Sequence
  Description of Artificial Sequence: Synthetic oligonucleotide
  modified_base (6)..(6): a, c, u, g, unknown or other
ggaaancugaacugaugga

SEQ ID NO: 1469290 - RNA, 19 nt, Artificial Sequence
  Description of Artificial Sequence: Synthetic oligonucleotide
acugauggagaggaacccu

SEQ ID NO: 1469291 - RNA, 19 nt, Artificial Sequence
  Description of Artificial Sequence: Synthetic oligonucleotide
caaacugguuguugggcca

SEQ ID NO: 1469292 - RNA, 19 nt, Artificial Sequence
  Description of Artificial Sequence: Synthetic oligonucleotide
aacugguuguugggccagg

SEQ ID NO: 1469293 - RNA, 19 nt, Artificial Sequence
  Description of Artificial Sequence: Synthetic oligonucleotide
uuguugggccaggugccgg

SEQ ID NO: 1469294 - RNA, 19 nt, Artificial Sequence
  Description of Artificial Sequence: Synthetic oligonucleotide
guuguugggccaggugccg

SEQ ID NO: 1469295 - RNA, 19 nt, Artificial Sequence
  Description of Artificial Sequence: Synthetic oligonucleotide
uguugggccaggugccggu

SEQ ID NO: 1469296 - RNA, 19 nt, Artificial Sequence
  Description of Artificial Sequence: Synthetic oligonucleotide
ggaacccuacuacccuugg

SEQ ID NO: 1469297 - RNA, 19 nt, Artificial Sequence
  Description of Artificial Sequence: Synthetic oligonucleotide
gauggagaggaacccuacu

SEQ ID NO: 1469298 - RNA, 19 nt, Artificial Sequence
  Description of Artificial Sequence: Synthetic oligonucleotide
gguuguugggccaggugcc

SEQ ID NO: 1469299 - RNA, 19 nt, Artificial Sequence
  Description of Artificial Sequence: Synthetic oligonucleotide
cugauggagaggaacccua

SEQ ID NO: 1469300 - RNA, 19 nt, Artificial Sequence
  Description of Artificial Sequence: Synthetic oligonucleotide
aggaacccuacuacccuug

SEQ ID NO: 1469301 - RNA, 19 nt, Artificial Sequence
  Description of Artificial Sequence: Synthetic oligonucleotide
  modified_base (8)..(8): a, c, u, g, unknown or other
ggggaaancugaacugaug

SEQ ID NO: 1469302 - RNA, 19 nt, Artificial Sequence
  Description of Artificial Sequence: Synthetic oligonucleotide
acugguuguugggccaggu

SEQ ID NO: 1469303 - RNA, 19 nt, Artificial Sequence
  Description of Artificial Sequence: Synthetic oligonucleotide
gaggaacccuacuacccuu

SEQ ID NO: 1469304 - RNA, 19 nt, Artificial Sequence
  Description of Artificial Sequence: Synthetic oligonucleotide
ccccaaauuaagcauuggu

SEQ ID NO: 1469305 - RNA, 19 nt, Artificial Sequence
  Description of Artificial Sequence: Synthetic oligonucleotide
guugggccaggugccgguu

SEQ ID NO: 1469306 - RNA, 19 nt, Artificial Sequence
  Description of Artificial Sequence: Synthetic oligonucleotide
uuggauaaaauuaauuugg

SEQ ID NO: 1469307 - RNA, 19 nt, Artificial Sequence
  Description of Artificial Sequence: Synthetic oligonucleotide
aauuauaugacauuucagu

SEQ ID NO: 1469308 - RNA, 19 nt, Artificial Sequence
  Description of Artificial Sequence: Synthetic oligonucleotide
aaaucuacaaguaacaguc

SEQ ID NO: 1469309 - RNA, 19 nt, Artificial Sequence
  Description of Artificial Sequence: Synthetic oligonucleotide
uuuuacuucggcaaacugg

SEQ ID NO: 1469310 - RNA, 19 nt, Artificial Sequence
  Description of Artificial Sequence: Synthetic oligonucleotide
uugaauacaaaucuacaag

SEQ ID NO: 1469311 - RNA, 19 nt, Artificial Sequence
  Description of Artificial Sequence: Synthetic oligonucleotide
ugaauuuaucauauuaccc

SEQ ID NO: 1469312 - RNA, 19 nt, Artificial Sequence
  Description of Artificial Sequence: Synthetic oligonucleotide
uuugccucaaauuuuacug

SEQ ID NO: 1469313 - RNA, 19 nt, Artificial Sequence
  Description of Artificial Sequence: Synthetic oligonucleotide
cagucuauaacuuaaaguc

SEQ ID NO: 1469314 - RNA, 19 nt, Artificial Sequence
  Description of Artificial Sequence: Synthetic oligonucleotide
aaaauucagcacuuaggcg

SEQ ID NO: 1469315 - RNA, 19 nt, Artificial Sequence
  Description of Artificial Sequence: Synthetic oligonucleotide
acucuugcuauucucaacc

SEQ ID NO: 1469316 - RNA, 19 nt, Artificial Sequence
  Description of Artificial Sequence: Synthetic oligonucleotide
ugugaagugaaauaaagau

SEQ ID NO: 1469317 - RNA, 19 nt, Artificial Sequence
  Description of Artificial Sequence: Synthetic oligonucleotide
uauuccauguuucucaagc

SEQ ID NO: 1469318 - RNA, 19 nt, Artificial Sequence
  Description of Artificial Sequence: Synthetic oligonucleotide
ugaauuuaggauuauucca

SEQ ID NO: 1469319 - RNA, 19 nt, Artificial Sequence
  Description of Artificial Sequence: Synthetic oligonucleotide
uuuacuucggcaaacugga

SEQ ID NO: 1469320 - RNA, 19 nt, Artificial Sequence
  Description of Artificial Sequence: Synthetic oligonucleotide
uauaacuuaaagucguuga

SEQ ID NO: 1469321 - RNA, 19 nt, Artificial Sequence
  Description of Artificial Sequence: Synthetic oligonucleotide
aagaaguguucucuugagc

SEQ ID NO: 1469322 - RNA, 19 nt, Artificial Sequence
  Description of Artificial Sequence: Synthetic oligonucleotide
aguaguaugaauucacaug

SEQ ID NO: 1469323 - RNA, 19 nt, Artificial Sequence
  Description of Artificial Sequence: Synthetic oligonucleotide
cugaauuuaggauuauucc

SEQ ID NO: 1469324 - RNA, 19 nt, Artificial Sequence
  Description of Artificial Sequence: Synthetic oligonucleotide
uuaauuucccugauggaug

SEQ ID NO: 1469325 - RNA, 19 nt, Artificial Sequence
  Description of Artificial Sequence: Synthetic oligonucleotide
aacagucuauaacuuaaag

SEQ ID NO: 1469326 - RNA, 19 nt, Artificial Sequence
  Description of Artificial Sequence: Synthetic oligonucleotide
gaaguuucuccguuggugg

SEQ ID NO: 1469327 - RNA, 19 nt, Artificial Sequence
  Description of Artificial Sequence: Synthetic oligonucleotide
caugacauuaacagaaaag

SEQ ID NO: 1469328 - RNA, 19 nt, Artificial Sequence
  Description of Artificial Sequence: Synthetic oligonucleotide
ugugucugaaguuucuccg

SEQ ID NO: 1469329 - RNA, 19 nt, Artificial Sequence
  Description of Artificial Sequence: Synthetic oligonucleotide
uacaaaucuacaaguaaca

SEQ ID NO: 1469330 - RNA, 19 nt, Artificial Sequence
  Description of Artificial Sequence: Synthetic oligonucleotide
guaguaugaauucacauga

SEQ ID NO: 1469331 - RNA, 19 nt, Artificial Sequence
  Description of Artificial Sequence: Synthetic oligonucleotide
ugauacuugauugacacgu

SEQ ID NO: 1469332 - RNA, 19 nt, Artificial Sequence
  Description of Artificial Sequence: Synthetic oligonucleotide
uguagcaguaguaugaauu

SEQ ID NO: 1469333 - RNA, 19 nt, Artificial Sequence
  Description of Artificial Sequence: Synthetic oligonucleotide
uugauugacacgugguacg

SEQ ID NO: 1469334 - RNA, 19 nt, Artificial Sequence
  Description of Artificial Sequence: Synthetic oligonucleotide
ugcaaaauucagcacuuag

SEQ ID NO: 1469335 - RNA, 19 nt, Artificial Sequence
  Description of Artificial Sequence: Synthetic oligonucleotide
gaggguuuggucuuuugcg

SEQ ID NO: 1469336 - RNA, 19 nt, Artificial Sequence
  Description of Artificial Sequence: Synthetic oligonucleotide
uuuucugaauugcagcccc

SEQ ID NO: 1469337 - RNA, 19 nt, Artificial Sequence
  Description of Artificial Sequence: Synthetic oligonucleotide
augaccaaugguugaauac

SEQ ID NO: 1469338 - RNA, 19 nt, Artificial Sequence
  Description of Artificial Sequence: Synthetic oligonucleotide
aauuuaggauuauuccaug

SEQ ID NO: 1469339 - RNA, 19 nt, Artificial Sequence
  Description of Artificial Sequence: Synthetic oligonucleotide
auugacacgugguacguuc

SEQ ID NO: 1469340 - RNA, 19 nt, Artificial Sequence
  Description of Artificial Sequence: Synthetic oligonucleotide
agucguugauacuugauug

SEQ ID NO: 1469341 - RNA, 19 nt, Artificial Sequence
  Description of Artificial Sequence: Synthetic oligonucleotide
aauuaauuuggguaccauu

SEQ ID NO: 1469342 - RNA, 19 nt, Artificial Sequence
  Description of Artificial Sequence: Synthetic oligonucleotide
ugguugaauacaaaucuac

SEQ ID NO: 1469343 - RNA, 19 nt, Artificial Sequence
  Description of Artificial Sequence: Synthetic oligonucleotide
ggcaauaagauccaagagc

SEQ ID NO: 1469344 - RNA, 19 nt, Artificial Sequence
  Description of Artificial Sequence: Synthetic oligonucleotide
uguccuagaccucccaggg

SEQ ID NO: 1469345 - RNA, 19 nt, Artificial Sequence
  Description of Artificial Sequence: Synthetic oligonucleotide
cauuuggagacccauggcc

SEQ ID NO: 1469346 - RNA, 19 nt, Artificial Sequence
  Description of Artificial Sequence: Synthetic oligonucleotide
aagaucuuggauaaaauua

SEQ ID NO: 1469347 - RNA, 19 nt, Artificial Sequence
  Description of Artificial Sequence: Synthetic oligonucleotide
ucuguaagguuccuccucc

SEQ ID NO: 1469348 - RNA, 19 nt, Artificial Sequence
  Description of Artificial Sequence: Synthetic oligonucleotide
aauaagauccaagagcauu

SEQ ID NO: 1469349 - RNA, 19 nt, Artificial Sequence
  Description of Artificial Sequence: Synthetic oligonucleotide
uuaaagucguugauacuug

SEQ ID NO: 1469350 - RNA, 19 nt, Artificial Sequence
  Description of Artificial Sequence: Synthetic oligonucleotide
uccaacgaguuucuggucc

SEQ ID NO: 1469351 - RNA, 19 nt, Artificial Sequence
  Description of Artificial Sequence: Synthetic oligonucleotide
aguaugaauucacaugaca

SEQ ID NO: 1469352 - RNA, 19 nt, Artificial Sequence
  Description of Artificial Sequence: Synthetic oligonucleotide
gaugccucgguguccaugg

SEQ ID NO: 1469353 - RNA, 19 nt, Artificial Sequence
  Description of Artificial Sequence: Synthetic oligonucleotide
uuaggauuauuccauguuu

SEQ ID NO: 1469354 - RNA, 19 nt, Artificial Sequence
  Description of Artificial Sequence: Synthetic oligonucleotide
caauuauaugacauuucag

SEQ ID NO: 1469355 - RNA, 19 nt, Artificial Sequence
  Description of Artificial Sequence: Synthetic oligonucleotide
agucuauaacuuaaagucg

SEQ ID NO: 1469356 - RNA, 19 nt, Artificial Sequence
  Description of Artificial Sequence: Synthetic oligonucleotide
ucauauuacccaugugaag

SEQ ID NO: 1469357 - RNA, 19 nt, Artificial Sequence
  Description of Artificial Sequence: Synthetic oligonucleotide
uccuagaccucccagggca

SEQ ID NO: 1469358 - RNA, 19 nt, Artificial Sequence
  Description of Artificial Sequence: Synthetic oligonucleotide
cucaacuucggccagcgag

SEQ ID NO: 1469359 - RNA, 19 nt, Artificial Sequence
  Description of Artificial Sequence: Synthetic oligonucleotide
uuucaauuauaugacauuu

SEQ ID NO: 1469360 - RNA, 19 nt, Artificial Sequence
  Description of Artificial Sequence: Synthetic oligonucleotide
uaauuucccugauggaugc

SEQ ID NO: 1469361 - RNA, 19 nt, Artificial Sequence
  Description of Artificial Sequence: Synthetic oligonucleotide
cacuuuucugaauugcagc

SEQ ID NO: 1469362 - RNA, 19 nt, Artificial Sequence
  Description of Artificial Sequence: Synthetic oligonucleotide
uaggauuauuccauguuuc

SEQ ID NO: 1469363 - RNA, 19 nt, Artificial Sequence
  Description of Artificial Sequence: Synthetic oligonucleotide
uccucauacugucucuggg

SEQ ID NO: 1469364 - RNA, 19 nt, Artificial Sequence
  Description of Artificial Sequence: Synthetic oligonucleotide
acuucggcaaacuggaacu

SEQ ID NO: 1469365 - RNA, 19 nt, Artificial Sequence
  Description of Artificial Sequence: Synthetic oligonucleotide
uuugcguuccacucuaccu

SEQ ID NO: 1469366 - RNA, 19 nt, Artificial Sequence
  Description of Artificial Sequence: Synthetic oligonucleotide
gugucuacaugaccaaugg

SEQ ID NO: 1469367 - RNA, 19 nt, Artificial Sequence
  Description of Artificial Sequence: Synthetic oligonucleotide
gaauucacaugacauuaac

SEQ ID NO: 1469368 - RNA, 19 nt, Artificial Sequence
  Description of Artificial Sequence: Synthetic oligonucleotide
aagucguugauacuugauu

SEQ ID NO: 1469369 - RNA, 19 nt, Artificial Sequence
  Description of Artificial Sequence: Synthetic oligonucleotide
ugucuagcugggcauuugg

SEQ ID NO: 1469370 - RNA, 19 nt, Artificial Sequence
  Description of Artificial Sequence: Synthetic oligonucleotide
cuucagugugucuaccugg

SEQ ID NO: 1469371 - RNA, 19 nt, Artificial Sequence
  Description of Artificial Sequence: Synthetic oligonucleotide
gguacguucacagaaacug

SEQ ID NO: 1469372 - RNA, 19 nt, Artificial Sequence
  Description of Artificial Sequence: Synthetic oligonucleotide
acuuaggcgagguaaagaa

SEQ ID NO: 1469373 - RNA, 19 nt, Artificial Sequence
  Description of Artificial Sequence: Synthetic oligonucleotide
ucuacaaguaacagucuau

SEQ ID NO: 1469374 - RNA, 19 nt, Artificial Sequence
  Description of Artificial Sequence: Synthetic oligonucleotide
uccuuuauuggguuggguc

SEQ ID NO: 1469375 - RNA, 19 nt, Artificial Sequence
  Description of Artificial Sequence: Synthetic oligonucleotide
auuuaggauuauuccaugu

SEQ ID NO: 1469376 - RNA, 19 nt, Artificial Sequence
  Description of Artificial Sequence: Synthetic oligonucleotide
auaacuuaaagucguugau

SEQ ID NO: 1469377 - RNA, 19 nt, Artificial Sequence
  Description of Artificial Sequence: Synthetic oligonucleotide
caaguaacagucuauaacu

SEQ ID NO: 1469378 - RNA, 19 nt, Artificial Sequence
  Description of Artificial Sequence: Synthetic oligonucleotide
aauuuggguaccauuggca

SEQ ID NO: 1469379 - RNA, 19 nt, Artificial Sequence
  Description of Artificial Sequence: Synthetic oligonucleotide
ugccucaaauuuuacugag

SEQ ID NO: 1469380 - RNA, 19 nt, Artificial Sequence
  Description of Artificial Sequence: Synthetic oligonucleotide
uacguucacagaaacugga

SEQ ID NO: 1469381 - RNA, 19 nt, Artificial Sequence
  Description of Artificial Sequence: Synthetic oligonucleotide
ugaccaaugguugaauaca

SEQ ID NO: 1469382 - RNA, 19 nt, Artificial Sequence
  Description of Artificial Sequence: Synthetic oligonucleotide
agagcauuggugcaaaauu

SEQ ID NO: 1469383 - RNA, 19 nt, Artificial Sequence
  Description of Artificial Sequence: Synthetic oligonucleotide
agcaguaguaugaauucac

SEQ ID NO: 1469384 - RNA, 19 nt, Artificial Sequence
  Description of Artificial Sequence: Synthetic oligonucleotide
uugauacuugauugacacg

SEQ ID NO: 1469385 - RNA, 19 nt, Artificial Sequence
  Description of Artificial Sequence: Synthetic oligonucleotide
uuucaacuccacuucuuug

SEQ ID NO: 1469386 - RNA, 19 nt, Artificial Sequence
  Description of Artificial Sequence: Synthetic oligonucleotide
ccucaaauuuuacugaggg

SEQ ID NO: 1469387 - RNA, 19 nt, Artificial Sequence
  Description of Artificial Sequence: Synthetic oligonucleotide
uaggcgagguaaagaaagg

SEQ ID NO: 1469388 - RNA, 19 nt, Artificial Sequence
  Description of Artificial Sequence: Synthetic oligonucleotide
auaagauccaagagcauug

SEQ ID NO: 1469389 - RNA, 19 nt, Artificial Sequence
  Description of Artificial Sequence: Synthetic oligonucleotide
acacgugguacguucacag

SEQ ID NO: 1469390 - RNA, 19 nt, Artificial Sequence
  Description of Artificial Sequence: Synthetic oligonucleotide
auuucaauuauaugacauu

SEQ ID NO: 1469391 - RNA, 19 nt, Artificial Sequence
  Description of Artificial Sequence: Synthetic oligonucleotide
cuguugcucacauuuggcc

SEQ ID NO: 1469392 - RNA, 19 nt, Artificial Sequence
  Description of Artificial Sequence: Synthetic oligonucleotide
uacuugauugacacguggu

SEQ ID NO: 1469393 - RNA, 19 nt, Artificial Sequence
  Description of Artificial Sequence: Synthetic oligonucleotide
ggcauuuggagacccaugg

SEQ ID NO: 1469394 - RNA, 19 nt, Artificial Sequence
  Description of Artificial Sequence: Synthetic oligonucleotide
ucaacuucggccagcgagu

SEQ ID NO: 1469395 - RNA, 19 nt, Artificial Sequence
  Description of Artificial Sequence: Synthetic oligonucleotide
uugaggaaagaaguguucu

SEQ ID NO: 1469396 - RNA, 19 nt, Artificial Sequence
  Description of Artificial Sequence: Synthetic oligonucleotide
uuuccccauacucugcaca

SEQ ID NO: 1469397 - RNA, 19 nt, Artificial Sequence
  Description of Artificial Sequence: Synthetic oligonucleotide
caauccuuuauuggguugg

SEQ ID NO: 1469398 - RNA, 19 nt, Artificial Sequence
  Description of Artificial Sequence: Synthetic oligonucleotide
uaagauccaagagcauugg

SEQ ID NO: 1469399 - RNA, 19 nt, Artificial Sequence
  Description of Artificial Sequence: Synthetic oligonucleotide
cuugauugacacgugguac

SEQ ID NO: 1469400 - RNA, 19 nt, Artificial Sequence
  Description of Artificial Sequence: Synthetic oligonucleotide
cuuuguagggccuugauau

SEQ ID NO: 1469401 - RNA, 19 nt, Artificial Sequence
  Description of Artificial Sequence: Synthetic oligonucleotide
auuuggguaccauuggcaa

SEQ ID NO: 1469402 - RNA, 19 nt, Artificial Sequence
  Description of Artificial Sequence: Synthetic oligonucleotide
cuuacucuugcuauucuca

SEQ ID NO: 1469403 - RNA, 19 nt, Artificial Sequence
  Description of Artificial Sequence: Synthetic oligonucleotide
ugugacaccccuuggucca

SEQ ID NO: 1469404 - RNA, 19 nt, Artificial Sequence
  Description of Artificial Sequence: Synthetic oligonucleotide
gacauuucaguuugccuca

SEQ ID NO: 1469405 - RNA, 19 nt, Artificial Sequence
  Description of Artificial Sequence: Synthetic oligonucleotide
uuguagggccuugauaucc

SEQ ID NO: 1469406 - RNA, 19 nt, Artificial Sequence
  Description of Artificial Sequence: Synthetic oligonucleotide
uggagguaucuccacuucc

SEQ ID NO: 1469407 - RNA, 19 nt, Artificial Sequence
  Description of Artificial Sequence: Synthetic oligonucleotide
aguaacagucuauaacuua

SEQ ID NO: 1469408 - RNA, 19 nt, Artificial Sequence
  Description of Artificial Sequence: Synthetic oligonucleotide
ugacucaaucugcucuggg

SEQ ID NO: 1469409 - RNA, 19 nt, Artificial Sequence
  Description of Artificial Sequence: Synthetic oligonucleotide
augcuaauggaaugcucuc

SEQ ID NO: 1469410 - RNA, 19 nt, Artificial Sequence
  Description of Artificial Sequence: Synthetic oligonucleotide
uggucugugaccucccgug

SEQ ID NO: 1469411 - RNA, 19 nt, Artificial Sequence
  Description of Artificial Sequence: Synthetic oligonucleotide
ucuacagcggguccugacu

SEQ ID NO: 1469412 - RNA, 19 nt, Artificial Sequence
  Description of Artificial Sequence: Synthetic oligonucleotide
augaauucacaugacauua

SEQ ID NO: 1469413 - RNA, 19 nt, Artificial Sequence
  Description of Artificial Sequence: Synthetic oligonucleotide
uaaagucguugauacuuga

SEQ ID NO: 1469414 - RNA, 19 nt, Artificial Sequence
  Description of Artificial Sequence: Synthetic oligonucleotide
cuauaacuuaaagucguug

SEQ ID NO: 1469415 - RNA, 19 nt, Artificial Sequence
  Description of Artificial Sequence: Synthetic oligonucleotide
gcaauaagauccaagagca

SEQ ID NO: 1469416 - RNA, 19 nt, Artificial Sequence
  Description of Artificial Sequence: Synthetic oligonucleotide
aauccuuuauuggguuggg

SEQ ID NO: 1469417 - RNA, 19 nt, Artificial Sequence
  Description of Artificial Sequence: Synthetic oligonucleotide
aacuucggccagcgagucc

SEQ ID NO: 1469418 - RNA, 19 nt, Artificial Sequence
  Description of Artificial Sequence: Synthetic oligonucleotide
aguuggacuguuccaacga

SEQ ID NO: 1469419 - RNA, 19 nt, Artificial Sequence
  Description of Artificial Sequence: Synthetic oligonucleotide
uguucucuugagcuuggcu

SEQ ID NO: 1469420 - RNA, 19 nt, Artificial Sequence
  Description of Artificial Sequence: Synthetic oligonucleotide
aacuccauucagugugucu

SEQ ID NO: 1469421 - RNA, 19 nt, Artificial Sequence
  Description of Artificial Sequence: Synthetic oligonucleotide
ucuuuugcguuccacucua

SEQ ID NO: 1469422 - RNA, 19 nt, Artificial Sequence
  Description of Artificial Sequence: Synthetic oligonucleotide
ucggcaaacuggaacugca

SEQ ID NO: 1469423 - RNA, 19 nt, Artificial Sequence
  Description of Artificial Sequence: Synthetic oligonucleotide
ucuugcuauucucaaccuc

SEQ ID NO: 1469424 - RNA, 19 nt, Artificial Sequence
  Description of Artificial Sequence: Synthetic oligonucleotide
ggugcaauccuccuuacuc

SEQ ID NO: 1469425 - RNA, 19 nt, Artificial Sequence
  Description of Artificial Sequence: Synthetic oligonucleotide
gaugcuaauggaaugcucu

SEQ ID NO: 1469426 - RNA, 19 nt, Artificial Sequence
  Description of Artificial Sequence: Synthetic oligonucleotide
cagcgaguccuuaauuucc

SEQ ID NO: 1469427 - RNA, 19 nt, Artificial Sequence
  Description of Artificial Sequence: Synthetic oligonucleotide
cuaauggaaugcucucagc

SEQ ID NO: 1469428 - RNA, 19 nt, Artificial Sequence
  Description of Artificial Sequence: Synthetic oligonucleotide
uccguugguggcuauuucu

SEQ ID NO: 1469429 - RNA, 19 nt, Artificial Sequence
  Description of Artificial Sequence: Synthetic oligonucleotide
caguuggacuguuccaacg

SEQ ID NO: 1469430 - RNA, 19 nt, Artificial Sequence
  Description of Artificial Sequence: Synthetic oligonucleotide
guaacagucuauaacuuaa

SEQ ID NO: 1469431 - RNA, 19 nt, Artificial Sequence
  Description of Artificial Sequence: Synthetic oligonucleotide
auggagguaucuccacuuc

SEQ ID NO: 1469432 - RNA, 19 nt, Artificial Sequence
  Description of Artificial Sequence: Synthetic oligonucleotide
uguugucuacagcgggucc

SEQ ID NO: 1469433 - RNA, 19 nt, Artificial Sequence
  Description of Artificial Sequence: Synthetic oligonucleotide
uguagggccuugauaucca

SEQ ID NO: 1469434 - RNA, 19 nt, Artificial Sequence
  Description of Artificial Sequence: Synthetic oligonucleotide
guuggacuguuccaacgag

SEQ ID NO: 1469435 - RNA, 19 nt, Artificial Sequence
  Description of Artificial Sequence: Synthetic oligonucleotide
uaacagucuauaacuuaaa

SEQ ID NO: 1469436 - RNA, 19 nt, Artificial Sequence
  Description of Artificial Sequence: Synthetic oligonucleotide
cauauuacccaugugaagu

SEQ ID NO: 1469437 - RNA, 19 nt, Artificial Sequence
  Description of Artificial Sequence: Synthetic oligonucleotide
uuuauuggguugggucugg

SEQ ID NO: 1469438 - RNA, 19 nt, Artificial Sequence
  Description of Artificial Sequence: Synthetic oligonucleotide
ugaugcuaauggaaugcuc

SEQ ID NO: 1469439 - RNA, 19 nt, Artificial Sequence
  Description of Artificial Sequence: Synthetic oligonucleotide
ucuuuuacuucggcaaacu

SEQ ID NO: 1469440 - RNA, 19 nt, Artificial Sequence
  Description of Artificial Sequence: Synthetic oligonucleotide
gcuaauggaaugcucucag

SEQ ID NO: 1469441 - RNA, 19 nt, Artificial Sequence
  Description of Artificial Sequence: Synthetic oligonucleotide
acgugguacguucacagaa

SEQ ID NO: 1469442 - RNA, 19 nt, Artificial Sequence
  Description of Artificial Sequence: Synthetic oligonucleotide
guacguucacagaaacugg

SEQ ID NO: 1469443 - RNA, 19 nt, Artificial Sequence
  Description of Artificial Sequence: Synthetic oligonucleotide
gaaccuguugcucacauuu

SEQ ID NO: 1469444 - RNA, 19 nt, Artificial Sequence
  Description of Artificial Sequence: Synthetic oligonucleotide
ucuauaacuuaaagucguu

SEQ ID NO: 1469445 - RNA, 19 nt, Artificial Sequence
  Description of Artificial Sequence: Synthetic oligonucleotide
gagcauuggugcaaaauuc

SEQ ID NO: 1469446 - RNA, 19 nt, Artificial Sequence
  Description of Artificial Sequence: Synthetic oligonucleotide
agcgaguccuuaauuuccc

SEQ ID NO: 1469447 - RNA, 19 nt, Artificial Sequence
  Description of Artificial Sequence: Synthetic oligonucleotide
ucugugaccucccgugacu

SEQ ID NO: 1469448 - RNA, 19 nt, Artificial Sequence
  Description of Artificial Sequence: Synthetic oligonucleotide
acuguccuagaccucccag

SEQ ID NO: 1469449 - RNA, 19 nt, Artificial Sequence
  Description of Artificial Sequence: Synthetic oligonucleotide
acuugauugacacguggua

SEQ ID NO: 1469450 - RNA, 19 nt, Artificial Sequence
  Description of Artificial Sequence: Synthetic oligonucleotide
gaauuuaggauuauuccau

SEQ ID NO: 1469451 - RNA, 19 nt, Artificial Sequence
  Description of Artificial Sequence: Synthetic oligonucleotide
ucguugauacuugauugac

SEQ ID NO: 1469452 - RNA, 19 nt, Artificial Sequence
  Description of Artificial Sequence: Synthetic oligonucleotide
cuagcugggcauuuggaga

SEQ ID NO: 1469453 - RNA, 19 nt, Artificial Sequence
  Description of Artificial Sequence: Synthetic oligonucleotide
ugcguuccacucuaccuug

SEQ ID NO: 1469454 - RNA, 19 nt, Artificial Sequence
  Description of Artificial Sequence: Synthetic oligonucleotide
ugcuauucucaaccucccc

SEQ ID NO: 1469455 - RNA, 19 nt, Artificial Sequence
  Description of Artificial Sequence: Synthetic oligonucleotide
uugcguuccacucuaccuu

SEQ ID NO: 1469456 - RNA, 19 nt, Artificial Sequence
  Description of Artificial Sequence: Synthetic oligonucleotide
uauuacccaugugaaguga

SEQ ID NO: 1469457 - RNA, 19 nt, Artificial Sequence
  Description of Artificial Sequence: Synthetic oligonucleotide
ugcuaauggaaugcucuca

SEQ ID NO: 1469458 - RNA, 19 nt, Artificial Sequence
  Description of Artificial Sequence: Synthetic oligonucleotide
uuuggccccugcuaguggu

SEQ ID NO: 1469459 - RNA, 19 nt, Artificial Sequence
  Description of Artificial Sequence: Synthetic oligonucleotide
ggcuauuucugaauuuagg

SEQ ID NO: 1469460 - RNA, 19 nt, Artificial Sequence
  Description of Artificial Sequence: Synthetic oligonucleotide
ugguacguucacagaaacu

SEQ ID NO: 1469461 - RNA, 19 nt, Artificial Sequence
  Description of Artificial Sequence: Synthetic oligonucleotide
auuuggccccugcuagugg

SEQ ID NO: 1469462 - RNA, 19 nt, Artificial Sequence
  Description of Artificial Sequence: Synthetic oligonucleotide
uccucaacuucggccagcg

SEQ ID NO: 1469463 - RNA, 19 nt, Artificial Sequence
  Description of Artificial Sequence: Synthetic oligonucleotide
uacucuugcuauucucaac

SEQ ID NO: 1469464 - RNA, 19 nt, Artificial Sequence
  Description of Artificial Sequence: Synthetic oligonucleotide
uuacccaugugaagugaaa

SEQ ID NO: 1469465 - RNA, 19 nt, Artificial Sequence
  Description of Artificial Sequence: Synthetic oligonucleotide
uugacacgugguacguuca

SEQ ID NO: 1469466 - RNA, 19 nt, Artificial Sequence
  Description of Artificial Sequence: Synthetic oligonucleotide
guagucucccuguguuugg

SEQ ID NO: 1469467 - RNA, 19 nt, Artificial Sequence
  Description of Artificial Sequence: Synthetic oligonucleotide
aauaaagaucuuggauaaa

SEQ ID NO: 1469468 - RNA, 19 nt, Artificial Sequence
  Description of Artificial Sequence: Synthetic oligonucleotide
acuucggccagcgaguccu

SEQ ID NO: 1469469 - RNA, 19 nt, Artificial Sequence
  Description of Artificial Sequence: Synthetic oligonucleotide
aaucuacaaguaacagucu

SEQ ID NO: 1469470 - RNA, 19 nt, Artificial Sequence
  Description of Artificial Sequence: Synthetic oligonucleotide
acuccacuuuucugaauug

SEQ ID NO: 1469471 - RNA, 19 nt, Artificial Sequence
  Description of Artificial Sequence: Synthetic oligonucleotide
uuuggguaccauuggcaau

SEQ ID NO: 1469472 - RNA, 19 nt, Artificial Sequence
  Description of Artificial Sequence: Synthetic oligonucleotide
gucguugauacuugauuga

SEQ ID NO: 1469473 - RNA, 19 nt, Artificial Sequence
  Description of Artificial Sequence: Synthetic oligonucleotide
cuuuauuggguugggucug

SEQ ID NO: 1469474 - RNA, 19 nt, Artificial Sequence
  Description of Artificial Sequence: Synthetic oligonucleotide
uacaugaccaaugguugaa

SEQ ID NO: 1469475 - RNA, 19 nt, Artificial Sequence
  Description of Artificial Sequence: Synthetic oligonucleotide
uuccccauacucugcacaa

SEQ ID NO: 1469476 - RNA, 19 nt, Artificial Sequence
  Description of Artificial Sequence: Synthetic oligonucleotide
uagcaguaguaugaauuca

SEQ ID NO: 1469477 - RNA, 19 nt, Artificial Sequence
  Description of Artificial Sequence: Synthetic oligonucleotide
guaugaauucacaugacau

SEQ ID NO: 1469478 - RNA, 19 nt, Artificial Sequence
  Description of Artificial Sequence: Synthetic oligonucleotide
cuuaaagucguugauacuu

SEQ ID NO: 1469479 - RNA, 19 nt, Artificial Sequence
  Description of Artificial Sequence: Synthetic oligonucleotide
cuccacuuuucugaauugc

SEQ ID NO: 1469480 - RNA, 19 nt, Artificial Sequence
  Description of Artificial Sequence: Synthetic oligonucleotide
cuuggcuccgaaccuguug

SEQ ID NO: 1469481 - RNA, 19 nt, Artificial Sequence
  Description of Artificial Sequence: Synthetic oligonucleotide
gguaucuccacuuccucuc

SEQ ID NO: 1469482 - RNA, 19 nt, Artificial Sequence
  Description of Artificial Sequence: Synthetic oligonucleotide
uccuuacucuugcuauucu

SEQ ID NO: 1469483 - RNA, 19 nt, Artificial Sequence
  Description of Artificial Sequence: Synthetic oligonucleotide
aaagucguugauacuugau

SEQ ID NO: 1469484 - RNA, 19 nt, Artificial Sequence
  Description of Artificial Sequence: Synthetic oligonucleotide
gugguacguucacagaaac

SEQ ID NO: 1469485 - RNA, 19 nt, Artificial Sequence
  Description of Artificial Sequence: Synthetic oligonucleotide
ugauugacacgugguacgu

SEQ ID NO: 1469486 - RNA, 19 nt, Artificial Sequence
  Description of Artificial Sequence: Synthetic oligonucleotide
ucaccgggaugugacaccc

SEQ ID NO: 1469487 - RNA, 19 nt, Artificial Sequence
  Description of Artificial Sequence: Synthetic oligonucleotide
cucccgugacucaaucugc

SEQ ID NO: 1469488 - RNA, 19 nt, Artificial Sequence
  Description of Artificial Sequence: Synthetic oligonucleotide
ucucaaccuccccucuggc

SEQ ID NO: 1469489 - RNA, 19 nt, Artificial Sequence
  Description of Artificial Sequence: Synthetic oligonucleotide
gucuauaacuuaaagucgu

SEQ ID NO: 1469490 - RNA, 19 nt, Artificial Sequence
  Description of Artificial Sequence: Synthetic oligonucleotide
ugaaaacaauggugucuac

SEQ ID NO: 1469491 - RNA, 19 nt, Artificial Sequence
  Description of Artificial Sequence: Synthetic oligonucleotide
cauugacauggugcaaucc

SEQ ID NO: 1469492 - RNA, 19 nt, Artificial Sequence
  Description of Artificial Sequence: Synthetic oligonucleotide
ucccgugacucaaucugcu

SEQ ID NO: 1469493 - RNA, 19 nt, Artificial Sequence
  Description of Artificial Sequence: Synthetic oligonucleotide
uguaagguuccuccuccuu

SEQ ID NO: 1469494 - RNA, 19 nt, Artificial Sequence
  Description of Artificial Sequence: Synthetic oligonucleotide
uuucccugauggaugccuc

SEQ ID NO: 1469495 - RNA, 19 nt, Artificial Sequence
  Description of Artificial Sequence: Synthetic oligonucleotide
uacccaugugaagugaaau

SEQ ID NO: 1469496 - RNA, 19 nt, Artificial Sequence
  Description of Artificial Sequence: Synthetic oligonucleotide
ucccugauggaugccucgg

SEQ ID NO: 1469497 - RNA, 19 nt, Artificial Sequence
  Description of Artificial Sequence: Synthetic oligonucleotide
ugacacgugguacguucac

SEQ ID NO: 1469498 - RNA, 19 nt, Artificial Sequence
  Description of Artificial Sequence: Synthetic oligonucleotide
gucaccugaugcuaaugga

SEQ ID NO: 1469499 - RNA, 19 nt, Artificial Sequence
  Description of Artificial Sequence: Synthetic oligonucleotide
accgggaugugacaccccu

SEQ ID NO: 1469500 - RNA, 19 nt, Artificial Sequence
  Description of Artificial Sequence: Synthetic oligonucleotide
uccaagagcauuggugcaa

SEQ ID NO: 1469501 - RNA, 19 nt, Artificial Sequence
  Description of Artificial Sequence: Synthetic oligonucleotide
auucagugugucugaaguu

SEQ ID NO: 1469502 - RNA, 19 nt, Artificial Sequence
  Description of Artificial Sequence: Synthetic oligonucleotide
uuauuggguugggucuggg

SEQ ID NO: 1469503 - RNA, 19 nt, Artificial Sequence
  Description of Artificial Sequence: Synthetic oligonucleotide
ccacuuuucugaauugcag

SEQ ID NO: 1469504 - RNA, 19 nt, Artificial Sequence
  Description of Artificial Sequence: Synthetic oligonucleotide
ggugucuacaugaccaaug

SEQ ID NO: 1469505 - RNA, 19 nt, Artificial Sequence
  Description of Artificial Sequence: Synthetic oligonucleotide
acucugcacaauuuccuuu

SEQ ID NO: 1469506 - RNA, 19 nt, Artificial Sequence
  Description of Artificial Sequence: Synthetic oligonucleotide
cauggugcaauccuccuua

SEQ ID NO: 1469507 - RNA, 19 nt, Artificial Sequence
  Description of Artificial Sequence: Synthetic oligonucleotide
ugcuagugguccuggggac

SEQ ID NO: 1469508 - RNA, 19 nt, Artificial Sequence
  Description of Artificial Sequence: Synthetic oligonucleotide
ccuuguagcaguaguauga

SEQ ID NO: 1469509 - RNA, 19 nt, Artificial Sequence
  Description of Artificial Sequence: Synthetic oligonucleotide
gagguaucuccacuuccuc

SEQ ID NO: 1469510 - RNA, 19 nt, Artificial Sequence
  Description of Artificial Sequence: Synthetic oligonucleotide
cuacagcggguccugacuc

SEQ ID NO: 1469511 - RNA, 19 nt, Artificial Sequence
  Description of Artificial Sequence: Synthetic oligonucleotide
gguugaauacaaaucuaca

SEQ ID NO: 1469512 - RNA, 19 nt, Artificial Sequence
  Description of Artificial Sequence: Synthetic oligonucleotide
cucaccgggaugugacacc

SEQ ID NO: 1469513 - RNA, 19 nt, Artificial Sequence
  Description of Artificial Sequence: Synthetic oligonucleotide
cugaaaacaauggugucua

SEQ ID NO: 1469514 - RNA, 19 nt, Artificial Sequence
  Description of Artificial Sequence: Synthetic oligonucleotide
aaccuguugcucacauuug

SEQ ID NO: 1469515 - RNA, 19 nt, Artificial Sequence
  Description of Artificial Sequence: Synthetic oligonucleotide
gucuacaugaccaaugguu

SEQ ID NO: 1469516 - RNA, 19 nt, Artificial Sequence
  Description of Artificial Sequence: Synthetic oligonucleotide
uggugcaauccuccuuacu

SEQ ID NO: 1469517 - RNA, 19 nt, Artificial Sequence
  Description of Artificial Sequence: Synthetic oligonucleotide
gcgagguaaagaaaggcac

SEQ ID NO: 1469518 - RNA, 19 nt, Artificial Sequence
  Description of Artificial Sequence: Synthetic oligonucleotide
aucuuuguagggccuugau

SEQ ID NO: 1469519 - RNA, 19 nt, Artificial Sequence
  Description of Artificial Sequence: Synthetic oligonucleotide
uugucuacagcggguccug

SEQ ID NO: 1469520 - RNA, 19 nt, Artificial Sequence
  Description of Artificial Sequence: Synthetic oligonucleotide
ugugaccucccgugacuca

SEQ ID NO: 1469521 - RNA, 19 nt, Artificial Sequence
  Description of Artificial Sequence: Synthetic oligonucleotide
cuccccugcugacuugagg

SEQ ID NO: 1469522 - RNA, 19 nt, Artificial Sequence
  Description of Artificial Sequence: Synthetic oligonucleotide
ccuguugcucacauuuggc

SEQ ID NO: 1469523 - RNA, 19 nt, Artificial Sequence
  Description of Artificial Sequence: Synthetic oligonucleotide
uuggucuuuugcguuccac

SEQ ID NO: 1469524 - RNA, 19 nt, Artificial Sequence
  Description of Artificial Sequence: Synthetic oligonucleotide
cuacaaguaacagucuaua

SEQ ID NO: 1469525 - RNA, 19 nt, Artificial Sequence
  Description of Artificial Sequence: Synthetic oligonucleotide
agucucccuguguuuggug

SEQ ID NO: 1469526 - RNA, 19 nt, Artificial Sequence
  Description of Artificial Sequence: Synthetic oligonucleotide
guggcuauuucugaauuua

SEQ ID NO: 1469527 - RNA, 19 nt, Artificial Sequence
  Description of Artificial Sequence: Synthetic oligonucleotide
auuacccaugugaagugaa

SEQ ID NO: 1469528 - RNA, 19 nt, Artificial Sequence
  Description of Artificial Sequence: Synthetic oligonucleotide
agcggguccugacucuuca

SEQ ID NO: 1469529 - RNA, 19 nt, Artificial Sequence
  Description of Artificial Sequence: Synthetic oligonucleotide
uggccugcacuccacuuuu

SEQ ID NO: 1469530 - RNA, 19 nt, Artificial Sequence
  Description of Artificial Sequence: Synthetic oligonucleotide
uuacuucggcaaacuggaa

SEQ ID NO: 1469531 - RNA, 19 nt, Artificial Sequence
  Description of Artificial Sequence: Synthetic oligonucleotide
caugaccaaugguugaaua

SEQ ID NO: 1469532 - RNA, 19 nt, Artificial Sequence
  Description of Artificial Sequence: Synthetic oligonucleotide
uacagcggguccugacucu

SEQ ID NO: 1469533 - RNA, 19 nt, Artificial Sequence
  Description of Artificial Sequence: Synthetic oligonucleotide
ccucccgugacucaaucug

SEQ ID NO: 1469534 - RNA, 19 nt, Artificial Sequence
  Description of Artificial Sequence: Synthetic oligonucleotide
gucugugaccucccgugac

SEQ ID NO: 1469535 - RNA, 19 nt, Artificial Sequence
  Description of Artificial Sequence: Synthetic oligonucleotide
ucagcacuuaggcgaggua

SEQ ID NO: 1469536 - RNA, 19 nt, Artificial Sequence
  Description of Artificial Sequence: Synthetic oligonucleotide
uuccaacgaguuucugguc

SEQ ID NO: 1469537 - RNA, 19 nt, Artificial Sequence
  Description of Artificial Sequence: Synthetic oligonucleotide
cuuguagcaguaguaugaa

SEQ ID NO: 1469538 - RNA, 19 nt, Artificial Sequence
  Description of Artificial Sequence: Synthetic oligonucleotide
caguaguaugaauucacau

SEQ ID NO: 1469539 - RNA, 19 nt, Artificial Sequence
  Description of Artificial Sequence: Synthetic oligonucleotide
accucccgugacucaaucu

SEQ ID NO: 1469540 - RNA, 19 nt, Artificial Sequence
  Description of Artificial Sequence: Synthetic oligonucleotide
cuuuugcguuccacucuac

SEQ ID NO: 1469541 - RNA, 19 nt, Artificial Sequence
  Description of Artificial Sequence: Synthetic oligonucleotide
gaaguguucucuugagcuu

SEQ ID NO: 1469542 - RNA, 19 nt, Artificial Sequence
  Description of Artificial Sequence: Synthetic oligonucleotide
gcuauucucaaccuccccu

SEQ ID NO: 1469543 - RNA, 19 nt, Artificial Sequence
  Description of Artificial Sequence: Synthetic oligonucleotide
gucuacagcggguccugac

SEQ ID NO: 1469544 - RNA, 19 nt, Artificial Sequence
  Description of Artificial Sequence: Synthetic oligonucleotide
ucuccguugguggcuauuu

SEQ ID NO: 1469545 - RNA, 19 nt, Artificial Sequence
  Description of Artificial Sequence: Synthetic oligonucleotide
cuccgaaccuguugcucac

SEQ ID NO: 1469546 - RNA, 19 nt, Artificial Sequence
  Description of Artificial Sequence: Synthetic oligonucleotide
gugcaauccuccuuacucu

SEQ ID NO: 1469547 - RNA, 19 nt, Artificial Sequence
  Description of Artificial Sequence: Synthetic oligonucleotide
cuucggcaaacuggaacug

SEQ ID NO: 1469548 - RNA, 19 nt, Artificial Sequence
  Description of Artificial Sequence: Synthetic oligonucleotide
gggaugugacaccccuugg

SEQ ID NO: 1469549 - RNA, 19 nt, Artificial Sequence
  Description of Artificial Sequence: Synthetic oligonucleotide
gacacgugguacguucaca

SEQ ID NO: 1469550 - RNA, 19 nt, Artificial Sequence
  Description of Artificial Sequence: Synthetic oligonucleotide
ccagcgaguccuuaauuuc

SEQ ID NO: 1469551 - RNA, 19 nt, Artificial Sequence
  Description of Artificial Sequence: Synthetic oligonucleotide
uccauucagugugucugaa

SEQ ID NO: 1469552 - RNA, 19 nt, Artificial Sequence
  Description of Artificial Sequence: Synthetic oligonucleotide
ucggccagcgaguccuuaa

SEQ ID NO: 1469553 - RNA, 19 nt, Artificial Sequence
  Description of Artificial Sequence: Synthetic oligonucleotide
uccuggggacagagcacug

SEQ ID NO: 1469554 - RNA, 19 nt, Artificial Sequence
  Description of Artificial Sequence: Synthetic oligonucleotide
cucucagcuagaacugaaa

SEQ ID NO: 1469555 - RNA, 19 nt, Artificial Sequence
  Description of Artificial Sequence: Synthetic oligonucleotide
guccuagaccucccagggc

SEQ ID NO: 1469556 - RNA, 19 nt, Artificial Sequence
  Description of Artificial Sequence: Synthetic oligonucleotide
cagcacuuaggcgagguaa

SEQ ID NO: 1469557 - RNA, 19 nt, Artificial Sequence
  Description of Artificial Sequence: Synthetic oligonucleotide
gacauggugcaauccuccu

SEQ ID NO: 1469558 - RNA, 19 nt, Artificial Sequence
  Description of Artificial Sequence: Synthetic oligonucleotide
guaagguuccuccuccuuu

SEQ ID NO: 1469559 - RNA, 19 nt, Artificial Sequence
  Description of Artificial Sequence: Synthetic oligonucleotide
cucuaccuuguagcaguag

SEQ ID NO: 1469560 - RNA, 19 nt, Artificial Sequence
  Description of Artificial Sequence: Synthetic oligonucleotide
gacaccccuugguccacac

SEQ ID NO: 1469561 - RNA, 19 nt, Artificial Sequence
  Description of Artificial Sequence: Synthetic oligonucleotide
gcuccgaaccuguugcuca

SEQ ID NO: 1469562 - RNA, 19 nt, Artificial Sequence
  Description of Artificial Sequence: Synthetic oligonucleotide
gaccucccgugacucaauc

SEQ ID NO: 1469563 - RNA, 19 nt, Artificial Sequence
  Description of Artificial Sequence: Synthetic oligonucleotide
cugauggaugccucggugu

SEQ ID NO: 1469564 - RNA, 19 nt, Artificial Sequence
  Description of Artificial Sequence: Synthetic oligonucleotide
ccugauggaugccucggug

SEQ ID NO: 1469565 - RNA, 19 nt, Artificial Sequence
  Description of Artificial Sequence: Synthetic oligonucleotide
auccuuuauuggguugggu

SEQ ID NO: 1469566 - RNA, 19 nt, Artificial Sequence
  Description of Artificial Sequence: Synthetic oligonucleotide
ccauucagugugucugaag

SEQ ID NO: 1469567 - RNA, 19 nt, Artificial Sequence
  Description of Artificial Sequence: Synthetic oligonucleotide
gguacaugaaguuggucuu

SEQ ID NO: 1469568 - RNA, 19 nt, Artificial Sequence
  Description of Artificial Sequence: Synthetic oligonucleotide
accaaugguugaauacaaa

SEQ ID NO: 1469569 - RNA, 19 nt, Artificial Sequence
  Description of Artificial Sequence: Synthetic oligonucleotide
ccuuuauuggguugggucu

SEQ ID NO: 1469570 - RNA, 19 nt, Artificial Sequence
  Description of Artificial Sequence: Synthetic oligonucleotide
acguagucucccuguguuu

SEQ ID NO: 1469571 - RNA, 19 nt, Artificial Sequence
  Description of Artificial Sequence: Synthetic oligonucleotide
ugaccucccgugacucaau

SEQ ID NO: 1469572 - RNA, 19 nt, Artificial Sequence
  Description of Artificial Sequence: Synthetic oligonucleotide
guugucuacagcggguccu

SEQ ID NO: 1469573 - RNA, 19 nt, Artificial Sequence
  Description of Artificial Sequence: Synthetic oligonucleotide
cuccguugguggcuauuuc

SEQ ID NO: 1469574 - RNA, 19 nt, Artificial Sequence
  Description of Artificial Sequence: Synthetic oligonucleotide
uggcuccgaaccuguugcu

SEQ ID NO: 1469575 - RNA, 19 nt, Artificial Sequence
  Description of Artificial Sequence: Synthetic oligonucleotide
ccucauacugucucuggga

SEQ ID NO: 1469576 - RNA, 19 nt, Artificial Sequence
  Description of Artificial Sequence: Synthetic oligonucleotide
gcuggucugugaccucccg

SEQ ID NO: 1469577 - RNA, 19 nt, Artificial Sequence
  Description of Artificial Sequence: Synthetic oligonucleotide
ggcauucucaccgggaugu

SEQ ID NO: 1469578 - RNA, 19 nt, Artificial Sequence
  Description of Artificial Sequence: Synthetic oligonucleotide
cacgugguacguucacaga

SEQ ID NO: 1469579 - RNA, 19 nt, Artificial Sequence
  Description of Artificial Sequence: Synthetic oligonucleotide
ugucuacagcggguccuga

SEQ ID NO: 1469580 - RNA, 19 nt, Artificial Sequence
  Description of Artificial Sequence: Synthetic oligonucleotide
uccgaaccuguugcucaca

SEQ ID NO: 1469581 - RNA, 19 nt, Artificial Sequence
  Description of Artificial Sequence: Synthetic oligonucleotide
acaccccuugguccacaca

SEQ ID NO: 1469582 - RNA, 19 nt, Artificial Sequence
  Description of Artificial Sequence: Synthetic oligonucleotide
caacuucggccagcgaguc

SEQ ID NO: 1469583 - RNA, 19 nt, Artificial Sequence
  Description of Artificial Sequence: Synthetic oligonucleotide
gcucacauuuggccccugc

SEQ ID NO: 1469584 - RNA, 19 nt, Artificial Sequence
  Description of Artificial Sequence: Synthetic oligonucleotide
gacccauggccuucuugua

SEQ ID NO: 1469585 - RNA, 19 nt, Artificial Sequence
  Description of Artificial Sequence: Synthetic oligonucleotide
cucuugcuauucucaaccu

SEQ ID NO: 1469586 - RNA, 19 nt, Artificial Sequence
  Description of Artificial Sequence: Synthetic oligonucleotide
gggcauucucaccgggaug

SEQ ID NO: 1469587 - RNA, 19 nt, Artificial Sequence
  Description of Artificial Sequence: Synthetic oligonucleotide
guagggccuugauauccaa

SEQ ID NO: 1469588 - RNA, 19 nt, Artificial Sequence
  Description of Artificial Sequence: Synthetic oligonucleotide
gggacagagcacugucuuc

SEQ ID NO: 1469589 - RNA, 19 nt, Artificial Sequence
  Description of Artificial Sequence: Synthetic oligonucleotide
gugaccucccgugacucaa

SEQ ID NO: 1469590 - RNA, 19 nt, Artificial Sequence
  Description of Artificial Sequence: Synthetic oligonucleotide
cgggaugugacaccccuug

SEQ ID NO: 1469591 - RNA, 19 nt, Artificial Sequence
  Description of Artificial Sequence: Synthetic oligonucleotide
uagaccucccagggcaguu

SEQ ID NO: 1469592 - RNA, 19 nt, Artificial Sequence
  Description of Artificial Sequence: Synthetic oligonucleotide
caacuccauucaguguguc

SEQ ID NO: 1469593 - RNA, 19 nt, Artificial Sequence
  Description of Artificial Sequence: Synthetic oligonucleotide
gcaauccuccuuacucuug

SEQ ID NO: 1469594 - RNA, 19 nt, Artificial Sequence
  Description of Artificial Sequence: Synthetic oligonucleotide
caccgggaugugacacccc

SEQ ID NO: 1469595 - RNA, 19 nt, Artificial Sequence
  Description of Artificial Sequence: Synthetic oligonucleotide
cacguagucucccuguguu

SEQ ID NO: 1469596 - RNA, 19 nt, Artificial Sequence
  Description of Artificial Sequence: Synthetic oligonucleotide
ucccuguguuuggugucac

SEQ ID NO: 1469597 - RNA, 19 nt, Artificial Sequence
  Description of Artificial Sequence: Synthetic oligonucleotide
caauaagauccaagagcau

SEQ ID NO: 1469598 - RNA, 19 nt, Artificial Sequence
  Description of Artificial Sequence: Synthetic oligonucleotide
cguugauacuugauugaca

SEQ ID NO: 1469599 - RNA, 19 nt, Artificial Sequence
  Description of Artificial Sequence: Synthetic oligonucleotide
uuucuccguugguggcuau

SEQ ID NO: 1469600 - RNA, 19 nt, Artificial Sequence
  Description of Artificial Sequence: Synthetic oligonucleotide
cagugugucugaaguuucu

SEQ ID NO: 1469601 - RNA, 19 nt, Artificial Sequence
  Description of Artificial Sequence: Synthetic oligonucleotide
ggucugugaccucccguga

SEQ ID NO: 1469602 - RNA, 19 nt, Artificial Sequence
  Description of Artificial Sequence: Synthetic oligonucleotide
guuucuccguugguggcua

SEQ ID NO: 1469603 - RNA, 19 nt, Artificial Sequence
  Description of Artificial Sequence: Synthetic oligonucleotide
cuguuccaacgaguuucug

SEQ ID NO: 1469604 - RNA, 19 nt, Artificial Sequence
  Description of Artificial Sequence: Synthetic oligonucleotide
uucuccguugguggcuauu

SEQ ID NO: 1469605 - RNA, 19 nt, Artificial Sequence
  Description of Artificial Sequence: Synthetic oligonucleotide
cacuguccuagaccuccca

SEQ ID NO: 1469606 - RNA, 19 nt, Artificial Sequence
  Description of Artificial Sequence: Synthetic oligonucleotide
cugaaguuucuccguuggu

SEQ ID NO: 1469607 - RNA, 19 nt, Artificial Sequence
  Description of Artificial Sequence: Synthetic oligonucleotide
uacugaggguuuggucuuu

SEQ ID NO: 1469608 - RNA, 19 nt, Artificial Sequence
  Description of Artificial Sequence: Synthetic oligonucleotide
cagcggguccugacucuuc

SEQ ID NO: 1469609 - RNA, 19 nt, Artificial Sequence
  Description of Artificial Sequence: Synthetic oligonucleotide
gcucaguauucuguaaggu

SEQ ID NO: 1469610 - RNA, 19 nt, Artificial Sequence
  Description of Artificial Sequence: Synthetic oligonucleotide
cuguaagguuccuccuccu

SEQ ID NO: 1469611 - RNA, 19 nt, Artificial Sequence
  Description of Artificial Sequence: Synthetic oligonucleotide
cuggucugugaccucccgu

SEQ ID NO: 1469612 - RNA, 19 nt, Artificial Sequence
  Description of Artificial Sequence: Synthetic oligonucleotide
acucuaccuuguagcagua

SEQ ID NO: 1469613 - RNA, 19 nt, Artificial Sequence
  Description of Artificial Sequence: Synthetic oligonucleotide
ggcuccgaaccuguugcuc

SEQ ID NO: 1469614 - RNA, 19 nt, Artificial Sequence
  Description of Artificial Sequence: Synthetic oligonucleotide
gauugacacgugguacguu

SEQ ID NO: 1469615 - RNA, 19 nt, Artificial Sequence
  Description of Artificial Sequence: Synthetic oligonucleotide
cccgugacucaaucugcuc

SEQ ID NO: 1469616 - RNA, 19 nt, Artificial Sequence
  Description of Artificial Sequence: Synthetic oligonucleotide
cccugcuagugguccuggg

SEQ ID NO: 1469617 - RNA, 19 nt, Artificial Sequence
  Description of Artificial Sequence: Synthetic oligonucleotide
cgugguacguucacagaaa

SEQ ID NO: 1469618 - RNA, 19 nt, Artificial Sequence
  Description of Artificial Sequence: Synthetic oligonucleotide
ccaacgaguuucugguccu

SEQ ID NO: 1469619 - RNA, 19 nt, Artificial Sequence
  Description of Artificial Sequence: Synthetic oligonucleotide
gcggguccugacucuucac

SEQ ID NO: 1469620 - RNA, 19 nt, Artificial Sequence
  Description of Artificial Sequence: Synthetic oligonucleotide
ccugguacaugaaguuggu

SEQ ID NO: 1469621 - RNA, 19 nt, Artificial Sequence
  Description of Artificial Sequence: Synthetic oligonucleotide
ggacuguuccaacgaguuu

SEQ ID NO: 1469622 - RNA, 19 nt, Artificial Sequence
  Description of Artificial Sequence: Synthetic oligonucleotide
caacgaguuucugguccua

SEQ ID NO: 1469623 - RNA, 19 nt, Artificial Sequence
  Description of Artificial Sequence: Synthetic oligonucleotide
cuagaccucccagggcagu

SEQ ID NO: 1469624 - RNA, 19 nt, Artificial Sequence
  Description of Artificial Sequence: Synthetic oligonucleotide
ccccugacaggucacuguu

SEQ ID NO: 1469625 - RNA, 19 nt, Artificial Sequence
  Description of Artificial Sequence: Synthetic oligonucleotide
ccucaacuucggccagcga

SEQ ID NO: 1469626 - RNA, 19 nt, Artificial Sequence
  Description of Artificial Sequence: Synthetic oligonucleotide
cccugauggaugccucggu

SEQ ID NO: 1469627 - RNA, 19 nt, Artificial Sequence
  Description of Artificial Sequence: Synthetic oligonucleotide
gcguuccacucuaccuugu

SEQ ID NO: 1469628 - RNA, 19 nt, Artificial Sequence
  Description of Artificial Sequence: Synthetic oligonucleotide
ccgggaugugacaccccuu

SEQ ID NO: 1469629 - RNA, 19 nt, Artificial Sequence
  Description of Artificial Sequence: Synthetic oligonucleotide
gcuuggcuccgaaccuguu

SEQ ID NO: 1469630 - RNA, 19 nt, Artificial Sequence
  Description of Artificial Sequence: Synthetic oligonucleotide
cggccagcgaguccuuaau

SEQ ID NO: 1469631 - RNA, 19 nt, Artificial Sequence
  Description of Artificial Sequence: Synthetic oligonucleotide
ggguugggucugggcuguu

SEQ ID NO: 1469632 - RNA, 19 nt, Artificial Sequence
  Description of Artificial Sequence: Synthetic oligonucleotide
agcuauuucacuuugaacc

SEQ ID NO: 1469633 - RNA, 19 nt, Artificial Sequence
  Description of Artificial Sequence: Synthetic oligonucleotide
aaaacuagaagucugggag

SEQ ID NO: 1469634 - RNA, 19 nt, Artificial Sequence
  Description of Artificial Sequence: Synthetic oligonucleotide
aacaguaaguuuucagucc

SEQ ID NO: 1469635 - RNA, 19 nt, Artificial Sequence
  Description of Artificial Sequence: Synthetic oligonucleotide
auaaagugaacauucagag

SEQ ID NO: 1469636 - RNA, 19 nt, Artificial Sequence
  Description of Artificial Sequence: Synthetic oligonucleotide
auagcaacaauguggaaac

SEQ ID NO: 1469637 - RNA, 19 nt, Artificial Sequence
  Description of Artificial Sequence: Synthetic oligonucleotide
ucuaagauaaagcuagaug

SEQ ID NO: 1469638 - RNA, 19 nt, Artificial Sequence
  Description of Artificial Sequence: Synthetic oligonucleotide
uaugcuuaaaugcagagau

SEQ ID NO: 1469639 - RNA, 19 nt, Artificial Sequence
  Description of Artificial Sequence: Synthetic oligonucleotide
acuaauaaagugaacauuc

SEQ ID NO: 1469640 - RNA, 19 nt, Artificial Sequence
  Description of Artificial Sequence: Synthetic oligonucleotide
uuuaggaugaacuuucugu

SEQ ID NO: 1469641 - RNA, 19 nt, Artificial Sequence
  Description of Artificial Sequence: Synthetic oligonucleotide
auuuagcacacacacacac

SEQ ID NO: 1469642 - RNA, 19 nt, Artificial Sequence
  Description of Artificial Sequence: Synthetic oligonucleotide
ugaaaacaugcacagcucg

SEQ ID NO: 1469643 - RNA, 19 nt, Artificial Sequence
  Description of Artificial Sequence: Synthetic oligonucleotide
uuaguaaggaauuuagcac

SEQ ID NO: 1469644 - RNA, 19 nt, Artificial Sequence
  Description of Artificial Sequence: Synthetic oligonucleotide
acuucuaagauaaagcuag

SEQ ID NO: 1469645 - RNA, 19 nt, Artificial Sequence
  Description of Artificial Sequence: Synthetic oligonucleotide
guuaguaaggaauuuagca

SEQ ID NO: 1469646 - RNA, 19 nt, Artificial Sequence
  Description of Artificial Sequence: Synthetic oligonucleotide
ugcuuaaaugcagagauag

SEQ ID NO: 1469647 - RNA, 19 nt, Artificial Sequence
  Description of Artificial Sequence: Synthetic oligonucleotide
aaauugauuacauguuagu

SEQ ID NO: 1469648 - RNA, 19 nt, Artificial Sequence
  Description of Artificial Sequence: Synthetic oligonucleotide
aagcuauuucacuuugaac

SEQ ID NO: 1469649 - RNA, 19 nt, Artificial Sequence
  Description of Artificial Sequence: Synthetic oligonucleotide
aaguagaacaucugcggag

SEQ ID NO: 1469650 - RNA, 19 nt, Artificial Sequence
  Description of Artificial Sequence: Synthetic oligonucleotide
aaauggacauauuuaucug

SEQ ID NO: 1469651 - RNA, 19 nt, Artificial Sequence
  Description of Artificial Sequence: Synthetic oligonucleotide
aaaauuccgagccaggauu

SEQ ID NO: 1469652 - RNA, 19 nt, Artificial Sequence
  Description of Artificial Sequence: Synthetic oligonucleotide
aucaucaucaucaucauca

SEQ ID NO: 1469653 - RNA, 19 nt, Artificial Sequence
  Description of Artificial Sequence: Synthetic oligonucleotide
aucaucaucaucaucaucu

SEQ ID NO: 1469654 - RNA, 19 nt, Artificial Sequence
  Description of Artificial Sequence: Synthetic oligonucleotide
uuuuaugcacucagguagg

SEQ ID NO: 1469655 - RNA, 19 nt, Artificial Sequence
  Description of Artificial Sequence: Synthetic oligonucleotide
augacuaauaaagugaaca

SEQ ID NO: 1469656 - RNA, 19 nt, Artificial Sequence
  Description of Artificial Sequence: Synthetic oligonucleotide
agcccuugcuacuaaaagc

SEQ ID NO: 1469657 - RNA, 19 nt, Artificial Sequence
  Description of Artificial Sequence: Synthetic oligonucleotide
uaaagcuagaugcagcccu

SEQ ID NO: 1469658 - RNA, 19 nt, Artificial Sequence
  Description of Artificial Sequence: Synthetic oligonucleotide
agucgcaucaacugagggc

SEQ ID NO: 1469659 - RNA, 19 nt, Artificial Sequence
  Description of Artificial Sequence: Synthetic oligonucleotide
gacaaguagaacaucugcg

SEQ ID NO: 1469660 - RNA, 19 nt, Artificial Sequence
  Description of Artificial Sequence: Synthetic oligonucleotide
aguauaguccacacuagcc

SEQ ID NO: 1469661 - RNA, 19 nt, Artificial Sequence
  Description of Artificial Sequence: Synthetic oligonucleotide
ucugccucggaacaguaag

SEQ ID NO: 1469662 - RNA, 19 nt, Artificial Sequence
  Description of Artificial Sequence: Synthetic oligonucleotide
uguuaguaaggaauuuagc

SEQ ID NO: 1469663 - RNA, 19 nt, Artificial Sequence
  Description of Artificial Sequence: Synthetic oligonucleotide
aacuagaagucugggagcg

SEQ ID NO: 1469664 - RNA, 19 nt, Artificial Sequence
  Description of Artificial Sequence: Synthetic oligonucleotide
uguacaaccgguuaacuuu

SEQ ID NO: 1469665 - RNA, 19 nt, Artificial Sequence
  Description of Artificial Sequence: Synthetic oligonucleotide
uuugcagucacagcagacg

SEQ ID NO: 1469666 - RNA, 19 nt, Artificial Sequence
  Description of Artificial Sequence: Synthetic oligonucleotide
gaaucgugaguucacauca

SEQ ID NO: 1469667 - RNA, 19 nt, Artificial Sequence
  Description of Artificial Sequence: Synthetic oligonucleotide
guuaacuuucucuaccagc

SEQ ID NO: 1469668 - RNA, 19 nt, Artificial Sequence
  Description of Artificial Sequence: Synthetic oligonucleotide
accaucaucaucaucauca

SEQ ID NO: 1469669 - RNA, 19 nt, Artificial Sequence
  Description of Artificial Sequence: Synthetic oligonucleotide
guauaguccacacuagccc

SEQ ID NO: 1469670 - RNA, 19 nt, Artificial Sequence
  Description of Artificial Sequence: Synthetic oligonucleotide
aguugucucccaauuaugc

SEQ ID NO: 1469671 - RNA, 19 nt, Artificial Sequence
  Description of Artificial Sequence: Synthetic oligonucleotide
guagguuugggauagucac

SEQ ID NO: 1469672 - RNA, 19 nt, Artificial Sequence
  Description of Artificial Sequence: Synthetic oligonucleotide
uucagucgcaucaacugag

SEQ ID NO: 1469673 - RNA, 19 nt, Artificial Sequence
  Description of Artificial Sequence: Synthetic oligonucleotide
gucgcaucaacugagggcg

SEQ ID NO: 1469674 - RNA, 19 nt, Artificial Sequence
  Description of Artificial Sequence: Synthetic oligonucleotide
ucccaauuaugcuuaaaug

SEQ ID NO: 1469675 - RNA, 19 nt, Artificial Sequence
  Description of Artificial Sequence: Synthetic oligonucleotide
cuuucagucgcaucaacug

SEQ ID NO: 1469676 - RNA, 19 nt, Artificial Sequence
  Description of Artificial Sequence: Synthetic oligonucleotide
auagucacgggaguguccc

SEQ ID NO: 1469677 - RNA, 19 nt, Artificial Sequence
  Description of Artificial Sequence: Synthetic oligonucleotide
uggaaacuuacauucauua

SEQ ID NO: 1469678 - RNA, 19 nt, Artificial Sequence
  Description of Artificial Sequence: Synthetic oligonucleotide
uugaaccugugccagaacu

SEQ ID NO: 1469679 - RNA, 19 nt, Artificial Sequence
  Description of Artificial Sequence: Synthetic oligonucleotide
uacaaaaguguaaauugau

SEQ ID NO: 1469680 - RNA, 19 nt, Artificial Sequence
  Description of Artificial Sequence: Synthetic oligonucleotide
uucucuuuguacaaccggu

SEQ ID NO: 1469681 - RNA, 19 nt, Artificial Sequence
  Description of Artificial Sequence: Synthetic oligonucleotide
caauuaugcuuaaaugcag

SEQ ID NO: 1469682 - RNA, 19 nt, Artificial Sequence
  Description of Artificial Sequence: Synthetic oligonucleotide
acuucugaucugaaggucc

SEQ ID NO: 1469683 - RNA, 19 nt, Artificial Sequence
  Description of Artificial Sequence: Synthetic oligonucleotide
cuugacaggucagacagcg

SEQ ID NO: 1469684 - RNA, 19 nt, Artificial Sequence
  Description of Artificial Sequence: Synthetic oligonucleotide
uuagcacacacacacacuu

SEQ ID NO: 1469685 - RNA, 19 nt, Artificial Sequence
  Description of Artificial Sequence: Synthetic oligonucleotide
acaauguggaaacuuacau

SEQ ID NO: 1469686 - RNA, 19 nt, Artificial Sequence
  Description of Artificial Sequence: Synthetic oligonucleotide
aauugauuacauguuagua

SEQ ID NO: 1469687 - RNA, 19 nt, Artificial Sequence
  Description of Artificial Sequence: Synthetic oligonucleotide
guguaaauugauuacaugu

SEQ ID NO: 1469688 - RNA, 19 nt, Artificial Sequence
  Description of Artificial Sequence: Synthetic oligonucleotide
cucaccauaugacuuuugg

SEQ ID NO: 1469689 - RNA, 19 nt, Artificial Sequence
  Description of Artificial Sequence: Synthetic oligonucleotide
caguacuagaucuaccaag

SEQ ID NO: 1469690 - RNA, 19 nt, Artificial Sequence
  Description of Artificial Sequence: Synthetic oligonucleotide
uucaugacuugaaaacaug

SEQ ID NO: 1469691 - RNA, 19 nt, Artificial Sequence
  Description of Artificial Sequence: Synthetic oligonucleotide
ucaguugucucccaauuau

SEQ ID NO: 1469692 - RNA, 19 nt, Artificial Sequence
  Description of Artificial Sequence: Synthetic oligonucleotide
ucgugaguucacaucaaag

SEQ ID NO: 1469693 - RNA, 19 nt, Artificial Sequence
  Description of Artificial Sequence: Synthetic oligonucleotide
ugacuaauaaagugaacau

SEQ ID NO: 1469694 - RNA, 19 nt, Artificial Sequence
  Description of Artificial Sequence: Synthetic oligonucleotide
aguguaaauugauuacaug

SEQ ID NO: 1469695 - RNA, 19 nt, Artificial Sequence
  Description of Artificial Sequence: Synthetic oligonucleotide
uacuaaaagcuguaccuga

SEQ ID NO: 1469696 - RNA, 19 nt, Artificial Sequence
  Description of Artificial Sequence: Synthetic oligonucleotide
uucaauuuaggaugaacuu

SEQ ID NO: 1469697 - RNA, 19 nt, Artificial Sequence
  Description of Artificial Sequence: Synthetic oligonucleotide
uaugcacucagguagguuu

SEQ ID NO: 1469698 - RNA, 19 nt, Artificial Sequence
  Description of Artificial Sequence: Synthetic oligonucleotide
ucuuuguacaaccgguuaa

SEQ ID NO: 1469699 - RNA, 19 nt, Artificial Sequence
  Description of Artificial Sequence: Synthetic oligonucleotide
uuucagucgcaucaacuga

SEQ ID NO: 1469700 - RNA, 19 nt, Artificial Sequence
  Description of Artificial Sequence: Synthetic oligonucleotide
uggacauauuuaucugagg

SEQ ID NO: 1469701 - RNA, 19 nt, Artificial Sequence
  Description of Artificial Sequence: Synthetic oligonucleotide
uagguuugggauagucacg

SEQ ID NO: 1469702 - RNA, 19 nt, Artificial Sequence
  Description of Artificial Sequence: Synthetic oligonucleotide
aaggcuugacaggucagac

SEQ ID NO: 1469703 - RNA, 19 nt, Artificial Sequence
  Description of Artificial Sequence: Synthetic oligonucleotide
uaggaugaacuuucugucc

SEQ ID NO: 1469704 - RNA, 19 nt, Artificial Sequence
  Description of Artificial Sequence: Synthetic oligonucleotide
ucacuauacaaaaguguaa

SEQ ID NO: 1469705 - RNA, 19 nt, Artificial Sequence
  Description of Artificial Sequence: Synthetic oligonucleotide
ggcuugacaggucagacag

SEQ ID NO: 1469706 - RNA, 19 nt, Artificial Sequence
  Description of Artificial Sequence: Synthetic oligonucleotide
auaaagcuagaugcagccc

SEQ ID NO: 1469707 - RNA, 19 nt, Artificial Sequence
  Description of Artificial Sequence: Synthetic oligonucleotide
agugaacauucagaguagc

SEQ ID NO: 1469708 - RNA, 19 nt, Artificial Sequence
  Description of Artificial Sequence: Synthetic oligonucleotide
augagcucucccuggaagg

SEQ ID NO: 1469709 - RNA, 19 nt, Artificial Sequence
  Description of Artificial Sequence: Synthetic oligonucleotide
ucaauuuaggaugaacuuu

SEQ ID NO: 1469710 - RNA, 19 nt, Artificial Sequence
  Description of Artificial Sequence: Synthetic oligonucleotide
agguuugggauagucacgg

SEQ ID NO: 1469711 - RNA, 19 nt, Artificial Sequence
  Description of Artificial Sequence: Synthetic oligonucleotide
gacacagucaaugacugca

SEQ ID NO: 1469712 - RNA, 19 nt, Artificial Sequence
  Description of Artificial Sequence: Synthetic oligonucleotide
auuuaggaugaacuuucug

SEQ ID NO: 1469713 - RNA, 19 nt, Artificial Sequence
  Description of Artificial Sequence: Synthetic oligonucleotide
acuagugaaucgugaguuc

SEQ ID NO: 1469714 - RNA, 19 nt, Artificial Sequence
  Description of Artificial Sequence: Synthetic oligonucleotide
ugaaucgugaguucacauc

SEQ ID NO: 1469715 - RNA, 19 nt, Artificial Sequence
  Description of Artificial Sequence: Synthetic oligonucleotide
ugugccagaacuucugauc

SEQ ID NO: 1469716 - RNA, 19 nt, Artificial Sequence
  Description of Artificial Sequence: Synthetic oligonucleotide
uuuagcacacacacacacu

SEQ ID NO: 1469717 - RNA, 19 nt, Artificial Sequence
  Description of Artificial Sequence: Synthetic oligonucleotide
gaagcuauuucacuuugaa

SEQ ID NO: 1469718 - RNA, 19 nt, Artificial Sequence
  Description of Artificial Sequence: Synthetic oligonucleotide
acugccguagguccuuuac

SEQ ID NO: 1469719 - RNA, 19 nt, Artificial Sequence
  Description of Artificial Sequence: Synthetic oligonucleotide
aaccgguuaacuuucucua

SEQ ID NO: 1469720 - RNA, 19 nt, Artificial Sequence
  Description of Artificial Sequence: Synthetic oligonucleotide
cucaguauaguccacacua

SEQ ID NO: 1469721 - RNA, 19 nt, Artificial Sequence
  Description of Artificial Sequence: Synthetic oligonucleotide
ucacuuugaaccugugcca

SEQ ID NO: 1469722 - RNA, 19 nt, Artificial Sequence
  Description of Artificial Sequence: Synthetic oligonucleotide
aacaauguggaaacuuaca

SEQ ID NO: 1469723 - RNA, 19 nt, Artificial Sequence
  Description of Artificial Sequence: Synthetic oligonucleotide
uaugacuaauaaagugaac

SEQ ID NO: 1469724 - RNA, 19 nt, Artificial Sequence
  Description of Artificial Sequence: Synthetic oligonucleotide
acacacacacacuucuaag

SEQ ID NO: 1469725 - RNA, 19 nt, Artificial Sequence
  Description of Artificial Sequence: Synthetic oligonucleotide
agcacacacacacacuucu

SEQ ID NO: 1469726 - RNA, 19 nt, Artificial Sequence
  Description of Artificial Sequence: Synthetic oligonucleotide
aacaaccagaauaguugac

SEQ ID NO: 1469727 - RNA, 19 nt, Artificial Sequence
  Description of Artificial Sequence: Synthetic oligonucleotide
aguugaaugucaguugucu

SEQ ID NO: 1469728 - RNA, 19 nt, Artificial Sequence
  Description of Artificial Sequence: Synthetic oligonucleotide
ucuucaauuuaggaugaac

SEQ ID NO: 1469729 - RNA, 19 nt, Artificial Sequence
  Description of Artificial Sequence: Synthetic oligonucleotide
auccccugaaccuagucca

SEQ ID NO: 1469730 - RNA, 19 nt, Artificial Sequence
  Description of Artificial Sequence: Synthetic oligonucleotide
aguacuagaucuaccaagu

SEQ ID NO: 1469731 - RNA, 19 nt, Artificial Sequence
  Description of Artificial Sequence: Synthetic oligonucleotide
gaggagauacugccguagg

SEQ ID NO: 1469732 - RNA, 19 nt, Artificial Sequence
  Description of Artificial Sequence: Synthetic oligonucleotide
agcuagaugcagcccuugc

SEQ ID NO: 1469733 - RNA, 19 nt, Artificial Sequence
  Description of Artificial Sequence: Synthetic oligonucleotide
gaguucacaucaaagaaaa

SEQ ID NO: 1469734 - RNA, 19 nt, Artificial Sequence
  Description of Artificial Sequence: Synthetic oligonucleotide
accgguuaacuuucucuac

SEQ ID NO: 1469735 - RNA, 19 nt, Artificial Sequence
  Description of Artificial Sequence: Synthetic oligonucleotide
cacaguacuagaucuacca

SEQ ID NO: 1469736 - RNA, 19 nt, Artificial Sequence
  Description of Artificial Sequence: Synthetic oligonucleotide
uucugucccagucaguaau

SEQ ID NO: 1469737 - RNA, 19 nt, Artificial Sequence
  Description of Artificial Sequence: Synthetic oligonucleotide
acaaccagaauaguugaca

SEQ ID NO: 1469738 - RNA, 19 nt, Artificial Sequence
  Description of Artificial Sequence: Synthetic oligonucleotide
gaaaacaugcacagcucgc

SEQ ID NO: 1469739 - RNA, 19 nt, Artificial Sequence
  Description of Artificial Sequence: Synthetic oligonucleotide
aaguguaaauugauuacau

SEQ ID NO: 1469740 - RNA, 19 nt, Artificial Sequence
  Description of Artificial Sequence: Synthetic oligonucleotide
ucaucaucaucaucaucug

SEQ ID NO: 1469741 - RNA, 19 nt, Artificial Sequence
  Description of Artificial Sequence: Synthetic oligonucleotide
uugcagucacagcagacgu

SEQ ID NO: 1469742 - RNA, 19 nt, Artificial Sequence
  Description of Artificial Sequence: Synthetic oligonucleotide
uuuugcagucacagcagac

SEQ ID NO: 1469743 - RNA, 19 nt, Artificial Sequence
  Description of Artificial Sequence: Synthetic oligonucleotide
gucccuuuuaugcacucag

SEQ ID NO: 1469744 - RNA, 19 nt, Artificial Sequence
  Description of Artificial Sequence: Synthetic oligonucleotide
aaggaauuuagcacacaca

SEQ ID NO: 1469745 - RNA, 19 nt, Artificial Sequence
  Description of Artificial Sequence: Synthetic oligonucleotide
gggagugucccacucaggg

SEQ ID NO: 1469746 - RNA, 19 nt, Artificial Sequence
  Description of Artificial Sequence: Synthetic oligonucleotide
caguauaguccacacuagc

SEQ ID NO: 1469747 - RNA, 19 nt, Artificial Sequence
  Description of Artificial Sequence: Synthetic oligonucleotide
accauaugacuuuugguuu

SEQ ID NO: 1469748 - RNA, 19 nt, Artificial Sequence
  Description of Artificial Sequence: Synthetic oligonucleotide
ugaagcuauuucacuuuga

SEQ ID NO: 1469749 - RNA, 19 nt, Artificial Sequence
  Description of Artificial Sequence: Synthetic oligonucleotide
auaugacuaauaaagugaa

SEQ ID NO: 1469750 - RNA, 19 nt, Artificial Sequence
  Description of Artificial Sequence: Synthetic oligonucleotide
auuccgagccaggauuucc

SEQ ID NO: 1469751 - RNA, 19 nt, Artificial Sequence
  Description of Artificial Sequence: Synthetic oligonucleotide
aaaggagcaaaaguccuuu

SEQ ID NO: 1469752 - RNA, 19 nt, Artificial Sequence
  Description of Artificial Sequence: Synthetic oligonucleotide
uugucucccaauuaugcuu

SEQ ID NO: 1469753 - RNA, 19 nt, Artificial Sequence
  Description of Artificial Sequence: Synthetic oligonucleotide
gcagauucggcacaggcug

SEQ ID NO: 1469754 - RNA, 19 nt, Artificial Sequence
  Description of Artificial Sequence: Synthetic oligonucleotide
gacauauuuaucugaggcu

SEQ ID NO: 1469755 - RNA, 19 nt, Artificial Sequence
  Description of Artificial Sequence: Synthetic oligonucleotide
aguaggugacaaguagaac

SEQ ID NO: 1469756 - RNA, 19 nt, Artificial Sequence
  Description of Artificial Sequence: Synthetic oligonucleotide
ugaaggucccaucucuguc

SEQ ID NO: 1469757 - RNA, 19 nt, Artificial Sequence
  Description of Artificial Sequence: Synthetic oligonucleotide
cuuuguacaaccgguuaac

SEQ ID NO: 1469758 - RNA, 19 nt, Artificial Sequence
  Description of Artificial Sequence: Synthetic oligonucleotide
uagaucuaccaagucuucc

SEQ ID NO: 1469759 - RNA, 19 nt, Artificial Sequence
  Description of Artificial Sequence: Synthetic oligonucleotide
acaaccgguuaacuuucuc

SEQ ID NO: 1469760 - RNA, 19 nt, Artificial Sequence
  Description of Artificial Sequence: Synthetic oligonucleotide
uucuaagauaaagcuagau

SEQ ID NO: 1469761 - RNA, 19 nt, Artificial Sequence
  Description of Artificial Sequence: Synthetic oligonucleotide
ccaauuaugcuuaaaugca

SEQ ID NO: 1469762 - RNA, 19 nt, Artificial Sequence
  Description of Artificial Sequence: Synthetic oligonucleotide
uagugaaucgugaguucac

SEQ ID NO: 1469763 - RNA, 19 nt, Artificial Sequence
  Description of Artificial Sequence: Synthetic oligonucleotide
ugucaguugucucccaauu

SEQ ID NO: 1469764 - RNA, 19 nt, Artificial Sequence
  Description of Artificial Sequence: Synthetic oligonucleotide
cagagauagcaacaaugug

SEQ ID NO: 1469765 - RNA, 19 nt, Artificial Sequence
  Description of Artificial Sequence: Synthetic oligonucleotide
cugaaccuaguccacgaug

SEQ ID NO: 1469766 - RNA, 19 nt, Artificial Sequence
  Description of Artificial Sequence: Synthetic oligonucleotide
cauccaugcagauucggca

SEQ ID NO: 1469767 - RNA, 19 nt, Artificial Sequence
  Description of Artificial Sequence: Synthetic oligonucleotide
aauuuagcacacacacaca

SEQ ID NO: 1469768 - RNA, 19 nt, Artificial Sequence
  Description of Artificial Sequence: Synthetic oligonucleotide
acuagcccacuagugaauc

SEQ ID NO: 1469769 - RNA, 19 nt, Artificial Sequence
  Description of Artificial Sequence: Synthetic oligonucleotide
aauuuaggaugaacuuucu

SEQ ID NO: 1469770 - RNA, 19 nt, Artificial Sequence
  Description of Artificial Sequence: Synthetic oligonucleotide
cauccgcucaccauaugac

SEQ ID NO: 1469771 - RNA, 19 nt, Artificial Sequence
  Description of Artificial Sequence: Synthetic oligonucleotide
aauuccgagccaggauuuc

SEQ ID NO: 1469772 - RNA, 19 nt, Artificial Sequence
  Description of Artificial Sequence: Synthetic oligonucleotide
agcgugaggaauugaggcu

SEQ ID NO: 1469773 - RNA, 19 nt, Artificial Sequence
  Description of Artificial Sequence: Synthetic oligonucleotide
aacaucugcggagguuuuc

SEQ ID NO: 1469774 - RNA, 19 nt, Artificial Sequence
  Description of Artificial Sequence: Synthetic oligonucleotide
acacuagcccacuagugaa

SEQ ID NO: 1469775 - RNA, 19 nt, Artificial Sequence
  Description of Artificial Sequence: Synthetic oligonucleotide
ucaugcgcuugccacauuu

SEQ ID NO: 1469776 - RNA, 19 nt, Artificial Sequence
  Description of Artificial Sequence: Synthetic oligonucleotide
ggggccucaauuuucauga

SEQ ID NO: 1469777 - RNA, 19 nt, Artificial Sequence
  Description of Artificial Sequence: Synthetic oligonucleotide
aggaauugaggcugcuuga

SEQ ID NO: 1469778 - RNA, 19 nt, Artificial Sequence
  Description of Artificial Sequence: Synthetic oligonucleotide
caacaaccagaauaguuga

SEQ ID NO: 1469779 - RNA, 19 nt, Artificial Sequence
  Description of Artificial Sequence: Synthetic oligonucleotide
aggauuuccuucagcuggc

SEQ ID NO: 1469780 - RNA, 19 nt, Artificial Sequence
  Description of Artificial Sequence: Synthetic oligonucleotide
cacgauggcacaguacuag

SEQ ID NO: 1469781 - RNA, 19 nt, Artificial Sequence
  Description of Artificial Sequence: Synthetic oligonucleotide
gcucgcaccacauacugcc

SEQ ID NO: 1469782 - RNA, 19 nt, Artificial Sequence
  Description of Artificial Sequence: Synthetic oligonucleotide
acgggagugucccacucag

SEQ ID NO: 1469783 - RNA, 19 nt, Artificial Sequence
  Description of Artificial Sequence: Synthetic oligonucleotide
cuagcccacuagugaaucg

SEQ ID NO: 1469784 - RNA, 19 nt, Artificial Sequence
  Description of Artificial Sequence: Synthetic oligonucleotide
ucucuuuguacaaccgguu

SEQ ID NO: 1469785 - RNA, 19 nt, Artificial Sequence
  Description of Artificial Sequence: Synthetic oligonucleotide
gcuacuaaaagcuguaccu

SEQ ID NO: 1469786 - RNA, 19 nt, Artificial Sequence
  Description of Artificial Sequence: Synthetic oligonucleotide
uugggauagucacgggagu

SEQ ID NO: 1469787 - RNA, 19 nt, Artificial Sequence
  Description of Artificial Sequence: Synthetic oligonucleotide
ggaaacaguagcagagggg

SEQ ID NO: 1469788 - RNA, 19 nt, Artificial Sequence
  Description of Artificial Sequence: Synthetic oligonucleotide
ucaucaucaucaucaucau

SEQ ID NO: 1469789 - RNA, 19 nt, Artificial Sequence
  Description of Artificial Sequence: Synthetic oligonucleotide
acaguacuagaucuaccaa

SEQ ID NO: 1469790 - RNA, 19 nt, Artificial Sequence
  Description of Artificial Sequence: Synthetic oligonucleotide
ggaacaguaaguuuucagu

SEQ ID NO: 1469791 - RNA, 19 nt, Artificial Sequence
  Description of Artificial Sequence: Synthetic oligonucleotide
aaaaggagcaaaaguccuu

SEQ ID NO: 1469792 - RNA, 19 nt, Artificial Sequence
  Description of Artificial Sequence: Synthetic oligonucleotide
caccacauacugccgacag

SEQ ID NO: 1469793 - RNA, 19 nt, Artificial Sequence
  Description of Artificial Sequence: Synthetic oligonucleotide
ugcauccaugcagauucgg

SEQ ID NO: 1469794 - RNA, 19 nt, Artificial Sequence
  Description of Artificial Sequence: Synthetic oligonucleotide
ugggauagucacgggagug

SEQ ID NO: 1469795 - RNA, 19 nt, Artificial Sequence
  Description of Artificial Sequence: Synthetic oligonucleotide
aggagauacugccguaggu

SEQ ID NO: 1469796 - RNA, 19 nt, Artificial Sequence
  Description of Artificial Sequence: Synthetic oligonucleotide
cacacuagcccacuaguga

SEQ ID NO: 1469797 - RNA, 19 nt, Artificial Sequence
  Description of Artificial Sequence: Synthetic oligonucleotide
cagucgcaucaacugaggg

SEQ ID NO: 1469798 - RNA, 19 nt, Artificial Sequence
  Description of Artificial Sequence: Synthetic oligonucleotide
uggggcacucacucaugcg

SEQ ID NO: 1469799 - RNA, 19 nt, Artificial Sequence
  Description of Artificial Sequence: Synthetic oligonucleotide
agguagguuugggauaguc

SEQ ID NO: 1469800 - RNA, 19 nt, Artificial Sequence
  Description of Artificial Sequence: Synthetic oligonucleotide
auccgcucaccauaugacu

SEQ ID NO: 1469801 - RNA, 19 nt, Artificial Sequence
  Description of Artificial Sequence: Synthetic oligonucleotide
gaguaggugacaaguagaa

SEQ ID NO: 1469802 - RNA, 19 nt, Artificial Sequence
  Description of Artificial Sequence: Synthetic oligonucleotide
caguugucucccaauuaug

SEQ ID NO: 1469803 - RNA, 19 nt, Artificial Sequence
  Description of Artificial Sequence: Synthetic oligonucleotide
cuagugaaucgugaguuca

SEQ ID NO: 1469804 - RNA, 19 nt, Artificial Sequence
  Description of Artificial Sequence: Synthetic oligonucleotide
ucgcaccacauacugccga

SEQ ID NO: 1469805 - RNA, 19 nt, Artificial Sequence
  Description of Artificial Sequence: Synthetic oligonucleotide
gauagucacgggagugucc

SEQ ID NO: 1469806 - RNA, 19 nt, Artificial Sequence
  Description of Artificial Sequence: Synthetic oligonucleotide
cucggaacaguaaguuuuc

SEQ ID NO: 1469807 - RNA, 19 nt, Artificial Sequence
  Description of Artificial Sequence: Synthetic oligonucleotide
uuugaaccugugccagaac

SEQ ID NO: 1469808 - RNA, 19 nt, Artificial Sequence
  Description of Artificial Sequence: Synthetic oligonucleotide
cccgacaagugucaguugg

SEQ ID NO: 1469809 - RNA, 19 nt, Artificial Sequence
  Description of Artificial Sequence: Synthetic oligonucleotide
cuagaucuaccaagucuuc

SEQ ID NO: 1469810 - RNA, 19 nt, Artificial Sequence
  Description of Artificial Sequence: Synthetic oligonucleotide
cccuucuaccucuucaagg

SEQ ID NO: 1469811 - RNA, 19 nt, Artificial Sequence
  Description of Artificial Sequence: Synthetic oligonucleotide
ggggcacucacucaugcgc

SEQ ID NO: 1469812 - RNA, 19 nt, Artificial Sequence
  Description of Artificial Sequence: Synthetic oligonucleotide
agugaaucgugaguucaca

SEQ ID NO: 1469813 - RNA, 19 nt, Artificial Sequence
  Description of Artificial Sequence: Synthetic oligonucleotide
caccauaugacuuuugguu

SEQ ID NO: 1469814 - RNA, 19 nt, Artificial Sequence
  Description of Artificial Sequence: Synthetic oligonucleotide
cuugcuacuaaaagcugua

SEQ ID NO: 1469815 - RNA, 19 nt, Artificial Sequence
  Description of Artificial Sequence: Synthetic oligonucleotide
gggcuguauaauuugaaaa

SEQ ID NO: 1469816 - RNA, 19 nt, Artificial Sequence
  Description of Artificial Sequence: Synthetic oligonucleotide
uuuaugcacucagguaggu

SEQ ID NO: 1469817 - RNA, 19 nt, Artificial Sequence
  Description of Artificial Sequence: Synthetic oligonucleotide
aaauuccgagccaggauuu

SEQ ID NO: 1469818 - RNA, 19 nt, Artificial Sequence
  Description of Artificial Sequence: Synthetic oligonucleotide
ucugaucugaaggucccau

SEQ ID NO: 1469819 - RNA, 19 nt, Artificial Sequence
  Description of Artificial Sequence: Synthetic oligonucleotide
aucgugaguucacaucaaa

SEQ ID NO: 1469820 - RNA, 19 nt, Artificial Sequence
  Description of Artificial Sequence: Synthetic oligonucleotide
ugcacucagguagguuugg

SEQ ID NO: 1469821 - RNA, 19 nt, Artificial Sequence
  Description of Artificial Sequence: Synthetic oligonucleotide
ugucccagucaguaaugaa

SEQ ID NO: 1469822 - RNA, 19 nt, Artificial Sequence
  Description of Artificial Sequence: Synthetic oligonucleotide
cuagaugcagcccuugcua

SEQ ID NO: 1469823 - RNA, 19 nt, Artificial Sequence
  Description of Artificial Sequence: Synthetic oligonucleotide
acucacucaugcgcuugcc

SEQ ID NO: 1469824 - RNA, 19 nt, Artificial Sequence
  Description of Artificial Sequence: Synthetic oligonucleotide
ucaacugagggcgcuggaa

SEQ ID NO: 1469825 - RNA, 19 nt, Artificial Sequence
  Description of Artificial Sequence: Synthetic oligonucleotide
ggagugucccacucagggg

SEQ ID NO: 1469826 - RNA, 19 nt, Artificial Sequence
  Description of Artificial Sequence: Synthetic oligonucleotide
agaugcagcccuugcuacu

SEQ ID NO: 1469827 - RNA, 19 nt, Artificial Sequence
  Description of Artificial Sequence: Synthetic oligonucleotide
acgauggcacaguacuaga

SEQ ID NO: 1469828 - RNA, 19 nt, Artificial Sequence
  Description of Artificial Sequence: Synthetic oligonucleotide
ggaaacuuacauucauuaa

SEQ ID NO: 1469829 - RNA, 19 nt, Artificial Sequence
  Description of Artificial Sequence: Synthetic oligonucleotide
aggcuugacaggucagaca

SEQ ID NO: 1469830 - RNA, 19 nt, Artificial Sequence
  Description of Artificial Sequence: Synthetic oligonucleotide
uagcacacacacacacuuc

SEQ ID NO: 1469831 - RNA, 19 nt, Artificial Sequence
  Description of Artificial Sequence: Synthetic oligonucleotide
ggagcgugaggaauugagg

SEQ ID NO: 1469832 - RNA, 19 nt, Artificial Sequence
  Description of Artificial Sequence: Synthetic oligonucleotide
cauguuaguaaggaauuua

SEQ ID NO: 1469833 - RNA, 19 nt, Artificial Sequence
  Description of Artificial Sequence: Synthetic oligonucleotide
cuuggaguaggugacaagu

SEQ ID NO: 1469834 - RNA, 19 nt, Artificial Sequence
  Description of Artificial Sequence: Synthetic oligonucleotide
ucauccccugaaccuaguc

SEQ ID NO: 1469835 - RNA, 19 nt, Artificial Sequence
  Description of Artificial Sequence: Synthetic oligonucleotide
ggaauugaggcugcuugag

SEQ ID NO: 1469836 - RNA, 19 nt, Artificial Sequence
  Description of Artificial Sequence: Synthetic oligonucleotide
caucaucaucaucaucauc

SEQ ID NO: 1469837 - RNA, 19 nt, Artificial Sequence
  Description of Artificial Sequence: Synthetic oligonucleotide
gucaguugguauguuucug

SEQ ID NO: 1469838 - RNA, 19 nt, Artificial Sequence
  Description of Artificial Sequence: Synthetic oligonucleotide
acuaaaagcuguaccugaa

SEQ ID NO: 1469839 - RNA, 19 nt, Artificial Sequence
  Description of Artificial Sequence: Synthetic oligonucleotide
cucgcaccacauacugccg

SEQ ID NO: 1469840 - RNA, 19 nt, Artificial Sequence
  Description of Artificial Sequence: Synthetic oligonucleotide
caggacacagucaaugacu

SEQ ID NO: 1469841 - RNA, 19 nt, Artificial Sequence
  Description of Artificial Sequence: Synthetic oligonucleotide
caguaaugaaaauaauuuu

SEQ ID NO: 1469842 - RNA, 19 nt, Artificial Sequence
  Description of Artificial Sequence: Synthetic oligonucleotide
uacaaccgguuaacuuucu

SEQ ID NO: 1469843 - RNA, 19 nt, Artificial Sequence
  Description of Artificial Sequence: Synthetic oligonucleotide
ucucccgacaagugucagu

SEQ ID NO: 1469844 - RNA, 19 nt, Artificial Sequence
  Description of Artificial Sequence: Synthetic oligonucleotide
uacugccgacagauggggc

SEQ ID NO: 1469845 - RNA, 19 nt, Artificial Sequence
  Description of Artificial Sequence: Synthetic oligonucleotide
uugacaggucagacagcga

SEQ ID NO: 1469846 - RNA, 19 nt, Artificial Sequence
  Description of Artificial Sequence: Synthetic oligonucleotide
gacuaauaaagugaacauu

SEQ ID NO: 1469847 - RNA, 19 nt, Artificial Sequence
  Description of Artificial Sequence: Synthetic oligonucleotide
guacaaccgguuaacuuuc

SEQ ID NO: 1469848 - RNA, 19 nt, Artificial Sequence
  Description of Artificial Sequence: Synthetic oligonucleotide
caggccuauggcacagccc

SEQ ID NO: 1469849 - RNA, 19 nt, Artificial Sequence
  Description of Artificial Sequence: Synthetic oligonucleotide
cccacuagugaaucgugag

SEQ ID NO: 1469850 - RNA, 19 nt, Artificial Sequence
  Description of Artificial Sequence: Synthetic oligonucleotide
caguugaaugucaguuguc

SEQ ID NO: 1469851 - RNA, 19 nt, Artificial Sequence
  Description of Artificial Sequence: Synthetic oligonucleotide
cacacacacacacuucuaa

SEQ ID NO: 1469852 - RNA, 19 nt, Artificial Sequence
  Description of Artificial Sequence: Synthetic oligonucleotide
aagcuagaugcagcccuug

SEQ ID NO: 1469853 - RNA, 19 nt, Artificial Sequence
  Description of Artificial Sequence: Synthetic oligonucleotide
caaccgguuaacuuucucu

SEQ ID NO: 1469854 - RNA, 19 nt, Artificial Sequence
  Description of Artificial Sequence: Synthetic oligonucleotide
gaauugaggcugcuugagu

SEQ ID NO: 1469855 - RNA, 19 nt, Artificial Sequence
  Description of Artificial Sequence: Synthetic oligonucleotide
ggaggagauacugccguag

SEQ ID NO: 1469856 - RNA, 19 nt, Artificial Sequence
  Description of Artificial Sequence: Synthetic oligonucleotide
gggagcgugaggaauugag

SEQ ID NO: 1469857 - RNA, 19 nt, Artificial Sequence
  Description of Artificial Sequence: Synthetic oligonucleotide
aaagcuagaugcagcccuu

SEQ ID NO: 1469858 - RNA, 19 nt, Artificial Sequence
  Description of Artificial Sequence: Synthetic oligonucleotide
uggcacaguacuagaucua

SEQ ID NO: 1469859 - RNA, 19 nt, Artificial Sequence
  Description of Artificial Sequence: Synthetic oligonucleotide
acauguuaguaaggaauuu

SEQ ID NO: 1469860 - RNA, 19 nt, Artificial Sequence
  Description of Artificial Sequence: Synthetic oligonucleotide
aaucgugaguucacaucaa

SEQ ID NO: 1469861 - RNA, 19 nt, Artificial Sequence
  Description of Artificial Sequence: Synthetic oligonucleotide
ucggaacaguaaguuuuca

SEQ ID NO: 1469862 - RNA, 19 nt, Artificial Sequence
  Description of Artificial Sequence: Synthetic oligonucleotide
cuaguccacgauggcacag

SEQ ID NO: 1469863 - RNA, 19 nt, Artificial Sequence
  Description of Artificial Sequence: Synthetic oligonucleotide
cacucagguagguuuggga

SEQ ID NO: 1469864 - RNA, 19 nt, Artificial Sequence
  Description of Artificial Sequence: Synthetic oligonucleotide
ucacgggagugucccacuc

SEQ ID NO: 1469865 - RNA, 19 nt, Artificial Sequence
  Description of Artificial Sequence: Synthetic oligonucleotide
cauauuuaucugaggcucu

SEQ ID NO: 1469866 - RNA, 19 nt, Artificial Sequence
  Description of Artificial Sequence: Synthetic oligonucleotide
ugccucggaacaguaaguu

SEQ ID NO: 1469867 - RNA, 19 nt, Artificial Sequence
  Description of Artificial Sequence: Synthetic oligonucleotide
gguagguuugggauaguca

SEQ ID NO: 1469868 - RNA, 19 nt, Artificial Sequence
  Description of Artificial Sequence: Synthetic oligonucleotide
gcauccgcucaccauauga

SEQ ID NO: 1469869 - RNA, 19 nt, Artificial Sequence
  Description of Artificial Sequence: Synthetic oligonucleotide
cucuuuguacaaccgguua

SEQ ID NO: 1469870 - RNA, 19 nt, Artificial Sequence
  Description of Artificial Sequence: Synthetic oligonucleotide
uccccugaaccuaguccac

SEQ ID NO: 1469871 - RNA, 19 nt, Artificial Sequence
  Description of Artificial Sequence: Synthetic oligonucleotide
ggcacaguacuagaucuac

SEQ ID NO: 1469872 - RNA, 19 nt, Artificial Sequence
  Description of Artificial Sequence: Synthetic oligonucleotide
uaguccacgauggcacagu

SEQ ID NO: 1469873 - RNA, 19 nt, Artificial Sequence
  Description of Artificial Sequence: Synthetic oligonucleotide
agcccagguuucuucaauu

SEQ ID NO: 1469874 - RNA, 19 nt, Artificial Sequence
  Description of Artificial Sequence: Synthetic oligonucleotide
aucaacugagggcgcugga

SEQ ID NO: 1469875 - RNA, 19 nt, Artificial Sequence
  Description of Artificial Sequence: Synthetic oligonucleotide
uucucccgacaagugucag

SEQ ID NO: 1469876 - RNA, 19 nt, Artificial Sequence
  Description of Artificial Sequence: Synthetic oligonucleotide
gucaguugucucccaauua

SEQ ID NO: 1469877 - RNA, 19 nt, Artificial Sequence
  Description of Artificial Sequence: Synthetic oligonucleotide
gguuugggauagucacggg

SEQ ID NO: 1469878 - RNA, 19 nt, Artificial Sequence
  Description of Artificial Sequence: Synthetic oligonucleotide
uuaugcacucagguagguu

SEQ ID NO: 1469879 - RNA, 19 nt, Artificial Sequence
  Description of Artificial Sequence: Synthetic oligonucleotide
ugcauccgcucaccauaug

SEQ ID NO: 1469880 - RNA, 19 nt, Artificial Sequence
  Description of Artificial Sequence: Synthetic oligonucleotide
gcgugaggaauugaggcug

SEQ ID NO: 1469881 - RNA, 19 nt, Artificial Sequence
  Description of Artificial Sequence: Synthetic oligonucleotide
ucgcaucaacugagggcgc

SEQ ID NO: 1469882 - RNA, 19 nt, Artificial Sequence
  Description of Artificial Sequence: Synthetic oligonucleotide
ggggcuguauaauuugaaa

SEQ ID NO: 1469883 - RNA, 19 nt, Artificial Sequence
  Description of Artificial Sequence: Synthetic oligonucleotide
gaugcagcccuugcuacua

SEQ ID NO: 1469884 - RNA, 19 nt, Artificial Sequence
  Description of Artificial Sequence: Synthetic oligonucleotide
acagcgaggcucucacuuu

SEQ ID NO: 1469885 - RNA, 19 nt, Artificial Sequence
  Description of Artificial Sequence: Synthetic oligonucleotide
cacucaugcgcuugccaca

SEQ ID NO: 1469886 - RNA, 19 nt, Artificial Sequence
  Description of Artificial Sequence: Synthetic oligonucleotide
gcauccaugcagauucggc

SEQ ID NO: 1469887 - RNA, 19 nt, Artificial Sequence
  Description of Artificial Sequence: Synthetic oligonucleotide
agucccuuuuaugcacuca

SEQ ID NO: 1469888 - RNA, 19 nt, Artificial Sequence
  Description of Artificial Sequence: Synthetic oligonucleotide
ccucaauuuucaugacuug

SEQ ID NO: 1469889 - RNA, 19 nt, Artificial Sequence
  Description of Artificial Sequence: Synthetic oligonucleotide
aguccacgauggcacagua

SEQ ID NO: 1469890 - RNA, 19 nt, Artificial Sequence
  Description of Artificial Sequence: Synthetic oligonucleotide
ucucccaauuaugcuuaaa

SEQ ID NO: 1469891 - RNA, 19 nt, Artificial Sequence
  Description of Artificial Sequence: Synthetic oligonucleotide
acucaugcgcuugccacau

SEQ ID NO: 1469892 - RNA, 19 nt, Artificial Sequence
  Description of Artificial Sequence: Synthetic oligonucleotide
ucccuggaaggaggaaaca

SEQ ID NO: 1469893 - RNA, 19 nt, Artificial Sequence
  Description of Artificial Sequence: Synthetic oligonucleotide
ggcugucucuuggaguagg

SEQ ID NO: 1469894 - RNA, 19 nt, Artificial Sequence
  Description of Artificial Sequence: Synthetic oligonucleotide
gcugcauccgcucaccaua

SEQ ID NO: 1469895 - RNA, 19 nt, Artificial Sequence
  Description of Artificial Sequence: Synthetic oligonucleotide
ggacacagucaaugacugc

SEQ ID NO: 1469896 - RNA, 19 nt, Artificial Sequence
  Description of Artificial Sequence: Synthetic oligonucleotide
caaaauuccgagccaggau

SEQ ID NO: 1469897 - RNA, 19 nt, Artificial Sequence
  Description of Artificial Sequence: Synthetic oligonucleotide
uagcaacaauguggaaacu

SEQ ID NO: 1469898 - RNA, 19 nt, Artificial Sequence
  Description of Artificial Sequence: Synthetic oligonucleotide
uggcgcacacucaucccuu

SEQ ID NO: 1469899 - RNA, 19 nt, Artificial Sequence
  Description of Artificial Sequence: Synthetic oligonucleotide
ugacugcauccaugcagau

SEQ ID NO: 1469900 - RNA, 19 nt, Artificial Sequence
  Description of Artificial Sequence: Synthetic oligonucleotide
cagucccuuuuaugcacuc

SEQ ID NO: 1469901 - RNA, 19 nt, Artificial Sequence
  Description of Artificial Sequence: Synthetic oligonucleotide
cacuagugaaucgugaguu

SEQ ID NO: 1469902 - RNA, 19 nt, Artificial Sequence
  Description of Artificial Sequence: Synthetic oligonucleotide
gugaaucgugaguucacau

SEQ ID NO: 1469903 - RNA, 19 nt, Artificial Sequence
  Description of Artificial Sequence: Synthetic oligonucleotide
agcccacuagugaaucgug

SEQ ID NO: 1469904 - RNA, 19 nt, Artificial Sequence
  Description of Artificial Sequence: Synthetic oligonucleotide
guaaguuuucagucccuuu

SEQ ID NO: 1469905 - RNA, 19 nt, Artificial Sequence
  Description of Artificial Sequence: Synthetic oligonucleotide
aggucauccccugaaccua

SEQ ID NO: 1469906 - RNA, 19 nt, Artificial Sequence
  Description of Artificial Sequence: Synthetic oligonucleotide
aggaggagauacugccgua

SEQ ID NO: 1469907 - RNA, 19 nt, Artificial Sequence
  Description of Artificial Sequence: Synthetic oligonucleotide
ggucauccccugaaccuag

SEQ ID NO: 1469908 - RNA, 19 nt, Artificial Sequence
  Description of Artificial Sequence: Synthetic oligonucleotide
uagucacgggaguguccca

SEQ ID NO: 1469909 - RNA, 19 nt, Artificial Sequence
  Description of Artificial Sequence: Synthetic oligonucleotide
gccagaacuucugaucuga

SEQ ID NO: 1469910 - RNA, 19 nt, Artificial Sequence
  Description of Artificial Sequence: Synthetic oligonucleotide
cugaaggucccaucucugu

SEQ ID NO: 1469911 - RNA, 19 nt, Artificial Sequence
  Description of Artificial Sequence: Synthetic oligonucleotide
gcccuugcuacuaaaagcu

SEQ ID NO: 1469912 - RNA, 19 nt, Artificial Sequence
  Description of Artificial Sequence: Synthetic oligonucleotide
aggcugucgucuuccucau

SEQ ID NO: 1469913 - RNA, 19 nt, Artificial Sequence
  Description of Artificial Sequence: Synthetic oligonucleotide
ugggagcgugaggaauuga

SEQ ID NO: 1469914 - RNA, 19 nt, Artificial Sequence
  Description of Artificial Sequence: Synthetic oligonucleotide
guagaacaucugcggaggu

SEQ ID NO: 1469915 - RNA, 19 nt, Artificial Sequence
  Description of Artificial Sequence: Synthetic oligonucleotide
ccuugcuacuaaaagcugu

SEQ ID NO: 1469916 - RNA, 19 nt, Artificial Sequence
  Description of Artificial Sequence: Synthetic oligonucleotide
gcuagaugcagcccuugcu

SEQ ID NO: 1469917 - RNA, 19 nt, Artificial Sequence
  Description of Artificial Sequence: Synthetic oligonucleotide
gcuggcgcacacucauccc

SEQ ID NO: 1469918 - RNA, 19 nt, Artificial Sequence
  Description of Artificial Sequence: Synthetic oligonucleotide
gcggagguuuucuugugaa

SEQ ID NO: 1469919 - RNA, 19 nt, Artificial Sequence
  Description of Artificial Sequence: Synthetic oligonucleotide
cuggcgcacacucaucccu

SEQ ID NO: 1469920 - RNA, 19 nt, Artificial Sequence
  Description of Artificial Sequence: Synthetic oligonucleotide
ccucggaacaguaaguuuu

SEQ ID NO: 1469921 - RNA, 19 nt, Artificial Sequence
  Description of Artificial Sequence: Synthetic oligonucleotide
cacgggagugucccacuca

SEQ ID NO: 1469922 - RNA, 19 nt, Artificial Sequence
  Description of Artificial Sequence: Synthetic oligonucleotide
ggccucaauuuucaugacu

SEQ ID NO: 1469923 - RNA, 19 nt, Artificial Sequence
  Description of Artificial Sequence: Synthetic oligonucleotide
gauacugccguagguccuu

SEQ ID NO: 1469924 - RNA, 19 nt, Artificial Sequence
  Description of Artificial Sequence: Synthetic oligonucleotide
uacugccguagguccuuua

SEQ ID NO: 1469925 - RNA, 19 nt, Artificial Sequence
  Description of Artificial Sequence: Synthetic oligonucleotide
cucccgacaagugucaguu

SEQ ID NO: 1469926 - RNA, 19 nt, Artificial Sequence
  Description of Artificial Sequence: Synthetic oligonucleotide
agggcgcuggaaggcuguc

SEQ ID NO: 1469927 - RNA, 19 nt, Artificial Sequence
  Description of Artificial Sequence: Synthetic oligonucleotide
cugccucggaacaguaagu

SEQ ID NO: 1469928 - RNA, 19 nt, Artificial Sequence
  Description of Artificial Sequence: Synthetic oligonucleotide
cugugccagaacuucugau

SEQ ID NO: 1469929 - RNA, 19 nt, Artificial Sequence
  Description of Artificial Sequence: Synthetic oligonucleotide
cugccguagguccuuuacu

SEQ ID NO: 1469930 - RNA, 19 nt, Artificial Sequence
  Description of Artificial Sequence: Synthetic oligonucleotide
ugccgacagauggggcacu

SEQ ID NO: 1469931 - RNA, 19 nt, Artificial Sequence
  Description of Artificial Sequence: Synthetic oligonucleotide
cccugaaccuaguccacga

SEQ ID NO: 1469932 - RNA, 19 nt, Artificial Sequence
  Description of Artificial Sequence: Synthetic oligonucleotide
ccccugaaccuaguccacg

SEQ ID NO: 1469933 - RNA, 19 nt, Artificial Sequence
  Description of Artificial Sequence: Synthetic oligonucleotide
gcuugacaggucagacagc

SEQ ID NO: 1469934 - RNA, 19 nt, Artificial Sequence
  Description of Artificial Sequence: Synthetic oligonucleotide
gggccucaauuuucaugac

SEQ ID NO: 1469935 - RNA, 19 nt, Artificial Sequence
  Description of Artificial Sequence: Synthetic oligonucleotide
gacugcauccaugcagauu

SEQ ID NO: 1469936 - RNA, 19 nt, Artificial Sequence
  Description of Artificial Sequence: Synthetic oligonucleotide
cacuagcccacuagugaau

SEQ ID NO: 1469937 - RNA, 19 nt, Artificial Sequence
  Description of Artificial Sequence: Synthetic oligonucleotide
cagauucggcacaggcugu

SEQ ID NO: 1469938 - RNA, 19 nt, Artificial Sequence
  Description of Artificial Sequence: Synthetic oligonucleotide
ggcgcacacucaucccuuc

SEQ ID NO: 1469939 - RNA, 19 nt, Artificial Sequence
  Description of Artificial Sequence: Synthetic oligonucleotide
gcucaccauaugacuuuug

SEQ ID NO: 1469940 - RNA, 19 nt, Artificial Sequence
  Description of Artificial Sequence: Synthetic oligonucleotide
gcccacuagugaaucguga

SEQ ID NO: 1469941 - RNA, 19 nt, Artificial Sequence
  Description of Artificial Sequence: Synthetic oligonucleotide
ggucagacagcgaggcucu

SEQ ID NO: 1469942 - RNA, 19 nt, Artificial Sequence
  Description of Artificial Sequence: Synthetic oligonucleotide
ccuaguccacgauggcaca

SEQ ID NO: 1469943 - RNA, 19 nt, Artificial Sequence
  Description of Artificial Sequence: Synthetic oligonucleotide
cugcauccgcucaccauau

SEQ ID NO: 1469944 - RNA, 19 nt, Artificial Sequence
  Description of Artificial Sequence: Synthetic oligonucleotide
ccacuagugaaucgugagu

SEQ ID NO: 1469945 - RNA, 19 nt, Artificial Sequence
  Description of Artificial Sequence: Synthetic oligonucleotide
auacugccguagguccuuu

SEQ ID NO: 1469946 - RNA, 19 nt, Artificial Sequence
  Description of Artificial Sequence: Synthetic oligonucleotide
gaacaucugcggagguuuu

SEQ ID NO: 1469947 - RNA, 19 nt, Artificial Sequence
  Description of Artificial Sequence: Synthetic oligonucleotide
gggcacucacucaugcgcu

SEQ ID NO: 1469948 - RNA, 19 nt, Artificial Sequence
  Description of Artificial Sequence: Synthetic oligonucleotide
caucugcggagguuuucuu

SEQ ID NO: 1469949 - RNA, 19 nt, Artificial Sequence
  Description of Artificial Sequence: Synthetic oligonucleotide
ccaucaucaucaucaucau

SEQ ID NO: 1469950 - RNA, 19 nt, Artificial Sequence
  Description of Artificial Sequence: Synthetic oligonucleotide
gccucggaacaguaaguuu

SEQ ID NO: 1469951 - RNA, 19 nt, Artificial Sequence
  Description of Artificial Sequence: Synthetic oligonucleotide
caggucagacagcgaggcu

SEQ ID NO: 1469952 - RNA, 19 nt, Artificial Sequence
  Description of Artificial Sequence: Synthetic oligonucleotide
gcacacacacacacuucua

SEQ ID NO: 1469953 - RNA, 19 nt, Artificial Sequence
  Description of Artificial Sequence: Synthetic oligonucleotide
ccacgauggcacaguacua

SEQ ID NO: 1469954 - RNA, 19 nt, Artificial Sequence
  Description of Artificial Sequence: Synthetic oligonucleotide
ccgacaagugucaguuggu

SEQ ID NO: 1469955 - RNA, 19 nt, Artificial Sequence
  Description of Artificial Sequence: Synthetic oligonucleotide
gcacagcucgcaccacaua

SEQ ID NO: 1469956 - RNA, 19 nt, Artificial Sequence
  Description of Artificial Sequence: Synthetic oligonucleotide
gucauccccugaaccuagu

SEQ ID NO: 1469957 - RNA, 19 nt, Artificial Sequence
  Description of Artificial Sequence: Synthetic oligonucleotide
gcugucucuuggaguaggu

SEQ ID NO: 1469958 - RNA, 19 nt, Artificial Sequence
  Description of Artificial Sequence: Synthetic oligonucleotide
gcgcacacucaucccuucu

SEQ ID NO: 1469959 - RNA, 19 nt, Artificial Sequence
  Description of Artificial Sequence: Synthetic oligonucleotide
ggcacucacucaugcgcuu

SEQ ID NO: 1469960 - RNA, 19 nt, Artificial Sequence
  Description of Artificial Sequence: Synthetic oligonucleotide
gcgcuggaaggcugucucu

SEQ ID NO: 1469961 - RNA, 19 nt, Artificial Sequence
  Description of Artificial Sequence: Synthetic oligonucleotide
ccugaaccuaguccacgau

SEQ ID NO: 1469962 - RNA, 19 nt, Artificial Sequence
  Description of Artificial Sequence: Synthetic oligonucleotide
ccgacagauggggcacuca

SEQ ID NO: 1469963 - RNA, 19 nt, Artificial Sequence
  Description of Artificial Sequence: Synthetic oligonucleotide
cagguagguuugggauagu

SEQ ID NO: 1469964 - RNA, 19 nt, Artificial Sequence
  Description of Artificial Sequence: Synthetic oligonucleotide
cucaugcgcuugccacauu

SEQ ID NO: 1469965 - RNA, 19 nt, Artificial Sequence
  Description of Artificial Sequence: Synthetic oligonucleotide
cgcucaccauaugacuuuu

SEQ ID NO: 1469966 - RNA, 19 nt, Artificial Sequence
  Description of Artificial Sequence: Synthetic oligonucleotide
aaggccugaaguuucugcc

SEQ ID NO: 1469967 - RNA, 19 nt, Artificial Sequence
  Description of Artificial Sequence: Synthetic oligonucleotide
ucucguagcaucaacacca

SEQ ID NO: 1469968 - RNA, 19 nt, Artificial Sequence
  Description of Artificial Sequence: Synthetic oligonucleotide
aauggggacagcucagggc

SEQ ID NO: 1469969 - RNA, 19 nt, Artificial Sequence
  Description of Artificial Sequence: Synthetic oligonucleotide
aucaacaccacccuuuggg

SEQ ID NO: 1469970 - RNA, 19 nt, Artificial Sequence
  Description of Artificial Sequence: Synthetic oligonucleotide
uggagguacagucaggucc

SEQ ID NO: 1469971 - RNA, 19 nt, Artificial Sequence
  Description of Artificial Sequence: Synthetic oligonucleotide
acuaccaacacagagcagg

SEQ ID NO: 1469972 - RNA, 19 nt, Artificial Sequence
  Description of Artificial Sequence: Synthetic oligonucleotide
aaggccuagguugagacac

SEQ ID NO: 1469973 - RNA, 19 nt, Artificial Sequence
  Description of Artificial Sequence: Synthetic oligonucleotide
agaacuaccaacacagagc

SEQ ID NO: 1469974 - RNA, 19 nt, Artificial Sequence
  Description of Artificial Sequence: Synthetic oligonucleotide
ugugacuguauuugcagcg

SEQ ID NO: 1469975 - RNA, 19 nt, Artificial Sequence
  Description of Artificial Sequence: Synthetic oligonucleotide
agaaaugccaucguucucg

SEQ ID NO: 1469976 - RNA, 19 nt, Artificial Sequence
  Description of Artificial Sequence: Synthetic oligonucleotide
uguaccaccuuacuguuga

SEQ ID NO: 1469977 - RNA, 19 nt, Artificial Sequence
  Description of Artificial Sequence: Synthetic oligonucleotide
aacaccacccuuuggguag

SEQ ID NO: 1469978 - RNA, 19 nt, Artificial Sequence
  Description of Artificial Sequence: Synthetic oligonucleotide
caagacaggguauaaacug

SEQ ID NO: 1469979 - RNA, 19 nt, Artificial Sequence
  Description of Artificial Sequence: Synthetic oligonucleotide
uuuggguagaaucuugggu

SEQ ID NO: 1469980 - RNA, 19 nt, Artificial Sequence
  Description of Artificial Sequence: Synthetic oligonucleotide
uggugugaacaucaaagag

SEQ ID NO: 1469981 - RNA, 19 nt, Artificial Sequence
  Description of Artificial Sequence: Synthetic oligonucleotide
gugaacaucaaagaggggc

SEQ ID NO: 1469982 - RNA, 19 nt, Artificial Sequence
  Description of Artificial Sequence: Synthetic oligonucleotide
aucaaagaggggcaguuuc

SEQ ID NO: 1469983 - RNA, 19 nt, Artificial Sequence
  Description of Artificial Sequence: Synthetic oligonucleotide
ugaacaucaaagaggggca

SEQ ID NO: 1469984 - RNA, 19 nt, Artificial Sequence
  Description of Artificial Sequence: Synthetic oligonucleotide
ucaaaauguugacuguggc

SEQ ID NO: 1469985 - RNA, 19 nt, Artificial Sequence
  Description of Artificial Sequence: Synthetic oligonucleotide
agaaggccuagguugagac

SEQ ID NO: 1469986 - RNA, 19 nt, Artificial Sequence
  Description of Artificial Sequence: Synthetic oligonucleotide
cucaagacaggguauaaac

SEQ ID NO: 1469987 - RNA, 19 nt, Artificial Sequence
  Description of Artificial Sequence: Synthetic oligonucleotide
agaaucuuggguugugggg

SEQ ID NO: 1469988 - RNA, 19 nt, Artificial Sequence
  Description of Artificial Sequence: Synthetic oligonucleotide
uacauggggagucaguucu

SEQ ID NO: 1469989 - RNA, 19 nt, Artificial Sequence
  Description of Artificial Sequence: Synthetic oligonucleotide
uaguucaaccucccaaagg

SEQ ID NO: 1469990 - RNA, 19 nt, Artificial Sequence
  Description of Artificial Sequence: Synthetic oligonucleotide
agcagagagagguagcguc

SEQ ID NO: 1469991 - RNA, 19 nt, Artificial Sequence
  Description of Artificial Sequence: Synthetic oligonucleotide
cacaaucagagaaggaggg

SEQ ID NO: 1469992 - RNA, 19 nt, Artificial Sequence
  Description of Artificial Sequence: Synthetic oligonucleotide
uagaaucuuggguuguggg

SEQ ID NO: 1469993 - RNA, 19 nt, Artificial Sequence
  Description of Artificial Sequence: Synthetic oligonucleotide
uguauuugcagcgggcacg

SEQ ID NO: 1469994 - RNA, 19 nt, Artificial Sequence
  Description of Artificial Sequence: Synthetic oligonucleotide
ugcgcucgcaccuuggugg

SEQ ID NO: 1469995 - RNA, 19 nt, Artificial Sequence
  Description of Artificial Sequence: Synthetic oligonucleotide
uuccucaaccaccaggaag

SEQ ID NO: 1469996 - RNA, 19 nt, Artificial Sequence
  Description of Artificial Sequence: Synthetic oligonucleotide
cuuguguccucacagguag

SEQ ID NO: 1469997 - RNA, 19 nt, Artificial Sequence
  Description of Artificial Sequence: Synthetic oligonucleotide
caggagaaggccuagguug

SEQ ID NO: 1469998 - RNA, 19 nt, Artificial Sequence
  Description of Artificial Sequence: Synthetic oligonucleotide
agcgguaggagcugguagc

SEQ ID NO: 1469999 - RNA, 19 nt, Artificial Sequence
  Description of Artificial Sequence: Synthetic oligonucleotide
agguugagacaccaagagc

SEQ ID NO: 1470000 - RNA, 19 nt, Artificial Sequence
  Description of Artificial Sequence: Synthetic oligonucleotide
ggugugaacaucaaagagg

SEQ ID NO: 1470001 - RNA, 19 nt, Artificial Sequence
  Description of Artificial Sequence: Synthetic oligonucleotide
gaucagaugcugacgaggg

SEQ ID NO: 1470002 - RNA, 19 nt, Artificial Sequence
  Description of Artificial Sequence: Synthetic oligonucleotide
uuggguagaaucuuggguu

SEQ ID NO: 1470003 - RNA, 19 nt, Artificial Sequence
  Description of Artificial Sequence: Synthetic oligonucleotide
cagaacuaccaacacagag

SEQ ID NO: 1470004 - RNA, 19 nt, Artificial Sequence
  Description of Artificial Sequence: Synthetic oligonucleotide
gaagcaccauuacaugggg

SEQ ID NO: 1470005 - RNA, 19 nt, Artificial Sequence
  Description of Artificial Sequence: Synthetic oligonucleotide
auuuccaaccuuugcccac

SEQ ID NO: 1470006 - RNA, 19 nt, Artificial Sequence
  Description of Artificial Sequence: Synthetic oligonucleotide
guaaugaugcgcucgcacc

SEQ ID NO: 1470007 - RNA, 19 nt, Artificial Sequence
  Description of Artificial Sequence: Synthetic oligonucleotide
aaguaagacugcaaggugu

SEQ ID NO: 1470008 - RNA, 19 nt, Artificial Sequence
  Description of Artificial Sequence: Synthetic oligonucleotide
gcuacuauguccuugugac

SEQ ID NO: 1470009 - RNA, 19 nt, Artificial Sequence
  Description of Artificial Sequence: Synthetic oligonucleotide
ugccacgggguaaugaugc

SEQ ID NO: 1470010 - RNA, 19 nt, Artificial Sequence
  Description of Artificial Sequence: Synthetic oligonucleotide
uucucguagcaucaacacc

SEQ ID NO: 1470011 - RNA, 19 nt, Artificial Sequence
  Description of Artificial Sequence: Synthetic oligonucleotide
uaaugaugcgcucgcaccu

SEQ ID NO: 1470012 - RNA, 19 nt, Artificial Sequence
  Description of Artificial Sequence: Synthetic oligonucleotide
accaagagcugucccagac

SEQ ID NO: 1470013 - RNA, 19 nt, Artificial Sequence
  Description of Artificial Sequence: Synthetic oligonucleotide
uucugacucagccaucgca

SEQ ID NO: 1470014 - RNA, 19 nt, Artificial Sequence
  Description of Artificial Sequence: Synthetic oligonucleotide
acgacgaagugccacgggg

SEQ ID NO: 1470015 - RNA, 19 nt, Artificial Sequence
  Description of Artificial Sequence: Synthetic oligonucleotide
uagcgucgcacaaucagag

SEQ ID NO: 1470016 - RNA, 19 nt, Artificial Sequence
  Description of Artificial Sequence: Synthetic oligonucleotide
aucaaaauguugacugugg

SEQ ID NO: 1470017 - RNA, 19 nt, Artificial Sequence
  Description of Artificial Sequence: Synthetic oligonucleotide
cuucaaauggcagcgguag

SEQ ID NO: 1470018 - RNA, 19 nt, Artificial Sequence
  Description of Artificial Sequence: Synthetic oligonucleotide
cuuuggguagaaucuuggg

SEQ ID NO: 1470019 - RNA, 19 nt, Artificial Sequence
  Description of Artificial Sequence: Synthetic oligonucleotide
uggacugcuccacaggaga

SEQ ID NO: 1470020 - RNA, 19 nt, Artificial Sequence
  Description of Artificial Sequence: Synthetic oligonucleotide
aagaggggcaguuucggau

SEQ ID NO: 1470021 - RNA, 19 nt, Artificial Sequence
  Description of Artificial Sequence: Synthetic oligonucleotide
agagcugucccagacgacg

SEQ ID NO: 1470022 - RNA, 19 nt, Artificial Sequence
  Description of Artificial Sequence: Synthetic oligonucleotide
uucaaauggcagcgguagg

SEQ ID NO: 1470023 - RNA, 19 nt, Artificial Sequence
  Description of Artificial Sequence: Synthetic oligonucleotide
aggggugccacugaugugg

SEQ ID NO: 1470024 - RNA, 19 nt, Artificial Sequence
  Description of Artificial Sequence: Synthetic oligonucleotide
agggaaagccaaguaagac

SEQ ID NO: 1470025 - RNA, 19 nt, Artificial Sequence
  Description of Artificial Sequence: Synthetic oligonucleotide
ucaaauggcagcgguagga

SEQ ID NO: 1470026 - RNA, 19 nt, Artificial Sequence
  Description of Artificial Sequence: Synthetic oligonucleotide
uucuucaaauggcagcggu

SEQ ID NO: 1470027 - RNA, 19 nt, Artificial Sequence
  Description of Artificial Sequence: Synthetic oligonucleotide
ugggaguucaagcuccaca

SEQ ID NO: 1470028 - RNA, 19 nt, Artificial Sequence
  Description of Artificial Sequence: Synthetic oligonucleotide
uguccucacagguagcaca

SEQ ID NO: 1470029 - RNA, 19 nt, Artificial Sequence
  Description of Artificial Sequence: Synthetic oligonucleotide
auggugugaacaucaaaga

SEQ ID NO: 1470030 - RNA, 19 nt, Artificial Sequence
  Description of Artificial Sequence: Synthetic oligonucleotide
ggaaagccaaguaagacug

SEQ ID NO: 1470031 - RNA, 19 nt, Artificial Sequence
  Description of Artificial Sequence: Synthetic oligonucleotide
uguugacuguggccaaggg

SEQ ID NO: 1470032 - RNA, 19 nt, Artificial Sequence
  Description of Artificial Sequence: Synthetic oligonucleotide
uuagagucggccugguccu

SEQ ID NO: 1470033 - RNA, 19 nt, Artificial Sequence
  Description of Artificial Sequence: Synthetic oligonucleotide
uccaucugagggaaagcca

SEQ ID NO: 1470034 - RNA, 19 nt, Artificial Sequence
  Description of Artificial Sequence: Synthetic oligonucleotide
ugugaacaucaaagagggg

SEQ ID NO: 1470035 - RNA, 19 nt, Artificial Sequence
  Description of Artificial Sequence: Synthetic oligonucleotide
caaguaagacugcaaggug

SEQ ID NO: 1470036 - RNA, 19 nt, Artificial Sequence
  Description of Artificial Sequence: Synthetic oligonucleotide
guucucguagcaucaacac

SEQ ID NO: 1470037 - RNA, 19 nt, Artificial Sequence
  Description of Artificial Sequence: Synthetic oligonucleotide
aacacagagcaggaagucu

SEQ ID NO: 1470038 - RNA, 19 nt, Artificial Sequence
  Description of Artificial Sequence: Synthetic oligonucleotide
aaagaggggcaguuucgga

SEQ ID NO: 1470039 - RNA, 19 nt, Artificial Sequence
  Description of Artificial Sequence: Synthetic oligonucleotide
ucagugaugaggggcugcg

SEQ ID NO: 1470040 - RNA, 19 nt, Artificial Sequence
  Description of Artificial Sequence: Synthetic oligonucleotide
acugaugugguugaugaaa

SEQ ID NO: 1470041 - RNA, 19 nt, Artificial Sequence
  Description of Artificial Sequence: Synthetic oligonucleotide
ucaacaccacccuuugggu

SEQ ID NO: 1470042 - RNA, 19 nt, Artificial Sequence
  Description of Artificial Sequence: Synthetic oligonucleotide
guaguucaaccucccaaag

SEQ ID NO: 1470043 - RNA, 19 nt, Artificial Sequence
  Description of Artificial Sequence: Synthetic oligonucleotide
gguagcgucgcacaaucag

SEQ ID NO: 1470044 - RNA, 19 nt, Artificial Sequence
  Description of Artificial Sequence: Synthetic oligonucleotide
cguagcaucaacaccaccc

SEQ ID NO: 1470045 - RNA, 19 nt, Artificial Sequence
  Description of Artificial Sequence: Synthetic oligonucleotide
ugacaucaaaauguugacu

SEQ ID NO: 1470046 - RNA, 19 nt, Artificial Sequence
  Description of Artificial Sequence: Synthetic oligonucleotide
gucgcacaaucagagaagg

SEQ ID NO: 1470047 - RNA, 19 nt, Artificial Sequence
  Description of Artificial Sequence: Synthetic oligonucleotide
uggggagucaguucuucug

SEQ ID NO: 1470048 - RNA, 19 nt, Artificial Sequence
  Description of Artificial Sequence: Synthetic oligonucleotide
agcacagcaccagaacuac

SEQ ID NO: 1470049 - RNA, 19 nt, Artificial Sequence
  Description of Artificial Sequence: Synthetic oligonucleotide
uggcacagugacaucaaaa

SEQ ID NO: 1470050 - RNA, 19 nt, Artificial Sequence
  Description of Artificial Sequence: Synthetic oligonucleotide
cagacgacgaagugccacg

SEQ ID NO: 1470051 - RNA, 19 nt, Artificial Sequence
  Description of Artificial Sequence: Synthetic oligonucleotide
uccuugugacuguauuugc

SEQ ID NO: 1470052 - RNA, 19 nt, Artificial Sequence
  Description of Artificial Sequence: Synthetic oligonucleotide
gacaccaagagcuguccca

SEQ ID NO: 1470053 - RNA, 19 nt, Artificial Sequence
  Description of Artificial Sequence: Synthetic oligonucleotide
uggguugugggguuagagu

SEQ ID NO: 1470054 - RNA, 19 nt, Artificial Sequence
  Description of Artificial Sequence: Synthetic oligonucleotide
ugcaguagccuggagguac

SEQ ID NO: 1470055 - RNA, 19 nt, Artificial Sequence
  Description of Artificial Sequence: Synthetic oligonucleotide
acaaucagagaaggagggg

SEQ ID NO: 1470056 - RNA, 19 nt, Artificial Sequence
  Description of Artificial Sequence: Synthetic oligonucleotide
gguacagucaggucccugc

SEQ ID NO: 1470057 - RNA, 19 nt, Artificial Sequence
  Description of Artificial Sequence: Synthetic oligonucleotide
uagacacacauggauggug

SEQ ID NO: 1470058 - RNA, 19 nt, Artificial Sequence
  Description of Artificial Sequence: Synthetic oligonucleotide
ugacucagccaucgcagca

SEQ ID NO: 1470059 - RNA, 19 nt, Artificial Sequence
  Description of Artificial Sequence: Synthetic oligonucleotide
ucuucaaauggcagcggua

SEQ ID NO: 1470060 - RNA, 19 nt, Artificial Sequence
  Description of Artificial Sequence: Synthetic oligonucleotide
guccuugugacuguauuug

SEQ ID NO: 1470061 - RNA, 19 nt, Artificial Sequence
  Description of Artificial Sequence: Synthetic oligonucleotide
guauaaacugcugcuccag

SEQ ID NO: 1470062 - RNA, 19 nt, Artificial Sequence
  Description of Artificial Sequence: Synthetic oligonucleotide
cuugcacggggcuuccucc

SEQ ID NO: 1470063 - RNA, 19 nt, Artificial Sequence
  Description of Artificial Sequence: Synthetic oligonucleotide
auuacauggggagucaguu

SEQ ID NO: 1470064 - RNA, 19 nt, Artificial Sequence
  Description of Artificial Sequence: Synthetic oligonucleotide
uguacucccucacccuccc

SEQ ID NO: 1470065 - RNA, 19 nt, Artificial Sequence
  Description of Artificial Sequence: Synthetic oligonucleotide
gucggcaggaccguggcgg

SEQ ID NO: 1470066 - RNA, 19 nt, Artificial Sequence
  Description of Artificial Sequence: Synthetic oligonucleotide
guguagacacacauggaug

SEQ ID NO: 1470067 - RNA, 19 nt, Artificial Sequence
  Description of Artificial Sequence: Synthetic oligonucleotide
gguaccgcaggaaaugggg

SEQ ID NO: 1470068 - RNA, 19 nt, Artificial Sequence
  Description of Artificial Sequence: Synthetic oligonucleotide
auccucucaagacagggua

SEQ ID NO: 1470069 - RNA, 19 nt, Artificial Sequence
  Description of Artificial Sequence: Synthetic oligonucleotide
ucggaugaugagcuggcuc

SEQ ID NO: 1470070 - RNA, 19 nt, Artificial Sequence
  Description of Artificial Sequence: Synthetic oligonucleotide
agugccacgggguaaugau

SEQ ID NO: 1470071 - RNA, 19 nt, Artificial Sequence
  Description of Artificial Sequence: Synthetic oligonucleotide
caaagaggggcaguuucgg

SEQ ID NO: 1470072 - RNA, 19 nt, Artificial Sequence
  Description of Artificial Sequence: Synthetic oligonucleotide
gagguagcgucgcacaauc

SEQ ID NO: 1470073 - RNA, 19 nt, Artificial Sequence
  Description of Artificial Sequence: Synthetic oligonucleotide
uccccuagcagcuggcgca

SEQ ID NO: 1470074 - RNA, 19 nt, Artificial Sequence
  Description of Artificial Sequence: Synthetic oligonucleotide
agagaaggaggggugccac

SEQ ID NO: 1470075 - RNA, 19 nt, Artificial Sequence
  Description of Artificial Sequence: Synthetic oligonucleotide
ggcacggucagugaugagg

SEQ ID NO: 1470076 - RNA, 19 nt, Artificial Sequence
  Description of Artificial Sequence: Synthetic oligonucleotide
guauuugcagcgggcacgg

SEQ ID NO: 1470077 - RNA, 19 nt, Artificial Sequence
  Description of Artificial Sequence: Synthetic oligonucleotide
caagagcugucccagacga

SEQ ID NO: 1470078 - RNA, 19 nt, Artificial Sequence
  Description of Artificial Sequence: Synthetic oligonucleotide
guugugggguuagagucgg

SEQ ID NO: 1470079 - RNA, 19 nt, Artificial Sequence
  Description of Artificial Sequence: Synthetic oligonucleotide
cacccugccaucacggcag

SEQ ID NO: 1470080 - RNA, 19 nt, Artificial Sequence
  Description of Artificial Sequence: Synthetic oligonucleotide
ccuagguugagacaccaag

SEQ ID NO: 1470081 - RNA, 19 nt, Artificial Sequence
  Description of Artificial Sequence: Synthetic oligonucleotide
ugucccagacgacgaagug

SEQ ID NO: 1470082 - RNA, 19 nt, Artificial Sequence
  Description of Artificial Sequence: Synthetic oligonucleotide
gguugagacaccaagagcu

SEQ ID NO: 1470083 - RNA, 19 nt, Artificial Sequence
  Description of Artificial Sequence: Synthetic oligonucleotide
acacagagcaggaagucug

SEQ ID NO: 1470084 - RNA, 19 nt, Artificial Sequence
  Description of Artificial Sequence: Synthetic oligonucleotide
ugacuguggccaagggugc

SEQ ID NO: 1470085 - RNA, 19 nt, Artificial Sequence
  Description of Artificial Sequence: Synthetic oligonucleotide
gaacaucaaagaggggcag

SEQ ID NO: 1470086 - RNA, 19 nt, Artificial Sequence
  Description of Artificial Sequence: Synthetic oligonucleotide
gaggguaccgcaggaaaug

SEQ ID NO: 1470087 - RNA, 19 nt, Artificial Sequence
  Description of Artificial Sequence: Synthetic oligonucleotide
ugaugcgcucgcaccuugg

SEQ ID NO: 1470088 - RNA, 19 nt, Artificial Sequence
  Description of Artificial Sequence: Synthetic oligonucleotide
aagggugccaucccugcuu

SEQ ID NO: 1470089 - RNA, 19 nt, Artificial Sequence
  Description of Artificial Sequence: Synthetic oligonucleotide
uaccgcaggaaauggggac

SEQ ID NO: 1470090 - RNA, 19 nt, Artificial Sequence
  Description of Artificial Sequence: Synthetic oligonucleotide
caucacggcagaaaugcca

SEQ ID NO: 1470091 - RNA, 19 nt, Artificial Sequence
  Description of Artificial Sequence: Synthetic oligonucleotide
gucgagcagagagagguag

SEQ ID NO: 1470092 - RNA, 19 nt, Artificial Sequence
  Description of Artificial Sequence: Synthetic oligonucleotide
uuacauggggagucaguuc

SEQ ID NO: 1470093 - RNA, 19 nt, Artificial Sequence
  Description of Artificial Sequence: Synthetic oligonucleotide
augcugacgaggguaccgc

SEQ ID NO: 1470094 - RNA, 19 nt, Artificial Sequence
  Description of Artificial Sequence: Synthetic oligonucleotide
uagaagcugggguucccgc

SEQ ID NO: 1470095 - RNA, 19 nt, Artificial Sequence
  Description of Artificial Sequence: Synthetic oligonucleotide
gguaaugaugcgcucgcac

SEQ ID NO: 1470096 - RNA, 19 nt, Artificial Sequence
  Description of Artificial Sequence: Synthetic oligonucleotide
gguccugucggcaggaccg

SEQ ID NO: 1470097 - RNA, 19 nt, Artificial Sequence
  Description of Artificial Sequence: Synthetic oligonucleotide
gggucuuguguccucacag

SEQ ID NO: 1470098 - RNA, 19 nt, Artificial Sequence
  Description of Artificial Sequence: Synthetic oligonucleotide
ggguugugggguuagaguc

SEQ ID NO: 1470099 - RNA, 19 nt, Artificial Sequence
  Description of Artificial Sequence: Synthetic oligonucleotide
ugcaagguguagacacaca

SEQ ID NO: 1470100 - RNA, 19 nt, Artificial Sequence
  Description of Artificial Sequence: Synthetic oligonucleotide
caaauggcagcgguaggag

SEQ ID NO: 1470101 - RNA, 19 nt, Artificial Sequence
  Description of Artificial Sequence: Synthetic oligonucleotide
gacgacgaagugccacggg

SEQ ID NO: 1470102 - RNA, 19 nt, Artificial Sequence
  Description of Artificial Sequence: Synthetic oligonucleotide
ggauccucucaagacaggg

SEQ ID NO: 1470103 - RNA, 19 nt, Artificial Sequence
  Description of Artificial Sequence: Synthetic oligonucleotide
auguugacuguggccaagg

SEQ ID NO: 1470104 - RNA, 19 nt, Artificial Sequence
  Description of Artificial Sequence: Synthetic oligonucleotide
cagaugcugacgaggguac

SEQ ID NO: 1470105 - RNA, 19 nt, Artificial Sequence
  Description of Artificial Sequence: Synthetic oligonucleotide
gaaucuuggguuguggggu

SEQ ID NO: 1470106 - RNA, 19 nt, Artificial Sequence
  Description of Artificial Sequence: Synthetic oligonucleotide
ucguucucguagcaucaac

SEQ ID NO: 1470107 - RNA, 19 nt, Artificial Sequence
  Description of Artificial Sequence: Synthetic oligonucleotide
aaucuuggguugugggguu

SEQ ID NO: 1470108 - RNA, 19 nt, Artificial Sequence
  Description of Artificial Sequence: Synthetic oligonucleotide
acuauguccuugugacugu

SEQ ID NO: 1470109 - RNA, 19 nt, Artificial Sequence
  Description of Artificial Sequence: Synthetic oligonucleotide
cugaucagaugcugacgag

SEQ ID NO: 1470110 - RNA, 19 nt, Artificial Sequence
  Description of Artificial Sequence: Synthetic oligonucleotide
cugacucagccaucgcagc

SEQ ID NO: 1470111 - RNA, 19 nt, Artificial Sequence
  Description of Artificial Sequence: Synthetic oligonucleotide
ggcaguuucggaugaugag

SEQ ID NO: 1470112 - RNA, 19 nt, Artificial Sequence
  Description of Artificial Sequence: Synthetic oligonucleotide
cuagaagcugggguucccg

SEQ ID NO: 1470113 - RNA, 19 nt, Artificial Sequence
  Description of Artificial Sequence: Synthetic oligonucleotide
gcaguuucggaugaugagc

SEQ ID NO: 1470114 - RNA, 19 nt, Artificial Sequence
  Description of Artificial Sequence: Synthetic oligonucleotide
uugagacaccaagagcugu

SEQ ID NO: 1470115 - RNA, 19 nt, Artificial Sequence
  Description of Artificial Sequence: Synthetic oligonucleotide
ggugccacugaugugguug

SEQ ID NO: 1470116 - RNA, 19 nt, Artificial Sequence
  Description of Artificial Sequence: Synthetic oligonucleotide
gucggccugguccugucgg

SEQ ID NO: 1470117 - RNA, 19 nt, Artificial Sequence
  Description of Artificial Sequence: Synthetic oligonucleotide
agucugugcaguagccugg

SEQ ID NO: 1470118 - RNA, 19 nt, Artificial Sequence
  Description of Artificial Sequence: Synthetic oligonucleotide
cagcacccugccaucacgg

SEQ ID NO: 1470119 - RNA, 19 nt, Artificial Sequence
  Description of Artificial Sequence: Synthetic oligonucleotide
gcacagugacaucaaaaug

SEQ ID NO: 1470120 - RNA, 19 nt, Artificial Sequence
  Description of Artificial Sequence: Synthetic oligonucleotide
uccucucaagacaggguau

SEQ ID NO: 1470121 - RNA, 19 nt, Artificial Sequence
  Description of Artificial Sequence: Synthetic oligonucleotide
ucguagcaucaacaccacc

SEQ ID NO: 1470122 - RNA, 19 nt, Artificial Sequence
  Description of Artificial Sequence: Synthetic oligonucleotide
gaggcgggaccuucgcucc

SEQ ID NO: 1470123 - RNA, 19 nt, Artificial Sequence
  Description of Artificial Sequence: Synthetic oligonucleotide
cugggguucccgcaaccgg

SEQ ID NO: 1470124 - RNA, 19 nt, Artificial Sequence
  Description of Artificial Sequence: Synthetic oligonucleotide
ucuuccccuagcagcuggc

SEQ ID NO: 1470125 - RNA, 19 nt, Artificial Sequence
  Description of Artificial Sequence: Synthetic oligonucleotide
agacacacauggauggugu

SEQ ID NO: 1470126 - RNA, 19 nt, Artificial Sequence
  Description of Artificial Sequence: Synthetic oligonucleotide
aggguaccgcaggaaaugg

SEQ ID NO: 1470127 - RNA, 19 nt, Artificial Sequence
  Description of Artificial Sequence: Synthetic oligonucleotide
uuuuggagggaggcgggac

SEQ ID NO: 1470128 - RNA, 19 nt, Artificial Sequence
  Description of Artificial Sequence: Synthetic oligonucleotide
gaaagccaaguaagacugc

SEQ ID NO: 1470129 - RNA, 19 nt, Artificial Sequence
  Description of Artificial Sequence: Synthetic oligonucleotide
ugacgaggguaccgcagga

SEQ ID NO: 1470130 - RNA, 19 nt, Artificial Sequence
  Description of Artificial Sequence: Synthetic oligonucleotide
gaccguggcggguagggca

SEQ ID NO: 1470131 - RNA, 19 nt, Artificial Sequence
  Description of Artificial Sequence: Synthetic oligonucleotide
acgaggguaccgcaggaaa

SEQ ID NO: 1470132 - RNA, 19 nt, Artificial Sequence
  Description of Artificial Sequence: Synthetic oligonucleotide
gucccagacgacgaagugc

SEQ ID NO: 1470133 - RNA, 19 nt, Artificial Sequence
  Description of Artificial Sequence: Synthetic oligonucleotide
gagagagguagcgucgcac

SEQ ID NO: 1470134 - RNA, 19 nt, Artificial Sequence
  Description of Artificial Sequence: Synthetic oligonucleotide
agaugcugacgaggguacc

SEQ ID NO: 1470135 - RNA, 19 nt, Artificial Sequence
  Description of Artificial Sequence: Synthetic oligonucleotide
aagagcugucccagacgac

SEQ ID NO: 1470136 - RNA, 19 nt, Artificial Sequence
  Description of Artificial Sequence: Synthetic oligonucleotide
caccauuacauggggaguc

SEQ ID NO: 1470137 - RNA, 19 nt, Artificial Sequence
  Description of Artificial Sequence: Synthetic oligonucleotide
gagggaaagccaaguaaga

SEQ ID NO: 1470138 - RNA, 19 nt, Artificial Sequence
  Description of Artificial Sequence: Synthetic oligonucleotide
ugggcacucgcugucuuug

SEQ ID NO: 1470139 - RNA, 19 nt, Artificial Sequence
  Description of Artificial Sequence: Synthetic oligonucleotide
acacacauggaugguguga

SEQ ID NO: 1470140 - RNA, 19 nt, Artificial Sequence
  Description of Artificial Sequence: Synthetic oligonucleotide
gguugugggguuagagucg

SEQ ID NO: 1470141 - RNA, 19 nt, Artificial Sequence
  Description of Artificial Sequence: Synthetic oligonucleotide
cagcgguaggagcugguag

SEQ ID NO: 1470142 - RNA, 19 nt, Artificial Sequence
  Description of Artificial Sequence: Synthetic oligonucleotide
gugucgagcagagagaggu

SEQ ID NO: 1470143 - RNA, 19 nt, Artificial Sequence
  Description of Artificial Sequence: Synthetic oligonucleotide
cagccccucagcuacuaug

SEQ ID NO: 1470144 - RNA, 19 nt, Artificial Sequence
  Description of Artificial Sequence: Synthetic oligonucleotide
ugccucagguagcucuuga

SEQ ID NO: 1470145 - RNA, 19 nt, Artificial Sequence
  Description of Artificial Sequence: Synthetic oligonucleotide
cucgcugucuuuggggaag

SEQ ID NO: 1470146 - RNA, 19 nt, Artificial Sequence
  Description of Artificial Sequence: Synthetic oligonucleotide
agacgacgaagugccacgg

SEQ ID NO: 1470147 - RNA, 19 nt, Artificial Sequence
  Description of Artificial Sequence: Synthetic oligonucleotide
caucguucucguagcauca

SEQ ID NO: 1470148 - RNA, 19 nt, Artificial Sequence
  Description of Artificial Sequence: Synthetic oligonucleotide
uuguguccucacagguagc

SEQ ID NO: 1470149 - RNA, 19 nt, Artificial Sequence
  Description of Artificial Sequence: Synthetic oligonucleotide
ccaaccuuugcccaccaug

SEQ ID NO: 1470150 - RNA, 19 nt, Artificial Sequence
  Description of Artificial Sequence: Synthetic oligonucleotide
cucguagcaucaacaccac

SEQ ID NO: 1470151 - RNA, 19 nt, Artificial Sequence
  Description of Artificial Sequence: Synthetic oligonucleotide
gaagcugggguucccgcaa

SEQ ID NO: 1470152 - RNA, 19 nt, Artificial Sequence
  Description of Artificial Sequence: Synthetic oligonucleotide
guagcaucaacaccacccu

SEQ ID NO: 1470153 - RNA, 19 nt, Artificial Sequence
  Description of Artificial Sequence: Synthetic oligonucleotide
aucagaugcugacgagggu

SEQ ID NO: 1470154 - RNA, 19 nt, Artificial Sequence
  Description of Artificial Sequence: Synthetic oligonucleotide
uacuguugagcugggcuuc

SEQ ID NO: 1470155 - RNA, 19 nt, Artificial Sequence
  Description of Artificial Sequence: Synthetic oligonucleotide
ggcagaaaugccaucguuc

SEQ ID NO: 1470156 - RNA, 19 nt, Artificial Sequence
  Description of Artificial Sequence: Synthetic oligonucleotide
agcaucaacaccacccuuu

SEQ ID NO: 1470157 - RNA, 19 nt, Artificial Sequence
  Description of Artificial Sequence: Synthetic oligonucleotide
ucaggucccugcaguauuu

SEQ ID NO: 1470158 - RNA, 19 nt, Artificial Sequence
  Description of Artificial Sequence: Synthetic oligonucleotide
ccucccaaagggcaggacc

SEQ ID NO: 1470159 - RNA, 19 nt, Artificial Sequence
  Description of Artificial Sequence: Synthetic oligonucleotide
ucggcaggaccguggcggg

SEQ ID NO: 1470160 - RNA, 19 nt, Artificial Sequence
  Description of Artificial Sequence: Synthetic oligonucleotide
guaagacugcaagguguag

SEQ ID NO: 1470161 - RNA, 19 nt, Artificial Sequence
  Description of Artificial Sequence: Synthetic oligonucleotide
augaugcgcucgcaccuug

SEQ ID NO: 1470162 - RNA, 19 nt, Artificial Sequence
  Description of Artificial Sequence: Synthetic oligonucleotide
cauggauggugugaacauc

SEQ ID NO: 1470163 - RNA, 19 nt, Artificial Sequence
  Description of Artificial Sequence: Synthetic oligonucleotide
gggguaaugaugcgcucgc

SEQ ID NO: 1470164 - RNA, 19 nt, Artificial Sequence
  Description of Artificial Sequence: Synthetic oligonucleotide
guugacuguggccaagggu

SEQ ID NO: 1470165 - RNA, 19 nt, Artificial Sequence
  Description of Artificial Sequence: Synthetic oligonucleotide
acgggguaaugaugcgcuc

SEQ ID NO: 1470166 - RNA, 19 nt, Artificial Sequence
  Description of Artificial Sequence: Synthetic oligonucleotide
caucaagcccaggugccgc

SEQ ID NO: 1470167 - RNA, 19 nt, Artificial Sequence
  Description of Artificial Sequence: Synthetic oligonucleotide
aaugaugcgcucgcaccuu

SEQ ID NO: 1470168 - RNA, 19 nt, Artificial Sequence
  Description of Artificial Sequence: Synthetic oligonucleotide
caaccucccaaagggcagg

SEQ ID NO: 1470169 - RNA, 19 nt, Artificial Sequence
  Description of Artificial Sequence: Synthetic oligonucleotide
augcgcucgcaccuuggug

SEQ ID NO: 1470170 - RNA, 19 nt, Artificial Sequence
  Description of Artificial Sequence: Synthetic oligonucleotide
ccaucguucucguagcauc

SEQ ID NO: 1470171 - RNA, 19 nt, Artificial Sequence
  Description of Artificial Sequence: Synthetic oligonucleotide
acggcagaaaugccaucgu

SEQ ID NO: 1470172 - RNA, 19 nt, Artificial Sequence
  Description of Artificial Sequence: Synthetic oligonucleotide
guagcgucgcacaaucaga

SEQ ID NO: 1470173 - RNA, 19 nt, Artificial Sequence
  Description of Artificial Sequence: Synthetic oligonucleotide
ggcagguaguucaaccucc

SEQ ID NO: 1470174 - RNA, 19 nt, Artificial Sequence
  Description of Artificial Sequence: Synthetic oligonucleotide
agggucuuguguccucaca

SEQ ID NO: 1470175 - RNA, 19 nt, Artificial Sequence
  Description of Artificial Sequence: Synthetic oligonucleotide
ugcugacgaggguaccgca

SEQ ID NO: 1470176 - RNA, 19 nt, Artificial Sequence
  Description of Artificial Sequence: Synthetic oligonucleotide
cugucggcaggaccguggc

SEQ ID NO: 1470177 - RNA, 19 nt, Artificial Sequence
  Description of Artificial Sequence: Synthetic oligonucleotide
caaccaccaggaagugagc

SEQ ID NO: 1470178 - RNA, 19 nt, Artificial Sequence
  Description of Artificial Sequence: Synthetic oligonucleotide
uugcacggggcuuccucca

SEQ ID NO: 1470179 - RNA, 19 nt, Artificial Sequence
  Description of Artificial Sequence: Synthetic oligonucleotide
ggcacagugacaucaaaau

SEQ ID NO: 1470180 - RNA, 19 nt, Artificial Sequence
  Description of Artificial Sequence: Synthetic oligonucleotide
agagagagguagcgucgca

SEQ ID NO: 1470181 - RNA, 19 nt, Artificial Sequence
  Description of Artificial Sequence: Synthetic oligonucleotide
ccagaagcaccauuacaug

SEQ ID NO: 1470182 - RNA, 19 nt, Artificial Sequence
  Description of Artificial Sequence: Synthetic oligonucleotide
ggcgcagccccucagcuac

SEQ ID NO: 1470183 - RNA, 19 nt, Artificial Sequence
  Description of Artificial Sequence: Synthetic oligonucleotide
caccaggaagugagcaaug

SEQ ID NO: 1470184 - RNA, 19 nt, Artificial Sequence
  Description of Artificial Sequence: Synthetic oligonucleotide
gacgaagugccacggggua

SEQ ID NO: 1470185 - RNA, 19 nt, Artificial Sequence
  Description of Artificial Sequence: Synthetic oligonucleotide
gucuuguguccucacaggu

SEQ ID NO: 1470186 - RNA, 19 nt, Artificial Sequence
  Description of Artificial Sequence: Synthetic oligonucleotide
accauuacauggggaguca

SEQ ID NO: 1470187 - RNA, 19 nt, Artificial Sequence
  Description of Artificial Sequence: Synthetic oligonucleotide
ggaccuucgcucccgcucc

SEQ ID NO: 1470188 - RNA, 19 nt, Artificial Sequence
  Description of Artificial Sequence: Synthetic oligonucleotide
ccaggaagugagcaauggc

SEQ ID NO: 1470189 - RNA, 19 nt, Artificial Sequence
  Description of Artificial Sequence: Synthetic oligonucleotide
accgcaggaaauggggaca

SEQ ID NO: 1470190 - RNA, 19 nt, Artificial Sequence
  Description of Artificial Sequence: Synthetic oligonucleotide
cacggucagugaugagggg

SEQ ID NO: 1470191 - RNA, 19 nt, Artificial Sequence
  Description of Artificial Sequence: Synthetic oligonucleotide
uuugcccaccauggguggc

SEQ ID NO: 1470192 - RNA, 19 nt, Artificial Sequence
  Description of Artificial Sequence: Synthetic oligonucleotide
cacccuuuggguagaaucu

SEQ ID NO: 1470193 - RNA, 19 nt, Artificial Sequence
  Description of Artificial Sequence: Synthetic oligonucleotide
agcgucgcacaaucagaga

SEQ ID NO: 1470194 - RNA, 19 nt, Artificial Sequence
  Description of Artificial Sequence: Synthetic oligonucleotide
guucaagcuccacagccgu

SEQ ID NO: 1470195 - RNA, 19 nt, Artificial Sequence
  Description of Artificial Sequence: Synthetic oligonucleotide
ccaagagcugucccagacg

SEQ ID NO: 1470196 - RNA, 19 nt, Artificial Sequence
  Description of Artificial Sequence: Synthetic oligonucleotide
ugcgggaagaugggcacuc

SEQ ID NO: 1470197 - RNA, 19 nt, Artificial Sequence
  Description of Artificial Sequence: Synthetic oligonucleotide
ugucgagcagagagaggua

SEQ ID NO: 1470198 - RNA, 19 nt, Artificial Sequence
  Description of Artificial Sequence: Synthetic oligonucleotide
ggaggcgggaccuucgcuc

SEQ ID NO: 1470199 - RNA, 19 nt, Artificial Sequence
  Description of Artificial Sequence: Synthetic oligonucleotide
cuggagguacagucagguc

SEQ ID NO: 1470200 - RNA, 19 nt, Artificial Sequence
  Description of Artificial Sequence: Synthetic oligonucleotide
gcgucgcacaaucagagaa

SEQ ID NO: 1470201 - RNA, 19 nt, Artificial Sequence
  Description of Artificial Sequence: Synthetic oligonucleotide
guucugacucagccaucgc

SEQ ID NO: 1470202 - RNA, 19 nt, Artificial Sequence
  Description of Artificial Sequence: Synthetic oligonucleotide
ggaggggugccacugaugu

SEQ ID NO: 1470203 - RNA, 19 nt, Artificial Sequence
  Description of Artificial Sequence: Synthetic oligonucleotide
gaaaugccaucguucucgu

SEQ ID NO: 1470204 - RNA, 19 nt, Artificial Sequence
  Description of Artificial Sequence: Synthetic oligonucleotide
gaggggugccacugaugug

SEQ ID NO: 1470205 - RNA, 19 nt, Artificial Sequence
  Description of Artificial Sequence: Synthetic oligonucleotide
guguacucccucacccucc

SEQ ID NO: 1470206 - RNA, 19 nt, Artificial Sequence
  Description of Artificial Sequence: Synthetic oligonucleotide
agcgggcacggucagugau

SEQ ID NO: 1470207 - RNA, 19 nt, Artificial Sequence
  Description of Artificial Sequence: Synthetic oligonucleotide
aggcgggaccuucgcuccc

SEQ ID NO: 1470208 - RNA, 19 nt, Artificial Sequence
  Description of Artificial Sequence: Synthetic oligonucleotide
gagaaggccuagguugaga

SEQ ID NO: 1470209 - RNA, 19 nt, Artificial Sequence
  Description of Artificial Sequence: Synthetic oligonucleotide
cccaucaagcccaggugcc

SEQ ID NO: 1470210 - RNA, 19 nt, Artificial Sequence
  Description of Artificial Sequence: Synthetic oligonucleotide
cauggggagucaguucuuc

SEQ ID NO: 1470211 - RNA, 19 nt, Artificial Sequence
  Description of Artificial Sequence: Synthetic oligonucleotide
caaggcucugaagggcaag

SEQ ID NO: 1470212 - RNA, 19 nt, Artificial Sequence
  Description of Artificial Sequence: Synthetic oligonucleotide
aggccuagguugagacacc

SEQ ID NO: 1470213 - RNA, 19 nt, Artificial Sequence
  Description of Artificial Sequence: Synthetic oligonucleotide
guaccaccuuacuguugag

SEQ ID NO: 1470214 - RNA, 19 nt, Artificial Sequence
  Description of Artificial Sequence: Synthetic oligonucleotide
ugcacggggcuuccuccac

SEQ ID NO: 1470215 - RNA, 19 nt, Artificial Sequence
  Description of Artificial Sequence: Synthetic oligonucleotide
cacgggguaaugaugcgcu

SEQ ID NO: 1470216 - RNA, 19 nt, Artificial Sequence
  Description of Artificial Sequence: Synthetic oligonucleotide
aggauccucucaagacagg

SEQ ID NO: 1470217 - RNA, 19 nt, Artificial Sequence
  Description of Artificial Sequence: Synthetic oligonucleotide
ccugucggcaggaccgugg

SEQ ID NO: 1470218 - RNA, 19 nt, Artificial Sequence
  Description of Artificial Sequence: Synthetic oligonucleotide
cauuacauggggagucagu

SEQ ID NO: 1470219 - RNA, 19 nt, Artificial Sequence
  Description of Artificial Sequence: Synthetic oligonucleotide
uggcagcgguaggagcugg

SEQ ID NO: 1470220 - RNA, 19 nt, Artificial Sequence
  Description of Artificial Sequence: Synthetic oligonucleotide
ggcggguagggcaggaaag

SEQ ID NO: 1470221 - RNA, 19 nt, Artificial Sequence
  Description of Artificial Sequence: Synthetic oligonucleotide
guaccgcaggaaaugggga

SEQ ID NO: 1470222 - RNA, 19 nt, Artificial Sequence
  Description of Artificial Sequence: Synthetic oligonucleotide
cucugccaggcuucugauc

SEQ ID NO: 1470223 - RNA, 19 nt, Artificial Sequence
  Description of Artificial Sequence: Synthetic oligonucleotide
caacaccacccuuugggua

SEQ ID NO: 1470224 - RNA, 19 nt, Artificial Sequence
  Description of Artificial Sequence: Synthetic oligonucleotide
gggcagguaguucaaccuc

SEQ ID NO: 1470225 - RNA, 19 nt, Artificial Sequence
  Description of Artificial Sequence: Synthetic oligonucleotide
ccuugugacuguauuugca

SEQ ID NO: 1470226 - RNA, 19 nt, Artificial Sequence
  Description of Artificial Sequence: Synthetic oligonucleotide
gcggguagggcaggaaagg

SEQ ID NO: 1470227 - RNA, 19 nt, Artificial Sequence
  Description of Artificial Sequence: Synthetic oligonucleotide
agucaggucccugcaguau

SEQ ID NO: 1470228 - RNA, 19 nt, Artificial Sequence
  Description of Artificial Sequence: Synthetic oligonucleotide
agguguagacacacaugga

SEQ ID NO: 1470229 - RNA, 19 nt, Artificial Sequence
  Description of Artificial Sequence: Synthetic oligonucleotide
cacccucccuccagguccc

SEQ ID NO: 1470230 - RNA, 19 nt, Artificial Sequence
  Description of Artificial Sequence: Synthetic oligonucleotide
gccgcugaaggccuugcac

SEQ ID NO: 1470231 - RNA, 19 nt, Artificial Sequence
  Description of Artificial Sequence: Synthetic oligonucleotide
uugugggguuagagucggc

SEQ ID NO: 1470232 - RNA, 19 nt, Artificial Sequence
  Description of Artificial Sequence: Synthetic oligonucleotide
ggcuucuagaagcuggggu

SEQ ID NO: 1470233 - RNA, 19 nt, Artificial Sequence
  Description of Artificial Sequence: Synthetic oligonucleotide
gauccucucaagacagggu

SEQ ID NO: 1470234 - RNA, 19 nt, Artificial Sequence
  Description of Artificial Sequence: Synthetic oligonucleotide
gggaccuucgcucccgcuc

SEQ ID NO: 1470235 - RNA, 19 nt, Artificial Sequence
  Description of Artificial Sequence: Synthetic oligonucleotide
agguagcacagcaccagaa

SEQ ID NO: 1470236 - RNA, 19 nt, Artificial Sequence
  Description of Artificial Sequence: Synthetic oligonucleotide
ccaaguaagacugcaaggu

SEQ ID NO: 1470237 - RNA, 19 nt, Artificial Sequence
  Description of Artificial Sequence: Synthetic oligonucleotide
cgucgcacaaucagagaag

SEQ ID NO: 1470238 - RNA, 19 nt, Artificial Sequence
  Description of Artificial Sequence: Synthetic oligonucleotide
ggauggugugaacaucaaa

SEQ ID NO: 1470239 - RNA, 19 nt, Artificial Sequence
  Description of Artificial Sequence: Synthetic oligonucleotide
accucccaaagggcaggac

SEQ ID NO: 1470240 - RNA, 19 nt, Artificial Sequence
  Description of Artificial Sequence: Synthetic oligonucleotide
cacaggagaaggccuaggu

SEQ ID NO: 1470241 - RNA, 19 nt, Artificial Sequence
  Description of Artificial Sequence: Synthetic oligonucleotide
gugccacgggguaaugaug

SEQ ID NO: 1470242 - RNA, 19 nt, Artificial Sequence
  Description of Artificial Sequence: Synthetic oligonucleotide
cccuuuggguagaaucuug

SEQ ID NO: 1470243 - RNA, 19 nt, Artificial Sequence
  Description of Artificial Sequence: Synthetic oligonucleotide
gaugcgcucgcaccuuggu

SEQ ID NO: 1470244 - RNA, 19 nt, Artificial Sequence
  Description of Artificial Sequence: Synthetic oligonucleotide
ggugccgcucccucagggc

SEQ ID NO: 1470245 - RNA, 19 nt, Artificial Sequence
  Description of Artificial Sequence: Synthetic oligonucleotide
cuccgugccuguuccagaa

SEQ ID NO: 1470246 - RNA, 19 nt, Artificial Sequence
  Description of Artificial Sequence: Synthetic oligonucleotide
ccuagcagcuggcgcagcc

SEQ ID NO: 1470247 - RNA, 19 nt, Artificial Sequence
  Description of Artificial Sequence: Synthetic oligonucleotide
cuccacacggccggucccc

SEQ ID NO: 1470248 - RNA, 19 nt, Artificial Sequence
  Description of Artificial Sequence: Synthetic oligonucleotide
agggcacacaggagugguc

SEQ ID NO: 1470249 - RNA, 19 nt, Artificial Sequence
  Description of Artificial Sequence: Synthetic oligonucleotide
gcugacgaggguaccgcag

SEQ ID NO: 1470250 - RNA, 19 nt, Artificial Sequence
  Description of Artificial Sequence: Synthetic oligonucleotide
gcugucccagacgacgaag

SEQ ID NO: 1470251 - RNA, 19 nt, Artificial Sequence
  Description of Artificial Sequence: Synthetic oligonucleotide
gaagugccacgggguaaug

SEQ ID NO: 1470252 - RNA, 19 nt, Artificial Sequence
  Description of Artificial Sequence: Synthetic oligonucleotide
ccgugucgagcagagagag

SEQ ID NO: 1470253 - RNA, 19 nt, Artificial Sequence
  Description of Artificial Sequence: Synthetic oligonucleotide
gccacgggguaaugaugcg

SEQ ID NO: 1470254 - RNA, 19 nt, Artificial Sequence
  Description of Artificial Sequence: Synthetic oligonucleotide
acccuuuggguagaaucuu

SEQ ID NO: 1470255 - RNA, 19 nt, Artificial Sequence
  Description of Artificial Sequence: Synthetic oligonucleotide
ccaucacggcagaaaugcc

SEQ ID NO: 1470256 - RNA, 19 nt, Artificial Sequence
  Description of Artificial Sequence: Synthetic oligonucleotide
accuuacuguugagcuggg

SEQ ID NO: 1470257 - RNA, 19 nt, Artificial Sequence
  Description of Artificial Sequence: Synthetic oligonucleotide
cagcuacuauguccuugug

SEQ ID NO: 1470258 - RNA, 19 nt, Artificial Sequence
  Description of Artificial Sequence: Synthetic oligonucleotide
gggcaguuucggaugauga

SEQ ID NO: 1470259 - RNA, 19 nt, Artificial Sequence
  Description of Artificial Sequence: Synthetic oligonucleotide
cuccacaggagaaggccua

SEQ ID NO: 1470260 - RNA, 19 nt, Artificial Sequence
  Description of Artificial Sequence: Synthetic oligonucleotide
gggcacucgcugucuuugg

SEQ ID NO: 1470261 - RNA, 19 nt, Artificial Sequence
  Description of Artificial Sequence: Synthetic oligonucleotide
acgaagugccacgggguaa

SEQ ID NO: 1470262 - RNA, 19 nt, Artificial Sequence
  Description of Artificial Sequence: Synthetic oligonucleotide
gcagguaguucaaccuccc

SEQ ID NO: 1470263 - RNA, 19 nt, Artificial Sequence
  Description of Artificial Sequence: Synthetic oligonucleotide
agagucggccugguccugu

SEQ ID NO: 1470264 - RNA, 19 nt, Artificial Sequence
  Description of Artificial Sequence: Synthetic oligonucleotide
aucguucucguagcaucaa

SEQ ID NO: 1470265 - RNA, 19 nt, Artificial Sequence
  Description of Artificial Sequence: Synthetic oligonucleotide
augggcacucgcugucuuu

SEQ ID NO: 1470266 - RNA, 19 nt, Artificial Sequence
  Description of Artificial Sequence: Synthetic oligonucleotide
cgugccuguuccagaagcc

SEQ ID NO: 1470267 - RNA, 19 nt, Artificial Sequence
  Description of Artificial Sequence: Synthetic oligonucleotide
gacgaggguaccgcaggaa

SEQ ID NO: 1470268 - RNA, 19 nt, Artificial Sequence
  Description of Artificial Sequence: Synthetic oligonucleotide
ugaggggcugcgggaagau

SEQ ID NO: 1470269 - RNA, 19 nt, Artificial Sequence
  Description of Artificial Sequence: Synthetic oligonucleotide
ggggcaguuucggaugaug

SEQ ID NO: 1470270 - RNA, 19 nt, Artificial Sequence
  Description of Artificial Sequence: Synthetic oligonucleotide
cuacuauguccuugugacu

SEQ ID NO: 1470271 - RNA, 19 nt, Artificial Sequence
  Description of Artificial Sequence: Synthetic oligonucleotide
ucgcugucuuuggggaagu

SEQ ID NO: 1470272 - RNA, 19 nt, Artificial Sequence
  Description of Artificial Sequence: Synthetic oligonucleotide
gagucggccugguccuguc

SEQ ID NO: 1470273 - RNA, 19 nt, Artificial Sequence
  Description of Artificial Sequence: Synthetic oligonucleotide
cugccaucacggcagaaau

SEQ ID NO: 1470274 - RNA, 19 nt, Artificial Sequence
  Description of Artificial Sequence: Synthetic oligonucleotide
uguggccaagggugccauc

SEQ ID NO: 1470275 - RNA, 19 nt, Artificial Sequence
  Description of Artificial Sequence: Synthetic oligonucleotide
cucucaagacaggguauaa

SEQ ID NO: 1470276 - RNA, 19 nt, Artificial Sequence
  Description of Artificial Sequence: Synthetic oligonucleotide
gcacccugccaucacggca

SEQ ID NO: 1470277 - RNA, 19 nt, Artificial Sequence
  Description of Artificial Sequence: Synthetic oligonucleotide
cgggguaaugaugcgcucg

SEQ ID NO: 1470278 - RNA, 19 nt, Artificial Sequence
  Description of Artificial Sequence: Synthetic oligonucleotide
uccugucggcaggaccgug

SEQ ID NO: 1470279 - RNA, 19 nt, Artificial Sequence
  Description of Artificial Sequence: Synthetic oligonucleotide
caguagccuggagguacag

SEQ ID NO: 1470280 - RNA, 19 nt, Artificial Sequence
  Description of Artificial Sequence: Synthetic oligonucleotide
gcgguaggagcugguagcc

SEQ ID NO: 1470281 - RNA, 19 nt, Artificial Sequence
  Description of Artificial Sequence: Synthetic oligonucleotide
ccacgggguaaugaugcgc

SEQ ID NO: 1470282 - RNA, 19 nt, Artificial Sequence
  Description of Artificial Sequence: Synthetic oligonucleotide
gcgcucgcaccuugguggg

SEQ ID NO: 1470283 - RNA, 19 nt, Artificial Sequence
  Description of Artificial Sequence: Synthetic oligonucleotide
cacagagcaggaagucugu

SEQ ID NO: 1470284 - RNA, 19 nt, Artificial Sequence
  Description of Artificial Sequence: Synthetic oligonucleotide
aaccggugccgggccaggu

SEQ ID NO: 1470285 - RNA, 19 nt, Artificial Sequence
  Description of Artificial Sequence: Synthetic oligonucleotide
ccauuacauggggagucag

SEQ ID NO: 1470286 - RNA, 19 nt, Artificial Sequence
  Description of Artificial Sequence: Synthetic oligonucleotide
ggcugcgggaagaugggca

SEQ ID NO: 1470287 - RNA, 19 nt, Artificial Sequence
  Description of Artificial Sequence: Synthetic oligonucleotide
cuuccucaaccaccaggaa

SEQ ID NO: 1470288 - RNA, 19 nt, Artificial Sequence
  Description of Artificial Sequence: Synthetic oligonucleotide
gucaggucccugcaguauu

SEQ ID NO: 1470289 - RNA, 19 nt, Artificial Sequence
  Description of Artificial Sequence: Synthetic oligonucleotide
ucccgcuccagggcacaca

SEQ ID NO: 1470290 - RNA, 19 nt, Artificial Sequence
  Description of Artificial Sequence: Synthetic oligonucleotide
ccuucgcucccgcuccagg

SEQ ID NO: 1470291 - RNA, 19 nt, Artificial Sequence
  Description of Artificial Sequence: Synthetic oligonucleotide
ccuugcacggggcuuccuc

SEQ ID NO: 1470292 - RNA, 19 nt, Artificial Sequence
  Description of Artificial Sequence: Synthetic oligonucleotide
agguagcgucgcacaauca

SEQ ID NO: 1470293 - RNA, 19 nt, Artificial Sequence
  Description of Artificial Sequence: Synthetic oligonucleotide
ggguucccgcaaccggugc

SEQ ID NO: 1470294 - RNA, 19 nt, Artificial Sequence
  Description of Artificial Sequence: Synthetic oligonucleotide
caaccggugccgggccagg

SEQ ID NO: 1470295 - RNA, 19 nt, Artificial Sequence
  Description of Artificial Sequence: Synthetic oligonucleotide
acaccacccuuuggguaga

SEQ ID NO: 1470296 - RNA, 19 nt, Artificial Sequence
  Description of Artificial Sequence: Synthetic oligonucleotide
caccaagagcugucccaga

SEQ ID NO: 1470297 - RNA, 19 nt, Artificial Sequence
  Description of Artificial Sequence: Synthetic oligonucleotide
ggcgggaccuucgcucccg

SEQ ID NO: 1470298 - RNA, 19 nt, Artificial Sequence
  Description of Artificial Sequence: Synthetic oligonucleotide
gaugggcacucgcugucuu

SEQ ID NO: 1470299 - RNA, 19 nt, Artificial Sequence
  Description of Artificial Sequence: Synthetic oligonucleotide
ggguggcaggcugauggug

SEQ ID NO: 1470300 - RNA, 19 nt, Artificial Sequence
  Description of Artificial Sequence: Synthetic oligonucleotide
gaccuucgcucccgcucca

SEQ ID NO: 1470301 - RNA, 19 nt, Artificial Sequence
  Description of Artificial Sequence: Synthetic oligonucleotide
cacagccgugucgagcaga

SEQ ID NO: 1470302 - RNA, 19 nt, Artificial Sequence
  Description of Artificial Sequence: Synthetic oligonucleotide
cgugucgagcagagagagg

SEQ ID NO: 1470303 - RNA, 19 nt, Artificial Sequence
  Description of Artificial Sequence: Synthetic oligonucleotide
aucuuggguugugggguua

SEQ ID NO: 1470304 - RNA, 19 nt, Artificial Sequence
  Description of Artificial Sequence: Synthetic oligonucleotide
acccugccaucacggcaga

SEQ ID NO: 1470305 - RNA, 19 nt, Artificial Sequence
  Description of Artificial Sequence: Synthetic oligonucleotide
ggccuagguugagacacca

SEQ ID NO: 1470306 - RNA, 19 nt, Artificial Sequence
  Description of Artificial Sequence: Synthetic oligonucleotide
gcaggaccguggcggguag

SEQ ID NO: 1470307 - RNA, 19 nt, Artificial Sequence
  Description of Artificial Sequence: Synthetic oligonucleotide
cuuggguugugggguuaga

SEQ ID NO: 1470308 - RNA, 19 nt, Artificial Sequence
  Description of Artificial Sequence: Synthetic oligonucleotide
ccgcaggaaauggggacag

SEQ ID NO: 1470309 - RNA, 19 nt, Artificial Sequence
  Description of Artificial Sequence: Synthetic oligonucleotide
ggugggguucugacucagc

SEQ ID NO: 1470310 - RNA, 19 nt, Artificial Sequence
  Description of Artificial Sequence: Synthetic oligonucleotide
ccuuacuguugagcugggc

SEQ ID NO: 1470311 - RNA, 19 nt, Artificial Sequence
  Description of Artificial Sequence: Synthetic oligonucleotide
gggguucccgcaaccggug

SEQ ID NO: 1470312 - RNA, 19 nt, Artificial Sequence
  Description of Artificial Sequence: Synthetic oligonucleotide
acauggggagucaguucuu

SEQ ID NO: 1470313 - RNA, 19 nt, Artificial Sequence
  Description of Artificial Sequence: Synthetic oligonucleotide
gcuccgugccuguuccaga

SEQ ID NO: 1470314 - RNA, 19 nt, Artificial Sequence
  Description of Artificial Sequence: Synthetic oligonucleotide
cagggcccgagagcccagc

SEQ ID NO: 1470315 - RNA, 19 nt, Artificial Sequence
  Description of Artificial Sequence: Synthetic oligonucleotide
gcgggcacggucagugaug

SEQ ID NO: 1470316 - RNA, 19 nt, Artificial Sequence
  Description of Artificial Sequence: Synthetic oligonucleotide
cccaaagggcaggaccaac

SEQ ID NO: 1470317 - RNA, 19 nt, Artificial Sequence
  Description of Artificial Sequence: Synthetic oligonucleotide
gccgugucgagcagagaga

SEQ ID NO: 1470318 - RNA, 19 nt, Artificial Sequence
  Description of Artificial Sequence: Synthetic oligonucleotide
gcaguagccuggagguaca

SEQ ID NO: 1470319 - RNA, 19 nt, Artificial Sequence
  Description of Artificial Sequence: Synthetic oligonucleotide
gcacggggcuuccuccaca

SEQ ID NO: 1470320 - RNA, 19 nt, Artificial Sequence
  Description of Artificial Sequence: Synthetic oligonucleotide
uggagggaggcgggaccuu

SEQ ID NO: 1470321 - RNA, 19 nt, Artificial Sequence
  Description of Artificial Sequence: Synthetic oligonucleotide
aggggcaguuucggaugau

SEQ ID NO: 1470322 - RNA, 19 nt, Artificial Sequence
  Description of Artificial Sequence: Synthetic oligonucleotide
gcaccauuacauggggagu

SEQ ID NO: 1470323 - RNA, 19 nt, Artificial Sequence
  Description of Artificial Sequence: Synthetic oligonucleotide
guaggagcugguagcccau

SEQ ID NO: 1470324 - RNA, 19 nt, Artificial Sequence
  Description of Artificial Sequence: Synthetic oligonucleotide
gggcacggucagugaugag

SEQ ID NO: 1470325 - RNA, 19 nt, Artificial Sequence
  Description of Artificial Sequence: Synthetic oligonucleotide
ggcaggaccguggcgggua

SEQ ID NO: 1470326 - RNA, 19 nt, Artificial Sequence
  Description of Artificial Sequence: Synthetic oligonucleotide
ccuuggugggguucugacu

SEQ ID NO: 1470327 - RNA, 19 nt, Artificial Sequence
  Description of Artificial Sequence: Synthetic oligonucleotide
ccgcaaccggugccgggcc

SEQ ID NO: 1470328 - RNA, 19 nt, Artificial Sequence
  Description of Artificial Sequence: Synthetic oligonucleotide
gagguacagucaggucccu

SEQ ID NO: 1470329 - RNA, 19 nt, Artificial Sequence
  Description of Artificial Sequence: Synthetic oligonucleotide
ggguucugacucagccauc

SEQ ID NO: 1470330 - RNA, 19 nt, Artificial Sequence
  Description of Artificial Sequence: Synthetic oligonucleotide
ccacagccgugucgagcag

SEQ ID NO: 1470331 - RNA, 19 nt, Artificial Sequence
  Description of Artificial Sequence: Synthetic oligonucleotide
ggccuugcacggggcuucc

SEQ ID NO: 1470332 - RNA, 19 nt, Artificial Sequence
  Description of Artificial Sequence: Synthetic oligonucleotide
gccuagguugagacaccaa

SEQ ID NO: 1470333 - RNA, 19 nt, Artificial Sequence
  Description of Artificial Sequence: Synthetic oligonucleotide
cgacgaagugccacggggu

SEQ ID NO: 1470334 - RNA, 19 nt, Artificial Sequence
  Description of Artificial Sequence: Synthetic oligonucleotide
gccaucguucucguagcau

SEQ ID NO: 1470335 - RNA, 19 nt, Artificial Sequence
  Description of Artificial Sequence: Synthetic oligonucleotide
cugcgggaagaugggcacu

SEQ ID NO: 1470336 - RNA, 19 nt, Artificial Sequence
  Description of Artificial Sequence: Synthetic oligonucleotide
guccugucggcaggaccgu

SEQ ID NO: 1470337 - RNA, 19 nt, Artificial Sequence
  Description of Artificial Sequence: Synthetic oligonucleotide
cgggcacggucagugauga

SEQ ID NO: 1470338 - RNA, 19 nt, Artificial Sequence
  Description of Artificial Sequence: Synthetic oligonucleotide
cagccgugucgagcagaga

SEQ ID NO: 1470339 - RNA, 19 nt, Artificial Sequence
  Description of Artificial Sequence: Synthetic oligonucleotide
ccuugguacucugggaguu

SEQ ID NO: 1470340 - RNA, 19 nt, Artificial Sequence
  Description of Artificial Sequence: Synthetic oligonucleotide
cccagacgacgaagugcca

SEQ ID NO: 1470341 - RNA, 19 nt, Artificial Sequence
  Description of Artificial Sequence: Synthetic oligonucleotide
cagggccauuuccaaccuu

SEQ ID NO: 1470342 - RNA, 19 nt, Artificial Sequence
  Description of Artificial Sequence: Synthetic oligonucleotide
gccaggcuucugaucagau

SEQ ID NO: 1470343 - RNA, 19 nt, Artificial Sequence
  Description of Artificial Sequence: Synthetic oligonucleotide
cucgcaccuuggugggguu

SEQ ID NO: 1470344 - RNA, 19 nt, Artificial Sequence
  Description of Artificial Sequence: Synthetic oligonucleotide
cccuagcagcuggcgcagc

SEQ ID NO: 1470345 - RNA, 19 nt, Artificial Sequence
  Description of Artificial Sequence: Synthetic oligonucleotide
ggggugccacugauguggu

SEQ ID NO: 1470346 - RNA, 19 nt, Artificial Sequence
  Description of Artificial Sequence: Synthetic oligonucleotide
ccguggcggguagggcagg

SEQ ID NO: 1470347 - RNA, 19 nt, Artificial Sequence
  Description of Artificial Sequence: Synthetic oligonucleotide
caccacccuuuggguagaa

SEQ ID NO: 1470348 - RNA, 19 nt, Artificial Sequence
  Description of Artificial Sequence: Synthetic oligonucleotide
ggcagcgguaggagcuggu

SEQ ID NO: 1470349 - RNA, 19 nt, Artificial Sequence
  Description of Artificial Sequence: Synthetic oligonucleotide
cgaagugccacgggguaau

SEQ ID NO: 1470350 - RNA, 19 nt, Artificial Sequence
  Description of Artificial Sequence: Synthetic oligonucleotide
gggugccacugaugugguu

SEQ ID NO: 1470351 - RNA, 19 nt, Artificial Sequence
  Description of Artificial Sequence: Synthetic oligonucleotide
cguggcggguagggcagga

SEQ ID NO: 1470352 - RNA, 19 nt, Artificial Sequence
  Description of Artificial Sequence: Synthetic oligonucleotide
cccugccaucacggcagaa

SEQ ID NO: 1470353 - RNA, 19 nt, Artificial Sequence
  Description of Artificial Sequence: Synthetic oligonucleotide
gccuugcacggggcuuccu

SEQ ID NO: 1470354 - RNA, 19 nt, Artificial Sequence
  Description of Artificial Sequence: Synthetic oligonucleotide
gcgcagccccucagcuacu

SEQ ID NO: 1470355 - RNA, 19 nt, Artificial Sequence
  Description of Artificial Sequence: Synthetic oligonucleotide
ccggggcuccgugccuguu

SEQ ID NO: 1470356 - RNA, 19 nt, Artificial Sequence
  Description of Artificial Sequence: Synthetic oligonucleotide
uuuauucuaacacaguaug

SEQ ID NO: 1470357 - RNA, 19 nt, Artificial Sequence
  Description of Artificial Sequence: Synthetic oligonucleotide
aauauauuucgccucauca

SEQ ID NO: 1470358 - RNA, 19 nt, Artificial Sequence
  Description of Artificial Sequence: Synthetic oligonucleotide
ucuaauccaaauuuggucc

SEQ ID NO: 1470359 - RNA, 19 nt, Artificial Sequence
  Description of Artificial Sequence: Synthetic oligonucleotide
uauauuucgccucaucaag

SEQ ID NO: 1470360 - RNA, 19 nt, Artificial Sequence
  Description of Artificial Sequence: Synthetic oligonucleotide
ugauacugggaucacaucc

SEQ ID NO: 1470361 - RNA, 19 nt, Artificial Sequence
  Description of Artificial Sequence: Synthetic oligonucleotide
acaccauucuuuuaaggcc

SEQ ID NO: 1470362 - RNA, 19 nt, Artificial Sequence
  Description of Artificial Sequence: Synthetic oligonucleotide
cuuuuaaggccuucgaugg

SEQ ID NO: 1470363 - RNA, 19 nt, Artificial Sequence
  Description of Artificial Sequence: Synthetic oligonucleotide
uucaaugcgccauugauug

SEQ ID NO: 1470364 - RNA, 19 nt, Artificial Sequence
  Description of Artificial Sequence: Synthetic oligonucleotide
ucuucacuagcuaugauga

SEQ ID NO: 1470365 - RNA, 19 nt, Artificial Sequence
  Description of Artificial Sequence: Synthetic oligonucleotide
caaauuuggucccaaagcg

SEQ ID NO: 1470366 - RNA, 19 nt, Artificial Sequence
  Description of Artificial Sequence: Synthetic oligonucleotide
uuauguuguauuuugcagc

SEQ ID NO: 1470367 - RNA, 19 nt, Artificial Sequence
  Description of Artificial Sequence: Synthetic oligonucleotide
uggcuauugacaaagacac

SEQ ID NO: 1470368 - RNA, 19 nt, Artificial Sequence
  Description of Artificial Sequence: Synthetic oligonucleotide
aucuaauccaaauuugguc

SEQ ID NO: 1470369 - RNA, 19 nt, Artificial Sequence
  Description of Artificial Sequence: Synthetic oligonucleotide
uaauucgugaaccaagugu

SEQ ID NO: 1470370 - RNA, 19 nt, Artificial Sequence
  Description of Artificial Sequence: Synthetic oligonucleotide
gaaccuaauauauuucgcc

SEQ ID NO: 1470371 - RNA, 19 nt, Artificial Sequence
  Description of Artificial Sequence: Synthetic oligonucleotide
gacaccauucuuuuaaggc

SEQ ID NO: 1470372 - RNA, 19 nt, Artificial Sequence
  Description of Artificial Sequence: Synthetic oligonucleotide
ugggaucacauccagauac

SEQ ID NO: 1470373 - RNA, 19 nt, Artificial Sequence
  Description of Artificial Sequence: Synthetic oligonucleotide
ucacuagcuaugaugacag

SEQ ID NO: 1470374 - RNA, 19 nt, Artificial Sequence
  Description of Artificial Sequence: Synthetic oligonucleotide
aauucgugaaccaagugug

SEQ ID NO: 1470375 - RNA, 19 nt, Artificial Sequence
  Description of Artificial Sequence: Synthetic oligonucleotide
uguuaggcagguaugaagu

SEQ ID NO: 1470376 - RNA, 19 nt, Artificial Sequence
  Description of Artificial Sequence: Synthetic oligonucleotide
guaugaaguggacagaacc

SEQ ID NO: 1470377 - RNA, 19 nt, Artificial Sequence
  Description of Artificial Sequence: Synthetic oligonucleotide
acaucaaccaaauccaugu

SEQ ID NO: 1470378 - RNA, 19 nt, Artificial Sequence
  Description of Artificial Sequence: Synthetic oligonucleotide
ucuaacacaguauguuagg

SEQ ID NO: 1470379 - RNA, 19 nt, Artificial Sequence
  Description of Artificial Sequence: Synthetic oligonucleotide
ugaucuguuaauccugccc

SEQ ID NO: 1470380 - RNA, 19 nt, Artificial Sequence
  Description of Artificial Sequence: Synthetic oligonucleotide
auuuccucauuaaaguagc

SEQ ID NO: 1470381 - RNA, 19 nt, Artificial Sequence
  Description of Artificial Sequence: Synthetic oligonucleotide
aauggguaccauuuccuca

SEQ ID NO: 1470382 - RNA, 19 nt, Artificial Sequence
  Description of Artificial Sequence: Synthetic oligonucleotide
aucguuagcggcuuuccac

SEQ ID NO: 1470383 - RNA, 19 nt, Artificial Sequence
  Description of Artificial Sequence: Synthetic oligonucleotide
aguagcucacaacucuggc

SEQ ID NO: 1470384 - RNA, 19 nt, Artificial Sequence
  Description of Artificial Sequence: Synthetic oligonucleotide
uccagcuuucuucaaugcg

SEQ ID NO: 1470385 - RNA, 19 nt, Artificial Sequence
  Description of Artificial Sequence: Synthetic oligonucleotide
aguacuggggagcgaaagc

SEQ ID NO: 1470386 - RNA, 19 nt, Artificial Sequence
  Description of Artificial Sequence: Synthetic oligonucleotide
accuaauauauuucgccuc

SEQ ID NO: 1470387 - RNA, 19 nt, Artificial Sequence
  Description of Artificial Sequence: Synthetic oligonucleotide
agaucuaauccaaauuugg

SEQ ID NO: 1470388 - RNA, 19 nt, Artificial Sequence
  Description of Artificial Sequence: Synthetic oligonucleotide
ugacauccacucacgaugg

SEQ ID NO: 1470389 - RNA, 19 nt, Artificial Sequence
  Description of Artificial Sequence: Synthetic oligonucleotide
auaaacacaccucguagca

SEQ ID NO: 1470390 - RNA, 19 nt, Artificial Sequence
  Description of Artificial Sequence: Synthetic oligonucleotide
gaucuguuaauccugccca

SEQ ID NO: 1470391 - RNA, 19 nt, Artificial Sequence
  Description of Artificial Sequence: Synthetic oligonucleotide
guauuuugcagcaagguuc

SEQ ID NO: 1470392 - RNA, 19 nt, Artificial Sequence
  Description of Artificial Sequence: Synthetic oligonucleotide
agaaccuaauauauuucgc

SEQ ID NO: 1470393 - RNA, 19 nt, Artificial Sequence
  Description of Artificial Sequence: Synthetic oligonucleotide
uauagugguggcuauugac

SEQ ID NO: 1470394 - RNA, 19 nt, Artificial Sequence
  Description of Artificial Sequence: Synthetic oligonucleotide
caaguaaagguggucaccg

SEQ ID NO: 1470395 - RNA, 19 nt, Artificial Sequence
  Description of Artificial Sequence: Synthetic oligonucleotide
ucgaugguggguuuuauuc

SEQ ID NO: 1470396 - RNA, 19 nt, Artificial Sequence
  Description of Artificial Sequence: Synthetic oligonucleotide
aaggguguucgcuuagcag

SEQ ID NO: 1470397 - RNA, 19 nt, Artificial Sequence
  Description of Artificial Sequence: Synthetic oligonucleotide
uguauuuugcagcaagguu

SEQ ID NO: 1470398 - RNA, 19 nt, Artificial Sequence
  Description of Artificial Sequence: Synthetic oligonucleotide
agugauucucgauccagag

SEQ ID NO: 1470399 - RNA, 19 nt, Artificial Sequence
  Description of Artificial Sequence: Synthetic oligonucleotide
ucuucaaugcgccauugau

SEQ ID NO: 1470400 - RNA, 19 nt, Artificial Sequence
  Description of Artificial Sequence: Synthetic oligonucleotide
uuaaggccuucgauggugg

SEQ ID NO: 1470401 - RNA, 19 nt, Artificial Sequence
  Description of Artificial Sequence: Synthetic oligonucleotide
cuccguaagcuccaaaggg

SEQ ID NO: 1470402 - RNA, 19 nt, Artificial Sequence
  Description of Artificial Sequence: Synthetic oligonucleotide
uuaauucgugaaccaagug

SEQ ID NO: 1470403 - RNA, 19 nt, Artificial Sequence
  Description of Artificial Sequence: Synthetic oligonucleotide
acuguugcaguagugcuac

SEQ ID NO: 1470404 - RNA, 19 nt, Artificial Sequence
  Description of Artificial Sequence: Synthetic oligonucleotide
uaacacaguauguuaggca

SEQ ID NO: 1470405 - RNA, 19 nt, Artificial Sequence
  Description of Artificial Sequence: Synthetic oligonucleotide
cuaauccaaauuugguccc

SEQ ID NO: 1470406 - RNA, 19 nt, Artificial Sequence
  Description of Artificial Sequence: Synthetic oligonucleotide
aguaaagguggucaccgug

SEQ ID NO: 1470407 - RNA, 19 nt, Artificial Sequence
  Description of Artificial Sequence: Synthetic oligonucleotide
uucacuagcuaugaugaca

SEQ ID NO: 1470408 - RNA, 19 nt, Artificial Sequence
  Description of Artificial Sequence: Synthetic oligonucleotide
guuuuauucuaacacagua

SEQ ID NO: 1470409 - RNA, 19 nt, Artificial Sequence
  Description of Artificial Sequence: Synthetic oligonucleotide
agccuauugagggugaggg

SEQ ID NO: 1470410 - RNA, 19 nt, Artificial Sequence
  Description of Artificial Sequence: Synthetic oligonucleotide
gagcuuaacaugcugaucu

SEQ ID NO: 1470411 - RNA, 19 nt, Artificial Sequence
  Description of Artificial Sequence: Synthetic oligonucleotide
aacccacaugccuugcuag

SEQ ID NO: 1470412 - RNA, 19 nt, Artificial Sequence
  Description of Artificial Sequence: Synthetic oligonucleotide
ucaaggcuuggucaauugc

SEQ ID NO: 1470413 - RNA, 19 nt, Artificial Sequence
  Description of Artificial Sequence: Synthetic oligonucleotide
gcagguaugaaguggacag

SEQ ID NO: 1470414 - RNA, 19 nt, Artificial Sequence
  Description of Artificial Sequence: Synthetic oligonucleotide
uguuccaggguuguuuggg

SEQ ID NO: 1470415 - RNA, 19 nt, Artificial Sequence
  Description of Artificial Sequence: Synthetic oligonucleotide
uccguaagcuccaaagggu

SEQ ID NO: 1470416 - RNA, 19 nt, Artificial Sequence
  Description of Artificial Sequence: Synthetic oligonucleotide
accuccguaagcuccaaag

SEQ ID NO: 1470417 - RNA, 19 nt, Artificial Sequence
  Description of Artificial Sequence: Synthetic oligonucleotide
accaagugugcagugauuc

SEQ ID NO: 1470418 - RNA, 19 nt, Artificial Sequence
  Description of Artificial Sequence: Synthetic oligonucleotide
aguggacagaaccuaauau

SEQ ID NO: 1470419 - RNA, 19 nt, Artificial Sequence
  Description of Artificial Sequence: Synthetic oligonucleotide
ucccaaagcgcacauuucu

SEQ ID NO: 1470420 - RNA, 19 nt, Artificial Sequence
  Description of Artificial Sequence: Synthetic oligonucleotide
uaauccugcccacaaagua

SEQ ID NO: 1470421 - RNA, 19 nt, Artificial Sequence
  Description of Artificial Sequence: Synthetic oligonucleotide
cacucgcaaacccacaugc

SEQ ID NO: 1470422 - RNA, 19 nt, Artificial Sequence
  Description of Artificial Sequence: Synthetic oligonucleotide
auccaagccuuucugaaca

SEQ ID NO: 1470423 - RNA, 19 nt, Artificial Sequence
  Description of Artificial Sequence: Synthetic oligonucleotide
aagugugcagugauucucg

SEQ ID NO: 1470424 - RNA, 19 nt, Artificial Sequence
  Description of Artificial Sequence: Synthetic oligonucleotide
gagaucuaauccaaauuug

SEQ ID NO: 1470425 - RNA, 19 nt, Artificial Sequence
  Description of Artificial Sequence: Synthetic oligonucleotide
aaagcgcacauuucucaca

SEQ ID NO: 1470426 - RNA, 19 nt, Artificial Sequence
  Description of Artificial Sequence: Synthetic oligonucleotide
agccacagagccuauugag

SEQ ID NO: 1470427 - RNA, 19 nt, Artificial Sequence
  Description of Artificial Sequence: Synthetic oligonucleotide
aauuguuccaggguuguuu

SEQ ID NO: 1470428 - RNA, 19 nt, Artificial Sequence
  Description of Artificial Sequence: Synthetic oligonucleotide
ucguuagcggcuuuccacc

SEQ ID NO: 1470429 - RNA, 19 nt, Artificial Sequence
  Description of Artificial Sequence: Synthetic oligonucleotide
aaguagcucacaacucugg

SEQ ID NO: 1470430 - RNA, 19 nt, Artificial Sequence
  Description of Artificial Sequence: Synthetic oligonucleotide
accucggcgccuuaauucg

SEQ ID NO: 1470431 - RNA, 19 nt, Artificial Sequence
  Description of Artificial Sequence: Synthetic oligonucleotide
aaaguagcucacaacucug

SEQ ID NO: 1470432 - RNA, 19 nt, Artificial Sequence
  Description of Artificial Sequence: Synthetic oligonucleotide
ugcgccauugauugcagga

SEQ ID NO: 1470433 - RNA, 19 nt, Artificial Sequence
  Description of Artificial Sequence: Synthetic oligonucleotide
ugggccaauacccaugaua

SEQ ID NO: 1470434 - RNA, 19 nt, Artificial Sequence
  Description of Artificial Sequence: Synthetic oligonucleotide
auauuucgccucaucaagg

SEQ ID NO: 1470435 - RNA, 19 nt, Artificial Sequence
  Description of Artificial Sequence: Synthetic oligonucleotide
agccacgauaaacacaccu

SEQ ID NO: 1470436 - RNA, 19 nt, Artificial Sequence
  Description of Artificial Sequence: Synthetic oligonucleotide
aucuguuaauccugcccac

SEQ ID NO: 1470437 - RNA, 19 nt, Artificial Sequence
  Description of Artificial Sequence: Synthetic oligonucleotide
uuucgccucaucaaggcuu

SEQ ID NO: 1470438 - RNA, 19 nt, Artificial Sequence
  Description of Artificial Sequence: Synthetic oligonucleotide
uguucgcuuagcagccacg

SEQ ID NO: 1470439 - RNA, 19 nt, Artificial Sequence
  Description of Artificial Sequence: Synthetic oligonucleotide
uauuuuccaccucggcgcc

SEQ ID NO: 1470440 - RNA, 19 nt, Artificial Sequence
  Description of Artificial Sequence: Synthetic oligonucleotide
acacaagacgacuucugca

SEQ ID NO: 1470441 - RNA, 19 nt, Artificial Sequence
  Description of Artificial Sequence: Synthetic oligonucleotide
agucauucccauggggagc

SEQ ID NO: 1470442 - RNA, 19 nt, Artificial Sequence
  Description of Artificial Sequence: Synthetic oligonucleotide
cuugagaagaccuccguaa

SEQ ID NO: 1470443 - RNA, 19 nt, Artificial Sequence
  Description of Artificial Sequence: Synthetic oligonucleotide
acaaaguagcucacaacuc

SEQ ID NO: 1470444 - RNA, 19 nt, Artificial Sequence
  Description of Artificial Sequence: Synthetic oligonucleotide
cacauugcuuuuacugggg

SEQ ID NO: 1470445 - RNA, 19 nt, Artificial Sequence
  Description of Artificial Sequence: Synthetic oligonucleotide
augacauugcccacgauga

SEQ ID NO: 1470446 - RNA, 19 nt, Artificial Sequence
  Description of Artificial Sequence: Synthetic oligonucleotide
ucaccuggcuaccuguucu

SEQ ID NO: 1470447 - RNA, 19 nt, Artificial Sequence
  Description of Artificial Sequence: Synthetic oligonucleotide
agcgccaugguaaaggucu

SEQ ID NO: 1470448 - RNA, 19 nt, Artificial Sequence
  Description of Artificial Sequence: Synthetic oligonucleotide
acaagacgacuucugcauc

SEQ ID NO: 1470449 - RNA, 19 nt, Artificial Sequence
  Description of Artificial Sequence: Synthetic oligonucleotide
uuagcggcuuuccaccucu

SEQ ID NO: 1470450 - RNA, 19 nt, Artificial Sequence
  Description of Artificial Sequence: Synthetic oligonucleotide
aaguggacagaaccuaaua

SEQ ID NO: 1470451 - RNA, 19 nt, Artificial Sequence
  Description of Artificial Sequence: Synthetic oligonucleotide
caagucaguagcagagaag

SEQ ID NO: 1470452 - RNA, 19 nt, Artificial Sequence
  Description of Artificial Sequence: Synthetic oligonucleotide
gugcguaucugucacaguc

SEQ ID NO: 1470453 - RNA, 19 nt, Artificial Sequence
  Description of Artificial Sequence: Synthetic oligonucleotide
cacacaagacgacuucugc

SEQ ID NO: 1470454 - RNA, 19 nt, Artificial Sequence
  Description of Artificial Sequence: Synthetic oligonucleotide
cacaucaaccaaauccaug

SEQ ID NO: 1470455 - RNA, 19 nt, Artificial Sequence
  Description of Artificial Sequence: Synthetic oligonucleotide
gucaaugguuucugguggg

SEQ ID NO: 1470456 - RNA, 19 nt, Artificial Sequence
  Description of Artificial Sequence: Synthetic oligonucleotide
uuaacaugcugaucuguua

SEQ ID NO: 1470457 - RNA, 19 nt, Artificial Sequence
  Description of Artificial Sequence: Synthetic oligonucleotide
ucgcuuagcagccacgaua

SEQ ID NO: 1470458 - RNA, 19 nt, Artificial Sequence
  Description of Artificial Sequence: Synthetic oligonucleotide
uccaggguuguuuggggcc

SEQ ID NO: 1470459 - RNA, 19 nt, Artificial Sequence
  Description of Artificial Sequence: Synthetic oligonucleotide
guaaagguggucaccgugc

SEQ ID NO: 1470460 - RNA, 19 nt, Artificial Sequence
  Description of Artificial Sequence: Synthetic oligonucleotide
aauccugcccacaaaguau

SEQ ID NO: 1470461 - RNA, 19 nt, Artificial Sequence
  Description of Artificial Sequence: Synthetic oligonucleotide
gauccaagccuuucugaac

SEQ ID NO: 1470462 - RNA, 19 nt, Artificial Sequence
  Description of Artificial Sequence: Synthetic oligonucleotide
uccgaugcaagcugacccc

SEQ ID NO: 1470463 - RNA, 19 nt, Artificial Sequence
  Description of Artificial Sequence: Synthetic oligonucleotide
gacagucccuucuuucuug

SEQ ID NO: 1470464 - RNA, 19 nt, Artificial Sequence
  Description of Artificial Sequence: Synthetic oligonucleotide
ugcaugacauugcccacga

SEQ ID NO: 1470465 - RNA, 19 nt, Artificial Sequence
  Description of Artificial Sequence: Synthetic oligonucleotide
ucacgauggacuggaaacc

SEQ ID NO: 1470466 - RNA, 19 nt, Artificial Sequence
  Description of Artificial Sequence: Synthetic oligonucleotide
uguuacuccgcguggcugu

SEQ ID NO: 1470467 - RNA, 19 nt, Artificial Sequence
  Description of Artificial Sequence: Synthetic oligonucleotide
agguucucugcagucauuc

SEQ ID NO: 1470468 - RNA, 19 nt, Artificial Sequence
  Description of Artificial Sequence: Synthetic oligonucleotide
guggcuauugacaaagaca

SEQ ID NO: 1470469 - RNA, 19 nt, Artificial Sequence
  Description of Artificial Sequence: Synthetic oligonucleotide
ugcuagguaugcugcaucu

SEQ ID NO: 1470470 - RNA, 19 nt, Artificial Sequence
  Description of Artificial Sequence: Synthetic oligonucleotide
cagauuuccugacauccac

SEQ ID NO: 1470471 - RNA, 19 nt, Artificial Sequence
  Description of Artificial Sequence: Synthetic oligonucleotide
gauacugggaucacaucca

SEQ ID NO: 1470472 - RNA, 19 nt, Artificial Sequence
  Description of Artificial Sequence: Synthetic oligonucleotide
ugcguaucugucacagucu

SEQ ID NO: 1470473 - RNA, 19 nt, Artificial Sequence
  Description of Artificial Sequence: Synthetic oligonucleotide
uucuugaacacuggaggga

SEQ ID NO: 1470474 - RNA, 19 nt, Artificial Sequence
  Description of Artificial Sequence: Synthetic oligonucleotide
ccuuaauucgugaaccaag

SEQ ID NO: 1470475 - RNA, 19 nt, Artificial Sequence
  Description of Artificial Sequence: Synthetic oligonucleotide
auggguaccauuuccucau

SEQ ID NO: 1470476 - RNA, 19 nt, Artificial Sequence
  Description of Artificial Sequence: Synthetic oligonucleotide
cagggcaaugccuugacca

SEQ ID NO: 1470477 - RNA, 19 nt, Artificial Sequence
  Description of Artificial Sequence: Synthetic oligonucleotide
aguagcagagaaguccuug

SEQ ID NO: 1470478 - RNA, 19 nt, Artificial Sequence
  Description of Artificial Sequence: Synthetic oligonucleotide
gaccccacugcauauuuuc

SEQ ID NO: 1470479 - RNA, 19 nt, Artificial Sequence
  Description of Artificial Sequence: Synthetic oligonucleotide
ccacgauaaacacaccucg

SEQ ID NO: 1470480 - RNA, 19 nt, Artificial Sequence
  Description of Artificial Sequence: Synthetic oligonucleotide
uucgugaaccaagugugca

SEQ ID NO: 1470481 - RNA, 19 nt, Artificial Sequence
  Description of Artificial Sequence: Synthetic oligonucleotide
auacugggaucacauccag

SEQ ID NO: 1470482 - RNA, 19 nt, Artificial Sequence
  Description of Artificial Sequence: Synthetic oligonucleotide
cuagguaugcugcaucuga

SEQ ID NO: 1470483 - RNA, 19 nt, Artificial Sequence
  Description of Artificial Sequence: Synthetic oligonucleotide
uuugggacucccacucgca

SEQ ID NO: 1470484 - RNA, 19 nt, Artificial Sequence
  Description of Artificial Sequence: Synthetic oligonucleotide
uucucgauccagagccucc

SEQ ID NO: 1470485 - RNA, 19 nt, Artificial Sequence
  Description of Artificial Sequence: Synthetic oligonucleotide
uucuucaaugcgccauuga

SEQ ID NO: 1470486 - RNA, 19 nt, Artificial Sequence
  Description of Artificial Sequence: Synthetic oligonucleotide
aggcguuccccgcagugac

SEQ ID NO: 1470487 - RNA, 19 nt, Artificial Sequence
  Description of Artificial Sequence: Synthetic oligonucleotide
uguuaauccugcccacaaa

SEQ ID NO: 1470488 - RNA, 19 nt, Artificial Sequence
  Description of Artificial Sequence: Synthetic oligonucleotide
uucgccucaucaaggcuug

SEQ ID NO: 1470489 - RNA, 19 nt, Artificial Sequence
  Description of Artificial Sequence: Synthetic oligonucleotide
gagcgaaagcuucauucac

SEQ ID NO: 1470490 - RNA, 19 nt, Artificial Sequence
  Description of Artificial Sequence: Synthetic oligonucleotide
ucaugcucucuguuccucc

SEQ ID NO: 1470491 - RNA, 19 nt, Artificial Sequence
  Description of Artificial Sequence: Synthetic oligonucleotide
uuuggggccgagcaugcuc

SEQ ID NO: 1470492 - RNA, 19 nt, Artificial Sequence
  Description of Artificial Sequence: Synthetic oligonucleotide
ucauuaaaguagccagcau

SEQ ID NO: 1470493 - RNA, 19 nt, Artificial Sequence
  Description of Artificial Sequence: Synthetic oligonucleotide
acgauaaacacaccucgua

SEQ ID NO: 1470494 - RNA, 19 nt, Artificial Sequence
  Description of Artificial Sequence: Synthetic oligonucleotide
uguuuggggccgagcaugc

SEQ ID NO: 1470495 - RNA, 19 nt, Artificial Sequence
  Description of Artificial Sequence: Synthetic oligonucleotide
uucaccucaauggguacca

SEQ ID NO: 1470496 - RNA, 19 nt, Artificial Sequence
  Description of Artificial Sequence: Synthetic oligonucleotide
gugauucucgauccagagc

SEQ ID NO: 1470497 - RNA, 19 nt, Artificial Sequence
  Description of Artificial Sequence: Synthetic oligonucleotide
cacaccucguagcagcgcc

SEQ ID NO: 1470498 - RNA, 19 nt, Artificial Sequence
  Description of Artificial Sequence: Synthetic oligonucleotide
ucuguuacuccgcguggcu

SEQ ID NO: 1470499 - RNA, 19 nt, Artificial Sequence
  Description of Artificial Sequence: Synthetic oligonucleotide
aacacaccucguagcagcg

SEQ ID NO: 1470500 - RNA, 19 nt, Artificial Sequence
  Description of Artificial Sequence: Synthetic oligonucleotide
gcagccacgauaaacacac

SEQ ID NO: 1470501 - RNA, 19 nt, Artificial Sequence
  Description of Artificial Sequence: Synthetic oligonucleotide
gacucccacucgcaaaccc

SEQ ID NO: 1470502 - RNA, 19 nt, Artificial Sequence
  Description of Artificial Sequence: Synthetic oligonucleotide
acccacaugccuugcuagg

SEQ ID NO: 1470503 - RNA, 19 nt, Artificial Sequence
  Description of Artificial Sequence: Synthetic oligonucleotide
auauagugguggcuauuga

SEQ ID NO: 1470504 - RNA, 19 nt, Artificial Sequence
  Description of Artificial Sequence: Synthetic oligonucleotide
gggagcgaaagcuucauuc

SEQ ID NO: 1470505 - RNA, 19 nt, Artificial Sequence
  Description of Artificial Sequence: Synthetic oligonucleotide
ucugcuuauguuguauuuu

SEQ ID NO: 1470506 - RNA, 19 nt, Artificial Sequence
  Description of Artificial Sequence: Synthetic oligonucleotide
cuuaauucgugaaccaagu

SEQ ID NO: 1470507 - RNA, 19 nt, Artificial Sequence
  Description of Artificial Sequence: Synthetic oligonucleotide
ucuguuaauccugcccaca

SEQ ID NO: 1470508 - RNA, 19 nt, Artificial Sequence
  Description of Artificial Sequence: Synthetic oligonucleotide
uagguaugcugcaucugaa

SEQ ID NO: 1470509 - RNA, 19 nt, Artificial Sequence
  Description of Artificial Sequence: Synthetic oligonucleotide
aauggcgccuccauucaca

SEQ ID NO: 1470510 - RNA, 19 nt, Artificial Sequence
  Description of Artificial Sequence: Synthetic oligonucleotide
gcuuauguuguauuuugca

SEQ ID NO: 1470511 - RNA, 19 nt, Artificial Sequence
  Description of Artificial Sequence: Synthetic oligonucleotide
cuccgaucucuuuugggac

SEQ ID NO: 1470512 - RNA, 19 nt, Artificial Sequence
  Description of Artificial Sequence: Synthetic oligonucleotide
guaugcugcaucugaagaa

SEQ ID NO: 1470513 - RNA, 19 nt, Artificial Sequence
  Description of Artificial Sequence: Synthetic oligonucleotide
agcuuaacaugcugaucug

SEQ ID NO: 1470514 - RNA, 19 nt, Artificial Sequence
  Description of Artificial Sequence: Synthetic oligonucleotide
uccuugagaagaccuccgu

SEQ ID NO: 1470515 - RNA, 19 nt, Artificial Sequence
  Description of Artificial Sequence: Synthetic oligonucleotide
gguaaaggucuguuacucc

SEQ ID NO: 1470516 - RNA, 19 nt, Artificial Sequence
  Description of Artificial Sequence: Synthetic oligonucleotide
acccaugauacugggauca

SEQ ID NO: 1470517 - RNA, 19 nt, Artificial Sequence
  Description of Artificial Sequence: Synthetic oligonucleotide
guagcagagaaguccuuga

SEQ ID NO: 1470518 - RNA, 19 nt, Artificial Sequence
  Description of Artificial Sequence: Synthetic oligonucleotide
auuucgccucaucaaggcu

SEQ ID NO: 1470519 - RNA, 19 nt, Artificial Sequence
  Description of Artificial Sequence: Synthetic oligonucleotide
uaaggccuucgaugguggg

SEQ ID NO: 1470520 - RNA, 19 nt, Artificial Sequence
  Description of Artificial Sequence: Synthetic oligonucleotide
aauacccaugauacuggga

SEQ ID NO: 1470521 - RNA, 19 nt, Artificial Sequence
  Description of Artificial Sequence: Synthetic oligonucleotide
gggccaauacccaugauac

SEQ ID NO: 1470522 - RNA, 19 nt, Artificial Sequence
  Description of Artificial Sequence: Synthetic oligonucleotide
gcgcacauuucucacacag

SEQ ID NO: 1470523 - RNA, 19 nt, Artificial Sequence
  Description of Artificial Sequence: Synthetic oligonucleotide
uugcuagguaugcugcauc

SEQ ID NO: 1470524 - RNA, 19 nt, Artificial Sequence
  Description of Artificial Sequence: Synthetic oligonucleotide
guauguuaggcagguauga

SEQ ID NO: 1470525 - RNA, 19 nt, Artificial Sequence
  Description of Artificial Sequence: Synthetic oligonucleotide
caaaguagcucacaacucu

SEQ ID NO: 1470526 - RNA, 19 nt, Artificial Sequence
  Description of Artificial Sequence: Synthetic oligonucleotide
ggcucaugcucucuguucc

SEQ ID NO: 1470527 - RNA, 19 nt, Artificial Sequence
  Description of Artificial Sequence: Synthetic oligonucleotide
ucgcaaacccacaugccuu

SEQ ID NO: 1470528 - RNA, 19 nt, Artificial Sequence
  Description of Artificial Sequence: Synthetic oligonucleotide
caagugugcagugauucuc

SEQ ID NO: 1470529 - RNA, 19 nt, Artificial Sequence
  Description of Artificial Sequence: Synthetic oligonucleotide
gaucuaauccaaauuuggu

SEQ ID NO: 1470530 - RNA, 19 nt, Artificial Sequence
  Description of Artificial Sequence: Synthetic oligonucleotide
uccugacauccacucacga

SEQ ID NO: 1470531 - RNA, 19 nt, Artificial Sequence
  Description of Artificial Sequence: Synthetic oligonucleotide
uggcuaccuguucuguggc

SEQ ID NO: 1470532 - RNA, 19 nt, Artificial Sequence
  Description of Artificial Sequence: Synthetic oligonucleotide
uaauccaaauuugguccca

SEQ ID NO: 1470533 - RNA, 19 nt, Artificial Sequence
  Description of Artificial Sequence: Synthetic oligonucleotide
caccucggcgccuuaauuc

SEQ ID NO: 1470534 - RNA, 19 nt, Artificial Sequence
  Description of Artificial Sequence: Synthetic oligonucleotide
ugcagugauucucgaucca

SEQ ID NO: 1470535 - RNA, 19 nt, Artificial Sequence
  Description of Artificial Sequence: Synthetic oligonucleotide
aaugcgccauugauugcag

SEQ ID NO: 1470536 - RNA, 19 nt, Artificial Sequence
  Description of Artificial Sequence: Synthetic oligonucleotide
aaggucuguuacuccgcgu

SEQ ID NO: 1470537 - RNA, 19 nt, Artificial Sequence
  Description of Artificial Sequence: Synthetic oligonucleotide
agguaugaaguggacagaa

SEQ ID NO: 1470538 - RNA, 19 nt, Artificial Sequence
  Description of Artificial Sequence: Synthetic oligonucleotide
gguggcuauugacaaagac

SEQ ID NO: 1470539 - RNA, 19 nt, Artificial Sequence
  Description of Artificial Sequence: Synthetic oligonucleotide
aacugggccaauacccaug

SEQ ID NO: 1470540 - RNA, 19 nt, Artificial Sequence
  Description of Artificial Sequence: Synthetic oligonucleotide
guaccauuuccucauuaaa

SEQ ID NO: 1470541 - RNA, 19 nt, Artificial Sequence
  Description of Artificial Sequence: Synthetic oligonucleotide
acucugcaugacauugccc

SEQ ID NO: 1470542 - RNA, 19 nt, Artificial Sequence
  Description of Artificial Sequence: Synthetic oligonucleotide
agauacaaaguagcucaca

SEQ ID NO: 1470543 - RNA, 19 nt, Artificial Sequence
  Description of Artificial Sequence: Synthetic oligonucleotide
ucaaugcgccauugauugc

SEQ ID NO: 1470544 - RNA, 19 nt, Artificial Sequence
  Description of Artificial Sequence: Synthetic oligonucleotide
agggcuccgaucucuuuug

SEQ ID NO: 1470545 - RNA, 19 nt, Artificial Sequence
  Description of Artificial Sequence: Synthetic oligonucleotide
aaggcuuggucaauugcaa

SEQ ID NO: 1470546 - RNA, 19 nt, Artificial Sequence
  Description of Artificial Sequence: Synthetic oligonucleotide
cagugcguaucugucacag

SEQ ID NO: 1470547 - RNA, 19 nt, Artificial Sequence
  Description of Artificial Sequence: Synthetic oligonucleotide
uacugggaucacauccaga

SEQ ID NO: 1470548 - RNA, 19 nt, Artificial Sequence
  Description of Artificial Sequence: Synthetic oligonucleotide
acacaguauguuaggcagg

SEQ ID NO: 1470549 - RNA, 19 nt, Artificial Sequence
  Description of Artificial Sequence: Synthetic oligonucleotide
uccuccacacaagacgacu

SEQ ID NO: 1470550 - RNA, 19 nt, Artificial Sequence
  Description of Artificial Sequence: Synthetic oligonucleotide
aauccaaauuuggucccaa

SEQ ID NO: 1470551 - RNA, 19 nt, Artificial Sequence
  Description of Artificial Sequence: Synthetic oligonucleotide
accccacugcauauuuucc

SEQ ID NO: 1470552 - RNA, 19 nt, Artificial Sequence
  Description of Artificial Sequence: Synthetic oligonucleotide
cucaucaaggcuuggucaa

SEQ ID NO: 1470553 - RNA, 19 nt, Artificial Sequence
  Description of Artificial Sequence: Synthetic oligonucleotide
gagccuauugagggugagg

SEQ ID NO: 1470554 - RNA, 19 nt, Artificial Sequence
  Description of Artificial Sequence: Synthetic oligonucleotide
ucaaugguuucugguggga

SEQ ID NO: 1470555 - RNA, 19 nt, Artificial Sequence
  Description of Artificial Sequence: Synthetic oligonucleotide
agcaucguuagcggcuuuc

SEQ ID NO: 1470556 - RNA, 19 nt, Artificial Sequence
  Description of Artificial Sequence: Synthetic oligonucleotide
ucucgauccagagccuccc

SEQ ID NO: 1470557 - RNA, 19 nt, Artificial Sequence
  Description of Artificial Sequence: Synthetic oligonucleotide
gagaaguccuugagaagac

SEQ ID NO: 1470558 - RNA, 19 nt, Artificial Sequence
  Description of Artificial Sequence: Synthetic oligonucleotide
ggagcgaaagcuucauuca

SEQ ID NO: 1470559 - RNA, 19 nt, Artificial Sequence
  Description of Artificial Sequence: Synthetic oligonucleotide
agccaaguacuggggagcg

SEQ ID NO: 1470560 - RNA, 19 nt, Artificial Sequence
  Description of Artificial Sequence: Synthetic oligonucleotide
accucaauggguaccauuu

SEQ ID NO: 1470561 - RNA, 19 nt, Artificial Sequence
  Description of Artificial Sequence: Synthetic oligonucleotide
uuccccgcagugacagucc

SEQ ID NO: 1470562 - RNA, 19 nt, Artificial Sequence
  Description of Artificial Sequence: Synthetic oligonucleotide
cgauaaacacaccucguag

SEQ ID NO: 1470563 - RNA, 19 nt, Artificial Sequence
  Description of Artificial Sequence: Synthetic oligonucleotide
agcgaaagcuucauucaca

SEQ ID NO: 1470564 - RNA, 19 nt, Artificial Sequence
  Description of Artificial Sequence: Synthetic oligonucleotide
ucccuucuuucuugaacac

SEQ ID NO: 1470565 - RNA, 19 nt, Artificial Sequence
  Description of Artificial Sequence: Synthetic oligonucleotide
augaaguggacagaaccua

SEQ ID NO: 1470566 - RNA, 19 nt, Artificial Sequence
  Description of Artificial Sequence: Synthetic oligonucleotide
gaugacacugucaaugguu

SEQ ID NO: 1470567 - RNA, 19 nt, Artificial Sequence
  Description of Artificial Sequence: Synthetic oligonucleotide
caaugcgccauugauugca

SEQ ID NO: 1470568 - RNA, 19 nt, Artificial Sequence
  Description of Artificial Sequence: Synthetic oligonucleotide
aagaccuccguaagcucca

SEQ ID NO: 1470569 - RNA, 19 nt, Artificial Sequence
  Description of Artificial Sequence: Synthetic oligonucleotide
cuuaagacucaguccagcu

SEQ ID NO: 1470570 - RNA, 19 nt, Artificial Sequence
  Description of Artificial Sequence: Synthetic oligonucleotide
uugggacucccacucgcaa

SEQ ID NO: 1470571 - RNA, 19 nt, Artificial Sequence
  Description of Artificial Sequence: Synthetic oligonucleotide
ggucuguuacuccgcgugg

SEQ ID NO: 1470572 - RNA, 19 nt, Artificial Sequence
  Description of Artificial Sequence: Synthetic oligonucleotide
caaugguuucuggugggac

SEQ ID NO: 1470573 - RNA, 19 nt, Artificial Sequence
  Description of Artificial Sequence: Synthetic oligonucleotide
auugcaggaacugggccaa

SEQ ID NO: 1470574 - RNA, 19 nt, Artificial Sequence
  Description of Artificial Sequence: Synthetic oligonucleotide
gguaccauuuccucauuaa

SEQ ID NO: 1470575 - RNA, 19 nt, Artificial Sequence
  Description of Artificial Sequence: Synthetic oligonucleotide
uucgaugguggguuuuauu

SEQ ID NO: 1470576 - RNA, 19 nt, Artificial Sequence
  Description of Artificial Sequence: Synthetic oligonucleotide
gcuccgaucucuuuuggga

SEQ ID NO: 1470577 - RNA, 19 nt, Artificial Sequence
  Description of Artificial Sequence: Synthetic oligonucleotide
augcgccauugauugcagg

SEQ ID NO: 1470578 - RNA, 19 nt, Artificial Sequence
  Description of Artificial Sequence: Synthetic oligonucleotide
ccuccguaagcuccaaagg

SEQ ID NO: 1470579 - RNA, 19 nt, Artificial Sequence
  Description of Artificial Sequence: Synthetic oligonucleotide
ugggacucccacucgcaaa

SEQ ID NO: 1470580 - RNA, 19 nt, Artificial Sequence
  Description of Artificial Sequence: Synthetic oligonucleotide
acagauuuccugacaucca

SEQ ID NO: 1470581 - RNA, 19 nt, Artificial Sequence
  Description of Artificial Sequence: Synthetic oligonucleotide
ugguggcuauugacaaaga

SEQ ID NO: 1470582 - RNA, 19 nt, Artificial Sequence
  Description of Artificial Sequence: Synthetic oligonucleotide
ucaccgugcugugaucucu

SEQ ID NO: 1470583 - RNA, 19 nt, Artificial Sequence
  Description of Artificial Sequence: Synthetic oligonucleotide
cucggcgccuuaauucgug

SEQ ID NO: 1470584 - RNA, 19 nt, Artificial Sequence
  Description of Artificial Sequence: Synthetic oligonucleotide
gucuguuacuccgcguggc

SEQ ID NO: 1470585 - RNA, 19 nt, Artificial Sequence
  Description of Artificial Sequence: Synthetic oligonucleotide
ggcuccgaucucuuuuggg

SEQ ID NO: 1470586 - RNA, 19 nt, Artificial Sequence
  Description of Artificial Sequence: Synthetic oligonucleotide
ccucguagcagcgccaugg

SEQ ID NO: 1470587 - RNA, 19 nt, Artificial Sequence
  Description of Artificial Sequence: Synthetic oligonucleotide
uuccuccacacaagacgac

SEQ ID NO: 1470588 - RNA, 19 nt, Artificial Sequence
  Description of Artificial Sequence: Synthetic oligonucleotide
cacaagacgacuucugcau

SEQ ID NO: 1470589 - RNA, 19 nt, Artificial Sequence
  Description of Artificial Sequence: Synthetic oligonucleotide
uucgcuuagcagccacgau

SEQ ID NO: 1470590 - RNA, 19 nt, Artificial Sequence
  Description of Artificial Sequence: Synthetic oligonucleotide
cuguuaauccugcccacaa

SEQ ID NO: 1470591 - RNA, 19 nt, Artificial Sequence
  Description of Artificial Sequence: Synthetic oligonucleotide
ggcgccuuaauucgugaac

SEQ ID NO: 1470592 - RNA, 19 nt, Artificial Sequence
  Description of Artificial Sequence: Synthetic oligonucleotide
agcuugagaucuaauccaa

SEQ ID NO: 1470593 - RNA, 19 nt, Artificial Sequence
  Description of Artificial Sequence: Synthetic oligonucleotide
agugcguaucugucacagu

SEQ ID NO: 1470594 - RNA, 19 nt, Artificial Sequence
  Description of Artificial Sequence: Synthetic oligonucleotide
gcgccuuaauucgugaacc

SEQ ID NO: 1470595 - RNA, 19 nt, Artificial Sequence
  Description of Artificial Sequence: Synthetic oligonucleotide
ucggcgccuuaauucguga

SEQ ID NO: 1470596 - RNA, 19 nt, Artificial Sequence
  Description of Artificial Sequence: Synthetic oligonucleotide
cucgcaaacccacaugccu

SEQ ID NO: 1470597 - RNA, 19 nt, Artificial Sequence
  Description of Artificial Sequence: Synthetic oligonucleotide
caagacgacuucugcaucu

SEQ ID NO: 1470598 - RNA, 19 nt, Artificial Sequence
  Description of Artificial Sequence: Synthetic oligonucleotide
acgauggacuggaaaccag

SEQ ID NO: 1470599 - RNA, 19 nt, Artificial Sequence
  Description of Artificial Sequence: Synthetic oligonucleotide
cacuagcuaugaugacagc

SEQ ID NO: 1470600 - RNA, 19 nt, Artificial Sequence
  Description of Artificial Sequence: Synthetic oligonucleotide
ucccacucgcaaacccaca

SEQ ID NO: 1470601 - RNA, 19 nt, Artificial Sequence
  Description of Artificial Sequence: Synthetic oligonucleotide
guucgcuuagcagccacga

SEQ ID NO: 1470602 - RNA, 19 nt, Artificial Sequence
  Description of Artificial Sequence: Synthetic oligonucleotide
cuguucuguggccuggcca

SEQ ID NO: 1470603 - RNA, 19 nt, Artificial Sequence
  Description of Artificial Sequence: Synthetic oligonucleotide
gaugcaagcugaccccacu

SEQ ID NO: 1470604 - RNA, 19 nt, Artificial Sequence
  Description of Artificial Sequence: Synthetic oligonucleotide
guuccccgcagugacaguc

SEQ ID NO: 1470605 - RNA, 19 nt, Artificial Sequence
  Description of Artificial Sequence: Synthetic oligonucleotide
ccguaagcuccaaagggug

SEQ ID NO: 1470606 - RNA, 19 nt, Artificial Sequence
  Description of Artificial Sequence: Synthetic oligonucleotide
ggccaaguaaaggugguca

SEQ ID NO: 1470607 - RNA, 19 nt, Artificial Sequence
  Description of Artificial Sequence: Synthetic oligonucleotide
agagccuauugagggugag

SEQ ID NO: 1470608 - RNA, 19 nt, Artificial Sequence
  Description of Artificial Sequence: Synthetic oligonucleotide
aagacgacuucugcaucuu

SEQ ID NO: 1470609 - RNA, 19 nt, Artificial Sequence
  Description of Artificial Sequence: Synthetic oligonucleotide
cuguuacuccgcguggcug

SEQ ID NO: 1470610 - RNA, 19 nt, Artificial Sequence
  Description of Artificial Sequence: Synthetic oligonucleotide
cagcccuggcagcaaauuc

SEQ ID NO: 1470611 - RNA, 19 nt, Artificial Sequence
  Description of Artificial Sequence: Synthetic oligonucleotide
caucugaagaacucugcau

SEQ ID NO: 1470612 - RNA, 19 nt, Artificial Sequence
  Description of Artificial Sequence: Synthetic oligonucleotide
auggcgccuccauucacau

SEQ ID NO: 1470613 - RNA, 19 nt, Artificial Sequence
  Description of Artificial Sequence: Synthetic oligonucleotide
ucaucaaggcuuggucaau

SEQ ID NO: 1470614 - RNA, 19 nt, Artificial Sequence
  Description of Artificial Sequence: Synthetic oligonucleotide
cuucaaugcgccauugauu

SEQ ID NO: 1470615 - RNA, 19 nt, Artificial Sequence
  Description of Artificial Sequence: Synthetic oligonucleotide
cccacgaugacacugucaa

SEQ ID NO: 1470616 - RNA, 19 nt, Artificial Sequence
  Description of Artificial Sequence: Synthetic oligonucleotide
guuagcggcuuuccaccuc

SEQ ID NO: 1470617 - RNA, 19 nt, Artificial Sequence
  Description of Artificial Sequence: Synthetic oligonucleotide
caauggcgccuccauucac

SEQ ID NO: 1470618 - RNA, 19 nt, Artificial Sequence
  Description of Artificial Sequence: Synthetic oligonucleotide
ugaccccacugcauauuuu

SEQ ID NO: 1470619 - RNA, 19 nt, Artificial Sequence
  Description of Artificial Sequence: Synthetic oligonucleotide
cugcagugcguaucuguca

SEQ ID NO: 1470620 - RNA, 19 nt, Artificial Sequence
  Description of Artificial Sequence: Synthetic oligonucleotide
ccucaucaaggcuugguca

SEQ ID NO: 1470621 - RNA, 19 nt, Artificial Sequence
  Description of Artificial Sequence: Synthetic oligonucleotide
ccuuaagacucaguccagc

SEQ ID NO: 1470622 - RNA, 19 nt, Artificial Sequence
  Description of Artificial Sequence: Synthetic oligonucleotide
gucaccuggcuaccuguuc

SEQ ID NO: 1470623 - RNA, 19 nt, Artificial Sequence
  Description of Artificial Sequence: Synthetic oligonucleotide
gguaugaaguggacagaac

SEQ ID NO: 1470624 - RNA, 19 nt, Artificial Sequence
  Description of Artificial Sequence: Synthetic oligonucleotide
ugaucucuucaggcugugu

SEQ ID NO: 1470625 - RNA, 19 nt, Artificial Sequence
  Description of Artificial Sequence: Synthetic oligonucleotide
aggccuucgaugguggguu

SEQ ID NO: 1470626 - RNA, 19 nt, Artificial Sequence
  Description of Artificial Sequence: Synthetic oligonucleotide
caucguuagcggcuuucca

SEQ ID NO: 1470627 - RNA, 19 nt, Artificial Sequence
  Description of Artificial Sequence: Synthetic oligonucleotide
ccacacaagacgacuucug

SEQ ID NO: 1470628 - RNA, 19 nt, Artificial Sequence
  Description of Artificial Sequence: Synthetic oligonucleotide
accuccgaugcaagcugac

SEQ ID NO: 1470629 - RNA, 19 nt, Artificial Sequence
  Description of Artificial Sequence: Synthetic oligonucleotide
uggccaaguaaaggugguc

SEQ ID NO: 1470630 - RNA, 19 nt, Artificial Sequence
  Description of Artificial Sequence: Synthetic oligonucleotide
gccacgauaaacacaccuc

SEQ ID NO: 1470631 - RNA, 19 nt, Artificial Sequence
  Description of Artificial Sequence: Synthetic oligonucleotide
uugcuuuuacuggggucaa

SEQ ID NO: 1470632 - RNA, 19 nt, Artificial Sequence
  Description of Artificial Sequence: Synthetic oligonucleotide
guagugcuacccugaaggu

SEQ ID NO: 1470633 - RNA, 19 nt, Artificial Sequence
  Description of Artificial Sequence: Synthetic oligonucleotide
cacgauaaacacaccucgu

SEQ ID NO: 1470634 - RNA, 19 nt, Artificial Sequence
  Description of Artificial Sequence: Synthetic oligonucleotide
cuuuuacuggggucaagau

SEQ ID NO: 1470635 - RNA, 19 nt, Artificial Sequence
  Description of Artificial Sequence: Synthetic oligonucleotide
agcgcacauuucucacaca

SEQ ID NO: 1470636 - RNA, 19 nt, Artificial Sequence
  Description of Artificial Sequence: Synthetic oligonucleotide
gacauccacucacgaugga

SEQ ID NO: 1470637 - RNA, 19 nt, Artificial Sequence
  Description of Artificial Sequence: Synthetic oligonucleotide
ggucccaaagcgcacauuu

SEQ ID NO: 1470638 - RNA, 19 nt, Artificial Sequence
  Description of Artificial Sequence: Synthetic oligonucleotide
gccuauugagggugagggc

SEQ ID NO: 1470639 - RNA, 19 nt, Artificial Sequence
  Description of Artificial Sequence: Synthetic oligonucleotide
cccaaagcgcacauuucuc

SEQ ID NO: 1470640 - RNA, 19 nt, Artificial Sequence
  Description of Artificial Sequence: Synthetic oligonucleotide
gaaguggacagaaccuaau

SEQ ID NO: 1470641 - RNA, 19 nt, Artificial Sequence
  Description of Artificial Sequence: Synthetic oligonucleotide
ggggagcuuaacaugcuga

SEQ ID NO: 1470642 - RNA, 19 nt, Artificial Sequence
  Description of Artificial Sequence: Synthetic oligonucleotide
agguggucaccgugcugug

SEQ ID NO: 1470643 - RNA, 19 nt, Artificial Sequence
  Description of Artificial Sequence: Synthetic oligonucleotide
uggggagcgaaagcuucau

SEQ ID NO: 1470644 - RNA, 19 nt, Artificial Sequence
  Description of Artificial Sequence: Synthetic oligonucleotide
cuguugcaguagugcuacc

SEQ ID NO: 1470645 - RNA, 19 nt, Artificial Sequence
  Description of Artificial Sequence: Synthetic oligonucleotide
ggccuggccaaguaaaggu

SEQ ID NO: 1470646 - RNA, 19 nt, Artificial Sequence
  Description of Artificial Sequence: Synthetic oligonucleotide
cagcgccaugguaaagguc

SEQ ID NO: 1470647 - RNA, 19 nt, Artificial Sequence
  Description of Artificial Sequence: Synthetic oligonucleotide
gagggcuccgaucucuuuu

SEQ ID NO: 1470648 - RNA, 19 nt, Artificial Sequence
  Description of Artificial Sequence: Synthetic oligonucleotide
gcaucguuagcggcuuucc

SEQ ID NO: 1470649 - RNA, 19 nt, Artificial Sequence
  Description of Artificial Sequence: Synthetic oligonucleotide
ggcuauugacaaagacacc

SEQ ID NO: 1470650 - RNA, 19 nt, Artificial Sequence
  Description of Artificial Sequence: Synthetic oligonucleotide
gucaccgugcugugaucuc

SEQ ID NO: 1470651 - RNA, 19 nt, Artificial Sequence
  Description of Artificial Sequence: Synthetic oligonucleotide
ugagggcuccgaucucuuu

SEQ ID NO: 1470652 - RNA, 19 nt, Artificial Sequence
  Description of Artificial Sequence: Synthetic oligonucleotide
cagccacgauaaacacacc

SEQ ID NO: 1470653 - RNA, 19 nt, Artificial Sequence
  Description of Artificial Sequence: Synthetic oligonucleotide
gcguuccccgcagugacag

SEQ ID NO: 1470654 - RNA, 19 nt, Artificial Sequence
  Description of Artificial Sequence: Synthetic oligonucleotide
accucguagcagcgccaug

SEQ ID NO: 1470655 - RNA, 19 nt, Artificial Sequence
  Description of Artificial Sequence: Synthetic oligonucleotide
gggcuccgaucucuuuugg

SEQ ID NO: 1470656 - RNA, 19 nt, Artificial Sequence
  Description of Artificial Sequence: Synthetic oligonucleotide
caagguucucugcagucau

SEQ ID NO: 1470657 - RNA, 19 nt, Artificial Sequence
  Description of Artificial Sequence: Synthetic oligonucleotide
ccaggguuguuuggggccg

SEQ ID NO: 1470658 - RNA, 19 nt, Artificial Sequence
  Description of Artificial Sequence: Synthetic oligonucleotide
gcuagguaugcugcaucug

SEQ ID NO: 1470659 - RNA, 19 nt, Artificial Sequence
  Description of Artificial Sequence: Synthetic oligonucleotide
gcgaaagcuucauucacau

SEQ ID NO: 1470660 - RNA, 19 nt, Artificial Sequence
  Description of Artificial Sequence: Synthetic oligonucleotide
cagguaugaaguggacaga

SEQ ID NO: 1470661 - RNA, 19 nt, Artificial Sequence
  Description of Artificial Sequence: Synthetic oligonucleotide
cuuucuucaaugcgccauu

SEQ ID NO: 1470662 - RNA, 19 nt, Artificial Sequence
  Description of Artificial Sequence: Synthetic oligonucleotide
ucgccucaucaaggcuugg

SEQ ID NO: 1470663 - RNA, 19 nt, Artificial Sequence
  Description of Artificial Sequence: Synthetic oligonucleotide
ugcuacccugaaggucacc

SEQ ID NO: 1470664 - RNA, 19 nt, Artificial Sequence
  Description of Artificial Sequence: Synthetic oligonucleotide
uuacuccgcguggcugucu

SEQ ID NO: 1470665 - RNA, 19 nt, Artificial Sequence
  Description of Artificial Sequence: Synthetic oligonucleotide
cugcaucuuugacacagau

SEQ ID NO: 1470666 - RNA, 19 nt, Artificial Sequence
  Description of Artificial Sequence: Synthetic oligonucleotide
gggaucacauccagauaca

SEQ ID NO: 1470667 - RNA, 19 nt, Artificial Sequence
  Description of Artificial Sequence: Synthetic oligonucleotide
gggagcuuaacaugcugau

SEQ ID NO: 1470668 - RNA, 19 nt, Artificial Sequence
  Description of Artificial Sequence: Synthetic oligonucleotide
gccuuaauucgugaaccaa

SEQ ID NO: 1470669 - RNA, 19 nt, Artificial Sequence
  Description of Artificial Sequence: Synthetic oligonucleotide
ccacucgcaaacccacaug

SEQ ID NO: 1470670 - RNA, 19 nt, Artificial Sequence
  Description of Artificial Sequence: Synthetic oligonucleotide
uuccaccucggcgccuuaa

SEQ ID NO: 1470671 - RNA, 19 nt, Artificial Sequence
  Description of Artificial Sequence: Synthetic oligonucleotide
cgcuuagcagccacgauaa

SEQ ID NO: 1470672 - RNA, 19 nt, Artificial Sequence
  Description of Artificial Sequence: Synthetic oligonucleotide
guuacuccgcguggcuguc

SEQ ID NO: 1470673 - RNA, 19 nt, Artificial Sequence
  Description of Artificial Sequence: Synthetic oligonucleotide
gaccuccguaagcuccaaa

SEQ ID NO: 1470674 - RNA, 19 nt, Artificial Sequence
  Description of Artificial Sequence: Synthetic oligonucleotide
ccuccgaugcaagcugacc

SEQ ID NO: 1470675 - RNA, 19 nt, Artificial Sequence
  Description of Artificial Sequence: Synthetic oligonucleotide
acaccucguagcagcgcca

SEQ ID NO: 1470676 - RNA, 19 nt, Artificial Sequence
  Description of Artificial Sequence: Synthetic oligonucleotide
gugugcagugauucucgau

SEQ ID NO: 1470677 - RNA, 19 nt, Artificial Sequence
  Description of Artificial Sequence: Synthetic oligonucleotide
gcuaccuguucuguggccu

SEQ ID NO: 1470678 - RNA, 19 nt, Artificial Sequence
  Description of Artificial Sequence: Synthetic oligonucleotide
cauucccauggggagcuua

SEQ ID NO: 1470679 - RNA, 19 nt, Artificial Sequence
  Description of Artificial Sequence: Synthetic oligonucleotide
gcuugagaucuaauccaaa

SEQ ID NO: 1470680 - RNA, 19 nt, Artificial Sequence
  Description of Artificial Sequence: Synthetic oligonucleotide
gcaauuguuccaggguugu

SEQ ID NO: 1470681 - RNA, 19 nt, Artificial Sequence
  Description of Artificial Sequence: Synthetic oligonucleotide
uggucccaaagcgcacauu

SEQ ID NO: 1470682 - RNA, 19 nt, Artificial Sequence
  Description of Artificial Sequence: Synthetic oligonucleotide
ccgaucucuuuugggacuc

SEQ ID NO: 1470683 - RNA, 19 nt, Artificial Sequence
  Description of Artificial Sequence: Synthetic oligonucleotide
gcagugcguaucugucaca

SEQ ID NO: 1470684 - RNA, 19 nt, Artificial Sequence
  Description of Artificial Sequence: Synthetic oligonucleotide
uggggccgagcaugcucau

SEQ ID NO: 1470685 - RNA, 19 nt, Artificial Sequence
  Description of Artificial Sequence: Synthetic oligonucleotide
uggcgccuccauucacauu

SEQ ID NO: 1470686 - RNA, 19 nt, Artificial Sequence
  Description of Artificial Sequence: Synthetic oligonucleotide
ccugaaggucaccuggcua

SEQ ID NO: 1470687 - RNA, 19 nt, Artificial Sequence
  Description of Artificial Sequence: Synthetic oligonucleotide
caccucaauggguaccauu

SEQ ID NO: 1470688 - RNA, 19 nt, Artificial Sequence
  Description of Artificial Sequence: Synthetic oligonucleotide
cucguagcagcgccauggu

SEQ ID NO: 1470689 - RNA, 19 nt, Artificial Sequence
  Description of Artificial Sequence: Synthetic oligonucleotide
gugcuacccugaaggucac

SEQ ID NO: 1470690 - RNA, 19 nt, Artificial Sequence
  Description of Artificial Sequence: Synthetic oligonucleotide
ggccaauacccaugauacu

SEQ ID NO: 1470691 - RNA, 19 nt, Artificial Sequence
  Description of Artificial Sequence: Synthetic oligonucleotide
ccgagcaugcucauccacu

SEQ ID NO: 1470692 - RNA, 19 nt, Artificial Sequence
  Description of Artificial Sequence: Synthetic oligonucleotide
caucaaggcuuggucaauu

SEQ ID NO: 1470693 - RNA, 19 nt, Artificial Sequence
  Description of Artificial Sequence: Synthetic oligonucleotide
gguggucaccgugcuguga

SEQ ID NO: 1470694 - RNA, 19 nt, Artificial Sequence
  Description of Artificial Sequence: Synthetic oligonucleotide
ggacagaaccuaauauauu

SEQ ID NO: 1470695 - RNA, 19 nt, Artificial Sequence
  Description of Artificial Sequence: Synthetic oligonucleotide
cgaggcguuccccgcagug

SEQ ID NO: 1470696 - RNA, 19 nt, Artificial Sequence
  Description of Artificial Sequence: Synthetic oligonucleotide
gggcuuggcucaugcucuc

SEQ ID NO: 1470697 - RNA, 19 nt, Artificial Sequence
  Description of Artificial Sequence: Synthetic oligonucleotide
gguguucgcuuagcagcca

SEQ ID NO: 1470698 - RNA, 19 nt, Artificial Sequence
  Description of Artificial Sequence: Synthetic oligonucleotide
cgaugguggguuuuauucu

SEQ ID NO: 1470699 - RNA, 19 nt, Artificial Sequence
  Description of Artificial Sequence: Synthetic oligonucleotide
cgccuuaauucgugaacca

SEQ ID NO: 1470700 - RNA, 19 nt, Artificial Sequence
  Description of Artificial Sequence: Synthetic oligonucleotide
cccgaggcguuccccgcag

SEQ ID NO: 1470701 - RNA, 19 nt, Artificial Sequence
  Description of Artificial Sequence: Synthetic oligonucleotide
gcagugacagucccuucuu

SEQ ID NO: 1470702 - RNA, 19 nt, Artificial Sequence
  Description of Artificial Sequence: Synthetic oligonucleotide
gcgccaugguaaaggucug

SEQ ID NO: 1470703 - RNA, 19 nt, Artificial Sequence
  Description of Artificial Sequence: Synthetic oligonucleotide
gcccacgaugacacuguca

SEQ ID NO: 1470704 - RNA, 19 nt, Artificial Sequence
  Description of Artificial Sequence: Synthetic oligonucleotide
cuucgaugguggguuuuau

SEQ ID NO: 1470705 - RNA, 19 nt, Artificial Sequence
  Description of Artificial Sequence: Synthetic oligonucleotide
gcuuagcagccacgauaaa

SEQ ID NO: 1470706 - RNA, 19 nt, Artificial Sequence
  Description of Artificial Sequence: Synthetic oligonucleotide
caggguuguuuggggccga

SEQ ID NO: 1470707 - RNA, 19 nt, Artificial Sequence
  Description of Artificial Sequence: Synthetic oligonucleotide
ccgaugcaagcugacccca

SEQ ID NO: 1470708 - RNA, 19 nt, Artificial Sequence
  Description of Artificial Sequence: Synthetic oligonucleotide
cguaagcuccaaagggugu

SEQ ID NO: 1470709 - RNA, 19 nt, Artificial Sequence
  Description of Artificial Sequence: Synthetic oligonucleotide
guuuggggccgagcaugcu

SEQ ID NO: 1470710 - RNA, 19 nt, Artificial Sequence
  Description of Artificial Sequence: Synthetic oligonucleotide
caccgugcugugaucucuu

SEQ ID NO: 1470711 - RNA, 19 nt, Artificial Sequence
  Description of Artificial Sequence: Synthetic oligonucleotide
caguagcagagaaguccuu

SEQ ID NO: 1470712 - RNA, 19 nt, Artificial Sequence
  Description of Artificial Sequence: Synthetic oligonucleotide
cgugaaccaagugugcagu

SEQ ID NO: 1470713 - RNA, 19 nt, Artificial Sequence
  Description of Artificial Sequence: Synthetic oligonucleotide
gccaaguacuggggagcga

SEQ ID NO: 1470714 - RNA, 19 nt, Artificial Sequence
  Description of Artificial Sequence: Synthetic oligonucleotide
ggcguuccccgcagugaca

SEQ ID NO: 1470715 - RNA, 19 nt, Artificial Sequence
  Description of Artificial Sequence: Synthetic oligonucleotide
ccuucgaugguggguuuua

SEQ ID NO: 1470716 - RNA, 19 nt, Artificial Sequence
  Description of Artificial Sequence: Synthetic oligonucleotide
caauuguuccaggguuguu

SEQ ID NO: 1470717 - RNA, 19 nt, Artificial Sequence
  Description of Artificial Sequence: Synthetic oligonucleotide
cccacucgcaaacccacau

SEQ ID NO: 1470718 - RNA, 19 nt, Artificial Sequence
  Description of Artificial Sequence: Synthetic oligonucleotide
gcucacaacucuggccagu

SEQ ID NO: 1470719 - RNA, 19 nt, Artificial Sequence
  Description of Artificial Sequence: Synthetic oligonucleotide
ccgcagugacagucccuuc

SEQ ID NO: 1470720 - RNA, 19 nt, Artificial Sequence
  Description of Artificial Sequence: Synthetic oligonucleotide
ggggccgagcaugcucauc

SEQ ID NO: 1470721 - RNA, 19 nt, Artificial Sequence
  Description of Artificial Sequence: Synthetic oligonucleotide
ggucaagauccaagccuuu

SEQ ID NO: 1470722 - RNA, 19 nt, Artificial Sequence
  Description of Artificial Sequence: Synthetic oligonucleotide
cugggccaauacccaugau

SEQ ID NO: 1470723 - RNA, 19 nt, Artificial Sequence
  Description of Artificial Sequence: Synthetic oligonucleotide
gcugaccccacugcauauu

SEQ ID NO: 1470724 - RNA, 19 nt, Artificial Sequence
  Description of Artificial Sequence: Synthetic oligonucleotide
cggcgccuuaauucgugaa

SEQ ID NO: 1470725 - RNA, 19 nt, Artificial Sequence
  Description of Artificial Sequence: Synthetic oligonucleotide
ccccgaggcguuccccgca

SEQ ID NO: 1470726 - RNA, 19 nt, Artificial Sequence
  Description of Artificial Sequence: Synthetic oligonucleotide
ccucggcgccuuaauucgu

SEQ ID NO: 1470727 - RNA, 19 nt, Artificial Sequence
  Description of Artificial Sequence: Synthetic oligonucleotide
ccacgaugacacugucaau

SEQ ID NO: 1470728 - RNA, 19 nt, Artificial Sequence
  Description of Artificial Sequence: Synthetic oligonucleotide
ccaccucggcgccuuaauu

SEQ ID NO: 1470729 - RNA, 19 nt, Artificial Sequence
  Description of Artificial Sequence: Synthetic oligonucleotide
ggccuucgaugguggguuu

SEQ ID NO: 1470730 - RNA, 19 nt, Artificial Sequence
  Description of Artificial Sequence: Synthetic oligonucleotide
gccuucgaugguggguuuu

SEQ ID NO: 1470731 - RNA, 19 nt, Artificial Sequence
  Description of Artificial Sequence: Synthetic oligonucleotide
ccgaggcguuccccgcagu

SEQ ID NO: 1470732 - RNA, 19 nt, Artificial Sequence
  Description of Artificial Sequence: Synthetic oligonucleotide
cguuccccgcagugacagu

SEQ ID NO: 1470733 - RNA, 19 nt, Artificial Sequence
  Description of Artificial Sequence: Synthetic oligonucleotide
gaaauaaggacccugacgc

SEQ ID NO: 1470734 - RNA, 19 nt, Artificial Sequence
  Description of Artificial Sequence: Synthetic oligonucleotide
aagagguuguacuacgucc

SEQ ID NO: 1470735 - RNA, 19 nt, Artificial Sequence
  Description of Artificial Sequence: Synthetic oligonucleotide
aaaggugugacaugguugg

SEQ ID NO: 1470736 - RNA, 19 nt, Artificial Sequence
  Description of Artificial Sequence: Synthetic oligonucleotide
uguacuacguccuggauag

SEQ ID NO: 1470737 - RNA, 19 nt, Artificial Sequence
  Description of Artificial Sequence: Synthetic oligonucleotide
aaauguuagggcugugggc

SEQ ID NO: 1470738 - RNA, 19 nt, Artificial Sequence
  Description of Artificial Sequence: Synthetic oligonucleotide
auagaaaauggccacgaac

SEQ ID NO: 1470739 - RNA, 19 nt, Artificial Sequence
  Description of Artificial Sequence: Synthetic oligonucleotide
uuagugaaaacccugaauu

SEQ ID NO: 1470740 - RNA, 19 nt, Artificial Sequence
  Description of Artificial Sequence: Synthetic oligonucleotide
aauggccacgaacugaaac

SEQ ID NO: 1470741 - RNA, 19 nt, Artificial Sequence
  Description of Artificial Sequence: Synthetic oligonucleotide
aagucuacacacccagucc

SEQ ID NO: 1470742 - RNA, 19 nt, Artificial Sequence
  Description of Artificial Sequence: Synthetic oligonucleotide
augguuggaaauaaggacc

SEQ ID NO: 1470743 - RNA, 19 nt, Artificial Sequence
  Description of Artificial Sequence: Synthetic oligonucleotide
acugaaacgcagcagcccc

SEQ ID NO: 1470744 - RNA, 19 nt, Artificial Sequence
  Description of Artificial Sequence: Synthetic oligonucleotide
aauguuagggcugugggcu

SEQ ID NO: 1470745 - RNA, 19 nt, Artificial Sequence
  Description of Artificial Sequence: Synthetic oligonucleotide
gaacuugcagcguaagagg

SEQ ID NO: 1470746 - RNA, 19 nt, Artificial Sequence
  Description of Artificial Sequence: Synthetic oligonucleotide
gacaugguuggaaauaagg

SEQ ID NO: 1470747 - RNA, 19 nt, Artificial Sequence
  Description of Artificial Sequence: Synthetic oligonucleotide
aagccaccuuacuugauac

SEQ ID NO: 1470748 - RNA, 19 nt, Artificial Sequence
  Description of Artificial Sequence: Synthetic oligonucleotide
aaagugaccacagcaguuc

SEQ ID NO: 1470749 - RNA, 19 nt, Artificial Sequence
  Description of Artificial Sequence: Synthetic oligonucleotide
caugguuggaaauaaggac

SEQ ID NO: 1470750 - RNA, 19 nt, Artificial Sequence
  Description of Artificial Sequence: Synthetic oligonucleotide
cuugauacaccgugaaagg

SEQ ID NO: 1470751 - RNA, 19 nt, Artificial Sequence
  Description of Artificial Sequence: Synthetic oligonucleotide
auggccacgaacugaaacg

SEQ ID NO: 1470752 - RNA, 19 nt, Artificial Sequence
  Description of Artificial Sequence: Synthetic oligonucleotide
aaauaaggacccugacgcg

SEQ ID NO: 1470753 - RNA, 19 nt, Artificial Sequence
  Description of Artificial Sequence: Synthetic oligonucleotide
ggggcuauugaguagaggg

SEQ ID NO: 1470754 - RNA, 19 nt, Artificial Sequence
  Description of Artificial Sequence: Synthetic oligonucleotide
auauucauacagugccugc

SEQ ID NO: 1470755 - RNA, 19 nt, Artificial Sequence
  Description of Artificial Sequence: Synthetic oligonucleotide
ugauacaccgugaaaggga

SEQ ID NO: 1470756 - RNA, 19 nt, Artificial Sequence
  Description of Artificial Sequence: Synthetic oligonucleotide
caaauguuagggcuguggg

SEQ ID NO: 1470757 - RNA, 19 nt, Artificial Sequence
  Description of Artificial Sequence: Synthetic oligonucleotide
uuuagugaaaacccugaau

SEQ ID NO: 1470758 - RNA, 19 nt, Artificial Sequence
  Description of Artificial Sequence: Synthetic oligonucleotide
caccuuacuugauacaccg

SEQ ID NO: 1470759 - RNA, 19 nt, Artificial Sequence
  Description of Artificial Sequence: Synthetic oligonucleotide
aaaaggugugacaugguug

SEQ ID NO: 1470760 - RNA, 19 nt, Artificial Sequence
  Description of Artificial Sequence: Synthetic oligonucleotide
ugguuggaaauaaggaccc

SEQ ID NO: 1470761 - RNA, 19 nt, Artificial Sequence
  Description of Artificial Sequence: Synthetic oligonucleotide
ggaaauaaggacccugacg

SEQ ID NO: 1470762 - RNA, 19 nt, Artificial Sequence
  Description of Artificial Sequence: Synthetic oligonucleotide
auuuaaugugacauugggg

SEQ ID NO: 1470763 - RNA, 19 nt, Artificial Sequence
  Description of Artificial Sequence: Synthetic oligonucleotide
uggucaagucuacacaccc

SEQ ID NO: 1470764 - RNA, 19 nt, Artificial Sequence
  Description of Artificial Sequence: Synthetic oligonucleotide
uucgugauggucaagucua

SEQ ID NO: 1470765 - RNA, 19 nt, Artificial Sequence
  Description of Artificial Sequence: Synthetic oligonucleotide
acuauguuguggucaaaag

SEQ ID NO: 1470766 - RNA, 19 nt, Artificial Sequence
  Description of Artificial Sequence: Synthetic oligonucleotide
ucagucagccuccugggcc

SEQ ID NO: 1470767 - RNA, 19 nt, Artificial Sequence
  Description of Artificial Sequence: Synthetic oligonucleotide
agaccagcggucuuugaac

SEQ ID NO: 1470768 - RNA, 19 nt, Artificial Sequence
  Description of Artificial Sequence: Synthetic oligonucleotide
aggagguuccaucgcagcc

SEQ ID NO: 1470769 - RNA, 19 nt, Artificial Sequence
  Description of Artificial Sequence: Synthetic oligonucleotide
ugucagcuguacaucagag

SEQ ID NO: 1470770 - RNA, 19 nt, Artificial Sequence
  Description of Artificial Sequence: Synthetic oligonucleotide
uugauacaccgugaaaggg

SEQ ID NO: 1470771 - RNA, 19 nt, Artificial Sequence
  Description of Artificial Sequence: Synthetic oligonucleotide
agaguugucagcuguacau

SEQ ID NO: 1470772 - RNA, 19 nt, Artificial Sequence
  Description of Artificial Sequence: Synthetic oligonucleotide
uuggcaaauguuagggcug

SEQ ID NO: 1470773 - RNA, 19 nt, Artificial Sequence
  Description of Artificial Sequence: Synthetic oligonucleotide
uacacggagugcaaacucc

SEQ ID NO: 1470774 - RNA, 19 nt, Artificial Sequence
  Description of Artificial Sequence: Synthetic oligonucleotide
gacgcugucgggcagagca

SEQ ID NO: 1470775 - RNA, 19 nt, Artificial Sequence
  Description of Artificial Sequence: Synthetic oligonucleotide
ucugacaccgucacagaga

SEQ ID NO: 1470776 - RNA, 19 nt, Artificial Sequence
  Description of Artificial Sequence: Synthetic oligonucleotide
uuuuagugaaaacccugaa

SEQ ID NO: 1470777 - RNA, 19 nt, Artificial Sequence
  Description of Artificial Sequence: Synthetic oligonucleotide
cuggauagaaaauggccac

SEQ ID NO: 1470778 - RNA, 19 nt, Artificial Sequence
  Description of Artificial Sequence: Synthetic oligonucleotide
cuguacaucagaggaaggg

SEQ ID NO: 1470779 - RNA, 19 nt, Artificial Sequence
  Description of Artificial Sequence: Synthetic oligonucleotide
agugcaaacuccucauucu

SEQ ID NO: 1470780 - RNA, 19 nt, Artificial Sequence
  Description of Artificial Sequence: Synthetic oligonucleotide
aagcagauucgugaugguc

SEQ ID NO: 1470781 - RNA, 19 nt, Artificial Sequence
  Description of Artificial Sequence: Synthetic oligonucleotide
ucgugucccuaucugaccc

SEQ ID NO: 1470782 - RNA, 19 nt, Artificial Sequence
  Description of Artificial Sequence: Synthetic oligonucleotide
agucuacacacccaguccu

SEQ ID NO: 1470783 - RNA, 19 nt, Artificial Sequence
  Description of Artificial Sequence: Synthetic oligonucleotide
ugucugacggagugagucg

SEQ ID NO: 1470784 - RNA, 19 nt, Artificial Sequence
  Description of Artificial Sequence: Synthetic oligonucleotide
ucuuugaacuugcagcgua

SEQ ID NO: 1470785 - RNA, 19 nt, Artificial Sequence
  Description of Artificial Sequence: Synthetic oligonucleotide
uuguacuacguccuggaua

SEQ ID NO: 1470786 - RNA, 19 nt, Artificial Sequence
  Description of Artificial Sequence: Synthetic oligonucleotide
aucugacccaauucuuugg

SEQ ID NO: 1470787 - RNA, 19 nt, Artificial Sequence
  Description of Artificial Sequence: Synthetic oligonucleotide
aguugucagcuguacauca

SEQ ID NO: 1470788 - RNA, 19 nt, Artificial Sequence
  Description of Artificial Sequence: Synthetic oligonucleotide
ugagucgugucccuaucug

SEQ ID NO: 1470789 - RNA, 19 nt, Artificial Sequence
  Description of Artificial Sequence: Synthetic oligonucleotide
uaagagguuguacuacguc

SEQ ID NO: 1470790 - RNA, 19 nt, Artificial Sequence
  Description of Artificial Sequence: Synthetic oligonucleotide
uggauagaaaauggccacg

SEQ ID NO: 1470791 - RNA, 19 nt, Artificial Sequence
  Description of Artificial Sequence: Synthetic oligonucleotide
ugagccagaguugucagcu

SEQ ID NO: 1470792 - RNA, 19 nt, Artificial Sequence
  Description of Artificial Sequence: Synthetic oligonucleotide
gaugacauucaauggcaca

SEQ ID NO: 1470793 - RNA, 19 nt, Artificial Sequence
  Description of Artificial Sequence: Synthetic oligonucleotide
gacggagugagucgugucc

SEQ ID NO: 1470794 - RNA, 19 nt, Artificial Sequence
  Description of Artificial Sequence: Synthetic oligonucleotide
caaagagccgcuccggccc

SEQ ID NO: 1470795 - RNA, 19 nt, Artificial Sequence
  Description of Artificial Sequence: Synthetic oligonucleotide
caagucuacacacccaguc

SEQ ID NO: 1470796 - RNA, 19 nt, Artificial Sequence
  Description of Artificial Sequence: Synthetic oligonucleotide
agguugacuauguuguggu

SEQ ID NO: 1470797 - RNA, 19 nt, Artificial Sequence
  Description of Artificial Sequence: Synthetic oligonucleotide
cuuugucugacggagugag

SEQ ID NO: 1470798 - RNA, 19 nt, Artificial Sequence
  Description of Artificial Sequence: Synthetic oligonucleotide
aggagacacaggccgaccg

SEQ ID NO: 1470799 - RNA, 19 nt, Artificial Sequence
  Description of Artificial Sequence: Synthetic oligonucleotide
uacaccgugaaagggacga

SEQ ID NO: 1470800 - RNA, 19 nt, Artificial Sequence
  Description of Artificial Sequence: Synthetic oligonucleotide
aagggacgaaaagugacca

SEQ ID NO: 1470801 - RNA, 19 nt, Artificial Sequence
  Description of Artificial Sequence: Synthetic oligonucleotide
gaagacguggagcccuagg

SEQ ID NO: 1470802 - RNA, 19 nt, Artificial Sequence
  Description of Artificial Sequence: Synthetic oligonucleotide
gaaagcagggccggugucg

SEQ ID NO: 1470803 - RNA, 19 nt, Artificial Sequence
  Description of Artificial Sequence: Synthetic oligonucleotide
uugacuauguuguggucaa

SEQ ID NO: 1470804 - RNA, 19 nt, Artificial Sequence
  Description of Artificial Sequence: Synthetic oligonucleotide
gaagggaaggaagacugug

SEQ ID NO: 1470805 - RNA, 19 nt, Artificial Sequence
  Description of Artificial Sequence: Synthetic oligonucleotide
gauacaccgugaaagggac

SEQ ID NO: 1470806 - RNA, 19 nt, Artificial Sequence
  Description of Artificial Sequence: Synthetic oligonucleotide
ucauucggccuguugugag

SEQ ID NO: 1470807 - RNA, 19 nt, Artificial Sequence
  Description of Artificial Sequence: Synthetic oligonucleotide
agggcuaggagaagaaggg

SEQ ID NO: 1470808 - RNA, 19 nt, Artificial Sequence
  Description of Artificial Sequence: Synthetic oligonucleotide
uuguacacggagugcaaac

SEQ ID NO: 1470809 - RNA, 19 nt, Artificial Sequence
  Description of Artificial Sequence: Synthetic oligonucleotide
agauucgugauggucaagu

SEQ ID NO: 1470810 - RNA, 19 nt, Artificial Sequence
  Description of Artificial Sequence: Synthetic oligonucleotide
cuugcagcguaagagguug

SEQ ID NO: 1470811 - RNA, 19 nt, Artificial Sequence
  Description of Artificial Sequence: Synthetic oligonucleotide
uccugacgggcccaggaag

SEQ ID NO: 1470812 - RNA, 19 nt, Artificial Sequence
  Description of Artificial Sequence: Synthetic oligonucleotide
agcagauucgugaugguca

SEQ ID NO: 1470813 - RNA, 19 nt, Artificial Sequence
  Description of Artificial Sequence: Synthetic oligonucleotide
gacgaaaagugaccacagc

SEQ ID NO: 1470814 - RNA, 19 nt, Artificial Sequence
  Description of Artificial Sequence: Synthetic oligonucleotide
aacuugcagcguaagaggu

SEQ ID NO: 1470815 - RNA, 19 nt, Artificial Sequence
  Description of Artificial Sequence: Synthetic oligonucleotide
uagugaaaacccugaauuu

SEQ ID NO: 1470816 - RNA, 19 nt, Artificial Sequence
  Description of Artificial Sequence: Synthetic oligonucleotide
uugaguagaggggugcuac

SEQ ID NO: 1470817 - RNA, 19 nt, Artificial Sequence
  Description of Artificial Sequence: Synthetic oligonucleotide
aagccgucgcucgggagcc

SEQ ID NO: 1470818 - RNA, 19 nt, Artificial Sequence
  Description of Artificial Sequence: Synthetic oligonucleotide
cuuacuugauacaccguga

SEQ ID NO: 1470819 - RNA, 19 nt, Artificial Sequence
  Description of Artificial Sequence: Synthetic oligonucleotide
agugaaaacccugaauuua

SEQ ID NO: 1470820 - RNA, 19 nt, Artificial Sequence
  Description of Artificial Sequence: Synthetic oligonucleotide
acucauucggccuguugug

SEQ ID NO: 1470821 - RNA, 19 nt, Artificial Sequence
  Description of Artificial Sequence: Synthetic oligonucleotide
ugggcggaagccuugugga

SEQ ID NO: 1470822 - RNA, 19 nt, Artificial Sequence
  Description of Artificial Sequence: Synthetic oligonucleotide
aguccggaguccuccugcc

SEQ ID NO: 1470823 - RNA, 19 nt, Artificial Sequence
  Description of Artificial Sequence: Synthetic oligonucleotide
acggagugagucguguccc

SEQ ID NO: 1470824 - RNA, 19 nt, Artificial Sequence
  Description of Artificial Sequence: Synthetic oligonucleotide
auggucaagucuacacacc

SEQ ID NO: 1470825 - RNA, 19 nt, Artificial Sequence
  Description of Artificial Sequence: Synthetic oligonucleotide
cagguugacuauguugugg

SEQ ID NO: 1470826 - RNA, 19 nt, Artificial Sequence
  Description of Artificial Sequence: Synthetic oligonucleotide
acguccuggauagaaaaug

SEQ ID NO: 1470827 - RNA, 19 nt, Artificial Sequence
  Description of Artificial Sequence: Synthetic oligonucleotide
gccggugcgagucaaagag

SEQ ID NO: 1470828 - RNA, 19 nt, Artificial Sequence
  Description of Artificial Sequence: Synthetic oligonucleotide
agugagucgugucccuauc

SEQ ID NO: 1470829 - RNA, 19 nt, Artificial Sequence
  Description of Artificial Sequence: Synthetic oligonucleotide
agggacgaaaagugaccac

SEQ ID NO: 1470830 - RNA, 19 nt, Artificial Sequence
  Description of Artificial Sequence: Synthetic oligonucleotide
ugucgcuucauguguucug

SEQ ID NO: 1470831 - RNA, 19 nt, Artificial Sequence
  Description of Artificial Sequence: Synthetic oligonucleotide
ugagacccaggaagcaucu

SEQ ID NO: 1470832 - RNA, 19 nt, Artificial Sequence
  Description of Artificial Sequence: Synthetic oligonucleotide
cugacccaauucuuuggcc

SEQ ID NO: 1470833 - RNA, 19 nt, Artificial Sequence
  Description of Artificial Sequence: Synthetic oligonucleotide
uacuugauacaccgugaaa

SEQ ID NO: 1470834 - RNA, 19 nt, Artificial Sequence
  Description of Artificial Sequence: Synthetic oligonucleotide
ccuuacuugauacaccgug

SEQ ID NO: 1470835 - RNA, 19 nt, Artificial Sequence
  Description of Artificial Sequence: Synthetic oligonucleotide
uguggucaaaaggugugac

SEQ ID NO: 1470836 - RNA, 19 nt, Artificial Sequence
  Description of Artificial Sequence: Synthetic oligonucleotide
gaguagaggggugcuacag

SEQ ID NO: 1470837 - RNA, 19 nt, Artificial Sequence
  Description of Artificial Sequence: Synthetic oligonucleotide
ucaagucuacacacccagu

SEQ ID NO: 1470838 - RNA, 19 nt, Artificial Sequence
  Description of Artificial Sequence: Synthetic oligonucleotide
gaagccuuguggaagcaca

SEQ ID NO: 1470839 - RNA, 19 nt, Artificial Sequence
  Description of Artificial Sequence: Synthetic oligonucleotide
acauucaauggcacauggg

SEQ ID NO: 1470840 - RNA, 19 nt, Artificial Sequence
  Description of Artificial Sequence: Synthetic oligonucleotide
gauucgugauggucaaguc

SEQ ID NO: 1470841 - RNA, 19 nt, Artificial Sequence
  Description of Artificial Sequence: Synthetic oligonucleotide
gaggagguuccaucgcagc

SEQ ID NO: 1470842 - RNA, 19 nt, Artificial Sequence
  Description of Artificial Sequence: Synthetic oligonucleotide
uggccacgaacugaaacgc

SEQ ID NO: 1470843 - RNA, 19 nt, Artificial Sequence
  Description of Artificial Sequence: Synthetic oligonucleotide
caaaggugugggcggaagc

SEQ ID NO: 1470844 - RNA, 19 nt, Artificial Sequence
  Description of Artificial Sequence: Synthetic oligonucleotide
ccgaugaacuggaugaagc

SEQ ID NO: 1470845 - RNA, 19 nt, Artificial Sequence
  Description of Artificial Sequence: Synthetic oligonucleotide
uacuacguccuggauagaa

SEQ ID NO: 1470846 - RNA, 19 nt, Artificial Sequence
  Description of Artificial Sequence: Synthetic oligonucleotide
gugcgagucaaagagccgc

SEQ ID NO: 1470847 - RNA, 19 nt, Artificial Sequence
  Description of Artificial Sequence: Synthetic oligonucleotide
cugagacccaggaagcauc

SEQ ID NO: 1470848 - RNA, 19 nt, Artificial Sequence
  Description of Artificial Sequence: Synthetic oligonucleotide
gaguccggaguccuccugc

SEQ ID NO: 1470849 - RNA, 19 nt, Artificial Sequence
  Description of Artificial Sequence: Synthetic oligonucleotide
ucggccuguugugagcugg

SEQ ID NO: 1470850 - RNA, 19 nt, Artificial Sequence
  Description of Artificial Sequence: Synthetic oligonucleotide
gaagcaucugacaccguca

SEQ ID NO: 1470851 - RNA, 19 nt, Artificial Sequence
  Description of Artificial Sequence: Synthetic oligonucleotide
cugcggaggacgcugucgg

SEQ ID NO: 1470852 - RNA, 19 nt, Artificial Sequence
  Description of Artificial Sequence: Synthetic oligonucleotide
gcaaauguuagggcugugg

SEQ ID NO: 1470853 - RNA, 19 nt, Artificial Sequence
  Description of Artificial Sequence: Synthetic oligonucleotide
agcguaagagguuguacua

SEQ ID NO: 1470854 - RNA, 19 nt, Artificial Sequence
  Description of Artificial Sequence: Synthetic oligonucleotide
uauugaguagaggggugcu

SEQ ID NO: 1470855 - RNA, 19 nt, Artificial Sequence
  Description of Artificial Sequence: Synthetic oligonucleotide
agguuguacuacguccugg

SEQ ID NO: 1470856 - RNA, 19 nt, Artificial Sequence
  Description of Artificial Sequence: Synthetic oligonucleotide
gauagaaaauggccacgaa

SEQ ID NO: 1470857 - RNA, 19 nt, Artificial Sequence
  Description of Artificial Sequence: Synthetic oligonucleotide
guaccauccuguuccuuug

SEQ ID NO: 1470858 - RNA, 19 nt, Artificial Sequence
  Description of Artificial Sequence: Synthetic oligonucleotide
accgucacagagaccagcg

SEQ ID NO: 1470859 - RNA, 19 nt, Artificial Sequence
  Description of Artificial Sequence: Synthetic oligonucleotide
gacuauguuguggucaaaa

SEQ ID NO: 1470860 - RNA, 19 nt, Artificial Sequence
  Description of Artificial Sequence: Synthetic oligonucleotide
gagaccagcggucuuugaa

SEQ ID NO: 1470861 - RNA, 19 nt, Artificial Sequence
  Description of Artificial Sequence: Synthetic oligonucleotide
aagccuuguggaagcacag

SEQ ID NO: 1470862 - RNA, 19 nt, Artificial Sequence
  Description of Artificial Sequence: Synthetic oligonucleotide
ggugucgccgccaucuucg

SEQ ID NO: 1470863 - RNA, 19 nt, Artificial Sequence
  Description of Artificial Sequence: Synthetic oligonucleotide
uacguccuggauagaaaau

SEQ ID NO: 1470864 - RNA, 19 nt, Artificial Sequence
  Description of Artificial Sequence: Synthetic oligonucleotide
guaaucuggggugucucug

SEQ ID NO: 1470865 - RNA, 19 nt, Artificial Sequence
  Description of Artificial Sequence: Synthetic oligonucleotide
ugcgagucaaagagccgcu

SEQ ID NO: 1470866 - RNA, 19 nt, Artificial Sequence
  Description of Artificial Sequence: Synthetic oligonucleotide
acgaacugaaacgcagcag

SEQ ID NO: 1470867 - RNA, 19 nt, Artificial Sequence
  Description of Artificial Sequence: Synthetic oligonucleotide
cuacguccuggauagaaaa

SEQ ID NO: 1470868 - RNA, 19 nt, Artificial Sequence
  Description of Artificial Sequence: Synthetic oligonucleotide
ggaagcaucugacaccguc

SEQ ID NO: 1470869 - RNA, 19 nt, Artificial Sequence
  Description of Artificial Sequence: Synthetic oligonucleotide
gaucccggaguccggaguc

SEQ ID NO: 1470870 - RNA, 19 nt, Artificial Sequence
  Description of Artificial Sequence: Synthetic oligonucleotide
cuacacacccaguccuggc

SEQ ID NO: 1470871 - RNA, 19 nt, Artificial Sequence
  Description of Artificial Sequence: Synthetic oligonucleotide
uuguggucaaaagguguga

SEQ ID NO: 1470872 - RNA, 19 nt, Artificial Sequence
  Description of Artificial Sequence: Synthetic oligonucleotide
cguaagagguuguacuacg

SEQ ID NO: 1470873 - RNA, 19 nt, Artificial Sequence
  Description of Artificial Sequence: Synthetic oligonucleotide
gaaccugcggaggacgcug

SEQ ID NO: 1470874 - RNA, 19 nt, Artificial Sequence
  Description of Artificial Sequence: Synthetic oligonucleotide
uccugccgggccacgagcc

SEQ ID NO: 1470875 - RNA, 19 nt, Artificial Sequence
  Description of Artificial Sequence: Synthetic oligonucleotide
agacguggagcccuaggaa

SEQ ID NO: 1470876 - RNA, 19 nt, Artificial Sequence
  Description of Artificial Sequence: Synthetic oligonucleotide
gucgcuucauguguucugc

SEQ ID NO: 1470877 - RNA, 19 nt, Artificial Sequence
  Description of Artificial Sequence: Synthetic oligonucleotide
auguuguggucaaaaggug

SEQ ID NO: 1470878 - RNA, 19 nt, Artificial Sequence
  Description of Artificial Sequence: Synthetic oligonucleotide
caugguccgcaccacgaac

SEQ ID NO: 1470879 - RNA, 19 nt, Artificial Sequence
  Description of Artificial Sequence: Synthetic oligonucleotide
gaccggagcguagagcagc

SEQ ID NO: 1470880 - RNA, 19 nt, Artificial Sequence
  Description of Artificial Sequence: Synthetic oligonucleotide
gcuaggagaagaagggaag

SEQ ID NO: 1470881 - RNA, 19 nt, Artificial Sequence
  Description of Artificial Sequence: Synthetic oligonucleotide
guccgcaccacgaaccugc

SEQ ID NO: 1470882 - RNA, 19 nt, Artificial Sequence
  Description of Artificial Sequence: Synthetic oligonucleotide
cugaccaggaagacgugga

SEQ ID NO: 1470883 - RNA, 19 nt, Artificial Sequence
  Description of Artificial Sequence: Synthetic oligonucleotide
gucgugucccuaucugacc

SEQ ID NO: 1470884 - RNA, 19 nt, Artificial Sequence
  Description of Artificial Sequence: Synthetic oligonucleotide
cacgaaccugcggaggacg

SEQ ID NO: 1470885 - RNA, 19 nt, Artificial Sequence
  Description of Artificial Sequence: Synthetic oligonucleotide
cacgaacugaaacgcagca

SEQ ID NO: 1470886 - RNA, 19 nt, Artificial Sequence
  Description of Artificial Sequence: Synthetic oligonucleotide
gguuguacuacguccugga

SEQ ID NO: 1470887 - RNA, 19 nt, Artificial Sequence
  Description of Artificial Sequence: Synthetic oligonucleotide
ugacgcggugaucccggag

SEQ ID NO: 1470888 - RNA, 19 nt, Artificial Sequence
  Description of Artificial Sequence: Synthetic oligonucleotide
ucgugauggucaagucuac

SEQ ID NO: 1470889 - RNA, 19 nt, Artificial Sequence
  Description of Artificial Sequence: Synthetic oligonucleotide
aucgcagccgccucaggaa

SEQ ID NO: 1470890 - RNA, 19 nt, Artificial Sequence
  Description of Artificial Sequence: Synthetic oligonucleotide
gagccggugcgagucaaag

SEQ ID NO: 1470891 - RNA, 19 nt, Artificial Sequence
  Description of Artificial Sequence: Synthetic oligonucleotide
uuccaucgcagccgccuca

SEQ ID NO: 1470892 - RNA, 19 nt, Artificial Sequence
  Description of Artificial Sequence: Synthetic oligonucleotide
uccgcaccacgaaccugcg

SEQ ID NO: 1470893 - RNA, 19 nt, Artificial Sequence
  Description of Artificial Sequence: Synthetic oligonucleotide
gggcuauugaguagagggg

SEQ ID NO: 1470894 - RNA, 19 nt, Artificial Sequence
  Description of Artificial Sequence: Synthetic oligonucleotide
acgcggugaucccggaguc

SEQ ID NO: 1470895 - RNA, 19 nt, Artificial Sequence
  Description of Artificial Sequence: Synthetic oligonucleotide
gaagccccgagaccagcac

SEQ ID NO: 1470896 - RNA, 19 nt, Artificial Sequence
  Description of Artificial Sequence: Synthetic oligonucleotide
ugguccgcaccacgaaccu

SEQ ID NO: 1470897 - RNA, 19 nt, Artificial Sequence
  Description of Artificial Sequence: Synthetic oligonucleotide
ccuguugugagcuggguga

SEQ ID NO: 1470898 - RNA, 19 nt, Artificial Sequence
  Description of Artificial Sequence: Synthetic oligonucleotide
ggacgaaaagugaccacag

SEQ ID NO: 1470899 - RNA, 19 nt, Artificial Sequence
  Description of Artificial Sequence: Synthetic oligonucleotide
acgaaccugcggaggacgc

SEQ ID NO: 1470900 - RNA, 19 nt, Artificial Sequence
  Description of Artificial Sequence: Synthetic oligonucleotide
uaaggacccugacgcggug

SEQ ID NO: 1470901 - RNA, 19 nt, Artificial Sequence
  Description of Artificial Sequence: Synthetic oligonucleotide
uccacccgccuauccaucu

SEQ ID NO: 1470902 - RNA, 19 nt, Artificial Sequence
  Description of Artificial Sequence: Synthetic oligonucleotide
cacucauucggccuguugu

SEQ ID NO: 1470903 - RNA, 19 nt, Artificial Sequence
  Description of Artificial Sequence: Synthetic oligonucleotide
auguuagggcugugggcug

SEQ ID NO: 1470904 - RNA, 19 nt, Artificial Sequence
  Description of Artificial Sequence: Synthetic oligonucleotide
ggauagaaaauggccacga

SEQ ID NO: 1470905 - RNA, 19 nt, Artificial Sequence
  Description of Artificial Sequence: Synthetic oligonucleotide
gccaccuuacuugauacac

SEQ ID NO: 1470906 - RNA, 19 nt, Artificial Sequence
  Description of Artificial Sequence: Synthetic oligonucleotide
gggacgaaaagugaccaca

SEQ ID NO: 1470907 - RNA, 19 nt, Artificial Sequence
  Description of Artificial Sequence: Synthetic oligonucleotide
gacgcggugaucccggagu

SEQ ID NO: 1470908 - RNA, 19 nt, Artificial Sequence
  Description of Artificial Sequence: Synthetic oligonucleotide
cagcggucuuugaacuugc

SEQ ID NO: 1470909 - RNA, 19 nt, Artificial Sequence
  Description of Artificial Sequence: Synthetic oligonucleotide
auaaggacccugacgcggu

SEQ ID NO: 1470910 - RNA, 19 nt, Artificial Sequence
  Description of Artificial Sequence: Synthetic oligonucleotide
gccacgaacugaaacgcag

SEQ ID NO: 1470911 - RNA, 19 nt, Artificial Sequence
  Description of Artificial Sequence: Synthetic oligonucleotide
ugugggcggaagccuugug

SEQ ID NO: 1470912 - RNA, 19 nt, Artificial Sequence
  Description of Artificial Sequence: Synthetic oligonucleotide
cagcguaagagguuguacu

SEQ ID NO: 1470913 - RNA, 19 nt, Artificial Sequence
  Description of Artificial Sequence: Synthetic oligonucleotide
gagcguagagcagcagcgc

SEQ ID NO: 1470914 - RNA, 19 nt, Artificial Sequence
  Description of Artificial Sequence: Synthetic oligonucleotide
ugacggagugagucguguc

SEQ ID NO: 1470915 - RNA, 19 nt, Artificial Sequence
  Description of Artificial Sequence: Synthetic oligonucleotide
gcugaccaggaagacgugg

SEQ ID NO: 1470916 - RNA, 19 nt, Artificial Sequence
  Description of Artificial Sequence: Synthetic oligonucleotide
acaugguccgcaccacgaa

SEQ ID NO: 1470917 - RNA, 19 nt, Artificial Sequence
  Description of Artificial Sequence: Synthetic oligonucleotide
gccgccucaggaaagcagg

SEQ ID NO: 1470918 - RNA, 19 nt, Artificial Sequence
  Description of Artificial Sequence: Synthetic oligonucleotide
caucgcagccgccucagga

SEQ ID NO: 1470919 - RNA, 19 nt, Artificial Sequence
  Description of Artificial Sequence: Synthetic oligonucleotide
gaccagcggucuuugaacu

SEQ ID NO: 1470920 - RNA, 19 nt, Artificial Sequence
  Description of Artificial Sequence: Synthetic oligonucleotide
ugcggcucuggguaccauc

SEQ ID NO: 1470921 - RNA, 19 nt, Artificial Sequence
  Description of Artificial Sequence: Synthetic oligonucleotide
auacaccgugaaagggacg

SEQ ID NO: 1470922 - RNA, 19 nt, Artificial Sequence
  Description of Artificial Sequence: Synthetic oligonucleotide
cccucaagcagauucguga

SEQ ID NO: 1470923 - RNA, 19 nt, Artificial Sequence
  Description of Artificial Sequence: Synthetic oligonucleotide
cuguugugagcugggugag

SEQ ID NO: 1470924 - RNA, 19 nt, Artificial Sequence
  Description of Artificial Sequence: Synthetic oligonucleotide
accgugaaagggacgaaaa

SEQ ID NO: 1470925 - RNA, 19 nt, Artificial Sequence
  Description of Artificial Sequence: Synthetic oligonucleotide
aagcugccgaugaacugga

SEQ ID NO: 1470926 - RNA, 19 nt, Artificial Sequence
  Description of Artificial Sequence: Synthetic oligonucleotide
aucccggaguccggagucc

SEQ ID NO: 1470927 - RNA, 19 nt, Artificial Sequence
  Description of Artificial Sequence: Synthetic oligonucleotide
acacggagugcaaacuccu

SEQ ID NO: 1470928 - RNA, 19 nt, Artificial Sequence
  Description of Artificial Sequence: Synthetic oligonucleotide
ggcggaagccuuguggaag

SEQ ID NO: 1470929 - RNA, 19 nt, Artificial Sequence
  Description of Artificial Sequence: Synthetic oligonucleotide
ucgcuucauguguucugcu

SEQ ID NO: 1470930 - RNA, 19 nt, Artificial Sequence
  Description of Artificial Sequence: Synthetic oligonucleotide
acuacguccuggauagaaa

SEQ ID NO: 1470931 - RNA, 19 nt, Artificial Sequence
  Description of Artificial Sequence: Synthetic oligonucleotide
cacccacucauucggccug

SEQ ID NO: 1470932 - RNA, 19 nt, Artificial Sequence
  Description of Artificial Sequence: Synthetic oligonucleotide
ccacgaacugaaacgcagc

SEQ ID NO: 1470933 - RNA, 19 nt, Artificial Sequence
  Description of Artificial Sequence: Synthetic oligonucleotide
gcacacaugguccgcacca

SEQ ID NO: 1470934 - RNA, 19 nt, Artificial Sequence
  Description of Artificial Sequence: Synthetic oligonucleotide
caccgucacagagaccagc

SEQ ID NO: 1470935 - RNA, 19 nt, Artificial Sequence
  Description of Artificial Sequence: Synthetic oligonucleotide
gcggugaucccggaguccg

SEQ ID NO: 1470936 - RNA, 19 nt, Artificial Sequence
  Description of Artificial Sequence: Synthetic oligonucleotide
ugccauugguagccucuuc

SEQ ID NO: 1470937 - RNA, 19 nt, Artificial Sequence
  Description of Artificial Sequence: Synthetic oligonucleotide
uugcagcguaagagguugu

SEQ ID NO: 1470938 - RNA, 19 nt, Artificial Sequence
  Description of Artificial Sequence: Synthetic oligonucleotide
ugggccugucucucucuga

SEQ ID NO: 1470939 - RNA, 19 nt, Artificial Sequence
  Description of Artificial Sequence: Synthetic oligonucleotide
cuaucugacccaauucuuu

SEQ ID NO: 1470940 - RNA, 19 nt, Artificial Sequence
  Description of Artificial Sequence: Synthetic oligonucleotide
gcuauugaguagaggggug

SEQ ID NO: 1470941 - RNA, 19 nt, Artificial Sequence
  Description of Artificial Sequence: Synthetic oligonucleotide
ugacaccgucacagagacc

SEQ ID NO: 1470942 - RNA, 19 nt, Artificial Sequence
  Description of Artificial Sequence: Synthetic oligonucleotide
gucuacacacccaguccug

SEQ ID NO: 1470943 - RNA, 19 nt, Artificial Sequence
  Description of Artificial Sequence: Synthetic oligonucleotide
ccugacgcggugaucccgg

SEQ ID NO: 1470944 - RNA, 19 nt, Artificial Sequence
  Description of Artificial Sequence: Synthetic oligonucleotide
gcggaagccuuguggaagc

SEQ ID NO: 1470945 - RNA, 19 nt, Artificial Sequence
  Description of Artificial Sequence: Synthetic oligonucleotide
caccacgaaccugcggagg

SEQ ID NO: 1470946 - RNA, 19 nt, Artificial Sequence
  Description of Artificial Sequence: Synthetic oligonucleotide
aaggugugacaugguugga

SEQ ID NO: 1470947 - RNA, 19 nt, Artificial Sequence
  Description of Artificial Sequence: Synthetic oligonucleotide
cacggagugcaaacuccuc

SEQ ID NO: 1470948 - RNA, 19 nt, Artificial Sequence
  Description of Artificial Sequence: Synthetic oligonucleotide
ccgugaaagggacgaaaag

SEQ ID NO: 1470949 - RNA, 19 nt, Artificial Sequence
  Description of Artificial Sequence: Synthetic oligonucleotide
cuccugccgggccacgagc

SEQ ID NO: 1470950 - RNA, 19 nt, Artificial Sequence
  Description of Artificial Sequence: Synthetic oligonucleotide
ggcuaggagaagaagggaa

SEQ ID NO: 1470951 - RNA, 19 nt, Artificial Sequence
  Description of Artificial Sequence: Synthetic oligonucleotide
auugaguagaggggugcua

SEQ ID NO: 1470952 - RNA, 19 nt, Artificial Sequence
  Description of Artificial Sequence: Synthetic oligonucleotide
ggggcaaaacuuccuugac

SEQ ID NO: 1470953 - RNA, 19 nt, Artificial Sequence
  Description of Artificial Sequence: Synthetic oligonucleotide
ccaugaagccccgagacca

SEQ ID NO: 1470954 - RNA, 19 nt, Artificial Sequence
  Description of Artificial Sequence: Synthetic oligonucleotide
gucgcucgggagccggugc

SEQ ID NO: 1470955 - RNA, 19 nt, Artificial Sequence
  Description of Artificial Sequence: Synthetic oligonucleotide
ggugcgagucaaagagccg

SEQ ID NO: 1470956 - RNA, 19 nt, Artificial Sequence
  Description of Artificial Sequence: Synthetic oligonucleotide
agccgccucaggaaagcag

SEQ ID NO: 1470957 - RNA, 19 nt, Artificial Sequence
  Description of Artificial Sequence: Synthetic oligonucleotide
agagaccagcggucuuuga

SEQ ID NO: 1470958 - RNA, 19 nt, Artificial Sequence
  Description of Artificial Sequence: Synthetic oligonucleotide
accugcggaggacgcuguc

SEQ ID NO: 1470959 - RNA, 19 nt, Artificial Sequence
  Description of Artificial Sequence: Synthetic oligonucleotide
ccgaccggagcguagagca

SEQ ID NO: 1470960 - RNA, 19 nt, Artificial Sequence
  Description of Artificial Sequence: Synthetic oligonucleotide
guuccaucgcagccgccuc

SEQ ID NO: 1470961 - RNA, 19 nt, Artificial Sequence
  Description of Artificial Sequence: Synthetic oligonucleotide
ugacgggcccaggaagacu

SEQ ID NO: 1470962 - RNA, 19 nt, Artificial Sequence
  Description of Artificial Sequence: Synthetic oligonucleotide
ugucccuaucugacccaau

SEQ ID NO: 1470963 - RNA, 19 nt, Artificial Sequence
  Description of Artificial Sequence: Synthetic oligonucleotide
cagcuguacaucagaggaa

SEQ ID NO: 1470964 - RNA, 19 nt, Artificial Sequence
  Description of Artificial Sequence: Synthetic oligonucleotide
caucuucgcagggccgcgg

SEQ ID NO: 1470965 - RNA, 19 nt, Artificial Sequence
  Description of Artificial Sequence: Synthetic oligonucleotide
gguugacuauguugugguc

SEQ ID NO: 1470966 - RNA, 19 nt, Artificial Sequence
  Description of Artificial Sequence: Synthetic oligonucleotide
gugcuacagguggugagca

SEQ ID NO: 1470967 - RNA, 19 nt, Artificial Sequence
  Description of Artificial Sequence: Synthetic oligonucleotide
cucauucggccuguuguga

SEQ ID NO: 1470968 - RNA, 19 nt, Artificial Sequence
  Description of Artificial Sequence: Synthetic oligonucleotide
gcguaagagguuguacuac

SEQ ID NO: 1470969 - RNA, 19 nt, Artificial Sequence
  Description of Artificial Sequence: Synthetic oligonucleotide
agccuuguggaagcacaga

SEQ ID NO: 1470970 - RNA, 19 nt, Artificial Sequence
  Description of Artificial Sequence: Synthetic oligonucleotide
cagagaccagcggucuuug

SEQ ID NO: 1470971 - RNA, 19 nt, Artificial Sequence
  Description of Artificial Sequence: Synthetic oligonucleotide
accagcggucuuugaacuu

SEQ ID NO: 1470972 - RNA, 19 nt, Artificial Sequence
  Description of Artificial Sequence: Synthetic oligonucleotide
ggcuauugaguagaggggu

SEQ ID NO: 1470973 - RNA, 19 nt, Artificial Sequence
  Description of Artificial Sequence: Synthetic oligonucleotide
ggagcccuaggaagaggcg

SEQ ID NO: 1470974 - RNA, 19 nt, Artificial Sequence
  Description of Artificial Sequence: Synthetic oligonucleotide
cugucgggcagagcacagc

SEQ ID NO: 1470975 - RNA, 19 nt, Artificial Sequence
  Description of Artificial Sequence: Synthetic oligonucleotide
ccgccuauccaucuccaug

SEQ ID NO: 1470976 - RNA, 19 nt, Artificial Sequence
  Description of Artificial Sequence: Synthetic oligonucleotide
gcaaaggugugggcggaag

SEQ ID NO: 1470977 - RNA, 19 nt, Artificial Sequence
  Description of Artificial Sequence: Synthetic oligonucleotide
gcagauucgugauggucaa

SEQ ID NO: 1470978 - RNA, 19 nt, Artificial Sequence
  Description of Artificial Sequence: Synthetic oligonucleotide
cugacgggcccaggaagac

SEQ ID NO: 1470979 - RNA, 19 nt, Artificial Sequence
  Description of Artificial Sequence: Synthetic oligonucleotide
gcggcucuggguaccaucc

SEQ ID NO: 1470980 - RNA, 19 nt, Artificial Sequence
  Description of Artificial Sequence: Synthetic oligonucleotide
acgcugucgggcagagcac

SEQ ID NO: 1470981 - RNA, 19 nt, Artificial Sequence
  Description of Artificial Sequence: Synthetic oligonucleotide
gugagucgugucccuaucu

SEQ ID NO: 1470982 - RNA, 19 nt, Artificial Sequence
  Description of Artificial Sequence: Synthetic oligonucleotide
gggcaaaacuuccuugacu

SEQ ID NO: 1470983 - RNA, 19 nt, Artificial Sequence
  Description of Artificial Sequence: Synthetic oligonucleotide
cggagcguagagcagcagc

SEQ ID NO: 1470984 - RNA, 19 nt, Artificial Sequence
  Description of Artificial Sequence: Synthetic oligonucleotide
uccuccccaagcugccgau

SEQ ID NO: 1470985 - RNA, 19 nt, Artificial Sequence
  Description of Artificial Sequence: Synthetic oligonucleotide
caggccgaccggagcguag

SEQ ID NO: 1470986 - RNA, 19 nt, Artificial Sequence
  Description of Artificial Sequence: Synthetic oligonucleotide
cagauucgugauggucaag

SEQ ID NO: 1470987 - RNA, 19 nt, Artificial Sequence
  Description of Artificial Sequence: Synthetic oligonucleotide
accuuacuugauacaccgu

SEQ ID NO: 1470988 - RNA, 19 nt, Artificial Sequence
  Description of Artificial Sequence: Synthetic oligonucleotide
aggacgcugucgggcagag

SEQ ID NO: 1470989 - RNA, 19 nt, Artificial Sequence
  Description of Artificial Sequence: Synthetic oligonucleotide
aaccugcggaggacgcugu

SEQ ID NO: 1470990 - RNA, 19 nt, Artificial Sequence
  Description of Artificial Sequence: Synthetic oligonucleotide
cugccgggccacgagcccc

SEQ ID NO: 1470991 - RNA, 19 nt, Artificial Sequence
  Description of Artificial Sequence: Synthetic oligonucleotide
ccaccagcuguuguacacg

SEQ ID NO: 1470992 - RNA, 19 nt, Artificial Sequence
  Description of Artificial Sequence: Synthetic oligonucleotide
ugacuauguuguggucaaa

SEQ ID NO: 1470993 - RNA, 19 nt, Artificial Sequence
  Description of Artificial Sequence: Synthetic oligonucleotide
ucccggaguccggaguccu

SEQ ID NO: 1470994 - RNA, 19 nt, Artificial Sequence
  Description of Artificial Sequence: Synthetic oligonucleotide
ggaguccuccugccgggcc

SEQ ID NO: 1470995 - RNA, 19 nt, Artificial Sequence
  Description of Artificial Sequence: Synthetic oligonucleotide
ccggugcgagucaaagagc

SEQ ID NO: 1470996 - RNA, 19 nt, Artificial Sequence
  Description of Artificial Sequence: Synthetic oligonucleotide
caguucugagacccaggaa

SEQ ID NO: 1470997 - RNA, 19 nt, Artificial Sequence
  Description of Artificial Sequence: Synthetic oligonucleotide
ggaguccggaguccuccug

SEQ ID NO: 1470998 - RNA, 19 nt, Artificial Sequence
  Description of Artificial Sequence: Synthetic oligonucleotide
caccgugaaagggacgaaa

SEQ ID NO: 1470999 - RNA, 19 nt, Artificial Sequence
  Description of Artificial Sequence: Synthetic oligonucleotide
cccuaucugacccaauucu

SEQ ID NO: 1471000 - RNA, 19 nt, Artificial Sequence
  Description of Artificial Sequence: Synthetic oligonucleotide
gacgggcccaggaagacuu

SEQ ID NO: 1471001 - RNA, 19 nt, Artificial Sequence
  Description of Artificial Sequence: Synthetic oligonucleotide
gggccugucucucucugaa

SEQ ID NO: 1471002 - RNA, 19 nt, Artificial Sequence
  Description of Artificial Sequence: Synthetic oligonucleotide
aggccgaccggagcguaga

SEQ ID NO: 1471003 - RNA, 19 nt, Artificial Sequence
  Description of Artificial Sequence: Synthetic oligonucleotide
accggagcguagagcagca

SEQ ID NO: 1471004 - RNA, 19 nt, Artificial Sequence
  Description of Artificial Sequence: Synthetic oligonucleotide
gcaaaacuuccuugacucu

SEQ ID NO: 1471005 - RNA, 19 nt, Artificial Sequence
  Description of Artificial Sequence: Synthetic oligonucleotide
ggugaucccggaguccgga

SEQ ID NO: 1471006 - RNA, 19 nt, Artificial Sequence
  Description of Artificial Sequence: Synthetic oligonucleotide
cuccugacgggcccaggaa

SEQ ID NO: 1471007 - RNA, 19 nt, Artificial Sequence
  Description of Artificial Sequence: Synthetic oligonucleotide
ggugugggcggaagccuug

SEQ ID NO: 1471008 - RNA, 19 nt, Artificial Sequence
  Description of Artificial Sequence: Synthetic oligonucleotide
accagcuguuguacacgga

SEQ ID NO: 1471009 - RNA, 19 nt, Artificial Sequence
  Description of Artificial Sequence: Synthetic oligonucleotide
gugucccuaucugacccaa

SEQ ID NO: 1471010 - RNA, 19 nt, Artificial Sequence
  Description of Artificial Sequence: Synthetic oligonucleotide
agcggucuuugaacuugca

SEQ ID NO: 1471011 - RNA, 19 nt, Artificial Sequence
  Description of Artificial Sequence: Synthetic oligonucleotide
gggcuaggagaagaaggga

SEQ ID NO: 1471012 - RNA, 19 nt, Artificial Sequence
  Description of Artificial Sequence: Synthetic oligonucleotide
acaccgugaaagggacgaa

SEQ ID NO: 1471013 - RNA, 19 nt, Artificial Sequence
  Description of Artificial Sequence: Synthetic oligonucleotide
ccacucauucggccuguug

SEQ ID NO: 1471014 - RNA, 19 nt, Artificial Sequence
  Description of Artificial Sequence: Synthetic oligonucleotide
acccacucauucggccugu

SEQ ID NO: 1471015 - RNA, 19 nt, Artificial Sequence
  Description of Artificial Sequence: Synthetic oligonucleotide
ccccaagcugccgaugaac

SEQ ID NO: 1471016 - RNA, 19 nt, Artificial Sequence
  Description of Artificial Sequence: Synthetic oligonucleotide
gcguaaucuggggugucuc

SEQ ID NO: 1471017 - RNA, 19 nt, Artificial Sequence
  Description of Artificial Sequence: Synthetic oligonucleotide
acccgccuauccaucucca

SEQ ID NO: 1471018 - RNA, 19 nt, Artificial Sequence
  Description of Artificial Sequence: Synthetic oligonucleotide
cuuugggcucagucagccu

SEQ ID NO: 1471019 - RNA, 19 nt, Artificial Sequence
  Description of Artificial Sequence: Synthetic oligonucleotide
cugacggagugagucgugu

SEQ ID NO: 1471020 - RNA, 19 nt, Artificial Sequence
  Description of Artificial Sequence: Synthetic oligonucleotide
gcguagagcagcagcgcga

SEQ ID NO: 1471021 - RNA, 19 nt, Artificial Sequence
  Description of Artificial Sequence: Synthetic oligonucleotide
ggccgaccggagcguagag

SEQ ID NO: 1471022 - RNA, 19 nt, Artificial Sequence
  Description of Artificial Sequence: Synthetic oligonucleotide
ccaucuucgcagggccgcg

SEQ ID NO: 1471023 - RNA, 19 nt, Artificial Sequence
  Description of Artificial Sequence: Synthetic oligonucleotide
gccgaccggagcguagagc

SEQ ID NO: 1471024 - RNA, 19 nt, Artificial Sequence
  Description of Artificial Sequence: Synthetic oligonucleotide
cugcuuugucugacggagu

SEQ ID NO: 1471025 - RNA, 19 nt, Artificial Sequence
  Description of Artificial Sequence: Synthetic oligonucleotide
ggccacgagccccagcacu

SEQ ID NO: 1471026 - RNA, 19 nt, Artificial Sequence
  Description of Artificial Sequence: Synthetic oligonucleotide
ggggaacuuuggggcagag

SEQ ID NO: 1471027 - RNA, 19 nt, Artificial Sequence
  Description of Artificial Sequence: Synthetic oligonucleotide
gcgcgagcagcaggaagcc

SEQ ID NO: 1471028 - RNA, 19 nt, Artificial Sequence
  Description of Artificial Sequence: Synthetic oligonucleotide
cccugacgcggugaucccg

SEQ ID NO: 1471029 - RNA, 19 nt, Artificial Sequence
  Description of Artificial Sequence: Synthetic oligonucleotide
ccuccugccgggccacgag

SEQ ID NO: 1471030 - RNA, 19 nt, Artificial Sequence
  Description of Artificial Sequence: Synthetic oligonucleotide
ccuaucugacccaauucuu

SEQ ID NO: 1471031 - RNA, 19 nt, Artificial Sequence
  Description of Artificial Sequence: Synthetic oligonucleotide
ggccacgaacugaaacgca

SEQ ID NO: 1471032 - RNA, 19 nt, Artificial Sequence
  Description of Artificial Sequence: Synthetic oligonucleotide
cugacgcggugaucccgga

SEQ ID NO: 1471033 - RNA, 19 nt, Artificial Sequence
  Description of Artificial Sequence: Synthetic oligonucleotide
gcucgggagccggugcgag

SEQ ID NO: 1471034 - RNA, 19 nt, Artificial Sequence
  Description of Artificial Sequence: Synthetic oligonucleotide
gguggugagcagguugacu

SEQ ID NO: 1471035 - RNA, 19 nt, Artificial Sequence
  Description of Artificial Sequence: Synthetic oligonucleotide
agggccggugucgccgcca

SEQ ID NO: 1471036 - RNA, 19 nt, Artificial Sequence
  Description of Artificial Sequence: Synthetic oligonucleotide
ccucaagcagauucgugau

SEQ ID NO: 1471037 - RNA, 19 nt, Artificial Sequence
  Description of Artificial Sequence: Synthetic oligonucleotide
cgucacagagaccagcggu

SEQ ID NO: 1471038 - RNA, 19 nt, Artificial Sequence
  Description of Artificial Sequence: Synthetic oligonucleotide
gggcggaagccuuguggaa

SEQ ID NO: 1471039 - RNA, 19 nt, Artificial Sequence
  Description of Artificial Sequence: Synthetic oligonucleotide
acaggccgaccggagcgua

SEQ ID NO: 1471040 - RNA, 19 nt, Artificial Sequence
  Description of Artificial Sequence: Synthetic oligonucleotide
caccaacuccacccgccua

SEQ ID NO: 1471041 - RNA, 19 nt, Artificial Sequence
  Description of Artificial Sequence: Synthetic oligonucleotide
gccuauccaucuccaugaa

SEQ ID NO: 1471042 - RNA, 19 nt, Artificial Sequence
  Description of Artificial Sequence: Synthetic oligonucleotide
agccgucgcucgggagccg

SEQ ID NO: 1471043 - RNA, 19 nt, Artificial Sequence
  Description of Artificial Sequence: Synthetic oligonucleotide
ggagugcaaacuccucauu

SEQ ID NO: 1471044 - RNA, 19 nt, Artificial Sequence
  Description of Artificial Sequence: Synthetic oligonucleotide
ggagugagucgugucccua

SEQ ID NO: 1471045 - RNA, 19 nt, Artificial Sequence
  Description of Artificial Sequence: Synthetic oligonucleotide
ccgcaccacgaaccugcgg

SEQ ID NO: 1471046 - RNA, 19 nt, Artificial Sequence
  Description of Artificial Sequence: Synthetic oligonucleotide
ccacgaaccugcggaggac

SEQ ID NO: 1471047 - RNA, 19 nt, Artificial Sequence
  Description of Artificial Sequence: Synthetic oligonucleotide
guacuacguccuggauaga

SEQ ID NO: 1471048 - RNA, 19 nt, Artificial Sequence
  Description of Artificial Sequence: Synthetic oligonucleotide
ggcguaaucuggggugucu

SEQ ID NO: 1471049 - RNA, 19 nt, Artificial Sequence
  Description of Artificial Sequence: Synthetic oligonucleotide
ccacccacucauucggccu

SEQ ID NO: 1471050 - RNA, 19 nt, Artificial Sequence
  Description of Artificial Sequence: Synthetic oligonucleotide
ccacccgccuauccaucuc

SEQ ID NO: 1471051 - RNA, 19 nt, Artificial Sequence
  Description of Artificial Sequence: Synthetic oligonucleotide
ccaacuccacccgccuauc

SEQ ID NO: 1471052 - RNA, 19 nt, Artificial Sequence
  Description of Artificial Sequence: Synthetic oligonucleotide
cggugaucccggaguccgg

SEQ ID NO: 1471053 - RNA, 19 nt, Artificial Sequence
  Description of Artificial Sequence: Synthetic oligonucleotide
ccccgagaccagcacacaa

SEQ ID NO: 1471054 - RNA, 19 nt, Artificial Sequence
  Description of Artificial Sequence: Synthetic oligonucleotide
ggggcguaaucuggggugu

SEQ ID NO: 1471055 - RNA, 19 nt, Artificial Sequence
  Description of Artificial Sequence: Synthetic oligonucleotide
gugugggcggaagccuugu

SEQ ID NO: 1471056 - RNA, 19 nt, Artificial Sequence
  Description of Artificial Sequence: Synthetic oligonucleotide
cucgggagccggugcgagu

SEQ ID NO: 1471057 - RNA, 19 nt, Artificial Sequence
  Description of Artificial Sequence: Synthetic oligonucleotide
agcugccgaugaacuggau

SEQ ID NO: 1471058 - RNA, 19 nt, Artificial Sequence
  Description of Artificial Sequence: Synthetic oligonucleotide
cgugucccuaucugaccca

SEQ ID NO: 1471059 - RNA, 19 nt, Artificial Sequence
  Description of Artificial Sequence: Synthetic oligonucleotide
gggcguaaucugggguguc

SEQ ID NO: 1471060 - RNA, 19 nt, Artificial Sequence
  Description of Artificial Sequence: Synthetic oligonucleotide
ggacgcugucgggcagagc

SEQ ID NO: 1471061 - RNA, 19 nt, Artificial Sequence
  Description of Artificial Sequence: Synthetic oligonucleotide
cggagugcaaacuccucau

SEQ ID NO: 1471062 - RNA, 19 nt, Artificial Sequence
  Description of Artificial Sequence: Synthetic oligonucleotide
cggugucgccgccaucuuc

SEQ ID NO: 1471063 - RNA, 19 nt, Artificial Sequence
  Description of Artificial Sequence: Synthetic oligonucleotide
cacaggccgaccggagcgu

SEQ ID NO: 1471064 - RNA, 19 nt, Artificial Sequence
  Description of Artificial Sequence: Synthetic oligonucleotide
ccggagcguagagcagcag

SEQ ID NO: 1471065 - RNA, 19 nt, Artificial Sequence
  Description of Artificial Sequence: Synthetic oligonucleotide
cccuaggaagaggcgcaga

SEQ ID NO: 1471066 - RNA, 19 nt, Artificial Sequence
  Description of Artificial Sequence: Synthetic oligonucleotide
cgcugucgggcagagcaca

SEQ ID NO: 1471067 - RNA, 19 nt, Artificial Sequence
  Description of Artificial Sequence: Synthetic oligonucleotide
cggaguccuccugccgggc

SEQ ID NO: 1471068 - RNA, 19 nt, Artificial Sequence
  Description of Artificial Sequence: Synthetic oligonucleotide
cuccggccccggagcugga

SEQ ID NO: 1471069 - RNA, 19 nt, Artificial Sequence
  Description of Artificial Sequence: Synthetic oligonucleotide
gggccggugucgccgccau

SEQ ID NO: 1471070 - RNA, 19 nt, Artificial Sequence
  Description of Artificial Sequence: Synthetic oligonucleotide
cggaagccuuguggaagca

SEQ ID NO: 1471071 - RNA, 19 nt, Artificial Sequence
  Description of Artificial Sequence: Synthetic oligonucleotide
cggagugagucgugucccu

SEQ ID NO: 1471072 - RNA, 19 nt, Artificial Sequence
  Description of Artificial Sequence: Synthetic oligonucleotide
cccgccuauccaucuccau

SEQ ID NO: 1471073 - RNA, 19 nt, Artificial Sequence
  Description of Artificial Sequence: Synthetic oligonucleotide
cgggagccggugcgaguca

SEQ ID NO: 1471074 - RNA, 19 nt, Artificial Sequence
  Description of Artificial Sequence: Synthetic oligonucleotide
cgaaccugcggaggacgcu

SEQ ID NO: 1471075 - RNA, 19 nt, Artificial Sequence
  Description of Artificial Sequence: Synthetic oligonucleotide
cggaguccggaguccuccu

SEQ ID NO: 1471076 - RNA, 19 nt, Artificial Sequence
  Description of Artificial Sequence: Synthetic oligonucleotide
gggcagggacugagauccu

SEQ ID NO: 1471077 - RNA, 19 nt, Artificial Sequence
  Description of Artificial Sequence: Synthetic oligonucleotide
cccacucauucggccuguu

SEQ ID NO: 1471078 - RNA, 19 nt, Artificial Sequence
  Description of Artificial Sequence: Synthetic oligonucleotide
aaauuugucaaguccaaac

SEQ ID NO: 1471079 - RNA, 19 nt, Artificial Sequence
  Description of Artificial Sequence: Synthetic oligonucleotide
uaaaaugcaaaacuguucc

SEQ ID NO: 1471080 - RNA, 19 nt, Artificial Sequence
  Description of Artificial Sequence: Synthetic oligonucleotide
uuuucuaaaaugcaaaacu

SEQ ID NO: 1471081 - RNA, 19 nt, Artificial Sequence
  Description of Artificial Sequence: Synthetic oligonucleotide
aaagaggagaguuuggguc

SEQ ID NO: 1471082 - RNA, 19 nt, Artificial Sequence
  Description of Artificial Sequence: Synthetic oligonucleotide
aagcccauggcauagacuc

SEQ ID NO: 1471083 - RNA, 19 nt, Artificial Sequence
  Description of Artificial Sequence: Synthetic oligonucleotide
auagcuaaaacaaaggcgg

SEQ ID NO: 1471084 - RNA, 19 nt, Artificial Sequence
  Description of Artificial Sequence: Synthetic oligonucleotide
uacacuuuguucaacauca

SEQ ID NO: 1471085 - RNA, 19 nt, Artificial Sequence
  Description of Artificial Sequence: Synthetic oligonucleotide
cauagcuaaaacaaaggcg

SEQ ID NO: 1471086 - RNA, 19 nt, Artificial Sequence
  Description of Artificial Sequence: Synthetic oligonucleotide
uuucuaaaaugcaaaacug

SEQ ID NO: 1471087 - RNA, 19 nt, Artificial Sequence
  Description of Artificial Sequence: Synthetic oligonucleotide
auggaauuugcccaucugc

SEQ ID NO: 1471088 - RNA, 19 nt, Artificial Sequence
  Description of Artificial Sequence: Synthetic oligonucleotide
agaagcugggguuucaggc

SEQ ID NO: 1471089 - RNA, 19 nt, Artificial Sequence
  Description of Artificial Sequence: Synthetic oligonucleotide
aauuugucaaguccaaaca

SEQ ID NO: 1471090 - RNA, 19 nt, Artificial Sequence
  Description of Artificial Sequence: Synthetic oligonucleotide
aaauugaugacgacaguac

SEQ ID NO: 1471091 - RNA, 19 nt, Artificial Sequence
  Description of Artificial Sequence: Synthetic oligonucleotide
cuuuguucaacaucaauac

SEQ ID NO: 1471092 - RNA, 19 nt, Artificial Sequence
  Description of Artificial Sequence: Synthetic oligonucleotide
aaugcaaaacuguuccuug

SEQ ID NO: 1471093 - RNA, 19 nt, Artificial Sequence
  Description of Artificial Sequence: Synthetic oligonucleotide
auauguuggggacaggcac

SEQ ID NO: 1471094 - RNA, 19 nt, Artificial Sequence
  Description of Artificial Sequence: Synthetic oligonucleotide
aaaacuguuccuuggauuu

SEQ ID NO: 1471095 - RNA, 19 nt, Artificial Sequence
  Description of Artificial Sequence: Synthetic oligonucleotide
aacgcauucuccuggaucu

SEQ ID NO: 1471096 - RNA, 19 nt, Artificial Sequence
  Description of Artificial Sequence: Synthetic oligonucleotide
uucuaaaaugcaaaacugu

SEQ ID NO: 1471097 - RNA, 19 nt, Artificial Sequence
  Description of Artificial Sequence: Synthetic oligonucleotide
uuugucaaguccaaacaug

SEQ ID NO: 1471098 - RNA, 19 nt, Artificial Sequence
  Description of Artificial Sequence: Synthetic oligonucleotide
uguuugaagugccaguuca

SEQ ID NO: 1471099 - RNA, 19 nt, Artificial Sequence
  Description of Artificial Sequence: Synthetic oligonucleotide
uucucuuuugccuucccgg

SEQ ID NO: 1471100 - RNA, 19 nt, Artificial Sequence
  Description of Artificial Sequence: Synthetic oligonucleotide
ucuaaaaugcaaaacuguu

SEQ ID NO: 1471101 - RNA, 19 nt, Artificial Sequence
  Description of Artificial Sequence: Synthetic oligonucleotide
uacucuuugcacaaauuug

SEQ ID NO: 1471102 - RNA, 19 nt, Artificial Sequence
  Description of Artificial Sequence: Synthetic oligonucleotide
aauugaugacgacaguaca

SEQ ID NO: 1471103 - RNA, 19 nt, Artificial Sequence
  Description of Artificial Sequence: Synthetic oligonucleotide
ucuggauggaauuugccca

SEQ ID NO: 1471104 - RNA, 19 nt, Artificial Sequence
  Description of Artificial Sequence: Synthetic oligonucleotide
uugucaaguccaaacauga

SEQ ID NO: 1471105 - RNA, 19 nt, Artificial Sequence
  Description of Artificial Sequence: Synthetic oligonucleotide
augauucugaaugagguag

SEQ ID NO: 1471106 - RNA, 19 nt, Artificial Sequence
  Description of Artificial Sequence: Synthetic oligonucleotide
ccaaacaugauucugaaug

SEQ ID NO: 1471107 - RNA, 19 nt, Artificial Sequence
  Description of Artificial Sequence: Synthetic oligonucleotide
aacaugauucugaaugagg

SEQ ID NO: 1471108 - RNA, 19 nt, Artificial Sequence
  Description of Artificial Sequence: Synthetic oligonucleotide
ucuccuggaucuuggaugg

SEQ ID NO: 1471109 - RNA, 19 nt, Artificial Sequence
  Description of Artificial Sequence: Synthetic oligonucleotide
ucgauugaagcccauggca

SEQ ID NO: 1471110 - RNA, 19 nt, Artificial Sequence
  Description of Artificial Sequence: Synthetic oligonucleotide
aacuguuccuuggauuucc

SEQ ID NO: 1471111 - RNA, 19 nt, Artificial Sequence
  Description of Artificial Sequence: Synthetic oligonucleotide
cuaaaaugcaaaacuguuc

SEQ ID NO: 1471112 - RNA, 19 nt, Artificial Sequence
  Description of Artificial Sequence: Synthetic oligonucleotide
uucuccuggaucuuggaug

SEQ ID NO: 1471113 - RNA, 19 nt, Artificial Sequence
  Description of Artificial Sequence: Synthetic oligonucleotide
uuacucuuugcacaaauuu

SEQ ID NO: 1471114 - RNA, 19 nt, Artificial Sequence
  Description of Artificial Sequence: Synthetic oligonucleotide
acgacaguacacuuuguuc

SEQ ID NO: 1471115 - RNA, 19 nt, Artificial Sequence
  Description of Artificial Sequence: Synthetic oligonucleotide
ugauucugaaugagguagg

SEQ ID NO: 1471116 - RNA, 19 nt, Artificial Sequence
  Description of Artificial Sequence: Synthetic oligonucleotide
uuggauuuccccuuacucu

SEQ ID NO: 1471117 - RNA, 19 nt, Artificial Sequence
  Description of Artificial Sequence: Synthetic oligonucleotide
ucuuugcacaaauuuguca

SEQ ID NO: 1471118 - RNA, 19 nt, Artificial Sequence
  Description of Artificial Sequence: Synthetic oligonucleotide
uggaauuugcccaucugcu

SEQ ID NO: 1471119 - RNA, 19 nt, Artificial Sequence
  Description of Artificial Sequence: Synthetic oligonucleotide
auaagcgagcuucaggucu

SEQ ID NO: 1471120 - RNA, 19 nt, Artificial Sequence
  Description of Artificial Sequence: Synthetic oligonucleotide
ugaagugccaguucauaug

SEQ ID NO: 1471121 - RNA, 19 nt, Artificial Sequence
  Description of Artificial Sequence: Synthetic oligonucleotide
gaagcugggguuucaggcg

SEQ ID NO: 1471122 - RNA, 19 nt, Artificial Sequence
  Description of Artificial Sequence: Synthetic oligonucleotide
auugaugacgacaguacac

SEQ ID NO: 1471123 - RNA, 19 nt, Artificial Sequence
  Description of Artificial Sequence: Synthetic oligonucleotide
cauggcauagacuccuugg

SEQ ID NO: 1471124 - RNA, 19 nt, Artificial Sequence
  Description of Artificial Sequence: Synthetic oligonucleotide
acaaaggcggcuguuuucc

SEQ ID NO: 1471125 - RNA, 19 nt, Artificial Sequence
  Description of Artificial Sequence: Synthetic oligonucleotide
uuggauggucgauugaagc

SEQ ID NO: 1471126 - RNA, 19 nt, Artificial Sequence
  Description of Artificial Sequence: Synthetic oligonucleotide
aacacugaggguaucuguc

SEQ ID NO: 1471127 - RNA, 19 nt, Artificial Sequence
  Description of Artificial Sequence: Synthetic oligonucleotide
guaaagaggagaguuuggg

SEQ ID NO: 1471128 - RNA, 19 nt, Artificial Sequence
  Description of Artificial Sequence: Synthetic oligonucleotide
caggcacaaacacugaggg

SEQ ID NO: 1471129 - RNA, 19 nt, Artificial Sequence
  Description of Artificial Sequence: Synthetic oligonucleotide
ucuuuugccuucccggaag

SEQ ID NO: 1471130 - RNA, 19 nt, Artificial Sequence
  Description of Artificial Sequence: Synthetic oligonucleotide
gagcauagcuaaaacaaag

SEQ ID NO: 1471131 - RNA, 19 nt, Artificial Sequence
  Description of Artificial Sequence: Synthetic oligonucleotide
ucauauguuggggacaggc

SEQ ID NO: 1471132 - RNA, 19 nt, Artificial Sequence
  Description of Artificial Sequence: Synthetic oligonucleotide
augacgacaguacacuuug

SEQ ID NO: 1471133 - RNA, 19 nt, Artificial Sequence
  Description of Artificial Sequence: Synthetic oligonucleotide
aaacaugauucugaaugag

SEQ ID NO: 1471134 - RNA, 19 nt, Artificial Sequence
  Description of Artificial Sequence: Synthetic oligonucleotide
aaaaugcaaaacuguuccu

SEQ ID NO: 1471135 - RNA, 19 nt, Artificial Sequence
  Description of Artificial Sequence: Synthetic oligonucleotide
gguucagcaagcaucaugg

SEQ ID NO: 1471136 - RNA, 19 nt, Artificial Sequence
  Description of Artificial Sequence: Synthetic oligonucleotide
uguuccuuggauuuccccu

SEQ ID NO: 1471137 - RNA, 19 nt, Artificial Sequence
  Description of Artificial Sequence: Synthetic oligonucleotide
uggauggucgauugaagcc

SEQ ID NO: 1471138 - RNA, 19 nt, Artificial Sequence
  Description of Artificial Sequence: Synthetic oligonucleotide
ugacugggcaaucagguuc

SEQ ID NO: 1471139 - RNA, 19 nt, Artificial Sequence
  Description of Artificial Sequence: Synthetic oligonucleotide
agugccaguucauauguug

SEQ ID NO: 1471140 - RNA, 19 nt, Artificial Sequence
  Description of Artificial Sequence: Synthetic oligonucleotide
acugaggguaucugucugc

SEQ ID NO: 1471141 - RNA, 19 nt, Artificial Sequence
  Description of Artificial Sequence: Synthetic oligonucleotide
uuugcacaaauuugucaag

SEQ ID NO: 1471142 - RNA, 19 nt, Artificial Sequence
  Description of Artificial Sequence: Synthetic oligonucleotide
cacaaauuugucaagucca

SEQ ID NO: 1471143 - RNA, 19 nt, Artificial Sequence
  Description of Artificial Sequence: Synthetic oligonucleotide
aaacacugaggguaucugu

SEQ ID NO: 1471144 - RNA, 19 nt, Artificial Sequence
  Description of Artificial Sequence: Synthetic oligonucleotide
gaauuugcccaucugcuca

SEQ ID NO: 1471145 - RNA, 19 nt, Artificial Sequence
  Description of Artificial Sequence: Synthetic oligonucleotide
ucaccuuuccuguuugaag

SEQ ID NO: 1471146 - RNA, 19 nt, Artificial Sequence
  Description of Artificial Sequence: Synthetic oligonucleotide
cugagcauagcuaaaacaa

SEQ ID NO: 1471147 - RNA, 19 nt, Artificial Sequence
  Description of Artificial Sequence: Synthetic oligonucleotide
gaguaaagaggagaguuug

SEQ ID NO: 1471148 - RNA, 19 nt, Artificial Sequence
  Description of Artificial Sequence: Synthetic oligonucleotide
auuugucaaguccaaacau

SEQ ID NO: 1471149 - RNA, 19 nt, Artificial Sequence
  Description of Artificial Sequence: Synthetic oligonucleotide
cuuugcacaaauuugucaa

SEQ ID NO: 1471150 - RNA, 19 nt, Artificial Sequence
  Description of Artificial Sequence: Synthetic oligonucleotide
uaaagaggagaguuugggu

SEQ ID NO: 1471151 - RNA, 19 nt, Artificial Sequence
  Description of Artificial Sequence: Synthetic oligonucleotide
agcauagcuaaaacaaagg

SEQ ID NO: 1471152 - RNA, 19 nt, Artificial Sequence
  Description of Artificial Sequence: Synthetic oligonucleotide
uucacugaguaaagaggag

SEQ ID NO: 1471153 - RNA, 19 nt, Artificial Sequence
  Description of Artificial Sequence: Synthetic oligonucleotide
ugccaguucauauguuggg

SEQ ID NO: 1471154 - RNA, 19 nt, Artificial Sequence
  Description of Artificial Sequence: Synthetic oligonucleotide
augcaaaacuguuccuugg

SEQ ID NO: 1471155 - RNA, 19 nt, Artificial Sequence
  Description of Artificial Sequence: Synthetic oligonucleotide
ugcaaaacuguuccuugga

SEQ ID NO: 1471156 - RNA, 19 nt, Artificial Sequence
  Description of Artificial Sequence: Synthetic oligonucleotide
ugagcauagcuaaaacaaa

SEQ ID NO: 1471157 - RNA, 19 nt, Artificial Sequence
  Description of Artificial Sequence: Synthetic oligonucleotide
aaaugcaaaacuguuccuu

SEQ ID NO: 1471158 - RNA, 19 nt, Artificial Sequence
  Description of Artificial Sequence: Synthetic oligonucleotide
cuuggauuuccccuuacuc

SEQ ID NO: 1471159 - RNA, 19 nt, Artificial Sequence
  Description of Artificial Sequence: Synthetic oligonucleotide
guaucugucugcugguucc

SEQ ID NO: 1471160 - RNA, 19 nt, Artificial Sequence
  Description of Artificial Sequence: Synthetic oligonucleotide
gaucuuggauggucgauug

SEQ ID NO: 1471161 - RNA, 19 nt, Artificial Sequence
  Description of Artificial Sequence: Synthetic oligonucleotide
uaggucuguccacaggaag

SEQ ID NO: 1471162 - RNA, 19 nt, Artificial Sequence
  Description of Artificial Sequence: Synthetic oligonucleotide
uggcauagacuccuuggag

SEQ ID NO: 1471163 - RNA, 19 nt, Artificial Sequence
  Description of Artificial Sequence: Synthetic oligonucleotide
uauguuggggacaggcaca

SEQ ID NO: 1471164 - RNA, 19 nt, Artificial Sequence
  Description of Artificial Sequence: Synthetic oligonucleotide
acaugauucugaaugaggu

SEQ ID NO: 1471165 - RNA, 19 nt, Artificial Sequence
  Description of Artificial Sequence: Synthetic oligonucleotide
uuuccccuuacucuuugca

SEQ ID NO: 1471166 - RNA, 19 nt, Artificial Sequence
  Description of Artificial Sequence: Synthetic oligonucleotide
gagaguuugggucccuuug

SEQ ID NO: 1471167 - RNA, 19 nt, Artificial Sequence
  Description of Artificial Sequence: Synthetic oligonucleotide
gcauagcuaaaacaaaggc

SEQ ID NO: 1471168 - RNA, 19 nt, Artificial Sequence
  Description of Artificial Sequence: Synthetic oligonucleotide
gacaggcacaaacacugag

SEQ ID NO: 1471169 - RNA, 19 nt, Artificial Sequence
  Description of Artificial Sequence: Synthetic oligonucleotide
gaugcagguaggucugucc

SEQ ID NO: 1471170 - RNA, 19 nt, Artificial Sequence
  Description of Artificial Sequence: Synthetic oligonucleotide
uugaugacgacaguacacu

SEQ ID NO: 1471171 - RNA, 19 nt, Artificial Sequence
  Description of Artificial Sequence: Synthetic oligonucleotide
aggaccuucucuuuugccu

SEQ ID NO: 1471172 - RNA, 19 nt, Artificial Sequence
  Description of Artificial Sequence: Synthetic oligonucleotide
acuuuguucaacaucaaua

SEQ ID NO: 1471173 - RNA, 19 nt, Artificial Sequence
  Description of Artificial Sequence: Synthetic oligonucleotide
guuggggacaggcacaaac

SEQ ID NO: 1471174 - RNA, 19 nt, Artificial Sequence
  Description of Artificial Sequence: Synthetic oligonucleotide
uuggggacaggcacaaaca

SEQ ID NO: 1471175 - RNA, 19 nt, Artificial Sequence
  Description of Artificial Sequence: Synthetic oligonucleotide
uccccuuacucuuugcaca

SEQ ID NO: 1471176 - RNA, 19 nt, Artificial Sequence
  Description of Artificial Sequence: Synthetic oligonucleotide
ggucgauugaagcccaugg

SEQ ID NO: 1471177 - RNA, 19 nt, Artificial Sequence
  Description of Artificial Sequence: Synthetic oligonucleotide
ugggguuucaggcgaagcu

SEQ ID NO: 1471178 - RNA, 19 nt, Artificial Sequence
  Description of Artificial Sequence: Synthetic oligonucleotide
aaacaaaggcggcuguuuu

SEQ ID NO: 1471179 - RNA, 19 nt, Artificial Sequence
  Description of Artificial Sequence: Synthetic oligonucleotide
acugugacugggcaaucag

SEQ ID NO: 1471180 - RNA, 19 nt, Artificial Sequence
  Description of Artificial Sequence: Synthetic oligonucleotide
uugaagugccaguucauau

SEQ ID NO: 1471181 - RNA, 19 nt, Artificial Sequence
  Description of Artificial Sequence: Synthetic oligonucleotide
ugaguaaagaggagaguuu

SEQ ID NO: 1471182 - RNA, 19 nt, Artificial Sequence
  Description of Artificial Sequence: Synthetic oligonucleotide
gauggaauuugcccaucug

SEQ ID NO: 1471183 - RNA, 19 nt, Artificial Sequence
  Description of Artificial Sequence: Synthetic oligonucleotide
uccuuggagaagcuggggu

SEQ ID NO: 1471184 - RNA, 19 nt, Artificial Sequence
  Description of Artificial Sequence: Synthetic oligonucleotide
auuuccccuuacucuuugc

SEQ ID NO: 1471185 - RNA, 19 nt, Artificial Sequence
  Description of Artificial Sequence: Synthetic oligonucleotide
cuuggauggucgauugaag

SEQ ID NO: 1471186 - RNA, 19 nt, Artificial Sequence
  Description of Artificial Sequence: Synthetic oligonucleotide
gcacaaauuugucaagucc

SEQ ID NO: 1471187 - RNA, 19 nt, Artificial Sequence
  Description of Artificial Sequence: Synthetic oligonucleotide
uaagcgagcuucaggucug

SEQ ID NO: 1471188 - RNA, 19 nt, Artificial Sequence
  Description of Artificial Sequence: Synthetic oligonucleotide
uagcuaaaacaaaggcggc

SEQ ID NO: 1471189 - RNA, 19 nt, Artificial Sequence
  Description of Artificial Sequence: Synthetic oligonucleotide
ucuuggauggucgauugaa

SEQ ID NO: 1471190 - RNA, 19 nt, Artificial Sequence
  Description of Artificial Sequence: Synthetic oligonucleotide
ucucuuuugccuucccgga

SEQ ID NO: 1471191 - RNA, 19 nt, Artificial Sequence
  Description of Artificial Sequence: Synthetic oligonucleotide
ucaaucaccuuuccuguuu

SEQ ID NO: 1471192 - RNA, 19 nt, Artificial Sequence
  Description of Artificial Sequence: Synthetic oligonucleotide
auugaagcccauggcauag

SEQ ID NO: 1471193 - RNA, 19 nt, Artificial Sequence
  Description of Artificial Sequence: Synthetic oligonucleotide
aguaaagaggagaguuugg

SEQ ID NO: 1471194 - RNA, 19 nt, Artificial Sequence
  Description of Artificial Sequence: Synthetic oligonucleotide
caaacaugauucugaauga

SEQ ID NO: 1471195 - RNA, 19 nt, Artificial Sequence
  Description of Artificial Sequence: Synthetic oligonucleotide
aaaacaaaggcggcuguuu

SEQ ID NO: 1471196 - RNA, 19 nt, Artificial Sequence
  Description of Artificial Sequence: Synthetic oligonucleotide
aaacuguuccuuggauuuc

SEQ ID NO: 1471197 - RNA, 19 nt, Artificial Sequence
  Description of Artificial Sequence: Synthetic oligonucleotide
uggauuuccccuuacucuu

SEQ ID NO: 1471198 - RNA, 19 nt, Artificial Sequence
  Description of Artificial Sequence: Synthetic oligonucleotide
cuucucuuuugccuucccg

SEQ ID NO: 1471199 - RNA, 19 nt, Artificial Sequence
  Description of Artificial Sequence: Synthetic oligonucleotide
accacaccaggcuaggacu

SEQ ID NO: 1471200 - RNA, 19 nt, Artificial Sequence
  Description of Artificial Sequence: Synthetic oligonucleotide
ucaugggcaacgcauucuc

SEQ ID NO: 1471201 - RNA, 19 nt, Artificial Sequence
  Description of Artificial Sequence: Synthetic oligonucleotide
uccacucugcugagcauag

SEQ ID NO: 1471202 - RNA, 19 nt, Artificial Sequence
  Description of Artificial Sequence: Synthetic oligonucleotide
ugcugagcauagcuaaaac

SEQ ID NO: 1471203 - RNA, 19 nt, Artificial Sequence
  Description of Artificial Sequence: Synthetic oligonucleotide
auggcauagacuccuugga

SEQ ID NO: 1471204 - RNA, 19 nt, Artificial Sequence
  Description of Artificial Sequence: Synthetic oligonucleotide
augggcaacgcauucuccu

SEQ ID NO: 1471205 - RNA, 19 nt, Artificial Sequence
  Description of Artificial Sequence: Synthetic oligonucleotide
uugcacaaauuugucaagu

SEQ ID NO: 1471206 - RNA, 19 nt, Artificial Sequence
  Description of Artificial Sequence: Synthetic oligonucleotide
ugaagcccauggcauagac

SEQ ID NO: 1471207 - RNA, 19 nt, Artificial Sequence
  Description of Artificial Sequence: Synthetic oligonucleotide
guacacuuuguucaacauc

SEQ ID NO: 1471208 - RNA, 19 nt, Artificial Sequence
  Description of Artificial Sequence: Synthetic oligonucleotide
aggucuguccacaggaagg

SEQ ID NO: 1471209 - RNA, 19 nt, Artificial Sequence
  Description of Artificial Sequence: Synthetic oligonucleotide
ucugcugguuccacucugc

SEQ ID NO: 1471210 - RNA, 19 nt, Artificial Sequence
  Description of Artificial Sequence: Synthetic oligonucleotide
aauuugcccaucugcucaa

SEQ ID NO: 1471211 - RNA, 19 nt, Artificial Sequence
  Description of Artificial Sequence: Synthetic oligonucleotide
gucgauugaagcccauggc

SEQ ID NO: 1471212 - RNA, 19 nt, Artificial Sequence
  Description of Artificial Sequence: Synthetic oligonucleotide
gauuuccccuuacucuuug

SEQ ID NO: 1471213 - RNA, 19 nt, Artificial Sequence
  Description of Artificial Sequence: Synthetic oligonucleotide
uuccccuuacucuuugcac

SEQ ID NO: 1471214 - RNA, 19 nt, Artificial Sequence
  Description of Artificial Sequence: Synthetic oligonucleotide
aguacacuuuguucaacau

SEQ ID NO: 1471215 - RNA, 19 nt, Artificial Sequence
  Description of Artificial Sequence: Synthetic oligonucleotide
gaagugccaguucauaugu

SEQ ID NO: 1471216 - RNA, 19 nt, Artificial Sequence
  Description of Artificial Sequence: Synthetic oligonucleotide
augcagguaggucugucca

SEQ ID NO: 1471217 - RNA, 19 nt, Artificial Sequence
  Description of Artificial Sequence: Synthetic oligonucleotide
ucugccucucaggugcugg

SEQ ID NO: 1471218 - RNA, 19 nt, Artificial Sequence
  Description of Artificial Sequence: Synthetic oligonucleotide
gugccaguucauauguugg

SEQ ID NO: 1471219 - RNA, 19 nt, Artificial Sequence
  Description of Artificial Sequence: Synthetic oligonucleotide
gggacaggcacaaacacug

SEQ ID NO: 1471220 - RNA, 19 nt, Artificial Sequence
  Description of Artificial Sequence: Synthetic oligonucleotide
uccuguuugaagugccagu

SEQ ID NO: 1471221 - RNA, 19 nt, Artificial Sequence
  Description of Artificial Sequence: Synthetic oligonucleotide
aaucaccuuuccuguuuga

SEQ ID NO: 1471222 - RNA, 19 nt, Artificial Sequence
  Description of Artificial Sequence: Synthetic oligonucleotide
cucuuugcacaaauuuguc

SEQ ID NO: 1471223 - RNA, 19 nt, Artificial Sequence
  Description of Artificial Sequence: Synthetic oligonucleotide
aggucuggauggaauuugc

SEQ ID NO: 1471224 - RNA, 19 nt, Artificial Sequence
  Description of Artificial Sequence: Synthetic oligonucleotide
gcaagcaucaugggcaacg

SEQ ID NO: 1471225 - RNA, 19 nt, Artificial Sequence
  Description of Artificial Sequence: Synthetic oligonucleotide
gguaggucuguccacagga

SEQ ID NO: 1471226 - RNA, 19 nt, Artificial Sequence
  Description of Artificial Sequence: Synthetic oligonucleotide
uuugaagugccaguucaua

SEQ ID NO: 1471227 - RNA, 19 nt, Artificial Sequence
  Description of Artificial Sequence: Synthetic oligonucleotide
acacugaggguaucugucu

SEQ ID NO: 1471228 - RNA, 19 nt, Artificial Sequence
  Description of Artificial Sequence: Synthetic oligonucleotide
acaaacacugaggguaucu

SEQ ID NO: 1471229 - RNA, 19 nt, Artificial Sequence
  Description of Artificial Sequence: Synthetic oligonucleotide
agcuaaaacaaaggcggcu

SEQ ID NO: 1471230 - RNA, 19 nt, Artificial Sequence
  Description of Artificial Sequence: Synthetic oligonucleotide
agguaggucuguccacagg

SEQ ID NO: 1471231 - RNA, 19 nt, Artificial Sequence
  Description of Artificial Sequence: Synthetic oligonucleotide
acaguacacuuuguucaac

SEQ ID NO: 1471232 - RNA, 19 nt, Artificial Sequence
  Description of Artificial Sequence: Synthetic oligonucleotide
caacgcauucuccuggauc

SEQ ID NO: 1471233 - RNA, 19 nt, Artificial Sequence
  Description of Artificial Sequence: Synthetic oligonucleotide
ugggcaacgcauucuccug

SEQ ID NO: 1471234 - RNA, 19 nt, Artificial Sequence
  Description of Artificial Sequence: Synthetic oligonucleotide
agcaucaugggcaacgcau

SEQ ID NO: 1471235 - RNA, 19 nt, Artificial Sequence
  Description of Artificial Sequence: Synthetic oligonucleotide
gcuaaaacaaaggcggcug

SEQ ID NO: 1471236 - RNA, 19 nt, Artificial Sequence
  Description of Artificial Sequence: Synthetic oligonucleotide
ucugcugagcauagcuaaa

SEQ ID NO: 1471237 - RNA, 19 nt, Artificial Sequence
  Description of Artificial Sequence: Synthetic oligonucleotide
accuuuccuguuugaagug

SEQ ID NO: 1471238 - RNA, 19 nt, Artificial Sequence
  Description of Artificial Sequence: Synthetic oligonucleotide
caaucaccuuuccuguuug

SEQ ID NO: 1471239 - RNA, 19 nt, Artificial Sequence
  Description of Artificial Sequence: Synthetic oligonucleotide
aagcaucaugggcaacgca

SEQ ID NO: 1471240 - RNA, 19 nt, Artificial Sequence
  Description of Artificial Sequence: Synthetic oligonucleotide
cuuuugccuucccggaagc

SEQ ID NO: 1471241 - RNA, 19 nt, Artificial Sequence
  Description of Artificial Sequence: Synthetic oligonucleotide
ggauggucgauugaagccc

SEQ ID NO: 1471242 - RNA, 19 nt, Artificial Sequence
  Description of Artificial Sequence: Synthetic oligonucleotide
caguacacuuuguucaaca

SEQ ID NO: 1471243 - RNA, 19 nt, Artificial Sequence
  Description of Artificial Sequence: Synthetic oligonucleotide
cauauguuggggacaggca

SEQ ID NO: 1471244 - RNA, 19 nt, Artificial Sequence
  Description of Artificial Sequence: Synthetic oligonucleotide
gacaguacacuuuguucaa

SEQ ID NO: 1471245 - RNA, 19 nt, Artificial Sequence
  Description of Artificial Sequence: Synthetic oligonucleotide
ugcugguuccacucugcug

SEQ ID NO: 1471246 - RNA, 19 nt, Artificial Sequence
  Description of Artificial Sequence: Synthetic oligonucleotide
ucugucugcugguuccacu

SEQ ID NO: 1471247 - RNA, 19 nt, Artificial Sequence
  Description of Artificial Sequence: Synthetic oligonucleotide
gcugagcauagcuaaaaca

SEQ ID NO: 1471248 - RNA, 19 nt, Artificial Sequence
  Description of Artificial Sequence: Synthetic oligonucleotide
auucuccuggaucuuggau

SEQ ID NO: 1471249 - RNA, 19 nt, Artificial Sequence
  Description of Artificial Sequence: Synthetic oligonucleotide
cugucugcugguuccacuc

SEQ ID NO: 1471250 - RNA, 19 nt, Artificial Sequence
  Description of Artificial Sequence: Synthetic oligonucleotide
uucccaguaccagacugug

SEQ ID NO: 1471251 - RNA, 19 nt, Artificial Sequence
  Description of Artificial Sequence: Synthetic oligonucleotide
gcaaucagguucugugggg

SEQ ID NO: 1471252 - RNA, 19 nt, Artificial Sequence
  Description of Artificial Sequence: Synthetic oligonucleotide
caugggcaacgcauucucc

SEQ ID NO: 1471253 - RNA, 19 nt, Artificial Sequence
  Description of Artificial Sequence: Synthetic oligonucleotide
cuguuccuuggauuucccc

SEQ ID NO: 1471254 - RNA, 19 nt, Artificial Sequence
  Description of Artificial Sequence: Synthetic oligonucleotide
cauaagcgagcuucagguc

SEQ ID NO: 1471255 - RNA, 19 nt, Artificial Sequence
  Description of Artificial Sequence: Synthetic oligonucleotide
caccacaccaggcuaggac

SEQ ID NO: 1471256 - RNA, 19 nt, Artificial Sequence
  Description of Artificial Sequence: Synthetic oligonucleotide
ggcacaaacacugagggua

SEQ ID NO: 1471257 - RNA, 19 nt, Artificial Sequence
  Description of Artificial Sequence: Synthetic oligonucleotide
gauugaagcccauggcaua

SEQ ID NO: 1471258 - RNA, 19 nt, Artificial Sequence
  Description of Artificial Sequence: Synthetic oligonucleotide
caaacacugaggguaucug

SEQ ID NO: 1471259 - RNA, 19 nt, Artificial Sequence
  Description of Artificial Sequence: Synthetic oligonucleotide
ccuggaucuuggauggucg

SEQ ID NO: 1471260 - RNA, 19 nt, Artificial Sequence
  Description of Artificial Sequence: Synthetic oligonucleotide
uccaaacaugauucugaau

SEQ ID NO: 1471261 - RNA, 19 nt, Artificial Sequence
  Description of Artificial Sequence: Synthetic oligonucleotide
cucugcugagcauagcuaa

SEQ ID NO: 1471262 - RNA, 19 nt, Artificial Sequence
  Description of Artificial Sequence: Synthetic oligonucleotide
acuguuccuuggauuuccc

SEQ ID NO: 1471263 - RNA, 19 nt, Artificial Sequence
  Description of Artificial Sequence: Synthetic oligonucleotide
gguuccacucugcugagca

SEQ ID NO: 1471264 - RNA, 19 nt, Artificial Sequence
  Description of Artificial Sequence: Synthetic oligonucleotide
gcauaagcgagcuucaggu

SEQ ID NO: 1471265 - RNA, 19 nt, Artificial Sequence
  Description of Artificial Sequence: Synthetic oligonucleotide
ugucugcugguuccacucu

SEQ ID NO: 1471266 - RNA, 19 nt, Artificial Sequence
  Description of Artificial Sequence: Synthetic oligonucleotide
uaaaacaaaggcggcuguu

SEQ ID NO: 1471267 - RNA, 19 nt, Artificial Sequence
  Description of Artificial Sequence: Synthetic oligonucleotide
acugaguaaagaggagagu

SEQ ID NO: 1471268 - RNA, 19 nt, Artificial Sequence
  Description of Artificial Sequence: Synthetic oligonucleotide
acaaauuugucaaguccaa

SEQ ID NO: 1471269 - RNA, 19 nt, Artificial Sequence
  Description of Artificial Sequence: Synthetic oligonucleotide
ugaugacgacaguacacuu

SEQ ID NO: 1471270 - RNA, 19 nt, Artificial Sequence
  Description of Artificial Sequence: Synthetic oligonucleotide
caggaccuucucuuuugcc

SEQ ID NO: 1471271 - RNA, 19 nt, Artificial Sequence
  Description of Artificial Sequence: Synthetic oligonucleotide
accuucucuuuugccuucc

SEQ ID NO: 1471272 - RNA, 19 nt, Artificial Sequence
  Description of Artificial Sequence: Synthetic oligonucleotide
ugcagguaggucuguccac

SEQ ID NO: 1471273 - RNA, 19 nt, Artificial Sequence
  Description of Artificial Sequence: Synthetic oligonucleotide
gugugcaccaccacaccag

SEQ ID NO: 1471274 - RNA, 19 nt, Artificial Sequence
  Description of Artificial Sequence: Synthetic oligonucleotide
cacugaggguaucugucug

SEQ ID NO: 1471275 - RNA, 19 nt, Artificial Sequence
  Description of Artificial Sequence: Synthetic oligonucleotide
caucaugggcaacgcauuc

SEQ ID NO: 1471276 - RNA, 19 nt, Artificial Sequence
  Description of Artificial Sequence: Synthetic oligonucleotide
caagcaucaugggcaacgc

SEQ ID NO: 1471277 - RNA, 19 nt, Artificial Sequence
  Description of Artificial Sequence: Synthetic oligonucleotide
gccaguucauauguugggg

SEQ ID NO: 1471278 - RNA, 19 nt, Artificial Sequence
  Description of Artificial Sequence: Synthetic oligonucleotide
cuguuugaagugccaguuc

SEQ ID NO: 1471279 - RNA, 19 nt, Artificial Sequence
  Description of Artificial Sequence: Synthetic oligonucleotide
guccaaacaugauucugaa

SEQ ID NO: 1471280 - RNA, 19 nt, Artificial Sequence
  Description of Artificial Sequence: Synthetic oligonucleotide
caugauucugaaugaggua

SEQ ID NO: 1471281 - RNA, 19 nt, Artificial Sequence
  Description of Artificial Sequence: Synthetic oligonucleotide
ggaauuugcccaucugcuc

SEQ ID NO: 1471282 - RNA, 19 nt, Artificial Sequence
  Description of Artificial Sequence: Synthetic oligonucleotide
uccuggaucuuggaugguc

SEQ ID NO: 1471283 - RNA, 19 nt, Artificial Sequence
  Description of Artificial Sequence: Synthetic oligonucleotide
uuccacucugcugagcaua

SEQ ID NO: 1471284 - RNA, 19 nt, Artificial Sequence
  Description of Artificial Sequence: Synthetic oligonucleotide
uucauauguuggggacagg

SEQ ID NO: 1471285 - RNA, 19 nt, Artificial Sequence
  Description of Artificial Sequence: Synthetic oligonucleotide
aucaugggcaacgcauucu

SEQ ID NO: 1471286 - RNA, 19 nt, Artificial Sequence
  Description of Artificial Sequence: Synthetic oligonucleotide
aggguaucugucugcuggu

SEQ ID NO: 1471287 - RNA, 19 nt, Artificial Sequence
  Description of Artificial Sequence: Synthetic oligonucleotide
caggucuggauggaauuug

SEQ ID NO: 1471288 - RNA, 19 nt, Artificial Sequence
  Description of Artificial Sequence: Synthetic oligonucleotide
gucugcugguuccacucug

SEQ ID NO: 1471289 - RNA, 19 nt, Artificial Sequence
  Description of Artificial Sequence: Synthetic oligonucleotide
gauggucgauugaagccca

SEQ ID NO: 1471290 - RNA, 19 nt, Artificial Sequence
  Description of Artificial Sequence: Synthetic oligonucleotide
ucccaguaccagacuguga

SEQ ID NO: 1471291 - RNA, 19 nt, Artificial Sequence
  Description of Artificial Sequence: Synthetic oligonucleotide
caaaggcggcuguuuuccc

SEQ ID NO: 1471292 - RNA, 19 nt, Artificial Sequence
  Description of Artificial Sequence: Synthetic oligonucleotide
gggcaacgcauucuccugg

SEQ ID NO: 1471293 - RNA, 19 nt, Artificial Sequence
  Description of Artificial Sequence: Synthetic oligonucleotide
uccuuggauuuccccuuac

SEQ ID NO: 1471294 - RNA, 19 nt, Artificial Sequence
  Description of Artificial Sequence: Synthetic oligonucleotide
uggucgauugaagcccaug

SEQ ID NO: 1471295 - RNA, 19 nt, Artificial Sequence
  Description of Artificial Sequence: Synthetic oligonucleotide
aggcacaaacacugagggu

SEQ ID NO: 1471296 - RNA, 19 nt, Artificial Sequence
  Description of Artificial Sequence: Synthetic oligonucleotide
ucaggucuggauggaauuu

SEQ ID NO: 1471297 - RNA, 19 nt, Artificial Sequence
  Description of Artificial Sequence: Synthetic oligonucleotide
aucuuggauggucgauuga

SEQ ID NO: 1471298 - RNA, 19 nt, Artificial Sequence
  Description of Artificial Sequence: Synthetic oligonucleotide
gguaucugucugcugguuc

SEQ ID NO: 1471299 - RNA, 19 nt, Artificial Sequence
  Description of Artificial Sequence: Synthetic oligonucleotide
ugacgacaguacacuuugu

SEQ ID NO: 1471300 - RNA, 19 nt, Artificial Sequence
  Description of Artificial Sequence: Synthetic oligonucleotide
cugccucucaggugcuggg

SEQ ID NO: 1471301 - RNA, 19 nt, Artificial Sequence
  Description of Artificial Sequence: Synthetic oligonucleotide
cagguaggucuguccacag

SEQ ID NO: 1471302 - RNA, 19 nt, Artificial Sequence
  Description of Artificial Sequence: Synthetic oligonucleotide
cugaguaaagaggagaguu

SEQ ID NO: 1471303 - RNA, 19 nt, Artificial Sequence
  Description of Artificial Sequence: Synthetic oligonucleotide
cgacaguacacuuuguuca

SEQ ID NO: 1471304 - RNA, 19 nt, Artificial Sequence
  Description of Artificial Sequence: Synthetic oligonucleotide
gacgacaguacacuuuguu

SEQ ID NO: 1471305 - RNA, 19 nt, Artificial Sequence
  Description of Artificial Sequence: Synthetic oligonucleotide
agcccauggcauagacucc

SEQ ID NO: 1471306 - RNA, 19 nt, Artificial Sequence
  Description of Artificial Sequence: Synthetic oligonucleotide
aagcgagcuucaggucugg

SEQ ID NO: 1471307 - RNA, 19 nt, Artificial Sequence
  Description of Artificial Sequence: Synthetic oligonucleotide
cgagcuucaggucuggaug

SEQ ID NO: 1471308 - RNA, 19 nt, Artificial Sequence
  Description of Artificial Sequence: Synthetic oligonucleotide
aucugucugcugguuccac

SEQ ID NO: 1471309 - RNA, 19 nt, Artificial Sequence
  Description of Artificial Sequence: Synthetic oligonucleotide
uuccuuggauuuccccuua

SEQ ID NO: 1471310 - RNA, 19 nt, Artificial Sequence
  Description of Artificial Sequence: Synthetic oligonucleotide
caaaacuguuccuuggauu

SEQ ID NO: 1471311 - RNA, 19 nt, Artificial Sequence
  Description of Artificial Sequence: Synthetic oligonucleotide
gaccuucucuuuugccuuc

SEQ ID NO: 1471312 - RNA, 19 nt, Artificial Sequence
  Description of Artificial Sequence: Synthetic oligonucleotide
uggaucuuggauggucgau

SEQ ID NO: 1471313 - RNA, 19 nt, Artificial Sequence
  Description of Artificial Sequence: Synthetic oligonucleotide
cugggguuucaggcgaagc

SEQ ID NO: 1471314 - RNA, 19 nt, Artificial Sequence
  Description of Artificial Sequence: Synthetic oligonucleotide
ggugugcaccaccacacca

SEQ ID NO: 1471315 - RNA, 19 nt, Artificial Sequence
  Description of Artificial Sequence: Synthetic oligonucleotide
cuccuuggagaagcugggg

SEQ ID NO: 1471316 - RNA, 19 nt, Artificial Sequence
  Description of Artificial Sequence: Synthetic oligonucleotide
agacuccuuggagaagcug

SEQ ID NO: 1471317 - RNA, 19 nt, Artificial Sequence
  Description of Artificial Sequence: Synthetic oligonucleotide
cugguuccacucugcugag

SEQ ID NO: 1471318 - RNA, 19 nt, Artificial Sequence
  Description of Artificial Sequence: Synthetic oligonucleotide
uugaagcccauggcauaga

SEQ ID NO: 1471319 - RNA, 19 nt, Artificial Sequence
  Description of Artificial Sequence: Synthetic oligonucleotide
cuaaaacaaaggcggcugu

SEQ ID NO: 1471320 - RNA, 19 nt, Artificial Sequence
  Description of Artificial Sequence: Synthetic oligonucleotide
agcaagcaucaugggcaac

SEQ ID NO: 1471321 - RNA, 19 nt, Artificial Sequence
  Description of Artificial Sequence: Synthetic oligonucleotide
gaugacgacaguacacuuu

SEQ ID NO: 1471322 - RNA, 19 nt, Artificial Sequence
  Description of Artificial Sequence: Synthetic oligonucleotide
caaauuugucaaguccaaa

SEQ ID NO: 1471323 - RNA, 19 nt, Artificial Sequence
  Description of Artificial Sequence: Synthetic oligonucleotide
agacugugacugggcaauc

SEQ ID NO: 1471324 - RNA, 19 nt, Artificial Sequence
  Description of Artificial Sequence: Synthetic oligonucleotide
cauucuccuggaucuugga

SEQ ID NO: 1471325 - RNA, 19 nt, Artificial Sequence
  Description of Artificial Sequence: Synthetic oligonucleotide
ccaguucauauguugggga

SEQ ID NO: 1471326 - RNA, 19 nt, Artificial Sequence
  Description of Artificial Sequence: Synthetic oligonucleotide
cuggaucuuggauggucga

SEQ ID NO: 1471327 - RNA, 19 nt, Artificial Sequence
  Description of Artificial Sequence: Synthetic oligonucleotide
ccuuuccuguuugaagugc

SEQ ID NO: 1471328 - RNA, 19 nt, Artificial Sequence
  Description of Artificial Sequence: Synthetic oligonucleotide
ggucuggauggaauuugcc

SEQ ID NO: 1471329 - RNA, 19 nt, Artificial Sequence
  Description of Artificial Sequence: Synthetic oligonucleotide
auguuggggacaggcacaa

SEQ ID NO: 1471330 - RNA, 19 nt, Artificial Sequence
  Description of Artificial Sequence: Synthetic oligonucleotide
gacugggcaaucagguucu

SEQ ID NO: 1471331 - RNA, 19 nt, Artificial Sequence
  Description of Artificial Sequence: Synthetic oligonucleotide
cuuacucuuugcacaaauu

SEQ ID NO: 1471332 - RNA, 19 nt, Artificial Sequence
  Description of Artificial Sequence: Synthetic oligonucleotide
uggauggaauuugcccauc

SEQ ID NO: 1471333 - RNA, 19 nt, Artificial Sequence
  Description of Artificial Sequence: Synthetic oligonucleotide
acucugcugagcauagcua

SEQ ID NO: 1471334 - RNA, 19 nt, Artificial Sequence
  Description of Artificial Sequence: Synthetic oligonucleotide
guuccuuggauuuccccuu

SEQ ID NO: 1471335 - RNA, 19 nt, Artificial Sequence
  Description of Artificial Sequence: Synthetic oligonucleotide
cuucaggucuggauggaau

SEQ ID NO: 1471336 - RNA, 19 nt, Artificial Sequence
  Description of Artificial Sequence: Synthetic oligonucleotide
gggguuucaggcgaagcuc

SEQ ID NO: 1471337 - RNA, 19 nt, Artificial Sequence
  Description of Artificial Sequence: Synthetic oligonucleotide
gcucaaucaccuuuccugu

SEQ ID NO: 1471338 - RNA, 19 nt, Artificial Sequence
  Description of Artificial Sequence: Synthetic oligonucleotide
cucuuuugccuucccggaa

SEQ ID NO: 1471339 - RNA, 19 nt, Artificial Sequence
  Description of Artificial Sequence: Synthetic oligonucleotide
cugcugagcauagcuaaaa

SEQ ID NO: 1471340 - RNA, 19 nt, Artificial Sequence
  Description of Artificial Sequence: Synthetic oligonucleotide
cacuuuguucaacaucaau

SEQ ID NO: 1471341 - RNA, 19 nt, Artificial Sequence
  Description of Artificial Sequence: Synthetic oligonucleotide
gaagcccauggcauagacu

SEQ ID NO: 1471342 - RNA, 19 nt, Artificial Sequence
  Description of Artificial Sequence: Synthetic oligonucleotide
ccaggaccuucucuuuugc

SEQ ID NO: 1471343 - RNA, 19 nt, Artificial Sequence
  Description of Artificial Sequence: Synthetic oligonucleotide
aagugccaguucauauguu

SEQ ID NO: 1471344 - RNA, 19 nt, Artificial Sequence
  Description of Artificial Sequence: Synthetic oligonucleotide
guaggucuguccacaggaa

SEQ ID NO: 1471345 - RNA, 19 nt, Artificial Sequence
  Description of Artificial Sequence: Synthetic oligonucleotide
ggcaacgcauucuccugga

SEQ ID NO: 1471346 - RNA, 19 nt, Artificial Sequence
  Description of Artificial Sequence: Synthetic oligonucleotide
cacaaacacugaggguauc

SEQ ID NO: 1471347 - RNA, 19 nt, Artificial Sequence
  Description of Artificial Sequence: Synthetic oligonucleotide
ucucaggugcugggauuaa

SEQ ID NO: 1471348 - RNA, 19 nt, Artificial Sequence
  Description of Artificial Sequence: Synthetic oligonucleotide
gcggcuguuuucccaguac

SEQ ID NO: 1471349 - RNA, 19 nt, Artificial Sequence
  Description of Artificial Sequence: Synthetic oligonucleotide
ggauggaauuugcccaucu

SEQ ID NO: 1471350 - RNA, 19 nt, Artificial Sequence
  Description of Artificial Sequence: Synthetic oligonucleotide
acacuuuguucaacaucaa

SEQ ID NO: 1471351 - RNA, 19 nt, Artificial Sequence
  Description of Artificial Sequence: Synthetic oligonucleotide
cagacugugacugggcaau

SEQ ID NO: 1471352 - RNA, 19 nt, Artificial Sequence
  Description of Artificial Sequence: Synthetic oligonucleotide
ccauggcauagacuccuug

SEQ ID NO: 1471353 - RNA, 19 nt, Artificial Sequence
  Description of Artificial Sequence: Synthetic oligonucleotide
gcaaaacuguuccuuggau

SEQ ID NO: 1471354 - RNA, 19 nt, Artificial Sequence
  Description of Artificial Sequence: Synthetic oligonucleotide
acaccaggcuaggacuuuu

SEQ ID NO: 1471355 - RNA, 19 nt, Artificial Sequence
  Description of Artificial Sequence: Synthetic oligonucleotide
guuugaagugccaguucau

SEQ ID NO: 1471356 - RNA, 19 nt, Artificial Sequence
  Description of Artificial Sequence: Synthetic oligonucleotide
gucuguccacaggaagguc

SEQ ID NO: 1471357 - RNA, 19 nt, Artificial Sequence
  Description of Artificial Sequence: Synthetic oligonucleotide
cugaggguaucugucugcu

SEQ ID NO: 1471358 - RNA, 19 nt, Artificial Sequence
  Description of Artificial Sequence: Synthetic oligonucleotide
aggcggcuguuuucccagu

SEQ ID NO: 1471359 - RNA, 19 nt, Artificial Sequence
  Description of Artificial Sequence: Synthetic oligonucleotide
auuugcccaucugcucaau

SEQ ID NO: 1471360 - RNA, 19 nt, Artificial Sequence
  Description of Artificial Sequence: Synthetic oligonucleotide
cugcucaaucaccuuuccu

SEQ ID NO: 1471361 - RNA, 19 nt, Artificial Sequence
  Description of Artificial Sequence: Synthetic oligonucleotide
cuuggagaagcugggguuu

SEQ ID NO: 1471362 - RNA, 19 nt, Artificial Sequence
  Description of Artificial Sequence: Synthetic oligonucleotide
aggagaguuugggucccuu

SEQ ID NO: 1471363 - RNA, 19 nt, Artificial Sequence
  Description of Artificial Sequence: Synthetic oligonucleotide
cccaucugcucaaucaccu

SEQ ID NO: 1471364 - RNA, 19 nt, Artificial Sequence
  Description of Artificial Sequence: Synthetic oligonucleotide
ggucuguccacaggaaggu

SEQ ID NO: 1471365 - RNA, 19 nt, Artificial Sequence
  Description of Artificial Sequence: Synthetic oligonucleotide
gugacugggcaaucagguu

SEQ ID NO: 1471366 - RNA, 19 nt, Artificial Sequence
  Description of Artificial Sequence: Synthetic oligonucleotide
cucaggugcugggauuaaa

SEQ ID NO: 1471367 - RNA, 19 nt, Artificial Sequence
  Description of Artificial Sequence: Synthetic oligonucleotide
agcgagcuucaggucugga

SEQ ID NO: 1471368 - RNA, 19 nt, Artificial Sequence
  Description of Artificial Sequence: Synthetic oligonucleotide
gcugggguuucaggcgaag

SEQ ID NO: 1471369 - RNA, 19 nt, Artificial Sequence
  Description of Artificial Sequence: Synthetic oligonucleotide
ggaucuuggauggucgauu

SEQ ID NO: 1471370 - RNA, 19 nt, Artificial Sequence
  Description of Artificial Sequence: Synthetic oligonucleotide
ccagacugugacugggcaa

SEQ ID NO: 1471371 - RNA, 19 nt, Artificial Sequence
  Description of Artificial Sequence: Synthetic oligonucleotide
guuccacucugcugagcau

SEQ ID NO: 1471372 - RNA, 19 nt, Artificial Sequence
  Description of Artificial Sequence: Synthetic oligonucleotide
ccuuacucuuugcacaaau

SEQ ID NO: 1471373 - RNA, 19 nt, Artificial Sequence
  Description of Artificial Sequence: Synthetic oligonucleotide
ggggacaggcacaaacacu

SEQ ID NO: 1471374 - RNA, 19 nt, Artificial Sequence
  Description of Artificial Sequence: Synthetic oligonucleotide
ccccuuacucuuugcacaa

SEQ ID NO: 1471375 - RNA, 19 nt, Artificial Sequence
  Description of Artificial Sequence: Synthetic oligonucleotide
ggacaggcacaaacacuga

SEQ ID NO: 1471376 - RNA, 19 nt, Artificial Sequence
  Description of Artificial Sequence: Synthetic oligonucleotide
cugcugguuccacucugcu

SEQ ID NO: 1471377 - RNA, 19 nt, Artificial Sequence
  Description of Artificial Sequence: Synthetic oligonucleotide
gcgagcuucaggucuggau

SEQ ID NO: 1471378 - RNA, 19 nt, Artificial Sequence
  Description of Artificial Sequence: Synthetic oligonucleotide
ggagaguuugggucccuuu

SEQ ID NO: 1471379 - RNA, 19 nt, Artificial Sequence
  Description of Artificial Sequence: Synthetic oligonucleotide
cgcauucuccuggaucuug

SEQ ID NO: 1471380 - RNA, 19 nt, Artificial Sequence
  Description of Artificial Sequence: Synthetic oligonucleotide
auggucgauugaagcccau

SEQ ID NO: 1471381 - RNA, 19 nt, Artificial Sequence
  Description of Artificial Sequence: Synthetic oligonucleotide
acgcauucuccuggaucuu

SEQ ID NO: 1471382 - RNA, 19 nt, Artificial Sequence
  Description of Artificial Sequence: Synthetic oligonucleotide
gcuucaggucuggauggaa

SEQ ID NO: 1471383 - RNA, 19 nt, Artificial Sequence
  Description of Artificial Sequence: Synthetic oligonucleotide
gcccauggcauagacuccu

SEQ ID NO: 1471384 - RNA, 19 nt, Artificial Sequence
  Description of Artificial Sequence: Synthetic oligonucleotide
ccuuggagaagcugggguu

SEQ ID NO: 1471385 - RNA, 19 nt, Artificial Sequence
  Description of Artificial Sequence: Synthetic oligonucleotide
ggcggcuguuuucccagua

SEQ ID NO: 1471386 - RNA, 19 nt, Artificial Sequence
  Description of Artificial Sequence: Synthetic oligonucleotide
agcugggguuucaggcgaa

SEQ ID NO: 1471387 - RNA, 19 nt, Artificial Sequence
  Description of Artificial Sequence: Synthetic oligonucleotide
ccuguuugaagugccaguu

SEQ ID NO: 1471388 - RNA, 19 nt, Artificial Sequence
  Description of Artificial Sequence: Synthetic oligonucleotide
ccuuggauuuccccuuacu

SEQ ID NO: 1471389 - RNA, 19 nt, Artificial Sequence
  Description of Artificial Sequence: Synthetic oligonucleotide
gcacaaacacugaggguau

SEQ ID NO: 1471390 - RNA, 19 nt, Artificial Sequence
  Description of Artificial Sequence: Synthetic oligonucleotide
ccacucugcugagcauagc

SEQ ID NO: 1471391 - RNA, 19 nt, Artificial Sequence
  Description of Artificial Sequence: Synthetic oligonucleotide
gcaucaugggcaacgcauu

SEQ ID NO: 1471392 - RNA, 19 nt, Artificial Sequence
  Description of Artificial Sequence: Synthetic oligonucleotide
ccaguaccagacugugacu

SEQ ID NO: 1471393 - RNA, 19 nt, Artificial Sequence
  Description of Artificial Sequence: Synthetic oligonucleotide
cgaugcagguaggucuguc

SEQ ID NO: 1471394 - RNA, 19 nt, Artificial Sequence
  Description of Artificial Sequence: Synthetic oligonucleotide
gcaacgcauucuccuggau

SEQ ID NO: 1471395 - RNA, 19 nt, Artificial Sequence
  Description of Artificial Sequence: Synthetic oligonucleotide
ggauuuccccuuacucuuu

SEQ ID NO: 1471396 - RNA, 19 nt, Artificial Sequence
  Description of Artificial Sequence: Synthetic oligonucleotide
cacaccaggcuaggacuuu

SEQ ID NO: 1471397 - RNA, 19 nt, Artificial Sequence
  Description of Artificial Sequence: Synthetic oligonucleotide
ggguaucugucugcugguu

SEQ ID NO: 1471398 - RNA, 19 nt, Artificial Sequence
  Description of Artificial Sequence: Synthetic oligonucleotide
ccaucugcucaaucaccuu

SEQ ID NO: 1471399 - RNA, 19 nt, Artificial Sequence
  Description of Artificial Sequence: Synthetic oligonucleotide
ccucucaggugcugggauu

SEQ ID NO: 1471400 - RNA, 19 nt, Artificial Sequence
  Description of Artificial Sequence: Synthetic oligonucleotide
cuccuggaucuuggauggu

SEQ ID NO: 1471401 - RNA, 19 nt, Artificial Sequence
  Description of Artificial Sequence: Synthetic oligonucleotide
cccuuacucuuugcacaaa

SEQ ID NO: 1471402 - RNA, 19 nt, Artificial Sequence
  Description of Artificial Sequence: Synthetic oligonucleotide
cccauggcauagacuccuu

SEQ ID NO: 1471403 - RNA, 19 nt, Artificial Sequence
  Description of Artificial Sequence: Synthetic oligonucleotide
acaauggucacacucauac

SEQ ID NO: 1471404 - RNA, 19 nt, Artificial Sequence
  Description of Artificial Sequence: Synthetic oligonucleotide
aaugggugaauucagaaga

SEQ ID NO: 1471405 - RNA, 19 nt, Artificial Sequence
  Description of Artificial Sequence: Synthetic oligonucleotide
ugaaguuggacuuccaccg

SEQ ID NO: 1471406 - RNA, 19 nt, Artificial Sequence
  Description of Artificial Sequence: Synthetic oligonucleotide
aagacuucaaauaaauggg

SEQ ID NO: 1471407 - RNA, 19 nt, Artificial Sequence
  Description of Artificial Sequence: Synthetic oligonucleotide
acacaagacauucauaggg

SEQ ID NO: 1471408 - RNA, 19 nt, Artificial Sequence
  Description of Artificial Sequence: Synthetic oligonucleotide
auaacuauggaccaccuug

SEQ ID NO: 1471409 - RNA, 19 nt, Artificial Sequence
  Description of Artificial Sequence: Synthetic oligonucleotide
acugacugcagucaaaggg

SEQ ID NO: 1471410 - RNA, 19 nt, Artificial Sequence
  Description of Artificial Sequence: Synthetic oligonucleotide
uguacauuaagguuggaac

SEQ ID NO: 1471411 - RNA, 19 nt, Artificial Sequence
  Description of Artificial Sequence: Synthetic oligonucleotide
uuucacgugacuccuaagg

SEQ ID NO: 1471412 - RNA, 19 nt, Artificial Sequence
  Description of Artificial Sequence: Synthetic oligonucleotide
ucguccauaacuauggacc

SEQ ID NO: 1471413 - RNA, 19 nt, Artificial Sequence
  Description of Artificial Sequence: Synthetic oligonucleotide
aucauacaugcucaggugc

SEQ ID NO: 1471414 - RNA, 19 nt, Artificial Sequence
  Description of Artificial Sequence: Synthetic oligonucleotide
aaaugggugaauucagaag

SEQ ID NO: 1471415 - RNA, 19 nt, Artificial Sequence
  Description of Artificial Sequence: Synthetic oligonucleotide
gaaaccuucccacaggaag

SEQ ID NO: 1471416 - RNA, 19 nt, Artificial Sequence
  Description of Artificial Sequence: Synthetic oligonucleotide
ucugaguacucacugaagc

SEQ ID NO: 1471417 - RNA, 19 nt, Artificial Sequence
  Description of Artificial Sequence: Synthetic oligonucleotide
uuaagguuggaaccuaugc

SEQ ID NO: 1471418 - RNA, 19 nt, Artificial Sequence
  Description of Artificial Sequence: Synthetic oligonucleotide
aaauugaaguuggacuucc

SEQ ID NO: 1471419 - RNA, 19 nt, Artificial Sequence
  Description of Artificial Sequence: Synthetic oligonucleotide
cuucuugacaagauggacg

SEQ ID NO: 1471420 - RNA, 19 nt, Artificial Sequence
  Description of Artificial Sequence: Synthetic oligonucleotide
agagaucgcagccauaagg

SEQ ID NO: 1471421 - RNA, 19 nt, Artificial Sequence
  Description of Artificial Sequence: Synthetic oligonucleotide
gacgaauggucacugaagg

SEQ ID NO: 1471422 - RNA, 19 nt, Artificial Sequence
  Description of Artificial Sequence: Synthetic oligonucleotide
ucaggauagacucguuucg

SEQ ID NO: 1471423 - RNA, 19 nt, Artificial Sequence
  Description of Artificial Sequence: Synthetic oligonucleotide
uuuaugggcuaugaggugg

SEQ ID NO: 1471424 - RNA, 19 nt, Artificial Sequence
  Description of Artificial Sequence: Synthetic oligonucleotide
acuguguacacucguaagg

SEQ ID NO: 1471425 - RNA, 19 nt, Artificial Sequence
  Description of Artificial Sequence: Synthetic oligonucleotide
aauaaaugggugaauucag

SEQ ID NO: 1471426 - RNA, 19 nt, Artificial Sequence
  Description of Artificial Sequence: Synthetic oligonucleotide
uucuugacaagauggacgc

SEQ ID NO: 1471427 - RNA, 19 nt, Artificial Sequence
  Description of Artificial Sequence: Synthetic oligonucleotide
uccaauugcacuccauuag

SEQ ID NO: 1471428 - RNA, 19 nt, Artificial Sequence
  Description of Artificial Sequence: Synthetic oligonucleotide
uaacuauggaccaccuugg

SEQ ID NO: 1471429 - RNA, 19 nt, Artificial Sequence
  Description of Artificial Sequence: Synthetic oligonucleotide
guacauuaagguuggaacc

SEQ ID NO: 1471430 - RNA, 19 nt, Artificial Sequence
  Description of Artificial Sequence: Synthetic oligonucleotide
ucucaugugugucuucagg

SEQ ID NO: 1471431 - RNA, 19 nt, Artificial Sequence
  Description of Artificial Sequence: Synthetic oligonucleotide
auagacucguuucggaagg

SEQ ID NO: 1471432 - RNA, 19 nt, Artificial Sequence
  Description of Artificial Sequence: Synthetic oligonucleotide
caaaauaucguccauaacu

SEQ ID NO: 1471433 - RNA, 19 nt, Artificial Sequence
  Description of Artificial Sequence: Synthetic oligonucleotide
aacuccacagcuguggcgg

SEQ ID NO: 1471434 - RNA, 19 nt, Artificial Sequence
  Description of Artificial Sequence: Synthetic oligonucleotide
ugagguuggaacuugcacu

SEQ ID NO: 1471435 - RNA, 19 nt, Artificial Sequence
  Description of Artificial Sequence: Synthetic oligonucleotide
aauaucguccauaacuaug

SEQ ID NO: 1471436 - RNA, 19 nt, Artificial Sequence
  Description of Artificial Sequence: Synthetic oligonucleotide
uucgugacagguaaucgcc

SEQ ID NO: 1471437 - RNA, 19 nt, Artificial Sequence
  Description of Artificial Sequence: Synthetic oligonucleotide
acuccuaagggacgaaugg

SEQ ID NO: 1471438 - RNA, 19 nt, Artificial Sequence
  Description of Artificial Sequence: Synthetic oligonucleotide
uugaaagcaacuccacagc

SEQ ID NO: 1471439 - RNA, 19 nt, Artificial Sequence
  Description of Artificial Sequence: Synthetic oligonucleotide
cuggauugguuccugaagg

SEQ ID NO: 1471440 - RNA, 19 nt, Artificial Sequence
  Description of Artificial Sequence: Synthetic oligonucleotide
uccauuagaugcuuccucc

SEQ ID NO: 1471441 - RNA, 19 nt, Artificial Sequence
  Description of Artificial Sequence: Synthetic oligonucleotide
agccauaagguuucucccc

SEQ ID NO: 1471442 - RNA, 19 nt, Artificial Sequence
  Description of Artificial Sequence: Synthetic oligonucleotide
ucuuaugcaaauugaaguu

SEQ ID NO: 1471443 - RNA, 19 nt, Artificial Sequence
  Description of Artificial Sequence: Synthetic oligonucleotide
ggaucuucagagcagagag

SEQ ID NO: 1471444 - RNA, 19 nt, Artificial Sequence
  Description of Artificial Sequence: Synthetic oligonucleotide
uucaugugugucuucagga

SEQ ID NO: 1471445 - RNA, 19 nt, Artificial Sequence
  Description of Artificial Sequence: Synthetic oligonucleotide
guagugaaggcuuucuggc

SEQ ID NO: 1471446 - RNA, 19 nt, Artificial Sequence
  Description of Artificial Sequence: Synthetic oligonucleotide
aaaauaucguccauaacua

SEQ ID NO: 1471447 - RNA, 19 nt, Artificial Sequence
  Description of Artificial Sequence: Synthetic oligonucleotide
uuggacuuccaccggaaag

SEQ ID NO: 1471448 - RNA, 19 nt, Artificial Sequence
  Description of Artificial Sequence: Synthetic oligonucleotide
ugcaucugaguacucacug

SEQ ID NO: 1471449 - RNA, 19 nt, Artificial Sequence
  Description of Artificial Sequence: Synthetic oligonucleotide
guugcagugagguuggaac

SEQ ID NO: 1471450 - RNA, 19 nt, Artificial Sequence
  Description of Artificial Sequence: Synthetic oligonucleotide
uccuacuaugccuugugag

SEQ ID NO: 1471451 - RNA, 19 nt, Artificial Sequence
  Description of Artificial Sequence: Synthetic oligonucleotide
caugugguucuucuuaugc

SEQ ID NO: 1471452 - RNA, 19 nt, Artificial Sequence
  Description of Artificial Sequence: Synthetic oligonucleotide
aucguccauaacuauggac

SEQ ID NO: 1471453 - RNA, 19 nt, Artificial Sequence
  Description of Artificial Sequence: Synthetic oligonucleotide
uaaaugggugaauucagaa

SEQ ID NO: 1471454 - RNA, 19 nt, Artificial Sequence
  Description of Artificial Sequence: Synthetic oligonucleotide
ucaaccgguuucuucacag

SEQ ID NO: 1471455 - RNA, 19 nt, Artificial Sequence
  Description of Artificial Sequence: Synthetic oligonucleotide
uuugguaaggccuuuccua

SEQ ID NO: 1471456 - RNA, 19 nt, Artificial Sequence
  Description of Artificial Sequence: Synthetic oligonucleotide
cacaagacauucauagggc

SEQ ID NO: 1471457 - RNA, 19 nt, Artificial Sequence
  Description of Artificial Sequence: Synthetic oligonucleotide
gguagugaaggcuuucugg

SEQ ID NO: 1471458 - RNA, 19 nt, Artificial Sequence
  Description of Artificial Sequence: Synthetic oligonucleotide
guuccugaaggcuuuuccg

SEQ ID NO: 1471459 - RNA, 19 nt, Artificial Sequence
  Description of Artificial Sequence: Synthetic oligonucleotide
cuccuuaagguggagaggg

SEQ ID NO: 1471460 - RNA, 19 nt, Artificial Sequence
  Description of Artificial Sequence: Synthetic oligonucleotide
ugaacucgcauguggaucu

SEQ ID NO: 1471461 - RNA, 19 nt, Artificial Sequence
  Description of Artificial Sequence: Synthetic oligonucleotide
acgaauggucacugaaggc

SEQ ID NO: 1471462 - RNA, 19 nt, Artificial Sequence
  Description of Artificial Sequence: Synthetic oligonucleotide
auagguuuucuccaccaug

SEQ ID NO: 1471463 - RNA, 19 nt, Artificial Sequence
  Description of Artificial Sequence: Synthetic oligonucleotide
aguaugguuccggaugugc

SEQ ID NO: 1471464 - RNA, 19 nt, Artificial Sequence
  Description of Artificial Sequence: Synthetic oligonucleotide
agguaaucgccgaagaaac

SEQ ID NO: 1471465 - RNA, 19 nt, Artificial Sequence
  Description of Artificial Sequence: Synthetic oligonucleotide
uugugggucuuccuacugg

SEQ ID NO: 1471466 - RNA, 19 nt, Artificial Sequence
  Description of Artificial Sequence: Synthetic oligonucleotide
ugagaguucaugugugucu

SEQ ID NO: 1471467 - RNA, 19 nt, Artificial Sequence
  Description of Artificial Sequence: Synthetic oligonucleotide
cuucgugacagguaaucgc

SEQ ID NO: 1471468 - RNA, 19 nt, Artificial Sequence
  Description of Artificial Sequence: Synthetic oligonucleotide
uuuugguaaggccuuuccu

SEQ ID NO: 1471469 - RNA, 19 nt, Artificial Sequence
  Description of Artificial Sequence: Synthetic oligonucleotide
cuagcauggcuccuuagag

SEQ ID NO: 1471470 - RNA, 19 nt, Artificial Sequence
  Description of Artificial Sequence: Synthetic oligonucleotide
agauggacgcucaugugcc

SEQ ID NO: 1471471 - RNA, 19 nt, Artificial Sequence
  Description of Artificial Sequence: Synthetic oligonucleotide
ucauacaugcucaggugcu

SEQ ID NO: 1471472 - RNA, 19 nt, Artificial Sequence
  Description of Artificial Sequence: Synthetic oligonucleotide
aaauaucguccauaacuau

SEQ ID NO: 1471473 - RNA, 19 nt, Artificial Sequence
  Description of Artificial Sequence: Synthetic oligonucleotide
uacauuaagguuggaaccu

SEQ ID NO: 1471474 - RNA, 19 nt, Artificial Sequence
  Description of Artificial Sequence: Synthetic oligonucleotide
aaggccuuuccuacagucc

SEQ ID NO: 1471475 - RNA, 19 nt, Artificial Sequence
  Description of Artificial Sequence: Synthetic oligonucleotide
cugaguacucacugaagcc

SEQ ID NO: 1471476 - RNA, 19 nt, Artificial Sequence
  Description of Artificial Sequence: Synthetic oligonucleotide
uuuagauggaguuccccaa

SEQ ID NO: 1471477 - RNA, 19 nt, Artificial Sequence
  Description of Artificial Sequence: Synthetic oligonucleotide
aguuccccaauccaggaga

SEQ ID NO: 1471478 - RNA, 19 nt, Artificial Sequence
  Description of Artificial Sequence: Synthetic oligonucleotide
uugguaaggccuuuccuac

SEQ ID NO: 1471479 - RNA, 19 nt, Artificial Sequence
  Description of Artificial Sequence: Synthetic oligonucleotide
ugucuucaggauagacucg

SEQ ID NO: 1471480 - RNA, 19 nt, Artificial Sequence
  Description of Artificial Sequence: Synthetic oligonucleotide
ucacgugacuccuaaggga

SEQ ID NO: 1471481 - RNA, 19 nt, Artificial Sequence
  Description of Artificial Sequence: Synthetic oligonucleotide
ggaaguugcagugagguug

SEQ ID NO: 1471482 - RNA, 19 nt, Artificial Sequence
  Description of Artificial Sequence: Synthetic oligonucleotide
cacacaagacauucauagg

SEQ ID NO: 1471483 - RNA, 19 nt, Artificial Sequence
  Description of Artificial Sequence: Synthetic oligonucleotide
uggagagggguuuugguaa

SEQ ID NO: 1471484 - RNA, 19 nt, Artificial Sequence
  Description of Artificial Sequence: Synthetic oligonucleotide
cacuccauuagaugcuucc

SEQ ID NO: 1471485 - RNA, 19 nt, Artificial Sequence
  Description of Artificial Sequence: Synthetic oligonucleotide
ccguuuaugggcuaugagg

SEQ ID NO: 1471486 - RNA, 19 nt, Artificial Sequence
  Description of Artificial Sequence: Synthetic oligonucleotide
aguugcaugccucucuccu

SEQ ID NO: 1471487 - RNA, 19 nt, Artificial Sequence
  Description of Artificial Sequence: Synthetic oligonucleotide
cauuagaugcuuccucccc

SEQ ID NO: 1471488 - RNA, 19 nt, Artificial Sequence
  Description of Artificial Sequence: Synthetic oligonucleotide
uccguuuaugggcuaugag

SEQ ID NO: 1471489 - RNA, 19 nt, Artificial Sequence
  Description of Artificial Sequence: Synthetic oligonucleotide
ugugagagaagcacuggua

SEQ ID NO: 1471490 - RNA, 19 nt, Artificial Sequence
  Description of Artificial Sequence: Synthetic oligonucleotide
uugacaagauggacgcuca

SEQ ID NO: 1471491 - RNA, 19 nt, Artificial Sequence
  Description of Artificial Sequence: Synthetic oligonucleotide
gaaguuggacuuccaccgg

SEQ ID NO: 1471492 - RNA, 19 nt, Artificial Sequence
  Description of Artificial Sequence: Synthetic oligonucleotide
auguguuuccuccuugaca

SEQ ID NO: 1471493 - RNA, 19 nt, Artificial Sequence
  Description of Artificial Sequence: Synthetic oligonucleotide
cacgugacuccuaagggac

SEQ ID NO: 1471494 - RNA, 19 nt, Artificial Sequence
  Description of Artificial Sequence: Synthetic oligonucleotide
cuuuagauggaguucccca

SEQ ID NO: 1471495 - RNA, 19 nt, Artificial Sequence
  Description of Artificial Sequence: Synthetic oligonucleotide
uugacaggaggucacugaa

SEQ ID NO: 1471496 - RNA, 19 nt, Artificial Sequence
  Description of Artificial Sequence: Synthetic oligonucleotide
aaguuggacuuccaccgga

SEQ ID NO: 1471497 - RNA, 19 nt, Artificial Sequence
  Description of Artificial Sequence: Synthetic oligonucleotide
ucgugacagguaaucgccg

SEQ ID NO: 1471498 - RNA, 19 nt, Artificial Sequence
  Description of Artificial Sequence: Synthetic oligonucleotide
guuuugguaaggccuuucc

SEQ ID NO: 1471499 - RNA, 19 nt, Artificial Sequence
  Description of Artificial Sequence: Synthetic oligonucleotide
aagacauucauagggcuuu

SEQ ID NO: 1471500 - RNA, 19 nt, Artificial Sequence
  Description of Artificial Sequence: Synthetic oligonucleotide
uuaugggcuaugagguggc

SEQ ID NO: 1471501 - RNA, 19 nt, Artificial Sequence
  Description of Artificial Sequence: Synthetic oligonucleotide
acuauggaccaccuuggcu

SEQ ID NO: 1471502 - RNA, 19 nt, Artificial Sequence
  Description of Artificial Sequence: Synthetic oligonucleotide
uggauugguuccugaaggc

SEQ ID NO: 1471503 - RNA, 19 nt, Artificial Sequence
  Description of Artificial Sequence: Synthetic oligonucleotide
gauggaguuccccaaucca

SEQ ID NO: 1471504 - RNA, 19 nt, Artificial Sequence
  Description of Artificial Sequence: Synthetic oligonucleotide
aacguuucucuccccggug

SEQ ID NO: 1471505 - RNA, 19 nt, Artificial Sequence
  Description of Artificial Sequence: Synthetic oligonucleotide
ugcugagucaggugagucc

SEQ ID NO: 1471506 - RNA, 19 nt, Artificial Sequence
  Description of Artificial Sequence: Synthetic oligonucleotide
cuugacaagauggacgcuc

SEQ ID NO: 1471507 - RNA, 19 nt, Artificial Sequence
  Description of Artificial Sequence: Synthetic oligonucleotide
uguguacacucguaaggcu

SEQ ID NO: 1471508 - RNA, 19 nt, Artificial Sequence
  Description of Artificial Sequence: Synthetic oligonucleotide
uccccgguggguuuucacg

SEQ ID NO: 1471509 - RNA, 19 nt, Artificial Sequence
  Description of Artificial Sequence: Synthetic oligonucleotide
augugugucuucaggauag

SEQ ID NO: 1471510 - RNA, 19 nt, Artificial Sequence
  Description of Artificial Sequence: Synthetic oligonucleotide
uagcauggcuccuuagagc

SEQ ID NO: 1471511 - RNA, 19 nt, Artificial Sequence
  Description of Artificial Sequence: Synthetic oligonucleotide
aaucgccgaagaaaccuuc

SEQ ID NO: 1471512 - RNA, 19 nt, Artificial Sequence
  Description of Artificial Sequence: Synthetic oligonucleotide
caggugaguucuagcaugg

SEQ ID NO: 1471513 - RNA, 19 nt, Artificial Sequence
  Description of Artificial Sequence: Synthetic oligonucleotide
cugccauaggcuuugccac

SEQ ID NO: 1471514 - RNA, 19 nt, Artificial Sequence
  Description of Artificial Sequence: Synthetic oligonucleotide
ugguagugaaggcuuucug

SEQ ID NO: 1471515 - RNA, 19 nt, Artificial Sequence
  Description of Artificial Sequence: Synthetic oligonucleotide
uucaggugaguucuagcau

SEQ ID NO: 1471516 - RNA, 19 nt, Artificial Sequence
  Description of Artificial Sequence: Synthetic oligonucleotide
caugugugucuucaggcug

SEQ ID NO: 1471517 - RNA, 19 nt, Artificial Sequence
  Description of Artificial Sequence: Synthetic oligonucleotide
uccuacuggcugaguaagg

SEQ ID NO: 1471518 - RNA, 19 nt, Artificial Sequence
  Description of Artificial Sequence: Synthetic oligonucleotide
uuagauggaguuccccaau

SEQ ID NO: 1471519 - RNA, 19 nt, Artificial Sequence
  Description of Artificial Sequence: Synthetic oligonucleotide
gaucuucagagcagagagg

SEQ ID NO: 1471520 - RNA, 19 nt, Artificial Sequence
  Description of Artificial Sequence: Synthetic oligonucleotide
aggccuuuccuacaguccu

SEQ ID NO: 1471521 - RNA, 19 nt, Artificial Sequence
  Description of Artificial Sequence: Synthetic oligonucleotide
acaguugcugcacucguaa

SEQ ID NO: 1471522 - RNA, 19 nt, Artificial Sequence
  Description of Artificial Sequence: Synthetic oligonucleotide
cuaagggacgaauggucac

SEQ ID NO: 1471523 - RNA, 19 nt, Artificial Sequence
  Description of Artificial Sequence: Synthetic oligonucleotide
ugacagguaaucgccgaag

SEQ ID NO: 1471524 - RNA, 19 nt, Artificial Sequence
  Description of Artificial Sequence: Synthetic oligonucleotide
cacuguguacacucguaag

SEQ ID NO: 1471525 - RNA, 19 nt, Artificial Sequence
  Description of Artificial Sequence: Synthetic oligonucleotide
uaugguuccggaugugcuc

SEQ ID NO: 1471526 - RNA, 19 nt, Artificial Sequence
  Description of Artificial Sequence: Synthetic oligonucleotide
uccgguguacauuaagguu

SEQ ID NO: 1471527 - RNA, 19 nt, Artificial Sequence
  Description of Artificial Sequence: Synthetic oligonucleotide
ugccuugugagagaagcac

SEQ ID NO: 1471528 - RNA, 19 nt, Artificial Sequence
  Description of Artificial Sequence: Synthetic oligonucleotide
uggaaccuaugcugaaggc

SEQ ID NO: 1471529 - RNA, 19 nt, Artificial Sequence
  Description of Artificial Sequence: Synthetic oligonucleotide
gugagguuggaacuugcac

SEQ ID NO: 1471530 - RNA, 19 nt, Artificial Sequence
  Description of Artificial Sequence: Synthetic oligonucleotide
cucauagguuuucuccacc

SEQ ID NO: 1471531 - RNA, 19 nt, Artificial Sequence
  Description of Artificial Sequence: Synthetic oligonucleotide
gacaagauggacgcucaug

SEQ ID NO: 1471532 - RNA, 19 nt, Artificial Sequence
  Description of Artificial Sequence: Synthetic oligonucleotide
uugcacuccauuagaugcu

SEQ ID NO: 1471533 - RNA, 19 nt, Artificial Sequence
  Description of Artificial Sequence: Synthetic oligonucleotide
ugcuugugggucuuccuac

SEQ ID NO: 1471534 - RNA, 19 nt, Artificial Sequence
  Description of Artificial Sequence: Synthetic oligonucleotide
gugaguucuagcauggcuc

SEQ ID NO: 1471535 - RNA, 19 nt, Artificial Sequence
  Description of Artificial Sequence: Synthetic oligonucleotide
ccgguguacauuaagguug

SEQ ID NO: 1471536 - RNA, 19 nt, Artificial Sequence
  Description of Artificial Sequence: Synthetic oligonucleotide
gguaaggccuuuccuacag

SEQ ID NO: 1471537 - RNA, 19 nt, Artificial Sequence
  Description of Artificial Sequence: Synthetic oligonucleotide
agggccaauacugaagacu

SEQ ID NO: 1471538 - RNA, 19 nt, Artificial Sequence
  Description of Artificial Sequence: Synthetic oligonucleotide
ucgccgaagaaaccuuccc

SEQ ID NO: 1471539 - RNA, 19 nt, Artificial Sequence
  Description of Artificial Sequence: Synthetic oligonucleotide
agggguuuugguaaggccu

SEQ ID NO: 1471540 - RNA, 19 nt, Artificial Sequence
  Description of Artificial Sequence: Synthetic oligonucleotide
acagagaucgcagccauaa

SEQ ID NO: 1471541 - RNA, 19 nt, Artificial Sequence
  Description of Artificial Sequence: Synthetic oligonucleotide
acgcucaugugccuccuuc

SEQ ID NO: 1471542 - RNA, 19 nt, Artificial Sequence
  Description of Artificial Sequence: Synthetic oligonucleotide
cuuuuccacauggaugggc

SEQ ID NO: 1471543 - RNA, 19 nt, Artificial Sequence
  Description of Artificial Sequence: Synthetic oligonucleotide
uagauggaguuccccaauc

SEQ ID NO: 1471544 - RNA, 19 nt, Artificial Sequence
  Description of Artificial Sequence: Synthetic oligonucleotide
gucguugaaggcuuugcca

SEQ ID NO: 1471545 - RNA, 19 nt, Artificial Sequence
  Description of Artificial Sequence: Synthetic oligonucleotide
cugccgacauuccacacac

SEQ ID NO: 1471546 - RNA, 19 nt, Artificial Sequence
  Description of Artificial Sequence: Synthetic oligonucleotide
guuuaugggcuaugaggug

SEQ ID NO: 1471547 - RNA, 19 nt, Artificial Sequence
  Description of Artificial Sequence: Synthetic oligonucleotide
aggauagacucguuucgga

SEQ ID NO: 1471548 - RNA, 19 nt, Artificial Sequence
  Description of Artificial Sequence: Synthetic oligonucleotide
uaucguccauaacuaugga

SEQ ID NO: 1471549 - RNA, 19 nt, Artificial Sequence
  Description of Artificial Sequence: Synthetic oligonucleotide
auaaaugggugaauucaga

SEQ ID NO: 1471550 - RNA, 19 nt, Artificial Sequence
  Description of Artificial Sequence: Synthetic oligonucleotide
guaaggugagggccaauac

SEQ ID NO: 1471551 - RNA, 19 nt, Artificial Sequence
  Description of Artificial Sequence: Synthetic oligonucleotide
guuggaaccuaugcugaag

SEQ ID NO: 1471552 - RNA, 19 nt, Artificial Sequence
  Description of Artificial Sequence: Synthetic oligonucleotide
gauccuccgguguacauua

SEQ ID NO: 1471553 - RNA, 19 nt, Artificial Sequence
  Description of Artificial Sequence: Synthetic oligonucleotide
caggauagacucguuucgg

SEQ ID NO: 1471554 - RNA, 19 nt, Artificial Sequence
  Description of Artificial Sequence: Synthetic oligonucleotide
ugguucuucuuaugcaaau

SEQ ID NO: 1471555 - RNA, 19 nt, Artificial Sequence
  Description of Artificial Sequence: Synthetic oligonucleotide
aucgccgaagaaaccuucc

SEQ ID NO: 1471556 - RNA, 19 nt, Artificial Sequence
  Description of Artificial Sequence: Synthetic oligonucleotide
uccggaugugcuccuuaag

SEQ ID NO: 1471557 - RNA, 19 nt, Artificial Sequence
  Description of Artificial Sequence: Synthetic oligonucleotide
uaagggacgaauggucacu

SEQ ID NO: 1471558 - RNA, 19 nt, Artificial Sequence
  Description of Artificial Sequence: Synthetic oligonucleotide
auuaagguuggaaccuaug

SEQ ID NO: 1471559 - RNA, 19 nt, Artificial Sequence
  Description of Artificial Sequence: Synthetic oligonucleotide
cuguucuugaaagcaacuc

SEQ ID NO: 1471560 - RNA, 19 nt, Artificial Sequence
  Description of Artificial Sequence: Synthetic oligonucleotide
cacauggaugggcccaacg

SEQ ID NO: 1471561 - RNA, 19 nt, Artificial Sequence
  Description of Artificial Sequence: Synthetic oligonucleotide
acagguaaucgccgaagaa

SEQ ID NO: 1471562 - RNA, 19 nt, Artificial Sequence
  Description of Artificial Sequence: Synthetic oligonucleotide
caacuccacagcuguggcg

SEQ ID NO: 1471563 - RNA, 19 nt, Artificial Sequence
  Description of Artificial Sequence: Synthetic oligonucleotide
gcugaguaaggugagggcc

SEQ ID NO: 1471564 - RNA, 19 nt, Artificial Sequence
  Description of Artificial Sequence: Synthetic oligonucleotide
uacuaugccuugugagaga

SEQ ID NO: 1471565 - RNA, 19 nt, Artificial Sequence
  Description of Artificial Sequence: Synthetic oligonucleotide
uaaucgccgaagaaaccuu

SEQ ID NO: 1471566 - RNA, 19 nt, Artificial Sequence
  Description of Artificial Sequence: Synthetic oligonucleotide
uuccccaguaugguuccgg

SEQ ID NO: 1471567 - RNA, 19 nt, Artificial Sequence
  Description of Artificial Sequence: Synthetic oligonucleotide
ucacacucauacuggcuuc

SEQ ID NO: 1471568 - RNA, 19 nt, Artificial Sequence
  Description of Artificial Sequence: Synthetic oligonucleotide
ccuccgguguacauuaagg

SEQ ID NO: 1471569 - RNA, 19 nt, Artificial Sequence
  Description of Artificial Sequence: Synthetic oligonucleotide
caaauugaaguuggacuuc

SEQ ID NO: 1471570 - RNA, 19 nt, Artificial Sequence
  Description of Artificial Sequence: Synthetic oligonucleotide
guuuucacgugacuccuaa

SEQ ID NO: 1471571 - RNA, 19 nt, Artificial Sequence
  Description of Artificial Sequence: Synthetic oligonucleotide
gcuggauugguuccugaag

SEQ ID NO: 1471572 - RNA, 19 nt, Artificial Sequence
  Description of Artificial Sequence: Synthetic oligonucleotide
caagauggacgcucaugug

SEQ ID NO: 1471573 - RNA, 19 nt, Artificial Sequence
  Description of Artificial Sequence: Synthetic oligonucleotide
cuauggaccaccuuggcuu

SEQ ID NO: 1471574 - RNA, 19 nt, Artificial Sequence
  Description of Artificial Sequence: Synthetic oligonucleotide
uccuucgugacagguaauc

SEQ ID NO: 1471575 - RNA, 19 nt, Artificial Sequence
  Description of Artificial Sequence: Synthetic oligonucleotide
ugccagguuccuuugcauc

SEQ ID NO: 1471576 - RNA, 19 nt, Artificial Sequence
  Description of Artificial Sequence: Synthetic oligonucleotide
uuaagguggagagggguuu

SEQ ID NO: 1471577 - RNA, 19 nt, Artificial Sequence
  Description of Artificial Sequence: Synthetic oligonucleotide
guaaucgccgaagaaaccu

SEQ ID NO: 1471578 - RNA, 19 nt, Artificial Sequence
  Description of Artificial Sequence: Synthetic oligonucleotide
auccuacuaugccuuguga

SEQ ID NO: 1471579 - RNA, 19 nt, Artificial Sequence
  Description of Artificial Sequence: Synthetic oligonucleotide
gagaucgcagccauaaggu

SEQ ID NO: 1471580 - RNA, 19 nt, Artificial Sequence
  Description of Artificial Sequence: Synthetic oligonucleotide
aguaaggugagggccaaua

SEQ ID NO: 1471581 - RNA, 19 nt, Artificial Sequence
  Description of Artificial Sequence: Synthetic oligonucleotide
cucaugugccuccuucgug

SEQ ID NO: 1471582 - RNA, 19 nt, Artificial Sequence
  Description of Artificial Sequence: Synthetic oligonucleotide
ugccauaggcuuugccaca

SEQ ID NO: 1471583 - RNA, 19 nt, Artificial Sequence
  Description of Artificial Sequence: Synthetic oligonucleotide
cuugugggucuuccuacug

SEQ ID NO: 1471584 - RNA, 19 nt, Artificial Sequence
  Description of Artificial Sequence: Synthetic oligonucleotide
uguggcggugacagggccu

SEQ ID NO: 1471585 - RNA, 19 nt, Artificial Sequence
  Description of Artificial Sequence: Synthetic oligonucleotide
ucguuucggaagguuuucc

SEQ ID NO: 1471586 - RNA, 19 nt, Artificial Sequence
  Description of Artificial Sequence: Synthetic oligonucleotide
gccgaagaaaccuucccac

SEQ ID NO: 1471587 - RNA, 19 nt, Artificial Sequence
  Description of Artificial Sequence: Synthetic oligonucleotide
cuccuugacaggaggucac

SEQ ID NO: 1471588 - RNA, 19 nt, Artificial Sequence
  Description of Artificial Sequence: Synthetic oligonucleotide
cagguaaucgccgaagaaa

SEQ ID NO: 1471589 - RNA, 19 nt, Artificial Sequence
  Description of Artificial Sequence: Synthetic oligonucleotide
uuucuggcacuggugacau

SEQ ID NO: 1471590 - RNA, 19 nt, Artificial Sequence
  Description of Artificial Sequence: Synthetic oligonucleotide
acuugcacugaaggcuuuc

SEQ ID NO: 1471591 - RNA, 19 nt, Artificial Sequence
  Description of Artificial Sequence: Synthetic oligonucleotide
ccuucccacaggaaguugc

SEQ ID NO: 1471592 - RNA, 19 nt, Artificial Sequence
  Description of Artificial Sequence: Synthetic oligonucleotide
agagaggguccggaaggcg

SEQ ID NO: 1471593 - RNA, 19 nt, Artificial Sequence
  Description of Artificial Sequence: Synthetic oligonucleotide
aucugaguacucacugaag

SEQ ID NO: 1471594 - RNA, 19 nt, Artificial Sequence
  Description of Artificial Sequence: Synthetic oligonucleotide
cagugagguuggaacuugc

SEQ ID NO: 1471595 - RNA, 19 nt, Artificial Sequence
  Description of Artificial Sequence: Synthetic oligonucleotide
aauccaggagaagcaccca

SEQ ID NO: 1471596 - RNA, 19 nt, Artificial Sequence
  Description of Artificial Sequence: Synthetic oligonucleotide
cugaggggucguugaaggc

SEQ ID NO: 1471597 - RNA, 19 nt, Artificial Sequence
  Description of Artificial Sequence: Synthetic oligonucleotide
ggacgaauggucacugaag

SEQ ID NO: 1471598 - RNA, 19 nt, Artificial Sequence
  Description of Artificial Sequence: Synthetic oligonucleotide
uccccaguaugguuccgga

SEQ ID NO: 1471599 - RNA, 19 nt, Artificial Sequence
  Description of Artificial Sequence: Synthetic oligonucleotide
uuccggaugugcuccuuaa

SEQ ID NO: 1471600 - RNA, 19 nt, Artificial Sequence
  Description of Artificial Sequence: Synthetic oligonucleotide
ccaauccaggagaagcacc

SEQ ID NO: 1471601 - RNA, 19 nt, Artificial Sequence
  Description of Artificial Sequence: Synthetic oligonucleotide
agguggagagggguuuugg

SEQ ID NO: 1471602 - RNA, 19 nt, Artificial Sequence
  Description of Artificial Sequence: Synthetic oligonucleotide
aggugaguucuagcauggc

SEQ ID NO: 1471603 - RNA, 19 nt, Artificial Sequence
  Description of Artificial Sequence: Synthetic oligonucleotide
augggcuaugagguggcag

SEQ ID NO: 1471604 - RNA, 19 nt, Artificial Sequence
  Description of Artificial Sequence: Synthetic oligonucleotide
ggcuuuuccgcacugccga

SEQ ID NO: 1471605 - RNA, 19 nt, Artificial Sequence
  Description of Artificial Sequence: Synthetic oligonucleotide
uggaccaccuuggcuuuag

SEQ ID NO: 1471606 - RNA, 19 nt, Artificial Sequence
  Description of Artificial Sequence: Synthetic oligonucleotide
agaucgcagccauaagguu

SEQ ID NO: 1471607 - RNA, 19 nt, Artificial Sequence
  Description of Artificial Sequence: Synthetic oligonucleotide
agguuggaaccuaugcuga

SEQ ID NO: 1471608 - RNA, 19 nt, Artificial Sequence
  Description of Artificial Sequence: Synthetic oligonucleotide
uccuuagagcugagggguc

SEQ ID NO: 1471609 - RNA, 19 nt, Artificial Sequence
  Description of Artificial Sequence: Synthetic oligonucleotide
cgaagaaaccuucccacag

SEQ ID NO: 1471610 - RNA, 19 nt, Artificial Sequence
  Description of Artificial Sequence: Synthetic oligonucleotide
gaaccuaugcugaaggcuu

SEQ ID NO: 1471611 - RNA, 19 nt, Artificial Sequence
  Description of Artificial Sequence: Synthetic oligonucleotide
uccgcacugccgacauucc

SEQ ID NO: 1471612 - RNA, 19 nt, Artificial Sequence
  Description of Artificial Sequence: Synthetic oligonucleotide
ccauuagaugcuuccuccc

SEQ ID NO: 1471613 - RNA, 19 nt, Artificial Sequence
  Description of Artificial Sequence: Synthetic oligonucleotide
ccuacuaugccuugugaga

SEQ ID NO: 1471614 - RNA, 19 nt, Artificial Sequence
  Description of Artificial Sequence: Synthetic oligonucleotide
caugugugucuucaggaua

SEQ ID NO: 1471615 - RNA, 19 nt, Artificial Sequence
  Description of Artificial Sequence: Synthetic oligonucleotide
uguccguuuaugggcuaug

SEQ ID NO: 1471616 - RNA, 19 nt, Artificial Sequence
  Description of Artificial Sequence: Synthetic oligonucleotide
cuaugccuugugagagaag

SEQ ID NO: 1471617 - RNA, 19 nt, Artificial Sequence
  Description of Artificial Sequence: Synthetic oligonucleotide
ggagagggguuuugguaag

SEQ ID NO: 1471618 - RNA, 19 nt, Artificial Sequence
  Description of Artificial Sequence: Synthetic oligonucleotide
gagggccaauacugaagac

SEQ ID NO: 1471619 - RNA, 19 nt, Artificial Sequence
  Description of Artificial Sequence: Synthetic oligonucleotide
caguugcaugccucucucc

SEQ ID NO: 1471620 - RNA, 19 nt, Artificial Sequence
  Description of Artificial Sequence: Synthetic oligonucleotide
ggauagacucguuucggaa

SEQ ID NO: 1471621 - RNA, 19 nt, Artificial Sequence
  Description of Artificial Sequence: Synthetic oligonucleotide
ucaggugaguccuguucuu

SEQ ID NO: 1471622 - RNA, 19 nt, Artificial Sequence
  Description of Artificial Sequence: Synthetic oligonucleotide
ugacaagauggacgcucau

SEQ ID NO: 1471623 - RNA, 19 nt, Artificial Sequence
  Description of Artificial Sequence: Synthetic oligonucleotide
ugggugaauucagaagauu

SEQ ID NO: 1471624 - RNA, 19 nt, Artificial Sequence
  Description of Artificial Sequence: Synthetic oligonucleotide
gaugggcccaacguuucuc

SEQ ID NO: 1471625 - RNA, 19 nt, Artificial Sequence
  Description of Artificial Sequence: Synthetic oligonucleotide
guccggaaggcguuaccac

SEQ ID NO: 1471626 - RNA, 19 nt, Artificial Sequence
  Description of Artificial Sequence: Synthetic oligonucleotide
cacacacuucuugacaaga

SEQ ID NO: 1471627 - RNA, 19 nt, Artificial Sequence
  Description of Artificial Sequence: Synthetic oligonucleotide
agugagguuggaacuugca

SEQ ID NO: 1471628 - RNA, 19 nt, Artificial Sequence
  Description of Artificial Sequence: Synthetic oligonucleotide
uuccuacaguccuggcacu

SEQ ID NO: 1471629 - RNA, 19 nt, Artificial Sequence
  Description of Artificial Sequence: Synthetic oligonucleotide
ggcccaacguuucucuccc

SEQ ID NO: 1471630 - RNA, 19 nt, Artificial Sequence
  Description of Artificial Sequence: Synthetic oligonucleotide
ugacuccuaagggacgaau

SEQ ID NO: 1471631 - RNA, 19 nt, Artificial Sequence
  Description of Artificial Sequence: Synthetic oligonucleotide
cccaacguuucucuccccg

SEQ ID NO: 1471632 - RNA, 19 nt, Artificial Sequence
  Description of Artificial Sequence: Synthetic oligonucleotide
cagagaucgcagccauaag

SEQ ID NO: 1471633 - RNA, 19 nt, Artificial Sequence
  Description of Artificial Sequence: Synthetic oligonucleotide
ugccucucuccuccauucu

SEQ ID NO: 1471634 - RNA, 19 nt, Artificial Sequence
  Description of Artificial Sequence: Synthetic oligonucleotide
cuguggcggugacagggcc

SEQ ID NO: 1471635 - RNA, 19 nt, Artificial Sequence
  Description of Artificial Sequence: Synthetic oligonucleotide
aguucuagcauggcuccuu

SEQ ID NO: 1471636 - RNA, 19 nt, Artificial Sequence
  Description of Artificial Sequence: Synthetic oligonucleotide
aauggucacugaaggcuuu

SEQ ID NO: 1471637 - RNA, 19 nt, Artificial Sequence
  Description of Artificial Sequence: Synthetic oligonucleotide
caggaaguugcagugaggu

SEQ ID NO: 1471638 - RNA, 19 nt, Artificial Sequence
  Description of Artificial Sequence: Synthetic oligonucleotide
ccuucgugacagguaaucg

SEQ ID NO: 1471639 - RNA, 19 nt, Artificial Sequence
  Description of Artificial Sequence: Synthetic oligonucleotide
gaucgcagccauaagguuu

SEQ ID NO: 1471640 - RNA, 19 nt, Artificial Sequence
  Description of Artificial Sequence: Synthetic oligonucleotide
ugugugucuucaggauaga

SEQ ID NO: 1471641 - RNA, 19 nt, Artificial Sequence
  Description of Artificial Sequence: Synthetic oligonucleotide
aggaaguugcagugagguu

SEQ ID NO: 1471642 - RNA, 19 nt, Artificial Sequence
  Description of Artificial Sequence: Synthetic oligonucleotide
gugaguccuguucuugaaa

SEQ ID NO: 1471643 - RNA, 19 nt, Artificial Sequence
  Description of Artificial Sequence: Synthetic oligonucleotide
cuccgguguacauuaaggu

SEQ ID NO: 1471644 - RNA, 19 nt, Artificial Sequence
  Description of Artificial Sequence: Synthetic oligonucleotide
acgugacuccuaagggacg

SEQ ID NO: 1471645 - RNA, 19 nt, Artificial Sequence
  Description of Artificial Sequence: Synthetic oligonucleotide
cucguuucggaagguuuuc

SEQ ID NO: 1471646 - RNA, 19 nt, Artificial Sequence
  Description of Artificial Sequence: Synthetic oligonucleotide
acucguuucggaagguuuu

SEQ ID NO: 1471647 - RNA, 19 nt, Artificial Sequence
  Description of Artificial Sequence: Synthetic oligonucleotide
ugcacuccauuagaugcuu

SEQ ID NO: 1471648 - RNA, 19 nt, Artificial Sequence
  Description of Artificial Sequence: Synthetic oligonucleotide
cgguguacauuaagguugg

SEQ ID NO: 1471649 - RNA, 19 nt, Artificial Sequence
  Description of Artificial Sequence: Synthetic oligonucleotide
uccuugacaggaggucacu

SEQ ID NO: 1471650 - RNA, 19 nt, Artificial Sequence
  Description of Artificial Sequence: Synthetic oligonucleotide
gcuuuagauggaguucccc

SEQ ID NO: 1471651 - RNA, 19 nt, Artificial Sequence
  Description of Artificial Sequence: Synthetic oligonucleotide
cguuucggaagguuuuccc

SEQ ID NO: 1471652 - RNA, 19 nt, Artificial Sequence
  Description of Artificial Sequence: Synthetic oligonucleotide
ccaauugcacuccauuaga

SEQ ID NO: 1471653 - RNA, 19 nt, Artificial Sequence
  Description of Artificial Sequence: Synthetic oligonucleotide
gguuggaacuugcacugaa

SEQ ID NO: 1471654 - RNA, 19 nt, Artificial Sequence
  Description of Artificial Sequence: Synthetic oligonucleotide
uggugacauucaugcauuu

SEQ ID NO: 1471655 - RNA, 19 nt, Artificial Sequence
  Description of Artificial Sequence: Synthetic oligonucleotide
caauugcacuccauuagau

SEQ ID NO: 1471656 - RNA, 19 nt, Artificial Sequence
  Description of Artificial Sequence: Synthetic oligonucleotide
gugacagguaaucgccgaa

SEQ ID NO: 1471657 - RNA, 19 nt, Artificial Sequence
  Description of Artificial Sequence: Synthetic oligonucleotide
uagacucguuucggaaggu

SEQ ID NO: 1471658 - RNA, 19 nt, Artificial Sequence
  Description of Artificial Sequence: Synthetic oligonucleotide
uaagguggagagggguuuu

SEQ ID NO: 1471659 - RNA, 19 nt, Artificial Sequence
  Description of Artificial Sequence: Synthetic oligonucleotide
ccuuagagcugaggggucg

SEQ ID NO: 1471660 - RNA, 19 nt, Artificial Sequence
  Description of Artificial Sequence: Synthetic oligonucleotide
guuggacuuccaccggaaa

SEQ ID NO: 1471661 - RNA, 19 nt, Artificial Sequence
  Description of Artificial Sequence: Synthetic oligonucleotide
ugcaugccucucuccucca

SEQ ID NO: 1471662 - RNA, 19 nt, Artificial Sequence
  Description of Artificial Sequence: Synthetic oligonucleotide
aggguccggaaggcguuac

SEQ ID NO: 1471663 - RNA, 19 nt, Artificial Sequence
  Description of Artificial Sequence: Synthetic oligonucleotide
cuuaagguggagagggguu

SEQ ID NO: 1471664 - RNA, 19 nt, Artificial Sequence
  Description of Artificial Sequence: Synthetic oligonucleotide
ccaucauacaugcucaggu

SEQ ID NO: 1471665 - RNA, 19 nt, Artificial Sequence
  Description of Artificial Sequence: Synthetic oligonucleotide
ggaaccuaugcugaaggcu

SEQ ID NO: 1471666 - RNA, 19 nt, Artificial Sequence
  Description of Artificial Sequence: Synthetic oligonucleotide
gaacuugcacugaaggcuu

SEQ ID NO: 1471667 - RNA, 19 nt, Artificial Sequence
  Description of Artificial Sequence: Synthetic oligonucleotide
augugccuccuucgugaca

SEQ ID NO: 1471668 - RNA, 19 nt, Artificial Sequence
  Description of Artificial Sequence: Synthetic oligonucleotide
guaugguuccggaugugcu

SEQ ID NO: 1471669 - RNA, 19 nt, Artificial Sequence
  Description of Artificial Sequence: Synthetic oligonucleotide
gagaggguccggaaggcgu

SEQ ID NO: 1471670 - RNA, 19 nt, Artificial Sequence
  Description of Artificial Sequence: Synthetic oligonucleotide
uguguccguuuaugggcua

SEQ ID NO: 1471671 - RNA, 19 nt, Artificial Sequence
  Description of Artificial Sequence: Synthetic oligonucleotide
aggcuggauugguuccuga

SEQ ID NO: 1471672 - RNA, 19 nt, Artificial Sequence
  Description of Artificial Sequence: Synthetic oligonucleotide
augccuugugagagaagca

SEQ ID NO: 1471673 - RNA, 19 nt, Artificial Sequence
  Description of Artificial Sequence: Synthetic oligonucleotide
cucaaccgguuucuucaca

SEQ ID NO: 1471674 - RNA, 19 nt, Artificial Sequence
  Description of Artificial Sequence: Synthetic oligonucleotide
gugaauccuacuaugccuu

SEQ ID NO: 1471675 - RNA, 19 nt, Artificial Sequence
  Description of Artificial Sequence: Synthetic oligonucleotide
cacacugacugcagucaaa

SEQ ID NO: 1471676 - RNA, 19 nt, Artificial Sequence
  Description of Artificial Sequence: Synthetic oligonucleotide
cuucaggauagacucguuu

SEQ ID NO: 1471677 - RNA, 19 nt, Artificial Sequence
  Description of Artificial Sequence: Synthetic oligonucleotide
cgcacugccgacauuccac

SEQ ID NO: 1471678 - RNA, 19 nt, Artificial Sequence
  Description of Artificial Sequence: Synthetic oligonucleotide
cuccccagugugagaguuc

SEQ ID NO: 1471679 - RNA, 19 nt, Artificial Sequence
  Description of Artificial Sequence: Synthetic oligonucleotide
gggucguugaaggcuuugc

SEQ ID NO: 1471680 - RNA, 19 nt, Artificial Sequence
  Description of Artificial Sequence: Synthetic oligonucleotide
cuuuuccgcacugccgaca

SEQ ID NO: 1471681 - RNA, 19 nt, Artificial Sequence
  Description of Artificial Sequence: Synthetic oligonucleotide
gacucguuucggaagguuu

SEQ ID NO: 1471682 - RNA, 19 nt, Artificial Sequence
  Description of Artificial Sequence: Synthetic oligonucleotide
gguccggaaggcguuacca

SEQ ID NO: 1471683 - RNA, 19 nt, Artificial Sequence
  Description of Artificial Sequence: Synthetic oligonucleotide
cuccccgguggguuuucac

SEQ ID NO: 1471684 - RNA, 19 nt, Artificial Sequence
  Description of Artificial Sequence: Synthetic oligonucleotide
gggugaauucagaagauuu

SEQ ID NO: 1471685 - RNA, 19 nt, Artificial Sequence
  Description of Artificial Sequence: Synthetic oligonucleotide
accuucccacaggaaguug

SEQ ID NO: 1471686 - RNA, 19 nt, Artificial Sequence
  Description of Artificial Sequence: Synthetic oligonucleotide
agacucguuucggaagguu

SEQ ID NO: 1471687 - RNA, 19 nt, Artificial Sequence
  Description of Artificial Sequence: Synthetic oligonucleotide
gauggacgcucaugugccu

SEQ ID NO: 1471688 - RNA, 19 nt, Artificial Sequence
  Description of Artificial Sequence: Synthetic oligonucleotide
gguuggaaccuaugcugaa

SEQ ID NO: 1471689 - RNA, 19 nt, Artificial Sequence
  Description of Artificial Sequence: Synthetic oligonucleotide
cgcucaugugccuccuucg

SEQ ID NO: 1471690 - RNA, 19 nt, Artificial Sequence
  Description of Artificial Sequence: Synthetic oligonucleotide
uuagagcugaggggucguu

SEQ ID NO: 1471691 - RNA, 19 nt, Artificial Sequence
  Description of Artificial Sequence: Synthetic oligonucleotide
aacuugcacugaaggcuuu

SEQ ID NO: 1471692 - RNA, 19 nt, Artificial Sequence
  Description of Artificial Sequence: Synthetic oligonucleotide
cacucauacuggcuucucu

SEQ ID NO: 1471693 - RNA, 19 nt, Artificial Sequence
  Description of Artificial Sequence: Synthetic oligonucleotide
aguacucacugaagccuuu

SEQ ID NO: 1471694 - RNA, 19 nt, Artificial Sequence
  Description of Artificial Sequence: Synthetic oligonucleotide
caacguuucucuccccggu

SEQ ID NO: 1471695 - RNA, 19 nt, Artificial Sequence
  Description of Artificial Sequence: Synthetic oligonucleotide
ggcuggauugguuccugaa

SEQ ID NO: 1471696 - RNA, 19 nt, Artificial Sequence
  Description of Artificial Sequence: Synthetic oligonucleotide
gugccuccuucgugacagg

SEQ ID NO: 1471697 - RNA, 19 nt, Artificial Sequence
  Description of Artificial Sequence: Synthetic oligonucleotide
caguaugguuccggaugug

SEQ ID NO: 1471698 - RNA, 19 nt, Artificial Sequence
  Description of Artificial Sequence: Synthetic oligonucleotide
ggcuuuagauggaguuccc

SEQ ID NO: 1471699 - RNA, 19 nt, Artificial Sequence
  Description of Artificial Sequence: Synthetic oligonucleotide
ccgaagaaaccuucccaca

SEQ ID NO: 1471700 - RNA, 19 nt, Artificial Sequence
  Description of Artificial Sequence: Synthetic oligonucleotide
ccagugugagaguucaugu

SEQ ID NO: 1471701 - RNA, 19 nt, Artificial Sequence
  Description of Artificial Sequence: Synthetic oligonucleotide
guguguccguuuaugggcu

SEQ ID NO: 1471702 - RNA, 19 nt, Artificial Sequence
  Description of Artificial Sequence: Synthetic oligonucleotide
ggauugguuccugaaggcu

SEQ ID NO: 1471703 - RNA, 19 nt, Artificial Sequence
  Description of Artificial Sequence: Synthetic oligonucleotide
ggccucuugcuuguggguc

SEQ ID NO: 1471704 - RNA, 19 nt, Artificial Sequence
  Description of Artificial Sequence: Synthetic oligonucleotide
gccgacauuccacacacuu

SEQ ID NO: 1471705 - RNA, 19 nt, Artificial Sequence
  Description of Artificial Sequence: Synthetic oligonucleotide
agaggguccggaaggcguu

SEQ ID NO: 1471706 - RNA, 19 nt, Artificial Sequence
  Description of Artificial Sequence: Synthetic oligonucleotide
accuaugcugaaggcuuuu

SEQ ID NO: 1471707 - RNA, 19 nt, Artificial Sequence
  Description of Artificial Sequence: Synthetic oligonucleotide
ccccaauccaggagaagca

SEQ ID NO: 1471708 - RNA, 19 nt, Artificial Sequence
  Description of Artificial Sequence: Synthetic oligonucleotide
ccuuuccuacaguccuggc

SEQ ID NO: 1471709 - RNA, 19 nt, Artificial Sequence
  Description of Artificial Sequence: Synthetic oligonucleotide
cauaacuauggaccaccuu

SEQ ID NO: 1471710 - RNA, 19 nt, Artificial Sequence
  Description of Artificial Sequence: Synthetic oligonucleotide
cugguagugaaggcuuucu

SEQ ID NO: 1471711 - RNA, 19 nt, Artificial Sequence
  Description of Artificial Sequence: Synthetic oligonucleotide
gcuuuuccgcacugccgac

SEQ ID NO: 1471712 - RNA, 19 nt, Artificial Sequence
  Description of Artificial Sequence: Synthetic oligonucleotide
gggccaauacugaagacuu

SEQ ID NO: 1471713 - RNA, 19 nt, Artificial Sequence
  Description of Artificial Sequence: Synthetic oligonucleotide
gcggugacagggccucuug

SEQ ID NO: 1471714 - RNA, 19 nt, Artificial Sequence
  Description of Artificial Sequence: Synthetic oligonucleotide
ggguccggaaggcguuacc

SEQ ID NO: 1471715 - RNA, 19 nt, Artificial Sequence
  Description of Artificial Sequence: Synthetic oligonucleotide
gaggggucguugaaggcuu

SEQ ID NO: 1471716 - RNA, 19 nt, Artificial Sequence
  Description of Artificial Sequence: Synthetic oligonucleotide
ucucuccccgguggguuuu

SEQ ID NO: 1471717 - RNA, 19 nt, Artificial Sequence
  Description of Artificial Sequence: Synthetic oligonucleotide
gagaagcacccaguugcau

SEQ ID NO: 1471718 - RNA, 19 nt, Artificial Sequence
  Description of Artificial Sequence: Synthetic oligonucleotide
cgugacagguaaucgccga

SEQ ID NO: 1471719 - RNA, 19 nt, Artificial Sequence
  Description of Artificial Sequence: Synthetic oligonucleotide
ggggucguugaaggcuuug

SEQ ID NO: 1471720 - RNA, 19 nt, Artificial Sequence
  Description of Artificial Sequence: Synthetic oligonucleotide
gaguucuagcauggcuccu

SEQ ID NO: 1471721 - RNA, 19 nt, Artificial Sequence
  Description of Artificial Sequence: Synthetic oligonucleotide
gcucaugugccuccuucgu

SEQ ID NO: 1471722 - RNA, 19 nt, Artificial Sequence
  Description of Artificial Sequence: Synthetic oligonucleotide
cuuagagcugaggggucgu

SEQ ID NO: 1471723 - RNA, 19 nt, Artificial Sequence
  Description of Artificial Sequence: Synthetic oligonucleotide
ggccaauacugaagacuuc

SEQ ID NO: 1471724 - RNA, 19 nt, Artificial Sequence
  Description of Artificial Sequence: Synthetic oligonucleotide
cgccgaagaaaccuuccca

SEQ ID NO: 1471725 - RNA, 19 nt, Artificial Sequence
  Description of Artificial Sequence: Synthetic oligonucleotide
gccuugugagagaagcacu

SEQ ID NO: 1471726 - RNA, 19 nt, Artificial Sequence
  Description of Artificial Sequence: Synthetic oligonucleotide
cagcacucaaccgguuucu

SEQ ID NO: 1471727 - RNA, 19 nt, Artificial Sequence
  Description of Artificial Sequence: Synthetic oligonucleotide
ccuuaagguggagaggggu

SEQ ID NO: 1471728 - RNA, 19 nt, Artificial Sequence
  Description of Artificial Sequence: Synthetic oligonucleotide
gaggguccggaaggcguua

SEQ ID NO: 1471729 - RNA, 19 nt, Artificial Sequence
  Description of Artificial Sequence: Synthetic oligonucleotide
ccuacaguccuggcacuca

SEQ ID NO: 1471730 - RNA, 19 nt, Artificial Sequence
  Description of Artificial Sequence: Synthetic oligonucleotide
ccauaacuauggaccaccu

SEQ ID NO: 1471731 - RNA, 19 nt, Artificial Sequence
  Description of Artificial Sequence: Synthetic oligonucleotide
ccccaaaauaucguccaua

SEQ ID NO: 1471732 - RNA, 19 nt, Artificial Sequence
  Description of Artificial Sequence: Synthetic oligonucleotide
cgugacuccuaagggacga

SEQ ID NO: 1471733 - RNA, 19 nt, Artificial Sequence
  Description of Artificial Sequence: Synthetic oligonucleotide
gguuuucacgugacuccua

SEQ ID NO: 1471734 - RNA, 19 nt, Artificial Sequence
  Description of Artificial Sequence: Synthetic oligonucleotide
gguguacauuaagguugga

SEQ ID NO: 1471735 - RNA, 19 nt, Artificial Sequence
  Description of Artificial Sequence: Synthetic oligonucleotide
gcccaacguuucucucccc

SEQ ID NO: 1471736 - RNA, 19 nt, Artificial Sequence
  Description of Artificial Sequence: Synthetic oligonucleotide
ggugcugagucaggugagu

SEQ ID NO: 1471737 - RNA, 19 nt, Artificial Sequence
  Description of Artificial Sequence: Synthetic oligonucleotide
ggaugggcccaacguuucu

SEQ ID NO: 1471738 - RNA, 19 nt, Artificial Sequence
  Description of Artificial Sequence: Synthetic oligonucleotide
gcacuccauuagaugcuuc

SEQ ID NO: 1471739 - RNA, 19 nt, Artificial Sequence
  Description of Artificial Sequence: Synthetic oligonucleotide
ggauccuccgguguacauu

SEQ ID NO: 1471740 - RNA, 19 nt, Artificial Sequence
  Description of Artificial Sequence: Synthetic oligonucleotide
cccaguugcaugccucucu

SEQ ID NO: 1471741 - RNA, 19 nt, Artificial Sequence
  Description of Artificial Sequence: Synthetic oligonucleotide
gacgcucaugugccuccuu

SEQ ID NO: 1471742 - RNA, 19 nt, Artificial Sequence
  Description of Artificial Sequence: Synthetic oligonucleotide
auccuccgguguacauuaa

SEQ ID NO: 1471743 - RNA, 19 nt, Artificial Sequence
  Description of Artificial Sequence: Synthetic oligonucleotide
ccuuggcuuuagauggagu

SEQ ID NO: 1471744 - RNA, 19 nt, Artificial Sequence
  Description of Artificial Sequence: Synthetic oligonucleotide
ccacaauggucacacucau

SEQ ID NO: 1471745 - RNA, 19 nt, Artificial Sequence
  Description of Artificial Sequence: Synthetic oligonucleotide
cuccuucgugacagguaau

SEQ ID NO: 1471746 - RNA, 19 nt, Artificial Sequence
  Description of Artificial Sequence: Synthetic oligonucleotide
gaguaaggugagggccaau

SEQ ID NO: 1471747 - RNA, 19 nt, Artificial Sequence
  Description of Artificial Sequence: Synthetic oligonucleotide
gccuccuucgugacaggua

SEQ ID NO: 1471748 - RNA, 19 nt, Artificial Sequence
  Description of Artificial Sequence: Synthetic oligonucleotide
ccgcacugccgacauucca

SEQ ID NO: 1471749 - RNA, 19 nt, Artificial Sequence
  Description of Artificial Sequence: Synthetic oligonucleotide
gaacucgcauguggaucuu

SEQ ID NO: 1471750 - RNA, 19 nt, Artificial Sequence
  Description of Artificial Sequence: Synthetic oligonucleotide
aggggucguugaaggcuuu

SEQ ID NO: 1471751 - RNA, 19 nt, Artificial Sequence
  Description of Artificial Sequence: Synthetic oligonucleotide
ccucauguguuuccuccuu

SEQ ID NO: 1471752 - RNA, 19 nt, Artificial Sequence
  Description of Artificial Sequence: Synthetic oligonucleotide
ggguuuugguaaggccuuu

SEQ ID NO: 1471753 - RNA, 19 nt, Artificial Sequence
  Description of Artificial Sequence: Synthetic oligonucleotide
ccccaguaugguuccggau

SEQ ID NO: 1471754 - RNA, 19 nt, Artificial Sequence
  Description of Artificial Sequence: Synthetic oligonucleotide
ggcggugacagggccucuu

SEQ ID NO: 1471755 - RNA, 19 nt, Artificial Sequence
  Description of Artificial Sequence: Synthetic oligonucleotide
ccccagugugagaguucau

SEQ ID NO: 1471756 - RNA, 19 nt, Artificial Sequence
  Description of Artificial Sequence: Synthetic oligonucleotide
aacuaaacagucaagaugc

SEQ ID NO: 1471757 - RNA, 19 nt, Artificial Sequence
  Description of Artificial Sequence: Synthetic oligonucleotide
aaacauguaaaguaugagg

SEQ ID NO: 1471758 - RNA, 19 nt, Artificial Sequence
  Description of Artificial Sequence: Synthetic oligonucleotide
uuaaacuagaaauaccugg

SEQ ID NO: 1471759 - RNA, 19 nt, Artificial Sequence
  Description of Artificial Sequence: Synthetic oligonucleotide
uuuaauuucacaucuuggc

SEQ ID NO: 1471760 - RNA, 19 nt, Artificial Sequence
  Description of Artificial Sequence: Synthetic oligonucleotide
uucuaaaucacucauuuac

SEQ ID NO: 1471761 - RNA, 19 nt, Artificial Sequence
  Description of Artificial Sequence: Synthetic oligonucleotide
aacgucucaaaguaggacg

SEQ ID NO: 1471762 - RNA, 19 nt, Artificial Sequence
  Description of Artificial Sequence: Synthetic oligonucleotide
aagaguuacaucccaggcc

SEQ ID NO: 1471763 - RNA, 19 nt, Artificial Sequence
  Description of Artificial Sequence: Synthetic oligonucleotide
aacuaaacaccacaacugg

SEQ ID NO: 1471764 - RNA, 19 nt, Artificial Sequence
  Description of Artificial Sequence: Synthetic oligonucleotide
aauuucacaucuuggcuac

SEQ ID NO: 1471765 - RNA, 19 nt, Artificial Sequence
  Description of Artificial Sequence: Synthetic oligonucleotide
augagugcagcacaaaacc

SEQ ID NO: 1471766 - RNA, 19 nt, Artificial Sequence
  Description of Artificial Sequence: Synthetic oligonucleotide
aguuucaucucacaugggc

SEQ ID NO: 1471767 - RNA, 19 nt, Artificial Sequence
  Description of Artificial Sequence: Synthetic oligonucleotide
agcacguacacguaugucc

SEQ ID NO: 1471768 - RNA, 19 nt, Artificial Sequence
  Description of Artificial Sequence: Synthetic oligonucleotide
gacaaaugcaucgugaagg

SEQ ID NO: 1471769 - RNA, 19 nt, Artificial Sequence
  Description of Artificial Sequence: Synthetic oligonucleotide
aaugggaacgcuucagaac

SEQ ID NO: 1471770 - RNA, 19 nt, Artificial Sequence
  Description of Artificial Sequence: Synthetic oligonucleotide
acaauaagcacguacacgu

SEQ ID NO: 1471771 - RNA, 19 nt, Artificial Sequence
  Description of Artificial Sequence: Synthetic oligonucleotide
aguaugaggggccuuaaac

SEQ ID NO: 1471772 - RNA, 19 nt, Artificial Sequence
  Description of Artificial Sequence: Synthetic oligonucleotide
aaaauuccaaccaaccuuc

SEQ ID NO: 1471773 - RNA, 19 nt, Artificial Sequence
  Description of Artificial Sequence: Synthetic oligonucleotide
aaaguuugaguauuuauua

SEQ ID NO: 1471774 - RNA, 19 nt, Artificial Sequence
  Description of Artificial Sequence: Synthetic oligonucleotide
aauaaagagaaguacuauu

SEQ ID NO: 1471775 - RNA, 19 nt, Artificial Sequence
  Description of Artificial Sequence: Synthetic oligonucleotide
aauuccaaccaaccuuccc

SEQ ID NO: 1471776 - RNA, 19 nt, Artificial Sequence
  Description of Artificial Sequence: Synthetic oligonucleotide
uaaacuagaaauaccugga

SEQ ID NO: 1471777 - RNA, 19 nt, Artificial Sequence
  Description of Artificial Sequence: Synthetic oligonucleotide
aaguuugaguauuuauuag

SEQ ID NO: 1471778 - RNA, 19 nt, Artificial Sequence
  Description of Artificial Sequence: Synthetic oligonucleotide
auuccuacaaaguuucauc

SEQ ID NO: 1471779 - RNA, 19 nt, Artificial Sequence
  Description of Artificial Sequence: Synthetic oligonucleotide
aaaacuaaacagucaagau

SEQ ID NO: 1471780 - RNA, 19 nt, Artificial Sequence
  Description of Artificial Sequence: Synthetic oligonucleotide
aaagaauagcguuauggaa

SEQ ID NO: 1471781 - RNA, 19 nt, Artificial Sequence
  Description of Artificial Sequence: Synthetic oligonucleotide
acaacuggcagaugagugc

SEQ ID NO: 1471782 - RNA, 19 nt, Artificial Sequence
  Description of Artificial Sequence: Synthetic oligonucleotide
ugugacaauaagcacguac

SEQ ID NO: 1471783 - RNA, 19 nt, Artificial Sequence
  Description of Artificial Sequence: Synthetic oligonucleotide
aaaauaccuggccaggcug

SEQ ID NO: 1471784 - RNA, 19 nt, Artificial Sequence
  Description of Artificial Sequence: Synthetic oligonucleotide
aaagagaaguacuauuuua

SEQ ID NO: 1471785 - RNA, 19 nt, Artificial Sequence
  Description of Artificial Sequence: Synthetic oligonucleotide
aguacuauuuuaauuucac

SEQ ID NO: 1471786 - RNA, 19 nt, Artificial Sequence
  Description of Artificial Sequence: Synthetic oligonucleotide
aagggaacaaggccacccc

SEQ ID NO: 1471787 - RNA, 19 nt, Artificial Sequence
  Description of Artificial Sequence: Synthetic oligonucleotide
aauccaucggucgggaugg

SEQ ID NO: 1471788 - RNA, 19 nt, Artificial Sequence
  Description of Artificial Sequence: Synthetic oligonucleotide
caacuaaacaccacaacug

SEQ ID NO: 1471789 - RNA, 19 nt, Artificial Sequence
  Description of Artificial Sequence: Synthetic oligonucleotide
uucuauuuuaaaccacucu

SEQ ID NO: 1471790 - RNA, 19 nt, Artificial Sequence
  Description of Artificial Sequence: Synthetic oligonucleotide
uuuacauaucaugucaugu

SEQ ID NO: 1471791 - RNA, 19 nt, Artificial Sequence
  Description of Artificial Sequence: Synthetic oligonucleotide
aauaagcacguacacguau

SEQ ID NO: 1471792 - RNA, 19 nt, Artificial Sequence
  Description of Artificial Sequence: Synthetic oligonucleotide
aacuagaaauaccuggaau

SEQ ID NO: 1471793 - RNA, 19 nt, Artificial Sequence
  Description of Artificial Sequence: Synthetic oligonucleotide
aagaauagcguuauggaaa

SEQ ID NO: 1471794 - RNA, 19 nt, Artificial Sequence
  Description of Artificial Sequence: Synthetic oligonucleotide
cauguaaaguaugaggggc

SEQ ID NO: 1471795 - RNA, 19 nt, Artificial Sequence
  Description of Artificial Sequence: Synthetic oligonucleotide
gaaagaguucccaucaccc

SEQ ID NO: 1471796 - RNA, 19 nt, Artificial Sequence
  Description of Artificial Sequence: Synthetic oligonucleotide
uuccuuccaauguucacgg

SEQ ID NO: 1471797 - RNA, 19 nt, Artificial Sequence
  Description of Artificial Sequence: Synthetic oligonucleotide
caucgugaagggaacaagg

SEQ ID NO: 1471798 - RNA, 19 nt, Artificial Sequence
  Description of Artificial Sequence: Synthetic oligonucleotide
ugcucuuucuaaaucacuc

SEQ ID NO: 1471799 - RNA, 19 nt, Artificial Sequence
  Description of Artificial Sequence: Synthetic oligonucleotide
uguagacaaaugcaucgug

SEQ ID NO: 1471800 - RNA, 19 nt, Artificial Sequence
  Description of Artificial Sequence: Synthetic oligonucleotide
uguaaggcauacaagggua

SEQ ID NO: 1471801 - RNA, 19 nt, Artificial Sequence
  Description of Artificial Sequence: Synthetic oligonucleotide
cuuaaacuagaaauaccug

SEQ ID NO: 1471802 - RNA, 19 nt, Artificial Sequence
  Description of Artificial Sequence: Synthetic oligonucleotide
aacgcuucagaacccaaga

SEQ ID NO: 1471803 - RNA, 19 nt, Artificial Sequence
  Description of Artificial Sequence: Synthetic oligonucleotide
aacaaauagcaaaacucug

SEQ ID NO: 1471804 - RNA, 19 nt, Artificial Sequence
  Description of Artificial Sequence: Synthetic oligonucleotide
uuccuacaaaguuucaucu

SEQ ID NO: 1471805 - RNA, 19 nt, Artificial Sequence
  Description of Artificial Sequence: Synthetic oligonucleotide
agcauuggaacaaacaugu

SEQ ID NO: 1471806 - RNA, 19 nt, Artificial Sequence
  Description of Artificial Sequence: Synthetic oligonucleotide
aaaugcaucgugaagggaa

SEQ ID NO: 1471807 - RNA, 19 nt, Artificial Sequence
  Description of Artificial Sequence: Synthetic oligonucleotide
ucgugaagggaacaaggcc

SEQ ID NO: 1471808 - RNA, 19 nt, Artificial Sequence
  Description of Artificial Sequence: Synthetic oligonucleotide
agaaaauaccuggccaggc

SEQ ID NO: 1471809 - RNA, 19 nt, Artificial Sequence
  Description of Artificial Sequence: Synthetic oligonucleotide
aaugcaucgugaagggaac

SEQ ID NO: 1471810 - RNA, 19 nt, Artificial Sequence
  Description of Artificial Sequence: Synthetic oligonucleotide
acgcacaucaccccacacc

SEQ ID NO: 1471811 - RNA, 19 nt, Artificial Sequence
  Description of Artificial Sequence: Synthetic oligonucleotide
uuacauaucaugucaugua

SEQ ID NO: 1471812 - RNA, 19 nt, Artificial Sequence
  Description of Artificial Sequence: Synthetic oligonucleotide
aaacuagaaauaccuggaa

SEQ ID NO: 1471813 - RNA, 19 nt, Artificial Sequence
  Description of Artificial Sequence: Synthetic oligonucleotide
gaugaggcgaaaugggaac

SEQ ID NO: 1471814 - RNA, 19 nt, Artificial Sequence
  Description of Artificial Sequence: Synthetic oligonucleotide
uuucaucucacaugggcgu

SEQ ID NO: 1471815 - RNA, 19 nt, Artificial Sequence
  Description of Artificial Sequence: Synthetic oligonucleotide
uacgaggcggccacgacag

SEQ ID NO: 1471816 - RNA, 19 nt, Artificial Sequence
  Description of Artificial Sequence: Synthetic oligonucleotide
acucauuuacauaucaugu

SEQ ID NO: 1471817 - RNA, 19 nt, Artificial Sequence
  Description of Artificial Sequence: Synthetic oligonucleotide
uacacguauguccugugcu

SEQ ID NO: 1471818 - RNA, 19 nt, Artificial Sequence
  Description of Artificial Sequence: Synthetic oligonucleotide
agggacaauccaucggucg

SEQ ID NO: 1471819 - RNA, 19 nt, Artificial Sequence
  Description of Artificial Sequence: Synthetic oligonucleotide
auguaaaguaugaggggcc

SEQ ID NO: 1471820 - RNA, 19 nt, Artificial Sequence
  Description of Artificial Sequence: Synthetic oligonucleotide
caaggucccauccaagacc

SEQ ID NO: 1471821 - RNA, 19 nt, Artificial Sequence
  Description of Artificial Sequence: Synthetic oligonucleotide
uaugaggggccuuaaacua

SEQ ID NO: 1471822 - RNA, 19 nt, Artificial Sequence
  Description of Artificial Sequence: Synthetic oligonucleotide
acaugggcgucuuuuaaug

SEQ ID NO: 1471823 - RNA, 19 nt, Artificial Sequence
  Description of Artificial Sequence: Synthetic oligonucleotide
cauaucaugucauguacca

SEQ ID NO: 1471824 - RNA, 19 nt, Artificial Sequence
  Description of Artificial Sequence: Synthetic oligonucleotide
aaauaccuggccaggcugg

SEQ ID NO: 1471825 - RNA, 19 nt, Artificial Sequence
  Description of Artificial Sequence: Synthetic oligonucleotide
auguucacggagucuuccc

SEQ ID NO: 1471826 - RNA, 19 nt, Artificial Sequence
  Description of Artificial Sequence: Synthetic oligonucleotide
aucgugaagggaacaaggc

SEQ ID NO: 1471827 - RNA, 19 nt, Artificial Sequence
  Description of Artificial Sequence: Synthetic oligonucleotide
uagacaaaugcaucgugaa

SEQ ID NO: 1471828 - RNA, 19 nt, Artificial Sequence
  Description of Artificial Sequence: Synthetic oligonucleotide
agacaaaugcaucgugaag

SEQ ID NO: 1471829 - RNA, 19 nt, Artificial Sequence
  Description of Artificial Sequence: Synthetic oligonucleotide
gaugagugcagcacaaaac

SEQ ID NO: 1471830 - RNA, 19 nt, Artificial Sequence
  Description of Artificial Sequence: Synthetic oligonucleotide
agaauagcguuauggaaaa

SEQ ID NO: 1471831 - RNA, 19 nt, Artificial Sequence
  Description of Artificial Sequence: Synthetic oligonucleotide
uccaagaccuuuacuuccc

SEQ ID NO: 1471832 - RNA, 19 nt, Artificial Sequence
  Description of Artificial Sequence: Synthetic oligonucleotide
cagacacuagcauuggaac

SEQ ID NO: 1471833 - RNA, 19 nt, Artificial Sequence
  Description of Artificial Sequence: Synthetic oligonucleotide
auaaagagaaguacuauuu

SEQ ID NO: 1471834 - RNA, 19 nt, Artificial Sequence
  Description of Artificial Sequence: Synthetic oligonucleotide
caaacauguaaaguaugag

SEQ ID NO: 1471835 - RNA, 19 nt, Artificial Sequence
  Description of Artificial Sequence: Synthetic oligonucleotide
ucaaggucccauccaagac

SEQ ID NO: 1471836 - RNA, 19 nt, Artificial Sequence
  Description of Artificial Sequence: Synthetic oligonucleotide
cuugcucaaggucccaucc

SEQ ID NO: 1471837 - RNA, 19 nt, Artificial Sequence
  Description of Artificial Sequence: Synthetic oligonucleotide
aaauuccaaccaaccuucc

SEQ ID NO: 1471838 - RNA, 19 nt, Artificial Sequence
  Description of Artificial Sequence: Synthetic oligonucleotide
aaagaggaggcugcaagga

SEQ ID NO: 1471839 - RNA, 19 nt, Artificial Sequence
  Description of Artificial Sequence: Synthetic oligonucleotide
agaccuuuacuucccaacu

SEQ ID NO: 1471840 - RNA, 19 nt, Artificial Sequence
  Description of Artificial Sequence: Synthetic oligonucleotide
uacaaaguuucaucucaca

SEQ ID NO: 1471841 - RNA, 19 nt, Artificial Sequence
  Description of Artificial Sequence: Synthetic oligonucleotide
uuacaucccaggcccaccc

SEQ ID NO: 1471842 - RNA, 19 nt, Artificial Sequence
  Description of Artificial Sequence: Synthetic oligonucleotide
acguauguccugugcuucc

SEQ ID NO: 1471843 - RNA, 19 nt, Artificial Sequence
  Description of Artificial Sequence: Synthetic oligonucleotide
agagaaguacuauuuuaau

SEQ ID NO: 1471844 - RNA, 19 nt, Artificial Sequence
  Description of Artificial Sequence: Synthetic oligonucleotide
cagcacaaaacccagguca

SEQ ID NO: 1471845 - RNA, 19 nt, Artificial Sequence
  Description of Artificial Sequence: Synthetic oligonucleotide
guucccaucaccccacacc

SEQ ID NO: 1471846 - RNA, 19 nt, Artificial Sequence
  Description of Artificial Sequence: Synthetic oligonucleotide
gaagccgucgccgucguag

SEQ ID NO: 1471847 - RNA, 19 nt, Artificial Sequence
  Description of Artificial Sequence: Synthetic oligonucleotide
uguucacggagucuuccca

SEQ ID NO: 1471848 - RNA, 19 nt, Artificial Sequence
  Description of Artificial Sequence: Synthetic oligonucleotide
uaagcacguacacguaugu

SEQ ID NO: 1471849 - RNA, 19 nt, Artificial Sequence
  Description of Artificial Sequence: Synthetic oligonucleotide
ucccuuuuacuccagccuc

SEQ ID NO: 1471850 - RNA, 19 nt, Artificial Sequence
  Description of Artificial Sequence: Synthetic oligonucleotide
caauccaucggucgggaug

SEQ ID NO: 1471851 - RNA, 19 nt, Artificial Sequence
  Description of Artificial Sequence: Synthetic oligonucleotide
caugggcgucuuuuaaugg

SEQ ID NO: 1471852 - RNA, 19 nt, Artificial Sequence
  Description of Artificial Sequence: Synthetic oligonucleotide
guaggugcgggucugguuc

SEQ ID NO: 1471853 - RNA, 19 nt, Artificial Sequence
  Description of Artificial Sequence: Synthetic oligonucleotide
uguaaaguaugaggggccu

SEQ ID NO: 1471854 - RNA, 19 nt, Artificial Sequence
  Description of Artificial Sequence: Synthetic oligonucleotide
gaguagccuugccucaacg

SEQ ID NO: 1471855 - RNA, 19 nt, Artificial Sequence
  Description of Artificial Sequence: Synthetic oligonucleotide
ugaggggccuuaaacuaga

SEQ ID NO: 1471856 - RNA, 19 nt, Artificial Sequence
  Description of Artificial Sequence: Synthetic oligonucleotide
agcaugcaggaagaguuac

SEQ ID NO: 1471857 - RNA, 19 nt, Artificial Sequence
  Description of Artificial Sequence: Synthetic oligonucleotide
ugccucaacgucucaaagu

SEQ ID NO: 1471858 - RNA, 19 nt, Artificial Sequence
  Description of Artificial Sequence: Synthetic oligonucleotide
cacaucaccccacacccag

SEQ ID NO: 1471859 - RNA, 19 nt, Artificial Sequence
  Description of Artificial Sequence: Synthetic oligonucleotide
gguguaaggcauacaaggg

SEQ ID NO: 1471860 - RNA, 19 nt, Artificial Sequence
  Description of Artificial Sequence: Synthetic oligonucleotide
aguagccuugccucaacgu

SEQ ID NO: 1471861 - RNA, 19 nt, Artificial Sequence
  Description of Artificial Sequence: Synthetic oligonucleotide
gacacuagcauuggaacaa

SEQ ID NO: 1471862 - RNA, 19 nt, Artificial Sequence
  Description of Artificial Sequence: Synthetic oligonucleotide
caccccacgcacaucaccc

SEQ ID NO: 1471863 - RNA, 19 nt, Artificial Sequence
  Description of Artificial Sequence: Synthetic oligonucleotide
augggcgucuuuuaaugga

SEQ ID NO: 1471864 - RNA, 19 nt, Artificial Sequence
  Description of Artificial Sequence: Synthetic oligonucleotide
uccagcacuucugugacaa

SEQ ID NO: 1471865 - RNA, 19 nt, Artificial Sequence
  Description of Artificial Sequence: Synthetic oligonucleotide
uaaaguaugaggggccuua

SEQ ID NO: 1471866 - RNA, 19 nt, Artificial Sequence
  Description of Artificial Sequence: Synthetic oligonucleotide
aagcacguacacguauguc

SEQ ID NO: 1471867 - RNA, 19 nt, Artificial Sequence
  Description of Artificial Sequence: Synthetic oligonucleotide
ucucgcugcggaagcacag

SEQ ID NO: 1471868 - RNA, 19 nt, Artificial Sequence
  Description of Artificial Sequence: Synthetic oligonucleotide
gaacgcuucagaacccaag

SEQ ID NO: 1471869 - RNA, 19 nt, Artificial Sequence
  Description of Artificial Sequence: Synthetic oligonucleotide
guagccuugccucaacguc

SEQ ID NO: 1471870 - RNA, 19 nt, Artificial Sequence
  Description of Artificial Sequence: Synthetic oligonucleotide
guagacaaaugcaucguga

SEQ ID NO: 1471871 - RNA, 19 nt, Artificial Sequence
  Description of Artificial Sequence: Synthetic oligonucleotide
cuagcauuggaacaaacau

SEQ ID NO: 1471872 - RNA, 19 nt, Artificial Sequence
  Description of Artificial Sequence: Synthetic oligonucleotide
agaguagccuugccucaac

SEQ ID NO: 1471873 - RNA, 19 nt, Artificial Sequence
  Description of Artificial Sequence: Synthetic oligonucleotide
aagccgucgccgucguagg

SEQ ID NO: 1471874 - RNA, 19 nt, Artificial Sequence
  Description of Artificial Sequence: Synthetic oligonucleotide
acgcuucagaacccaagag

SEQ ID NO: 1471875 - RNA, 19 nt, Artificial Sequence
  Description of Artificial Sequence: Synthetic oligonucleotide
augaggcgaaaugggaacg

SEQ ID NO: 1471876 - RNA, 19 nt, Artificial Sequence
  Description of Artificial Sequence: Synthetic oligonucleotide
ucacaugggcgucuuuuaa

SEQ ID NO: 1471877 - RNA, 19 nt, Artificial Sequence
  Description of Artificial Sequence: Synthetic oligonucleotide
ucaaaguaggacgccugca

SEQ ID NO: 1471878 - RNA, 19 nt, Artificial Sequence
  Description of Artificial Sequence: Synthetic oligonucleotide
auaagcacguacacguaug

SEQ ID NO: 1471879 - RNA, 19 nt, Artificial Sequence
  Description of Artificial Sequence: Synthetic oligonucleotide
aguucccaucaccccacac

SEQ ID NO: 1471880 - RNA, 19 nt, Artificial Sequence
  Description of Artificial Sequence: Synthetic oligonucleotide
uuccaauguucacggaguc

SEQ ID NO: 1471881 - RNA, 19 nt, Artificial Sequence
  Description of Artificial Sequence: Synthetic oligonucleotide
guaugaggggccuuaaacu

SEQ ID NO: 1471882 - RNA, 19 nt, Artificial Sequence
  Description of Artificial Sequence: Synthetic oligonucleotide
ugggcgucuuuuaauggaa

SEQ ID NO: 1471883 - RNA, 19 nt, Artificial Sequence
  Description of Artificial Sequence: Synthetic oligonucleotide
gagaaagaguucccaucac

SEQ ID NO: 1471884 - RNA, 19 nt, Artificial Sequence
  Description of Artificial Sequence: Synthetic oligonucleotide
aauucccagccagcaggac

SEQ ID NO: 1471885 - RNA, 19 nt, Artificial Sequence
  Description of Artificial Sequence: Synthetic oligonucleotide
aggucagcgugguguaagg

SEQ ID NO: 1471886 - RNA, 19 nt, Artificial Sequence
  Description of Artificial Sequence: Synthetic oligonucleotide
guacacguauguccugugc

SEQ ID NO: 1471887 - RNA, 19 nt, Artificial Sequence
  Description of Artificial Sequence: Synthetic oligonucleotide
gucagcgugguguaaggca

SEQ ID NO: 1471888 - RNA, 19 nt, Artificial Sequence
  Description of Artificial Sequence: Synthetic oligonucleotide
agcacaaaacccaggucag

SEQ ID NO: 1471889 - RNA, 19 nt, Artificial Sequence
  Description of Artificial Sequence: Synthetic oligonucleotide
gaaaauaccuggccaggcu

SEQ ID NO: 1471890 - RNA, 19 nt, Artificial Sequence
  Description of Artificial Sequence: Synthetic oligonucleotide
caugucauguaccaugugu

SEQ ID NO: 1471891 - RNA, 19 nt, Artificial Sequence
  Description of Artificial Sequence: Synthetic oligonucleotide
caccagggacaauccaucg

SEQ ID NO: 1471892 - RNA, 19 nt, Artificial Sequence
  Description of Artificial Sequence: Synthetic oligonucleotide
aaguaugaggggccuuaaa

SEQ ID NO: 1471893 - RNA, 19 nt, Artificial Sequence
  Description of Artificial Sequence: Synthetic oligonucleotide
caccacaacuggcagauga

SEQ ID NO: 1471894 - RNA, 19 nt, Artificial Sequence
  Description of Artificial Sequence: Synthetic oligonucleotide
ggggccuuaaacuagaaau

SEQ ID NO: 1471895 - RNA, 19 nt, Artificial Sequence
  Description of Artificial Sequence: Synthetic oligonucleotide
uaggugcgggucugguucg

SEQ ID NO: 1471896 - RNA, 19 nt, Artificial Sequence
  Description of Artificial Sequence: Synthetic oligonucleotide
cagaacccaagagggaggg

SEQ ID NO: 1471897 - RNA, 19 nt, Artificial Sequence
  Description of Artificial Sequence: Synthetic oligonucleotide
ucgcugcggaagcacaggc

SEQ ID NO: 1471898 - RNA, 19 nt, Artificial Sequence
  Description of Artificial Sequence: Synthetic oligonucleotide
cuucccaacuaaacaccac

SEQ ID NO: 1471899 - RNA, 19 nt, Artificial Sequence
  Description of Artificial Sequence: Synthetic oligonucleotide
uucccucucucagagggca

SEQ ID NO: 1471900 - RNA, 19 nt, Artificial Sequence
  Description of Artificial Sequence: Synthetic oligonucleotide
accccacgcacaucacccc

SEQ ID NO: 1471901 - RNA, 19 nt, Artificial Sequence
  Description of Artificial Sequence: Synthetic oligonucleotide
aaguuucaucucacauggg

SEQ ID NO: 1471902 - RNA, 19 nt, Artificial Sequence
  Description of Artificial Sequence: Synthetic oligonucleotide
ccuacaaaguuucaucuca

SEQ ID NO: 1471903 - RNA, 19 nt, Artificial Sequence
  Description of Artificial Sequence: Synthetic oligonucleotide
ccaggcaucagcucccucc

SEQ ID NO: 1471904 - RNA, 19 nt, Artificial Sequence
  Description of Artificial Sequence: Synthetic oligonucleotide
guguaaggcauacaagggu

SEQ ID NO: 1471905 - RNA, 19 nt, Artificial Sequence
  Description of Artificial Sequence: Synthetic oligonucleotide
augaggggccuuaaacuag

SEQ ID NO: 1471906 - RNA, 19 nt, Artificial Sequence
  Description of Artificial Sequence: Synthetic oligonucleotide
ggcucaacagcacaucaca

SEQ ID NO: 1471907 - RNA, 19 nt, Artificial Sequence
  Description of Artificial Sequence: Synthetic oligonucleotide
uucacaucuuggcuacauu

SEQ ID NO: 1471908 - RNA, 19 nt, Artificial Sequence
  Description of Artificial Sequence: Synthetic oligonucleotide
cacuagcauuggaacaaac

SEQ ID NO: 1471909 - RNA, 19 nt, Artificial Sequence
  Description of Artificial Sequence: Synthetic oligonucleotide
augucauguaccaugugua

SEQ ID NO: 1471910 - RNA, 19 nt, Artificial Sequence
  Description of Artificial Sequence: Synthetic oligonucleotide
aaaguaugaggggccuuaa

SEQ ID NO: 1471911 - RNA, 19 nt, Artificial Sequence
  Description of Artificial Sequence: Synthetic oligonucleotide
agggaacaaggccacccca

SEQ ID NO: 1471912 - RNA, 19 nt, Artificial Sequence
  Description of Artificial Sequence: Synthetic oligonucleotide
aaacccaggucagcguggu

SEQ ID NO: 1471913 - RNA, 19 nt, Artificial Sequence
  Description of Artificial Sequence: Synthetic oligonucleotide
acacguauguccugugcuu

SEQ ID NO: 1471914 - RNA, 19 nt, Artificial Sequence
  Description of Artificial Sequence: Synthetic oligonucleotide
cacaggacagauuccuaca

SEQ ID NO: 1471915 - RNA, 19 nt, Artificial Sequence
  Description of Artificial Sequence: Synthetic oligonucleotide
caccaugccugggugaaag

SEQ ID NO: 1471916 - RNA, 19 nt, Artificial Sequence
  Description of Artificial Sequence: Synthetic oligonucleotide
ucacggagucuucccaguc

SEQ ID NO: 1471917 - RNA, 19 nt, Artificial Sequence
  Description of Artificial Sequence: Synthetic oligonucleotide
cugcggaagcacaggcacg

SEQ ID NO: 1471918 - RNA, 19 nt, Artificial Sequence
  Description of Artificial Sequence: Synthetic oligonucleotide
aauaccuggccaggcugga

SEQ ID NO: 1471919 - RNA, 19 nt, Artificial Sequence
  Description of Artificial Sequence: Synthetic oligonucleotide
ccaucggucgggauggcgg

SEQ ID NO: 1471920 - RNA, 19 nt, Artificial Sequence
  Description of Artificial Sequence: Synthetic oligonucleotide
caucggucgggauggcggc

SEQ ID NO: 1471921 - RNA, 19 nt, Artificial Sequence
  Description of Artificial Sequence: Synthetic oligonucleotide
ugcccaccaugccugggug

SEQ ID NO: 1471922 - RNA, 19 nt, Artificial Sequence
  Description of Artificial Sequence: Synthetic oligonucleotide
ccauguguagacaaaugca

SEQ ID NO: 1471923 - RNA, 19 nt, Artificial Sequence
  Description of Artificial Sequence: Synthetic oligonucleotide
uccaucggucgggauggcg

SEQ ID NO: 1471924 - RNA, 19 nt, Artificial Sequence
  Description of Artificial Sequence: Synthetic oligonucleotide
gauuccuacaaaguuucau

SEQ ID NO: 1471925 - RNA, 19 nt, Artificial Sequence
  Description of Artificial Sequence: Synthetic oligonucleotide
ugcgggucugguucgacuu

SEQ ID NO: 1471926 - RNA, 19 nt, Artificial Sequence
  Description of Artificial Sequence: Synthetic oligonucleotide
acagacuucccggaccgcu

SEQ ID NO: 1471927 - RNA, 19 nt, Artificial Sequence
  Description of Artificial Sequence: Synthetic oligonucleotide
gaccuuuacuucccaacua

SEQ ID NO: 1471928 - RNA, 19 nt, Artificial Sequence
  Description of Artificial Sequence: Synthetic oligonucleotide
accacaacuggcagaugag

SEQ ID NO: 1471929 - RNA, 19 nt, Artificial Sequence
  Description of Artificial Sequence: Synthetic oligonucleotide
cacgacaggggugccauug

SEQ ID NO: 1471930 - RNA, 19 nt, Artificial Sequence
  Description of Artificial Sequence: Synthetic oligonucleotide
guacgaggcggccacgaca

SEQ ID NO: 1471931 - RNA, 19 nt, Artificial Sequence
  Description of Artificial Sequence: Synthetic oligonucleotide
ccgagccccacacugaacc

SEQ ID NO: 1471932 - RNA, 19 nt, Artificial Sequence
  Description of Artificial Sequence: Synthetic oligonucleotide
gccuuaaacuagaaauacc

SEQ ID NO: 1471933 - RNA, 19 nt, Artificial Sequence
  Description of Artificial Sequence: Synthetic oligonucleotide
ggacaauccaucggucggg

SEQ ID NO: 1471934 - RNA, 19 nt, Artificial Sequence
  Description of Artificial Sequence: Synthetic oligonucleotide
ggaacaaggccaccccaug

SEQ ID NO: 1471935 - RNA, 19 nt, Artificial Sequence
  Description of Artificial Sequence: Synthetic oligonucleotide
cacuccggcucucacagga

SEQ ID NO: 1471936 - RNA, 19 nt, Artificial Sequence
  Description of Artificial Sequence: Synthetic oligonucleotide
aggggccuuaaacuagaaa

SEQ ID NO: 1471937 - RNA, 19 nt, Artificial Sequence
  Description of Artificial Sequence: Synthetic oligonucleotide
auaucaugucauguaccau

SEQ ID NO: 1471938 - RNA, 19 nt, Artificial Sequence
  Description of Artificial Sequence: Synthetic oligonucleotide
ugguucgacuugagcuuca

SEQ ID NO: 1471939 - RNA, 19 nt, Artificial Sequence
  Description of Artificial Sequence: Synthetic oligonucleotide
cagacuucccggaccgcug

SEQ ID NO: 1471940 - RNA, 19 nt, Artificial Sequence
  Description of Artificial Sequence: Synthetic oligonucleotide
cauggggcucaacagcaca

SEQ ID NO: 1471941 - RNA, 19 nt, Artificial Sequence
  Description of Artificial Sequence: Synthetic oligonucleotide
gccucaacgucucaaagua

SEQ ID NO: 1471942 - RNA, 19 nt, Artificial Sequence
  Description of Artificial Sequence: Synthetic oligonucleotide
cacguauguccugugcuuc

SEQ ID NO: 1471943 - RNA, 19 nt, Artificial Sequence
  Description of Artificial Sequence: Synthetic oligonucleotide
guaggacgccugcacgggc

SEQ ID NO: 1471944 - RNA, 19 nt, Artificial Sequence
  Description of Artificial Sequence: Synthetic oligonucleotide
gccaugucagcaaagaaua

SEQ ID NO: 1471945 - RNA, 19 nt, Artificial Sequence
  Description of Artificial Sequence: Synthetic oligonucleotide
gugaggagagccacgcuuc

SEQ ID NO: 1471946 - RNA, 19 nt, Artificial Sequence
  Description of Artificial Sequence: Synthetic oligonucleotide
cucgcugcggaagcacagg

SEQ ID NO: 1471947 - RNA, 19 nt, Artificial Sequence
  Description of Artificial Sequence: Synthetic oligonucleotide
gucccuuuuacuccagccu

SEQ ID NO: 1471948 - RNA, 19 nt, Artificial Sequence
  Description of Artificial Sequence: Synthetic oligonucleotide
cagggacaauccaucgguc

SEQ ID NO: 1471949 - RNA, 19 nt, Artificial Sequence
  Description of Artificial Sequence: Synthetic oligonucleotide
acuaaacagucaagaugcu

SEQ ID NO: 1471950 - RNA, 19 nt, Artificial Sequence
  Description of Artificial Sequence: Synthetic oligonucleotide
cugcacgggcuugugacac

SEQ ID NO: 1471951 - RNA, 19 nt, Artificial Sequence
  Description of Artificial Sequence: Synthetic oligonucleotide
uugaagccgucgccgucgu

SEQ ID NO: 1471952 - RNA, 19 nt, Artificial Sequence
  Description of Artificial Sequence: Synthetic oligonucleotide
guaaggcauacaaggguaa

SEQ ID NO: 1471953 - RNA, 19 nt, Artificial Sequence
  Description of Artificial Sequence: Synthetic oligonucleotide
gacaauccaucggucggga

SEQ ID NO: 1471954 - RNA, 19 nt, Artificial Sequence
  Description of Artificial Sequence: Synthetic oligonucleotide
gccugcacgggcuugugac

SEQ ID NO: 1471955 - RNA, 19 nt, Artificial Sequence
  Description of Artificial Sequence: Synthetic oligonucleotide
cugcagcacuuuuauggca

SEQ ID NO: 1471956 - RNA, 19 nt, Artificial Sequence
  Description of Artificial Sequence: Synthetic oligonucleotide
gagccgugaggagagccac

SEQ ID NO: 1471957 - RNA, 19 nt, Artificial Sequence
  Description of Artificial Sequence: Synthetic oligonucleotide
cugguucgacuugagcuuc

SEQ ID NO: 1471958 - RNA, 19 nt, Artificial Sequence
  Description of Artificial Sequence: Synthetic oligonucleotide
cacguacacguauguccug

SEQ ID NO: 1471959 - RNA, 19 nt, Artificial Sequence
  Description of Artificial Sequence: Synthetic oligonucleotide
gcaucgugaagggaacaag

SEQ ID NO: 1471960 - RNA, 19 nt, Artificial Sequence
  Description of Artificial Sequence: Synthetic oligonucleotide
ccaugucagcaaagaauag

SEQ ID NO: 1471961 - RNA, 19 nt, Artificial Sequence
  Description of Artificial Sequence: Synthetic oligonucleotide
cauccuccgggcccgggug

SEQ ID NO: 1471962 - RNA, 19 nt, Artificial Sequence
  Description of Artificial Sequence: Synthetic oligonucleotide
ggcgucuuuuaauggaaaa

SEQ ID NO: 1471963 - RNA, 19 nt, Artificial Sequence
  Description of Artificial Sequence: Synthetic oligonucleotide
caauaagcacguacacgua

SEQ ID NO: 1471964 - RNA, 19 nt, Artificial Sequence
  Description of Artificial Sequence: Synthetic oligonucleotide
ggagcaugcaggaagaguu

SEQ ID NO: 1471965 - RNA, 19 nt, Artificial Sequence
  Description of Artificial Sequence: Synthetic oligonucleotide
ccucaacgucucaaaguag

SEQ ID NO: 1471966 - RNA, 19 nt, Artificial Sequence
  Description of Artificial Sequence: Synthetic oligonucleotide
cgugguguaaggcauacaa

SEQ ID NO: 1471967 - RNA, 19 nt, Artificial Sequence
  Description of Artificial Sequence: Synthetic oligonucleotide
ucggucgggauggcggcug

SEQ ID NO: 1471968 - RNA, 19 nt, Artificial Sequence
  Description of Artificial Sequence: Synthetic oligonucleotide
caggacagauuccuacaaa

SEQ ID NO: 1471969 - RNA, 19 nt, Artificial Sequence
  Description of Artificial Sequence: Synthetic oligonucleotide
gcagucaucugaugccuga

SEQ ID NO: 1471970 - RNA, 19 nt, Artificial Sequence
  Description of Artificial Sequence: Synthetic oligonucleotide
cacgcacaucaccccacac

SEQ ID NO: 1471971 - RNA, 19 nt, Artificial Sequence
  Description of Artificial Sequence: Synthetic oligonucleotide
aaccaggcaucagcucccu

SEQ ID NO: 1471972 - RNA, 19 nt, Artificial Sequence
  Description of Artificial Sequence: Synthetic oligonucleotide
acacuagcauuggaacaaa

SEQ ID NO: 1471973 - RNA, 19 nt, Artificial Sequence
  Description of Artificial Sequence: Synthetic oligonucleotide
gcggcccgcuucuugaagc

SEQ ID NO: 1471974 - RNA, 19 nt, Artificial Sequence
  Description of Artificial Sequence: Synthetic oligonucleotide
cacgggcuugugacacugc

SEQ ID NO: 1471975 - RNA, 19 nt, Artificial Sequence
  Description of Artificial Sequence: Synthetic oligonucleotide
guguagacaaaugcaucgu

SEQ ID NO: 1471976 - RNA, 19 nt, Artificial Sequence
  Description of Artificial Sequence: Synthetic oligonucleotide
ucguaggugcgggucuggu

SEQ ID NO: 1471977 - RNA, 19 nt, Artificial Sequence
  Description of Artificial Sequence: Synthetic oligonucleotide
gucgggauggcggcugcug

SEQ ID NO: 1471978 - RNA, 19 nt, Artificial Sequence
  Description of Artificial Sequence: Synthetic oligonucleotide
cacgcggcccgcuucuuga

SEQ ID NO: 1471979 - RNA, 19 nt, Artificial Sequence
  Description of Artificial Sequence: Synthetic oligonucleotide
caaccaaccuucccagugu

SEQ ID NO: 1471980 - RNA, 19 nt, Artificial Sequence
  Description of Artificial Sequence: Synthetic oligonucleotide
aggcacgcggcccgcuucu

SEQ ID NO: 1471981 - RNA, 19 nt, Artificial Sequence
  Description of Artificial Sequence: Synthetic oligonucleotide
gcgaaaugggaacgcuuca

SEQ ID NO: 1471982 - RNA, 19 nt, Artificial Sequence
  Description of Artificial Sequence: Synthetic oligonucleotide
gcggccacgacaggggugc

SEQ ID NO: 1471983 - RNA, 19 nt, Artificial Sequence
  Description of Artificial Sequence: Synthetic oligonucleotide
agccgugaggagagccacg

SEQ ID NO: 1471984 - RNA, 19 nt, Artificial Sequence
  Description of Artificial Sequence: Synthetic oligonucleotide
gccgugaggagagccacgc

SEQ ID NO: 1471985 - RNA, 19 nt, Artificial Sequence
  Description of Artificial Sequence: Synthetic oligonucleotide
gaguucccaucaccccaca

SEQ ID NO: 1471986 - RNA, 19 nt, Artificial Sequence
  Description of Artificial Sequence: Synthetic oligonucleotide
gaggcgaaaugggaacgcu

SEQ ID NO: 1471987 - RNA, 19 nt, Artificial Sequence
  Description of Artificial Sequence: Synthetic oligonucleotide
gaguuacaucccaggccca

SEQ ID NO: 1471988 - RNA, 19 nt, Artificial Sequence
  Description of Artificial Sequence: Synthetic oligonucleotide
gggagccgugaggagagcc

SEQ ID NO: 1471989 - RNA, 19 nt, Artificial Sequence
  Description of Artificial Sequence: Synthetic oligonucleotide
auccaucggucgggauggc

SEQ ID NO: 1471990 - RNA, 19 nt, Artificial Sequence
  Description of Artificial Sequence: Synthetic oligonucleotide
gguacgaggcggccacgac

SEQ ID NO: 1471991 - RNA, 19 nt, Artificial Sequence
  Description of Artificial Sequence: Synthetic oligonucleotide
agccgucgccgucguaggu

SEQ ID NO: 1471992 - RNA, 19 nt, Artificial Sequence
  Description of Artificial Sequence: Synthetic oligonucleotide
gcucucacaggagucugca

SEQ ID NO: 1471993 - RNA, 19 nt, Artificial Sequence
  Description of Artificial Sequence: Synthetic oligonucleotide
cacagacuucccggaccgc

SEQ ID NO: 1471994 - RNA, 19 nt, Artificial Sequence
  Description of Artificial Sequence: Synthetic oligonucleotide
cacggagucuucccagucu

SEQ ID NO: 1471995 - RNA, 19 nt, Artificial Sequence
  Description of Artificial Sequence: Synthetic oligonucleotide
caggcacgcggcccgcuuc

SEQ ID NO: 1471996 - RNA, 19 nt, Artificial Sequence
  Description of Artificial Sequence: Synthetic oligonucleotide
acaggcacgcggcccgcuu

SEQ ID NO: 1471997 - RNA, 19 nt, Artificial Sequence
  Description of Artificial Sequence: Synthetic oligonucleotide
ggagccgugaggagagcca

SEQ ID NO: 1471998 - RNA, 19 nt, Artificial Sequence
  Description of Artificial Sequence: Synthetic oligonucleotide
cuccucgcucucgcugcgg

SEQ ID NO: 1471999 - RNA, 19 nt, Artificial Sequence
  Description of Artificial Sequence: Synthetic oligonucleotide
cagaguagccuugccucaa

SEQ ID NO: 1472000 - RNA, 19 nt, Artificial Sequence
  Description of Artificial Sequence: Synthetic oligonucleotide
gcgggucugguucgacuug

SEQ ID NO: 1472001 - RNA, 19 nt, Artificial Sequence
  Description of Artificial Sequence: Synthetic oligonucleotide
caaggguaagagaggccau

SEQ ID NO: 1472002 - RNA, 19 nt, Artificial Sequence
  Description of Artificial Sequence: Synthetic oligonucleotide
ugaagccgucgccgucgua

SEQ ID NO: 1472003 - RNA, 19 nt, Artificial Sequence
  Description of Artificial Sequence: Synthetic oligonucleotide
aucggucgggauggcggcu

SEQ ID NO: 1472004 - RNA, 19 nt, Artificial Sequence
  Description of Artificial Sequence: Synthetic oligonucleotide
cccacgcacaucaccccac

SEQ ID NO: 1472005 - RNA, 19 nt, Artificial Sequence
  Description of Artificial Sequence: Synthetic oligonucleotide
cccacacugaaccaggcau

SEQ ID NO: 1472006 - RNA, 19 nt, Artificial Sequence
  Description of Artificial Sequence: Synthetic oligonucleotide
cguacacguauguccugug

SEQ ID NO: 1472007 - RNA, 19 nt, Artificial Sequence
  Description of Artificial Sequence: Synthetic oligonucleotide
caucauccuccgggcccgg

SEQ ID NO: 1472008 - RNA, 19 nt, Artificial Sequence
  Description of Artificial Sequence: Synthetic oligonucleotide
gaggggccuuaaacuagaa

SEQ ID NO: 1472009 - RNA, 19 nt, Artificial Sequence
  Description of Artificial Sequence: Synthetic oligonucleotide
gugcgggucugguucgacu

SEQ ID NO: 1472010 - RNA, 19 nt, Artificial Sequence
  Description of Artificial Sequence: Synthetic oligonucleotide
ccacgcuucagucugguuu

SEQ ID NO: 1472011 - RNA, 19 nt, Artificial Sequence
  Description of Artificial Sequence: Synthetic oligonucleotide
guaaaguaugaggggccuu

SEQ ID NO: 1472012 - RNA, 19 nt, Artificial Sequence
  Description of Artificial Sequence: Synthetic oligonucleotide
ggaacgcuucagaacccaa

SEQ ID NO: 1472013 - RNA, 19 nt, Artificial Sequence
  Description of Artificial Sequence: Synthetic oligonucleotide
gcacgcggcccgcuucuug

SEQ ID NO: 1472014 - RNA, 19 nt, Artificial Sequence
  Description of Artificial Sequence: Synthetic oligonucleotide
gcggaagcacaggcacgcg

SEQ ID NO: 1472015 - RNA, 19 nt, Artificial Sequence
  Description of Artificial Sequence: Synthetic oligonucleotide
gccgucguaggugcggguc

SEQ ID NO: 1472016 - RNA, 19 nt, Artificial Sequence
  Description of Artificial Sequence: Synthetic oligonucleotide
gggcgucuuuuaauggaaa

SEQ ID NO: 1472017 - RNA, 19 nt, Artificial Sequence
  Description of Artificial Sequence: Synthetic oligonucleotide
ggguacgaggcggccacga

SEQ ID NO: 1472018 - RNA, 19 nt, Artificial Sequence
  Description of Artificial Sequence: Synthetic oligonucleotide
ccccuucugaugcccacca

SEQ ID NO: 1472019 - RNA, 19 nt, Artificial Sequence
  Description of Artificial Sequence: Synthetic oligonucleotide
augccgccaccagggacaa

SEQ ID NO: 1472020 - RNA, 19 nt, Artificial Sequence
  Description of Artificial Sequence: Synthetic oligonucleotide
cggcccgcuucuugaagcc

SEQ ID NO: 1472021 - RNA, 19 nt, Artificial Sequence
  Description of Artificial Sequence: Synthetic oligonucleotide
aggugcgggucugguucga

SEQ ID NO: 1472022 - RNA, 19 nt, Artificial Sequence
  Description of Artificial Sequence: Synthetic oligonucleotide
ggcggccacgacaggggug

SEQ ID NO: 1472023 - RNA, 19 nt, Artificial Sequence
  Description of Artificial Sequence: Synthetic oligonucleotide
ggugcgggucugguucgac

SEQ ID NO: 1472024 - RNA, 19 nt, Artificial Sequence
  Description of Artificial Sequence: Synthetic oligonucleotide
gggguacgaggcggccacg

SEQ ID NO: 1472025 - RNA, 19 nt, Artificial Sequence
  Description of Artificial Sequence: Synthetic oligonucleotide
ccuugccucaacgucucaa

SEQ ID NO: 1472026 - RNA, 19 nt, Artificial Sequence
  Description of Artificial Sequence: Synthetic oligonucleotide
ggagcggagcaugcaggaa

SEQ ID NO: 1472027 - RNA, 19 nt, Artificial Sequence
  Description of Artificial Sequence: Synthetic oligonucleotide
gggugccauuguuggcaga

SEQ ID NO: 1472028 - RNA, 19 nt, Artificial Sequence
  Description of Artificial Sequence: Synthetic oligonucleotide
ccccacgcacaucacccca

SEQ ID NO: 1472029 - RNA, 19 nt, Artificial Sequence
  Description of Artificial Sequence: Synthetic oligonucleotide
ggacgccugcacgggcuug

SEQ ID NO: 1472030 - RNA, 19 nt, Artificial Sequence
  Description of Artificial Sequence: Synthetic oligonucleotide
cccaccaugccugggugaa

SEQ ID NO: 1472031 - RNA, 19 nt, Artificial Sequence
  Description of Artificial Sequence: Synthetic oligonucleotide
ccacaacuggcagaugagu

SEQ ID NO: 1472032 - RNA, 19 nt, Artificial Sequence
  Description of Artificial Sequence: Synthetic oligonucleotide
cugugacaauaagcacgua

SEQ ID NO: 1472033 - RNA, 19 nt, Artificial Sequence
  Description of Artificial Sequence: Synthetic oligonucleotide
ggccacgacaggggugcca

SEQ ID NO: 1472034 - RNA, 19 nt, Artificial Sequence
  Description of Artificial Sequence: Synthetic oligonucleotide
ccuuuuacuccagccuccu

SEQ ID NO: 1472035 - RNA, 19 nt, Artificial Sequence
  Description of Artificial Sequence: Synthetic oligonucleotide
gcgugguguaaggcauaca

SEQ ID NO: 1472036 - RNA, 19 nt, Artificial Sequence
  Description of Artificial Sequence: Synthetic oligonucleotide
gcugccacacuuggcuccu

SEQ ID NO: 1472037 - RNA, 19 nt, Artificial Sequence
  Description of Artificial Sequence: Synthetic oligonucleotide
gccuugccucaacgucuca

SEQ ID NO: 1472038 - RNA, 19 nt, Artificial Sequence
  Description of Artificial Sequence: Synthetic oligonucleotide
cacaggcacgcggcccgcu

SEQ ID NO: 1472039 - RNA, 19 nt, Artificial Sequence
  Description of Artificial Sequence: Synthetic oligonucleotide
ggucgggauggcggcugcu

SEQ ID NO: 1472040 - RNA, 19 nt, Artificial Sequence
  Description of Artificial Sequence: Synthetic oligonucleotide
cgccugcacgggcuuguga

SEQ ID NO: 1472041 - RNA, 19 nt, Artificial Sequence
  Description of Artificial Sequence: Synthetic oligonucleotide
ccgugaggagagccacgcu

SEQ ID NO: 1472042 - RNA, 19 nt, Artificial Sequence
  Description of Artificial Sequence: Synthetic oligonucleotide
ccaccaugccugggugaaa

SEQ ID NO: 1472043 - RNA, 19 nt, Artificial Sequence
  Description of Artificial Sequence: Synthetic oligonucleotide
cggccacgacaggggugcc

SEQ ID NO: 1472044 - RNA, 19 nt, Artificial Sequence
  Description of Artificial Sequence: Synthetic oligonucleotide
ccacgacaggggugccauu

SEQ ID NO: 1472045 - RNA, 19 nt, Artificial Sequence
  Description of Artificial Sequence: Synthetic oligonucleotide
ggcacgcggcccgcuucuu

SEQ ID NO: 1472046 - RNA, 19 nt, Artificial Sequence
  Description of Artificial Sequence: Synthetic oligonucleotide
cccggaccgcugccacacu

SEQ ID NO: 1472047 - RNA, 19 nt, Artificial Sequence
  Description of Artificial Sequence: Synthetic oligonucleotide
cgccgucguaggugcgggu

SEQ ID NO: 1472048 - RNA, 19 nt, Artificial Sequence
  Description of Artificial Sequence: Synthetic oligonucleotide
aauaccaaugccaucgucc

SEQ ID NO: 1472049 - RNA, 19 nt, Artificial Sequence
  Description of Artificial Sequence: Synthetic oligonucleotide
aaucuuauaauguucggcu

SEQ ID NO: 1472050 - RNA, 19 nt, Artificial Sequence
  Description of Artificial Sequence: Synthetic oligonucleotide
uguucugaggauuaagagg

SEQ ID NO: 1472051 - RNA, 19 nt, Artificial Sequence
  Description of Artificial Sequence: Synthetic oligonucleotide
aaaucauggaauugcaaug

SEQ ID NO: 1472052 - RNA, 19 nt, Artificial Sequence
  Description of Artificial Sequence: Synthetic oligonucleotide
uauccugccagucaguaag

SEQ ID NO: 1472053 - RNA, 19 nt, Artificial Sequence
  Description of Artificial Sequence: Synthetic oligonucleotide
gacuguugucauuugaugg

SEQ ID NO: 1472054 - RNA, 19 nt, Artificial Sequence
  Description of Artificial Sequence: Synthetic oligonucleotide
aaggaagugggcuucugac

SEQ ID NO: 1472055 - RNA, 19 nt, Artificial Sequence
  Description of Artificial Sequence: Synthetic oligonucleotide
uguaaaacucccuggaaug

SEQ ID NO: 1472056 - RNA, 19 nt, Artificial Sequence
  Description of Artificial Sequence: Synthetic oligonucleotide
cucaauaccaaugccaucg

SEQ ID NO: 1472057 - RNA, 19 nt, Artificial Sequence
  Description of Artificial Sequence: Synthetic oligonucleotide
gauucuguaaaacucccug

SEQ ID NO: 1472058 - RNA, 19 nt, Artificial Sequence
  Description of Artificial Sequence: Synthetic oligonucleotide
auucuuggggauccgaggc

SEQ ID NO: 1472059 - RNA, 19 nt, Artificial Sequence
  Description of Artificial Sequence: Synthetic oligonucleotide
guuuguucugauuucgggg

SEQ ID NO: 1472060 - RNA, 19 nt, Artificial Sequence
  Description of Artificial Sequence: Synthetic oligonucleotide
gugauauccgcacaguagg

SEQ ID NO: 1472061 - RNA, 19 nt, Artificial Sequence
  Description of Artificial Sequence: Synthetic oligonucleotide
aggagaguccuccauaggg

SEQ ID NO: 1472062 - RNA, 19 nt, Artificial Sequence
  Description of Artificial Sequence: Synthetic oligonucleotide
auaauauuuuccuccacca

SEQ ID NO: 1472063 - RNA, 19 nt, Artificial Sequence
  Description of Artificial Sequence: Synthetic oligonucleotide
aggaauaggagaguccucc

SEQ ID NO: 1472064 - RNA, 19 nt, Artificial Sequence
  Description of Artificial Sequence: Synthetic oligonucleotide
ucugauuucggggagaggu

SEQ ID NO: 1472065 - RNA, 19 nt, Artificial Sequence
  Description of Artificial Sequence: Synthetic oligonucleotide
uucuuauccugccagucag

SEQ ID NO: 1472066 - RNA, 19 nt, Artificial Sequence
  Description of Artificial Sequence: Synthetic oligonucleotide
gaauucauauuccuggauc

SEQ ID NO: 1472067 - RNA, 19 nt, Artificial Sequence
  Description of Artificial Sequence: Synthetic oligonucleotide
auucuguaaaacucccugg

SEQ ID NO: 1472068 - RNA, 19 nt, Artificial Sequence
  Description of Artificial Sequence: Synthetic oligonucleotide
ucaagcuccagcugcagag

SEQ ID NO: 1472069 - RNA, 19 nt, Artificial Sequence
  Description of Artificial Sequence: Synthetic oligonucleotide
ugggauucuguaaaacucc

SEQ ID NO: 1472070 - RNA, 19 nt, Artificial Sequence
  Description of Artificial Sequence: Synthetic oligonucleotide
caucagugaauucauauuc

SEQ ID NO: 1472071 - RNA, 19 nt, Artificial Sequence
  Description of Artificial Sequence: Synthetic oligonucleotide
aaggucucaagcuccagcu

SEQ ID NO: 1472072 - RNA, 19 nt, Artificial Sequence
  Description of Artificial Sequence: Synthetic oligonucleotide
gaaucuuauaauguucggc

SEQ ID NO: 1472073 - RNA, 19 nt, Artificial Sequence
  Description of Artificial Sequence: Synthetic oligonucleotide
uucuguaaaacucccugga

SEQ ID NO: 1472074 - RNA, 19 nt, Artificial Sequence
  Description of Artificial Sequence: Synthetic oligonucleotide
aguaguguuuucccagugg

SEQ ID NO: 1472075 - RNA, 19 nt, Artificial Sequence
  Description of Artificial Sequence: Synthetic oligonucleotide
uguucguaccuccucacug

SEQ ID NO: 1472076 - RNA, 19 nt, Artificial Sequence
  Description of Artificial Sequence: Synthetic oligonucleotide
uuuuguguccaguucaguc

SEQ ID NO: 1472077 - RNA, 19 nt, Artificial Sequence
  Description of Artificial Sequence: Synthetic oligonucleotide
auguucugaggauuaagag

SEQ ID NO: 1472078 - RNA, 19 nt, Artificial Sequence
  Description of Artificial Sequence: Synthetic oligonucleotide
auaggagaguccuccauag

SEQ ID NO: 1472079 - RNA, 19 nt, Artificial Sequence
  Description of Artificial Sequence: Synthetic oligonucleotide
aagugggcuucugacaggc

SEQ ID NO: 1472080 - RNA, 19 nt, Artificial Sequence
  Description of Artificial Sequence: Synthetic oligonucleotide
cuugcagaggacagcaagg

SEQ ID NO: 1472081 - RNA, 19 nt, Artificial Sequence
  Description of Artificial Sequence: Synthetic oligonucleotide
gggagcaccaaguucaugg

SEQ ID NO: 1472082 - RNA, 19 nt, Artificial Sequence
  Description of Artificial Sequence: Synthetic oligonucleotide
agcagauccuccugggccc

SEQ ID NO: 1472083 - RNA, 19 nt, Artificial Sequence
  Description of Artificial Sequence: Synthetic oligonucleotide
guguggggcacacugaagg

SEQ ID NO: 1472084 - RNA, 19 nt, Artificial Sequence
  Description of Artificial Sequence: Synthetic oligonucleotide
ugauauccgcacaguaggg

SEQ ID NO: 1472085 - RNA, 19 nt, Artificial Sequence
  Description of Artificial Sequence: Synthetic oligonucleotide
uccauaggggaaauaauau

SEQ ID NO: 1472086 - RNA, 19 nt, Artificial Sequence
  Description of Artificial Sequence: Synthetic oligonucleotide
ugggcaguccuucaguuca

SEQ ID NO: 1472087 - RNA, 19 nt, Artificial Sequence
  Description of Artificial Sequence: Synthetic oligonucleotide
ucuuuuguguccaguucag

SEQ ID NO: 1472088 - RNA, 19 nt, Artificial Sequence
  Description of Artificial Sequence: Synthetic oligonucleotide
augggauucuguaaaacuc

SEQ ID NO: 1472089 - RNA, 19 nt, Artificial Sequence
  Description of Artificial Sequence: Synthetic oligonucleotide
gaaaucauggaauugcaau

SEQ ID NO: 1472090 - RNA, 19 nt, Artificial Sequence
  Description of Artificial Sequence: Synthetic oligonucleotide
aaaggaagugggcuucuga

SEQ ID NO: 1472091 - RNA, 19 nt, Artificial Sequence
  Description of Artificial Sequence: Synthetic oligonucleotide
gaugcuacccguccaggag

SEQ ID NO: 1472092 - RNA, 19 nt, Artificial Sequence
  Description of Artificial Sequence: Synthetic oligonucleotide
guugugugcacugagugcc

SEQ ID NO: 1472093 - RNA, 19 nt, Artificial Sequence
  Description of Artificial Sequence: Synthetic oligonucleotide
gucaauugggucaucagug

SEQ ID NO: 1472094 - RNA, 19 nt, Artificial Sequence
  Description of Artificial Sequence: Synthetic oligonucleotide
augcuacccguccaggagc

SEQ ID NO: 1472095 - RNA, 19 nt, Artificial Sequence
  Description of Artificial Sequence: Synthetic oligonucleotide
ugucauuugaugggcagcc

SEQ ID NO: 1472096 - RNA, 19 nt, Artificial Sequence
  Description of Artificial Sequence: Synthetic oligonucleotide
uugggagcgucauucuugg

SEQ ID NO: 1472097 - RNA, 19 nt, Artificial Sequence
  Description of Artificial Sequence: Synthetic oligonucleotide
agacaugucaggaauagga

SEQ ID NO: 1472098 - RNA, 19 nt, Artificial Sequence
  Description of Artificial Sequence: Synthetic oligonucleotide
cugccagucaguaaggauc

SEQ ID NO: 1472099 - RNA, 19 nt, Artificial Sequence
  Description of Artificial Sequence: Synthetic oligonucleotide
uauaauguucggcuucauc

SEQ ID NO: 1472100 - RNA, 19 nt, Artificial Sequence
  Description of Artificial Sequence: Synthetic oligonucleotide
uccgaggcacgucaauugg

SEQ ID NO: 1472101 - RNA, 19 nt, Artificial Sequence
  Description of Artificial Sequence: Synthetic oligonucleotide
uugcgaaaggcauccauga

SEQ ID NO: 1472102 - RNA, 19 nt, Artificial Sequence
  Description of Artificial Sequence: Synthetic oligonucleotide
auggaauugcaaugggcag

SEQ ID NO: 1472103 - RNA, 19 nt, Artificial Sequence
  Description of Artificial Sequence: Synthetic oligonucleotide
accuuucuuauccugccag

SEQ ID NO: 1472104 - RNA, 19 nt, Artificial Sequence
  Description of Artificial Sequence: Synthetic oligonucleotide
acaugucaggaauaggaga

SEQ ID NO: 1472105 - RNA, 19 nt, Artificial Sequence
  Description of Artificial Sequence: Synthetic oligonucleotide
cuugcgaaaggcauccaug

SEQ ID NO: 1472106 - RNA, 19 nt, Artificial Sequence
  Description of Artificial Sequence: Synthetic oligonucleotide
ucaauugggucaucaguga

SEQ ID NO: 1472107 - RNA, 19 nt, Artificial Sequence
  Description of Artificial Sequence: Synthetic oligonucleotide
ugaaaucauggaauugcaa

SEQ ID NO: 1472108 - RNA, 19 nt, Artificial Sequence
  Description of Artificial Sequence: Synthetic oligonucleotide
guucguaccuccucacugg

SEQ ID NO: 1472109 - RNA, 19 nt, Artificial Sequence
  Description of Artificial Sequence: Synthetic oligonucleotide
aguacacgcagccgccugc

SEQ ID NO: 1472110 - RNA, 19 nt, Artificial Sequence
  Description of Artificial Sequence: Synthetic oligonucleotide
agacuguugucauuugaug

SEQ ID NO: 1472111 - RNA, 19 nt, Artificial Sequence
  Description of Artificial Sequence: Synthetic oligonucleotide
gggaaucuuauaauguucg

SEQ ID NO: 1472112 - RNA, 19 nt, Artificial Sequence
  Description of Artificial Sequence: Synthetic oligonucleotide
gacaugucaggaauaggag

SEQ ID NO: 1472113 - RNA, 19 nt, Artificial Sequence
  Description of Artificial Sequence: Synthetic oligonucleotide
agacuucuucagcagggcg

SEQ ID NO: 1472114 - RNA, 19 nt, Artificial Sequence
  Description of Artificial Sequence: Synthetic oligonucleotide
ucucgacccagcuucagga

SEQ ID NO: 1472115 - RNA, 19 nt, Artificial Sequence
  Description of Artificial Sequence: Synthetic oligonucleotide
uaaggaucuggguuucagc

SEQ ID NO: 1472116 - RNA, 19 nt, Artificial Sequence
  Description of Artificial Sequence: Synthetic oligonucleotide
auaccaaugccaucguccu

SEQ ID NO: 1472117 - RNA, 19 nt, Artificial Sequence
  Description of Artificial Sequence: Synthetic oligonucleotide
gggacagaccuucaggugg

SEQ ID NO: 1472118 - RNA, 19 nt, Artificial Sequence
  Description of Artificial Sequence: Synthetic oligonucleotide
ucuguaaaacucccuggaa

SEQ ID NO: 1472119 - RNA, 19 nt, Artificial Sequence
  Description of Artificial Sequence: Synthetic oligonucleotide
auauccgcacaguagggcu

SEQ ID NO: 1472120 - RNA, 19 nt, Artificial Sequence
  Description of Artificial Sequence: Synthetic oligonucleotide
ugaauucauauuccuggau

SEQ ID NO: 1472121 - RNA, 19 nt, Artificial Sequence
  Description of Artificial Sequence: Synthetic oligonucleotide
agaugggauucuguaaaac

SEQ ID NO: 1472122 - RNA, 19 nt, Artificial Sequence
  Description of Artificial Sequence: Synthetic oligonucleotide
gaugggauucuguaaaacu

SEQ ID NO: 1472123 - RNA, 19 nt, Artificial Sequence
  Description of Artificial Sequence: Synthetic oligonucleotide
cuggaucuuuggcugaacg

SEQ ID NO: 1472124 - RNA, 19 nt, Artificial Sequence
  Description of Artificial Sequence: Synthetic oligonucleotide
uccucacuggugauauccg

SEQ ID NO: 1472125 - RNA, 19 nt, Artificial Sequence
  Description of Artificial Sequence: Synthetic oligonucleotide
uccucuaguguucguaccu

SEQ ID NO: 1472126 - RNA, 19 nt, Artificial Sequence
  Description of Artificial Sequence: Synthetic oligonucleotide
ucugaggauuaagagguga

SEQ ID NO: 1472127 - RNA, 19 nt, Artificial Sequence
  Description of Artificial Sequence: Synthetic oligonucleotide
uguugucauuugaugggca

SEQ ID NO: 1472128 - RNA, 19 nt, Artificial Sequence
  Description of Artificial Sequence: Synthetic oligonucleotide
ugauuucggggagaggugc

SEQ ID NO: 1472129 - RNA, 19 nt, Artificial Sequence
  Description of Artificial Sequence: Synthetic oligonucleotide
acugccguguaccggggac

SEQ ID NO: 1472130 - RNA, 19 nt, Artificial Sequence
  Description of Artificial Sequence: Synthetic oligonucleotide
gauauccgcacaguagggc

SEQ ID NO: 1472131 - RNA, 19 nt, Artificial Sequence
  Description of Artificial Sequence: Synthetic oligonucleotide
uggaucuuuggcugaacgu

SEQ ID NO: 1472132 - RNA, 19 nt, Artificial Sequence
  Description of Artificial Sequence: Synthetic oligonucleotide
aguccuucaguucacucau

SEQ ID NO: 1472133 - RNA, 19 nt, Artificial Sequence
  Description of Artificial Sequence: Synthetic oligonucleotide
uccuccauaggggaaauaa

SEQ ID NO: 1472134 - RNA, 19 nt, Artificial Sequence
  Description of Artificial Sequence: Synthetic oligonucleotide
ggaaucuuauaauguucgg

SEQ ID NO: 1472135 - RNA, 19 nt, Artificial Sequence
  Description of Artificial Sequence: Synthetic oligonucleotide
ugggccucagacuucuuca

SEQ ID NO: 1472136 - RNA, 19 nt, Artificial Sequence
  Description of Artificial Sequence: Synthetic oligonucleotide
ucagccugccguuugcgca

SEQ ID NO: 1472137 - RNA, 19 nt, Artificial Sequence
  Description of Artificial Sequence: Synthetic oligonucleotide
aggguuuguucugauuucg

SEQ ID NO: 1472138 - RNA, 19 nt, Artificial Sequence
  Description of Artificial Sequence: Synthetic oligonucleotide
cagacuugaaaucauggaa

SEQ ID NO: 1472139 - RNA, 19 nt, Artificial Sequence
  Description of Artificial Sequence: Synthetic oligonucleotide
ucgucggucaccuuucuua

SEQ ID NO: 1472140 - RNA, 19 nt, Artificial Sequence
  Description of Artificial Sequence: Synthetic oligonucleotide
uccucggacuccaggaggc

SEQ ID NO: 1472141 - RNA, 19 nt, Artificial Sequence
  Description of Artificial Sequence: Synthetic oligonucleotide
ucacuggugauauccgcac

SEQ ID NO: 1472142 - RNA, 19 nt, Artificial Sequence
  Description of Artificial Sequence: Synthetic oligonucleotide
ucuugcgaaaggcauccau

SEQ ID NO: 1472143 - RNA, 19 nt, Artificial Sequence
  Description of Artificial Sequence: Synthetic oligonucleotide
agcagcaggugaugcuacc

SEQ ID NO: 1472144 - RNA, 19 nt, Artificial Sequence
  Description of Artificial Sequence: Synthetic oligonucleotide
aauugggucaucagugaau

SEQ ID NO: 1472145 - RNA, 19 nt, Artificial Sequence
  Description of Artificial Sequence: Synthetic oligonucleotide
uggaauugcaaugggcagu

SEQ ID NO: 1472146 - RNA, 19 nt, Artificial Sequence
  Description of Artificial Sequence: Synthetic oligonucleotide
ucaggagaugggauucugu

SEQ ID NO: 1472147 - RNA, 19 nt, Artificial Sequence
  Description of Artificial Sequence: Synthetic oligonucleotide
uccaaggacuugguguggg

SEQ ID NO: 1472148 - RNA, 19 nt, Artificial Sequence
  Description of Artificial Sequence: Synthetic oligonucleotide
uccaguacacgcagccgcc

SEQ ID NO: 1472149 - RNA, 19 nt, Artificial Sequence
  Description of Artificial Sequence: Synthetic oligonucleotide
uaauguucggcuucaucuu

SEQ ID NO: 1472150 - RNA, 19 nt, Artificial Sequence
  Description of Artificial Sequence: Synthetic oligonucleotide
gcgaaaggcauccaugacc

SEQ ID NO: 1472151 - RNA, 19 nt, Artificial Sequence
  Description of Artificial Sequence: Synthetic oligonucleotide
ucaauaccaaugccaucgu

SEQ ID NO: 1472152 - RNA, 19 nt, Artificial Sequence
  Description of Artificial Sequence: Synthetic oligonucleotide
auccgaggcacgucaauug

SEQ ID NO: 1472153 - RNA, 19 nt, Artificial Sequence
  Description of Artificial Sequence: Synthetic oligonucleotide
ucaggguuuuccaggccug

SEQ ID NO: 1472154 - RNA, 19 nt, Artificial Sequence
  Description of Artificial Sequence: Synthetic oligonucleotide
ugggaguaguguuuuccca

SEQ ID NO: 1472155 - RNA, 19 nt, Artificial Sequence
  Description of Artificial Sequence: Synthetic oligonucleotide
uucuuuguaggggugcgcu

SEQ ID NO: 1472156 - RNA, 19 nt, Artificial Sequence
  Description of Artificial Sequence: Synthetic oligonucleotide
cauaggggaaauaauauuu

SEQ ID NO: 1472157 - RNA, 19 nt, Artificial Sequence
  Description of Artificial Sequence: Synthetic oligonucleotide
ugaugcuacccguccagga

SEQ ID NO: 1472158 - RNA, 19 nt, Artificial Sequence
  Description of Artificial Sequence: Synthetic oligonucleotide
caugaucuugcgaaaggca

SEQ ID NO: 1472159 - RNA, 19 nt, Artificial Sequence
  Description of Artificial Sequence: Synthetic oligonucleotide
ggugauauccgcacaguag

SEQ ID NO: 1472160 - RNA, 19 nt, Artificial Sequence
  Description of Artificial Sequence: Synthetic oligonucleotide
uugucauuugaugggcagc

SEQ ID NO: 1472161 - RNA, 19 nt, Artificial Sequence
  Description of Artificial Sequence: Synthetic oligonucleotide
ugucaggaauaggagaguc

SEQ ID NO: 1472162 - RNA, 19 nt, Artificial Sequence
  Description of Artificial Sequence: Synthetic oligonucleotide
guugggagcgucauucuug

SEQ ID NO: 1472163 - RNA, 19 nt, Artificial Sequence
  Description of Artificial Sequence: Synthetic oligonucleotide
ucagcggucccaugaggcc

SEQ ID NO: 1472164 - RNA, 19 nt, Artificial Sequence
  Description of Artificial Sequence: Synthetic oligonucleotide
gagaguccuccauagggga

SEQ ID NO: 1472165 - RNA, 19 nt, Artificial Sequence
  Description of Artificial Sequence: Synthetic oligonucleotide
agcucagccugccguuugc

SEQ ID NO: 1472166 - RNA, 19 nt, Artificial Sequence
  Description of Artificial Sequence: Synthetic oligonucleotide
aggaagugggcuucugaca

SEQ ID NO: 1472167 - RNA, 19 nt, Artificial Sequence
  Description of Artificial Sequence: Synthetic oligonucleotide
agucaguaaggaucugggu

SEQ ID NO: 1472168 - RNA, 19 nt, Artificial Sequence
  Description of Artificial Sequence: Synthetic oligonucleotide
augggcaguccuucaguuc

SEQ ID NO: 1472169 - RNA, 19 nt, Artificial Sequence
  Description of Artificial Sequence: Synthetic oligonucleotide
uggugauauccgcacagua

SEQ ID NO: 1472170 - RNA, 19 nt, Artificial Sequence
  Description of Artificial Sequence: Synthetic oligonucleotide
guaaggaucuggguuucag

SEQ ID NO: 1472171 - RNA, 19 nt, Artificial Sequence
  Description of Artificial Sequence: Synthetic oligonucleotide
cuccauaggggaaauaaua

SEQ ID NO: 1472172 - RNA, 19 nt, Artificial Sequence
  Description of Artificial Sequence: Synthetic oligonucleotide
aucuuauaauguucggcuu

SEQ ID NO: 1472173 - RNA, 19 nt, Artificial Sequence
  Description of Artificial Sequence: Synthetic oligonucleotide
cuguugucauuugaugggc

SEQ ID NO: 1472174 - RNA, 19 nt, Artificial Sequence
  Description of Artificial Sequence: Synthetic oligonucleotide
ugcgaaaggcauccaugac

SEQ ID NO: 1472175 - RNA, 19 nt, Artificial Sequence
  Description of Artificial Sequence: Synthetic oligonucleotide
cagcaggugaugcuacccg

SEQ ID NO: 1472176 - RNA, 19 nt, Artificial Sequence
  Description of Artificial Sequence: Synthetic oligonucleotide
gcagccaugaucuugcgaa

SEQ ID NO: 1472177 - RNA, 19 nt, Artificial Sequence
  Description of Artificial Sequence: Synthetic oligonucleotide
cuuucuuauccugccaguc

SEQ ID NO: 1472178 - RNA, 19 nt, Artificial Sequence
  Description of Artificial Sequence: Synthetic oligonucleotide
ugcgccaucagccccugau

SEQ ID NO: 1472179 - RNA, 19 nt, Artificial Sequence
  Description of Artificial Sequence: Synthetic oligonucleotide
cauccaugaccucauuguc

SEQ ID NO: 1472180 - RNA, 19 nt, Artificial Sequence
  Description of Artificial Sequence: Synthetic oligonucleotide
ggucaugcuucuuggugcg

SEQ ID NO: 1472181 - RNA, 19 nt, Artificial Sequence
  Description of Artificial Sequence: Synthetic oligonucleotide
gucucgacccagcuucagg

SEQ ID NO: 1472182 - RNA, 19 nt, Artificial Sequence
  Description of Artificial Sequence: Synthetic oligonucleotide
ggagaugggauucuguaaa

SEQ ID NO: 1472183 - RNA, 19 nt, Artificial Sequence
  Description of Artificial Sequence: Synthetic oligonucleotide
gaccucauugucugccaug

SEQ ID NO: 1472184 - RNA, 19 nt, Artificial Sequence
  Description of Artificial Sequence: Synthetic oligonucleotide
ucccuggaauguucugagg

SEQ ID NO: 1472185 - RNA, 19 nt, Artificial Sequence
  Description of Artificial Sequence: Synthetic oligonucleotide
ucuuauccugccagucagu

SEQ ID NO: 1472186 - RNA, 19 nt, Artificial Sequence
  Description of Artificial Sequence: Synthetic oligonucleotide
cagggcaccaaagggacag

SEQ ID NO: 1472187 - RNA, 19 nt, Artificial Sequence
  Description of Artificial Sequence: Synthetic oligonucleotide
ggagaguccuccauagggg

SEQ ID NO: 1472188 - RNA, 19 nt, Artificial Sequence
  Description of Artificial Sequence: Synthetic oligonucleotide
agcgcugugucagggcacc

SEQ ID NO: 1472189 - RNA, 19 nt, Artificial Sequence
  Description of Artificial Sequence: Synthetic oligonucleotide
auccgcacaguagggcucc

SEQ ID NO: 1472190 - RNA, 19 nt, Artificial Sequence
  Description of Artificial Sequence: Synthetic oligonucleotide
ugcuugcgccaucagcccc

SEQ ID NO: 1472191 - RNA, 19 nt, Artificial Sequence
  Description of Artificial Sequence: Synthetic oligonucleotide
cugauuucggggagaggug

SEQ ID NO: 1472192 - RNA, 19 nt, Artificial Sequence
  Description of Artificial Sequence: Synthetic oligonucleotide
cuccucuaguguucguacc

SEQ ID NO: 1472193 - RNA, 19 nt, Artificial Sequence
  Description of Artificial Sequence: Synthetic oligonucleotide
ugccaugcggacccgcugu

SEQ ID NO: 1472194 - RNA, 19 nt, Artificial Sequence
  Description of Artificial Sequence: Synthetic oligonucleotide
cuaguguucguaccuccuc

SEQ ID NO: 1472195 - RNA, 19 nt, Artificial Sequence
  Description of Artificial Sequence: Synthetic oligonucleotide
cugugucagggcaccaaag

SEQ ID NO: 1472196 - RNA, 19 nt, Artificial Sequence
  Description of Artificial Sequence: Synthetic oligonucleotide
gguugugugcacugagugc

SEQ ID NO: 1472197 - RNA, 19 nt, Artificial Sequence
  Description of Artificial Sequence: Synthetic oligonucleotide
ugcagaggacagcaagguc

SEQ ID NO: 1472198 - RNA, 19 nt, Artificial Sequence
  Description of Artificial Sequence: Synthetic oligonucleotide
cucacuggugauauccgca

SEQ ID NO: 1472199 - RNA, 19 nt, Artificial Sequence
  Description of Artificial Sequence: Synthetic oligonucleotide
uauccgcacaguagggcuc

SEQ ID NO: 1472200 - RNA, 19 nt, Artificial Sequence
  Description of Artificial Sequence: Synthetic oligonucleotide
ucgacccagcuucaggaau

SEQ ID NO: 1472201 - RNA, 19 nt, Artificial Sequence
  Description of Artificial Sequence: Synthetic oligonucleotide
ggugaugcuacccguccag

SEQ ID NO: 1472202 - RNA, 19 nt, Artificial Sequence
  Description of Artificial Sequence: Synthetic oligonucleotide
uuauccugccagucaguaa

SEQ ID NO: 1472203 - RNA, 19 nt, Artificial Sequence
  Description of Artificial Sequence: Synthetic oligonucleotide
uugguguggggcacacuga

SEQ ID NO: 1472204 - RNA, 19 nt, Artificial Sequence
  Description of Artificial Sequence: Synthetic oligonucleotide
gauuugggucguccugggc

SEQ ID NO: 1472205 - RNA, 19 nt, Artificial Sequence
  Description of Artificial Sequence: Synthetic oligonucleotide
aaucgucggucaccuuucu

SEQ ID NO: 1472206 - RNA, 19 nt, Artificial Sequence
  Description of Artificial Sequence: Synthetic oligonucleotide
agcaggugaugcuacccgu

SEQ ID NO: 1472207 - RNA, 19 nt, Artificial Sequence
  Description of Artificial Sequence: Synthetic oligonucleotide
gucagcggucccaugaggc

SEQ ID NO: 1472208 - RNA, 19 nt, Artificial Sequence
  Description of Artificial Sequence: Synthetic oligonucleotide
aguucauggucucgaccca

SEQ ID NO: 1472209 - RNA, 19 nt, Artificial Sequence
  Description of Artificial Sequence: Synthetic oligonucleotide
uguugggagcgucauucuu

SEQ ID NO: 1472210 - RNA, 19 nt, Artificial Sequence
  Description of Artificial Sequence: Synthetic oligonucleotide
cauuugaugggcagcccca

SEQ ID NO: 1472211 - RNA, 19 nt, Artificial Sequence
  Description of Artificial Sequence: Synthetic oligonucleotide
ucucguucuuucaggguuu

SEQ ID NO: 1472212 - RNA, 19 nt, Artificial Sequence
  Description of Artificial Sequence: Synthetic oligonucleotide
ugcuacccguccaggagcu

SEQ ID NO: 1472213 - RNA, 19 nt, Artificial Sequence
  Description of Artificial Sequence: Synthetic oligonucleotide
ugccaaccucagcagguca

SEQ ID NO: 1472214 - RNA, 19 nt, Artificial Sequence
  Description of Artificial Sequence: Synthetic oligonucleotide
uucggggagaggugcuugc

SEQ ID NO: 1472215 - RNA, 19 nt, Artificial Sequence
  Description of Artificial Sequence: Synthetic oligonucleotide
cuuccaguacacgcagccg

SEQ ID NO: 1472216 - RNA, 19 nt, Artificial Sequence
  Description of Artificial Sequence: Synthetic oligonucleotide
ucggacuccaggaggcccu

SEQ ID NO: 1472217 - RNA, 19 nt, Artificial Sequence
  Description of Artificial Sequence: Synthetic oligonucleotide
gacccagcuucaggaaucg

SEQ ID NO: 1472218 - RNA, 19 nt, Artificial Sequence
  Description of Artificial Sequence: Synthetic oligonucleotide
agcgucauucuuggggauc

SEQ ID NO: 1472219 - RNA, 19 nt, Artificial Sequence
  Description of Artificial Sequence: Synthetic oligonucleotide
cacgcagccgccugcuugc

SEQ ID NO: 1472220 - RNA, 19 nt, Artificial Sequence
  Description of Artificial Sequence: Synthetic oligonucleotide
agaccuucaggugguccac

SEQ ID NO: 1472221 - RNA, 19 nt, Artificial Sequence
  Description of Artificial Sequence: Synthetic oligonucleotide
gcucucucguucuuucagg

SEQ ID NO: 1472222 - RNA, 19 nt, Artificial Sequence
  Description of Artificial Sequence: Synthetic oligonucleotide
ugccguuugcgcagcucag

SEQ ID NO: 1472223 - RNA, 19 nt, Artificial Sequence
  Description of Artificial Sequence: Synthetic oligonucleotide
gaaucgucggucaccuuuc

SEQ ID NO: 1472224 - RNA, 19 nt, Artificial Sequence
  Description of Artificial Sequence: Synthetic oligonucleotide
ggagcgucauucuugggga

SEQ ID NO: 1472225 - RNA, 19 nt, Artificial Sequence
  Description of Artificial Sequence: Synthetic oligonucleotide
cagacaugucaggaauagg

SEQ ID NO: 1472226 - RNA, 19 nt, Artificial Sequence
  Description of Artificial Sequence: Synthetic oligonucleotide
gagcaccaaguucaugguc

SEQ ID NO: 1472227 - RNA, 19 nt, Artificial Sequence
  Description of Artificial Sequence: Synthetic oligonucleotide
aagcgcugugucagggcac

SEQ ID NO: 1472228 - RNA, 19 nt, Artificial Sequence
  Description of Artificial Sequence: Synthetic oligonucleotide
cucagccugccguuugcgc

SEQ ID NO: 1472229 - RNA, 19 nt, Artificial Sequence
  Description of Artificial Sequence: Synthetic oligonucleotide
caauaccaaugccaucguc

SEQ ID NO: 1472230 - RNA, 19 nt, Artificial Sequence
  Description of Artificial Sequence: Synthetic oligonucleotide
uacccguccaggagcuuca

SEQ ID NO: 1472231 - RNA, 19 nt, Artificial Sequence
  Description of Artificial Sequence: Synthetic oligonucleotide
uucugauuucggggagagg

SEQ ID NO: 1472232 - RNA, 19 nt, Artificial Sequence
  Description of Artificial Sequence: Synthetic oligonucleotide
ucaaaggaagugggcuucu

SEQ ID NO: 1472233 - RNA, 19 nt, Artificial Sequence
  Description of Artificial Sequence: Synthetic oligonucleotide
guucauggucucgacccag

SEQ ID NO: 1472234 - RNA, 19 nt, Artificial Sequence
  Description of Artificial Sequence: Synthetic oligonucleotide
accggggacagaccuucag

SEQ ID NO: 1472235 - RNA, 19 nt, Artificial Sequence
  Description of Artificial Sequence: Synthetic oligonucleotide
ggugcgcuucuucugccgg

SEQ ID NO: 1472236 - RNA, 19 nt, Artificial Sequence
  Description of Artificial Sequence: Synthetic oligonucleotide
caagcgcugugucagggca

SEQ ID NO: 1472237 - RNA, 19 nt, Artificial Sequence
  Description of Artificial Sequence: Synthetic oligonucleotide
cuguaaaacucccuggaau

SEQ ID NO: 1472238 - RNA, 19 nt, Artificial Sequence
  Description of Artificial Sequence: Synthetic oligonucleotide
ggauuugggucguccuggg

SEQ ID NO: 1472239 - RNA, 19 nt, Artificial Sequence
  Description of Artificial Sequence: Synthetic oligonucleotide
ucguccucggagcgggcca

SEQ ID NO: 1472240 - RNA, 19 nt, Artificial Sequence
  Description of Artificial Sequence: Synthetic oligonucleotide
aggugaugcuacccgucca

SEQ ID NO: 1472241 - RNA, 19 nt, Artificial Sequence
  Description of Artificial Sequence: Synthetic oligonucleotide
ccagucaguaaggaucugg

SEQ ID NO: 1472242 - RNA, 19 nt, Artificial Sequence
  Description of Artificial Sequence: Synthetic oligonucleotide
gggauucuguaaaacuccc

SEQ ID NO: 1472243 - RNA, 19 nt, Artificial Sequence
  Description of Artificial Sequence: Synthetic oligonucleotide
auugcaaugggcaguccuu

SEQ ID NO: 1472244 - RNA, 19 nt, Artificial Sequence
  Description of Artificial Sequence: Synthetic oligonucleotide
gugaugcuacccguccagg

SEQ ID NO: 1472245 - RNA, 19 nt, Artificial Sequence
  Description of Artificial Sequence: Synthetic oligonucleotide
ugccguguaccggggacag

SEQ ID NO: 1472246 - RNA, 19 nt, Artificial Sequence
  Description of Artificial Sequence: Synthetic oligonucleotide
cagucagcggucccaugag

SEQ ID NO: 1472247 - RNA, 19 nt, Artificial Sequence
  Description of Artificial Sequence: Synthetic oligonucleotide
gcugggaguaguguuuucc

SEQ ID NO: 1472248 - RNA, 19 nt, Artificial Sequence
  Description of Artificial Sequence: Synthetic oligonucleotide
cagccugccguuugcgcag

SEQ ID NO: 1472249 - RNA, 19 nt, Artificial Sequence
  Description of Artificial Sequence: Synthetic oligonucleotide
cuucuuuguaggggugcgc

SEQ ID NO: 1472250 - RNA, 19 nt, Artificial Sequence
  Description of Artificial Sequence: Synthetic oligonucleotide
ggaauugcaaugggcaguc

SEQ ID NO: 1472251 - RNA, 19 nt, Artificial Sequence
  Description of Artificial Sequence: Synthetic oligonucleotide
gaauaggagaguccuccau

SEQ ID NO: 1472252 - RNA, 19 nt, Artificial Sequence
  Description of Artificial Sequence: Synthetic oligonucleotide
agaggugcuugcgccauca

SEQ ID NO: 1472253 - RNA, 19 nt, Artificial Sequence
  Description of Artificial Sequence: Synthetic oligonucleotide
gagacuguugucauuugau

SEQ ID NO: 1472254 - RNA, 19 nt, Artificial Sequence
  Description of Artificial Sequence: Synthetic oligonucleotide
ccagacaugucaggaauag

SEQ ID NO: 1472255 - RNA, 19 nt, Artificial Sequence
  Description of Artificial Sequence: Synthetic oligonucleotide
ccuguugggagcgucauuc

SEQ ID NO: 1472256 - RNA, 19 nt, Artificial Sequence
  Description of Artificial Sequence: Synthetic oligonucleotide
gugcuugcgccaucagccc

SEQ ID NO: 1472257 - RNA, 19 nt, Artificial Sequence
  Description of Artificial Sequence: Synthetic oligonucleotide
caauugggucaucagugaa

SEQ ID NO: 1472258 - RNA, 19 nt, Artificial Sequence
  Description of Artificial Sequence: Synthetic oligonucleotide
ggggaaucuuauaauguuc

SEQ ID NO: 1472259 - RNA, 19 nt, Artificial Sequence
  Description of Artificial Sequence: Synthetic oligonucleotide
cugccguuugcgcagcuca

SEQ ID NO: 1472260 - RNA, 19 nt, Artificial Sequence
  Description of Artificial Sequence: Synthetic oligonucleotide
ugggagcgucauucuuggg

SEQ ID NO: 1472261 - RNA, 19 nt, Artificial Sequence
  Description of Artificial Sequence: Synthetic oligonucleotide
aaccuguugggagcgucau

SEQ ID NO: 1472262 - RNA, 19 nt, Artificial Sequence
  Description of Artificial Sequence: Synthetic oligonucleotide
uucagucagcggucccaug

SEQ ID NO: 1472263 - RNA, 19 nt, Artificial Sequence
  Description of Artificial Sequence: Synthetic oligonucleotide
caccaaagggacagccauc

SEQ ID NO: 1472264 - RNA, 19 nt, Artificial Sequence
  Description of Artificial Sequence: Synthetic oligonucleotide
cucggacuccaggaggccc

SEQ ID NO: 1472265 - RNA, 19 nt, Artificial Sequence
  Description of Artificial Sequence: Synthetic oligonucleotide
ggguuuguucugauuucgg

SEQ ID NO: 1472266 - RNA, 19 nt, Artificial Sequence
  Description of Artificial Sequence: Synthetic oligonucleotide
ugcggacccgcugucucag

SEQ ID NO: 1472267 - RNA, 19 nt, Artificial Sequence
  Description of Artificial Sequence: Synthetic oligonucleotide
cccagcuucaggaaucguc

SEQ ID NO: 1472268 - RNA, 19 nt, Artificial Sequence
  Description of Artificial Sequence: Synthetic oligonucleotide
augucaggaauaggagagu

SEQ ID NO: 1472269 - RNA, 19 nt, Artificial Sequence
  Description of Artificial Sequence: Synthetic oligonucleotide
cuacccguccaggagcuuc

SEQ ID NO: 1472270 - RNA, 19 nt, Artificial Sequence
  Description of Artificial Sequence: Synthetic oligonucleotide
augcucucucguucuuuca

SEQ ID NO: 1472271 - RNA, 19 nt, Artificial Sequence
  Description of Artificial Sequence: Synthetic oligonucleotide
guaccggggacagaccuuc

SEQ ID NO: 1472272 - RNA, 19 nt, Artificial Sequence
  Description of Artificial Sequence: Synthetic oligonucleotide
gcuccucuaguguucguac

SEQ ID NO: 1472273 - RNA, 19 nt, Artificial Sequence
  Description of Artificial Sequence: Synthetic oligonucleotide
ccguuugcgcagcucagcg

SEQ ID NO: 1472274 - RNA, 19 nt, Artificial Sequence
  Description of Artificial Sequence: Synthetic oligonucleotide
guaggggugcgcuucuucu

SEQ ID NO: 1472275 - RNA, 19 nt, Artificial Sequence
  Description of Artificial Sequence: Synthetic oligonucleotide
auguucggcuucaucuuca

SEQ ID NO: 1472276 - RNA, 19 nt, Artificial Sequence
  Description of Artificial Sequence: Synthetic oligonucleotide
gaauugcaaugggcagucc

SEQ ID NO: 1472277 - RNA, 19 nt, Artificial Sequence
  Description of Artificial Sequence: Synthetic oligonucleotide
agugggcuucugacaggcc

SEQ ID NO: 1472278 - RNA, 19 nt, Artificial Sequence
  Description of Artificial Sequence: Synthetic oligonucleotide
uacugccguguaccgggga

SEQ ID NO: 1472279 - RNA, 19 nt, Artificial Sequence
  Description of Artificial Sequence: Synthetic oligonucleotide
ccaguacugccguguaccg

SEQ ID NO: 1472280 - RNA, 19 nt, Artificial Sequence
  Description of Artificial Sequence: Synthetic oligonucleotide
ggaauaggagaguccucca

SEQ ID NO: 1472281 - RNA, 19 nt, Artificial Sequence
  Description of Artificial Sequence: Synthetic oligonucleotide
cuuauccugccagucagua

SEQ ID NO: 1472282 - RNA, 19 nt, Artificial Sequence
  Description of Artificial Sequence: Synthetic oligonucleotide
agcgaggaccucauccucu

SEQ ID NO: 1472283 - RNA, 19 nt, Artificial Sequence
  Description of Artificial Sequence: Synthetic oligonucleotide
ggagcgggccaguacugcc

SEQ ID NO: 1472284 - RNA, 19 nt, Artificial Sequence
  Description of Artificial Sequence: Synthetic oligonucleotide
cacgucaauugggucauca

SEQ ID NO: 1472285 - RNA, 19 nt, Artificial Sequence
  Description of Artificial Sequence: Synthetic oligonucleotide
uugccaaccucagcagguc

SEQ ID NO: 1472286 - RNA, 19 nt, Artificial Sequence
  Description of Artificial Sequence: Synthetic oligonucleotide
agcgggccaguacugccgu

SEQ ID NO: 1472287 - RNA, 19 nt, Artificial Sequence
  Description of Artificial Sequence: Synthetic oligonucleotide
guguaccggggacagaccu

SEQ ID NO: 1472288 - RNA, 19 nt, Artificial Sequence
  Description of Artificial Sequence: Synthetic oligonucleotide
cucucguucuuucaggguu

SEQ ID NO: 1472289 - RNA, 19 nt, Artificial Sequence
  Description of Artificial Sequence: Synthetic oligonucleotide
gcgucauucuuggggaucc

SEQ ID NO: 1472290 - RNA, 19 nt, Artificial Sequence
  Description of Artificial Sequence: Synthetic oligonucleotide
augcggacccgcugucuca

SEQ ID NO: 1472291 - RNA, 19 nt, Artificial Sequence
  Description of Artificial Sequence: Synthetic oligonucleotide
ggggauccgaggcacguca

SEQ ID NO: 1472292 - RNA, 19 nt, Artificial Sequence
  Description of Artificial Sequence: Synthetic oligonucleotide
uucuugggcuucccauguu

SEQ ID NO: 1472293 - RNA, 19 nt, Artificial Sequence
  Description of Artificial Sequence: Synthetic oligonucleotide
cugaggauuaagaggugau

SEQ ID NO: 1472294 - RNA, 19 nt, Artificial Sequence
  Description of Artificial Sequence: Synthetic oligonucleotide
caguaaggaucuggguuuc

SEQ ID NO: 1472295 - RNA, 19 nt, Artificial Sequence
  Description of Artificial Sequence: Synthetic oligonucleotide
gccccugauucuuucccag

SEQ ID NO: 1472296 - RNA, 19 nt, Artificial Sequence
  Description of Artificial Sequence: Synthetic oligonucleotide
ccagaaccuguugggagcg

SEQ ID NO: 1472297 - RNA, 19 nt, Artificial Sequence
  Description of Artificial Sequence: Synthetic oligonucleotide
ggaaucgucggucaccuuu

SEQ ID NO: 1472298 - RNA, 19 nt, Artificial Sequence
  Description of Artificial Sequence: Synthetic oligonucleotide
gggugcgcuucuucugccg

SEQ ID NO: 1472299 - RNA, 19 nt, Artificial Sequence
  Description of Artificial Sequence: Synthetic oligonucleotide
ggguuuuccaggccugguc

SEQ ID NO: 1472300 - RNA, 19 nt, Artificial Sequence
  Description of Artificial Sequence: Synthetic oligonucleotide
aggccgguccucggacucc

SEQ ID NO: 1472301 - RNA, 19 nt, Artificial Sequence
  Description of Artificial Sequence: Synthetic oligonucleotide
ccaaguucauggucucgac

SEQ ID NO: 1472302 - RNA, 19 nt, Artificial Sequence
  Description of Artificial Sequence: Synthetic oligonucleotide
gugugcacugagugccuuc

SEQ ID NO: 1472303 - RNA, 19 nt, Artificial Sequence
  Description of Artificial Sequence: Synthetic oligonucleotide
cucggagcgggccaguacu

SEQ ID NO: 1472304 - RNA, 19 nt, Artificial Sequence
  Description of Artificial Sequence: Synthetic oligonucleotide
cugcagcaagcgcuguguc

SEQ ID NO: 1472305 - RNA, 19 nt, Artificial Sequence
  Description of Artificial Sequence: Synthetic oligonucleotide
ccguguaccggggacagac

SEQ ID NO: 1472306 - RNA, 19 nt, Artificial Sequence
  Description of Artificial Sequence: Synthetic oligonucleotide
uggugcgguugugugcacu

SEQ ID NO: 1472307 - RNA, 19 nt, Artificial Sequence
  Description of Artificial Sequence: Synthetic oligonucleotide
guacugccguguaccgggg

SEQ ID NO: 1472308 - RNA, 19 nt, Artificial Sequence
  Description of Artificial Sequence: Synthetic oligonucleotide
gucggucaccuuucuuauc

SEQ ID NO: 1472309 - RNA, 19 nt, Artificial Sequence
  Description of Artificial Sequence: Synthetic oligonucleotide
ugugugcacugagugccuu

SEQ ID NO: 1472310 - RNA, 19 nt, Artificial Sequence
  Description of Artificial Sequence: Synthetic oligonucleotide
cuucaggaugcucucucgu

SEQ ID NO: 1472311 - RNA, 19 nt, Artificial Sequence
  Description of Artificial Sequence: Synthetic oligonucleotide
aucgucggucaccuuucuu

SEQ ID NO: 1472312 - RNA, 19 nt, Artificial Sequence
  Description of Artificial Sequence: Synthetic oligonucleotide
cgguugugugcacugagug

SEQ ID NO: 1472313 - RNA, 19 nt, Artificial Sequence
  Description of Artificial Sequence: Synthetic oligonucleotide
cguaccuccucacugguga

SEQ ID NO: 1472314 - RNA, 19 nt, Artificial Sequence
  Description of Artificial Sequence: Synthetic oligonucleotide
uuuccaggccugguccuuu

SEQ ID NO: 1472315 - RNA, 19 nt, Artificial Sequence
  Description of Artificial Sequence: Synthetic oligonucleotide
agaguccuccauaggggaa

SEQ ID NO: 1472316 - RNA, 19 nt, Artificial Sequence
  Description of Artificial Sequence: Synthetic oligonucleotide
ugucugccaugcggacccg

SEQ ID NO: 1472317 - RNA, 19 nt, Artificial Sequence
  Description of Artificial Sequence: Synthetic oligonucleotide
auuucggggagaggugcuu

SEQ ID NO: 1472318 - RNA, 19 nt, Artificial Sequence
  Description of Artificial Sequence: Synthetic oligonucleotide
ggaucuuuggcugaacguu

SEQ ID NO: 1472319 - RNA, 19 nt, Artificial Sequence
  Description of Artificial Sequence: Synthetic oligonucleotide
agccugccguuugcgcagc

SEQ ID NO: 1472320 - RNA, 19 nt, Artificial Sequence
  Description of Artificial Sequence: Synthetic oligonucleotide
gauuucggggagaggugcu

SEQ ID NO: 1472321 - RNA, 19 nt, Artificial Sequence
  Description of Artificial Sequence: Synthetic oligonucleotide
cucgacccagcuucaggaa

SEQ ID NO: 1472322 - RNA, 19 nt, Artificial Sequence
  Description of Artificial Sequence: Synthetic oligonucleotide
ccucaauaccaaugccauc

SEQ ID NO: 1472323 - RNA, 19 nt, Artificial Sequence
  Description of Artificial Sequence: Synthetic oligonucleotide
guguucguaccuccucacu

SEQ ID NO: 1472324 - RNA, 19 nt, Artificial Sequence
  Description of Artificial Sequence: Synthetic oligonucleotide
ggggugcgcuucuucugcc

SEQ ID NO: 1472325 - RNA, 19 nt, Artificial Sequence
  Description of Artificial Sequence: Synthetic oligonucleotide
ggagcaccaaguucauggu

SEQ ID NO: 1472326 - RNA, 19 nt, Artificial Sequence
  Description of Artificial Sequence: Synthetic oligonucleotide
uacacgcagccgccugcuu

SEQ ID NO: 1472327 - RNA, 19 nt, Artificial Sequence
  Description of Artificial Sequence: Synthetic oligonucleotide
gcucagccugccguuugcg

SEQ ID NO: 1472328 - RNA, 19 nt, Artificial Sequence
  Description of Artificial Sequence: Synthetic oligonucleotide
caggccugguccuuuuccu

SEQ ID NO: 1472329 - RNA, 19 nt, Artificial Sequence
  Description of Artificial Sequence: Synthetic oligonucleotide
aucuugcgaaaggcaucca

SEQ ID NO: 1472330 - RNA, 19 nt, Artificial Sequence
  Description of Artificial Sequence: Synthetic oligonucleotide
caggagguuucaggagcuc

SEQ ID NO: 1472331 - RNA, 19 nt, Artificial Sequence
  Description of Artificial Sequence: Synthetic oligonucleotide
acuugguguggggcacacu

SEQ ID NO: 1472332 - RNA, 19 nt, Artificial Sequence
  Description of Artificial Sequence: Synthetic oligonucleotide
gucugccaugcggacccgc

SEQ ID NO: 1472333 - RNA, 19 nt, Artificial Sequence
  Description of Artificial Sequence: Synthetic oligonucleotide
cuugcgccaucagccccug

SEQ ID NO: 1472334 - RNA, 19 nt, Artificial Sequence
  Description of Artificial Sequence: Synthetic oligonucleotide
gcaggugaugcuacccguc

SEQ ID NO: 1472335 - RNA, 19 nt, Artificial Sequence
  Description of Artificial Sequence: Synthetic oligonucleotide
ccucuaguguucguaccuc

SEQ ID NO: 1472336 - RNA, 19 nt, Artificial Sequence
  Description of Artificial Sequence: Synthetic oligonucleotide
ggucucgacccagcuucag

SEQ ID NO: 1472337 - RNA, 19 nt, Artificial Sequence
  Description of Artificial Sequence: Synthetic oligonucleotide
cuguugggagcgucauucu

SEQ ID NO: 1472338 - RNA, 19 nt, Artificial Sequence
  Description of Artificial Sequence: Synthetic oligonucleotide
cugccguguaccggggaca

SEQ ID NO: 1472339 - RNA, 19 nt, Artificial Sequence
  Description of Artificial Sequence: Synthetic oligonucleotide
ccauaggggaaauaauauu

SEQ ID NO: 1472340 - RNA, 19 nt, Artificial Sequence
  Description of Artificial Sequence: Synthetic oligonucleotide
uugcgccaucagccccuga

SEQ ID NO: 1472341 - RNA, 19 nt, Artificial Sequence
  Description of Artificial Sequence: Synthetic oligonucleotide
aggaaucgucggucaccuu

SEQ ID NO: 1472342 - RNA, 19 nt, Artificial Sequence
  Description of Artificial Sequence: Synthetic oligonucleotide
gagcgucauucuuggggau

SEQ ID NO: 1472343 - RNA, 19 nt, Artificial Sequence
  Description of Artificial Sequence: Synthetic oligonucleotide
cgucaauugggucaucagu

SEQ ID NO: 1472344 - RNA, 19 nt, Artificial Sequence
  Description of Artificial Sequence: Synthetic oligonucleotide
cguguaccggggacagacc

SEQ ID NO: 1472345 - RNA, 19 nt, Artificial Sequence
  Description of Artificial Sequence: Synthetic oligonucleotide
cccagcgcugggaguagug

SEQ ID NO: 1472346 - RNA, 19 nt, Artificial Sequence
  Description of Artificial Sequence: Synthetic oligonucleotide
acccguccaggagcuucag

SEQ ID NO: 1472347 - RNA, 19 nt, Artificial Sequence
  Description of Artificial Sequence: Synthetic oligonucleotide
acccagcuucaggaaucgu

SEQ ID NO: 1472348 - RNA, 19 nt, Artificial Sequence
  Description of Artificial Sequence: Synthetic oligonucleotide
guacacgcagccgccugcu

SEQ ID NO: 1472349 - RNA, 19 nt, Artificial Sequence
  Description of Artificial Sequence: Synthetic oligonucleotide
ccuuucuuauccugccagu

SEQ ID NO: 1472350 - RNA, 19 nt, Artificial Sequence
  Description of Artificial Sequence: Synthetic oligonucleotide
guaccuccucacuggugau

SEQ ID NO: 1472351 - RNA, 19 nt, Artificial Sequence
  Description of Artificial Sequence: Synthetic oligonucleotide
ggacagaccuucagguggu

SEQ ID NO: 1472352 - RNA, 19 nt, Artificial Sequence
  Description of Artificial Sequence: Synthetic oligonucleotide
agcggucccaugaggccuu

SEQ ID NO: 1472353 - RNA, 19 nt, Artificial Sequence
  Description of Artificial Sequence: Synthetic oligonucleotide
cgcacaguagggcuccaca

SEQ ID NO: 1472354 - RNA, 19 nt, Artificial Sequence
  Description of Artificial Sequence: Synthetic oligonucleotide
cagcggucccaugaggccu

SEQ ID NO: 1472355 - RNA, 19 nt, Artificial Sequence
  Description of Artificial Sequence: Synthetic oligonucleotide
cccagacaugucaggaaua

SEQ ID NO: 1472356 - RNA, 19 nt, Artificial Sequence
  Description of Artificial Sequence: Synthetic oligonucleotide
ggcacgucaauugggucau

SEQ ID NO: 1472357 - RNA, 19 nt, Artificial Sequence
  Description of Artificial Sequence: Synthetic oligonucleotide
cggcucaccuccuccuuug

SEQ ID NO: 1472358 - RNA, 19 nt, Artificial Sequence
  Description of Artificial Sequence: Synthetic oligonucleotide
cgaggcacgucaauugggu

SEQ ID NO: 1472359 - RNA, 19 nt, Artificial Sequence
  Description of Artificial Sequence: Synthetic oligonucleotide
ggauccgaggcacgucaau

SEQ ID NO: 1472360 - RNA, 19 nt, Artificial Sequence
  Description of Artificial Sequence: Synthetic oligonucleotide
cugcugcccgagccccauc

SEQ ID NO: 1472361 - RNA, 19 nt, Artificial Sequence
  Description of Artificial Sequence: Synthetic oligonucleotide
cguuugcgcagcucagcga

SEQ ID NO: 1472362 - RNA, 19 nt, Artificial Sequence
  Description of Artificial Sequence: Synthetic oligonucleotide
ccgccugcuugcagaggac

SEQ ID NO: 1472363 - RNA, 19 nt, Artificial Sequence
  Description of Artificial Sequence: Synthetic oligonucleotide
cgucauucuuggggauccg

SEQ ID NO: 1472364 - RNA, 19 nt, Artificial Sequence
  Description of Artificial Sequence: Synthetic oligonucleotide
gggccaguacugccgugua

SEQ ID NO: 1472365 - RNA, 19 nt, Artificial Sequence
  Description of Artificial Sequence: Synthetic oligonucleotide
gcuugcgccaucagccccu

SEQ ID NO: 1472366 - RNA, 19 nt, Artificial Sequence
  Description of Artificial Sequence: Synthetic oligonucleotide
ggcccagcgcugggaguag

SEQ ID NO: 1472367 - RNA, 19 nt, Artificial Sequence
  Description of Artificial Sequence: Synthetic oligonucleotide
cagaggcccagaaccuguu

SEQ ID NO: 1472368 - RNA, 19 nt, Artificial Sequence
  Description of Artificial Sequence: Synthetic oligonucleotide
acgcagccgccugcuugca

SEQ ID NO: 1472369 - RNA, 19 nt, Artificial Sequence
  Description of Artificial Sequence: Synthetic oligonucleotide
gcggacccgcugucucagc

SEQ ID NO: 1472370 - RNA, 19 nt, Artificial Sequence
  Description of Artificial Sequence: Synthetic oligonucleotide
ggugguccacagacuugaa

SEQ ID NO: 1472371 - RNA, 19 nt, Artificial Sequence
  Description of Artificial Sequence: Synthetic oligonucleotide
gggauccgaggcacgucaa

SEQ ID NO: 1472372 - RNA, 19 nt, Artificial Sequence
  Description of Artificial Sequence: Synthetic oligonucleotide
gcgggccaguacugccgug

SEQ ID NO: 1472373 - RNA, 19 nt, Artificial Sequence
  Description of Artificial Sequence: Synthetic oligonucleotide
cucguucuuucaggguuuu

SEQ ID NO: 1472374 - RNA, 19 nt, Artificial Sequence
  Description of Artificial Sequence: Synthetic oligonucleotide
gcccgagccccauccuucu

SEQ ID NO: 1472375 - RNA, 19 nt, Artificial Sequence
  Description of Artificial Sequence: Synthetic oligonucleotide
cgucggucaccuuucuuau

SEQ ID NO: 1472376 - RNA, 19 nt, Artificial Sequence
  Description of Artificial Sequence: Synthetic oligonucleotide
ccgcacaguagggcuccac

SEQ ID NO: 1472377 - RNA, 19 nt, Artificial Sequence
  Description of Artificial Sequence: Synthetic oligonucleotide
cgcagccgccugcuugcag

SEQ ID NO: 1472378 - RNA, 19 nt, Artificial Sequence
  Description of Artificial Sequence: Synthetic oligonucleotide
gcgccaucagccccugauu

SEQ ID NO: 1472379 - RNA, 19 nt, Artificial Sequence
  Description of Artificial Sequence: Synthetic oligonucleotide
ccagcgcugggaguagugu

SEQ ID NO: 1472380 - RNA, 19 nt, Artificial Sequence
  Description of Artificial Sequence: Synthetic oligonucleotide
cgaggaccucauccucuga

SEQ ID NO: 1472381 - RNA, 19 nt, Artificial Sequence
  Description of Artificial Sequence: Synthetic oligonucleotide
gcacgucaauugggucauc

SEQ ID NO: 1472382 - RNA, 19 nt, Artificial Sequence
  Description of Artificial Sequence: Synthetic oligonucleotide
ccaguacacgcagccgccu

SEQ ID NO: 1472383 - RNA, 19 nt, Artificial Sequence
  Description of Artificial Sequence: Synthetic oligonucleotide
gcgcugggaguaguguuuu

SEQ ID NO: 1472384 - RNA, 19 nt, Artificial Sequence
  Description of Artificial Sequence: Synthetic oligonucleotide
guccucggagcgggccagu

SEQ ID NO: 1472385 - RNA, 19 nt, Artificial Sequence
  Description of Artificial Sequence: Synthetic oligonucleotide
cgggccaguacugccgugu

SEQ ID NO: 1472386 - RNA, 19 nt, Artificial Sequence
  Description of Artificial Sequence: Synthetic oligonucleotide
gcccagcgcugggaguagu

SEQ ID NO: 1472387 - RNA, 19 nt, Artificial Sequence
  Description of Artificial Sequence: Synthetic oligonucleotide
gcuacccguccaggagcuu

SEQ ID NO: 1472388 - RNA, 19 nt, Artificial Sequence
  Description of Artificial Sequence: Synthetic oligonucleotide
gcggucccaugaggccuuu

SEQ ID NO: 1472389 - RNA, 19 nt, Artificial Sequence
  Description of Artificial Sequence: Synthetic oligonucleotide
gauguuaugaauuuauuug

SEQ ID NO: 1472390 - RNA, 19 nt, Artificial Sequence
  Description of Artificial Sequence: Synthetic oligonucleotide
uauuaauauuguuacaagg

SEQ ID NO: 1472391 - RNA, 19 nt, Artificial Sequence
  Description of Artificial Sequence: Synthetic oligonucleotide
aaauuaacuaccacaaccc

SEQ ID NO: 1472392 - RNA, 19 nt, Artificial Sequence
  Description of Artificial Sequence: Synthetic oligonucleotide
uuaugaauuuauuugggcg

SEQ ID NO: 1472393 - RNA, 19 nt, Artificial Sequence
  Description of Artificial Sequence: Synthetic oligonucleotide
uaaauuguugagaacaaag

SEQ ID NO: 1472394 - RNA, 19 nt, Artificial Sequence
  Description of Artificial Sequence: Synthetic oligonucleotide
aguuagauaauucuucaac

SEQ ID NO: 1472395 - RNA, 19 nt, Artificial Sequence
  Description of Artificial Sequence: Synthetic oligonucleotide
ucuuaguuaguucagaccu

SEQ ID NO: 1472396 - RNA, 19 nt, Artificial Sequence
  Description of Artificial Sequence: Synthetic oligonucleotide
uacacauucaguaagucug

SEQ ID NO: 1472397 - RNA, 19 nt, Artificial Sequence
  Description of Artificial Sequence: Synthetic oligonucleotide
ugauaaauuaacuaccaca

SEQ ID NO: 1472398 - RNA, 19 nt, Artificial Sequence
  Description of Artificial Sequence: Synthetic oligonucleotide
auaauauuaggauuguuug

SEQ ID NO: 1472399 - RNA, 19 nt, Artificial Sequence
  Description of Artificial Sequence: Synthetic oligonucleotide
auguuaugaauuuauuugg

SEQ ID NO: 1472400 - RNA, 19 nt, Artificial Sequence
  Description of Artificial Sequence: Synthetic oligonucleotide
uuaauauuguuacaaggga

SEQ ID NO: 1472401 - RNA, 19 nt, Artificial Sequence
  Description of Artificial Sequence: Synthetic oligonucleotide
cucaugauaaauuaacuac

SEQ ID NO: 1472402 - RNA, 19 nt, Artificial Sequence
  Description of Artificial Sequence: Synthetic oligonucleotide
uuacuuaagauuuccaaca

SEQ ID NO: 1472403 - RNA, 19 nt, Artificial Sequence
  Description of Artificial Sequence: Synthetic oligonucleotide
uuaagaaucaaaacccuac

SEQ ID NO: 1472404 - RNA, 19 nt, Artificial Sequence
  Description of Artificial Sequence: Synthetic oligonucleotide
ucaacuguuugaaauaaug

SEQ ID NO: 1472405 - RNA, 19 nt, Artificial Sequence
  Description of Artificial Sequence: Synthetic oligonucleotide
aagauuuccaacaaggcug

SEQ ID NO: 1472406 - RNA, 19 nt, Artificial Sequence
  Description of Artificial Sequence: Synthetic oligonucleotide
aauauuaggauuguuugcu

SEQ ID NO: 1472407 - RNA, 19 nt, Artificial Sequence
  Description of Artificial Sequence: Synthetic oligonucleotide
aaaguuagauaauucuuca

SEQ ID NO: 1472408 - RNA, 19 nt, Artificial Sequence
  Description of Artificial Sequence: Synthetic oligonucleotide
ugaaauaaugcugucuagg

SEQ ID NO: 1472409 - RNA, 19 nt, Artificial Sequence
  Description of Artificial Sequence: Synthetic oligonucleotide
aacccuauggaaccaaguc

SEQ ID NO: 1472410 - RNA, 19 nt, Artificial Sequence
  Description of Artificial Sequence: Synthetic oligonucleotide
uuguuagucacacuacucc

SEQ ID NO: 1472411 - RNA, 19 nt, Artificial Sequence
  Description of Artificial Sequence: Synthetic oligonucleotide
ugagaaauuacaagccugc

SEQ ID NO: 1472412 - RNA, 19 nt, Artificial Sequence
  Description of Artificial Sequence: Synthetic oligonucleotide
accacaacccuauggaacc

SEQ ID NO: 1472413 - RNA, 19 nt, Artificial Sequence
  Description of Artificial Sequence: Synthetic oligonucleotide
uaugaauuuauuugggcgu

SEQ ID NO: 1472414 - RNA, 19 nt, Artificial Sequence
  Description of Artificial Sequence: Synthetic oligonucleotide
uuuauguucaaguauuaau

SEQ ID NO: 1472415 - RNA, 19 nt, Artificial Sequence
  Description of Artificial Sequence: Synthetic oligonucleotide
uaugcaagcagcuucacau

SEQ ID NO: 1472416 - RNA, 19 nt, Artificial Sequence
  Description of Artificial Sequence: Synthetic oligonucleotide
cuuacuuaagauuuccaac

SEQ ID NO: 1472417 - RNA, 19 nt, Artificial Sequence
  Description of Artificial Sequence: Synthetic oligonucleotide
acaacaagcgaggagaagg

SEQ ID NO: 1472418 - RNA, 19 nt, Artificial Sequence
  Description of Artificial Sequence: Synthetic oligonucleotide
auucucaugauaaauuaac

SEQ ID NO: 1472419 - RNA, 19 nt, Artificial Sequence
  Description of Artificial Sequence: Synthetic oligonucleotide
uuuccaacaaggcugggca

SEQ ID NO: 1472420 - RNA, 19 nt, Artificial Sequence
  Description of Artificial Sequence: Synthetic oligonucleotide
aagugaggguuguuguugc

SEQ ID NO: 1472421 - RNA, 19 nt, Artificial Sequence
  Description of Artificial Sequence: Synthetic oligonucleotide
uagauaauucuucaacugu

SEQ ID NO: 1472422 - RNA, 19 nt, Artificial Sequence
  Description of Artificial Sequence: Synthetic oligonucleotide
uaauauuguuacaagggaa

SEQ ID NO: 1472423 - RNA, 19 nt, Artificial Sequence
  Description of Artificial Sequence: Synthetic oligonucleotide
ugaauguauaauuaauuua

SEQ ID NO: 1472424 - RNA, 19 nt, Artificial Sequence
  Description of Artificial Sequence: Synthetic oligonucleotide
agucguuucuguuugcuuc

SEQ ID NO: 1472425 - RNA, 19 nt, Artificial Sequence
  Description of Artificial Sequence: Synthetic oligonucleotide
aguuaguucagaccuugac

SEQ ID NO: 1472426 - RNA, 19 nt, Artificial Sequence
  Description of Artificial Sequence: Synthetic oligonucleotide
uucguaagggucaaacuug

SEQ ID NO: 1472427 - RNA, 19 nt, Artificial Sequence
  Description of Artificial Sequence: Synthetic oligonucleotide
caacuguuugaaauaaugc

SEQ ID NO: 1472428 - RNA, 19 nt, Artificial Sequence
  Description of Artificial Sequence: Synthetic oligonucleotide
cauuaaauuguugagaaca

SEQ ID NO: 1472429 - RNA, 19 nt, Artificial Sequence
  Description of Artificial Sequence: Synthetic oligonucleotide
uaacuagugccacagugcc

SEQ ID NO: 1472430 - RNA, 19 nt, Artificial Sequence
  Description of Artificial Sequence: Synthetic oligonucleotide
auaaugaauguauaauuaa

SEQ ID NO: 1472431 - RNA, 19 nt, Artificial Sequence
  Description of Artificial Sequence: Synthetic oligonucleotide
acucuuaguuaguucagac

SEQ ID NO: 1472432 - RNA, 19 nt, Artificial Sequence
  Description of Artificial Sequence: Synthetic oligonucleotide
ucaagccagcuuaagaagc

SEQ ID NO: 1472433 - RNA, 19 nt, Artificial Sequence
  Description of Artificial Sequence: Synthetic oligonucleotide
aauuaacuaccacaacccu

SEQ ID NO: 1472434 - RNA, 19 nt, Artificial Sequence
  Description of Artificial Sequence: Synthetic oligonucleotide
aguagguggcgcuaaacuc

SEQ ID NO: 1472435 - RNA, 19 nt, Artificial Sequence
  Description of Artificial Sequence: Synthetic oligonucleotide
gaaauaaugcugucuagga

SEQ ID NO: 1472436 - RNA, 19 nt, Artificial Sequence
  Description of Artificial Sequence: Synthetic oligonucleotide
uaauuaauuuauguucaag

SEQ ID NO: 1472437 - RNA, 19 nt, Artificial Sequence
  Description of Artificial Sequence: Synthetic oligonucleotide
ugucaagccagcuuaagaa

SEQ ID NO: 1472438 - RNA, 19 nt, Artificial Sequence
  Description of Artificial Sequence: Synthetic oligonucleotide
aauauuguuacaagggaaa

SEQ ID NO: 1472439 - RNA, 19 nt, Artificial Sequence
  Description of Artificial Sequence: Synthetic oligonucleotide
acuaccacaacccuaugga

SEQ ID NO: 1472440 - RNA, 19 nt, Artificial Sequence
  Description of Artificial Sequence: Synthetic oligonucleotide
auuaggauuguuugcucuc

SEQ ID NO: 1472441 - RNA, 19 nt, Artificial Sequence
  Description of Artificial Sequence: Synthetic oligonucleotide
ugcacaacaagcgaggaga

SEQ ID NO: 1472442 - RNA, 19 nt, Artificial Sequence
  Description of Artificial Sequence: Synthetic oligonucleotide
ucucaugauaaauuaacua

SEQ ID NO: 1472443 - RNA, 19 nt, Artificial Sequence
  Description of Artificial Sequence: Synthetic oligonucleotide
aaguagguggcgcuaaacu

SEQ ID NO: 1472444 - RNA, 19 nt, Artificial Sequence
  Description of Artificial Sequence: Synthetic oligonucleotide
acuagugccacagugcccg

SEQ ID NO: 1472445 - RNA, 19 nt, Artificial Sequence
  Description of Artificial Sequence: Synthetic oligonucleotide
gaaggccugaacgacagcg

SEQ ID NO: 1472446 - RNA, 19 nt, Artificial Sequence
  Description of Artificial Sequence: Synthetic oligonucleotide
uucucaugauaaauuaacu

SEQ ID NO: 1472447 - RNA, 19 nt, Artificial Sequence
  Description of Artificial Sequence: Synthetic oligonucleotide
aacgacagcgccaacgccg

SEQ ID NO: 1472448 - RNA, 19 nt, Artificial Sequence
  Description of Artificial Sequence: Synthetic oligonucleotide
uucgauguuaugaauuuau

SEQ ID NO: 1472449 - RNA, 19 nt, Artificial Sequence
  Description of Artificial Sequence: Synthetic oligonucleotide
acauuaaauuguugagaac

SEQ ID NO: 1472450 - RNA, 19 nt, Artificial Sequence
  Description of Artificial Sequence: Synthetic oligonucleotide
ucguaagggucaaacuugg

SEQ ID NO: 1472451 - RNA, 19 nt, Artificial Sequence
  Description of Artificial Sequence: Synthetic oligonucleotide
ugagggugcgcccauguag

SEQ ID NO: 1472452 - RNA, 19 nt, Artificial Sequence
  Description of Artificial Sequence: Synthetic oligonucleotide
agucacacuacuccugagg

SEQ ID NO: 1472453 - RNA, 19 nt, Artificial Sequence
  Description of Artificial Sequence: Synthetic oligonucleotide
cuaaacucagugaccaggc

SEQ ID NO: 1472454 - RNA, 19 nt, Artificial Sequence
  Description of Artificial Sequence: Synthetic oligonucleotide
ugaacgacagcgccaacgc

SEQ ID NO: 1472455 - RNA, 19 nt, Artificial Sequence
  Description of Artificial Sequence: Synthetic oligonucleotide
uauuaggauuguuugcucu

SEQ ID NO: 1472456 - RNA, 19 nt, Artificial Sequence
  Description of Artificial Sequence: Synthetic oligonucleotide
aagaauguauuaagaauca

SEQ ID NO: 1472457 - RNA, 19 nt, Artificial Sequence
  Description of Artificial Sequence: Synthetic oligonucleotide
aauuacaagccugccuuuc

SEQ ID NO: 1472458 - RNA, 19 nt, Artificial Sequence
  Description of Artificial Sequence: Synthetic oligonucleotide
auuacaagccugccuuucg

SEQ ID NO: 1472459 - RNA, 19 nt, Artificial Sequence
  Description of Artificial Sequence: Synthetic oligonucleotide
uuagucacacuacuccuga

SEQ ID NO: 1472460 - RNA, 19 nt, Artificial Sequence
  Description of Artificial Sequence: Synthetic oligonucleotide
caguaucugccaaagcucg

SEQ ID NO: 1472461 - RNA, 19 nt, Artificial Sequence
  Description of Artificial Sequence: Synthetic oligonucleotide
augccauacaacuuggccu

SEQ ID NO: 1472462 - RNA, 19 nt, Artificial Sequence
  Description of Artificial Sequence: Synthetic oligonucleotide
acuuaagauuuccaacaag

SEQ ID NO: 1472463 - RNA, 19 nt, Artificial Sequence
  Description of Artificial Sequence: Synthetic oligonucleotide
ucuguuucguagcugugca

SEQ ID NO: 1472464 - RNA, 19 nt, Artificial Sequence
  Description of Artificial Sequence: Synthetic oligonucleotide
uucugcuuagcuuacuuaa

SEQ ID NO: 1472465 - RNA, 19 nt, Artificial Sequence
  Description of Artificial Sequence: Synthetic oligonucleotide
ucugcuuagcuuacuuaag

SEQ ID NO: 1472466 - RNA, 19 nt, Artificial Sequence
  Description of Artificial Sequence: Synthetic oligonucleotide
auauuaggauuguuugcuc

SEQ ID NO: 1472467 - RNA, 19 nt, Artificial Sequence
  Description of Artificial Sequence: Synthetic oligonucleotide
cauauaggcucuucaagug

SEQ ID NO: 1472468 - RNA, 19 nt, Artificial Sequence
  Description of Artificial Sequence: Synthetic oligonucleotide
uuacucuuaguuaguucag

SEQ ID NO: 1472469 - RNA, 19 nt, Artificial Sequence
  Description of Artificial Sequence: Synthetic oligonucleotide
agucugauccuuguuaguc

SEQ ID NO: 1472470 - RNA, 19 nt, Artificial Sequence
  Description of Artificial Sequence: Synthetic oligonucleotide
ugccuuucgaguucuaaca

SEQ ID NO: 1472471 - RNA, 19 nt, Artificial Sequence
  Description of Artificial Sequence: Synthetic oligonucleotide
guuaguucagaccuugaca

SEQ ID NO: 1472472 - RNA, 19 nt, Artificial Sequence
  Description of Artificial Sequence: Synthetic oligonucleotide
uguuagucacacuacuccu

SEQ ID NO: 1472473 - RNA, 19 nt, Artificial Sequence
  Description of Artificial Sequence: Synthetic oligonucleotide
augacccaaguccucuucc

SEQ ID NO: 1472474 - RNA, 19 nt, Artificial Sequence
  Description of Artificial Sequence: Synthetic oligonucleotide
uuaguuaguucagaccuug

SEQ ID NO: 1472475 - RNA, 19 nt, Artificial Sequence
  Description of Artificial Sequence: Synthetic oligonucleotide
uaccacaacccuauggaac

SEQ ID NO: 1472476 - RNA, 19 nt, Artificial Sequence
  Description of Artificial Sequence: Synthetic oligonucleotide
gaaauuacaagccugccuu

SEQ ID NO: 1472477 - RNA, 19 nt, Artificial Sequence
  Description of Artificial Sequence: Synthetic oligonucleotide
auguucguaagggucaaac

SEQ ID NO: 1472478 - RNA, 19 nt, Artificial Sequence
  Description of Artificial Sequence: Synthetic oligonucleotide
uuucgaguucuaacaagug

SEQ ID NO: 1472479 - RNA, 19 nt, Artificial Sequence
  Description of Artificial Sequence: Synthetic oligonucleotide
ugucaacaaaacagaaagu

SEQ ID NO: 1472480 - RNA, 19 nt, Artificial Sequence
  Description of Artificial Sequence: Synthetic oligonucleotide
ugucuuuggcucacaauga

SEQ ID NO: 1472481 - RNA, 19 nt, Artificial Sequence
  Description of Artificial Sequence: Synthetic oligonucleotide
caguuacacauucaguaag

SEQ ID NO: 1472482 - RNA, 19 nt, Artificial Sequence
  Description of Artificial Sequence: Synthetic oligonucleotide
gucacacuacuccugaggc

SEQ ID NO: 1472483 - RNA, 19 nt, Artificial Sequence
  Description of Artificial Sequence: Synthetic oligonucleotide
aaguuagauaauucuucaa

SEQ ID NO: 1472484 - RNA, 19 nt, Artificial Sequence
  Description of Artificial Sequence: Synthetic oligonucleotide
uguuucguagcugugcaca

SEQ ID NO: 1472485 - RNA, 19 nt, Artificial Sequence
  Description of Artificial Sequence: Synthetic oligonucleotide
uggcgcuaaacucagugac

SEQ ID NO: 1472486 - RNA, 19 nt, Artificial Sequence
  Description of Artificial Sequence: Synthetic oligonucleotide
cacuuugcugucaagccag

SEQ ID NO: 1472487 - RNA, 19 nt, Artificial Sequence
  Description of Artificial Sequence: Synthetic oligonucleotide
ugggcaaagaucagaugug

SEQ ID NO: 1472488 - RNA, 19 nt, Artificial Sequence
  Description of Artificial Sequence: Synthetic oligonucleotide
ucuuuugaaguagguggcg

SEQ ID NO: 1472489 - RNA, 19 nt, Artificial Sequence
  Description of Artificial Sequence: Synthetic oligonucleotide
uacuuaagauuuccaacaa

SEQ ID NO: 1472490 - RNA, 19 nt, Artificial Sequence
  Description of Artificial Sequence: Synthetic oligonucleotide
auccuuguuagucacacua

SEQ ID NO: 1472491 - RNA, 19 nt, Artificial Sequence
  Description of Artificial Sequence: Synthetic oligonucleotide
ugaggguuguuguugcuga

SEQ ID NO: 1472492 - RNA, 19 nt, Artificial Sequence
  Description of Artificial Sequence: Synthetic oligonucleotide
cacacuacuccugaggccc

SEQ ID NO: 1472493 - RNA, 19 nt, Artificial Sequence
  Description of Artificial Sequence: Synthetic oligonucleotide
aguucagaccuugacaugu

SEQ ID NO: 1472494 - RNA, 19 nt, Artificial Sequence
  Description of Artificial Sequence: Synthetic oligonucleotide
cuuguuagucacacuacuc

SEQ ID NO: 1472495 - RNA, 19 nt, Artificial Sequence
  Description of Artificial Sequence: Synthetic oligonucleotide
uuugcuaacuagugccaca

SEQ ID NO: 1472496 - RNA, 19 nt, Artificial Sequence
  Description of Artificial Sequence: Synthetic oligonucleotide
uguucguaagggucaaacu

SEQ ID NO: 1472497 - RNA, 19 nt, Artificial Sequence
  Description of Artificial Sequence: Synthetic oligonucleotide
uuagcuuacuuaagauuuc

SEQ ID NO: 1472498 - RNA, 19 nt, Artificial Sequence
  Description of Artificial Sequence: Synthetic oligonucleotide
uuucccuuccacaggggug

SEQ ID NO: 1472499 - RNA, 19 nt, Artificial Sequence
  Description of Artificial Sequence: Synthetic oligonucleotide
uucucaguaucugccaaag

SEQ ID NO: 1472500 - RNA, 19 nt, Artificial Sequence
  Description of Artificial Sequence: Synthetic oligonucleotide
acccuauggaaccaagucu

SEQ ID NO: 1472501 - RNA, 19 nt, Artificial Sequence
  Description of Artificial Sequence: Synthetic oligonucleotide
cugugcacaacaagcgagg

SEQ ID NO: 1472502 - RNA, 19 nt, Artificial Sequence
  Description of Artificial Sequence: Synthetic oligonucleotide
ugccauacaacuuggccuc

SEQ ID NO: 1472503 - RNA, 19 nt, Artificial Sequence
  Description of Artificial Sequence: Synthetic oligonucleotide
guauuuaauucucaugaua

SEQ ID NO: 1472504 - RNA, 19 nt, Artificial Sequence
  Description of Artificial Sequence: Synthetic oligonucleotide
ugagaacaaagucguuucu

SEQ ID NO: 1472505 - RNA, 19 nt, Artificial Sequence
  Description of Artificial Sequence: Synthetic oligonucleotide
caccgagccgccaugauug

SEQ ID NO: 1472506 - RNA, 19 nt, Artificial Sequence
  Description of Artificial Sequence: Synthetic oligonucleotide
uuugcugucaagccagcuu

SEQ ID NO: 1472507 - RNA, 19 nt, Artificial Sequence
  Description of Artificial Sequence: Synthetic oligonucleotide
aacccuggaugccauacaa

SEQ ID NO: 1472508 - RNA, 19 nt, Artificial Sequence
  Description of Artificial Sequence: Synthetic oligonucleotide
caacaagcgaggagaaggc

SEQ ID NO: 1472509 - RNA, 19 nt, Artificial Sequence
  Description of Artificial Sequence: Synthetic oligonucleotide
aaggccugaacgacagcgc

SEQ ID NO: 1472510 - RNA, 19 nt, Artificial Sequence
  Description of Artificial Sequence: Synthetic oligonucleotide
uuacaagccugccuuucga

SEQ ID NO: 1472511 - RNA, 19 nt, Artificial Sequence
  Description of Artificial Sequence: Synthetic oligonucleotide
aagccugccuuucgaguuc

SEQ ID NO: 1472512 - RNA, 19 nt, Artificial Sequence
  Description of Artificial Sequence: Synthetic oligonucleotide
uuaaauuguugagaacaaa

SEQ ID NO: 1472513 - RNA, 19 nt, Artificial Sequence
  Description of Artificial Sequence: Synthetic oligonucleotide
gcuaacuagugccacagug

SEQ ID NO: 1472514 - RNA, 19 nt, Artificial Sequence
  Description of Artificial Sequence: Synthetic oligonucleotide
uucaaguauuaauauuguu

SEQ ID NO: 1472515 - RNA, 19 nt, Artificial Sequence
  Description of Artificial Sequence: Synthetic oligonucleotide
cuuuugaaguagguggcgc

SEQ ID NO: 1472516 - RNA, 19 nt, Artificial Sequence
  Description of Artificial Sequence: Synthetic oligonucleotide
uucuguuucguagcugugc

SEQ ID NO: 1472517 - RNA, 19 nt, Artificial Sequence
  Description of Artificial Sequence: Synthetic oligonucleotide
cugaacgacagcgccaacg

SEQ ID NO: 1472518 - RNA, 19 nt, Artificial Sequence
  Description of Artificial Sequence: Synthetic oligonucleotide
auggaaccaagucuuuuca

SEQ ID NO: 1472519 - RNA, 19 nt, Artificial Sequence
  Description of Artificial Sequence: Synthetic oligonucleotide
aacaagugaccuacaaagu

SEQ ID NO: 1472520 - RNA, 19 nt, Artificial Sequence
  Description of Artificial Sequence: Synthetic oligonucleotide
ugcuuagcuuacuuaagau

SEQ ID NO: 1472521 - RNA, 19 nt, Artificial Sequence
  Description of Artificial Sequence: Synthetic oligonucleotide
uccuuguuagucacacuac

SEQ ID NO: 1472522 - RNA, 19 nt, Artificial Sequence
  Description of Artificial Sequence: Synthetic oligonucleotide
uguacaucuuucgauguua

SEQ ID NO: 1472523 - RNA, 19 nt, Artificial Sequence
  Description of Artificial Sequence: Synthetic oligonucleotide
uagguggcgcuaaacucag

SEQ ID NO: 1472524 - RNA, 19 nt, Artificial Sequence
  Description of Artificial Sequence: Synthetic oligonucleotide
cauuacucuuaguuaguuc

SEQ ID NO: 1472525 - RNA, 19 nt, Artificial Sequence
  Description of Artificial Sequence: Synthetic oligonucleotide
gcuaaacucagugaccagg

SEQ ID NO: 1472526 - RNA, 19 nt, Artificial Sequence
  Description of Artificial Sequence: Synthetic oligonucleotide
gagaaggccugaacgacag

SEQ ID NO: 1472527 - RNA, 19 nt, Artificial Sequence
  Description of Artificial Sequence: Synthetic oligonucleotide
ugagcaagccauguuuugu

SEQ ID NO: 1472528 - RNA, 19 nt, Artificial Sequence
  Description of Artificial Sequence: Synthetic oligonucleotide
agcgccaacgccgggagac

SEQ ID NO: 1472529 - RNA, 19 nt, Artificial Sequence
  Description of Artificial Sequence: Synthetic oligonucleotide
ucacacuacuccugaggcc

SEQ ID NO: 1472530 - RNA, 19 nt, Artificial Sequence
  Description of Artificial Sequence: Synthetic oligonucleotide
aaacccuggaugccauaca

SEQ ID NO: 1472531 - RNA, 19 nt, Artificial Sequence
  Description of Artificial Sequence: Synthetic oligonucleotide
ugggccauacaguuacaca

SEQ ID NO: 1472532 - RNA, 19 nt, Artificial Sequence
  Description of Artificial Sequence: Synthetic oligonucleotide
acaaacugucuuugaguca

SEQ ID NO: 1472533 - RNA, 19 nt, Artificial Sequence
  Description of Artificial Sequence: Synthetic oligonucleotide
auucaguaagucugauccu

SEQ ID NO: 1472534 - RNA, 19 nt, Artificial Sequence
  Description of Artificial Sequence: Synthetic oligonucleotide
uucaguaagucugauccuu

SEQ ID NO: 1472535 - RNA, 19 nt, Artificial Sequence
  Description of Artificial Sequence: Synthetic oligonucleotide
ggcgugacuguuuuaaaac

SEQ ID NO: 1472536 - RNA, 19 nt, Artificial Sequence
  Description of Artificial Sequence: Synthetic oligonucleotide
uucaacuguuugaaauaau

SEQ ID NO: 1472537 - RNA, 19 nt, Artificial Sequence
  Description of Artificial Sequence: Synthetic oligonucleotide
cugccuuucgaguucuaac

SEQ ID NO: 1472538 - RNA, 19 nt, Artificial Sequence
  Description of Artificial Sequence: Synthetic oligonucleotide
ucgauguuaugaauuuauu

SEQ ID NO: 1472539 - RNA, 19 nt, Artificial Sequence
  Description of Artificial Sequence: Synthetic oligonucleotide
caagcgaggagaaggccug

SEQ ID NO: 1472540 - RNA, 19 nt, Artificial Sequence
  Description of Artificial Sequence: Synthetic oligonucleotide
uggcucacaaugacccaag

SEQ ID NO: 1472541 - RNA, 19 nt, Artificial Sequence
  Description of Artificial Sequence: Synthetic oligonucleotide
gguggcgcuaaacucagug

SEQ ID NO: 1472542 - RNA, 19 nt, Artificial Sequence
  Description of Artificial Sequence: Synthetic oligonucleotide
uugugaacaccuucugaau

SEQ ID NO: 1472543 - RNA, 19 nt, Artificial Sequence
  Description of Artificial Sequence: Synthetic oligonucleotide
uguagcuuguagcccacuu

SEQ ID NO: 1472544 - RNA, 19 nt, Artificial Sequence
  Description of Artificial Sequence: Synthetic oligonucleotide
guuagucacacuacuccug

SEQ ID NO: 1472545 - RNA, 19 nt, Artificial Sequence
  Description of Artificial Sequence: Synthetic oligonucleotide
agcuaagcuuccuucacua

SEQ ID NO: 1472546 - RNA, 19 nt, Artificial Sequence
  Description of Artificial Sequence: Synthetic oligonucleotide
auuaagaaucaaaacccua

SEQ ID NO: 1472547 - RNA, 19 nt, Artificial Sequence
  Description of Artificial Sequence: Synthetic oligonucleotide
caucuuucgauguuaugaa

SEQ ID NO: 1472548 - RNA, 19 nt, Artificial Sequence
  Description of Artificial Sequence: Synthetic oligonucleotide
uugggcgugacuguuuuaa

SEQ ID NO: 1472549 - RNA, 19 nt, Artificial Sequence
  Description of Artificial Sequence: Synthetic oligonucleotide
guagguggcgcuaaacuca

SEQ ID NO: 1472550 - RNA, 19 nt, Artificial Sequence
  Description of Artificial Sequence: Synthetic oligonucleotide
agcugugcacaacaagcga

SEQ ID NO: 1472551 - RNA, 19 nt, Artificial Sequence
  Description of Artificial Sequence: Synthetic oligonucleotide
uaggauuguuugcucuccu

SEQ ID NO: 1472552 - RNA, 19 nt, Artificial Sequence
  Description of Artificial Sequence: Synthetic oligonucleotide
ugccaaagcucguuuguau

SEQ ID NO: 1472553 - RNA, 19 nt, Artificial Sequence
  Description of Artificial Sequence: Synthetic oligonucleotide
uaguuaguucagaccuuga

SEQ ID NO: 1472554 - RNA, 19 nt, Artificial Sequence
  Description of Artificial Sequence: Synthetic oligonucleotide
ucaagugaggguuguuguu

SEQ ID NO: 1472555 - RNA, 19 nt, Artificial Sequence
  Description of Artificial Sequence: Synthetic oligonucleotide
uggaaccaagucuuuucaa

SEQ ID NO: 1472556 - RNA, 19 nt, Artificial Sequence
  Description of Artificial Sequence: Synthetic oligonucleotide
aguaagucugauccuuguu

SEQ ID NO: 1472557 - RNA, 19 nt, Artificial Sequence
  Description of Artificial Sequence: Synthetic oligonucleotide
guucguaagggucaaacuu

SEQ ID NO: 1472558 - RNA, 19 nt, Artificial Sequence
  Description of Artificial Sequence: Synthetic oligonucleotide
auucugcuuagcuuacuua

SEQ ID NO: 1472559 - RNA, 19 nt, Artificial Sequence
  Description of Artificial Sequence: Synthetic oligonucleotide
gagggugcgcccauguagc

SEQ ID NO: 1472560 - RNA, 19 nt, Artificial Sequence
  Description of Artificial Sequence: Synthetic oligonucleotide
ugcuggcccucuuuugaag

SEQ ID NO: 1472561 - RNA, 19 nt, Artificial Sequence
  Description of Artificial Sequence: Synthetic oligonucleotide
ccuacaaaguccagagccc

SEQ ID NO: 1472562 - RNA, 19 nt, Artificial Sequence
  Description of Artificial Sequence: Synthetic oligonucleotide
auuugggcgugacuguuuu

SEQ ID NO: 1472563 - RNA, 19 nt, Artificial Sequence
  Description of Artificial Sequence: Synthetic oligonucleotide
ggugcgcccauguagcuug

SEQ ID NO: 1472564 - RNA, 19 nt, Artificial Sequence
  Description of Artificial Sequence: Synthetic oligonucleotide
aggccucauguucguaagg

SEQ ID NO: 1472565 - RNA, 19 nt, Artificial Sequence
  Description of Artificial Sequence: Synthetic oligonucleotide
gaaguagguggcgcuaaac

SEQ ID NO: 1472566 - RNA, 19 nt, Artificial Sequence
  Description of Artificial Sequence: Synthetic oligonucleotide
gaacgacagcgccaacgcc

SEQ ID NO: 1472567 - RNA, 19 nt, Artificial Sequence
  Description of Artificial Sequence: Synthetic oligonucleotide
uccaacaaggcugggcaaa

SEQ ID NO: 1472568 - RNA, 19 nt, Artificial Sequence
  Description of Artificial Sequence: Synthetic oligonucleotide
agaauguauuaagaaucaa

SEQ ID NO: 1472569 - RNA, 19 nt, Artificial Sequence
  Description of Artificial Sequence: Synthetic oligonucleotide
uucagaccuugacauguuu

SEQ ID NO: 1472570 - RNA, 19 nt, Artificial Sequence
  Description of Artificial Sequence: Synthetic oligonucleotide
acauuccaagaauguauua

SEQ ID NO: 1472571 - RNA, 19 nt, Artificial Sequence
  Description of Artificial Sequence: Synthetic oligonucleotide
ucccugacacaguaugcaa

SEQ ID NO: 1472572 - RNA, 19 nt, Artificial Sequence
  Description of Artificial Sequence: Synthetic oligonucleotide
uauuugggcgugacuguuu

SEQ ID NO: 1472573 - RNA, 19 nt, Artificial Sequence
  Description of Artificial Sequence: Synthetic oligonucleotide
uuucgauguuaugaauuua

SEQ ID NO: 1472574 - RNA, 19 nt, Artificial Sequence
  Description of Artificial Sequence: Synthetic oligonucleotide
cugucaagccagcuuaaga

SEQ ID NO: 1472575 - RNA, 19 nt, Artificial Sequence
  Description of Artificial Sequence: Synthetic oligonucleotide
uuauuugggcgugacuguu

SEQ ID NO: 1472576 - RNA, 19 nt, Artificial Sequence
  Description of Artificial Sequence: Synthetic oligonucleotide
ccuuucgaguucuaacaag

SEQ ID NO: 1472577 - RNA, 19 nt, Artificial Sequence
  Description of Artificial Sequence: Synthetic oligonucleotide
uaacuaccacaacccuaug

SEQ ID NO: 1472578 - RNA, 19 nt, Artificial Sequence
  Description of Artificial Sequence: Synthetic oligonucleotide
ugccguagauucucaguau

SEQ ID NO: 1472579 - RNA, 19 nt, Artificial Sequence
  Description of Artificial Sequence: Synthetic oligonucleotide
accgagccgccaugauugc

SEQ ID NO: 1472580 - RNA, 19 nt, Artificial Sequence
  Description of Artificial Sequence: Synthetic oligonucleotide
acauuacucuuaguuaguu

SEQ ID NO: 1472581 - RNA, 19 nt, Artificial Sequence
  Description of Artificial Sequence: Synthetic oligonucleotide
guugagaacaaagucguuu

SEQ ID NO: 1472582 - RNA, 19 nt, Artificial Sequence
  Description of Artificial Sequence: Synthetic oligonucleotide
acuuugcugucaagccagc

SEQ ID NO: 1472583 - RNA, 19 nt, Artificial Sequence
  Description of Artificial Sequence: Synthetic oligonucleotide
agccucacgcaccgagccg

SEQ ID NO: 1472584 - RNA, 19 nt, Artificial Sequence
  Description of Artificial Sequence: Synthetic oligonucleotide
ugcuaacuagugccacagu

SEQ ID NO: 1472585 - RNA, 19 nt, Artificial Sequence
  Description of Artificial Sequence: Synthetic oligonucleotide
acaacccuauggaaccaag

SEQ ID NO: 1472586 - RNA, 19 nt, Artificial Sequence
  Description of Artificial Sequence: Synthetic oligonucleotide
guggcgcuaaacucaguga

SEQ ID NO: 1472587 - RNA, 19 nt, Artificial Sequence
  Description of Artificial Sequence: Synthetic oligonucleotide
uguagcccacuuugcuaac

SEQ ID NO: 1472588 - RNA, 19 nt, Artificial Sequence
  Description of Artificial Sequence: Synthetic oligonucleotide
ugcugucaagccagcuuaa

SEQ ID NO: 1472589 - RNA, 19 nt, Artificial Sequence
  Description of Artificial Sequence: Synthetic oligonucleotide
cuguuucguagcugugcac

SEQ ID NO: 1472590 - RNA, 19 nt, Artificial Sequence
  Description of Artificial Sequence: Synthetic oligonucleotide
acccuggaugccauacaac

SEQ ID NO: 1472591 - RNA, 19 nt, Artificial Sequence
  Description of Artificial Sequence: Synthetic oligonucleotide
gcgugacuguuuuaaaaca

SEQ ID NO: 1472592 - RNA, 19 nt, Artificial Sequence
  Description of Artificial Sequence: Synthetic oligonucleotide
cgaguucuaacaagugacc

SEQ ID NO: 1472593 - RNA, 19 nt, Artificial Sequence
  Description of Artificial Sequence: Synthetic oligonucleotide
guuucguagcugugcacaa

SEQ ID NO: 1472594 - RNA, 19 nt, Artificial Sequence
  Description of Artificial Sequence: Synthetic oligonucleotide
cuaccacaacccuauggaa

SEQ ID NO: 1472595 - RNA, 19 nt, Artificial Sequence
  Description of Artificial Sequence: Synthetic oligonucleotide
cccugacacaguaugcaag

SEQ ID NO: 1472596 - RNA, 19 nt, Artificial Sequence
  Description of Artificial Sequence: Synthetic oligonucleotide
ucacgcaccgagccgccau

SEQ ID NO: 1472597 - RNA, 19 nt, Artificial Sequence
  Description of Artificial Sequence: Synthetic oligonucleotide
gagacugcgccgcgccagc

SEQ ID NO: 1472598 - RNA, 19 nt, Artificial Sequence
  Description of Artificial Sequence: Synthetic oligonucleotide
ggccaacauuccaagaaug

SEQ ID NO: 1472599 - RNA, 19 nt, Artificial Sequence
  Description of Artificial Sequence: Synthetic oligonucleotide
gggccauacaguuacacau

SEQ ID NO: 1472600 - RNA, 19 nt, Artificial Sequence
  Description of Artificial Sequence: Synthetic oligonucleotide
cccugggccauacaguuac

SEQ ID NO: 1472601 - RNA, 19 nt, Artificial Sequence
  Description of Artificial Sequence: Synthetic oligonucleotide
ugggcgugacuguuuuaaa

SEQ ID NO: 1472602 - RNA, 19 nt, Artificial Sequence
  Description of Artificial Sequence: Synthetic oligonucleotide
gccguagauucucaguauc

SEQ ID NO: 1472603 - RNA, 19 nt, Artificial Sequence
  Description of Artificial Sequence: Synthetic oligonucleotide
acgccgggagacugcgccg

SEQ ID NO: 1472604 - RNA, 19 nt, Artificial Sequence
  Description of Artificial Sequence: Synthetic oligonucleotide
ggcgcuaaacucagugacc

SEQ ID NO: 1472605 - RNA, 19 nt, Artificial Sequence
  Description of Artificial Sequence: Synthetic oligonucleotide
gcgcccauguagcuuguag

SEQ ID NO: 1472606 - RNA, 19 nt, Artificial Sequence
  Description of Artificial Sequence: Synthetic oligonucleotide
gcgcuaaacucagugacca

SEQ ID NO: 1472607 - RNA, 19 nt, Artificial Sequence
  Description of Artificial Sequence: Synthetic oligonucleotide
agacugcgccgcgccagcc

SEQ ID NO: 1472608 - RNA, 19 nt, Artificial Sequence
  Description of Artificial Sequence: Synthetic oligonucleotide
cguagcugugcacaacaag

SEQ ID NO: 1472609 - RNA, 19 nt, Artificial Sequence
  Description of Artificial Sequence: Synthetic oligonucleotide
cuuucccuuccacaggggu

SEQ ID NO: 1472610 - RNA, 19 nt, Artificial Sequence
  Description of Artificial Sequence: Synthetic oligonucleotide
uuugggcgugacuguuuua

SEQ ID NO: 1472611 - RNA, 19 nt, Artificial Sequence
  Description of Artificial Sequence: Synthetic oligonucleotide
gggcgugacuguuuuaaaa

SEQ ID NO: 1472612 - RNA, 19 nt, Artificial Sequence
  Description of Artificial Sequence: Synthetic oligonucleotide
ggcccucuuuugaaguagg

SEQ ID NO: 1472613 - RNA, 19 nt, Artificial Sequence
  Description of Artificial Sequence: Synthetic oligonucleotide
cgcccauguagcuuguagc

SEQ ID NO: 1472614 - RNA, 19 nt, Artificial Sequence
  Description of Artificial Sequence: Synthetic oligonucleotide
gauccuuguuagucacacu

SEQ ID NO: 1472615 - RNA, 19 nt, Artificial Sequence
  Description of Artificial Sequence: Synthetic oligonucleotide
gcuuagcuuacuuaagauu

SEQ ID NO: 1472616 - RNA, 19 nt, Artificial Sequence
  Description of Artificial Sequence: Synthetic oligonucleotide
guagcuuguagcccacuuu

SEQ ID NO: 1472617 - RNA, 19 nt, Artificial Sequence
  Description of Artificial Sequence: Synthetic oligonucleotide
cccaauggggucgagccug

SEQ ID NO: 1472618 - RNA, 19 nt, Artificial Sequence
  Description of Artificial Sequence: Synthetic oligonucleotide
caacccuauggaaccaagu

SEQ ID NO: 1472619 - RNA, 19 nt, Artificial Sequence
  Description of Artificial Sequence: Synthetic oligonucleotide
cuuaguuaguucagaccuu

SEQ ID NO: 1472620 - RNA, 19 nt, Artificial Sequence
  Description of Artificial Sequence: Synthetic oligonucleotide
cauguuuugugaacaccuu

SEQ ID NO: 1472621 - RNA, 19 nt, Artificial Sequence
  Description of Artificial Sequence: Synthetic oligonucleotide
gccuuucgaguucuaacaa

SEQ ID NO: 1472622 - RNA, 19 nt, Artificial Sequence
  Description of Artificial Sequence: Synthetic oligonucleotide
ggucgagccugagcaagcc

SEQ ID NO: 1472623 - RNA, 19 nt, Artificial Sequence
  Description of Artificial Sequence: Synthetic oligonucleotide
ugcugucuaggaggccaac

SEQ ID NO: 1472624 - RNA, 19 nt, Artificial Sequence
  Description of Artificial Sequence: Synthetic oligonucleotide
gcgaggagaaggccugaac

SEQ ID NO: 1472625 - RNA, 19 nt, Artificial Sequence
  Description of Artificial Sequence: Synthetic oligonucleotide
gccucacgcaccgagccgc

SEQ ID NO: 1472626 - RNA, 19 nt, Artificial Sequence
  Description of Artificial Sequence: Synthetic oligonucleotide
agccugccuuucgaguucu

SEQ ID NO: 1472627 - RNA, 19 nt, Artificial Sequence
  Description of Artificial Sequence: Synthetic oligonucleotide
guacaucuuucgauguuau

SEQ ID NO: 1472628 - RNA, 19 nt, Artificial Sequence
  Description of Artificial Sequence: Synthetic oligonucleotide
auguagcuuguagcccacu

SEQ ID NO: 1472629 - RNA, 19 nt, Artificial Sequence
  Description of Artificial Sequence: Synthetic oligonucleotide
ccaacgccgggagacugcg

SEQ ID NO: 1472630 - RNA, 19 nt, Artificial Sequence
  Description of Artificial Sequence: Synthetic oligonucleotide
cagcuaagcuuccuucacu

SEQ ID NO: 1472631 - RNA, 19 nt, Artificial Sequence
  Description of Artificial Sequence: Synthetic oligonucleotide
cuguuugcuucuugauccu

SEQ ID NO: 1472632 - RNA, 19 nt, Artificial Sequence
  Description of Artificial Sequence: Synthetic oligonucleotide
cguaagggucaaacuuggc

SEQ ID NO: 1472633 - RNA, 19 nt, Artificial Sequence
  Description of Artificial Sequence: Synthetic oligonucleotide
gcucuucaagugaggguug

SEQ ID NO: 1472634 - RNA, 19 nt, Artificial Sequence
  Description of Artificial Sequence: Synthetic oligonucleotide
gcugucuaggaggccaaca

SEQ ID NO: 1472635 - RNA, 19 nt, Artificial Sequence
  Description of Artificial Sequence: Synthetic oligonucleotide
cccuauggaaccaagucuu

SEQ ID NO: 1472636 - RNA, 19 nt, Artificial Sequence
  Description of Artificial Sequence: Synthetic oligonucleotide
cuucucugccguagauucu

SEQ ID NO: 1472637 - RNA, 19 nt, Artificial Sequence
  Description of Artificial Sequence: Synthetic oligonucleotide
gcuggcccucuuuugaagu

SEQ ID NO: 1472638 - RNA, 19 nt, Artificial Sequence
  Description of Artificial Sequence: Synthetic oligonucleotide
cacaacccuauggaaccaa

SEQ ID NO: 1472639 - RNA, 19 nt, Artificial Sequence
  Description of Artificial Sequence: Synthetic oligonucleotide
cuauggaaccaagucuuuu

SEQ ID NO: 1472640 - RNA, 19 nt, Artificial Sequence
  Description of Artificial Sequence: Synthetic oligonucleotide
gggucgagccugagcaagc

SEQ ID NO: 1472641 - RNA, 19 nt, Artificial Sequence
  Description of Artificial Sequence: Synthetic oligonucleotide
gaggguuguuguugcugau

SEQ ID NO: 1472642 - RNA, 19 nt, Artificial Sequence
  Description of Artificial Sequence: Synthetic oligonucleotide
caauggggucgagccugag

SEQ ID NO: 1472643 - RNA, 19 nt, Artificial Sequence
  Description of Artificial Sequence: Synthetic oligonucleotide
acacuacuccugaggcccu

SEQ ID NO: 1472644 - RNA, 19 nt, Artificial Sequence
  Description of Artificial Sequence: Synthetic oligonucleotide
gggcaaagaucagaugugu

SEQ ID NO: 1472645 - RNA, 19 nt, Artificial Sequence
  Description of Artificial Sequence: Synthetic oligonucleotide
cugccaaagcucguuugua

SEQ ID NO: 1472646 - RNA, 19 nt, Artificial Sequence
  Description of Artificial Sequence: Synthetic oligonucleotide
cuuccacagggguguggaa

SEQ ID NO: 1472647 - RNA, 19 nt, Artificial Sequence
  Description of Artificial Sequence: Synthetic oligonucleotide
guagcccacuuugcuaacu

SEQ ID NO: 1472648 - RNA, 19 nt, Artificial Sequence
  Description of Artificial Sequence: Synthetic oligonucleotide
augcugucuaggaggccaa

SEQ ID NO: 1472649 - RNA, 19 nt, Artificial Sequence
  Description of Artificial Sequence: Synthetic oligonucleotide
gccugaacgacagcgccaa

SEQ ID NO: 1472650 - RNA, 19 nt, Artificial Sequence
  Description of Artificial Sequence: Synthetic oligonucleotide
cagaaacccuggaugccau

SEQ ID NO: 1472651 - RNA, 19 nt, Artificial Sequence
  Description of Artificial Sequence: Synthetic oligonucleotide
acgcaccgagccgccauga

SEQ ID NO: 1472652 - RNA, 19 nt, Artificial Sequence
  Description of Artificial Sequence: Synthetic oligonucleotide
gccaaagcucguuuguauu

SEQ ID NO: 1472653 - RNA, 19 nt, Artificial Sequence
  Description of Artificial Sequence: Synthetic oligonucleotide
ggccccaauggggucgagc

SEQ ID NO: 1472654 - RNA, 19 nt, Artificial Sequence
  Description of Artificial Sequence: Synthetic oligonucleotide
cgcuaaacucagugaccag

SEQ ID NO: 1472655 - RNA, 19 nt, Artificial Sequence
  Description of Artificial Sequence: Synthetic oligonucleotide
cgcgccagccucacgcacc

SEQ ID NO: 1472656 - RNA, 19 nt, Artificial Sequence
  Description of Artificial Sequence: Synthetic oligonucleotide
ggccugaacgacagcgcca

SEQ ID NO: 1472657 - RNA, 19 nt, Artificial Sequence
  Description of Artificial Sequence: Synthetic oligonucleotide
gcccacuuugcuaacuagu

SEQ ID NO: 1472658 - RNA, 19 nt, Artificial Sequence
  Description of Artificial Sequence: Synthetic oligonucleotide
ccucacgcaccgagccgcc

SEQ ID NO: 1472659 - RNA, 19 nt, Artificial Sequence
  Description of Artificial Sequence: Synthetic oligonucleotide
cuacuccugaggcccugcu

SEQ ID NO: 1472660 - RNA, 19 nt, Artificial Sequence
  Description of Artificial Sequence: Synthetic oligonucleotide
cacauucaguaagucugau

SEQ ID NO: 1472661 - RNA, 19 nt, Artificial Sequence
  Description of Artificial Sequence: Synthetic oligonucleotide
ggcucacaaugacccaagu

SEQ ID NO: 1472662 - RNA, 19 nt, Artificial Sequence
  Description of Artificial Sequence: Synthetic oligonucleotide
gggagacugcgccgcgcca

SEQ ID NO: 1472663 - RNA, 19 nt, Artificial Sequence
  Description of Artificial Sequence: Synthetic oligonucleotide
ccgagccgccaugauugcc

SEQ ID NO: 1472664 - RNA, 19 nt, Artificial Sequence
  Description of Artificial Sequence: Synthetic oligonucleotide
agguggcgcuaaacucagu

SEQ ID NO: 1472665 - RNA, 19 nt, Artificial Sequence
  Description of Artificial Sequence: Synthetic oligonucleotide
gugcccggcucuuucccuu

SEQ ID NO: 1472666 - RNA, 19 nt, Artificial Sequence
  Description of Artificial Sequence: Synthetic oligonucleotide
cucacgcaccgagccgcca

SEQ ID NO: 1472667 - RNA, 19 nt, Artificial Sequence
  Description of Artificial Sequence: Synthetic oligonucleotide
gcaccgagccgccaugauu

SEQ ID NO: 1472668 - RNA, 19 nt, Artificial Sequence
  Description of Artificial Sequence: Synthetic oligonucleotide
ccugaacgacagcgccaac

SEQ ID NO: 1472669 - RNA, 19 nt, Artificial Sequence
  Description of Artificial Sequence: Synthetic oligonucleotide
ccacaacccuauggaacca

SEQ ID NO: 1472670 - RNA, 19 nt, Artificial Sequence
  Description of Artificial Sequence: Synthetic oligonucleotide
ccugagggugcgcccaugu

SEQ ID NO: 1472671 - RNA, 19 nt, Artificial Sequence
  Description of Artificial Sequence: Synthetic oligonucleotide
cagcgccaacgccgggaga

SEQ ID NO: 1472672 - RNA, 19 nt, Artificial Sequence
  Description of Artificial Sequence: Synthetic oligonucleotide
ccuauggaaccaagucuuu

SEQ ID NO: 1472673 - RNA, 19 nt, Artificial Sequence
  Description of Artificial Sequence: Synthetic oligonucleotide
gccugagggugcgcccaug

SEQ ID NO: 1472674 - RNA, 19 nt, Artificial Sequence
  Description of Artificial Sequence: Synthetic oligonucleotide
cgccaacgccgggagacug

SEQ ID NO: 1472675 - RNA, 19 nt, Artificial Sequence
  Description of Artificial Sequence: Synthetic oligonucleotide
ccuaucugccccagcuguu

SEQ ID NO: 1472676 - RNA, 19 nt, Artificial Sequence
  Description of Artificial Sequence: Synthetic oligonucleotide
ccccugggccauacaguua

SEQ ID NO: 1472677 - RNA, 19 nt, Artificial Sequence
  Description of Artificial Sequence: Synthetic oligonucleotide
ccccaauggggucgagccu

SEQ ID NO: 1472678 - RNA, 19 nt, Artificial Sequence
  Description of Artificial Sequence: Synthetic oligonucleotide
gggugcgcccauguagcuu

SEQ ID NO: 1472679 - RNA, 19 nt, Artificial Sequence
  Description of Artificial Sequence: Synthetic oligonucleotide
gugcgcccauguagcuugu

SEQ ID NO: 1472680 - RNA, 19 nt, Artificial Sequence
  Description of Artificial Sequence: Synthetic oligonucleotide
gcgccaacgccgggagacu

SEQ ID NO: 1472681 - RNA, 19 nt, Artificial Sequence
  Description of Artificial Sequence: Synthetic oligonucleotide
cgcaccgagccgccaugau

SEQ ID NO: 1472682 - RNA, 19 nt, Artificial Sequence
  Description of Artificial Sequence: Synthetic oligonucleotide
uuuaccauagcccaaaucc

SEQ ID NO: 1472683 - RNA, 19 nt, Artificial Sequence
  Description of Artificial Sequence: Synthetic oligonucleotide
ucuuuuaccaaucagaacu

SEQ ID NO: 1472684 - RNA, 19 nt, Artificial Sequence
  Description of Artificial Sequence: Synthetic oligonucleotide
aaagugacaaccuugguag

SEQ ID NO: 1472685 - RNA, 19 nt, Artificial Sequence
  Description of Artificial Sequence: Synthetic oligonucleotide
aaauagaccacacacuggg

SEQ ID NO: 1472686 - RNA, 19 nt, Artificial Sequence
  Description of Artificial Sequence: Synthetic oligonucleotide
uuuaguugaaguaaccacc

SEQ ID NO: 1472687 - RNA, 19 nt, Artificial Sequence
  Description of Artificial Sequence: Synthetic oligonucleotide
aaagcugccagguauuuuc

SEQ ID NO: 1472688 - RNA, 19 nt, Artificial Sequence
  Description of Artificial Sequence: Synthetic oligonucleotide
uccuucauuagucuggugg

SEQ ID NO: 1472689 - RNA, 19 nt, Artificial Sequence
  Description of Artificial Sequence: Synthetic oligonucleotide
uagauaauuccuuauaaca

SEQ ID NO: 1472690 - RNA, 19 nt, Artificial Sequence
  Description of Artificial Sequence: Synthetic oligonucleotide
uuaccaaucagaacuaccc

SEQ ID NO: 1472691 - RNA, 19 nt, Artificial Sequence
  Description of Artificial Sequence: Synthetic oligonucleotide
aacauuaauuaauugcaca

SEQ ID NO: 1472692 - RNA, 19 nt, Artificial Sequence
  Description of Artificial Sequence: Synthetic oligonucleotide
uucaaugguacacauuuag

SEQ ID NO: 1472693 - RNA, 19 nt, Artificial Sequence
  Description of Artificial Sequence: Synthetic oligonucleotide
auaagcauaaucauugcac

SEQ ID NO: 1472694 - RNA, 19 nt, Artificial Sequence
  Description of Artificial Sequence: Synthetic oligonucleotide
uuccuuauaacauuaauua

SEQ ID NO: 1472695 - RNA, 19 nt, Artificial Sequence
  Description of Artificial Sequence: Synthetic oligonucleotide
uugacuacucuucuuacag

SEQ ID NO: 1472696 - RNA, 19 nt, Artificial Sequence
  Description of Artificial Sequence: Synthetic oligonucleotide
agaacaucuuccuagagcu

SEQ ID NO: 1472697 - RNA, 19 nt, Artificial Sequence
  Description of Artificial Sequence: Synthetic oligonucleotide
ucggucauauaaaaugugg

SEQ ID NO: 1472698 - RNA, 19 nt, Artificial Sequence
  Description of Artificial Sequence: Synthetic oligonucleotide
aagaccuuugcauauaaaa

SEQ ID NO: 1472699 - RNA, 19 nt, Artificial Sequence
  Description of Artificial Sequence: Synthetic oligonucleotide
auagcucucauuaaaauag

SEQ ID NO: 1472700 - RNA, 19 nt, Artificial Sequence
  Description of Artificial Sequence: Synthetic oligonucleotide
cucucauuaaaauagucac

SEQ ID NO: 1472701 - RNA, 19 nt, Artificial Sequence
  Description of Artificial Sequence: Synthetic oligonucleotide
aauuaauugcacaaagcug

SEQ ID NO: 1472702 - RNA, 19 nt, Artificial Sequence
  Description of Artificial Sequence: Synthetic oligonucleotide
ugcucggucauauaaaaug

SEQ ID NO: 1472703 - RNA, 19 nt, Artificial Sequence
  Description of Artificial Sequence: Synthetic oligonucleotide
uguuuuaacuuuucccagg

SEQ ID NO: 1472704 - RNA, 19 nt, Artificial Sequence
  Description of Artificial Sequence: Synthetic oligonucleotide
aaucauugcacagagugca

SEQ ID NO: 1472705 - RNA, 19 nt, Artificial Sequence
  Description of Artificial Sequence: Synthetic oligonucleotide
aaauccuucauuagucugg

SEQ ID NO: 1472706 - RNA, 19 nt, Artificial Sequence
  Description of Artificial Sequence: Synthetic oligonucleotide
uaaaaugugggaccguugu

SEQ ID NO: 1472707 - RNA, 19 nt, Artificial Sequence
  Description of Artificial Sequence: Synthetic oligonucleotide
aaaugugggaccguuguag

SEQ ID NO: 1472708 - RNA, 19 nt, Artificial Sequence
  Description of Artificial Sequence: Synthetic oligonucleotide
aaugugggaccguuguagg

SEQ ID NO: 1472709 - RNA, 19 nt, Artificial Sequence
  Description of Artificial Sequence: Synthetic oligonucleotide
uaaagugacaaccuuggua

SEQ ID NO: 1472710 - RNA, 19 nt, Artificial Sequence
  Description of Artificial Sequence: Synthetic oligonucleotide
uggccuaaaagucaacacc

SEQ ID NO: 1472711 - RNA, 19 nt, Artificial Sequence
  Description of Artificial Sequence: Synthetic oligonucleotide
uuaugacuuaaauacuaug

SEQ ID NO: 1472712 - RNA, 19 nt, Artificial Sequence
  Description of Artificial Sequence: Synthetic oligonucleotide
cuugugcuaaugcugacgg

SEQ ID NO: 1472713 - RNA, 19 nt, Artificial Sequence
  Description of Artificial Sequence: Synthetic oligonucleotide
ugacggaucugccagacca

SEQ ID NO: 1472714 - RNA, 19 nt, Artificial Sequence
  Description of Artificial Sequence: Synthetic oligonucleotide
cuauaaagugacaaccuug

SEQ ID NO: 1472715 - RNA, 19 nt, Artificial Sequence
  Description of Artificial Sequence: Synthetic oligonucleotide
uuaguugaaguaaccaccu

SEQ ID NO: 1472716 - RNA, 19 nt, Artificial Sequence
  Description of Artificial Sequence: Synthetic oligonucleotide
aggagaauagguuugacua

SEQ ID NO: 1472717 - RNA, 19 nt, Artificial Sequence
  Description of Artificial Sequence: Synthetic oligonucleotide
gagucuaggacauggauuc

SEQ ID NO: 1472718 - RNA, 19 nt, Artificial Sequence
  Description of Artificial Sequence: Synthetic oligonucleotide
ucaagaacaaucacccgac

SEQ ID NO: 1472719 - RNA, 19 nt, Artificial Sequence
  Description of Artificial Sequence: Synthetic oligonucleotide
aagccuacugaacagaauu

SEQ ID NO: 1472720 - RNA, 19 nt, Artificial Sequence
  Description of Artificial Sequence: Synthetic oligonucleotide
ugaacagaauuuugaaaug

SEQ ID NO: 1472721 - RNA, 19 nt, Artificial Sequence
  Description of Artificial Sequence: Synthetic oligonucleotide
ucacuaugcaguauuaaau

SEQ ID NO: 1472722 - RNA, 19 nt, Artificial Sequence
  Description of Artificial Sequence: Synthetic oligonucleotide
gaaguaaccaccuccaucu

SEQ ID NO: 1472723 - RNA, 19 nt, Artificial Sequence
  Description of Artificial Sequence: Synthetic oligonucleotide
acuaugcaguauuaaauca

SEQ ID NO: 1472724 - RNA, 19 nt, Artificial Sequence
  Description of Artificial Sequence: Synthetic oligonucleotide
uaaucauugcacagagugc

SEQ ID NO: 1472725 - RNA, 19 nt, Artificial Sequence
  Description of Artificial Sequence: Synthetic oligonucleotide
ugccuauaaagugacaacc

SEQ ID NO: 1472726 - RNA, 19 nt, Artificial Sequence
  Description of Artificial Sequence: Synthetic oligonucleotide
cuaugcaguauuaaaucac

SEQ ID NO: 1472727 - RNA, 19 nt, Artificial Sequence
  Description of Artificial Sequence: Synthetic oligonucleotide
augguacacauuuaguuga

SEQ ID NO: 1472728 - RNA, 19 nt, Artificial Sequence
  Description of Artificial Sequence: Synthetic oligonucleotide
ucuuccuagagcucaaccu

SEQ ID NO: 1472729 - RNA, 19 nt, Artificial Sequence
  Description of Artificial Sequence: Synthetic oligonucleotide
ugacauuaugacuuaaaua

SEQ ID NO: 1472730 - RNA, 19 nt, Artificial Sequence
  Description of Artificial Sequence: Synthetic oligonucleotide
ucuacuggaagcuucucaa

SEQ ID NO: 1472731 - RNA, 19 nt, Artificial Sequence
  Description of Artificial Sequence: Synthetic oligonucleotide
uggcacaaaauguuggucu

SEQ ID NO: 1472732 - RNA, 19 nt, Artificial Sequence
  Description of Artificial Sequence: Synthetic oligonucleotide
uuaauugcacaaagcugcc

SEQ ID NO: 1472733 - RNA, 19 nt, Artificial Sequence
  Description of Artificial Sequence: Synthetic oligonucleotide
augccuauaaagugacaac

SEQ ID NO: 1472734 - RNA, 19 nt, Artificial Sequence
  Description of Artificial Sequence: Synthetic oligonucleotide
uucacaucauucucgguga

SEQ ID NO: 1472735 - RNA, 19 nt, Artificial Sequence
  Description of Artificial Sequence: Synthetic oligonucleotide
gucauauaaaaugugggac

SEQ ID NO: 1472736 - RNA, 19 nt, Artificial Sequence
  Description of Artificial Sequence: Synthetic oligonucleotide
acggcuagagucuaggaca

SEQ ID NO: 1472737 - RNA, 19 nt, Artificial Sequence
  Description of Artificial Sequence: Synthetic oligonucleotide
aucggcuuagaagagcagc

SEQ ID NO: 1472738 - RNA, 19 nt, Artificial Sequence
  Description of Artificial Sequence: Synthetic oligonucleotide
ucaaugguacacauuuagu

SEQ ID NO: 1472739 - RNA, 19 nt, Artificial Sequence
  Description of Artificial Sequence: Synthetic oligonucleotide
uagucauggccuaaaaguc

SEQ ID NO: 1472740 - RNA, 19 nt, Artificial Sequence
  Description of Artificial Sequence: Synthetic oligonucleotide
cagaacaucuuccuagagc

SEQ ID NO: 1472741 - RNA, 19 nt, Artificial Sequence
  Description of Artificial Sequence: Synthetic oligonucleotide
cacuaugcaguauuaaauc

SEQ ID NO: 1472742 - RNA, 19 nt, Artificial Sequence
  Description of Artificial Sequence: Synthetic oligonucleotide
augacauuaugacuuaaau

SEQ ID NO: 1472743 - RNA, 19 nt, Artificial Sequence
  Description of Artificial Sequence: Synthetic oligonucleotide
cuccuggcuacauagagug

SEQ ID NO: 1472744 - RNA, 19 nt, Artificial Sequence
  Description of Artificial Sequence: Synthetic oligonucleotide
cacaauuucaaugguacac

SEQ ID NO: 1472745 - RNA, 19 nt, Artificial Sequence
  Description of Artificial Sequence: Synthetic oligonucleotide
cacauuuaguugaaguaac

SEQ ID NO: 1472746 - RNA, 19 nt, Artificial Sequence
  Description of Artificial Sequence: Synthetic oligonucleotide
uugauagcucucauuaaaa

SEQ ID NO: 1472747 - RNA, 19 nt, Artificial Sequence
  Description of Artificial Sequence: Synthetic oligonucleotide
uacguuuucuuuuaccaau

SEQ ID NO: 1472748 - RNA, 19 nt, Artificial Sequence
  Description of Artificial Sequence: Synthetic oligonucleotide
gguugcaccaaucagugug

SEQ ID NO: 1472749 - RNA, 19 nt, Artificial Sequence
  Description of Artificial Sequence: Synthetic oligonucleotide
acauuuaguugaaguaacc

SEQ ID NO: 1472750 - RNA, 19 nt, Artificial Sequence
  Description of Artificial Sequence: Synthetic oligonucleotide
gcuuaaagaagucaacccc

SEQ ID NO: 1472751 - RNA, 19 nt, Artificial Sequence
  Description of Artificial Sequence: Synthetic oligonucleotide
aaagucaacaccgccucug

SEQ ID NO: 1472752 - RNA, 19 nt, Artificial Sequence
  Description of Artificial Sequence: Synthetic oligonucleotide
uccuuauaacauuaauuaa

SEQ ID NO: 1472753 - RNA, 19 nt, Artificial Sequence
  Description of Artificial Sequence: Synthetic oligonucleotide
uuagaagagcagcauugac

SEQ ID NO: 1472754 - RNA, 19 nt, Artificial Sequence
  Description of Artificial Sequence: Synthetic oligonucleotide
aauagaccacacacugggc

SEQ ID NO: 1472755 - RNA, 19 nt, Artificial Sequence
  Description of Artificial Sequence: Synthetic oligonucleotide
ucauaagcauaaucauugc

SEQ ID NO: 1472756 - RNA, 19 nt, Artificial Sequence
  Description of Artificial Sequence: Synthetic oligonucleotide
cuagucauggccuaaaagu

SEQ ID NO: 1472757 - RNA, 19 nt, Artificial Sequence
  Description of Artificial Sequence: Synthetic oligonucleotide
caguaggacggcuagaguc

SEQ ID NO: 1472758 - RNA, 19 nt, Artificial Sequence
  Description of Artificial Sequence: Synthetic oligonucleotide
uuaaagaagucaaccccuc

SEQ ID NO: 1472759 - RNA, 19 nt, Artificial Sequence
  Description of Artificial Sequence: Synthetic oligonucleotide
cucaagaacaaucacccga

SEQ ID NO: 1472760 - RNA, 19 nt, Artificial Sequence
  Description of Artificial Sequence: Synthetic oligonucleotide
aguagagggaggcauucug

SEQ ID NO: 1472761 - RNA, 19 nt, Artificial Sequence
  Description of Artificial Sequence: Synthetic oligonucleotide
ucggcuuagaagagcagca

SEQ ID NO: 1472762 - RNA, 19 nt, Artificial Sequence
  Description of Artificial Sequence: Synthetic oligonucleotide
ucauuagucuggugggugc

SEQ ID NO: 1472763 - RNA, 19 nt, Artificial Sequence
  Description of Artificial Sequence: Synthetic oligonucleotide
gugaucaggacucggcuag

SEQ ID NO: 1472764 - RNA, 19 nt, Artificial Sequence
  Description of Artificial Sequence: Synthetic oligonucleotide
ucucaagaacaaucacccg

SEQ ID NO: 1472765 - RNA, 19 nt, Artificial Sequence
  Description of Artificial Sequence: Synthetic oligonucleotide
ucccugcugagauuuauug

SEQ ID NO: 1472766 - RNA, 19 nt, Artificial Sequence
  Description of Artificial Sequence: Synthetic oligonucleotide
ucauaagaccuuugcauau

SEQ ID NO: 1472767 - RNA, 19 nt, Artificial Sequence
  Description of Artificial Sequence: Synthetic oligonucleotide
aaucacaauuacguuuucu

SEQ ID NO: 1472768 - RNA, 19 nt, Artificial Sequence
  Description of Artificial Sequence: Synthetic oligonucleotide
auucaagccaguccgugca

SEQ ID NO: 1472769 - RNA, 19 nt, Artificial Sequence
  Description of Artificial Sequence: Synthetic oligonucleotide
gacuacucuucuuacagaa

SEQ ID NO: 1472770 - RNA, 19 nt, Artificial Sequence
  Description of Artificial Sequence: Synthetic oligonucleotide
cuugguaggcagcaacugc

SEQ ID NO: 1472771 - RNA, 19 nt, Artificial Sequence
  Description of Artificial Sequence: Synthetic oligonucleotide
gaaggguucuccgugguug

SEQ ID NO: 1472772 - RNA, 19 nt, Artificial Sequence
  Description of Artificial Sequence: Synthetic oligonucleotide
cauuaugacuuaaauacua

SEQ ID NO: 1472773 - RNA, 19 nt, Artificial Sequence
  Description of Artificial Sequence: Synthetic oligonucleotide
caaucagugugaucguccc

SEQ ID NO: 1472774 - RNA, 19 nt, Artificial Sequence
  Description of Artificial Sequence: Synthetic oligonucleotide
ucaagcauccgugccagcc

SEQ ID NO: 1472775 - RNA, 19 nt, Artificial Sequence
  Description of Artificial Sequence: Synthetic oligonucleotide
aaucuggcacaaaauguug

SEQ ID NO: 1472776 - RNA, 19 nt, Artificial Sequence
  Description of Artificial Sequence: Synthetic oligonucleotide
ggccuaaaagucaacaccg

SEQ ID NO: 1472777 - RNA, 19 nt, Artificial Sequence
  Description of Artificial Sequence: Synthetic oligonucleotide
cagaccaauguccucacug

SEQ ID NO: 1472778 - RNA, 19 nt, Artificial Sequence
  Description of Artificial Sequence: Synthetic oligonucleotide
uggcaaaccucacaagccu

SEQ ID NO: 1472779 - RNA, 19 nt, Artificial Sequence
  Description of Artificial Sequence: Synthetic oligonucleotide
acauagaguggguccuccc

SEQ ID NO: 1472780 - RNA, 19 nt, Artificial Sequence
  Description of Artificial Sequence: Synthetic oligonucleotide
guugauagcucucauuaaa

SEQ ID NO: 1472781 - RNA, 19 nt, Artificial Sequence
  Description of Artificial Sequence: Synthetic oligonucleotide
uauuuguagccuuuaccau

SEQ ID NO: 1472782 - RNA, 19 nt, Artificial Sequence
  Description of Artificial Sequence: Synthetic oligonucleotide
caggcaugccuauaaagug

SEQ ID NO: 1472783 - RNA, 19 nt, Artificial Sequence
  Description of Artificial Sequence: Synthetic oligonucleotide
uaaccaccuccaucuaugg

SEQ ID NO: 1472784 - RNA, 19 nt, Artificial Sequence
  Description of Artificial Sequence: Synthetic oligonucleotide
uuacguuuucuuuuaccaa

SEQ ID NO: 1472785 - RNA, 19 nt, Artificial Sequence
  Description of Artificial Sequence: Synthetic oligonucleotide
acaauuacguuuucuuuua

SEQ ID NO: 1472786 - RNA, 19 nt, Artificial Sequence
  Description of Artificial Sequence: Synthetic oligonucleotide
uucuuuuaccaaucagaac

SEQ ID NO: 1472787 - RNA, 19 nt, Artificial Sequence
  Description of Artificial Sequence: Synthetic oligonucleotide
aaugacauuaugacuuaaa

SEQ ID NO: 1472788 - RNA, 19 nt, Artificial Sequence
  Description of Artificial Sequence: Synthetic oligonucleotide
aguguccacugcuuuaucu

SEQ ID NO: 1472789 - RNA, 19 nt, Artificial Sequence
  Description of Artificial Sequence: Synthetic oligonucleotide
auucucggugaucaggacu

SEQ ID NO: 1472790 - RNA, 19 nt, Artificial Sequence
  Description of Artificial Sequence: Synthetic oligonucleotide
agccaguccgugcaucacc

SEQ ID NO: 1472791 - RNA, 19 nt, Artificial Sequence
  Description of Artificial Sequence: Synthetic oligonucleotide
gauaauuccuuauaacauu

SEQ ID NO: 1472792 - RNA, 19 nt, Artificial Sequence
  Description of Artificial Sequence: Synthetic oligonucleotide
caccucaauggauuugggg

SEQ ID NO: 1472793 - RNA, 19 nt, Artificial Sequence
  Description of Artificial Sequence: Synthetic oligonucleotide
ucacaauuacguuuucuuu

SEQ ID NO: 1472794 - RNA, 19 nt, Artificial Sequence
  Description of Artificial Sequence: Synthetic oligonucleotide
ucaccaucacuaagguaag

SEQ ID NO: 1472795 - RNA, 19 nt, Artificial Sequence
  Description of Artificial Sequence: Synthetic oligonucleotide
uucauuagucuggugggug

SEQ ID NO: 1472796 - RNA, 19 nt, Artificial Sequence
  Description of Artificial Sequence: Synthetic oligonucleotide
aaaagucaacaccgccucu

SEQ ID NO: 1472797 - RNA, 19 nt, Artificial Sequence
  Description of Artificial Sequence: Synthetic oligonucleotide
uucccagugaguugauagc

SEQ ID NO: 1472798 - RNA, 19 nt, Artificial Sequence
  Description of Artificial Sequence: Synthetic oligonucleotide
cauucaagccaguccgugc

SEQ ID NO: 1472799 - RNA, 19 nt, Artificial Sequence
  Description of Artificial Sequence: Synthetic oligonucleotide
agaagucaaccccucucag

SEQ ID NO: 1472800 - RNA, 19 nt, Artificial Sequence
  Description of Artificial Sequence: Synthetic oligonucleotide
cauugccucuacuggaagc

SEQ ID NO: 1472801 - RNA, 19 nt, Artificial Sequence
  Description of Artificial Sequence: Synthetic oligonucleotide
uaauuccuuauaacauuaa

SEQ ID NO: 1472802 - RNA, 19 nt, Artificial Sequence
  Description of Artificial Sequence: Synthetic oligonucleotide
ggucauauaaaauguggga

SEQ ID NO: 1472803 - RNA, 19 nt, Artificial Sequence
  Description of Artificial Sequence: Synthetic oligonucleotide
cagaauuuugaaaugacau

SEQ ID NO: 1472804 - RNA, 19 nt, Artificial Sequence
  Description of Artificial Sequence: Synthetic oligonucleotide
uccgaagacaggcuuucac

SEQ ID NO: 1472805 - RNA, 19 nt, Artificial Sequence
  Description of Artificial Sequence: Synthetic oligonucleotide
auccgugccagccaguaga

SEQ ID NO: 1472806 - RNA, 19 nt, Artificial Sequence
  Description of Artificial Sequence: Synthetic oligonucleotide
gcuagagucuaggacaugg

SEQ ID NO: 1472807 - RNA, 19 nt, Artificial Sequence
  Description of Artificial Sequence: Synthetic oligonucleotide
uggcaaaauagaccacaca

SEQ ID NO: 1472808 - RNA, 19 nt, Artificial Sequence
  Description of Artificial Sequence: Synthetic oligonucleotide
gucaguaggacggcuagag

SEQ ID NO: 1472809 - RNA, 19 nt, Artificial Sequence
  Description of Artificial Sequence: Synthetic oligonucleotide
aucuggcacaaaauguugg

SEQ ID NO: 1472810 - RNA, 19 nt, Artificial Sequence
  Description of Artificial Sequence: Synthetic oligonucleotide
gcucuggcaaaauagacca

SEQ ID NO: 1472811 - RNA, 19 nt, Artificial Sequence
  Description of Artificial Sequence: Synthetic oligonucleotide
ggcacuguacaccucaaug

SEQ ID NO: 1472812 - RNA, 19 nt, Artificial Sequence
  Description of Artificial Sequence: Synthetic oligonucleotide
gguacaggcauccuaguca

SEQ ID NO: 1472813 - RNA, 19 nt, Artificial Sequence
  Description of Artificial Sequence: Synthetic oligonucleotide
cuagagcucaaccuggcca

SEQ ID NO: 1472814 - RNA, 19 nt, Artificial Sequence
  Description of Artificial Sequence: Synthetic oligonucleotide
ggcucagagggucaguagg

SEQ ID NO: 1472815 - RNA, 19 nt, Artificial Sequence
  Description of Artificial Sequence: Synthetic oligonucleotide
ugacaaccuugguaggcag

SEQ ID NO: 1472816 - RNA, 19 nt, Artificial Sequence
  Description of Artificial Sequence: Synthetic oligonucleotide
cauuuaguugaaguaacca

SEQ ID NO: 1472817 - RNA, 19 nt, Artificial Sequence
  Description of Artificial Sequence: Synthetic oligonucleotide
aaaaugugggaccguugua

SEQ ID NO: 1472818 - RNA, 19 nt, Artificial Sequence
  Description of Artificial Sequence: Synthetic oligonucleotide
uguccucacuggcaaaccu

SEQ ID NO: 1472819 - RNA, 19 nt, Artificial Sequence
  Description of Artificial Sequence: Synthetic oligonucleotide
auaauuccuuauaacauua

SEQ ID NO: 1472820 - RNA, 19 nt, Artificial Sequence
  Description of Artificial Sequence: Synthetic oligonucleotide
ccuucauuagucugguggg

SEQ ID NO: 1472821 - RNA, 19 nt, Artificial Sequence
  Description of Artificial Sequence: Synthetic oligonucleotide
aaucacccgacaucggcuu

SEQ ID NO: 1472822 - RNA, 19 nt, Artificial Sequence
  Description of Artificial Sequence: Synthetic oligonucleotide
cuggcaaaauagaccacac

SEQ ID NO: 1472823 - RNA, 19 nt, Artificial Sequence
  Description of Artificial Sequence: Synthetic oligonucleotide
agugaguugauagcucuca

SEQ ID NO: 1472824 - RNA, 19 nt, Artificial Sequence
  Description of Artificial Sequence: Synthetic oligonucleotide
ugacuacucuucuuacaga

SEQ ID NO: 1472825 - RNA, 19 nt, Artificial Sequence
  Description of Artificial Sequence: Synthetic oligonucleotide
auugccucuacuggaagcu

SEQ ID NO: 1472826 - RNA, 19 nt, Artificial Sequence
  Description of Artificial Sequence: Synthetic oligonucleotide
aaucagugugaucguccca

SEQ ID NO: 1472827 - RNA, 19 nt, Artificial Sequence
  Description of Artificial Sequence: Synthetic oligonucleotide
cacgugaggaaggaaagug

SEQ ID NO: 1472828 - RNA, 19 nt, Artificial Sequence
  Description of Artificial Sequence: Synthetic oligonucleotide
uagcucucauuaaaauagu

SEQ ID NO: 1472829 - RNA, 19 nt, Artificial Sequence
  Description of Artificial Sequence: Synthetic oligonucleotide
uacucuucuuacagaacau

SEQ ID NO: 1472830 - RNA, 19 nt, Artificial Sequence
  Description of Artificial Sequence: Synthetic oligonucleotide
guaggcacuguacaccuca

SEQ ID NO: 1472831 - RNA, 19 nt, Artificial Sequence
  Description of Artificial Sequence: Synthetic oligonucleotide
uuuuaccaaucagaacuac

SEQ ID NO: 1472832 - RNA, 19 nt, Artificial Sequence
  Description of Artificial Sequence: Synthetic oligonucleotide
agcucucauuaaaauaguc

SEQ ID NO: 1472833 - RNA, 19 nt, Artificial Sequence
  Description of Artificial Sequence: Synthetic oligonucleotide
uguaggccuucuuucacau

SEQ ID NO: 1472834 - RNA, 19 nt, Artificial Sequence
  Description of Artificial Sequence: Synthetic oligonucleotide
auuaugacuuaaauacuau

SEQ ID NO: 1472835 - RNA, 19 nt, Artificial Sequence
  Description of Artificial Sequence: Synthetic oligonucleotide
agcccaaauccuucauuag

SEQ ID NO: 1472836 - RNA, 19 nt, Artificial Sequence
  Description of Artificial Sequence: Synthetic oligonucleotide
acauuaugacuuaaauacu

SEQ ID NO: 1472837 - RNA, 19 nt, Artificial Sequence
  Description of Artificial Sequence: Synthetic oligonucleotide
ugugaucgucccacauucc

SEQ ID NO: 1472838 - RNA, 19 nt, Artificial Sequence
  Description of Artificial Sequence: Synthetic oligonucleotide
cuacuggaagcuucucaag

SEQ ID NO: 1472839 - RNA, 19 nt, Artificial Sequence
  Description of Artificial Sequence: Synthetic oligonucleotide
ugaguugauagcucucauu

SEQ ID NO: 1472840 - RNA, 19 nt, Artificial Sequence
  Description of Artificial Sequence: Synthetic oligonucleotide
acgcauagccuuguguagg

SEQ ID NO: 1472841 - RNA, 19 nt, Artificial Sequence
  Description of Artificial Sequence: Synthetic oligonucleotide
cucauaagaccuuugcaua

SEQ ID NO: 1472842 - RNA, 19 nt, Artificial Sequence
  Description of Artificial Sequence: Synthetic oligonucleotide
aucaggacucggcuaggag

SEQ ID NO: 1472843 - RNA, 19 nt, Artificial Sequence
  Description of Artificial Sequence: Synthetic oligonucleotide
cuuuaccauagcccaaauc

SEQ ID NO: 1472844 - RNA, 19 nt, Artificial Sequence
  Description of Artificial Sequence: Synthetic oligonucleotide
cugagauuuauugaaccga

SEQ ID NO: 1472845 - RNA, 19 nt, Artificial Sequence
  Description of Artificial Sequence: Synthetic oligonucleotide
ccuaaaagucaacaccgcc

SEQ ID NO: 1472846 - RNA, 19 nt, Artificial Sequence
  Description of Artificial Sequence: Synthetic oligonucleotide
aguugauagcucucauuaa

SEQ ID NO: 1472847 - RNA, 19 nt, Artificial Sequence
  Description of Artificial Sequence: Synthetic oligonucleotide
guuguaggccuucuuucac

SEQ ID NO: 1472848 - RNA, 19 nt, Artificial Sequence
  Description of Artificial Sequence: Synthetic oligonucleotide
ugccagguauuuucauaag

SEQ ID NO: 1472849 - RNA, 19 nt, Artificial Sequence
  Description of Artificial Sequence: Synthetic oligonucleotide
acaaccuugguaggcagca

SEQ ID NO: 1472850 - RNA, 19 nt, Artificial Sequence
  Description of Artificial Sequence: Synthetic oligonucleotide
accuccaucuauggaacuc

SEQ ID NO: 1472851 - RNA, 19 nt, Artificial Sequence
  Description of Artificial Sequence: Synthetic oligonucleotide
agaauagguuugacuacuc

SEQ ID NO: 1472852 - RNA, 19 nt, Artificial Sequence
  Description of Artificial Sequence: Synthetic oligonucleotide
aaaugacauuaugacuuaa

SEQ ID NO: 1472853 - RNA, 19 nt, Artificial Sequence
  Description of Artificial Sequence: Synthetic oligonucleotide
gacaucggcuuagaagagc

SEQ ID NO: 1472854 - RNA, 19 nt, Artificial Sequence
  Description of Artificial Sequence: Synthetic oligonucleotide
uacauagaguggguccucc

SEQ ID NO: 1472855 - RNA, 19 nt, Artificial Sequence
  Description of Artificial Sequence: Synthetic oligonucleotide
ccgacaucggcuuagaaga

SEQ ID NO: 1472856 - RNA, 19 nt, Artificial Sequence
  Description of Artificial Sequence: Synthetic oligonucleotide
ucaguaggacggcuagagu

SEQ ID NO: 1472857 - RNA, 19 nt, Artificial Sequence
  Description of Artificial Sequence: Synthetic oligonucleotide
aguaggacggcuagagucu

SEQ ID NO: 1472858 - RNA, 19 nt, Artificial Sequence
  Description of Artificial Sequence: Synthetic oligonucleotide
cucaaccuggccagcacug

SEQ ID NO: 1472859 - RNA, 19 nt, Artificial Sequence
  Description of Artificial Sequence: Synthetic oligonucleotide
aauuucaaugguacacauu

SEQ ID NO: 1472860 - RNA, 19 nt, Artificial Sequence
  Description of Artificial Sequence: Synthetic oligonucleotide
auaaaaugugggaccguug

SEQ ID NO: 1472861 - RNA, 19 nt, Artificial Sequence
  Description of Artificial Sequence: Synthetic oligonucleotide
uccgugccagccaguagag

SEQ ID NO: 1472862 - RNA, 19 nt, Artificial Sequence
  Description of Artificial Sequence: Synthetic oligonucleotide
ggagaauagguuugacuac

SEQ ID NO: 1472863 - RNA, 19 nt, Artificial Sequence
  Description of Artificial Sequence: Synthetic oligonucleotide
agguaguccugguccacag

SEQ ID NO: 1472864 - RNA, 19 nt, Artificial Sequence
  Description of Artificial Sequence: Synthetic oligonucleotide
gccagguauuuucauaagc

SEQ ID NO: 1472865 - RNA, 19 nt, Artificial Sequence
  Description of Artificial Sequence: Synthetic oligonucleotide
agugugaucgucccacauu

SEQ ID NO: 1472866 - RNA, 19 nt, Artificial Sequence
  Description of Artificial Sequence: Synthetic oligonucleotide
caaugguacacauuuaguu

SEQ ID NO: 1472867 - RNA, 19 nt, Artificial Sequence
  Description of Artificial Sequence: Synthetic oligonucleotide
ccaaucagugugaucgucc

SEQ ID NO: 1472868 - RNA, 19 nt, Artificial Sequence
  Description of Artificial Sequence: Synthetic oligonucleotide
guacaugggguuguauuug

SEQ ID NO: 1472869 - RNA, 19 nt, Artificial Sequence
  Description of Artificial Sequence: Synthetic oligonucleotide
acaucggcuuagaagagca

SEQ ID NO: 1472870 - RNA, 19 nt, Artificial Sequence
  Description of Artificial Sequence: Synthetic oligonucleotide
cauuaauuaauugcacaaa

SEQ ID NO: 1472871 - RNA, 19 nt, Artificial Sequence
  Description of Artificial Sequence: Synthetic oligonucleotide
cggucauauaaaauguggg

SEQ ID NO: 1472872 - RNA, 19 nt, Artificial Sequence
  Description of Artificial Sequence: Synthetic oligonucleotide
ugguacacauuuaguugaa

SEQ ID NO: 1472873 - RNA, 19 nt, Artificial Sequence
  Description of Artificial Sequence: Synthetic oligonucleotide
aaccccucucaguuccuca

SEQ ID NO: 1472874 - RNA, 19 nt, Artificial Sequence
  Description of Artificial Sequence: Synthetic oligonucleotide
gugaucgucccacauucca

SEQ ID NO: 1472875 - RNA, 19 nt, Artificial Sequence
  Description of Artificial Sequence: Synthetic oligonucleotide
uugaaguaaccaccuccau

SEQ ID NO: 1472876 - RNA, 19 nt, Artificial Sequence
  Description of Artificial Sequence: Synthetic oligonucleotide
aggacggcuagagucuagg

SEQ ID NO: 1472877 - RNA, 19 nt, Artificial Sequence
  Description of Artificial Sequence: Synthetic oligonucleotide
ggcacaaaauguuggucug

SEQ ID NO: 1472878 - RNA, 19 nt, Artificial Sequence
  Description of Artificial Sequence: Synthetic oligonucleotide
uaauugcacaaagcugcca

SEQ ID NO: 1472879 - RNA, 19 nt, Artificial Sequence
  Description of Artificial Sequence: Synthetic oligonucleotide
gaauagguuugacuacucu

SEQ ID NO: 1472880 - RNA, 19 nt, Artificial Sequence
  Description of Artificial Sequence: Synthetic oligonucleotide
ggugggugcauuccucagg

SEQ ID NO: 1472881 - RNA, 19 nt, Artificial Sequence
  Description of Artificial Sequence: Synthetic oligonucleotide
gagaauagguuugacuacu

SEQ ID NO: 1472882 - RNA, 19 nt, Artificial Sequence
  Description of Artificial Sequence: Synthetic oligonucleotide
aggcaacaucuccaagauc

SEQ ID NO: 1472883 - RNA, 19 nt, Artificial Sequence
  Description of Artificial Sequence: Synthetic oligonucleotide
caauuacguuuucuuuuac

SEQ ID NO: 1472884 - RNA, 19 nt, Artificial Sequence
  Description of Artificial Sequence: Synthetic oligonucleotide
gaacacaauuucaauggua

SEQ ID NO: 1472885 - RNA, 19 nt, Artificial Sequence
  Description of Artificial Sequence: Synthetic oligonucleotide
uccauucaagccaguccgu

SEQ ID NO: 1472886 - RNA, 19 nt, Artificial Sequence
  Description of Artificial Sequence: Synthetic oligonucleotide
uaguugaaguaaccaccuc

SEQ ID NO: 1472887 - RNA, 19 nt, Artificial Sequence
  Description of Artificial Sequence: Synthetic oligonucleotide
cccgacaucggcuuagaag

SEQ ID NO: 1472888 - RNA, 19 nt, Artificial Sequence
  Description of Artificial Sequence: Synthetic oligonucleotide
cuuuuaccaaucagaacua

SEQ ID NO: 1472889 - RNA, 19 nt, Artificial Sequence
  Description of Artificial Sequence: Synthetic oligonucleotide
cauucaggcaugccuauaa

SEQ ID NO: 1472890 - RNA, 19 nt, Artificial Sequence
  Description of Artificial Sequence: Synthetic oligonucleotide
gugcaucaccaucacuaag

SEQ ID NO: 1472891 - RNA, 19 nt, Artificial Sequence
  Description of Artificial Sequence: Synthetic oligonucleotide
cauggccuaaaagucaaca

SEQ ID NO: 1472892 - RNA, 19 nt, Artificial Sequence
  Description of Artificial Sequence: Synthetic oligonucleotide
uggcucagagggucaguag

SEQ ID NO: 1472893 - RNA, 19 nt, Artificial Sequence
  Description of Artificial Sequence: Synthetic oligonucleotide
ggcucuggcaaaauagacc

SEQ ID NO: 1472894 - RNA, 19 nt, Artificial Sequence
  Description of Artificial Sequence: Synthetic oligonucleotide
ccuuauaacauuaauuaau

SEQ ID NO: 1472895 - RNA, 19 nt, Artificial Sequence
  Description of Artificial Sequence: Synthetic oligonucleotide
uauuggcucauaagaccuu

SEQ ID NO: 1472896 - RNA, 19 nt, Artificial Sequence
  Description of Artificial Sequence: Synthetic oligonucleotide
cacaauuacguuuucuuuu

SEQ ID NO: 1472897 - RNA, 19 nt, Artificial Sequence
  Description of Artificial Sequence: Synthetic oligonucleotide
cuuagaagagcagcauuga

SEQ ID NO: 1472898 - RNA, 19 nt, Artificial Sequence
  Description of Artificial Sequence: Synthetic oligonucleotide
aggcaugccuauaaaguga

SEQ ID NO: 1472899 - RNA, 19 nt, Artificial Sequence
  Description of Artificial Sequence: Synthetic oligonucleotide
gcauugaccuggaaggaag

SEQ ID NO: 1472900 - RNA, 19 nt, Artificial Sequence
  Description of Artificial Sequence: Synthetic oligonucleotide
ucacccgacaucggcuuag

SEQ ID NO: 1472901 - RNA, 19 nt, Artificial Sequence
  Description of Artificial Sequence: Synthetic oligonucleotide
ccuagucauggccuaaaag

SEQ ID NO: 1472902 - RNA, 19 nt, Artificial Sequence
  Description of Artificial Sequence: Synthetic oligonucleotide
ucgucccacauuccacgug

SEQ ID NO: 1472903 - RNA, 19 nt, Artificial Sequence
  Description of Artificial Sequence: Synthetic oligonucleotide
cucccucaagcauccgugc

SEQ ID NO: 1472904 - RNA, 19 nt, Artificial Sequence
  Description of Artificial Sequence: Synthetic oligonucleotide
uagucuggugggugcauuc

SEQ ID NO: 1472905 - RNA, 19 nt, Artificial Sequence
  Description of Artificial Sequence: Synthetic oligonucleotide
gcuugugcuaaugcugacg

SEQ ID NO: 1472906 - RNA, 19 nt, Artificial Sequence
  Description of Artificial Sequence: Synthetic oligonucleotide
gaagucaaccccucucagu

SEQ ID NO: 1472907 - RNA, 19 nt, Artificial Sequence
  Description of Artificial Sequence: Synthetic oligonucleotide
accucacauucaggcaugc

SEQ ID NO: 1472908 - RNA, 19 nt, Artificial Sequence
  Description of Artificial Sequence: Synthetic oligonucleotide
agaugcaguuguaguguuc

SEQ ID NO: 1472909 - RNA, 19 nt, Artificial Sequence
  Description of Artificial Sequence: Synthetic oligonucleotide
acucggcuaggagaauagg

SEQ ID NO: 1472910 - RNA, 19 nt, Artificial Sequence
  Description of Artificial Sequence: Synthetic oligonucleotide
cuggcacaaaauguugguc

SEQ ID NO: 1472911 - RNA, 19 nt, Artificial Sequence
  Description of Artificial Sequence: Synthetic oligonucleotide
acgugaggaaggaaagugu

SEQ ID NO: 1472912 - RNA, 19 nt, Artificial Sequence
  Description of Artificial Sequence: Synthetic oligonucleotide
uucuccugcucggucauau

SEQ ID NO: 1472913 - RNA, 19 nt, Artificial Sequence
  Description of Artificial Sequence: Synthetic oligonucleotide
caggcucacuguacauggg

SEQ ID NO: 1472914 - RNA, 19 nt, Artificial Sequence
  Description of Artificial Sequence: Synthetic oligonucleotide
cuaggagaauagguuugac

SEQ ID NO: 1472915 - RNA, 19 nt, Artificial Sequence
  Description of Artificial Sequence: Synthetic oligonucleotide
cauucucggugaucaggac

SEQ ID NO: 1472916 - RNA, 19 nt, Artificial Sequence
  Description of Artificial Sequence: Synthetic oligonucleotide
caguccgugcaucaccauc

SEQ ID NO: 1472917 - RNA, 19 nt, Artificial Sequence
  Description of Artificial Sequence: Synthetic oligonucleotide
ggguacgggaggcaggggc

SEQ ID NO: 1472918 - RNA, 19 nt, Artificial Sequence
  Description of Artificial Sequence: Synthetic oligonucleotide
caaucagaacuacccagaa

SEQ ID NO: 1472919 - RNA, 19 nt, Artificial Sequence
  Description of Artificial Sequence: Synthetic oligonucleotide
caucggcuuagaagagcag

SEQ ID NO: 1472920 - RNA, 19 nt, Artificial Sequence
  Description of Artificial Sequence: Synthetic oligonucleotide
aucgucccacauuccacgu

SEQ ID NO: 1472921 - RNA, 19 nt, Artificial Sequence
  Description of Artificial Sequence: Synthetic oligonucleotide
gggucaguaggacggcuag

SEQ ID NO: 1472922 - RNA, 19 nt, Artificial Sequence
  Description of Artificial Sequence: Synthetic oligonucleotide
auuggcucauaagaccuuu

SEQ ID NO: 1472923 - RNA, 19 nt, Artificial Sequence
  Description of Artificial Sequence: Synthetic oligonucleotide
ggaucugccagaccaaugu

SEQ ID NO: 1472924 - RNA, 19 nt, Artificial Sequence
  Description of Artificial Sequence: Synthetic oligonucleotide
aggaaggguucuccguggu

SEQ ID NO: 1472925 - RNA, 19 nt, Artificial Sequence
  Description of Artificial Sequence: Synthetic oligonucleotide
gguaguccugguccacagg

SEQ ID NO: 1472926 - RNA, 19 nt, Artificial Sequence
  Description of Artificial Sequence: Synthetic oligonucleotide
guugcaccaaucaguguga

SEQ ID NO: 1472927 - RNA, 19 nt, Artificial Sequence
  Description of Artificial Sequence: Synthetic oligonucleotide
gaguggguccuccccuccc

SEQ ID NO: 1472928 - RNA, 19 nt, Artificial Sequence
  Description of Artificial Sequence: Synthetic oligonucleotide
aguggguccuccccucccu

SEQ ID NO: 1472929 - RNA, 19 nt, Artificial Sequence
  Description of Artificial Sequence: Synthetic oligonucleotide
ugcuugugcuaaugcugac

SEQ ID NO: 1472930 - RNA, 19 nt, Artificial Sequence
  Description of Artificial Sequence: Synthetic oligonucleotide
ucuccgugguugcaccaau

SEQ ID NO: 1472931 - RNA, 19 nt, Artificial Sequence
  Description of Artificial Sequence: Synthetic oligonucleotide
ggcuaggagaauagguuug

SEQ ID NO: 1472932 - RNA, 19 nt, Artificial Sequence
  Description of Artificial Sequence: Synthetic oligonucleotide
cagugaguugauagcucuc

SEQ ID NO: 1472933 - RNA, 19 nt, Artificial Sequence
  Description of Artificial Sequence: Synthetic oligonucleotide
guacaccucaauggauuug

SEQ ID NO: 1472934 - RNA, 19 nt, Artificial Sequence
  Description of Artificial Sequence: Synthetic oligonucleotide
cucggcuaggagaauaggu

SEQ ID NO: 1472935 - RNA, 19 nt, Artificial Sequence
  Description of Artificial Sequence: Synthetic oligonucleotide
acuguacaccucaauggau

SEQ ID NO: 1472936 - RNA, 19 nt, Artificial Sequence
  Description of Artificial Sequence: Synthetic oligonucleotide
cuccugcucggucauauaa

SEQ ID NO: 1472937 - RNA, 19 nt, Artificial Sequence
  Description of Artificial Sequence: Synthetic oligonucleotide
caguuguaguguucuucuc

SEQ ID NO: 1472938 - RNA, 19 nt, Artificial Sequence
  Description of Artificial Sequence: Synthetic oligonucleotide
cuuccucaagguacaggca

SEQ ID NO: 1472939 - RNA, 19 nt, Artificial Sequence
  Description of Artificial Sequence: Synthetic oligonucleotide
agguuugacuacucuucuu

SEQ ID NO: 1472940 - RNA, 19 nt, Artificial Sequence
  Description of Artificial Sequence: Synthetic oligonucleotide
agagccacgcauagccuug

SEQ ID NO: 1472941 - RNA, 19 nt, Artificial Sequence
  Description of Artificial Sequence: Synthetic oligonucleotide
ugucccugcugagauuuau

SEQ ID NO: 1472942 - RNA, 19 nt, Artificial Sequence
  Description of Artificial Sequence: Synthetic oligonucleotide
acauggauucccagugagu

SEQ ID NO: 1472943 - RNA, 19 nt, Artificial Sequence
  Description of Artificial Sequence: Synthetic oligonucleotide
caggggccccugaugauuc

SEQ ID NO: 1472944 - RNA, 19 nt, Artificial Sequence
  Description of Artificial Sequence: Synthetic oligonucleotide
caagcauccgugccagcca

SEQ ID NO: 1472945 - RNA, 19 nt, Artificial Sequence
  Description of Artificial Sequence: Synthetic oligonucleotide
aagugucccugcugagauu

SEQ ID NO: 1472946 - RNA, 19 nt, Artificial Sequence
  Description of Artificial Sequence: Synthetic oligonucleotide
caguccauucaagccaguc

SEQ ID NO: 1472947 - RNA, 19 nt, Artificial Sequence
  Description of Artificial Sequence: Synthetic oligonucleotide
gaucaggacucggcuagga

SEQ ID NO: 1472948 - RNA, 19 nt, Artificial Sequence
  Description of Artificial Sequence: Synthetic oligonucleotide
cugacggaucugccagacc

SEQ ID NO: 1472949 - RNA, 19 nt, Artificial Sequence
  Description of Artificial Sequence: Synthetic oligonucleotide
cauggauucccagugaguu

SEQ ID NO: 1472950 - RNA, 19 nt, Artificial Sequence
  Description of Artificial Sequence: Synthetic oligonucleotide
acauuguuguaggcacugu

SEQ ID NO: 1472951 - RNA, 19 nt, Artificial Sequence
  Description of Artificial Sequence: Synthetic oligonucleotide
cuguacaccucaauggauu

SEQ ID NO: 1472952 - RNA, 19 nt, Artificial Sequence
  Description of Artificial Sequence: Synthetic oligonucleotide
uuagucuggugggugcauu

SEQ ID NO: 1472953 - RNA, 19 nt, Artificial Sequence
  Description of Artificial Sequence: Synthetic oligonucleotide
uucuccgugguugcaccaa

SEQ ID NO: 1472954 - RNA, 19 nt, Artificial Sequence
  Description of Artificial Sequence: Synthetic oligonucleotide
cauccgugccagccaguag

SEQ ID NO: 1472955 - RNA, 19 nt, Artificial Sequence
  Description of Artificial Sequence: Synthetic oligonucleotide
cuguacaugggguuguauu

SEQ ID NO: 1472956 - RNA, 19 nt, Artificial Sequence
  Description of Artificial Sequence: Synthetic oligonucleotide
gaguguccacugcuuuauc

SEQ ID NO: 1472957 - RNA, 19 nt, Artificial Sequence
  Description of Artificial Sequence: Synthetic oligonucleotide
ccucaagguacaggcaucc

SEQ ID NO: 1472958 - RNA, 19 nt, Artificial Sequence
  Description of Artificial Sequence: Synthetic oligonucleotide
ggugcauuccucaggugca

SEQ ID NO: 1472959 - RNA, 19 nt, Artificial Sequence
  Description of Artificial Sequence: Synthetic oligonucleotide
gguacgggaggcaggggcc

SEQ ID NO: 1472960 - RNA, 19 nt, Artificial Sequence
  Description of Artificial Sequence: Synthetic oligonucleotide
cauuagucuggugggugca

SEQ ID NO: 1472961 - RNA, 19 nt, Artificial Sequence
  Description of Artificial Sequence: Synthetic oligonucleotide
cuacauagaguggguccuc

SEQ ID NO: 1472962 - RNA, 19 nt, Artificial Sequence
  Description of Artificial Sequence: Synthetic oligonucleotide
agccuacugaacagaauuu

SEQ ID NO: 1472963 - RNA, 19 nt, Artificial Sequence
  Description of Artificial Sequence: Synthetic oligonucleotide
auuagucuggugggugcau

SEQ ID NO: 1472964 - RNA, 19 nt, Artificial Sequence
  Description of Artificial Sequence: Synthetic oligonucleotide
gccuaaaagucaacaccgc

SEQ ID NO: 1472965 - RNA, 19 nt, Artificial Sequence
  Description of Artificial Sequence: Synthetic oligonucleotide
cgcauagccuuguguaggg

SEQ ID NO: 1472966 - RNA, 19 nt, Artificial Sequence
  Description of Artificial Sequence: Synthetic oligonucleotide
uguggcucagagggucagu

SEQ ID NO: 1472967 - RNA, 19 nt, Artificial Sequence
  Description of Artificial Sequence: Synthetic oligonucleotide
guucuccgugguugcacca

SEQ ID NO: 1472968 - RNA, 19 nt, Artificial Sequence
  Description of Artificial Sequence: Synthetic oligonucleotide
guaggccuucuuucacauc

SEQ ID NO: 1472969 - RNA, 19 nt, Artificial Sequence
  Description of Artificial Sequence: Synthetic oligonucleotide
guacgggaggcaggggccc

SEQ ID NO: 1472970 - RNA, 19 nt, Artificial Sequence
  Description of Artificial Sequence: Synthetic oligonucleotide
ggacauggauucccaguga

SEQ ID NO: 1472971 - RNA, 19 nt, Artificial Sequence
  Description of Artificial Sequence: Synthetic oligonucleotide
auccuagucauggccuaaa

SEQ ID NO: 1472972 - RNA, 19 nt, Artificial Sequence
  Description of Artificial Sequence: Synthetic oligonucleotide
gagcucaaccuggccagca

SEQ ID NO: 1472973 - RNA, 19 nt, Artificial Sequence
  Description of Artificial Sequence: Synthetic oligonucleotide
ccgugguugcaccaaucag

SEQ ID NO: 1472974 - RNA, 19 nt, Artificial Sequence
  Description of Artificial Sequence: Synthetic oligonucleotide
gggcucuggcaaaauagac

SEQ ID NO: 1472975 - RNA, 19 nt, Artificial Sequence
  Description of Artificial Sequence: Synthetic oligonucleotide
gauuccgaagacaggcuuu

SEQ ID NO: 1472976 - RNA, 19 nt, Artificial Sequence
  Description of Artificial Sequence: Synthetic oligonucleotide
ucuccugcucggucauaua

SEQ ID NO: 1472977 - RNA, 19 nt, Artificial Sequence
  Description of Artificial Sequence: Synthetic oligonucleotide
gcccaaauccuucauuagu

SEQ ID NO: 1472978 - RNA, 19 nt, Artificial Sequence
  Description of Artificial Sequence: Synthetic oligonucleotide
gcugccagguauuuucaua

SEQ ID NO: 1472979 - RNA, 19 nt, Artificial Sequence
  Description of Artificial Sequence: Synthetic oligonucleotide
ccacgcauagccuugugua

SEQ ID NO: 1472980 - RNA, 19 nt, Artificial Sequence
  Description of Artificial Sequence: Synthetic oligonucleotide
ccugcucggucauauaaaa

SEQ ID NO: 1472981 - RNA, 19 nt, Artificial Sequence
  Description of Artificial Sequence: Synthetic oligonucleotide
agccacgcauagccuugug

SEQ ID NO: 1472982 - RNA, 19 nt, Artificial Sequence
  Description of Artificial Sequence: Synthetic oligonucleotide
agacaggcuuucacauugu

SEQ ID NO: 1472983 - RNA, 19 nt, Artificial Sequence
  Description of Artificial Sequence: Synthetic oligonucleotide
cccagugaguugauagcuc

SEQ ID NO: 1472984 - RNA, 19 nt, Artificial Sequence
  Description of Artificial Sequence: Synthetic oligonucleotide
ggggcucuggcaaaauaga

SEQ ID NO: 1472985 - RNA, 19 nt, Artificial Sequence
  Description of Artificial Sequence: Synthetic oligonucleotide
auuccacgugaggaaggaa

SEQ ID NO: 1472986 - RNA, 19 nt, Artificial Sequence
  Description of Artificial Sequence: Synthetic oligonucleotide
ccuugguaggcagcaacug

SEQ ID NO: 1472987 - RNA, 19 nt, Artificial Sequence
  Description of Artificial Sequence: Synthetic oligonucleotide
aucacccgacaucggcuua

SEQ ID NO: 1472988 - RNA, 19 nt, Artificial Sequence
  Description of Artificial Sequence: Synthetic oligonucleotide
acauucaggcaugccuaua

SEQ ID NO: 1472989 - RNA, 19 nt, Artificial Sequence
  Description of Artificial Sequence: Synthetic oligonucleotide
gccuauaaagugacaaccu

SEQ ID NO: 1472990 - RNA, 19 nt, Artificial Sequence
  Description of Artificial Sequence: Synthetic oligonucleotide
gugaguugauagcucucau

SEQ ID NO: 1472991 - RNA, 19 nt, Artificial Sequence
  Description of Artificial Sequence: Synthetic oligonucleotide
gugggaccguuguaggccu

SEQ ID NO: 1472992 - RNA, 19 nt, Artificial Sequence
  Description of Artificial Sequence: Synthetic oligonucleotide
cccugcugagauuuauuga

SEQ ID NO: 1472993 - RNA, 19 nt, Artificial Sequence
  Description of Artificial Sequence: Synthetic oligonucleotide
cccugaugauuccgaagac

SEQ ID NO: 1472994 - RNA, 19 nt, Artificial Sequence
  Description of Artificial Sequence: Synthetic oligonucleotide
ccagugaguugauagcucu

SEQ ID NO: 1472995 - RNA, 19 nt, Artificial Sequence
  Description of Artificial Sequence: Synthetic oligonucleotide
cuucauuagucuggugggu

SEQ ID NO: 1472996 - RNA, 19 nt, Artificial Sequence
  Description of Artificial Sequence: Synthetic oligonucleotide
ggacggcuagagucuagga

SEQ ID NO: 1472997 - RNA, 19 nt, Artificial Sequence
  Description of Artificial Sequence: Synthetic oligonucleotide
agggucaguaggacggcua

SEQ ID NO: 1472998 - RNA, 19 nt, Artificial Sequence
  Description of Artificial Sequence: Synthetic oligonucleotide
cguuguaggccuucuuuca

SEQ ID NO: 1472999 - RNA, 19 nt, Artificial Sequence
  Description of Artificial Sequence: Synthetic oligonucleotide
acccgacaucggcuuagaa

SEQ ID NO: 1473000 - RNA, 19 nt, Artificial Sequence
  Description of Artificial Sequence: Synthetic oligonucleotide
ccaguagagggaggcauuc

SEQ ID NO: 1473001 - RNA, 19 nt, Artificial Sequence
  Description of Artificial Sequence: Synthetic oligonucleotide
ggucagagccacgcauagc

SEQ ID NO: 1473002 - RNA, 19 nt, Artificial Sequence
  Description of Artificial Sequence: Synthetic oligonucleotide
gccuuuaccauagcccaaa

SEQ ID NO: 1473003 - RNA, 19 nt, Artificial Sequence
  Description of Artificial Sequence: Synthetic oligonucleotide
ccccucucaguuccucagg

SEQ ID NO: 1473004 - RNA, 19 nt, Artificial Sequence
  Description of Artificial Sequence: Synthetic oligonucleotide
ggcuuagaagagcagcauu

SEQ ID NO: 1473005 - RNA, 19 nt, Artificial Sequence
  Description of Artificial Sequence: Synthetic oligonucleotide
ggguucuccgugguugcac

SEQ ID NO: 1473006 - RNA, 19 nt, Artificial Sequence
  Description of Artificial Sequence: Synthetic oligonucleotide
cacauucaggcaugccuau

SEQ ID NO: 1473007 - RNA, 19 nt, Artificial Sequence
  Description of Artificial Sequence: Synthetic oligonucleotide
guaggacggcuagagucua

SEQ ID NO: 1473008 - RNA, 19 nt, Artificial Sequence
  Description of Artificial Sequence: Synthetic oligonucleotide
cgucccacauuccacguga

SEQ ID NO: 1473009 - RNA, 19 nt, Artificial Sequence
  Description of Artificial Sequence: Synthetic oligonucleotide
cugcucggucauauaaaau

SEQ ID NO: 1473010 - RNA, 19 nt, Artificial Sequence
  Description of Artificial Sequence: Synthetic oligonucleotide
gccaguccgugcaucacca

SEQ ID NO: 1473011 - RNA, 19 nt, Artificial Sequence
  Description of Artificial Sequence: Synthetic oligonucleotide
cgacaucggcuuagaagag

SEQ ID NO: 1473012 - RNA, 19 nt, Artificial Sequence
  Description of Artificial Sequence: Synthetic oligonucleotide
gcauccuagucauggccua

SEQ ID NO: 1473013 - RNA, 19 nt, Artificial Sequence
  Description of Artificial Sequence: Synthetic oligonucleotide
cauccuagucauggccuaa

SEQ ID NO: 1473014 - RNA, 19 nt, Artificial Sequence
  Description of Artificial Sequence: Synthetic oligonucleotide
ugggaccguuguaggccuu

SEQ ID NO: 1473015 - RNA, 19 nt, Artificial Sequence
  Description of Artificial Sequence: Synthetic oligonucleotide
gccacgcauagccuugugu

SEQ ID NO: 1473016 - RNA, 19 nt, Artificial Sequence
  Description of Artificial Sequence: Synthetic oligonucleotide
ggucaguaggacggcuaga

SEQ ID NO: 1473017 - RNA, 19 nt, Artificial Sequence
  Description of Artificial Sequence: Synthetic oligonucleotide
gguuguauuuguagccuuu

SEQ ID NO: 1473018 - RNA, 19 nt, Artificial Sequence
  Description of Artificial Sequence: Synthetic oligonucleotide
ccucaggugcagggguacg

SEQ ID NO: 1473019 - RNA, 19 nt, Artificial Sequence
  Description of Artificial Sequence: Synthetic oligonucleotide
gcucacuguacaugggguu

SEQ ID NO: 1473020 - RNA, 19 nt, Artificial Sequence
  Description of Artificial Sequence: Synthetic oligonucleotide
agcauccgugccagccagu

SEQ ID NO: 1473021 - RNA, 19 nt, Artificial Sequence
  Description of Artificial Sequence: Synthetic oligonucleotide
cuccaucuauggaacucuu

SEQ ID NO: 1473022 - RNA, 19 nt, Artificial Sequence
  Description of Artificial Sequence: Synthetic oligonucleotide
caacaccgccucugcuuaa

SEQ ID NO: 1473023 - RNA, 19 nt, Artificial Sequence
  Description of Artificial Sequence: Synthetic oligonucleotide
ggccccugaugauuccgaa

SEQ ID NO: 1473024 - RNA, 19 nt, Artificial Sequence
  Description of Artificial Sequence: Synthetic oligonucleotide
gaccguuguaggccuucuu

SEQ ID NO: 1473025 - RNA, 19 nt, Artificial Sequence
  Description of Artificial Sequence: Synthetic oligonucleotide
gggaccguuguaggccuuc

SEQ ID NO: 1473026 - RNA, 19 nt, Artificial Sequence
  Description of Artificial Sequence: Synthetic oligonucleotide
caaccuugguaggcagcaa

SEQ ID NO: 1473027 - RNA, 19 nt, Artificial Sequence
  Description of Artificial Sequence: Synthetic oligonucleotide
gcaugccuauaaagugaca

SEQ ID NO: 1473028 - RNA, 19 nt, Artificial Sequence
  Description of Artificial Sequence: Synthetic oligonucleotide
gagccacgcauagccuugu

SEQ ID NO: 1473029 - RNA, 19 nt, Artificial Sequence
  Description of Artificial Sequence: Synthetic oligonucleotide
gcauccgugccagccagua

SEQ ID NO: 1473030 - RNA, 19 nt, Artificial Sequence
  Description of Artificial Sequence: Synthetic oligonucleotide
caguagagggaggcauucu

SEQ ID NO: 1473031 - RNA, 19 nt, Artificial Sequence
  Description of Artificial Sequence: Synthetic oligonucleotide
ccuccaucuauggaacucu

SEQ ID NO: 1473032 - RNA, 19 nt, Artificial Sequence
  Description of Artificial Sequence: Synthetic oligonucleotide
cacccgacaucggcuuaga

SEQ ID NO: 1473033 - RNA, 19 nt, Artificial Sequence
  Description of Artificial Sequence: Synthetic oligonucleotide
ccgugccagccaguagagg

SEQ ID NO: 1473034 - RNA, 19 nt, Artificial Sequence
  Description of Artificial Sequence: Synthetic oligonucleotide
ggaaggguucuccgugguu

SEQ ID NO: 1473035 - RNA, 19 nt, Artificial Sequence
  Description of Artificial Sequence: Synthetic oligonucleotide
cggcuaggagaauagguuu

SEQ ID NO: 1473036 - RNA, 19 nt, Artificial Sequence
  Description of Artificial Sequence: Synthetic oligonucleotide
cggugaucaggacucggcu

SEQ ID NO: 1473037 - RNA, 19 nt, Artificial Sequence
  Description of Artificial Sequence: Synthetic oligonucleotide
ccacgugaggaaggaaagu

SEQ ID NO: 1473038 - RNA, 19 nt, Artificial Sequence
  Description of Artificial Sequence: Synthetic oligonucleotide
ccagaccaauguccucacu

SEQ ID NO: 1473039 - RNA, 19 nt, Artificial Sequence
  Description of Artificial Sequence: Synthetic oligonucleotide
ccccucccucaagcauccg

SEQ ID NO: 1473040 - RNA, 19 nt, Artificial Sequence
  Description of Artificial Sequence: Synthetic oligonucleotide
ccaguccgugcaucaccau

SEQ ID NO: 1473041 - RNA, 19 nt, Artificial Sequence
  Description of Artificial Sequence: Synthetic oligonucleotide
cggcuuagaagagcagcau

SEQ ID NO: 1473042 - RNA, 19 nt, Artificial Sequence
  Description of Artificial Sequence: Synthetic oligonucleotide
aaggaguauacauagaugc

SEQ ID NO: 1473043 - RNA, 19 nt, Artificial Sequence
  Description of Artificial Sequence: Synthetic oligonucleotide
uuuaagagcaaagauaugg

SEQ ID NO: 1473044 - RNA, 19 nt, Artificial Sequence
  Description of Artificial Sequence: Synthetic oligonucleotide
aaguuaaugcaguauaggg

SEQ ID NO: 1473045 - RNA, 19 nt, Artificial Sequence
  Description of Artificial Sequence: Synthetic oligonucleotide
auucguauacaucacagac

SEQ ID NO: 1473046 - RNA, 19 nt, Artificial Sequence
  Description of Artificial Sequence: Synthetic oligonucleotide
acagaauugacauucuugg

SEQ ID NO: 1473047 - RNA, 19 nt, Artificial Sequence
  Description of Artificial Sequence: Synthetic oligonucleotide
uguuuauuuagacacagcu

SEQ ID NO: 1473048 - RNA, 19 nt, Artificial Sequence
  Description of Artificial Sequence: Synthetic oligonucleotide
ucguauacaucacagacgc

SEQ ID NO: 1473049 - RNA, 19 nt, Artificial Sequence
  Description of Artificial Sequence: Synthetic oligonucleotide
aguauuucgaccaaaggcg

SEQ ID NO: 1473050 - RNA, 19 nt, Artificial Sequence
  Description of Artificial Sequence: Synthetic oligonucleotide
guuaaugcaguauagggug

SEQ ID NO: 1473051 - RNA, 19 nt, Artificial Sequence
  Description of Artificial Sequence: Synthetic oligonucleotide
uuauucguauacaucacag

SEQ ID NO: 1473052 - RNA, 19 nt, Artificial Sequence
  Description of Artificial Sequence: Synthetic oligonucleotide
ugugcauugauagugaaug

SEQ ID NO: 1473053 - RNA, 19 nt, Artificial Sequence
  Description of Artificial Sequence: Synthetic oligonucleotide
auuacgacaaccccuuugg

SEQ ID NO: 1473054 - RNA, 19 nt, Artificial Sequence
  Description of Artificial Sequence: Synthetic oligonucleotide
ugaauggagagugagaggc

SEQ ID NO: 1473055 - RNA, 19 nt, Artificial Sequence
  Description of Artificial Sequence: Synthetic oligonucleotide
ucaagguacacgucaaagg

SEQ ID NO: 1473056 - RNA, 19 nt, Artificial Sequence
  Description of Artificial Sequence: Synthetic oligonucleotide
aagacauauuuguggaagg

SEQ ID NO: 1473057 - RNA, 19 nt, Artificial Sequence
  Description of Artificial Sequence: Synthetic oligonucleotide
cucuuaaaagucaucgucg

SEQ ID NO: 1473058 - RNA, 19 nt, Artificial Sequence
  Description of Artificial Sequence: Synthetic oligonucleotide
uauagauucggacaccugu

SEQ ID NO: 1473059 - RNA, 19 nt, Artificial Sequence
  Description of Artificial Sequence: Synthetic oligonucleotide
aggaaacacaagcaguugc

SEQ ID NO: 1473060 - RNA, 19 nt, Artificial Sequence
  Description of Artificial Sequence: Synthetic oligonucleotide
uauacauagaugcgguucc

SEQ ID NO: 1473061 - RNA, 19 nt, Artificial Sequence
  Description of Artificial Sequence: Synthetic oligonucleotide
agggaaacuguccauggcc

SEQ ID NO: 1473062 - RNA, 19 nt, Artificial Sequence
  Description of Artificial Sequence: Synthetic oligonucleotide
aguaaagcuggccaggcuc

SEQ ID NO: 1473063 - RNA, 19 nt, Artificial Sequence
  Description of Artificial Sequence: Synthetic oligonucleotide
ucuugguuaaaauguaggc

SEQ ID NO: 1473064 - RNA, 19 nt, Artificial Sequence
  Description of Artificial Sequence: Synthetic oligonucleotide
uguuucccagacuaggugg

SEQ ID NO: 1473065 - RNA, 19 nt, Artificial Sequence
  Description of Artificial Sequence: Synthetic oligonucleotide
ugguucaacacccucaaga

SEQ ID NO: 1473066 - RNA, 19 nt, Artificial Sequence
  Description of Artificial Sequence: Synthetic oligonucleotide
ucaagacucaguuuggcca

SEQ ID NO: 1473067 - RNA, 19 nt, Artificial Sequence
  Description of Artificial Sequence: Synthetic oligonucleotide
ugugcuugaauggagagug

SEQ ID NO: 1473068 - RNA, 19 nt, Artificial Sequence
  Description of Artificial Sequence: Synthetic oligonucleotide
ucaucgucgucacagaugu

SEQ ID NO: 1473069 - RNA, 19 nt, Artificial Sequence
  Description of Artificial Sequence: Synthetic oligonucleotide
aagacgaauaaggguaccc

SEQ ID NO: 1473070 - RNA, 19 nt, Artificial Sequence
  Description of Artificial Sequence: Synthetic oligonucleotide
uuuauucguauacaucaca

SEQ ID NO: 1473071 - RNA, 19 nt, Artificial Sequence
  Description of Artificial Sequence: Synthetic oligonucleotide
acgacaaccccuuuggguc

SEQ ID NO: 1473072 - RNA, 19 nt, Artificial Sequence
  Description of Artificial Sequence: Synthetic oligonucleotide
gaaguuaaugcaguauagg

SEQ ID NO: 1473073 - RNA, 19 nt, Artificial Sequence
  Description of Artificial Sequence: Synthetic oligonucleotide
acugucuccccuuggaucg

SEQ ID NO: 1473074 - RNA, 19 nt, Artificial Sequence
  Description of Artificial Sequence: Synthetic oligonucleotide
gucccaucuacgcagaugg

SEQ ID NO: 1473075 - RNA, 19 nt, Artificial Sequence
  Description of Artificial Sequence: Synthetic oligonucleotide
ugcgucaugguucaggacu

SEQ ID NO: 1473076 - RNA, 19 nt, Artificial Sequence
  Description of Artificial Sequence: Synthetic oligonucleotide
uaaaauguaggcuggucac

SEQ ID NO: 1473077 - RNA, 19 nt, Artificial Sequence
  Description of Artificial Sequence: Synthetic oligonucleotide
auagaugcgguuccucagc

SEQ ID NO: 1473078 - RNA, 19 nt, Artificial Sequence
  Description of Artificial Sequence: Synthetic oligonucleotide
gaaggucccaucuacgcag

SEQ ID NO: 1473079 - RNA, 19 nt, Artificial Sequence
  Description of Artificial Sequence: Synthetic oligonucleotide
aaaagacgaauaaggguac

SEQ ID NO: 1473080 - RNA, 19 nt, Artificial Sequence
  Description of Artificial Sequence: Synthetic oligonucleotide
acuaguugcaggcuuccac

SEQ ID NO: 1473081 - RNA, 19 nt, Artificial Sequence
  Description of Artificial Sequence: Synthetic oligonucleotide
ucuuggaaguauuucgacc

SEQ ID NO: 1473082 - RNA, 19 nt, Artificial Sequence
  Description of Artificial Sequence: Synthetic oligonucleotide
ugguuaaaauguaggcugg

SEQ ID NO: 1473083 - RNA, 19 nt, Artificial Sequence
  Description of Artificial Sequence: Synthetic oligonucleotide
uuaaugcaguauagggugg

SEQ ID NO: 1473084 - RNA, 19 nt, Artificial Sequence
  Description of Artificial Sequence: Synthetic oligonucleotide
uuggauuacgacaaccccu

SEQ ID NO: 1473085 - RNA, 19 nt, Artificial Sequence
  Description of Artificial Sequence: Synthetic oligonucleotide
ugaauggagcugaugaagu

SEQ ID NO: 1473086 - RNA, 19 nt, Artificial Sequence
  Description of Artificial Sequence: Synthetic oligonucleotide
cuuaaugcuugcuggcugg

SEQ ID NO: 1473087 - RNA, 19 nt, Artificial Sequence
  Description of Artificial Sequence: Synthetic oligonucleotide
aaagacgaauaaggguacc

SEQ ID NO: 1473088 - RNA, 19 nt, Artificial Sequence
  Description of Artificial Sequence: Synthetic oligonucleotide
aguauaggguggcaggguc

SEQ ID NO: 1473089 - RNA, 19 nt, Artificial Sequence
  Description of Artificial Sequence: Synthetic oligonucleotide
aauugacauucuuggaagu

SEQ ID NO: 1473090 - RNA, 19 nt, Artificial Sequence
  Description of Artificial Sequence: Synthetic oligonucleotide
uuuguggaaggucccaucu

SEQ ID NO: 1473091 - RNA, 19 nt, Artificial Sequence
  Description of Artificial Sequence: Synthetic oligonucleotide
cacauuauagauucggaca

SEQ ID NO: 1473092 - RNA, 19 nt, Artificial Sequence
  Description of Artificial Sequence: Synthetic oligonucleotide
uauuuagacacagcugugc

SEQ ID NO: 1473093 - RNA, 19 nt, Artificial Sequence
  Description of Artificial Sequence: Synthetic oligonucleotide
uguggaaggucccaucuac

SEQ ID NO: 1473094 - RNA, 19 nt, Artificial Sequence
  Description of Artificial Sequence: Synthetic oligonucleotide
gauuacgacaaccccuuug

SEQ ID NO: 1473095 - RNA, 19 nt, Artificial Sequence
  Description of Artificial Sequence: Synthetic oligonucleotide
agcacaaucacaaucuugu

SEQ ID NO: 1473096 - RNA, 19 nt, Artificial Sequence
  Description of Artificial Sequence: Synthetic oligonucleotide
uuauuuagacacagcugug

SEQ ID NO: 1473097 - RNA, 19 nt, Artificial Sequence
  Description of Artificial Sequence: Synthetic oligonucleotide
aggcccuuuauucguauac

SEQ ID NO: 1473098 - RNA, 19 nt, Artificial Sequence
  Description of Artificial Sequence: Synthetic oligonucleotide
uauucguauacaucacaga

SEQ ID NO: 1473099 - RNA, 19 nt, Artificial Sequence
  Description of Artificial Sequence: Synthetic oligonucleotide
uugaauggagagugagagg

SEQ ID NO: 1473100 - RNA, 19 nt, Artificial Sequence
  Description of Artificial Sequence: Synthetic oligonucleotide
cauauuuguggaagguccc

SEQ ID NO: 1473101 - RNA, 19 nt, Artificial Sequence
  Description of Artificial Sequence: Synthetic oligonucleotide
cacgcugccuacuugcucg

SEQ ID NO: 1473102 - RNA, 19 nt, Artificial Sequence
  Description of Artificial Sequence: Synthetic oligonucleotide
ugauagugaauggagcuga

SEQ ID NO: 1473103 - RNA, 19 nt, Artificial Sequence
  Description of Artificial Sequence: Synthetic oligonucleotide
uaaggguacccuuuuggga

SEQ ID NO: 1473104 - RNA, 19 nt, Artificial Sequence
  Description of Artificial Sequence: Synthetic oligonucleotide
uccauggcacagcaaaagc

SEQ ID NO: 1473105 - RNA, 19 nt, Artificial Sequence
  Description of Artificial Sequence: Synthetic oligonucleotide
uccacauuauagauucgga

SEQ ID NO: 1473106 - RNA, 19 nt, Artificial Sequence
  Description of Artificial Sequence: Synthetic oligonucleotide
guuggauuacgacaacccc

SEQ ID NO: 1473107 - RNA, 19 nt, Artificial Sequence
  Description of Artificial Sequence: Synthetic oligonucleotide
guacugcccaaucauaggc

SEQ ID NO: 1473108 - RNA, 19 nt, Artificial Sequence
  Description of Artificial Sequence: Synthetic oligonucleotide
ugaugugcauugauaguga

SEQ ID NO: 1473109 - RNA, 19 nt, Artificial Sequence
  Description of Artificial Sequence: Synthetic oligonucleotide
auggcaauuacagaauuga

SEQ ID NO: 1473110 - RNA, 19 nt, Artificial Sequence
  Description of Artificial Sequence: Synthetic oligonucleotide
agcaaagauauggacagug

SEQ ID NO: 1473111 - RNA, 19 nt, Artificial Sequence
  Description of Artificial Sequence: Synthetic oligonucleotide
gaugcaugcugacucagca

SEQ ID NO: 1473112 - RNA, 19 nt, Artificial Sequence
  Description of Artificial Sequence: Synthetic oligonucleotide
aguuaaugcaguauagggu

SEQ ID NO: 1473113 - RNA, 19 nt, Artificial Sequence
  Description of Artificial Sequence: Synthetic oligonucleotide
ugcauugauagugaaugga

SEQ ID NO: 1473114 - RNA, 19 nt, Artificial Sequence
  Description of Artificial Sequence: Synthetic oligonucleotide
gaaggaguauacauagaug

SEQ ID NO: 1473115 - RNA, 19 nt, Artificial Sequence
  Description of Artificial Sequence: Synthetic oligonucleotide
cuuuauucguauacaucac

SEQ ID NO: 1473116 - RNA, 19 nt, Artificial Sequence
  Description of Artificial Sequence: Synthetic oligonucleotide
gacgcuaucuccugguaac

SEQ ID NO: 1473117 - RNA, 19 nt, Artificial Sequence
  Description of Artificial Sequence: Synthetic oligonucleotide
uguacuugccagauccacu

SEQ ID NO: 1473118 - RNA, 19 nt, Artificial Sequence
  Description of Artificial Sequence: Synthetic oligonucleotide
acauucuuggaaguauuuc

SEQ ID NO: 1473119 - RNA, 19 nt, Artificial Sequence
  Description of Artificial Sequence: Synthetic oligonucleotide
uacgacaaccccuuugggu

SEQ ID NO: 1473120 - RNA, 19 nt, Artificial Sequence
  Description of Artificial Sequence: Synthetic oligonucleotide
ugacucagcaggcacagua

SEQ ID NO: 1473121 - RNA, 19 nt, Artificial Sequence
  Description of Artificial Sequence: Synthetic oligonucleotide
aucggugcagcaucucuac

SEQ ID NO: 1473122 - RNA, 19 nt, Artificial Sequence
  Description of Artificial Sequence: Synthetic oligonucleotide
aaauuccccagguuggauu

SEQ ID NO: 1473123 - RNA, 19 nt, Artificial Sequence
  Description of Artificial Sequence: Synthetic oligonucleotide
auuauagauucggacaccu

SEQ ID NO: 1473124 - RNA, 19 nt, Artificial Sequence
  Description of Artificial Sequence: Synthetic oligonucleotide
agguuggauuacgacaacc

SEQ ID NO: 1473125 - RNA, 19 nt, Artificial Sequence
  Description of Artificial Sequence: Synthetic oligonucleotide
ugaguguuucccagacuag

SEQ ID NO: 1473126 - RNA, 19 nt, Artificial Sequence
  Description of Artificial Sequence: Synthetic oligonucleotide
ugcuugaauggagagugag

SEQ ID NO: 1473127 - RNA, 19 nt, Artificial Sequence
  Description of Artificial Sequence: Synthetic oligonucleotide
uuacgacaaccccuuuggg

SEQ ID NO: 1473128 - RNA, 19 nt, Artificial Sequence
  Description of Artificial Sequence: Synthetic oligonucleotide
ucugaugugcauugauagu

SEQ ID NO: 1473129 - RNA, 19 nt, Artificial Sequence
  Description of Artificial Sequence: Synthetic oligonucleotide
uugucauggcgcaugcgca

SEQ ID NO: 1473130 - RNA, 19 nt, Artificial Sequence
  Description of Artificial Sequence: Synthetic oligonucleotide
uggauuacgacaaccccuu

SEQ ID NO: 1473131 - RNA, 19 nt, Artificial Sequence
  Description of Artificial Sequence: Synthetic oligonucleotide
uauuucgaccaaaggcgca

SEQ ID NO: 1473132 - RNA, 19 nt, Artificial Sequence
  Description of Artificial Sequence: Synthetic oligonucleotide
gcuaccaccgcccaccagg

SEQ ID NO: 1473133 - RNA, 19 nt, Artificial Sequence
  Description of Artificial Sequence: Synthetic oligonucleotide
guauacauagaugcgguuc

SEQ ID NO: 1473134 - RNA, 19 nt, Artificial Sequence
  Description of Artificial Sequence: Synthetic oligonucleotide
auagauucggacaccuguc

SEQ ID NO: 1473135 - RNA, 19 nt, Artificial Sequence
  Description of Artificial Sequence: Synthetic oligonucleotide
uggcaauuacagaauugac

SEQ ID NO: 1473136 - RNA, 19 nt, Artificial Sequence
  Description of Artificial Sequence: Synthetic oligonucleotide
gacuagguggcccagggaa

SEQ ID NO: 1473137 - RNA, 19 nt, Artificial Sequence
  Description of Artificial Sequence: Synthetic oligonucleotide
ugcaccucgcuuuugccga

SEQ ID NO: 1473138 - RNA, 19 nt, Artificial Sequence
  Description of Artificial Sequence: Synthetic oligonucleotide
ugucccgagugucaaacuc

SEQ ID NO: 1473139 - RNA, 19 nt, Artificial Sequence
  Description of Artificial Sequence: Synthetic oligonucleotide
gaggcuaccacggugccug

SEQ ID NO: 1473140 - RNA, 19 nt, Artificial Sequence
  Description of Artificial Sequence: Synthetic oligonucleotide
aggaguauacauagaugcg

SEQ ID NO: 1473141 - RNA, 19 nt, Artificial Sequence
  Description of Artificial Sequence: Synthetic oligonucleotide
uuuguacuugccagaucca

SEQ ID NO: 1473142 - RNA, 19 nt, Artificial Sequence
  Description of Artificial Sequence: Synthetic oligonucleotide
caaaggcgcagaugcaugc

SEQ ID NO: 1473143 - RNA, 19 nt, Artificial Sequence
  Description of Artificial Sequence: Synthetic oligonucleotide
cacgagccagcgcagagcg

SEQ ID NO: 1473144 - RNA, 19 nt, Artificial Sequence
  Description of Artificial Sequence: Synthetic oligonucleotide
gucccuaugaguguuuccc

SEQ ID NO: 1473145 - RNA, 19 nt, Artificial Sequence
  Description of Artificial Sequence: Synthetic oligonucleotide
gugcauugauagugaaugg

SEQ ID NO: 1473146 - RNA, 19 nt, Artificial Sequence
  Description of Artificial Sequence: Synthetic oligonucleotide
auuucgaccaaaggcgcag

SEQ ID NO: 1473147 - RNA, 19 nt, Artificial Sequence
  Description of Artificial Sequence: Synthetic oligonucleotide
gacauauuuguggaagguc

SEQ ID NO: 1473148 - RNA, 19 nt, Artificial Sequence
  Description of Artificial Sequence: Synthetic oligonucleotide
ugccagggcucuuaaaagu

SEQ ID NO: 1473149 - RNA, 19 nt, Artificial Sequence
  Description of Artificial Sequence: Synthetic oligonucleotide
guaggcuggucacaccccg

SEQ ID NO: 1473150 - RNA, 19 nt, Artificial Sequence
  Description of Artificial Sequence: Synthetic oligonucleotide
ucggacaccugucuccaug

SEQ ID NO: 1473151 - RNA, 19 nt, Artificial Sequence
  Description of Artificial Sequence: Synthetic oligonucleotide
gcucuuaaaagucaucguc

SEQ ID NO: 1473152 - RNA, 19 nt, Artificial Sequence
  Description of Artificial Sequence: Synthetic oligonucleotide
cagaucagcacugagaucu

SEQ ID NO: 1473153 - RNA, 19 nt, Artificial Sequence
  Description of Artificial Sequence: Synthetic oligonucleotide
agugaauggagcugaugaa

SEQ ID NO: 1473154 - RNA, 19 nt, Artificial Sequence
  Description of Artificial Sequence: Synthetic oligonucleotide
uugccagauccacuaguug

SEQ ID NO: 1473155 - RNA, 19 nt, Artificial Sequence
  Description of Artificial Sequence: Synthetic oligonucleotide
gugagcuguuuauuuagac

SEQ ID NO: 1473156 - RNA, 19 nt, Artificial Sequence
  Description of Artificial Sequence: Synthetic oligonucleotide
cugaaguuaaugcaguaua

SEQ ID NO: 1473157 - RNA, 19 nt, Artificial Sequence
  Description of Artificial Sequence: Synthetic oligonucleotide
ggaaguauuucgaccaaag

SEQ ID NO: 1473158 - RNA, 19 nt, Artificial Sequence
  Description of Artificial Sequence: Synthetic oligonucleotide
cuaguugcaggcuuccaca

SEQ ID NO: 1473159 - RNA, 19 nt, Artificial Sequence
  Description of Artificial Sequence: Synthetic oligonucleotide
guauuucgaccaaaggcgc

SEQ ID NO: 1473160 - RNA, 19 nt, Artificial Sequence
  Description of Artificial Sequence: Synthetic oligonucleotide
gacugucuccccuuggauc

SEQ ID NO: 1473161 - RNA, 19 nt, Artificial Sequence
  Description of Artificial Sequence: Synthetic oligonucleotide
acugagaguccacguacug

SEQ ID NO: 1473162 - RNA, 19 nt, Artificial Sequence
  Description of Artificial Sequence: Synthetic oligonucleotide
ugcugcgucaugguucagg

SEQ ID NO: 1473163 - RNA, 19 nt, Artificial Sequence
  Description of Artificial Sequence: Synthetic oligonucleotide
ccgagugucaaacucaaac

SEQ ID NO: 1473164 - RNA, 19 nt, Artificial Sequence
  Description of Artificial Sequence: Synthetic oligonucleotide
gcauugauagugaauggag

SEQ ID NO: 1473165 - RNA, 19 nt, Artificial Sequence
  Description of Artificial Sequence: Synthetic oligonucleotide
ccuccuuaaugcuugcugg

SEQ ID NO: 1473166 - RNA, 19 nt, Artificial Sequence
  Description of Artificial Sequence: Synthetic oligonucleotide
acuugccagauccacuagu

SEQ ID NO: 1473167 - RNA, 19 nt, Artificial Sequence
  Description of Artificial Sequence: Synthetic oligonucleotide
cuuaaaagucaucgucguc

SEQ ID NO: 1473168 - RNA, 19 nt, Artificial Sequence
  Description of Artificial Sequence: Synthetic oligonucleotide
gucacacagccccuugggg

SEQ ID NO: 1473169 - RNA, 19 nt, Artificial Sequence
  Description of Artificial Sequence: Synthetic oligonucleotide
uuugggucccuaugagugu

SEQ ID NO: 1473170 - RNA, 19 nt, Artificial Sequence
  Description of Artificial Sequence: Synthetic oligonucleotide
gguuggauuacgacaaccc

SEQ ID NO: 1473171 - RNA, 19 nt, Artificial Sequence
  Description of Artificial Sequence: Synthetic oligonucleotide
cacaguaaagcuggccagg

SEQ ID NO: 1473172 - RNA, 19 nt, Artificial Sequence
  Description of Artificial Sequence: Synthetic oligonucleotide
cauuauagauucggacacc

SEQ ID NO: 1473173 - RNA, 19 nt, Artificial Sequence
  Description of Artificial Sequence: Synthetic oligonucleotide
uccacugagaguccacgua

SEQ ID NO: 1473174 - RNA, 19 nt, Artificial Sequence
  Description of Artificial Sequence: Synthetic oligonucleotide
uccacuaguugcaggcuuc

SEQ ID NO: 1473175 - RNA, 19 nt, Artificial Sequence
  Description of Artificial Sequence: Synthetic oligonucleotide
uuguacuugccagauccac

SEQ ID NO: 1473176 - RNA, 19 nt, Artificial Sequence
  Description of Artificial Sequence: Synthetic oligonucleotide
acguacugcccaaucauag

SEQ ID NO: 1473177 - RNA, 19 nt, Artificial Sequence
  Description of Artificial Sequence: Synthetic oligonucleotide
uggucacaccccgaagugg

SEQ ID NO: 1473178 - RNA, 19 nt, Artificial Sequence
  Description of Artificial Sequence: Synthetic oligonucleotide
acagacgcuaucuccuggu

SEQ ID NO: 1473179 - RNA, 19 nt, Artificial Sequence
  Description of Artificial Sequence: Synthetic oligonucleotide
guuaaaauguaggcugguc

SEQ ID NO: 1473180 - RNA, 19 nt, Artificial Sequence
  Description of Artificial Sequence: Synthetic oligonucleotide
aaugcaguauaggguggca

SEQ ID NO: 1473181 - RNA, 19 nt, Artificial Sequence
  Description of Artificial Sequence: Synthetic oligonucleotide
gaggcgggugucuuuaaga

SEQ ID NO: 1473182 - RNA, 19 nt, Artificial Sequence
  Description of Artificial Sequence: Synthetic oligonucleotide
agacgaauaaggguacccu

SEQ ID NO: 1473183 - RNA, 19 nt, Artificial Sequence
  Description of Artificial Sequence: Synthetic oligonucleotide
uacuugccagauccacuag

SEQ ID NO: 1473184 - RNA, 19 nt, Artificial Sequence
  Description of Artificial Sequence: Synthetic oligonucleotide
ucgucacagaugucaaggu

SEQ ID NO: 1473185 - RNA, 19 nt, Artificial Sequence
  Description of Artificial Sequence: Synthetic oligonucleotide
ccacauuauagauucggac

SEQ ID NO: 1473186 - RNA, 19 nt, Artificial Sequence
  Description of Artificial Sequence: Synthetic oligonucleotide
uuggaaguauuucgaccaa

SEQ ID NO: 1473187 - RNA, 19 nt, Artificial Sequence
  Description of Artificial Sequence: Synthetic oligonucleotide
aggguacccuuuugggagg

SEQ ID NO: 1473188 - RNA, 19 nt, Artificial Sequence
  Description of Artificial Sequence: Synthetic oligonucleotide
ucacagacgcuaucuccug

SEQ ID NO: 1473189 - RNA, 19 nt, Artificial Sequence
  Description of Artificial Sequence: Synthetic oligonucleotide
cugagaguccacguacugc

SEQ ID NO: 1473190 - RNA, 19 nt, Artificial Sequence
  Description of Artificial Sequence: Synthetic oligonucleotide
agaguccacguacugccca

SEQ ID NO: 1473191 - RNA, 19 nt, Artificial Sequence
  Description of Artificial Sequence: Synthetic oligonucleotide
ugucauggcgcaugcgcac

SEQ ID NO: 1473192 - RNA, 19 nt, Artificial Sequence
  Description of Artificial Sequence: Synthetic oligonucleotide
uaguugcaggcuuccacac

SEQ ID NO: 1473193 - RNA, 19 nt, Artificial Sequence
  Description of Artificial Sequence: Synthetic oligonucleotide
cacgucaaaggccucucug

SEQ ID NO: 1473194 - RNA, 19 nt, Artificial Sequence
  Description of Artificial Sequence: Synthetic oligonucleotide
uucucgggcaucgucccag

SEQ ID NO: 1473195 - RNA, 19 nt, Artificial Sequence
  Description of Artificial Sequence: Synthetic oligonucleotide
ucccuaugaguguuuccca

SEQ ID NO: 1473196 - RNA, 19 nt, Artificial Sequence
  Description of Artificial Sequence: Synthetic oligonucleotide
uuggaucggugcagcaucu

SEQ ID NO: 1473197 - RNA, 19 nt, Artificial Sequence
  Description of Artificial Sequence: Synthetic oligonucleotide
cuaccaccgcccaccaggg

SEQ ID NO: 1473198 - RNA, 19 nt, Artificial Sequence
  Description of Artificial Sequence: Synthetic oligonucleotide
gaauggagagugagaggcc

SEQ ID NO: 1473199 - RNA, 19 nt, Artificial Sequence
  Description of Artificial Sequence: Synthetic oligonucleotide
cacagacgcuaucuccugg

SEQ ID NO: 1473200 - RNA, 19 nt, Artificial Sequence
  Description of Artificial Sequence: Synthetic oligonucleotide
ucgggcaucgucccagauc

SEQ ID NO: 1473201 - RNA, 19 nt, Artificial Sequence
  Description of Artificial Sequence: Synthetic oligonucleotide
ugcaggcuuccacacuugu

SEQ ID NO: 1473202 - RNA, 19 nt, Artificial Sequence
  Description of Artificial Sequence: Synthetic oligonucleotide
aaaggcgcagaugcaugcu

SEQ ID NO: 1473203 - RNA, 19 nt, Artificial Sequence
  Description of Artificial Sequence: Synthetic oligonucleotide
acgcuaucuccugguaacc

SEQ ID NO: 1473204 - RNA, 19 nt, Artificial Sequence
  Description of Artificial Sequence: Synthetic oligonucleotide
agucaucgucgucacagau

SEQ ID NO: 1473205 - RNA, 19 nt, Artificial Sequence
  Description of Artificial Sequence: Synthetic oligonucleotide
agacgcuaucuccugguaa

SEQ ID NO: 1473206 - RNA, 19 nt, Artificial Sequence
  Description of Artificial Sequence: Synthetic oligonucleotide
guuucccagacuagguggc

SEQ ID NO: 1473207 - RNA, 19 nt, Artificial Sequence
  Description of Artificial Sequence: Synthetic oligonucleotide
auugacauucuuggaagua

SEQ ID NO: 1473208 - RNA, 19 nt, Artificial Sequence
  Description of Artificial Sequence: Synthetic oligonucleotide
ugccaggcuuuguacuugc

SEQ ID NO: 1473209 - RNA, 19 nt, Artificial Sequence
  Description of Artificial Sequence: Synthetic oligonucleotide
cagggaaacuguccauggc

SEQ ID NO: 1473210 - RNA, 19 nt, Artificial Sequence
  Description of Artificial Sequence: Synthetic oligonucleotide
cugcccaaucauaggcccg

SEQ ID NO: 1473211 - RNA, 19 nt, Artificial Sequence
  Description of Artificial Sequence: Synthetic oligonucleotide
cuacgcagauggcaauuac

SEQ ID NO: 1473212 - RNA, 19 nt, Artificial Sequence
  Description of Artificial Sequence: Synthetic oligonucleotide
gucaucgucgucacagaug

SEQ ID NO: 1473213 - RNA, 19 nt, Artificial Sequence
  Description of Artificial Sequence: Synthetic oligonucleotide
guggaaggucccaucuacg

SEQ ID NO: 1473214 - RNA, 19 nt, Artificial Sequence
  Description of Artificial Sequence: Synthetic oligonucleotide
cagaauugacauucuugga

SEQ ID NO: 1473215 - RNA, 19 nt, Artificial Sequence
  Description of Artificial Sequence: Synthetic oligonucleotide
uuucgaggauugucaggga

SEQ ID NO: 1473216 - RNA, 19 nt, Artificial Sequence
  Description of Artificial Sequence: Synthetic oligonucleotide
ggucuugguuaaaauguag

SEQ ID NO: 1473217 - RNA, 19 nt, Artificial Sequence
  Description of Artificial Sequence: Synthetic oligonucleotide
gaguauacauagaugcggu

SEQ ID NO: 1473218 - RNA, 19 nt, Artificial Sequence
  Description of Artificial Sequence: Synthetic oligonucleotide
uggaaguauuucgaccaaa

SEQ ID NO: 1473219 - RNA, 19 nt, Artificial Sequence
  Description of Artificial Sequence: Synthetic oligonucleotide
gcuuucgaggauugucagg

SEQ ID NO: 1473220 - RNA, 19 nt, Artificial Sequence
  Description of Artificial Sequence: Synthetic oligonucleotide
accccuuugggucccuaug

SEQ ID NO: 1473221 - RNA, 19 nt, Artificial Sequence
  Description of Artificial Sequence: Synthetic oligonucleotide
cacaccccgaaguggcugc

SEQ ID NO: 1473222 - RNA, 19 nt, Artificial Sequence
  Description of Artificial Sequence: Synthetic oligonucleotide
ugcccaaucauaggcccga

SEQ ID NO: 1473223 - RNA, 19 nt, Artificial Sequence
  Description of Artificial Sequence: Synthetic oligonucleotide
uccccagguuggauuacga

SEQ ID NO: 1473224 - RNA, 19 nt, Artificial Sequence
  Description of Artificial Sequence: Synthetic oligonucleotide
ucuacgcagauggcaauua

SEQ ID NO: 1473225 - RNA, 19 nt, Artificial Sequence
  Description of Artificial Sequence: Synthetic oligonucleotide
uacauagaugcgguuccuc

SEQ ID NO: 1473226 - RNA, 19 nt, Artificial Sequence
  Description of Artificial Sequence: Synthetic oligonucleotide
uucgaccaaaggcgcagau

SEQ ID NO: 1473227 - RNA, 19 nt, Artificial Sequence
  Description of Artificial Sequence: Synthetic oligonucleotide
ugguccagaugccccuucu

SEQ ID NO: 1473228 - RNA, 19 nt, Artificial Sequence
  Description of Artificial Sequence: Synthetic oligonucleotide
agaugucaagguacacguc

SEQ ID NO: 1473229 - RNA, 19 nt, Artificial Sequence
  Description of Artificial Sequence: Synthetic oligonucleotide
uaaauuccccagguuggau

SEQ ID NO: 1473230 - RNA, 19 nt, Artificial Sequence
  Description of Artificial Sequence: Synthetic oligonucleotide
ucacaccccgaaguggcug

SEQ ID NO: 1473231 - RNA, 19 nt, Artificial Sequence
  Description of Artificial Sequence: Synthetic oligonucleotide
gagugagaggccuccuuaa

SEQ ID NO: 1473232 - RNA, 19 nt, Artificial Sequence
  Description of Artificial Sequence: Synthetic oligonucleotide
aaccccuuugggucccuau

SEQ ID NO: 1473233 - RNA, 19 nt, Artificial Sequence
  Description of Artificial Sequence: Synthetic oligonucleotide
auccacuaguugcaggcuu

SEQ ID NO: 1473234 - RNA, 19 nt, Artificial Sequence
  Description of Artificial Sequence: Synthetic oligonucleotide
aacagcuuucgaggauugu

SEQ ID NO: 1473235 - RNA, 19 nt, Artificial Sequence
  Description of Artificial Sequence: Synthetic oligonucleotide
ggucacaccccgaaguggc

SEQ ID NO: 1473236 - RNA, 19 nt, Artificial Sequence
  Description of Artificial Sequence: Synthetic oligonucleotide
guacccuuuugggaggcug

SEQ ID NO: 1473237 - RNA, 19 nt, Artificial Sequence
  Description of Artificial Sequence: Synthetic oligonucleotide
acgaauaaggguacccuuu

SEQ ID NO: 1473238 - RNA, 19 nt, Artificial Sequence
  Description of Artificial Sequence: Synthetic oligonucleotide
agggucagugccucuucga

SEQ ID NO: 1473239 - RNA, 19 nt, Artificial Sequence
  Description of Artificial Sequence: Synthetic oligonucleotide
uugucccgagugucaaacu

SEQ ID NO: 1473240 - RNA, 19 nt, Artificial Sequence
  Description of Artificial Sequence: Synthetic oligonucleotide
ucccaucuacgcagauggc

SEQ ID NO: 1473241 - RNA, 19 nt, Artificial Sequence
  Description of Artificial Sequence: Synthetic oligonucleotide
ccuuggaucgugcuccagc

SEQ ID NO: 1473242 - RNA, 19 nt, Artificial Sequence
  Description of Artificial Sequence: Synthetic oligonucleotide
cuuggaucgugcuccagcu

SEQ ID NO: 1473243 - RNA, 19 nt, Artificial Sequence
  Description of Artificial Sequence: Synthetic oligonucleotide
ccuuaaugcuugcuggcug

SEQ ID NO: 1473244 - RNA, 19 nt, Artificial Sequence
  Description of Artificial Sequence: Synthetic oligonucleotide
gacgaauaaggguacccuu

SEQ ID NO: 1473245 - RNA, 19 nt, Artificial Sequence
  Description of Artificial Sequence: Synthetic oligonucleotide
ccagguuggauuacgacaa

SEQ ID NO: 1473246 - RNA, 19 nt, Artificial Sequence
  Description of Artificial Sequence: Synthetic oligonucleotide
uuucgaccaaaggcgcaga

SEQ ID NO: 1473247 - RNA, 19 nt, Artificial Sequence
  Description of Artificial Sequence: Synthetic oligonucleotide
ccacugagaguccacguac

SEQ ID NO: 1473248 - RNA, 19 nt, Artificial Sequence
  Description of Artificial Sequence: Synthetic oligonucleotide
cuugcucgugguccagaug

SEQ ID NO: 1473249 - RNA, 19 nt, Artificial Sequence
  Description of Artificial Sequence: Synthetic oligonucleotide
caggagugaagacauauuu

SEQ ID NO: 1473250 - RNA, 19 nt, Artificial Sequence
  Description of Artificial Sequence: Synthetic oligonucleotide
gagaguccacguacugccc

SEQ ID NO: 1473251 - RNA, 19 nt, Artificial Sequence
  Description of Artificial Sequence: Synthetic oligonucleotide
gccuacuugcucguggucc

SEQ ID NO: 1473252 - RNA, 19 nt, Artificial Sequence
  Description of Artificial Sequence: Synthetic oligonucleotide
caggacugucuccccuugg

SEQ ID NO: 1473253 - RNA, 19 nt, Artificial Sequence
  Description of Artificial Sequence: Synthetic oligonucleotide
cagguuggaucggugcagc

SEQ ID NO: 1473254 - RNA, 19 nt, Artificial Sequence
  Description of Artificial Sequence: Synthetic oligonucleotide
acacgucaaaggccucucu

SEQ ID NO: 1473255 - RNA, 19 nt, Artificial Sequence
  Description of Artificial Sequence: Synthetic oligonucleotide
cugaggcuaccacggugcc

SEQ ID NO: 1473256 - RNA, 19 nt, Artificial Sequence
  Description of Artificial Sequence: Synthetic oligonucleotide
cuaccacggugccuggcug

SEQ ID NO: 1473257 - RNA, 19 nt, Artificial Sequence
  Description of Artificial Sequence: Synthetic oligonucleotide
guauaggguggcaggguca

SEQ ID NO: 1473258 - RNA, 19 nt, Artificial Sequence
  Description of Artificial Sequence: Synthetic oligonucleotide
gcugcgucaugguucagga

SEQ ID NO: 1473259 - RNA, 19 nt, Artificial Sequence
  Description of Artificial Sequence: Synthetic oligonucleotide
gacaaccccuuuggguccc

SEQ ID NO: 1473260 - RNA, 19 nt, Artificial Sequence
  Description of Artificial Sequence: Synthetic oligonucleotide
gaucggugcagcaucucua

SEQ ID NO: 1473261 - RNA, 19 nt, Artificial Sequence
  Description of Artificial Sequence: Synthetic oligonucleotide
gcugacucagcaggcacag

SEQ ID NO: 1473262 - RNA, 19 nt, Artificial Sequence
  Description of Artificial Sequence: Synthetic oligonucleotide
ugcuaccaccgcccaccag

SEQ ID NO: 1473263 - RNA, 19 nt, Artificial Sequence
  Description of Artificial Sequence: Synthetic oligonucleotide
ccaaaggcgcagaugcaug

SEQ ID NO: 1473264 - RNA, 19 nt, Artificial Sequence
  Description of Artificial Sequence: Synthetic oligonucleotide
ggcaucgucccagaucagc

SEQ ID NO: 1473265 - RNA, 19 nt, Artificial Sequence
  Description of Artificial Sequence: Synthetic oligonucleotide
uugggucccuaugaguguu

SEQ ID NO: 1473266 - RNA, 19 nt, Artificial Sequence
  Description of Artificial Sequence: Synthetic oligonucleotide
ugccuacuugcucgugguc

SEQ ID NO: 1473267 - RNA, 19 nt, Artificial Sequence
  Description of Artificial Sequence: Synthetic oligonucleotide
agguuggaucggugcagca

SEQ ID NO: 1473268 - RNA, 19 nt, Artificial Sequence
  Description of Artificial Sequence: Synthetic oligonucleotide
gaguccacguacugcccaa

SEQ ID NO: 1473269 - RNA, 19 nt, Artificial Sequence
  Description of Artificial Sequence: Synthetic oligonucleotide
ggucccuaugaguguuucc

SEQ ID NO: 1473270 - RNA, 19 nt, Artificial Sequence
  Description of Artificial Sequence: Synthetic oligonucleotide
cugaugaagugccaggcuu

SEQ ID NO: 1473271 - RNA, 19 nt, Artificial Sequence
  Description of Artificial Sequence: Synthetic oligonucleotide
ugaggcuaccacggugccu

SEQ ID NO: 1473272 - RNA, 19 nt, Artificial Sequence
  Description of Artificial Sequence: Synthetic oligonucleotide
gcccacgcugccuacuugc

SEQ ID NO: 1473273 - RNA, 19 nt, Artificial Sequence
  Description of Artificial Sequence: Synthetic oligonucleotide
cagguuggauuacgacaac

SEQ ID NO: 1473274 - RNA, 19 nt, Artificial Sequence
  Description of Artificial Sequence: Synthetic oligonucleotide
aucuacgcagauggcaauu

SEQ ID NO: 1473275 - RNA, 19 nt, Artificial Sequence
  Description of Artificial Sequence: Synthetic oligonucleotide
ggcuugguaaaggugaacu

SEQ ID NO: 1473276 - RNA, 19 nt, Artificial Sequence
  Description of Artificial Sequence: Synthetic oligonucleotide
caugcugacucagcaggca

SEQ ID NO: 1473277 - RNA, 19 nt, Artificial Sequence
  Description of Artificial Sequence: Synthetic oligonucleotide
ucucgggcaucgucccaga

SEQ ID NO: 1473278 - RNA, 19 nt, Artificial Sequence
  Description of Artificial Sequence: Synthetic oligonucleotide
gcugguucaacacccucaa

SEQ ID NO: 1473279 - RNA, 19 nt, Artificial Sequence
  Description of Artificial Sequence: Synthetic oligonucleotide
cugcgucaugguucaggac

SEQ ID NO: 1473280 - RNA, 19 nt, Artificial Sequence
  Description of Artificial Sequence: Synthetic oligonucleotide
guugaggcgggugucuuua

SEQ ID NO: 1473281 - RNA, 19 nt, Artificial Sequence
  Description of Artificial Sequence: Synthetic oligonucleotide
cagcuuuggucuugguuaa

SEQ ID NO: 1473282 - RNA, 19 nt, Artificial Sequence
  Description of Artificial Sequence: Synthetic oligonucleotide
gguuccuaguacagcugcc

SEQ ID NO: 1473283 - RNA, 19 nt, Artificial Sequence
  Description of Artificial Sequence: Synthetic oligonucleotide
ccaucuacgcagauggcaa

SEQ ID NO: 1473284 - RNA, 19 nt, Artificial Sequence
  Description of Artificial Sequence: Synthetic oligonucleotide
agcgcagagcggcgguuga

SEQ ID NO: 1473285 - RNA, 19 nt, Artificial Sequence
  Description of Artificial Sequence: Synthetic oligonucleotide
acuagguggcccagggaaa

SEQ ID NO: 1473286 - RNA, 19 nt, Artificial Sequence
  Description of Artificial Sequence: Synthetic oligonucleotide
gcuggucacaccccgaagu

SEQ ID NO: 1473287 - RNA, 19 nt, Artificial Sequence
  Description of Artificial Sequence: Synthetic oligonucleotide
gugccaggcuuuguacuug

SEQ ID NO: 1473288 - RNA, 19 nt, Artificial Sequence
  Description of Artificial Sequence: Synthetic oligonucleotide
uaccaccgcccaccagggc

SEQ ID NO: 1473289 - RNA, 19 nt, Artificial Sequence
  Description of Artificial Sequence: Synthetic oligonucleotide
ggucccaucuacgcagaug

SEQ ID NO: 1473290 - RNA, 19 nt, Artificial Sequence
  Description of Artificial Sequence: Synthetic oligonucleotide
agaggccuccuuaaugcuu

SEQ ID NO: 1473291 - RNA, 19 nt, Artificial Sequence
  Description of Artificial Sequence: Synthetic oligonucleotide
cgggcaucgucccagauca

SEQ ID NO: 1473292 - RNA, 19 nt, Artificial Sequence
  Description of Artificial Sequence: Synthetic oligonucleotide
gcuugaauggagagugaga

SEQ ID NO: 1473293 - RNA, 19 nt, Artificial Sequence
  Description of Artificial Sequence: Synthetic oligonucleotide
ccuaugaguguuucccaga

SEQ ID NO: 1473294 - RNA, 19 nt, Artificial Sequence
  Description of Artificial Sequence: Synthetic oligonucleotide
cagcaggcacaguaaagcu

SEQ ID NO: 1473295 - RNA, 19 nt, Artificial Sequence
  Description of Artificial Sequence: Synthetic oligonucleotide
cuucgaagcuccaccaguu

SEQ ID NO: 1473296 - RNA, 19 nt, Artificial Sequence
  Description of Artificial Sequence: Synthetic oligonucleotide
cauggcgcaugcgcacagc

SEQ ID NO: 1473297 - RNA, 19 nt, Artificial Sequence
  Description of Artificial Sequence: Synthetic oligonucleotide
cuacuugcucgugguccag

SEQ ID NO: 1473298 - RNA, 19 nt, Artificial Sequence
  Description of Artificial Sequence: Synthetic oligonucleotide
ggcucuuaaaagucaucgu

SEQ ID NO: 1473299 - RNA, 19 nt, Artificial Sequence
  Description of Artificial Sequence: Synthetic oligonucleotide
cgaccuugcccacacgagc

SEQ ID NO: 1473300 - RNA, 19 nt, Artificial Sequence
  Description of Artificial Sequence: Synthetic oligonucleotide
aggcuaccacggugccugg

SEQ ID NO: 1473301 - RNA, 19 nt, Artificial Sequence
  Description of Artificial Sequence: Synthetic oligonucleotide
gggucagugccucuucgaa

SEQ ID NO: 1473302 - RNA, 19 nt, Artificial Sequence
  Description of Artificial Sequence: Synthetic oligonucleotide
gcgucaugguucaggacug

SEQ ID NO: 1473303 - RNA, 19 nt, Artificial Sequence
  Description of Artificial Sequence: Synthetic oligonucleotide
ccgaccuugcccacacgag

SEQ ID NO: 1473304 - RNA, 19 nt, Artificial Sequence
  Description of Artificial Sequence: Synthetic oligonucleotide
ugggucccuaugaguguuu

SEQ ID NO: 1473305 - RNA, 19 nt, Artificial Sequence
  Description of Artificial Sequence: Synthetic oligonucleotide
ggcuggucacaccccgaag

SEQ ID NO: 1473306 - RNA, 19 nt, Artificial Sequence
  Description of Artificial Sequence: Synthetic oligonucleotide
guacacgucaaaggccucu

SEQ ID NO: 1473307 - RNA, 19 nt, Artificial Sequence
  Description of Artificial Sequence: Synthetic oligonucleotide
ggcgcagaugcaugcugac

SEQ ID NO: 1473308 - RNA, 19 nt, Artificial Sequence
  Description of Artificial Sequence: Synthetic oligonucleotide
ggcccuuuauucguauaca

SEQ ID NO: 1473309 - RNA, 19 nt, Artificial Sequence
  Description of Artificial Sequence: Synthetic oligonucleotide
cacugagaguccacguacu

SEQ ID NO: 1473310 - RNA, 19 nt, Artificial Sequence
  Description of Artificial Sequence: Synthetic oligonucleotide
ccuacuugcucguggucca

SEQ ID NO: 1473311 - RNA, 19 nt, Artificial Sequence
  Description of Artificial Sequence: Synthetic oligonucleotide
ggccuuccgcaccagucac

SEQ ID NO: 1473312 - RNA, 19 nt, Artificial Sequence
  Description of Artificial Sequence: Synthetic oligonucleotide
acgcugccuacuugcucgu

SEQ ID NO: 1473313 - RNA, 19 nt, Artificial Sequence
  Description of Artificial Sequence: Synthetic oligonucleotide
accucgcuuuugccgacuu

SEQ ID NO: 1473314 - RNA, 19 nt, Artificial Sequence
  Description of Artificial Sequence: Synthetic oligonucleotide
augcgguuccucagcacaa

SEQ ID NO: 1473315 - RNA, 19 nt, Artificial Sequence
  Description of Artificial Sequence: Synthetic oligonucleotide
cccaucuacgcagauggca

SEQ ID NO: 1473316 - RNA, 19 nt, Artificial Sequence
  Description of Artificial Sequence: Synthetic oligonucleotide
cugccuacuugcucguggu

SEQ ID NO: 1473317 - RNA, 19 nt, Artificial Sequence
  Description of Artificial Sequence: Synthetic oligonucleotide
caucgucgucacagauguc

SEQ ID NO: 1473318 - RNA, 19 nt, Artificial Sequence
  Description of Artificial Sequence: Synthetic oligonucleotide
cacuuguggccaggaaaca

SEQ ID NO: 1473319 - RNA, 19 nt, Artificial Sequence
  Description of Artificial Sequence: Synthetic oligonucleotide
gcccuuuauucguauacau

SEQ ID NO: 1473320 - RNA, 19 nt, Artificial Sequence
  Description of Artificial Sequence: Synthetic oligonucleotide
gguuaaaauguaggcuggu

SEQ ID NO: 1473321 - RNA, 19 nt, Artificial Sequence
  Description of Artificial Sequence: Synthetic oligonucleotide
ccacuaguugcaggcuucc

SEQ ID NO: 1473322 - RNA, 19 nt, Artificial Sequence
  Description of Artificial Sequence: Synthetic oligonucleotide
gcgguuccucagcacaauc

SEQ ID NO: 1473323 - RNA, 19 nt, Artificial Sequence
  Description of Artificial Sequence: Synthetic oligonucleotide
gcuaccacggugccuggcu

SEQ ID NO: 1473324 - RNA, 19 nt, Artificial Sequence
  Description of Artificial Sequence: Synthetic oligonucleotide
ggcccgaccuugcccacac

SEQ ID NO: 1473325 - RNA, 19 nt, Artificial Sequence
  Description of Artificial Sequence: Synthetic oligonucleotide
caaucauaggcccgaccuu

SEQ ID NO: 1473326 - RNA, 19 nt, Artificial Sequence
  Description of Artificial Sequence: Synthetic oligonucleotide
cccgaccuugcccacacga

SEQ ID NO: 1473327 - RNA, 19 nt, Artificial Sequence
  Description of Artificial Sequence: Synthetic oligonucleotide
acgagccagcgcagagcgg

SEQ ID NO: 1473328 - RNA, 19 nt, Artificial Sequence
  Description of Artificial Sequence: Synthetic oligonucleotide
caucuacgcagauggcaau

SEQ ID NO: 1473329 - RNA, 19 nt, Artificial Sequence
  Description of Artificial Sequence: Synthetic oligonucleotide
caguaaagcuggccaggcu

SEQ ID NO: 1473330 - RNA, 19 nt, Artificial Sequence
  Description of Artificial Sequence: Synthetic oligonucleotide
ggguacccuuuugggaggc

SEQ ID NO: 1473331 - RNA, 19 nt, Artificial Sequence
  Description of Artificial Sequence: Synthetic oligonucleotide
agcuuuggucuugguuaaa

SEQ ID NO: 1473332 - RNA, 19 nt, Artificial Sequence
  Description of Artificial Sequence: Synthetic oligonucleotide
cgguuccucagcacaauca

SEQ ID NO: 1473333 - RNA, 19 nt, Artificial Sequence
  Description of Artificial Sequence: Synthetic oligonucleotide
cagacgcuaucuccuggua

SEQ ID NO: 1473334 - RNA, 19 nt, Artificial Sequence
  Description of Artificial Sequence: Synthetic oligonucleotide
cacuaguugcaggcuucca

SEQ ID NO: 1473335 - RNA, 19 nt, Artificial Sequence
  Description of Artificial Sequence: Synthetic oligonucleotide
gcuaucuccugguaaccuu

SEQ ID NO: 1473336 - RNA, 19 nt, Artificial Sequence
  Description of Artificial Sequence: Synthetic oligonucleotide
gggguugucccgaguguca

SEQ ID NO: 1473337 - RNA, 19 nt, Artificial Sequence
  Description of Artificial Sequence: Synthetic oligonucleotide
gggugucuuuaagagcaaa

SEQ ID NO: 1473338 - RNA, 19 nt, Artificial Sequence
  Description of Artificial Sequence: Synthetic oligonucleotide
acaccccgaaguggcugcu

SEQ ID NO: 1473339 - RNA, 19 nt, Artificial Sequence
  Description of Artificial Sequence: Synthetic oligonucleotide
gggucccuaugaguguuuc

SEQ ID NO: 1473340 - RNA, 19 nt, Artificial Sequence
  Description of Artificial Sequence: Synthetic oligonucleotide
gguuggaucggugcagcau

SEQ ID NO: 1473341 - RNA, 19 nt, Artificial Sequence
  Description of Artificial Sequence: Synthetic oligonucleotide
ggaaacuguccauggccuu

SEQ ID NO: 1473342 - RNA, 19 nt, Artificial Sequence
  Description of Artificial Sequence: Synthetic oligonucleotide
ccucgcuuuugccgacuug

SEQ ID NO: 1473343 - RNA, 19 nt, Artificial Sequence
  Description of Artificial Sequence: Synthetic oligonucleotide
gcaccucgcuuuugccgac

SEQ ID NO: 1473344 - RNA, 19 nt, Artificial Sequence
  Description of Artificial Sequence: Synthetic oligonucleotide
ggcgguugaggcggguguc

SEQ ID NO: 1473345 - RNA, 19 nt, Artificial Sequence
  Description of Artificial Sequence: Synthetic oligonucleotide
gccuuccgcaccagucacc

SEQ ID NO: 1473346 - RNA, 19 nt, Artificial Sequence
  Description of Artificial Sequence: Synthetic oligonucleotide
gcgcagagcggcgguugag

SEQ ID NO: 1473347 - RNA, 19 nt, Artificial Sequence
  Description of Artificial Sequence: Synthetic oligonucleotide
gcgcaugcgcacagccagc

SEQ ID NO: 1473348 - RNA, 19 nt, Artificial Sequence
  Description of Artificial Sequence: Synthetic oligonucleotide
cccagacuagguggcccag

SEQ ID NO: 1473349 - RNA, 19 nt, Artificial Sequence
  Description of Artificial Sequence: Synthetic oligonucleotide
ccuuggacugggugucaaa

SEQ ID NO: 1473350 - RNA, 19 nt, Artificial Sequence
  Description of Artificial Sequence: Synthetic oligonucleotide
gcccgaccuugcccacacg

SEQ ID NO: 1473351 - RNA, 19 nt, Artificial Sequence
  Description of Artificial Sequence: Synthetic oligonucleotide
gguugaggcgggugucuuu

SEQ ID NO: 1473352 - RNA, 19 nt, Artificial Sequence
  Description of Artificial Sequence: Synthetic oligonucleotide
cugcugcgucaugguucag

SEQ ID NO: 1473353 - RNA, 19 nt, Artificial Sequence
  Description of Artificial Sequence: Synthetic oligonucleotide
gggcaucgucccagaucag

SEQ ID NO: 1473354 - RNA, 19 nt, Artificial Sequence
  Description of Artificial Sequence: Synthetic oligonucleotide
cgaauaaggguacccuuuu

SEQ ID NO: 1473355 - RNA, 19 nt, Artificial Sequence
  Description of Artificial Sequence: Synthetic oligonucleotide
gcccaaucauaggcccgac

SEQ ID NO: 1473356 - RNA, 19 nt, Artificial Sequence
  Description of Artificial Sequence: Synthetic oligonucleotide
ggauuacgacaaccccuuu

SEQ ID NO: 1473357 - RNA, 19 nt, Artificial Sequence
  Description of Artificial Sequence: Synthetic oligonucleotide
cccuuggaucgugcuccag

SEQ ID NO: 1473358 - RNA, 19 nt, Artificial Sequence
  Description of Artificial Sequence: Synthetic oligonucleotide
gcgcagaugcaugcugacu

SEQ ID NO: 1473359 - RNA, 19 nt, Artificial Sequence
  Description of Artificial Sequence: Synthetic oligonucleotide
cucgggcaucgucccagau

SEQ ID NO: 1473360 - RNA, 19 nt, Artificial Sequence
  Description of Artificial Sequence: Synthetic oligonucleotide
cccgagugucaaacucaaa

SEQ ID NO: 1473361 - RNA, 19 nt, Artificial Sequence
  Description of Artificial Sequence: Synthetic oligonucleotide
cgcaugcgcacagccagca

SEQ ID NO: 1473362 - RNA, 19 nt, Artificial Sequence
  Description of Artificial Sequence: Synthetic oligonucleotide
cugacucagcaggcacagu

SEQ ID NO: 1473363 - RNA, 19 nt, Artificial Sequence
  Description of Artificial Sequence: Synthetic oligonucleotide
cccgaaguggcugcugcgu

SEQ ID NO: 1473364 - RNA, 19 nt, Artificial Sequence
  Description of Artificial Sequence: Synthetic oligonucleotide
gcgguugaggcgggugucu

SEQ ID NO: 1473365 - RNA, 19 nt, Artificial Sequence
  Description of Artificial Sequence: Synthetic oligonucleotide
ccccuuggaucgugcucca

SEQ ID NO: 1473366 - RNA, 19 nt, Artificial Sequence
  Description of Artificial Sequence: Synthetic oligonucleotide
cugucuccccuuggaucgu

SEQ ID NO: 1473367 - RNA, 19 nt, Artificial Sequence
  Description of Artificial Sequence: Synthetic oligonucleotide
caccucgcuuuugccgacu

SEQ ID NO: 1473368 - RNA, 19 nt, Artificial Sequence
  Description of Artificial Sequence: Synthetic oligonucleotide
cgggugucuuuaagagcaa

SEQ ID NO: 1473369 - RNA, 19 nt, Artificial Sequence
  Description of Artificial Sequence: Synthetic oligonucleotide
ccuugggguugucccgagu

SEQ ID NO: 1473370 - RNA, 19 nt, Artificial Sequence
  Description of Artificial Sequence: Synthetic oligonucleotide
cgucaugguucaggacugu

SEQ ID NO: 1473371 - RNA, 19 nt, Artificial Sequence
  Description of Artificial Sequence: Synthetic oligonucleotide
aaaagaauauccucuaucg

SEQ ID NO: 1473372 - RNA, 19 nt, Artificial Sequence
  Description of Artificial Sequence: Synthetic oligonucleotide
aaaauaacaugguaugugc

SEQ ID NO: 1473373 - RNA, 19 nt, Artificial Sequence
  Description of Artificial Sequence: Synthetic oligonucleotide
aauccaauaacagacacuc

SEQ ID NO: 1473374 - RNA, 19 nt, Artificial Sequence
  Description of Artificial Sequence: Synthetic oligonucleotide
acugauaggauuuugauca

SEQ ID NO: 1473375 - RNA, 19 nt, Artificial Sequence
  Description of Artificial Sequence: Synthetic oligonucleotide
uuuauauugauauauacuu

SEQ ID NO: 1473376 - RNA, 19 nt, Artificial Sequence
  Description of Artificial Sequence: Synthetic oligonucleotide
uuuguaauggguuucaucu

SEQ ID NO: 1473377 - RNA, 19 nt, Artificial Sequence
  Description of Artificial Sequence: Synthetic oligonucleotide
auaaaugaugguaagaucg

SEQ ID NO: 1473378 - RNA, 19 nt, Artificial Sequence
  Description of Artificial Sequence: Synthetic oligonucleotide
gaugagacgacccucaccg

SEQ ID NO: 1473379 - RNA, 19 nt, Artificial Sequence
  Description of Artificial Sequence: Synthetic oligonucleotide
ugcuuaaggaauuauagag

SEQ ID NO: 1473380 - RNA, 19 nt, Artificial Sequence
  Description of Artificial Sequence: Synthetic oligonucleotide
uauacuugcacaacaaaug

SEQ ID NO: 1473381 - RNA, 19 nt, Artificial Sequence
  Description of Artificial Sequence: Synthetic oligonucleotide
auuuuagcugccuucaggg

SEQ ID NO: 1473382 - RNA, 19 nt, Artificial Sequence
  Description of Artificial Sequence: Synthetic oligonucleotide
ucuaucguagccuuaagug

SEQ ID NO: 1473383 - RNA, 19 nt, Artificial Sequence
  Description of Artificial Sequence: Synthetic oligonucleotide
aaugaugguaagaucgugc

SEQ ID NO: 1473384 - RNA, 19 nt, Artificial Sequence
  Description of Artificial Sequence: Synthetic oligonucleotide
uccaauaacagacacucug

SEQ ID NO: 1473385 - RNA, 19 nt, Artificial Sequence
  Description of Artificial Sequence: Synthetic oligonucleotide
uuucuuaacccauucagug

SEQ ID NO: 1473386 - RNA, 19 nt, Artificial Sequence
  Description of Artificial Sequence: Synthetic oligonucleotide
aaauaaaugaugguaagau

SEQ ID NO: 1473387 - RNA, 19 nt, Artificial Sequence
  Description of Artificial Sequence: Synthetic oligonucleotide
caugcuuaaggaauuauag

SEQ ID NO: 1473388 - RNA, 19 nt, Artificial Sequence
  Description of Artificial Sequence: Synthetic oligonucleotide
acuuauucaacacuccguc

SEQ ID NO: 1473389 - RNA, 19 nt, Artificial Sequence
  Description of Artificial Sequence: Synthetic oligonucleotide
uacagugcaaacucgaacc

SEQ ID NO: 1473390 - RNA, 19 nt, Artificial Sequence
  Description of Artificial Sequence: Synthetic oligonucleotide
aauauuagauggaucacag

SEQ ID NO: 1473391 - RNA, 19 nt, Artificial Sequence
  Description of Artificial Sequence: Synthetic oligonucleotide
augauuaguacuucucuac

SEQ ID NO: 1473392 - RNA, 19 nt, Artificial Sequence
  Description of Artificial Sequence: Synthetic oligonucleotide
uucacgagcaaguacagug

SEQ ID NO: 1473393 - RNA, 19 nt, Artificial Sequence
  Description of Artificial Sequence: Synthetic oligonucleotide
acuaaagaugauuaguacu

SEQ ID NO: 1473394 - RNA, 19 nt, Artificial Sequence
  Description of Artificial Sequence: Synthetic oligonucleotide
ucuuaacccauucagugug

SEQ ID NO: 1473395 - RNA, 19 nt, Artificial Sequence
  Description of Artificial Sequence: Synthetic oligonucleotide
uguuuuaggguuugcauug

SEQ ID NO: 1473396 - RNA, 19 nt, Artificial Sequence
  Description of Artificial Sequence: Synthetic oligonucleotide
aagaauuucccauguucuc

SEQ ID NO: 1473397 - RNA, 19 nt, Artificial Sequence
  Description of Artificial Sequence: Synthetic oligonucleotide
auacuuauucaacacuccg

SEQ ID NO: 1473398 - RNA, 19 nt, Artificial Sequence
  Description of Artificial Sequence: Synthetic oligonucleotide
cauguuggaaucaaauacc

SEQ ID NO: 1473399 - RNA, 19 nt, Artificial Sequence
  Description of Artificial Sequence: Synthetic oligonucleotide
aacaacucuuuguaauggg

SEQ ID NO: 1473400 - RNA, 19 nt, Artificial Sequence
  Description of Artificial Sequence: Synthetic oligonucleotide
cucuuagucacaauuauuc

SEQ ID NO: 1473401 - RNA, 19 nt, Artificial Sequence
  Description of Artificial Sequence: Synthetic oligonucleotide
aguaagaccacauauuuua

SEQ ID NO: 1473402 - RNA, 19 nt, Artificial Sequence
  Description of Artificial Sequence: Synthetic oligonucleotide
aacucgaaccucugcagac

SEQ ID NO: 1473403 - RNA, 19 nt, Artificial Sequence
  Description of Artificial Sequence: Synthetic oligonucleotide
uuaacaacucuuuguaaug

SEQ ID NO: 1473404 - RNA, 19 nt, Artificial Sequence
  Description of Artificial Sequence: Synthetic oligonucleotide
uguguauacuugcacaaca

SEQ ID NO: 1473405 - RNA, 19 nt, Artificial Sequence
  Description of Artificial Sequence: Synthetic oligonucleotide
auauacuuauucaacacuc

SEQ ID NO: 1473406 - RNA, 19 nt, Artificial Sequence
  Description of Artificial Sequence: Synthetic oligonucleotide
uguacuuugcucgacacug

SEQ ID NO: 1473407 - RNA, 19 nt, Artificial Sequence
  Description of Artificial Sequence: Synthetic oligonucleotide
uucuagagaaauuucuuga

SEQ ID NO: 1473408 - RNA, 19 nt, Artificial Sequence
  Description of Artificial Sequence: Synthetic oligonucleotide
auuaguacuucucuacuug

SEQ ID NO: 1473409 - RNA, 19 nt, Artificial Sequence
  Description of Artificial Sequence: Synthetic oligonucleotide
uguuauguguuuccuuggg

SEQ ID NO: 1473410 - RNA, 19 nt, Artificial Sequence
  Description of Artificial Sequence: Synthetic oligonucleotide
ugggaucuuaugaauacag

SEQ ID NO: 1473411 - RNA, 19 nt, Artificial Sequence
  Description of Artificial Sequence: Synthetic oligonucleotide
uguauguccaggcaugugu

SEQ ID NO: 1473412 - RNA, 19 nt, Artificial Sequence
  Description of Artificial Sequence: Synthetic oligonucleotide
ugaaggaugguuuugcauc

SEQ ID NO: 1473413 - RNA, 19 nt, Artificial Sequence
  Description of Artificial Sequence: Synthetic oligonucleotide
ugagugagcauucggagcu

SEQ ID NO: 1473414 - RNA, 19 nt, Artificial Sequence
  Description of Artificial Sequence: Synthetic oligonucleotide
aaagaauauccucuaucgu

SEQ ID NO: 1473415 - RNA, 19 nt, Artificial Sequence
  Description of Artificial Sequence: Synthetic oligonucleotide
uuauucaacacuccgucuc

SEQ ID NO: 1473416 - RNA, 19 nt, Artificial Sequence
  Description of Artificial Sequence: Synthetic oligonucleotide
aacccauucaguguguguc

SEQ ID NO: 1473417 - RNA, 19 nt, Artificial Sequence
  Description of Artificial Sequence: Synthetic oligonucleotide
uaagaucgugccaagugag

SEQ ID NO: 1473418 - RNA, 19 nt, Artificial Sequence
  Description of Artificial Sequence: Synthetic oligonucleotide
aggagggcuaacaugaugc

SEQ ID NO: 1473419 - RNA, 19 nt, Artificial Sequence
  Description of Artificial Sequence: Synthetic oligonucleotide
aauggguuucaucuaaaau

SEQ ID NO: 1473420 - RNA, 19 nt, Artificial Sequence
  Description of Artificial Sequence: Synthetic oligonucleotide
uccguugcaggucauaucu

SEQ ID NO: 1473421 - RNA, 19 nt, Artificial Sequence
  Description of Artificial Sequence: Synthetic oligonucleotide
uccaaaugcgccaugcuga

SEQ ID NO: 1473422 - RNA, 19 nt, Artificial Sequence
  Description of Artificial Sequence: Synthetic oligonucleotide
uccaaucugacugauagga

SEQ ID NO: 1473423 - RNA, 19 nt, Artificial Sequence
  Description of Artificial Sequence: Synthetic oligonucleotide
uccugaucagacaaagaag

SEQ ID NO: 1473424 - RNA, 19 nt, Artificial Sequence
  Description of Artificial Sequence: Synthetic oligonucleotide
ggaucuuaugaauacagcc

SEQ ID NO: 1473425 - RNA, 19 nt, Artificial Sequence
  Description of Artificial Sequence: Synthetic oligonucleotide
ucccauacgaaugagugag

SEQ ID NO: 1473426 - RNA, 19 nt, Artificial Sequence
  Description of Artificial Sequence: Synthetic oligonucleotide
agaaauauccucccagugu

SEQ ID NO: 1473427 - RNA, 19 nt, Artificial Sequence
  Description of Artificial Sequence: Synthetic oligonucleotide
ucuuagucacaauuauucc

SEQ ID NO: 1473428 - RNA, 19 nt, Artificial Sequence
  Description of Artificial Sequence: Synthetic oligonucleotide
uguaauggguuucaucuaa

SEQ ID NO: 1473429 - RNA, 19 nt, Artificial Sequence
  Description of Artificial Sequence: Synthetic oligonucleotide
ugcuauuauccaaaugcgc

SEQ ID NO: 1473430 - RNA, 19 nt, Artificial Sequence
  Description of Artificial Sequence: Synthetic oligonucleotide
uaacaacucuuuguaaugg

SEQ ID NO: 1473431 - RNA, 19 nt, Artificial Sequence
  Description of Artificial Sequence: Synthetic oligonucleotide
aagaugauuaguacuucuc

SEQ ID NO: 1473432 - RNA, 19 nt, Artificial Sequence
  Description of Artificial Sequence: Synthetic oligonucleotide
uccuuuauauucuucuaga

SEQ ID NO: 1473433 - RNA, 19 nt, Artificial Sequence
  Description of Artificial Sequence: Synthetic oligonucleotide
ucggacuuguccauggugc

SEQ ID NO: 1473434 - RNA, 19 nt, Artificial Sequence
  Description of Artificial Sequence: Synthetic oligonucleotide
ucuuaugaauacagccagg

SEQ ID NO: 1473435 - RNA, 19 nt, Artificial Sequence
  Description of Artificial Sequence: Synthetic oligonucleotide
auccauaacaaaaucuuuc

SEQ ID NO: 1473436 - RNA, 19 nt, Artificial Sequence
  Description of Artificial Sequence: Synthetic oligonucleotide
agucacaauuauuccaauc

SEQ ID NO: 1473437 - RNA, 19 nt, Artificial Sequence
  Description of Artificial Sequence: Synthetic oligonucleotide
uggguuuccugaaaguuca

SEQ ID NO: 1473438 - RNA, 19 nt, Artificial Sequence
  Description of Artificial Sequence: Synthetic oligonucleotide
ugggcuuuaagucuugauc

SEQ ID NO: 1473439 - RNA, 19 nt, Artificial Sequence
  Description of Artificial Sequence: Synthetic oligonucleotide
agaugauuaguacuucucu

SEQ ID NO: 1473440 - RNA, 19 nt, Artificial Sequence
  Description of Artificial Sequence: Synthetic oligonucleotide
uaaaugaugguaagaucgu

SEQ ID NO: 1473441 - RNA, 19 nt, Artificial Sequence
  Description of Artificial Sequence: Synthetic oligonucleotide
gcaaacauagacaugcugg

SEQ ID NO: 1473442 - RNA, 19 nt, Artificial Sequence
  Description of Artificial Sequence: Synthetic oligonucleotide
ccugaucagacaaagaagc

SEQ ID NO: 1473443 - RNA, 19 nt, Artificial Sequence
  Description of Artificial Sequence: Synthetic oligonucleotide
agaauauccucuaucguag

SEQ ID NO: 1473444 - RNA, 19 nt, Artificial Sequence
  Description of Artificial Sequence: Synthetic oligonucleotide
ugauuaguacuucucuacu

SEQ ID NO: 1473445 - RNA, 19 nt, Artificial Sequence
  Description of Artificial Sequence: Synthetic oligonucleotide
ggaaucaaauaccugcagg

SEQ ID NO: 1473446 - RNA, 19 nt, Artificial Sequence
  Description of Artificial Sequence: Synthetic oligonucleotide
aggaguugggaucuuauga

SEQ ID NO: 1473447 - RNA, 19 nt, Artificial Sequence
  Description of Artificial Sequence: Synthetic oligonucleotide
auagagagaugguucuccg

SEQ ID NO: 1473448 - RNA, 19 nt, Artificial Sequence
  Description of Artificial Sequence: Synthetic oligonucleotide
ucuagagaaauuucuugaa

SEQ ID NO: 1473449 - RNA, 19 nt, Artificial Sequence
  Description of Artificial Sequence: Synthetic oligonucleotide
aauauccucccaguguaag

SEQ ID NO: 1473450 - RNA, 19 nt, Artificial Sequence
  Description of Artificial Sequence: Synthetic oligonucleotide
uccaagucggacuugucca

SEQ ID NO: 1473451 - RNA, 19 nt, Artificial Sequence
  Description of Artificial Sequence: Synthetic oligonucleotide
gaagcaauggugugcugag

SEQ ID NO: 1473452 - RNA, 19 nt, Artificial Sequence
  Description of Artificial Sequence: Synthetic oligonucleotide
cuuagucacaauuauucca

SEQ ID NO: 1473453 - RNA, 19 nt, Artificial Sequence
  Description of Artificial Sequence: Synthetic oligonucleotide
ucugauuuuagcugccuuc

SEQ ID NO: 1473454 - RNA, 19 nt, Artificial Sequence
  Description of Artificial Sequence: Synthetic oligonucleotide
aauaacagacacucugauu

SEQ ID NO: 1473455 - RNA, 19 nt, Artificial Sequence
  Description of Artificial Sequence: Synthetic oligonucleotide
aucuaaaauaacaugguau

SEQ ID NO: 1473456 - RNA, 19 nt, Artificial Sequence
  Description of Artificial Sequence: Synthetic oligonucleotide
aguuucacgagcaaguaca

SEQ ID NO: 1473457 - RNA, 19 nt, Artificial Sequence
  Description of Artificial Sequence: Synthetic oligonucleotide
uucaaagauguuauguguu

SEQ ID NO: 1473458 - RNA, 19 nt, Artificial Sequence
  Description of Artificial Sequence: Synthetic oligonucleotide
uaaagguggcgcaucauuc

SEQ ID NO: 1473459 - RNA, 19 nt, Artificial Sequence
  Description of Artificial Sequence: Synthetic oligonucleotide
uguguuuuaggguuugcau

SEQ ID NO: 1473460 - RNA, 19 nt, Artificial Sequence
  Description of Artificial Sequence: Synthetic oligonucleotide
uguauacuugcacaacaaa

SEQ ID NO: 1473461 - RNA, 19 nt, Artificial Sequence
  Description of Artificial Sequence: Synthetic oligonucleotide
uuacucuuagucacaauua

SEQ ID NO: 1473462 - RNA, 19 nt, Artificial Sequence
  Description of Artificial Sequence: Synthetic oligonucleotide
gggcuuuaagucuugaucc

SEQ ID NO: 1473463 - RNA, 19 nt, Artificial Sequence
  Description of Artificial Sequence: Synthetic oligonucleotide
uuauguguuuccuuggguu

SEQ ID NO: 1473464 - RNA, 19 nt, Artificial Sequence
  Description of Artificial Sequence: Synthetic oligonucleotide
accgcuuaguucuuucagg

SEQ ID NO: 1473465 - RNA, 19 nt, Artificial Sequence
  Description of Artificial Sequence: Synthetic oligonucleotide
uguccuacauguuggaauc

SEQ ID NO: 1473466 - RNA, 19 nt, Artificial Sequence
  Description of Artificial Sequence: Synthetic oligonucleotide
aucgugccaagugaggugc

SEQ ID NO: 1473467 - RNA, 19 nt, Artificial Sequence
  Description of Artificial Sequence: Synthetic oligonucleotide
aacaggaagcucacuguac

SEQ ID NO: 1473468 - RNA, 19 nt, Artificial Sequence
  Description of Artificial Sequence: Synthetic oligonucleotide
agccuauugggcuuuaagu

SEQ ID NO: 1473469 - RNA, 19 nt, Artificial Sequence
  Description of Artificial Sequence: Synthetic oligonucleotide
uuaugaauacagccaggac

SEQ ID NO: 1473470 - RNA, 19 nt, Artificial Sequence
  Description of Artificial Sequence: Synthetic oligonucleotide
guagccuuaagugauccag

SEQ ID NO: 1473471 - RNA, 19 nt, Artificial Sequence
  Description of Artificial Sequence: Synthetic oligonucleotide
aguacaagucagccuauug

SEQ ID NO: 1473472 - RNA, 19 nt, Artificial Sequence
  Description of Artificial Sequence: Synthetic oligonucleotide
auguuauguguuuccuugg

SEQ ID NO: 1473473 - RNA, 19 nt, Artificial Sequence
  Description of Artificial Sequence: Synthetic oligonucleotide
uacucuuagucacaauuau

SEQ ID NO: 1473474 - RNA, 19 nt, Artificial Sequence
  Description of Artificial Sequence: Synthetic oligonucleotide
ucacgagcaaguacagugc

SEQ ID NO: 1473475 - RNA, 19 nt, Artificial Sequence
  Description of Artificial Sequence: Synthetic oligonucleotide
gacugauaggauuuugauc

SEQ ID NO: 1473476 - RNA, 19 nt, Artificial Sequence
  Description of Artificial Sequence: Synthetic oligonucleotide
uuauauucuucuagagaaa

SEQ ID NO: 1473477 - RNA, 19 nt, Artificial Sequence
  Description of Artificial Sequence: Synthetic oligonucleotide
aaaaccucggugccgcgca

SEQ ID NO: 1473478 - RNA, 19 nt, Artificial Sequence
  Description of Artificial Sequence: Synthetic oligonucleotide
uucuuaacccauucagugu

SEQ ID NO: 1473479 - RNA, 19 nt, Artificial Sequence
  Description of Artificial Sequence: Synthetic oligonucleotide
aaaugaugguaagaucgug

SEQ ID NO: 1473480 - RNA, 19 nt, Artificial Sequence
  Description of Artificial Sequence: Synthetic oligonucleotide
augcuuaaggaauuauaga

SEQ ID NO: 1473481 - RNA, 19 nt, Artificial Sequence
  Description of Artificial Sequence: Synthetic oligonucleotide
gcuauuauccaaaugcgcc

SEQ ID NO: 1473482 - RNA, 19 nt, Artificial Sequence
  Description of Artificial Sequence: Synthetic oligonucleotide
gaugguaagaucgugccaa

SEQ ID NO: 1473483 - RNA, 19 nt, Artificial Sequence
  Description of Artificial Sequence: Synthetic oligonucleotide
uacuuguauguccaggcau

SEQ ID NO: 1473484 - RNA, 19 nt, Artificial Sequence
  Description of Artificial Sequence: Synthetic oligonucleotide
acccauucagugugugucc

SEQ ID NO: 1473485 - RNA, 19 nt, Artificial Sequence
  Description of Artificial Sequence: Synthetic oligonucleotide
uugucaggcuacuaaagau

SEQ ID NO: 1473486 - RNA, 19 nt, Artificial Sequence
  Description of Artificial Sequence: Synthetic oligonucleotide
uaagugauccaguuucauc

SEQ ID NO: 1473487 - RNA, 19 nt, Artificial Sequence
  Description of Artificial Sequence: Synthetic oligonucleotide
caaacucgaaccucugcag

SEQ ID NO: 1473488 - RNA, 19 nt, Artificial Sequence
  Description of Artificial Sequence: Synthetic oligonucleotide
ugaugcguuaacaacucuu

SEQ ID NO: 1473489 - RNA, 19 nt, Artificial Sequence
  Description of Artificial Sequence: Synthetic oligonucleotide
uucccauguucucucguag

SEQ ID NO: 1473490 - RNA, 19 nt, Artificial Sequence
  Description of Artificial Sequence: Synthetic oligonucleotide
ugagacgacccucaccgga

SEQ ID NO: 1473491 - RNA, 19 nt, Artificial Sequence
  Description of Artificial Sequence: Synthetic oligonucleotide
gugcuauuauccaaaugcg

SEQ ID NO: 1473492 - RNA, 19 nt, Artificial Sequence
  Description of Artificial Sequence: Synthetic oligonucleotide
gguaagaucgugccaagug

SEQ ID NO: 1473493 - RNA, 19 nt, Artificial Sequence
  Description of Artificial Sequence: Synthetic oligonucleotide
guaagaucgugccaaguga

SEQ ID NO: 1473494 - RNA, 19 nt, Artificial Sequence
  Description of Artificial Sequence: Synthetic oligonucleotide
acauuuuggcacacugugc

SEQ ID NO: 1473495 - RNA, 19 nt, Artificial Sequence
  Description of Artificial Sequence: Synthetic oligonucleotide
ccuuaagugauccaguuuc

SEQ ID NO: 1473496 - RNA, 19 nt, Artificial Sequence
  Description of Artificial Sequence: Synthetic oligonucleotide
auagacaugcuggucuuuc

SEQ ID NO: 1473497 - RNA, 19 nt, Artificial Sequence
  Description of Artificial Sequence: Synthetic oligonucleotide
uucaguguguguccuacau

SEQ ID NO: 1473498 - RNA, 19 nt, Artificial Sequence
  Description of Artificial Sequence: Synthetic oligonucleotide
augaauacagccaggacaa

SEQ ID NO: 1473499 - RNA, 19 nt, Artificial Sequence
  Description of Artificial Sequence: Synthetic oligonucleotide
guuaacaacucuuuguaau

SEQ ID NO: 1473500 - RNA, 19 nt, Artificial Sequence
  Description of Artificial Sequence: Synthetic oligonucleotide
gauaggauuuugaucaaaa

SEQ ID NO: 1473501 - RNA, 19 nt, Artificial Sequence
  Description of Artificial Sequence: Synthetic oligonucleotide
auacgaaugagugagcauu

SEQ ID NO: 1473502 - RNA, 19 nt, Artificial Sequence
  Description of Artificial Sequence: Synthetic oligonucleotide
uacuuugcucgacacugug

SEQ ID NO: 1473503 - RNA, 19 nt, Artificial Sequence
  Description of Artificial Sequence: Synthetic oligonucleotide
uuuaagaauuucccauguu

SEQ ID NO: 1473504 - RNA, 19 nt, Artificial Sequence
  Description of Artificial Sequence: Synthetic oligonucleotide
cauucggagcuugagcugg

SEQ ID NO: 1473505 - RNA, 19 nt, Artificial Sequence
  Description of Artificial Sequence: Synthetic oligonucleotide
aaucugacugauaggauuu

SEQ ID NO: 1473506 - RNA, 19 nt, Artificial Sequence
  Description of Artificial Sequence: Synthetic oligonucleotide
uccgggucccuccuguccg

SEQ ID NO: 1473507 - RNA, 19 nt, Artificial Sequence
  Description of Artificial Sequence: Synthetic oligonucleotide
auaaagguggcgcaucauu

SEQ ID NO: 1473508 - RNA, 19 nt, Artificial Sequence
  Description of Artificial Sequence: Synthetic oligonucleotide
gaauauccucuaucguagc

SEQ ID NO: 1473509 - RNA, 19 nt, Artificial Sequence
  Description of Artificial Sequence: Synthetic oligonucleotide
ugaugguaagaucgugcca

SEQ ID NO: 1473510 - RNA, 19 nt, Artificial Sequence
  Description of Artificial Sequence: Synthetic oligonucleotide
aagguggcgcaucauucca

SEQ ID NO: 1473511 - RNA, 19 nt, Artificial Sequence
  Description of Artificial Sequence: Synthetic oligonucleotide
guugucaggcuacuaaaga

SEQ ID NO: 1473512 - RNA, 19 nt, Artificial Sequence
  Description of Artificial Sequence: Synthetic oligonucleotide
cuuaugaauacagccagga

SEQ ID NO: 1473513 - RNA, 19 nt, Artificial Sequence
  Description of Artificial Sequence: Synthetic oligonucleotide
uguguguguguguauacuu

SEQ ID NO: 1473514 - RNA, 19 nt, Artificial Sequence
  Description of Artificial Sequence: Synthetic oligonucleotide
ucucguagccuccuuccca

SEQ ID NO: 1473515 - RNA, 19 nt, Artificial Sequence
  Description of Artificial Sequence: Synthetic oligonucleotide
aagaucgugccaagugagg

SEQ ID NO: 1473516 - RNA, 19 nt, Artificial Sequence
  Description of Artificial Sequence: Synthetic oligonucleotide
guacagugcaaacucgaac

SEQ ID NO: 1473517 - RNA, 19 nt, Artificial Sequence
  Description of Artificial Sequence: Synthetic oligonucleotide
gagcauucggagcuugagc

SEQ ID NO: 1473518 - RNA, 19 nt, Artificial Sequence
  Description of Artificial Sequence: Synthetic oligonucleotide
uacgaaugagugagcauuc

SEQ ID NO: 1473519 - RNA, 19 nt, Artificial Sequence
  Description of Artificial Sequence: Synthetic oligonucleotide
aacaugguaugugccacca

SEQ ID NO: 1473520 - RNA, 19 nt, Artificial Sequence
  Description of Artificial Sequence: Synthetic oligonucleotide
gaauacagccaggacaaca

SEQ ID NO: 1473521 - RNA, 19 nt, Artificial Sequence
  Description of Artificial Sequence: Synthetic oligonucleotide
cuaaagaugauuaguacuu

SEQ ID NO: 1473522 - RNA, 19 nt, Artificial Sequence
  Description of Artificial Sequence: Synthetic oligonucleotide
gaucgugccaagugaggug

SEQ ID NO: 1473523 - RNA, 19 nt, Artificial Sequence
  Description of Artificial Sequence: Synthetic oligonucleotide
agcaaguacagugcaaacu

SEQ ID NO: 1473524 - RNA, 19 nt, Artificial Sequence
  Description of Artificial Sequence: Synthetic oligonucleotide
acauaaagguggcgcauca

SEQ ID NO: 1473525 - RNA, 19 nt, Artificial Sequence
  Description of Artificial Sequence: Synthetic oligonucleotide
aucauaaauauuagaugga

SEQ ID NO: 1473526 - RNA, 19 nt, Artificial Sequence
  Description of Artificial Sequence: Synthetic oligonucleotide
uguguguguguguguauac

SEQ ID NO: 1473527 - RNA, 19 nt, Artificial Sequence
  Description of Artificial Sequence: Synthetic oligonucleotide
ugaugagaucauaaauauu

SEQ ID NO: 1473528 - RNA, 19 nt, Artificial Sequence
  Description of Artificial Sequence: Synthetic oligonucleotide
ugagggaaucccauacgaa

SEQ ID NO: 1473529 - RNA, 19 nt, Artificial Sequence
  Description of Artificial Sequence: Synthetic oligonucleotide
uauccaaaugcgccaugcu

SEQ ID NO: 1473530 - RNA, 19 nt, Artificial Sequence
  Description of Artificial Sequence: Synthetic oligonucleotide
uaaagaugauuaguacuuc

SEQ ID NO: 1473531 - RNA, 19 nt, Artificial Sequence
  Description of Artificial Sequence: Synthetic oligonucleotide
acuuguauguccaggcaug

SEQ ID NO: 1473532 - RNA, 19 nt, Artificial Sequence
  Description of Artificial Sequence: Synthetic oligonucleotide
agaugguucuccguugcag

SEQ ID NO: 1473533 - RNA, 19 nt, Artificial Sequence
  Description of Artificial Sequence: Synthetic oligonucleotide
aaggaauuauagagagaug

SEQ ID NO: 1473534 - RNA, 19 nt, Artificial Sequence
  Description of Artificial Sequence: Synthetic oligonucleotide
auguuggaaucaaauaccu

SEQ ID NO: 1473535 - RNA, 19 nt, Artificial Sequence
  Description of Artificial Sequence: Synthetic oligonucleotide
cuagagaaauuucuugaaa

SEQ ID NO: 1473536 - RNA, 19 nt, Artificial Sequence
  Description of Artificial Sequence: Synthetic oligonucleotide
gaauagaugagacgacccu

SEQ ID NO: 1473537 - RNA, 19 nt, Artificial Sequence
  Description of Artificial Sequence: Synthetic oligonucleotide
cugacugauaggauuuuga

SEQ ID NO: 1473538 - RNA, 19 nt, Artificial Sequence
  Description of Artificial Sequence: Synthetic oligonucleotide
cuaacaugaugcguuaaca

SEQ ID NO: 1473539 - RNA, 19 nt, Artificial Sequence
  Description of Artificial Sequence: Synthetic oligonucleotide
ucccauguucucucguagc

SEQ ID NO: 1473540 - RNA, 19 nt, Artificial Sequence
  Description of Artificial Sequence: Synthetic oligonucleotide
auauccucccaguguaagu

SEQ ID NO: 1473541 - RNA, 19 nt, Artificial Sequence
  Description of Artificial Sequence: Synthetic oligonucleotide
aagucagccuauugggcuu

SEQ ID NO: 1473542 - RNA, 19 nt, Artificial Sequence
  Description of Artificial Sequence: Synthetic oligonucleotide
agggaaucccauacgaaug

SEQ ID NO: 1473543 - RNA, 19 nt, Artificial Sequence
  Description of Artificial Sequence: Synthetic oligonucleotide
ucccgggaauagaugagac

SEQ ID NO: 1473544 - RNA, 19 nt, Artificial Sequence
  Description of Artificial Sequence: Synthetic oligonucleotide
uauugggcuuuaagucuug

SEQ ID NO: 1473545 - RNA, 19 nt, Artificial Sequence
  Description of Artificial Sequence: Synthetic oligonucleotide
agaucgugccaagugaggu

SEQ ID NO: 1473546 - RNA, 19 nt, Artificial Sequence
  Description of Artificial Sequence: Synthetic oligonucleotide
cauucaguguguguccuac

SEQ ID NO: 1473547 - RNA, 19 nt, Artificial Sequence
  Description of Artificial Sequence: Synthetic oligonucleotide
gccuauugggcuuuaaguc

SEQ ID NO: 1473548 - RNA, 19 nt, Artificial Sequence
  Description of Artificial Sequence: Synthetic oligonucleotide
uauccucuaucguagccuu

SEQ ID NO: 1473549 - RNA, 19 nt, Artificial Sequence
  Description of Artificial Sequence: Synthetic oligonucleotide
gguaugugccaccaguuuc

SEQ ID NO: 1473550 - RNA, 19 nt, Artificial Sequence
  Description of Artificial Sequence: Synthetic oligonucleotide
aucccauacgaaugaguga

SEQ ID NO: 1473551 - RNA, 19 nt, Artificial Sequence
  Description of Artificial Sequence: Synthetic oligonucleotide
uuucccauguucucucgua

SEQ ID NO: 1473552 - RNA, 19 nt, Artificial Sequence
  Description of Artificial Sequence: Synthetic oligonucleotide
acaacucuuuguaaugggu

SEQ ID NO: 1473553 - RNA, 19 nt, Artificial Sequence
  Description of Artificial Sequence: Synthetic oligonucleotide
agguugucaggcuacuaaa

SEQ ID NO: 1473554 - RNA, 19 nt, Artificial Sequence
  Description of Artificial Sequence: Synthetic oligonucleotide
ucguagccuuaagugaucc

SEQ ID NO: 1473555 - RNA, 19 nt, Artificial Sequence
  Description of Artificial Sequence: Synthetic oligonucleotide
ucucuacuuguauguccag

SEQ ID NO: 1473556 - RNA, 19 nt, Artificial Sequence
  Description of Artificial Sequence: Synthetic oligonucleotide
gucaggcuacuaaagauga

SEQ ID NO: 1473557 - RNA, 19 nt, Artificial Sequence
  Description of Artificial Sequence: Synthetic oligonucleotide
ugcucgacacugugggcag

SEQ ID NO: 1473558 - RNA, 19 nt, Artificial Sequence
  Description of Artificial Sequence: Synthetic oligonucleotide
gagcaaguacagugcaaac

SEQ ID NO: 1473559 - RNA, 19 nt, Artificial Sequence
  Description of Artificial Sequence: Synthetic oligonucleotide
aggaugguuuugcauccug

SEQ ID NO: 1473560 - RNA, 19 nt, Artificial Sequence
  Description of Artificial Sequence: Synthetic oligonucleotide
uuaagugauccaguuucau

SEQ ID NO: 1473561 - RNA, 19 nt, Artificial Sequence
  Description of Artificial Sequence: Synthetic oligonucleotide
uuguaauggguuucaucua

SEQ ID NO: 1473562 - RNA, 19 nt, Artificial Sequence
  Description of Artificial Sequence: Synthetic oligonucleotide
aggucauaucuacagcuuu

SEQ ID NO: 1473563 - RNA, 19 nt, Artificial Sequence
  Description of Artificial Sequence: Synthetic oligonucleotide
acuccgucucuccuccggg

SEQ ID NO: 1473564 - RNA, 19 nt, Artificial Sequence
  Description of Artificial Sequence: Synthetic oligonucleotide
cucguagccuccuucccac

SEQ ID NO: 1473565 - RNA, 19 nt, Artificial Sequence
  Description of Artificial Sequence: Synthetic oligonucleotide
cagccuauugggcuuuaag

SEQ ID NO: 1473566 - RNA, 19 nt, Artificial Sequence
  Description of Artificial Sequence: Synthetic oligonucleotide
augguaagaucgugccaag

SEQ ID NO: 1473567 - RNA, 19 nt, Artificial Sequence
  Description of Artificial Sequence: Synthetic oligonucleotide
caguuucacgagcaaguac

SEQ ID NO: 1473568 - RNA, 19 nt, Artificial Sequence
  Description of Artificial Sequence: Synthetic oligonucleotide
acgaaugagugagcauucg

SEQ ID NO: 1473569 - RNA, 19 nt, Artificial Sequence
  Description of Artificial Sequence: Synthetic oligonucleotide
gaauuauagagagaugguu

SEQ ID NO: 1473570 - RNA, 19 nt, Artificial Sequence
  Description of Artificial Sequence: Synthetic oligonucleotide
cugagggaaucccauacga

SEQ ID NO: 1473571 - RNA, 19 nt, Artificial Sequence
  Description of Artificial Sequence: Synthetic oligonucleotide
caccgcuuaguucuuucag

SEQ ID NO: 1473572 - RNA, 19 nt, Artificial Sequence
  Description of Artificial Sequence: Synthetic oligonucleotide
uccucuaucguagccuuaa

SEQ ID NO: 1473573 - RNA, 19 nt, Artificial Sequence
  Description of Artificial Sequence: Synthetic oligonucleotide
gcuaacaugaugcguuaac

SEQ ID NO: 1473574 - RNA, 19 nt, Artificial Sequence
  Description of Artificial Sequence: Synthetic oligonucleotide
ugauaggauuuugaucaaa

SEQ ID NO: 1473575 - RNA, 19 nt, Artificial Sequence
  Description of Artificial Sequence: Synthetic oligonucleotide
guguguguguguauacuug

SEQ ID NO: 1473576 - RNA, 19 nt, Artificial Sequence
  Description of Artificial Sequence: Synthetic oligonucleotide
gauggaucacagguuguca

SEQ ID NO: 1473577 - RNA, 19 nt, Artificial Sequence
  Description of Artificial Sequence: Synthetic oligonucleotide
uuauagagagaugguucuc

SEQ ID NO: 1473578 - RNA, 19 nt, Artificial Sequence
  Description of Artificial Sequence: Synthetic oligonucleotide
cuuuaagaauuucccaugu

SEQ ID NO: 1473579 - RNA, 19 nt, Artificial Sequence
  Description of Artificial Sequence: Synthetic oligonucleotide
gacaccaaaguaagaccac

SEQ ID NO: 1473580 - RNA, 19 nt, Artificial Sequence
  Description of Artificial Sequence: Synthetic oligonucleotide
gucggacuuguccauggug

SEQ ID NO: 1473581 - RNA, 19 nt, Artificial Sequence
  Description of Artificial Sequence: Synthetic oligonucleotide
gauuaguacuucucuacuu

SEQ ID NO: 1473582 - RNA, 19 nt, Artificial Sequence
  Description of Artificial Sequence: Synthetic oligonucleotide
caggaguugggaucuuaug

SEQ ID NO: 1473583 - RNA, 19 nt, Artificial Sequence
  Description of Artificial Sequence: Synthetic oligonucleotide
guauacuugcacaacaaau

SEQ ID NO: 1473584 - RNA, 19 nt, Artificial Sequence
  Description of Artificial Sequence: Synthetic oligonucleotide
ugccaccaguuucacgagc

SEQ ID NO: 1473585 - RNA, 19 nt, Artificial Sequence
  Description of Artificial Sequence: Synthetic oligonucleotide
uagaugagacgacccucac

SEQ ID NO: 1473586 - RNA, 19 nt, Artificial Sequence
  Description of Artificial Sequence: Synthetic oligonucleotide
guaugugccaccaguuuca

SEQ ID NO: 1473587 - RNA, 19 nt, Artificial Sequence
  Description of Artificial Sequence: Synthetic oligonucleotide
ugugugugugugugugugu

SEQ ID NO: 1473588 - RNA, 19 nt, Artificial Sequence
  Description of Artificial Sequence: Synthetic oligonucleotide
cuacauguuggaaucaaau

SEQ ID NO: 1473589 - RNA, 19 nt, Artificial Sequence
  Description of Artificial Sequence: Synthetic oligonucleotide
ggaguugggaucuuaugaa

SEQ ID NO: 1473590 - RNA, 19 nt, Artificial Sequence
  Description of Artificial Sequence: Synthetic oligonucleotide
agggcuaacaugaugcguu

SEQ ID NO: 1473591 - RNA, 19 nt, Artificial Sequence
  Description of Artificial Sequence: Synthetic oligonucleotide
uggugcucaaacacucuuu

SEQ ID NO: 1473592 - RNA, 19 nt, Artificial Sequence
  Description of Artificial Sequence: Synthetic oligonucleotide
uccuacauguuggaaucaa

SEQ ID NO: 1473593 - RNA, 19 nt, Artificial Sequence
  Description of Artificial Sequence: Synthetic oligonucleotide
gcuuaaggaauuauagaga

SEQ ID NO: 1473594 - RNA, 19 nt, Artificial Sequence
  Description of Artificial Sequence: Synthetic oligonucleotide
auggugcucaaacacucuu

SEQ ID NO: 1473595 - RNA, 19 nt, Artificial Sequence
  Description of Artificial Sequence: Synthetic oligonucleotide
cauuguucuggaaccaucu

SEQ ID NO: 1473596 - RNA, 19 nt, Artificial Sequence
  Description of Artificial Sequence: Synthetic oligonucleotide
gugugugugugugugugug

SEQ ID NO: 1473597 - RNA, 19 nt, Artificial Sequence
  Description of Artificial Sequence: Synthetic oligonucleotide
augagacgacccucaccgg

SEQ ID NO: 1473598 - RNA, 19 nt, Artificial Sequence
  Description of Artificial Sequence: Synthetic oligonucleotide
aguugggaucuuaugaaua

SEQ ID NO: 1473599 - RNA, 19 nt, Artificial Sequence
  Description of Artificial Sequence: Synthetic oligonucleotide
gguugucaggcuacuaaag

SEQ ID NO: 1473600 - RNA, 19 nt, Artificial Sequence
  Description of Artificial Sequence: Synthetic oligonucleotide
aaaccucggugccgcgcag

SEQ ID NO: 1473601 - RNA, 19 nt, Artificial Sequence
  Description of Artificial Sequence: Synthetic oligonucleotide
acaugguaugugccaccag

SEQ ID NO: 1473602 - RNA, 19 nt, Artificial Sequence
  Description of Artificial Sequence: Synthetic oligonucleotide
caccaguuucacgagcaag

SEQ ID NO: 1473603 - RNA, 19 nt, Artificial Sequence
  Description of Artificial Sequence: Synthetic oligonucleotide
aggcuacuaaagaugauua

SEQ ID NO: 1473604 - RNA, 19 nt, Artificial Sequence
  Description of Artificial Sequence: Synthetic oligonucleotide
ggaucacagguugucaggc

SEQ ID NO: 1473605 - RNA, 19 nt, Artificial Sequence
  Description of Artificial Sequence: Synthetic oligonucleotide
cuacuuguauguccaggca

SEQ ID NO: 1473606 - RNA, 19 nt, Artificial Sequence
  Description of Artificial Sequence: Synthetic oligonucleotide
aaauauccucccaguguaa

SEQ ID NO: 1473607 - RNA, 19 nt, Artificial Sequence
  Description of Artificial Sequence: Synthetic oligonucleotide
uguguguguguguguguau

SEQ ID NO: 1473608 - RNA, 19 nt, Artificial Sequence
  Description of Artificial Sequence: Synthetic oligonucleotide
cagguugucaggcuacuaa

SEQ ID NO: 1473609 - RNA, 19 nt, Artificial Sequence
  Description of Artificial Sequence: Synthetic oligonucleotide
guuauguguuuccuugggu

SEQ ID NO: 1473610 - RNA, 19 nt, Artificial Sequence
  Description of Artificial Sequence: Synthetic oligonucleotide
caaaaccucggugccgcgc

SEQ ID NO: 1473611 - RNA, 19 nt, Artificial Sequence
  Description of Artificial Sequence: Synthetic oligonucleotide
uguucucucguagccuccu

SEQ ID NO: 1473612 - RNA, 19 nt, Artificial Sequence
  Description of Artificial Sequence: Synthetic oligonucleotide
agacgacccucaccggaag

SEQ ID NO: 1473613 - RNA, 19 nt, Artificial Sequence
  Description of Artificial Sequence: Synthetic oligonucleotide
cuaccacauaaagguggcg

SEQ ID NO: 1473614 - RNA, 19 nt, Artificial Sequence
  Description of Artificial Sequence: Synthetic oligonucleotide
cacacugugcaaacauaga

SEQ ID NO: 1473615 - RNA, 19 nt, Artificial Sequence
  Description of Artificial Sequence: Synthetic oligonucleotide
caaucugacugauaggauu

SEQ ID NO: 1473616 - RNA, 19 nt, Artificial Sequence
  Description of Artificial Sequence: Synthetic oligonucleotide
cacauaaagguggcgcauc

SEQ ID NO: 1473617 - RNA, 19 nt, Artificial Sequence
  Description of Artificial Sequence: Synthetic oligonucleotide
aucguagccuuaagugauc

SEQ ID NO: 1473618 - RNA, 19 nt, Artificial Sequence
  Description of Artificial Sequence: Synthetic oligonucleotide
guguccuacauguuggaau

SEQ ID NO: 1473619 - RNA, 19 nt, Artificial Sequence
  Description of Artificial Sequence: Synthetic oligonucleotide
ccaauaacagacacucuga

SEQ ID NO: 1473620 - RNA, 19 nt, Artificial Sequence
  Description of Artificial Sequence: Synthetic oligonucleotide
gggaucuuaugaauacagc

SEQ ID NO: 1473621 - RNA, 19 nt, Artificial Sequence
  Description of Artificial Sequence: Synthetic oligonucleotide
ugguaagaucgugccaagu

SEQ ID NO: 1473622 - RNA, 19 nt, Artificial Sequence
  Description of Artificial Sequence: Synthetic oligonucleotide
acgacccucaccggaagug

SEQ ID NO: 1473623 - RNA, 19 nt, Artificial Sequence
  Description of Artificial Sequence: Synthetic oligonucleotide
agugagcauucggagcuug

SEQ ID NO: 1473624 - RNA, 19 nt, Artificial Sequence
  Description of Artificial Sequence: Synthetic oligonucleotide
cuuauucaacacuccgucu

SEQ ID NO: 1473625 - RNA, 19 nt, Artificial Sequence
  Description of Artificial Sequence: Synthetic oligonucleotide
cacugugggcagaaauauc

SEQ ID NO: 1473626 - RNA, 19 nt, Artificial Sequence
  Description of Artificial Sequence: Synthetic oligonucleotide
caauccaauaacagacacu

SEQ ID NO: 1473627 - RNA, 19 nt, Artificial Sequence
  Description of Artificial Sequence: Synthetic oligonucleotide
auucggagcuugagcuggc

SEQ ID NO: 1473628 - RNA, 19 nt, Artificial Sequence
  Description of Artificial Sequence: Synthetic oligonucleotide
guguauacuugcacaacaa

SEQ ID NO: 1473629 - RNA, 19 nt, Artificial Sequence
  Description of Artificial Sequence: Synthetic oligonucleotide
gcguuaacaacucuuugua

SEQ ID NO: 1473630 - RNA, 19 nt, Artificial Sequence
  Description of Artificial Sequence: Synthetic oligonucleotide
gguucuccguugcagguca

SEQ ID NO: 1473631 - RNA, 19 nt, Artificial Sequence
  Description of Artificial Sequence: Synthetic oligonucleotide
cacgagcaaguacagugca

SEQ ID NO: 1473632 - RNA, 19 nt, Artificial Sequence
  Description of Artificial Sequence: Synthetic oligonucleotide
aaguacaagucagccuauu

SEQ ID NO: 1473633 - RNA, 19 nt, Artificial Sequence
  Description of Artificial Sequence: Synthetic oligonucleotide
acucuuagucacaauuauu

SEQ ID NO: 1473634 - RNA, 19 nt, Artificial Sequence
  Description of Artificial Sequence: Synthetic oligonucleotide
acucgaaccucugcagaca

SEQ ID NO: 1473635 - RNA, 19 nt, Artificial Sequence
  Description of Artificial Sequence: Synthetic oligonucleotide
cacuguacuuugcucgaca

SEQ ID NO: 1473636 - RNA, 19 nt, Artificial Sequence
  Description of Artificial Sequence: Synthetic oligonucleotide
gacccucaccggaagugcc

SEQ ID NO: 1473637 - RNA, 19 nt, Artificial Sequence
  Description of Artificial Sequence: Synthetic oligonucleotide
gaaucccauacgaaugagu

SEQ ID NO: 1473638 - RNA, 19 nt, Artificial Sequence
  Description of Artificial Sequence: Synthetic oligonucleotide
cuccgggucccuccugucc

SEQ ID NO: 1473639 - RNA, 19 nt, Artificial Sequence
  Description of Artificial Sequence: Synthetic oligonucleotide
agucggacuuguccauggu

SEQ ID NO: 1473640 - RNA, 19 nt, Artificial Sequence
  Description of Artificial Sequence: Synthetic oligonucleotide
cccgggaauagaugagacg

SEQ ID NO: 1473641 - RNA, 19 nt, Artificial Sequence
  Description of Artificial Sequence: Synthetic oligonucleotide
cuccguugcaggucauauc

SEQ ID NO: 1473642 - RNA, 19 nt, Artificial Sequence
  Description of Artificial Sequence: Synthetic oligonucleotide
cucuaucguagccuuaagu

SEQ ID NO: 1473643 - RNA, 19 nt, Artificial Sequence
  Description of Artificial Sequence: Synthetic oligonucleotide
auuccaagucggacuuguc

SEQ ID NO: 1473644 - RNA, 19 nt, Artificial Sequence
  Description of Artificial Sequence: Synthetic oligonucleotide
ggaaucccauacgaaugag

SEQ ID NO: 1473645 - RNA, 19 nt, Artificial Sequence
  Description of Artificial Sequence: Synthetic oligonucleotide
gcaucauuccaagucggac

SEQ ID NO: 1473646 - RNA, 19 nt, Artificial Sequence
  Description of Artificial Sequence: Synthetic oligonucleotide
cguugcaggucauaucuac

SEQ ID NO: 1473647 - RNA, 19 nt, Artificial Sequence
  Description of Artificial Sequence: Synthetic oligonucleotide
ugaauacagccaggacaac

SEQ ID NO: 1473648 - RNA, 19 nt, Artificial Sequence
  Description of Artificial Sequence: Synthetic oligonucleotide
gaucacagguugucaggcu

SEQ ID NO: 1473649 - RNA, 19 nt, Artificial Sequence
  Description of Artificial Sequence: Synthetic oligonucleotide
caacucuuuguaauggguu

SEQ ID NO: 1473650 - RNA, 19 nt, Artificial Sequence
  Description of Artificial Sequence: Synthetic oligonucleotide
uccuucccaccgcuuaguu

SEQ ID NO: 1473651 - RNA, 19 nt, Artificial Sequence
  Description of Artificial Sequence: Synthetic oligonucleotide
acccucaccggaagugccg

SEQ ID NO: 1473652 - RNA, 19 nt, Artificial Sequence
  Description of Artificial Sequence: Synthetic oligonucleotide
ucguagccuccuucccacc

SEQ ID NO: 1473653 - RNA, 19 nt, Artificial Sequence
  Description of Artificial Sequence: Synthetic oligonucleotide
guaauggguuucaucuaaa

SEQ ID NO: 1473654 - RNA, 19 nt, Artificial Sequence
  Description of Artificial Sequence: Synthetic oligonucleotide
augguaugugccaccaguu

SEQ ID NO: 1473655 - RNA, 19 nt, Artificial Sequence
  Description of Artificial Sequence: Synthetic oligonucleotide
ccuauugggcuuuaagucu

SEQ ID NO: 1473656 - RNA, 19 nt, Artificial Sequence
  Description of Artificial Sequence: Synthetic oligonucleotide
ucgaaccucugcagacaau

SEQ ID NO: 1473657 - RNA, 19 nt, Artificial Sequence
  Description of Artificial Sequence: Synthetic oligonucleotide
ucgugccaagugaggugca

SEQ ID NO: 1473658 - RNA, 19 nt, Artificial Sequence
  Description of Artificial Sequence: Synthetic oligonucleotide
gagacgacccucaccggaa

SEQ ID NO: 1473659 - RNA, 19 nt, Artificial Sequence
  Description of Artificial Sequence: Synthetic oligonucleotide
gcagaaauauccucccagu

SEQ ID NO: 1473660 - RNA, 19 nt, Artificial Sequence
  Description of Artificial Sequence: Synthetic oligonucleotide
guguguccuacauguugga

SEQ ID NO: 1473661 - RNA, 19 nt, Artificial Sequence
  Description of Artificial Sequence: Synthetic oligonucleotide
cugaaggaugguuuugcau

SEQ ID NO: 1473662 - RNA, 19 nt, Artificial Sequence
  Description of Artificial Sequence: Synthetic oligonucleotide
auccaauaacagacacucu

SEQ ID NO: 1473663 - RNA, 19 nt, Artificial Sequence
  Description of Artificial Sequence: Synthetic oligonucleotide
ccaggacaacaauggagac

SEQ ID NO: 1473664 - RNA, 19 nt, Artificial Sequence
  Description of Artificial Sequence: Synthetic oligonucleotide
ugccaugcuuaaggaauua

SEQ ID NO: 1473665 - RNA, 19 nt, Artificial Sequence
  Description of Artificial Sequence: Synthetic oligonucleotide
caugcugaaggaugguuuu

SEQ ID NO: 1473666 - RNA, 19 nt, Artificial Sequence
  Description of Artificial Sequence: Synthetic oligonucleotide
gcgcaucauuccaagucgg

SEQ ID NO: 1473667 - RNA, 19 nt, Artificial Sequence
  Description of Artificial Sequence: Synthetic oligonucleotide
ggaugguuuugcauccuga

SEQ ID NO: 1473668 - RNA, 19 nt, Artificial Sequence
  Description of Artificial Sequence: Synthetic oligonucleotide
guguguguguguguguaua

SEQ ID NO: 1473669 - RNA, 19 nt, Artificial Sequence
  Description of Artificial Sequence: Synthetic oligonucleotide
gugugugugugugugugua

SEQ ID NO: 1473670 - RNA, 19 nt, Artificial Sequence
  Description of Artificial Sequence: Synthetic oligonucleotide
cuuaacccauucagugugu

SEQ ID NO: 1473671 - RNA, 19 nt, Artificial Sequence
  Description of Artificial Sequence: Synthetic oligonucleotide
cauacgaaugagugagcau

SEQ ID NO: 1473672 - RNA, 19 nt, Artificial Sequence
  Description of Artificial Sequence: Synthetic oligonucleotide
gcucagugcuauuauccaa

SEQ ID NO: 1473673 - RNA, 19 nt, Artificial Sequence
  Description of Artificial Sequence: Synthetic oligonucleotide
ccaugcuuaaggaauuaua

SEQ ID NO: 1473674 - RNA, 19 nt, Artificial Sequence
  Description of Artificial Sequence: Synthetic oligonucleotide
cucggugccgcgcaggccu

SEQ ID NO: 1473675 - RNA, 19 nt, Artificial Sequence
  Description of Artificial Sequence: Synthetic oligonucleotide
caauggagacagucaugaa

SEQ ID NO: 1473676 - RNA, 19 nt, Artificial Sequence
  Description of Artificial Sequence: Synthetic oligonucleotide
cguagccuccuucccaccg

SEQ ID NO: 1473677 - RNA, 19 nt, Artificial Sequence
  Description of Artificial Sequence: Synthetic oligonucleotide
ggugcucaaacacucuuuu

SEQ ID NO: 1473678 - RNA, 19 nt, Artificial Sequence
  Description of Artificial Sequence: Synthetic oligonucleotide
cuccauuguucuggaacca

SEQ ID NO: 1473679 - RNA, 19 nt, Artificial Sequence
  Description of Artificial Sequence: Synthetic oligonucleotide
aucugacugauaggauuuu

SEQ ID NO: 1473680 - RNA, 19 nt, Artificial Sequence
  Description of Artificial Sequence: Synthetic oligonucleotide
agccguggacucccgggaa

SEQ ID NO: 1473681 - RNA, 19 nt, Artificial Sequence
  Description of Artificial Sequence: Synthetic oligonucleotide
cccauacgaaugagugagc

SEQ ID NO: 1473682 - RNA, 19 nt, Artificial Sequence
  Description of Artificial Sequence: Synthetic oligonucleotide
acgagcaaguacagugcaa

SEQ ID NO: 1473683 - RNA, 19 nt, Artificial Sequence
  Description of Artificial Sequence: Synthetic oligonucleotide
uucuccguugcaggucaua

SEQ ID NO: 1473684 - RNA, 19 nt, Artificial Sequence
  Description of Artificial Sequence: Synthetic oligonucleotide
guccuacauguuggaauca

SEQ ID NO: 1473685 - RNA, 19 nt, Artificial Sequence
  Description of Artificial Sequence: Synthetic oligonucleotide
cuuguauguccaggcaugu

SEQ ID NO: 1473686 - RNA, 19 nt, Artificial Sequence
  Description of Artificial Sequence: Synthetic oligonucleotide
guguguguguguguauacu

SEQ ID NO: 1473687 - RNA, 19 nt, Artificial Sequence
  Description of Artificial Sequence: Synthetic oligonucleotide
agugaggugcagacaccaa

SEQ ID NO: 1473688 - RNA, 19 nt, Artificial Sequence
  Description of Artificial Sequence: Synthetic oligonucleotide
ccuucccaccgcuuaguuc

SEQ ID NO: 1473689 - RNA, 19 nt, Artificial Sequence
  Description of Artificial Sequence: Synthetic oligonucleotide
guggacucccgggaauaga

SEQ ID NO: 1473690 - RNA, 19 nt, Artificial Sequence
  Description of Artificial Sequence: Synthetic oligonucleotide
gugagcauucggagcuuga

SEQ ID NO: 1473691 - RNA, 19 nt, Artificial Sequence
  Description of Artificial Sequence: Synthetic oligonucleotide
gacgacccucaccggaagu

SEQ ID NO: 1473692 - RNA, 19 nt, Artificial Sequence
  Description of Artificial Sequence: Synthetic oligonucleotide
ccuacauguuggaaucaaa

SEQ ID NO: 1473693 - RNA, 19 nt, Artificial Sequence
  Description of Artificial Sequence: Synthetic oligonucleotide
ccucuaucguagccuuaag

SEQ ID NO: 1473694 - RNA, 19 nt, Artificial Sequence
  Description of Artificial Sequence: Synthetic oligonucleotide
cucgacacugugggcagaa

SEQ ID NO: 1473695 - RNA, 19 nt, Artificial Sequence
  Description of Artificial Sequence: Synthetic oligonucleotide
cguuaacaacucuuuguaa

SEQ ID NO: 1473696 - RNA, 19 nt, Artificial Sequence
  Description of Artificial Sequence: Synthetic oligonucleotide
agguggcgcaucauuccaa

SEQ ID NO: 1473697 - RNA, 19 nt, Artificial Sequence
  Description of Artificial Sequence: Synthetic oligonucleotide
ggacuuguccauggugcuc

SEQ ID NO: 1473698 - RNA, 19 nt, Artificial Sequence
  Description of Artificial Sequence: Synthetic oligonucleotide
ccaaaugcgccaugcugaa

SEQ ID NO: 1473699 - RNA, 19 nt, Artificial Sequence
  Description of Artificial Sequence: Synthetic oligonucleotide
guacuuugcucgacacugu

SEQ ID NO: 1473700 - RNA, 19 nt, Artificial Sequence
  Description of Artificial Sequence: Synthetic oligonucleotide
ccgcuuaguucuuucaggu

SEQ ID NO: 1473701 - RNA, 19 nt, Artificial Sequence
  Description of Artificial Sequence: Synthetic oligonucleotide
ucggugccgcgcaggccuc

SEQ ID NO: 1473702 - RNA, 19 nt, Artificial Sequence
  Description of Artificial Sequence: Synthetic oligonucleotide
gggcuaacaugaugcguua

SEQ ID NO: 1473703 - RNA, 19 nt, Artificial Sequence
  Description of Artificial Sequence: Synthetic oligonucleotide
cccaguguaaguccuggcu

SEQ ID NO: 1473704 - RNA, 19 nt, Artificial Sequence
  Description of Artificial Sequence: Synthetic oligonucleotide
cgagcaaguacagugcaaa

SEQ ID NO: 1473705 - RNA, 19 nt, Artificial Sequence
  Description of Artificial Sequence: Synthetic oligonucleotide
guggcgcaucauuccaagu

SEQ ID NO: 1473706 - RNA, 19 nt, Artificial Sequence
  Description of Artificial Sequence: Synthetic oligonucleotide
ccaccgcuuaguucuuuca

SEQ ID NO: 1473707 - RNA, 19 nt, Artificial Sequence
  Description of Artificial Sequence: Synthetic oligonucleotide
cauaaagguggcgcaucau

SEQ ID NO: 1473708 - RNA, 19 nt, Artificial Sequence
  Description of Artificial Sequence: Synthetic oligonucleotide
ggcuaacaugaugcguuaa

SEQ ID NO: 1473709 - RNA, 19 nt, Artificial Sequence
  Description of Artificial Sequence: Synthetic oligonucleotide
cgacccucaccggaagugc

SEQ ID NO: 1473710 - RNA, 19 nt, Artificial Sequence
  Description of Artificial Sequence: Synthetic oligonucleotide
gccuuaagugauccaguuu

SEQ ID NO: 1473711 - RNA, 19 nt, Artificial Sequence
  Description of Artificial Sequence: Synthetic oligonucleotide
guguaaguccuggcucagu

SEQ ID NO: 1473712 - RNA, 19 nt, Artificial Sequence
  Description of Artificial Sequence: Synthetic oligonucleotide
cguggacucccgggaauag

SEQ ID NO: 1473713 - RNA, 19 nt, Artificial Sequence
  Description of Artificial Sequence: Synthetic oligonucleotide
ccgggucccuccuguccgc

SEQ ID NO: 1473714 - RNA, 19 nt, Artificial Sequence
  Description of Artificial Sequence: Synthetic oligonucleotide
guucucucguagccuccuu

SEQ ID NO: 1473715 - RNA, 19 nt, Artificial Sequence
  Description of Artificial Sequence: Synthetic oligonucleotide
gagugagcauucggagcuu

SEQ ID NO: 1473716 - RNA, 19 nt, Artificial Sequence
  Description of Artificial Sequence: Synthetic oligonucleotide
gucagccuauugggcuuua

SEQ ID NO: 1473717 - RNA, 19 nt, Artificial Sequence
  Description of Artificial Sequence: Synthetic oligonucleotide
ccguugcaggucauaucua

SEQ ID NO: 1473718 - RNA, 19 nt, Artificial Sequence
  Description of Artificial Sequence: Synthetic oligonucleotide
ggugccgcgcaggccucca

SEQ ID NO: 1473719 - RNA, 19 nt, Artificial Sequence
  Description of Artificial Sequence: Synthetic oligonucleotide
gcgcaggccuccagccgug

SEQ ID NO: 1473720 - RNA, 19 nt, Artificial Sequence
  Description of Artificial Sequence: Synthetic oligonucleotide
gccguggacucccgggaau

SEQ ID NO: 1473721 - RNA, 19 nt, Artificial Sequence
  Description of Artificial Sequence: Synthetic oligonucleotide
gcucgacacugugggcaga

SEQ ID NO: 1473722 - RNA, 19 nt, Artificial Sequence
  Description of Artificial Sequence: Synthetic oligonucleotide
ccgccucucacuccagccu

SEQ ID NO: 1473723 - RNA, 19 nt, Artificial Sequence
  Description of Artificial Sequence: Synthetic oligonucleotide
ccguggacucccgggaaua

SEQ ID NO: 1473724 - RNA, 19 nt, Artificial Sequence
  Description of Artificial Sequence: Synthetic oligonucleotide
guucuccguugcaggucau

SEQ ID NO: 1473725 - RNA, 19 nt, Artificial Sequence
  Description of Artificial Sequence: Synthetic oligonucleotide
cggugccgcgcaggccucc

SEQ ID NO: 1473726 - RNA, 19 nt, Artificial Sequence
  Description of Artificial Sequence: Synthetic oligonucleotide
aauacugcaaacuucaggg

SEQ ID NO: 1473727 - RNA, 19 nt, Artificial Sequence
  Description of Artificial Sequence: Synthetic oligonucleotide
uaaucaaugacucagaggu

SEQ ID NO: 1473728 - RNA, 19 nt, Artificial Sequence
  Description of Artificial Sequence: Synthetic oligonucleotide
uauauuggcaauauaacag

SEQ ID NO: 1473729 - RNA, 19 nt, Artificial Sequence
  Description of Artificial Sequence: Synthetic oligonucleotide
gaaacuuuugcuuuuacag

SEQ ID NO: 1473730 - RNA, 19 nt, Artificial Sequence
  Description of Artificial Sequence: Synthetic oligonucleotide
aaauucaguccauagaauc

SEQ ID NO: 1473731 - RNA, 19 nt, Artificial Sequence
  Description of Artificial Sequence: Synthetic oligonucleotide
auaaugaucuaucugcacc

SEQ ID NO: 1473732 - RNA, 19 nt, Artificial Sequence
  Description of Artificial Sequence: Synthetic oligonucleotide
aaaaucagcagugucagac

SEQ ID NO: 1473733 - RNA, 19 nt, Artificial Sequence
  Description of Artificial Sequence: Synthetic oligonucleotide
uagauaaugaucuaucugc

SEQ ID NO: 1473734 - RNA, 19 nt, Artificial Sequence
  Description of Artificial Sequence: Synthetic oligonucleotide
uuauauauccuaaagcuga

SEQ ID NO: 1473735 - RNA, 19 nt, Artificial Sequence
  Description of Artificial Sequence: Synthetic oligonucleotide
aacuauguuugauaacugc

SEQ ID NO: 1473736 - RNA, 19 nt, Artificial Sequence
  Description of Artificial Sequence: Synthetic oligonucleotide
aaaucaucaacuaagaaga

SEQ ID NO: 1473737 - RNA, 19 nt, Artificial Sequence
  Description of Artificial Sequence: Synthetic oligonucleotide
ucacaauacaccuagaaca

SEQ ID NO: 1473738 - RNA, 19 nt, Artificial Sequence
  Description of Artificial Sequence: Synthetic oligonucleotide
uaugauuacaauuuaaauc

SEQ ID NO: 1473739 - RNA, 19 nt, Artificial Sequence
  Description of Artificial Sequence: Synthetic oligonucleotide
uauauccuaaagcugauag

SEQ ID NO: 1473740 - RNA, 19 nt, Artificial Sequence
  Description of Artificial Sequence: Synthetic oligonucleotide
ucuugcauaacuauguuug

SEQ ID NO: 1473741 - RNA, 19 nt, Artificial Sequence
  Description of Artificial Sequence: Synthetic oligonucleotide
aaguauuaaauucagucca

SEQ ID NO: 1473742 - RNA, 19 nt, Artificial Sequence
  Description of Artificial Sequence: Synthetic oligonucleotide
uguauaaucaaugacucag

SEQ ID NO: 1473743 - RNA, 19 nt, Artificial Sequence
  Description of Artificial Sequence: Synthetic oligonucleotide
auagaaucaauacaguaag

SEQ ID NO: 1473744 - RNA, 19 nt, Artificial Sequence
  Description of Artificial Sequence: Synthetic oligonucleotide
aauguaggccguuacacuc

SEQ ID NO: 1473745 - RNA, 19 nt, Artificial Sequence
  Description of Artificial Sequence: Synthetic oligonucleotide
uacagcuuaaaccacaaug

SEQ ID NO: 1473746 - RNA, 19 nt, Artificial Sequence
  Description of Artificial Sequence: Synthetic oligonucleotide
ugcuuuaguaguaugaucu

SEQ ID NO: 1473747 - RNA, 19 nt, Artificial Sequence
  Description of Artificial Sequence: Synthetic oligonucleotide
aguaaguucacaauacacc

SEQ ID NO: 1473748 - RNA, 19 nt, Artificial Sequence
  Description of Artificial Sequence: Synthetic oligonucleotide
auacaguaacuucagauuc

SEQ ID NO: 1473749 - RNA, 19 nt, Artificial Sequence
  Description of Artificial Sequence: Synthetic oligonucleotide
ucaauuuacaccaaccaaa

SEQ ID NO: 1473750 - RNA, 19 nt, Artificial Sequence
  Description of Artificial Sequence: Synthetic oligonucleotide
uagaacauaccauaaagac

SEQ ID NO: 1473751 - RNA, 19 nt, Artificial Sequence
  Description of Artificial Sequence: Synthetic oligonucleotide
accaacauaaguaaacacc

SEQ ID NO: 1473752 - RNA, 19 nt, Artificial Sequence
  Description of Artificial Sequence: Synthetic oligonucleotide
aaaucagcagugucagacc

SEQ ID NO: 1473753 - RNA, 19 nt, Artificial Sequence
  Description of Artificial Sequence: Synthetic oligonucleotide
uagcuuaugugcuugagag

SEQ ID NO: 1473754 - RNA, 19 nt, Artificial Sequence
  Description of Artificial Sequence: Synthetic oligonucleotide
uuacaauuuaaauccauac

SEQ ID NO: 1473755 - RNA, 19 nt, Artificial Sequence
  Description of Artificial Sequence: Synthetic oligonucleotide
uuaaagaugaacuccuacu

SEQ ID NO: 1473756 - RNA, 19 nt, Artificial Sequence
  Description of Artificial Sequence: Synthetic oligonucleotide
acuaccugcaauuaaauau

SEQ ID NO: 1473757 - RNA, 19 nt, Artificial Sequence
  Description of Artificial Sequence: Synthetic oligonucleotide
aacaguaaguucacaauac

SEQ ID NO: 1473758 - RNA, 19 nt, Artificial Sequence
  Description of Artificial Sequence: Synthetic oligonucleotide
uuugugaaacacuauauau

SEQ ID NO: 1473759 - RNA, 19 nt, Artificial Sequence
  Description of Artificial Sequence: Synthetic oligonucleotide
agaaucaauacaguaaguc

SEQ ID NO: 1473760 - RNA, 19 nt, Artificial Sequence
  Description of Artificial Sequence: Synthetic oligonucleotide
uucacaaugcauuccacag

SEQ ID NO: 1473761 - RNA, 19 nt, Artificial Sequence
  Description of Artificial Sequence: Synthetic oligonucleotide
auuugcaaguccuagauaa

SEQ ID NO: 1473762 - RNA, 19 nt, Artificial Sequence
  Description of Artificial Sequence: Synthetic oligonucleotide
aauauaacaguaaguucac

SEQ ID NO: 1473763 - RNA, 19 nt, Artificial Sequence
  Description of Artificial Sequence: Synthetic oligonucleotide
ucauuuuaugauuucuugc

SEQ ID NO: 1473764 - RNA, 19 nt, Artificial Sequence
  Description of Artificial Sequence: Synthetic oligonucleotide
aacaaguaugauuacaauu

SEQ ID NO: 1473765 - RNA, 19 nt, Artificial Sequence
  Description of Artificial Sequence: Synthetic oligonucleotide
cuuauauuggcaauauaac

SEQ ID NO: 1473766 - RNA, 19 nt, Artificial Sequence
  Description of Artificial Sequence: Synthetic oligonucleotide
aagguaaagaucuaagcuu

SEQ ID NO: 1473767 - RNA, 19 nt, Artificial Sequence
  Description of Artificial Sequence: Synthetic oligonucleotide
uucauuuuaugauuucuug

SEQ ID NO: 1473768 - RNA, 19 nt, Artificial Sequence
  Description of Artificial Sequence: Synthetic oligonucleotide
aaccaaacacaguacacug

SEQ ID NO: 1473769 - RNA, 19 nt, Artificial Sequence
  Description of Artificial Sequence: Synthetic oligonucleotide
gagacuauacuguauaauc

SEQ ID NO: 1473770 - RNA, 19 nt, Artificial Sequence
  Description of Artificial Sequence: Synthetic oligonucleotide
uuuaaagaugaacuccuac

SEQ ID NO: 1473771 - RNA, 19 nt, Artificial Sequence
  Description of Artificial Sequence: Synthetic oligonucleotide
cagggaaucaacuaaauca

SEQ ID NO: 1473772 - RNA, 19 nt, Artificial Sequence
  Description of Artificial Sequence: Synthetic oligonucleotide
aaguccuagauaaugaucu

SEQ ID NO: 1473773 - RNA, 19 nt, Artificial Sequence
  Description of Artificial Sequence: Synthetic oligonucleotide
aaucagagcuaaaaucagc

SEQ ID NO: 1473774 - RNA, 19 nt, Artificial Sequence
  Description of Artificial Sequence: Synthetic oligonucleotide
aaacuuuugcuuuuacagu

SEQ ID NO: 1473775 - RNA, 19 nt, Artificial Sequence
  Description of Artificial Sequence: Synthetic oligonucleotide
aagaucuaagcuuugugaa

SEQ ID NO: 1473776 - RNA, 19 nt, Artificial Sequence
  Description of Artificial Sequence: Synthetic oligonucleotide
aaagacagaugguagugcu

SEQ ID NO: 1473777 - RNA, 19 nt, Artificial Sequence
  Description of Artificial Sequence: Synthetic oligonucleotide
uaugaucucgucuaaacau

SEQ ID NO: 1473778 - RNA, 19 nt, Artificial Sequence
  Description of Artificial Sequence: Synthetic oligonucleotide
agauuaugucuauauuuac

SEQ ID NO: 1473779 - RNA, 19 nt, Artificial Sequence
  Description of Artificial Sequence: Synthetic oligonucleotide
aauggcauaagucuucauu

SEQ ID NO: 1473780 - RNA, 19 nt, Artificial Sequence
  Description of Artificial Sequence: Synthetic oligonucleotide
uaaagaucuaagcuuugug

SEQ ID NO: 1473781 - RNA, 19 nt, Artificial Sequence
  Description of Artificial Sequence: Synthetic oligonucleotide
ugcuccuagaaauauauuc

SEQ ID NO: 1473782 - RNA, 19 nt, Artificial Sequence
  Description of Artificial Sequence: Synthetic oligonucleotide
aauaagcuggcaccaaaca

SEQ ID NO: 1473783 - RNA, 19 nt, Artificial Sequence
  Description of Artificial Sequence: Synthetic oligonucleotide
gaagagugaaaucagagcu

SEQ ID NO: 1473784 - RNA, 19 nt, Artificial Sequence
  Description of Artificial Sequence: Synthetic oligonucleotide
gauagucacagagagcagg

SEQ ID NO: 1473785 - RNA, 19 nt, Artificial Sequence
  Description of Artificial Sequence: Synthetic oligonucleotide
ugcuugagagacuauacug

SEQ ID NO: 1473786 - RNA, 19 nt, Artificial Sequence
  Description of Artificial Sequence: Synthetic oligonucleotide
uacuuaagaugauaaacac

SEQ ID NO: 1473787 - RNA, 19 nt, Artificial Sequence
  Description of Artificial Sequence: Synthetic oligonucleotide
agcaggaauaagcuggcac

SEQ ID NO: 1473788 - RNA, 19 nt, Artificial Sequence
  Description of Artificial Sequence: Synthetic oligonucleotide
uuaagaugauaaacacagg

SEQ ID NO: 1473789 - RNA, 19 nt, Artificial Sequence
  Description of Artificial Sequence: Synthetic oligonucleotide
uauccuaaagcugauaguc

SEQ ID NO: 1473790 - RNA, 19 nt, Artificial Sequence
  Description of Artificial Sequence: Synthetic oligonucleotide
aguaguaugaucucgucua

SEQ ID NO: 1473791 - RNA, 19 nt, Artificial Sequence
  Description of Artificial Sequence: Synthetic oligonucleotide
ucgucuaaacauuucauuc

SEQ ID NO: 1473792 - RNA, 19 nt, Artificial Sequence
  Description of Artificial Sequence: Synthetic oligonucleotide
aauacaccuagaacauacc

SEQ ID NO: 1473793 - RNA, 19 nt, Artificial Sequence
  Description of Artificial Sequence: Synthetic oligonucleotide
cugaagagugaaaucagag

SEQ ID NO: 1473794 - RNA, 19 nt, Artificial Sequence
  Description of Artificial Sequence: Synthetic oligonucleotide
auauuggcaauauaacagu

SEQ ID NO: 1473795 - RNA, 19 nt, Artificial Sequence
  Description of Artificial Sequence: Synthetic oligonucleotide
aaauaacaggaauacugaa

SEQ ID NO: 1473796 - RNA, 19 nt, Artificial Sequence
  Description of Artificial Sequence: Synthetic oligonucleotide
ucaacuaagaagaggcguc

SEQ ID NO: 1473797 - RNA, 19 nt, Artificial Sequence
  Description of Artificial Sequence: Synthetic oligonucleotide
uaaugaucuaucugcaccu

SEQ ID NO: 1473798 - RNA, 19 nt, Artificial Sequence
  Description of Artificial Sequence: Synthetic oligonucleotide
cuagauaaugaucuaucug

SEQ ID NO: 1473799 - RNA, 19 nt, Artificial Sequence
  Description of Artificial Sequence: Synthetic oligonucleotide
ugaguguccccuuuaaaga

SEQ ID NO: 1473800 - RNA, 19 nt, Artificial Sequence
  Description of Artificial Sequence: Synthetic oligonucleotide
uugugaaacacuauauaua

SEQ ID NO: 1473801 - RNA, 19 nt, Artificial Sequence
  Description of Artificial Sequence: Synthetic oligonucleotide
cacuuaauucaccagugcc

SEQ ID NO: 1473802 - RNA, 19 nt, Artificial Sequence
  Description of Artificial Sequence: Synthetic oligonucleotide
cuaaaaucagcagugucag

SEQ ID NO: 1473803 - RNA, 19 nt, Artificial Sequence
  Description of Artificial Sequence: Synthetic oligonucleotide
aaccacaauggcauaaguc

SEQ ID NO: 1473804 - RNA, 19 nt, Artificial Sequence
  Description of Artificial Sequence: Synthetic oligonucleotide
agucuauaagcuuuauuga

SEQ ID NO: 1473805 - RNA, 19 nt, Artificial Sequence
  Description of Artificial Sequence: Synthetic oligonucleotide
ccaacauaaguaaacaccc

SEQ ID NO: 1473806 - RNA, 19 nt, Artificial Sequence
  Description of Artificial Sequence: Synthetic oligonucleotide
ugagagacuauacuguaua

SEQ ID NO: 1473807 - RNA, 19 nt, Artificial Sequence
  Description of Artificial Sequence: Synthetic oligonucleotide
ugcaaguccuagauaauga

SEQ ID NO: 1473808 - RNA, 19 nt, Artificial Sequence
  Description of Artificial Sequence: Synthetic oligonucleotide
uaacacucuuauuugcaag

SEQ ID NO: 1473809 - RNA, 19 nt, Artificial Sequence
  Description of Artificial Sequence: Synthetic oligonucleotide
uaucaaaugaguguccccu

SEQ ID NO: 1473810 - RNA, 19 nt, Artificial Sequence
  Description of Artificial Sequence: Synthetic oligonucleotide
uuaaauccauacacagcag

SEQ ID NO: 1473811 - RNA, 19 nt, Artificial Sequence
  Description of Artificial Sequence: Synthetic oligonucleotide
aaugauguuuaugcuggag

SEQ ID NO: 1473812 - RNA, 19 nt, Artificial Sequence
  Description of Artificial Sequence: Synthetic oligonucleotide
auaacaguaaguucacaau

SEQ ID NO: 1473813 - RNA, 19 nt, Artificial Sequence
  Description of Artificial Sequence: Synthetic oligonucleotide
ugugcuugagagacuauac

SEQ ID NO: 1473814 - RNA, 19 nt, Artificial Sequence
  Description of Artificial Sequence: Synthetic oligonucleotide
aaacaaguaugauuacaau

SEQ ID NO: 1473815 - RNA, 19 nt, Artificial Sequence
  Description of Artificial Sequence: Synthetic oligonucleotide
gaucuaagcuuugugaaac

SEQ ID NO: 1473816 - RNA, 19 nt, Artificial Sequence
  Description of Artificial Sequence: Synthetic oligonucleotide
acaaguaugauuacaauuu

SEQ ID NO: 1473817 - RNA, 19 nt, Artificial Sequence
  Description of Artificial Sequence: Synthetic oligonucleotide
ugaacaccgucagagacag

SEQ ID NO: 1473818 - RNA, 19 nt, Artificial Sequence
  Description of Artificial Sequence: Synthetic oligonucleotide
gucguucauaaauaacagg

SEQ ID NO: 1473819 - RNA, 19 nt, Artificial Sequence
  Description of Artificial Sequence: Synthetic oligonucleotide
acauaccauaaagacagcg

SEQ ID NO: 1473820 - RNA, 19 nt, Artificial Sequence
  Description of Artificial Sequence: Synthetic oligonucleotide
acccuuauauauccuaaag

SEQ ID NO: 1473821 - RNA, 19 nt, Artificial Sequence
  Description of Artificial Sequence: Synthetic oligonucleotide
caguaaguucacaauacac

SEQ ID NO: 1473822 - RNA, 19 nt, Artificial Sequence
  Description of Artificial Sequence: Synthetic oligonucleotide
caguccauagaaucaauac

SEQ ID NO: 1473823 - RNA, 19 nt, Artificial Sequence
  Description of Artificial Sequence: Synthetic oligonucleotide
auaagcuuuauugaaacuu

SEQ ID NO: 1473824 - RNA, 19 nt, Artificial Sequence
  Description of Artificial Sequence: Synthetic oligonucleotide
uuuacuuauauuggcaaua

SEQ ID NO: 1473825 - RNA, 19 nt, Artificial Sequence
  Description of Artificial Sequence: Synthetic oligonucleotide
uaacuauguuugauaacug

SEQ ID NO: 1473826 - RNA, 19 nt, Artificial Sequence
  Description of Artificial Sequence: Synthetic oligonucleotide
gauaaugaucuaucugcac

SEQ ID NO: 1473827 - RNA, 19 nt, Artificial Sequence
  Description of Artificial Sequence: Synthetic oligonucleotide
cucuuccuagcuuaugugc

SEQ ID NO: 1473828 - RNA, 19 nt, Artificial Sequence
  Description of Artificial Sequence: Synthetic oligonucleotide
guguuguuuccuuaaagac

SEQ ID NO: 1473829 - RNA, 19 nt, Artificial Sequence
  Description of Artificial Sequence: Synthetic oligonucleotide
ugcauaacuauguuugaua

SEQ ID NO: 1473830 - RNA, 19 nt, Artificial Sequence
  Description of Artificial Sequence: Synthetic oligonucleotide
cucacuuaauucaccagug

SEQ ID NO: 1473831 - RNA, 19 nt, Artificial Sequence
  Description of Artificial Sequence: Synthetic oligonucleotide
uacaccuagaacauaccau

SEQ ID NO: 1473832 - RNA, 19 nt, Artificial Sequence
  Description of Artificial Sequence: Synthetic oligonucleotide
auacaccuagaacauacca

SEQ ID NO: 1473833 - RNA, 19 nt, Artificial Sequence
  Description of Artificial Sequence: Synthetic oligonucleotide
uuaacacucuuauuugcaa

SEQ ID NO: 1473834 - RNA, 19 nt, Artificial Sequence
  Description of Artificial Sequence: Synthetic oligonucleotide
agugaaaucagagcuaaaa

SEQ ID NO: 1473835 - RNA, 19 nt, Artificial Sequence
  Description of Artificial Sequence: Synthetic oligonucleotide
uaggccguuacacucacaa

SEQ ID NO: 1473836 - RNA, 19 nt, Artificial Sequence
  Description of Artificial Sequence: Synthetic oligonucleotide
auaccauaaagacagcguu

SEQ ID NO: 1473837 - RNA, 19 nt, Artificial Sequence
  Description of Artificial Sequence: Synthetic oligonucleotide
uuaucaaaugagugucccc

SEQ ID NO: 1473838 - RNA, 19 nt, Artificial Sequence
  Description of Artificial Sequence: Synthetic oligonucleotide
caaauaugcccugaauggg

SEQ ID NO: 1473839 - RNA, 19 nt, Artificial Sequence
  Description of Artificial Sequence: Synthetic oligonucleotide
gacuauacuguauaaucaa

SEQ ID NO: 1473840 - RNA, 19 nt, Artificial Sequence
  Description of Artificial Sequence: Synthetic oligonucleotide
uauaagcuuuauugaaacu

SEQ ID NO: 1473841 - RNA, 19 nt, Artificial Sequence
  Description of Artificial Sequence: Synthetic oligonucleotide
agcaaaacuaccugcaauu

SEQ ID NO: 1473842 - RNA, 19 nt, Artificial Sequence
  Description of Artificial Sequence: Synthetic oligonucleotide
cagaggucaaguacugugg

SEQ ID NO: 1473843 - RNA, 19 nt, Artificial Sequence
  Description of Artificial Sequence: Synthetic oligonucleotide
uuugcgcuucaauccaggg

SEQ ID NO: 1473844 - RNA, 19 nt, Artificial Sequence
  Description of Artificial Sequence: Synthetic oligonucleotide
aguaugauuacaauuuaaa

SEQ ID NO: 1473845 - RNA, 19 nt, Artificial Sequence
  Description of Artificial Sequence: Synthetic oligonucleotide
guuaucaaaugaguguccc

SEQ ID NO: 1473846 - RNA, 19 nt, Artificial Sequence
  Description of Artificial Sequence: Synthetic oligonucleotide
uccacagauaauucauuac

SEQ ID NO: 1473847 - RNA, 19 nt, Artificial Sequence
  Description of Artificial Sequence: Synthetic oligonucleotide
ucagggaaucaacuaaauc

SEQ ID NO: 1473848 - RNA, 19 nt, Artificial Sequence
  Description of Artificial Sequence: Synthetic oligonucleotide
augaacuccuacuguuugg

SEQ ID NO: 1473849 - RNA, 19 nt, Artificial Sequence
  Description of Artificial Sequence: Synthetic oligonucleotide
aaauaugcccugaaugggu

SEQ ID NO: 1473850 - RNA, 19 nt, Artificial Sequence
  Description of Artificial Sequence: Synthetic oligonucleotide
guaaguucacaauacaccu

SEQ ID NO: 1473851 - RNA, 19 nt, Artificial Sequence
  Description of Artificial Sequence: Synthetic oligonucleotide
ugauguuuaugcuggaguu

SEQ ID NO: 1473852 - RNA, 19 nt, Artificial Sequence
  Description of Artificial Sequence: Synthetic oligonucleotide
agaacauaccauaaagaca

SEQ ID NO: 1473853 - RNA, 19 nt, Artificial Sequence
  Description of Artificial Sequence: Synthetic oligonucleotide
augaucuaucugcaccugg

SEQ ID NO: 1473854 - RNA, 19 nt, Artificial Sequence
  Description of Artificial Sequence: Synthetic oligonucleotide
caucaacuaagaagaggcg

SEQ ID NO: 1473855 - RNA, 19 nt, Artificial Sequence
  Description of Artificial Sequence: Synthetic oligonucleotide
aaaugaguguccccuuuaa

SEQ ID NO: 1473856 - RNA, 19 nt, Artificial Sequence
  Description of Artificial Sequence: Synthetic oligonucleotide
uauacugcuuucucggcuc

SEQ ID NO: 1473857 - RNA, 19 nt, Artificial Sequence
  Description of Artificial Sequence: Synthetic oligonucleotide
auauacugcuuucucggcu

SEQ ID NO: 1473858 - RNA, 19 nt, Artificial Sequence
  Description of Artificial Sequence: Synthetic oligonucleotide
acaccuagaacauaccaua

SEQ ID NO: 1473859 - RNA, 19 nt, Artificial Sequence
  Description of Artificial Sequence: Synthetic oligonucleotide
uauuggcaauauaacagua

SEQ ID NO: 1473860 - RNA, 19 nt, Artificial Sequence
  Description of Artificial Sequence: Synthetic oligonucleotide
auauucucuuccuagcuua

SEQ ID NO: 1473861 - RNA, 19 nt, Artificial Sequence
  Description of Artificial Sequence: Synthetic oligonucleotide
uccuuaaagacagauggua

SEQ ID NO: 1473862 - RNA, 19 nt, Artificial Sequence
  Description of Artificial Sequence: Synthetic oligonucleotide
aucaacuaagaagaggcgu

SEQ ID NO: 1473863 - RNA, 19 nt, Artificial Sequence
  Description of Artificial Sequence: Synthetic oligonucleotide
auacacagcagcuuacaau

SEQ ID NO: 1473864 - RNA, 19 nt, Artificial Sequence
  Description of Artificial Sequence: Synthetic oligonucleotide
caucaauuuacaccaacca

SEQ ID NO: 1473865 - RNA, 19 nt, Artificial Sequence
  Description of Artificial Sequence: Synthetic oligonucleotide
uauauauccuaaagcugau

SEQ ID NO: 1473866 - RNA, 19 nt, Artificial Sequence
  Description of Artificial Sequence: Synthetic oligonucleotide
auauccuaaagcugauagu

SEQ ID NO: 1473867 - RNA, 19 nt, Artificial Sequence
  Description of Artificial Sequence: Synthetic oligonucleotide
agcuuugugaaacacuaua

SEQ ID NO: 1473868 - RNA, 19 nt, Artificial Sequence
  Description of Artificial Sequence: Synthetic oligonucleotide
uuaugucuauauuuacuua

SEQ ID NO: 1473869 - RNA, 19 nt, Artificial Sequence
  Description of Artificial Sequence: Synthetic oligonucleotide
ugcuuugcgcuucaaucca

SEQ ID NO: 1473870 - RNA, 19 nt, Artificial Sequence
  Description of Artificial Sequence: Synthetic oligonucleotide
aaugcugaacaccgucaga

SEQ ID NO: 1473871 - RNA, 19 nt, Artificial Sequence
  Description of Artificial Sequence: Synthetic oligonucleotide
cuccuagaaauauauucuc

SEQ ID NO: 1473872 - RNA, 19 nt, Artificial Sequence
  Description of Artificial Sequence: Synthetic oligonucleotide
cuuaauucaccagugccuc

SEQ ID NO: 1473873 - RNA, 19 nt, Artificial Sequence
  Description of Artificial Sequence: Synthetic oligonucleotide
acuaagaagaggcgucuga

SEQ ID NO: 1473874 - RNA, 19 nt, Artificial Sequence
  Description of Artificial Sequence: Synthetic oligonucleotide
acuuaauucaccagugccu

SEQ ID NO: 1473875 - RNA, 19 nt, Artificial Sequence
  Description of Artificial Sequence: Synthetic oligonucleotide
ucauuacagcuuaaaccac

SEQ ID NO: 1473876 - RNA, 19 nt, Artificial Sequence
  Description of Artificial Sequence: Synthetic oligonucleotide
aaccaauuccucugauaca

SEQ ID NO: 1473877 - RNA, 19 nt, Artificial Sequence
  Description of Artificial Sequence: Synthetic oligonucleotide
cacucuuauuugcaagucc

SEQ ID NO: 1473878 - RNA, 19 nt, Artificial Sequence
  Description of Artificial Sequence: Synthetic oligonucleotide
ggccguuacacucacaaug

SEQ ID NO: 1473879 - RNA, 19 nt, Artificial Sequence
  Description of Artificial Sequence: Synthetic oligonucleotide
acuaaaucaucaacuaaga

SEQ ID NO: 1473880 - RNA, 19 nt, Artificial Sequence
  Description of Artificial Sequence: Synthetic oligonucleotide
gucuauaagcuuuauugaa

SEQ ID NO: 1473881 - RNA, 19 nt, Artificial Sequence
  Description of Artificial Sequence: Synthetic oligonucleotide
agacuauacuguauaauca

SEQ ID NO: 1473882 - RNA, 19 nt, Artificial Sequence
  Description of Artificial Sequence: Synthetic oligonucleotide
acuccuacuguuuggggcu

SEQ ID NO: 1473883 - RNA, 19 nt, Artificial Sequence
  Description of Artificial Sequence: Synthetic oligonucleotide
cagcuuaaaccacaauggc

SEQ ID NO: 1473884 - RNA, 19 nt, Artificial Sequence
  Description of Artificial Sequence: Synthetic oligonucleotide
cauaaagacagcguuuuca

SEQ ID NO: 1473885 - RNA, 19 nt, Artificial Sequence
  Description of Artificial Sequence: Synthetic oligonucleotide
cuguguuguuuccuuaaag

SEQ ID NO: 1473886 - RNA, 19 nt, Artificial Sequence
  Description of Artificial Sequence: Synthetic oligonucleotide
acuuaagaugauaaacaca

SEQ ID NO: 1473887 - RNA, 19 nt, Artificial Sequence
  Description of Artificial Sequence: Synthetic oligonucleotide
uggauagcuuggaucacac

SEQ ID NO: 1473888 - RNA, 19 nt, Artificial Sequence
  Description of Artificial Sequence: Synthetic oligonucleotide
guaugaucucgucuaaaca

SEQ ID NO: 1473889 - RNA, 19 nt, Artificial Sequence
  Description of Artificial Sequence: Synthetic oligonucleotide
agagcugaagcugcaccgc

SEQ ID NO: 1473890 - RNA, 19 nt, Artificial Sequence
  Description of Artificial Sequence: Synthetic oligonucleotide
aacauaccauaaagacagc

SEQ ID NO: 1473891 - RNA, 19 nt, Artificial Sequence
  Description of Artificial Sequence: Synthetic oligonucleotide
uuaguaguaugaucucguc

SEQ ID NO: 1473892 - RNA, 19 nt, Artificial Sequence
  Description of Artificial Sequence: Synthetic oligonucleotide
uugcgcuucaauccaggga

SEQ ID NO: 1473893 - RNA, 19 nt, Artificial Sequence
  Description of Artificial Sequence: Synthetic oligonucleotide
agaucuaagcuuugugaaa

SEQ ID NO: 1473894 - RNA, 19 nt, Artificial Sequence
  Description of Artificial Sequence: Synthetic oligonucleotide
caaugcugaacaccgucag

SEQ ID NO: 1473895 - RNA, 19 nt, Artificial Sequence
  Description of Artificial Sequence: Synthetic oligonucleotide
acaaggcaccaacauaagu

SEQ ID NO: 1473896 - RNA, 19 nt, Artificial Sequence
  Description of Artificial Sequence: Synthetic oligonucleotide
aagacagaugguagugcuc

SEQ ID NO: 1473897 - RNA, 19 nt, Artificial Sequence
  Description of Artificial Sequence: Synthetic oligonucleotide
gauuaugucuauauuuacu

SEQ ID NO: 1473898 - RNA, 19 nt, Artificial Sequence
  Description of Artificial Sequence: Synthetic oligonucleotide
cccuuauauauccuaaagc

SEQ ID NO: 1473899 - RNA, 19 nt, Artificial Sequence
  Description of Artificial Sequence: Synthetic oligonucleotide
ccuuaaagacagaugguag

SEQ ID NO: 1473900 - RNA, 19 nt, Artificial Sequence
  Description of Artificial Sequence: Synthetic oligonucleotide
uugagagacuauacuguau

SEQ ID NO: 1473901 - RNA, 19 nt, Artificial Sequence
  Description of Artificial Sequence: Synthetic oligonucleotide
ugaucucgucuaaacauuu

SEQ ID NO: 1473902 - RNA, 19 nt, Artificial Sequence
  Description of Artificial Sequence: Synthetic oligonucleotide
uucuguguuguuuccuuaa

SEQ ID NO: 1473903 - RNA, 19 nt, Artificial Sequence
  Description of Artificial Sequence: Synthetic oligonucleotide
agugcuccuagaaauauau

SEQ ID NO: 1473904 - RNA, 19 nt, Artificial Sequence
  Description of Artificial Sequence: Synthetic oligonucleotide
agucuuugcaaugauguuu

SEQ ID NO: 1473905 - RNA, 19 nt, Artificial Sequence
  Description of Artificial Sequence: Synthetic oligonucleotide
aagucugcaucaauuuaca

SEQ ID NO: 1473906 - RNA, 19 nt, Artificial Sequence
  Description of Artificial Sequence: Synthetic oligonucleotide
aggcaauguaggccguuac

SEQ ID NO: 1473907 - RNA, 19 nt, Artificial Sequence
  Description of Artificial Sequence: Synthetic oligonucleotide
ugaaccaauuccucugaua

SEQ ID NO: 1473908 - RNA, 19 nt, Artificial Sequence
  Description of Artificial Sequence: Synthetic oligonucleotide
ccuuauauauccuaaagcu

SEQ ID NO: 1473909 - RNA, 19 nt, Artificial Sequence
  Description of Artificial Sequence: Synthetic oligonucleotide
ucaaaugaguguccccuuu

SEQ ID NO: 1473910 - RNA, 19 nt, Artificial Sequence
  Description of Artificial Sequence: Synthetic oligonucleotide
cacaaugcugaacaccguc

SEQ ID NO: 1473911 - RNA, 19 nt, Artificial Sequence
  Description of Artificial Sequence: Synthetic oligonucleotide
aagucuuugcaaugauguu

SEQ ID NO: 1473912 - RNA, 19 nt, Artificial Sequence
  Description of Artificial Sequence: Synthetic oligonucleotide
agauaaugaucuaucugca

SEQ ID NO: 1473913 - RNA, 19 nt, Artificial Sequence
  Description of Artificial Sequence: Synthetic oligonucleotide
agggaaucaacuaaaucau

SEQ ID NO: 1473914 - RNA, 19 nt, Artificial Sequence
  Description of Artificial Sequence: Synthetic oligonucleotide
gcuaaaaucagcaguguca

SEQ ID NO: 1473915 - RNA, 19 nt, Artificial Sequence
  Description of Artificial Sequence: Synthetic oligonucleotide
uuucucggcucacuuaauu

SEQ ID NO: 1473916 - RNA, 19 nt, Artificial Sequence
  Description of Artificial Sequence: Synthetic oligonucleotide
uuaauucaccagugccuca

SEQ ID NO: 1473917 - RNA, 19 nt, Artificial Sequence
  Description of Artificial Sequence: Synthetic oligonucleotide
cagaugguagugcuccuag

SEQ ID NO: 1473918 - RNA, 19 nt, Artificial Sequence
  Description of Artificial Sequence: Synthetic oligonucleotide
uccauacacagcagcuuac

SEQ ID NO: 1473919 - RNA, 19 nt, Artificial Sequence
  Description of Artificial Sequence: Synthetic oligonucleotide
uuacaauacuuaagaugau

SEQ ID NO: 1473920 - RNA, 19 nt, Artificial Sequence
  Description of Artificial Sequence: Synthetic oligonucleotide
gcaauauaacaguaaguuc

SEQ ID NO: 1473921 - RNA, 19 nt, Artificial Sequence
  Description of Artificial Sequence: Synthetic oligonucleotide
cuuaaagacagaugguagu

SEQ ID NO: 1473922 - RNA, 19 nt, Artificial Sequence
  Description of Artificial Sequence: Synthetic oligonucleotide
aacaaggcaccaacauaag

SEQ ID NO: 1473923 - RNA, 19 nt, Artificial Sequence
  Description of Artificial Sequence: Synthetic oligonucleotide
ugaauggguggccuucauc

SEQ ID NO: 1473924 - RNA, 19 nt, Artificial Sequence
  Description of Artificial Sequence: Synthetic oligonucleotide
ucggcucacuuaauucacc

SEQ ID NO: 1473925 - RNA, 19 nt, Artificial Sequence
  Description of Artificial Sequence: Synthetic oligonucleotide
auacugcaaacuucaggga

SEQ ID NO: 1473926 - RNA, 19 nt, Artificial Sequence
  Description of Artificial Sequence: Synthetic oligonucleotide
aucugauuucuggauagcu

SEQ ID NO: 1473927 - RNA, 19 nt, Artificial Sequence
  Description of Artificial Sequence: Synthetic oligonucleotide
agagacuauacuguauaau

SEQ ID NO: 1473928 - RNA, 19 nt, Artificial Sequence
  Description of Artificial Sequence: Synthetic oligonucleotide
cugcuuuaguaguaugauc

SEQ ID NO: 1473929 - RNA, 19 nt, Artificial Sequence
  Description of Artificial Sequence: Synthetic oligonucleotide
accuagaacauaccauaaa

SEQ ID NO: 1473930 - RNA, 19 nt, Artificial Sequence
  Description of Artificial Sequence: Synthetic oligonucleotide
uguaggccguuacacucac

SEQ ID NO: 1473931 - RNA, 19 nt, Artificial Sequence
  Description of Artificial Sequence: Synthetic oligonucleotide
caaacauauggaaguauua

SEQ ID NO: 1473932 - RNA, 19 nt, Artificial Sequence
  Description of Artificial Sequence: Synthetic oligonucleotide
cucggcucacuuaauucac

SEQ ID NO: 1473933 - RNA, 19 nt, Artificial Sequence
  Description of Artificial Sequence: Synthetic oligonucleotide
accauaaagacagcguuuu

SEQ ID NO: 1473934 - RNA, 19 nt, Artificial Sequence
  Description of Artificial Sequence: Synthetic oligonucleotide
agauuccaaauaugcccug

SEQ ID NO: 1473935 - RNA, 19 nt, Artificial Sequence
  Description of Artificial Sequence: Synthetic oligonucleotide
cauaccauaaagacagcgu

SEQ ID NO: 1473936 - RNA, 19 nt, Artificial Sequence
  Description of Artificial Sequence: Synthetic oligonucleotide
ucaccccugacccucccac

SEQ ID NO: 1473937 - RNA, 19 nt, Artificial Sequence
  Description of Artificial Sequence: Synthetic oligonucleotide
gagagacuauacuguauaa

SEQ ID NO: 1473938 - RNA, 19 nt, Artificial Sequence
  Description of Artificial Sequence: Synthetic oligonucleotide
gcugaacaccgucagagac

SEQ ID NO: 1473939 - RNA, 19 nt, Artificial Sequence
  Description of Artificial Sequence: Synthetic oligonucleotide
acugaagagugaaaucaga

SEQ ID NO: 1473940 - RNA, 19 nt, Artificial Sequence
  Description of Artificial Sequence: Synthetic oligonucleotide
gcagcuuacaauacuuaag

SEQ ID NO: 1473941 - RNA, 19 nt, Artificial Sequence
  Description of Artificial Sequence: Synthetic oligonucleotide
guauaaucaaugacucaga

SEQ ID NO: 1473942 - RNA, 19 nt, Artificial Sequence
  Description of Artificial Sequence: Synthetic oligonucleotide
acuauacuguauaaucaau

SEQ ID NO: 1473943 - RNA, 19 nt, Artificial Sequence
  Description of Artificial Sequence: Synthetic oligonucleotide
cuugcauaacuauguuuga

SEQ ID NO: 1473944 - RNA, 19 nt, Artificial Sequence
  Description of Artificial Sequence: Synthetic oligonucleotide
agcuuaugugcuugagaga

SEQ ID NO: 1473945 - RNA, 19 nt, Artificial Sequence
  Description of Artificial Sequence: Synthetic oligonucleotide
ugcugaacaccgucagaga

SEQ ID NO: 1473946 - RNA, 19 nt, Artificial Sequence
  Description of Artificial Sequence: Synthetic oligonucleotide
caacuaaaucaucaacuaa

SEQ ID NO: 1473947 - RNA, 19 nt, Artificial Sequence
  Description of Artificial Sequence: Synthetic oligonucleotide
acaaugcugaacaccguca

SEQ ID NO: 1473948 - RNA, 19 nt, Artificial Sequence
  Description of Artificial Sequence: Synthetic oligonucleotide
caaaacuaccugcaauuaa

SEQ ID NO: 1473949 - RNA, 19 nt, Artificial Sequence
  Description of Artificial Sequence: Synthetic oligonucleotide
augauuucuugcauaacua

SEQ ID NO: 1473950 - RNA, 19 nt, Artificial Sequence
  Description of Artificial Sequence: Synthetic oligonucleotide
cagagcuaaaaucagcagu

SEQ ID NO: 1473951 - RNA, 19 nt, Artificial Sequence
  Description of Artificial Sequence: Synthetic oligonucleotide
gcaauuucccaaauacagc

SEQ ID NO: 1473952 - RNA, 19 nt, Artificial Sequence
  Description of Artificial Sequence: Synthetic oligonucleotide
ggcaauauaacaguaaguu

SEQ ID NO: 1473953 - RNA, 19 nt, Artificial Sequence
  Description of Artificial Sequence: Synthetic oligonucleotide
gcaauguaggccguuacac

SEQ ID NO: 1473954 - RNA, 19 nt, Artificial Sequence
  Description of Artificial Sequence: Synthetic oligonucleotide
aucaauacaguaagucuuu

SEQ ID NO: 1473955 - RNA, 19 nt, Artificial Sequence
  Description of Artificial Sequence: Synthetic oligonucleotide
gauuacaauuuaaauccau

SEQ ID NO: 1473956 - RNA, 19 nt, Artificial Sequence
  Description of Artificial Sequence: Synthetic oligonucleotide
ucacacccuuauauauccu

SEQ ID NO: 1473957 - RNA, 19 nt, Artificial Sequence
  Description of Artificial Sequence: Synthetic oligonucleotide
ugcuggaguucuguguugu

SEQ ID NO: 1473958 - RNA, 19 nt, Artificial Sequence
  Description of Artificial Sequence: Synthetic oligonucleotide
aguguccccuuuaaagaug

SEQ ID NO: 1473959 - RNA, 19 nt, Artificial Sequence
  Description of Artificial Sequence: Synthetic oligonucleotide
caguacacugugaaaaggu

SEQ ID NO: 1473960 - RNA, 19 nt, Artificial Sequence
  Description of Artificial Sequence: Synthetic oligonucleotide
gcauuccacagauaauuca

SEQ ID NO: 1473961 - RNA, 19 nt, Artificial Sequence
  Description of Artificial Sequence: Synthetic oligonucleotide
auggccaagagcagaauua

SEQ ID NO: 1473962 - RNA, 19 nt, Artificial Sequence
  Description of Artificial Sequence: Synthetic oligonucleotide
aguacacugugaaaagguu

SEQ ID NO: 1473963 - RNA, 19 nt, Artificial Sequence
  Description of Artificial Sequence: Synthetic oligonucleotide
gaucucgucuaaacauuuc

SEQ ID NO: 1473964 - RNA, 19 nt, Artificial Sequence
  Description of Artificial Sequence: Synthetic oligonucleotide
gccguuacacucacaaugc

SEQ ID NO: 1473965 - RNA, 19 nt, Artificial Sequence
  Description of Artificial Sequence: Synthetic oligonucleotide
ugcaaacuucagggaauca

SEQ ID NO: 1473966 - RNA, 19 nt, Artificial Sequence
  Description of Artificial Sequence: Synthetic oligonucleotide
aaggcaauguaggccguua

SEQ ID NO: 1473967 - RNA, 19 nt, Artificial Sequence
  Description of Artificial Sequence: Synthetic oligonucleotide
caguaagucuuugcaauga

SEQ ID NO: 1473968 - RNA, 19 nt, Artificial Sequence
  Description of Artificial Sequence: Synthetic oligonucleotide
ggcucacuuaauucaccag

SEQ ID NO: 1473969 - RNA, 19 nt, Artificial Sequence
  Description of Artificial Sequence: Synthetic oligonucleotide
aguccuagauaaugaucua

SEQ ID NO: 1473970 - RNA, 19 nt, Artificial Sequence
  Description of Artificial Sequence: Synthetic oligonucleotide
auacugcuuucucggcuca

SEQ ID NO: 1473971 - RNA, 19 nt, Artificial Sequence
  Description of Artificial Sequence: Synthetic oligonucleotide
uaugugcuugagagacuau

SEQ ID NO: 1473972 - RNA, 19 nt, Artificial Sequence
  Description of Artificial Sequence: Synthetic oligonucleotide
guaguaugaucucgucuaa

SEQ ID NO: 1473973 - RNA, 19 nt, Artificial Sequence
  Description of Artificial Sequence: Synthetic oligonucleotide
augcccugaauggguggcc

SEQ ID NO: 1473974 - RNA, 19 nt, Artificial Sequence
  Description of Artificial Sequence: Synthetic oligonucleotide
augaucucgucuaaacauu

SEQ ID NO: 1473975 - RNA, 19 nt, Artificial Sequence
  Description of Artificial Sequence: Synthetic oligonucleotide
caaugacucagaggucaag

SEQ ID NO: 1473976 - RNA, 19 nt, Artificial Sequence
  Description of Artificial Sequence: Synthetic oligonucleotide
guaaagaucuaagcuuugu

SEQ ID NO: 1473977 - RNA, 19 nt, Artificial Sequence
  Description of Artificial Sequence: Synthetic oligonucleotide
gugaaacacuauauauaga

SEQ ID NO: 1473978 - RNA, 19 nt, Artificial Sequence
  Description of Artificial Sequence: Synthetic oligonucleotide
gcucacuuaauucaccagu

SEQ ID NO: 1473979 - RNA, 19 nt, Artificial Sequence
  Description of Artificial Sequence: Synthetic oligonucleotide
gucugaguucuuuuauugu

SEQ ID NO: 1473980 - RNA, 19 nt, Artificial Sequence
  Description of Artificial Sequence: Synthetic oligonucleotide
cacacccuuauauauccua

SEQ ID NO: 1473981 - RNA, 19 nt, Artificial Sequence
  Description of Artificial Sequence: Synthetic oligonucleotide
ccccguuaucaaaugagug

SEQ ID NO: 1473982 - RNA, 19 nt, Artificial Sequence
  Description of Artificial Sequence: Synthetic oligonucleotide
cucaaauagugcacugcua

SEQ ID NO: 1473983 - RNA, 19 nt, Artificial Sequence
  Description of Artificial Sequence: Synthetic oligonucleotide
auauauccuaaagcugaua

SEQ ID NO: 1473984 - RNA, 19 nt, Artificial Sequence
  Description of Artificial Sequence: Synthetic oligonucleotide
accugcaauuaaauauacu

SEQ ID NO: 1473985 - RNA, 19 nt, Artificial Sequence
  Description of Artificial Sequence: Synthetic oligonucleotide
caccuagaacauaccauaa

SEQ ID NO: 1473986 - RNA, 19 nt, Artificial Sequence
  Description of Artificial Sequence: Synthetic oligonucleotide
caccuggugucguucauaa

SEQ ID NO: 1473987 - RNA, 19 nt, Artificial Sequence
  Description of Artificial Sequence: Synthetic oligonucleotide
gugcuugagagacuauacu

SEQ ID NO: 1473988 - RNA, 19 nt, Artificial Sequence
  Description of Artificial Sequence: Synthetic oligonucleotide
ggcaauguaggccguuaca

SEQ ID NO: 1473989 - RNA, 19 nt, Artificial Sequence
  Description of Artificial Sequence: Synthetic oligonucleotide
auguaggccguuacacuca

SEQ ID NO: 1473990 - RNA, 19 nt, Artificial Sequence
  Description of Artificial Sequence: Synthetic oligonucleotide
cuuaaaccacaauggcaua

SEQ ID NO: 1473991 - RNA, 19 nt, Artificial Sequence
  Description of Artificial Sequence: Synthetic oligonucleotide
caauguaggccguuacacu

SEQ ID NO: 1473992 - RNA, 19 nt, Artificial Sequence
  Description of Artificial Sequence: Synthetic oligonucleotide
cgucuaaacauuucauuca

SEQ ID NO: 1473993 - RNA, 19 nt, Artificial Sequence
  Description of Artificial Sequence: Synthetic oligonucleotide
gcuccuagaaauauauucu

SEQ ID NO: 1473994 - RNA, 19 nt, Artificial Sequence
  Description of Artificial Sequence: Synthetic oligonucleotide
cacccuuauauauccuaaa

SEQ ID NO: 1473995 - RNA, 19 nt, Artificial Sequence
  Description of Artificial Sequence: Synthetic oligonucleotide
cuggauagcuuggaucaca

SEQ ID NO: 1473996 - RNA, 19 nt, Artificial Sequence
  Description of Artificial Sequence: Synthetic oligonucleotide
cucgucuaaacauuucauu

SEQ ID NO: 1473997 - RNA, 19 nt, Artificial Sequence
  Description of Artificial Sequence: Synthetic oligonucleotide
acaauacaccuagaacaua

SEQ ID NO: 1473998 - RNA, 19 nt, Artificial Sequence
  Description of Artificial Sequence: Synthetic oligonucleotide
gcuggcaccaaacaccacu

SEQ ID NO: 1473999 - RNA, 19 nt, Artificial Sequence
  Description of Artificial Sequence: Synthetic oligonucleotide
ugcccugaauggguggccu

SEQ ID NO: 1474000 - RNA, 19 nt, Artificial Sequence
  Description of Artificial Sequence: Synthetic oligonucleotide
cacuccagucuucuuaaua

SEQ ID NO: 1474001 - RNA, 19 nt, Artificial Sequence
  Description of Artificial Sequence: Synthetic oligonucleotide
aggcgucugaguucuuuua

SEQ ID NO: 1474002 - RNA, 19 nt, Artificial Sequence
  Description of Artificial Sequence: Synthetic oligonucleotide
ugcaccuggugucguucau

SEQ ID NO: 1474003 - RNA, 19 nt, Artificial Sequence
  Description of Artificial Sequence: Synthetic oligonucleotide
aguucacaauacaccuaga

SEQ ID NO: 1474004 - RNA, 19 nt, Artificial Sequence
  Description of Artificial Sequence: Synthetic oligonucleotide
ccuagauaaugaucuaucu

SEQ ID NO: 1474005 - RNA, 19 nt, Artificial Sequence
  Description of Artificial Sequence: Synthetic oligonucleotide
aggccguuacacucacaau

SEQ ID NO: 1474006 - RNA, 19 nt, Artificial Sequence
  Description of Artificial Sequence: Synthetic oligonucleotide
guagugcuccuagaaauau

SEQ ID NO: 1474007 - RNA, 19 nt, Artificial Sequence
  Description of Artificial Sequence: Synthetic oligonucleotide
cauucugcuuugcgcuuca

SEQ ID NO: 1474008 - RNA, 19 nt, Artificial Sequence
  Description of Artificial Sequence: Synthetic oligonucleotide
cccguuaucaaaugagugu

SEQ ID NO: 1474009 - RNA, 19 nt, Artificial Sequence
  Description of Artificial Sequence: Synthetic oligonucleotide
cuuggaucacacccuuaua

SEQ ID NO: 1474010 - RNA, 19 nt, Artificial Sequence
  Description of Artificial Sequence: Synthetic oligonucleotide
cagcaaaacuaccugcaau

SEQ ID NO: 1474011 - RNA, 19 nt, Artificial Sequence
  Description of Artificial Sequence: Synthetic oligonucleotide
ggucaaguacuguggggaa

SEQ ID NO: 1474012 - RNA, 19 nt, Artificial Sequence
  Description of Artificial Sequence: Synthetic oligonucleotide
guccuagauaaugaucuau

SEQ ID NO: 1474013 - RNA, 19 nt, Artificial Sequence
  Description of Artificial Sequence: Synthetic oligonucleotide
accgccgccaagggcucac

SEQ ID NO: 1474014 - RNA, 19 nt, Artificial Sequence
  Description of Artificial Sequence: Synthetic oligonucleotide
cacccacaucaauacugca

SEQ ID NO: 1474015 - RNA, 19 nt, Artificial Sequence
  Description of Artificial Sequence: Synthetic oligonucleotide
cugcaaacauauggaagua

SEQ ID NO: 1474016 - RNA, 19 nt, Artificial Sequence
  Description of Artificial Sequence: Synthetic oligonucleotide
gcuuugcgcuucaauccag

SEQ ID NO: 1474017 - RNA, 19 nt, Artificial Sequence
  Description of Artificial Sequence: Synthetic oligonucleotide
caaacaccacuccagucuu

SEQ ID NO: 1474018 - RNA, 19 nt, Artificial Sequence
  Description of Artificial Sequence: Synthetic oligonucleotide
ccucaaauagugcacugcu

SEQ ID NO: 1474019 - RNA, 19 nt, Artificial Sequence
  Description of Artificial Sequence: Synthetic oligonucleotide
aggcaccaacauaaguaaa

SEQ ID NO: 1474020 - RNA, 19 nt, Artificial Sequence
  Description of Artificial Sequence: Synthetic oligonucleotide
gcaaaacuaccugcaauua

SEQ ID NO: 1474021 - RNA, 19 nt, Artificial Sequence
  Description of Artificial Sequence: Synthetic oligonucleotide
cuuccuagcuuaugugcuu

SEQ ID NO: 1474022 - RNA, 19 nt, Artificial Sequence
  Description of Artificial Sequence: Synthetic oligonucleotide
acaaugcauuccacagaua

SEQ ID NO: 1474023 - RNA, 19 nt, Artificial Sequence
  Description of Artificial Sequence: Synthetic oligonucleotide
guacuguggggaagcugga

SEQ ID NO: 1474024 - RNA, 19 nt, Artificial Sequence
  Description of Artificial Sequence: Synthetic oligonucleotide
cagcguuuucauuccugcu

SEQ ID NO: 1474025 - RNA, 19 nt, Artificial Sequence
  Description of Artificial Sequence: Synthetic oligonucleotide
gcguuuucauuccugcuuu

SEQ ID NO: 1474026 - RNA, 19 nt, Artificial Sequence
  Description of Artificial Sequence: Synthetic oligonucleotide
ggcgucugaguucuuuuau

SEQ ID NO: 1474027 - RNA, 19 nt, Artificial Sequence
  Description of Artificial Sequence: Synthetic oligonucleotide
gaacaccgucagagacagc

SEQ ID NO: 1474028 - RNA, 19 nt, Artificial Sequence
  Description of Artificial Sequence: Synthetic oligonucleotide
uccuacuguuuggggcuuu

SEQ ID NO: 1474029 - RNA, 19 nt, Artificial Sequence
  Description of Artificial Sequence: Synthetic oligonucleotide
ggccucuuuaacacucuua

SEQ ID NO: 1474030 - RNA, 19 nt, Artificial Sequence
  Description of Artificial Sequence: Synthetic oligonucleotide
cuuucucggcucacuuaau

SEQ ID NO: 1474031 - RNA, 19 nt, Artificial Sequence
  Description of Artificial Sequence: Synthetic oligonucleotide
cccugaauggguggccuuc

SEQ ID NO: 1474032 - RNA, 19 nt, Artificial Sequence
  Description of Artificial Sequence: Synthetic oligonucleotide
gccaagggcucaccccuga

SEQ ID NO: 1474033 - RNA, 19 nt, Artificial Sequence
  Description of Artificial Sequence: Synthetic oligonucleotide
ccugcuuuaguaguaugau

SEQ ID NO: 1474034 - RNA, 19 nt, Artificial Sequence
  Description of Artificial Sequence: Synthetic oligonucleotide
cugcuuucucggcucacuu

SEQ ID NO: 1474035 - RNA, 19 nt, Artificial Sequence
  Description of Artificial Sequence: Synthetic oligonucleotide
guaggccguuacacucaca

SEQ ID NO: 1474036 - RNA, 19 nt, Artificial Sequence
  Description of Artificial Sequence: Synthetic oligonucleotide
ccauugaacaaggcaccaa

SEQ ID NO: 1474037 - RNA, 19 nt, Artificial Sequence
  Description of Artificial Sequence: Synthetic oligonucleotide
ccugaauggguggccuuca

SEQ ID NO: 1474038 - RNA, 19 nt, Artificial Sequence
  Description of Artificial Sequence: Synthetic oligonucleotide
cugaauggguggccuucau

SEQ ID NO: 1474039 - RNA, 19 nt, Artificial Sequence
  Description of Artificial Sequence: Synthetic oligonucleotide
gugcuccuagaaauauauu

SEQ ID NO: 1474040 - RNA, 19 nt, Artificial Sequence
  Description of Artificial Sequence: Synthetic oligonucleotide
ccaauuccucugauacagu

SEQ ID NO: 1474041 - RNA, 19 nt, Artificial Sequence
  Description of Artificial Sequence: Synthetic oligonucleotide
ccgccaagggcucaccccu

SEQ ID NO: 1474042 - RNA, 19 nt, Artificial Sequence
  Description of Artificial Sequence: Synthetic oligonucleotide
caaggcaauguaggccguu

SEQ ID NO: 1474043 - RNA, 19 nt, Artificial Sequence
  Description of Artificial Sequence: Synthetic oligonucleotide
cgccgccaagggcucaccc

SEQ ID NO: 1474044 - RNA, 19 nt, Artificial Sequence
  Description of Artificial Sequence: Synthetic oligonucleotide
ccaaggcaauguaggccgu

SEQ ID NO: 1474045 - RNA, 19 nt, Artificial Sequence
  Description of Artificial Sequence: Synthetic oligonucleotide
cuccuacuguuuggggcuu

SEQ ID NO: 1474046 - RNA, 19 nt, Artificial Sequence
  Description of Artificial Sequence: Synthetic oligonucleotide
gcaccgccgccaagggcuc

SEQ ID NO: 1474047 - RNA, 19 nt, Artificial Sequence
  Description of Artificial Sequence: Synthetic oligonucleotide
caccgccgccaagggcuca

SEQ ID NO: 1474048 - RNA, 19 nt, Artificial Sequence
  Description of Artificial Sequence: Synthetic oligonucleotide
gcccugaauggguggccuu

SEQ ID NO: 1474049 - RNA, 19 nt, Artificial Sequence
  Description of Artificial Sequence: Synthetic oligonucleotide
ccacuccagucuucuuaau

SEQ ID NO: 1474050 - RNA, 19 nt, Artificial Sequence
  Description of Artificial Sequence: Synthetic oligonucleotide
cgcuucaauccagggauuu

SEQ ID NO: 1474051 - RNA, 19 nt, Artificial Sequence
  Description of Artificial Sequence: Synthetic oligonucleotide
ccuacuguuuggggcuuuu

SEQ ID NO: 1474052 - RNA, 19 nt, Artificial Sequence
  Description of Artificial Sequence: Synthetic oligonucleotide
aauagguuaugcuaaaacc

SEQ ID NO: 1474053 - RNA, 19 nt, Artificial Sequence
  Description of Artificial Sequence: Synthetic oligonucleotide
uaugcuaaaaccuugcucc

SEQ ID NO: 1474054 - RNA, 19 nt, Artificial Sequence
  Description of Artificial Sequence: Synthetic oligonucleotide
acgaaugccaaguacaucc

SEQ ID NO: 1474055 - RNA, 19 nt, Artificial Sequence
  Description of Artificial Sequence: Synthetic oligonucleotide
uauaccaauacaaaguuga

SEQ ID NO: 1474056 - RNA, 19 nt, Artificial Sequence
  Description of Artificial Sequence: Synthetic oligonucleotide
aaaggguauauucaggaag

SEQ ID NO: 1474057 - RNA, 19 nt, Artificial Sequence
  Description of Artificial Sequence: Synthetic oligonucleotide
aauuggauucaguugguuc

SEQ ID NO: 1474058 - RNA, 19 nt, Artificial Sequence
  Description of Artificial Sequence: Synthetic oligonucleotide
aaauguuuauggcagccuc

SEQ ID NO: 1474059 - RNA, 19 nt, Artificial Sequence
  Description of Artificial Sequence: Synthetic oligonucleotide
uuuacuagggaagaggugc

SEQ ID NO: 1474060 - RNA, 19 nt, Artificial Sequence
  Description of Artificial Sequence: Synthetic oligonucleotide
auggugaauagccaauucc

SEQ ID NO: 1474061 - RNA, 19 nt, Artificial Sequence
  Description of Artificial Sequence: Synthetic oligonucleotide
aacacucuagucuaaucuc

SEQ ID NO: 1474062 - RNA, 19 nt, Artificial Sequence
  Description of Artificial Sequence: Synthetic oligonucleotide
caaauugugguauacuccc

SEQ ID NO: 1474063 - RNA, 19 nt, Artificial Sequence
  Description of Artificial Sequence: Synthetic oligonucleotide
ucaacgaaugccaaguaca

SEQ ID NO: 1474064 - RNA, 19 nt, Artificial Sequence
  Description of Artificial Sequence: Synthetic oligonucleotide
agagauuuggaaaggacgc

SEQ ID NO: 1474065 - RNA, 19 nt, Artificial Sequence
  Description of Artificial Sequence: Synthetic oligonucleotide
uguuacuaaacuuggcgag

SEQ ID NO: 1474066 - RNA, 19 nt, Artificial Sequence
  Description of Artificial Sequence: Synthetic oligonucleotide
ucuagucugcaaauugugg

SEQ ID NO: 1474067 - RNA, 19 nt, Artificial Sequence
  Description of Artificial Sequence: Synthetic oligonucleotide
agaaauguuacuaaacuug

SEQ ID NO: 1474068 - RNA, 19 nt, Artificial Sequence
  Description of Artificial Sequence: Synthetic oligonucleotide
uguuuuacuagggaagagg

SEQ ID NO: 1474069 - RNA, 19 nt, Artificial Sequence
  Description of Artificial Sequence: Synthetic oligonucleotide
aguaacaacuaccaggaga

SEQ ID NO: 1474070 - RNA, 19 nt, Artificial Sequence
  Description of Artificial Sequence: Synthetic oligonucleotide
agagcuuaguaacaacuac

SEQ ID NO: 1474071 - RNA, 19 nt, Artificial Sequence
  Description of Artificial Sequence: Synthetic oligonucleotide
ugcuauuaucuuuaaauac

SEQ ID NO: 1474072 - RNA, 19 nt, Artificial Sequence
  Description of Artificial Sequence: Synthetic oligonucleotide
uaaaauggaugcuacacuc

SEQ ID NO: 1474073 - RNA, 19 nt, Artificial Sequence
  Description of Artificial Sequence: Synthetic oligonucleotide
gauucuagucugcaaauug

SEQ ID NO: 1474074 - RNA, 19 nt, Artificial Sequence
  Description of Artificial Sequence: Synthetic oligonucleotide
auauccaaauagguuaugc

SEQ ID NO: 1474075 - RNA, 19 nt, Artificial Sequence
  Description of Artificial Sequence: Synthetic oligonucleotide
uaaugagccaauuggauuc

SEQ ID NO: 1474076 - RNA, 19 nt, Artificial Sequence
  Description of Artificial Sequence: Synthetic oligonucleotide
ucgugcaauaccugaaucg

SEQ ID NO: 1474077 - RNA, 19 nt, Artificial Sequence
  Description of Artificial Sequence: Synthetic oligonucleotide
uacaauauaccaauacaaa

SEQ ID NO: 1474078 - RNA, 19 nt, Artificial Sequence
  Description of Artificial Sequence: Synthetic oligonucleotide
uauacucccucuuaugagc

SEQ ID NO: 1474079 - RNA, 19 nt, Artificial Sequence
  Description of Artificial Sequence: Synthetic oligonucleotide
gaugacggaaccugaagag

SEQ ID NO: 1474080 - RNA, 19 nt, Artificial Sequence
  Description of Artificial Sequence: Synthetic oligonucleotide
uguccauuggcacucagcu

SEQ ID NO: 1474081 - RNA, 19 nt, Artificial Sequence
  Description of Artificial Sequence: Synthetic oligonucleotide
aucuugcccaaacugaagg

SEQ ID NO: 1474082 - RNA, 19 nt, Artificial Sequence
  Description of Artificial Sequence: Synthetic oligonucleotide
acggugauaggacuggugg

SEQ ID NO: 1474083 - RNA, 19 nt, Artificial Sequence
  Description of Artificial Sequence: Synthetic oligonucleotide
agaaaugugguucucugga

SEQ ID NO: 1474084 - RNA, 19 nt, Artificial Sequence
  Description of Artificial Sequence: Synthetic oligonucleotide
aaucgguguuuucccaggc

SEQ ID NO: 1474085 - RNA, 19 nt, Artificial Sequence
  Description of Artificial Sequence: Synthetic oligonucleotide
guuacucugaaggugaaag

SEQ ID NO: 1474086 - RNA, 19 nt, Artificial Sequence
  Description of Artificial Sequence: Synthetic oligonucleotide
uggugaauagccaauuccu

SEQ ID NO: 1474087 - RNA, 19 nt, Artificial Sequence
  Description of Artificial Sequence: Synthetic oligonucleotide
uuaugcuaaaaccuugcuc

SEQ ID NO: 1474088 - RNA, 19 nt, Artificial Sequence
  Description of Artificial Sequence: Synthetic oligonucleotide
aaaugugguucucuggaga

SEQ ID NO: 1474089 - RNA, 19 nt, Artificial Sequence
  Description of Artificial Sequence: Synthetic oligonucleotide
ugcaaauugugguauacuc

SEQ ID NO: 1474090 - RNA, 19 nt, Artificial Sequence
  Description of Artificial Sequence: Synthetic oligonucleotide
guaacaacuaccaggagac

SEQ ID NO: 1474091 - RNA, 19 nt, Artificial Sequence
  Description of Artificial Sequence: Synthetic oligonucleotide
cuucaugccguauucgugc

SEQ ID NO: 1474092 - RNA, 19 nt, Artificial Sequence
  Description of Artificial Sequence: Synthetic oligonucleotide
gauggaucaggcauugagg

SEQ ID NO: 1474093 - RNA, 19 nt, Artificial Sequence
  Description of Artificial Sequence: Synthetic oligonucleotide
uguaaugagccaauuggau

SEQ ID NO: 1474094 - RNA, 19 nt, Artificial Sequence
  Description of Artificial Sequence: Synthetic oligonucleotide
uguucccugaaaauuuagc

SEQ ID NO: 1474095 - RNA, 19 nt, Artificial Sequence
  Description of Artificial Sequence: Synthetic oligonucleotide
auguuacuaaacuuggcga

SEQ ID NO: 1474096 - RNA, 19 nt, Artificial Sequence
  Description of Artificial Sequence: Synthetic oligonucleotide
uucuagucugcaaauugug

SEQ ID NO: 1474097 - RNA, 19 nt, Artificial Sequence
  Description of Artificial Sequence: Synthetic oligonucleotide
uuacuagggaagaggugcg

SEQ ID NO: 1474098 - RNA, 19 nt, Artificial Sequence
  Description of Artificial Sequence: Synthetic oligonucleotide
ucuuuauuccauuguuuca

SEQ ID NO: 1474099 - RNA, 19 nt, Artificial Sequence
  Description of Artificial Sequence: Synthetic oligonucleotide
ugccaaguacauccuaggg

SEQ ID NO: 1474100 - RNA, 19 nt, Artificial Sequence
  Description of Artificial Sequence: Synthetic oligonucleotide
cauuuguuagagaaaugug

SEQ ID NO: 1474101 - RNA, 19 nt, Artificial Sequence
  Description of Artificial Sequence: Synthetic oligonucleotide
uacucugaaggugaaagug

SEQ ID NO: 1474102 - RNA, 19 nt, Artificial Sequence
  Description of Artificial Sequence: Synthetic oligonucleotide
ugcaaguuaugucaccaac

SEQ ID NO: 1474103 - RNA, 19 nt, Artificial Sequence
  Description of Artificial Sequence: Synthetic oligonucleotide
ucccugaaaauuuagcaau

SEQ ID NO: 1474104 - RNA, 19 nt, Artificial Sequence
  Description of Artificial Sequence: Synthetic oligonucleotide
aguucugcgagacacuggu

SEQ ID NO: 1474105 - RNA, 19 nt, Artificial Sequence
  Description of Artificial Sequence: Synthetic oligonucleotide
cacgugaauuugcacaucg

SEQ ID NO: 1474106 - RNA, 19 nt, Artificial Sequence
  Description of Artificial Sequence: Synthetic oligonucleotide
aauggaugcuacacucagc

SEQ ID NO: 1474107 - RNA, 19 nt, Artificial Sequence
  Description of Artificial Sequence: Synthetic oligonucleotide
acauacguacauuacagua

SEQ ID NO: 1474108 - RNA, 19 nt, Artificial Sequence
  Description of Artificial Sequence: Synthetic oligonucleotide
aaggguauauucaggaagu

SEQ ID NO: 1474109 - RNA, 19 nt, Artificial Sequence
  Description of Artificial Sequence: Synthetic oligonucleotide
ugaaucgguguuuucccag

SEQ ID NO: 1474110 - RNA, 19 nt, Artificial Sequence
  Description of Artificial Sequence: Synthetic oligonucleotide
agcagcgucacucugugca

SEQ ID NO: 1474111 - RNA, 19 nt, Artificial Sequence
  Description of Artificial Sequence: Synthetic oligonucleotide
ugggucuucccucuccacg

SEQ ID NO: 1474112 - RNA, 19 nt, Artificial Sequence
  Description of Artificial Sequence: Synthetic oligonucleotide
auccccaacacucuagucu

SEQ ID NO: 1474113 - RNA, 19 nt, Artificial Sequence
  Description of Artificial Sequence: Synthetic oligonucleotide
aagucgaugacggaaccug

SEQ ID NO: 1474114 - RNA, 19 nt, Artificial Sequence
  Description of Artificial Sequence: Synthetic oligonucleotide
agcucuaugcuucgccagc

SEQ ID NO: 1474115 - RNA, 19 nt, Artificial Sequence
  Description of Artificial Sequence: Synthetic oligonucleotide
aacgguuacucugaaggug

SEQ ID NO: 1474116 - RNA, 19 nt, Artificial Sequence
  Description of Artificial Sequence: Synthetic oligonucleotide
cugaaaauuuagcaaugac

SEQ ID NO: 1474117 - RNA, 19 nt, Artificial Sequence
  Description of Artificial Sequence: Synthetic oligonucleotide
agucuaaucucuucauugu

SEQ ID NO: 1474118 - RNA, 19 nt, Artificial Sequence
  Description of Artificial Sequence: Synthetic oligonucleotide
gagcuuaguaacaacuacc

SEQ ID NO: 1474119 - RNA, 19 nt, Artificial Sequence
  Description of Artificial Sequence: Synthetic oligonucleotide
guauacucccucuuaugag

SEQ ID NO: 1474120 - RNA, 19 nt, Artificial Sequence
  Description of Artificial Sequence: Synthetic oligonucleotide
uucugcgagacacugguau

SEQ ID NO: 1474121 - RNA, 19 nt, Artificial Sequence
  Description of Artificial Sequence: Synthetic oligonucleotide
agaccaaccauguucccug

SEQ ID NO: 1474122 - RNA, 19 nt, Artificial Sequence
  Description of Artificial Sequence: Synthetic oligonucleotide
aaaauguuuauggcagccu

SEQ ID NO: 1474123 - RNA, 19 nt, Artificial Sequence
  Description of Artificial Sequence: Synthetic oligonucleotide
aguuaugucaccaacgguu

SEQ ID NO: 1474124 - RNA, 19 nt, Artificial Sequence
  Description of Artificial Sequence: Synthetic oligonucleotide
guuaucaucuugcccaaac

SEQ ID NO: 1474125 - RNA, 19 nt, Artificial Sequence
  Description of Artificial Sequence: Synthetic oligonucleotide
auacguacauuacaguaaa

SEQ ID NO: 1474126 - RNA, 19 nt, Artificial Sequence
  Description of Artificial Sequence: Synthetic oligonucleotide
aaagugggcacgugaauuu

SEQ ID NO: 1474127 - RNA, 19 nt, Artificial Sequence
  Description of Artificial Sequence: Synthetic oligonucleotide
ugacggaaccugaagagau

SEQ ID NO: 1474128 - RNA, 19 nt, Artificial Sequence
  Description of Artificial Sequence: Synthetic oligonucleotide
uacauagcagaccaaccau

SEQ ID NO: 1474129 - RNA, 19 nt, Artificial Sequence
  Description of Artificial Sequence: Synthetic oligonucleotide
ucgaugacggaaccugaag

SEQ ID NO: 1474130 - RNA, 19 nt, Artificial Sequence
  Description of Artificial Sequence: Synthetic oligonucleotide
uaugcacugccaaaagauc

SEQ ID NO: 1474131 - RNA, 19 nt, Artificial Sequence
  Description of Artificial Sequence: Synthetic oligonucleotide
aacuuggcgagaaauuucu

SEQ ID NO: 1474132 - RNA, 19 nt, Artificial Sequence
  Description of Artificial Sequence: Synthetic oligonucleotide
uauucgugcaauaccugaa

SEQ ID NO: 1474133 - RNA, 19 nt, Artificial Sequence
  Description of Artificial Sequence: Synthetic oligonucleotide
gagccuacuuucuuucugc

SEQ ID NO: 1474134 - RNA, 19 nt, Artificial Sequence
  Description of Artificial Sequence: Synthetic oligonucleotide
uaaacuuggcgagaaauuu

SEQ ID NO: 1474135 - RNA, 19 nt, Artificial Sequence
  Description of Artificial Sequence: Synthetic oligonucleotide
acucuagucuaaucucuuc

SEQ ID NO: 1474136 - RNA, 19 nt, Artificial Sequence
  Description of Artificial Sequence: Synthetic oligonucleotide
cagagcauugugagcagcg

SEQ ID NO: 1474137 - RNA, 19 nt, Artificial Sequence
  Description of Artificial Sequence: Synthetic oligonucleotide
aacuuaugcacugccaaaa

SEQ ID NO: 1474138 - RNA, 19 nt, Artificial Sequence
  Description of Artificial Sequence: Synthetic oligonucleotide
gaucuccuaagcugccugg

SEQ ID NO: 1474139 - RNA, 19 nt, Artificial Sequence
  Description of Artificial Sequence: Synthetic oligonucleotide
gucacaggcgaacaugcag

SEQ ID NO: 1474140 - RNA, 19 nt, Artificial Sequence
  Description of Artificial Sequence: Synthetic oligonucleotide
agccaauuccuguaaugag

SEQ ID NO: 1474141 - RNA, 19 nt, Artificial Sequence
  Description of Artificial Sequence: Synthetic oligonucleotide
ugacacacggugauaggac

SEQ ID NO: 1474142 - RNA, 19 nt, Artificial Sequence
  Description of Artificial Sequence: Synthetic oligonucleotide
cuagggaagaggugcgagg

SEQ ID NO: 1474143 - RNA, 19 nt, Artificial Sequence
  Description of Artificial Sequence: Synthetic oligonucleotide
acuaaacuuggcgagaaau

SEQ ID NO: 1474144 - RNA, 19 nt, Artificial Sequence
  Description of Artificial Sequence: Synthetic oligonucleotide
ucuagucuaaucucuucau

SEQ ID NO: 1474145 - RNA, 19 nt, Artificial Sequence
  Description of Artificial Sequence: Synthetic oligonucleotide
aacgaaugccaaguacauc

SEQ ID NO: 1474146 - RNA, 19 nt, Artificial Sequence
  Description of Artificial Sequence: Synthetic oligonucleotide
ggauggaucaggcauugag

SEQ ID NO: 1474147 - RNA, 19 nt, Artificial Sequence
  Description of Artificial Sequence: Synthetic oligonucleotide
uggaucaggcauugagggg

SEQ ID NO: 1474148 - RNA, 19 nt, Artificial Sequence
  Description of Artificial Sequence: Synthetic oligonucleotide
uuaaaucuggaaagucgau

SEQ ID NO: 1474149 - RNA, 19 nt, Artificial Sequence
  Description of Artificial Sequence: Synthetic oligonucleotide
ugccugacccuguaaaaug

SEQ ID NO: 1474150 - RNA, 19 nt, Artificial Sequence
  Description of Artificial Sequence: Synthetic oligonucleotide
uggaaaggacgcacauacg

SEQ ID NO: 1474151 - RNA, 19 nt, Artificial Sequence
  Description of Artificial Sequence: Synthetic oligonucleotide
ugagcagcgucacucugug

SEQ ID NO: 1474152 - RNA, 19 nt, Artificial Sequence
  Description of Artificial Sequence: Synthetic oligonucleotide
uccucaacgaaugccaagu

SEQ ID NO: 1474153 - RNA, 19 nt, Artificial Sequence
  Description of Artificial Sequence: Synthetic oligonucleotide
cucaacgaaugccaaguac

SEQ ID NO: 1474154 - RNA, 19 nt, Artificial Sequence
  Description of Artificial Sequence: Synthetic oligonucleotide
gugcgagggaaacuuaugc

SEQ ID NO: 1474155 - RNA, 19 nt, Artificial Sequence
  Description of Artificial Sequence: Synthetic oligonucleotide
ccaauuccuguaaugagcc

SEQ ID NO: 1474156 - RNA, 19 nt, Artificial Sequence
  Description of Artificial Sequence: Synthetic oligonucleotide
ucuaugcuucgccagcuuc

SEQ ID NO: 1474157 - RNA, 19 nt, Artificial Sequence
  Description of Artificial Sequence: Synthetic oligonucleotide
uugcacaucggaucuuuca

SEQ ID NO: 1474158 - RNA, 19 nt, Artificial Sequence
  Description of Artificial Sequence: Synthetic oligonucleotide
aauguuuauggcagccucu

SEQ ID NO: 1474159 - RNA, 19 nt, Artificial Sequence
  Description of Artificial Sequence: Synthetic oligonucleotide
cauacguacauuacaguaa

SEQ ID NO: 1474160 - RNA, 19 nt, Artificial Sequence
  Description of Artificial Sequence: Synthetic oligonucleotide
uuuggauggaucaggcauu

SEQ ID NO: 1474161 - RNA, 19 nt, Artificial Sequence
  Description of Artificial Sequence: Synthetic oligonucleotide
aguuggauauagucugugu

SEQ ID NO: 1474162 - RNA, 19 nt, Artificial Sequence
  Description of Artificial Sequence: Synthetic oligonucleotide
acacucagccuugugguac

SEQ ID NO: 1474163 - RNA, 19 nt, Artificial Sequence
  Description of Artificial Sequence: Synthetic oligonucleotide
ucuccuaagcugccuggag

SEQ ID NO: 1474164 - RNA, 19 nt, Artificial Sequence
  Description of Artificial Sequence: Synthetic oligonucleotide
caauuaaaucuggaaaguc

SEQ ID NO: 1474165 - RNA, 19 nt, Artificial Sequence
  Description of Artificial Sequence: Synthetic oligonucleotide
agcuuaguaacaacuacca

SEQ ID NO: 1474166 - RNA, 19 nt, Artificial Sequence
  Description of Artificial Sequence: Synthetic oligonucleotide
guauucgugcaauaccuga

SEQ ID NO: 1474167 - RNA, 19 nt, Artificial Sequence
  Description of Artificial Sequence: Synthetic oligonucleotide
acuaagcaguuggauauag

SEQ ID NO: 1474168 - RNA, 19 nt, Artificial Sequence
  Description of Artificial Sequence: Synthetic oligonucleotide
caggcgaacaugcagcuuc

SEQ ID NO: 1474169 - RNA, 19 nt, Artificial Sequence
  Description of Artificial Sequence: Synthetic oligonucleotide
gaaggucccgcuguccucg

SEQ ID NO: 1474170 - RNA, 19 nt, Artificial Sequence
  Description of Artificial Sequence: Synthetic oligonucleotide
ucuuaugagcagguccucc

SEQ ID NO: 1474171 - RNA, 19 nt, Artificial Sequence
  Description of Artificial Sequence: Synthetic oligonucleotide
gaugcuacacucagccuug

SEQ ID NO: 1474172 - RNA, 19 nt, Artificial Sequence
  Description of Artificial Sequence: Synthetic oligonucleotide
gcaaguuaugucaccaacg

SEQ ID NO: 1474173 - RNA, 19 nt, Artificial Sequence
  Description of Artificial Sequence: Synthetic oligonucleotide
ugcacugccaaaagaucuc

SEQ ID NO: 1474174 - RNA, 19 nt, Artificial Sequence
  Description of Artificial Sequence: Synthetic oligonucleotide
ccaauacaaaguugaagcc

SEQ ID NO: 1474175 - RNA, 19 nt, Artificial Sequence
  Description of Artificial Sequence: Synthetic oligonucleotide
cuguaaugagccaauugga

SEQ ID NO: 1474176 - RNA, 19 nt, Artificial Sequence
  Description of Artificial Sequence: Synthetic oligonucleotide
cuccuaagcugccuggagc

SEQ ID NO: 1474177 - RNA, 19 nt, Artificial Sequence
  Description of Artificial Sequence: Synthetic oligonucleotide
uuccucaacgaaugccaag

SEQ ID NO: 1474178 - RNA, 19 nt, Artificial Sequence
  Description of Artificial Sequence: Synthetic oligonucleotide
gaaaggguauauucaggaa

SEQ ID NO: 1474179 - RNA, 19 nt, Artificial Sequence
  Description of Artificial Sequence: Synthetic oligonucleotide
aaagucgaugacggaaccu

SEQ ID NO: 1474180 - RNA, 19 nt, Artificial Sequence
  Description of Artificial Sequence: Synthetic oligonucleotide
uagucugcaaauuguggua

SEQ ID NO: 1474181 - RNA, 19 nt, Artificial Sequence
  Description of Artificial Sequence: Synthetic oligonucleotide
gaugcccgagccaugacac

SEQ ID NO: 1474182 - RNA, 19 nt, Artificial Sequence
  Description of Artificial Sequence: Synthetic oligonucleotide
uuacugguaccuucaccug

SEQ ID NO: 1474183 - RNA, 19 nt, Artificial Sequence
  Description of Artificial Sequence: Synthetic oligonucleotide
cugggaaaggguauauuca

SEQ ID NO: 1474184 - RNA, 19 nt, Artificial Sequence
  Description of Artificial Sequence: Synthetic oligonucleotide
auucuagucugcaaauugu

SEQ ID NO: 1474185 - RNA, 19 nt, Artificial Sequence
  Description of Artificial Sequence: Synthetic oligonucleotide
ggguauauucaggaagucg

SEQ ID NO: 1474186 - RNA, 19 nt, Artificial Sequence
  Description of Artificial Sequence: Synthetic oligonucleotide
guauauucaggaagucgcc

SEQ ID NO: 1474187 - RNA, 19 nt, Artificial Sequence
  Description of Artificial Sequence: Synthetic oligonucleotide
uuaugucaccaacgguuac

SEQ ID NO: 1474188 - RNA, 19 nt, Artificial Sequence
  Description of Artificial Sequence: Synthetic oligonucleotide
uggcgagaaauuucucagc

SEQ ID NO: 1474189 - RNA, 19 nt, Artificial Sequence
  Description of Artificial Sequence: Synthetic oligonucleotide
gcacauacguacauuacag

SEQ ID NO: 1474190 - RNA, 19 nt, Artificial Sequence
  Description of Artificial Sequence: Synthetic oligonucleotide
aaugagccaauuggauuca

SEQ ID NO: 1474191 - RNA, 19 nt, Artificial Sequence
  Description of Artificial Sequence: Synthetic oligonucleotide
auccuagggaauguccaac

SEQ ID NO: 1474192 - RNA, 19 nt, Artificial Sequence
  Description of Artificial Sequence: Synthetic oligonucleotide
guccaaccacauuuguuag

SEQ ID NO: 1474193 - RNA, 19 nt, Artificial Sequence
  Description of Artificial Sequence: Synthetic oligonucleotide
ugaaagugggcacgugaau

SEQ ID NO: 1474194 - RNA, 19 nt, Artificial Sequence
  Description of Artificial Sequence: Synthetic oligonucleotide
cucuagucuaaucucuuca

SEQ ID NO: 1474195 - RNA, 19 nt, Artificial Sequence
  Description of Artificial Sequence: Synthetic oligonucleotide
ugcccaaacugaagguccc

SEQ ID NO: 1474196 - RNA, 19 nt, Artificial Sequence
  Description of Artificial Sequence: Synthetic oligonucleotide
uccccaacacucuagucua

SEQ ID NO: 1474197 - RNA, 19 nt, Artificial Sequence
  Description of Artificial Sequence: Synthetic oligonucleotide
agaugcccgagccaugaca

SEQ ID NO: 1474198 - RNA, 19 nt, Artificial Sequence
  Description of Artificial Sequence: Synthetic oligonucleotide
auucgugcaauaccugaau

SEQ ID NO: 1474199 - RNA, 19 nt, Artificial Sequence
  Description of Artificial Sequence: Synthetic oligonucleotide
aggggaauuccucaacgaa

SEQ ID NO: 1474200 - RNA, 19 nt, Artificial Sequence
  Description of Artificial Sequence: Synthetic oligonucleotide
gacggcugugcacagugac

SEQ ID NO: 1474201 - RNA, 19 nt, Artificial Sequence
  Description of Artificial Sequence: Synthetic oligonucleotide
agugaccgagagcagugug

SEQ ID NO: 1474202 - RNA, 19 nt, Artificial Sequence
  Description of Artificial Sequence: Synthetic oligonucleotide
gcaaauugugguauacucc

SEQ ID NO: 1474203 - RNA, 19 nt, Artificial Sequence
  Description of Artificial Sequence: Synthetic oligonucleotide
agcauugugagcagcguca

SEQ ID NO: 1474204 - RNA, 19 nt, Artificial Sequence
  Description of Artificial Sequence: Synthetic oligonucleotide
cauggugaauagccaauuc

SEQ ID NO: 1474205 - RNA, 19 nt, Artificial Sequence
  Description of Artificial Sequence: Synthetic oligonucleotide
cuagucugcaaauuguggu

SEQ ID NO: 1474206 - RNA, 19 nt, Artificial Sequence
  Description of Artificial Sequence: Synthetic oligonucleotide
acuagggaagaggugcgag

SEQ ID NO: 1474207 - RNA, 19 nt, Artificial Sequence
  Description of Artificial Sequence: Synthetic oligonucleotide
acauagcagaccaaccaug

SEQ ID NO: 1474208 - RNA, 19 nt, Artificial Sequence
  Description of Artificial Sequence: Synthetic oligonucleotide
gugaccgagagcagugugg

SEQ ID NO: 1474209 - RNA, 19 nt, Artificial Sequence
  Description of Artificial Sequence: Synthetic oligonucleotide
ccugggaaaggguauauuc

SEQ ID NO: 1474210 - RNA, 19 nt, Artificial Sequence
  Description of Artificial Sequence: Synthetic oligonucleotide
ugguaccuucaccugugca

SEQ ID NO: 1474211 - RNA, 19 nt, Artificial Sequence
  Description of Artificial Sequence: Synthetic oligonucleotide
aaauugugguauacucccu

SEQ ID NO: 1474212 - RNA, 19 nt, Artificial Sequence
  Description of Artificial Sequence: Synthetic oligonucleotide
uucaugccguauucgugca

SEQ ID NO: 1474213 - RNA, 19 nt, Artificial Sequence
  Description of Artificial Sequence: Synthetic oligonucleotide
gagcauugugagcagcguc

SEQ ID NO: 1474214 - RNA, 19 nt, Artificial Sequence
  Description of Artificial Sequence: Synthetic oligonucleotide
ggcgagaaauuucucagca

SEQ ID NO: 1474215 - RNA, 19 nt, Artificial Sequence
  Description of Artificial Sequence: Synthetic oligonucleotide
cugccuggagccuacuuuc

SEQ ID NO: 1474216 - RNA, 19 nt, Artificial Sequence
  Description of Artificial Sequence: Synthetic oligonucleotide
caacacucuagucuaaucu

SEQ ID NO: 1474217 - RNA, 19 nt, Artificial Sequence
  Description of Artificial Sequence: Synthetic oligonucleotide
gcgagggaaacuuaugcac

SEQ ID NO: 1474218 - RNA, 19 nt, Artificial Sequence
  Description of Artificial Sequence: Synthetic oligonucleotide
guuuuacuagggaagaggu

SEQ ID NO: 1474219 - RNA, 19 nt, Artificial Sequence
  Description of Artificial Sequence: Synthetic oligonucleotide
ucucacuaagcaguuggau

SEQ ID NO: 1474220 - RNA, 19 nt, Artificial Sequence
  Description of Artificial Sequence: Synthetic oligonucleotide
guuacuaaacuuggcgaga

SEQ ID NO: 1474221 - RNA, 19 nt, Artificial Sequence
  Description of Artificial Sequence: Synthetic oligonucleotide
agguuaugcuaaaaccuug

SEQ ID NO: 1474222 - RNA, 19 nt, Artificial Sequence
  Description of Artificial Sequence: Synthetic oligonucleotide
cugugcaaguuaugucacc

SEQ ID NO: 1474223 - RNA, 19 nt, Artificial Sequence
  Description of Artificial Sequence: Synthetic oligonucleotide
aaggucccgcuguccucgc

SEQ ID NO: 1474224 - RNA, 19 nt, Artificial Sequence
  Description of Artificial Sequence: Synthetic oligonucleotide
acgguuacucugaagguga

SEQ ID NO: 1474225 - RNA, 19 nt, Artificial Sequence
  Description of Artificial Sequence: Synthetic oligonucleotide
ggaaaggacgcacauacgu

SEQ ID NO: 1474226 - RNA, 19 nt, Artificial Sequence
  Description of Artificial Sequence: Synthetic oligonucleotide
acaauccccaacacucuag

SEQ ID NO: 1474227 - RNA, 19 nt, Artificial Sequence
  Description of Artificial Sequence: Synthetic oligonucleotide
gcuuaguaacaacuaccag

SEQ ID NO: 1474228 - RNA, 19 nt, Artificial Sequence
  Description of Artificial Sequence: Synthetic oligonucleotide
aaccuugcuccuuggcaau

SEQ ID NO: 1474229 - RNA, 19 nt, Artificial Sequence
  Description of Artificial Sequence: Synthetic oligonucleotide
acacucuagucuaaucucu

SEQ ID NO: 1474230 - RNA, 19 nt, Artificial Sequence
  Description of Artificial Sequence: Synthetic oligonucleotide
cuguguucgggagacugag

SEQ ID NO: 1474231 - RNA, 19 nt, Artificial Sequence
  Description of Artificial Sequence: Synthetic oligonucleotide
aggguauauucaggaaguc

SEQ ID NO: 1474232 - RNA, 19 nt, Artificial Sequence
  Description of Artificial Sequence: Synthetic oligonucleotide
gguaccuucaccugugcaa

SEQ ID NO: 1474233 - RNA, 19 nt, Artificial Sequence
  Description of Artificial Sequence: Synthetic oligonucleotide
uuugcacaucggaucuuuc

SEQ ID NO: 1474234 - RNA, 19 nt, Artificial Sequence
  Description of Artificial Sequence: Synthetic oligonucleotide
gaaccugaagagauuugga

SEQ ID NO: 1474235 - RNA, 19 nt, Artificial Sequence
  Description of Artificial Sequence: Synthetic oligonucleotide
cccucuuaugagcaggucc

SEQ ID NO: 1474236 - RNA, 19 nt, Artificial Sequence
  Description of Artificial Sequence: Synthetic oligonucleotide
ugccguauucgugcaauac

SEQ ID NO: 1474237 - RNA, 19 nt, Artificial Sequence
  Description of Artificial Sequence: Synthetic oligonucleotide
acggcugugcacagugacc

SEQ ID NO: 1474238 - RNA, 19 nt, Artificial Sequence
  Description of Artificial Sequence: Synthetic oligonucleotide
ggugaaagugggcacguga

SEQ ID NO: 1474239 - RNA, 19 nt, Artificial Sequence
  Description of Artificial Sequence: Synthetic oligonucleotide
guaaugagccaauuggauu

SEQ ID NO: 1474240 - RNA, 19 nt, Artificial Sequence
  Description of Artificial Sequence: Synthetic oligonucleotide
uacuaaacuuggcgagaaa

SEQ ID NO: 1474241 - RNA, 19 nt, Artificial Sequence
  Description of Artificial Sequence: Synthetic oligonucleotide
augacggaaccugaagaga

SEQ ID NO: 1474242 - RNA, 19 nt, Artificial Sequence
  Description of Artificial Sequence: Synthetic oligonucleotide
agucugcaaauugugguau

SEQ ID NO: 1474243 - RNA, 19 nt, Artificial Sequence
  Description of Artificial Sequence: Synthetic oligonucleotide
acgcacauacguacauuac

SEQ ID NO: 1474244 - RNA, 19 nt, Artificial Sequence
  Description of Artificial Sequence: Synthetic oligonucleotide
aaggacgcacauacguaca

SEQ ID NO: 1474245 - RNA, 19 nt, Artificial Sequence
  Description of Artificial Sequence: Synthetic oligonucleotide
acagugaccgagagcagug

SEQ ID NO: 1474246 - RNA, 19 nt, Artificial Sequence
  Description of Artificial Sequence: Synthetic oligonucleotide
cagcucuaugcuucgccag

SEQ ID NO: 1474247 - RNA, 19 nt, Artificial Sequence
  Description of Artificial Sequence: Synthetic oligonucleotide
ggaaagucgaugacggaac

SEQ ID NO: 1474248 - RNA, 19 nt, Artificial Sequence
  Description of Artificial Sequence: Synthetic oligonucleotide
acgucggccagaucccgag

SEQ ID NO: 1474249 - RNA, 19 nt, Artificial Sequence
  Description of Artificial Sequence: Synthetic oligonucleotide
uugugguauacucccucuu

SEQ ID NO: 1474250 - RNA, 19 nt, Artificial Sequence
  Description of Artificial Sequence: Synthetic oligonucleotide
cugcgagacacugguauug

SEQ ID NO: 1474251 - RNA, 19 nt, Artificial Sequence
  Description of Artificial Sequence: Synthetic oligonucleotide
ugcccgagccaugacacac

SEQ ID NO: 1474252 - RNA, 19 nt, Artificial Sequence
  Description of Artificial Sequence: Synthetic oligonucleotide
acgugaauuugcacaucgg

SEQ ID NO: 1474253 - RNA, 19 nt, Artificial Sequence
  Description of Artificial Sequence: Synthetic oligonucleotide
ucugcgagacacugguauu

SEQ ID NO: 1474254 - RNA, 19 nt, Artificial Sequence
  Description of Artificial Sequence: Synthetic oligonucleotide
uacguacauuacaguaaau

SEQ ID NO: 1474255 - RNA, 19 nt, Artificial Sequence
  Description of Artificial Sequence: Synthetic oligonucleotide
cuucgccagcuucuuacug

SEQ ID NO: 1474256 - RNA, 19 nt, Artificial Sequence
  Description of Artificial Sequence: Synthetic oligonucleotide
auggcgagaagggacggcu

SEQ ID NO: 1474257 - RNA, 19 nt, Artificial Sequence
  Description of Artificial Sequence: Synthetic oligonucleotide
caccugugcaaguuauguc

SEQ ID NO: 1474258 - RNA, 19 nt, Artificial Sequence
  Description of Artificial Sequence: Synthetic oligonucleotide
auguucccugaaaauuuag

SEQ ID NO: 1474259 - RNA, 19 nt, Artificial Sequence
  Description of Artificial Sequence: Synthetic oligonucleotide
gacacacggugauaggacu

SEQ ID NO: 1474260 - RNA, 19 nt, Artificial Sequence
  Description of Artificial Sequence: Synthetic oligonucleotide
ucccgagaggagcuugccu

SEQ ID NO: 1474261 - RNA, 19 nt, Artificial Sequence
  Description of Artificial Sequence: Synthetic oligonucleotide
uggaugcuacacucagccu

SEQ ID NO: 1474262 - RNA, 19 nt, Artificial Sequence
  Description of Artificial Sequence: Synthetic oligonucleotide
guuaugcuaaaaccuugcu

SEQ ID NO: 1474263 - RNA, 19 nt, Artificial Sequence
  Description of Artificial Sequence: Synthetic oligonucleotide
auacucccucuuaugagca

SEQ ID NO: 1474264 - RNA, 19 nt, Artificial Sequence
  Description of Artificial Sequence: Synthetic oligonucleotide
uggagccuacuuucuuucu

SEQ ID NO: 1474265 - RNA, 19 nt, Artificial Sequence
  Description of Artificial Sequence: Synthetic oligonucleotide
aggcgaacaugcagcuucc

SEQ ID NO: 1474266 - RNA, 19 nt, Artificial Sequence
  Description of Artificial Sequence: Synthetic oligonucleotide
cugaggaggcuucuuuuca

SEQ ID NO: 1474267 - RNA, 19 nt, Artificial Sequence
  Description of Artificial Sequence: Synthetic oligonucleotide
ccaugacacacggugauag

SEQ ID NO: 1474268 - RNA, 19 nt, Artificial Sequence
  Description of Artificial Sequence: Synthetic oligonucleotide
aggacgcacauacguacau

SEQ ID NO: 1474269 - RNA, 19 nt, Artificial Sequence
  Description of Artificial Sequence: Synthetic oligonucleotide
ugggcacgugaauuugcac

SEQ ID NO: 1474270 - RNA, 19 nt, Artificial Sequence
  Description of Artificial Sequence: Synthetic oligonucleotide
auuugcacaucggaucuuu

SEQ ID NO: 1474271 - RNA, 19 nt, Artificial Sequence
  Description of Artificial Sequence: Synthetic oligonucleotide
gcgagaaauuucucagcag

SEQ ID NO: 1474272 - RNA, 19 nt, Artificial Sequence
  Description of Artificial Sequence: Synthetic oligonucleotide
gaucccgagaggagcuugc

SEQ ID NO: 1474273 - RNA, 19 nt, Artificial Sequence
  Description of Artificial Sequence: Synthetic oligonucleotide
caguuggauauagucugug

SEQ ID NO: 1474274 - RNA, 19 nt, Artificial Sequence
  Description of Artificial Sequence: Synthetic oligonucleotide
ggcaaucucacuaagcagu

SEQ ID NO: 1474275 - RNA, 19 nt, Artificial Sequence
  Description of Artificial Sequence: Synthetic oligonucleotide
gaaagugggcacgugaauu

SEQ ID NO: 1474276 - RNA, 19 nt, Artificial Sequence
  Description of Artificial Sequence: Synthetic oligonucleotide
acauggcgagaagggacgg

SEQ ID NO: 1474277 - RNA, 19 nt, Artificial Sequence
  Description of Artificial Sequence: Synthetic oligonucleotide
gguauuguccauuggcacu

SEQ ID NO: 1474278 - RNA, 19 nt, Artificial Sequence
  Description of Artificial Sequence: Synthetic oligonucleotide
gggacggcugugcacagug

SEQ ID NO: 1474279 - RNA, 19 nt, Artificial Sequence
  Description of Artificial Sequence: Synthetic oligonucleotide
acggaaccugaagagauuu

SEQ ID NO: 1474280 - RNA, 19 nt, Artificial Sequence
  Description of Artificial Sequence: Synthetic oligonucleotide
agagcauugugagcagcgu

SEQ ID NO: 1474281 - RNA, 19 nt, Artificial Sequence
  Description of Artificial Sequence: Synthetic oligonucleotide
acacacggugauaggacug

SEQ ID NO: 1474282 - RNA, 19 nt, Artificial Sequence
  Description of Artificial Sequence: Synthetic oligonucleotide
cccgagaggagcuugccug

SEQ ID NO: 1474283 - RNA, 19 nt, Artificial Sequence
  Description of Artificial Sequence: Synthetic oligonucleotide
cugaaucgguguuuuccca

SEQ ID NO: 1474284 - RNA, 19 nt, Artificial Sequence
  Description of Artificial Sequence: Synthetic oligonucleotide
ugccuggagccuacuuucu

SEQ ID NO: 1474285 - RNA, 19 nt, Artificial Sequence
  Description of Artificial Sequence: Synthetic oligonucleotide
gugaaagugggcacgugaa

SEQ ID NO: 1474286 - RNA, 19 nt, Artificial Sequence
  Description of Artificial Sequence: Synthetic oligonucleotide
uaacaacuaccaggagaca

SEQ ID NO: 1474287 - RNA, 19 nt, Artificial Sequence
  Description of Artificial Sequence: Synthetic oligonucleotide
caggggaauuccucaacga

SEQ ID NO: 1474288 - RNA, 19 nt, Artificial Sequence
  Description of Artificial Sequence: Synthetic oligonucleotide
agaucccgagaggagcuug

SEQ ID NO: 1474289 - RNA, 19 nt, Artificial Sequence
  Description of Artificial Sequence: Synthetic oligonucleotide
ccuugugguacaaaguuua

SEQ ID NO: 1474290 - RNA, 19 nt, Artificial Sequence
  Description of Artificial Sequence: Synthetic oligonucleotide
cugguaccuucaccugugc

SEQ ID NO: 1474291 - RNA, 19 nt, Artificial Sequence
  Description of Artificial Sequence: Synthetic oligonucleotide
cauccuagggaauguccaa

SEQ ID NO: 1474292 - RNA, 19 nt, Artificial Sequence
  Description of Artificial Sequence: Synthetic oligonucleotide
ggaucaggcauugaggggu

SEQ ID NO: 1474293 - RNA, 19 nt, Artificial Sequence
  Description of Artificial Sequence: Synthetic oligonucleotide
ggaugcuacacucagccuu

SEQ ID NO: 1474294 - RNA, 19 nt, Artificial Sequence
  Description of Artificial Sequence: Synthetic oligonucleotide
cuucccucuccacgucggc

SEQ ID NO: 1474295 - RNA, 19 nt, Artificial Sequence
  Description of Artificial Sequence: Synthetic oligonucleotide
accuugcuccuuggcaauc

SEQ ID NO: 1474296 - RNA, 19 nt, Artificial Sequence
  Description of Artificial Sequence: Synthetic oligonucleotide
gcaaauacuugcauuggcu

SEQ ID NO: 1474297 - RNA, 19 nt, Artificial Sequence
  Description of Artificial Sequence: Synthetic oligonucleotide
gcacaucggaucuuucaca

SEQ ID NO: 1474298 - RNA, 19 nt, Artificial Sequence
  Description of Artificial Sequence: Synthetic oligonucleotide
cauggcgagaagggacggc

SEQ ID NO: 1474299 - RNA, 19 nt, Artificial Sequence
  Description of Artificial Sequence: Synthetic oligonucleotide
uguuaucaucuugcccaaa

SEQ ID NO: 1474300 - RNA, 19 nt, Artificial Sequence
  Description of Artificial Sequence: Synthetic oligonucleotide
gaucaggcauugagggguc

SEQ ID NO: 1474301 - RNA, 19 nt, Artificial Sequence
  Description of Artificial Sequence: Synthetic oligonucleotide
acaucggaucuuucacauu

SEQ ID NO: 1474302 - RNA, 19 nt, Artificial Sequence
  Description of Artificial Sequence: Synthetic oligonucleotide
ccaacacucuagucuaauc

SEQ ID NO: 1474303 - RNA, 19 nt, Artificial Sequence
  Description of Artificial Sequence: Synthetic oligonucleotide
gcagcucuaugcuucgcca

SEQ ID NO: 1474304 - RNA, 19 nt, Artificial Sequence
  Description of Artificial Sequence: Synthetic oligonucleotide
caacgaaugccaaguacau

SEQ ID NO: 1474305 - RNA, 19 nt, Artificial Sequence
  Description of Artificial Sequence: Synthetic oligonucleotide
uacuugcauuggcuuucaa

SEQ ID NO: 1474306 - RNA, 19 nt, Artificial Sequence
  Description of Artificial Sequence: Synthetic oligonucleotide
gugggcacgugaauuugca

SEQ ID NO: 1474307 - RNA, 19 nt, Artificial Sequence
  Description of Artificial Sequence: Synthetic oligonucleotide
cucggcgcgaugccugcug

SEQ ID NO: 1474308 - RNA, 19 nt, Artificial Sequence
  Description of Artificial Sequence: Synthetic oligonucleotide
aggugcgagggaaacuuau

SEQ ID NO: 1474309 - RNA, 19 nt, Artificial Sequence
  Description of Artificial Sequence: Synthetic oligonucleotide
cuggaaagucgaugacgga

SEQ ID NO: 1474310 - RNA, 19 nt, Artificial Sequence
  Description of Artificial Sequence: Synthetic oligonucleotide
gagcagcgucacucugugc

SEQ ID NO: 1474311 - RNA, 19 nt, Artificial Sequence
  Description of Artificial Sequence: Synthetic oligonucleotide
caacgguuacucugaaggu

SEQ ID NO: 1474312 - RNA, 19 nt, Artificial Sequence
  Description of Artificial Sequence: Synthetic oligonucleotide
cacaauccccaacacucua

SEQ ID NO: 1474313 - RNA, 19 nt, Artificial Sequence
  Description of Artificial Sequence: Synthetic oligonucleotide
uccugggaaaggguauauu

SEQ ID NO: 1474314 - RNA, 19 nt, Artificial Sequence
  Description of Artificial Sequence: Synthetic oligonucleotide
cguauucgugcaauaccug

SEQ ID NO: 1474315 - RNA, 19 nt, Artificial Sequence
  Description of Artificial Sequence: Synthetic oligonucleotide
augcccgagccaugacaca

SEQ ID NO: 1474316 - RNA, 19 nt, Artificial Sequence
  Description of Artificial Sequence: Synthetic oligonucleotide
ggcacgugaauuugcacau

SEQ ID NO: 1474317 - RNA, 19 nt, Artificial Sequence
  Description of Artificial Sequence: Synthetic oligonucleotide
augccguauucgugcaaua

SEQ ID NO: 1474318 - RNA, 19 nt, Artificial Sequence
  Description of Artificial Sequence: Synthetic oligonucleotide
ccguauucgugcaauaccu

SEQ ID NO: 1474319 - RNA, 19 nt, Artificial Sequence
  Description of Artificial Sequence: Synthetic oligonucleotide
gucgaugacggaaccugaa

SEQ ID NO: 1474320 - RNA, 19 nt, Artificial Sequence
  Description of Artificial Sequence: Synthetic oligonucleotide
aggugaaagugggcacgug

SEQ ID NO: 1474321 - RNA, 19 nt, Artificial Sequence
  Description of Artificial Sequence: Synthetic oligonucleotide
ucccucuuaugagcagguc

SEQ ID NO: 1474322 - RNA, 19 nt, Artificial Sequence
  Description of Artificial Sequence: Synthetic oligonucleotide
cgaugacggaaccugaaga

SEQ ID NO: 1474323 - RNA, 19 nt, Artificial Sequence
  Description of Artificial Sequence: Synthetic oligonucleotide
cgcacauacguacauuaca

SEQ ID NO: 1474324 - RNA, 19 nt, Artificial Sequence
  Description of Artificial Sequence: Synthetic oligonucleotide
gaugccugcugugggacau

SEQ ID NO: 1474325 - RNA, 19 nt, Artificial Sequence
  Description of Artificial Sequence: Synthetic oligonucleotide
gcgcgaugccugcuguggg

SEQ ID NO: 1474326 - RNA, 19 nt, Artificial Sequence
  Description of Artificial Sequence: Synthetic oligonucleotide
caauaccugaaucgguguu

SEQ ID NO: 1474327 - RNA, 19 nt, Artificial Sequence
  Description of Artificial Sequence: Synthetic oligonucleotide
cugcaaauugugguauacu

SEQ ID NO: 1474328 - RNA, 19 nt, Artificial Sequence
  Description of Artificial Sequence: Synthetic oligonucleotide
ggggaauuccucaacgaau

SEQ ID NO: 1474329 - RNA, 19 nt, Artificial Sequence
  Description of Artificial Sequence: Synthetic oligonucleotide
cacucuagucuaaucucuu

SEQ ID NO: 1474330 - RNA, 19 nt, Artificial Sequence
  Description of Artificial Sequence: Synthetic oligonucleotide
gcgagacacugguauuguc

SEQ ID NO: 1474331 - RNA, 19 nt, Artificial Sequence
  Description of Artificial Sequence: Synthetic oligonucleotide
cggaaccugaagagauuug

SEQ ID NO: 1474332 - RNA, 19 nt, Artificial Sequence
  Description of Artificial Sequence: Synthetic oligonucleotide
cauugugagcagcgucacu

SEQ ID NO: 1474333 - RNA, 19 nt, Artificial Sequence
  Description of Artificial Sequence: Synthetic oligonucleotide
gacggaaccugaagagauu

SEQ ID NO: 1474334 - RNA, 19 nt, Artificial Sequence
  Description of Artificial Sequence: Synthetic oligonucleotide
agggacggcugugcacagu

SEQ ID NO: 1474335 - RNA, 19 nt, Artificial Sequence
  Description of Artificial Sequence: Synthetic oligonucleotide
gcgaacaugcagcuuccau

SEQ ID NO: 1474336 - RNA, 19 nt, Artificial Sequence
  Description of Artificial Sequence: Synthetic oligonucleotide
guucugcgagacacuggua

SEQ ID NO: 1474337 - RNA, 19 nt, Artificial Sequence
  Description of Artificial Sequence: Synthetic oligonucleotide
gcacgugaauuugcacauc

SEQ ID NO: 1474338 - RNA, 19 nt, Artificial Sequence
  Description of Artificial Sequence: Synthetic oligonucleotide
gcucuaugcuucgccagcu

SEQ ID NO: 1474339 - RNA, 19 nt, Artificial Sequence
  Description of Artificial Sequence: Synthetic oligonucleotide
ccucaacgaaugccaagua

SEQ ID NO: 1474340 - RNA, 19 nt, Artificial Sequence
  Description of Artificial Sequence: Synthetic oligonucleotide
cucuaugcuucgccagcuu

SEQ ID NO: 1474341 - RNA, 19 nt, Artificial Sequence
  Description of Artificial Sequence: Synthetic oligonucleotide
ggcgaacaugcagcuucca

SEQ ID NO: 1474342 - RNA, 19 nt, Artificial Sequence
  Description of Artificial Sequence: Synthetic oligonucleotide
gcagcgucacucugugcau

SEQ ID NO: 1474343 - RNA, 19 nt, Artificial Sequence
  Description of Artificial Sequence: Synthetic oligonucleotide
ggacggcugugcacaguga

SEQ ID NO: 1474344 - RNA, 19 nt, Artificial Sequence
  Description of Artificial Sequence: Synthetic oligonucleotide
gccuugugguacaaaguuu

SEQ ID NO: 1474345 - RNA, 19 nt, Artificial Sequence
  Description of Artificial Sequence: Synthetic oligonucleotide
gccaugacacacggugaua

SEQ ID NO: 1474346 - RNA, 19 nt, Artificial Sequence
  Description of Artificial Sequence: Synthetic oligonucleotide
gucgccagccauggugaau

SEQ ID NO: 1474347 - RNA, 19 nt, Artificial Sequence
  Description of Artificial Sequence: Synthetic oligonucleotide
cgcgaugccugcuguggga

SEQ ID NO: 1474348 - RNA, 19 nt, Artificial Sequence
  Description of Artificial Sequence: Synthetic oligonucleotide
ggacgcacauacguacauu

SEQ ID NO: 1474349 - RNA, 19 nt, Artificial Sequence
  Description of Artificial Sequence: Synthetic oligonucleotide
gccuggagccuacuuucuu

SEQ ID NO: 1474350 - RNA, 19 nt, Artificial Sequence
  Description of Artificial Sequence: Synthetic oligonucleotide
cgaugccugcugugggaca

SEQ ID NO: 1474351 - RNA, 19 nt, Artificial Sequence
  Description of Artificial Sequence: Synthetic oligonucleotide
cggcgcgaugccugcugug

SEQ ID NO: 1474352 - RNA, 19 nt, Artificial Sequence
  Description of Artificial Sequence: Synthetic oligonucleotide
cgucggccagaucccgaga

SEQ ID NO: 1474353 - RNA, 19 nt, Artificial Sequence
  Description of Artificial Sequence: Synthetic oligonucleotide
ccucggcgcgaugccugcu

SEQ ID NO: 1474354 - RNA, 19 nt, Artificial Sequence
  Description of Artificial Sequence: Synthetic oligonucleotide
uuuaguaagaucuugaauu

SEQ ID NO: 1474355 - RNA, 19 nt, Artificial Sequence
  Description of Artificial Sequence: Synthetic oligonucleotide
uauauaacagcaaagguuu

SEQ ID NO: 1474356 - RNA, 19 nt, Artificial Sequence
  Description of Artificial Sequence: Synthetic oligonucleotide
aguuuaaucuuucugaaca

SEQ ID NO: 1474357 - RNA, 19 nt, Artificial Sequence
  Description of Artificial Sequence: Synthetic oligonucleotide
ucaauugccauuucuauug

SEQ ID NO: 1474358 - RNA, 19 nt, Artificial Sequence
  Description of Artificial Sequence: Synthetic oligonucleotide
cauuauauaacagcaaagg

SEQ ID NO: 1474359 - RNA, 19 nt, Artificial Sequence
  Description of Artificial Sequence: Synthetic oligonucleotide
aaagguuugugggagaagg

SEQ ID NO: 1474360 - RNA, 19 nt, Artificial Sequence
  Description of Artificial Sequence: Synthetic oligonucleotide
uccacucuuaacaugaacc

SEQ ID NO: 1474361 - RNA, 19 nt, Artificial Sequence
  Description of Artificial Sequence: Synthetic oligonucleotide
auuguuacauuuuggacag

SEQ ID NO: 1474362 - RNA, 19 nt, Artificial Sequence
  Description of Artificial Sequence: Synthetic oligonucleotide
acaugugucggccuguugc

SEQ ID NO: 1474363 - RNA, 19 nt, Artificial Sequence
  Description of Artificial Sequence: Synthetic oligonucleotide
auaucauuuagcaucuugc

SEQ ID NO: 1474364 - RNA, 19 nt, Artificial Sequence
  Description of Artificial Sequence: Synthetic oligonucleotide
uuuuguugcgguauucggg

SEQ ID NO: 1474365 - RNA, 19 nt, Artificial Sequence
  Description of Artificial Sequence: Synthetic oligonucleotide
aguagauguaaggauaggc

SEQ ID NO: 1474366 - RNA, 19 nt, Artificial Sequence
  Description of Artificial Sequence: Synthetic oligonucleotide
ucucgggcaaugaugaugg

SEQ ID NO: 1474367 - RNA, 19 nt, Artificial Sequence
  Description of Artificial Sequence: Synthetic oligonucleotide
uucuccauuauauaacagc

SEQ ID NO: 1474368 - RNA, 19 nt, Artificial Sequence
  Description of Artificial Sequence: Synthetic oligonucleotide
uccccuucgaaguauaagg

SEQ ID NO: 1474369 - RNA, 19 nt, Artificial Sequence
  Description of Artificial Sequence: Synthetic oligonucleotide
agcaagaagaauuuuccag

SEQ ID NO: 1474370 - RNA, 19 nt, Artificial Sequence
  Description of Artificial Sequence: Synthetic oligonucleotide
uucauuguuacauuuugga

SEQ ID NO: 1474371 - RNA, 19 nt, Artificial Sequence
  Description of Artificial Sequence: Synthetic oligonucleotide
aauuuuguugcgguauucg

SEQ ID NO: 1474372 - RNA, 19 nt, Artificial Sequence
  Description of Artificial Sequence: Synthetic oligonucleotide
acuguguaagaucaugagg

SEQ ID NO: 1474373 - RNA, 19 nt, Artificial Sequence
  Description of Artificial Sequence: Synthetic oligonucleotide
aaguuuagugccaccagcc

SEQ ID NO: 1474374 - RNA, 19 nt, Artificial Sequence
  Description of Artificial Sequence: Synthetic oligonucleotide
aacuguguaagaucaugag

SEQ ID NO: 1474375 - RNA, 19 nt, Artificial Sequence
  Description of Artificial Sequence: Synthetic oligonucleotide
gaguauguaacuguguaag

SEQ ID NO: 1474376 - RNA, 19 nt, Artificial Sequence
  Description of Artificial Sequence: Synthetic oligonucleotide
uuuguugcgguauucgggc

SEQ ID NO: 1474377 - RNA, 19 nt, Artificial Sequence
  Description of Artificial Sequence: Synthetic oligonucleotide
uguuucagcgccauguaca

SEQ ID NO: 1474378 - RNA, 19 nt, Artificial Sequence
  Description of Artificial Sequence: Synthetic oligonucleotide
aaggauaggcacgaugugg

SEQ ID NO: 1474379 - RNA, 19 nt, Artificial Sequence
  Description of Artificial Sequence: Synthetic oligonucleotide
uguaaggauaggcacgaug

SEQ ID NO: 1474380 - RNA, 19 nt, Artificial Sequence
  Description of Artificial Sequence: Synthetic oligonucleotide
agaucaugagguugguagc

SEQ ID NO: 1474381 - RNA, 19 nt, Artificial Sequence
  Description of Artificial Sequence: Synthetic oligonucleotide
aguugacuagaguuuaauc

SEQ ID NO: 1474382 - RNA, 19 nt, Artificial Sequence
  Description of Artificial Sequence: Synthetic oligonucleotide
auuuuguugcgguauucgg

SEQ ID NO: 1474383 - RNA, 19 nt, Artificial Sequence
  Description of Artificial Sequence: Synthetic oligonucleotide
ugguagccaucucagaggg

SEQ ID NO: 1474384 - RNA, 19 nt, Artificial Sequence
  Description of Artificial Sequence: Synthetic oligonucleotide
aaccgcuugagcaucaggg

SEQ ID NO: 1474385 - RNA, 19 nt, Artificial Sequence
  Description of Artificial Sequence: Synthetic oligonucleotide
uuaguaagaucuugaauuc

SEQ ID NO: 1474386 - RNA, 19 nt, Artificial Sequence
  Description of Artificial Sequence: Synthetic oligonucleotide
auaggcacgaugugggacg

SEQ ID NO: 1474387 - RNA, 19 nt, Artificial Sequence
  Description of Artificial Sequence: Synthetic oligonucleotide
uaucauuuagcaucuugca

SEQ ID NO: 1474388 - RNA, 19 nt, Artificial Sequence
  Description of Artificial Sequence: Synthetic oligonucleotide
cuucauauggucuccacuc

SEQ ID NO: 1474389 - RNA, 19 nt, Artificial Sequence
  Description of Artificial Sequence: Synthetic oligonucleotide
uauguaacuguguaagauc

SEQ ID NO: 1474390 - RNA, 19 nt, Artificial Sequence
  Description of Artificial Sequence: Synthetic oligonucleotide
agacccauaucauuuagca

SEQ ID NO: 1474391 - RNA, 19 nt, Artificial Sequence
  Description of Artificial Sequence: Synthetic oligonucleotide
uaacuguguaagaucauga

SEQ ID NO: 1474392 - RNA, 19 nt, Artificial Sequence
  Description of Artificial Sequence: Synthetic oligonucleotide
uugguagccaucucagagg

SEQ ID NO: 1474393 - RNA, 19 nt, Artificial Sequence
  Description of Artificial Sequence: Synthetic oligonucleotide
uguugcaaugcaauaggga

SEQ ID NO: 1474394 - RNA, 19 nt, Artificial Sequence
  Description of Artificial Sequence: Synthetic oligonucleotide
aaguauaaggcgaugcucu

SEQ ID NO: 1474395 - RNA, 19 nt, Artificial Sequence
  Description of Artificial Sequence: Synthetic oligonucleotide
agaaauuggauggcagacc

SEQ ID NO: 1474396 - RNA, 19 nt, Artificial Sequence
  Description of Artificial Sequence: Synthetic oligonucleotide
ugcauauuucccaagcauc

SEQ ID NO: 1474397 - RNA, 19 nt, Artificial Sequence
  Description of Artificial Sequence: Synthetic oligonucleotide
ugugcauuccuguaguuuc

SEQ ID NO: 1474398 - RNA, 19 nt, Artificial Sequence
  Description of Artificial Sequence: Synthetic oligonucleotide
acucuuaacaugaaccuuc

SEQ ID NO: 1474399 - RNA, 19 nt, Artificial Sequence
  Description of Artificial Sequence: Synthetic oligonucleotide
ugacacucgaucacaguag

SEQ ID NO: 1474400 - RNA, 19 nt, Artificial Sequence
  Description of Artificial Sequence: Synthetic oligonucleotide
ugauagucuucauuaguug

SEQ ID NO: 1474401 - RNA, 19 nt, Artificial Sequence
  Description of Artificial Sequence: Synthetic oligonucleotide
uucuauugccacauugucu

SEQ ID NO: 1474402 - RNA, 19 nt, Artificial Sequence
  Description of Artificial Sequence: Synthetic oligonucleotide
guugacuagaguuuaaucu

SEQ ID NO: 1474403 - RNA, 19 nt, Artificial Sequence
  Description of Artificial Sequence: Synthetic oligonucleotide
acagccgggacaaaggagc

SEQ ID NO: 1474404 - RNA, 19 nt, Artificial Sequence
  Description of Artificial Sequence: Synthetic oligonucleotide
ucagaaccaaugaugucug

SEQ ID NO: 1474405 - RNA, 19 nt, Artificial Sequence
  Description of Artificial Sequence: Synthetic oligonucleotide
uucacgaguauguaacugu

SEQ ID NO: 1474406 - RNA, 19 nt, Artificial Sequence
  Description of Artificial Sequence: Synthetic oligonucleotide
cauuccuguaguuuccugc

SEQ ID NO: 1474407 - RNA, 19 nt, Artificial Sequence
  Description of Artificial Sequence: Synthetic oligonucleotide
uuucuauugccacauuguc

SEQ ID NO: 1474408 - RNA, 19 nt, Artificial Sequence
  Description of Artificial Sequence: Synthetic oligonucleotide
acugaagagaacgucaugu

SEQ ID NO: 1474409 - RNA, 19 nt, Artificial Sequence
  Description of Artificial Sequence: Synthetic oligonucleotide
uugacuagaguuuaaucuu

SEQ ID NO: 1474410 - RNA, 19 nt, Artificial Sequence
  Description of Artificial Sequence: Synthetic oligonucleotide
cauuucuauugccacauug

SEQ ID NO: 1474411 - RNA, 19 nt, Artificial Sequence
  Description of Artificial Sequence: Synthetic oligonucleotide
cauaucauuuagcaucuug

SEQ ID NO: 1474412 - RNA, 19 nt, Artificial Sequence
  Description of Artificial Sequence: Synthetic oligonucleotide
uauucgggccucaucagca

SEQ ID NO: 1474413 - RNA, 19 nt, Artificial Sequence
  Description of Artificial Sequence: Synthetic oligonucleotide
uuagugcccgugaauacug

SEQ ID NO: 1474414 - RNA, 19 nt, Artificial Sequence
  Description of Artificial Sequence: Synthetic oligonucleotide
accuucacgaguauguaac

SEQ ID NO: 1474415 - RNA, 19 nt, Artificial Sequence
  Description of Artificial Sequence: Synthetic oligonucleotide
ugaaagugucucuuuuccc

SEQ ID NO: 1474416 - RNA, 19 nt, Artificial Sequence
  Description of Artificial Sequence: Synthetic oligonucleotide
uuuagugccaccagccaaa

SEQ ID NO: 1474417 - RNA, 19 nt, Artificial Sequence
  Description of Artificial Sequence: Synthetic oligonucleotide
caucagguggucuaucagc

SEQ ID NO: 1474418 - RNA, 19 nt, Artificial Sequence
  Description of Artificial Sequence: Synthetic oligonucleotide
uucaacaugugucggccug

SEQ ID NO: 1474419 - RNA, 19 nt, Artificial Sequence
  Description of Artificial Sequence: Synthetic oligonucleotide
ucugcguagauuuccauuu

SEQ ID NO: 1474420 - RNA, 19 nt, Artificial Sequence
  Description of Artificial Sequence: Synthetic oligonucleotide
agcaucagaaaaccgcuug

SEQ ID NO: 1474421 - RNA, 19 nt, Artificial Sequence
  Description of Artificial Sequence: Synthetic oligonucleotide
agauguaaggauaggcacg

SEQ ID NO: 1474422 - RNA, 19 nt, Artificial Sequence
  Description of Artificial Sequence: Synthetic oligonucleotide
ucacgaguauguaacugug

SEQ ID NO: 1474423 - RNA, 19 nt, Artificial Sequence
  Description of Artificial Sequence: Synthetic oligonucleotide
gagaacgucaugugcauuc

SEQ ID NO: 1474424 - RNA, 19 nt, Artificial Sequence
  Description of Artificial Sequence: Synthetic oligonucleotide
uuucaguugacuagaguuu

SEQ ID NO: 1474425 - RNA, 19 nt, Artificial Sequence
  Description of Artificial Sequence: Synthetic oligonucleotide
auugccucgauuuucuuuu

SEQ ID NO: 1474426 - RNA, 19 nt, Artificial Sequence
  Description of Artificial Sequence: Synthetic oligonucleotide
ugaauacuggccacacagc

SEQ ID NO: 1474427 - RNA, 19 nt, Artificial Sequence
  Description of Artificial Sequence: Synthetic oligonucleotide
gcuuucacuguuuaguaag

SEQ ID NO: 1474428 - RNA, 19 nt, Artificial Sequence
  Description of Artificial Sequence: Synthetic oligonucleotide
uaacaugaaccuucacgag

SEQ ID NO: 1474429 - RNA, 19 nt, Artificial Sequence
  Description of Artificial Sequence: Synthetic oligonucleotide
aaaccgcuugagcaucagg

SEQ ID NO: 1474430 - RNA, 19 nt, Artificial Sequence
  Description of Artificial Sequence: Synthetic oligonucleotide
uacagugcagggaagccac

SEQ ID NO: 1474431 - RNA, 19 nt, Artificial Sequence
  Description of Artificial Sequence: Synthetic oligonucleotide
ucgaaguauaaggcgaugc

SEQ ID NO: 1474432 - RNA, 19 nt, Artificial Sequence
  Description of Artificial Sequence: Synthetic oligonucleotide
agugcgggcacauugucca

SEQ ID NO: 1474433 - RNA, 19 nt, Artificial Sequence
  Description of Artificial Sequence: Synthetic oligonucleotide
aguacagugcagggaagcc

SEQ ID NO: 1474434 - RNA, 19 nt, Artificial Sequence
  Description of Artificial Sequence: Synthetic oligonucleotide
aagggaaguuuagugccac

SEQ ID NO: 1474435 - RNA, 19 nt, Artificial Sequence
  Description of Artificial Sequence: Synthetic oligonucleotide
ccaagcaucagaaaaccgc

SEQ ID NO: 1474436 - RNA, 19 nt, Artificial Sequence
  Description of Artificial Sequence: Synthetic oligonucleotide
agcaguucgucuuuagccu

SEQ ID NO: 1474437 - RNA, 19 nt, Artificial Sequence
  Description of Artificial Sequence: Synthetic oligonucleotide
acauacugaagagaacguc

SEQ ID NO: 1474438 - RNA, 19 nt, Artificial Sequence
  Description of Artificial Sequence: Synthetic oligonucleotide
ugggacgggaacuugcuga

SEQ ID NO: 1474439 - RNA, 19 nt, Artificial Sequence
  Description of Artificial Sequence: Synthetic oligonucleotide
cugauuggucagcaguucg

SEQ ID NO: 1474440 - RNA, 19 nt, Artificial Sequence
  Description of Artificial Sequence: Synthetic oligonucleotide
agugcccgugaauacuggc

SEQ ID NO: 1474441 - RNA, 19 nt, Artificial Sequence
  Description of Artificial Sequence: Synthetic oligonucleotide
ucauuaguugugucuucag

SEQ ID NO: 1474442 - RNA, 19 nt, Artificial Sequence
  Description of Artificial Sequence: Synthetic oligonucleotide
uuacagccgggacaaagga

SEQ ID NO: 1474443 - RNA, 19 nt, Artificial Sequence
  Description of Artificial Sequence: Synthetic oligonucleotide
cuguugcaaugcaauaggg

SEQ ID NO: 1474444 - RNA, 19 nt, Artificial Sequence
  Description of Artificial Sequence: Synthetic oligonucleotide
guacuuggcauccuuuggc

SEQ ID NO: 1474445 - RNA, 19 nt, Artificial Sequence
  Description of Artificial Sequence: Synthetic oligonucleotide
cacuguuccguuucugucc

SEQ ID NO: 1474446 - RNA, 19 nt, Artificial Sequence
  Description of Artificial Sequence: Synthetic oligonucleotide
uguccggagguacugggug

SEQ ID NO: 1474447 - RNA, 19 nt, Artificial Sequence
  Description of Artificial Sequence: Synthetic oligonucleotide
uaaggauaggcacgaugug

SEQ ID NO: 1474448 - RNA, 19 nt, Artificial Sequence
  Description of Artificial Sequence: Synthetic oligonucleotide
auguaacuguguaagauca

SEQ ID NO: 1474449 - RNA, 19 nt, Artificial Sequence
  Description of Artificial Sequence: Synthetic oligonucleotide
ucgggcaaugaugauggcg

SEQ ID NO: 1474450 - RNA, 19 nt, Artificial Sequence
  Description of Artificial Sequence: Synthetic oligonucleotide
acccgaaugagcaugcggg

SEQ ID NO: 1474451 - RNA, 19 nt, Artificial Sequence
  Description of Artificial Sequence: Synthetic oligonucleotide
ucgucuuuagccuggccca

SEQ ID NO: 1474452 - RNA, 19 nt, Artificial Sequence
  Description of Artificial Sequence: Synthetic oligonucleotide
uccguuucuguccggaggu

SEQ ID NO: 1474453 - RNA, 19 nt, Artificial Sequence
  Description of Artificial Sequence: Synthetic oligonucleotide
aggauaggcacgauguggg

SEQ ID NO: 1474454 - RNA, 19 nt, Artificial Sequence
  Description of Artificial Sequence: Synthetic oligonucleotide
ucagcgccauguacaagcg

SEQ ID NO: 1474455 - RNA, 19 nt, Artificial Sequence
  Description of Artificial Sequence: Synthetic oligonucleotide
uuuagugcccgugaauacu

SEQ ID NO: 1474456 - RNA, 19 nt, Artificial Sequence
  Description of Artificial Sequence: Synthetic oligonucleotide
ggagcucacauucugggag

SEQ ID NO: 1474457 - RNA, 19 nt, Artificial Sequence
  Description of Artificial Sequence: Synthetic oligonucleotide
aguauguaacuguguaaga

SEQ ID NO: 1474458 - RNA, 19 nt, Artificial Sequence
  Description of Artificial Sequence: Synthetic oligonucleotide
gaaguauaaggcgaugcuc

SEQ ID NO: 1474459 - RNA, 19 nt, Artificial Sequence
  Description of Artificial Sequence: Synthetic oligonucleotide
aaugaugucugcguagauu

SEQ ID NO: 1474460 - RNA, 19 nt, Artificial Sequence
  Description of Artificial Sequence: Synthetic oligonucleotide
uucauauggucuccacucu

SEQ ID NO: 1474461 - RNA, 19 nt, Artificial Sequence
  Description of Artificial Sequence: Synthetic oligonucleotide
guugucaaggaagcugugg

SEQ ID NO: 1474462 - RNA, 19 nt, Artificial Sequence
  Description of Artificial Sequence: Synthetic oligonucleotide
ugggagaagggaaguuuag

SEQ ID NO: 1474463 - RNA, 19 nt, Artificial Sequence
  Description of Artificial Sequence: Synthetic oligonucleotide
agugcuuuagugcccguga

SEQ ID NO: 1474464 - RNA, 19 nt, Artificial Sequence
  Description of Artificial Sequence: Synthetic oligonucleotide
agaacgucaugugcauucc

SEQ ID NO: 1474465 - RNA, 19 nt, Artificial Sequence
  Description of Artificial Sequence: Synthetic oligonucleotide
agaaaaccgcuugagcauc

SEQ ID NO: 1474466 - RNA, 19 nt, Artificial Sequence
  Description of Artificial Sequence: Synthetic oligonucleotide
uacagccgggacaaaggag

SEQ ID NO: 1474467 - RNA, 19 nt, Artificial Sequence
  Description of Artificial Sequence: Synthetic oligonucleotide
ugcauacauacugaagaga

SEQ ID NO: 1474468 - RNA, 19 nt, Artificial Sequence
  Description of Artificial Sequence: Synthetic oligonucleotide
aacgucaugugcauuccug

SEQ ID NO: 1474469 - RNA, 19 nt, Artificial Sequence
  Description of Artificial Sequence: Synthetic oligonucleotide
acgaguauguaacugugua

SEQ ID NO: 1474470 - RNA, 19 nt, Artificial Sequence
  Description of Artificial Sequence: Synthetic oligonucleotide
aaccuucacgaguauguaa

SEQ ID NO: 1474471 - RNA, 19 nt, Artificial Sequence
  Description of Artificial Sequence: Synthetic oligonucleotide
ucgaucacaguagauguaa

SEQ ID NO: 1474472 - RNA, 19 nt, Artificial Sequence
  Description of Artificial Sequence: Synthetic oligonucleotide
aguauaaggcgaugcucug

SEQ ID NO: 1474473 - RNA, 19 nt, Artificial Sequence
  Description of Artificial Sequence: Synthetic oligonucleotide
ugacuagaguuuaaucuuu

SEQ ID NO: 1474474 - RNA, 19 nt, Artificial Sequence
  Description of Artificial Sequence: Synthetic oligonucleotide
cacucgaucacaguagaug

SEQ ID NO: 1474475 - RNA, 19 nt, Artificial Sequence
  Description of Artificial Sequence: Synthetic oligonucleotide
cucugauagucuucauuag

SEQ ID NO: 1474476 - RNA, 19 nt, Artificial Sequence
  Description of Artificial Sequence: Synthetic oligonucleotide
cuuuagugcccgugaauac

SEQ ID NO: 1474477 - RNA, 19 nt, Artificial Sequence
  Description of Artificial Sequence: Synthetic oligonucleotide
cacgguacuguuucagcgc

SEQ ID NO: 1474478 - RNA, 19 nt, Artificial Sequence
  Description of Artificial Sequence: Synthetic oligonucleotide
uacugaagagaacgucaug

SEQ ID NO: 1474479 - RNA, 19 nt, Artificial Sequence
  Description of Artificial Sequence: Synthetic oligonucleotide
agaauuuuccagccugaaa

SEQ ID NO: 1474480 - RNA, 19 nt, Artificial Sequence
  Description of Artificial Sequence: Synthetic oligonucleotide
agggaaguuuagugccacc

SEQ ID NO: 1474481 - RNA, 19 nt, Artificial Sequence
  Description of Artificial Sequence: Synthetic oligonucleotide
acauugucuucugagcuug

SEQ ID NO: 1474482 - RNA, 19 nt, Artificial Sequence
  Description of Artificial Sequence: Synthetic oligonucleotide
aguuuagugccaccagcca

SEQ ID NO: 1474483 - RNA, 19 nt, Artificial Sequence
  Description of Artificial Sequence: Synthetic oligonucleotide
cagcauagcugcaaagcug

SEQ ID NO: 1474484 - RNA, 19 nt, Artificial Sequence
  Description of Artificial Sequence: Synthetic oligonucleotide
guagccaucucagagggga

SEQ ID NO: 1474485 - RNA, 19 nt, Artificial Sequence
  Description of Artificial Sequence: Synthetic oligonucleotide
cagacccauaucauuuagc

SEQ ID NO: 1474486 - RNA, 19 nt, Artificial Sequence
  Description of Artificial Sequence: Synthetic oligonucleotide
ugccaucuacucaggagca

SEQ ID NO: 1474487 - RNA, 19 nt, Artificial Sequence
  Description of Artificial Sequence: Synthetic oligonucleotide
gaugugucuggccuccuga

SEQ ID NO: 1474488 - RNA, 19 nt, Artificial Sequence
  Description of Artificial Sequence: Synthetic oligonucleotide
guguaagaucaugagguug

SEQ ID NO: 1474489 - RNA, 19 nt, Artificial Sequence
  Description of Artificial Sequence: Synthetic oligonucleotide
ccuguugcaaugcaauagg

SEQ ID NO: 1474490 - RNA, 19 nt, Artificial Sequence
  Description of Artificial Sequence: Synthetic oligonucleotide
guaaggauaggcacgaugu

SEQ ID NO: 1474491 - RNA, 19 nt, Artificial Sequence
  Description of Artificial Sequence: Synthetic oligonucleotide
ugcucugauagucuucauu

SEQ ID NO: 1474492 - RNA, 19 nt, Artificial Sequence
  Description of Artificial Sequence: Synthetic oligonucleotide
ugugggacgggaacuugcu

SEQ ID NO: 1474493 - RNA, 19 nt, Artificial Sequence
  Description of Artificial Sequence: Synthetic oligonucleotide
gauaggcacgaugugggac

SEQ ID NO: 1474494 - RNA, 19 nt, Artificial Sequence
  Description of Artificial Sequence: Synthetic oligonucleotide
guagauggaguugauuuuc

SEQ ID NO: 1474495 - RNA, 19 nt, Artificial Sequence
  Description of Artificial Sequence: Synthetic oligonucleotide
uucaguugacuagaguuua

SEQ ID NO: 1474496 - RNA, 19 nt, Artificial Sequence
  Description of Artificial Sequence: Synthetic oligonucleotide
uaguaagaucuugaauucu

SEQ ID NO: 1474497 - RNA, 19 nt, Artificial Sequence
  Description of Artificial Sequence: Synthetic oligonucleotide
guauucgggccucaucagc

SEQ ID NO: 1474498 - RNA, 19 nt, Artificial Sequence
  Description of Artificial Sequence: Synthetic oligonucleotide
uacaagcggaacagguacu

SEQ ID NO: 1474499 - RNA, 19 nt, Artificial Sequence
  Description of Artificial Sequence: Synthetic oligonucleotide
uuccccuucgaaguauaag

SEQ ID NO: 1474500 - RNA, 19 nt, Artificial Sequence
  Description of Artificial Sequence: Synthetic oligonucleotide
acagugcgggcacauuguc

SEQ ID NO: 1474501 - RNA, 19 nt, Artificial Sequence
  Description of Artificial Sequence: Synthetic oligonucleotide
uguaacuguguaagaucau

SEQ ID NO: 1474502 - RNA, 19 nt, Artificial Sequence
  Description of Artificial Sequence: Synthetic oligonucleotide
ucuuaacaugaaccuucac

SEQ ID NO: 1474503 - RNA, 19 nt, Artificial Sequence
  Description of Artificial Sequence: Synthetic oligonucleotide
augugggacgggaacuugc

SEQ ID NO: 1474504 - RNA, 19 nt, Artificial Sequence
  Description of Artificial Sequence: Synthetic oligonucleotide
acgucaugugcauuccugu

SEQ ID NO: 1474505 - RNA, 19 nt, Artificial Sequence
  Description of Artificial Sequence: Synthetic oligonucleotide
uagugcccgugaauacugg

SEQ ID NO: 1474506 - RNA, 19 nt, Artificial Sequence
  Description of Artificial Sequence: Synthetic oligonucleotide
cuucacgaguauguaacug

SEQ ID NO: 1474507 - RNA, 19 nt, Artificial Sequence
  Description of Artificial Sequence: Synthetic oligonucleotide
cauuaguugugucuucaga

SEQ ID NO: 1474508 - RNA, 19 nt, Artificial Sequence
  Description of Artificial Sequence: Synthetic oligonucleotide
aggcgaugcucugauaguc

SEQ ID NO: 1474509 - RNA, 19 nt, Artificial Sequence
  Description of Artificial Sequence: Synthetic oligonucleotide
aagugcuuuagugcccgug

SEQ ID NO: 1474510 - RNA, 19 nt, Artificial Sequence
  Description of Artificial Sequence: Synthetic oligonucleotide
aagaauuuuccagccugaa

SEQ ID NO: 1474511 - RNA, 19 nt, Artificial Sequence
  Description of Artificial Sequence: Synthetic oligonucleotide
caucuacucaggagcacug

SEQ ID NO: 1474512 - RNA, 19 nt, Artificial Sequence
  Description of Artificial Sequence: Synthetic oligonucleotide
caguucgucuuuagccugg

SEQ ID NO: 1474513 - RNA, 19 nt, Artificial Sequence
  Description of Artificial Sequence: Synthetic oligonucleotide
ugugacacucgaucacagu

SEQ ID NO: 1474514 - RNA, 19 nt, Artificial Sequence
  Description of Artificial Sequence: Synthetic oligonucleotide
aggaagugcuuuagugccc

SEQ ID NO: 1474515 - RNA, 19 nt, Artificial Sequence
  Description of Artificial Sequence: Synthetic oligonucleotide
ucaguugacuagaguuuaa

SEQ ID NO: 1474516 - RNA, 19 nt, Artificial Sequence
  Description of Artificial Sequence: Synthetic oligonucleotide
cacccgaaugagcaugcgg

SEQ ID NO: 1474517 - RNA, 19 nt, Artificial Sequence
  Description of Artificial Sequence: Synthetic oligonucleotide
uuucaacaugugucggccu

SEQ ID NO: 1474518 - RNA, 19 nt, Artificial Sequence
  Description of Artificial Sequence: Synthetic oligonucleotide
gcaucuugcauauuuccca

SEQ ID NO: 1474519 - RNA, 19 nt, Artificial Sequence
  Description of Artificial Sequence: Synthetic oligonucleotide
guuuagugccaccagccaa

SEQ ID NO: 1474520 - RNA, 19 nt, Artificial Sequence
  Description of Artificial Sequence: Synthetic oligonucleotide
cuuucacuguuuaguaaga

SEQ ID NO: 1474521 - RNA, 19 nt, Artificial Sequence
  Description of Artificial Sequence: Synthetic oligonucleotide
agguuugugggagaaggga

SEQ ID NO: 1474522 - RNA, 19 nt, Artificial Sequence
  Description of Artificial Sequence: Synthetic oligonucleotide
uuucuguccggagguacug

SEQ ID NO: 1474523 - RNA, 19 nt, Artificial Sequence
  Description of Artificial Sequence: Synthetic oligonucleotide
cacgaugugggacgggaac

SEQ ID NO: 1474524 - RNA, 19 nt, Artificial Sequence
  Description of Artificial Sequence: Synthetic oligonucleotide
agcgccauguacaagcgga

SEQ ID NO: 1474525 - RNA, 19 nt, Artificial Sequence
  Description of Artificial Sequence: Synthetic oligonucleotide
uuucacuguuuaguaagau

SEQ ID NO: 1474526 - RNA, 19 nt, Artificial Sequence
  Description of Artificial Sequence: Synthetic oligonucleotide
guuuaguaagaucuugaau

SEQ ID NO: 1474527 - RNA, 19 nt, Artificial Sequence
  Description of Artificial Sequence: Synthetic oligonucleotide
gcucugauagucuucauua

SEQ ID NO: 1474528 - RNA, 19 nt, Artificial Sequence
  Description of Artificial Sequence: Synthetic oligonucleotide
uguuguuggccacccgaau

SEQ ID NO: 1474529 - RNA, 19 nt, Artificial Sequence
  Description of Artificial Sequence: Synthetic oligonucleotide
uucgaaguauaaggcgaug

SEQ ID NO: 1474530 - RNA, 19 nt, Artificial Sequence
  Description of Artificial Sequence: Synthetic oligonucleotide
agguugguagccaucucag

SEQ ID NO: 1474531 - RNA, 19 nt, Artificial Sequence
  Description of Artificial Sequence: Synthetic oligonucleotide
uggccuccugaccauugcc

SEQ ID NO: 1474532 - RNA, 19 nt, Artificial Sequence
  Description of Artificial Sequence: Synthetic oligonucleotide
acaugaaccuucacgagua

SEQ ID NO: 1474533 - RNA, 19 nt, Artificial Sequence
  Description of Artificial Sequence: Synthetic oligonucleotide
auggcagacccauaucauu

SEQ ID NO: 1474534 - RNA, 19 nt, Artificial Sequence
  Description of Artificial Sequence: Synthetic oligonucleotide
auuuuggacaggaccagaa

SEQ ID NO: 1474535 - RNA, 19 nt, Artificial Sequence
  Description of Artificial Sequence: Synthetic oligonucleotide
uuguugcgguauucgggcc

SEQ ID NO: 1474536 - RNA, 19 nt, Artificial Sequence
  Description of Artificial Sequence: Synthetic oligonucleotide
cagguggucuaucagcuga

SEQ ID NO: 1474537 - RNA, 19 nt, Artificial Sequence
  Description of Artificial Sequence: Synthetic oligonucleotide
uggcaugccaucgcucucc

SEQ ID NO: 1474538 - RNA, 19 nt, Artificial Sequence
  Description of Artificial Sequence: Synthetic oligonucleotide
cucuuaacaugaaccuuca

SEQ ID NO: 1474539 - RNA, 19 nt, Artificial Sequence
  Description of Artificial Sequence: Synthetic oligonucleotide
ugaccauugccucgauuuu

SEQ ID NO: 1474540 - RNA, 19 nt, Artificial Sequence
  Description of Artificial Sequence: Synthetic oligonucleotide
guuucagcgccauguacaa

SEQ ID NO: 1474541 - RNA, 19 nt, Artificial Sequence
  Description of Artificial Sequence: Synthetic oligonucleotide
aggagcucacauucuggga

SEQ ID NO: 1474542 - RNA, 19 nt, Artificial Sequence
  Description of Artificial Sequence: Synthetic oligonucleotide
aggggauuuugaucuucug

SEQ ID NO: 1474543 - RNA, 19 nt, Artificial Sequence
  Description of Artificial Sequence: Synthetic oligonucleotide
caguagauguaaggauagg

SEQ ID NO: 1474544 - RNA, 19 nt, Artificial Sequence
  Description of Artificial Sequence: Synthetic oligonucleotide
ucggaugugucuggccucc

SEQ ID NO: 1474545 - RNA, 19 nt, Artificial Sequence
  Description of Artificial Sequence: Synthetic oligonucleotide
cagcaagaagaauuuucca

SEQ ID NO: 1474546 - RNA, 19 nt, Artificial Sequence
  Description of Artificial Sequence: Synthetic oligonucleotide
uuucccacucugugucuga

SEQ ID NO: 1474547 - RNA, 19 nt, Artificial Sequence
  Description of Artificial Sequence: Synthetic oligonucleotide
uggauggcagacccauauc

SEQ ID NO: 1474548 - RNA, 19 nt, Artificial Sequence
  Description of Artificial Sequence: Synthetic oligonucleotide
cugaccauugccucgauuu

SEQ ID NO: 1474549 - RNA, 19 nt, Artificial Sequence
  Description of Artificial Sequence: Synthetic oligonucleotide
auauaacagcaaagguuug

SEQ ID NO: 1474550 - RNA, 19 nt, Artificial Sequence
  Description of Artificial Sequence: Synthetic oligonucleotide
guauguaacuguguaagau

SEQ ID NO: 1474551 - RNA, 19 nt, Artificial Sequence
  Description of Artificial Sequence: Synthetic oligonucleotide
gaagggaaguuuagugcca

SEQ ID NO: 1474552 - RNA, 19 nt, Artificial Sequence
  Description of Artificial Sequence: Synthetic oligonucleotide
agcaaagguuugugggaga

SEQ ID NO: 1474553 - RNA, 19 nt, Artificial Sequence
  Description of Artificial Sequence: Synthetic oligonucleotide
cuggcagaauggacauggg

SEQ ID NO: 1474554 - RNA, 19 nt, Artificial Sequence
  Description of Artificial Sequence: Synthetic oligonucleotide
ucaacaugugucggccugu

SEQ ID NO: 1474555 - RNA, 19 nt, Artificial Sequence
  Description of Artificial Sequence: Synthetic oligonucleotide
ucggccuguugcaaugcaa

SEQ ID NO: 1474556 - RNA, 19 nt, Artificial Sequence
  Description of Artificial Sequence: Synthetic oligonucleotide
uugggcacuucaggaagug

SEQ ID NO: 1474557 - RNA, 19 nt, Artificial Sequence
  Description of Artificial Sequence: Synthetic oligonucleotide
gaaugagcaugcgggcccc

SEQ ID NO: 1474558 - RNA, 19 nt, Artificial Sequence
  Description of Artificial Sequence: Synthetic oligonucleotide
gugucggccuguugcaaug

SEQ ID NO: 1474559 - RNA, 19 nt, Artificial Sequence
  Description of Artificial Sequence: Synthetic oligonucleotide
gucaguucuccauuauaua

SEQ ID NO: 1474560 - RNA, 19 nt, Artificial Sequence
  Description of Artificial Sequence: Synthetic oligonucleotide
caugugucggccuguugca

SEQ ID NO: 1474561 - RNA, 19 nt, Artificial Sequence
  Description of Artificial Sequence: Synthetic oligonucleotide
uuucagcgccauguacaag

SEQ ID NO: 1474562 - RNA, 19 nt, Artificial Sequence
  Description of Artificial Sequence: Synthetic oligonucleotide
acgaugugggacgggaacu

SEQ ID NO: 1474563 - RNA, 19 nt, Artificial Sequence
  Description of Artificial Sequence: Synthetic oligonucleotide
ggacaggaccagaaauugg

SEQ ID NO: 1474564 - RNA, 19 nt, Artificial Sequence
  Description of Artificial Sequence: Synthetic oligonucleotide
guccggagguacugggugc

SEQ ID NO: 1474565 - RNA, 19 nt, Artificial Sequence
  Description of Artificial Sequence: Synthetic oligonucleotide
gguggguagauggaguuga

SEQ ID NO: 1474566 - RNA, 19 nt, Artificial Sequence
  Description of Artificial Sequence: Synthetic oligonucleotide
ugucugcguagauuuccau

SEQ ID NO: 1474567 - RNA, 19 nt, Artificial Sequence
  Description of Artificial Sequence: Synthetic oligonucleotide
guauaaggcgaugcucuga

SEQ ID NO: 1474568 - RNA, 19 nt, Artificial Sequence
  Description of Artificial Sequence: Synthetic oligonucleotide
augugcauuccuguaguuu

SEQ ID NO: 1474569 - RNA, 19 nt, Artificial Sequence
  Description of Artificial Sequence: Synthetic oligonucleotide
caauagggaauguuguuuu

SEQ ID NO: 1474570 - RNA, 19 nt, Artificial Sequence
  Description of Artificial Sequence: Synthetic oligonucleotide
guugauuuucccacucugu

SEQ ID NO: 1474571 - RNA, 19 nt, Artificial Sequence
  Description of Artificial Sequence: Synthetic oligonucleotide
cucggaugugucuggccuc

SEQ ID NO: 1474572 - RNA, 19 nt, Artificial Sequence
  Description of Artificial Sequence: Synthetic oligonucleotide
gaauggacaugggguggug

SEQ ID NO: 1474573 - RNA, 19 nt, Artificial Sequence
  Description of Artificial Sequence: Synthetic oligonucleotide
ugggugcagucugaaauuu

SEQ ID NO: 1474574 - RNA, 19 nt, Artificial Sequence
  Description of Artificial Sequence: Synthetic oligonucleotide
acaagcggaacagguacuu

SEQ ID NO: 1474575 - RNA, 19 nt, Artificial Sequence
  Description of Artificial Sequence: Synthetic oligonucleotide
uucgggccucaucagcaua

SEQ ID NO: 1474576 - RNA, 19 nt, Artificial Sequence
  Description of Artificial Sequence: Synthetic oligonucleotide
auucgggccucaucagcau

SEQ ID NO: 1474577 - RNA, 19 nt, Artificial Sequence
  Description of Artificial Sequence: Synthetic oligonucleotide
augucugcguagauuucca

SEQ ID NO: 1474578 - RNA, 19 nt, Artificial Sequence
  Description of Artificial Sequence: Synthetic oligonucleotide
gggagaugccaucuacuca

SEQ ID NO: 1474579 - RNA, 19 nt, Artificial Sequence
  Description of Artificial Sequence: Synthetic oligonucleotide
gacccauaucauuuagcau

SEQ ID NO: 1474580 - RNA, 19 nt, Artificial Sequence
  Description of Artificial Sequence: Synthetic oligonucleotide
cgaaugagcaugcgggccc

SEQ ID NO: 1474581 - RNA, 19 nt, Artificial Sequence
  Description of Artificial Sequence: Synthetic oligonucleotide
gugggacgggaacuugcug

SEQ ID NO: 1474582 - RNA, 19 nt, Artificial Sequence
  Description of Artificial Sequence: Synthetic oligonucleotide
gcuuuagugcccgugaaua

SEQ ID NO: 1474583 - RNA, 19 nt, Artificial Sequence
  Description of Artificial Sequence: Synthetic oligonucleotide
caagcggaacagguacuug

SEQ ID NO: 1474584 - RNA, 19 nt, Artificial Sequence
  Description of Artificial Sequence: Synthetic oligonucleotide
ccuccugaccauugccucg

SEQ ID NO: 1474585 - RNA, 19 nt, Artificial Sequence
  Description of Artificial Sequence: Synthetic oligonucleotide
ccacagugcgggcacauug

SEQ ID NO: 1474586 - RNA, 19 nt, Artificial Sequence
  Description of Artificial Sequence: Synthetic oligonucleotide
gggacaaaggagcucacau

SEQ ID NO: 1474587 - RNA, 19 nt, Artificial Sequence
  Description of Artificial Sequence: Synthetic oligonucleotide
cuucgaaguauaaggcgau

SEQ ID NO: 1474588 - RNA, 19 nt, Artificial Sequence
  Description of Artificial Sequence: Synthetic oligonucleotide
ggucaguucuccauuauau

SEQ ID NO: 1474589 - RNA, 19 nt, Artificial Sequence
  Description of Artificial Sequence: Synthetic oligonucleotide
gaacgucaugugcauuccu

SEQ ID NO: 1474590 - RNA, 19 nt, Artificial Sequence
  Description of Artificial Sequence: Synthetic oligonucleotide
cccgaaugagcaugcgggc

SEQ ID NO: 1474591 - RNA, 19 nt, Artificial Sequence
  Description of Artificial Sequence: Synthetic oligonucleotide
ugcgggcacauuguccaau

SEQ ID NO: 1474592 - RNA, 19 nt, Artificial Sequence
  Description of Artificial Sequence: Synthetic oligonucleotide
cucgggcaaugaugauggc

SEQ ID NO: 1474593 - RNA, 19 nt, Artificial Sequence
  Description of Artificial Sequence: Synthetic oligonucleotide
gccgggacaaaggagcuca

SEQ ID NO: 1474594 - RNA, 19 nt, Artificial Sequence
  Description of Artificial Sequence: Synthetic oligonucleotide
gucugcguagauuuccauu

SEQ ID NO: 1474595 - RNA, 19 nt, Artificial Sequence
  Description of Artificial Sequence: Synthetic oligonucleotide
cacgaguauguaacugugu

SEQ ID NO: 1474596 - RNA, 19 nt, Artificial Sequence
  Description of Artificial Sequence: Synthetic oligonucleotide
ccgaaugagcaugcgggcc

SEQ ID NO: 1474597 - RNA, 19 nt, Artificial Sequence
  Description of Artificial Sequence: Synthetic oligonucleotide
cauugccucgauuuucuuu

SEQ ID NO: 1474598 - RNA, 19 nt, Artificial Sequence
  Description of Artificial Sequence: Synthetic oligonucleotide
agagaacgucaugugcauu

SEQ ID NO: 1474599 - RNA, 19 nt, Artificial Sequence
  Description of Artificial Sequence: Synthetic oligonucleotide
ccacucuuaacaugaaccu

SEQ ID NO: 1474600 - RNA, 19 nt, Artificial Sequence
  Description of Artificial Sequence: Synthetic oligonucleotide
ccgcuugagcaucaggguc

SEQ ID NO: 1474601 - RNA, 19 nt, Artificial Sequence
  Description of Artificial Sequence: Synthetic oligonucleotide
gcccugugacacucgauca

SEQ ID NO: 1474602 - RNA, 19 nt, Artificial Sequence
  Description of Artificial Sequence: Synthetic oligonucleotide
ggauaggcacgauguggga

SEQ ID NO: 1474603 - RNA, 19 nt, Artificial Sequence
  Description of Artificial Sequence: Synthetic oligonucleotide
ggccacccgaaugagcaug

SEQ ID NO: 1474604 - RNA, 19 nt, Artificial Sequence
  Description of Artificial Sequence: Synthetic oligonucleotide
cacagugcgggcacauugu

SEQ ID NO: 1474605 - RNA, 19 nt, Artificial Sequence
  Description of Artificial Sequence: Synthetic oligonucleotide
cccugugacacucgaucac

SEQ ID NO: 1474606 - RNA, 19 nt, Artificial Sequence
  Description of Artificial Sequence: Synthetic oligonucleotide
gccuccugaccauugccuc

SEQ ID NO: 1474607 - RNA, 19 nt, Artificial Sequence
  Description of Artificial Sequence: Synthetic oligonucleotide
cacauugucuucugagcuu

SEQ ID NO: 1474608 - RNA, 19 nt, Artificial Sequence
  Description of Artificial Sequence: Synthetic oligonucleotide
acacucgaucacaguagau

SEQ ID NO: 1474609 - RNA, 19 nt, Artificial Sequence
  Description of Artificial Sequence: Synthetic oligonucleotide
gcaauagggaauguuguuu

SEQ ID NO: 1474610 - RNA, 19 nt, Artificial Sequence
  Description of Artificial Sequence: Synthetic oligonucleotide
uggccacccgaaugagcau

SEQ ID NO: 1474611 - RNA, 19 nt, Artificial Sequence
  Description of Artificial Sequence: Synthetic oligonucleotide
ggcagacccauaucauuua

SEQ ID NO: 1474612 - RNA, 19 nt, Artificial Sequence
  Description of Artificial Sequence: Synthetic oligonucleotide
ugcgguauucgggccucau

SEQ ID NO: 1474613 - RNA, 19 nt, Artificial Sequence
  Description of Artificial Sequence: Synthetic oligonucleotide
cccaucagguggucuauca

SEQ ID NO: 1474614 - RNA, 19 nt, Artificial Sequence
  Description of Artificial Sequence: Synthetic oligonucleotide
cccuucauauggucuccac

SEQ ID NO: 1474615 - RNA, 19 nt, Artificial Sequence
  Description of Artificial Sequence: Synthetic oligonucleotide
caggugcuuucacuguuua

SEQ ID NO: 1474616 - RNA, 19 nt, Artificial Sequence
  Description of Artificial Sequence: Synthetic oligonucleotide
ggguggguagauggaguug

SEQ ID NO: 1474617 - RNA, 19 nt, Artificial Sequence
  Description of Artificial Sequence: Synthetic oligonucleotide
ggacaaaggagcucacauu

SEQ ID NO: 1474618 - RNA, 19 nt, Artificial Sequence
  Description of Artificial Sequence: Synthetic oligonucleotide
augugucggccuguugcaa

SEQ ID NO: 1474619 - RNA, 19 nt, Artificial Sequence
  Description of Artificial Sequence: Synthetic oligonucleotide
gcgggcacauuguccaauc

SEQ ID NO: 1474620 - RNA, 19 nt, Artificial Sequence
  Description of Artificial Sequence: Synthetic oligonucleotide
gggcacauuguccaaucau

SEQ ID NO: 1474621 - RNA, 19 nt, Artificial Sequence
  Description of Artificial Sequence: Synthetic oligonucleotide
cgaguauguaacuguguaa

SEQ ID NO: 1474622 - RNA, 19 nt, Artificial Sequence
  Description of Artificial Sequence: Synthetic oligonucleotide
gccacccgaaugagcaugc

SEQ ID NO: 1474623 - RNA, 19 nt, Artificial Sequence
  Description of Artificial Sequence: Synthetic oligonucleotide
gccauuucuauugccacau

SEQ ID NO: 1474624 - RNA, 19 nt, Artificial Sequence
  Description of Artificial Sequence: Synthetic oligonucleotide
gcguagauuuccauuuugu

SEQ ID NO: 1474625 - RNA, 19 nt, Artificial Sequence
  Description of Artificial Sequence: Synthetic oligonucleotide
aggcacgaugugggacggg

SEQ ID NO: 1474626 - RNA, 19 nt, Artificial Sequence
  Description of Artificial Sequence: Synthetic oligonucleotide
caguugacuagaguuuaau

SEQ ID NO: 1474627 - RNA, 19 nt, Artificial Sequence
  Description of Artificial Sequence: Synthetic oligonucleotide
ccgugaauacuggccacac

SEQ ID NO: 1474628 - RNA, 19 nt, Artificial Sequence
  Description of Artificial Sequence: Synthetic oligonucleotide
uugcgguauucgggccuca

SEQ ID NO: 1474629 - RNA, 19 nt, Artificial Sequence
  Description of Artificial Sequence: Synthetic oligonucleotide
gauggcguccgggcggccu

SEQ ID NO: 1474630 - RNA, 19 nt, Artificial Sequence
  Description of Artificial Sequence: Synthetic oligonucleotide
cuguccggagguacugggu

SEQ ID NO: 1474631 - RNA, 19 nt, Artificial Sequence
  Description of Artificial Sequence: Synthetic oligonucleotide
cgaaguauaaggcgaugcu

SEQ ID NO: 1474632 - RNA, 19 nt, Artificial Sequence
  Description of Artificial Sequence: Synthetic oligonucleotide
caugugcauuccuguaguu

SEQ ID NO: 1474633 - RNA, 19 nt, Artificial Sequence
  Description of Artificial Sequence: Synthetic oligonucleotide
ggacgggaacuugcugaug

SEQ ID NO: 1474634 - RNA, 19 nt, Artificial Sequence
  Description of Artificial Sequence: Synthetic oligonucleotide
gcaaagcugaaagcagagu

SEQ ID NO: 1474635 - RNA, 19 nt, Artificial Sequence
  Description of Artificial Sequence: Synthetic oligonucleotide
caugaaccuucacgaguau

SEQ ID NO: 1474636 - RNA, 19 nt, Artificial Sequence
  Description of Artificial Sequence: Synthetic oligonucleotide
cagccgggacaaaggagcu

SEQ ID NO: 1474637 - RNA, 19 nt, Artificial Sequence
  Description of Artificial Sequence: Synthetic oligonucleotide
gggacgggaacuugcugau

SEQ ID NO: 1474638 - RNA, 19 nt, Artificial Sequence
  Description of Artificial Sequence: Synthetic oligonucleotide
ggcgaugcucugauagucu

SEQ ID NO: 1474639 - RNA, 19 nt, Artificial Sequence
  Description of Artificial Sequence: Synthetic oligonucleotide
ccuucacgaguauguaacu

SEQ ID NO: 1474640 - RNA, 19 nt, Artificial Sequence
  Description of Artificial Sequence: Synthetic oligonucleotide
gugcgggcacauuguccaa

SEQ ID NO: 1474641 - RNA, 19 nt, Artificial Sequence
  Description of Artificial Sequence: Synthetic oligonucleotide
cugcguagauuuccauuuu

SEQ ID NO: 1474642 - RNA, 19 nt, Artificial Sequence
  Description of Artificial Sequence: Synthetic oligonucleotide
ccaucuacucaggagcacu

SEQ ID NO: 1474643 - RNA, 19 nt, Artificial Sequence
  Description of Artificial Sequence: Synthetic oligonucleotide
caugggguggugaccucuu

SEQ ID NO: 1474644 - RNA, 19 nt, Artificial Sequence
  Description of Artificial Sequence: Synthetic oligonucleotide
ccgggcggccucacgguac

SEQ ID NO: 1474645 - RNA, 19 nt, Artificial Sequence
  Description of Artificial Sequence: Synthetic oligonucleotide
gcgaugcucugauagucuu

SEQ ID NO: 1474646 - RNA, 19 nt, Artificial Sequence
  Description of Artificial Sequence: Synthetic oligonucleotide
cgccauguacaagcggaac

SEQ ID NO: 1474647 - RNA, 19 nt, Artificial Sequence
  Description of Artificial Sequence: Synthetic oligonucleotide
guccgggcggccucacggu

SEQ ID NO: 1474648 - RNA, 19 nt, Artificial Sequence
  Description of Artificial Sequence: Synthetic oligonucleotide
cccgugaauacuggccaca

SEQ ID NO: 1474649 - RNA, 19 nt, Artificial Sequence
  Description of Artificial Sequence: Synthetic oligonucleotide
ccgggacaaaggagcucac

SEQ ID NO: 1474650 - RNA, 19 nt, Artificial Sequence
  Description of Artificial Sequence: Synthetic oligonucleotide
gcugcucacuguuccguuu

SEQ ID NO: 1474651 - RNA, 19 nt, Artificial Sequence
  Description of Artificial Sequence: Synthetic oligonucleotide
gcguccgggcggccucacg

SEQ ID NO: 1474652 - RNA, 19 nt, Artificial Sequence
  Description of Artificial Sequence: Synthetic oligonucleotide
gcgccauguacaagcggaa

SEQ ID NO: 1474653 - RNA, 19 nt, Artificial Sequence
  Description of Artificial Sequence: Synthetic oligonucleotide
gcaaugcaauagggaaugu

SEQ ID NO: 1474654 - RNA, 19 nt, Artificial Sequence
  Description of Artificial Sequence: Synthetic oligonucleotide
gcacuucaggaagugcuuu

SEQ ID NO: 1474655 - RNA, 19 nt, Artificial Sequence
  Description of Artificial Sequence: Synthetic oligonucleotide
caacaugugucggccuguu

SEQ ID NO: 1474656 - RNA, 19 nt, Artificial Sequence
  Description of Artificial Sequence: Synthetic oligonucleotide
ccggagguacugggugcag

SEQ ID NO: 1474657 - RNA, 19 nt, Artificial Sequence
  Description of Artificial Sequence: Synthetic oligonucleotide
ggcggccucacgguacugu

SEQ ID NO: 1474658 - RNA, 19 nt, Artificial Sequence
  Description of Artificial Sequence: Synthetic oligonucleotide
gguggucuaucagcugauu

SEQ ID NO: 1474659 - RNA, 19 nt, Artificial Sequence
  Description of Artificial Sequence: Synthetic oligonucleotide
gggcggccucacgguacug

SEQ ID NO: 1474660 - RNA, 19 nt, Artificial Sequence
  Description of Artificial Sequence: Synthetic oligonucleotide
ccauuucuauugccacauu

SEQ ID NO: 1474661 - RNA, 19 nt, Artificial Sequence
  Description of Artificial Sequence: Synthetic oligonucleotide
ccauugccucgauuuucuu

SEQ ID NO: 1474662 - RNA, 19 nt, Artificial Sequence
  Description of Artificial Sequence: Synthetic oligonucleotide
ggcguccgggcggccucac

SEQ ID NO: 1474663 - RNA, 19 nt, Artificial Sequence
  Description of Artificial Sequence: Synthetic oligonucleotide
ccguuucuguccggaggua

SEQ ID NO: 1474664 - RNA, 19 nt, Artificial Sequence
  Description of Artificial Sequence: Synthetic oligonucleotide
aauauaaccaauuucuuag

SEQ ID NO: 1474665 - RNA, 19 nt, Artificial Sequence
  Description of Artificial Sequence: Synthetic oligonucleotide
auauugauuacucugaugg

SEQ ID NO: 1474666 - RNA, 19 nt, Artificial Sequence
  Description of Artificial Sequence: Synthetic oligonucleotide
uuaaguaugagaaauagcu

SEQ ID NO: 1474667 - RNA, 19 nt, Artificial Sequence
  Description of Artificial Sequence: Synthetic oligonucleotide
ucucaugcaauacauaggg

SEQ ID NO: 1474668 - RNA, 19 nt, Artificial Sequence
  Description of Artificial Sequence: Synthetic oligonucleotide
uaauguucaagucaacagg

SEQ ID NO: 1474669 - RNA, 19 nt, Artificial Sequence
  Description of Artificial Sequence: Synthetic oligonucleotide
aacauuaugucuuuuauua

SEQ ID NO: 1474670 - RNA, 19 nt, Artificial Sequence
  Description of Artificial Sequence: Synthetic oligonucleotide
caaaacauagaucaugccg

SEQ ID NO: 1474671 - RNA, 19 nt, Artificial Sequence
  Description of Artificial Sequence: Synthetic oligonucleotide
ugaucuuuaaacaacgcac

SEQ ID NO: 1474672 - RNA, 19 nt, Artificial Sequence
  Description of Artificial Sequence: Synthetic oligonucleotide
auuauaauggguuaaguau

SEQ ID NO: 1474673 - RNA, 19 nt, Artificial Sequence
  Description of Artificial Sequence: Synthetic oligonucleotide
aauuucuuaguaaauaaug

SEQ ID NO: 1474674 - RNA, 19 nt, Artificial Sequence
  Description of Artificial Sequence: Synthetic oligonucleotide
uuauaauggguuaaguaug

SEQ ID NO: 1474675 - RNA, 19 nt, Artificial Sequence
  Description of Artificial Sequence: Synthetic oligonucleotide
agggaauucccucucaugc

SEQ ID NO: 1474676 - RNA, 19 nt, Artificial Sequence
  Description of Artificial Sequence: Synthetic oligonucleotide
gaucaugccguauagguag

SEQ ID NO: 1474677 - RNA, 19 nt, Artificial Sequence
  Description of Artificial Sequence: Synthetic oligonucleotide
ugucuuuuauuauaauggg

SEQ ID NO: 1474678 - RNA, 19 nt, Artificial Sequence
  Description of Artificial Sequence: Synthetic oligonucleotide
aguucaaccugucaacacc

SEQ ID NO: 1474679 - RNA, 19 nt, Artificial Sequence
  Description of Artificial Sequence: Synthetic oligonucleotide
uaaacaacgcacuggaaag

SEQ ID NO: 1474680 - RNA, 19 nt, Artificial Sequence
  Description of Artificial Sequence: Synthetic oligonucleotide
ugaauuaggacaguaagca

SEQ ID NO: 1474681 - RNA, 19 nt, Artificial Sequence
  Description of Artificial Sequence: Synthetic oligonucleotide
uguaaaaugacaacauuau

SEQ ID NO: 1474682 - RNA, 19 nt, Artificial Sequence
  Description of Artificial Sequence: Synthetic oligonucleotide
uauacguaauuccauuuag

SEQ ID NO: 1474683 - RNA, 19 nt, Artificial Sequence
  Description of Artificial Sequence: Synthetic oligonucleotide
cuuguaaucagucuucagc

SEQ ID NO: 1474684 - RNA, 19 nt, Artificial Sequence
  Description of Artificial Sequence: Synthetic oligonucleotide
uacucuuggaaacaggacc

SEQ ID NO: 1474685 - RNA, 19 nt, Artificial Sequence
  Description of Artificial Sequence: Synthetic oligonucleotide
uacguaauuccauuuagag

SEQ ID NO: 1474686 - RNA, 19 nt, Artificial Sequence
  Description of Artificial Sequence: Synthetic oligonucleotide
uugugaucuuuaaacaacg

SEQ ID NO: 1474687 - RNA, 19 nt, Artificial Sequence
  Description of Artificial Sequence: Synthetic oligonucleotide
ucagcuacagugauaagug

SEQ ID NO: 1474688 - RNA, 19 nt, Artificial Sequence
  Description of Artificial Sequence: Synthetic oligonucleotide
uaagagugcaaguucaacc

SEQ ID NO: 1474689 - RNA, 19 nt, Artificial Sequence
  Description of Artificial Sequence: Synthetic oligonucleotide
aaaacauagaucaugccgu

SEQ ID NO: 1474690 - RNA, 19 nt, Artificial Sequence
  Description of Artificial Sequence: Synthetic oligonucleotide
uacucugauggaaaggagg

SEQ ID NO: 1474691 - RNA, 19 nt, Artificial Sequence
  Description of Artificial Sequence: Synthetic oligonucleotide
aauggguuaaguaugagaa

SEQ ID NO: 1474692 - RNA, 19 nt, Artificial Sequence
  Description of Artificial Sequence: Synthetic oligonucleotide
cugacaguaggcuagaaug

SEQ ID NO: 1474693 - RNA, 19 nt, Artificial Sequence
  Description of Artificial Sequence: Synthetic oligonucleotide
aauacauagggauaauguu

SEQ ID NO: 1474694 - RNA, 19 nt, Artificial Sequence
  Description of Artificial Sequence: Synthetic oligonucleotide
uuuauuauaauggguuaag

SEQ ID NO: 1474695 - RNA, 19 nt, Artificial Sequence
  Description of Artificial Sequence: Synthetic oligonucleotide
aaagcuaguuugcaccauc

SEQ ID NO: 1474696 - RNA, 19 nt, Artificial Sequence
  Description of Artificial Sequence: Synthetic oligonucleotide
uauaccuccaaauaugaua

SEQ ID NO: 1474697 - RNA, 19 nt, Artificial Sequence
  Description of Artificial Sequence: Synthetic oligonucleotide
ugagcucaccaaaacauag

SEQ ID NO: 1474698 - RNA, 19 nt, Artificial Sequence
  Description of Artificial Sequence: Synthetic oligonucleotide
auaggcuacucuuggaaac

SEQ ID NO: 1474699 - RNA, 19 nt, Artificial Sequence
  Description of Artificial Sequence: Synthetic oligonucleotide
aaggccgcgaaagugaacg

SEQ ID NO: 1474700 - RNA, 19 nt, Artificial Sequence
  Description of Artificial Sequence: Synthetic oligonucleotide
aaguucaaccugucaacac

SEQ ID NO: 1474701 - RNA, 19 nt, Artificial Sequence
  Description of Artificial Sequence: Synthetic oligonucleotide
uaaguaugagaaauagcug

SEQ ID NO: 1474702 - RNA, 19 nt, Artificial Sequence
  Description of Artificial Sequence: Synthetic oligonucleotide
ucaugcaauacauagggau

SEQ ID NO: 1474703 - RNA, 19 nt, Artificial Sequence
  Description of Artificial Sequence: Synthetic oligonucleotide
uuaguggcgauuugcaugc

SEQ ID NO: 1474704 - RNA, 19 nt, Artificial Sequence
  Description of Artificial Sequence: Synthetic oligonucleotide
ugauaugccaaaaggggca

SEQ ID NO: 1474705 - RNA, 19 nt, Artificial Sequence
  Description of Artificial Sequence: Synthetic oligonucleotide
uauaauggguuaaguauga

SEQ ID NO: 1474706 - RNA, 19 nt, Artificial Sequence
  Description of Artificial Sequence: Synthetic oligonucleotide
uguuugugaucuuuaaaca

SEQ ID NO: 1474707 - RNA, 19 nt, Artificial Sequence
  Description of Artificial Sequence: Synthetic oligonucleotide
uacucuggaaguacaagag

SEQ ID NO: 1474708 - RNA, 19 nt, Artificial Sequence
  Description of Artificial Sequence: Synthetic oligonucleotide
ugaccacugaauuaggaca

SEQ ID NO: 1474709 - RNA, 19 nt, Artificial Sequence
  Description of Artificial Sequence: Synthetic oligonucleotide
agaaaggcggcgcacggcc

SEQ ID NO: 1474710 - RNA, 19 nt, Artificial Sequence
  Description of Artificial Sequence: Synthetic oligonucleotide
aguacuugcaaauucuuaa

SEQ ID NO: 1474711 - RNA, 19 nt, Artificial Sequence
  Description of Artificial Sequence: Synthetic oligonucleotide
aagaauuaaagcaaguaua

SEQ ID NO: 1474712 - RNA, 19 nt, Artificial Sequence
  Description of Artificial Sequence: Synthetic oligonucleotide
caugcacuuaacuggaccg

SEQ ID NO: 1474713 - RNA, 19 nt, Artificial Sequence
  Description of Artificial Sequence: Synthetic oligonucleotide
auacauagggauaauguuc

SEQ ID NO: 1474714 - RNA, 19 nt, Artificial Sequence
  Description of Artificial Sequence: Synthetic oligonucleotide
cugaauuaggacaguaagc

SEQ ID NO: 1474715 - RNA, 19 nt, Artificial Sequence
  Description of Artificial Sequence: Synthetic oligonucleotide
uaauauaaccaauuucuua

SEQ ID NO: 1474716 - RNA, 19 nt, Artificial Sequence
  Description of Artificial Sequence: Synthetic oligonucleotide
acagcuaaccucuaaacaa

SEQ ID NO: 1474717 - RNA, 19 nt, Artificial Sequence
  Description of Artificial Sequence: Synthetic oligonucleotide
uguuccuuaagagugcaag

SEQ ID NO: 1474718 - RNA, 19 nt, Artificial Sequence
  Description of Artificial Sequence: Synthetic oligonucleotide
aaucccuucauuaguggcg

SEQ ID NO: 1474719 - RNA, 19 nt, Artificial Sequence
  Description of Artificial Sequence: Synthetic oligonucleotide
augauaugccaaaaggggc

SEQ ID NO: 1474720 - RNA, 19 nt, Artificial Sequence
  Description of Artificial Sequence: Synthetic oligonucleotide
ucccaauggacucagggca

SEQ ID NO: 1474721 - RNA, 19 nt, Artificial Sequence
  Description of Artificial Sequence: Synthetic oligonucleotide
uacagcuaaccucuaaaca

SEQ ID NO: 1474722 - RNA, 19 nt, Artificial Sequence
  Description of Artificial Sequence: Synthetic oligonucleotide
agggauaauguucaaguca

SEQ ID NO: 1474723 - RNA, 19 nt, Artificial Sequence
  Description of Artificial Sequence: Synthetic oligonucleotide
aaauagcuguuugugaucu

SEQ ID NO: 1474724 - RNA, 19 nt, Artificial Sequence
  Description of Artificial Sequence: Synthetic oligonucleotide
guaagcauaauauaaccaa

SEQ ID NO: 1474725 - RNA, 19 nt, Artificial Sequence
  Description of Artificial Sequence: Synthetic oligonucleotide
uaauggguuaaguaugaga

SEQ ID NO: 1474726 - RNA, 19 nt, Artificial Sequence
  Description of Artificial Sequence: Synthetic oligonucleotide
auggaaaggagggaauucc

SEQ ID NO: 1474727 - RNA, 19 nt, Artificial Sequence
  Description of Artificial Sequence: Synthetic oligonucleotide
uggucgucgggucauagag

SEQ ID NO: 1474728 - RNA, 19 nt, Artificial Sequence
  Description of Artificial Sequence: Synthetic oligonucleotide
uguucuaugagcucaccaa

SEQ ID NO: 1474729 - RNA, 19 nt, Artificial Sequence
  Description of Artificial Sequence: Synthetic oligonucleotide
ccauuuagagucuuuaucc

SEQ ID NO: 1474730 - RNA, 19 nt, Artificial Sequence
  Description of Artificial Sequence: Synthetic oligonucleotide
uauauugauuacucugaug

SEQ ID NO: 1474731 - RNA, 19 nt, Artificial Sequence
  Description of Artificial Sequence: Synthetic oligonucleotide
aaccugucaacaccagagg

SEQ ID NO: 1474732 - RNA, 19 nt, Artificial Sequence
  Description of Artificial Sequence: Synthetic oligonucleotide
aaaccuacgcuguauccca

SEQ ID NO: 1474733 - RNA, 19 nt, Artificial Sequence
  Description of Artificial Sequence: Synthetic oligonucleotide
uuaaugcaaucacuuggag

SEQ ID NO: 1474734 - RNA, 19 nt, Artificial Sequence
  Description of Artificial Sequence: Synthetic oligonucleotide
guguaagccacucugcugc

SEQ ID NO: 1474735 - RNA, 19 nt, Artificial Sequence
  Description of Artificial Sequence: Synthetic oligonucleotide
aguggggaaaccuacgcug

SEQ ID NO: 1474736 - RNA, 19 nt, Artificial Sequence
  Description of Artificial Sequence: Synthetic oligonucleotide
uguaucccacacaagucag

SEQ ID NO: 1474737 - RNA, 19 nt, Artificial Sequence
  Description of Artificial Sequence: Synthetic oligonucleotide
aagugaacgccauggccgg

SEQ ID NO: 1474738 - RNA, 19 nt, Artificial Sequence
  Description of Artificial Sequence: Synthetic oligonucleotide
uaaguggggaaaccuacgc

SEQ ID NO: 1474739 - RNA, 19 nt, Artificial Sequence
  Description of Artificial Sequence: Synthetic oligonucleotide
ugauuacucugauggaaag

SEQ ID NO: 1474740 - RNA, 19 nt, Artificial Sequence
  Description of Artificial Sequence: Synthetic oligonucleotide
gacaguaagcauaauauaa

SEQ ID NO: 1474741 - RNA, 19 nt, Artificial Sequence
  Description of Artificial Sequence: Synthetic oligonucleotide
uuauacguaauuccauuua

SEQ ID NO: 1474742 - RNA, 19 nt, Artificial Sequence
  Description of Artificial Sequence: Synthetic oligonucleotide
ugugaucuuuaaacaacgc

SEQ ID NO: 1474743 - RNA, 19 nt, Artificial Sequence
  Description of Artificial Sequence: Synthetic oligonucleotide
auaucacuuaugcuuaaga

SEQ ID NO: 1474744 - RNA, 19 nt, Artificial Sequence
  Description of Artificial Sequence: Synthetic oligonucleotide
uauaggguucuuguaauca

SEQ ID NO: 1474745 - RNA, 19 nt, Artificial Sequence
  Description of Artificial Sequence: Synthetic oligonucleotide
cuuggaaacaggaccuugc

SEQ ID NO: 1474746 - RNA, 19 nt, Artificial Sequence
  Description of Artificial Sequence: Synthetic oligonucleotide
uuucagcucaccagaagca

SEQ ID NO: 1474747 - RNA, 19 nt, Artificial Sequence
  Description of Artificial Sequence: Synthetic oligonucleotide
aaucccacucuucuuauua

SEQ ID NO: 1474748 - RNA, 19 nt, Artificial Sequence
  Description of Artificial Sequence: Synthetic oligonucleotide
agguaaucauuuuauauua

SEQ ID NO: 1474749 - RNA, 19 nt, Artificial Sequence
  Description of Artificial Sequence: Synthetic oligonucleotide
agugauaaguggggaaacc

SEQ ID NO: 1474750 - RNA, 19 nt, Artificial Sequence
  Description of Artificial Sequence: Synthetic oligonucleotide
aagcuaguuugcaccaucc

SEQ ID NO: 1474751 - RNA, 19 nt, Artificial Sequence
  Description of Artificial Sequence: Synthetic oligonucleotide
aguaggcuagaaugucugc

SEQ ID NO: 1474752 - RNA, 19 nt, Artificial Sequence
  Description of Artificial Sequence: Synthetic oligonucleotide
auaggguucuuguaaucag

SEQ ID NO: 1474753 - RNA, 19 nt, Artificial Sequence
  Description of Artificial Sequence: Synthetic oligonucleotide
uugaccacugaauuaggac

SEQ ID NO: 1474754 - RNA, 19 nt, Artificial Sequence
  Description of Artificial Sequence: Synthetic oligonucleotide
aaacaacgcacuggaaagg

SEQ ID NO: 1474755 - RNA, 19 nt, Artificial Sequence
  Description of Artificial Sequence: Synthetic oligonucleotide
auuuauacguaauuccauu

SEQ ID NO: 1474756 - RNA, 19 nt, Artificial Sequence
  Description of Artificial Sequence: Synthetic oligonucleotide
uuuauacguaauuccauuu

SEQ ID NO: 1474757 - RNA, 19 nt, Artificial Sequence
  Description of Artificial Sequence: Synthetic oligonucleotide
uggguuaaguaugagaaau

SEQ ID NO: 1474758 - RNA, 19 nt, Artificial Sequence
  Description of Artificial Sequence: Synthetic oligonucleotide
gaaaccuacgcuguauccc

SEQ ID NO: 1474759 - RNA, 19 nt, Artificial Sequence
  Description of Artificial Sequence: Synthetic oligonucleotide
uggucuauaggguucuugu

SEQ ID NO: 1474760 - RNA, 19 nt, Artificial Sequence
  Description of Artificial Sequence: Synthetic oligonucleotide
gaccuugcuggauagaauc

SEQ ID NO: 1474761 - RNA, 19 nt, Artificial Sequence
  Description of Artificial Sequence: Synthetic oligonucleotide
agaauuaaagcaaguauau

SEQ ID NO: 1474762 - RNA, 19 nt, Artificial Sequence
  Description of Artificial Sequence: Synthetic oligonucleotide
ugacaguaggcuagaaugu

SEQ ID NO: 1474763 - RNA, 19 nt, Artificial Sequence
  Description of Artificial Sequence: Synthetic oligonucleotide
ugaucagauuccauaggcu

SEQ ID NO: 1474764 - RNA, 19 nt, Artificial Sequence
  Description of Artificial Sequence: Synthetic oligonucleotide
ucgaucuacagcuaaccuc

SEQ ID NO: 1474765 - RNA, 19 nt, Artificial Sequence
  Description of Artificial Sequence: Synthetic oligonucleotide
uuguucuaugagcucacca

SEQ ID NO: 1474766 - RNA, 19 nt, Artificial Sequence
  Description of Artificial Sequence: Synthetic oligonucleotide
accuugaccacugaauuag

SEQ ID NO: 1474767 - RNA, 19 nt, Artificial Sequence
  Description of Artificial Sequence: Synthetic oligonucleotide
ucagaguuuuauuguguug

SEQ ID NO: 1474768 - RNA, 19 nt, Artificial Sequence
  Description of Artificial Sequence: Synthetic oligonucleotide
guaaucagucuucagcuca

SEQ ID NO: 1474769 - RNA, 19 nt, Artificial Sequence
  Description of Artificial Sequence: Synthetic oligonucleotide
uccuuaagagugcaaguuc

SEQ ID NO: 1474770 - RNA, 19 nt, Artificial Sequence
  Description of Artificial Sequence: Synthetic oligonucleotide
uucagcauaugcuuauauc

SEQ ID NO: 1474771 - RNA, 19 nt, Artificial Sequence
  Description of Artificial Sequence: Synthetic oligonucleotide
uugagacccaguguaagcc

SEQ ID NO: 1474772 - RNA, 19 nt, Artificial Sequence
  Description of Artificial Sequence: Synthetic oligonucleotide
aguaagcauaauauaacca

SEQ ID NO: 1474773 - RNA, 19 nt, Artificial Sequence
  Description of Artificial Sequence: Synthetic oligonucleotide
uuaacuggaccgauucuuc

SEQ ID NO: 1474774 - RNA, 19 nt, Artificial Sequence
  Description of Artificial Sequence: Synthetic oligonucleotide
gagaaauagcuguuuguga

SEQ ID NO: 1474775 - RNA, 19 nt, Artificial Sequence
  Description of Artificial Sequence: Synthetic oligonucleotide
gugaucuuuaaacaacgca

SEQ ID NO: 1474776 - RNA, 19 nt, Artificial Sequence
  Description of Artificial Sequence: Synthetic oligonucleotide
gaucagauuccauaggcua

SEQ ID NO: 1474777 - RNA, 19 nt, Artificial Sequence
  Description of Artificial Sequence: Synthetic oligonucleotide
auuaaugcaaucacuugga

SEQ ID NO: 1474778 - RNA, 19 nt, Artificial Sequence
  Description of Artificial Sequence: Synthetic oligonucleotide
uauagcagaaggccgcgaa

SEQ ID NO: 1474779 - RNA, 19 nt, Artificial Sequence
  Description of Artificial Sequence: Synthetic oligonucleotide
uggguaaaaccauucacuu

SEQ ID NO: 1474780 - RNA, 19 nt, Artificial Sequence
  Description of Artificial Sequence: Synthetic oligonucleotide
auugauuacucugauggaa

SEQ ID NO: 1474781 - RNA, 19 nt, Artificial Sequence
  Description of Artificial Sequence: Synthetic oligonucleotide
ugauaaguggggaaaccua

SEQ ID NO: 1474782 - RNA, 19 nt, Artificial Sequence
  Description of Artificial Sequence: Synthetic oligonucleotide
aaguggggaaaccuacgcu

SEQ ID NO: 1474783 - RNA, 19 nt, Artificial Sequence
  Description of Artificial Sequence: Synthetic oligonucleotide
cuuauaucacuuaugcuua

SEQ ID NO: 1474784 - RNA, 19 nt, Artificial Sequence
  Description of Artificial Sequence: Synthetic oligonucleotide
auuaugucuuuuauuauaa

SEQ ID NO: 1474785 - RNA, 19 nt, Artificial Sequence
  Description of Artificial Sequence: Synthetic oligonucleotide
uccagggccgcucaucacc

SEQ ID NO: 1474786 - RNA, 19 nt, Artificial Sequence
  Description of Artificial Sequence: Synthetic oligonucleotide
gaccacugaauuaggacag

SEQ ID NO: 1474787 - RNA, 19 nt, Artificial Sequence
  Description of Artificial Sequence: Synthetic oligonucleotide
uauaucacuuaugcuuaag

SEQ ID NO: 1474788 - RNA, 19 nt, Artificial Sequence
  Description of Artificial Sequence: Synthetic oligonucleotide
caccggucuacucauauac

SEQ ID NO: 1474789 - RNA, 19 nt, Artificial Sequence
  Description of Artificial Sequence: Synthetic oligonucleotide
ugccguauagguaguaaaa

SEQ ID NO: 1474790 - RNA, 19 nt, Artificial Sequence
  Description of Artificial Sequence: Synthetic oligonucleotide
uaagccacucugcugcaca

SEQ ID NO: 1474791 - RNA, 19 nt, Artificial Sequence
  Description of Artificial Sequence: Synthetic oligonucleotide
cagcauaugcuuauaucac

SEQ ID NO: 1474792 - RNA, 19 nt, Artificial Sequence
  Description of Artificial Sequence: Synthetic oligonucleotide
auucaugauggucgucggg

SEQ ID NO: 1474793 - RNA, 19 nt, Artificial Sequence
  Description of Artificial Sequence: Synthetic oligonucleotide
uacaaucagcuacagugau

SEQ ID NO: 1474794 - RNA, 19 nt, Artificial Sequence
  Description of Artificial Sequence: Synthetic oligonucleotide
ggucuacucauauaccucc

SEQ ID NO: 1474795 - RNA, 19 nt, Artificial Sequence
  Description of Artificial Sequence: Synthetic oligonucleotide
cagaguauuacacuggucu

SEQ ID NO: 1474796 - RNA, 19 nt, Artificial Sequence
  Description of Artificial Sequence: Synthetic oligonucleotide
aguguaagccacucugcug

SEQ ID NO: 1474797 - RNA, 19 nt, Artificial Sequence
  Description of Artificial Sequence: Synthetic oligonucleotide
ggcauauugagacccagug

SEQ ID NO: 1474798 - RNA, 19 nt, Artificial Sequence
  Description of Artificial Sequence: Synthetic oligonucleotide
aagcauaauauaaccaauu

SEQ ID NO: 1474799 - RNA, 19 nt, Artificial Sequence
  Description of Artificial Sequence: Synthetic oligonucleotide
cacuuaacuggaccgauuc

SEQ ID NO: 1474800 - RNA, 19 nt, Artificial Sequence
  Description of Artificial Sequence: Synthetic oligonucleotide
acauagaucaugccguaua

SEQ ID NO: 1474801 - RNA, 19 nt, Artificial Sequence
  Description of Artificial Sequence: Synthetic oligonucleotide
aaagcauggaugagguacu

SEQ ID NO: 1474802 - RNA, 19 nt, Artificial Sequence
  Description of Artificial Sequence: Synthetic oligonucleotide
cauucaugauggucgucgg

SEQ ID NO: 1474803 - RNA, 19 nt, Artificial Sequence
  Description of Artificial Sequence: Synthetic oligonucleotide
aaacauagaucaugccgua

SEQ ID NO: 1474804 - RNA, 19 nt, Artificial Sequence
  Description of Artificial Sequence: Synthetic oligonucleotide
auauacaaucagcuacagu

SEQ ID NO: 1474805 - RNA, 19 nt, Artificial Sequence
  Description of Artificial Sequence: Synthetic oligonucleotide
gucuauaggguucuuguaa

SEQ ID NO: 1474806 - RNA, 19 nt, Artificial Sequence
  Description of Artificial Sequence: Synthetic oligonucleotide
uacacuggucuauaggguu

SEQ ID NO: 1474807 - RNA, 19 nt, Artificial Sequence
  Description of Artificial Sequence: Synthetic oligonucleotide
auaaguggggaaaccuacg

SEQ ID NO: 1474808 - RNA, 19 nt, Artificial Sequence
  Description of Artificial Sequence: Synthetic oligonucleotide
gcuuauaucacuuaugcuu

SEQ ID NO: 1474809 - RNA, 19 nt, Artificial Sequence
  Description of Artificial Sequence: Synthetic oligonucleotide
caacgcacuggaaaggauc

SEQ ID NO: 1474810 - RNA, 19 nt, Artificial Sequence
  Description of Artificial Sequence: Synthetic oligonucleotide
acuggaccgauucuucugu

SEQ ID NO: 1474811 - RNA, 19 nt, Artificial Sequence
  Description of Artificial Sequence: Synthetic oligonucleotide
ucuacucauauaccuccaa

SEQ ID NO: 1474812 - RNA, 19 nt, Artificial Sequence
  Description of Artificial Sequence: Synthetic oligonucleotide
cuacucuuggaaacaggac

SEQ ID NO: 1474813 - RNA, 19 nt, Artificial Sequence
  Description of Artificial Sequence: Synthetic oligonucleotide
aaauaaugucuuacaaaua

SEQ ID NO: 1474814 - RNA, 19 nt, Artificial Sequence
  Description of Artificial Sequence: Synthetic oligonucleotide
gaugagguacucuggaagu

SEQ ID NO: 1474815 - RNA, 19 nt, Artificial Sequence
  Description of Artificial Sequence: Synthetic oligonucleotide
auuaggacaguaagcauaa

SEQ ID NO: 1474816 - RNA, 19 nt, Artificial Sequence
  Description of Artificial Sequence: Synthetic oligonucleotide
uuaugucuuuuauuauaau

SEQ ID NO: 1474817 - RNA, 19 nt, Artificial Sequence
  Description of Artificial Sequence: Synthetic oligonucleotide
gauuccauaggcuacucuu

SEQ ID NO: 1474818 - RNA, 19 nt, Artificial Sequence
  Description of Artificial Sequence: Synthetic oligonucleotide
cuguaucccacacaaguca

SEQ ID NO: 1474819 - RNA, 19 nt, Artificial Sequence
  Description of Artificial Sequence: Synthetic oligonucleotide
gcuacagugauaagugggg

SEQ ID NO: 1474820 - RNA, 19 nt, Artificial Sequence
  Description of Artificial Sequence: Synthetic oligonucleotide
gucgucgggucauagaguc

SEQ ID NO: 1474821 - RNA, 19 nt, Artificial Sequence
  Description of Artificial Sequence: Synthetic oligonucleotide
ugagguacucuggaaguac

SEQ ID NO: 1474822 - RNA, 19 nt, Artificial Sequence
  Description of Artificial Sequence: Synthetic oligonucleotide
ucccucucaugcaauacau

SEQ ID NO: 1474823 - RNA, 19 nt, Artificial Sequence
  Description of Artificial Sequence: Synthetic oligonucleotide
gaccgauucuucuguguug

SEQ ID NO: 1474824 - RNA, 19 nt, Artificial Sequence
  Description of Artificial Sequence: Synthetic oligonucleotide
ucuuauuaugguguccaua

SEQ ID NO: 1474825 - RNA, 19 nt, Artificial Sequence
  Description of Artificial Sequence: Synthetic oligonucleotide
uuccuuaagagugcaaguu

SEQ ID NO: 1474826 - RNA, 19 nt, Artificial Sequence
  Description of Artificial Sequence: Synthetic oligonucleotide
ucagaguauuacacugguc

SEQ ID NO: 1474827 - RNA, 19 nt, Artificial Sequence
  Description of Artificial Sequence: Synthetic oligonucleotide
cauauagcagaaggccgcg

SEQ ID NO: 1474828 - RNA, 19 nt, Artificial Sequence
  Description of Artificial Sequence: Synthetic oligonucleotide
uuauaucacuuaugcuuaa

SEQ ID NO: 1474829 - RNA, 19 nt, Artificial Sequence
  Description of Artificial Sequence: Synthetic oligonucleotide
uguguuguucuaugagcuc

SEQ ID NO: 1474830 - RNA, 19 nt, Artificial Sequence
  Description of Artificial Sequence: Synthetic oligonucleotide
ggcgaagaagaugagcgcg

SEQ ID NO: 1474831 - RNA, 19 nt, Artificial Sequence
  Description of Artificial Sequence: Synthetic oligonucleotide
cagcuacagugauaagugg

SEQ ID NO: 1474832 - RNA, 19 nt, Artificial Sequence
  Description of Artificial Sequence: Synthetic oligonucleotide
augcaauacauagggauaa

SEQ ID NO: 1474833 - RNA, 19 nt, Artificial Sequence
  Description of Artificial Sequence: Synthetic oligonucleotide
uggaaaggaucuucauuuc

SEQ ID NO: 1474834 - RNA, 19 nt, Artificial Sequence
  Description of Artificial Sequence: Synthetic oligonucleotide
acagugauaaguggggaaa

SEQ ID NO: 1474835 - RNA, 19 nt, Artificial Sequence
  Description of Artificial Sequence: Synthetic oligonucleotide
uuauuaugguguccauaua

SEQ ID NO: 1474836 - RNA, 19 nt, Artificial Sequence
  Description of Artificial Sequence: Synthetic oligonucleotide
ucaucaccggucuacucau

SEQ ID NO: 1474837 - RNA, 19 nt, Artificial Sequence
  Description of Artificial Sequence: Synthetic oligonucleotide
cuuaguaaauaaugucuua

SEQ ID NO: 1474838 - RNA, 19 nt, Artificial Sequence
  Description of Artificial Sequence: Synthetic oligonucleotide
aaaggcggcgcacggcccu

SEQ ID NO: 1474839 - RNA, 19 nt, Artificial Sequence
  Description of Artificial Sequence: Synthetic oligonucleotide
cauuucagaguuuuauugu

SEQ ID NO: 1474840 - RNA, 19 nt, Artificial Sequence
  Description of Artificial Sequence: Synthetic oligonucleotide
caugcaauacauagggaua

SEQ ID NO: 1474841 - RNA, 19 nt, Artificial Sequence
  Description of Artificial Sequence: Synthetic oligonucleotide
auaauggguuaaguaugag

SEQ ID NO: 1474842 - RNA, 19 nt, Artificial Sequence
  Description of Artificial Sequence: Synthetic oligonucleotide
ggaaaccuacgcuguaucc

SEQ ID NO: 1474843 - RNA, 19 nt, Artificial Sequence
  Description of Artificial Sequence: Synthetic oligonucleotide
cuugaccacugaauuagga

SEQ ID NO: 1474844 - RNA, 19 nt, Artificial Sequence
  Description of Artificial Sequence: Synthetic oligonucleotide
aguccagggccgcucauca

SEQ ID NO: 1474845 - RNA, 19 nt, Artificial Sequence
  Description of Artificial Sequence: Synthetic oligonucleotide
augccguauagguaguaaa

SEQ ID NO: 1474846 - RNA, 19 nt, Artificial Sequence
  Description of Artificial Sequence: Synthetic oligonucleotide
ggauagaaucccuucauua

SEQ ID NO: 1474847 - RNA, 19 nt, Artificial Sequence
  Description of Artificial Sequence: Synthetic oligonucleotide
auacguaauuccauuuaga

SEQ ID NO: 1474848 - RNA, 19 nt, Artificial Sequence
  Description of Artificial Sequence: Synthetic oligonucleotide
gacaguaggcuagaauguc

SEQ ID NO: 1474849 - RNA, 19 nt, Artificial Sequence
  Description of Artificial Sequence: Synthetic oligonucleotide
accggucuacucauauacc

SEQ ID NO: 1474850 - RNA, 19 nt, Artificial Sequence
  Description of Artificial Sequence: Synthetic oligonucleotide
agauuccauaggcuacucu

SEQ ID NO: 1474851 - RNA, 19 nt, Artificial Sequence
  Description of Artificial Sequence: Synthetic oligonucleotide
agcuaaccucuaaacaaag

SEQ ID NO: 1474852 - RNA, 19 nt, Artificial Sequence
  Description of Artificial Sequence: Synthetic oligonucleotide
guucaagucaacagggaaa

SEQ ID NO: 1474853 - RNA, 19 nt, Artificial Sequence
  Description of Artificial Sequence: Synthetic oligonucleotide
acuuaugcuuaagaauuaa

SEQ ID NO: 1474854 - RNA, 19 nt, Artificial Sequence
  Description of Artificial Sequence: Synthetic oligonucleotide
ggaaaggaucuucauuuca

SEQ ID NO: 1474855 - RNA, 19 nt, Artificial Sequence
  Description of Artificial Sequence: Synthetic oligonucleotide
gcaugcacuuaacuggacc

SEQ ID NO: 1474856 - RNA, 19 nt, Artificial Sequence
  Description of Artificial Sequence: Synthetic oligonucleotide
aacauagaucaugccguau

SEQ ID NO: 1474857 - RNA, 19 nt, Artificial Sequence
  Description of Artificial Sequence: Synthetic oligonucleotide
aaaagcuaguuugcaccau

SEQ ID NO: 1474858 - RNA, 19 nt, Artificial Sequence
  Description of Artificial Sequence: Synthetic oligonucleotide
ugcauucuuuacagguaau

SEQ ID NO: 1474859 - RNA, 19 nt, Artificial Sequence
  Description of Artificial Sequence: Synthetic oligonucleotide
aggccgcgaaagugaacgc

SEQ ID NO: 1474860 - RNA, 19 nt, Artificial Sequence
  Description of Artificial Sequence: Synthetic oligonucleotide
aguauuacacuggucuaua

SEQ ID NO: 1474861 - RNA, 19 nt, Artificial Sequence
  Description of Artificial Sequence: Synthetic oligonucleotide
aauucagcauaugcuuaua

SEQ ID NO: 1474862 - RNA, 19 nt, Artificial Sequence
  Description of Artificial Sequence: Synthetic oligonucleotide
cacacauuuucagcucacc

SEQ ID NO: 1474863 - RNA, 19 nt, Artificial Sequence
  Description of Artificial Sequence: Synthetic oligonucleotide
aaccuacgcuguaucccac

SEQ ID NO: 1474864 - RNA, 19 nt, Artificial Sequence
  Description of Artificial Sequence: Synthetic oligonucleotide
gcaauacauagggauaaug

SEQ ID NO: 1474865 - RNA, 19 nt, Artificial Sequence
  Description of Artificial Sequence: Synthetic oligonucleotide
ccaaaacauagaucaugcc

SEQ ID NO: 1474866 - RNA, 19 nt, Artificial Sequence
  Description of Artificial Sequence: Synthetic oligonucleotide
aucccuucauuaguggcga

SEQ ID NO: 1474867 - RNA, 19 nt, Artificial Sequence
  Description of Artificial Sequence: Synthetic oligonucleotide
cagcuaaccucuaaacaaa

SEQ ID NO: 1474868 - RNA, 19 nt, Artificial Sequence
  Description of Artificial Sequence: Synthetic oligonucleotide
gcuacucuuggaaacagga

SEQ ID NO: 1474869 - RNA, 19 nt, Artificial Sequence
  Description of Artificial Sequence: Synthetic oligonucleotide
ccauauacaaucagcuaca

SEQ ID NO: 1474870 - RNA, 19 nt, Artificial Sequence
  Description of Artificial Sequence: Synthetic oligonucleotide
aucccacucuucuuauuau

SEQ ID NO: 1474871 - RNA, 19 nt, Artificial Sequence
  Description of Artificial Sequence: Synthetic oligonucleotide
cagugauaaguggggaaac

SEQ ID NO: 1474872 - RNA, 19 nt, Artificial Sequence
  Description of Artificial Sequence: Synthetic oligonucleotide
ucgucgggucauagagucc

SEQ ID NO: 1474873 - RNA, 19 nt, Artificial Sequence
  Description of Artificial Sequence: Synthetic oligonucleotide
uggcgauuugcaugcacuu

SEQ ID NO: 1474874 - RNA, 19 nt, Artificial Sequence
  Description of Artificial Sequence: Synthetic oligonucleotide
ggguaaaaccauucacuuc

SEQ ID NO: 1474875 - RNA, 19 nt, Artificial Sequence
  Description of Artificial Sequence: Synthetic oligonucleotide
guauauugauuacucugau

SEQ ID NO: 1474876 - RNA, 19 nt, Artificial Sequence
  Description of Artificial Sequence: Synthetic oligonucleotide
ucaagucaacagggaaaga

SEQ ID NO: 1474877 - RNA, 19 nt, Artificial Sequence
  Description of Artificial Sequence: Synthetic oligonucleotide
ugaacgccauggccgggga

SEQ ID NO: 1474878 - RNA, 19 nt, Artificial Sequence
  Description of Artificial Sequence: Synthetic oligonucleotide
aggcuacucuuggaaacag

SEQ ID NO: 1474879 - RNA, 19 nt, Artificial Sequence
  Description of Artificial Sequence: Synthetic oligonucleotide
gcagcgccagcauauagca

SEQ ID NO: 1474880 - RNA, 19 nt, Artificial Sequence
  Description of Artificial Sequence: Synthetic oligonucleotide
auauugagacccaguguaa

SEQ ID NO: 1474881 - RNA, 19 nt, Artificial Sequence
  Description of Artificial Sequence: Synthetic oligonucleotide
guuguucuaugagcucacc

SEQ ID NO: 1474882 - RNA, 19 nt, Artificial Sequence
  Description of Artificial Sequence: Synthetic oligonucleotide
gcgauuugcaugcacuuaa

SEQ ID NO: 1474883 - RNA, 19 nt, Artificial Sequence
  Description of Artificial Sequence: Synthetic oligonucleotide
ggacaguaagcauaauaua

SEQ ID NO: 1474884 - RNA, 19 nt, Artificial Sequence
  Description of Artificial Sequence: Synthetic oligonucleotide
ugcaauacauagggauaau

SEQ ID NO: 1474885 - RNA, 19 nt, Artificial Sequence
  Description of Artificial Sequence: Synthetic oligonucleotide
auauaccuccaaauaugau

SEQ ID NO: 1474886 - RNA, 19 nt, Artificial Sequence
  Description of Artificial Sequence: Synthetic oligonucleotide
gugauaaguggggaaaccu

SEQ ID NO: 1474887 - RNA, 19 nt, Artificial Sequence
  Description of Artificial Sequence: Synthetic oligonucleotide
accuacgcuguaucccaca

SEQ ID NO: 1474888 - RNA, 19 nt, Artificial Sequence
  Description of Artificial Sequence: Synthetic oligonucleotide
gcuagaaugucugcauuca

SEQ ID NO: 1474889 - RNA, 19 nt, Artificial Sequence
  Description of Artificial Sequence: Synthetic oligonucleotide
cuggaccgauucuucugug

SEQ ID NO: 1474890 - RNA, 19 nt, Artificial Sequence
  Description of Artificial Sequence: Synthetic oligonucleotide
aagaggguucagaguauua

SEQ ID NO: 1474891 - RNA, 19 nt, Artificial Sequence
  Description of Artificial Sequence: Synthetic oligonucleotide
uggggaaaccuacgcugua

SEQ ID NO: 1474892 - RNA, 19 nt, Artificial Sequence
  Description of Artificial Sequence: Synthetic oligonucleotide
guacaagaggguucagagu

SEQ ID NO: 1474893 - RNA, 19 nt, Artificial Sequence
  Description of Artificial Sequence: Synthetic oligonucleotide
cuacagugauaagugggga

SEQ ID NO: 1474894 - RNA, 19 nt, Artificial Sequence
  Description of Artificial Sequence: Synthetic oligonucleotide
cagagguaaucauuuuaua

SEQ ID NO: 1474895 - RNA, 19 nt, Artificial Sequence
  Description of Artificial Sequence: Synthetic oligonucleotide
cagcagcgccagcauauag

SEQ ID NO: 1474896 - RNA, 19 nt, Artificial Sequence
  Description of Artificial Sequence: Synthetic oligonucleotide
gggaaaccuacgcuguauc

SEQ ID NO: 1474897 - RNA, 19 nt, Artificial Sequence
  Description of Artificial Sequence: Synthetic oligonucleotide
agggccgcucaucaccggu

SEQ ID NO: 1474898 - RNA, 19 nt, Artificial Sequence
  Description of Artificial Sequence: Synthetic oligonucleotide
ccucgaucuacagcuaacc

SEQ ID NO: 1474899 - RNA, 19 nt, Artificial Sequence
  Description of Artificial Sequence: Synthetic oligonucleotide
ccuugaccacugaauuagg

SEQ ID NO: 1474900 - RNA, 19 nt, Artificial Sequence
  Description of Artificial Sequence: Synthetic oligonucleotide
gguuacacaguucucucau

SEQ ID NO: 1474901 - RNA, 19 nt, Artificial Sequence
  Description of Artificial Sequence: Synthetic oligonucleotide
auauagcagaaggccgcga

SEQ ID NO: 1474902 - RNA, 19 nt, Artificial Sequence
  Description of Artificial Sequence: Synthetic oligonucleotide
augauggucgucgggucau

SEQ ID NO: 1474903 - RNA, 19 nt, Artificial Sequence
  Description of Artificial Sequence: Synthetic oligonucleotide
ccauucacuuccccuggcc

SEQ ID NO: 1474904 - RNA, 19 nt, Artificial Sequence
  Description of Artificial Sequence: Synthetic oligonucleotide
acaaucagcuacagugaua

SEQ ID NO: 1474905 - RNA, 19 nt, Artificial Sequence
  Description of Artificial Sequence: Synthetic oligonucleotide
cauucacuuccccuggccu

SEQ ID NO: 1474906 - RNA, 19 nt, Artificial Sequence
  Description of Artificial Sequence: Synthetic oligonucleotide
cccaauggacucagggcag

SEQ ID NO: 1474907 - RNA, 19 nt, Artificial Sequence
  Description of Artificial Sequence: Synthetic oligonucleotide
gggccagcggagaaaggcg

SEQ ID NO: 1474908 - RNA, 19 nt, Artificial Sequence
  Description of Artificial Sequence: Synthetic oligonucleotide
ccagggccgcucaucaccg

SEQ ID NO: 1474909 - RNA, 19 nt, Artificial Sequence
  Description of Artificial Sequence: Synthetic oligonucleotide
cucgaucuacagcuaaccu

SEQ ID NO: 1474910 - RNA, 19 nt, Artificial Sequence
  Description of Artificial Sequence: Synthetic oligonucleotide
cgaucuacagcuaaccucu

SEQ ID NO: 1474911 - RNA, 19 nt, Artificial Sequence
  Description of Artificial Sequence: Synthetic oligonucleotide
guaauuccauuuagagucu

SEQ ID NO: 1474912 - RNA, 19 nt, Artificial Sequence
  Description of Artificial Sequence: Synthetic oligonucleotide
cuacgcuguaucccacaca

SEQ ID NO: 1474913 - RNA, 19 nt, Artificial Sequence
  Description of Artificial Sequence: Synthetic oligonucleotide
cagcggagaaaggcggcgc

SEQ ID NO: 1474914 - RNA, 19 nt, Artificial Sequence
  Description of Artificial Sequence: Synthetic oligonucleotide
caugccguauagguaguaa

SEQ ID NO: 1474915 - RNA, 19 nt, Artificial Sequence
  Description of Artificial Sequence: Synthetic oligonucleotide
ccuacgcuguaucccacac

SEQ ID NO: 1474916 - RNA, 19 nt, Artificial Sequence
  Description of Artificial Sequence: Synthetic oligonucleotide
guggcgauuugcaugcacu

SEQ ID NO: 1474917 - RNA, 19 nt, Artificial Sequence
  Description of Artificial Sequence: Synthetic oligonucleotide
ucaugccguauagguagua

SEQ ID NO: 1474918 - RNA, 19 nt, Artificial Sequence
  Description of Artificial Sequence: Synthetic oligonucleotide
acaacgcacuggaaaggau

SEQ ID NO: 1474919 - RNA, 19 nt, Artificial Sequence
  Description of Artificial Sequence: Synthetic oligonucleotide
ggggcauauugagacccag

SEQ ID NO: 1474920 - RNA, 19 nt, Artificial Sequence
  Description of Artificial Sequence: Synthetic oligonucleotide
gaaggccgcgaaagugaac

SEQ ID NO: 1474921 - RNA, 19 nt, Artificial Sequence
  Description of Artificial Sequence: Synthetic oligonucleotide
ggguucagaguauuacacu

SEQ ID NO: 1474922 - RNA, 19 nt, Artificial Sequence
  Description of Artificial Sequence: Synthetic oligonucleotide
ccauaggcuacucuuggaa

SEQ ID NO: 1474923 - RNA, 19 nt, Artificial Sequence
  Description of Artificial Sequence: Synthetic oligonucleotide
cuuggaggguuauggcugu

SEQ ID NO: 1474924 - RNA, 19 nt, Artificial Sequence
  Description of Artificial Sequence: Synthetic oligonucleotide
gcuaguuugcaccauccuu

SEQ ID NO: 1474925 - RNA, 19 nt, Artificial Sequence
  Description of Artificial Sequence: Synthetic oligonucleotide
ccagagguaaucauuuuau

SEQ ID NO: 1474926 - RNA, 19 nt, Artificial Sequence
  Description of Artificial Sequence: Synthetic oligonucleotide
guaagccacucugcugcac

SEQ ID NO: 1474927 - RNA, 19 nt, Artificial Sequence
  Description of Artificial Sequence: Synthetic oligonucleotide
aucaugccguauagguagu

SEQ ID NO: 1474928 - RNA, 19 nt, Artificial Sequence
  Description of Artificial Sequence: Synthetic oligonucleotide
ccugucaacaccagaggua

SEQ ID NO: 1474929 - RNA, 19 nt, Artificial Sequence
  Description of Artificial Sequence: Synthetic oligonucleotide
cuagaaugucugcauucau

SEQ ID NO: 1474930 - RNA, 19 nt, Artificial Sequence
  Description of Artificial Sequence: Synthetic oligonucleotide
ggaaaggagggaauucccu

SEQ ID NO: 1474931 - RNA, 19 nt, Artificial Sequence
  Description of Artificial Sequence: Synthetic oligonucleotide
ccagcggagaaaggcggcg

SEQ ID NO: 1474932 - RNA, 19 nt, Artificial Sequence
  Description of Artificial Sequence: Synthetic oligonucleotide
gccgcgaaagugaacgcca

SEQ ID NO: 1474933 - RNA, 19 nt, Artificial Sequence
  Description of Artificial Sequence: Synthetic oligonucleotide
cugcauucaugauggucgu

SEQ ID NO: 1474934 - RNA, 19 nt, Artificial Sequence
  Description of Artificial Sequence: Synthetic oligonucleotide
aggggcauauugagaccca

SEQ ID NO: 1474935 - RNA, 19 nt, Artificial Sequence
  Description of Artificial Sequence: Synthetic oligonucleotide
cuguuccuuaagagugcaa

SEQ ID NO: 1474936 - RNA, 19 nt, Artificial Sequence
  Description of Artificial Sequence: Synthetic oligonucleotide
ccggucuacucauauaccu

SEQ ID NO: 1474937 - RNA, 19 nt, Artificial Sequence
  Description of Artificial Sequence: Synthetic oligonucleotide
auaugccaaaaggggcaua

SEQ ID NO: 1474938 - RNA, 19 nt, Artificial Sequence
  Description of Artificial Sequence: Synthetic oligonucleotide
gucgggucauagaguccag

SEQ ID NO: 1474939 - RNA, 19 nt, Artificial Sequence
  Description of Artificial Sequence: Synthetic oligonucleotide
guggggaaaccuacgcugu

SEQ ID NO: 1474940 - RNA, 19 nt, Artificial Sequence
  Description of Artificial Sequence: Synthetic oligonucleotide
acgcuguaucccacacaag

SEQ ID NO: 1474941 - RNA, 19 nt, Artificial Sequence
  Description of Artificial Sequence: Synthetic oligonucleotide
ucccuucauuaguggcgau

SEQ ID NO: 1474942 - RNA, 19 nt, Artificial Sequence
  Description of Artificial Sequence: Synthetic oligonucleotide
guccagggccgcucaucac

SEQ ID NO: 1474943 - RNA, 19 nt, Artificial Sequence
  Description of Artificial Sequence: Synthetic oligonucleotide
ggguuauggcuguuccuua

SEQ ID NO: 1474944 - RNA, 19 nt, Artificial Sequence
  Description of Artificial Sequence: Synthetic oligonucleotide
ccgcucaucaccggucuac

SEQ ID NO: 1474945 - RNA, 19 nt, Artificial Sequence
  Description of Artificial Sequence: Synthetic oligonucleotide
ggcgauuugcaugcacuua

SEQ ID NO: 1474946 - RNA, 19 nt, Artificial Sequence
  Description of Artificial Sequence: Synthetic oligonucleotide
cgucgggucauagagucca

SEQ ID NO: 1474947 - RNA, 19 nt, Artificial Sequence
  Description of Artificial Sequence: Synthetic oligonucleotide
gccagcggagaaaggcggc

SEQ ID NO: 1474948 - RNA, 19 nt, Artificial Sequence
  Description of Artificial Sequence: Synthetic oligonucleotide
ccggggccagcggagaaag

SEQ ID NO: 1474949 - RNA, 19 nt, Artificial Sequence
  Description of Artificial Sequence: Synthetic oligonucleotide
caucaccggucuacucaua

SEQ ID NO: 1474950 - RNA, 19 nt, Artificial Sequence
  Description of Artificial Sequence: Synthetic oligonucleotide
cauagaguccagggccgcu

SEQ ID NO: 1474951 - RNA, 19 nt, Artificial Sequence
  Description of Artificial Sequence: Synthetic oligonucleotide
gcggagaaaggcggcgcac

SEQ ID NO: 1474952 - RNA, 19 nt, Artificial Sequence
  Description of Artificial Sequence: Synthetic oligonucleotide
caaucacuuggaggguuau

SEQ ID NO: 1474953 - RNA, 19 nt, Artificial Sequence
  Description of Artificial Sequence: Synthetic oligonucleotide
ccacugaauuaggacagua

SEQ ID NO: 1474954 - RNA, 19 nt, Artificial Sequence
  Description of Artificial Sequence: Synthetic oligonucleotide
gggcauauugagacccagu

SEQ ID NO: 1474955 - RNA, 19 nt, Artificial Sequence
  Description of Artificial Sequence: Synthetic oligonucleotide
gcacgccggggccagcgga

SEQ ID NO: 1474956 - RNA, 19 nt, Artificial Sequence
  Description of Artificial Sequence: Synthetic oligonucleotide
ggccgcucaucaccggucu

SEQ ID NO: 1474957 - RNA, 19 nt, Artificial Sequence
  Description of Artificial Sequence: Synthetic oligonucleotide
ggucgucgggucauagagu

SEQ ID NO: 1474958 - RNA, 19 nt, Artificial Sequence
  Description of Artificial Sequence: Synthetic oligonucleotide
gggccgcucaucaccgguc

SEQ ID NO: 1474959 - RNA, 19 nt, Artificial Sequence
  Description of Artificial Sequence: Synthetic oligonucleotide
ggaccuugcuggauagaau

SEQ ID NO: 1474960 - RNA, 19 nt, Artificial Sequence
  Description of Artificial Sequence: Synthetic oligonucleotide
gcgcacggcccucugggua

SEQ ID NO: 1474961 - RNA, 19 nt, Artificial Sequence
  Description of Artificial Sequence: Synthetic oligonucleotide
cgcacggcccucuggguaa

SEQ ID NO: 1474962 - RNA, 19 nt, Artificial Sequence
  Description of Artificial Sequence: Synthetic oligonucleotide
gcacuuaacuggaccgauu

SEQ ID NO: 1474963 - RNA, 19 nt, Artificial Sequence
  Description of Artificial Sequence: Synthetic oligonucleotide
ggcgcacggcccucugggu

SEQ ID NO: 1474964 - RNA, 19 nt, Artificial Sequence
  Description of Artificial Sequence: Synthetic oligonucleotide
ccgcgaaagugaacgccau

SEQ ID NO: 1474965 - RNA, 19 nt, Artificial Sequence
  Description of Artificial Sequence: Synthetic oligonucleotide
cacggcccucuggguaaaa

SEQ ID NO: 1474966 - RNA, 19 nt, Artificial Sequence
  Description of Artificial Sequence: Synthetic oligonucleotide
gcacggcccucuggguaaa

SEQ ID NO: 1474967 - RNA, 19 nt, Artificial Sequence
  Description of Artificial Sequence: Synthetic oligonucleotide
cgcucaucaccggucuacu

SEQ ID NO: 1474968 - RNA, 19 nt, Artificial Sequence
  Description of Artificial Sequence: Synthetic oligonucleotide
cgggcacgccggggccagc

SEQ ID NO: 1474969 - RNA, 19 nt, Artificial Sequence
  Description of Artificial Sequence: Synthetic oligonucleotide
gaagcuauuauguacaggc

SEQ ID NO: 1474970 - RNA, 19 nt, Artificial Sequence
  Description of Artificial Sequence: Synthetic oligonucleotide
aaucucgaggucuacaugg

SEQ ID NO: 1474971 - RNA, 19 nt, Artificial Sequence
  Description of Artificial Sequence: Synthetic oligonucleotide
ugguuucuaucuuugaggg

SEQ ID NO: 1474972 - RNA, 19 nt, Artificial Sequence
  Description of Artificial Sequence: Synthetic oligonucleotide
ucauccgaaaaguagaacu

SEQ ID NO: 1474973 - RNA, 19 nt, Artificial Sequence
  Description of Artificial Sequence: Synthetic oligonucleotide
ugagaauccgcaccgauga

SEQ ID NO: 1474974 - RNA, 19 nt, Artificial Sequence
  Description of Artificial Sequence: Synthetic oligonucleotide
uuugugaggaccucgaaaa

SEQ ID NO: 1474975 - RNA, 19 nt, Artificial Sequence
  Description of Artificial Sequence: Synthetic oligonucleotide
caugcuagcuauuugugag

SEQ ID NO: 1474976 - RNA, 19 nt, Artificial Sequence
  Description of Artificial Sequence: Synthetic oligonucleotide
aaaaucucgaggucuacau

SEQ ID NO: 1474977 - RNA, 19 nt, Artificial Sequence
  Description of Artificial Sequence: Synthetic oligonucleotide
agaucauacaccaacagca

SEQ ID NO: 1474978 - RNA, 19 nt, Artificial Sequence
  Description of Artificial Sequence: Synthetic oligonucleotide
ugcgggcucaucaucaugg

SEQ ID NO: 1474979 - RNA, 19 nt, Artificial Sequence
  Description of Artificial Sequence: Synthetic oligonucleotide
ucuaaggggacugaauucc

SEQ ID NO: 1474980 - RNA, 19 nt, Artificial Sequence
  Description of Artificial Sequence: Synthetic oligonucleotide
cuagcuauuugugaggacc

SEQ ID NO: 1474981 - RNA, 19 nt, Artificial Sequence
  Description of Artificial Sequence: Synthetic oligonucleotide
cuacagguaacccaucugc

SEQ ID NO: 1474982 - RNA, 19 nt, Artificial Sequence
  Description of Artificial Sequence: Synthetic oligonucleotide
gagaucauacaccaacagc

SEQ ID NO: 1474983 - RNA, 19 nt, Artificial Sequence
  Description of Artificial Sequence: Synthetic oligonucleotide
uauauaaaaucucgagguc

SEQ ID NO: 1474984 - RNA, 19 nt, Artificial Sequence
  Description of Artificial Sequence: Synthetic oligonucleotide
aaagauauucugguggcca

SEQ ID NO: 1474985 - RNA, 19 nt, Artificial Sequence
  Description of Artificial Sequence: Synthetic oligonucleotide
ugucaugcuagcuauuugu

SEQ ID NO: 1474986 - RNA, 19 nt, Artificial Sequence
  Description of Artificial Sequence: Synthetic oligonucleotide
uacagguaacccaucugcg

SEQ ID NO: 1474987 - RNA, 19 nt, Artificial Sequence
  Description of Artificial Sequence: Synthetic oligonucleotide
uuucuaaggggacugaauu

SEQ ID NO: 1474988 - RNA, 19 nt, Artificial Sequence
  Description of Artificial Sequence: Synthetic oligonucleotide
ugucugaagaauaauccau

SEQ ID NO: 1474989 - RNA, 19 nt, Artificial Sequence
  Description of Artificial Sequence: Synthetic oligonucleotide
auuauguacaggcucggcu

SEQ ID NO: 1474990 - RNA, 19 nt, Artificial Sequence
  Description of Artificial Sequence: Synthetic oligonucleotide
auauaaaaucucgaggucu

SEQ ID NO: 1474991 - RNA, 19 nt, Artificial Sequence
  Description of Artificial Sequence: Synthetic oligonucleotide
ucgaaaacaaaguuuguuu

SEQ ID NO: 1474992 - RNA, 19 nt, Artificial Sequence
  Description of Artificial Sequence: Synthetic oligonucleotide
  modified_base (3)..(3): a, c, u, g, unknown or other
ucncaguuggggaacaggu

SEQ ID NO: 1474993 - RNA, 19 nt, Artificial Sequence
  Description of Artificial Sequence: Synthetic oligonucleotide
ucaugggcuuuaauggccg

SEQ ID NO: 1474994 - RNA, 19 nt, Artificial Sequence
  Description of Artificial Sequence: Synthetic oligonucleotide
aauccaugcacuuccggaa

SEQ ID NO: 1474995 - RNA, 19 nt, Artificial Sequence
  Description of Artificial Sequence: Synthetic oligonucleotide
cuugucguggcacugugcc

SEQ ID NO: 1474996 - RNA, 19 nt, Artificial Sequence
  Description of Artificial Sequence: Synthetic oligonucleotide
aacuguuggcggaagacuc

SEQ ID NO: 1474997 - RNA, 19 nt, Artificial Sequence
  Description of Artificial Sequence: Synthetic oligonucleotide
aaaucucgaggucuacaug

SEQ ID NO: 1474998 - RNA, 19 nt, Artificial Sequence
  Description of Artificial Sequence: Synthetic oligonucleotide
aggggacugaauuccauuc

SEQ ID NO: 1474999 - RNA, 19 nt, Artificial Sequence
  Description of Artificial Sequence: Synthetic oligonucleotide
aaaguagaacucaaucuga

SEQ ID NO: 1475000 - RNA, 19 nt, Artificial Sequence
  Description of Artificial Sequence: Synthetic oligonucleotide
agaauaauccaugcacuuc

SEQ ID NO: 1475001 - RNA, 19 nt, Artificial Sequence
  Description of Artificial Sequence: Synthetic oligonucleotide
guggagaucauacaccaac

SEQ ID NO: 1475002 - RNA, 19 nt, Artificial Sequence
  Description of Artificial Sequence: Synthetic oligonucleotide
ucucauguccaccauggaa

SEQ ID NO: 1475003 - RNA, 19 nt, Artificial Sequence
  Description of Artificial Sequence: Synthetic oligonucleotide
accucgaaaacaaaguuug

SEQ ID NO: 1475004 - RNA, 19 nt, Artificial Sequence
  Description of Artificial Sequence: Synthetic oligonucleotide
ucgucugcgaacccagggg

SEQ ID NO: 1475005 - RNA, 19 nt, Artificial Sequence
  Description of Artificial Sequence: Synthetic oligonucleotide
ugucguggcacugugcccg

SEQ ID NO: 1475006 - RNA, 19 nt, Artificial Sequence
  Description of Artificial Sequence: Synthetic oligonucleotide
uguugucagggccucuggg

SEQ ID NO: 1475007 - RNA, 19 nt, Artificial Sequence
  Description of Artificial Sequence: Synthetic oligonucleotide
uugagaauccgcaccgaug

SEQ ID NO: 1475008 - RNA, 19 nt, Artificial Sequence
  Description of Artificial Sequence: Synthetic oligonucleotide
uugacgcucacguagccca

SEQ ID NO: 1475009 - RNA, 19 nt, Artificial Sequence
  Description of Artificial Sequence: Synthetic oligonucleotide
uuuugggugguuucauccc

SEQ ID NO: 1475010 - RNA, 19 nt, Artificial Sequence
  Description of Artificial Sequence: Synthetic oligonucleotide
uggcggaagacucaucccc

SEQ ID NO: 1475011 - RNA, 19 nt, Artificial Sequence
  Description of Artificial Sequence: Synthetic oligonucleotide
gguuugagaauccgcaccg

SEQ ID NO: 1475012 - RNA, 19 nt, Artificial Sequence
  Description of Artificial Sequence: Synthetic oligonucleotide
ucaugcuagcuauuuguga

SEQ ID NO: 1475013 - RNA, 19 nt, Artificial Sequence
  Description of Artificial Sequence: Synthetic oligonucleotide
  modified_base (4)..(4): a, c, u, g, unknown or other
uucncaguuggggaacagg

SEQ ID NO: 1475014 - RNA, 19 nt, Artificial Sequence
  Description of Artificial Sequence: Synthetic oligonucleotide
uuccggaagaucucggggc

SEQ ID NO: 1475015 - RNA, 19 nt, Artificial Sequence
  Description of Artificial Sequence: Synthetic oligonucleotide
ugagguaccgggcuggguc

SEQ ID NO: 1475016 - RNA, 19 nt, Artificial Sequence
  Description of Artificial Sequence: Synthetic oligonucleotide
uuugggugguuucauccca

SEQ ID NO: 1475017 - RNA, 19 nt, Artificial Sequence
  Description of Artificial Sequence: Synthetic oligonucleotide
cauccgaaaaguagaacuc

SEQ ID NO: 1475018 - RNA, 19 nt, Artificial Sequence
  Description of Artificial Sequence: Synthetic oligonucleotide
agaacucaaucugauccac

SEQ ID NO: 1475019 - RNA, 19 nt, Artificial Sequence
  Description of Artificial Sequence: Synthetic oligonucleotide
ggugguuucaucccaauca

SEQ ID NO: 1475020 - RNA, 19 nt, Artificial Sequence
  Description of Artificial Sequence: Synthetic oligonucleotide
cauggcgaggcauuugggc

SEQ ID NO: 1475021 - RNA, 19 nt, Artificial Sequence
  Description of Artificial Sequence: Synthetic oligonucleotide
ugaauuccauucucuguca

SEQ ID NO: 1475022 - RNA, 19 nt, Artificial Sequence
  Description of Artificial Sequence: Synthetic oligonucleotide
cuucgguccauccuccucc

SEQ ID NO: 1475023 - RNA, 19 nt, Artificial Sequence
  Description of Artificial Sequence: Synthetic oligonucleotide
auuugugaggaccucgaaa

SEQ ID NO: 1475024 - RNA, 19 nt, Artificial Sequence
  Description of Artificial Sequence: Synthetic oligonucleotide
cugagauucagugaccaug

SEQ ID NO: 1475025 - RNA, 19 nt, Artificial Sequence
  Description of Artificial Sequence: Synthetic oligonucleotide
augcuagcuauuugugagg

SEQ ID NO: 1475026 - RNA, 19 nt, Artificial Sequence
  Description of Artificial Sequence: Synthetic oligonucleotide
ugcgcuagggucccuucgg

SEQ ID NO: 1475027 - RNA, 19 nt, Artificial Sequence
  Description of Artificial Sequence: Synthetic oligonucleotide
ugcuugaguaggaaggcau

SEQ ID NO: 1475028 - RNA, 19 nt, Artificial Sequence
  Description of Artificial Sequence: Synthetic oligonucleotide
cuuuaauggccgcaucuac

SEQ ID NO: 1475029 - RNA, 19 nt, Artificial Sequence
  Description of Artificial Sequence: Synthetic oligonucleotide
uugcgcugcgccaaggggc

SEQ ID NO: 1475030 - RNA, 19 nt, Artificial Sequence
  Description of Artificial Sequence: Synthetic oligonucleotide
agauucagugaccaugaau

SEQ ID NO: 1475031 - RNA, 19 nt, Artificial Sequence
  Description of Artificial Sequence: Synthetic oligonucleotide
uaaaaucucgaggucuaca

SEQ ID NO: 1475032 - RNA, 19 nt, Artificial Sequence
  Description of Artificial Sequence: Synthetic oligonucleotide
uccgaaaaguagaacucaa

SEQ ID NO: 1475033 - RNA, 19 nt, Artificial Sequence
  Description of Artificial Sequence: Synthetic oligonucleotide
uagcuauuugugaggaccu

SEQ ID NO: 1475034 - RNA, 19 nt, Artificial Sequence
  Description of Artificial Sequence: Synthetic oligonucleotide
ucuucuggggcguggccgg

SEQ ID NO: 1475035 - RNA, 19 nt, Artificial Sequence
  Description of Artificial Sequence: Synthetic oligonucleotide
uggacugagguaccgggcu

SEQ ID NO: 1475036 - RNA, 19 nt, Artificial Sequence
  Description of Artificial Sequence: Synthetic oligonucleotide
ucuuugagggguuucuuuu

SEQ ID NO: 1475037 - RNA, 19 nt, Artificial Sequence
  Description of Artificial Sequence: Synthetic oligonucleotide
ucgaggucuacauggguac

SEQ ID NO: 1475038 - RNA, 19 nt, Artificial Sequence
  Description of Artificial Sequence: Synthetic oligonucleotide
cagcuugacgcucacguag

SEQ ID NO: 1475039 - RNA, 19 nt, Artificial Sequence
  Description of Artificial Sequence: Synthetic oligonucleotide
cacccuuccguucuucugg

SEQ ID NO: 1475040 - RNA, 19 nt, Artificial Sequence
  Description of Artificial Sequence: Synthetic oligonucleotide
ugguuucaucccaaucaag

SEQ ID NO: 1475041 - RNA, 19 nt, Artificial Sequence
  Description of Artificial Sequence: Synthetic oligonucleotide
auccgcaccgaugagauga

SEQ ID NO: 1475042 - RNA, 19 nt, Artificial Sequence
  Description of Artificial Sequence: Synthetic oligonucleotide
guuucuaucuuugaggggu

SEQ ID NO: 1475043 - RNA, 19 nt, Artificial Sequence
  Description of Artificial Sequence: Synthetic oligonucleotide
auggcgaggcauuugggcu

SEQ ID NO: 1475044 - RNA, 19 nt, Artificial Sequence
  Description of Artificial Sequence: Synthetic oligonucleotide
ucucccagguuugagaauc

SEQ ID NO: 1475045 - RNA, 19 nt, Artificial Sequence
  Description of Artificial Sequence: Synthetic oligonucleotide
cacucucuuguucagggac

SEQ ID NO: 1475046 - RNA, 19 nt, Artificial Sequence
  Description of Artificial Sequence: Synthetic oligonucleotide
auaaaaucucgaggucuac

SEQ ID NO: 1475047 - RNA, 19 nt, Artificial Sequence
  Description of Artificial Sequence: Synthetic oligonucleotide
gcugucugaagaauaaucc

SEQ ID NO: 1475048 - RNA, 19 nt, Artificial Sequence
  Description of Artificial Sequence: Synthetic oligonucleotide
cucuuguucagggaccugc

SEQ ID NO: 1475049 - RNA, 19 nt, Artificial Sequence
  Description of Artificial Sequence: Synthetic oligonucleotide
uugaacauggcgaggcauu

SEQ ID NO: 1475050 - RNA, 19 nt, Artificial Sequence
  Description of Artificial Sequence: Synthetic oligonucleotide
aguggcgauuuucuggaga

SEQ ID NO: 1475051 - RNA, 19 nt, Artificial Sequence
  Description of Artificial Sequence: Synthetic oligonucleotide
ugcuagcuauuugugagga

SEQ ID NO: 1475052 - RNA, 19 nt, Artificial Sequence
  Description of Artificial Sequence: Synthetic oligonucleotide
gucgucugcgaacccaggg

SEQ ID NO: 1475053 - RNA, 19 nt, Artificial Sequence
  Description of Artificial Sequence: Synthetic oligonucleotide
aaguagaacucaaucugau

SEQ ID NO: 1475054 - RNA, 19 nt, Artificial Sequence
  Description of Artificial Sequence: Synthetic oligonucleotide
agguaacccaucugcgguc

SEQ ID NO: 1475055 - RNA, 19 nt, Artificial Sequence
  Description of Artificial Sequence: Synthetic oligonucleotide
uccccaucucagcuuggcg

SEQ ID NO: 1475056 - RNA, 19 nt, Artificial Sequence
  Description of Artificial Sequence: Synthetic oligonucleotide
  modified_base (11)..(11): a, c, u, g, unknown or other
uggggaguucncaguuggg

SEQ ID NO: 1475057 - RNA, 19 nt, Artificial Sequence
  Description of Artificial Sequence: Synthetic oligonucleotide
  modified_base (10)..(10): a, c, u, g, unknown or other
ggggaguucncaguugggg

SEQ ID NO: 1475058 - RNA, 19 nt, Artificial Sequence
  Description of Artificial Sequence: Synthetic oligonucleotide
cuugcgcugcgccaagggg

SEQ ID NO: 1475059 - RNA, 19 nt, Artificial Sequence
  Description of Artificial Sequence: Synthetic oligonucleotide
cuuguuccuccgcacgugc

SEQ ID NO: 1475060 - RNA, 19 nt, Artificial Sequence
  Description of Artificial Sequence: Synthetic oligonucleotide
uauuugugaggaccucgaa

SEQ ID NO: 1475061 - RNA, 19 nt, Artificial Sequence
  Description of Artificial Sequence: Synthetic oligonucleotide
uuggcgucgucugcgaacc

SEQ ID NO: 1475062 - RNA, 19 nt, Artificial Sequence
  Description of Artificial Sequence: Synthetic oligonucleotide
ugaauucaugggcuuuaau

SEQ ID NO: 1475063 - RNA, 19 nt, Artificial Sequence
  Description of Artificial Sequence: Synthetic oligonucleotide
uuggcggaagacucauccc

SEQ ID NO: 1475064 - RNA, 19 nt, Artificial Sequence
  Description of Artificial Sequence: Synthetic oligonucleotide
auccgaaaaguagaacuca

SEQ ID NO: 1475065 - RNA, 19 nt, Artificial Sequence
  Description of Artificial Sequence: Synthetic oligonucleotide
cuauuugugaggaccucga

SEQ ID NO: 1475066 - RNA, 19 nt, Artificial Sequence
  Description of Artificial Sequence: Synthetic oligonucleotide
cuuucauguugucccugcc

SEQ ID NO: 1475067 - RNA, 19 nt, Artificial Sequence
  Description of Artificial Sequence: Synthetic oligonucleotide
ucaccuccacuugucgugg

SEQ ID NO: 1475068 - RNA, 19 nt, Artificial Sequence
  Description of Artificial Sequence: Synthetic oligonucleotide
cuuggcgucgucugcgaac

SEQ ID NO: 1475069 - RNA, 19 nt, Artificial Sequence
  Description of Artificial Sequence: Synthetic oligonucleotide
gcuauuugugaggaccucg

SEQ ID NO: 1475070 - RNA, 19 nt, Artificial Sequence
  Description of Artificial Sequence: Synthetic oligonucleotide
  modified_base (2)..(2): a, c, u, g, unknown or other
cncaguuggggaacaggug

SEQ ID NO: 1475071 - RNA, 19 nt, Artificial Sequence
  Description of Artificial Sequence: Synthetic oligonucleotide
ucucgaggucuacaugggu

SEQ ID NO: 1475072 - RNA, 19 nt, Artificial Sequence
  Description of Artificial Sequence: Synthetic oligonucleotide
gguuucuaucuuugagggg

SEQ ID NO: 1475073 - RNA, 19 nt, Artificial Sequence
  Description of Artificial Sequence: Synthetic oligonucleotide
aggaccucgaaaacaaagu

SEQ ID NO: 1475074 - RNA, 19 nt, Artificial Sequence
  Description of Artificial Sequence: Synthetic oligonucleotide
ugcacuuccggaagaucuc

SEQ ID NO: 1475075 - RNA, 19 nt, Artificial Sequence
  Description of Artificial Sequence: Synthetic oligonucleotide
gcuagggucccuucggucc

SEQ ID NO: 1475076 - RNA, 19 nt, Artificial Sequence
  Description of Artificial Sequence: Synthetic oligonucleotide
cagguuugagaauccgcac

SEQ ID NO: 1475077 - RNA, 19 nt, Artificial Sequence
  Description of Artificial Sequence: Synthetic oligonucleotide
agaauccgcaccgaugaga

SEQ ID NO: 1475078 - RNA, 19 nt, Artificial Sequence
  Description of Artificial Sequence: Synthetic oligonucleotide
uaaggggacugaauuccau

SEQ ID NO: 1475079 - RNA, 19 nt, Artificial Sequence
  Description of Artificial Sequence: Synthetic oligonucleotide
gagguaccgggcugggucc

SEQ ID NO: 1475080 - RNA, 19 nt, Artificial Sequence
  Description of Artificial Sequence: Synthetic oligonucleotide
  modified_base (7)..(7): a, c, u, g, unknown or other
gaguucncaguuggggaac

SEQ ID NO: 1475081 - RNA, 19 nt, Artificial Sequence
  Description of Artificial Sequence: Synthetic oligonucleotide
ucuaucuuugagggguuuc

SEQ ID NO: 1475082 - RNA, 19 nt, Artificial Sequence
  Description of Artificial Sequence: Synthetic oligonucleotide
auucucaccuccacuuguc

SEQ ID NO: 1475083 - RNA, 19 nt, Artificial Sequence
  Description of Artificial Sequence: Synthetic oligonucleotide
gucaugcuagcuauuugug

SEQ ID NO: 1475084 - RNA, 19 nt, Artificial Sequence
  Description of Artificial Sequence: Synthetic oligonucleotide
cagcuuguuccuccgcacg

SEQ ID NO: 1475085 - RNA, 19 nt, Artificial Sequence
  Description of Artificial Sequence: Synthetic oligonucleotide
gguggguacuugcugcggg

SEQ ID NO: 1475086 - RNA, 19 nt, Artificial Sequence
  Description of Artificial Sequence: Synthetic oligonucleotide
uugguggccaugugccgcc

SEQ ID NO: 1475087 - RNA, 19 nt, Artificial Sequence
  Description of Artificial Sequence: Synthetic oligonucleotide
ugcggucugcaucuuccga

SEQ ID NO: 1475088 - RNA, 19 nt, Artificial Sequence
  Description of Artificial Sequence: Synthetic oligonucleotide
acuugaacauggcgaggca

SEQ ID NO: 1475089 - RNA, 19 nt, Artificial Sequence
  Description of Artificial Sequence: Synthetic oligonucleotide
gcaccgaugagaugauucc

SEQ ID NO: 1475090 - RNA, 19 nt, Artificial Sequence
  Description of Artificial Sequence: Synthetic oligonucleotide
cuugacgcucacguagccc

SEQ ID NO: 1475091 - RNA, 19 nt, Artificial Sequence
  Description of Artificial Sequence: Synthetic oligonucleotide
gagaauccgcaccgaugag

SEQ ID NO: 1475092 - RNA, 19 nt, Artificial Sequence
  Description of Artificial Sequence: Synthetic oligonucleotide
gugguuucaucccaaucaa

SEQ ID NO: 1475093 - RNA, 19 nt, Artificial Sequence
  Description of Artificial Sequence: Synthetic oligonucleotide
uucugguggccagaagggc

SEQ ID NO: 1475094 - RNA, 19 nt, Artificial Sequence
  Description of Artificial Sequence: Synthetic oligonucleotide
aauccgcaccgaugagaug

SEQ ID NO: 1475095 - RNA, 19 nt, Artificial Sequence
  Description of Artificial Sequence: Synthetic oligonucleotide
aggggacuugccccuggac

SEQ ID NO: 1475096 - RNA, 19 nt, Artificial Sequence
  Description of Artificial Sequence: Synthetic oligonucleotide
cugucaugcuagcuauuug

SEQ ID NO: 1475097 - RNA, 19 nt, Artificial Sequence
  Description of Artificial Sequence: Synthetic oligonucleotide
uaacccaucugcggucugc

SEQ ID NO: 1475098 - RNA, 19 nt, Artificial Sequence
  Description of Artificial Sequence: Synthetic oligonucleotide
aucugcggucugcaucuuc

SEQ ID NO: 1475099 - RNA, 19 nt, Artificial Sequence
  Description of Artificial Sequence: Synthetic oligonucleotide
ucaucccaaucaagacggc

SEQ ID NO: 1475100 - RNA, 19 nt, Artificial Sequence
  Description of Artificial Sequence: Synthetic oligonucleotide
uggguacaaaagcuuucua

SEQ ID NO: 1475101 - RNA, 19 nt, Artificial Sequence
  Description of Artificial Sequence: Synthetic oligonucleotide
aucucgaggucuacauggg

SEQ ID NO: 1475102 - RNA, 19 nt, Artificial Sequence
  Description of Artificial Sequence: Synthetic oligonucleotide
uugggugguuucaucccaa

SEQ ID NO: 1475103 - RNA, 19 nt, Artificial Sequence
  Description of Artificial Sequence: Synthetic oligonucleotide
accaugaauucaugggcuu

SEQ ID NO: 1475104 - RNA, 19 nt, Artificial Sequence
  Description of Artificial Sequence: Synthetic oligonucleotide
uguuccuccgcacgugcuu

SEQ ID NO: 1475105 - RNA, 19 nt, Artificial Sequence
  Description of Artificial Sequence: Synthetic oligonucleotide
agcuauuugugaggaccuc

SEQ ID NO: 1475106 - RNA, 19 nt, Artificial Sequence
  Description of Artificial Sequence: Synthetic oligonucleotide
gacgcccuugcgcugcgcc

SEQ ID NO: 1475107 - RNA, 19 nt, Artificial Sequence
  Description of Artificial Sequence: Synthetic oligonucleotide
uccgcacgugcuugaguag

SEQ ID NO: 1475108 - RNA, 19 nt, Artificial Sequence
  Description of Artificial Sequence: Synthetic oligonucleotide
cucacgcucauucucaccu

SEQ ID NO: 1475109 - RNA, 19 nt, Artificial Sequence
  Description of Artificial Sequence: Synthetic oligonucleotide
uuguuccuccgcacgugcu

SEQ ID NO: 1475110 - RNA, 19 nt, Artificial Sequence
  Description of Artificial Sequence: Synthetic oligonucleotide
ugacgcucacguagcccag

SEQ ID NO: 1475111 - RNA, 19 nt, Artificial Sequence
  Description of Artificial Sequence: Synthetic oligonucleotide
uccacuugucguggcacug

SEQ ID NO: 1475112 - RNA, 19 nt, Artificial Sequence
  Description of Artificial Sequence: Synthetic oligonucleotide
  modified_base (9)..(9): a, c, u, g, unknown or other
gggaguucncaguugggga

SEQ ID NO: 1475113 - RNA, 19 nt, Artificial Sequence
  Description of Artificial Sequence: Synthetic oligonucleotide
cuaaggggacugaauucca

SEQ ID NO: 1475114 - RNA, 19 nt, Artificial Sequence
  Description of Artificial Sequence: Synthetic oligonucleotide
cucgaggucuacaugggua

SEQ ID NO: 1475115 - RNA, 19 nt, Artificial Sequence
  Description of Artificial Sequence: Synthetic oligonucleotide
cuuccgagacagcagggga

SEQ ID NO: 1475116 - RNA, 19 nt, Artificial Sequence
  Description of Artificial Sequence: Synthetic oligonucleotide
uaauggccgcaucuaccuc

SEQ ID NO: 1475117 - RNA, 19 nt, Artificial Sequence
  Description of Artificial Sequence: Synthetic oligonucleotide
uggcgaggcauuugggcuc

SEQ ID NO: 1475118 - RNA, 19 nt, Artificial Sequence
  Description of Artificial Sequence: Synthetic oligonucleotide
gcggucugcaucuuccgag

SEQ ID NO: 1475119 - RNA, 19 nt, Artificial Sequence
  Description of Artificial Sequence: Synthetic oligonucleotide
caugggcuuuaauggccgc

SEQ ID NO: 1475120 - RNA, 19 nt, Artificial Sequence
  Description of Artificial Sequence: Synthetic oligonucleotide
ggagugacgcugcugucug

SEQ ID NO: 1475121 - RNA, 19 nt, Artificial Sequence
  Description of Artificial Sequence: Synthetic oligonucleotide
gaccaugaauucaugggcu

SEQ ID NO: 1475122 - RNA, 19 nt, Artificial Sequence
  Description of Artificial Sequence: Synthetic oligonucleotide
guaggaaggcauccuucuc

SEQ ID NO: 1475123 - RNA, 19 nt, Artificial Sequence
  Description of Artificial Sequence: Synthetic oligonucleotide
gggacugaauuccauucuc

SEQ ID NO: 1475124 - RNA, 19 nt, Artificial Sequence
  Description of Artificial Sequence: Synthetic oligonucleotide
ugaacauggcgaggcauuu

SEQ ID NO: 1475125 - RNA, 19 nt, Artificial Sequence
  Description of Artificial Sequence: Synthetic oligonucleotide
gagaggugggauugcucuc

SEQ ID NO: 1475126 - RNA, 19 nt, Artificial Sequence
  Description of Artificial Sequence: Synthetic oligonucleotide
cugcggucugcaucuuccg

SEQ ID NO: 1475127 - RNA, 19 nt, Artificial Sequence
  Description of Artificial Sequence: Synthetic oligonucleotide
ugagcagcuugacgcucac

SEQ ID NO: 1475128 - RNA, 19 nt, Artificial Sequence
  Description of Artificial Sequence: Synthetic oligonucleotide
aucccaaucaagacggcuu

SEQ ID NO: 1475129 - RNA, 19 nt, Artificial Sequence
  Description of Artificial Sequence: Synthetic oligonucleotide
cugcgcuagggucccuucg

SEQ ID NO: 1475130 - RNA, 19 nt, Artificial Sequence
  Description of Artificial Sequence: Synthetic oligonucleotide
ggagaggugggauugcucu

SEQ ID NO: 1475131 - RNA, 19 nt, Artificial Sequence
  Description of Artificial Sequence: Synthetic oligonucleotide
guccccaccuggcuguagc

SEQ ID NO: 1475132 - RNA, 19 nt, Artificial Sequence
  Description of Artificial Sequence: Synthetic oligonucleotide
uucgguccauccuccucca

SEQ ID NO: 1475133 - RNA, 19 nt, Artificial Sequence
  Description of Artificial Sequence: Synthetic oligonucleotide
  modified_base (8)..(8): a, c, u, g, unknown or other
ggaguucncaguuggggaa

SEQ ID NO: 1475134 - RNA, 19 nt, Artificial Sequence
  Description of Artificial Sequence: Synthetic oligonucleotide
caccccuacagguaaccca

SEQ ID NO: 1475135 - RNA, 19 nt, Artificial Sequence
  Description of Artificial Sequence: Synthetic oligonucleotide
cacguagcccagcuuguuc

SEQ ID NO: 1475136 - RNA, 19 nt, Artificial Sequence
  Description of Artificial Sequence: Synthetic oligonucleotide
cacuugucguggcacugug

SEQ ID NO: 1475137 - RNA, 19 nt, Artificial Sequence
  Description of Artificial Sequence: Synthetic oligonucleotide
cucggggucagaggaacug

SEQ ID NO: 1475138 - RNA, 19 nt, Artificial Sequence
  Description of Artificial Sequence: Synthetic oligonucleotide
gaacuguuggcggaagacu

SEQ ID NO: 1475139 - RNA, 19 nt, Artificial Sequence
  Description of Artificial Sequence: Synthetic oligonucleotide
cuccgcacgugcuugagua

SEQ ID NO: 1475140 - RNA, 19 nt, Artificial Sequence
  Description of Artificial Sequence: Synthetic oligonucleotide
cucucggggucagaggaac

SEQ ID NO: 1475141 - RNA, 19 nt, Artificial Sequence
  Description of Artificial Sequence: Synthetic oligonucleotide
acauggcgaggcauuuggg

SEQ ID NO: 1475142 - RNA, 19 nt, Artificial Sequence
  Description of Artificial Sequence: Synthetic oligonucleotide
gaauccgcaccgaugagau

SEQ ID NO: 1475143 - RNA, 19 nt, Artificial Sequence
  Description of Artificial Sequence: Synthetic oligonucleotide
  modified_base (6)..(6): a, c, u, g, unknown or other
aguucncaguuggggaaca

SEQ ID NO: 1475144 - RNA, 19 nt, Artificial Sequence
  Description of Artificial Sequence: Synthetic oligonucleotide
accccuacagguaacccau

SEQ ID NO: 1475145 - RNA, 19 nt, Artificial Sequence
  Description of Artificial Sequence: Synthetic oligonucleotide
cugaaguucagucuaccuu

SEQ ID NO: 1475146 - RNA, 19 nt, Artificial Sequence
  Description of Artificial Sequence: Synthetic oligonucleotide
uugcugcgggcucaucauc

SEQ ID NO: 1475147 - RNA, 19 nt, Artificial Sequence
  Description of Artificial Sequence: Synthetic oligonucleotide
ucggggucagaggaacugu

SEQ ID NO: 1475148 - RNA, 19 nt, Artificial Sequence
  Description of Artificial Sequence: Synthetic oligonucleotide
ccaaggggcugcuccaagg

SEQ ID NO: 1475149 - RNA, 19 nt, Artificial Sequence
  Description of Artificial Sequence: Synthetic oligonucleotide
ucacgcucauucucaccuc

SEQ ID NO: 1475150 - RNA, 19 nt, Artificial Sequence
  Description of Artificial Sequence: Synthetic oligonucleotide
acuguuggcggaagacuca

SEQ ID NO: 1475151 - RNA, 19 nt, Artificial Sequence
  Description of Artificial Sequence: Synthetic oligonucleotide
  modified_base (5)..(5): a, c, u, g, unknown or other
guucncaguuggggaacag

SEQ ID NO: 1475152 - RNA, 19 nt, Artificial Sequence
  Description of Artificial Sequence: Synthetic oligonucleotide
gaggucuacauggguacaa

SEQ ID NO: 1475153 - RNA, 19 nt, Artificial Sequence
  Description of Artificial Sequence: Synthetic oligonucleotide
acgcucacguagcccagcu

SEQ ID NO: 1475154 - RNA, 19 nt, Artificial Sequence
  Description of Artificial Sequence: Synthetic oligonucleotide
gaccucgaaaacaaaguuu

SEQ ID NO: 1475155 - RNA, 19 nt, Artificial Sequence
  Description of Artificial Sequence: Synthetic oligonucleotide
cagguaacccaucugcggu

SEQ ID NO: 1475156 - RNA, 19 nt, Artificial Sequence
  Description of Artificial Sequence: Synthetic oligonucleotide
gauuuucuggagacgcccu

SEQ ID NO: 1475157 - RNA, 19 nt, Artificial Sequence
  Description of Artificial Sequence: Synthetic oligonucleotide
agguaccgggcuggguccc

SEQ ID NO: 1475158 - RNA, 19 nt, Artificial Sequence
  Description of Artificial Sequence: Synthetic oligonucleotide
ugggugguuucaucccaau

SEQ ID NO: 1475159 - RNA, 19 nt, Artificial Sequence
  Description of Artificial Sequence: Synthetic oligonucleotide
ccaaggacuugaacauggc

SEQ ID NO: 1475160 - RNA, 19 nt, Artificial Sequence
  Description of Artificial Sequence: Synthetic oligonucleotide
ccuacagguaacccaucug

SEQ ID NO: 1475161 - RNA, 19 nt, Artificial Sequence
  Description of Artificial Sequence: Synthetic oligonucleotide
cagcucucucccagguuug

SEQ ID NO: 1475162 - RNA, 19 nt, Artificial Sequence
  Description of Artificial Sequence: Synthetic oligonucleotide
accugcuuagguggguacu

SEQ ID NO: 1475163 - RNA, 19 nt, Artificial Sequence
  Description of Artificial Sequence: Synthetic oligonucleotide
cucgaaaacaaaguuuguu

SEQ ID NO: 1475164 - RNA, 19 nt, Artificial Sequence
  Description of Artificial Sequence: Synthetic oligonucleotide
uguacaggcucggcuucuc

SEQ ID NO: 1475165 - RNA, 19 nt, Artificial Sequence
  Description of Artificial Sequence: Synthetic oligonucleotide
gaaguucagucuaccuucu

SEQ ID NO: 1475166 - RNA, 19 nt, Artificial Sequence
  Description of Artificial Sequence: Synthetic oligonucleotide
cuagggucccuucggucca

SEQ ID NO: 1475167 - RNA, 19 nt, Artificial Sequence
  Description of Artificial Sequence: Synthetic oligonucleotide
cgcaccgaugagaugauuc

SEQ ID NO: 1475168 - RNA, 19 nt, Artificial Sequence
  Description of Artificial Sequence: Synthetic oligonucleotide
uuccuccgcacgugcuuga

SEQ ID NO: 1475169 - RNA, 19 nt, Artificial Sequence
  Description of Artificial Sequence: Synthetic oligonucleotide
acugugcccgcggcucggc

SEQ ID NO: 1475170 - RNA, 19 nt, Artificial Sequence
  Description of Artificial Sequence: Synthetic oligonucleotide
aggucuacauggguacaaa

SEQ ID NO: 1475171 - RNA, 19 nt, Artificial Sequence
  Description of Artificial Sequence: Synthetic oligonucleotide
agcaucuugcuggggaguu

SEQ ID NO: 1475172 - RNA, 19 nt, Artificial Sequence
  Description of Artificial Sequence: Synthetic oligonucleotide
ccggccagccauaggagag

SEQ ID NO: 1475173 - RNA, 19 nt, Artificial Sequence
  Description of Artificial Sequence: Synthetic oligonucleotide
gacgcucacguagcccagc

SEQ ID NO: 1475174 - RNA, 19 nt, Artificial Sequence
  Description of Artificial Sequence: Synthetic oligonucleotide
uccgcaccgaugagaugau

SEQ ID NO: 1475175 - RNA, 19 nt, Artificial Sequence
  Description of Artificial Sequence: Synthetic oligonucleotide
  modified_base (18)..(18): a, c, u, g, unknown or other
aucuugcuggggaguucnc

SEQ ID NO: 1475176 - RNA, 19 nt, Artificial Sequence
  Description of Artificial Sequence: Synthetic oligonucleotide
caguggcgauuuucuggag

SEQ ID NO: 1475177 - RNA, 19 nt, Artificial Sequence
  Description of Artificial Sequence: Synthetic oligonucleotide
guuugagaauccgcaccga

SEQ ID NO: 1475178 - RNA, 19 nt, Artificial Sequence
  Description of Artificial Sequence: Synthetic oligonucleotide
guaacccaucugcggucug

SEQ ID NO: 1475179 - RNA, 19 nt, Artificial Sequence
  Description of Artificial Sequence: Synthetic oligonucleotide
uccuccgcacgugcuugag

SEQ ID NO: 1475180 - RNA, 19 nt, Artificial Sequence
  Description of Artificial Sequence: Synthetic oligonucleotide
gcuuaggggacagguggag

SEQ ID NO: 1475181 - RNA, 19 nt, Artificial Sequence
  Description of Artificial Sequence: Synthetic oligonucleotide
ugcccgagggagugacgcu

SEQ ID NO: 1475182 - RNA, 19 nt, Artificial Sequence
  Description of Artificial Sequence: Synthetic oligonucleotide
uggccaugugccgccggcc

SEQ ID NO: 1475183 - RNA, 19 nt, Artificial Sequence
  Description of Artificial Sequence: Synthetic oligonucleotide
gugagcagcuugacgcuca

SEQ ID NO: 1475184 - RNA, 19 nt, Artificial Sequence
  Description of Artificial Sequence: Synthetic oligonucleotide
caccgaugagaugauucca

SEQ ID NO: 1475185 - RNA, 19 nt, Artificial Sequence
  Description of Artificial Sequence: Synthetic oligonucleotide
aggcucggcuucucucaug

SEQ ID NO: 1475186 - RNA, 19 nt, Artificial Sequence
  Description of Artificial Sequence: Synthetic oligonucleotide
ccuugcgcugcgccaaggg

SEQ ID NO: 1475187 - RNA, 19 nt, Artificial Sequence
  Description of Artificial Sequence: Synthetic oligonucleotide
gaacagguggcacccuuuu

SEQ ID NO: 1475188 - RNA, 19 nt, Artificial Sequence
  Description of Artificial Sequence: Synthetic oligonucleotide
gggugguuucaucccaauc

SEQ ID NO: 1475189 - RNA, 19 nt, Artificial Sequence
  Description of Artificial Sequence: Synthetic oligonucleotide
gcuagcuauuugugaggac

SEQ ID NO: 1475190 - RNA, 19 nt, Artificial Sequence
  Description of Artificial Sequence: Synthetic oligonucleotide
ugcgaacccaggggcugcc

SEQ ID NO: 1475191 - RNA, 19 nt, Artificial Sequence
  Description of Artificial Sequence: Synthetic oligonucleotide
cccaucugcggucugcauc

SEQ ID NO: 1475192 - RNA, 19 nt, Artificial Sequence
  Description of Artificial Sequence: Synthetic oligonucleotide
ggagacgcccuugcgcugc

SEQ ID NO: 1475193 - RNA, 19 nt, Artificial Sequence
  Description of Artificial Sequence: Synthetic oligonucleotide
ggaccucgaaaacaaaguu

SEQ ID NO: 1475194 - RNA, 19 nt, Artificial Sequence
  Description of Artificial Sequence: Synthetic oligonucleotide
cagccaguggcgauuuucu

SEQ ID NO: 1475195 - RNA, 19 nt, Artificial Sequence
  Description of Artificial Sequence: Synthetic oligonucleotide
caugugccgccggccagcc

SEQ ID NO: 1475196 - RNA, 19 nt, Artificial Sequence
  Description of Artificial Sequence: Synthetic oligonucleotide
cuggacuuuucuccugugu

SEQ ID NO: 1475197 - RNA, 19 nt, Artificial Sequence
  Description of Artificial Sequence: Synthetic oligonucleotide
ucacguagcccagcuuguu

SEQ ID NO: 1475198 - RNA, 19 nt, Artificial Sequence
  Description of Artificial Sequence: Synthetic oligonucleotide
cugcgaacccaggggcugc

SEQ ID NO: 1475199 - RNA, 19 nt, Artificial Sequence
  Description of Artificial Sequence: Synthetic oligonucleotide
cuugcugcgggcucaucau

SEQ ID NO: 1475200 - RNA, 19 nt, Artificial Sequence
  Description of Artificial Sequence: Synthetic oligonucleotide
gagugacgcugcugucuga

SEQ ID NO: 1475201 - RNA, 19 nt, Artificial Sequence
  Description of Artificial Sequence: Synthetic oligonucleotide
ccaaucaagacggcuuuca

SEQ ID NO: 1475202 - RNA, 19 nt, Artificial Sequence
  Description of Artificial Sequence: Synthetic oligonucleotide
uggcgucgucugcgaaccc

SEQ ID NO: 1475203 - RNA, 19 nt, Artificial Sequence
  Description of Artificial Sequence: Synthetic oligonucleotide
cuugaacauggcgaggcau

SEQ ID NO: 1475204 - RNA, 19 nt, Artificial Sequence
  Description of Artificial Sequence: Synthetic oligonucleotide
cagcaccccuacagguaac

SEQ ID NO: 1475205 - RNA, 19 nt, Artificial Sequence
  Description of Artificial Sequence: Synthetic oligonucleotide
ucguggcacugugcccgcg

SEQ ID NO: 1475206 - RNA, 19 nt, Artificial Sequence
  Description of Artificial Sequence: Synthetic oligonucleotide
cugccugcgcuaggguccc

SEQ ID NO: 1475207 - RNA, 19 nt, Artificial Sequence
  Description of Artificial Sequence: Synthetic oligonucleotide
caaucaagacggcuuucau

SEQ ID NO: 1475208 - RNA, 19 nt, Artificial Sequence
  Description of Artificial Sequence: Synthetic oligonucleotide
caucccaaucaagacggcu

SEQ ID NO: 1475209 - RNA, 19 nt, Artificial Sequence
  Description of Artificial Sequence: Synthetic oligonucleotide
cacugugcccgcggcucgg

SEQ ID NO: 1475210 - RNA, 19 nt, Artificial Sequence
  Description of Artificial Sequence: Synthetic oligonucleotide
ggcucggcuucucucaugu

SEQ ID NO: 1475211 - RNA, 19 nt, Artificial Sequence
  Description of Artificial Sequence: Synthetic oligonucleotide
gcagcucucucccagguuu

SEQ ID NO: 1475212 - RNA, 19 nt, Artificial Sequence
  Description of Artificial Sequence: Synthetic oligonucleotide
agacgcccuugcgcugcgc

SEQ ID NO: 1475213 - RNA, 19 nt, Artificial Sequence
  Description of Artificial Sequence: Synthetic oligonucleotide
cuucuggggcguggccggg

SEQ ID NO: 1475214 - RNA, 19 nt, Artificial Sequence
  Description of Artificial Sequence: Synthetic oligonucleotide
gcgucgucugcgaacccag

SEQ ID NO: 1475215 - RNA, 19 nt, Artificial Sequence
  Description of Artificial Sequence: Synthetic oligonucleotide
gcuguagcggcugcugauc

SEQ ID NO: 1475216 - RNA, 19 nt, Artificial Sequence
  Description of Artificial Sequence: Synthetic oligonucleotide
gggauugcucucgggguca

SEQ ID NO: 1475217 - RNA, 19 nt, Artificial Sequence
  Description of Artificial Sequence: Synthetic oligonucleotide
ccaucucagcuuggcgucg

SEQ ID NO: 1475218 - RNA, 19 nt, Artificial Sequence
  Description of Artificial Sequence: Synthetic oligonucleotide
ugccgccggccagccauag

SEQ ID NO: 1475219 - RNA, 19 nt, Artificial Sequence
  Description of Artificial Sequence: Synthetic oligonucleotide
ccggcuccaguuccucacg

SEQ ID NO: 1475220 - RNA, 19 nt, Artificial Sequence
  Description of Artificial Sequence: Synthetic oligonucleotide
gcccgagggagugacgcug

SEQ ID NO: 1475221 - RNA, 19 nt, Artificial Sequence
  Description of Artificial Sequence: Synthetic oligonucleotide
ccgccggccagccauagga

SEQ ID NO: 1475222 - RNA, 19 nt, Artificial Sequence
  Description of Artificial Sequence: Synthetic oligonucleotide
gcaccccuacagguaaccc

SEQ ID NO: 1475223 - RNA, 19 nt, Artificial Sequence
  Description of Artificial Sequence: Synthetic oligonucleotide
ggauugcucucggggucag

SEQ ID NO: 1475224 - RNA, 19 nt, Artificial Sequence
  Description of Artificial Sequence: Synthetic oligonucleotide
ggcgucgucugcgaaccca

SEQ ID NO: 1475225 - RNA, 19 nt, Artificial Sequence
  Description of Artificial Sequence: Synthetic oligonucleotide
gguaacccaucugcggucu

SEQ ID NO: 1475226 - RNA, 19 nt, Artificial Sequence
  Description of Artificial Sequence: Synthetic oligonucleotide
caaucugauccaccagcuu

SEQ ID NO: 1475227 - RNA, 19 nt, Artificial Sequence
  Description of Artificial Sequence: Synthetic oligonucleotide
gcagcuugacgcucacgua

SEQ ID NO: 1475228 - RNA, 19 nt, Artificial Sequence
  Description of Artificial Sequence: Synthetic oligonucleotide
gggagugacgcugcugucu

SEQ ID NO: 1475229 - RNA, 19 nt, Artificial Sequence
  Description of Artificial Sequence: Synthetic oligonucleotide
gguggagaucauacaccaa

SEQ ID NO: 1475230 - RNA, 19 nt, Artificial Sequence
  Description of Artificial Sequence: Synthetic oligonucleotide
ggcgaggcauuugggcuca

SEQ ID NO: 1475231 - RNA, 19 nt, Artificial Sequence
  Description of Artificial Sequence: Synthetic oligonucleotide
ccgaaaaguagaacucaau

SEQ ID NO: 1475232 - RNA, 19 nt, Artificial Sequence
  Description of Artificial Sequence: Synthetic oligonucleotide
cgucgucugcgaacccagg

SEQ ID NO: 1475233 - RNA, 19 nt, Artificial Sequence
  Description of Artificial Sequence: Synthetic oligonucleotide
uggccgcaucuaccuccuc

SEQ ID NO: 1475234 - RNA, 19 nt, Artificial Sequence
  Description of Artificial Sequence: Synthetic oligonucleotide
ccugcgcuagggucccuuc

SEQ ID NO: 1475235 - RNA, 19 nt, Artificial Sequence
  Description of Artificial Sequence: Synthetic oligonucleotide
gggacagguggagaucaua

SEQ ID NO: 1475236 - RNA, 19 nt, Artificial Sequence
  Description of Artificial Sequence: Synthetic oligonucleotide
ccacucucuuguucaggga

SEQ ID NO: 1475237 - RNA, 19 nt, Artificial Sequence
  Description of Artificial Sequence: Synthetic oligonucleotide
augugccgccggccagcca

SEQ ID NO: 1475238 - RNA, 19 nt, Artificial Sequence
  Description of Artificial Sequence: Synthetic oligonucleotide
gcaucuugcuggggaguuc

SEQ ID NO: 1475239 - RNA, 19 nt, Artificial Sequence
  Description of Artificial Sequence: Synthetic oligonucleotide
gcgccaaggggcugcucca

SEQ ID NO: 1475240 - RNA, 19 nt, Artificial Sequence
  Description of Artificial Sequence: Synthetic oligonucleotide
ccucgaaaacaaaguuugu

SEQ ID NO: 1475241 - RNA, 19 nt, Artificial Sequence
  Description of Artificial Sequence: Synthetic oligonucleotide
cucucccagguuugagaau

SEQ ID NO: 1475242 - RNA, 19 nt, Artificial Sequence
  Description of Artificial Sequence: Synthetic oligonucleotide
guaccgggcugggucccca

SEQ ID NO: 1475243 - RNA, 19 nt, Artificial Sequence
  Description of Artificial Sequence: Synthetic oligonucleotide
gccgccggccagccauagg

SEQ ID NO: 1475244 - RNA, 19 nt, Artificial Sequence
  Description of Artificial Sequence: Synthetic oligonucleotide
gguaccgggcugggucccc

SEQ ID NO: 1475245 - RNA, 19 nt, Artificial Sequence
  Description of Artificial Sequence: Synthetic oligonucleotide
cgcuagggucccuucgguc

SEQ ID NO: 1475246 - RNA, 19 nt, Artificial Sequence
  Description of Artificial Sequence: Synthetic oligonucleotide
gcguggccggggcccagag

SEQ ID NO: 1475247 - RNA, 19 nt, Artificial Sequence
  Description of Artificial Sequence: Synthetic oligonucleotide
gcuuggcgucgucugcgaa

SEQ ID NO: 1475248 - RNA, 19 nt, Artificial Sequence
  Description of Artificial Sequence: Synthetic oligonucleotide
caucucagcuuggcgucgu

SEQ ID NO: 1475249 - RNA, 19 nt, Artificial Sequence
  Description of Artificial Sequence: Synthetic oligonucleotide
gccagccauaggagaggug

SEQ ID NO: 1475250 - RNA, 19 nt, Artificial Sequence
  Description of Artificial Sequence: Synthetic oligonucleotide
cgccggccagccauaggag

SEQ ID NO: 1475251 - RNA, 19 nt, Artificial Sequence
  Description of Artificial Sequence: Synthetic oligonucleotide
ccccuacagguaacccauc

SEQ ID NO: 1475252 - RNA, 19 nt, Artificial Sequence
  Description of Artificial Sequence: Synthetic oligonucleotide
cccuugcgcugcgccaagg

SEQ ID NO: 1475253 - RNA, 19 nt, Artificial Sequence
  Description of Artificial Sequence: Synthetic oligonucleotide
ggaacagguggcacccuuu

SEQ ID NO: 1475254 - RNA, 19 nt, Artificial Sequence
  Description of Artificial Sequence: Synthetic oligonucleotide
gcgggcucaucaucauggu

SEQ ID NO: 1475255 - RNA, 19 nt, Artificial Sequence
  Description of Artificial Sequence: Synthetic oligonucleotide
gcgaacccaggggcugccc

SEQ ID NO: 1475256 - RNA, 19 nt, Artificial Sequence
  Description of Artificial Sequence: Synthetic oligonucleotide
cgcugcgccaaggggcugc

SEQ ID NO: 1475257 - RNA, 19 nt, Artificial Sequence
  Description of Artificial Sequence: Synthetic oligonucleotide
guacuugcugcgggcucau

SEQ ID NO: 1475258 - RNA, 19 nt, Artificial Sequence
  Description of Artificial Sequence: Synthetic oligonucleotide
gcugcgggcucaucaucau

SEQ ID NO: 1475259 - RNA, 19 nt, Artificial Sequence
  Description of Artificial Sequence: Synthetic oligonucleotide
gcgcuagggucccuucggu

SEQ ID NO: 1475260 - RNA, 19 nt, Artificial Sequence
  Description of Artificial Sequence: Synthetic oligonucleotide
cugagguaccgggcugggu

SEQ ID NO: 1475261 - RNA, 19 nt, Artificial Sequence
  Description of Artificial Sequence: Synthetic oligonucleotide
ccaugaauucaugggcuuu

SEQ ID NO: 1475262 - RNA, 19 nt, Artificial Sequence
  Description of Artificial Sequence: Synthetic oligonucleotide
cccagccuggacugaggua

SEQ ID NO: 1475263 - RNA, 19 nt, Artificial Sequence
  Description of Artificial Sequence: Synthetic oligonucleotide
ugccugcgcuagggucccu

SEQ ID NO: 1475264 - RNA, 19 nt, Artificial Sequence
  Description of Artificial Sequence: Synthetic oligonucleotide
cugcgccaaggggcugcuc

SEQ ID NO: 1475265 - RNA, 19 nt, Artificial Sequence
  Description of Artificial Sequence: Synthetic oligonucleotide
cgaggucuacauggguaca

SEQ ID NO: 1475266 - RNA, 19 nt, Artificial Sequence
  Description of Artificial Sequence: Synthetic oligonucleotide
ccgcaucuaccuccucaaa

SEQ ID NO: 1475267 - RNA, 19 nt, Artificial Sequence
  Description of Artificial Sequence: Synthetic oligonucleotide
ggacuugccccuggacuuu

SEQ ID NO: 1475268 - RNA, 19 nt, Artificial Sequence
  Description of Artificial Sequence: Synthetic oligonucleotide
ccacuugucguggcacugu

SEQ ID NO: 1475269 - RNA, 19 nt, Artificial Sequence
  Description of Artificial Sequence: Synthetic oligonucleotide
ccuccgcacgugcuugagu

SEQ ID NO: 1475270 - RNA, 19 nt, Artificial Sequence
  Description of Artificial Sequence: Synthetic oligonucleotide
gugccgccggccagccaua

SEQ ID NO: 1475271 - RNA, 19 nt, Artificial Sequence
  Description of Artificial Sequence: Synthetic oligonucleotide
gcgcugcgccaaggggcug

SEQ ID NO: 1475272 - RNA, 19 nt, Artificial Sequence
  Description of Artificial Sequence: Synthetic oligonucleotide
gcugcgccaaggggcugcu

SEQ ID NO: 1475273 - RNA, 19 nt, Artificial Sequence
  Description of Artificial Sequence: Synthetic oligonucleotide
cgaggcauuugggcucaaa

SEQ ID NO: 1475274 - RNA, 19 nt, Artificial Sequence
  Description of Artificial Sequence: Synthetic oligonucleotide
caucugcggucugcaucuu

SEQ ID NO: 1475275 - RNA, 19 nt, Artificial Sequence
  Description of Artificial Sequence: Synthetic oligonucleotide
ccgagggagugacgcugcu

SEQ ID NO: 1475276 - RNA, 19 nt, Artificial Sequence
  Description of Artificial Sequence: Synthetic oligonucleotide
ggguccccaccuggcugua

SEQ ID NO: 1475277 - RNA, 19 nt, Artificial Sequence
  Description of Artificial Sequence: Synthetic oligonucleotide
gccugcgcuagggucccuu

SEQ ID NO: 1475278 - RNA, 19 nt, Artificial Sequence
  Description of Artificial Sequence: Synthetic oligonucleotide
ccgagacagcaggggacuu

SEQ ID NO: 1475279 - RNA, 19 nt, Artificial Sequence
  Description of Artificial Sequence: Synthetic oligonucleotide
cgcucacguagcccagcuu

SEQ ID NO: 1475280 - RNA, 19 nt, Artificial Sequence
  Description of Artificial Sequence: Synthetic oligonucleotide
ccgcaccgaugagaugauu

SEQ ID NO: 1475281 - RNA, 19 nt, Artificial Sequence
  Description of Artificial Sequence: Synthetic oligonucleotide
acugcaaagaguuagcucc

SEQ ID NO: 1475282 - RNA, 19 nt, Artificial Sequence
  Description of Artificial Sequence: Synthetic oligonucleotide
uuuaaauuuacauuguggc

SEQ ID NO: 1475283 - RNA, 19 nt, Artificial Sequence
  Description of Artificial Sequence: Synthetic oligonucleotide
agaacuagucuucugaacc

SEQ ID NO: 1475284 - RNA, 19 nt, Artificial Sequence
  Description of Artificial Sequence: Synthetic oligonucleotide
aaauuuacauuguggcucc

SEQ ID NO: 1475285 - RNA, 19 nt, Artificial Sequence
  Description of Artificial Sequence: Synthetic oligonucleotide
aagaaaucgggacaccugc

SEQ ID NO: 1475286 - RNA, 19 nt, Artificial Sequence
  Description of Artificial Sequence: Synthetic oligonucleotide
auuauaaauggugaagucc

SEQ ID NO: 1475287 - RNA, 19 nt, Artificial Sequence
  Description of Artificial Sequence: Synthetic oligonucleotide
aaugauguggagcaucccg

SEQ ID NO: 1475288 - RNA, 19 nt, Artificial Sequence
  Description of Artificial Sequence: Synthetic oligonucleotide
aauuauaaauggugaaguc

SEQ ID NO: 1475289 - RNA, 19 nt, Artificial Sequence
  Description of Artificial Sequence: Synthetic oligonucleotide
uuauaaauggugaagucca

SEQ ID NO: 1475290 - RNA, 19 nt, Artificial Sequence
  Description of Artificial Sequence: Synthetic oligonucleotide
gaaaccaauggcuucaaag

SEQ ID NO: 1475291 - RNA, 19 nt, Artificial Sequence
  Description of Artificial Sequence: Synthetic oligonucleotide
ucuggaaaucccacgaagg

SEQ ID NO: 1475292 - RNA, 19 nt, Artificial Sequence
  Description of Artificial Sequence: Synthetic oligonucleotide
uucaaagaugaacuugggg

SEQ ID NO: 1475293 - RNA, 19 nt, Artificial Sequence
  Description of Artificial Sequence: Synthetic oligonucleotide
augaacuuggggcaaacac

SEQ ID NO: 1475294 - RNA, 19 nt, Artificial Sequence
  Description of Artificial Sequence: Synthetic oligonucleotide
ucuugagauaagaaaucgg

SEQ ID NO: 1475295 - RNA, 19 nt, Artificial Sequence
  Description of Artificial Sequence: Synthetic oligonucleotide
ugggcauugauauggagag

SEQ ID NO: 1475296 - RNA, 19 nt, Artificial Sequence
  Description of Artificial Sequence: Synthetic oligonucleotide
aguuacaggacccugagau

SEQ ID NO: 1475297 - RNA, 19 nt, Artificial Sequence
  Description of Artificial Sequence: Synthetic oligonucleotide
ugaacuuggggcaaacacc

SEQ ID NO: 1475298 - RNA, 19 nt, Artificial Sequence
  Description of Artificial Sequence: Synthetic oligonucleotide
uuaaauuuacauuguggcu

SEQ ID NO: 1475299 - RNA, 19 nt, Artificial Sequence
  Description of Artificial Sequence: Synthetic oligonucleotide
acaggcuagaaucugaacu

SEQ ID NO: 1475300 - RNA, 19 nt, Artificial Sequence
  Description of Artificial Sequence: Synthetic oligonucleotide
aagggagugaggauagucc

SEQ ID NO: 1475301 - RNA, 19 nt, Artificial Sequence
  Description of Artificial Sequence: Synthetic oligonucleotide
ugaggaauaaccucuggcu

SEQ ID NO: 1475302 - RNA, 19 nt, Artificial Sequence
  Description of Artificial Sequence: Synthetic oligonucleotide
ucuacucgcaucaccaaag

SEQ ID NO: 1475303 - RNA, 19 nt, Artificial Sequence
  Description of Artificial Sequence: Synthetic oligonucleotide
agaguagacacuucccaac

SEQ ID NO: 1475304 - RNA, 19 nt, Artificial Sequence
  Description of Artificial Sequence: Synthetic oligonucleotide
agauaagaaaucgggacac

SEQ ID NO: 1475305 - RNA, 19 nt, Artificial Sequence
  Description of Artificial Sequence: Synthetic oligonucleotide
caugagaugccuucggagg

SEQ ID NO: 1475306 - RNA, 19 nt, Artificial Sequence
  Description of Artificial Sequence: Synthetic oligonucleotide
uccacagagauucugaauu

SEQ ID NO: 1475307 - RNA, 19 nt, Artificial Sequence
  Description of Artificial Sequence: Synthetic oligonucleotide
aucacuuccccaauguucc

SEQ ID NO: 1475308 - RNA, 19 nt, Artificial Sequence
  Description of Artificial Sequence: Synthetic oligonucleotide
gugccuaacaccaugagag

SEQ ID NO: 1475309 - RNA, 19 nt, Artificial Sequence
  Description of Artificial Sequence: Synthetic oligonucleotide
uuagcucccacuaguaagc

SEQ ID NO: 1475310 - RNA, 19 nt, Artificial Sequence
  Description of Artificial Sequence: Synthetic oligonucleotide
uugagauaagaaaucggga

SEQ ID NO: 1475311 - RNA, 19 nt, Artificial Sequence
  Description of Artificial Sequence: Synthetic oligonucleotide
agagccaugaccuucugga

SEQ ID NO: 1475312 - RNA, 19 nt, Artificial Sequence
  Description of Artificial Sequence: Synthetic oligonucleotide
gugaggauaguccuggucc

SEQ ID NO: 1475313 - RNA, 19 nt, Artificial Sequence
  Description of Artificial Sequence: Synthetic oligonucleotide
aauauccagcaccaguaca

SEQ ID NO: 1475314 - RNA, 19 nt, Artificial Sequence
  Description of Artificial Sequence: Synthetic oligonucleotide
aaagaguuagcucccacua

SEQ ID NO: 1475315 - RNA, 19 nt, Artificial Sequence
  Description of Artificial Sequence: Synthetic oligonucleotide
guuagcucccacuaguaag

SEQ ID NO: 1475316 - RNA, 19 nt, Artificial Sequence
  Description of Artificial Sequence: Synthetic oligonucleotide
uuacacagugguaaggggu

SEQ ID NO: 1475317 - RNA, 19 nt, Artificial Sequence
  Description of Artificial Sequence: Synthetic oligonucleotide
uguggcgguagauuugugg

SEQ ID NO: 1475318 - RNA, 19 nt, Artificial Sequence
  Description of Artificial Sequence: Synthetic oligonucleotide
agaaucugaacuccaagga

SEQ ID NO: 1475319 - RNA, 19 nt, Artificial Sequence
  Description of Artificial Sequence: Synthetic oligonucleotide
cauaaucuaggucagccug

SEQ ID NO: 1475320 - RNA, 19 nt, Artificial Sequence
  Description of Artificial Sequence: Synthetic oligonucleotide
aggacaaagagguacuuga

SEQ ID NO: 1475321 - RNA, 19 nt, Artificial Sequence
  Description of Artificial Sequence: Synthetic oligonucleotide
uaguaagcaggcaaccaag

SEQ ID NO: 1475322 - RNA, 19 nt, Artificial Sequence
  Description of Artificial Sequence: Synthetic oligonucleotide
accaguacaggucaggcca

SEQ ID NO: 1475323 - RNA, 19 nt, Artificial Sequence
  Description of Artificial Sequence: Synthetic oligonucleotide
agauuugguccucucuagc

SEQ ID NO: 1475324 - RNA, 19 nt, Artificial Sequence
  Description of Artificial Sequence: Synthetic oligonucleotide
uucccaacugauaugcagc

SEQ ID NO: 1475325 - RNA, 19 nt, Artificial Sequence
  Description of Artificial Sequence: Synthetic oligonucleotide
ugcguugaaaugaugugga

SEQ ID NO: 1475326 - RNA, 19 nt, Artificial Sequence
  Description of Artificial Sequence: Synthetic oligonucleotide
uggacaaccuacugcaaag

SEQ ID NO: 1475327 - RNA, 19 nt, Artificial Sequence
  Description of Artificial Sequence: Synthetic oligonucleotide
uaagaaaucgggacaccug

SEQ ID NO: 1475328 - RNA, 19 nt, Artificial Sequence
  Description of Artificial Sequence: Synthetic oligonucleotide
ugacucucacacaggaagg

SEQ ID NO: 1475329 - RNA, 19 nt, Artificial Sequence
  Description of Artificial Sequence: Synthetic oligonucleotide
caggcaaccaaguagaaga

SEQ ID NO: 1475330 - RNA, 19 nt, Artificial Sequence
  Description of Artificial Sequence: Synthetic oligonucleotide
uuugguccucucuagccgg

SEQ ID NO: 1475331 - RNA, 19 nt, Artificial Sequence
  Description of Artificial Sequence: Synthetic oligonucleotide
aaagcuaugcccaggagaa

SEQ ID NO: 1475332 - RNA, 19 nt, Artificial Sequence
  Description of Artificial Sequence: Synthetic oligonucleotide
uucugaaccaggaacucac

SEQ ID NO: 1475333 - RNA, 19 nt, Artificial Sequence
  Description of Artificial Sequence: Synthetic oligonucleotide
gagauaagaaaucgggaca

SEQ ID NO: 1475334 - RNA, 19 nt, Artificial Sequence
  Description of Artificial Sequence: Synthetic oligonucleotide
aagaguuagcucccacuag

SEQ ID NO: 1475335 - RNA, 19 nt, Artificial Sequence
  Description of Artificial Sequence: Synthetic oligonucleotide
uaaggggugugucugaguc

SEQ ID NO: 1475336 - RNA, 19 nt, Artificial Sequence
  Description of Artificial Sequence: Synthetic oligonucleotide
gaggaugggagucacugcc

SEQ ID NO: 1475337 - RNA, 19 nt, Artificial Sequence
  Description of Artificial Sequence: Synthetic oligonucleotide
gauuugugggaccacauaa

SEQ ID NO: 1475338 - RNA, 19 nt, Artificial Sequence
  Description of Artificial Sequence: Synthetic oligonucleotide
acauuguggcuccacagag

SEQ ID NO: 1475339 - RNA, 19 nt, Artificial Sequence
  Description of Artificial Sequence: Synthetic oligonucleotide
cuuccagaccaugagaugc

SEQ ID NO: 1475340 - RNA, 19 nt, Artificial Sequence
  Description of Artificial Sequence: Synthetic oligonucleotide
cucuugagauaagaaaucg

SEQ ID NO: 1475341 - RNA, 19 nt, Artificial Sequence
  Description of Artificial Sequence: Synthetic oligonucleotide
ugugggaccacauaaucua

SEQ ID NO: 1475342 - RNA, 19 nt, Artificial Sequence
  Description of Artificial Sequence: Synthetic oligonucleotide
guggcgguagauuuguggg

SEQ ID NO: 1475343 - RNA, 19 nt, Artificial Sequence
  Description of Artificial Sequence: Synthetic oligonucleotide
uggcccuugacucucacac

SEQ ID NO: 1475344 - RNA, 19 nt, Artificial Sequence
  Description of Artificial Sequence: Synthetic oligonucleotide
cacauaaucuaggucagcc

SEQ ID NO: 1475345 - RNA, 19 nt, Artificial Sequence
  Description of Artificial Sequence: Synthetic oligonucleotide
gaggcagcacaacugaggc

SEQ ID NO: 1475346 - RNA, 19 nt, Artificial Sequence
  Description of Artificial Sequence: Synthetic oligonucleotide
uacauuguggcuccacaga

SEQ ID NO: 1475347 - RNA, 19 nt, Artificial Sequence
  Description of Artificial Sequence: Synthetic oligonucleotide
ugguccuugaagcaccagc

SEQ ID NO: 1475348 - RNA, 19 nt, Artificial Sequence
  Description of Artificial Sequence: Synthetic oligonucleotide
auaaauggugaaguccagg

SEQ ID NO: 1475349 - RNA, 19 nt, Artificial Sequence
  Description of Artificial Sequence: Synthetic oligonucleotide
cuugggcuagagcagaggc

SEQ ID NO: 1475350 - RNA, 19 nt, Artificial Sequence
  Description of Artificial Sequence: Synthetic oligonucleotide
caucaccaaagcuaugccc

SEQ ID NO: 1475351 - RNA, 19 nt, Artificial Sequence
  Description of Artificial Sequence: Synthetic oligonucleotide
agugaggauaguccugguc

SEQ ID NO: 1475352 - RNA, 19 nt, Artificial Sequence
  Description of Artificial Sequence: Synthetic oligonucleotide
gagauuugguccucucuag

SEQ ID NO: 1475353 - RNA, 19 nt, Artificial Sequence
  Description of Artificial Sequence: Synthetic oligonucleotide
gcuucaaagaugaacuugg

SEQ ID NO: 1475354 - RNA, 19 nt, Artificial Sequence
  Description of Artificial Sequence: Synthetic oligonucleotide
aggacccugagauuugguc

SEQ ID NO: 1475355 - RNA, 19 nt, Artificial Sequence
  Description of Artificial Sequence: Synthetic oligonucleotide
cuggaaaucccacgaaggc

SEQ ID NO: 1475356 - RNA, 19 nt, Artificial Sequence
  Description of Artificial Sequence: Synthetic oligonucleotide
caucacuuccccaauguuc

SEQ ID NO: 1475357 - RNA, 19 nt, Artificial Sequence
  Description of Artificial Sequence: Synthetic oligonucleotide
caaagaugaacuuggggca

SEQ ID NO: 1475358 - RNA, 19 nt, Artificial Sequence
  Description of Artificial Sequence: Synthetic oligonucleotide
uucccaaaugggaugggca

SEQ ID NO: 1475359 - RNA, 19 nt, Artificial Sequence
  Description of Artificial Sequence: Synthetic oligonucleotide
acugcucacaaugaaacca

SEQ ID NO: 1475360 - RNA, 19 nt, Artificial Sequence
  Description of Artificial Sequence: Synthetic oligonucleotide
gaaaucgggacaccugcug

SEQ ID NO: 1475361 - RNA, 19 nt, Artificial Sequence
  Description of Artificial Sequence: Synthetic oligonucleotide
gaggaauaaccucuggcuc

SEQ ID NO: 1475362 - RNA, 19 nt, Artificial Sequence
  Description of Artificial Sequence: Synthetic oligonucleotide
accuacugcaaagaguuag

SEQ ID NO: 1475363 - RNA, 19 nt, Artificial Sequence
  Description of Artificial Sequence: Synthetic oligonucleotide
cuucaaagaugaacuuggg

SEQ ID NO: 1475364 - RNA, 19 nt, Artificial Sequence
  Description of Artificial Sequence: Synthetic oligonucleotide
uguaacagggcugcguuga

SEQ ID NO: 1475365 - RNA, 19 nt, Artificial Sequence
  Description of Artificial Sequence: Synthetic oligonucleotide
aacugauaugcagccacag

SEQ ID NO: 1475366 - RNA, 19 nt, Artificial Sequence
  Description of Artificial Sequence: Synthetic oligonucleotide
cuuggggcaaacaccuucc

SEQ ID NO: 1475367 - RNA, 19 nt, Artificial Sequence
  Description of Artificial Sequence: Synthetic oligonucleotide
cugcguugaaaugaugugg

SEQ ID NO: 1475368 - RNA, 19 nt, Artificial Sequence
  Description of Artificial Sequence: Synthetic oligonucleotide
ugacuugaggaauaaccuc

SEQ ID NO: 1475369 - RNA, 19 nt, Artificial Sequence
  Description of Artificial Sequence: Synthetic oligonucleotide
acucuugagauaagaaauc

SEQ ID NO: 1475370 - RNA, 19 nt, Artificial Sequence
  Description of Artificial Sequence: Synthetic oligonucleotide
caggcuagaaucugaacuc

SEQ ID NO: 1475371 - RNA, 19 nt, Artificial Sequence
  Description of Artificial Sequence: Synthetic oligonucleotide
aagcaggcaaccaaguaga

SEQ ID NO: 1475372 - RNA, 19 nt, Artificial Sequence
  Description of Artificial Sequence: Synthetic oligonucleotide
auaagaaaucgggacaccu

SEQ ID NO: 1475373 - RNA, 19 nt, Artificial Sequence
  Description of Artificial Sequence: Synthetic oligonucleotide
agcgccaucuacucgcauc

SEQ ID NO: 1475374 - RNA, 19 nt, Artificial Sequence
  Description of Artificial Sequence: Synthetic oligonucleotide
ugaaaugauguggagcauc

SEQ ID NO: 1475375 - RNA, 19 nt, Artificial Sequence
  Description of Artificial Sequence: Synthetic oligonucleotide
ucccaacugauaugcagcc

SEQ ID NO: 1475376 - RNA, 19 nt, Artificial Sequence
  Description of Artificial Sequence: Synthetic oligonucleotide
uucggaggauggaagcugc

SEQ ID NO: 1475377 - RNA, 19 nt, Artificial Sequence
  Description of Artificial Sequence: Synthetic oligonucleotide
gguuacacagugguaaggg

SEQ ID NO: 1475378 - RNA, 19 nt, Artificial Sequence
  Description of Artificial Sequence: Synthetic oligonucleotide
accuucuggaaaucccacg

SEQ ID NO: 1475379 - RNA, 19 nt, Artificial Sequence
  Description of Artificial Sequence: Synthetic oligonucleotide
aggucagccugacaaguag

SEQ ID NO: 1475380 - RNA, 19 nt, Artificial Sequence
  Description of Artificial Sequence: Synthetic oligonucleotide
gaauauccagcaccaguac

SEQ ID NO: 1475381 - RNA, 19 nt, Artificial Sequence
  Description of Artificial Sequence: Synthetic oligonucleotide
aggcuagaaucugaacucc

SEQ ID NO: 1475382 - RNA, 19 nt, Artificial Sequence
  Description of Artificial Sequence: Synthetic oligonucleotide
ugccuaacaccaugagagg

SEQ ID NO: 1475383 - RNA, 19 nt, Artificial Sequence
  Description of Artificial Sequence: Synthetic oligonucleotide
agcagaguagacacuuccc

SEQ ID NO: 1475384 - RNA, 19 nt, Artificial Sequence
  Description of Artificial Sequence: Synthetic oligonucleotide
gcaaccaaguagaagagcc

SEQ ID NO: 1475385 - RNA, 19 nt, Artificial Sequence
  Description of Artificial Sequence: Synthetic oligonucleotide
caaugaaaccaauggcuuc

SEQ ID NO: 1475386 - RNA, 19 nt, Artificial Sequence
  Description of Artificial Sequence: Synthetic oligonucleotide
agagcugagacuugggcua

SEQ ID NO: 1475387 - RNA, 19 nt, Artificial Sequence
  Description of Artificial Sequence: Synthetic oligonucleotide
ugggaacucuuccugcaug

SEQ ID NO: 1475388 - RNA, 19 nt, Artificial Sequence
  Description of Artificial Sequence: Synthetic oligonucleotide
uugggcuagagcagaggcc

SEQ ID NO: 1475389 - RNA, 19 nt, Artificial Sequence
  Description of Artificial Sequence: Synthetic oligonucleotide
auguucccaaaugggaugg

SEQ ID NO: 1475390 - RNA, 19 nt, Artificial Sequence
  Description of Artificial Sequence: Synthetic oligonucleotide
agggagugaggauaguccu

SEQ ID NO: 1475391 - RNA, 19 nt, Artificial Sequence
  Description of Artificial Sequence: Synthetic oligonucleotide
uggggcaaacaccuuccag

SEQ ID NO: 1475392 - RNA, 19 nt, Artificial Sequence
  Description of Artificial Sequence: Synthetic oligonucleotide
aguagacacuucccaacug

SEQ ID NO: 1475393 - RNA, 19 nt, Artificial Sequence
  Description of Artificial Sequence: Synthetic oligonucleotide
ugcauguggcgguagauuu

SEQ ID NO: 1475394 - RNA, 19 nt, Artificial Sequence
  Description of Artificial Sequence: Synthetic oligonucleotide
uacugcaaagaguuagcuc

SEQ ID NO: 1475395 - RNA, 19 nt, Artificial Sequence
  Description of Artificial Sequence: Synthetic oligonucleotide
ugguuacacagugguaagg

SEQ ID NO: 1475396 - RNA, 19 nt, Artificial Sequence
  Description of Artificial Sequence: Synthetic oligonucleotide
caguggacaaccuacugca

SEQ ID NO: 1475397 - RNA, 19 nt, Artificial Sequence
  Description of Artificial Sequence: Synthetic oligonucleotide
gaagcugccaaggcacagg

SEQ ID NO: 1475398 - RNA, 19 nt, Artificial Sequence
  Description of Artificial Sequence: Synthetic oligonucleotide
acaacugaggccccagcga

SEQ ID NO: 1475399 - RNA, 19 nt, Artificial Sequence
  Description of Artificial Sequence: Synthetic oligonucleotide
guacaggucaggccagagg

SEQ ID NO: 1475400 - RNA, 19 nt, Artificial Sequence
  Description of Artificial Sequence: Synthetic oligonucleotide
agcugagaccuccagcuca

SEQ ID NO: 1475401 - RNA, 19 nt, Artificial Sequence
  Description of Artificial Sequence: Synthetic oligonucleotide
agaauauccagcaccagua

SEQ ID NO: 1475402 - RNA, 19 nt, Artificial Sequence
  Description of Artificial Sequence: Synthetic oligonucleotide
agccucacucccugggagc

SEQ ID NO: 1475403 - RNA, 19 nt, Artificial Sequence
  Description of Artificial Sequence: Synthetic oligonucleotide
ggacccugagauuuggucc

SEQ ID NO: 1475404 - RNA, 19 nt, Artificial Sequence
  Description of Artificial Sequence: Synthetic oligonucleotide
ugccuucggaggauggaag

SEQ ID NO: 1475405 - RNA, 19 nt, Artificial Sequence
  Description of Artificial Sequence: Synthetic oligonucleotide
ggaaaucccacgaaggcug

SEQ ID NO: 1475406 - RNA, 19 nt, Artificial Sequence
  Description of Artificial Sequence: Synthetic oligonucleotide
aaagaugaacuuggggcaa

SEQ ID NO: 1475407 - RNA, 19 nt, Artificial Sequence
  Description of Artificial Sequence: Synthetic oligonucleotide
gauaagaaaucgggacacc

SEQ ID NO: 1475408 - RNA, 19 nt, Artificial Sequence
  Description of Artificial Sequence: Synthetic oligonucleotide
uggagcaucccggaggcgc

SEQ ID NO: 1475409 - RNA, 19 nt, Artificial Sequence
  Description of Artificial Sequence: Synthetic oligonucleotide
ucaccaaagcuaugcccag

SEQ ID NO: 1475410 - RNA, 19 nt, Artificial Sequence
  Description of Artificial Sequence: Synthetic oligonucleotide
cagaacuagucuucugaac

SEQ ID NO: 1475411 - RNA, 19 nt, Artificial Sequence
  Description of Artificial Sequence: Synthetic oligonucleotide
uacucgcaucaccaaagcu

SEQ ID NO: 1475412 - RNA, 19 nt, Artificial Sequence
  Description of Artificial Sequence: Synthetic oligonucleotide
ugaggaugggagucacugc

SEQ ID NO: 1475413 - RNA, 19 nt, Artificial Sequence
  Description of Artificial Sequence: Synthetic oligonucleotide
uugauauggagagcugaga

SEQ ID NO: 1475414 - RNA, 19 nt, Artificial Sequence
  Description of Artificial Sequence: Synthetic oligonucleotide
caggccuagcaacagugcc

SEQ ID NO: 1475415 - RNA, 19 nt, Artificial Sequence
  Description of Artificial Sequence: Synthetic oligonucleotide
cugguuacacagugguaag

SEQ ID NO: 1475416 - RNA, 19 nt, Artificial Sequence
  Description of Artificial Sequence: Synthetic oligonucleotide
acaccaugagaggcaaccc

SEQ ID NO: 1475417 - RNA, 19 nt, Artificial Sequence
  Description of Artificial Sequence: Synthetic oligonucleotide
cccaauguucccaaauggg

SEQ ID NO: 1475418 - RNA, 19 nt, Artificial Sequence
  Description of Artificial Sequence: Synthetic oligonucleotide
gcucccacuaguaagcagg

SEQ ID NO: 1475419 - RNA, 19 nt, Artificial Sequence
  Description of Artificial Sequence: Synthetic oligonucleotide
uccucuggugggacagugg

SEQ ID NO: 1475420 - RNA, 19 nt, Artificial Sequence
  Description of Artificial Sequence: Synthetic oligonucleotide
ggagugaggauaguccugg

SEQ ID NO: 1475421 - RNA, 19 nt, Artificial Sequence
  Description of Artificial Sequence: Synthetic oligonucleotide
accauagcagcagaguaga

SEQ ID NO: 1475422 - RNA, 19 nt, Artificial Sequence
  Description of Artificial Sequence: Synthetic oligonucleotide
cuugcagaauauccagcac

SEQ ID NO: 1475423 - RNA, 19 nt, Artificial Sequence
  Description of Artificial Sequence: Synthetic oligonucleotide
caugaccuucuggaaaucc

SEQ ID NO: 1475424 - RNA, 19 nt, Artificial Sequence
  Description of Artificial Sequence: Synthetic oligonucleotide
aacugaggccccagcgacc

SEQ ID NO: 1475425 - RNA, 19 nt, Artificial Sequence
  Description of Artificial Sequence: Synthetic oligonucleotide
uagacacuucccaacugau

SEQ ID NO: 1475426 - RNA, 19 nt, Artificial Sequence
  Description of Artificial Sequence: Synthetic oligonucleotide
acaaccuacugcaaagagu

SEQ ID NO: 1475427 - RNA, 19 nt, Artificial Sequence
  Description of Artificial Sequence: Synthetic oligonucleotide
ucccacgaaggcugcaugc

SEQ ID NO: 1475428 - RNA, 19 nt, Artificial Sequence
  Description of Artificial Sequence: Synthetic oligonucleotide
ugggccagaacuagucuuc

SEQ ID NO: 1475429 - RNA, 19 nt, Artificial Sequence
  Description of Artificial Sequence: Synthetic oligonucleotide
cugcaaagaguuagcuccc

SEQ ID NO: 1475430 - RNA, 19 nt, Artificial Sequence
  Description of Artificial Sequence: Synthetic oligonucleotide
guaagcagucucugguuac

SEQ ID NO: 1475431 - RNA, 19 nt, Artificial Sequence
  Description of Artificial Sequence: Synthetic oligonucleotide
uuccccaauguucccaaau

SEQ ID NO: 1475432 - RNA, 19 nt, Artificial Sequence
  Description of Artificial Sequence: Synthetic oligonucleotide
acaaugaaaccaauggcuu

SEQ ID NO: 1475433 - RNA, 19 nt, Artificial Sequence
  Description of Artificial Sequence: Synthetic oligonucleotide
agcuaugcccaggagaagu

SEQ ID NO: 1475434 - RNA, 19 nt, Artificial Sequence
  Description of Artificial Sequence: Synthetic oligonucleotide
cuaguaagcaggcaaccaa

SEQ ID NO: 1475435 - RNA, 19 nt, Artificial Sequence
  Description of Artificial Sequence: Synthetic oligonucleotide
acgugguggugcuucaucu

SEQ ID NO: 1475436 - RNA, 19 nt, Artificial Sequence
  Description of Artificial Sequence: Synthetic oligonucleotide
gcgcacaaagagcacaggg

SEQ ID NO: 1475437 - RNA, 19 nt, Artificial Sequence
  Description of Artificial Sequence: Synthetic oligonucleotide
caaccuacugcaaagaguu

SEQ ID NO: 1475438 - RNA, 19 nt, Artificial Sequence
  Description of Artificial Sequence: Synthetic oligonucleotide
acucgcaucaccaaagcua

SEQ ID NO: 1475439 - RNA, 19 nt, Artificial Sequence
  Description of Artificial Sequence: Synthetic oligonucleotide
aggagaagucccacacugc

SEQ ID NO: 1475440 - RNA, 19 nt, Artificial Sequence
  Description of Artificial Sequence: Synthetic oligonucleotide
cauagcagcagaguagaca

SEQ ID NO: 1475441 - RNA, 19 nt, Artificial Sequence
  Description of Artificial Sequence: Synthetic oligonucleotide
gacaugcucagccugggcu

SEQ ID NO: 1475442 - RNA, 19 nt, Artificial Sequence
  Description of Artificial Sequence: Synthetic oligonucleotide
aucuacucgcaucaccaaa

SEQ ID NO: 1475443 - RNA, 19 nt, Artificial Sequence
  Description of Artificial Sequence: Synthetic oligonucleotide
gaacuuggggcaaacaccu

SEQ ID NO: 1475444 - RNA, 19 nt, Artificial Sequence
  Description of Artificial Sequence: Synthetic oligonucleotide
uaagcagucucugguuaca

SEQ ID NO: 1475445 - RNA, 19 nt, Artificial Sequence
  Description of Artificial Sequence: Synthetic oligonucleotide
agccaugaccuucuggaaa

SEQ ID NO: 1475446 - RNA, 19 nt, Artificial Sequence
  Description of Artificial Sequence: Synthetic oligonucleotide
gagaacagcucagccauca

SEQ ID NO: 1475447 - RNA, 19 nt, Artificial Sequence
  Description of Artificial Sequence: Synthetic oligonucleotide
accaugagaugccuucgga

SEQ ID NO: 1475448 - RNA, 19 nt, Artificial Sequence
  Description of Artificial Sequence: Synthetic oligonucleotide
uaaucuaggucagccugac

SEQ ID NO: 1475449 - RNA, 19 nt, Artificial Sequence
  Description of Artificial Sequence: Synthetic oligonucleotide
cauugauauggagagcuga

SEQ ID NO: 1475450 - RNA, 19 nt, Artificial Sequence
  Description of Artificial Sequence: Synthetic oligonucleotide
cacuaguaagcaggcaacc

SEQ ID NO: 1475451 - RNA, 19 nt, Artificial Sequence
  Description of Artificial Sequence: Synthetic oligonucleotide
gcaacagugccaguguggg

SEQ ID NO: 1475452 - RNA, 19 nt, Artificial Sequence
  Description of Artificial Sequence: Synthetic oligonucleotide
ggggcaaacaccuuccaga

SEQ ID NO: 1475453 - RNA, 19 nt, Artificial Sequence
  Description of Artificial Sequence: Synthetic oligonucleotide
accacauaaucuaggucag

SEQ ID NO: 1475454 - RNA, 19 nt, Artificial Sequence
  Description of Artificial Sequence: Synthetic oligonucleotide
cagcgcacaaagagcacag

SEQ ID NO: 1475455 - RNA, 19 nt, Artificial Sequence
  Description of Artificial Sequence: Synthetic oligonucleotide
aaucuaggucagccugaca

SEQ ID NO: 1475456 - RNA, 19 nt, Artificial Sequence
  Description of Artificial Sequence: Synthetic oligonucleotide
auaaucuaggucagccuga

SEQ ID NO: 1475457 - RNA, 19 nt, Artificial Sequence
  Description of Artificial Sequence: Synthetic oligonucleotide
gugguaaggggugugucug

SEQ ID NO: 1475458 - RNA, 19 nt, Artificial Sequence
  Description of Artificial Sequence: Synthetic oligonucleotide
gguccuugaagcaccagcc

SEQ ID NO: 1475459 - RNA, 19 nt, Artificial Sequence
  Description of Artificial Sequence: Synthetic oligonucleotide
agaggauucuccagcucuc

SEQ ID NO: 1475460 - RNA, 19 nt, Artificial Sequence
  Description of Artificial Sequence: Synthetic oligonucleotide
ucaggacucuugagauaag

SEQ ID NO: 1475461 - RNA, 19 nt, Artificial Sequence
  Description of Artificial Sequence: Synthetic oligonucleotide
gcccuugacucucacacag

SEQ ID NO: 1475462 - RNA, 19 nt, Artificial Sequence
  Description of Artificial Sequence: Synthetic oligonucleotide
guagauuugugggaccaca

SEQ ID NO: 1475463 - RNA, 19 nt, Artificial Sequence
  Description of Artificial Sequence: Synthetic oligonucleotide
agggcugugggacuguaua

SEQ ID NO: 1475464 - RNA, 19 nt, Artificial Sequence
  Description of Artificial Sequence: Synthetic oligonucleotide
ggagcaguggacaaccuac

SEQ ID NO: 1475465 - RNA, 19 nt, Artificial Sequence
  Description of Artificial Sequence: Synthetic oligonucleotide
agauuugugggaccacaua

SEQ ID NO: 1475466 - RNA, 19 nt, Artificial Sequence
  Description of Artificial Sequence: Synthetic oligonucleotide
uggcgguagauuuguggga

SEQ ID NO: 1475467 - RNA, 19 nt, Artificial Sequence
  Description of Artificial Sequence: Synthetic oligonucleotide
aggcgcaucuccaucagug

SEQ ID NO: 1475468 - RNA, 19 nt, Artificial Sequence
  Description of Artificial Sequence: Synthetic oligonucleotide
augcccaguaggcagccgu

SEQ ID NO: 1475469 - RNA, 19 nt, Artificial Sequence
  Description of Artificial Sequence: Synthetic oligonucleotide
cuucggaggauggaagcug

SEQ ID NO: 1475470 - RNA, 19 nt, Artificial Sequence
  Description of Artificial Sequence: Synthetic oligonucleotide
aaucccacgaaggcugcau

SEQ ID NO: 1475471 - RNA, 19 nt, Artificial Sequence
  Description of Artificial Sequence: Synthetic oligonucleotide
aguaagcaggcaaccaagu

SEQ ID NO: 1475472 - RNA, 19 nt, Artificial Sequence
  Description of Artificial Sequence: Synthetic oligonucleotide
agcucccacuaguaagcag

SEQ ID NO: 1475473 - RNA, 19 nt, Artificial Sequence
  Description of Artificial Sequence: Synthetic oligonucleotide
cacaguuacaggacccuga

SEQ ID NO: 1475474 - RNA, 19 nt, Artificial Sequence
  Description of Artificial Sequence: Synthetic oligonucleotide
gaguagacacuucccaacu

SEQ ID NO: 1475475 - RNA, 19 nt, Artificial Sequence
  Description of Artificial Sequence: Synthetic oligonucleotide
ccuacugcaaagaguuagc

SEQ ID NO: 1475476 - RNA, 19 nt, Artificial Sequence
  Description of Artificial Sequence: Synthetic oligonucleotide
agcagucucugguuacaca

SEQ ID NO: 1475477 - RNA, 19 nt, Artificial Sequence
  Description of Artificial Sequence: Synthetic oligonucleotide
guucccaaaugggaugggc

SEQ ID NO: 1475478 - RNA, 19 nt, Artificial Sequence
  Description of Artificial Sequence: Synthetic oligonucleotide
ccccaauguucccaaaugg

SEQ ID NO: 1475479 - RNA, 19 nt, Artificial Sequence
  Description of Artificial Sequence: Synthetic oligonucleotide
uguucccaaaugggauggg

SEQ ID NO: 1475480 - RNA, 19 nt, Artificial Sequence
  Description of Artificial Sequence: Synthetic oligonucleotide
gccagaacuagucuucuga

SEQ ID NO: 1475481 - RNA, 19 nt, Artificial Sequence
  Description of Artificial Sequence: Synthetic oligonucleotide
uuggggcaaacaccuucca

SEQ ID NO: 1475482 - RNA, 19 nt, Artificial Sequence
  Description of Artificial Sequence: Synthetic oligonucleotide
gacgugguggugcuucauc

SEQ ID NO: 1475483 - RNA, 19 nt, Artificial Sequence
  Description of Artificial Sequence: Synthetic oligonucleotide
agcccgaggcagcacaacu

SEQ ID NO: 1475484 - RNA, 19 nt, Artificial Sequence
  Description of Artificial Sequence: Synthetic oligonucleotide
gaaaucccacgaaggcugc

SEQ ID NO: 1475485 - RNA, 19 nt, Artificial Sequence
  Description of Artificial Sequence: Synthetic oligonucleotide
uaggucagccugacaagua

SEQ ID NO: 1475486 - RNA, 19 nt, Artificial Sequence
  Description of Artificial Sequence: Synthetic oligonucleotide
caaccaaguagaagagcca

SEQ ID NO: 1475487 - RNA, 19 nt, Artificial Sequence
  Description of Artificial Sequence: Synthetic oligonucleotide
aggauaguccugguccuug

SEQ ID NO: 1475488 - RNA, 19 nt, Artificial Sequence
  Description of Artificial Sequence: Synthetic oligonucleotide
ugcccaguaggcagccgug

SEQ ID NO: 1475489 - RNA, 19 nt, Artificial Sequence
  Description of Artificial Sequence: Synthetic oligonucleotide
ccaauguucccaaauggga

SEQ ID NO: 1475490 - RNA, 19 nt, Artificial Sequence
  Description of Artificial Sequence: Synthetic oligonucleotide
ucggaggauggaagcugcc

SEQ ID NO: 1475491 - RNA, 19 nt, Artificial Sequence
  Description of Artificial Sequence: Synthetic oligonucleotide
aggaacucacagcgccauc

SEQ ID NO: 1475492 - RNA, 19 nt, Artificial Sequence
  Description of Artificial Sequence: Synthetic oligonucleotide
caaagaguuagcucccacu

SEQ ID NO: 1475493 - RNA, 19 nt, Artificial Sequence
  Description of Artificial Sequence: Synthetic oligonucleotide
cagaauauccagcaccagu

SEQ ID NO: 1475494 - RNA, 19 nt, Artificial Sequence
  Description of Artificial Sequence: Synthetic oligonucleotide
ugcaaagaguuagcuccca

SEQ ID NO: 1475495 - RNA, 19 nt, Artificial Sequence
  Description of Artificial Sequence: Synthetic oligonucleotide
guaagcaggcaaccaagua

SEQ ID NO: 1475496 - RNA, 19 nt, Artificial Sequence
  Description of Artificial Sequence: Synthetic oligonucleotide
aaggcugacuugaggaaua

SEQ ID NO: 1475497 - RNA, 19 nt, Artificial Sequence
  Description of Artificial Sequence: Synthetic oligonucleotide
cucuggugggacaguggag

SEQ ID NO: 1475498 - RNA, 19 nt, Artificial Sequence
  Description of Artificial Sequence: Synthetic oligonucleotide
caauguucccaaaugggau

SEQ ID NO: 1475499 - RNA, 19 nt, Artificial Sequence
  Description of Artificial Sequence: Synthetic oligonucleotide
aucccacgaaggcugcaug

SEQ ID NO: 1475500 - RNA, 19 nt, Artificial Sequence
  Description of Artificial Sequence: Synthetic oligonucleotide
ccuagcaacagugccagug

SEQ ID NO: 1475501 - RNA, 19 nt, Artificial Sequence
  Description of Artificial Sequence: Synthetic oligonucleotide
caggugcugacaugcucag

SEQ ID NO: 1475502 - RNA, 19 nt, Artificial Sequence
  Description of Artificial Sequence: Synthetic oligonucleotide
aagcuaugcccaggagaag

SEQ ID NO: 1475503 - RNA, 19 nt, Artificial Sequence
  Description of Artificial Sequence: Synthetic oligonucleotide
cucacucccugggagcugc

SEQ ID NO: 1475504 - RNA, 19 nt, Artificial Sequence
  Description of Artificial Sequence: Synthetic oligonucleotide
cguugaaaugauguggagc

SEQ ID NO: 1475505 - RNA, 19 nt, Artificial Sequence
  Description of Artificial Sequence: Synthetic oligonucleotide
ggcauugauauggagagcu

SEQ ID NO: 1475506 - RNA, 19 nt, Artificial Sequence
  Description of Artificial Sequence: Synthetic oligonucleotide
gaccuucuggaaaucccac

SEQ ID NO: 1475507 - RNA, 19 nt, Artificial Sequence
  Description of Artificial Sequence: Synthetic oligonucleotide
gugggaccacauaaucuag

SEQ ID NO: 1475508 - RNA, 19 nt, Artificial Sequence
  Description of Artificial Sequence: Synthetic oligonucleotide
aggucaggccagaggauuc

SEQ ID NO: 1475509 - RNA, 19 nt, Artificial Sequence
  Description of Artificial Sequence: Synthetic oligonucleotide
ggacaaagagguacuugag

SEQ ID NO: 1475510 - RNA, 19 nt, Artificial Sequence
  Description of Artificial Sequence: Synthetic oligonucleotide
gauaguccugguccuugaa

SEQ ID NO: 1475511 - RNA, 19 nt, Artificial Sequence
  Description of Artificial Sequence: Synthetic oligonucleotide
ccaucuacucgcaucacca

SEQ ID NO: 1475512 - RNA, 19 nt, Artificial Sequence
  Description of Artificial Sequence: Synthetic oligonucleotide
gaagagccaugaccuucug

SEQ ID NO: 1475513 - RNA, 19 nt, Artificial Sequence
  Description of Artificial Sequence: Synthetic oligonucleotide
ucuagccggcccugggaac

SEQ ID NO: 1475514 - RNA, 19 nt, Artificial Sequence
  Description of Artificial Sequence: Synthetic oligonucleotide
ugagaacagcucagccauc

SEQ ID NO: 1475515 - RNA, 19 nt, Artificial Sequence
  Description of Artificial Sequence: Synthetic oligonucleotide
accaaguagaagagccaug

SEQ ID NO: 1475516 - RNA, 19 nt, Artificial Sequence
  Description of Artificial Sequence: Synthetic oligonucleotide
ccacuaguaagcaggcaac

SEQ ID NO: 1475517 - RNA, 19 nt, Artificial Sequence
  Description of Artificial Sequence: Synthetic oligonucleotide
gacuugggcuagagcagag

SEQ ID NO: 1475518 - RNA, 19 nt, Artificial Sequence
  Description of Artificial Sequence: Synthetic oligonucleotide
gccaucuacucgcaucacc

SEQ ID NO: 1475519 - RNA, 19 nt, Artificial Sequence
  Description of Artificial Sequence: Synthetic oligonucleotide
uugaaaugauguggagcau

SEQ ID NO: 1475520 - RNA, 19 nt, Artificial Sequence
  Description of Artificial Sequence: Synthetic oligonucleotide
aaaucccacgaaggcugca

SEQ ID NO: 1475521 - RNA, 19 nt, Artificial Sequence
  Description of Artificial Sequence: Synthetic oligonucleotide
caacugauaugcagccaca

SEQ ID NO: 1475522 - RNA, 19 nt, Artificial Sequence
  Description of Artificial Sequence: Synthetic oligonucleotide
ucccggaggcgcaucucca

SEQ ID NO: 1475523 - RNA, 19 nt, Artificial Sequence
  Description of Artificial Sequence: Synthetic oligonucleotide
agaaaucgggacaccugcu

SEQ ID NO: 1475524 - RNA, 19 nt, Artificial Sequence
  Description of Artificial Sequence: Synthetic oligonucleotide
uccagaccaugagaugccu

SEQ ID NO: 1475525 - RNA, 19 nt, Artificial Sequence
  Description of Artificial Sequence: Synthetic oligonucleotide
cucgcaucaccaaagcuau

SEQ ID NO: 1475526 - RNA, 19 nt, Artificial Sequence
  Description of Artificial Sequence: Synthetic oligonucleotide
agcgcacaaagagcacagg

SEQ ID NO: 1475527 - RNA, 19 nt, Artificial Sequence
  Description of Artificial Sequence: Synthetic oligonucleotide
gaaguccaggguaagcagu

SEQ ID NO: 1475528 - RNA, 19 nt, Artificial Sequence
  Description of Artificial Sequence: Synthetic oligonucleotide
caccaaagcuaugcccagg

SEQ ID NO: 1475529 - RNA, 19 nt, Artificial Sequence
  Description of Artificial Sequence: Synthetic oligonucleotide
ugagaugccuucggaggau

SEQ ID NO: 1475530 - RNA, 19 nt, Artificial Sequence
  Description of Artificial Sequence: Synthetic oligonucleotide
uacuugaggcccagcugua

SEQ ID NO: 1475531 - RNA, 19 nt, Artificial Sequence
  Description of Artificial Sequence: Synthetic oligonucleotide
gguaagcagucucugguua

SEQ ID NO: 1475532 - RNA, 19 nt, Artificial Sequence
  Description of Artificial Sequence: Synthetic oligonucleotide
caccugagaacagcucagc

SEQ ID NO: 1475533 - RNA, 19 nt, Artificial Sequence
  Description of Artificial Sequence: Synthetic oligonucleotide
cgcaucaccaaagcuaugc

SEQ ID NO: 1475534 - RNA, 19 nt, Artificial Sequence
  Description of Artificial Sequence: Synthetic oligonucleotide
ggaugggagucacugccac

SEQ ID NO: 1475535 - RNA, 19 nt, Artificial Sequence
  Description of Artificial Sequence: Synthetic oligonucleotide
ccuaacaccaugagaggca

SEQ ID NO: 1475536 - RNA, 19 nt, Artificial Sequence
  Description of Artificial Sequence: Synthetic oligonucleotide
ggugaaguccaggguaagc

SEQ ID NO: 1475537 - RNA, 19 nt, Artificial Sequence
  Description of Artificial Sequence: Synthetic oligonucleotide
aggccuagcaacagugcca

SEQ ID NO: 1475538 - RNA, 19 nt, Artificial Sequence
  Description of Artificial Sequence: Synthetic oligonucleotide
ggcaggccuagcaacagug

SEQ ID NO: 1475539 - RNA, 19 nt, Artificial Sequence
  Description of Artificial Sequence: Synthetic oligonucleotide
gguaaggggugugucugag

SEQ ID NO: 1475540 - RNA, 19 nt, Artificial Sequence
  Description of Artificial Sequence: Synthetic oligonucleotide
gcagccgugccuaacacca

SEQ ID NO: 1475541 - RNA, 19 nt, Artificial Sequence
  Description of Artificial Sequence: Synthetic oligonucleotide
guauaggaacagugcagcu

SEQ ID NO: 1475542 - RNA, 19 nt, Artificial Sequence
  Description of Artificial Sequence: Synthetic oligonucleotide
ccaaugcccaguaggcagc

SEQ ID NO: 1475543 - RNA, 19 nt, Artificial Sequence
  Description of Artificial Sequence: Synthetic oligonucleotide
gggcucaggacucuugaga

SEQ ID NO: 1475544 - RNA, 19 nt, Artificial Sequence
  Description of Artificial Sequence: Synthetic oligonucleotide
ggcgguagauuugugggac

SEQ ID NO: 1475545 - RNA, 19 nt, Artificial Sequence
  Description of Artificial Sequence: Synthetic oligonucleotide
ucgcaucaccaaagcuaug

SEQ ID NO: 1475546 - RNA, 19 nt, Artificial Sequence
  Description of Artificial Sequence: Synthetic oligonucleotide
caggacucuugagauaaga

SEQ ID NO: 1475547 - RNA, 19 nt, Artificial Sequence
  Description of Artificial Sequence: Synthetic oligonucleotide
auaugcagccacaguuaca

SEQ ID NO: 1475548 - RNA, 19 nt, Artificial Sequence
  Description of Artificial Sequence: Synthetic oligonucleotide
uagcucccacuaguaagca

SEQ ID NO: 1475549 - RNA, 19 nt, Artificial Sequence
  Description of Artificial Sequence: Synthetic oligonucleotide
gcaggcaaccaaguagaag

SEQ ID NO: 1475550 - RNA, 19 nt, Artificial Sequence
  Description of Artificial Sequence: Synthetic oligonucleotide
gcguugaaaugauguggag

SEQ ID NO: 1475551 - RNA, 19 nt, Artificial Sequence
  Description of Artificial Sequence: Synthetic oligonucleotide
ggcaaccaaguagaagagc

SEQ ID NO: 1475552 - RNA, 19 nt, Artificial Sequence
  Description of Artificial Sequence: Synthetic oligonucleotide
gcaaagaguuagcucccac

SEQ ID NO: 1475553 - RNA, 19 nt, Artificial Sequence
  Description of Artificial Sequence: Synthetic oligonucleotide
gcgaccagggcccggagac

SEQ ID NO: 1475554 - RNA, 19 nt, Artificial Sequence
  Description of Artificial Sequence: Synthetic oligonucleotide
augccuucggaggauggaa

SEQ ID NO: 1475555 - RNA, 19 nt, Artificial Sequence
  Description of Artificial Sequence: Synthetic oligonucleotide
gcugggcauugauauggag

SEQ ID NO: 1475556 - RNA, 19 nt, Artificial Sequence
  Description of Artificial Sequence: Synthetic oligonucleotide
gaacucacagcgccaucua

SEQ ID NO: 1475557 - RNA, 19 nt, Artificial Sequence
  Description of Artificial Sequence: Synthetic oligonucleotide
ccaccugagaacagcucag

SEQ ID NO: 1475558 - RNA, 19 nt, Artificial Sequence
  Description of Artificial Sequence: Synthetic oligonucleotide
cccacuaguaagcaggcaa

SEQ ID NO: 1475559 - RNA, 19 nt, Artificial Sequence
  Description of Artificial Sequence: Synthetic oligonucleotide
gagacgugguggugcuuca

SEQ ID NO: 1475560 - RNA, 19 nt, Artificial Sequence
  Description of Artificial Sequence: Synthetic oligonucleotide
caugcucagccugggcuac

SEQ ID NO: 1475561 - RNA, 19 nt, Artificial Sequence
  Description of Artificial Sequence: Synthetic oligonucleotide
ugugggcacaaggcugacu

SEQ ID NO: 1475562 - RNA, 19 nt, Artificial Sequence
  Description of Artificial Sequence: Synthetic oligonucleotide
cugugggacuguauaggaa

SEQ ID NO: 1475563 - RNA, 19 nt, Artificial Sequence
  Description of Artificial Sequence: Synthetic oligonucleotide
ccuugacucucacacagga

SEQ ID NO: 1475564 - RNA, 19 nt, Artificial Sequence
  Description of Artificial Sequence: Synthetic oligonucleotide
ucccacuaguaagcaggca

SEQ ID NO: 1475565 - RNA, 19 nt, Artificial Sequence
  Description of Artificial Sequence: Synthetic oligonucleotide
agcgaccagggcccggaga

SEQ ID NO: 1475566 - RNA, 19 nt, Artificial Sequence
  Description of Artificial Sequence: Synthetic oligonucleotide
ggagacgugguggugcuuc

SEQ ID NO: 1475567 - RNA, 19 nt, Artificial Sequence
  Description of Artificial Sequence: Synthetic oligonucleotide
gggaccugagaagggagug

SEQ ID NO: 1475568 - RNA, 19 nt, Artificial Sequence
  Description of Artificial Sequence: Synthetic oligonucleotide
cugagauuugguccucucu

SEQ ID NO: 1475569 - RNA, 19 nt, Artificial Sequence
  Description of Artificial Sequence: Synthetic oligonucleotide
ggcagccgugccuaacacc

SEQ ID NO: 1475570 - RNA, 19 nt, Artificial Sequence
  Description of Artificial Sequence: Synthetic oligonucleotide
agucucucuugcagaauau

SEQ ID NO: 1475571 - RNA, 19 nt, Artificial Sequence
  Description of Artificial Sequence: Synthetic oligonucleotide
cuuggcccuugacucucac

SEQ ID NO: 1475572 - RNA, 19 nt, Artificial Sequence
  Description of Artificial Sequence: Synthetic oligonucleotide
caucuacucgcaucaccaa

SEQ ID NO: 1475573 - RNA, 19 nt, Artificial Sequence
  Description of Artificial Sequence: Synthetic oligonucleotide
ggggcucaggacucuugag

SEQ ID NO: 1475574 - RNA, 19 nt, Artificial Sequence
  Description of Artificial Sequence: Synthetic oligonucleotide
agacacuucccaacugaua

SEQ ID NO: 1475575 - RNA, 19 nt, Artificial Sequence
  Description of Artificial Sequence: Synthetic oligonucleotide
cuacugcaaagaguuagcu

SEQ ID NO: 1475576 - RNA, 19 nt, Artificial Sequence
  Description of Artificial Sequence: Synthetic oligonucleotide
ggauaguccugguccuuga

SEQ ID NO: 1475577 - RNA, 19 nt, Artificial Sequence
  Description of Artificial Sequence: Synthetic oligonucleotide
ggcucaggacucuugagau

SEQ ID NO: 1475578 - RNA, 19 nt, Artificial Sequence
  Description of Artificial Sequence: Synthetic oligonucleotide
ggaacucacagcgccaucu

SEQ ID NO: 1475579 - RNA, 19 nt, Artificial Sequence
  Description of Artificial Sequence: Synthetic oligonucleotide
agggcugcguugaaaugau

SEQ ID NO: 1475580 - RNA, 19 nt, Artificial Sequence
  Description of Artificial Sequence: Synthetic oligonucleotide
cccuugacucucacacagg

SEQ ID NO: 1475581 - RNA, 19 nt, Artificial Sequence
  Description of Artificial Sequence: Synthetic oligonucleotide
gcauugauauggagagcug

SEQ ID NO: 1475582 - RNA, 19 nt, Artificial Sequence
  Description of Artificial Sequence: Synthetic oligonucleotide
guuacaggacccugagauu

SEQ ID NO: 1475583 - RNA, 19 nt, Artificial Sequence
  Description of Artificial Sequence: Synthetic oligonucleotide
gcuagaaucugaacuccaa

SEQ ID NO: 1475584 - RNA, 19 nt, Artificial Sequence
  Description of Artificial Sequence: Synthetic oligonucleotide
gguagauuugugggaccac

SEQ ID NO: 1475585 - RNA, 19 nt, Artificial Sequence
  Description of Artificial Sequence: Synthetic oligonucleotide
ccagaacuagucuucugaa

SEQ ID NO: 1475586 - RNA, 19 nt, Artificial Sequence
  Description of Artificial Sequence: Synthetic oligonucleotide
gcgguagauuugugggacc

SEQ ID NO: 1475587 - RNA, 19 nt, Artificial Sequence
  Description of Artificial Sequence: Synthetic oligonucleotide
acccugagauuugguccuc

SEQ ID NO: 1475588 - RNA, 19 nt, Artificial Sequence
  Description of Artificial Sequence: Synthetic oligonucleotide
ggccagaacuagucuucug

SEQ ID NO: 1475589 - RNA, 19 nt, Artificial Sequence
  Description of Artificial Sequence: Synthetic oligonucleotide
ggaugggcaggccuagcaa

SEQ ID NO: 1475590 - RNA, 19 nt, Artificial Sequence
  Description of Artificial Sequence: Synthetic oligonucleotide
cacuuccccaauguuccca

SEQ ID NO: 1475591 - RNA, 19 nt, Artificial Sequence
  Description of Artificial Sequence: Synthetic oligonucleotide
caguuacaggacccugaga

SEQ ID NO: 1475592 - RNA, 19 nt, Artificial Sequence
  Description of Artificial Sequence: Synthetic oligonucleotide
cccaguaggcagccgugcc

SEQ ID NO: 1475593 - RNA, 19 nt, Artificial Sequence
  Description of Artificial Sequence: Synthetic oligonucleotide
ggcuagaaucugaacucca

SEQ ID NO: 1475594 - RNA, 19 nt, Artificial Sequence
  Description of Artificial Sequence: Synthetic oligonucleotide
aguggacaaccuacugcaa

SEQ ID NO: 1475595 - RNA, 19 nt, Artificial Sequence
  Description of Artificial Sequence: Synthetic oligonucleotide
ccugagauuugguccucuc

SEQ ID NO: 1475596 - RNA, 19 nt, Artificial Sequence
  Description of Artificial Sequence: Synthetic oligonucleotide
guaaggggugugucugagu

SEQ ID NO: 1475597 - RNA, 19 nt, Artificial Sequence
  Description of Artificial Sequence: Synthetic oligonucleotide
cccacgaaggcugcaugcc

SEQ ID NO: 1475598 - RNA, 19 nt, Artificial Sequence
  Description of Artificial Sequence: Synthetic oligonucleotide
cugggccagaacuagucuu

SEQ ID NO: 1475599 - RNA, 19 nt, Artificial Sequence
  Description of Artificial Sequence: Synthetic oligonucleotide
cccggagacgugguggugc

SEQ ID NO: 1475600 - RNA, 19 nt, Artificial Sequence
  Description of Artificial Sequence: Synthetic oligonucleotide
cugguccuugaagcaccag

SEQ ID NO: 1475601 - RNA, 19 nt, Artificial Sequence
  Description of Artificial Sequence: Synthetic oligonucleotide
ccaaggacaaagagguacu

SEQ ID NO: 1475602 - RNA, 19 nt, Artificial Sequence
  Description of Artificial Sequence: Synthetic oligonucleotide
gcuaugcccaggagaaguc

SEQ ID NO: 1475603 - RNA, 19 nt, Artificial Sequence
  Description of Artificial Sequence: Synthetic oligonucleotide
uaccucugcugggccagaa

SEQ ID NO: 1475604 - RNA, 19 nt, Artificial Sequence
  Description of Artificial Sequence: Synthetic oligonucleotide
caaggcugacuugaggaau

SEQ ID NO: 1475605 - RNA, 19 nt, Artificial Sequence
  Description of Artificial Sequence: Synthetic oligonucleotide
cacagagauucugaauuau

SEQ ID NO: 1475606 - RNA, 19 nt, Artificial Sequence
  Description of Artificial Sequence: Synthetic oligonucleotide
cagucucugguuacacagu

SEQ ID NO: 1475607 - RNA, 19 nt, Artificial Sequence
  Description of Artificial Sequence: Synthetic oligonucleotide
agcaggcaaccaaguagaa

SEQ ID NO: 1475608 - RNA, 19 nt, Artificial Sequence
  Description of Artificial Sequence: Synthetic oligonucleotide
ggaccugagaagggaguga

SEQ ID NO: 1475609 - RNA, 19 nt, Artificial Sequence
  Description of Artificial Sequence: Synthetic oligonucleotide
gucaggccagaggauucuc

SEQ ID NO: 1475610 - RNA, 19 nt, Artificial Sequence
  Description of Artificial Sequence: Synthetic oligonucleotide
ccauagcagcagaguagac

SEQ ID NO: 1475611 - RNA, 19 nt, Artificial Sequence
  Description of Artificial Sequence: Synthetic oligonucleotide
cgugccuaacaccaugaga

SEQ ID NO: 1475612 - RNA, 19 nt, Artificial Sequence
  Description of Artificial Sequence: Synthetic oligonucleotide
ccacagagauucugaauua

SEQ ID NO: 1475613 - RNA, 19 nt, Artificial Sequence
  Description of Artificial Sequence: Synthetic oligonucleotide
ccgugccuaacaccaugag

SEQ ID NO: 1475614 - RNA, 19 nt, Artificial Sequence
  Description of Artificial Sequence: Synthetic oligonucleotide
gcagaggccugaggauggg

SEQ ID NO: 1475615 - RNA, 19 nt, Artificial Sequence
  Description of Artificial Sequence: Synthetic oligonucleotide
ccagcgcacaaagagcaca

SEQ ID NO: 1475616 - RNA, 19 nt, Artificial Sequence
  Description of Artificial Sequence: Synthetic oligonucleotide
ccacaguuacaggacccug

SEQ ID NO: 1475617 - RNA, 19 nt, Artificial Sequence
  Description of Artificial Sequence: Synthetic oligonucleotide
agacgugguggugcuucau

SEQ ID NO: 1475618 - RNA, 19 nt, Artificial Sequence
  Description of Artificial Sequence: Synthetic oligonucleotide
gggacuguauaggaacagu

SEQ ID NO: 1475619 - RNA, 19 nt, Artificial Sequence
  Description of Artificial Sequence: Synthetic oligonucleotide
cuagccggcccugggaacu

SEQ ID NO: 1475620 - RNA, 19 nt, Artificial Sequence
  Description of Artificial Sequence: Synthetic oligonucleotide
caucccggaggcgcaucuc

SEQ ID NO: 1475621 - RNA, 19 nt, Artificial Sequence
  Description of Artificial Sequence: Synthetic oligonucleotide
cugaggccccagcgaccag

SEQ ID NO: 1475622 - RNA, 19 nt, Artificial Sequence
  Description of Artificial Sequence: Synthetic oligonucleotide
gcccaguaggcagccgugc

SEQ ID NO: 1475623 - RNA, 19 nt, Artificial Sequence
  Description of Artificial Sequence: Synthetic oligonucleotide
cagcgaccagggcccggag

SEQ ID NO: 1475624 - RNA, 19 nt, Artificial Sequence
  Description of Artificial Sequence: Synthetic oligonucleotide
gccgugccuaacaccauga

SEQ ID NO: 1475625 - RNA, 19 nt, Artificial Sequence
  Description of Artificial Sequence: Synthetic oligonucleotide
ggagcaucccggaggcgca

SEQ ID NO: 1475626 - RNA, 19 nt, Artificial Sequence
  Description of Artificial Sequence: Synthetic oligonucleotide
gcagcagaguagacacuuc

SEQ ID NO: 1475627 - RNA, 19 nt, Artificial Sequence
  Description of Artificial Sequence: Synthetic oligonucleotide
cccagcgcacaaagagcac

SEQ ID NO: 1475628 - RNA, 19 nt, Artificial Sequence
  Description of Artificial Sequence: Synthetic oligonucleotide
caggucaggccagaggauu

SEQ ID NO: 1475629 - RNA, 19 nt, Artificial Sequence
  Description of Artificial Sequence: Synthetic oligonucleotide
caggaacucacagcgccau

SEQ ID NO: 1475630 - RNA, 19 nt, Artificial Sequence
  Description of Artificial Sequence: Synthetic oligonucleotide
gugugggcacaaggcugac

SEQ ID NO: 1475631 - RNA, 19 nt, Artificial Sequence
  Description of Artificial Sequence: Synthetic oligonucleotide
caaggacaaagagguacuu

SEQ ID NO: 1475632 - RNA, 19 nt, Artificial Sequence
  Description of Artificial Sequence: Synthetic oligonucleotide
gcugagaagacaggaccau

SEQ ID NO: 1475633 - RNA, 19 nt, Artificial Sequence
  Description of Artificial Sequence: Synthetic oligonucleotide
ggccugaggaugggaguca

SEQ ID NO: 1475634 - RNA, 19 nt, Artificial Sequence
  Description of Artificial Sequence: Synthetic oligonucleotide
accagggcccggagacgug

SEQ ID NO: 1475635 - RNA, 19 nt, Artificial Sequence
  Description of Artificial Sequence: Synthetic oligonucleotide
ccucucuagccggcccugg

SEQ ID NO: 1475636 - RNA, 19 nt, Artificial Sequence
  Description of Artificial Sequence: Synthetic oligonucleotide
cagcacaacugaggcccca

SEQ ID NO: 1475637 - RNA, 19 nt, Artificial Sequence
  Description of Artificial Sequence: Synthetic oligonucleotide
cgaaggcugcaugccaaug

SEQ ID NO: 1475638 - RNA, 19 nt, Artificial Sequence
  Description of Artificial Sequence: Synthetic oligonucleotide
cgguagauuugugggacca

SEQ ID NO: 1475639 - RNA, 19 nt, Artificial Sequence
  Description of Artificial Sequence: Synthetic oligonucleotide
caccagccccagccuucac

SEQ ID NO: 1475640 - RNA, 19 nt, Artificial Sequence
  Description of Artificial Sequence: Synthetic oligonucleotide
gccacaguuacaggacccu

SEQ ID NO: 1475641 - RNA, 19 nt, Artificial Sequence
  Description of Artificial Sequence: Synthetic oligonucleotide
ggucaggccagaggauucu

SEQ ID NO: 1475642 - RNA, 19 nt, Artificial Sequence
  Description of Artificial Sequence: Synthetic oligonucleotide
ccaugaccuucuggaaauc

SEQ ID NO: 1475643 - RNA, 19 nt, Artificial Sequence
  Description of Artificial Sequence: Synthetic oligonucleotide
gcaucccggaggcgcaucu

SEQ ID NO: 1475644 - RNA, 19 nt, Artificial Sequence
  Description of Artificial Sequence: Synthetic oligonucleotide
cccaacugauaugcagcca

SEQ ID NO: 1475645 - RNA, 19 nt, Artificial Sequence
  Description of Artificial Sequence: Synthetic oligonucleotide
ccaguaggcagccgugccu

SEQ ID NO: 1475646 - RNA, 19 nt, Artificial Sequence
  Description of Artificial Sequence: Synthetic oligonucleotide
cuaccucugcugggccaga

SEQ ID NO: 1475647 - RNA, 19 nt, Artificial Sequence
  Description of Artificial Sequence: Synthetic oligonucleotide
ccggcccugggaacucuuc

SEQ ID NO: 1475648 - RNA, 19 nt, Artificial Sequence
  Description of Artificial Sequence: Synthetic oligonucleotide
cagccaucacuuccccaau

SEQ ID NO: 1475649 - RNA, 19 nt, Artificial Sequence
  Description of Artificial Sequence: Synthetic oligonucleotide
ccagcgaccagggcccgga

SEQ ID NO: 1475650 - RNA, 19 nt, Artificial Sequence
  Description of Artificial Sequence: Synthetic oligonucleotide
gagcaucccggaggcgcau

SEQ ID NO: 1475651 - RNA, 19 nt, Artificial Sequence
  Description of Artificial Sequence: Synthetic oligonucleotide
cccagcgaccagggcccgg

SEQ ID NO: 1475652 - RNA, 19 nt, Artificial Sequence
  Description of Artificial Sequence: Synthetic oligonucleotide
ccggagacgugguggugcu

SEQ ID NO: 1475653 - RNA, 19 nt, Artificial Sequence
  Description of Artificial Sequence: Synthetic oligonucleotide
cgccaucuacucgcaucac

SEQ ID NO: 1475654 - RNA, 19 nt, Artificial Sequence
  Description of Artificial Sequence: Synthetic oligonucleotide
cagcgccaucuacucgcau

SEQ ID NO: 1475655 - RNA, 19 nt, Artificial Sequence
  Description of Artificial Sequence: Synthetic oligonucleotide
gccuagcaacagugccagu

SEQ ID NO: 1475656 - RNA, 19 nt, Artificial Sequence
  Description of Artificial Sequence: Synthetic oligonucleotide
ggggugugucugagucucu

SEQ ID NO: 1475657 - RNA, 19 nt, Artificial Sequence
  Description of Artificial Sequence: Synthetic oligonucleotide
cccggaggcgcaucuccau

SEQ ID NO: 1475658 - RNA, 19 nt, Artificial Sequence
  Description of Artificial Sequence: Synthetic oligonucleotide
cccugagauuugguccucu

SEQ ID NO: 1475659 - RNA, 19 nt, Artificial Sequence
  Description of Artificial Sequence: Synthetic oligonucleotide
gccggcccugggaacucuu

SEQ ID NO: 1475660 - RNA, 19 nt, Artificial Sequence
  Description of Artificial Sequence: Synthetic oligonucleotide
cggagacgugguggugcuu

SEQ ID NO: 1475661 - RNA, 19 nt, Artificial Sequence
  Description of Artificial Sequence: Synthetic oligonucleotide
uucaagauaauacugaaca

SEQ ID NO: 1475662 - RNA, 19 nt, Artificial Sequence
  Description of Artificial Sequence: Synthetic oligonucleotide
uuaaugacaauucauggug

SEQ ID NO: 1475663 - RNA, 19 nt, Artificial Sequence
  Description of Artificial Sequence: Synthetic oligonucleotide
ugagccagaauauugaugc

SEQ ID NO: 1475664 - RNA, 19 nt, Artificial Sequence
  Description of Artificial Sequence: Synthetic oligonucleotide
aauauugaugcaaaagaac

SEQ ID NO: 1475665 - RNA, 19 nt, Artificial Sequence
  Description of Artificial Sequence: Synthetic oligonucleotide
uuuucauugacuaugccgu

SEQ ID NO: 1475666 - RNA, 19 nt, Artificial Sequence
  Description of Artificial Sequence: Synthetic oligonucleotide
uuuaauauaagugucaaua

SEQ ID NO: 1475667 - RNA, 19 nt, Artificial Sequence
  Description of Artificial Sequence: Synthetic oligonucleotide
auauguagccucuuugucc

SEQ ID NO: 1475668 - RNA, 19 nt, Artificial Sequence
  Description of Artificial Sequence: Synthetic oligonucleotide
agaauauugaugcaaaaga

SEQ ID NO: 1475669 - RNA, 19 nt, Artificial Sequence
  Description of Artificial Sequence: Synthetic oligonucleotide
uauucgaugggaaagacaa

SEQ ID NO: 1475670 - RNA, 19 nt, Artificial Sequence
  Description of Artificial Sequence: Synthetic oligonucleotide
aacauuugcaaacuucaag

SEQ ID NO: 1475671 - RNA, 19 nt, Artificial Sequence
  Description of Artificial Sequence: Synthetic oligonucleotide
aauuuaggcaaauaucaga

SEQ ID NO: 1475672 - RNA, 19 nt, Artificial Sequence
  Description of Artificial Sequence: Synthetic oligonucleotide
guuuucauugacuaugccg

SEQ ID NO: 1475673 - RNA, 19 nt, Artificial Sequence
  Description of Artificial Sequence: Synthetic oligonucleotide
aauagcauugaagagauau

SEQ ID NO: 1475674 - RNA, 19 nt, Artificial Sequence
  Description of Artificial Sequence: Synthetic oligonucleotide
ucaauaaggagacuguaca

SEQ ID NO: 1475675 - RNA, 19 nt, Artificial Sequence
  Description of Artificial Sequence: Synthetic oligonucleotide
agaaaauuuaggcaaauau

SEQ ID NO: 1475676 - RNA, 19 nt, Artificial Sequence
  Description of Artificial Sequence: Synthetic oligonucleotide
aauaaggagacuguacauc

SEQ ID NO: 1475677 - RNA, 19 nt, Artificial Sequence
  Description of Artificial Sequence: Synthetic oligonucleotide
ucuuggaggauucuccucg

SEQ ID NO: 1475678 - RNA, 19 nt, Artificial Sequence
  Description of Artificial Sequence: Synthetic oligonucleotide
ucugcuaaugagcucauug

SEQ ID NO: 1475679 - RNA, 19 nt, Artificial Sequence
  Description of Artificial Sequence: Synthetic oligonucleotide
uuuaaugacaauucauggu

SEQ ID NO: 1475680 - RNA, 19 nt, Artificial Sequence
  Description of Artificial Sequence: Synthetic oligonucleotide
ugagauauaaaaugucucu

SEQ ID NO: 1475681 - RNA, 19 nt, Artificial Sequence
  Description of Artificial Sequence: Synthetic oligonucleotide
aauguauguuuuccauggc

SEQ ID NO: 1475682 - RNA, 19 nt, Artificial Sequence
  Description of Artificial Sequence: Synthetic oligonucleotide
uucgaugggaaagacaacg

SEQ ID NO: 1475683 - RNA, 19 nt, Artificial Sequence
  Description of Artificial Sequence: Synthetic oligonucleotide
auuuucucucaauaacggc

SEQ ID NO: 1475684 - RNA, 19 nt, Artificial Sequence
  Description of Artificial Sequence: Synthetic oligonucleotide
gaugucaugguauucgaug

SEQ ID NO: 1475685 - RNA, 19 nt, Artificial Sequence
  Description of Artificial Sequence: Synthetic oligonucleotide
uuaguagauacuuuacucu

SEQ ID NO: 1475686 - RNA, 19 nt, Artificial Sequence
  Description of Artificial Sequence: Synthetic oligonucleotide
aagacaacgaagcggcggg

SEQ ID NO: 1475687 - RNA, 19 nt, Artificial Sequence
  Description of Artificial Sequence: Synthetic oligonucleotide
auuggaaaaggugaggccg

SEQ ID NO: 1475688 - RNA, 19 nt, Artificial Sequence
  Description of Artificial Sequence: Synthetic oligonucleotide
aacggcucauccucaacgc

SEQ ID NO: 1475689 - RNA, 19 nt, Artificial Sequence
  Description of Artificial Sequence: Synthetic oligonucleotide
uaacggcucauccucaacg

SEQ ID NO: 1475690 - RNA, 19 nt, Artificial Sequence
  Description of Artificial Sequence: Synthetic oligonucleotide
ucaauaacggcucauccuc

SEQ ID NO: 1475691 - RNA, 19 nt, Artificial Sequence
  Description of Artificial Sequence: Synthetic oligonucleotide
uauugaugcaaaagaacca

SEQ ID NO: 1475692 - RNA, 19 nt, Artificial Sequence
  Description of Artificial Sequence: Synthetic oligonucleotide
uauguagccucuuuguccc

SEQ ID NO: 1475693 - RNA, 19 nt, Artificial Sequence
  Description of Artificial Sequence: Synthetic oligonucleotide
ucugccacgaauucgauau

SEQ ID NO: 1475694 - RNA, 19 nt, Artificial Sequence
  Description of Artificial Sequence: Synthetic oligonucleotide
gaaaauuuaggcaaauauc

SEQ ID NO: 1475695 - RNA, 19 nt, Artificial Sequence
  Description of Artificial Sequence: Synthetic oligonucleotide
aucagcaaagagcaguccg

SEQ ID NO: 1475696 - RNA, 19 nt, Artificial Sequence
  Description of Artificial Sequence: Synthetic oligonucleotide
aucccgaugagcuucacag

SEQ ID NO: 1475697 - RNA, 19 nt, Artificial Sequence
  Description of Artificial Sequence: Synthetic oligonucleotide
uguugaauucgacaucacc

SEQ ID NO: 1475698 - RNA, 19 nt, Artificial Sequence
  Description of Artificial Sequence: Synthetic oligonucleotide
aaagacaacgaagcggcgg

SEQ ID NO: 1475699 - RNA, 19 nt, Artificial Sequence
  Description of Artificial Sequence: Synthetic oligonucleotide
augucaugguauucgaugg

SEQ ID NO: 1475700 - RNA, 19 nt, Artificial Sequence
  Description of Artificial Sequence: Synthetic oligonucleotide
uugaauucgacaucacccc

SEQ ID NO: 1475701 - RNA, 19 nt, Artificial Sequence
  Description of Artificial Sequence: Synthetic oligonucleotide
aauucgauauacugcuuca

SEQ ID NO: 1475702 - RNA, 19 nt, Artificial Sequence
  Description of Artificial Sequence: Synthetic oligonucleotide
acgaauucgauauacugcu

SEQ ID NO: 1475703 - RNA, 19 nt, Artificial Sequence
  Description of Artificial Sequence: Synthetic oligonucleotide
guuaguagauacuuuacuc

SEQ ID NO: 1475704 - RNA, 19 nt, Artificial Sequence
  Description of Artificial Sequence: Synthetic oligonucleotide
auaaggagacuguacaucu

SEQ ID NO: 1475705 - RNA, 19 nt, Artificial Sequence
  Description of Artificial Sequence: Synthetic oligonucleotide
uguauguuuuccauggcaa

SEQ ID NO: 1475706 - RNA, 19 nt, Artificial Sequence
  Description of Artificial Sequence: Synthetic oligonucleotide
cacgaauucgauauacugc

SEQ ID NO: 1475707 - RNA, 19 nt, Artificial Sequence
  Description of Artificial Sequence: Synthetic oligonucleotide
ucuugagccagaauauuga

SEQ ID NO: 1475708 - RNA, 19 nt, Artificial Sequence
  Description of Artificial Sequence: Synthetic oligonucleotide
guagauacuuuacucuccg

SEQ ID NO: 1475709 - RNA, 19 nt, Artificial Sequence
  Description of Artificial Sequence: Synthetic oligonucleotide
ucucaauaacggcucaucc

SEQ ID NO: 1475710 - RNA, 19 nt, Artificial Sequence
  Description of Artificial Sequence: Synthetic oligonucleotide
auacuuuacucuccgguuc

SEQ ID NO: 1475711 - RNA, 19 nt, Artificial Sequence
  Description of Artificial Sequence: Synthetic oligonucleotide
aaauuuaaugacaauucau

SEQ ID NO: 1475712 - RNA, 19 nt, Artificial Sequence
  Description of Artificial Sequence: Synthetic oligonucleotide
ucauuggaaaaggugaggc

SEQ ID NO: 1475713 - RNA, 19 nt, Artificial Sequence
  Description of Artificial Sequence: Synthetic oligonucleotide
aguccgcuuacuuagaagu

SEQ ID NO: 1475714 - RNA, 19 nt, Artificial Sequence
  Description of Artificial Sequence: Synthetic oligonucleotide
agauacuuuacucuccggu

SEQ ID NO: 1475715 - RNA, 19 nt, Artificial Sequence
  Description of Artificial Sequence: Synthetic oligonucleotide
ucaugguguagccaguuga

SEQ ID NO: 1475716 - RNA, 19 nt, Artificial Sequence
  Description of Artificial Sequence: Synthetic oligonucleotide
gaaagguccaccuccucag

SEQ ID NO: 1475717 - RNA, 19 nt, Artificial Sequence
  Description of Artificial Sequence: Synthetic oligonucleotide
uccauauguagccucuuug

SEQ ID NO: 1475718 - RNA, 19 nt, Artificial Sequence
  Description of Artificial Sequence: Synthetic oligonucleotide
acaguguaaacccucgucu

SEQ ID NO: 1475719 - RNA, 19 nt, Artificial Sequence
  Description of Artificial Sequence: Synthetic oligonucleotide
uacuuagaaguccgcaucc

SEQ ID NO: 1475720 - RNA, 19 nt, Artificial Sequence
  Description of Artificial Sequence: Synthetic oligonucleotide
uucggcgacgucuuggagg

SEQ ID NO: 1475721 - RNA, 19 nt, Artificial Sequence
  Description of Artificial Sequence: Synthetic oligonucleotide
ucuauccucacugcguugg

SEQ ID NO: 1475722 - RNA, 19 nt, Artificial Sequence
  Description of Artificial Sequence: Synthetic oligonucleotide
uuggaaaaggugaggccgg

SEQ ID NO: 1475723 - RNA, 19 nt, Artificial Sequence
  Description of Artificial Sequence: Synthetic oligonucleotide
ucauccucaacgcuggggu

SEQ ID NO: 1475724 - RNA, 19 nt, Artificial Sequence
  Description of Artificial Sequence: Synthetic oligonucleotide
gaauucgauauacugcuuc

SEQ ID NO: 1475725 - RNA, 19 nt, Artificial Sequence
  Description of Artificial Sequence: Synthetic oligonucleotide
aguagauacuuuacucucc

SEQ ID NO: 1475726 - RNA, 19 nt, Artificial Sequence
  Description of Artificial Sequence: Synthetic oligonucleotide
ugacaauucaugguguagc

SEQ ID NO: 1475727 - RNA, 19 nt, Artificial Sequence
  Description of Artificial Sequence: Synthetic oligonucleotide
augagauauaaaaugucuc

SEQ ID NO: 1475728 - RNA, 19 nt, Artificial Sequence
  Description of Artificial Sequence: Synthetic oligonucleotide
agguaaaagaauucucugu

SEQ ID NO: 1475729 - RNA, 19 nt, Artificial Sequence
  Description of Artificial Sequence: Synthetic oligonucleotide
agcauugaagagauauucc

SEQ ID NO: 1475730 - RNA, 19 nt, Artificial Sequence
  Description of Artificial Sequence: Synthetic oligonucleotide
gacaauucaugguguagcc

SEQ ID NO: 1475731 - RNA, 19 nt, Artificial Sequence
  Description of Artificial Sequence: Synthetic oligonucleotide
uagugaaauguuuuccaug

SEQ ID NO: 1475732 - RNA, 19 nt, Artificial Sequence
  Description of Artificial Sequence: Synthetic oligonucleotide
guacucucugcuccgaugg

SEQ ID NO: 1475733 - RNA, 19 nt, Artificial Sequence
  Description of Artificial Sequence: Synthetic oligonucleotide
auauaagugucaauaagga

SEQ ID NO: 1475734 - RNA, 19 nt, Artificial Sequence
  Description of Artificial Sequence: Synthetic oligonucleotide
ugcuggucggugauggugg

SEQ ID NO: 1475735 - RNA, 19 nt, Artificial Sequence
  Description of Artificial Sequence: Synthetic oligonucleotide
uucuagugaaauguuuucc

SEQ ID NO: 1475736 - RNA, 19 nt, Artificial Sequence
  Description of Artificial Sequence: Synthetic oligonucleotide
uuggcuaaaucgcuccacc

SEQ ID NO: 1475737 - RNA, 19 nt, Artificial Sequence
  Description of Artificial Sequence: Synthetic oligonucleotide
uucccagugcugaauaucu

SEQ ID NO: 1475738 - RNA, 19 nt, Artificial Sequence
  Description of Artificial Sequence: Synthetic oligonucleotide
ucuuguacucucugcuccg

SEQ ID NO: 1475739 - RNA, 19 nt, Artificial Sequence
  Description of Artificial Sequence: Synthetic oligonucleotide
auuuaggcaaauaucagaa

SEQ ID NO: 1475740 - RNA, 19 nt, Artificial Sequence
  Description of Artificial Sequence: Synthetic oligonucleotide
uaggcaaauaucagaauuu

SEQ ID NO: 1475741 - RNA, 19 nt, Artificial Sequence
  Description of Artificial Sequence: Synthetic oligonucleotide
auguauguuuuccauggca

SEQ ID NO: 1475742 - RNA, 19 nt, Artificial Sequence
  Description of Artificial Sequence: Synthetic oligonucleotide
cuagcauaagccugucugc

SEQ ID NO: 1475743 - RNA, 19 nt, Artificial Sequence
  Description of Artificial Sequence: Synthetic oligonucleotide
uccgcauccaagguaaaag

SEQ ID NO: 1475744 - RNA, 19 nt, Artificial Sequence
  Description of Artificial Sequence: Synthetic oligonucleotide
ugaauaucuuuggaaaggu

SEQ ID NO: 1475745 - RNA, 19 nt, Artificial Sequence
  Description of Artificial Sequence: Synthetic oligonucleotide
aaugacaauucauggugua

SEQ ID NO: 1475746 - RNA, 19 nt, Artificial Sequence
  Description of Artificial Sequence: Synthetic oligonucleotide
acuaugccgucacuggccg

SEQ ID NO: 1475747 - RNA, 19 nt, Artificial Sequence
  Description of Artificial Sequence: Synthetic oligonucleotide
aagucaaauggauuuucua

SEQ ID NO: 1475748 - RNA, 19 nt, Artificial Sequence
  Description of Artificial Sequence: Synthetic oligonucleotide
cauuggaaaaggugaggcc

SEQ ID NO: 1475749 - RNA, 19 nt, Artificial Sequence
  Description of Artificial Sequence: Synthetic oligonucleotide
auugacuaugccgucacug

SEQ ID NO: 1475750 - RNA, 19 nt, Artificial Sequence
  Description of Artificial Sequence: Synthetic oligonucleotide
auaucagaauuuacaguac

SEQ ID NO: 1475751 - RNA, 19 nt, Artificial Sequence
  Description of Artificial Sequence: Synthetic oligonucleotide
aaggccacaacgcgcucuc

SEQ ID NO: 1475752 - RNA, 19 nt, Artificial Sequence
  Description of Artificial Sequence: Synthetic oligonucleotide
uugaugcaaaagaaccaga

SEQ ID NO: 1475753 - RNA, 19 nt, Artificial Sequence
  Description of Artificial Sequence: Synthetic oligonucleotide
ucauugacuaugccgucac

SEQ ID NO: 1475754 - RNA, 19 nt, Artificial Sequence
  Description of Artificial Sequence: Synthetic oligonucleotide
agugcugaauaucuuugga

SEQ ID NO: 1475755 - RNA, 19 nt, Artificial Sequence
  Description of Artificial Sequence: Synthetic oligonucleotide
ugacuaugccgucacuggc

SEQ ID NO: 1475756 - RNA, 19 nt, Artificial Sequence
  Description of Artificial Sequence: Synthetic oligonucleotide
uguuuugacaaggggagaa

SEQ ID NO: 1475757 - RNA, 19 nt, Artificial Sequence
  Description of Artificial Sequence: Synthetic oligonucleotide
caacgcaaggcccagucag

SEQ ID NO: 1475758 - RNA, 19 nt, Artificial Sequence
  Description of Artificial Sequence: Synthetic oligonucleotide
ucaaagaaguuugucuuuc

SEQ ID NO: 1475759 - RNA, 19 nt, Artificial Sequence
  Description of Artificial Sequence: Synthetic oligonucleotide
gcaaauaucagaauuuaca

SEQ ID NO: 1475760 - RNA, 19 nt, Artificial Sequence
  Description of Artificial Sequence: Synthetic oligonucleotide
uuccugguuaacaaauuua

SEQ ID NO: 1475761 - RNA, 19 nt, Artificial Sequence
  Description of Artificial Sequence: Synthetic oligonucleotide
uccgcuuacuuagaagucc

SEQ ID NO: 1475762 - RNA, 19 nt, Artificial Sequence
  Description of Artificial Sequence: Synthetic oligonucleotide
gaugguggcgagcgggacg

SEQ ID NO: 1475763 - RNA, 19 nt, Artificial Sequence
  Description of Artificial Sequence: Synthetic oligonucleotide
caugagauauaaaaugucu

SEQ ID NO: 1475764 - RNA, 19 nt, Artificial Sequence
  Description of Artificial Sequence: Synthetic oligonucleotide
auuguuucaauagcauuga

SEQ ID NO: 1475765 - RNA, 19 nt, Artificial Sequence
  Description of Artificial Sequence: Synthetic oligonucleotide
acgucuuggaggauucucc

SEQ ID NO: 1475766 - RNA, 19 nt, Artificial Sequence
  Description of Artificial Sequence: Synthetic oligonucleotide
aauaacggcucauccucaa

SEQ ID NO: 1475767 - RNA, 19 nt, Artificial Sequence
  Description of Artificial Sequence: Synthetic oligonucleotide
uggaggauucuccucgcca

SEQ ID NO: 1475768 - RNA, 19 nt, Artificial Sequence
  Description of Artificial Sequence: Synthetic oligonucleotide
ugcucuauccucacugcgu

SEQ ID NO: 1475769 - RNA, 19 nt, Artificial Sequence
  Description of Artificial Sequence: Synthetic oligonucleotide
ugcguugguuauuauuucu

SEQ ID NO: 1475770 - RNA, 19 nt, Artificial Sequence
  Description of Artificial Sequence: Synthetic oligonucleotide
ugagcucauuggaaaaggu

SEQ ID NO: 1475771 - RNA, 19 nt, Artificial Sequence
  Description of Artificial Sequence: Synthetic oligonucleotide
uguacucucugcuccgaug

SEQ ID NO: 1475772 - RNA, 19 nt, Artificial Sequence
  Description of Artificial Sequence: Synthetic oligonucleotide
uaacauuugcaaacuucaa

SEQ ID NO: 1475773 - RNA, 19 nt, Artificial Sequence
  Description of Artificial Sequence: Synthetic oligonucleotide
uagauacuuuacucuccgg

SEQ ID NO: 1475774 - RNA, 19 nt, Artificial Sequence
  Description of Artificial Sequence: Synthetic oligonucleotide
ugguguagccaguugauuu

SEQ ID NO: 1475775 - RNA, 19 nt, Artificial Sequence
  Description of Artificial Sequence: Synthetic oligonucleotide
ucgaugggaaagacaacga

SEQ ID NO: 1475776 - RNA, 19 nt, Artificial Sequence
  Description of Artificial Sequence: Synthetic oligonucleotide
uuacucuccgguucggcga

SEQ ID NO: 1475777 - RNA, 19 nt, Artificial Sequence
  Description of Artificial Sequence: Synthetic oligonucleotide
auaacggcucauccucaac

SEQ ID NO: 1475778 - RNA, 19 nt, Artificial Sequence
  Description of Artificial Sequence: Synthetic oligonucleotide
cauauguagccucuuuguc

SEQ ID NO: 1475779 - RNA, 19 nt, Artificial Sequence
  Description of Artificial Sequence: Synthetic oligonucleotide
cagugcugaauaucuuugg

SEQ ID NO: 1475780 - RNA, 19 nt, Artificial Sequence
  Description of Artificial Sequence: Synthetic oligonucleotide
aagccugucugccacgaau

SEQ ID NO: 1475781 - RNA, 19 nt, Artificial Sequence
  Description of Artificial Sequence: Synthetic oligonucleotide
ucggcgacgucuuggagga

SEQ ID NO: 1475782 - RNA, 19 nt, Artificial Sequence
  Description of Artificial Sequence: Synthetic oligonucleotide
uucaugguguagccaguug

SEQ ID NO: 1475783 - RNA, 19 nt, Artificial Sequence
  Description of Artificial Sequence: Synthetic oligonucleotide
acgcgggucccgcugaggc

SEQ ID NO: 1475784 - RNA, 19 nt, Artificial Sequence
  Description of Artificial Sequence: Synthetic oligonucleotide
gcuaaaucgcuccaccaag

SEQ ID NO: 1475785 - RNA, 19 nt, Artificial Sequence
  Description of Artificial Sequence: Synthetic oligonucleotide
ggcaauuuggaagccauag

SEQ ID NO: 1475786 - RNA, 19 nt, Artificial Sequence
  Description of Artificial Sequence: Synthetic oligonucleotide
acugcguugguuauuauuu

SEQ ID NO: 1475787 - RNA, 19 nt, Artificial Sequence
  Description of Artificial Sequence: Synthetic oligonucleotide
augacaauucaugguguag

SEQ ID NO: 1475788 - RNA, 19 nt, Artificial Sequence
  Description of Artificial Sequence: Synthetic oligonucleotide
uucauugacuaugccguca

SEQ ID NO: 1475789 - RNA, 19 nt, Artificial Sequence
  Description of Artificial Sequence: Synthetic oligonucleotide
uucacacaaggcauuguuu

SEQ ID NO: 1475790 - RNA, 19 nt, Artificial Sequence
  Description of Artificial Sequence: Synthetic oligonucleotide
uguugaaccccagcucuag

SEQ ID NO: 1475791 - RNA, 19 nt, Artificial Sequence
  Description of Artificial Sequence: Synthetic oligonucleotide
cucauuggaaaaggugagg

SEQ ID NO: 1475792 - RNA, 19 nt, Artificial Sequence
  Description of Artificial Sequence: Synthetic oligonucleotide
acggagaacaugacgagug

SEQ ID NO: 1475793 - RNA, 19 nt, Artificial Sequence
  Description of Artificial Sequence: Synthetic oligonucleotide
gucaauaaggagacuguac

SEQ ID NO: 1475794 - RNA, 19 nt, Artificial Sequence
  Description of Artificial Sequence: Synthetic oligonucleotide
gagagcagcggccgaggcg

SEQ ID NO: 1475795 - RNA, 19 nt, Artificial Sequence
  Description of Artificial Sequence: Synthetic oligonucleotide
aaguccgcauccaagguaa

SEQ ID NO: 1475796 - RNA, 19 nt, Artificial Sequence
  Description of Artificial Sequence: Synthetic oligonucleotide
gacuaugccgucacuggcc

SEQ ID NO: 1475797 - RNA, 19 nt, Artificial Sequence
  Description of Artificial Sequence: Synthetic oligonucleotide
aaaucuuguugaaccccag

SEQ ID NO: 1475798 - RNA, 19 nt, Artificial Sequence
  Description of Artificial Sequence: Synthetic oligonucleotide
ugguauucgaugggaaaga

SEQ ID NO: 1475799 - RNA, 19 nt, Artificial Sequence
  Description of Artificial Sequence: Synthetic oligonucleotide
uccaacgcaaggcccaguc

SEQ ID NO: 1475800 - RNA, 19 nt, Artificial Sequence
  Description of Artificial Sequence: Synthetic oligonucleotide
agugcaguucaucccgaug

SEQ ID NO: 1475801 - RNA, 19 nt, Artificial Sequence
  Description of Artificial Sequence: Synthetic oligonucleotide
cacaguguaaacccucguc

SEQ ID NO: 1475802 - RNA, 19 nt, Artificial Sequence
  Description of Artificial Sequence: Synthetic oligonucleotide
uaaaucgcuccaccaaguu

SEQ ID NO: 1475803 - RNA, 19 nt, Artificial Sequence
  Description of Artificial Sequence: Synthetic oligonucleotide
uccgugaggaacuccugcu

SEQ ID NO: 1475804 - RNA, 19 nt, Artificial Sequence
  Description of Artificial Sequence: Synthetic oligonucleotide
uggcuaaaucgcuccacca

SEQ ID NO: 1475805 - RNA, 19 nt, Artificial Sequence
  Description of Artificial Sequence: Synthetic oligonucleotide
uaugccgucacuggccgca

SEQ ID NO: 1475806 - RNA, 19 nt, Artificial Sequence
  Description of Artificial Sequence: Synthetic oligonucleotide
uucucucaauaacggcuca

SEQ ID NO: 1475807 - RNA, 19 nt, Artificial Sequence
  Description of Artificial Sequence: Synthetic oligonucleotide
cauaagccugucugccacg

SEQ ID NO: 1475808 - RNA, 19 nt, Artificial Sequence
  Description of Artificial Sequence: Synthetic oligonucleotide
ugccacgaauucgauauac

SEQ ID NO: 1475809 - RNA, 19 nt, Artificial Sequence
  Description of Artificial Sequence: Synthetic oligonucleotide
aacaaucagcaaagagcag

SEQ ID NO: 1475810 - RNA, 19 nt, Artificial Sequence
  Description of Artificial Sequence: Synthetic oligonucleotide
aaccgggagcaccggugac

SEQ ID NO: 1475811 - RNA, 19 nt, Artificial Sequence
  Description of Artificial Sequence: Synthetic oligonucleotide
caaagagcaguccgcuuac

SEQ ID NO: 1475812 - RNA, 19 nt, Artificial Sequence
  Description of Artificial Sequence: Synthetic oligonucleotide
cugucugccacgaauucga

SEQ ID NO: 1475813 - RNA, 19 nt, Artificial Sequence
  Description of Artificial Sequence: Synthetic oligonucleotide
caguguaaacccucgucuc

SEQ ID NO: 1475814 - RNA, 19 nt, Artificial Sequence
  Description of Artificial Sequence: Synthetic oligonucleotide
gaaagacaacgaagcggcg

SEQ ID NO: 1475815 - RNA, 19 nt, Artificial Sequence
  Description of Artificial Sequence: Synthetic oligonucleotide
gaaacagcgggccucugua

SEQ ID NO: 1475816 - RNA, 19 nt, Artificial Sequence
  Description of Artificial Sequence: Synthetic oligonucleotide
guugguuauuauuucuugu

SEQ ID NO: 1475817 - RNA, 19 nt, Artificial Sequence
  Description of Artificial Sequence: Synthetic oligonucleotide
cuuguugaaccccagcucu

SEQ ID NO: 1475818 - RNA, 19 nt, Artificial Sequence
  Description of Artificial Sequence: Synthetic oligonucleotide
ccacgaauucgauauacug

SEQ ID NO: 1475819 - RNA, 19 nt, Artificial Sequence
  Description of Artificial Sequence: Synthetic oligonucleotide
agcauaagccugucugcca

SEQ ID NO: 1475820 - RNA, 19 nt, Artificial Sequence
  Description of Artificial Sequence: Synthetic oligonucleotide
ggcugagucgcuucagcgg

SEQ ID NO: 1475821 - RNA, 19 nt, Artificial Sequence
  Description of Artificial Sequence: Synthetic oligonucleotide
uggucggugaugguggcga

SEQ ID NO: 1475822 - RNA, 19 nt, Artificial Sequence
  Description of Artificial Sequence: Synthetic oligonucleotide
agauaauacugaacaauua

SEQ ID NO: 1475823 - RNA, 19 nt, Artificial Sequence
  Description of Artificial Sequence: Synthetic oligonucleotide
uccgauggcuuguguacca

SEQ ID NO: 1475824 - RNA, 19 nt, Artificial Sequence
  Description of Artificial Sequence: Synthetic oligonucleotide
uucagcggcgacaccugca

SEQ ID NO: 1475825 - RNA, 19 nt, Artificial Sequence
  Description of Artificial Sequence: Synthetic oligonucleotide
caguccgcuuacuuagaag

SEQ ID NO: 1475826 - RNA, 19 nt, Artificial Sequence
  Description of Artificial Sequence: Synthetic oligonucleotide
gguuauuauuucuuguacu

SEQ ID NO: 1475827 - RNA, 19 nt, Artificial Sequence
  Description of Artificial Sequence: Synthetic oligonucleotide
acaauucaugguguagcca

SEQ ID NO: 1475828 - RNA, 19 nt, Artificial Sequence
  Description of Artificial Sequence: Synthetic oligonucleotide
gaaguccgcauccaaggua

SEQ ID NO: 1475829 - RNA, 19 nt, Artificial Sequence
  Description of Artificial Sequence: Synthetic oligonucleotide
aacgcugggguuaguagau

SEQ ID NO: 1475830 - RNA, 19 nt, Artificial Sequence
  Description of Artificial Sequence: Synthetic oligonucleotide
ucuccucgccaccuugcug

SEQ ID NO: 1475831 - RNA, 19 nt, Artificial Sequence
  Description of Artificial Sequence: Synthetic oligonucleotide
agccagaauauugaugcaa

SEQ ID NO: 1475832 - RNA, 19 nt, Artificial Sequence
  Description of Artificial Sequence: Synthetic oligonucleotide
gguaaaagaauucucuguu

SEQ ID NO: 1475833 - RNA, 19 nt, Artificial Sequence
  Description of Artificial Sequence: Synthetic oligonucleotide
auguagccucuuugucccc

SEQ ID NO: 1475834 - RNA, 19 nt, Artificial Sequence
  Description of Artificial Sequence: Synthetic oligonucleotide
aagauccccuccacggcag

SEQ ID NO: 1475835 - RNA, 19 nt, Artificial Sequence
  Description of Artificial Sequence: Synthetic oligonucleotide
auucgaugggaaagacaac

SEQ ID NO: 1475836 - RNA, 19 nt, Artificial Sequence
  Description of Artificial Sequence: Synthetic oligonucleotide
aagcggcggggauuuucuc

SEQ ID NO: 1475837 - RNA, 19 nt, Artificial Sequence
  Description of Artificial Sequence: Synthetic oligonucleotide
acaaggcauuguuucaaua

SEQ ID NO: 1475838 - RNA, 19 nt, Artificial Sequence
  Description of Artificial Sequence: Synthetic oligonucleotide
aacgaagcggcggggauuu

SEQ ID NO: 1475839 - RNA, 19 nt, Artificial Sequence
  Description of Artificial Sequence: Synthetic oligonucleotide
agcggcggggauuuucucu

SEQ ID NO: 1475840 - RNA, 19 nt, Artificial Sequence
  Description of Artificial Sequence: Synthetic oligonucleotide
uacucucugcuccgauggc

SEQ ID NO: 1475841 - RNA, 19 nt, Artificial Sequence
  Description of Artificial Sequence: Synthetic oligonucleotide
cuuggcuaaaucgcuccac

SEQ ID NO: 1475842 - RNA, 19 nt, Artificial Sequence
  Description of Artificial Sequence: Synthetic oligonucleotide
guguaaacccucgucucug

SEQ ID NO: 1475843 - RNA, 19 nt, Artificial Sequence
  Description of Artificial Sequence: Synthetic oligonucleotide
ugggguuaguagauacuuu

SEQ ID NO: 1475844 - RNA, 19 nt, Artificial Sequence
  Description of Artificial Sequence: Synthetic oligonucleotide
cuuacuuagaaguccgcau

SEQ ID NO: 1475845 - RNA, 19 nt, Artificial Sequence
  Description of Artificial Sequence: Synthetic oligonucleotide
cucaauaacggcucauccu

SEQ ID NO: 1475846 - RNA, 19 nt, Artificial Sequence
  Description of Artificial Sequence: Synthetic oligonucleotide
ggaggauucuccucgccac

SEQ ID NO: 1475847 - RNA, 19 nt, Artificial Sequence
  Description of Artificial Sequence: Synthetic oligonucleotide
uacucuccgguucggcgac

SEQ ID NO: 1475848 - RNA, 19 nt, Artificial Sequence
  Description of Artificial Sequence: Synthetic oligonucleotide
cugcguugguuauuauuuc

SEQ ID NO: 1475849 - RNA, 19 nt, Artificial Sequence
  Description of Artificial Sequence: Synthetic oligonucleotide
aucagaauuuacaguacua

SEQ ID NO: 1475850 - RNA, 19 nt, Artificial Sequence
  Description of Artificial Sequence: Synthetic oligonucleotide
agcucuagcauaagccugu

SEQ ID NO: 1475851 - RNA, 19 nt, Artificial Sequence
  Description of Artificial Sequence: Synthetic oligonucleotide
gguuaguagauacuuuacu

SEQ ID NO: 1475852 - RNA, 19 nt, Artificial Sequence
  Description of Artificial Sequence: Synthetic oligonucleotide
gucaugguauucgauggga

SEQ ID NO: 1475853 - RNA, 19 nt, Artificial Sequence
  Description of Artificial Sequence: Synthetic oligonucleotide
ccaauccaacgcaaggccc

SEQ ID NO: 1475854 - RNA, 19 nt, Artificial Sequence
  Description of Artificial Sequence: Synthetic oligonucleotide
cuucccagugcugaauauc

SEQ ID NO: 1475855 - RNA, 19 nt, Artificial Sequence
  Description of Artificial Sequence: Synthetic oligonucleotide
gcggacggagaacaugacg

SEQ ID NO: 1475856 - RNA, 19 nt, Artificial Sequence
  Description of Artificial Sequence: Synthetic oligonucleotide
gaaccgggagcaccgguga

SEQ ID NO: 1475857 - RNA, 19 nt, Artificial Sequence
  Description of Artificial Sequence: Synthetic oligonucleotide
gggguuaguagauacuuua

SEQ ID NO: 1475858 - RNA, 19 nt, Artificial Sequence
  Description of Artificial Sequence: Synthetic oligonucleotide
uccucaacgcugggguuag

SEQ ID NO: 1475859 - RNA, 19 nt, Artificial Sequence
  Description of Artificial Sequence: Synthetic oligonucleotide
gacgucuuggaggauucuc

SEQ ID NO: 1475860 - RNA, 19 nt, Artificial Sequence
  Description of Artificial Sequence: Synthetic oligonucleotide
ccgcuuacuuagaaguccg

SEQ ID NO: 1475861 - RNA, 19 nt, Artificial Sequence
  Description of Artificial Sequence: Synthetic oligonucleotide
ggacggagaacaugacgag

SEQ ID NO: 1475862 - RNA, 19 nt, Artificial Sequence
  Description of Artificial Sequence: Synthetic oligonucleotide
gacgcggacggagaacaug

SEQ ID NO: 1475863 - RNA, 19 nt, Artificial Sequence
  Description of Artificial Sequence: Synthetic oligonucleotide
aaccccagcucuagcauaa

SEQ ID NO: 1475864 - RNA, 19 nt, Artificial Sequence
  Description of Artificial Sequence: Synthetic oligonucleotide
aucucagaauguauguuuu

SEQ ID NO: 1475865 - RNA, 19 nt, Artificial Sequence
  Description of Artificial Sequence: Synthetic oligonucleotide
gccauagaaacagcgggcc

SEQ ID NO: 1475866 - RNA, 19 nt, Artificial Sequence
  Description of Artificial Sequence: Synthetic oligonucleotide
acaacgaagcggcggggau

SEQ ID NO: 1475867 - RNA, 19 nt, Artificial Sequence
  Description of Artificial Sequence: Synthetic oligonucleotide
ggggauuuucucucaauaa

SEQ ID NO: 1475868 - RNA, 19 nt, Artificial Sequence
  Description of Artificial Sequence: Synthetic oligonucleotide
cagaugucaugguauucga

SEQ ID NO: 1475869 - RNA, 19 nt, Artificial Sequence
  Description of Artificial Sequence: Synthetic oligonucleotide
auaagccugucugccacga

SEQ ID NO: 1475870 - RNA, 19 nt, Artificial Sequence
  Description of Artificial Sequence: Synthetic oligonucleotide
uuguacucucugcuccgau

SEQ ID NO: 1475871 - RNA, 19 nt, Artificial Sequence
  Description of Artificial Sequence: Synthetic oligonucleotide
acaucucagaauguauguu

SEQ ID NO: 1475872 - RNA, 19 nt, Artificial Sequence
  Description of Artificial Sequence: Synthetic oligonucleotide
gucgcuucagcggcgacac

SEQ ID NO: 1475873 - RNA, 19 nt, Artificial Sequence
  Description of Artificial Sequence: Synthetic oligonucleotide
auucgauauacugcuucau

SEQ ID NO: 1475874 - RNA, 19 nt, Artificial Sequence
  Description of Artificial Sequence: Synthetic oligonucleotide
ggcaaauaucagaauuuac

SEQ ID NO: 1475875 - RNA, 19 nt, Artificial Sequence
  Description of Artificial Sequence: Synthetic oligonucleotide
guacaucuuccagauguca

SEQ ID NO: 1475876 - RNA, 19 nt, Artificial Sequence
  Description of Artificial Sequence: Synthetic oligonucleotide
aaagagcaguccgcuuacu

SEQ ID NO: 1475877 - RNA, 19 nt, Artificial Sequence
  Description of Artificial Sequence: Synthetic oligonucleotide
uggaaccgggagcaccggu

SEQ ID NO: 1475878 - RNA, 19 nt, Artificial Sequence
  Description of Artificial Sequence: Synthetic oligonucleotide
cuccgauggcuuguguacc

SEQ ID NO: 1475879 - RNA, 19 nt, Artificial Sequence
  Description of Artificial Sequence: Synthetic oligonucleotide
gcgcucuccauauguagcc

SEQ ID NO: 1475880 - RNA, 19 nt, Artificial Sequence
  Description of Artificial Sequence: Synthetic oligonucleotide
acgcggacggagaacauga

SEQ ID NO: 1475881 - RNA, 19 nt, Artificial Sequence
  Description of Artificial Sequence: Synthetic oligonucleotide
cagaauguauguuuuccau

SEQ ID NO: 1475882 - RNA, 19 nt, Artificial Sequence
  Description of Artificial Sequence: Synthetic oligonucleotide
gcaaagagcaguccgcuua

SEQ ID NO: 1475883 - RNA, 19 nt, Artificial Sequence
  Description of Artificial Sequence: Synthetic oligonucleotide
ucaagcgcagcagcuggaa

SEQ ID NO: 1475884 - RNA, 19 nt, Artificial Sequence
  Description of Artificial Sequence: Synthetic oligonucleotide
ucucucaauaacggcucau

SEQ ID NO: 1475885 - RNA, 19 nt, Artificial Sequence
  Description of Artificial Sequence: Synthetic oligonucleotide
cuaaaucgcuccaccaagu

SEQ ID NO: 1475886 - RNA, 19 nt, Artificial Sequence
  Description of Artificial Sequence: Synthetic oligonucleotide
cuucagcggcgacaccugc

SEQ ID NO: 1475887 - RNA, 19 nt, Artificial Sequence
  Description of Artificial Sequence: Synthetic oligonucleotide
cucuauccucacugcguug

SEQ ID NO: 1475888 - RNA, 19 nt, Artificial Sequence
  Description of Artificial Sequence: Synthetic oligonucleotide
uggaaagguccaccuccuc

SEQ ID NO: 1475889 - RNA, 19 nt, Artificial Sequence
  Description of Artificial Sequence: Synthetic oligonucleotide
uggcaauuuggaagccaua

SEQ ID NO: 1475890 - RNA, 19 nt, Artificial Sequence
  Description of Artificial Sequence: Synthetic oligonucleotide
acaacgcgcucuccauaug

SEQ ID NO: 1475891 - RNA, 19 nt, Artificial Sequence
  Description of Artificial Sequence: Synthetic oligonucleotide
agacaacgaagcggcgggg

SEQ ID NO: 1475892 - RNA, 19 nt, Artificial Sequence
  Description of Artificial Sequence: Synthetic oligonucleotide
uccucacugcguugguuau

SEQ ID NO: 1475893 - RNA, 19 nt, Artificial Sequence
  Description of Artificial Sequence: Synthetic oligonucleotide
uccgguucggcgacgucuu

SEQ ID NO: 1475894 - RNA, 19 nt, Artificial Sequence
  Description of Artificial Sequence: Synthetic oligonucleotide
ugagucgcuucagcggcga

SEQ ID NO: 1475895 - RNA, 19 nt, Artificial Sequence
  Description of Artificial Sequence: Synthetic oligonucleotide
gacaacgaagcggcgggga

SEQ ID NO: 1475896 - RNA, 19 nt, Artificial Sequence
  Description of Artificial Sequence: Synthetic oligonucleotide
agcgguccagaaggaggcc

SEQ ID NO: 1475897 - RNA, 19 nt, Artificial Sequence
  Description of Artificial Sequence: Synthetic oligonucleotide
ucucugcuaaugagcucau

SEQ ID NO: 1475898 - RNA, 19 nt, Artificial Sequence
  Description of Artificial Sequence: Synthetic oligonucleotide
caauaaggagacuguacau

SEQ ID NO: 1475899 - RNA, 19 nt, Artificial Sequence
  Description of Artificial Sequence: Synthetic oligonucleotide
cucgccaccuugcuggcca

SEQ ID NO: 1475900 - RNA, 19 nt, Artificial Sequence
  Description of Artificial Sequence: Synthetic oligonucleotide
cucagcgguccagaaggag

SEQ ID NO: 1475901 - RNA, 19 nt, Artificial Sequence
  Description of Artificial Sequence: Synthetic oligonucleotide
ggguuaguagauacuuuac

SEQ ID NO: 1475902 - RNA, 19 nt, Artificial Sequence
  Description of Artificial Sequence: Synthetic oligonucleotide
auucaugguguagccaguu

SEQ ID NO: 1475903 - RNA, 19 nt, Artificial Sequence
  Description of Artificial Sequence: Synthetic oligonucleotide
agcaaagagcaguccgcuu

SEQ ID NO: 1475904 - RNA, 19 nt, Artificial Sequence
  Description of Artificial Sequence: Synthetic oligonucleotide
gcuaaugagcucauuggaa

SEQ ID NO: 1475905 - RNA, 19 nt, Artificial Sequence
  Description of Artificial Sequence: Synthetic oligonucleotide
guguaccaggugcuugaac

SEQ ID NO: 1475906 - RNA, 19 nt, Artificial Sequence
  Description of Artificial Sequence: Synthetic oligonucleotide
gcgagcgggacgcggacgg

SEQ ID NO: 1475907 - RNA, 19 nt, Artificial Sequence
  Description of Artificial Sequence: Synthetic oligonucleotide
guuuugacaaggggagaaa

SEQ ID NO: 1475908 - RNA, 19 nt, Artificial Sequence
  Description of Artificial Sequence: Synthetic oligonucleotide
guucggcgacgucuuggag

SEQ ID NO: 1475909 - RNA, 19 nt, Artificial Sequence
  Description of Artificial Sequence: Synthetic oligonucleotide
uaagccugucugccacgaa

SEQ ID NO: 1475910 - RNA, 19 nt, Artificial Sequence
  Description of Artificial Sequence: Synthetic oligonucleotide
ccucgucucugcuaaugag

SEQ ID NO: 1475911 - RNA, 19 nt, Artificial Sequence
  Description of Artificial Sequence: Synthetic oligonucleotide
gagcgggacgcggacggag

SEQ ID NO: 1475912 - RNA, 19 nt, Artificial Sequence
  Description of Artificial Sequence: Synthetic oligonucleotide
uguguaccaggugcuugaa

SEQ ID NO: 1475913 - RNA, 19 nt, Artificial Sequence
  Description of Artificial Sequence: Synthetic oligonucleotide
cuugagccagaauauugau

SEQ ID NO: 1475914 - RNA, 19 nt, Artificial Sequence
  Description of Artificial Sequence: Synthetic oligonucleotide
aacgcgcucuccauaugua

SEQ ID NO: 1475915 - RNA, 19 nt, Artificial Sequence
  Description of Artificial Sequence: Synthetic oligonucleotide
cucacugcguugguuauua

SEQ ID NO: 1475916 - RNA, 19 nt, Artificial Sequence
  Description of Artificial Sequence: Synthetic oligonucleotide
cuaugccgucacuggccgc

SEQ ID NO: 1475917 - RNA, 19 nt, Artificial Sequence
  Description of Artificial Sequence: Synthetic oligonucleotide
aucgcuccaccaaguuuuc

SEQ ID NO: 1475918 - RNA, 19 nt, Artificial Sequence
  Description of Artificial Sequence: Synthetic oligonucleotide
guagccaguugauuuguuu

SEQ ID NO: 1475919 - RNA, 19 nt, Artificial Sequence
  Description of Artificial Sequence: Synthetic oligonucleotide
caccaaguuuucauugacu

SEQ ID NO: 1475920 - RNA, 19 nt, Artificial Sequence
  Description of Artificial Sequence: Synthetic oligonucleotide
gacggagaacaugacgagu

SEQ ID NO: 1475921 - RNA, 19 nt, Artificial Sequence
  Description of Artificial Sequence: Synthetic oligonucleotide
agcgggccucuguaacuug

SEQ ID NO: 1475922 - RNA, 19 nt, Artificial Sequence
  Description of Artificial Sequence: Synthetic oligonucleotide
gguucggcgacgucuugga

SEQ ID NO: 1475923 - RNA, 19 nt, Artificial Sequence
  Description of Artificial Sequence: Synthetic oligonucleotide
caugguguagccaguugau

SEQ ID NO: 1475924 - RNA, 19 nt, Artificial Sequence
  Description of Artificial Sequence: Synthetic oligonucleotide
guccgcuuacuuagaaguc

SEQ ID NO: 1475925 - RNA, 19 nt, Artificial Sequence
  Description of Artificial Sequence: Synthetic oligonucleotide
cuggucggugaugguggcg

SEQ ID NO: 1475926 - RNA, 19 nt, Artificial Sequence
  Description of Artificial Sequence: Synthetic oligonucleotide
aggacgcgggucccgcuga

SEQ ID NO: 1475927 - RNA, 19 nt, Artificial Sequence
  Description of Artificial Sequence: Synthetic oligonucleotide
gaagcggcggggauuuucu

SEQ ID NO: 1475928 - RNA, 19 nt, Artificial Sequence
  Description of Artificial Sequence: Synthetic oligonucleotide
gcagcggccgaggcgaagg

SEQ ID NO: 1475929 - RNA, 19 nt, Artificial Sequence
  Description of Artificial Sequence: Synthetic oligonucleotide
gccagaauauugaugcaaa

SEQ ID NO: 1475930 - RNA, 19 nt, Artificial Sequence
  Description of Artificial Sequence: Synthetic oligonucleotide
caggacgcgggucccgcug

SEQ ID NO: 1475931 - RNA, 19 nt, Artificial Sequence
  Description of Artificial Sequence: Synthetic oligonucleotide
augguguagccaguugauu

SEQ ID NO: 1475932 - RNA, 19 nt, Artificial Sequence
  Description of Artificial Sequence: Synthetic oligonucleotide
gguuucagagcuucccagu

SEQ ID NO: 1475933 - RNA, 19 nt, Artificial Sequence
  Description of Artificial Sequence: Synthetic oligonucleotide
caacgcgcucuccauaugu

SEQ ID NO: 1475934 - RNA, 19 nt, Artificial Sequence
  Description of Artificial Sequence: Synthetic oligonucleotide
cgcgcucuccauauguagc

SEQ ID NO: 1475935 - RNA, 19 nt, Artificial Sequence
  Description of Artificial Sequence: Synthetic oligonucleotide
guaccaggugcuugaacau

SEQ ID NO: 1475936 - RNA, 19 nt, Artificial Sequence
  Description of Artificial Sequence: Synthetic oligonucleotide
cacaacgcgcucuccauau

SEQ ID NO: 1475937 - RNA, 19 nt, Artificial Sequence
  Description of Artificial Sequence: Synthetic oligonucleotide
gucugccacgaauucgaua

SEQ ID NO: 1475938 - RNA, 19 nt, Artificial Sequence
  Description of Artificial Sequence: Synthetic oligonucleotide
ccauauguagccucuuugu

SEQ ID NO: 1475939 - RNA, 19 nt, Artificial Sequence
  Description of Artificial Sequence: Synthetic oligonucleotide
agccugucugccacgaauu

SEQ ID NO: 1475940 - RNA, 19 nt, Artificial Sequence
  Description of Artificial Sequence: Synthetic oligonucleotide
aacccucgucucugcuaau

SEQ ID NO: 1475941 - RNA, 19 nt, Artificial Sequence
  Description of Artificial Sequence: Synthetic oligonucleotide
cuuguacucucugcuccga

SEQ ID NO: 1475942 - RNA, 19 nt, Artificial Sequence
  Description of Artificial Sequence: Synthetic oligonucleotide
ccgcauccaagguaaaaga

SEQ ID NO: 1475943 - RNA, 19 nt, Artificial Sequence
  Description of Artificial Sequence: Synthetic oligonucleotide
ucacugcguugguuauuau

SEQ ID NO: 1475944 - RNA, 19 nt, Artificial Sequence
  Description of Artificial Sequence: Synthetic oligonucleotide
cuggaaccgggagcaccgg

SEQ ID NO: 1475945 - RNA, 19 nt, Artificial Sequence
  Description of Artificial Sequence: Synthetic oligonucleotide
ucgcuccaccaaguuuuca

SEQ ID NO: 1475946 - RNA, 19 nt, Artificial Sequence
  Description of Artificial Sequence: Synthetic oligonucleotide
gguggcgagcgggacgcgg

SEQ ID NO: 1475947 - RNA, 19 nt, Artificial Sequence
  Description of Artificial Sequence: Synthetic oligonucleotide
gcggcggggauuuucucuc

SEQ ID NO: 1475948 - RNA, 19 nt, Artificial Sequence
  Description of Artificial Sequence: Synthetic oligonucleotide
cucaacgcugggguuagua

SEQ ID NO: 1475949 - RNA, 19 nt, Artificial Sequence
  Description of Artificial Sequence: Synthetic oligonucleotide
ccgcaaagaaagccagaac

SEQ ID NO: 1475950 - RNA, 19 nt, Artificial Sequence
  Description of Artificial Sequence: Synthetic oligonucleotide
cugggguuaguagauacuu

SEQ ID NO: 1475951 - RNA, 19 nt, Artificial Sequence
  Description of Artificial Sequence: Synthetic oligonucleotide
ucuccgguucggcgacguc

SEQ ID NO: 1475952 - RNA, 19 nt, Artificial Sequence
  Description of Artificial Sequence: Synthetic oligonucleotide
gagucgcuucagcggcgac

SEQ ID NO: 1475953 - RNA, 19 nt, Artificial Sequence
  Description of Artificial Sequence: Synthetic oligonucleotide
cacugcguugguuauuauu

SEQ ID NO: 1475954 - RNA, 19 nt, Artificial Sequence
  Description of Artificial Sequence: Synthetic oligonucleotide
agccagaacaugagauaua

SEQ ID NO: 1475955 - RNA, 19 nt, Artificial Sequence
  Description of Artificial Sequence: Synthetic oligonucleotide
agcaguccgcuuacuuaga

SEQ ID NO: 1475956 - RNA, 19 nt, Artificial Sequence
  Description of Artificial Sequence: Synthetic oligonucleotide
guccgcauccaagguaaaa

SEQ ID NO: 1475957 - RNA, 19 nt, Artificial Sequence
  Description of Artificial Sequence: Synthetic oligonucleotide
gcuggucggugaugguggc

SEQ ID NO: 1475958 - RNA, 19 nt, Artificial Sequence
  Description of Artificial Sequence: Synthetic oligonucleotide
ggcauuguuucaauagcau

SEQ ID NO: 1475959 - RNA, 19 nt, Artificial Sequence
  Description of Artificial Sequence: Synthetic oligonucleotide
gcaguccgcuuacuuagaa

SEQ ID NO: 1475960 - RNA, 19 nt, Artificial Sequence
  Description of Artificial Sequence: Synthetic oligonucleotide
acucuccgguucggcgacg

SEQ ID NO: 1475961 - RNA, 19 nt, Artificial Sequence
  Description of Artificial Sequence: Synthetic oligonucleotide
guccccgcuucuugagcca

SEQ ID NO: 1475962 - RNA, 19 nt, Artificial Sequence
  Description of Artificial Sequence: Synthetic oligonucleotide
gccugucugccacgaauuc

SEQ ID NO: 1475963 - RNA, 19 nt, Artificial Sequence
  Description of Artificial Sequence: Synthetic oligonucleotide
gagugcaguucaucccgau

SEQ ID NO: 1475964 - RNA, 19 nt, Artificial Sequence
  Description of Artificial Sequence: Synthetic oligonucleotide
agcgggacgcggacggaga

SEQ ID NO: 1475965 - RNA, 19 nt, Artificial Sequence
  Description of Artificial Sequence: Synthetic oligonucleotide
cagcaaagagcaguccgcu

SEQ ID NO: 1475966 - RNA, 19 nt, Artificial Sequence
  Description of Artificial Sequence: Synthetic oligonucleotide
cuccgguucggcgacgucu

SEQ ID NO: 1475967 - RNA, 19 nt, Artificial Sequence
  Description of Artificial Sequence: Synthetic oligonucleotide
cgcuuacuuagaaguccgc

SEQ ID NO: 1475968 - RNA, 19 nt, Artificial Sequence
  Description of Artificial Sequence: Synthetic oligonucleotide
guggcgagcgggacgcgga

SEQ ID NO: 1475969 - RNA, 19 nt, Artificial Sequence
  Description of Artificial Sequence: Synthetic oligonucleotide
cucuagcauaagccugucu

SEQ ID NO: 1475970 - RNA, 19 nt, Artificial Sequence
  Description of Artificial Sequence: Synthetic oligonucleotide
auccaacgcaaggcccagu

SEQ ID NO: 1475971 - RNA, 19 nt, Artificial Sequence
  Description of Artificial Sequence: Synthetic oligonucleotide
ugguggcgagcgggacgcg

SEQ ID NO: 1475972 - RNA, 19 nt, Artificial Sequence
  Description of Artificial Sequence: Synthetic oligonucleotide
cuccauauguagccucuuu

SEQ ID NO: 1475973 - RNA, 19 nt, Artificial Sequence
  Description of Artificial Sequence: Synthetic oligonucleotide
gcucuauccucacugcguu

SEQ ID NO: 1475974 - RNA, 19 nt, Artificial Sequence
  Description of Artificial Sequence: Synthetic oligonucleotide
gcgacgucuuggaggauuc

SEQ ID NO: 1475975 - RNA, 19 nt, Artificial Sequence
  Description of Artificial Sequence: Synthetic oligonucleotide
cuauccucacugcguuggu

SEQ ID NO: 1475976 - RNA, 19 nt, Artificial Sequence
  Description of Artificial Sequence: Synthetic oligonucleotide
ggacgcgggucccgcugag

SEQ ID NO: 1475977 - RNA, 19 nt, Artificial Sequence
  Description of Artificial Sequence: Synthetic oligonucleotide
ggcggggauuuucucucaa

SEQ ID NO: 1475978 - RNA, 19 nt, Artificial Sequence
  Description of Artificial Sequence: Synthetic oligonucleotide
gaaggaggccucagcuuuu

SEQ ID NO: 1475979 - RNA, 19 nt, Artificial Sequence
  Description of Artificial Sequence: Synthetic oligonucleotide
ccaacgcaaggcccaguca

SEQ ID NO: 1475980 - RNA, 19 nt, Artificial Sequence
  Description of Artificial Sequence: Synthetic oligonucleotide
cgguucggcgacgucuugg

SEQ ID NO: 1475981 - RNA, 19 nt, Artificial Sequence
  Description of Artificial Sequence: Synthetic oligonucleotide
ggggcguguucuccuuguc

SEQ ID NO: 1475982 - RNA, 19 nt, Artificial Sequence
  Description of Artificial Sequence: Synthetic oligonucleotide
gcggcgacaccugcagcug

SEQ ID NO: 1475983 - RNA, 19 nt, Artificial Sequence
  Description of Artificial Sequence: Synthetic oligonucleotide
cugccacgaauucgauaua

SEQ ID NO: 1475984 - RNA, 19 nt, Artificial Sequence
  Description of Artificial Sequence: Synthetic oligonucleotide
ggcaucaguccccgcuucu

SEQ ID NO: 1475985 - RNA, 19 nt, Artificial Sequence
  Description of Artificial Sequence: Synthetic oligonucleotide
aguccgcauccaagguaaa

SEQ ID NO: 1475986 - RNA, 19 nt, Artificial Sequence
  Description of Artificial Sequence: Synthetic oligonucleotide
gccacgaauucgauauacu

SEQ ID NO: 1475987 - RNA, 19 nt, Artificial Sequence
  Description of Artificial Sequence: Synthetic oligonucleotide
gcugggguuaguagauacu

SEQ ID NO: 1475988 - RNA, 19 nt, Artificial Sequence
  Description of Artificial Sequence: Synthetic oligonucleotide
acgcugggguuaguagaua

SEQ ID NO: 1475989 - RNA, 19 nt, Artificial Sequence
  Description of Artificial Sequence: Synthetic oligonucleotide
gccaggacgcgggucccgc

SEQ ID NO: 1475990 - RNA, 19 nt, Artificial Sequence
  Description of Artificial Sequence: Synthetic oligonucleotide
gcucuagcauaagccuguc

SEQ ID NO: 1475991 - RNA, 19 nt, Artificial Sequence
  Description of Artificial Sequence: Synthetic oligonucleotide
ggccgcaaagaaagccaga

SEQ ID NO: 1475992 - RNA, 19 nt, Artificial Sequence
  Description of Artificial Sequence: Synthetic oligonucleotide
cgucucugcuaaugagcuc

SEQ ID NO: 1475993 - RNA, 19 nt, Artificial Sequence
  Description of Artificial Sequence: Synthetic oligonucleotide
gccacaacgcgcucuccau

SEQ ID NO: 1475994 - RNA, 19 nt, Artificial Sequence
  Description of Artificial Sequence: Synthetic oligonucleotide
cagcuggaaccgggagcac

SEQ ID NO: 1475995 - RNA, 19 nt, Artificial Sequence
  Description of Artificial Sequence: Synthetic oligonucleotide
cgaagcggcggggauuuuc

SEQ ID NO: 1475996 - RNA, 19 nt, Artificial Sequence
  Description of Artificial Sequence: Synthetic oligonucleotide
caacgaagcggcggggauu

SEQ ID NO: 1475997 - RNA, 19 nt, Artificial Sequence
  Description of Artificial Sequence: Synthetic oligonucleotide
ggcgacgucuuggaggauu

SEQ ID NO: 1475998 - RNA, 19 nt, Artificial Sequence
  Description of Artificial Sequence: Synthetic oligonucleotide
cggcgacaccugcagcugc

SEQ ID NO: 1475999 - RNA, 19 nt, Artificial Sequence
  Description of Artificial Sequence: Synthetic oligonucleotide
gcgggacgcggacggagaa

SEQ ID NO: 1476000 - RNA, 19 nt, Artificial Sequence
  Description of Artificial Sequence: Synthetic oligonucleotide
cgcggacggagaacaugac

SEQ ID NO: 1476001 - RNA, 19 nt, Artificial Sequence
  Description of Artificial Sequence: Synthetic oligonucleotide
ccgggcaucaguccccgcu

SEQ ID NO: 1476002 - RNA, 19 nt, Artificial Sequence
  Description of Artificial Sequence: Synthetic oligonucleotide
gcggggauuuucucucaau

SEQ ID NO: 1476003 - RNA, 19 nt, Artificial Sequence
  Description of Artificial Sequence: Synthetic oligonucleotide
gcgguccagaaggaggccu

SEQ ID NO: 1476004 - RNA, 19 nt, Artificial Sequence
  Description of Artificial Sequence: Synthetic oligonucleotide
cucuccgguucggcgacgu

SEQ ID NO: 1476005 - RNA, 19 nt, Artificial Sequence
  Description of Artificial Sequence: Synthetic oligonucleotide
ccacaacgcgcucuccaua

SEQ ID NO: 1476006 - RNA, 19 nt, Artificial Sequence
  Description of Artificial Sequence: Synthetic oligonucleotide
ggauucuccucgccaccuu

SEQ ID NO: 1476007 - RNA, 19 nt, Artificial Sequence
  Description of Artificial Sequence: Synthetic oligonucleotide
cagcgggccucuguaacuu

SEQ ID NO: 1476008 - RNA, 19 nt, Artificial Sequence
  Description of Artificial Sequence: Synthetic oligonucleotide
gcuuguguaccaggugcuu

SEQ ID NO: 1476009 - RNA, 19 nt, Artificial Sequence
  Description of Artificial Sequence: Synthetic oligonucleotide
ccgguucggcgacgucuug

SEQ ID NO: 1476010 - RNA, 19 nt, Artificial Sequence
  Description of Artificial Sequence: Synthetic oligonucleotide
gccgggcaucaguccccgc

SEQ ID NO: 1476011 - RNA, 19 nt, Artificial Sequence
  Description of Artificial Sequence: Synthetic oligonucleotide
acgaagcggcggggauuuu

SEQ ID NO: 1476012 - RNA, 19 nt, Artificial Sequence
  Description of Artificial Sequence: Synthetic oligonucleotide
cgggacgcggacggagaac

SEQ ID NO: 1476013 - RNA, 19 nt, Artificial Sequence
  Description of Artificial Sequence: Synthetic oligonucleotide
cccucucuuuggaaucuuu

SEQ ID NO: 1476014 - RNA, 19 nt, Artificial Sequence
  Description of Artificial Sequence: Synthetic oligonucleotide
cgaauucgauauacugcuu

SEQ ID NO: 1476015 - RNA, 19 nt, Artificial Sequence
  Description of Artificial Sequence: Synthetic oligonucleotide
cggcggggauuuucucuca

SEQ ID NO: 1476016 - RNA, 19 nt, Artificial Sequence
  Description of Artificial Sequence: Synthetic oligonucleotide
ggacgcggacggagaacau

SEQ ID NO: 1476017 - RNA, 19 nt, Artificial Sequence
  Description of Artificial Sequence: Synthetic oligonucleotide
ccaggacgcgggucccgcu

SEQ ID NO: 1476018 - RNA, 19 nt, Artificial Sequence
  Description of Artificial Sequence: Synthetic oligonucleotide
ccucacugcguugguuauu

SEQ ID NO: 1476019 - RNA, 19 nt, Artificial Sequence
  Description of Artificial Sequence: Synthetic oligonucleotide
cgcgggucccgcugaggcu

SEQ ID NO: 1476020 - RNA, 19 nt, Artificial Sequence
  Description of Artificial Sequence: Synthetic oligonucleotide
ccgcuucuugagccagaau

SEQ ID NO: 1476021 - RNA, 19 nt, Artificial Sequence
  Description of Artificial Sequence: Synthetic oligonucleotide
cgagcgggacgcggacgga

SEQ ID NO: 1476022 - RNA, 19 nt, Artificial Sequence
  Description of Artificial Sequence: Synthetic oligonucleotide
cgacgucuuggaggauucu

SEQ ID NO: 1476023 - RNA, 19 nt, Artificial Sequence
  Description of Artificial Sequence: Synthetic oligonucleotide
ccucaacgcugggguuagu

SEQ ID NO: 1476024 - RNA, 19 nt, Artificial Sequence
  Description of Artificial Sequence: Synthetic oligonucleotide
cggcgacgucuuggaggau

SEQ ID NO: 1476025 - RNA, 19 nt, Artificial Sequence
  Description of Artificial Sequence: Synthetic oligonucleotide
aauaaagucauaguuugcg

SEQ ID NO: 1476026 - RNA, 19 nt, Artificial Sequence
  Description of Artificial Sequence: Synthetic oligonucleotide
aaugcuauaauuguugcag

SEQ ID NO: 1476027 - RNA, 19 nt, Artificial Sequence
  Description of Artificial Sequence: Synthetic oligonucleotide
ucuuguacaacccaggaug

SEQ ID NO: 1476028 - RNA, 19 nt, Artificial Sequence
  Description of Artificial Sequence: Synthetic oligonucleotide
agaauaaagucauaguuug

SEQ ID NO: 1476029 - RNA, 19 nt, Artificial Sequence
  Description of Artificial Sequence: Synthetic oligonucleotide
uacagauaguccuucaugg

SEQ ID NO: 1476030 - RNA, 19 nt, Artificial Sequence
  Description of Artificial Sequence: Synthetic oligonucleotide
uuugcgguagaguucaugg

SEQ ID NO: 1476031 - RNA, 19 nt, Artificial Sequence
  Description of Artificial Sequence: Synthetic oligonucleotide
gauguagugguguugaaug

SEQ ID NO: 1476032 - RNA, 19 nt, Artificial Sequence
  Description of Artificial Sequence: Synthetic oligonucleotide
ugaugagucucccauacag

SEQ ID NO: 1476033 - RNA, 19 nt, Artificial Sequence
  Description of Artificial Sequence: Synthetic oligonucleotide
uuuagggugaaacuggagu

SEQ ID NO: 1476034 - RNA, 19 nt, Artificial Sequence
  Description of Artificial Sequence: Synthetic oligonucleotide
ugaucuucugagaugaucu

SEQ ID NO: 1476035 - RNA, 19 nt, Artificial Sequence
  Description of Artificial Sequence: Synthetic oligonucleotide
ugggauucgauaccaaccg

SEQ ID NO: 1476036 - RNA, 19 nt, Artificial Sequence
  Description of Artificial Sequence: Synthetic oligonucleotide
cuuuagaauaaagucauag

SEQ ID NO: 1476037 - RNA, 19 nt, Artificial Sequence
  Description of Artificial Sequence: Synthetic oligonucleotide
agcagaaggcaccuaaggc

SEQ ID NO: 1476038 - RNA, 19 nt, Artificial Sequence
  Description of Artificial Sequence: Synthetic oligonucleotide
aacacguuggcauuuucug

SEQ ID NO: 1476039 - RNA, 19 nt, Artificial Sequence
  Description of Artificial Sequence: Synthetic oligonucleotide
auaaagucauaguuugcgg

SEQ ID NO: 1476040 - RNA, 19 nt, Artificial Sequence
  Description of Artificial Sequence: Synthetic oligonucleotide
gacuguaacagcuugaucu

SEQ ID NO: 1476041 - RNA, 19 nt, Artificial Sequence
  Description of Artificial Sequence: Synthetic oligonucleotide
auuuccuccacgucagagc

SEQ ID NO: 1476042 - RNA, 19 nt, Artificial Sequence
  Description of Artificial Sequence: Synthetic oligonucleotide
uuuucgaaguugaugaguc

SEQ ID NO: 1476043 - RNA, 19 nt, Artificial Sequence
  Description of Artificial Sequence: Synthetic oligonucleotide
uagaauaaagucauaguuu

SEQ ID NO: 1476044 - RNA, 19 nt, Artificial Sequence
  Description of Artificial Sequence: Synthetic oligonucleotide
agaacuucuuuuccuggcc

SEQ ID NO: 1476045 - RNA, 19 nt, Artificial Sequence
  Description of Artificial Sequence: Synthetic oligonucleotide
uuaugaucuucugagauga

SEQ ID NO: 1476046 - RNA, 19 nt, Artificial Sequence
  Description of Artificial Sequence: Synthetic oligonucleotide
uggaagaaccagcugagug

SEQ ID NO: 1476047 - RNA, 19 nt, Artificial Sequence
  Description of Artificial Sequence: Synthetic oligonucleotide
uuucggaugacagucgggg

SEQ ID NO: 1476048 - RNA, 19 nt, Artificial Sequence
  Description of Artificial Sequence: Synthetic oligonucleotide
agugcuuagucccagccag

SEQ ID NO: 1476049 - RNA, 19 nt, Artificial Sequence
  Description of Artificial Sequence: Synthetic oligonucleotide
caugcuugaccuuagcccc

SEQ ID NO: 1476050 - RNA, 19 nt, Artificial Sequence
  Description of Artificial Sequence: Synthetic oligonucleotide
ugagaaaggcuagaguggg

SEQ ID NO: 1476051 - RNA, 19 nt, Artificial Sequence
  Description of Artificial Sequence: Synthetic oligonucleotide
auaauuguugcaggcagac

SEQ ID NO: 1476052 - RNA, 19 nt, Artificial Sequence
  Description of Artificial Sequence: Synthetic oligonucleotide
aagucagcuaguccucugg

SEQ ID NO: 1476053 - RNA, 19 nt, Artificial Sequence
  Description of Artificial Sequence: Synthetic oligonucleotide
uuauagaguggcagugagg

SEQ ID NO: 1476054 - RNA, 19 nt, Artificial Sequence
  Description of Artificial Sequence: Synthetic oligonucleotide
ugugccugugggcacaagg

SEQ ID NO: 1476055 - RNA, 19 nt, Artificial Sequence
  Description of Artificial Sequence: Synthetic oligonucleotide
uguacaacccaggauguag

SEQ ID NO: 1476056 - RNA, 19 nt, Artificial Sequence
  Description of Artificial Sequence: Synthetic oligonucleotide
gacucccucacucuguagg

SEQ ID NO: 1476057 - RNA, 19 nt, Artificial Sequence
  Description of Artificial Sequence: Synthetic oligonucleotide
auacagauaguccuucaug

SEQ ID NO: 1476058 - RNA, 19 nt, Artificial Sequence
  Description of Artificial Sequence: Synthetic oligonucleotide
ugcgguagaguucauggca

SEQ ID NO: 1476059 - RNA, 19 nt, Artificial Sequence
  Description of Artificial Sequence: Synthetic oligonucleotide
cacguagucuuguacaacc

SEQ ID NO: 1476060 - RNA, 19 nt, Artificial Sequence
  Description of Artificial Sequence: Synthetic oligonucleotide
ucucccauacagauagucc

SEQ ID NO: 1476061 - RNA, 19 nt, Artificial Sequence
  Description of Artificial Sequence: Synthetic oligonucleotide
ugcuauaauuguugcaggc

SEQ ID NO: 1476062 - RNA, 19 nt, Artificial Sequence
  Description of Artificial Sequence: Synthetic oligonucleotide
uagucuuguacaacccagg

SEQ ID NO: 1476063 - RNA, 19 nt, Artificial Sequence
  Description of Artificial Sequence: Synthetic oligonucleotide
ucagcuaguccucugguuc

SEQ ID NO: 1476064 - RNA, 19 nt, Artificial Sequence
  Description of Artificial Sequence: Synthetic oligonucleotide
gggacuuccaugaagaucc

SEQ ID NO: 1476065 - RNA, 19 nt, Artificial Sequence
  Description of Artificial Sequence: Synthetic oligonucleotide
ucugcuucaugcgagggag

SEQ ID NO: 1476066 - RNA, 19 nt, Artificial Sequence
  Description of Artificial Sequence: Synthetic oligonucleotide
cuuaugaucuucugagaug

SEQ ID NO: 1476067 - RNA, 19 nt, Artificial Sequence
  Description of Artificial Sequence: Synthetic oligonucleotide
gcagaaggcaccuaaggcg

SEQ ID NO: 1476068 - RNA, 19 nt, Artificial Sequence
  Description of Artificial Sequence: Synthetic oligonucleotide
uccgggacaaagcucaugu

SEQ ID NO: 1476069 - RNA, 19 nt, Artificial Sequence
  Description of Artificial Sequence: Synthetic oligonucleotide
aaggccgggacuuccauga

SEQ ID NO: 1476070 - RNA, 19 nt, Artificial Sequence
  Description of Artificial Sequence: Synthetic oligonucleotide
gagguuuagggugaaacug

SEQ ID NO: 1476071 - RNA, 19 nt, Artificial Sequence
  Description of Artificial Sequence: Synthetic oligonucleotide
gagcagaaggcaccuaagg

SEQ ID NO: 1476072 - RNA, 19 nt, Artificial Sequence
  Description of Artificial Sequence: Synthetic oligonucleotide
uccacgucagagcuggaag

SEQ ID NO: 1476073 - RNA, 19 nt, Artificial Sequence
  Description of Artificial Sequence: Synthetic oligonucleotide
ucgaaguugaugagucucc

SEQ ID NO: 1476074 - RNA, 19 nt, Artificial Sequence
  Description of Artificial Sequence: Synthetic oligonucleotide
uucauggcauagaacacgu

SEQ ID NO: 1476075 - RNA, 19 nt, Artificial Sequence
  Description of Artificial Sequence: Synthetic oligonucleotide
ucggaugacagucggggcc

SEQ ID NO: 1476076 - RNA, 19 nt, Artificial Sequence
  Description of Artificial Sequence: Synthetic oligonucleotide
aucuucugagaugaucugc

SEQ ID NO: 1476077 - RNA, 19 nt, Artificial Sequence
  Description of Artificial Sequence: Synthetic oligonucleotide
augcuauaauuguugcagg

SEQ ID NO: 1476078 - RNA, 19 nt, Artificial Sequence
  Description of Artificial Sequence: Synthetic oligonucleotide
ugggagacguccuuagaag

SEQ ID NO: 1476079 - RNA, 19 nt, Artificial Sequence
  Description of Artificial Sequence: Synthetic oligonucleotide
uuuucggaugacagucggg

SEQ ID NO: 1476080 - RNA, 19 nt, Artificial Sequence
  Description of Artificial Sequence: Synthetic oligonucleotide
gaugaugcagcagucgccc

SEQ ID NO: 1476081 - RNA, 19 nt, Artificial Sequence
  Description of Artificial Sequence: Synthetic oligonucleotide
uccagggcaggcaagguac

SEQ ID NO: 1476082 - RNA, 19 nt, Artificial Sequence
  Description of Artificial Sequence: Synthetic oligonucleotide
ugucacucccggcagcagg

SEQ ID NO: 1476083 - RNA, 19 nt, Artificial Sequence
  Description of Artificial Sequence: Synthetic oligonucleotide
gagaaugcaguggucagcc

SEQ ID NO: 1476084 - RNA, 19 nt, Artificial Sequence
  Description of Artificial Sequence: Synthetic oligonucleotide
cauguugauuuccuccacg

SEQ ID NO: 1476085 - RNA, 19 nt, Artificial Sequence
  Description of Artificial Sequence: Synthetic oligonucleotide
ugagugcacgcugagggcg

SEQ ID NO: 1476086 - RNA, 19 nt, Artificial Sequence
  Description of Artificial Sequence: Synthetic oligonucleotide
aagucauaguuugcgguag

SEQ ID NO: 1476087 - RNA, 19 nt, Artificial Sequence
  Description of Artificial Sequence: Synthetic oligonucleotide
cuuuucggaugacagucgg

SEQ ID NO: 1476088 - RNA, 19 nt, Artificial Sequence
  Description of Artificial Sequence: Synthetic oligonucleotide
agauuguguuuguccaugg

SEQ ID NO: 1476089 - RNA, 19 nt, Artificial Sequence
  Description of Artificial Sequence: Synthetic oligonucleotide
agagguuuagggugaaacu

SEQ ID NO: 1476090 - RNA, 19 nt, Artificial Sequence
  Description of Artificial Sequence: Synthetic oligonucleotide
gacagucggggccuuaucc

SEQ ID NO: 1476091 - RNA, 19 nt, Artificial Sequence
  Description of Artificial Sequence: Synthetic oligonucleotide
uguagugguguugaauggc

SEQ ID NO: 1476092 - RNA, 19 nt, Artificial Sequence
  Description of Artificial Sequence: Synthetic oligonucleotide
ugugggauucgauaccaac

SEQ ID NO: 1476093 - RNA, 19 nt, Artificial Sequence
  Description of Artificial Sequence: Synthetic oligonucleotide
uccuccacgucagagcugg

SEQ ID NO: 1476094 - RNA, 19 nt, Artificial Sequence
  Description of Artificial Sequence: Synthetic oligonucleotide
gaucugggcaaucacuuca

SEQ ID NO: 1476095 - RNA, 19 nt, Artificial Sequence
  Description of Artificial Sequence: Synthetic oligonucleotide
ggaagaaccagcugagugc

SEQ ID NO: 1476096 - RNA, 19 nt, Artificial Sequence
  Description of Artificial Sequence: Synthetic oligonucleotide
uaguuugcgguagaguuca

SEQ ID NO: 1476097 - RNA, 19 nt, Artificial Sequence
  Description of Artificial Sequence: Synthetic oligonucleotide
gagagguuuagggugaaac

SEQ ID NO: 1476098 - RNA, 19 nt, Artificial Sequence
  Description of Artificial Sequence: Synthetic oligonucleotide
guugcaggcagacuguaac

SEQ ID NO: 1476099 - RNA, 19 nt, Artificial Sequence
  Description of Artificial Sequence: Synthetic oligonucleotide
acuuccaugaagaucccag

SEQ ID NO: 1476100 - RNA, 19 nt, Artificial Sequence
  Description of Artificial Sequence: Synthetic oligonucleotide
cuagucuaagugcuuaguc

SEQ ID NO: 1476101 - RNA, 19 nt, Artificial Sequence
  Description of Artificial Sequence: Synthetic oligonucleotide
gaggguaguguccagggca

SEQ ID NO: 1476102 - RNA, 19 nt, Artificial Sequence
  Description of Artificial Sequence: Synthetic oligonucleotide
agaaccagcugagugcacg

SEQ ID NO: 1476103 - RNA, 19 nt, Artificial Sequence
  Description of Artificial Sequence: Synthetic oligonucleotide
agaccccugagacggagcg

SEQ ID NO: 1476104 - RNA, 19 nt, Artificial Sequence
  Description of Artificial Sequence: Synthetic oligonucleotide
guuggcauuuucuggaauc

SEQ ID NO: 1476105 - RNA, 19 nt, Artificial Sequence
  Description of Artificial Sequence: Synthetic oligonucleotide
agacguccuuagaagaugc

SEQ ID NO: 1476106 - RNA, 19 nt, Artificial Sequence
  Description of Artificial Sequence: Synthetic oligonucleotide
cugcagaccccugagacgg

SEQ ID NO: 1476107 - RNA, 19 nt, Artificial Sequence
  Description of Artificial Sequence: Synthetic oligonucleotide
caaucuugaguccuuucug

SEQ ID NO: 1476108 - RNA, 19 nt, Artificial Sequence
  Description of Artificial Sequence: Synthetic oligonucleotide
ugcuucaugcgagggaggg

SEQ ID NO: 1476109 - RNA, 19 nt, Artificial Sequence
  Description of Artificial Sequence: Synthetic oligonucleotide
guagucuuguacaacccag

SEQ ID NO: 1476110 - RNA, 19 nt, Artificial Sequence
  Description of Artificial Sequence: Synthetic oligonucleotide
ugauccaagggagggcugg

SEQ ID NO: 1476111 - RNA, 19 nt, Artificial Sequence
  Description of Artificial Sequence: Synthetic oligonucleotide
gaaaguguggaggguagug

SEQ ID NO: 1476112 - RNA, 19 nt, Artificial Sequence
  Description of Artificial Sequence: Synthetic oligonucleotide
uucgaaguugaugagucuc

SEQ ID NO: 1476113 - RNA, 19 nt, Artificial Sequence
  Description of Artificial Sequence: Synthetic oligonucleotide
guacauguugccguugucc

SEQ ID NO: 1476114 - RNA, 19 nt, Artificial Sequence
  Description of Artificial Sequence: Synthetic oligonucleotide
gaagaucccaggccugugc

SEQ ID NO: 1476115 - RNA, 19 nt, Artificial Sequence
  Description of Artificial Sequence: Synthetic oligonucleotide
agugguguugaauggcacu

SEQ ID NO: 1476116 - RNA, 19 nt, Artificial Sequence
  Description of Artificial Sequence: Synthetic oligonucleotide
agucuuguacaacccagga

SEQ ID NO: 1476117 - RNA, 19 nt, Artificial Sequence
  Description of Artificial Sequence: Synthetic oligonucleotide
ccuuuggcaaucuugaguc

SEQ ID NO: 1476118 - RNA, 19 nt, Artificial Sequence
  Description of Artificial Sequence: Synthetic oligonucleotide
auaguuugcgguagaguuc

SEQ ID NO: 1476119 - RNA, 19 nt, Artificial Sequence
  Description of Artificial Sequence: Synthetic oligonucleotide
aaccgggugguccacgaga

SEQ ID NO: 1476120 - RNA, 19 nt, Artificial Sequence
  Description of Artificial Sequence: Synthetic oligonucleotide
caguggucagcccugcugg

SEQ ID NO: 1476121 - RNA, 19 nt, Artificial Sequence
  Description of Artificial Sequence: Synthetic oligonucleotide
ccaugcuugaccuuagccc

SEQ ID NO: 1476122 - RNA, 19 nt, Artificial Sequence
  Description of Artificial Sequence: Synthetic oligonucleotide
aggcugacccggaugaugc

SEQ ID NO: 1476123 - RNA, 19 nt, Artificial Sequence
  Description of Artificial Sequence: Synthetic oligonucleotide
guggugugggauucgauac

SEQ ID NO: 1476124 - RNA, 19 nt, Artificial Sequence
  Description of Artificial Sequence: Synthetic oligonucleotide
caggcaagguaccaugccc

SEQ ID NO: 1476125 - RNA, 19 nt, Artificial Sequence
  Description of Artificial Sequence: Synthetic oligonucleotide
aaaggccgggacuuccaug

SEQ ID NO: 1476126 - RNA, 19 nt, Artificial Sequence
  Description of Artificial Sequence: Synthetic oligonucleotide
uuggugcagccugagaaag

SEQ ID NO: 1476127 - RNA, 19 nt, Artificial Sequence
  Description of Artificial Sequence: Synthetic oligonucleotide
cuucaugcgagggagggug

SEQ ID NO: 1476128 - RNA, 19 nt, Artificial Sequence
  Description of Artificial Sequence: Synthetic oligonucleotide
aguggugugggauucgaua

SEQ ID NO: 1476129 - RNA, 19 nt, Artificial Sequence
  Description of Artificial Sequence: Synthetic oligonucleotide
auucgauaccaaccgggug

SEQ ID NO: 1476130 - RNA, 19 nt, Artificial Sequence
  Description of Artificial Sequence: Synthetic oligonucleotide
agacuguaacagcuugauc

SEQ ID NO: 1476131 - RNA, 19 nt, Artificial Sequence
  Description of Artificial Sequence: Synthetic oligonucleotide
gugggauucgauaccaacc

SEQ ID NO: 1476132 - RNA, 19 nt, Artificial Sequence
  Description of Artificial Sequence: Synthetic oligonucleotide
gcucauguugauuuccucc

SEQ ID NO: 1476133 - RNA, 19 nt, Artificial Sequence
  Description of Artificial Sequence: Synthetic oligonucleotide
acaacccaggauguagugg

SEQ ID NO: 1476134 - RNA, 19 nt, Artificial Sequence
  Description of Artificial Sequence: Synthetic oligonucleotide
ggauucgauaccaaccggg

SEQ ID NO: 1476135 - RNA, 19 nt, Artificial Sequence
  Description of Artificial Sequence: Synthetic oligonucleotide
uuucugcuucaugcgaggg

SEQ ID NO: 1476136 - RNA, 19 nt, Artificial Sequence
  Description of Artificial Sequence: Synthetic oligonucleotide
uucugcuucaugcgaggga

SEQ ID NO: 1476137 - RNA, 19 nt, Artificial Sequence
  Description of Artificial Sequence: Synthetic oligonucleotide
uacaacccaggauguagug

SEQ ID NO: 1476138 - RNA, 19 nt, Artificial Sequence
  Description of Artificial Sequence: Synthetic oligonucleotide
uggugugggauucgauacc

SEQ ID NO: 1476139 - RNA, 19 nt, Artificial Sequence
  Description of Artificial Sequence: Synthetic oligonucleotide
uguugauuuccuccacguc

SEQ ID NO: 1476140 - RNA, 19 nt, Artificial Sequence
  Description of Artificial Sequence: Synthetic oligonucleotide
agaacacguuggcauuuuc

SEQ ID NO: 1476141 - RNA, 19 nt, Artificial Sequence
  Description of Artificial Sequence: Synthetic oligonucleotide
uccacgagagggcuucucu

SEQ ID NO: 1476142 - RNA, 19 nt, Artificial Sequence
  Description of Artificial Sequence: Synthetic oligonucleotide
uucaugcgagggagggugg

SEQ ID NO: 1476143 - RNA, 19 nt, Artificial Sequence
  Description of Artificial Sequence: Synthetic oligonucleotide
gccacucuagucuaagugc

SEQ ID NO: 1476144 - RNA, 19 nt, Artificial Sequence
  Description of Artificial Sequence: Synthetic oligonucleotide
ugagacucccucacucugu

SEQ ID NO: 1476145 - RNA, 19 nt, Artificial Sequence
  Description of Artificial Sequence: Synthetic oligonucleotide
ucauaguuugcgguagagu

SEQ ID NO: 1476146 - RNA, 19 nt, Artificial Sequence
  Description of Artificial Sequence: Synthetic oligonucleotide
aagguccgcuucuuuagaa

SEQ ID NO: 1476147 - RNA, 19 nt, Artificial Sequence
  Description of Artificial Sequence: Synthetic oligonucleotide
uggaaucuuuggugcagcc

SEQ ID NO: 1476148 - RNA, 19 nt, Artificial Sequence
  Description of Artificial Sequence: Synthetic oligonucleotide
uugcaggcagacuguaaca

SEQ ID NO: 1476149 - RNA, 19 nt, Artificial Sequence
  Description of Artificial Sequence: Synthetic oligonucleotide
gaaccagcugagugcacgc

SEQ ID NO: 1476150 - RNA, 19 nt, Artificial Sequence
  Description of Artificial Sequence: Synthetic oligonucleotide
cauaguuugcgguagaguu

SEQ ID NO: 1476151 - RNA, 19 nt, Artificial Sequence
  Description of Artificial Sequence: Synthetic oligonucleotide
acguagucuuguacaaccc

SEQ ID NO: 1476152 - RNA, 19 nt, Artificial Sequence
  Description of Artificial Sequence: Synthetic oligonucleotide
uugcgguagaguucauggc

SEQ ID NO: 1476153 - RNA, 19 nt, Artificial Sequence
  Description of Artificial Sequence: Synthetic oligonucleotide
gagacguccuuagaagaug

SEQ ID NO: 1476154 - RNA, 19 nt, Artificial Sequence
  Description of Artificial Sequence: Synthetic oligonucleotide
ugcuuagucccagccagcc

SEQ ID NO: 1476155 - RNA, 19 nt, Artificial Sequence
  Description of Artificial Sequence: Synthetic oligonucleotide
cacguuggcauuuucugga

SEQ ID NO: 1476156 - RNA, 19 nt, Artificial Sequence
  Description of Artificial Sequence: Synthetic oligonucleotide
uugaugagucucccauaca

SEQ ID NO: 1476157 - RNA, 19 nt, Artificial Sequence
  Description of Artificial Sequence: Synthetic oligonucleotide
aauggcacuuucaguggug

SEQ ID NO: 1476158 - RNA, 19 nt, Artificial Sequence
  Description of Artificial Sequence: Synthetic oligonucleotide
cuaagugcuuagucccagc

SEQ ID NO: 1476159 - RNA, 19 nt, Artificial Sequence
  Description of Artificial Sequence: Synthetic oligonucleotide
agcgcuuguggguacgugu

SEQ ID NO: 1476160 - RNA, 19 nt, Artificial Sequence
  Description of Artificial Sequence: Synthetic oligonucleotide
cucucucugauccaaggga

SEQ ID NO: 1476161 - RNA, 19 nt, Artificial Sequence
  Description of Artificial Sequence: Synthetic oligonucleotide
acagucggggccuuauccu

SEQ ID NO: 1476162 - RNA, 19 nt, Artificial Sequence
  Description of Artificial Sequence: Synthetic oligonucleotide
agcuuaugaucuucugaga

SEQ ID NO: 1476163 - RNA, 19 nt, Artificial Sequence
  Description of Artificial Sequence: Synthetic oligonucleotide
caccuaaggcggcaagugg

SEQ ID NO: 1476164 - RNA, 19 nt, Artificial Sequence
  Description of Artificial Sequence: Synthetic oligonucleotide
acgugugguagacacgggu

SEQ ID NO: 1476165 - RNA, 19 nt, Artificial Sequence
  Description of Artificial Sequence: Synthetic oligonucleotide
uucggaugacagucggggc

SEQ ID NO: 1476166 - RNA, 19 nt, Artificial Sequence
  Description of Artificial Sequence: Synthetic oligonucleotide
aagguaccaugcccaguug

SEQ ID NO: 1476167 - RNA, 19 nt, Artificial Sequence
  Description of Artificial Sequence: Synthetic oligonucleotide
auagaguggcagugaggag

SEQ ID NO: 1476168 - RNA, 19 nt, Artificial Sequence
  Description of Artificial Sequence: Synthetic oligonucleotide
gaaugcaguggucagcccu

SEQ ID NO: 1476169 - RNA, 19 nt, Artificial Sequence
  Description of Artificial Sequence: Synthetic oligonucleotide
gaagaugccuuuggcaauc

SEQ ID NO: 1476170 - RNA, 19 nt, Artificial Sequence
  Description of Artificial Sequence: Synthetic oligonucleotide
ucaguggcaggugucacuc

SEQ ID NO: 1476171 - RNA, 19 nt, Artificial Sequence
  Description of Artificial Sequence: Synthetic oligonucleotide
cugacccggaugaugcagc

SEQ ID NO: 1476172 - RNA, 19 nt, Artificial Sequence
  Description of Artificial Sequence: Synthetic oligonucleotide
cagcuaguccucugguucc

SEQ ID NO: 1476173 - RNA, 19 nt, Artificial Sequence
  Description of Artificial Sequence: Synthetic oligonucleotide
uacgugugguagacacggg

SEQ ID NO: 1476174 - RNA, 19 nt, Artificial Sequence
  Description of Artificial Sequence: Synthetic oligonucleotide
ggggccaaugcuauaauug

SEQ ID NO: 1476175 - RNA, 19 nt, Artificial Sequence
  Description of Artificial Sequence: Synthetic oligonucleotide
gagacuccgggacaaagcu

SEQ ID NO: 1476176 - RNA, 19 nt, Artificial Sequence
  Description of Artificial Sequence: Synthetic oligonucleotide
ucagccugucaguggcagg

SEQ ID NO: 1476177 - RNA, 19 nt, Artificial Sequence
  Description of Artificial Sequence: Synthetic oligonucleotide
ggccacucuagucuaagug

SEQ ID NO: 1476178 - RNA, 19 nt, Artificial Sequence
  Description of Artificial Sequence: Synthetic oligonucleotide
gugagacucccucacucug

SEQ ID NO: 1476179 - RNA, 19 nt, Artificial Sequence
  Description of Artificial Sequence: Synthetic oligonucleotide
aggugucacucccggcagc

SEQ ID NO: 1476180 - RNA, 19 nt, Artificial Sequence
  Description of Artificial Sequence: Synthetic oligonucleotide
uaguguccagggcaggcaa

SEQ ID NO: 1476181 - RNA, 19 nt, Artificial Sequence
  Description of Artificial Sequence: Synthetic oligonucleotide
gaugagucucccauacaga

SEQ ID NO: 1476182 - RNA, 19 nt, Artificial Sequence
  Description of Artificial Sequence: Synthetic oligonucleotide
uggguggcagugaucugca

SEQ ID NO: 1476183 - RNA, 19 nt, Artificial Sequence
  Description of Artificial Sequence: Synthetic oligonucleotide
agucagcuaguccucuggu

SEQ ID NO: 1476184 - RNA, 19 nt, Artificial Sequence
  Description of Artificial Sequence: Synthetic oligonucleotide
gacugggaggcugacuccc

SEQ ID NO: 1476185 - RNA, 19 nt, Artificial Sequence
  Description of Artificial Sequence: Synthetic oligonucleotide
acguccuuagaagaugccu

SEQ ID NO: 1476186 - RNA, 19 nt, Artificial Sequence
  Description of Artificial Sequence: Synthetic oligonucleotide
cucccauacagauaguccu

SEQ ID NO: 1476187 - RNA, 19 nt, Artificial Sequence
  Description of Artificial Sequence: Synthetic oligonucleotide
cugagugcacgcugagggc

SEQ ID NO: 1476188 - RNA, 19 nt, Artificial Sequence
  Description of Artificial Sequence: Synthetic oligonucleotide
gaugccagaggucucuggu

SEQ ID NO: 1476189 - RNA, 19 nt, Artificial Sequence
  Description of Artificial Sequence: Synthetic oligonucleotide
gguagaguucauggcauag

SEQ ID NO: 1476190 - RNA, 19 nt, Artificial Sequence
  Description of Artificial Sequence: Synthetic oligonucleotide
aggaaaguguggaggguag

SEQ ID NO: 1476191 - RNA, 19 nt, Artificial Sequence
  Description of Artificial Sequence: Synthetic oligonucleotide
uugccguuguccacaucca

SEQ ID NO: 1476192 - RNA, 19 nt, Artificial Sequence
  Description of Artificial Sequence: Synthetic oligonucleotide
uucaguggugugggauucg

SEQ ID NO: 1476193 - RNA, 19 nt, Artificial Sequence
  Description of Artificial Sequence: Synthetic oligonucleotide
uguuuguccauggcuuuuc

SEQ ID NO: 1476194 - RNA, 19 nt, Artificial Sequence
  Description of Artificial Sequence: Synthetic oligonucleotide
agucauaguuugcgguaga

SEQ ID NO: 1476195 - RNA, 19 nt, Artificial Sequence
  Description of Artificial Sequence: Synthetic oligonucleotide
aguccucugguuccagaga

SEQ ID NO: 1476196 - RNA, 19 nt, Artificial Sequence
  Description of Artificial Sequence: Synthetic oligonucleotide
ucccauacagauaguccuu

SEQ ID NO: 1476197 - RNA, 19 nt, Artificial Sequence
  Description of Artificial Sequence: Synthetic oligonucleotide
ggcagugaucugcaccugg

SEQ ID NO: 1476198 - RNA, 19 nt, Artificial Sequence
  Description of Artificial Sequence: Synthetic oligonucleotide
gcagucgcccaccugcugg

SEQ ID NO: 1476199 - RNA, 19 nt, Artificial Sequence
  Description of Artificial Sequence: Synthetic oligonucleotide
guagugguguugaauggca

SEQ ID NO: 1476200 - RNA, 19 nt, Artificial Sequence
  Description of Artificial Sequence: Synthetic oligonucleotide
ggagcuggcgccaugcuug

SEQ ID NO: 1476201 - RNA, 19 nt, Artificial Sequence
  Description of Artificial Sequence: Synthetic oligonucleotide
gugggugagacucccucac

SEQ ID NO: 1476202 - RNA, 19 nt, Artificial Sequence
  Description of Artificial Sequence: Synthetic oligonucleotide
ccguuguccacauccaggc

SEQ ID NO: 1476203 - RNA, 19 nt, Artificial Sequence
  Description of Artificial Sequence: Synthetic oligonucleotide
gggauucgauaccaaccgg

SEQ ID NO: 1476204 - RNA, 19 nt, Artificial Sequence
  Description of Artificial Sequence: Synthetic oligonucleotide
aggagacuccgggacaaag

SEQ ID NO: 1476205 - RNA, 19 nt, Artificial Sequence
  Description of Artificial Sequence: Synthetic oligonucleotide
ugacccggaugaugcagca

SEQ ID NO: 1476206 - RNA, 19 nt, Artificial Sequence
  Description of Artificial Sequence: Synthetic oligonucleotide
cgucagagcuggaagaacc

SEQ ID NO: 1476207 - RNA, 19 nt, Artificial Sequence
  Description of Artificial Sequence: Synthetic oligonucleotide
ucaguggugugggauucga

SEQ ID NO: 1476208 - RNA, 19 nt, Artificial Sequence
  Description of Artificial Sequence: Synthetic oligonucleotide
ggcaagugguccccggagg

SEQ ID NO: 1476209 - RNA, 19 nt, Artificial Sequence
  Description of Artificial Sequence: Synthetic oligonucleotide
gccaugcuugaccuuagcc

SEQ ID NO: 1476210 - RNA, 19 nt, Artificial Sequence
  Description of Artificial Sequence: Synthetic oligonucleotide
cagacccugggagacgucc

SEQ ID NO: 1476211 - RNA, 19 nt, Artificial Sequence
  Description of Artificial Sequence: Synthetic oligonucleotide
agaaggcaccuaaggcggc

SEQ ID NO: 1476212 - RNA, 19 nt, Artificial Sequence
  Description of Artificial Sequence: Synthetic oligonucleotide
uccccggaggccaggucag

SEQ ID NO: 1476213 - RNA, 19 nt, Artificial Sequence
  Description of Artificial Sequence: Synthetic oligonucleotide
uccgcuucuuuagaauaaa

SEQ ID NO: 1476214 - RNA, 19 nt, Artificial Sequence
  Description of Artificial Sequence: Synthetic oligonucleotide
gguguugaauggcacuuuc

SEQ ID NO: 1476215 - RNA, 19 nt, Artificial Sequence
  Description of Artificial Sequence: Synthetic oligonucleotide
caacccaggauguaguggu

SEQ ID NO: 1476216 - RNA, 19 nt, Artificial Sequence
  Description of Artificial Sequence: Synthetic oligonucleotide
ugggccacucuagucuaag

SEQ ID NO: 1476217 - RNA, 19 nt, Artificial Sequence
  Description of Artificial Sequence: Synthetic oligonucleotide
ggugaugacugggaggcug

SEQ ID NO: 1476218 - RNA, 19 nt, Artificial Sequence
  Description of Artificial Sequence: Synthetic oligonucleotide
uaccugcguggccugggcc

SEQ ID NO: 1476219 - RNA, 19 nt, Artificial Sequence
  Description of Artificial Sequence: Synthetic oligonucleotide
guuugcgguagaguucaug

SEQ ID NO: 1476220 - RNA, 19 nt, Artificial Sequence
  Description of Artificial Sequence: Synthetic oligonucleotide
gcuauaauuguugcaggca

SEQ ID NO: 1476221 - RNA, 19 nt, Artificial Sequence
  Description of Artificial Sequence: Synthetic oligonucleotide
acucuagucuaagugcuua

SEQ ID NO: 1476222 - RNA, 19 nt, Artificial Sequence
  Description of Artificial Sequence: Synthetic oligonucleotide
ugaagaucccaggccugug

SEQ ID NO: 1476223 - RNA, 19 nt, Artificial Sequence
  Description of Artificial Sequence: Synthetic oligonucleotide
uggcucaucuucguccaga

SEQ ID NO: 1476224 - RNA, 19 nt, Artificial Sequence
  Description of Artificial Sequence: Synthetic oligonucleotide
caggcagacuguaacagcu

SEQ ID NO: 1476225 - RNA, 19 nt, Artificial Sequence
  Description of Artificial Sequence: Synthetic oligonucleotide
gauucgauaccaaccgggu

SEQ ID NO: 1476226 - RNA, 19 nt, Artificial Sequence
  Description of Artificial Sequence: Synthetic oligonucleotide
guaggggccaaugcuauaa

SEQ ID NO: 1476227 - RNA, 19 nt, Artificial Sequence
  Description of Artificial Sequence: Synthetic oligonucleotide
agguccgcuucuuuagaau

SEQ ID NO: 1476228 - RNA, 19 nt, Artificial Sequence
  Description of Artificial Sequence: Synthetic oligonucleotide
ucgauaccaaccggguggu

SEQ ID NO: 1476229 - RNA, 19 nt, Artificial Sequence
  Description of Artificial Sequence: Synthetic oligonucleotide
ugggugagacucccucacu

SEQ ID NO: 1476230 - RNA, 19 nt, Artificial Sequence
  Description of Artificial Sequence: Synthetic oligonucleotide
accccugagacggagcgcu

SEQ ID NO: 1476231 - RNA, 19 nt, Artificial Sequence
  Description of Artificial Sequence: Synthetic oligonucleotide
aggcaagguaccaugccca

SEQ ID NO: 1476232 - RNA, 19 nt, Artificial Sequence
  Description of Artificial Sequence: Synthetic oligonucleotide
guggaaucuuuggugcagc

SEQ ID NO: 1476233 - RNA, 19 nt, Artificial Sequence
  Description of Artificial Sequence: Synthetic oligonucleotide
auagaacacguuggcauuu

SEQ ID NO: 1476234 - RNA, 19 nt, Artificial Sequence
  Description of Artificial Sequence: Synthetic oligonucleotide
cucugguuccagagagcag

SEQ ID NO: 1476235 - RNA, 19 nt, Artificial Sequence
  Description of Artificial Sequence: Synthetic oligonucleotide
uggcacuuucaguggugug

SEQ ID NO: 1476236 - RNA, 19 nt, Artificial Sequence
  Description of Artificial Sequence: Synthetic oligonucleotide
gucagccugucaguggcag

SEQ ID NO: 1476237 - RNA, 19 nt, Artificial Sequence
  Description of Artificial Sequence: Synthetic oligonucleotide
gcuggcgccaugcuugacc

SEQ ID NO: 1476238 - RNA, 19 nt, Artificial Sequence
  Description of Artificial Sequence: Synthetic oligonucleotide
uagacacggguguggugga

SEQ ID NO: 1476239 - RNA, 19 nt, Artificial Sequence
  Description of Artificial Sequence: Synthetic oligonucleotide
gugggcagagguaccugcg

SEQ ID NO: 1476240 - RNA, 19 nt, Artificial Sequence
  Description of Artificial Sequence: Synthetic oligonucleotide
gcaagugguccccggaggc

SEQ ID NO: 1476241 - RNA, 19 nt, Artificial Sequence
  Description of Artificial Sequence: Synthetic oligonucleotide
gggagacguccuuagaaga

SEQ ID NO: 1476242 - RNA, 19 nt, Artificial Sequence
  Description of Artificial Sequence: Synthetic oligonucleotide
gaacacguuggcauuuucu

SEQ ID NO: 1476243 - RNA, 19 nt, Artificial Sequence
  Description of Artificial Sequence: Synthetic oligonucleotide
agacuccgggacaaagcuc

SEQ ID NO: 1476244 - RNA, 19 nt, Artificial Sequence
  Description of Artificial Sequence: Synthetic oligonucleotide
gacguccuuagaagaugcc

SEQ ID NO: 1476245 - RNA, 19 nt, Artificial Sequence
  Description of Artificial Sequence: Synthetic oligonucleotide
agacucccucacucuguag

SEQ ID NO: 1476246 - RNA, 19 nt, Artificial Sequence
  Description of Artificial Sequence: Synthetic oligonucleotide
gugauguccccgcugccga

SEQ ID NO: 1476247 - RNA, 19 nt, Artificial Sequence
  Description of Artificial Sequence: Synthetic oligonucleotide
gcuuuucggaugacagucg

SEQ ID NO: 1476248 - RNA, 19 nt, Artificial Sequence
  Description of Artificial Sequence: Synthetic oligonucleotide
aggggccaaugcuauaauu

SEQ ID NO: 1476249 - RNA, 19 nt, Artificial Sequence
  Description of Artificial Sequence: Synthetic oligonucleotide
aucuuuggugcagccugag

SEQ ID NO: 1476250 - RNA, 19 nt, Artificial Sequence
  Description of Artificial Sequence: Synthetic oligonucleotide
guccccggaggccagguca

SEQ ID NO: 1476251 - RNA, 19 nt, Artificial Sequence
  Description of Artificial Sequence: Synthetic oligonucleotide
gcagugaucugcaccuggg

SEQ ID NO: 1476252 - RNA, 19 nt, Artificial Sequence
  Description of Artificial Sequence: Synthetic oligonucleotide
gccguuguccacauccagg

SEQ ID NO: 1476253 - RNA, 19 nt, Artificial Sequence
  Description of Artificial Sequence: Synthetic oligonucleotide
gcaggcagacuguaacagc

SEQ ID NO: 1476254 - RNA, 19 nt, Artificial Sequence
  Description of Artificial Sequence: Synthetic oligonucleotide
acggagcgcuuguggguac

SEQ ID NO: 1476255 - RNA, 19 nt, Artificial Sequence
  Description of Artificial Sequence: Synthetic oligonucleotide
uaggcccugaagguggaau

SEQ ID NO: 1476256 - RNA, 19 nt, Artificial Sequence
  Description of Artificial Sequence: Synthetic oligonucleotide
ccugcugguuauagagugg

SEQ ID NO: 1476257 - RNA, 19 nt, Artificial Sequence
  Description of Artificial Sequence: Synthetic oligonucleotide
cuuuucgaaguugaugagu

SEQ ID NO: 1476258 - RNA, 19 nt, Artificial Sequence
  Description of Artificial Sequence: Synthetic oligonucleotide
cagugaggagcuguagcug

SEQ ID NO: 1476259 - RNA, 19 nt, Artificial Sequence
  Description of Artificial Sequence: Synthetic oligonucleotide
guggguacgugugguagac

SEQ ID NO: 1476260 - RNA, 19 nt, Artificial Sequence
  Description of Artificial Sequence: Synthetic oligonucleotide
ugacagucggggccuuauc

SEQ ID NO: 1476261 - RNA, 19 nt, Artificial Sequence
  Description of Artificial Sequence: Synthetic oligonucleotide
gcaaucuugaguccuuucu

SEQ ID NO: 1476262 - RNA, 19 nt, Artificial Sequence
  Description of Artificial Sequence: Synthetic oligonucleotide
gguaguguccagggcaggc

SEQ ID NO: 1476263 - RNA, 19 nt, Artificial Sequence
  Description of Artificial Sequence: Synthetic oligonucleotide
gcaggcaagguaccaugcc

SEQ ID NO: 1476264 - RNA, 19 nt, Artificial Sequence
  Description of Artificial Sequence: Synthetic oligonucleotide
gggugagacucccucacuc

SEQ ID NO: 1476265 - RNA, 19 nt, Artificial Sequence
  Description of Artificial Sequence: Synthetic oligonucleotide
acguuggcauuuucuggaa

SEQ ID NO: 1476266 - RNA, 19 nt, Artificial Sequence
  Description of Artificial Sequence: Synthetic oligonucleotide
cagaccccugagacggagc

SEQ ID NO: 1476267 - RNA, 19 nt, Artificial Sequence
  Description of Artificial Sequence: Synthetic oligonucleotide
gcacaaggagagaaugcag

SEQ ID NO: 1476268 - RNA, 19 nt, Artificial Sequence
  Description of Artificial Sequence: Synthetic oligonucleotide
gagguaccugcguggccug

SEQ ID NO: 1476269 - RNA, 19 nt, Artificial Sequence
  Description of Artificial Sequence: Synthetic oligonucleotide
gagacucccucacucugua

SEQ ID NO: 1476270 - RNA, 19 nt, Artificial Sequence
  Description of Artificial Sequence: Synthetic oligonucleotide
cugauccaagggagggcug

SEQ ID NO: 1476271 - RNA, 19 nt, Artificial Sequence
  Description of Artificial Sequence: Synthetic oligonucleotide
cagagguaccugcguggcc

SEQ ID NO: 1476272 - RNA, 19 nt, Artificial Sequence
  Description of Artificial Sequence: Synthetic oligonucleotide
caggcugacccggaugaug

SEQ ID NO: 1476273 - RNA, 19 nt, Artificial Sequence
  Description of Artificial Sequence: Synthetic oligonucleotide
gaaggcaccuaaggcggca

SEQ ID NO: 1476274 - RNA, 19 nt, Artificial Sequence
  Description of Artificial Sequence: Synthetic oligonucleotide
ggugugggauucgauacca

SEQ ID NO: 1476275 - RNA, 19 nt, Artificial Sequence
  Description of Artificial Sequence: Synthetic oligonucleotide
acgcugagggcgucaguga

SEQ ID NO: 1476276 - RNA, 19 nt, Artificial Sequence
  Description of Artificial Sequence: Synthetic oligonucleotide
ggcgucagugauguccccg

SEQ ID NO: 1476277 - RNA, 19 nt, Artificial Sequence
  Description of Artificial Sequence: Synthetic oligonucleotide
ucgcccaccugcugguuau

SEQ ID NO: 1476278 - RNA, 19 nt, Artificial Sequence
  Description of Artificial Sequence: Synthetic oligonucleotide
gguccgcuucuuuagaaua

SEQ ID NO: 1476279 - RNA, 19 nt, Artificial Sequence
  Description of Artificial Sequence: Synthetic oligonucleotide
guaccaugcccaguuggca

SEQ ID NO: 1476280 - RNA, 19 nt, Artificial Sequence
  Description of Artificial Sequence: Synthetic oligonucleotide
caugcgagggaggguggag

SEQ ID NO: 1476281 - RNA, 19 nt, Artificial Sequence
  Description of Artificial Sequence: Synthetic oligonucleotide
ggaggguaguguccagggc

SEQ ID NO: 1476282 - RNA, 19 nt, Artificial Sequence
  Description of Artificial Sequence: Synthetic oligonucleotide
guaguguccagggcaggca

SEQ ID NO: 1476283 - RNA, 19 nt, Artificial Sequence
  Description of Artificial Sequence: Synthetic oligonucleotide
gagggcuucucucucugau

SEQ ID NO: 1476284 - RNA, 19 nt, Artificial Sequence
  Description of Artificial Sequence: Synthetic oligonucleotide
agcagucgcccaccugcug

SEQ ID NO: 1476285 - RNA, 19 nt, Artificial Sequence
  Description of Artificial Sequence: Synthetic oligonucleotide
cuggaaucuucagcuuaug

SEQ ID NO: 1476286 - RNA, 19 nt, Artificial Sequence
  Description of Artificial Sequence: Synthetic oligonucleotide
gggcagagguaccugcgug

SEQ ID NO: 1476287 - RNA, 19 nt, Artificial Sequence
  Description of Artificial Sequence: Synthetic oligonucleotide
ccgcuucuuuagaauaaag

SEQ ID NO: 1476288 - RNA, 19 nt, Artificial Sequence
  Description of Artificial Sequence: Synthetic oligonucleotide
cgugugguagacacgggug

SEQ ID NO: 1476289 - RNA, 19 nt, Artificial Sequence
  Description of Artificial Sequence: Synthetic oligonucleotide
cauuucacguagucuugua

SEQ ID NO: 1476290 - RNA, 19 nt, Artificial Sequence
  Description of Artificial Sequence: Synthetic oligonucleotide
gcagugaggagcuguagcu

SEQ ID NO: 1476291 - RNA, 19 nt, Artificial Sequence
  Description of Artificial Sequence: Synthetic oligonucleotide
aaggcaccuaaggcggcaa

SEQ ID NO: 1476292 - RNA, 19 nt, Artificial Sequence
  Description of Artificial Sequence: Synthetic oligonucleotide
gcgucagugauguccccgc

SEQ ID NO: 1476293 - RNA, 19 nt, Artificial Sequence
  Description of Artificial Sequence: Synthetic oligonucleotide
gguggagcuggcgccaugc

SEQ ID NO: 1476294 - RNA, 19 nt, Artificial Sequence
  Description of Artificial Sequence: Synthetic oligonucleotide
uagaacacguuggcauuuu

SEQ ID NO: 1476295 - RNA, 19 nt, Artificial Sequence
  Description of Artificial Sequence: Synthetic oligonucleotide
gucuuguacaacccaggau

SEQ ID NO: 1476296 - RNA, 19 nt, Artificial Sequence
  Description of Artificial Sequence: Synthetic oligonucleotide
gguagacacggguguggug

SEQ ID NO: 1476297 - RNA, 19 nt, Artificial Sequence
  Description of Artificial Sequence: Synthetic oligonucleotide
gcaccuaaggcggcaagug

SEQ ID NO: 1476298 - RNA, 19 nt, Artificial Sequence
  Description of Artificial Sequence: Synthetic oligonucleotide
ugaugacugggaggcugac

SEQ ID NO: 1476299 - RNA, 19 nt, Artificial Sequence
  Description of Artificial Sequence: Synthetic oligonucleotide
accaaccgggugguccacg

SEQ ID NO: 1476300 - RNA, 19 nt, Artificial Sequence
  Description of Artificial Sequence: Synthetic oligonucleotide
ggccgggacuuccaugaag

SEQ ID NO: 1476301 - RNA, 19 nt, Artificial Sequence
  Description of Artificial Sequence: Synthetic oligonucleotide
gggcacaaggagagaaugc

SEQ ID NO: 1476302 - RNA, 19 nt, Artificial Sequence
  Description of Artificial Sequence: Synthetic oligonucleotide
caucuucguccagauugug

SEQ ID NO: 1476303 - RNA, 19 nt, Artificial Sequence
  Description of Artificial Sequence: Synthetic oligonucleotide
gcugacccggaugaugcag

SEQ ID NO: 1476304 - RNA, 19 nt, Artificial Sequence
  Description of Artificial Sequence: Synthetic oligonucleotide
gugaugacugggaggcuga

SEQ ID NO: 1476305 - RNA, 19 nt, Artificial Sequence
  Description of Artificial Sequence: Synthetic oligonucleotide
ugguguugaauggcacuuu

SEQ ID NO: 1476306 - RNA, 19 nt, Artificial Sequence
  Description of Artificial Sequence: Synthetic oligonucleotide
cuuucaguggugugggauu

SEQ ID NO: 1476307 - RNA, 19 nt, Artificial Sequence
  Description of Artificial Sequence: Synthetic oligonucleotide
gacggagcgcuugugggua

SEQ ID NO: 1476308 - RNA, 19 nt, Artificial Sequence
  Description of Artificial Sequence: Synthetic oligonucleotide
ugcagaccccugagacgga

SEQ ID NO: 1476309 - RNA, 19 nt, Artificial Sequence
  Description of Artificial Sequence: Synthetic oligonucleotide
ggggaggaaaggccgggac

SEQ ID NO: 1476310 - RNA, 19 nt, Artificial Sequence
  Description of Artificial Sequence: Synthetic oligonucleotide
aucugggcaaucacuucaa

SEQ ID NO: 1476311 - RNA, 19 nt, Artificial Sequence
  Description of Artificial Sequence: Synthetic oligonucleotide
ggcaggcaagguaccaugc

SEQ ID NO: 1476312 - RNA, 19 nt, Artificial Sequence
  Description of Artificial Sequence: Synthetic oligonucleotide
guccgcuucuuuagaauaa

SEQ ID NO: 1476313 - RNA, 19 nt, Artificial Sequence
  Description of Artificial Sequence: Synthetic oligonucleotide
agccagacccugggagacg

SEQ ID NO: 1476314 - RNA, 19 nt, Artificial Sequence
  Description of Artificial Sequence: Synthetic oligonucleotide
gccgggacuuccaugaaga

SEQ ID NO: 1476315 - RNA, 19 nt, Artificial Sequence
  Description of Artificial Sequence: Synthetic oligonucleotide
agugcacgcugagggcguc

SEQ ID NO: 1476316 - RNA, 19 nt, Artificial Sequence
  Description of Artificial Sequence: Synthetic oligonucleotide
guacaacccaggauguagu

SEQ ID NO: 1476317 - RNA, 19 nt, Artificial Sequence
  Description of Artificial Sequence: Synthetic oligonucleotide
gcagagguaccugcguggc

SEQ ID NO: 1476318 - RNA, 19 nt, Artificial Sequence
  Description of Artificial Sequence: Synthetic oligonucleotide
gagcgcuuguggguacgug

SEQ ID NO: 1476319 - RNA, 19 nt, Artificial Sequence
  Description of Artificial Sequence: Synthetic oligonucleotide
gacaaagcucauguugauu

SEQ ID NO: 1476320 - RNA, 19 nt, Artificial Sequence
  Description of Artificial Sequence: Synthetic oligonucleotide
cuggcucaucuucguccag

SEQ ID NO: 1476321 - RNA, 19 nt, Artificial Sequence
  Description of Artificial Sequence: Synthetic oligonucleotide
ccucccauuucacguaguc

SEQ ID NO: 1476322 - RNA, 19 nt, Artificial Sequence
  Description of Artificial Sequence: Synthetic oligonucleotide
cacgucagagcuggaagaa

SEQ ID NO: 1476323 - RNA, 19 nt, Artificial Sequence
  Description of Artificial Sequence: Synthetic oligonucleotide
gaaaggccgggacuuccau

SEQ ID NO: 1476324 - RNA, 19 nt, Artificial Sequence
  Description of Artificial Sequence: Synthetic oligonucleotide
gaccccugagacggagcgc

SEQ ID NO: 1476325 - RNA, 19 nt, Artificial Sequence
  Description of Artificial Sequence: Synthetic oligonucleotide
ggugagacucccucacucu

SEQ ID NO: 1476326 - RNA, 19 nt, Artificial Sequence
  Description of Artificial Sequence: Synthetic oligonucleotide
ccaugaagaucccaggccu

SEQ ID NO: 1476327 - RNA, 19 nt, Artificial Sequence
  Description of Artificial Sequence: Synthetic oligonucleotide
agacccugggagacguccu

SEQ ID NO: 1476328 - RNA, 19 nt, Artificial Sequence
  Description of Artificial Sequence: Synthetic oligonucleotide
ccacgucagagcuggaaga

SEQ ID NO: 1476329 - RNA, 19 nt, Artificial Sequence
  Description of Artificial Sequence: Synthetic oligonucleotide
gcagacuguaacagcuuga

SEQ ID NO: 1476330 - RNA, 19 nt, Artificial Sequence
  Description of Artificial Sequence: Synthetic oligonucleotide
gcgcuuguggguacgugug

SEQ ID NO: 1476331 - RNA, 19 nt, Artificial Sequence
  Description of Artificial Sequence: Synthetic oligonucleotide
gugguguugaauggcacuu

SEQ ID NO: 1476332 - RNA, 19 nt, Artificial Sequence
  Description of Artificial Sequence: Synthetic oligonucleotide
ccgcugccgagguaggggc

SEQ ID NO: 1476333 - RNA, 19 nt, Artificial Sequence
  Description of Artificial Sequence: Synthetic oligonucleotide
ggcucguggugggugagac

SEQ ID NO: 1476334 - RNA, 19 nt, Artificial Sequence
  Description of Artificial Sequence: Synthetic oligonucleotide
ccacucuagucuaagugcu

SEQ ID NO: 1476335 - RNA, 19 nt, Artificial Sequence
  Description of Artificial Sequence: Synthetic oligonucleotide
agccugucaguggcaggug

SEQ ID NO: 1476336 - RNA, 19 nt, Artificial Sequence
  Description of Artificial Sequence: Synthetic oligonucleotide
gcagaccccugagacggag

SEQ ID NO: 1476337 - RNA, 19 nt, Artificial Sequence
  Description of Artificial Sequence: Synthetic oligonucleotide
gggugguccacgagagggc

SEQ ID NO: 1476338 - RNA, 19 nt, Artificial Sequence
  Description of Artificial Sequence: Synthetic oligonucleotide
caccugcugguuauagagu

SEQ ID NO: 1476339 - RNA, 19 nt, Artificial Sequence
  Description of Artificial Sequence: Synthetic oligonucleotide
cugcaccuggggagguguc

SEQ ID NO: 1476340 - RNA, 19 nt, Artificial Sequence
  Description of Artificial Sequence: Synthetic oligonucleotide
cacuuucagugguguggga

SEQ ID NO: 1476341 - RNA, 19 nt, Artificial Sequence
  Description of Artificial Sequence: Synthetic oligonucleotide
ggaaucuuuggugcagccu

SEQ ID NO: 1476342 - RNA, 19 nt, Artificial Sequence
  Description of Artificial Sequence: Synthetic oligonucleotide
cuccacgucagagcuggaa

SEQ ID NO: 1476343 - RNA, 19 nt, Artificial Sequence
  Description of Artificial Sequence: Synthetic oligonucleotide
cccgcugccgagguagggg

SEQ ID NO: 1476344 - RNA, 19 nt, Artificial Sequence
  Description of Artificial Sequence: Synthetic oligonucleotide
cagccugucaguggcaggu

SEQ ID NO: 1476345 - RNA, 19 nt, Artificial Sequence
  Description of Artificial Sequence: Synthetic oligonucleotide
ggauguagugguguugaau

SEQ ID NO: 1476346 - RNA, 19 nt, Artificial Sequence
  Description of Artificial Sequence: Synthetic oligonucleotide
cacuucaaacuccuuccuu

SEQ ID NO: 1476347 - RNA, 19 nt, Artificial Sequence
  Description of Artificial Sequence: Synthetic oligonucleotide
agcuggcgccaugcuugac

SEQ ID NO: 1476348 - RNA, 19 nt, Artificial Sequence
  Description of Artificial Sequence: Synthetic oligonucleotide
uaccaaccgggugguccac

SEQ ID NO: 1476349 - RNA, 19 nt, Artificial Sequence
  Description of Artificial Sequence: Synthetic oligonucleotide
cagccugagaaaggcuaga

SEQ ID NO: 1476350 - RNA, 19 nt, Artificial Sequence
  Description of Artificial Sequence: Synthetic oligonucleotide
ugguccccggaggccaggu

SEQ ID NO: 1476351 - RNA, 19 nt, Artificial Sequence
  Description of Artificial Sequence: Synthetic oligonucleotide
gucgcccaccugcugguua

SEQ ID NO: 1476352 - RNA, 19 nt, Artificial Sequence
  Description of Artificial Sequence: Synthetic oligonucleotide
cccggaugaugcagcaguc

SEQ ID NO: 1476353 - RNA, 19 nt, Artificial Sequence
  Description of Artificial Sequence: Synthetic oligonucleotide
agagagcagaaggcaccua

SEQ ID NO: 1476354 - RNA, 19 nt, Artificial Sequence
  Description of Artificial Sequence: Synthetic oligonucleotide
ccagaggucucuggugaug

SEQ ID NO: 1476355 - RNA, 19 nt, Artificial Sequence
  Description of Artificial Sequence: Synthetic oligonucleotide
ggagacguccuuagaagau

SEQ ID NO: 1476356 - RNA, 19 nt, Artificial Sequence
  Description of Artificial Sequence: Synthetic oligonucleotide
ggacuuccaugaagauccc

SEQ ID NO: 1476357 - RNA, 19 nt, Artificial Sequence
  Description of Artificial Sequence: Synthetic oligonucleotide
aggccgggacuuccaugaa

SEQ ID NO: 1476358 - RNA, 19 nt, Artificial Sequence
  Description of Artificial Sequence: Synthetic oligonucleotide
cgggacuuccaugaagauc

SEQ ID NO: 1476359 - RNA, 19 nt, Artificial Sequence
  Description of Artificial Sequence: Synthetic oligonucleotide
gguaggggccaaugcuaua

SEQ ID NO: 1476360 - RNA, 19 nt, Artificial Sequence
  Description of Artificial Sequence: Synthetic oligonucleotide
cugggccacucuagucuaa

SEQ ID NO: 1476361 - RNA, 19 nt, Artificial Sequence
  Description of Artificial Sequence: Synthetic oligonucleotide
gcugccgagguaggggcca

SEQ ID NO: 1476362 - RNA, 19 nt, Artificial Sequence
  Description of Artificial Sequence: Synthetic oligonucleotide
ccaaccgggugguccacga

SEQ ID NO: 1476363 - RNA, 19 nt, Artificial Sequence
  Description of Artificial Sequence: Synthetic oligonucleotide
ggcugacccggaugaugca

SEQ ID NO: 1476364 - RNA, 19 nt, Artificial Sequence
  Description of Artificial Sequence: Synthetic oligonucleotide
ggaaaguguggaggguagu

SEQ ID NO: 1476365 - RNA, 19 nt, Artificial Sequence
  Description of Artificial Sequence: Synthetic oligonucleotide
ggcaccuaaggcggcaagu

SEQ ID NO: 1476366 - RNA, 19 nt, Artificial Sequence
  Description of Artificial Sequence: Synthetic oligonucleotide
ccgggugguccacgagagg

SEQ ID NO: 1476367 - RNA, 19 nt, Artificial Sequence
  Description of Artificial Sequence: Synthetic oligonucleotide
cagucgcccaccugcuggu

SEQ ID NO: 1476368 - RNA, 19 nt, Artificial Sequence
  Description of Artificial Sequence: Synthetic oligonucleotide
gggcgucagugaugucccc

SEQ ID NO: 1476369 - RNA, 19 nt, Artificial Sequence
  Description of Artificial Sequence: Synthetic oligonucleotide
ggcccugaagguggaaucu

SEQ ID NO: 1476370 - RNA, 19 nt, Artificial Sequence
  Description of Artificial Sequence: Synthetic oligonucleotide
gcgguagaguucauggcau

SEQ ID NO: 1476371 - RNA, 19 nt, Artificial Sequence
  Description of Artificial Sequence: Synthetic oligonucleotide
aguuugcgguagaguucau

SEQ ID NO: 1476372 - RNA, 19 nt, Artificial Sequence
  Description of Artificial Sequence: Synthetic oligonucleotide
ggggcucguggugggugag

SEQ ID NO: 1476373 - RNA, 19 nt, Artificial Sequence
  Description of Artificial Sequence: Synthetic oligonucleotide
caguggugugggauucgau

SEQ ID NO: 1476374 - RNA, 19 nt, Artificial Sequence
  Description of Artificial Sequence: Synthetic oligonucleotide
gcgagggaggguggagcug

SEQ ID NO: 1476375 - RNA, 19 nt, Artificial Sequence
  Description of Artificial Sequence: Synthetic oligonucleotide
ggucagcccugcugggugu

SEQ ID NO: 1476376 - RNA, 19 nt, Artificial Sequence
  Description of Artificial Sequence: Synthetic oligonucleotide
guaggcccugaagguggaa

SEQ ID NO: 1476377 - RNA, 19 nt, Artificial Sequence
  Description of Artificial Sequence: Synthetic oligonucleotide
gggccacucuagucuaagu

SEQ ID NO: 1476378 - RNA, 19 nt, Artificial Sequence
  Description of Artificial Sequence: Synthetic oligonucleotide
ggucagccugucaguggca

SEQ ID NO: 1476379 - RNA, 19 nt, Artificial Sequence
  Description of Artificial Sequence: Synthetic oligonucleotide
ggggaggugucaggaaagu

SEQ ID NO: 1476380 - RNA, 19 nt, Artificial Sequence
  Description of Artificial Sequence: Synthetic oligonucleotide
gcgggugggcagagguacc

SEQ ID NO: 1476381 - RNA, 19 nt, Artificial Sequence
  Description of Artificial Sequence: Synthetic oligonucleotide
gccagacccugggagacgu

SEQ ID NO: 1476382 - RNA, 19 nt, Artificial Sequence
  Description of Artificial Sequence: Synthetic oligonucleotide
cggagcgcuuguggguacg

SEQ ID NO: 1476383 - RNA, 19 nt, Artificial Sequence
  Description of Artificial Sequence: Synthetic oligonucleotide
ccccgcugccgagguaggg

SEQ ID NO: 1476384 - RNA, 19 nt, Artificial Sequence
  Description of Artificial Sequence: Synthetic oligonucleotide
ccagacccugggagacguc

SEQ ID NO: 1476385 - RNA, 19 nt, Artificial Sequence
  Description of Artificial Sequence: Synthetic oligonucleotide
gccagaggucucuggugau

SEQ ID NO: 1476386 - RNA, 19 nt, Artificial Sequence
  Description of Artificial Sequence: Synthetic oligonucleotide
gcucguggugggugagacu

SEQ ID NO: 1476387 - RNA, 19 nt, Artificial Sequence
  Description of Artificial Sequence: Synthetic oligonucleotide
cgguagaguucauggcaua

SEQ ID NO: 1476388 - RNA, 19 nt, Artificial Sequence
  Description of Artificial Sequence: Synthetic oligonucleotide
cgagagggcuucucucucu

SEQ ID NO: 1476389 - RNA, 19 nt, Artificial Sequence
  Description of Artificial Sequence: Synthetic oligonucleotide
ccccggaggccaggucagc

SEQ ID NO: 1476390 - RNA, 19 nt, Artificial Sequence
  Description of Artificial Sequence: Synthetic oligonucleotide
ccgggacuuccaugaagau

SEQ ID NO: 1476391 - RNA, 19 nt, Artificial Sequence
  Description of Artificial Sequence: Synthetic oligonucleotide
gcacgcugagggcgucagu

SEQ ID NO: 1476392 - RNA, 19 nt, Artificial Sequence
  Description of Artificial Sequence: Synthetic oligonucleotide
ccgggacaaagcucauguu

SEQ ID NO: 1476393 - RNA, 19 nt, Artificial Sequence
  Description of Artificial Sequence: Synthetic oligonucleotide
cgauaccaaccgggugguc

SEQ ID NO: 1476394 - RNA, 19 nt, Artificial Sequence
  Description of Artificial Sequence: Synthetic oligonucleotide
ccuccacgucagagcugga

SEQ ID NO: 1476395 - RNA, 19 nt, Artificial Sequence
  Description of Artificial Sequence: Synthetic oligonucleotide
gcguggccugggccacucu

SEQ ID NO: 1476396 - RNA, 19 nt, Artificial Sequence
  Description of Artificial Sequence: Synthetic oligonucleotide
ccaggcugacccggaugau

SEQ ID NO: 1476397 - RNA, 19 nt, Artificial Sequence
  Description of Artificial Sequence: Synthetic oligonucleotide
ccccugagacggagcgcuu

SEQ ID NO: 1476398 - RNA, 19 nt, Artificial Sequence
  Description of Artificial Sequence: Synthetic oligonucleotide
aacaauaguaaacaauuuc

SEQ ID NO: 1476399 - RNA, 19 nt, Artificial Sequence
  Description of Artificial Sequence: Synthetic oligonucleotide
aaauccggaacacacaagg

SEQ ID NO: 1476400 - RNA, 19 nt, Artificial Sequence
  Description of Artificial Sequence: Synthetic oligonucleotide
aauucuagcuccugguucc

SEQ ID NO: 1476401 - RNA, 19 nt, Artificial Sequence
  Description of Artificial Sequence: Synthetic oligonucleotide
uuuaacaaacaccaaagga

SEQ ID NO: 1476402 - RNA, 19 nt, Artificial Sequence
  Description of Artificial Sequence: Synthetic oligonucleotide
aagaccagaggaccgagcc

SEQ ID NO: 1476403 - RNA, 19 nt, Artificial Sequence
  Description of Artificial Sequence: Synthetic oligonucleotide
aaccuaaacaguccuaggg

SEQ ID NO: 1476404 - RNA, 19 nt, Artificial Sequence
  Description of Artificial Sequence: Synthetic oligonucleotide
ugguacucaaaccagagcc

SEQ ID NO: 1476405 - RNA, 19 nt, Artificial Sequence
  Description of Artificial Sequence: Synthetic oligonucleotide
uaaaccacuucacacuugg

SEQ ID NO: 1476406 - RNA, 19 nt, Artificial Sequence
  Description of Artificial Sequence: Synthetic oligonucleotide
agauucggaggcuugaccc

SEQ ID NO: 1476407 - RNA, 19 nt, Artificial Sequence
  Description of Artificial Sequence: Synthetic oligonucleotide
aauaaauagugugcacucc

SEQ ID NO: 1476408 - RNA, 19 nt, Artificial Sequence
  Description of Artificial Sequence: Synthetic oligonucleotide
gucaggacaacucacaaag

SEQ ID NO: 1476409 - RNA, 19 nt, Artificial Sequence
  Description of Artificial Sequence: Synthetic oligonucleotide
aauagugugcacuccacca

SEQ ID NO: 1476410 - RNA, 19 nt, Artificial Sequence
  Description of Artificial Sequence: Synthetic oligonucleotide
gaucccuuuguacacaggg

SEQ ID NO: 1476411 - RNA, 19 nt, Artificial Sequence
  Description of Artificial Sequence: Synthetic oligonucleotide
acaggaacaaauccggaac

SEQ ID NO: 1476412 - RNA, 19 nt, Artificial Sequence
  Description of Artificial Sequence: Synthetic oligonucleotide
acauuggggaauuaggcuc

SEQ ID NO: 1476413 - RNA, 19 nt, Artificial Sequence
  Description of Artificial Sequence: Synthetic oligonucleotide
ucuuuugucaggaagggau

SEQ ID NO: 1476414 - RNA, 19 nt, Artificial Sequence
  Description of Artificial Sequence: Synthetic oligonucleotide
aauugcaauaguggcaggg

SEQ ID NO: 1476415 - RNA, 19 nt, Artificial Sequence
  Description of Artificial Sequence: Synthetic oligonucleotide
guuaggaaccuccacagag

SEQ ID NO: 1476416 - RNA, 19 nt, Artificial Sequence
  Description of Artificial Sequence: Synthetic oligonucleotide
uguucaagugggaugaaga

SEQ ID NO: 1476417 - RNA, 19 nt, Artificial Sequence
  Description of Artificial Sequence: Synthetic oligonucleotide
guuacugugguacucaaac

SEQ ID NO: 1476418 - RNA, 19 nt, Artificial Sequence
  Description of Artificial Sequence: Synthetic oligonucleotide
uacugugguacucaaacca

SEQ ID NO: 1476419 - RNA, 19 nt, Artificial Sequence
  Description of Artificial Sequence: Synthetic oligonucleotide
aaggacuugugcuucagca

SEQ ID NO: 1476420 - RNA, 19 nt, Artificial Sequence
  Description of Artificial Sequence: Synthetic oligonucleotide
uucuuaaaccacuucacac

SEQ ID NO: 1476421 - RNA, 19 nt, Artificial Sequence
  Description of Artificial Sequence: Synthetic oligonucleotide
ugacuaagcccuuuggucc

SEQ ID NO: 1476422 - RNA, 19 nt, Artificial Sequence
  Description of Artificial Sequence: Synthetic oligonucleotide
cuuuaacaaacaccaaagg

SEQ ID NO: 1476423 - RNA, 19 nt, Artificial Sequence
  Description of Artificial Sequence: Synthetic oligonucleotide
acagccuuuaacaaacacc

SEQ ID NO: 1476424 - RNA, 19 nt, Artificial Sequence
  Description of Artificial Sequence: Synthetic oligonucleotide
uccaacagaaggcaggcug

SEQ ID NO: 1476425 - RNA, 19 nt, Artificial Sequence
  Description of Artificial Sequence: Synthetic oligonucleotide
gauagaggaccagagaaag

SEQ ID NO: 1476426 - RNA, 19 nt, Artificial Sequence
  Description of Artificial Sequence: Synthetic oligonucleotide
accuaaacaguccuagggg

SEQ ID NO: 1476427 - RNA, 19 nt, Artificial Sequence
  Description of Artificial Sequence: Synthetic oligonucleotide
uagaggaccagagaaagcc

SEQ ID NO: 1476428 - RNA, 19 nt, Artificial Sequence
  Description of Artificial Sequence: Synthetic oligonucleotide
cuggaauugcaauaguggc

SEQ ID NO: 1476429 - RNA, 19 nt, Artificial Sequence
  Description of Artificial Sequence: Synthetic oligonucleotide
cuucaaacaguccccaggg

SEQ ID NO: 1476430 - RNA, 19 nt, Artificial Sequence
  Description of Artificial Sequence: Synthetic oligonucleotide
gaauuaggcucguaucccg

SEQ ID NO: 1476431 - RNA, 19 nt, Artificial Sequence
  Description of Artificial Sequence: Synthetic oligonucleotide
auaaauagugugcacucca

SEQ ID NO: 1476432 - RNA, 19 nt, Artificial Sequence
  Description of Artificial Sequence: Synthetic oligonucleotide
uauccugcaaggcauggug

SEQ ID NO: 1476433 - RNA, 19 nt, Artificial Sequence
  Description of Artificial Sequence: Synthetic oligonucleotide
uggaauugcaauaguggca

SEQ ID NO: 1476434 - RNA, 19 nt, Artificial Sequence
  Description of Artificial Sequence: Synthetic oligonucleotide
ucacaaagaggcccgaaga

SEQ ID NO: 1476435 - RNA, 19 nt, Artificial Sequence
  Description of Artificial Sequence: Synthetic oligonucleotide
uggucucaagaccagagga

SEQ ID NO: 1476436 - RNA, 19 nt, Artificial Sequence
  Description of Artificial Sequence: Synthetic oligonucleotide
agagcacaaugacagcagc

SEQ ID NO: 1476437 - RNA, 19 nt, Artificial Sequence
  Description of Artificial Sequence: Synthetic oligonucleotide
ucccuuuguacacagggca

SEQ ID NO: 1476438 - RNA, 19 nt, Artificial Sequence
  Description of Artificial Sequence: Synthetic oligonucleotide
gaugccucacucaugaggc

SEQ ID NO: 1476439 - RNA, 19 nt, Artificial Sequence
  Description of Artificial Sequence: Synthetic oligonucleotide
aagugggaugaagacagac

SEQ ID NO: 1476440 - RNA, 19 nt, Artificial Sequence
  Description of Artificial Sequence: Synthetic oligonucleotide
cacacugccagaauucuag

SEQ ID NO: 1476441 - RNA, 19 nt, Artificial Sequence
  Description of Artificial Sequence: Synthetic oligonucleotide
auagugugcacuccaccac

SEQ ID NO: 1476442 - RNA, 19 nt, Artificial Sequence
  Description of Artificial Sequence: Synthetic oligonucleotide
aauccggaacacacaaggc

SEQ ID NO: 1476443 - RNA, 19 nt, Artificial Sequence
  Description of Artificial Sequence: Synthetic oligonucleotide
gucuuguuuggacacagcc

SEQ ID NO: 1476444 - RNA, 19 nt, Artificial Sequence
  Description of Artificial Sequence: Synthetic oligonucleotide
ugugcaggcucuuuuguca

SEQ ID NO: 1476445 - RNA, 19 nt, Artificial Sequence
  Description of Artificial Sequence: Synthetic oligonucleotide
uugcaauaguggcagggag

SEQ ID NO: 1476446 - RNA, 19 nt, Artificial Sequence
  Description of Artificial Sequence: Synthetic oligonucleotide
cuaggccccacucaggucc

SEQ ID NO: 1476447 - RNA, 19 nt, Artificial Sequence
  Description of Artificial Sequence: Synthetic oligonucleotide
agguuaggaaccuccacag

SEQ ID NO: 1476448 - RNA, 19 nt, Artificial Sequence
  Description of Artificial Sequence: Synthetic oligonucleotide
agagcccacacccaggcag

SEQ ID NO: 1476449 - RNA, 19 nt, Artificial Sequence
  Description of Artificial Sequence: Synthetic oligonucleotide
cauuggggaauuaggcucg

SEQ ID NO: 1476450 - RNA, 19 nt, Artificial Sequence
  Description of Artificial Sequence: Synthetic oligonucleotide
auaugacccacagagagca

SEQ ID NO: 1476451 - RNA, 19 nt, Artificial Sequence
  Description of Artificial Sequence: Synthetic oligonucleotide
gaauucuagcuccugguuc

SEQ ID NO: 1476452 - RNA, 19 nt, Artificial Sequence
  Description of Artificial Sequence: Synthetic oligonucleotide
agccacaccuaccagucac

SEQ ID NO: 1476453 - RNA, 19 nt, Artificial Sequence
  Description of Artificial Sequence: Synthetic oligonucleotide
acaaauccggaacacacaa

SEQ ID NO: 1476454 - RNA, 19 nt, Artificial Sequence
  Description of Artificial Sequence: Synthetic oligonucleotide
ugcaauaguggcagggaga

SEQ ID NO: 1476455 - RNA, 19 nt, Artificial Sequence
  Description of Artificial Sequence: Synthetic oligonucleotide
uaaauagugugcacuccac

SEQ ID NO: 1476456 - RNA, 19 nt, Artificial Sequence
  Description of Artificial Sequence: Synthetic oligonucleotide
uggggauagaggaccagag

SEQ ID NO: 1476457 - RNA, 19 nt, Artificial Sequence
  Description of Artificial Sequence: Synthetic oligonucleotide
cugacuaagcccuuugguc

SEQ ID NO: 1476458 - RNA, 19 nt, Artificial Sequence
  Description of Artificial Sequence: Synthetic oligonucleotide
agggucaaugcacacaggu

SEQ ID NO: 1476459 - RNA, 19 nt, Artificial Sequence
  Description of Artificial Sequence: Synthetic oligonucleotide
ugucuauccugcaaggcau

SEQ ID NO: 1476460 - RNA, 19 nt, Artificial Sequence
  Description of Artificial Sequence: Synthetic oligonucleotide
ggacaacucacaaagaggc

SEQ ID NO: 1476461 - RNA, 19 nt, Artificial Sequence
  Description of Artificial Sequence: Synthetic oligonucleotide
ggaauugcaauaguggcag

SEQ ID NO: 1476462 - RNA, 19 nt, Artificial Sequence
  Description of Artificial Sequence: Synthetic oligonucleotide
ugguauagggaagagcaca

SEQ ID NO: 1476463 - RNA, 19 nt, Artificial Sequence
  Description of Artificial Sequence: Synthetic oligonucleotide
uuacugugguacucaaacc

SEQ ID NO: 1476464 - RNA, 19 nt, Artificial Sequence
  Description of Artificial Sequence: Synthetic oligonucleotide
gauggccagacaaaaggag

SEQ ID NO: 1476465 - RNA, 19 nt, Artificial Sequence
  Description of Artificial Sequence: Synthetic oligonucleotide
cugccagaauucuagcucc

SEQ ID NO: 1476466 - RNA, 19 nt, Artificial Sequence
  Description of Artificial Sequence: Synthetic oligonucleotide
aauuaggcucguaucccgg

SEQ ID NO: 1476467 - RNA, 19 nt, Artificial Sequence
  Description of Artificial Sequence: Synthetic oligonucleotide
cauaugacccacagagagc

SEQ ID NO: 1476468 - RNA, 19 nt, Artificial Sequence
  Description of Artificial Sequence: Synthetic oligonucleotide
guuggguugguauagggaa

SEQ ID NO: 1476469 - RNA, 19 nt, Artificial Sequence
  Description of Artificial Sequence: Synthetic oligonucleotide
ugaccuaccucccuagaaa

SEQ ID NO: 1476470 - RNA, 19 nt, Artificial Sequence
  Description of Artificial Sequence: Synthetic oligonucleotide
uucaagugggaugaagaca

SEQ ID NO: 1476471 - RNA, 19 nt, Artificial Sequence
  Description of Artificial Sequence: Synthetic oligonucleotide
aacgcuugggugugcccac

SEQ ID NO: 1476472 - RNA, 19 nt, Artificial Sequence
  Description of Artificial Sequence: Synthetic oligonucleotide
gggaauuaggcucguaucc

SEQ ID NO: 1476473 - RNA, 19 nt, Artificial Sequence
  Description of Artificial Sequence: Synthetic oligonucleotide
uccugucuauccugcaagg

SEQ ID NO: 1476474 - RNA, 19 nt, Artificial Sequence
  Description of Artificial Sequence: Synthetic oligonucleotide
auagggaagagcacaauga

SEQ ID NO: 1476475 - RNA, 19 nt, Artificial Sequence
  Description of Artificial Sequence: Synthetic oligonucleotide
ccauaugacccacagagag

SEQ ID NO: 1476476 - RNA, 19 nt, Artificial Sequence
  Description of Artificial Sequence: Synthetic oligonucleotide
uuaaaccacuucacacuug

SEQ ID NO: 1476477 - RNA, 19 nt, Artificial Sequence
  Description of Artificial Sequence: Synthetic oligonucleotide
ugacagacggugcucacuc

SEQ ID NO: 1476478 - RNA, 19 nt, Artificial Sequence
  Description of Artificial Sequence: Synthetic oligonucleotide
uggggaauuaggcucguau

SEQ ID NO: 1476479 - RNA, 19 nt, Artificial Sequence
  Description of Artificial Sequence: Synthetic oligonucleotide
ucccagacaaggaaacacu

SEQ ID NO: 1476480 - RNA, 19 nt, Artificial Sequence
  Description of Artificial Sequence: Synthetic oligonucleotide
guucaagugggaugaagac

SEQ ID NO: 1476481 - RNA, 19 nt, Artificial Sequence
  Description of Artificial Sequence: Synthetic oligonucleotide
agacaaaaggagcuguaaa

SEQ ID NO: 1476482 - RNA, 19 nt, Artificial Sequence
  Description of Artificial Sequence: Synthetic oligonucleotide
agaccagaggaccgagccc

SEQ ID NO: 1476483 - RNA, 19 nt, Artificial Sequence
  Description of Artificial Sequence: Synthetic oligonucleotide
gggaucagagcccacaccc

SEQ ID NO: 1476484 - RNA, 19 nt, Artificial Sequence
  Description of Artificial Sequence: Synthetic oligonucleotide
agccugaacuccacaaucc

SEQ ID NO: 1476485 - RNA, 19 nt, Artificial Sequence
  Description of Artificial Sequence: Synthetic oligonucleotide
cucacaaagaggcccgaag

SEQ ID NO: 1476486 - RNA, 19 nt, Artificial Sequence
  Description of Artificial Sequence: Synthetic oligonucleotide
agggucucuggccauauga

SEQ ID NO: 1476487 - RNA, 19 nt, Artificial Sequence
  Description of Artificial Sequence: Synthetic oligonucleotide
uguuccuggcuucugcccu

SEQ ID NO: 1476488 - RNA, 19 nt, Artificial Sequence
  Description of Artificial Sequence: Synthetic oligonucleotide
gacagacugcuacuggaug

SEQ ID NO: 1476489 - RNA, 19 nt, Artificial Sequence
  Description of Artificial Sequence: Synthetic oligonucleotide
agcacuuuccacccaguca

SEQ ID NO: 1476490 - RNA, 19 nt, Artificial Sequence
  Description of Artificial Sequence: Synthetic oligonucleotide
cacaaggcagcugaugggg

SEQ ID NO: 1476491 - RNA, 19 nt, Artificial Sequence
  Description of Artificial Sequence: Synthetic oligonucleotide
aagcccuugugauguuggg

SEQ ID NO: 1476492 - RNA, 19 nt, Artificial Sequence
  Description of Artificial Sequence: Synthetic oligonucleotide
cacaaugacagcagcugac

SEQ ID NO: 1476493 - RNA, 19 nt, Artificial Sequence
  Description of Artificial Sequence: Synthetic oligonucleotide
ucuauccugcaaggcaugg

SEQ ID NO: 1476494 - RNA, 19 nt, Artificial Sequence
  Description of Artificial Sequence: Synthetic oligonucleotide
ggaaacacugacaagguuc

SEQ ID NO: 1476495 - RNA, 19 nt, Artificial Sequence
  Description of Artificial Sequence: Synthetic oligonucleotide
aaacgcuugggugugccca

SEQ ID NO: 1476496 - RNA, 19 nt, Artificial Sequence
  Description of Artificial Sequence: Synthetic oligonucleotide
aaacaauaguaaacaauuu

SEQ ID NO: 1476497 - RNA, 19 nt, Artificial Sequence
  Description of Artificial Sequence: Synthetic oligonucleotide
augacugucuuggggauag

SEQ ID NO: 1476498 - RNA, 19 nt, Artificial Sequence
  Description of Artificial Sequence: Synthetic oligonucleotide
gccaagagcacuuuccacc

SEQ ID NO: 1476499 - RNA, 19 nt, Artificial Sequence
  Description of Artificial Sequence: Synthetic oligonucleotide
gaccuaccucccuagaaac

SEQ ID NO: 1476500 - RNA, 19 nt, Artificial Sequence
  Description of Artificial Sequence: Synthetic oligonucleotide
auagaggaccagagaaagc

SEQ ID NO: 1476501 - RNA, 19 nt, Artificial Sequence
  Description of Artificial Sequence: Synthetic oligonucleotide
gacaugacugaccuaccuc

SEQ ID NO: 1476502 - RNA, 19 nt, Artificial Sequence
  Description of Artificial Sequence: Synthetic oligonucleotide
uucaaacaguccccagggc

SEQ ID NO: 1476503 - RNA, 19 nt, Artificial Sequence
  Description of Artificial Sequence: Synthetic oligonucleotide
ggaggcuugacccagccac

SEQ ID NO: 1476504 - RNA, 19 nt, Artificial Sequence
  Description of Artificial Sequence: Synthetic oligonucleotide
uggaucccuuuguacacag

SEQ ID NO: 1476505 - RNA, 19 nt, Artificial Sequence
  Description of Artificial Sequence: Synthetic oligonucleotide
uuguucaagugggaugaag

SEQ ID NO: 1476506 - RNA, 19 nt, Artificial Sequence
  Description of Artificial Sequence: Synthetic oligonucleotide
agcaggggaugccucacuc

SEQ ID NO: 1476507 - RNA, 19 nt, Artificial Sequence
  Description of Artificial Sequence: Synthetic oligonucleotide
agaggaccagagaaagccc

SEQ ID NO: 1476508 - RNA, 19 nt, Artificial Sequence
  Description of Artificial Sequence: Synthetic oligonucleotide
cagcagguuaggaaccucc

SEQ ID NO: 1476509 - RNA, 19 nt, Artificial Sequence
  Description of Artificial Sequence: Synthetic oligonucleotide
ugugcucuacccaccccag

SEQ ID NO: 1476510 - RNA, 19 nt, Artificial Sequence
  Description of Artificial Sequence: Synthetic oligonucleotide
agcuugcguugucuguucc

SEQ ID NO: 1476511 - RNA, 19 nt, Artificial Sequence
  Description of Artificial Sequence: Synthetic oligonucleotide
agcccgagggucucuggcc

SEQ ID NO: 1476512 - RNA, 19 nt, Artificial Sequence
  Description of Artificial Sequence: Synthetic oligonucleotide
uugguauagggaagagcac

SEQ ID NO: 1476513 - RNA, 19 nt, Artificial Sequence
  Description of Artificial Sequence: Synthetic oligonucleotide
aggagcuguaaacgcuugg

SEQ ID NO: 1476514 - RNA, 19 nt, Artificial Sequence
  Description of Artificial Sequence: Synthetic oligonucleotide
caaugacagcagcugacag

SEQ ID NO: 1476515 - RNA, 19 nt, Artificial Sequence
  Description of Artificial Sequence: Synthetic oligonucleotide
acagacggugcucacucug

SEQ ID NO: 1476516 - RNA, 19 nt, Artificial Sequence
  Description of Artificial Sequence: Synthetic oligonucleotide
gaauugcaauaguggcagg

SEQ ID NO: 1476517 - RNA, 19 nt, Artificial Sequence
  Description of Artificial Sequence: Synthetic oligonucleotide
caaggcauggugcaggcca

SEQ ID NO: 1476518 - RNA, 19 nt, Artificial Sequence
  Description of Artificial Sequence: Synthetic oligonucleotide
agcugugucaggacaacuc

SEQ ID NO: 1476519 - RNA, 19 nt, Artificial Sequence
  Description of Artificial Sequence: Synthetic oligonucleotide
ggaaccuccacagagagaa

SEQ ID NO: 1476520 - RNA, 19 nt, Artificial Sequence
  Description of Artificial Sequence: Synthetic oligonucleotide
ugucaggacaacucacaaa

SEQ ID NO: 1476521 - RNA, 19 nt, Artificial Sequence
  Description of Artificial Sequence: Synthetic oligonucleotide
caugacugaccuaccuccc

SEQ ID NO: 1476522 - RNA, 19 nt, Artificial Sequence
  Description of Artificial Sequence: Synthetic oligonucleotide
ugucuuggggauagaggac

SEQ ID NO: 1476523 - RNA, 19 nt, Artificial Sequence
  Description of Artificial Sequence: Synthetic oligonucleotide
uugcguugucuguuccugg

SEQ ID NO: 1476524 - RNA, 19 nt, Artificial Sequence
  Description of Artificial Sequence: Synthetic oligonucleotide
cuuuguacacagggcagcc

SEQ ID NO: 1476525 - RNA, 19 nt, Artificial Sequence
  Description of Artificial Sequence: Synthetic oligonucleotide
acugugguacucaaaccag

SEQ ID NO: 1476526 - RNA, 19 nt, Artificial Sequence
  Description of Artificial Sequence: Synthetic oligonucleotide
gggauagaggaccagagaa

SEQ ID NO: 1476527 - RNA, 19 nt, Artificial Sequence
  Description of Artificial Sequence: Synthetic oligonucleotide
gacugaccuaccucccuag

SEQ ID NO: 1476528 - RNA, 19 nt, Artificial Sequence
  Description of Artificial Sequence: Synthetic oligonucleotide
aggaccgagcccuugugcu

SEQ ID NO: 1476529 - RNA, 19 nt, Artificial Sequence
  Description of Artificial Sequence: Synthetic oligonucleotide
caaauccggaacacacaag

SEQ ID NO: 1476530 - RNA, 19 nt, Artificial Sequence
  Description of Artificial Sequence: Synthetic oligonucleotide
ccacauuggggaauuaggc

SEQ ID NO: 1476531 - RNA, 19 nt, Artificial Sequence
  Description of Artificial Sequence: Synthetic oligonucleotide
auugcaauaguggcaggga

SEQ ID NO: 1476532 - RNA, 19 nt, Artificial Sequence
  Description of Artificial Sequence: Synthetic oligonucleotide
gacaagguucuggaauugc

SEQ ID NO: 1476533 - RNA, 19 nt, Artificial Sequence
  Description of Artificial Sequence: Synthetic oligonucleotide
cugucuauccugcaaggca

SEQ ID NO: 1476534 - RNA, 19 nt, Artificial Sequence
  Description of Artificial Sequence: Synthetic oligonucleotide
auccugcaaggcauggugc

SEQ ID NO: 1476535 - RNA, 19 nt, Artificial Sequence
  Description of Artificial Sequence: Synthetic oligonucleotide
uguagaggucucugcuuca

SEQ ID NO: 1476536 - RNA, 19 nt, Artificial Sequence
  Description of Artificial Sequence: Synthetic oligonucleotide
augccucacucaugaggcc

SEQ ID NO: 1476537 - RNA, 19 nt, Artificial Sequence
  Description of Artificial Sequence: Synthetic oligonucleotide
gcaauaguggcagggagag

SEQ ID NO: 1476538 - RNA, 19 nt, Artificial Sequence
  Description of Artificial Sequence: Synthetic oligonucleotide
cagacggugcucacucugg

SEQ ID NO: 1476539 - RNA, 19 nt, Artificial Sequence
  Description of Artificial Sequence: Synthetic oligonucleotide
uacucaaaccagagccaca

SEQ ID NO: 1476540 - RNA, 19 nt, Artificial Sequence
  Description of Artificial Sequence: Synthetic oligonucleotide
cucccagacaaggaaacac

SEQ ID NO: 1476541 - RNA, 19 nt, Artificial Sequence
  Description of Artificial Sequence: Synthetic oligonucleotide
gacuccuugcagcugggca

SEQ ID NO: 1476542 - RNA, 19 nt, Artificial Sequence
  Description of Artificial Sequence: Synthetic oligonucleotide
gugguacucaaaccagagc

SEQ ID NO: 1476543 - RNA, 19 nt, Artificial Sequence
  Description of Artificial Sequence: Synthetic oligonucleotide
cacagccuuuaacaaacac

SEQ ID NO: 1476544 - RNA, 19 nt, Artificial Sequence
  Description of Artificial Sequence: Synthetic oligonucleotide
ugcaaggcauggugcaggc

SEQ ID NO: 1476545 - RNA, 19 nt, Artificial Sequence
  Description of Artificial Sequence: Synthetic oligonucleotide
uaccucccuagaaaccagc

SEQ ID NO: 1476546 - RNA, 19 nt, Artificial Sequence
  Description of Artificial Sequence: Synthetic oligonucleotide
uuuguccccgagcuugcgu

SEQ ID NO: 1476547 - RNA, 19 nt, Artificial Sequence
  Description of Artificial Sequence: Synthetic oligonucleotide
ucaagaccagaggaccgag

SEQ ID NO: 1476548 - RNA, 19 nt, Artificial Sequence
  Description of Artificial Sequence: Synthetic oligonucleotide
gacaacucacaaagaggcc

SEQ ID NO: 1476549 - RNA, 19 nt, Artificial Sequence
  Description of Artificial Sequence: Synthetic oligonucleotide
ugguuccucuauuuuguuc

SEQ ID NO: 1476550 - RNA, 19 nt, Artificial Sequence
  Description of Artificial Sequence: Synthetic oligonucleotide
gauucggaggcuugaccca

SEQ ID NO: 1476551 - RNA, 19 nt, Artificial Sequence
  Description of Artificial Sequence: Synthetic oligonucleotide
agugggaugaagacagacu

SEQ ID NO: 1476552 - RNA, 19 nt, Artificial Sequence
  Description of Artificial Sequence: Synthetic oligonucleotide
cugugucaggacaacucac

SEQ ID NO: 1476553 - RNA, 19 nt, Artificial Sequence
  Description of Artificial Sequence: Synthetic oligonucleotide
uggggaucagagcccacac

SEQ ID NO: 1476554 - RNA, 19 nt, Artificial Sequence
  Description of Artificial Sequence: Synthetic oligonucleotide
uguacacagggcagccacu

SEQ ID NO: 1476555 - RNA, 19 nt, Artificial Sequence
  Description of Artificial Sequence: Synthetic oligonucleotide
gaggaccgagcccuugugc

SEQ ID NO: 1476556 - RNA, 19 nt, Artificial Sequence
  Description of Artificial Sequence: Synthetic oligonucleotide
gacuaagcccuuuggucca

SEQ ID NO: 1476557 - RNA, 19 nt, Artificial Sequence
  Description of Artificial Sequence: Synthetic oligonucleotide
uaaacgcuugggugugccc

SEQ ID NO: 1476558 - RNA, 19 nt, Artificial Sequence
  Description of Artificial Sequence: Synthetic oligonucleotide
accuaccucccuagaaacc

SEQ ID NO: 1476559 - RNA, 19 nt, Artificial Sequence
  Description of Artificial Sequence: Synthetic oligonucleotide
cuugcguugucuguuccug

SEQ ID NO: 1476560 - RNA, 19 nt, Artificial Sequence
  Description of Artificial Sequence: Synthetic oligonucleotide
ugacccagccacaccuacc

SEQ ID NO: 1476561 - RNA, 19 nt, Artificial Sequence
  Description of Artificial Sequence: Synthetic oligonucleotide
uggugcaggccagauucgg

SEQ ID NO: 1476562 - RNA, 19 nt, Artificial Sequence
  Description of Artificial Sequence: Synthetic oligonucleotide
cagccugaacuccacaauc

SEQ ID NO: 1476563 - RNA, 19 nt, Artificial Sequence
  Description of Artificial Sequence: Synthetic oligonucleotide
guacucaaaccagagccac

SEQ ID NO: 1476564 - RNA, 19 nt, Artificial Sequence
  Description of Artificial Sequence: Synthetic oligonucleotide
gaccuggaucccuuuguac

SEQ ID NO: 1476565 - RNA, 19 nt, Artificial Sequence
  Description of Artificial Sequence: Synthetic oligonucleotide
aaagcaccaaggacuugug

SEQ ID NO: 1476566 - RNA, 19 nt, Artificial Sequence
  Description of Artificial Sequence: Synthetic oligonucleotide
caauaguaaacaauuucau

SEQ ID NO: 1476567 - RNA, 19 nt, Artificial Sequence
  Description of Artificial Sequence: Synthetic oligonucleotide
ugccaagagcacuuuccac

SEQ ID NO: 1476568 - RNA, 19 nt, Artificial Sequence
  Description of Artificial Sequence: Synthetic oligonucleotide
ggaauuaggcucguauccc

SEQ ID NO: 1476569 - RNA, 19 nt, Artificial Sequence
  Description of Artificial Sequence: Synthetic oligonucleotide
ccagggucaaugcacacag

SEQ ID NO: 1476570 - RNA, 19 nt, Artificial Sequence
  Description of Artificial Sequence: Synthetic oligonucleotide
gaggggacaugacugaccu

SEQ ID NO: 1476571 - RNA, 19 nt, Artificial Sequence
  Description of Artificial Sequence: Synthetic oligonucleotide
ugacaagguucuggaauug

SEQ ID NO: 1476572 - RNA, 19 nt, Artificial Sequence
  Description of Artificial Sequence: Synthetic oligonucleotide
accuccacagagagaaggg

SEQ ID NO: 1476573 - RNA, 19 nt, Artificial Sequence
  Description of Artificial Sequence: Synthetic oligonucleotide
gccacauuggggaauuagg

SEQ ID NO: 1476574 - RNA, 19 nt, Artificial Sequence
  Description of Artificial Sequence: Synthetic oligonucleotide
ucggaggcuugacccagcc

SEQ ID NO: 1476575 - RNA, 19 nt, Artificial Sequence
  Description of Artificial Sequence: Synthetic oligonucleotide
gacggugcucacucugggc

SEQ ID NO: 1476576 - RNA, 19 nt, Artificial Sequence
  Description of Artificial Sequence: Synthetic oligonucleotide
uaugacccacagagagcag

SEQ ID NO: 1476577 - RNA, 19 nt, Artificial Sequence
  Description of Artificial Sequence: Synthetic oligonucleotide
caagaccagaggaccgagc

SEQ ID NO: 1476578 - RNA, 19 nt, Artificial Sequence
  Description of Artificial Sequence: Synthetic oligonucleotide
cuaccucccuagaaaccag

SEQ ID NO: 1476579 - RNA, 19 nt, Artificial Sequence
  Description of Artificial Sequence: Synthetic oligonucleotide
ugaccuggaucccuuugua

SEQ ID NO: 1476580 - RNA, 19 nt, Artificial Sequence
  Description of Artificial Sequence: Synthetic oligonucleotide
uacacagggcagccacugc

SEQ ID NO: 1476581 - RNA, 19 nt, Artificial Sequence
  Description of Artificial Sequence: Synthetic oligonucleotide
gugcaggcucuuuugucag

SEQ ID NO: 1476582 - RNA, 19 nt, Artificial Sequence
  Description of Artificial Sequence: Synthetic oligonucleotide
caaggacuugugcuucagc

SEQ ID NO: 1476583 - RNA, 19 nt, Artificial Sequence
  Description of Artificial Sequence: Synthetic oligonucleotide
uuuguacacagggcagcca

SEQ ID NO: 1476584 - RNA, 19 nt, Artificial Sequence
  Description of Artificial Sequence: Synthetic oligonucleotide
acacagguuuccagccucc

SEQ ID NO: 1476585 - RNA, 19 nt, Artificial Sequence
  Description of Artificial Sequence: Synthetic oligonucleotide
uuuuguccccgagcuugcg

SEQ ID NO: 1476586 - RNA, 19 nt, Artificial Sequence
  Description of Artificial Sequence: Synthetic oligonucleotide
guaaacgcuugggugugcc

SEQ ID NO: 1476587 - RNA, 19 nt, Artificial Sequence
  Description of Artificial Sequence: Synthetic oligonucleotide
cuauuuuguucaaguggga

SEQ ID NO: 1476588 - RNA, 19 nt, Artificial Sequence
  Description of Artificial Sequence: Synthetic oligonucleotide
auucggaggcuugacccag

SEQ ID NO: 1476589 - RNA, 19 nt, Artificial Sequence
  Description of Artificial Sequence: Synthetic oligonucleotide
uggcuugucucaaggcaaa

SEQ ID NO: 1476590 - RNA, 19 nt, Artificial Sequence
  Description of Artificial Sequence: Synthetic oligonucleotide
agggaggacaggaacaaau

SEQ ID NO: 1476591 - RNA, 19 nt, Artificial Sequence
  Description of Artificial Sequence: Synthetic oligonucleotide
ugcuacuggauggccagac

SEQ ID NO: 1476592 - RNA, 19 nt, Artificial Sequence
  Description of Artificial Sequence: Synthetic oligonucleotide
ugcccacccaucugugcag

SEQ ID NO: 1476593 - RNA, 19 nt, Artificial Sequence
  Description of Artificial Sequence: Synthetic oligonucleotide
agaggaccgagcccuugug

SEQ ID NO: 1476594 - RNA, 19 nt, Artificial Sequence
  Description of Artificial Sequence: Synthetic oligonucleotide
uugggugugcccacccauc

SEQ ID NO: 1476595 - RNA, 19 nt, Artificial Sequence
  Description of Artificial Sequence: Synthetic oligonucleotide
ucuacccaccccagggcuc

SEQ ID NO: 1476596 - RNA, 19 nt, Artificial Sequence
  Description of Artificial Sequence: Synthetic oligonucleotide
ggggaugccucacucauga

SEQ ID NO: 1476597 - RNA, 19 nt, Artificial Sequence
  Description of Artificial Sequence: Synthetic oligonucleotide
gagcccgagggucucuggc

SEQ ID NO: 1476598 - RNA, 19 nt, Artificial Sequence
  Description of Artificial Sequence: Synthetic oligonucleotide
uuguccccgagcuugcguu

SEQ ID NO: 1476599 - RNA, 19 nt, Artificial Sequence
  Description of Artificial Sequence: Synthetic oligonucleotide
cucgcugagggccugacua

SEQ ID NO: 1476600 - RNA, 19 nt, Artificial Sequence
  Description of Artificial Sequence: Synthetic oligonucleotide
gacuugggucuguagaggu

SEQ ID NO: 1476601 - RNA, 19 nt, Artificial Sequence
  Description of Artificial Sequence: Synthetic oligonucleotide
aacaguccccagggcuggc

SEQ ID NO: 1476602 - RNA, 19 nt, Artificial Sequence
  Description of Artificial Sequence: Synthetic oligonucleotide
acacacaaggcagcugaug

SEQ ID NO: 1476603 - RNA, 19 nt, Artificial Sequence
  Description of Artificial Sequence: Synthetic oligonucleotide
aggcuugacccagccacac

SEQ ID NO: 1476604 - RNA, 19 nt, Artificial Sequence
  Description of Artificial Sequence: Synthetic oligonucleotide
ggggaauuaggcucguauc

SEQ ID NO: 1476605 - RNA, 19 nt, Artificial Sequence
  Description of Artificial Sequence: Synthetic oligonucleotide
cugugguacucaaaccaga

SEQ ID NO: 1476606 - RNA, 19 nt, Artificial Sequence
  Description of Artificial Sequence: Synthetic oligonucleotide
gucaaugcacacagguuuc

SEQ ID NO: 1476607 - RNA, 19 nt, Artificial Sequence
  Description of Artificial Sequence: Synthetic oligonucleotide
aagcccuuugguccaccau

SEQ ID NO: 1476608 - RNA, 19 nt, Artificial Sequence
  Description of Artificial Sequence: Synthetic oligonucleotide
cacauuggggaauuaggcu

SEQ ID NO: 1476609 - RNA, 19 nt, Artificial Sequence
  Description of Artificial Sequence: Synthetic oligonucleotide
cuguaaacgcuugggugug

SEQ ID NO: 1476610 - RNA, 19 nt, Artificial Sequence
  Description of Artificial Sequence: Synthetic oligonucleotide
gcuguaaacgcuugggugu

SEQ ID NO: 1476611 - RNA, 19 nt, Artificial Sequence
  Description of Artificial Sequence: Synthetic oligonucleotide
cacccaucugugcaggcuc

SEQ ID NO: 1476612 - RNA, 19 nt, Artificial Sequence
  Description of Artificial Sequence: Synthetic oligonucleotide
ggucaaugcacacagguuu

SEQ ID NO: 1476613 - RNA, 19 nt, Artificial Sequence
  Description of Artificial Sequence: Synthetic oligonucleotide
acuuuccacccagucagga

SEQ ID NO: 1476614 - RNA, 19 nt, Artificial Sequence
  Description of Artificial Sequence: Synthetic oligonucleotide
uguaaacgcuugggugugc

SEQ ID NO: 1476615 - RNA, 19 nt, Artificial Sequence
  Description of Artificial Sequence: Synthetic oligonucleotide
cacucagguccaacagaag

SEQ ID NO: 1476616 - RNA, 19 nt, Artificial Sequence
  Description of Artificial Sequence: Synthetic oligonucleotide
acugaccuaccucccuaga

SEQ ID NO: 1476617 - RNA, 19 nt, Artificial Sequence
  Description of Artificial Sequence: Synthetic oligonucleotide
agagcccgagggucucugg

SEQ ID NO: 1476618 - RNA, 19 nt, Artificial Sequence
  Description of Artificial Sequence: Synthetic oligonucleotide
uugucuguuccuggcuucu

SEQ ID NO: 1476619 - RNA, 19 nt, Artificial Sequence
  Description of Artificial Sequence: Synthetic oligonucleotide
uguccccgagcuugcguug

SEQ ID NO: 1476620 - RNA, 19 nt, Artificial Sequence
  Description of Artificial Sequence: Synthetic oligonucleotide
gugucaggacaacucacaa

SEQ ID NO: 1476621 - RNA, 19 nt, Artificial Sequence
  Description of Artificial Sequence: Synthetic oligonucleotide
uucggaggcuugacccagc

SEQ ID NO: 1476622 - RNA, 19 nt, Artificial Sequence
  Description of Artificial Sequence: Synthetic oligonucleotide
gguccaacagaaggcaggc

SEQ ID NO: 1476623 - RNA, 19 nt, Artificial Sequence
  Description of Artificial Sequence: Synthetic oligonucleotide
gugcccacccaucugugca

SEQ ID NO: 1476624 - RNA, 19 nt, Artificial Sequence
  Description of Artificial Sequence: Synthetic oligonucleotide
cccagacaaggaaacacug

SEQ ID NO: 1476625 - RNA, 19 nt, Artificial Sequence
  Description of Artificial Sequence: Synthetic oligonucleotide
uccuaggguccucgcugag

SEQ ID NO: 1476626 - RNA, 19 nt, Artificial Sequence
  Description of Artificial Sequence: Synthetic oligonucleotide
acuaagcccuuugguccac

SEQ ID NO: 1476627 - RNA, 19 nt, Artificial Sequence
  Description of Artificial Sequence: Synthetic oligonucleotide
aacucacaaagaggcccga

SEQ ID NO: 1476628 - RNA, 19 nt, Artificial Sequence
  Description of Artificial Sequence: Synthetic oligonucleotide
ccuggaucccuuuguacac

SEQ ID NO: 1476629 - RNA, 19 nt, Artificial Sequence
  Description of Artificial Sequence: Synthetic oligonucleotide
gagcuugcguugucuguuc

SEQ ID NO: 1476630 - RNA, 19 nt, Artificial Sequence
  Description of Artificial Sequence: Synthetic oligonucleotide
gugcucuacccaccccagg

SEQ ID NO: 1476631 - RNA, 19 nt, Artificial Sequence
  Description of Artificial Sequence: Synthetic oligonucleotide
caccuaccagucacugcag

SEQ ID NO: 1476632 - RNA, 19 nt, Artificial Sequence
  Description of Artificial Sequence: Synthetic oligonucleotide
gguacucaaaccagagcca

SEQ ID NO: 1476633 - RNA, 19 nt, Artificial Sequence
  Description of Artificial Sequence: Synthetic oligonucleotide
auaguggcagggagagcag

SEQ ID NO: 1476634 - RNA, 19 nt, Artificial Sequence
  Description of Artificial Sequence: Synthetic oligonucleotide
ucgcugagggccugacuaa

SEQ ID NO: 1476635 - RNA, 19 nt, Artificial Sequence
  Description of Artificial Sequence: Synthetic oligonucleotide
agacagacugcuacuggau

SEQ ID NO: 1476636 - RNA, 19 nt, Artificial Sequence
  Description of Artificial Sequence: Synthetic oligonucleotide
agcccuugugauguugggu

SEQ ID NO: 1476637 - RNA, 19 nt, Artificial Sequence
  Description of Artificial Sequence: Synthetic oligonucleotide
uuuguucaagugggaugaa

SEQ ID NO: 1476638 - RNA, 19 nt, Artificial Sequence
  Description of Artificial Sequence: Synthetic oligonucleotide
gagcccacacccaggcagc

SEQ ID NO: 1476639 - RNA, 19 nt, Artificial Sequence
  Description of Artificial Sequence: Synthetic oligonucleotide
ugucuguuccuggcuucug

SEQ ID NO: 1476640 - RNA, 19 nt, Artificial Sequence
  Description of Artificial Sequence: Synthetic oligonucleotide
cugacaagguucuggaauu

SEQ ID NO: 1476641 - RNA, 19 nt, Artificial Sequence
  Description of Artificial Sequence: Synthetic oligonucleotide
aggcccuaggccccacuca

SEQ ID NO: 1476642 - RNA, 19 nt, Artificial Sequence
  Description of Artificial Sequence: Synthetic oligonucleotide
gguauagggaagagcacaa

SEQ ID NO: 1476643 - RNA, 19 nt, Artificial Sequence
  Description of Artificial Sequence: Synthetic oligonucleotide
cucaagaccagaggaccga

SEQ ID NO: 1476644 - RNA, 19 nt, Artificial Sequence
  Description of Artificial Sequence: Synthetic oligonucleotide
caccaaggacuugugcuuc

SEQ ID NO: 1476645 - RNA, 19 nt, Artificial Sequence
  Description of Artificial Sequence: Synthetic oligonucleotide
ggcuucaaacaguccccag

SEQ ID NO: 1476646 - RNA, 19 nt, Artificial Sequence
  Description of Artificial Sequence: Synthetic oligonucleotide
gaaccuccacagagagaag

SEQ ID NO: 1476647 - RNA, 19 nt, Artificial Sequence
  Description of Artificial Sequence: Synthetic oligonucleotide
uaggguccucgcugagggc

SEQ ID NO: 1476648 - RNA, 19 nt, Artificial Sequence
  Description of Artificial Sequence: Synthetic oligonucleotide
ggggauagaggaccagaga

SEQ ID NO: 1476649 - RNA, 19 nt, Artificial Sequence
  Description of Artificial Sequence: Synthetic oligonucleotide
ggaggggacaugacugacc

SEQ ID NO: 1476650 - RNA, 19 nt, Artificial Sequence
  Description of Artificial Sequence: Synthetic oligonucleotide
ggauagaggaccagagaaa

SEQ ID NO: 1476651 - RNA, 19 nt, Artificial Sequence
  Description of Artificial Sequence: Synthetic oligonucleotide
gcccuugugcucuacccac

SEQ ID NO: 1476652 - RNA, 19 nt, Artificial Sequence
  Description of Artificial Sequence: Synthetic oligonucleotide
cugcucccagacaaggaaa

SEQ ID NO: 1476653 - RNA, 19 nt, Artificial Sequence
  Description of Artificial Sequence: Synthetic oligonucleotide
gcccugguuacugugguac

SEQ ID NO: 1476654 - RNA, 19 nt, Artificial Sequence
  Description of Artificial Sequence: Synthetic oligonucleotide
caauaguggcagggagagc

SEQ ID NO: 1476655 - RNA, 19 nt, Artificial Sequence
  Description of Artificial Sequence: Synthetic oligonucleotide
acgcuugggugugcccacc

SEQ ID NO: 1476656 - RNA, 19 nt, Artificial Sequence
  Description of Artificial Sequence: Synthetic oligonucleotide
caugucuuguuuggacaca

SEQ ID NO: 1476657 - RNA, 19 nt, Artificial Sequence
  Description of Artificial Sequence: Synthetic oligonucleotide
ccagacaaggaaacacuga

SEQ ID NO: 1476658 - RNA, 19 nt, Artificial Sequence
  Description of Artificial Sequence: Synthetic oligonucleotide
cucuuuugucaggaaggga

SEQ ID NO: 1476659 - RNA, 19 nt, Artificial Sequence
  Description of Artificial Sequence: Synthetic oligonucleotide
gguuaggaaccuccacaga

SEQ ID NO: 1476660 - RNA, 19 nt, Artificial Sequence
  Description of Artificial Sequence: Synthetic oligonucleotide
ccugaacuccacaauccca

SEQ ID NO: 1476661 - RNA, 19 nt, Artificial Sequence
  Description of Artificial Sequence: Synthetic oligonucleotide
ggggaggcuucaaacaguc

SEQ ID NO: 1476662 - RNA, 19 nt, Artificial Sequence
  Description of Artificial Sequence: Synthetic oligonucleotide
ccugucuauccugcaaggc

SEQ ID NO: 1476663 - RNA, 19 nt, Artificial Sequence
  Description of Artificial Sequence: Synthetic oligonucleotide
gaugacugucuuggggaua

SEQ ID NO: 1476664 - RNA, 19 nt, Artificial Sequence
  Description of Artificial Sequence: Synthetic oligonucleotide
ggugugcccacccaucugu

SEQ ID NO: 1476665 - RNA, 19 nt, Artificial Sequence
  Description of Artificial Sequence: Synthetic oligonucleotide
cucacucaugaggcccuag

SEQ ID NO: 1476666 - RNA, 19 nt, Artificial Sequence
  Description of Artificial Sequence: Synthetic oligonucleotide
gggucuguagaggucucug

SEQ ID NO: 1476667 - RNA, 19 nt, Artificial Sequence
  Description of Artificial Sequence: Synthetic oligonucleotide
cugggcccugcucccagac

SEQ ID NO: 1476668 - RNA, 19 nt, Artificial Sequence
  Description of Artificial Sequence: Synthetic oligonucleotide
cugaccuggaucccuuugu

SEQ ID NO: 1476669 - RNA, 19 nt, Artificial Sequence
  Description of Artificial Sequence: Synthetic oligonucleotide
auuggggaauuaggcucgu

SEQ ID NO: 1476670 - RNA, 19 nt, Artificial Sequence
  Description of Artificial Sequence: Synthetic oligonucleotide
gaggcccgaagagggacuc

SEQ ID NO: 1476671 - RNA, 19 nt, Artificial Sequence
  Description of Artificial Sequence: Synthetic oligonucleotide
agaggcccgaagagggacu

SEQ ID NO: 1476672 - RNA, 19 nt, Artificial Sequence
  Description of Artificial Sequence: Synthetic oligonucleotide
ccguccaucauccugucua

SEQ ID NO: 1476673 - RNA, 19 nt, Artificial Sequence
  Description of Artificial Sequence: Synthetic oligonucleotide
acacagccuuuaacaaaca

SEQ ID NO: 1476674 - RNA, 19 nt, Artificial Sequence
  Description of Artificial Sequence: Synthetic oligonucleotide
ggacaugacugaccuaccu

SEQ ID NO: 1476675 - RNA, 19 nt, Artificial Sequence
  Description of Artificial Sequence: Synthetic oligonucleotide
cccuugugauguuggguug

SEQ ID NO: 1476676 - RNA, 19 nt, Artificial Sequence
  Description of Artificial Sequence: Synthetic oligonucleotide
caagagcacuuuccaccca

SEQ ID NO: 1476677 - RNA, 19 nt, Artificial Sequence
  Description of Artificial Sequence: Synthetic oligonucleotide
cacugacaagguucuggaa

SEQ ID NO: 1476678 - RNA, 19 nt, Artificial Sequence
  Description of Artificial Sequence: Synthetic oligonucleotide
ggcuugacccagccacacc

SEQ ID NO: 1476679 - RNA, 19 nt, Artificial Sequence
  Description of Artificial Sequence: Synthetic oligonucleotide
ggguugguauagggaagag

SEQ ID NO: 1476680 - RNA, 19 nt, Artificial Sequence
  Description of Artificial Sequence: Synthetic oligonucleotide
ccuaggguccucgcugagg

SEQ ID NO: 1476681 - RNA, 19 nt, Artificial Sequence
  Description of Artificial Sequence: Synthetic oligonucleotide
ccugguuccucuauuuugu

SEQ ID NO: 1476682 - RNA, 19 nt, Artificial Sequence
  Description of Artificial Sequence: Synthetic oligonucleotide
aggaaccuccacagagaga

SEQ ID NO: 1476683 - RNA, 19 nt, Artificial Sequence
  Description of Artificial Sequence: Synthetic oligonucleotide
aggggaugccucacucaug

SEQ ID NO: 1476684 - RNA, 19 nt, Artificial Sequence
  Description of Artificial Sequence: Synthetic oligonucleotide
cuacccaccccagggcuca

SEQ ID NO: 1476685 - RNA, 19 nt, Artificial Sequence
  Description of Artificial Sequence: Synthetic oligonucleotide
agccuuuaacaaacaccaa

SEQ ID NO: 1476686 - RNA, 19 nt, Artificial Sequence
  Description of Artificial Sequence: Synthetic oligonucleotide
cuccguccaucauccuguc

SEQ ID NO: 1476687 - RNA, 19 nt, Artificial Sequence
  Description of Artificial Sequence: Synthetic oligonucleotide
gaccgagcccuugugcucu

SEQ ID NO: 1476688 - RNA, 19 nt, Artificial Sequence
  Description of Artificial Sequence: Synthetic oligonucleotide
gcuacuggauggccagaca

SEQ ID NO: 1476689 - RNA, 19 nt, Artificial Sequence
  Description of Artificial Sequence: Synthetic oligonucleotide
cccuggcaugucuuguuug

SEQ ID NO: 1476690 - RNA, 19 nt, Artificial Sequence
  Description of Artificial Sequence: Synthetic oligonucleotide
cuaccagucacugcaguuu

SEQ ID NO: 1476691 - RNA, 19 nt, Artificial Sequence
  Description of Artificial Sequence: Synthetic oligonucleotide
gacagacggugcucacucu

SEQ ID NO: 1476692 - RNA, 19 nt, Artificial Sequence
  Description of Artificial Sequence: Synthetic oligonucleotide
caggggaugccucacucau

SEQ ID NO: 1476693 - RNA, 19 nt, Artificial Sequence
  Description of Artificial Sequence: Synthetic oligonucleotide
cccuagaaaccagcccugg

SEQ ID NO: 1476694 - RNA, 19 nt, Artificial Sequence
  Description of Artificial Sequence: Synthetic oligonucleotide
ggaccgagcccuugugcuc

SEQ ID NO: 1476695 - RNA, 19 nt, Artificial Sequence
  Description of Artificial Sequence: Synthetic oligonucleotide
uccccgagcuugcguuguc

SEQ ID NO: 1476696 - RNA, 19 nt, Artificial Sequence
  Description of Artificial Sequence: Synthetic oligonucleotide
ggcuccacuuggugacuug

SEQ ID NO: 1476697 - RNA, 19 nt, Artificial Sequence
  Description of Artificial Sequence: Synthetic oligonucleotide
gggaugccucacucaugag

SEQ ID NO: 1476698 - RNA, 19 nt, Artificial Sequence
  Description of Artificial Sequence: Synthetic oligonucleotide
uccucgcugagggccugac

SEQ ID NO: 1476699 - RNA, 19 nt, Artificial Sequence
  Description of Artificial Sequence: Synthetic oligonucleotide
gcccuugugauguuggguu

SEQ ID NO: 1476700 - RNA, 19 nt, Artificial Sequence
  Description of Artificial Sequence: Synthetic oligonucleotide
aggaccagagaaagcccuu

SEQ ID NO: 1476701 - RNA, 19 nt, Artificial Sequence
  Description of Artificial Sequence: Synthetic oligonucleotide
ugacugucuuggggauaga

SEQ ID NO: 1476702 - RNA, 19 nt, Artificial Sequence
  Description of Artificial Sequence: Synthetic oligonucleotide
ggaaagcaccaaggacuug

SEQ ID NO: 1476703 - RNA, 19 nt, Artificial Sequence
  Description of Artificial Sequence: Synthetic oligonucleotide
uuggggaauuaggcucgua

SEQ ID NO: 1476704 - RNA, 19 nt, Artificial Sequence
  Description of Artificial Sequence: Synthetic oligonucleotide
ccaaggacuugugcuucag

SEQ ID NO: 1476705 - RNA, 19 nt, Artificial Sequence
  Description of Artificial Sequence: Synthetic oligonucleotide
aggggacaugacugaccua

SEQ ID NO: 1476706 - RNA, 19 nt, Artificial Sequence
  Description of Artificial Sequence: Synthetic oligonucleotide
ccacaccuaccagucacug

SEQ ID NO: 1476707 - RNA, 19 nt, Artificial Sequence
  Description of Artificial Sequence: Synthetic oligonucleotide
ccuccguccaucauccugu

SEQ ID NO: 1476708 - RNA, 19 nt, Artificial Sequence
  Description of Artificial Sequence: Synthetic oligonucleotide
gggaggcuucaaacagucc

SEQ ID NO: 1476709 - RNA, 19 nt, Artificial Sequence
  Description of Artificial Sequence: Synthetic oligonucleotide
guauagggaagagcacaau

SEQ ID NO: 1476710 - RNA, 19 nt, Artificial Sequence
  Description of Artificial Sequence: Synthetic oligonucleotide
cagagagcaggcccuccua

SEQ ID NO: 1476711 - RNA, 19 nt, Artificial Sequence
  Description of Artificial Sequence: Synthetic oligonucleotide
cugccacacugccagaauu

SEQ ID NO: 1476712 - RNA, 19 nt, Artificial Sequence
  Description of Artificial Sequence: Synthetic oligonucleotide
cagaggaccgagcccuugu

SEQ ID NO: 1476713 - RNA, 19 nt, Artificial Sequence
  Description of Artificial Sequence: Synthetic oligonucleotide
ccagacaaaaggagcugua

SEQ ID NO: 1476714 - RNA, 19 nt, Artificial Sequence
  Description of Artificial Sequence: Synthetic oligonucleotide
ggccagauucggaggcuug

SEQ ID NO: 1476715 - RNA, 19 nt, Artificial Sequence
  Description of Artificial Sequence: Synthetic oligonucleotide
gccagauucggaggcuuga

SEQ ID NO: 1476716 - RNA, 19 nt, Artificial Sequence
  Description of Artificial Sequence: Synthetic oligonucleotide
cuauccugcaaggcauggu

SEQ ID NO: 1476717 - RNA, 19 nt, Artificial Sequence
  Description of Artificial Sequence: Synthetic oligonucleotide
gggcucaugccaagagcac

SEQ ID NO: 1476718 - RNA, 19 nt, Artificial Sequence
  Description of Artificial Sequence: Synthetic oligonucleotide
aggcauggugcaggccaga

SEQ ID NO: 1476719 - RNA, 19 nt, Artificial Sequence
  Description of Artificial Sequence: Synthetic oligonucleotide
gccagacaaaaggagcugu

SEQ ID NO: 1476720 - RNA, 19 nt, Artificial Sequence
  Description of Artificial Sequence: Synthetic oligonucleotide
aggcuccacuuggugacuu

SEQ ID NO: 1476721 - RNA, 19 nt, Artificial Sequence
  Description of Artificial Sequence: Synthetic oligonucleotide
cuucugcccugguuacugu

SEQ ID NO: 1476722 - RNA, 19 nt, Artificial Sequence
  Description of Artificial Sequence: Synthetic oligonucleotide
cggugcucacucugggccc

SEQ ID NO: 1476723 - RNA, 19 nt, Artificial Sequence
  Description of Artificial Sequence: Synthetic oligonucleotide
gcucccagacaaggaaaca

SEQ ID NO: 1476724 - RNA, 19 nt, Artificial Sequence
  Description of Artificial Sequence: Synthetic oligonucleotide
cagagcccacacccaggca

SEQ ID NO: 1476725 - RNA, 19 nt, Artificial Sequence
  Description of Artificial Sequence: Synthetic oligonucleotide
gcaaggcauggugcaggcc

SEQ ID NO: 1476726 - RNA, 19 nt, Artificial Sequence
  Description of Artificial Sequence: Synthetic oligonucleotide
gcuugcguugucuguuccu

SEQ ID NO: 1476727 - RNA, 19 nt, Artificial Sequence
  Description of Artificial Sequence: Synthetic oligonucleotide
ccuaggccccacucagguc

SEQ ID NO: 1476728 - RNA, 19 nt, Artificial Sequence
  Description of Artificial Sequence: Synthetic oligonucleotide
gucccaccuguggcucagg

SEQ ID NO: 1476729 - RNA, 19 nt, Artificial Sequence
  Description of Artificial Sequence: Synthetic oligonucleotide
gggagcugaccuggauccc

SEQ ID NO: 1476730 - RNA, 19 nt, Artificial Sequence
  Description of Artificial Sequence: Synthetic oligonucleotide
aggcccuccuaggguccuc

SEQ ID NO: 1476731 - RNA, 19 nt, Artificial Sequence
  Description of Artificial Sequence: Synthetic oligonucleotide
ggagcugaccuggaucccu

SEQ ID NO: 1476732 - RNA, 19 nt, Artificial Sequence
  Description of Artificial Sequence: Synthetic oligonucleotide
gcagcagguuaggaaccuc

SEQ ID NO: 1476733 - RNA, 19 nt, Artificial Sequence
  Description of Artificial Sequence: Synthetic oligonucleotide
gggagagcaggggaugccu

SEQ ID NO: 1476734 - RNA, 19 nt, Artificial Sequence
  Description of Artificial Sequence: Synthetic oligonucleotide
cugcuacuggauggccaga

SEQ ID NO: 1476735 - RNA, 19 nt, Artificial Sequence
  Description of Artificial Sequence: Synthetic oligonucleotide
gcguugucuguuccuggcu

SEQ ID NO: 1476736 - RNA, 19 nt, Artificial Sequence
  Description of Artificial Sequence: Synthetic oligonucleotide
guccaacagaaggcaggcu

SEQ ID NO: 1476737 - RNA, 19 nt, Artificial Sequence
  Description of Artificial Sequence: Synthetic oligonucleotide
accgagcccuugugcucua

SEQ ID NO: 1476738 - RNA, 19 nt, Artificial Sequence
  Description of Artificial Sequence: Synthetic oligonucleotide
gggucaaugcacacagguu

SEQ ID NO: 1476739 - RNA, 19 nt, Artificial Sequence
  Description of Artificial Sequence: Synthetic oligonucleotide
gagcugaccuggaucccuu

SEQ ID NO: 1476740 - RNA, 19 nt, Artificial Sequence
  Description of Artificial Sequence: Synthetic oligonucleotide
ccccagggcuggcagcuuc

SEQ ID NO: 1476741 - RNA, 19 nt, Artificial Sequence
  Description of Artificial Sequence: Synthetic oligonucleotide
gcccuuugguccaccaugu

SEQ ID NO: 1476742 - RNA, 19 nt, Artificial Sequence
  Description of Artificial Sequence: Synthetic oligonucleotide
cucaaaccagagccacauu

SEQ ID NO: 1476743 - RNA, 19 nt, Artificial Sequence
  Description of Artificial Sequence: Synthetic oligonucleotide
cccuaggccccacucaggu

SEQ ID NO: 1476744 - RNA, 19 nt, Artificial Sequence
  Description of Artificial Sequence: Synthetic oligonucleotide
gagccacauuggggaauua

SEQ ID NO: 1476745 - RNA, 19 nt, Artificial Sequence
  Description of Artificial Sequence: Synthetic oligonucleotide
ggccccacucagguccaac

SEQ ID NO: 1476746 - RNA, 19 nt, Artificial Sequence
  Description of Artificial Sequence: Synthetic oligonucleotide
guccccgagcuugcguugu

SEQ ID NO: 1476747 - RNA, 19 nt, Artificial Sequence
  Description of Artificial Sequence: Synthetic oligonucleotide
accagaggaccgagcccuu

SEQ ID NO: 1476748 - RNA, 19 nt, Artificial Sequence
  Description of Artificial Sequence: Synthetic oligonucleotide
ggugcucacucugggcccu

SEQ ID NO: 1476749 - RNA, 19 nt, Artificial Sequence
  Description of Artificial Sequence: Synthetic oligonucleotide
cucaugccaagagcacuuu

SEQ ID NO: 1476750 - RNA, 19 nt, Artificial Sequence
  Description of Artificial Sequence: Synthetic oligonucleotide
gcauggugcaggccagauu

SEQ ID NO: 1476751 - RNA, 19 nt, Artificial Sequence
  Description of Artificial Sequence: Synthetic oligonucleotide
ccgagcuugcguugucugu

SEQ ID NO: 1476752 - RNA, 19 nt, Artificial Sequence
  Description of Artificial Sequence: Synthetic oligonucleotide
gccacaccuaccagucacu

SEQ ID NO: 1476753 - RNA, 19 nt, Artificial Sequence
  Description of Artificial Sequence: Synthetic oligonucleotide
ggcccuggcaugucuuguu

SEQ ID NO: 1476754 - RNA, 19 nt, Artificial Sequence
  Description of Artificial Sequence: Synthetic oligonucleotide
gcccuggcaugucuuguuu

SEQ ID NO: 1476755 - RNA, 19 nt, Artificial Sequence
  Description of Artificial Sequence: Synthetic oligonucleotide
cccugguuacugugguacu

SEQ ID NO: 1476756 - RNA, 19 nt, Artificial Sequence
  Description of Artificial Sequence: Synthetic oligonucleotide
cguccaucauccugucuau

SEQ ID NO: 1476757 - RNA, 19 nt, Artificial Sequence
  Description of Artificial Sequence: Synthetic oligonucleotide
caggcccuccuaggguccu

SEQ ID NO: 1476758 - RNA, 19 nt, Artificial Sequence
  Description of Artificial Sequence: Synthetic oligonucleotide
ccgagcccuugugcucuac

SEQ ID NO: 1476759 - RNA, 19 nt, Artificial Sequence
  Description of Artificial Sequence: Synthetic oligonucleotide
gcagagcccgagggucucu

SEQ ID NO: 1476760 - RNA, 19 nt, Artificial Sequence
  Description of Artificial Sequence: Synthetic oligonucleotide
gggccugacuaagcccuuu

SEQ ID NO: 1476761 - RNA, 19 nt, Artificial Sequence
  Description of Artificial Sequence: Synthetic oligonucleotide
ccgagggucucuggccaua

SEQ ID NO: 1476762 - RNA, 19 nt, Artificial Sequence
  Description of Artificial Sequence: Synthetic oligonucleotide
ccucacucaugaggcccua

SEQ ID NO: 1476763 - RNA, 19 nt, Artificial Sequence
  Description of Artificial Sequence: Synthetic oligonucleotide
cgagggucucuggccauau

SEQ ID NO: 1476764 - RNA, 19 nt, Artificial Sequence
  Description of Artificial Sequence: Synthetic oligonucleotide
aagcacauaaaucaacucc

SEQ ID NO: 1476765 - RNA, 19 nt, Artificial Sequence
  Description of Artificial Sequence: Synthetic oligonucleotide
aagaaugucagauuugagg

SEQ ID NO: 1476766 - RNA, 19 nt, Artificial Sequence
  Description of Artificial Sequence: Synthetic oligonucleotide
uuaaacauaauacagacuu

SEQ ID NO: 1476767 - RNA, 19 nt, Artificial Sequence
  Description of Artificial Sequence: Synthetic oligonucleotide
aaaauaagacuugagggcc

SEQ ID NO: 1476768 - RNA, 19 nt, Artificial Sequence
  Description of Artificial Sequence: Synthetic oligonucleotide
agaaugucagauuugaggg

SEQ ID NO: 1476769 - RNA, 19 nt, Artificial Sequence
  Description of Artificial Sequence: Synthetic oligonucleotide
agaauaguagcucugcagc

SEQ ID NO: 1476770 - RNA, 19 nt, Artificial Sequence
  Description of Artificial Sequence: Synthetic oligonucleotide
uuuuaagucauuaauaguu

SEQ ID NO: 1476771 - RNA, 19 nt, Artificial Sequence
  Description of Artificial Sequence: Synthetic oligonucleotide
aaucaaagcaccccaugcc

SEQ ID NO: 1476772 - RNA, 19 nt, Artificial Sequence
  Description of Artificial Sequence: Synthetic oligonucleotide
uauauuuaacaacacaaga

SEQ ID NO: 1476773 - RNA, 19 nt, Artificial Sequence
  Description of Artificial Sequence: Synthetic oligonucleotide
cuaacagccaauaaaggcc

SEQ ID NO: 1476774 - RNA, 19 nt, Artificial Sequence
  Description of Artificial Sequence: Synthetic oligonucleotide
aagaguucagaguguaggc

SEQ ID NO: 1476775 - RNA, 19 nt, Artificial Sequence
  Description of Artificial Sequence: Synthetic oligonucleotide
uaaaucaacuccaaauuca

SEQ ID NO: 1476776 - RNA, 19 nt, Artificial Sequence
  Description of Artificial Sequence: Synthetic oligonucleotide
uuuaacaacacaagagaca

SEQ ID NO: 1476777 - RNA, 19 nt, Artificial Sequence
  Description of Artificial Sequence: Synthetic oligonucleotide
caacauuaacccaagaccc

SEQ ID NO: 1476778 - RNA, 19 nt, Artificial Sequence
  Description of Artificial Sequence: Synthetic oligonucleotide
uggguguagauccuaagcg

SEQ ID NO: 1476779 - RNA, 19 nt, Artificial Sequence
  Description of Artificial Sequence: Synthetic oligonucleotide
ucaaagacuguccaauaag

SEQ ID NO: 1476780 - RNA, 19 nt, Artificial Sequence
  Description of Artificial Sequence: Synthetic oligonucleotide
uuuaaaagacacaauguua

SEQ ID NO: 1476781 - RNA, 19 nt, Artificial Sequence
  Description of Artificial Sequence: Synthetic oligonucleotide
ucccuaagcacauaaauca

SEQ ID NO: 1476782 - RNA, 19 nt, Artificial Sequence
  Description of Artificial Sequence: Synthetic oligonucleotide
uuaacaacacaagagacac

SEQ ID NO: 1476783 - RNA, 19 nt, Artificial Sequence
  Description of Artificial Sequence: Synthetic oligonucleotide
auauuuaacaacacaagag

SEQ ID NO: 1476784 - RNA, 19 nt, Artificial Sequence
  Description of Artificial Sequence: Synthetic oligonucleotide
acauaaaucaacuccaaau

SEQ ID NO: 1476785 - RNA, 19 nt, Artificial Sequence
  Description of Artificial Sequence: Synthetic oligonucleotide
aucaaagcaccccaugccc

SEQ ID NO: 1476786 - RNA, 19 nt, Artificial Sequence
  Description of Artificial Sequence: Synthetic oligonucleotide
uguccaauaagcaccuggg

SEQ ID NO: 1476787 - RNA, 19 nt, Artificial Sequence
  Description of Artificial Sequence: Synthetic oligonucleotide
ugaacuguguaaaacauuu

SEQ ID NO: 1476788 - RNA, 19 nt, Artificial Sequence
  Description of Artificial Sequence: Synthetic oligonucleotide
aucucuaucuaccugggag

SEQ ID NO: 1476789 - RNA, 19 nt, Artificial Sequence
  Description of Artificial Sequence: Synthetic oligonucleotide
uaaucaaagcaccccaugc

SEQ ID NO: 1476790 - RNA, 19 nt, Artificial Sequence
  Description of Artificial Sequence: Synthetic oligonucleotide
uucuccuuaaucaaagcac

SEQ ID NO: 1476791 - RNA, 19 nt, Artificial Sequence
  Description of Artificial Sequence: Synthetic oligonucleotide
uaacuuuuaagucauuaau

SEQ ID NO: 1476792 - RNA, 19 nt, Artificial Sequence
  Description of Artificial Sequence: Synthetic oligonucleotide
ucuccuuaaucaaagcacc

SEQ ID NO: 1476793 - RNA, 19 nt, Artificial Sequence
  Description of Artificial Sequence: Synthetic oligonucleotide
auuuaacaacacaagagac

SEQ ID NO: 1476794 - RNA, 19 nt, Artificial Sequence
  Description of Artificial Sequence: Synthetic oligonucleotide
cugugauccacuuucuucg

SEQ ID NO: 1476795 - RNA, 19 nt, Artificial Sequence
  Description of Artificial Sequence: Synthetic oligonucleotide
ucacaucaggcuaacagcc

SEQ ID NO: 1476796 - RNA, 19 nt, Artificial Sequence
  Description of Artificial Sequence: Synthetic oligonucleotide
gaauagaagccacugcugc

SEQ ID NO: 1476797 - RNA, 19 nt, Artificial Sequence
  Description of Artificial Sequence: Synthetic oligonucleotide
aacagugagaaguucaguu

SEQ ID NO: 1476798 - RNA, 19 nt, Artificial Sequence
  Description of Artificial Sequence: Synthetic oligonucleotide
aauaguagcucugcagcac

SEQ ID NO: 1476799 - RNA, 19 nt, Artificial Sequence
  Description of Artificial Sequence: Synthetic oligonucleotide
agacuguccaauaagcacc

SEQ ID NO: 1476800 - RNA, 19 nt, Artificial Sequence
  Description of Artificial Sequence: Synthetic oligonucleotide
caaagacuguccaauaagc

SEQ ID NO: 1476801 - RNA, 19 nt, Artificial Sequence
  Description of Artificial Sequence: Synthetic oligonucleotide
ucucuaucuaccugggagg

SEQ ID NO: 1476802 - RNA, 19 nt, Artificial Sequence
  Description of Artificial Sequence: Synthetic oligonucleotide
aagucacaguuguuugucc

SEQ ID NO: 1476803 - RNA, 19 nt, Artificial Sequence
  Description of Artificial Sequence: Synthetic oligonucleotide
uaacagaaacuccccaggg

SEQ ID NO: 1476804 - RNA, 19 nt, Artificial Sequence
  Description of Artificial Sequence: Synthetic oligonucleotide
uccauaaaccaccugauuu

SEQ ID NO: 1476805 - RNA, 19 nt, Artificial Sequence
  Description of Artificial Sequence: Synthetic oligonucleotide
caucaaaucccagugauag

SEQ ID NO: 1476806 - RNA, 19 nt, Artificial Sequence
  Description of Artificial Sequence: Synthetic oligonucleotide
agucacaguuguuuguccc

SEQ ID NO: 1476807 - RNA, 19 nt, Artificial Sequence
  Description of Artificial Sequence: Synthetic oligonucleotide
uucacaucaggcuaacagc

SEQ ID NO: 1476808 - RNA, 19 nt, Artificial Sequence
  Description of Artificial Sequence: Synthetic oligonucleotide
agaguagaggccuuuaaca

SEQ ID NO: 1476809 - RNA, 19 nt, Artificial Sequence
  Description of Artificial Sequence: Synthetic oligonucleotide
ucagaguguaggcaugagg

SEQ ID NO: 1476810 - RNA, 19 nt, Artificial Sequence
  Description of Artificial Sequence: Synthetic oligonucleotide
aauaaaggcccuaacagaa

SEQ ID NO: 1476811 - RNA, 19 nt, Artificial Sequence
  Description of Artificial Sequence: Synthetic oligonucleotide
aguuguuugucccuagaag

SEQ ID NO: 1476812 - RNA, 19 nt, Artificial Sequence
  Description of Artificial Sequence: Synthetic oligonucleotide
aacauuaacccaagacccc

SEQ ID NO: 1476813 - RNA, 19 nt, Artificial Sequence
  Description of Artificial Sequence: Synthetic oligonucleotide
uaacagccaauaaaggccc

SEQ ID NO: 1476814 - RNA, 19 nt, Artificial Sequence
  Description of Artificial Sequence: Synthetic oligonucleotide
aagagacaccacuugagcu

SEQ ID NO: 1476815 - RNA, 19 nt, Artificial Sequence
  Description of Artificial Sequence: Synthetic oligonucleotide
cuaagcgaguccauaaacc

SEQ ID NO: 1476816 - RNA, 19 nt, Artificial Sequence
  Description of Artificial Sequence: Synthetic oligonucleotide
uuguucaacauuaacccaa

SEQ ID NO: 1476817 - RNA, 19 nt, Artificial Sequence
  Description of Artificial Sequence: Synthetic oligonucleotide
aggaauagaagccacugcu

SEQ ID NO: 1476818 - RNA, 19 nt, Artificial Sequence
  Description of Artificial Sequence: Synthetic oligonucleotide
uuaaucaaagcaccccaug

SEQ ID NO: 1476819 - RNA, 19 nt, Artificial Sequence
  Description of Artificial Sequence: Synthetic oligonucleotide
uucaacacucaucacacuc

SEQ ID NO: 1476820 - RNA, 19 nt, Artificial Sequence
  Description of Artificial Sequence: Synthetic oligonucleotide
uaagcgaguccauaaacca

SEQ ID NO: 1476821 - RNA, 19 nt, Artificial Sequence
  Description of Artificial Sequence: Synthetic oligonucleotide
uccaauaagcaccugggaa

SEQ ID NO: 1476822 - RNA, 19 nt, Artificial Sequence
  Description of Artificial Sequence: Synthetic oligonucleotide
ucaacuccaaauucagaag

SEQ ID NO: 1476823 - RNA, 19 nt, Artificial Sequence
  Description of Artificial Sequence: Synthetic oligonucleotide
aaauaagacuugagggccc

SEQ ID NO: 1476824 - RNA, 19 nt, Artificial Sequence
  Description of Artificial Sequence: Synthetic oligonucleotide
cuaacagaaacuccccagg

SEQ ID NO: 1476825 - RNA, 19 nt, Artificial Sequence
  Description of Artificial Sequence: Synthetic oligonucleotide
accagauggccugugaucc

SEQ ID NO: 1476826 - RNA, 19 nt, Artificial Sequence
  Description of Artificial Sequence: Synthetic oligonucleotide
aguagaggccuuuaacauc

SEQ ID NO: 1476827 - RNA, 19 nt, Artificial Sequence
  Description of Artificial Sequence: Synthetic oligonucleotide
uuggguguagauccuaagc

SEQ ID NO: 1476828 - RNA, 19 nt, Artificial Sequence
  Description of Artificial Sequence: Synthetic oligonucleotide
cagcacaagacagagaugc

SEQ ID NO: 1476829 - RNA, 19 nt, Artificial Sequence
  Description of Artificial Sequence: Synthetic oligonucleotide
aggaggaauauccacauau

SEQ ID NO: 1476830 - RNA, 19 nt, Artificial Sequence
  Description of Artificial Sequence: Synthetic oligonucleotide
caagaguucagaguguagg

SEQ ID NO: 1476831 - RNA, 19 nt, Artificial Sequence
  Description of Artificial Sequence: Synthetic oligonucleotide
gauggcaagcuaucuagcc

SEQ ID NO: 1476832 - RNA, 19 nt, Artificial Sequence
  Description of Artificial Sequence: Synthetic oligonucleotide
uccaaauucagaagucaca

SEQ ID NO: 1476833 - RNA, 19 nt, Artificial Sequence
  Description of Artificial Sequence: Synthetic oligonucleotide
uaaaggcccuaacagaaac

SEQ ID NO: 1476834 - RNA, 19 nt, Artificial Sequence
  Description of Artificial Sequence: Synthetic oligonucleotide
uuaacccaagaccccaucc

SEQ ID NO: 1476835 - RNA, 19 nt, Artificial Sequence
  Description of Artificial Sequence: Synthetic oligonucleotide
ucuacagcugucccacugg

SEQ ID NO: 1476836 - RNA, 19 nt, Artificial Sequence
  Description of Artificial Sequence: Synthetic oligonucleotide
ucaaaucccagugauagaa

SEQ ID NO: 1476837 - RNA, 19 nt, Artificial Sequence
  Description of Artificial Sequence: Synthetic oligonucleotide
ugaucuucacaucaggcua

SEQ ID NO: 1476838 - RNA, 19 nt, Artificial Sequence
  Description of Artificial Sequence: Synthetic oligonucleotide
accagagcuacuuucccgg

SEQ ID NO: 1476839 - RNA, 19 nt, Artificial Sequence
  Description of Artificial Sequence: Synthetic oligonucleotide
gucugugagauucagcccc

SEQ ID NO: 1476840 - RNA, 19 nt, Artificial Sequence
  Description of Artificial Sequence: Synthetic oligonucleotide
uucguguucuuuucuuugg

SEQ ID NO: 1476841 - RNA, 19 nt, Artificial Sequence
  Description of Artificial Sequence: Synthetic oligonucleotide
uuucuggcgagacuguucu

SEQ ID NO: 1476842 - RNA, 19 nt, Artificial Sequence
  Description of Artificial Sequence: Synthetic oligonucleotide
ucaacacucaucacacucu

SEQ ID NO: 1476843 - RNA, 19 nt, Artificial Sequence
  Description of Artificial Sequence: Synthetic oligonucleotide
gcugacuucaaucuggagc

SEQ ID NO: 1476844 - RNA, 19 nt, Artificial Sequence
  Description of Artificial Sequence: Synthetic oligonucleotide
gcuaacagccaauaaaggc

SEQ ID NO: 1476845 - RNA, 19 nt, Artificial Sequence
  Description of Artificial Sequence: Synthetic oligonucleotide
cagaauaguagcucugcag

SEQ ID NO: 1476846 - RNA, 19 nt, Artificial Sequence
  Description of Artificial Sequence: Synthetic oligonucleotide
uaacccaagaccccauccc

SEQ ID NO: 1476847 - RNA, 19 nt, Artificial Sequence
  Description of Artificial Sequence: Synthetic oligonucleotide
guaggcaugagggaaggcg

SEQ ID NO: 1476848 - RNA, 19 nt, Artificial Sequence
  Description of Artificial Sequence: Synthetic oligonucleotide
cuguccaauaagcaccugg

SEQ ID NO: 1476849 - RNA, 19 nt, Artificial Sequence
  Description of Artificial Sequence: Synthetic oligonucleotide
gaaggcgccaaacuccugc

SEQ ID NO: 1476850 - RNA, 19 nt, Artificial Sequence
  Description of Artificial Sequence: Synthetic oligonucleotide
aaaguauauaauguauauu

SEQ ID NO: 1476851 - RNA, 19 nt, Artificial Sequence
  Description of Artificial Sequence: Synthetic oligonucleotide
ucugcucuuuggaugaacu

SEQ ID NO: 1476852 - RNA, 19 nt, Artificial Sequence
  Description of Artificial Sequence: Synthetic oligonucleotide
auaaugggaugguugugag

SEQ ID NO: 1476853 - RNA, 19 nt, Artificial Sequence
  Description of Artificial Sequence: Synthetic oligonucleotide
aagacagagaugcccuuca

SEQ ID NO: 1476854 - RNA, 19 nt, Artificial Sequence
  Description of Artificial Sequence: Synthetic oligonucleotide
aguaucagaguagaggccu

SEQ ID NO: 1476855 - RNA, 19 nt, Artificial Sequence
  Description of Artificial Sequence: Synthetic oligonucleotide
cauaagaaugucagauuug

SEQ ID NO: 1476856 - RNA, 19 nt, Artificial Sequence
  Description of Artificial Sequence: Synthetic oligonucleotide
aaagacuguccaauaagca

SEQ ID NO: 1476857 - RNA, 19 nt, Artificial Sequence
  Description of Artificial Sequence: Synthetic oligonucleotide
ugagggcccagaauaguag

SEQ ID NO: 1476858 - RNA, 19 nt, Artificial Sequence
  Description of Artificial Sequence: Synthetic oligonucleotide
uucugcucgaaaguggaag

SEQ ID NO: 1476859 - RNA, 19 nt, Artificial Sequence
  Description of Artificial Sequence: Synthetic oligonucleotide
aggcuaacagccaauaaag

SEQ ID NO: 1476860 - RNA, 19 nt, Artificial Sequence
  Description of Artificial Sequence: Synthetic oligonucleotide
gccuuuaacaucuuucugc

SEQ ID NO: 1476861 - RNA, 19 nt, Artificial Sequence
  Description of Artificial Sequence: Synthetic oligonucleotide
cagauuugagggcagcugc

SEQ ID NO: 1476862 - RNA, 19 nt, Artificial Sequence
  Description of Artificial Sequence: Synthetic oligonucleotide
gaggaauauccacauauaa

SEQ ID NO: 1476863 - RNA, 19 nt, Artificial Sequence
  Description of Artificial Sequence: Synthetic oligonucleotide
uuaagucauuaauaguuuu

SEQ ID NO: 1476864 - RNA, 19 nt, Artificial Sequence
  Description of Artificial Sequence: Synthetic oligonucleotide
uguuugucccuagaagucc

SEQ ID NO: 1476865 - RNA, 19 nt, Artificial Sequence
  Description of Artificial Sequence: Synthetic oligonucleotide
uuguuugucccuagaaguc

SEQ ID NO: 1476866 - RNA, 19 nt, Artificial Sequence
  Description of Artificial Sequence: Synthetic oligonucleotide
agagaugcccuucaacacu

SEQ ID NO: 1476867 - RNA, 19 nt, Artificial Sequence
  Description of Artificial Sequence: Synthetic oligonucleotide
gaagcuccgagucaucuuc

SEQ ID NO: 1476868 - RNA, 19 nt, Artificial Sequence
  Description of Artificial Sequence: Synthetic oligonucleotide
ucucccgaguaucagagua

SEQ ID NO: 1476869 - RNA, 19 nt, Artificial Sequence
  Description of Artificial Sequence: Synthetic oligonucleotide
aagcgaguccauaaaccac

SEQ ID NO: 1476870 - RNA, 19 nt, Artificial Sequence
  Description of Artificial Sequence: Synthetic oligonucleotide
agcacauaaaucaacucca

SEQ ID NO: 1476871 - RNA, 19 nt, Artificial Sequence
  Description of Artificial Sequence: Synthetic oligonucleotide
agggaaggcgccaaacucc

SEQ ID NO: 1476872 - RNA, 19 nt, Artificial Sequence
  Description of Artificial Sequence: Synthetic oligonucleotide
auauccacauauaaaauua

SEQ ID NO: 1476873 - RNA, 19 nt, Artificial Sequence
  Description of Artificial Sequence: Synthetic oligonucleotide
gaggaauagaagccacugc

SEQ ID NO: 1476874 - RNA, 19 nt, Artificial Sequence
  Description of Artificial Sequence: Synthetic oligonucleotide
guuguuugucccuagaagu

SEQ ID NO: 1476875 - RNA, 19 nt, Artificial Sequence
  Description of Artificial Sequence: Synthetic oligonucleotide
gucccuagaagucccacag

SEQ ID NO: 1476876 - RNA, 19 nt, Artificial Sequence
  Description of Artificial Sequence: Synthetic oligonucleotide
ugccccacccuacauaaga

SEQ ID NO: 1476877 - RNA, 19 nt, Artificial Sequence
  Description of Artificial Sequence: Synthetic oligonucleotide
aacugacuuuucuugggaa

SEQ ID NO: 1476878 - RNA, 19 nt, Artificial Sequence
  Description of Artificial Sequence: Synthetic oligonucleotide
aaucuggagcgauggcaag

SEQ ID NO: 1476879 - RNA, 19 nt, Artificial Sequence
  Description of Artificial Sequence: Synthetic oligonucleotide
uuaacaucuuucugcucga

SEQ ID NO: 1476880 - RNA, 19 nt, Artificial Sequence
  Description of Artificial Sequence: Synthetic oligonucleotide
agagcuacuuucccggcug

SEQ ID NO: 1476881 - RNA, 19 nt, Artificial Sequence
  Description of Artificial Sequence: Synthetic oligonucleotide
ucaaagcaccccaugcccu

SEQ ID NO: 1476882 - RNA, 19 nt, Artificial Sequence
  Description of Artificial Sequence: Synthetic oligonucleotide
auuuccucucccgaguauc

SEQ ID NO: 1476883 - RNA, 19 nt, Artificial Sequence
  Description of Artificial Sequence: Synthetic oligonucleotide
ucagauuugagggcagcug

SEQ ID NO: 1476884 - RNA, 19 nt, Artificial Sequence
  Description of Artificial Sequence: Synthetic oligonucleotide
auugcuuccuuggagguga

SEQ ID NO: 1476885 - RNA, 19 nt, Artificial Sequence
  Description of Artificial Sequence: Synthetic oligonucleotide
uacauaagaaugucagauu

SEQ ID NO: 1476886 - RNA, 19 nt, Artificial Sequence
  Description of Artificial Sequence: Synthetic oligonucleotide
ucuuuggaugaacugugua

SEQ ID NO: 1476887 - RNA, 19 nt, Artificial Sequence
  Description of Artificial Sequence: Synthetic oligonucleotide
ggaugaacuguguaaaaca

SEQ ID NO: 1476888 - RNA, 19 nt, Artificial Sequence
  Description of Artificial Sequence: Synthetic oligonucleotide
agcacugaccuugaucuuc

SEQ ID NO: 1476889 - RNA, 19 nt, Artificial Sequence
  Description of Artificial Sequence: Synthetic oligonucleotide
ugugccccacccuacauaa

SEQ ID NO: 1476890 - RNA, 19 nt, Artificial Sequence
  Description of Artificial Sequence: Synthetic oligonucleotide
cccuacauaagaaugucag

SEQ ID NO: 1476891 - RNA, 19 nt, Artificial Sequence
  Description of Artificial Sequence: Synthetic oligonucleotide
aauaagacuugagggccca

SEQ ID NO: 1476892 - RNA, 19 nt, Artificial Sequence
  Description of Artificial Sequence: Synthetic oligonucleotide
cugaaccagagcuacuuuc

SEQ ID NO: 1476893 - RNA, 19 nt, Artificial Sequence
  Description of Artificial Sequence: Synthetic oligonucleotide
acaagagacaccacuugag

SEQ ID NO: 1476894 - RNA, 19 nt, Artificial Sequence
  Description of Artificial Sequence: Synthetic oligonucleotide
auaguagcucugcagcaca

SEQ ID NO: 1476895 - RNA, 19 nt, Artificial Sequence
  Description of Artificial Sequence: Synthetic oligonucleotide
agagacaccacuugagcuu

SEQ ID NO: 1476896 - RNA, 19 nt, Artificial Sequence
  Description of Artificial Sequence: Synthetic oligonucleotide
agauuugagggcagcugcc

SEQ ID NO: 1476897 - RNA, 19 nt, Artificial Sequence
  Description of Artificial Sequence: Synthetic oligonucleotide
uuuccucucccgaguauca

SEQ ID NO: 1476898 - RNA, 19 nt, Artificial Sequence
  Description of Artificial Sequence: Synthetic oligonucleotide
aagcuaucuagccgacucu

SEQ ID NO: 1476899 - RNA, 19 nt, Artificial Sequence
  Description of Artificial Sequence: Synthetic oligonucleotide
ccaauaagcaccugggaac

SEQ ID NO: 1476900 - RNA, 19 nt, Artificial Sequence
  Description of Artificial Sequence: Synthetic oligonucleotide
aggcaggcgaucucugugg

SEQ ID NO: 1476901 - RNA, 19 nt, Artificial Sequence
  Description of Artificial Sequence: Synthetic oligonucleotide
ucgaaaguggaagcgcuug

SEQ ID NO: 1476902 - RNA, 19 nt, Artificial Sequence
  Description of Artificial Sequence: Synthetic oligonucleotide
cagaguagaggccuuuaac

SEQ ID NO: 1476903 - RNA, 19 nt, Artificial Sequence
  Description of Artificial Sequence: Synthetic oligonucleotide
gaaaguggaagcgcuuggc

SEQ ID NO: 1476904 - RNA, 19 nt, Artificial Sequence
  Description of Artificial Sequence: Synthetic oligonucleotide
caaaucccagugauagaag

SEQ ID NO: 1476905 - RNA, 19 nt, Artificial Sequence
  Description of Artificial Sequence: Synthetic oligonucleotide
aauugcuuccuuggaggug

SEQ ID NO: 1476906 - RNA, 19 nt, Artificial Sequence
  Description of Artificial Sequence: Synthetic oligonucleotide
acaccacuugagcuucccc

SEQ ID NO: 1476907 - RNA, 19 nt, Artificial Sequence
  Description of Artificial Sequence: Synthetic oligonucleotide
gccaacaggaggaauaucc

SEQ ID NO: 1476908 - RNA, 19 nt, Artificial Sequence
  Description of Artificial Sequence: Synthetic oligonucleotide
uccucaaagacuguccaau

SEQ ID NO: 1476909 - RNA, 19 nt, Artificial Sequence
  Description of Artificial Sequence: Synthetic oligonucleotide
uggagcgauggcaagcuau

SEQ ID NO: 1476910 - RNA, 19 nt, Artificial Sequence
  Description of Artificial Sequence: Synthetic oligonucleotide
gaacugacuuuucuuggga

SEQ ID NO: 1476911 - RNA, 19 nt, Artificial Sequence
  Description of Artificial Sequence: Synthetic oligonucleotide
gaggccuuuaacaucuuuc

SEQ ID NO: 1476912 - RNA, 19 nt, Artificial Sequence
  Description of Artificial Sequence: Synthetic oligonucleotide
gagggcccagaauaguagc

SEQ ID NO: 1476913 - RNA, 19 nt, Artificial Sequence
  Description of Artificial Sequence: Synthetic oligonucleotide
ucguguucuuuucuuuggu

SEQ ID NO: 1476914 - RNA, 19 nt, Artificial Sequence
  Description of Artificial Sequence: Synthetic oligonucleotide
uugagggcccagaauagua

SEQ ID NO: 1476915 - RNA, 19 nt, Artificial Sequence
  Description of Artificial Sequence: Synthetic oligonucleotide
gacaucaaaucccagugau

SEQ ID NO: 1476916 - RNA, 19 nt, Artificial Sequence
  Description of Artificial Sequence: Synthetic oligonucleotide
cucuaucuaccugggaggg

SEQ ID NO: 1476917 - RNA, 19 nt, Artificial Sequence
  Description of Artificial Sequence: Synthetic oligonucleotide
cuuggguguagauccuaag

SEQ ID NO: 1476918 - RNA, 19 nt, Artificial Sequence
  Description of Artificial Sequence: Synthetic oligonucleotide
gcgauggcaagcuaucuag

SEQ ID NO: 1476919 - RNA, 19 nt, Artificial Sequence
  Description of Artificial Sequence: Synthetic oligonucleotide
aagcuccgagucaucuucc

SEQ ID NO: 1476920 - RNA, 19 nt, Artificial Sequence
  Description of Artificial Sequence: Synthetic oligonucleotide
uccuaagcgaguccauaaa

SEQ ID NO: 1476921 - RNA, 19 nt, Artificial Sequence
  Description of Artificial Sequence: Synthetic oligonucleotide
aaucaacuccaaauucaga

SEQ ID NO: 1476922 - RNA, 19 nt, Artificial Sequence
  Description of Artificial Sequence: Synthetic oligonucleotide
agaccccaucccuaagcac

SEQ ID NO: 1476923 - RNA, 19 nt, Artificial Sequence
  Description of Artificial Sequence: Synthetic oligonucleotide
ugcccucugaagcuccgag

SEQ ID NO: 1476924 - RNA, 19 nt, Artificial Sequence
  Description of Artificial Sequence: Synthetic oligonucleotide
cauaaugggaugguuguga

SEQ ID NO: 1476925 - RNA, 19 nt, Artificial Sequence
  Description of Artificial Sequence: Synthetic oligonucleotide
uccgagucaucuuccucag

SEQ ID NO: 1476926 - RNA, 19 nt, Artificial Sequence
  Description of Artificial Sequence: Synthetic oligonucleotide
cuacagcugucccacuggg

SEQ ID NO: 1476927 - RNA, 19 nt, Artificial Sequence
  Description of Artificial Sequence: Synthetic oligonucleotide
acauuaacccaagacccca

SEQ ID NO: 1476928 - RNA, 19 nt, Artificial Sequence
  Description of Artificial Sequence: Synthetic oligonucleotide
cuuuucuugggaaaugggu

SEQ ID NO: 1476929 - RNA, 19 nt, Artificial Sequence
  Description of Artificial Sequence: Synthetic oligonucleotide
acaucaggcuaacagccaa

SEQ ID NO: 1476930 - RNA, 19 nt, Artificial Sequence
  Description of Artificial Sequence: Synthetic oligonucleotide
caggauucugccucugaac

SEQ ID NO: 1476931 - RNA, 19 nt, Artificial Sequence
  Description of Artificial Sequence: Synthetic oligonucleotide
caaggcaacagugagaagu

SEQ ID NO: 1476932 - RNA, 19 nt, Artificial Sequence
  Description of Artificial Sequence: Synthetic oligonucleotide
acugaccuugaucuucaca

SEQ ID NO: 1476933 - RNA, 19 nt, Artificial Sequence
  Description of Artificial Sequence: Synthetic oligonucleotide
ucaggcuaacagccaauaa

SEQ ID NO: 1476934 - RNA, 19 nt, Artificial Sequence
  Description of Artificial Sequence: Synthetic oligonucleotide
ugacuuuucuugggaaaug

SEQ ID NO: 1476935 - RNA, 19 nt, Artificial Sequence
  Description of Artificial Sequence: Synthetic oligonucleotide
cagaucucauaaugggaug

SEQ ID NO: 1476936 - RNA, 19 nt, Artificial Sequence
  Description of Artificial Sequence: Synthetic oligonucleotide
gguguagauccuaagcgag

SEQ ID NO: 1476937 - RNA, 19 nt, Artificial Sequence
  Description of Artificial Sequence: Synthetic oligonucleotide
uacugugugccccacccua

SEQ ID NO: 1476938 - RNA, 19 nt, Artificial Sequence
  Description of Artificial Sequence: Synthetic oligonucleotide
cuacaucucuaucuaccug

SEQ ID NO: 1476939 - RNA, 19 nt, Artificial Sequence
  Description of Artificial Sequence: Synthetic oligonucleotide
ccuaacagaaacuccccag

SEQ ID NO: 1476940 - RNA, 19 nt, Artificial Sequence
  Description of Artificial Sequence: Synthetic oligonucleotide
cuccgagucaucuuccuca

SEQ ID NO: 1476941 - RNA, 19 nt, Artificial Sequence
  Description of Artificial Sequence: Synthetic oligonucleotide
gaguaucagaguagaggcc

SEQ ID NO: 1476942 - RNA, 19 nt, Artificial Sequence
  Description of Artificial Sequence: Synthetic oligonucleotide
ccgaguaucagaguagagg

SEQ ID NO: 1476943 - RNA, 19 nt, Artificial Sequence
  Description of Artificial Sequence: Synthetic oligonucleotide
gaccccaucccuaagcaca

SEQ ID NO: 1476944 - RNA, 19 nt, Artificial Sequence
  Description of Artificial Sequence: Synthetic oligonucleotide
guagauccuaagcgagucc

SEQ ID NO: 1476945 - RNA, 19 nt, Artificial Sequence
  Description of Artificial Sequence: Synthetic oligonucleotide
ugaggucugugagauucag

SEQ ID NO: 1476946 - RNA, 19 nt, Artificial Sequence
  Description of Artificial Sequence: Synthetic oligonucleotide
auccuaagcgaguccauaa

SEQ ID NO: 1476947 - RNA, 19 nt, Artificial Sequence
  Description of Artificial Sequence: Synthetic oligonucleotide
ucccggcugacuucaaucu

SEQ ID NO: 1476948 - RNA, 19 nt, Artificial Sequence
  Description of Artificial Sequence: Synthetic oligonucleotide
ucauaaugggaugguugug

SEQ ID NO: 1476949 - RNA, 19 nt, Artificial Sequence
  Description of Artificial Sequence: Synthetic oligonucleotide
cuuuuaagucauuaauagu

SEQ ID NO: 1476950 - RNA, 19 nt, Artificial Sequence
  Description of Artificial Sequence: Synthetic oligonucleotide
cuacauaagaaugucagau

SEQ ID NO: 1476951 - RNA, 19 nt, Artificial Sequence
  Description of Artificial Sequence: Synthetic oligonucleotide
aaggcgccaaacuccugca

SEQ ID NO: 1476952 - RNA, 19 nt, Artificial Sequence
  Description of Artificial Sequence: Synthetic oligonucleotide
aaaggcccuaacagaaacu

SEQ ID NO: 1476953 - RNA, 19 nt, Artificial Sequence
  Description of Artificial Sequence: Synthetic oligonucleotide
uucccggcugacuucaauc

SEQ ID NO: 1476954 - RNA, 19 nt, Artificial Sequence
  Description of Artificial Sequence: Synthetic oligonucleotide
uccucagcaccagauggcc

SEQ ID NO: 1476955 - RNA, 19 nt, Artificial Sequence
  Description of Artificial Sequence: Synthetic oligonucleotide
aauaagcaccugggaacug

SEQ ID NO: 1476956 - RNA, 19 nt, Artificial Sequence
  Description of Artificial Sequence: Synthetic oligonucleotide
caccugauuuccucucccg

SEQ ID NO: 1476957 - RNA, 19 nt, Artificial Sequence
  Description of Artificial Sequence: Synthetic oligonucleotide
ccauaaaccaccugauuuc

SEQ ID NO: 1476958 - RNA, 19 nt, Artificial Sequence
  Description of Artificial Sequence: Synthetic oligonucleotide
agugagaaguucaguucuc

SEQ ID NO: 1476959 - RNA, 19 nt, Artificial Sequence
  Description of Artificial Sequence: Synthetic oligonucleotide
uuugucccuagaaguccca

SEQ ID NO: 1476960 - RNA, 19 nt, Artificial Sequence
  Description of Artificial Sequence: Synthetic oligonucleotide
cuaucuaccugggagggca

SEQ ID NO: 1476961 - RNA, 19 nt, Artificial Sequence
  Description of Artificial Sequence: Synthetic oligonucleotide
auaagcaccugggaacuga

SEQ ID NO: 1476962 - RNA, 19 nt, Artificial Sequence
  Description of Artificial Sequence: Synthetic oligonucleotide
acauuucuuuuaaaagaca

SEQ ID NO: 1476963 - RNA, 19 nt, Artificial Sequence
  Description of Artificial Sequence: Synthetic oligonucleotide
ugugauccacuuucuucgu

SEQ ID NO: 1476964 - RNA, 19 nt, Artificial Sequence
  Description of Artificial Sequence: Synthetic oligonucleotide
uuuggucuuggguguagau

SEQ ID NO: 1476965 - RNA, 19 nt, Artificial Sequence
  Description of Artificial Sequence: Synthetic oligonucleotide
aucaaaucccagugauaga

SEQ ID NO: 1476966 - RNA, 19 nt, Artificial Sequence
  Description of Artificial Sequence: Synthetic oligonucleotide
ucuaccugggagggcagcc

SEQ ID NO: 1476967 - RNA, 19 nt, Artificial Sequence
  Description of Artificial Sequence: Synthetic oligonucleotide
cacaagagacaccacuuga

SEQ ID NO: 1476968 - RNA, 19 nt, Artificial Sequence
  Description of Artificial Sequence: Synthetic oligonucleotide
cucuacagcugucccacug

SEQ ID NO: 1476969 - RNA, 19 nt, Artificial Sequence
  Description of Artificial Sequence: Synthetic oligonucleotide
agcacaagacagagaugcc

SEQ ID NO: 1476970 - RNA, 19 nt, Artificial Sequence
  Description of Artificial Sequence: Synthetic oligonucleotide
uccucucccgaguaucaga

SEQ ID NO: 1476971 - RNA, 19 nt, Artificial Sequence
  Description of Artificial Sequence: Synthetic oligonucleotide
gaugaacuguguaaaacau

SEQ ID NO: 1476972 - RNA, 19 nt, Artificial Sequence
  Description of Artificial Sequence: Synthetic oligonucleotide
acaucucuaucuaccuggg

SEQ ID NO: 1476973 - RNA, 19 nt, Artificial Sequence
  Description of Artificial Sequence: Synthetic oligonucleotide
guagaggccuuuaacaucu

SEQ ID NO: 1476974 - RNA, 19 nt, Artificial Sequence
  Description of Artificial Sequence: Synthetic oligonucleotide
cugcaagggagguuccuac

SEQ ID NO: 1476975 - RNA, 19 nt, Artificial Sequence
  Description of Artificial Sequence: Synthetic oligonucleotide
uaucuaccugggagggcag

SEQ ID NO: 1476976 - RNA, 19 nt, Artificial Sequence
  Description of Artificial Sequence: Synthetic oligonucleotide
aggcccuaacagaaacucc

SEQ ID NO: 1476977 - RNA, 19 nt, Artificial Sequence
  Description of Artificial Sequence: Synthetic oligonucleotide
caaucuggagcgauggcaa

SEQ ID NO: 1476978 - RNA, 19 nt, Artificial Sequence
  Description of Artificial Sequence: Synthetic oligonucleotide
ucccgaguaucagaguaga

SEQ ID NO: 1476979 - RNA, 19 nt, Artificial Sequence
  Description of Artificial Sequence: Synthetic oligonucleotide
cuuuaacaucuuucugcuc

SEQ ID NO: 1476980 - RNA, 19 nt, Artificial Sequence
  Description of Artificial Sequence: Synthetic oligonucleotide
ucuggcgagacuguucuuu

SEQ ID NO: 1476981 - RNA, 19 nt, Artificial Sequence
  Description of Artificial Sequence: Synthetic oligonucleotide
ugucagauuugagggcagc

SEQ ID NO: 1476982 - RNA, 19 nt, Artificial Sequence
  Description of Artificial Sequence: Synthetic oligonucleotide
aaggcaacagugagaaguu

SEQ ID NO: 1476983 - RNA, 19 nt, Artificial Sequence
  Description of Artificial Sequence: Synthetic oligonucleotide
gagaugcccuucaacacuc

SEQ ID NO: 1476984 - RNA, 19 nt, Artificial Sequence
  Description of Artificial Sequence: Synthetic oligonucleotide
uacagcugucccacuggga

SEQ ID NO: 1476985 - RNA, 19 nt, Artificial Sequence
  Description of Artificial Sequence: Synthetic oligonucleotide
ccuacugugugccccaccc

SEQ ID NO: 1476986 - RNA, 19 nt, Artificial Sequence
  Description of Artificial Sequence: Synthetic oligonucleotide
aucuucacaucaggcuaac

SEQ ID NO: 1476987 - RNA, 19 nt, Artificial Sequence
  Description of Artificial Sequence: Synthetic oligonucleotide
aggcaugagggaaggcgcc

SEQ ID NO: 1476988 - RNA, 19 nt, Artificial Sequence
  Description of Artificial Sequence: Synthetic oligonucleotide
ggcuaacagccaauaaagg

SEQ ID NO: 1476989 - RNA, 19 nt, Artificial Sequence
  Description of Artificial Sequence: Synthetic oligonucleotide
caccccaugcccucugaag

SEQ ID NO: 1476990 - RNA, 19 nt, Artificial Sequence
  Description of Artificial Sequence: Synthetic oligonucleotide
cccacccuacauaagaaug

SEQ ID NO: 1476991 - RNA, 19 nt, Artificial Sequence
  Description of Artificial Sequence: Synthetic oligonucleotide
caccagauggccugugauc

SEQ ID NO: 1476992 - RNA, 19 nt, Artificial Sequence
  Description of Artificial Sequence: Synthetic oligonucleotide
ggaauagaagccacugcug

SEQ ID NO: 1476993 - RNA, 19 nt, Artificial Sequence
  Description of Artificial Sequence: Synthetic oligonucleotide
ucuaucuaccugggagggc

SEQ ID NO: 1476994 - RNA, 19 nt, Artificial Sequence
  Description of Artificial Sequence: Synthetic oligonucleotide
ggcgccaaacuccugcaag

SEQ ID NO: 1476995 - RNA, 19 nt, Artificial Sequence
  Description of Artificial Sequence: Synthetic oligonucleotide
cacaguuguuugucccuag

SEQ ID NO: 1476996 - RNA, 19 nt, Artificial Sequence
  Description of Artificial Sequence: Synthetic oligonucleotide
acuucaaucuggagcgaug

SEQ ID NO: 1476997 - RNA, 19 nt, Artificial Sequence
  Description of Artificial Sequence: Synthetic oligonucleotide
caaagcaccccaugcccuc

SEQ ID NO: 1476998 - RNA, 19 nt, Artificial Sequence
  Description of Artificial Sequence: Synthetic oligonucleotide
agcgauggcaagcuaucua

SEQ ID NO: 1476999 - RNA, 19 nt, Artificial Sequence
  Description of Artificial Sequence: Synthetic oligonucleotide
ccuaagcgaguccauaaac

SEQ ID NO: 1477000 - RNA, 19 nt, Artificial Sequence
  Description of Artificial Sequence: Synthetic oligonucleotide
acaacacaagagacaccac

SEQ ID NO: 1477001 - RNA, 19 nt, Artificial Sequence
  Description of Artificial Sequence: Synthetic oligonucleotide
ccggcugacuucaaucugg

SEQ ID NO: 1477002 - RNA, 19 nt, Artificial Sequence
  Description of Artificial Sequence: Synthetic oligonucleotide
gcacaagacagagaugccc

SEQ ID NO: 1477003 - RNA, 19 nt, Artificial Sequence
  Description of Artificial Sequence: Synthetic oligonucleotide
ggguguagauccuaagcga

SEQ ID NO: 1477004 - RNA, 19 nt, Artificial Sequence
  Description of Artificial Sequence: Synthetic oligonucleotide
aucuaccugggagggcagc

SEQ ID NO: 1477005 - RNA, 19 nt, Artificial Sequence
  Description of Artificial Sequence: Synthetic oligonucleotide
uucagaagucacaguuguu

SEQ ID NO: 1477006 - RNA, 19 nt, Artificial Sequence
  Description of Artificial Sequence: Synthetic oligonucleotide
gugauccacuuucuucgug

SEQ ID NO: 1477007 - RNA, 19 nt, Artificial Sequence
  Description of Artificial Sequence: Synthetic oligonucleotide
aguucagaguguaggcaug

SEQ ID NO: 1477008 - RNA, 19 nt, Artificial Sequence
  Description of Artificial Sequence: Synthetic oligonucleotide
cacauaaaucaacuccaaa

SEQ ID NO: 1477009 - RNA, 19 nt, Artificial Sequence
  Description of Artificial Sequence: Synthetic oligonucleotide
caggcgaucucugugguga

SEQ ID NO: 1477010 - RNA, 19 nt, Artificial Sequence
  Description of Artificial Sequence: Synthetic oligonucleotide
cacaagacagagaugcccu

SEQ ID NO: 1477011 - RNA, 19 nt, Artificial Sequence
  Description of Artificial Sequence: Synthetic oligonucleotide
caugcccucugaagcuccg

SEQ ID NO: 1477012 - RNA, 19 nt, Artificial Sequence
  Description of Artificial Sequence: Synthetic oligonucleotide
ugaagcuccgagucaucuu

SEQ ID NO: 1477013 - RNA, 19 nt, Artificial Sequence
  Description of Artificial Sequence: Synthetic oligonucleotide
ggucugugagauucagccc

SEQ ID NO: 1477014 - RNA, 19 nt, Artificial Sequence
  Description of Artificial Sequence: Synthetic oligonucleotide
cuggcgagacuguucuuuc

SEQ ID NO: 1477015 - RNA, 19 nt, Artificial Sequence
  Description of Artificial Sequence: Synthetic oligonucleotide
uuccuccucaaagacuguc

SEQ ID NO: 1477016 - RNA, 19 nt, Artificial Sequence
  Description of Artificial Sequence: Synthetic oligonucleotide
ccucucccgaguaucagag

SEQ ID NO: 1477017 - RNA, 19 nt, Artificial Sequence
  Description of Artificial Sequence: Synthetic oligonucleotide
ccuuaaucaaagcacccca

SEQ ID NO: 1477018 - RNA, 19 nt, Artificial Sequence
  Description of Artificial Sequence: Synthetic oligonucleotide
cacccuacauaagaauguc

SEQ ID NO: 1477019 - RNA, 19 nt, Artificial Sequence
  Description of Artificial Sequence: Synthetic oligonucleotide
gcucuuuggaugaacugug

SEQ ID NO: 1477020 - RNA, 19 nt, Artificial Sequence
  Description of Artificial Sequence: Synthetic oligonucleotide
ggccuuuaacaucuuucug

SEQ ID NO: 1477021 - RNA, 19 nt, Artificial Sequence
  Description of Artificial Sequence: Synthetic oligonucleotide
ucacaguuguuugucccua

SEQ ID NO: 1477022 - RNA, 19 nt, Artificial Sequence
  Description of Artificial Sequence: Synthetic oligonucleotide
gacaccacuugagcuuccc

SEQ ID NO: 1477023 - RNA, 19 nt, Artificial Sequence
  Description of Artificial Sequence: Synthetic oligonucleotide
uguaggcaugagggaaggc

SEQ ID NO: 1477024 - RNA, 19 nt, Artificial Sequence
  Description of Artificial Sequence: Synthetic oligonucleotide
agcuacuuucccggcugac

SEQ ID NO: 1477025 - RNA, 19 nt, Artificial Sequence
  Description of Artificial Sequence: Synthetic oligonucleotide
uggcgagacuguucuuucu

SEQ ID NO: 1477026 - RNA, 19 nt, Artificial Sequence
  Description of Artificial Sequence: Synthetic oligonucleotide
ugccucugaaccagagcua

SEQ ID NO: 1477027 - RNA, 19 nt, Artificial Sequence
  Description of Artificial Sequence: Synthetic oligonucleotide
augaacuguguaaaacauu

SEQ ID NO: 1477028 - RNA, 19 nt, Artificial Sequence
  Description of Artificial Sequence: Synthetic oligonucleotide
gcgagacuguucuuucucc

SEQ ID NO: 1477029 - RNA, 19 nt, Artificial Sequence
  Description of Artificial Sequence: Synthetic oligonucleotide
auaaaccaccugauuuccu

SEQ ID NO: 1477030 - RNA, 19 nt, Artificial Sequence
  Description of Artificial Sequence: Synthetic oligonucleotide
agaggccuuuaacaucuuu

SEQ ID NO: 1477031 - RNA, 19 nt, Artificial Sequence
  Description of Artificial Sequence: Synthetic oligonucleotide
auaaaggcccuaacagaaa

SEQ ID NO: 1477032 - RNA, 19 nt, Artificial Sequence
  Description of Artificial Sequence: Synthetic oligonucleotide
gccaaggcaacagugagaa

SEQ ID NO: 1477033 - RNA, 19 nt, Artificial Sequence
  Description of Artificial Sequence: Synthetic oligonucleotide
guucagaguguaggcauga

SEQ ID NO: 1477034 - RNA, 19 nt, Artificial Sequence
  Description of Artificial Sequence: Synthetic oligonucleotide
uuggcucgcuguuucuuuu

SEQ ID NO: 1477035 - RNA, 19 nt, Artificial Sequence
  Description of Artificial Sequence: Synthetic oligonucleotide
agcuccgagucaucuuccu

SEQ ID NO: 1477036 - RNA, 19 nt, Artificial Sequence
  Description of Artificial Sequence: Synthetic oligonucleotide
cacaucaggcuaacagcca

SEQ ID NO: 1477037 - RNA, 19 nt, Artificial Sequence
  Description of Artificial Sequence: Synthetic oligonucleotide
uugucccuagaagucccac

SEQ ID NO: 1477038 - RNA, 19 nt, Artificial Sequence
  Description of Artificial Sequence: Synthetic oligonucleotide
acccuacauaagaauguca

SEQ ID NO: 1477039 - RNA, 19 nt, Artificial Sequence
  Description of Artificial Sequence: Synthetic oligonucleotide
cagauggccugugauccac

SEQ ID NO: 1477040 - RNA, 19 nt, Artificial Sequence
  Description of Artificial Sequence: Synthetic oligonucleotide
gauccuaagcgaguccaua

SEQ ID NO: 1477041 - RNA, 19 nt, Artificial Sequence
  Description of Artificial Sequence: Synthetic oligonucleotide
ggauucugccucugaacca

SEQ ID NO: 1477042 - RNA, 19 nt, Artificial Sequence
  Description of Artificial Sequence: Synthetic oligonucleotide
agccaacaggaggaauauc

SEQ ID NO: 1477043 - RNA, 19 nt, Artificial Sequence
  Description of Artificial Sequence: Synthetic oligonucleotide
agaagccacugcugcuaca

SEQ ID NO: 1477044 - RNA, 19 nt, Artificial Sequence
  Description of Artificial Sequence: Synthetic oligonucleotide
agcuaucuagccgacucuu

SEQ ID NO: 1477045 - RNA, 19 nt, Artificial Sequence
  Description of Artificial Sequence: Synthetic oligonucleotide
ggcgagacuguucuuucuc

SEQ ID NO: 1477046 - RNA, 19 nt, Artificial Sequence
  Description of Artificial Sequence: Synthetic oligonucleotide
agacagagaugcccuucaa

SEQ ID NO: 1477047 - RNA, 19 nt, Artificial Sequence
  Description of Artificial Sequence: Synthetic oligonucleotide
aucucauaaugggaugguu

SEQ ID NO: 1477048 - RNA, 19 nt, Artificial Sequence
  Description of Artificial Sequence: Synthetic oligonucleotide
auaagacuugagggcccag

SEQ ID NO: 1477049 - RNA, 19 nt, Artificial Sequence
  Description of Artificial Sequence: Synthetic oligonucleotide
gucacaguuguuugucccu

SEQ ID NO: 1477050 - RNA, 19 nt, Artificial Sequence
  Description of Artificial Sequence: Synthetic oligonucleotide
gggaaaugggugcuggcaa

SEQ ID NO: 1477051 - RNA, 19 nt, Artificial Sequence
  Description of Artificial Sequence: Synthetic oligonucleotide
ccuagaagucccacagcac

SEQ ID NO: 1477052 - RNA, 19 nt, Artificial Sequence
  Description of Artificial Sequence: Synthetic oligonucleotide
gaagccacugcugcuacau

SEQ ID NO: 1477053 - RNA, 19 nt, Artificial Sequence
  Description of Artificial Sequence: Synthetic oligonucleotide
ugacuucaaucuggagcga

SEQ ID NO: 1477054 - RNA, 19 nt, Artificial Sequence
  Description of Artificial Sequence: Synthetic oligonucleotide
agggcccagaauaguagcu

SEQ ID NO: 1477055 - RNA, 19 nt, Artificial Sequence
  Description of Artificial Sequence: Synthetic oligonucleotide
gcuacaucucuaucuaccu

SEQ ID NO: 1477056 - RNA, 19 nt, Artificial Sequence
  Description of Artificial Sequence: Synthetic oligonucleotide
caauaagcaccugggaacu

SEQ ID NO: 1477057 - RNA, 19 nt, Artificial Sequence
  Description of Artificial Sequence: Synthetic oligonucleotide
gacuguccaauaagcaccu

SEQ ID NO: 1477058 - RNA, 19 nt, Artificial Sequence
  Description of Artificial Sequence: Synthetic oligonucleotide
aagcaccugggaacugacu

SEQ ID NO: 1477059 - RNA, 19 nt, Artificial Sequence
  Description of Artificial Sequence: Synthetic oligonucleotide
caauugcuuccuuggaggu

SEQ ID NO: 1477060 - RNA, 19 nt, Artificial Sequence
  Description of Artificial Sequence: Synthetic oligonucleotide
acaucaaaucccagugaua

SEQ ID NO: 1477061 - RNA, 19 nt, Artificial Sequence
  Description of Artificial Sequence: Synthetic oligonucleotide
ccaacaggaggaauaucca

SEQ ID NO: 1477062 - RNA, 19 nt, Artificial Sequence
  Description of Artificial Sequence: Synthetic oligonucleotide
gccucugaaccagagcuac

SEQ ID NO: 1477063 - RNA, 19 nt, Artificial Sequence
  Description of Artificial Sequence: Synthetic oligonucleotide
gagacuguucuuucuccuu

SEQ ID NO: 1477064 - RNA, 19 nt, Artificial Sequence
  Description of Artificial Sequence: Synthetic oligonucleotide
gcaagaguucagaguguag

SEQ ID NO: 1477065 - RNA, 19 nt, Artificial Sequence
  Description of Artificial Sequence: Synthetic oligonucleotide
cuaucuagccgacucuuuu

SEQ ID NO: 1477066 - RNA, 19 nt, Artificial Sequence
  Description of Artificial Sequence: Synthetic oligonucleotide
aucagaguagaggccuuua

SEQ ID NO: 1477067 - RNA, 19 nt, Artificial Sequence
  Description of Artificial Sequence: Synthetic oligonucleotide
acagccaauaaaggcccua

SEQ ID NO: 1477068 - RNA, 19 nt, Artificial Sequence
  Description of Artificial Sequence: Synthetic oligonucleotide
gaugcccuucaacacucau

SEQ ID NO: 1477069 - RNA, 19 nt, Artificial Sequence
  Description of Artificial Sequence: Synthetic oligonucleotide
cuccucaaagacuguccaa

SEQ ID NO: 1477070 - RNA, 19 nt, Artificial Sequence
  Description of Artificial Sequence: Synthetic oligonucleotide
caucucuaucuaccuggga

SEQ ID NO: 1477071 - RNA, 19 nt, Artificial Sequence
  Description of Artificial Sequence: Synthetic oligonucleotide
ccccggagccaacaggagg

SEQ ID NO: 1477072 - RNA, 19 nt, Artificial Sequence
  Description of Artificial Sequence: Synthetic oligonucleotide
ggaagcgcuuggcucgcug

SEQ ID NO: 1477073 - RNA, 19 nt, Artificial Sequence
  Description of Artificial Sequence: Synthetic oligonucleotide
caagggagguuccuacugu

SEQ ID NO: 1477074 - RNA, 19 nt, Artificial Sequence
  Description of Artificial Sequence: Synthetic oligonucleotide
ggagcgauggcaagcuauc

SEQ ID NO: 1477075 - RNA, 19 nt, Artificial Sequence
  Description of Artificial Sequence: Synthetic oligonucleotide
cccggagccaacaggagga

SEQ ID NO: 1477076 - RNA, 19 nt, Artificial Sequence
  Description of Artificial Sequence: Synthetic oligonucleotide
gacuucaaucuggagcgau

SEQ ID NO: 1477077 - RNA, 19 nt, Artificial Sequence
  Description of Artificial Sequence: Synthetic oligonucleotide
cagcugucccacugggaca

SEQ ID NO: 1477078 - RNA, 19 nt, Artificial Sequence
  Description of Artificial Sequence: Synthetic oligonucleotide
agauccuaagcgaguccau

SEQ ID NO: 1477079 - RNA, 19 nt, Artificial Sequence
  Description of Artificial Sequence: Synthetic oligonucleotide
cgauggcaagcuaucuagc

SEQ ID NO: 1477080 - RNA, 19 nt, Artificial Sequence
  Description of Artificial Sequence: Synthetic oligonucleotide
accugggaacugacuuuuc

SEQ ID NO: 1477081 - RNA, 19 nt, Artificial Sequence
  Description of Artificial Sequence: Synthetic oligonucleotide
ccaugcccucugaagcucc

SEQ ID NO: 1477082 - RNA, 19 nt, Artificial Sequence
  Description of Artificial Sequence: Synthetic oligonucleotide
ggaggaauauccacauaua

SEQ ID NO: 1477083 - RNA, 19 nt, Artificial Sequence
  Description of Artificial Sequence: Synthetic oligonucleotide
cacugaccuugaucuucac

SEQ ID NO: 1477084 - RNA, 19 nt, Artificial Sequence
  Description of Artificial Sequence: Synthetic oligonucleotide
ccagagcuacuuucccggc

SEQ ID NO: 1477085 - RNA, 19 nt, Artificial Sequence
  Description of Artificial Sequence: Synthetic oligonucleotide
gagccaacaggaggaauau

SEQ ID NO: 1477086 - RNA, 19 nt, Artificial Sequence
  Description of Artificial Sequence: Synthetic oligonucleotide
aggcgccaaacuccugcaa

SEQ ID NO: 1477087 - RNA, 19 nt, Artificial Sequence
  Description of Artificial Sequence: Synthetic oligonucleotide
guggaagcgcuuggcucgc

SEQ ID NO: 1477088 - RNA, 19 nt, Artificial Sequence
  Description of Artificial Sequence: Synthetic oligonucleotide
cccgaguaucagaguagag

SEQ ID NO: 1477089 - RNA, 19 nt, Artificial Sequence
  Description of Artificial Sequence: Synthetic oligonucleotide
caggugaggucugugagau

SEQ ID NO: 1477090 - RNA, 19 nt, Artificial Sequence
  Description of Artificial Sequence: Synthetic oligonucleotide
cugugugccccacccuaca

SEQ ID NO: 1477091 - RNA, 19 nt, Artificial Sequence
  Description of Artificial Sequence: Synthetic oligonucleotide
cugaagcuccgagucaucu

SEQ ID NO: 1477092 - RNA, 19 nt, Artificial Sequence
  Description of Artificial Sequence: Synthetic oligonucleotide
guguagauccuaagcgagu

SEQ ID NO: 1477093 - RNA, 19 nt, Artificial Sequence
  Description of Artificial Sequence: Synthetic oligonucleotide
caugagggaaggcgccaaa

SEQ ID NO: 1477094 - RNA, 19 nt, Artificial Sequence
  Description of Artificial Sequence: Synthetic oligonucleotide
cauuaacccaagaccccau

SEQ ID NO: 1477095 - RNA, 19 nt, Artificial Sequence
  Description of Artificial Sequence: Synthetic oligonucleotide
cucugaagcuccgagucau

SEQ ID NO: 1477096 - RNA, 19 nt, Artificial Sequence
  Description of Artificial Sequence: Synthetic oligonucleotide
gggcccagaauaguagcuc

SEQ ID NO: 1477097 - RNA, 19 nt, Artificial Sequence
  Description of Artificial Sequence: Synthetic oligonucleotide
aggcgaucucuguggugau

SEQ ID NO: 1477098 - RNA, 19 nt, Artificial Sequence
  Description of Artificial Sequence: Synthetic oligonucleotide
gaaacuccccagggaggaa

SEQ ID NO: 1477099 - RNA, 19 nt, Artificial Sequence
  Description of Artificial Sequence: Synthetic oligonucleotide
gcacauaaaucaacuccaa

SEQ ID NO: 1477100 - RNA, 19 nt, Artificial Sequence
  Description of Artificial Sequence: Synthetic oligonucleotide
ggccaggacagucaggauu

SEQ ID NO: 1477101 - RNA, 19 nt, Artificial Sequence
  Description of Artificial Sequence: Synthetic oligonucleotide
uucuggcgagacuguucuu

SEQ ID NO: 1477102 - RNA, 19 nt, Artificial Sequence
  Description of Artificial Sequence: Synthetic oligonucleotide
gcaggcgaucucuguggug

SEQ ID NO: 1477103 - RNA, 19 nt, Artificial Sequence
  Description of Artificial Sequence: Synthetic oligonucleotide
gcacugaccuugaucuuca

SEQ ID NO: 1477104 - RNA, 19 nt, Artificial Sequence
  Description of Artificial Sequence: Synthetic oligonucleotide
gcagcacaagacagagaug

SEQ ID NO: 1477105 - RNA, 19 nt, Artificial Sequence
  Description of Artificial Sequence: Synthetic oligonucleotide
ccacccuacauaagaaugu

SEQ ID NO: 1477106 - RNA, 19 nt, Artificial Sequence
  Description of Artificial Sequence: Synthetic oligonucleotide
accccaucccuaagcacau

SEQ ID NO: 1477107 - RNA, 19 nt, Artificial Sequence
  Description of Artificial Sequence: Synthetic oligonucleotide
agaugcccuucaacacuca

SEQ ID NO: 1477108 - RNA, 19 nt, Artificial Sequence
  Description of Artificial Sequence: Synthetic oligonucleotide
cuuggcucgcuguuucuuu

SEQ ID NO: 1477109 - RNA, 19 nt, Artificial Sequence
  Description of Artificial Sequence: Synthetic oligonucleotide
gagcgauggcaagcuaucu

SEQ ID NO: 1477110 - RNA, 19 nt, Artificial Sequence
  Description of Artificial Sequence: Synthetic oligonucleotide
cccaucccuaagcacauaa

SEQ ID NO: 1477111 - RNA, 19 nt, Artificial Sequence
  Description of Artificial Sequence: Synthetic oligonucleotide
cccuaacagaaacucccca

SEQ ID NO: 1477112 - RNA, 19 nt, Artificial Sequence
  Description of Artificial Sequence: Synthetic oligonucleotide
agcgcuuggcucgcuguuu

SEQ ID NO: 1477113 - RNA, 19 nt, Artificial Sequence
  Description of Artificial Sequence: Synthetic oligonucleotide
caacagugagaaguucagu

SEQ ID NO: 1477114 - RNA, 19 nt, Artificial Sequence
  Description of Artificial Sequence: Synthetic oligonucleotide
caucaggcuaacagccaau

SEQ ID NO: 1477115 - RNA, 19 nt, Artificial Sequence
  Description of Artificial Sequence: Synthetic oligonucleotide
cccggcugacuucaaucug

SEQ ID NO: 1477116 - RNA, 19 nt, Artificial Sequence
  Description of Artificial Sequence: Synthetic oligonucleotide
ggccaaggcaacagugaga

SEQ ID NO: 1477117 - RNA, 19 nt, Artificial Sequence
  Description of Artificial Sequence: Synthetic oligonucleotide
gcgcuuggcucgcuguuuc

SEQ ID NO: 1477118 - RNA, 19 nt, Artificial Sequence
  Description of Artificial Sequence: Synthetic oligonucleotide
gcucgaaaguggaagcgcu

SEQ ID NO: 1477119 - RNA, 19 nt, Artificial Sequence
  Description of Artificial Sequence: Synthetic oligonucleotide
ccaaggcaacagugagaag

SEQ ID NO: 1477120 - RNA, 19 nt, Artificial Sequence
  Description of Artificial Sequence: Synthetic oligonucleotide
ggcaagcuaucuagccgac

SEQ ID NO: 1477121 - RNA, 19 nt, Artificial Sequence
  Description of Artificial Sequence: Synthetic oligonucleotide
gugccccacccuacauaag

SEQ ID NO: 1477122 - RNA, 19 nt, Artificial Sequence
  Description of Artificial Sequence: Synthetic oligonucleotide
cucgaaaguggaagcgcuu

SEQ ID NO: 1477123 - RNA, 19 nt, Artificial Sequence
  Description of Artificial Sequence: Synthetic oligonucleotide
cccaagaccccaucccuaa

SEQ ID NO: 1477124 - RNA, 19 nt, Artificial Sequence
  Description of Artificial Sequence: Synthetic oligonucleotide
ggcaugagggaaggcgcca

SEQ ID NO: 1477125 - RNA, 19 nt, Artificial Sequence
  Description of Artificial Sequence: Synthetic oligonucleotide
accugggagggcagccaca

SEQ ID NO: 1477126 - RNA, 19 nt, Artificial Sequence
  Description of Artificial Sequence: Synthetic oligonucleotide
uggaagcgcuuggcucgcu

SEQ ID NO: 1477127 - RNA, 19 nt, Artificial Sequence
  Description of Artificial Sequence: Synthetic oligonucleotide
cuacugugugccccacccu

SEQ ID NO: 1477128 - RNA, 19 nt, Artificial Sequence
  Description of Artificial Sequence: Synthetic oligonucleotide
ccgagucaucuuccucagc

SEQ ID NO: 1477129 - RNA, 19 nt, Artificial Sequence
  Description of Artificial Sequence: Synthetic oligonucleotide
cagcaccagauggccugug

SEQ ID NO: 1477130 - RNA, 19 nt, Artificial Sequence
  Description of Artificial Sequence: Synthetic oligonucleotide
cucucccgaguaucagagu

SEQ ID NO: 1477131 - RNA, 19 nt, Artificial Sequence
  Description of Artificial Sequence: Synthetic oligonucleotide
cuuucccggcugacuucaa

SEQ ID NO: 1477132 - RNA, 19 nt, Artificial Sequence
  Description of Artificial Sequence: Synthetic oligonucleotide
guaucagaguagaggccuu

SEQ ID NO: 1477133 - RNA, 19 nt, Artificial Sequence
  Description of Artificial Sequence: Synthetic oligonucleotide
ggaaggcgccaaacuccug

SEQ ID NO: 1477134 - RNA, 19 nt, Artificial Sequence
  Description of Artificial Sequence: Synthetic oligonucleotide
ggcaggcgaucucuguggu

SEQ ID NO: 1477135 - RNA, 19 nt, Artificial Sequence
  Description of Artificial Sequence: Synthetic oligonucleotide
caugugguugcugggcguu

SEQ ID NO: 1477136 - RNA, 19 nt, Artificial Sequence
  Description of Artificial Sequence: Synthetic oligonucleotide
cuggagcgauggcaagcua

SEQ ID NO: 1477137 - RNA, 19 nt, Artificial Sequence
  Description of Artificial Sequence: Synthetic oligonucleotide
gcaccccaugcccucugaa

SEQ ID NO: 1477138 - RNA, 19 nt, Artificial Sequence
  Description of Artificial Sequence: Synthetic oligonucleotide
cuguggugaugcacgccuu

SEQ ID NO: 1477139 - RNA, 19 nt, Artificial Sequence
  Description of Artificial Sequence: Synthetic oligonucleotide
ccccaugcccucugaagcu

SEQ ID NO: 1477140 - RNA, 19 nt, Artificial Sequence
  Description of Artificial Sequence: Synthetic oligonucleotide
cagcacugaccuugaucuu

SEQ ID NO: 1477141 - RNA, 19 nt, Artificial Sequence
  Description of Artificial Sequence: Synthetic oligonucleotide
ccccacccuacauaagaau

SEQ ID NO: 1477142 - RNA, 19 nt, Artificial Sequence
  Description of Artificial Sequence: Synthetic oligonucleotide
ccucugaaccagagcuacu

SEQ ID NO: 1477143 - RNA, 19 nt, Artificial Sequence
  Description of Artificial Sequence: Synthetic oligonucleotide
gucccacagcacugaccuu

SEQ ID NO: 1477144 - RNA, 19 nt, Artificial Sequence
  Description of Artificial Sequence: Synthetic oligonucleotide
ccccaucccuaagcacaua

SEQ ID NO: 1477145 - RNA, 19 nt, Artificial Sequence
  Description of Artificial Sequence: Synthetic oligonucleotide
aagaguucaacucuaaaug

SEQ ID NO: 1477146 - RNA, 19 nt, Artificial Sequence
  Description of Artificial Sequence: Synthetic oligonucleotide
aauuaaaacagcuggacua

SEQ ID NO: 1477147 - RNA, 19 nt, Artificial Sequence
  Description of Artificial Sequence: Synthetic oligonucleotide
uauaugaucauaucugcag

SEQ ID NO: 1477148 - RNA, 19 nt, Artificial Sequence
  Description of Artificial Sequence: Synthetic oligonucleotide
uaaagaaccucacagugcc

SEQ ID NO: 1477149 - RNA, 19 nt, Artificial Sequence
  Description of Artificial Sequence: Synthetic oligonucleotide
gauaaaaucccaaagccgc

SEQ ID NO: 1477150 - RNA, 19 nt, Artificial Sequence
  Description of Artificial Sequence: Synthetic oligonucleotide
uuuauucugaucuucuacc

SEQ ID NO: 1477151 - RNA, 19 nt, Artificial Sequence
  Description of Artificial Sequence: Synthetic oligonucleotide
ugaucuucuacccaguaca

SEQ ID NO: 1477152 - RNA, 19 nt, Artificial Sequence
  Description of Artificial Sequence: Synthetic oligonucleotide
uuuucaaacugcuuggcgc

SEQ ID NO: 1477153 - RNA, 19 nt, Artificial Sequence
  Description of Artificial Sequence: Synthetic oligonucleotide
uguugcuuaaggaagaaaa

SEQ ID NO: 1477154 - RNA, 19 nt, Artificial Sequence
  Description of Artificial Sequence: Synthetic oligonucleotide
caaaccuccucucagaugc

SEQ ID NO: 1477155 - RNA, 19 nt, Artificial Sequence
  Description of Artificial Sequence: Synthetic oligonucleotide
cuuggaauuacaaacucug

SEQ ID NO: 1477156 - RNA, 19 nt, Artificial Sequence
  Description of Artificial Sequence: Synthetic oligonucleotide
ucgguucucgauaaaaucc

SEQ ID NO: 1477157 - RNA, 19 nt, Artificial Sequence
  Description of Artificial Sequence: Synthetic oligonucleotide
aaaugaaggugucagcacu

SEQ ID NO: 1477158 - RNA, 19 nt, Artificial Sequence
  Description of Artificial Sequence: Synthetic oligonucleotide
ucucgauaaaaucccaaag

SEQ ID NO: 1477159 - RNA, 19 nt, Artificial Sequence
  Description of Artificial Sequence: Synthetic oligonucleotide
uuaaagaaccucacagugc

SEQ ID NO: 1477160 - RNA, 19 nt, Artificial Sequence
  Description of Artificial Sequence: Synthetic oligonucleotide
cucgauaaaaucccaaagc

SEQ ID NO: 1477161 - RNA, 19 nt, Artificial Sequence
  Description of Artificial Sequence: Synthetic oligonucleotide
uguagagcccuaaaugaag

SEQ ID NO: 1477162 - RNA, 19 nt, Artificial Sequence
  Description of Artificial Sequence: Synthetic oligonucleotide
uaagaguucaacucuaaau

SEQ ID NO: 1477163 - RNA, 19 nt, Artificial Sequence
  Description of Artificial Sequence: Synthetic oligonucleotide
uccagaaaggugcaugaag

SEQ ID NO: 1477164 - RNA, 19 nt, Artificial Sequence
  Description of Artificial Sequence: Synthetic oligonucleotide
aaacucugauaucacacga

SEQ ID NO: 1477165 - RNA, 19 nt, Artificial Sequence
  Description of Artificial Sequence: Synthetic oligonucleotide
gacuguagagcccuaaaug

SEQ ID NO: 1477166 - RNA, 19 nt, Artificial Sequence
  Description of Artificial Sequence: Synthetic oligonucleotide
agcguaggggcauaauugc

SEQ ID NO: 1477167 - RNA, 19 nt, Artificial Sequence
  Description of Artificial Sequence: Synthetic oligonucleotide
agugauuccauggacuugg

SEQ ID NO: 1477168 - RNA, 19 nt, Artificial Sequence
  Description of Artificial Sequence: Synthetic oligonucleotide
uuauaugaucauaucugca

SEQ ID NO: 1477169 - RNA, 19 nt, Artificial Sequence
  Description of Artificial Sequence: Synthetic oligonucleotide
ucuaccaugccaccuuggg

SEQ ID NO: 1477170 - RNA, 19 nt, Artificial Sequence
  Description of Artificial Sequence: Synthetic oligonucleotide
ucacacgacacucuggaca

SEQ ID NO: 1477171 - RNA, 19 nt, Artificial Sequence
  Description of Artificial Sequence: Synthetic oligonucleotide
uuauucugaucuucuaccc

SEQ ID NO: 1477172 - RNA, 19 nt, Artificial Sequence
  Description of Artificial Sequence: Synthetic oligonucleotide
uuuaugaucggguuuucaa

SEQ ID NO: 1477173 - RNA, 19 nt, Artificial Sequence
  Description of Artificial Sequence: Synthetic oligonucleotide
caaucaauuaaaacagcug

SEQ ID NO: 1477174 - RNA, 19 nt, Artificial Sequence
  Description of Artificial Sequence: Synthetic oligonucleotide
uggaauuacaaacucugau

SEQ ID NO: 1477175 - RNA, 19 nt, Artificial Sequence
  Description of Artificial Sequence: Synthetic oligonucleotide
cauaauugcugcucguugc

SEQ ID NO: 1477176 - RNA, 19 nt, Artificial Sequence
  Description of Artificial Sequence: Synthetic oligonucleotide
cuguuugaaagcuucaauc

SEQ ID NO: 1477177 - RNA, 19 nt, Artificial Sequence
  Description of Artificial Sequence: Synthetic oligonucleotide
guaagcauggcgguaaagg

SEQ ID NO: 1477178 - RNA, 19 nt, Artificial Sequence
  Description of Artificial Sequence: Synthetic oligonucleotide
ucuaaauguagugauucca

SEQ ID NO: 1477179 - RNA, 19 nt, Artificial Sequence
  Description of Artificial Sequence: Synthetic oligonucleotide
ucaacucuaaauguaguga

SEQ ID NO: 1477180 - RNA, 19 nt, Artificial Sequence
  Description of Artificial Sequence: Synthetic oligonucleotide
aguauuugcagauggugga

SEQ ID NO: 1477181 - RNA, 19 nt, Artificial Sequence
  Description of Artificial Sequence: Synthetic oligonucleotide
gacuugguuaucuaccaug

SEQ ID NO: 1477182 - RNA, 19 nt, Artificial Sequence
  Description of Artificial Sequence: Synthetic oligonucleotide
acuugguuaucuaccaugc

SEQ ID NO: 1477183 - RNA, 19 nt, Artificial Sequence
  Description of Artificial Sequence: Synthetic oligonucleotide
agaguucaacucuaaaugu

SEQ ID NO: 1477184 - RNA, 19 nt, Artificial Sequence
  Description of Artificial Sequence: Synthetic oligonucleotide
ugguuaucuaccaugccac

SEQ ID NO: 1477185 - RNA, 19 nt, Artificial Sequence
  Description of Artificial Sequence: Synthetic oligonucleotide
ucuaggguucugaugauuc

SEQ ID NO: 1477186 - RNA, 19 nt, Artificial Sequence
  Description of Artificial Sequence: Synthetic oligonucleotide
cacaucaacaucauccgug

SEQ ID NO: 1477187 - RNA, 19 nt, Artificial Sequence
  Description of Artificial Sequence: Synthetic oligonucleotide
aaugccaaaccuccucuca

SEQ ID NO: 1477188 - RNA, 19 nt, Artificial Sequence
  Description of Artificial Sequence: Synthetic oligonucleotide
uuucaaacugcuuggcgca

SEQ ID NO: 1477189 - RNA, 19 nt, Artificial Sequence
  Description of Artificial Sequence: Synthetic oligonucleotide
cuacccaguacacacuugg

SEQ ID NO: 1477190 - RNA, 19 nt, Artificial Sequence
  Description of Artificial Sequence: Synthetic oligonucleotide
caucacugcagcuacccgg

SEQ ID NO: 1477191 - RNA, 19 nt, Artificial Sequence
  Description of Artificial Sequence: Synthetic oligonucleotide
aagacuuuaugaucggguu

SEQ ID NO: 1477192 - RNA, 19 nt, Artificial Sequence
  Description of Artificial Sequence: Synthetic oligonucleotide
ugcucaaaguauuuacaug

SEQ ID NO: 1477193 - RNA, 19 nt, Artificial Sequence
  Description of Artificial Sequence: Synthetic oligonucleotide
auaucugcagcgcgcaccg

SEQ ID NO: 1477194 - RNA, 19 nt, Artificial Sequence
  Description of Artificial Sequence: Synthetic oligonucleotide
auggacuugguuaucuacc

SEQ ID NO: 1477195 - RNA, 19 nt, Artificial Sequence
  Description of Artificial Sequence: Synthetic oligonucleotide
uggagagaaugccaaaccu

SEQ ID NO: 1477196 - RNA, 19 nt, Artificial Sequence
  Description of Artificial Sequence: Synthetic oligonucleotide
ugaucggguuuucaaacug

SEQ ID NO: 1477197 - RNA, 19 nt, Artificial Sequence
  Description of Artificial Sequence: Synthetic oligonucleotide
uggacuacauagcugguuc

SEQ ID NO: 1477198 - RNA, 19 nt, Artificial Sequence
  Description of Artificial Sequence: Synthetic oligonucleotide
gagguugugacuguagagc

SEQ ID NO: 1477199 - RNA, 19 nt, Artificial Sequence
  Description of Artificial Sequence: Synthetic oligonucleotide
ugcaccuaagaguucaacu

SEQ ID NO: 1477200 - RNA, 19 nt, Artificial Sequence
  Description of Artificial Sequence: Synthetic oligonucleotide
ugaugauucuacuccagaa

SEQ ID NO: 1477201 - RNA, 19 nt, Artificial Sequence
  Description of Artificial Sequence: Synthetic oligonucleotide
uggcgcaucuccauuggcg

SEQ ID NO: 1477202 - RNA, 19 nt, Artificial Sequence
  Description of Artificial Sequence: Synthetic oligonucleotide
cugguucccaguaacgggg

SEQ ID NO: 1477203 - RNA, 19 nt, Artificial Sequence
  Description of Artificial Sequence: Synthetic oligonucleotide
gagauuucggucucuuagc

SEQ ID NO: 1477204 - RNA, 19 nt, Artificial Sequence
  Description of Artificial Sequence: Synthetic oligonucleotide
uuaugaucggguuuucaaa

SEQ ID NO: 1477205 - RNA, 19 nt, Artificial Sequence
  Description of Artificial Sequence: Synthetic oligonucleotide
acuagagacggucacugca

SEQ ID NO: 1477206 - RNA, 19 nt, Artificial Sequence
  Description of Artificial Sequence: Synthetic oligonucleotide
uaaaugaaggugucagcac

SEQ ID NO: 1477207 - RNA, 19 nt, Artificial Sequence
  Description of Artificial Sequence: Synthetic oligonucleotide
uggaggugcaccuaagagu

SEQ ID NO: 1477208 - RNA, 19 nt, Artificial Sequence
  Description of Artificial Sequence: Synthetic oligonucleotide
ggcacuugcuuccaaaggg

SEQ ID NO: 1477209 - RNA, 19 nt, Artificial Sequence
  Description of Artificial Sequence: Synthetic oligonucleotide
acucugauaucacacgaca

SEQ ID NO: 1477210 - RNA, 19 nt, Artificial Sequence
  Description of Artificial Sequence: Synthetic oligonucleotide
aaaaucccaaagccgcacu

SEQ ID NO: 1477211 - RNA, 19 nt, Artificial Sequence
  Description of Artificial Sequence: Synthetic oligonucleotide
ugugcuugggacacucuug

SEQ ID NO: 1477212 - RNA, 19 nt, Artificial Sequence
  Description of Artificial Sequence: Synthetic oligonucleotide
agugccuucagaacucagc

SEQ ID NO: 1477213 - RNA, 19 nt, Artificial Sequence
  Description of Artificial Sequence: Synthetic oligonucleotide
uuggaauuacaaacucuga

SEQ ID NO: 1477214 - RNA, 19 nt, Artificial Sequence
  Description of Artificial Sequence: Synthetic oligonucleotide
uucucgauaaaaucccaaa

SEQ ID NO: 1477215 - RNA, 19 nt, Artificial Sequence
  Description of Artificial Sequence: Synthetic oligonucleotide
guugcuuaaggaagaaaag

SEQ ID NO: 1477216 - RNA, 19 nt, Artificial Sequence
  Description of Artificial Sequence: Synthetic oligonucleotide
cuaaaugaaggugucagca

SEQ ID NO: 1477217 - RNA, 19 nt, Artificial Sequence
  Description of Artificial Sequence: Synthetic oligonucleotide
cucguugcugcuauaggag

SEQ ID NO: 1477218 - RNA, 19 nt, Artificial Sequence
  Description of Artificial Sequence: Synthetic oligonucleotide
cuagagacggucacugcag

SEQ ID NO: 1477219 - RNA, 19 nt, Artificial Sequence
  Description of Artificial Sequence: Synthetic oligonucleotide
ugcuuuguaagcagcucca

SEQ ID NO: 1477220 - RNA, 19 nt, Artificial Sequence
  Description of Artificial Sequence: Synthetic oligonucleotide
uggacuugguuaucuacca

SEQ ID NO: 1477221 - RNA, 19 nt, Artificial Sequence
  Description of Artificial Sequence: Synthetic oligonucleotide
ugauaucacacgacacucu

SEQ ID NO: 1477222 - RNA, 19 nt, Artificial Sequence
  Description of Artificial Sequence: Synthetic oligonucleotide
agcauggcgguaaaggcac

SEQ ID NO: 1477223 - RNA, 19 nt, Artificial Sequence
  Description of Artificial Sequence: Synthetic oligonucleotide
agaagguugagggcugggc

SEQ ID NO: 1477224 - RNA, 19 nt, Artificial Sequence
  Description of Artificial Sequence: Synthetic oligonucleotide
agaaugccaaaccuccucu

SEQ ID NO: 1477225 - RNA, 19 nt, Artificial Sequence
  Description of Artificial Sequence: Synthetic oligonucleotide
agugacagaggccucggca

SEQ ID NO: 1477226 - RNA, 19 nt, Artificial Sequence
  Description of Artificial Sequence: Synthetic oligonucleotide
agauuucggucucuuagca

SEQ ID NO: 1477227 - RNA, 19 nt, Artificial Sequence
  Description of Artificial Sequence: Synthetic oligonucleotide
auggcaucuagguaggaau

SEQ ID NO: 1477228 - RNA, 19 nt, Artificial Sequence
  Description of Artificial Sequence: Synthetic oligonucleotide
auaauugcugcucguugcu

SEQ ID NO: 1477229 - RNA, 19 nt, Artificial Sequence
  Description of Artificial Sequence: Synthetic oligonucleotide
ugcucguugcugcuauagg

SEQ ID NO: 1477230 - RNA, 19 nt, Artificial Sequence
  Description of Artificial Sequence: Synthetic oligonucleotide
uuaucuaccaugccaccuu

SEQ ID NO: 1477231 - RNA, 19 nt, Artificial Sequence
  Description of Artificial Sequence: Synthetic oligonucleotide
guaggggcauaauugcugc

SEQ ID NO: 1477232 - RNA, 19 nt, Artificial Sequence
  Description of Artificial Sequence: Synthetic oligonucleotide
uggcaucuagguaggaaug

SEQ ID NO: 1477233 - RNA, 19 nt, Artificial Sequence
  Description of Artificial Sequence: Synthetic oligonucleotide
cagcguaggggcauaauug

SEQ ID NO: 1477234 - RNA, 19 nt, Artificial Sequence
  Description of Artificial Sequence: Synthetic oligonucleotide
guuuacuguugcuuaagga

SEQ ID NO: 1477235 - RNA, 19 nt, Artificial Sequence
  Description of Artificial Sequence: Synthetic oligonucleotide
gaucauaucugcagcgcgc

SEQ ID NO: 1477236 - RNA, 19 nt, Artificial Sequence
  Description of Artificial Sequence: Synthetic oligonucleotide
ugacuguagagcccuaaau

SEQ ID NO: 1477237 - RNA, 19 nt, Artificial Sequence
  Description of Artificial Sequence: Synthetic oligonucleotide
cuggaggugcaccuaagag

SEQ ID NO: 1477238 - RNA, 19 nt, Artificial Sequence
  Description of Artificial Sequence: Synthetic oligonucleotide
cucgguucucgauaaaauc

SEQ ID NO: 1477239 - RNA, 19 nt, Artificial Sequence
  Description of Artificial Sequence: Synthetic oligonucleotide
uccauccggguaagcaugg

SEQ ID NO: 1477240 - RNA, 19 nt, Artificial Sequence
  Description of Artificial Sequence: Synthetic oligonucleotide
uaucuaccaugccaccuug

SEQ ID NO: 1477241 - RNA, 19 nt, Artificial Sequence
  Description of Artificial Sequence: Synthetic oligonucleotide
agcuacccggguuauucac

SEQ ID NO: 1477242 - RNA, 19 nt, Artificial Sequence
  Description of Artificial Sequence: Synthetic oligonucleotide
ucguugcugcuauaggagc

SEQ ID NO: 1477243 - RNA, 19 nt, Artificial Sequence
  Description of Artificial Sequence: Synthetic oligonucleotide
uccauuggcggaugcagga

SEQ ID NO: 1477244 - RNA, 19 nt, Artificial Sequence
  Description of Artificial Sequence: Synthetic oligonucleotide
cuacauagcugguucccag

SEQ ID NO: 1477245 - RNA, 19 nt, Artificial Sequence
  Description of Artificial Sequence: Synthetic oligonucleotide
accguaggcacaguacccc

SEQ ID NO: 1477246 - RNA, 19 nt, Artificial Sequence
  Description of Artificial Sequence: Synthetic oligonucleotide
gagaaugccaaaccuccuc

SEQ ID NO: 1477247 - RNA, 19 nt, Artificial Sequence
  Description of Artificial Sequence: Synthetic oligonucleotide
aguacacacuuggaauuac

SEQ ID NO: 1477248 - RNA, 19 nt, Artificial Sequence
  Description of Artificial Sequence: Synthetic oligonucleotide
uggcaguuggguuucauuu

SEQ ID NO: 1477249 - RNA, 19 nt, Artificial Sequence
  Description of Artificial Sequence: Synthetic oligonucleotide
cucugauaucacacgacac

SEQ ID NO: 1477250 - RNA, 19 nt, Artificial Sequence
  Description of Artificial Sequence: Synthetic oligonucleotide
ucugcagcgcgcaccguag

SEQ ID NO: 1477251 - RNA, 19 nt, Artificial Sequence
  Description of Artificial Sequence: Synthetic oligonucleotide
cucuggacaagacuuuaug

SEQ ID NO: 1477252 - RNA, 19 nt, Artificial Sequence
  Description of Artificial Sequence: Synthetic oligonucleotide
gauuucggucucuuagcac

SEQ ID NO: 1477253 - RNA, 19 nt, Artificial Sequence
  Description of Artificial Sequence: Synthetic oligonucleotide
cgcacugaauuaaagaacc

SEQ ID NO: 1477254 - RNA, 19 nt, Artificial Sequence
  Description of Artificial Sequence: Synthetic oligonucleotide
gauggcuugcuguuugcca

SEQ ID NO: 1477255 - RNA, 19 nt, Artificial Sequence
  Description of Artificial Sequence: Synthetic oligonucleotide
augccaaaccuccucucag

SEQ ID NO: 1477256 - RNA, 19 nt, Artificial Sequence
  Description of Artificial Sequence: Synthetic oligonucleotide
cauaucugcagcgcgcacc

SEQ ID NO: 1477257 - RNA, 19 nt, Artificial Sequence
  Description of Artificial Sequence: Synthetic oligonucleotide
cgauaaaaucccaaagccg

SEQ ID NO: 1477258 - RNA, 19 nt, Artificial Sequence
  Description of Artificial Sequence: Synthetic oligonucleotide
cauccggguaagcauggcg

SEQ ID NO: 1477259 - RNA, 19 nt, Artificial Sequence
  Description of Artificial Sequence: Synthetic oligonucleotide
auucacugugcuugggaca

SEQ ID NO: 1477260 - RNA, 19 nt, Artificial Sequence
  Description of Artificial Sequence: Synthetic oligonucleotide
aaccucacagugccuucag

SEQ ID NO: 1477261 - RNA, 19 nt, Artificial Sequence
  Description of Artificial Sequence: Synthetic oligonucleotide
uccaaguuuacuguugcuu

SEQ ID NO: 1477262 - RNA, 19 nt, Artificial Sequence
  Description of Artificial Sequence: Synthetic oligonucleotide
gaucggguuuucaaacugc

SEQ ID NO: 1477263 - RNA, 19 nt, Artificial Sequence
  Description of Artificial Sequence: Synthetic oligonucleotide
agaaccucacagugccuuc

SEQ ID NO: 1477264 - RNA, 19 nt, Artificial Sequence
  Description of Artificial Sequence: Synthetic oligonucleotide
gacuacauagcugguuccc

SEQ ID NO: 1477265 - RNA, 19 nt, Artificial Sequence
  Description of Artificial Sequence: Synthetic oligonucleotide
acacuagagacggucacug

SEQ ID NO: 1477266 - RNA, 19 nt, Artificial Sequence
  Description of Artificial Sequence: Synthetic oligonucleotide
aacacacuagagacgguca

SEQ ID NO: 1477267 - RNA, 19 nt, Artificial Sequence
  Description of Artificial Sequence: Synthetic oligonucleotide
caugugagaacaggcacug

SEQ ID NO: 1477268 - RNA, 19 nt, Artificial Sequence
  Description of Artificial Sequence: Synthetic oligonucleotide
acuuggaauuacaaacucu

SEQ ID NO: 1477269 - RNA, 19 nt, Artificial Sequence
  Description of Artificial Sequence: Synthetic oligonucleotide
uacauagcugguucccagu

SEQ ID NO: 1477270 - RNA, 19 nt, Artificial Sequence
  Description of Artificial Sequence: Synthetic oligonucleotide
aguccugauggcaucuagg

SEQ ID NO: 1477271 - RNA, 19 nt, Artificial Sequence
  Description of Artificial Sequence: Synthetic oligonucleotide
cuuggcgcaucuccauugg

SEQ ID NO: 1477272 - RNA, 19 nt, Artificial Sequence
  Description of Artificial Sequence: Synthetic oligonucleotide
cuacccggguuauucacug

SEQ ID NO: 1477273 - RNA, 19 nt, Artificial Sequence
  Description of Artificial Sequence: Synthetic oligonucleotide
caggucaugugagaacagg

SEQ ID NO: 1477274 - RNA, 19 nt, Artificial Sequence
  Description of Artificial Sequence: Synthetic oligonucleotide
gcaccuaagaguucaacuc

SEQ ID NO: 1477275 - RNA, 19 nt, Artificial Sequence
  Description of Artificial Sequence: Synthetic oligonucleotide
acccggguuauucacugug

SEQ ID NO: 1477276 - RNA, 19 nt, Artificial Sequence
  Description of Artificial Sequence: Synthetic oligonucleotide
uccauggacuugguuaucu

SEQ ID NO: 1477277 - RNA, 19 nt, Artificial Sequence
  Description of Artificial Sequence: Synthetic oligonucleotide
ggcgcaucuccauuggcgg

SEQ ID NO: 1477278 - RNA, 19 nt, Artificial Sequence
  Description of Artificial Sequence: Synthetic oligonucleotide
gguucugaugauucuacuc

SEQ ID NO: 1477279 - RNA, 19 nt, Artificial Sequence
  Description of Artificial Sequence: Synthetic oligonucleotide
agacuuuaugaucggguuu

SEQ ID NO: 1477280 - RNA, 19 nt, Artificial Sequence
  Description of Artificial Sequence: Synthetic oligonucleotide
uucucgguucucgauaaaa

SEQ ID NO: 1477281 - RNA, 19 nt, Artificial Sequence
  Description of Artificial Sequence: Synthetic oligonucleotide
ggggcauaauugcugcucg

SEQ ID NO: 1477282 - RNA, 19 nt, Artificial Sequence
  Description of Artificial Sequence: Synthetic oligonucleotide
gacgcccuggauaagaaaa

SEQ ID NO: 1477283 - RNA, 19 nt, Artificial Sequence
  Description of Artificial Sequence: Synthetic oligonucleotide
uagagacggucacugcaga

SEQ ID NO: 1477284 - RNA, 19 nt, Artificial Sequence
  Description of Artificial Sequence: Synthetic oligonucleotide
caacacacuagagacgguc

SEQ ID NO: 1477285 - RNA, 19 nt, Artificial Sequence
  Description of Artificial Sequence: Synthetic oligonucleotide
cacuugcuuccaaagggac

SEQ ID NO: 1477286 - RNA, 19 nt, Artificial Sequence
  Description of Artificial Sequence: Synthetic oligonucleotide
acugcagcuacccggguua

SEQ ID NO: 1477287 - RNA, 19 nt, Artificial Sequence
  Description of Artificial Sequence: Synthetic oligonucleotide
uuccccauccccuguuuga

SEQ ID NO: 1477288 - RNA, 19 nt, Artificial Sequence
  Description of Artificial Sequence: Synthetic oligonucleotide
gcauaauugcugcucguug

SEQ ID NO: 1477289 - RNA, 19 nt, Artificial Sequence
  Description of Artificial Sequence: Synthetic oligonucleotide
guuauucacugugcuuggg

SEQ ID NO: 1477290 - RNA, 19 nt, Artificial Sequence
  Description of Artificial Sequence: Synthetic oligonucleotide
ccaguaacggggcuggagg

SEQ ID NO: 1477291 - RNA, 19 nt, Artificial Sequence
  Description of Artificial Sequence: Synthetic oligonucleotide
caccguaggcacaguaccc

SEQ ID NO: 1477292 - RNA, 19 nt, Artificial Sequence
  Description of Artificial Sequence: Synthetic oligonucleotide
ucggucucuuagcaccagc

SEQ ID NO: 1477293 - RNA, 19 nt, Artificial Sequence
  Description of Artificial Sequence: Synthetic oligonucleotide
guuucucgguucucgauaa

SEQ ID NO: 1477294 - RNA, 19 nt, Artificial Sequence
  Description of Artificial Sequence: Synthetic oligonucleotide
gaucuucuacccaguacac

SEQ ID NO: 1477295 - RNA, 19 nt, Artificial Sequence
  Description of Artificial Sequence: Synthetic oligonucleotide
gaaugccaaaccuccucuc

SEQ ID NO: 1477296 - RNA, 19 nt, Artificial Sequence
  Description of Artificial Sequence: Synthetic oligonucleotide
cuaaauguagugauuccau

SEQ ID NO: 1477297 - RNA, 19 nt, Artificial Sequence
  Description of Artificial Sequence: Synthetic oligonucleotide
uaauugcugcucguugcug

SEQ ID NO: 1477298 - RNA, 19 nt, Artificial Sequence
  Description of Artificial Sequence: Synthetic oligonucleotide
uccaaagggacaggucccc

SEQ ID NO: 1477299 - RNA, 19 nt, Artificial Sequence
  Description of Artificial Sequence: Synthetic oligonucleotide
gacacucuggacaagacuu

SEQ ID NO: 1477300 - RNA, 19 nt, Artificial Sequence
  Description of Artificial Sequence: Synthetic oligonucleotide
aggugcaccuaagaguuca

SEQ ID NO: 1477301 - RNA, 19 nt, Artificial Sequence
  Description of Artificial Sequence: Synthetic oligonucleotide
aacucuaaauguagugauu

SEQ ID NO: 1477302 - RNA, 19 nt, Artificial Sequence
  Description of Artificial Sequence: Synthetic oligonucleotide
guaacggggcuggaggugc

SEQ ID NO: 1477303 - RNA, 19 nt, Artificial Sequence
  Description of Artificial Sequence: Synthetic oligonucleotide
aagccgcacugaauuaaag

SEQ ID NO: 1477304 - RNA, 19 nt, Artificial Sequence
  Description of Artificial Sequence: Synthetic oligonucleotide
gaguucaacucuaaaugua

SEQ ID NO: 1477305 - RNA, 19 nt, Artificial Sequence
  Description of Artificial Sequence: Synthetic oligonucleotide
ccuaaaugaaggugucagc

SEQ ID NO: 1477306 - RNA, 19 nt, Artificial Sequence
  Description of Artificial Sequence: Synthetic oligonucleotide
ucgcuuccccgguucaugc

SEQ ID NO: 1477307 - RNA, 19 nt, Artificial Sequence
  Description of Artificial Sequence: Synthetic oligonucleotide
ggcaucuagguaggaaugg

SEQ ID NO: 1477308 - RNA, 19 nt, Artificial Sequence
  Description of Artificial Sequence: Synthetic oligonucleotide
uuggcgcaucuccauuggc

SEQ ID NO: 1477309 - RNA, 19 nt, Artificial Sequence
  Description of Artificial Sequence: Synthetic oligonucleotide
gcuccaaguuuacuguugc

SEQ ID NO: 1477310 - RNA, 19 nt, Artificial Sequence
  Description of Artificial Sequence: Synthetic oligonucleotide
uggguuucucgguucucga

SEQ ID NO: 1477311 - RNA, 19 nt, Artificial Sequence
  Description of Artificial Sequence: Synthetic oligonucleotide
ggauaagaaaacagaucug

SEQ ID NO: 1477312 - RNA, 19 nt, Artificial Sequence
  Description of Artificial Sequence: Synthetic oligonucleotide
cuggacaagacuuuaugau

SEQ ID NO: 1477313 - RNA, 19 nt, Artificial Sequence
  Description of Artificial Sequence: Synthetic oligonucleotide
aaagccgcacugaauuaaa

SEQ ID NO: 1477314 - RNA, 19 nt, Artificial Sequence
  Description of Artificial Sequence: Synthetic oligonucleotide
cuccggacuggucugagca

SEQ ID NO: 1477315 - RNA, 19 nt, Artificial Sequence
  Description of Artificial Sequence: Synthetic oligonucleotide
ugcacacuuuguccuggcu

SEQ ID NO: 1477316 - RNA, 19 nt, Artificial Sequence
  Description of Artificial Sequence: Synthetic oligonucleotide
auuggcggaugcaggacag

SEQ ID NO: 1477317 - RNA, 19 nt, Artificial Sequence
  Description of Artificial Sequence: Synthetic oligonucleotide
auucuacuccagaaaggug

SEQ ID NO: 1477318 - RNA, 19 nt, Artificial Sequence
  Description of Artificial Sequence: Synthetic oligonucleotide
uccggguaagcauggcggu

SEQ ID NO: 1477319 - RNA, 19 nt, Artificial Sequence
  Description of Artificial Sequence: Synthetic oligonucleotide
cuugccuugcucaaaguau

SEQ ID NO: 1477320 - RNA, 19 nt, Artificial Sequence
  Description of Artificial Sequence: Synthetic oligonucleotide
ucuacggggcuggcgacgc

SEQ ID NO: 1477321 - RNA, 19 nt, Artificial Sequence
  Description of Artificial Sequence: Synthetic oligonucleotide
ucucucgcuuccccgguuc

SEQ ID NO: 1477322 - RNA, 19 nt, Artificial Sequence
  Description of Artificial Sequence: Synthetic oligonucleotide
acuuuaugaucggguuuuc

SEQ ID NO: 1477323 - RNA, 19 nt, Artificial Sequence
  Description of Artificial Sequence: Synthetic oligonucleotide
uaggguucugaugauucua

SEQ ID NO: 1477324 - RNA, 19 nt, Artificial Sequence
  Description of Artificial Sequence: Synthetic oligonucleotide
cacuagagacggucacugc

SEQ ID NO: 1477325 - RNA, 19 nt, Artificial Sequence
  Description of Artificial Sequence: Synthetic oligonucleotide
gagcccuaaaugaaggugu

SEQ ID NO: 1477326 - RNA, 19 nt, Artificial Sequence
  Description of Artificial Sequence: Synthetic oligonucleotide
agcccuaaaugaagguguc

SEQ ID NO: 1477327 - RNA, 19 nt, Artificial Sequence
  Description of Artificial Sequence: Synthetic oligonucleotide
gcucguugcugcuauagga

SEQ ID NO: 1477328 - RNA, 19 nt, Artificial Sequence
  Description of Artificial Sequence: Synthetic oligonucleotide
agggccuaccgcuccaccu

SEQ ID NO: 1477329 - RNA, 19 nt, Artificial Sequence
  Description of Artificial Sequence: Synthetic oligonucleotide
aucggguuuucaaacugcu

SEQ ID NO: 1477330 - RNA, 19 nt, Artificial Sequence
  Description of Artificial Sequence: Synthetic oligonucleotide
cugcucguugcugcuauag

SEQ ID NO: 1477331 - RNA, 19 nt, Artificial Sequence
  Description of Artificial Sequence: Synthetic oligonucleotide
aguaacggggcuggaggug

SEQ ID NO: 1477332 - RNA, 19 nt, Artificial Sequence
  Description of Artificial Sequence: Synthetic oligonucleotide
ggacuacauagcugguucc

SEQ ID NO: 1477333 - RNA, 19 nt, Artificial Sequence
  Description of Artificial Sequence: Synthetic oligonucleotide
guccauccggguaagcaug

SEQ ID NO: 1477334 - RNA, 19 nt, Artificial Sequence
  Description of Artificial Sequence: Synthetic oligonucleotide
guccugauggcaucuaggu

SEQ ID NO: 1477335 - RNA, 19 nt, Artificial Sequence
  Description of Artificial Sequence: Synthetic oligonucleotide
cauuggcggaugcaggaca

SEQ ID NO: 1477336 - RNA, 19 nt, Artificial Sequence
  Description of Artificial Sequence: Synthetic oligonucleotide
aaagaaccucacagugccu

SEQ ID NO: 1477337 - RNA, 19 nt, Artificial Sequence
  Description of Artificial Sequence: Synthetic oligonucleotide
ucggguuuucaaacugcuu

SEQ ID NO: 1477338 - RNA, 19 nt, Artificial Sequence
  Description of Artificial Sequence: Synthetic oligonucleotide
ucuccggacuggucugagc

SEQ ID NO: 1477339 - RNA, 19 nt, Artificial Sequence
  Description of Artificial Sequence: Synthetic oligonucleotide
cuggcgacgcccuggauaa

SEQ ID NO: 1477340 - RNA, 19 nt, Artificial Sequence
  Description of Artificial Sequence: Synthetic oligonucleotide
gcaaucaauuaaaacagcu

SEQ ID NO: 1477341 - RNA, 19 nt, Artificial Sequence
  Description of Artificial Sequence: Synthetic oligonucleotide
cgguucucgauaaaauccc

SEQ ID NO: 1477342 - RNA, 19 nt, Artificial Sequence
  Description of Artificial Sequence: Synthetic oligonucleotide
ccgcacugaauuaaagaac

SEQ ID NO: 1477343 - RNA, 19 nt, Artificial Sequence
  Description of Artificial Sequence: Synthetic oligonucleotide
ucggcacccugccuuggga

SEQ ID NO: 1477344 - RNA, 19 nt, Artificial Sequence
  Description of Artificial Sequence: Synthetic oligonucleotide
acuuuguccuggcuugcuu

SEQ ID NO: 1477345 - RNA, 19 nt, Artificial Sequence
  Description of Artificial Sequence: Synthetic oligonucleotide
cugguaguauuugcagaug

SEQ ID NO: 1477346 - RNA, 19 nt, Artificial Sequence
  Description of Artificial Sequence: Synthetic oligonucleotide
uaggcacaguaccccuucu

SEQ ID NO: 1477347 - RNA, 19 nt, Artificial Sequence
  Description of Artificial Sequence: Synthetic oligonucleotide
gcuuggcgcaucuccauug

SEQ ID NO: 1477348 - RNA, 19 nt, Artificial Sequence
  Description of Artificial Sequence: Synthetic oligonucleotide
ggucaugugagaacaggca

SEQ ID NO: 1477349 - RNA, 19 nt, Artificial Sequence
  Description of Artificial Sequence: Synthetic oligonucleotide
aucugcagcgcgcaccgua

SEQ ID NO: 1477350 - RNA, 19 nt, Artificial Sequence
  Description of Artificial Sequence: Synthetic oligonucleotide
cuuuaugaucggguuuuca

SEQ ID NO: 1477351 - RNA, 19 nt, Artificial Sequence
  Description of Artificial Sequence: Synthetic oligonucleotide
aucuaccaugccaccuugg

SEQ ID NO: 1477352 - RNA, 19 nt, Artificial Sequence
  Description of Artificial Sequence: Synthetic oligonucleotide
gaaccucacagugccuuca

SEQ ID NO: 1477353 - RNA, 19 nt, Artificial Sequence
  Description of Artificial Sequence: Synthetic oligonucleotide
uuucucgguucucgauaaa

SEQ ID NO: 1477354 - RNA, 19 nt, Artificial Sequence
  Description of Artificial Sequence: Synthetic oligonucleotide
guuaucuaccaugccaccu

SEQ ID NO: 1477355 - RNA, 19 nt, Artificial Sequence
  Description of Artificial Sequence: Synthetic oligonucleotide
caccuaagaguucaacucu

SEQ ID NO: 1477356 - RNA, 19 nt, Artificial Sequence
  Description of Artificial Sequence: Synthetic oligonucleotide
agagaaugccaaaccuccu

SEQ ID NO: 1477357 - RNA, 19 nt, Artificial Sequence
  Description of Artificial Sequence: Synthetic oligonucleotide
uagguuucucuggcucugc

SEQ ID NO: 1477358 - RNA, 19 nt, Artificial Sequence
  Description of Artificial Sequence: Synthetic oligonucleotide
cguaggggcauaauugcug

SEQ ID NO: 1477359 - RNA, 19 nt, Artificial Sequence
  Description of Artificial Sequence: Synthetic oligonucleotide
gcccuggauaagaaaacag

SEQ ID NO: 1477360 - RNA, 19 nt, Artificial Sequence
  Description of Artificial Sequence: Synthetic oligonucleotide
uucggucucuuagcaccag

SEQ ID NO: 1477361 - RNA, 19 nt, Artificial Sequence
  Description of Artificial Sequence: Synthetic oligonucleotide
cucggcacccugccuuggg

SEQ ID NO: 1477362 - RNA, 19 nt, Artificial Sequence
  Description of Artificial Sequence: Synthetic oligonucleotide
cagcgcgcaccguaggcac

SEQ ID NO: 1477363 - RNA, 19 nt, Artificial Sequence
  Description of Artificial Sequence: Synthetic oligonucleotide
caaagccgcacugaauuaa

SEQ ID NO: 1477364 - RNA, 19 nt, Artificial Sequence
  Description of Artificial Sequence: Synthetic oligonucleotide
cucuacggggcuggcgacg

SEQ ID NO: 1477365 - RNA, 19 nt, Artificial Sequence
  Description of Artificial Sequence: Synthetic oligonucleotide
uccccgguucaugcaaaug

SEQ ID NO: 1477366 - RNA, 19 nt, Artificial Sequence
  Description of Artificial Sequence: Synthetic oligonucleotide
uggcuacagcuggagagaa

SEQ ID NO: 1477367 - RNA, 19 nt, Artificial Sequence
  Description of Artificial Sequence: Synthetic oligonucleotide
agccugaggauggcaaaga

SEQ ID NO: 1477368 - RNA, 19 nt, Artificial Sequence
  Description of Artificial Sequence: Synthetic oligonucleotide
gguguggcuacagcuggag

SEQ ID NO: 1477369 - RNA, 19 nt, Artificial Sequence
  Description of Artificial Sequence: Synthetic oligonucleotide
gguccccuugccuugcuca

SEQ ID NO: 1477370 - RNA, 19 nt, Artificial Sequence
  Description of Artificial Sequence: Synthetic oligonucleotide
accuaagaguucaacucua

SEQ ID NO: 1477371 - RNA, 19 nt, Artificial Sequence
  Description of Artificial Sequence: Synthetic oligonucleotide
gcagcuacccggguuauuc

SEQ ID NO: 1477372 - RNA, 19 nt, Artificial Sequence
  Description of Artificial Sequence: Synthetic oligonucleotide
cccgguucaugcaaaugug

SEQ ID NO: 1477373 - RNA, 19 nt, Artificial Sequence
  Description of Artificial Sequence: Synthetic oligonucleotide
uucaaacugcuuggcgcau

SEQ ID NO: 1477374 - RNA, 19 nt, Artificial Sequence
  Description of Artificial Sequence: Synthetic oligonucleotide
gguaagcauggcgguaaag

SEQ ID NO: 1477375 - RNA, 19 nt, Artificial Sequence
  Description of Artificial Sequence: Synthetic oligonucleotide
cucgcuuccccgguucaug

SEQ ID NO: 1477376 - RNA, 19 nt, Artificial Sequence
  Description of Artificial Sequence: Synthetic oligonucleotide
gacuggucugagcaucacu

SEQ ID NO: 1477377 - RNA, 19 nt, Artificial Sequence
  Description of Artificial Sequence: Synthetic oligonucleotide
uccggacuggucugagcau

SEQ ID NO: 1477378 - RNA, 19 nt, Artificial Sequence
  Description of Artificial Sequence: Synthetic oligonucleotide
uacccggguuauucacugu

SEQ ID NO: 1477379 - RNA, 19 nt, Artificial Sequence
  Description of Artificial Sequence: Synthetic oligonucleotide
cuauaggagcugcuggccu

SEQ ID NO: 1477380 - RNA, 19 nt, Artificial Sequence
  Description of Artificial Sequence: Synthetic oligonucleotide
cgguaaaggcacuugcuuc

SEQ ID NO: 1477381 - RNA, 19 nt, Artificial Sequence
  Description of Artificial Sequence: Synthetic oligonucleotide
uuccccgguucaugcaaau

SEQ ID NO: 1477382 - RNA, 19 nt, Artificial Sequence
  Description of Artificial Sequence: Synthetic oligonucleotide
cccggguuauucacugugc

SEQ ID NO: 1477383 - RNA, 19 nt, Artificial Sequence
  Description of Artificial Sequence: Synthetic oligonucleotide
gugcaccuaagaguucaac

SEQ ID NO: 1477384 - RNA, 19 nt, Artificial Sequence
  Description of Artificial Sequence: Synthetic oligonucleotide
cgguucaugcaaauguguc

SEQ ID NO: 1477385 - RNA, 19 nt, Artificial Sequence
  Description of Artificial Sequence: Synthetic oligonucleotide
ggaggugcaccuaagaguu

SEQ ID NO: 1477386 - RNA, 19 nt, Artificial Sequence
  Description of Artificial Sequence: Synthetic oligonucleotide
ccaaaccuccucucagaug

SEQ ID NO: 1477387 - RNA, 19 nt, Artificial Sequence
  Description of Artificial Sequence: Synthetic oligonucleotide
uucucucgcuuccccgguu

SEQ ID NO: 1477388 - RNA, 19 nt, Artificial Sequence
  Description of Artificial Sequence: Synthetic oligonucleotide
guguggcuacagcuggaga

SEQ ID NO: 1477389 - RNA, 19 nt, Artificial Sequence
  Description of Artificial Sequence: Synthetic oligonucleotide
aucuccggacuggucugag

SEQ ID NO: 1477390 - RNA, 19 nt, Artificial Sequence
  Description of Artificial Sequence: Synthetic oligonucleotide
caggcaguagguguggcua

SEQ ID NO: 1477391 - RNA, 19 nt, Artificial Sequence
  Description of Artificial Sequence: Synthetic oligonucleotide
ggcaguuggguuucauuua

SEQ ID NO: 1477392 - RNA, 19 nt, Artificial Sequence
  Description of Artificial Sequence: Synthetic oligonucleotide
gagcaucacugcagcuacc

SEQ ID NO: 1477393 - RNA, 19 nt, Artificial Sequence
  Description of Artificial Sequence: Synthetic oligonucleotide
cuucuacccaguacacacu

SEQ ID NO: 1477394 - RNA, 19 nt, Artificial Sequence
  Description of Artificial Sequence: Synthetic oligonucleotide
cagggccuaccgcuccacc

SEQ ID NO: 1477395 - RNA, 19 nt, Artificial Sequence
  Description of Artificial Sequence: Synthetic oligonucleotide
cagccguccauccggguaa

SEQ ID NO: 1477396 - RNA, 19 nt, Artificial Sequence
  Description of Artificial Sequence: Synthetic oligonucleotide
accuccucucagaugcaga

SEQ ID NO: 1477397 - RNA, 19 nt, Artificial Sequence
  Description of Artificial Sequence: Synthetic oligonucleotide
cuagguaggaauggggcuu

SEQ ID NO: 1477398 - RNA, 19 nt, Artificial Sequence
  Description of Artificial Sequence: Synthetic oligonucleotide
uugugacuguagagcccua

SEQ ID NO: 1477399 - RNA, 19 nt, Artificial Sequence
  Description of Artificial Sequence: Synthetic oligonucleotide
cucucagaugcagaugccu

SEQ ID NO: 1477400 - RNA, 19 nt, Artificial Sequence
  Description of Artificial Sequence: Synthetic oligonucleotide
cagcuacccggguuauuca

SEQ ID NO: 1477401 - RNA, 19 nt, Artificial Sequence
  Description of Artificial Sequence: Synthetic oligonucleotide
cauacagaugcugcacacu

SEQ ID NO: 1477402 - RNA, 19 nt, Artificial Sequence
  Description of Artificial Sequence: Synthetic oligonucleotide
ggggcuuuauaugaucaua

SEQ ID NO: 1477403 - RNA, 19 nt, Artificial Sequence
  Description of Artificial Sequence: Synthetic oligonucleotide
gguaguauuugcagauggu

SEQ ID NO: 1477404 - RNA, 19 nt, Artificial Sequence
  Description of Artificial Sequence: Synthetic oligonucleotide
guauuugcagaugguggau

SEQ ID NO: 1477405 - RNA, 19 nt, Artificial Sequence
  Description of Artificial Sequence: Synthetic oligonucleotide
cugacucuaggguucugau

SEQ ID NO: 1477406 - RNA, 19 nt, Artificial Sequence
  Description of Artificial Sequence: Synthetic oligonucleotide
cuuccccgguucaugcaaa

SEQ ID NO: 1477407 - RNA, 19 nt, Artificial Sequence
  Description of Artificial Sequence: Synthetic oligonucleotide
acaacacacuagagacggu

SEQ ID NO: 1477408 - RNA, 19 nt, Artificial Sequence
  Description of Artificial Sequence: Synthetic oligonucleotide
caguaacggggcuggaggu

SEQ ID NO: 1477409 - RNA, 19 nt, Artificial Sequence
  Description of Artificial Sequence: Synthetic oligonucleotide
acacgacacucuggacaag

SEQ ID NO: 1477410 - RNA, 19 nt, Artificial Sequence
  Description of Artificial Sequence: Synthetic oligonucleotide
cgcaccguaggcacaguac

SEQ ID NO: 1477411 - RNA, 19 nt, Artificial Sequence
  Description of Artificial Sequence: Synthetic oligonucleotide
gcuuccccgguucaugcaa

SEQ ID NO: 1477412 - RNA, 19 nt, Artificial Sequence
  Description of Artificial Sequence: Synthetic oligonucleotide
gcaagccugaggauggcaa

SEQ ID NO: 1477413 - RNA, 19 nt, Artificial Sequence
  Description of Artificial Sequence: Synthetic oligonucleotide
cacucuggacaagacuuua

SEQ ID NO: 1477414 - RNA, 19 nt, Artificial Sequence
  Description of Artificial Sequence: Synthetic oligonucleotide
cccucuacggggcuggcga

SEQ ID NO: 1477415 - RNA, 19 nt, Artificial Sequence
  Description of Artificial Sequence: Synthetic oligonucleotide
cccaguaacggggcuggag

SEQ ID NO: 1477416 - RNA, 19 nt, Artificial Sequence
  Description of Artificial Sequence: Synthetic oligonucleotide
agcccucuacggggcuggc

SEQ ID NO: 1477417 - RNA, 19 nt, Artificial Sequence
  Description of Artificial Sequence: Synthetic oligonucleotide
gugaccugcuggguuucuc

SEQ ID NO: 1477418 - RNA, 19 nt, Artificial Sequence
  Description of Artificial Sequence: Synthetic oligonucleotide
cccaaagccgcacugaauu

SEQ ID NO: 1477419 - RNA, 19 nt, Artificial Sequence
  Description of Artificial Sequence: Synthetic oligonucleotide
gguugagggcugggcaagc

SEQ ID NO: 1477420 - RNA, 19 nt, Artificial Sequence
  Description of Artificial Sequence: Synthetic oligonucleotide
ccaggccagugagauuucg

SEQ ID NO: 1477421 - RNA, 19 nt, Artificial Sequence
  Description of Artificial Sequence: Synthetic oligonucleotide
cacacuagagacggucacu

SEQ ID NO: 1477422 - RNA, 19 nt, Artificial Sequence
  Description of Artificial Sequence: Synthetic oligonucleotide
ccugaggauggcaaagagu

SEQ ID NO: 1477423 - RNA, 19 nt, Artificial Sequence
  Description of Artificial Sequence: Synthetic oligonucleotide
agcagcguaggggcauaau

SEQ ID NO: 1477424 - RNA, 19 nt, Artificial Sequence
  Description of Artificial Sequence: Synthetic oligonucleotide
gcagcguaggggcauaauu

SEQ ID NO: 1477425 - RNA, 19 nt, Artificial Sequence
  Description of Artificial Sequence: Synthetic oligonucleotide
cuacggggcuggcgacgcc

SEQ ID NO: 1477426 - RNA, 19 nt, Artificial Sequence
  Description of Artificial Sequence: Synthetic oligonucleotide
agccguccauccggguaag

SEQ ID NO: 1477427 - RNA, 19 nt, Artificial Sequence
  Description of Artificial Sequence: Synthetic oligonucleotide
ccccgguucaugcaaaugu

SEQ ID NO: 1477428 - RNA, 19 nt, Artificial Sequence
  Description of Artificial Sequence: Synthetic oligonucleotide
gcgguaaaggcacuugcuu

SEQ ID NO: 1477429 - RNA, 19 nt, Artificial Sequence
  Description of Artificial Sequence: Synthetic oligonucleotide
uaucugcagcgcgcaccgu

SEQ ID NO: 1477430 - RNA, 19 nt, Artificial Sequence
  Description of Artificial Sequence: Synthetic oligonucleotide
ccaccuugggucagugaca

SEQ ID NO: 1477431 - RNA, 19 nt, Artificial Sequence
  Description of Artificial Sequence: Synthetic oligonucleotide
ccauuggcggaugcaggac

SEQ ID NO: 1477432 - RNA, 19 nt, Artificial Sequence
  Description of Artificial Sequence: Synthetic oligonucleotide
ucccaguaacggggcugga

SEQ ID NO: 1477433 - RNA, 19 nt, Artificial Sequence
  Description of Artificial Sequence: Synthetic oligonucleotide
ccggacuggucugagcauc

SEQ ID NO: 1477434 - RNA, 19 nt, Artificial Sequence
  Description of Artificial Sequence: Synthetic oligonucleotide
ggcaguagguguggcuaca

SEQ ID NO: 1477435 - RNA, 19 nt, Artificial Sequence
  Description of Artificial Sequence: Synthetic oligonucleotide
caucuccggacuggucuga

SEQ ID NO: 1477436 - RNA, 19 nt, Artificial Sequence
  Description of Artificial Sequence: Synthetic oligonucleotide
ggcgguaaaggcacuugcu

SEQ ID NO: 1477437 - RNA, 19 nt, Artificial Sequence
  Description of Artificial Sequence: Synthetic oligonucleotide
ccugccuugggagguugug

SEQ ID NO: 1477438 - RNA, 19 nt, Artificial Sequence
  Description of Artificial Sequence: Synthetic oligonucleotide
gcgcgcaccguaggcacag

SEQ ID NO: 1477439 - RNA, 19 nt, Artificial Sequence
  Description of Artificial Sequence: Synthetic oligonucleotide
uggcgacgcccuggauaag

SEQ ID NO: 1477440 - RNA, 19 nt, Artificial Sequence
  Description of Artificial Sequence: Synthetic oligonucleotide
gcgcaucuccauuggcgga

SEQ ID NO: 1477441 - RNA, 19 nt, Artificial Sequence
  Description of Artificial Sequence: Synthetic oligonucleotide
ggacuugguuaucuaccau

SEQ ID NO: 1477442 - RNA, 19 nt, Artificial Sequence
  Description of Artificial Sequence: Synthetic oligonucleotide
ccaaagccgcacugaauua

SEQ ID NO: 1477443 - RNA, 19 nt, Artificial Sequence
  Description of Artificial Sequence: Synthetic oligonucleotide
ccguccauccggguaagca

SEQ ID NO: 1477444 - RNA, 19 nt, Artificial Sequence
  Description of Artificial Sequence: Synthetic oligonucleotide
ggguaagcauggcgguaaa

SEQ ID NO: 1477445 - RNA, 19 nt, Artificial Sequence
  Description of Artificial Sequence: Synthetic oligonucleotide
ccucuacggggcuggcgac

SEQ ID NO: 1477446 - RNA, 19 nt, Artificial Sequence
  Description of Artificial Sequence: Synthetic oligonucleotide
cggcacccugccuugggag

SEQ ID NO: 1477447 - RNA, 19 nt, Artificial Sequence
  Description of Artificial Sequence: Synthetic oligonucleotide
ccgguucaugcaaaugugu

SEQ ID NO: 1477448 - RNA, 19 nt, Artificial Sequence
  Description of Artificial Sequence: Synthetic oligonucleotide
ccaaggcucacaacacacu

SEQ ID NO: 1477449 - RNA, 19 nt, Artificial Sequence
  Description of Artificial Sequence: Synthetic oligonucleotide
agcgcgcaccguaggcaca

SEQ ID NO: 1477450 - RNA, 19 nt, Artificial Sequence
  Description of Artificial Sequence: Synthetic oligonucleotide
cugcuuggcgcaucuccau

SEQ ID NO: 1477451 - RNA, 19 nt, Artificial Sequence
  Description of Artificial Sequence: Synthetic oligonucleotide
gcccucuacggggcuggcg

SEQ ID NO: 1477452 - RNA, 19 nt, Artificial Sequence
  Description of Artificial Sequence: Synthetic oligonucleotide
caguaccccuucugguagu

SEQ ID NO: 1477453 - RNA, 19 nt, Artificial Sequence
  Description of Artificial Sequence: Synthetic oligonucleotide
cccuguuugaaagcuucaa

SEQ ID NO: 1477454 - RNA, 19 nt, Artificial Sequence
  Description of Artificial Sequence: Synthetic oligonucleotide
ggguuucucgguucucgau

SEQ ID NO: 1477455 - RNA, 19 nt, Artificial Sequence
  Description of Artificial Sequence: Synthetic oligonucleotide
acggggcuggcgacgcccu

SEQ ID NO: 1477456 - RNA, 19 nt, Artificial Sequence
  Description of Artificial Sequence: Synthetic oligonucleotide
cguugcugcuauaggagcu

SEQ ID NO: 1477457 - RNA, 19 nt, Artificial Sequence
  Description of Artificial Sequence: Synthetic oligonucleotide
gcuacccggguuauucacu

SEQ ID NO: 1477458 - RNA, 19 nt, Artificial Sequence
  Description of Artificial Sequence: Synthetic oligonucleotide
ccggguuauucacugugcu

SEQ ID NO: 1477459 - RNA, 19 nt, Artificial Sequence
  Description of Artificial Sequence: Synthetic oligonucleotide
ccauccggguaagcauggc

SEQ ID NO: 1477460 - RNA, 19 nt, Artificial Sequence
  Description of Artificial Sequence: Synthetic oligonucleotide
ccagccguccauccgggua

SEQ ID NO: 1477461 - RNA, 19 nt, Artificial Sequence
  Description of Artificial Sequence: Synthetic oligonucleotide
gcguaggggcauaauugcu

SEQ ID NO: 1477462 - RNA, 19 nt, Artificial Sequence
  Description of Artificial Sequence: Synthetic oligonucleotide
ggccucggcacccugccuu

SEQ ID NO: 1477463 - RNA, 19 nt, Artificial Sequence
  Description of Artificial Sequence: Synthetic oligonucleotide
cgcccuggauaagaaaaca

SEQ ID NO: 1477464 - RNA, 19 nt, Artificial Sequence
  Description of Artificial Sequence: Synthetic oligonucleotide
gcgcaccguaggcacagua

SEQ ID NO: 1477465 - RNA, 19 nt, Artificial Sequence
  Description of Artificial Sequence: Synthetic oligonucleotide
cggguaagcauggcgguaa

SEQ ID NO: 1477466 - RNA, 19 nt, Artificial Sequence
  Description of Artificial Sequence: Synthetic oligonucleotide
cuacuccagaaaggugcau

SEQ ID NO: 1477467 - RNA, 19 nt, Artificial Sequence
  Description of Artificial Sequence: Synthetic oligonucleotide
ggcuugcuuggaaggcaaa

SEQ ID NO: 1477468 - RNA, 19 nt, Artificial Sequence
  Description of Artificial Sequence: Synthetic oligonucleotide
guaccccuucugguaguau

SEQ ID NO: 1477469 - RNA, 19 nt, Artificial Sequence
  Description of Artificial Sequence: Synthetic oligonucleotide
ccucggcacccugccuugg

SEQ ID NO: 1477470 - RNA, 19 nt, Artificial Sequence
  Description of Artificial Sequence: Synthetic oligonucleotide
ccguaggcacaguaccccu

SEQ ID NO: 1477471 - RNA, 19 nt, Artificial Sequence
  Description of Artificial Sequence: Synthetic oligonucleotide
gccguccauccggguaagc

SEQ ID NO: 1477472 - RNA, 19 nt, Artificial Sequence
  Description of Artificial Sequence: Synthetic oligonucleotide
cgacgcccuggauaagaaa

SEQ ID NO: 1477473 - RNA, 19 nt, Artificial Sequence
  Description of Artificial Sequence: Synthetic oligonucleotide
ggugaccugcuggguuucu

SEQ ID NO: 1477474 - RNA, 19 nt, Artificial Sequence
  Description of Artificial Sequence: Synthetic oligonucleotide
cgcuuccccgguucaugca

SEQ ID NO: 1477475 - RNA, 19 nt, Artificial Sequence
  Description of Artificial Sequence: Synthetic oligonucleotide
cggguuauucacugugcuu

SEQ ID NO: 1477476 - RNA, 19 nt, Artificial Sequence
  Description of Artificial Sequence: Synthetic oligonucleotide
ccaaagggacagguccccu

SEQ ID NO: 1477477 - RNA, 19 nt, Artificial Sequence
  Description of Artificial Sequence: Synthetic oligonucleotide
ccggguaagcauggcggua

SEQ ID NO: 1477478 - RNA, 19 nt, Artificial Sequence
  Description of Artificial Sequence: Synthetic oligonucleotide
ccaguccugauggcaucua

SEQ ID NO: 1477479 - RNA, 19 nt, Artificial Sequence
  Description of Artificial Sequence: Synthetic oligonucleotide
cccugccuugggagguugu

SEQ ID NO: 1477480 - RNA, 19 nt, Artificial Sequence
  Description of Artificial Sequence: Synthetic oligonucleotide
gccuaccgcuccaccugcu

SEQ ID NO: 1477481 - RNA, 19 nt, Artificial Sequence
  Description of Artificial Sequence: Synthetic oligonucleotide
cgcgcaccguaggcacagu

SEQ ID NO: 1477482 - RNA, 19 nt, Artificial Sequence
  Description of Artificial Sequence: Synthetic oligonucleotide
aaauaguuaguuuagagaa

SEQ ID NO: 1477483 - RNA, 19 nt, Artificial Sequence
  Description of Artificial Sequence: Synthetic oligonucleotide
uuaacuauauuuuagauuu

SEQ ID NO: 1477484 - RNA, 19 nt, Artificial Sequence
  Description of Artificial Sequence: Synthetic oligonucleotide
ugauuaauauaguaggugg

SEQ ID NO: 1477485 - RNA, 19 nt, Artificial Sequence
  Description of Artificial Sequence: Synthetic oligonucleotide
acaugauuaauauaguagg

SEQ ID NO: 1477486 - RNA, 19 nt, Artificial Sequence
  Description of Artificial Sequence: Synthetic oligonucleotide
uguguuuucgcuuuccugg

SEQ ID NO: 1477487 - RNA, 19 nt, Artificial Sequence
  Description of Artificial Sequence: Synthetic oligonucleotide
agauuuaacauugauuacc

SEQ ID NO: 1477488 - RNA, 19 nt, Artificial Sequence
  Description of Artificial Sequence: Synthetic oligonucleotide
aacagcuaaaacaagagag

SEQ ID NO: 1477489 - RNA, 19 nt, Artificial Sequence
  Description of Artificial Sequence: Synthetic oligonucleotide
aaucacaacguccucagag

SEQ ID NO: 1477490 - RNA, 19 nt, Artificial Sequence
  Description of Artificial Sequence: Synthetic oligonucleotide
aaauccucccaguaugugc

SEQ ID NO: 1477491 - RNA, 19 nt, Artificial Sequence
  Description of Artificial Sequence: Synthetic oligonucleotide
acccuuaaaaugcaaagcc

SEQ ID NO: 1477492 - RNA, 19 nt, Artificial Sequence
  Description of Artificial Sequence: Synthetic oligonucleotide
ucucuuacccuuaaaaugc

SEQ ID NO: 1477493 - RNA, 19 nt, Artificial Sequence
  Description of Artificial Sequence: Synthetic oligonucleotide
aaagccaggucgcuaaagc

SEQ ID NO: 1477494 - RNA, 19 nt, Artificial Sequence
  Description of Artificial Sequence: Synthetic oligonucleotide
uuaguuuagagaacgcggg

SEQ ID NO: 1477495 - RNA, 19 nt, Artificial Sequence
  Description of Artificial Sequence: Synthetic oligonucleotide
uucaacuuaagucccaucc

SEQ ID NO: 1477496 - RNA, 19 nt, Artificial Sequence
  Description of Artificial Sequence: Synthetic oligonucleotide
uguguaacagcuaaaacaa

SEQ ID NO: 1477497 - RNA, 19 nt, Artificial Sequence
  Description of Artificial Sequence: Synthetic oligonucleotide
aacaugauuaauauaguag

SEQ ID NO: 1477498 - RNA, 19 nt, Artificial Sequence
  Description of Artificial Sequence: Synthetic oligonucleotide
uaaauaguuaguuuagaga

SEQ ID NO: 1477499 - RNA, 19 nt, Artificial Sequence
  Description of Artificial Sequence: Synthetic oligonucleotide
agcgacagagacuuuaugc

SEQ ID NO: 1477500 - RNA, 19 nt, Artificial Sequence
  Description of Artificial Sequence: Synthetic oligonucleotide
aaggcagcggaccugaacg

SEQ ID NO: 1477501 - RNA, 19 nt, Artificial Sequence
  Description of Artificial Sequence: Synthetic oligonucleotide
uuuccuauuaggaggagcc

SEQ ID NO: 1477502 - RNA, 19 nt, Artificial Sequence
  Description of Artificial Sequence: Synthetic oligonucleotide
ugaagaauaggcauugcca

SEQ ID NO: 1477503 - RNA, 19 nt, Artificial Sequence
  Description of Artificial Sequence: Synthetic oligonucleotide
aauauaucugccguucaac

SEQ ID NO: 1477504 - RNA, 19 nt, Artificial Sequence
  Description of Artificial Sequence: Synthetic oligonucleotide
uauaccguuggauauucgg

SEQ ID NO: 1477505 - RNA, 19 nt, Artificial Sequence
  Description of Artificial Sequence: Synthetic oligonucleotide
auuuuauacuucucuauag

SEQ ID NO: 1477506 - RNA, 19 nt, Artificial Sequence
  Description of Artificial Sequence: Synthetic oligonucleotide
auaguuaguuuagagaacg

SEQ ID NO: 1477507 - RNA, 19 nt, Artificial Sequence
  Description of Artificial Sequence: Synthetic oligonucleotide
aauccguaagagcugugac

SEQ ID NO: 1477508 - RNA, 19 nt, Artificial Sequence
  Description of Artificial Sequence: Synthetic oligonucleotide
cugaaaagcccuuaaagac

SEQ ID NO: 1477509 - RNA, 19 nt, Artificial Sequence
  Description of Artificial Sequence: Synthetic oligonucleotide
uacuguggaagaaagacgu

SEQ ID NO: 1477510 - RNA, 19 nt, Artificial Sequence
  Description of Artificial Sequence: Synthetic oligonucleotide
guuuagucaaaccauuugc

SEQ ID NO: 1477511 - RNA, 19 nt, Artificial Sequence
  Description of Artificial Sequence: Synthetic oligonucleotide
aagaauaggcauugccaac

SEQ ID NO: 1477512 - RNA, 19 nt, Artificial Sequence
  Description of Artificial Sequence: Synthetic oligonucleotide
uuacccuuaaaaugcaaag

SEQ ID NO: 1477513 - RNA, 19 nt, Artificial Sequence
  Description of Artificial Sequence: Synthetic oligonucleotide
ugugaagacggacuaaaga

SEQ ID NO: 1477514 - RNA, 19 nt, Artificial Sequence
  Description of Artificial Sequence: Synthetic oligonucleotide
agagacuuuaugcacuggg

SEQ ID NO: 1477515 - RNA, 19 nt, Artificial Sequence
  Description of Artificial Sequence: Synthetic oligonucleotide
uccguaagagcugugaccg

SEQ ID NO: 1477516 - RNA, 19 nt, Artificial Sequence
  Description of Artificial Sequence: Synthetic oligonucleotide
ugccguucaacuuaagucc

SEQ ID NO: 1477517 - RNA, 19 nt, Artificial Sequence
  Description of Artificial Sequence: Synthetic oligonucleotide
gauuuaacauugauuaccc

SEQ ID NO: 1477518 - RNA, 19 nt, Artificial Sequence
  Description of Artificial Sequence: Synthetic oligonucleotide
guuaguuuagagaacgcgg

SEQ ID NO: 1477519 - RNA, 19 nt, Artificial Sequence
  Description of Artificial Sequence: Synthetic oligonucleotide
guguguaacagcuaaaaca

SEQ ID NO: 1477520 - RNA, 19 nt, Artificial Sequence
  Description of Artificial Sequence: Synthetic oligonucleotide
aauaguuaguuuagagaac

SEQ ID NO: 1477521 - RNA, 19 nt, Artificial Sequence
  Description of Artificial Sequence: Synthetic oligonucleotide
ucgcuuuccuauuaggagg

SEQ ID NO: 1477522 - RNA, 19 nt, Artificial Sequence
  Description of Artificial Sequence: Synthetic oligonucleotide
uugugaucuauaccguugg

SEQ ID NO: 1477523 - RNA, 19 nt, Artificial Sequence
  Description of Artificial Sequence: Synthetic oligonucleotide
ucagugaaauauaucugcc

SEQ ID NO: 1477524 - RNA, 19 nt, Artificial Sequence
  Description of Artificial Sequence: Synthetic oligonucleotide
cuugauguucgucuugucg

SEQ ID NO: 1477525 - RNA, 19 nt, Artificial Sequence
  Description of Artificial Sequence: Synthetic oligonucleotide
acaacguccucagagaacg

SEQ ID NO: 1477526 - RNA, 19 nt, Artificial Sequence
  Description of Artificial Sequence: Synthetic oligonucleotide
gucucuuacccuuaaaaug

SEQ ID NO: 1477527 - RNA, 19 nt, Artificial Sequence
  Description of Artificial Sequence: Synthetic oligonucleotide
ucuuuuaugucaaaaucuu

SEQ ID NO: 1477528 - RNA, 19 nt, Artificial Sequence
  Description of Artificial Sequence: Synthetic oligonucleotide
aguuaguuuagagaacgcg

SEQ ID NO: 1477529 - RNA, 19 nt, Artificial Sequence
  Description of Artificial Sequence: Synthetic oligonucleotide
auccguaagagcugugacc

SEQ ID NO: 1477530 - RNA, 19 nt, Artificial Sequence
  Description of Artificial Sequence: Synthetic oligonucleotide
accgcagaccuuuaaauag

SEQ ID NO: 1477531 - RNA, 19 nt, Artificial Sequence
  Description of Artificial Sequence: Synthetic oligonucleotide
agguaagcuauuugcaccg

SEQ ID NO: 1477532 - RNA, 19 nt, Artificial Sequence
  Description of Artificial Sequence: Synthetic oligonucleotide
uuaaagacugcaucgcacu

SEQ ID NO: 1477533 - RNA, 19 nt, Artificial Sequence
  Description of Artificial Sequence: Synthetic oligonucleotide
uuauacuucucuauaguuu

SEQ ID NO: 1477534 - RNA, 19 nt, Artificial Sequence
  Description of Artificial Sequence: Synthetic oligonucleotide
acagagaaucacaacgucc

SEQ ID NO: 1477535 - RNA, 19 nt, Artificial Sequence
  Description of Artificial Sequence: Synthetic oligonucleotide
gaugccucaacaauagcag

SEQ ID NO: 1477536 - RNA, 19 nt, Artificial Sequence
  Description of Artificial Sequence: Synthetic oligonucleotide
gauuaauauaguagguggc

SEQ ID NO: 1477537 - RNA, 19 nt, Artificial Sequence
  Description of Artificial Sequence: Synthetic oligonucleotide
aacaaguuccgggagcgac

SEQ ID NO: 1477538 - RNA, 19 nt, Artificial Sequence
  Description of Artificial Sequence: Synthetic oligonucleotide
uuaucccacauaucuuucg

SEQ ID NO: 1477539 - RNA, 19 nt, Artificial Sequence
  Description of Artificial Sequence: Synthetic oligonucleotide
uuaauauaguagguggccc

SEQ ID NO: 1477540 - RNA, 19 nt, Artificial Sequence
  Description of Artificial Sequence: Synthetic oligonucleotide
ugaucuauaccguuggaua

SEQ ID NO: 1477541 - RNA, 19 nt, Artificial Sequence
  Description of Artificial Sequence: Synthetic oligonucleotide
ugaacgaugccucaacaau

SEQ ID NO: 1477542 - RNA, 19 nt, Artificial Sequence
  Description of Artificial Sequence: Synthetic oligonucleotide
uaguuuagagaacgcgggg

SEQ ID NO: 1477543 - RNA, 19 nt, Artificial Sequence
  Description of Artificial Sequence: Synthetic oligonucleotide
uagucaaaccauuugcgac

SEQ ID NO: 1477544 - RNA, 19 nt, Artificial Sequence
  Description of Artificial Sequence: Synthetic oligonucleotide
augauuaauauaguaggug

SEQ ID NO: 1477545 - RNA, 19 nt, Artificial Sequence
  Description of Artificial Sequence: Synthetic oligonucleotide
agcuugagcaaacagucug

SEQ ID NO: 1477546 - RNA, 19 nt, Artificial Sequence
  Description of Artificial Sequence: Synthetic oligonucleotide
uaauauaguagguggccca

SEQ ID NO: 1477547 - RNA, 19 nt, Artificial Sequence
  Description of Artificial Sequence: Synthetic oligonucleotide
cuuaaagacugcaucgcac

SEQ ID NO: 1477548 - RNA, 19 nt, Artificial Sequence
  Description of Artificial Sequence: Synthetic oligonucleotide
uccgggagcaugaagugag

SEQ ID NO: 1477549 - RNA, 19 nt, Artificial Sequence
  Description of Artificial Sequence: Synthetic oligonucleotide
aacuuaagucccauccuac

SEQ ID NO: 1477550 - RNA, 19 nt, Artificial Sequence
  Description of Artificial Sequence: Synthetic oligonucleotide
agaaacaggauuucccaca

SEQ ID NO: 1477551 - RNA, 19 nt, Artificial Sequence
  Description of Artificial Sequence: Synthetic oligonucleotide
ucggguauuacugugugug

SEQ ID NO: 1477552 - RNA, 19 nt, Artificial Sequence
  Description of Artificial Sequence: Synthetic oligonucleotide
accauuugcgaccgcagac

SEQ ID NO: 1477553 - RNA, 19 nt, Artificial Sequence
  Description of Artificial Sequence: Synthetic oligonucleotide
cagugaaauauaucugccg

SEQ ID NO: 1477554 - RNA, 19 nt, Artificial Sequence
  Description of Artificial Sequence: Synthetic oligonucleotide
ucaaggcucuuuuauguca

SEQ ID NO: 1477555 - RNA, 19 nt, Artificial Sequence
  Description of Artificial Sequence: Synthetic oligonucleotide
uccuauuaggaggagcccg

SEQ ID NO: 1477556 - RNA, 19 nt, Artificial Sequence
  Description of Artificial Sequence: Synthetic oligonucleotide
ucaacuuaagucccauccu

SEQ ID NO: 1477557 - RNA, 19 nt, Artificial Sequence
  Description of Artificial Sequence: Synthetic oligonucleotide
ugaaauauaucugccguuc

SEQ ID NO: 1477558 - RNA, 19 nt, Artificial Sequence
  Description of Artificial Sequence: Synthetic oligonucleotide
gaagaaagacgugagugug

SEQ ID NO: 1477559 - RNA, 19 nt, Artificial Sequence
  Description of Artificial Sequence: Synthetic oligonucleotide
uguguguaacagcuaaaac

SEQ ID NO: 1477560 - RNA, 19 nt, Artificial Sequence
  Description of Artificial Sequence: Synthetic oligonucleotide
cagguaagcuauuugcacc

SEQ ID NO: 1477561 - RNA, 19 nt, Artificial Sequence
  Description of Artificial Sequence: Synthetic oligonucleotide
uaucccacauaucuuucgc

SEQ ID NO: 1477562 - RNA, 19 nt, Artificial Sequence
  Description of Artificial Sequence: Synthetic oligonucleotide
gcuaaaacaagagagagga

SEQ ID NO: 1477563 - RNA, 19 nt, Artificial Sequence
  Description of Artificial Sequence: Synthetic oligonucleotide
uaagcuauuugcaccgcga

SEQ ID NO: 1477564 - RNA, 19 nt, Artificial Sequence
  Description of Artificial Sequence: Synthetic oligonucleotide
aauaggcauugccaacaag

SEQ ID NO: 1477565 - RNA, 19 nt, Artificial Sequence
  Description of Artificial Sequence: Synthetic oligonucleotide
aacgaugccucaacaauag

SEQ ID NO: 1477566 - RNA, 19 nt, Artificial Sequence
  Description of Artificial Sequence: Synthetic oligonucleotide
ugaagacggacuaaagaau

SEQ ID NO: 1477567 - RNA, 19 nt, Artificial Sequence
  Description of Artificial Sequence: Synthetic oligonucleotide
gugaagacggacuaaagaa

SEQ ID NO: 1477568 - RNA, 19 nt, Artificial Sequence
  Description of Artificial Sequence: Synthetic oligonucleotide
ucccacauaucuuucgccc

SEQ ID NO: 1477569 - RNA, 19 nt, Artificial Sequence
  Description of Artificial Sequence: Synthetic oligonucleotide
cucgcuuuccuauuaggag

SEQ ID NO: 1477570 - RNA, 19 nt, Artificial Sequence
  Description of Artificial Sequence: Synthetic oligonucleotide
aauucauuccccuggccuu

SEQ ID NO: 1477571 - RNA, 19 nt, Artificial Sequence
  Description of Artificial Sequence: Synthetic oligonucleotide
aaaaugcaaagcccacacu

SEQ ID NO: 1477572 - RNA, 19 nt, Artificial Sequence
  Description of Artificial Sequence: Synthetic oligonucleotide
cugccguucaacuuaaguc

SEQ ID NO: 1477573 - RNA, 19 nt, Artificial Sequence
  Description of Artificial Sequence: Synthetic oligonucleotide
cacacggucuugauguucg

SEQ ID NO: 1477574 - RNA, 19 nt, Artificial Sequence
  Description of Artificial Sequence: Synthetic oligonucleotide
guucgaauaagcugccuug

SEQ ID NO: 1477575 - RNA, 19 nt, Artificial Sequence
  Description of Artificial Sequence: Synthetic oligonucleotide
uaucuuucgccccuuccug

SEQ ID NO: 1477576 - RNA, 19 nt, Artificial Sequence
  Description of Artificial Sequence: Synthetic oligonucleotide
uucgaauaagcugccuugg

SEQ ID NO: 1477577 - RNA, 19 nt, Artificial Sequence
  Description of Artificial Sequence: Synthetic oligonucleotide
ggaucagugaaauauaucu

SEQ ID NO: 1477578 - RNA, 19 nt, Artificial Sequence
  Description of Artificial Sequence: Synthetic oligonucleotide
gaucagugaaauauaucug

SEQ ID NO: 1477579 - RNA, 19 nt, Artificial Sequence
  Description of Artificial Sequence: Synthetic oligonucleotide
aucaaggcucuuuuauguc

SEQ ID NO: 1477580 - RNA, 19 nt, Artificial Sequence
  Description of Artificial Sequence: Synthetic oligonucleotide
gaacgaauggcucuuccuc

SEQ ID NO: 1477581 - RNA, 19 nt, Artificial Sequence
  Description of Artificial Sequence: Synthetic oligonucleotide
auauucggguauuacugug

SEQ ID NO: 1477582 - RNA, 19 nt, Artificial Sequence
  Description of Artificial Sequence: Synthetic oligonucleotide
uauucggguauuacugugu

SEQ ID NO: 1477583 - RNA, 19 nt, Artificial Sequence
  Description of Artificial Sequence: Synthetic oligonucleotide
ugccucaacaauagcaggu

SEQ ID NO: 1477584 - RNA, 19 nt, Artificial Sequence
  Description of Artificial Sequence: Synthetic oligonucleotide
auuucccacaaucccauga

SEQ ID NO: 1477585 - RNA, 19 nt, Artificial Sequence
  Description of Artificial Sequence: Synthetic oligonucleotide
aaacagucugaaaagcccu

SEQ ID NO: 1477586 - RNA, 19 nt, Artificial Sequence
  Description of Artificial Sequence: Synthetic oligonucleotide
gugagugugaguauucacc

SEQ ID NO: 1477587 - RNA, 19 nt, Artificial Sequence
  Description of Artificial Sequence: Synthetic oligonucleotide
agaaagacgugagugugag

SEQ ID NO: 1477588 - RNA, 19 nt, Artificial Sequence
  Description of Artificial Sequence: Synthetic oligonucleotide
guaagcuauuugcaccgcg

SEQ ID NO: 1477589 - RNA, 19 nt, Artificial Sequence
  Description of Artificial Sequence: Synthetic oligonucleotide
aaagacugcaucgcacuug

SEQ ID NO: 1477590 - RNA, 19 nt, Artificial Sequence
  Description of Artificial Sequence: Synthetic oligonucleotide
ucgauuuccgggagcauga

SEQ ID NO: 1477591 - RNA, 19 nt, Artificial Sequence
  Description of Artificial Sequence: Synthetic oligonucleotide
auaucugccguucaacuua

SEQ ID NO: 1477592 - RNA, 19 nt, Artificial Sequence
  Description of Artificial Sequence: Synthetic oligonucleotide
uauuacuguguguguaaca

SEQ ID NO: 1477593 - RNA, 19 nt, Artificial Sequence
  Description of Artificial Sequence: Synthetic oligonucleotide
aagccaggucgcuaaagcu

SEQ ID NO: 1477594 - RNA, 19 nt, Artificial Sequence
  Description of Artificial Sequence: Synthetic oligonucleotide
ugugugugaagacggacua

SEQ ID NO: 1477595 - RNA, 19 nt, Artificial Sequence
  Description of Artificial Sequence: Synthetic oligonucleotide
aguuccgggagcgacagag

SEQ ID NO: 1477596 - RNA, 19 nt, Artificial Sequence
  Description of Artificial Sequence: Synthetic oligonucleotide
guacuguggaagaaagacg

SEQ ID NO: 1477597 - RNA, 19 nt, Artificial Sequence
  Description of Artificial Sequence: Synthetic oligonucleotide
auaccguuggauauucggg

SEQ ID NO: 1477598 - RNA, 19 nt, Artificial Sequence
  Description of Artificial Sequence: Synthetic oligonucleotide
ggauauucggguauuacug

SEQ ID NO: 1477599 - RNA, 19 nt, Artificial Sequence
  Description of Artificial Sequence: Synthetic oligonucleotide
uucgucuugucguccaggc

SEQ ID NO: 1477600 - RNA, 19 nt, Artificial Sequence
  Description of Artificial Sequence: Synthetic oligonucleotide
augccucaacaauagcagg

SEQ ID NO: 1477601 - RNA, 19 nt, Artificial Sequence
  Description of Artificial Sequence: Synthetic oligonucleotide
uaccguuggauauucgggu

SEQ ID NO: 1477602 - RNA, 19 nt, Artificial Sequence
  Description of Artificial Sequence: Synthetic oligonucleotide
uaguuaguuuagagaacgc

SEQ ID NO: 1477603 - RNA, 19 nt, Artificial Sequence
  Description of Artificial Sequence: Synthetic oligonucleotide
uauuaggaggagcccguca

SEQ ID NO: 1477604 - RNA, 19 nt, Artificial Sequence
  Description of Artificial Sequence: Synthetic oligonucleotide
agcuaaaacaagagagagg

SEQ ID NO: 1477605 - RNA, 19 nt, Artificial Sequence
  Description of Artificial Sequence: Synthetic oligonucleotide
aucacaacguccucagaga

SEQ ID NO: 1477606 - RNA, 19 nt, Artificial Sequence
  Description of Artificial Sequence: Synthetic oligonucleotide
guauucaccggaugcuucc

SEQ ID NO: 1477607 - RNA, 19 nt, Artificial Sequence
  Description of Artificial Sequence: Synthetic oligonucleotide
auucggguauuacugugug

SEQ ID NO: 1477608 - RNA, 19 nt, Artificial Sequence
  Description of Artificial Sequence: Synthetic oligonucleotide
aaccauuugcgaccgcaga

SEQ ID NO: 1477609 - RNA, 19 nt, Artificial Sequence
  Description of Artificial Sequence: Synthetic oligonucleotide
accugaacgaugccucaac

SEQ ID NO: 1477610 - RNA, 19 nt, Artificial Sequence
  Description of Artificial Sequence: Synthetic oligonucleotide
auuaggaggagcccgucau

SEQ ID NO: 1477611 - RNA, 19 nt, Artificial Sequence
  Description of Artificial Sequence: Synthetic oligonucleotide
uacguuuagucaaaccauu

SEQ ID NO: 1477612 - RNA, 19 nt, Artificial Sequence
  Description of Artificial Sequence: Synthetic oligonucleotide
cuggcaauccguaagagcu

SEQ ID NO: 1477613 - RNA, 19 nt, Artificial Sequence
  Description of Artificial Sequence: Synthetic oligonucleotide
gaauucauuccccuggccu

SEQ ID NO: 1477614 - RNA, 19 nt, Artificial Sequence
  Description of Artificial Sequence: Synthetic oligonucleotide
uucgcuuuccuggaggaga

SEQ ID NO: 1477615 - RNA, 19 nt, Artificial Sequence
  Description of Artificial Sequence: Synthetic oligonucleotide
uccucgcuuuccuauuagg

SEQ ID NO: 1477616 - RNA, 19 nt, Artificial Sequence
  Description of Artificial Sequence: Synthetic oligonucleotide
uaaaaucaaggcucuuuua

SEQ ID NO: 1477617 - RNA, 19 nt, Artificial Sequence
  Description of Artificial Sequence: Synthetic oligonucleotide
uugucguccaggcccugcg

SEQ ID NO: 1477618 - RNA, 19 nt, Artificial Sequence
  Description of Artificial Sequence: Synthetic oligonucleotide
aguucgaauaagcugccuu

SEQ ID NO: 1477619 - RNA, 19 nt, Artificial Sequence
  Description of Artificial Sequence: Synthetic oligonucleotide
aucuuucgccccuuccugg

SEQ ID NO: 1477620 - RNA, 19 nt, Artificial Sequence
  Description of Artificial Sequence: Synthetic oligonucleotide
agaacgaauggcucuuccu

SEQ ID NO: 1477621 - RNA, 19 nt, Artificial Sequence
  Description of Artificial Sequence: Synthetic oligonucleotide
caguuuaucccacauaucu

SEQ ID NO: 1477622 - RNA, 19 nt, Artificial Sequence
  Description of Artificial Sequence: Synthetic oligonucleotide
agagaaucacaacguccuc

SEQ ID NO: 1477623 - RNA, 19 nt, Artificial Sequence
  Description of Artificial Sequence: Synthetic oligonucleotide
uugccguuuucuuuugugu

SEQ ID NO: 1477624 - RNA, 19 nt, Artificial Sequence
  Description of Artificial Sequence: Synthetic oligonucleotide
uucauguuaucaacaugau

SEQ ID NO: 1477625 - RNA, 19 nt, Artificial Sequence
  Description of Artificial Sequence: Synthetic oligonucleotide
gagaacgaauggcucuucc

SEQ ID NO: 1477626 - RNA, 19 nt, Artificial Sequence
  Description of Artificial Sequence: Synthetic oligonucleotide
gauuuccgggagcaugaag

SEQ ID NO: 1477627 - RNA, 19 nt, Artificial Sequence
  Description of Artificial Sequence: Synthetic oligonucleotide
uccuacguuuagucaaacc

SEQ ID NO: 1477628 - RNA, 19 nt, Artificial Sequence
  Description of Artificial Sequence: Synthetic oligonucleotide
ugcaaagcccacacugugu

SEQ ID NO: 1477629 - RNA, 19 nt, Artificial Sequence
  Description of Artificial Sequence: Synthetic oligonucleotide
ucgaauaagcugccuugga

SEQ ID NO: 1477630 - RNA, 19 nt, Artificial Sequence
  Description of Artificial Sequence: Synthetic oligonucleotide
ugaguguuuucaacaucac

SEQ ID NO: 1477631 - RNA, 19 nt, Artificial Sequence
  Description of Artificial Sequence: Synthetic oligonucleotide
uuccgggagcgacagagac

SEQ ID NO: 1477632 - RNA, 19 nt, Artificial Sequence
  Description of Artificial Sequence: Synthetic oligonucleotide
cuuuccuauuaggaggagc

SEQ ID NO: 1477633 - RNA, 19 nt, Artificial Sequence
  Description of Artificial Sequence: Synthetic oligonucleotide
cuuacccuuaaaaugcaaa

SEQ ID NO: 1477634 - RNA, 19 nt, Artificial Sequence
  Description of Artificial Sequence: Synthetic oligonucleotide
ugugaucuauaccguugga

SEQ ID NO: 1477635 - RNA, 19 nt, Artificial Sequence
  Description of Artificial Sequence: Synthetic oligonucleotide
ucaguuuaucccacauauc

SEQ ID NO: 1477636 - RNA, 19 nt, Artificial Sequence
  Description of Artificial Sequence: Synthetic oligonucleotide
gucaaaccauuugcgaccg

SEQ ID NO: 1477637 - RNA, 19 nt, Artificial Sequence
  Description of Artificial Sequence: Synthetic oligonucleotide
ucuauaccguuggauauuc

SEQ ID NO: 1477638 - RNA, 19 nt, Artificial Sequence
  Description of Artificial Sequence: Synthetic oligonucleotide
aguauucaccggaugcuuc

SEQ ID NO: 1477639 - RNA, 19 nt, Artificial Sequence
  Description of Artificial Sequence: Synthetic oligonucleotide
acgaugccucaacaauagc

SEQ ID NO: 1477640 - RNA, 19 nt, Artificial Sequence
  Description of Artificial Sequence: Synthetic oligonucleotide
ucaccggaugcuucccacg

SEQ ID NO: 1477641 - RNA, 19 nt, Artificial Sequence
  Description of Artificial Sequence: Synthetic oligonucleotide
ccuacguuuagucaaacca

SEQ ID NO: 1477642 - RNA, 19 nt, Artificial Sequence
  Description of Artificial Sequence: Synthetic oligonucleotide
gaaagcgccgggagcaggg

SEQ ID NO: 1477643 - RNA, 19 nt, Artificial Sequence
  Description of Artificial Sequence: Synthetic oligonucleotide
gaagacggacuaaagaaua

SEQ ID NO: 1477644 - RNA, 19 nt, Artificial Sequence
  Description of Artificial Sequence: Synthetic oligonucleotide
ucuuacccuuaaaaugcaa

SEQ ID NO: 1477645 - RNA, 19 nt, Artificial Sequence
  Description of Artificial Sequence: Synthetic oligonucleotide
aggaucagugaaauauauc

SEQ ID NO: 1477646 - RNA, 19 nt, Artificial Sequence
  Description of Artificial Sequence: Synthetic oligonucleotide
gauauucggguauuacugu

SEQ ID NO: 1477647 - RNA, 19 nt, Artificial Sequence
  Description of Artificial Sequence: Synthetic oligonucleotide
uuugcgaccgcagaccuuu

SEQ ID NO: 1477648 - RNA, 19 nt, Artificial Sequence
  Description of Artificial Sequence: Synthetic oligonucleotide
uuggauauucggguauuac

SEQ ID NO: 1477649 - RNA, 19 nt, Artificial Sequence
  Description of Artificial Sequence: Synthetic oligonucleotide
ucuuucgccccuuccuggc

SEQ ID NO: 1477650 - RNA, 19 nt, Artificial Sequence
  Description of Artificial Sequence: Synthetic oligonucleotide
uguguguguaacagcuaaa

SEQ ID NO: 1477651 - RNA, 19 nt, Artificial Sequence
  Description of Artificial Sequence: Synthetic oligonucleotide
aguaugugcacacggucuu

SEQ ID NO: 1477652 - RNA, 19 nt, Artificial Sequence
  Description of Artificial Sequence: Synthetic oligonucleotide
caucgcacuugccugcugc

SEQ ID NO: 1477653 - RNA, 19 nt, Artificial Sequence
  Description of Artificial Sequence: Synthetic oligonucleotide
ggagcaugaagugagugug

SEQ ID NO: 1477654 - RNA, 19 nt, Artificial Sequence
  Description of Artificial Sequence: Synthetic oligonucleotide
guguguuuucgcuuuccug

SEQ ID NO: 1477655 - RNA, 19 nt, Artificial Sequence
  Description of Artificial Sequence: Synthetic oligonucleotide
aagacgugagugugaguau

SEQ ID NO: 1477656 - RNA, 19 nt, Artificial Sequence
  Description of Artificial Sequence: Synthetic oligonucleotide
caccuuucccgccacacac

SEQ ID NO: 1477657 - RNA, 19 nt, Artificial Sequence
  Description of Artificial Sequence: Synthetic oligonucleotide
gacggacuaaagaauaaaa

SEQ ID NO: 1477658 - RNA, 19 nt, Artificial Sequence
  Description of Artificial Sequence: Synthetic oligonucleotide
uggacaccacuccugaauu

SEQ ID NO: 1477659 - RNA, 19 nt, Artificial Sequence
  Description of Artificial Sequence: Synthetic oligonucleotide
agaccuuuaaauaguuagu

SEQ ID NO: 1477660 - RNA, 19 nt, Artificial Sequence
  Description of Artificial Sequence: Synthetic oligonucleotide
ugugugugugaagacggac

SEQ ID NO: 1477661 - RNA, 19 nt, Artificial Sequence
  Description of Artificial Sequence: Synthetic oligonucleotide
cagcggaccugaacgaugc

SEQ ID NO: 1477662 - RNA, 19 nt, Artificial Sequence
  Description of Artificial Sequence: Synthetic oligonucleotide
gaucuauaccguuggauau

SEQ ID NO: 1477663 - RNA, 19 nt, Artificial Sequence
  Description of Artificial Sequence: Synthetic oligonucleotide
uaaagacugcaucgcacuu

SEQ ID NO: 1477664 - RNA, 19 nt, Artificial Sequence
  Description of Artificial Sequence: Synthetic oligonucleotide
uguucgucuugucguccag

SEQ ID NO: 1477665 - RNA, 19 nt, Artificial Sequence
  Description of Artificial Sequence: Synthetic oligonucleotide
caugauuaauauaguaggu

SEQ ID NO: 1477666 - RNA, 19 nt, Artificial Sequence
  Description of Artificial Sequence: Synthetic oligonucleotide
uaagucccauccuacguuu

SEQ ID NO: 1477667 - RNA, 19 nt, Artificial Sequence
  Description of Artificial Sequence: Synthetic oligonucleotide
uggcaauccguaagagcug

SEQ ID NO: 1477668 - RNA, 19 nt, Artificial Sequence
  Description of Artificial Sequence: Synthetic oligonucleotide
acauaucuuucgccccuuc

SEQ ID NO: 1477669 - RNA, 19 nt, Artificial Sequence
  Description of Artificial Sequence: Synthetic oligonucleotide
gaaauccucccaguaugug

SEQ ID NO: 1477670 - RNA, 19 nt, Artificial Sequence
  Description of Artificial Sequence: Synthetic oligonucleotide
gagcaugaagugagugugg

SEQ ID NO: 1477671 - RNA, 19 nt, Artificial Sequence
  Description of Artificial Sequence: Synthetic oligonucleotide
gauguucgucuugucgucc

SEQ ID NO: 1477672 - RNA, 19 nt, Artificial Sequence
  Description of Artificial Sequence: Synthetic oligonucleotide
cuauaccguuggauauucg

SEQ ID NO: 1477673 - RNA, 19 nt, Artificial Sequence
  Description of Artificial Sequence: Synthetic oligonucleotide
ucucuauaguuuguagcaa

SEQ ID NO: 1477674 - RNA, 19 nt, Artificial Sequence
  Description of Artificial Sequence: Synthetic oligonucleotide
uguuaucaacaugauuaau

SEQ ID NO: 1477675 - RNA, 19 nt, Artificial Sequence
  Description of Artificial Sequence: Synthetic oligonucleotide
ugucguccaggcccugcgg

SEQ ID NO: 1477676 - RNA, 19 nt, Artificial Sequence
  Description of Artificial Sequence: Synthetic oligonucleotide
aaagcugccgagagagaca

SEQ ID NO: 1477677 - RNA, 19 nt, Artificial Sequence
  Description of Artificial Sequence: Synthetic oligonucleotide
gagacuuuaugcacuggga

SEQ ID NO: 1477678 - RNA, 19 nt, Artificial Sequence
  Description of Artificial Sequence: Synthetic oligonucleotide
cugucucuuacccuuaaaa

SEQ ID NO: 1477679 - RNA, 19 nt, Artificial Sequence
  Description of Artificial Sequence: Synthetic oligonucleotide
gacugcaucgcacuugccu

SEQ ID NO: 1477680 - RNA, 19 nt, Artificial Sequence
  Description of Artificial Sequence: Synthetic oligonucleotide
aagacggacuaaagaauaa

SEQ ID NO: 1477681 - RNA, 19 nt, Artificial Sequence
  Description of Artificial Sequence: Synthetic oligonucleotide
cucgauuuccgggagcaug

SEQ ID NO: 1477682 - RNA, 19 nt, Artificial Sequence
  Description of Artificial Sequence: Synthetic oligonucleotide
uucaccggaugcuucccac

SEQ ID NO: 1477683 - RNA, 19 nt, Artificial Sequence
  Description of Artificial Sequence: Synthetic oligonucleotide
gggaaaacaaaggcagcgg

SEQ ID NO: 1477684 - RNA, 19 nt, Artificial Sequence
  Description of Artificial Sequence: Synthetic oligonucleotide
aacguccucagagaacgaa

SEQ ID NO: 1477685 - RNA, 19 nt, Artificial Sequence
  Description of Artificial Sequence: Synthetic oligonucleotide
cuguggaagaaagacguga

SEQ ID NO: 1477686 - RNA, 19 nt, Artificial Sequence
  Description of Artificial Sequence: Synthetic oligonucleotide
ucgucuugucguccaggcc

SEQ ID NO: 1477687 - RNA, 19 nt, Artificial Sequence
  Description of Artificial Sequence: Synthetic oligonucleotide
ugccgcagaguucgaauaa

SEQ ID NO: 1477688 - RNA, 19 nt, Artificial Sequence
  Description of Artificial Sequence: Synthetic oligonucleotide
gcgacagagacuuuaugca

SEQ ID NO: 1477689 - RNA, 19 nt, Artificial Sequence
  Description of Artificial Sequence: Synthetic oligonucleotide
cuguguguguaacagcuaa

SEQ ID NO: 1477690 - RNA, 19 nt, Artificial Sequence
  Description of Artificial Sequence: Synthetic oligonucleotide
guauuacuguguguguaac

SEQ ID NO: 1477691 - RNA, 19 nt, Artificial Sequence
  Description of Artificial Sequence: Synthetic oligonucleotide
gagcgacagagacuuuaug

SEQ ID NO: 1477692 - RNA, 19 nt, Artificial Sequence
  Description of Artificial Sequence: Synthetic oligonucleotide
agccaggucgcuaaagcug

SEQ ID NO: 1477693 - RNA, 19 nt, Artificial Sequence
  Description of Artificial Sequence: Synthetic oligonucleotide
agugaccaaagcauuuccu

SEQ ID NO: 1477694 - RNA, 19 nt, Artificial Sequence
  Description of Artificial Sequence: Synthetic oligonucleotide
gaccgcagaccuuuaaaua

SEQ ID NO: 1477695 - RNA, 19 nt, Artificial Sequence
  Description of Artificial Sequence: Synthetic oligonucleotide
uauucaccggaugcuuccc

SEQ ID NO: 1477696 - RNA, 19 nt, Artificial Sequence
  Description of Artificial Sequence: Synthetic oligonucleotide
caaguuccgggagcgacag

SEQ ID NO: 1477697 - RNA, 19 nt, Artificial Sequence
  Description of Artificial Sequence: Synthetic oligonucleotide
gaacgaugccucaacaaua

SEQ ID NO: 1477698 - RNA, 19 nt, Artificial Sequence
  Description of Artificial Sequence: Synthetic oligonucleotide
ucgcuuuccuggaggagaa

SEQ ID NO: 1477699 - RNA, 19 nt, Artificial Sequence
  Description of Artificial Sequence: Synthetic oligonucleotide
aggucgcuaaagcugccga

SEQ ID NO: 1477700 - RNA, 19 nt, Artificial Sequence
  Description of Artificial Sequence: Synthetic oligonucleotide
caaaccauuugcgaccgca

SEQ ID NO: 1477701 - RNA, 19 nt, Artificial Sequence
  Description of Artificial Sequence: Synthetic oligonucleotide
auguucgucuugucgucca

SEQ ID NO: 1477702 - RNA, 19 nt, Artificial Sequence
  Description of Artificial Sequence: Synthetic oligonucleotide
uucggguauuacugugugu

SEQ ID NO: 1477703 - RNA, 19 nt, Artificial Sequence
  Description of Artificial Sequence: Synthetic oligonucleotide
uuucgcuuuccuggaggag

SEQ ID NO: 1477704 - RNA, 19 nt, Artificial Sequence
  Description of Artificial Sequence: Synthetic oligonucleotide
gguauuacuguguguguaa

SEQ ID NO: 1477705 - RNA, 19 nt, Artificial Sequence
  Description of Artificial Sequence: Synthetic oligonucleotide
agcgccgggagcagggacc

SEQ ID NO: 1477706 - RNA, 19 nt, Artificial Sequence
  Description of Artificial Sequence: Synthetic oligonucleotide
uuucgccccuuccuggcaa

SEQ ID NO: 1477707 - RNA, 19 nt, Artificial Sequence
  Description of Artificial Sequence: Synthetic oligonucleotide
guucgucuugucguccagg

SEQ ID NO: 1477708 - RNA, 19 nt, Artificial Sequence
  Description of Artificial Sequence: Synthetic oligonucleotide
uccgggagcgacagagacu

SEQ ID NO: 1477709 - RNA, 19 nt, Artificial Sequence
  Description of Artificial Sequence: Synthetic oligonucleotide
cugaacgaugccucaacaa

SEQ ID NO: 1477710 - RNA, 19 nt, Artificial Sequence
  Description of Artificial Sequence: Synthetic oligonucleotide
auucaccggaugcuuccca

SEQ ID NO: 1477711 - RNA, 19 nt, Artificial Sequence
  Description of Artificial Sequence: Synthetic oligonucleotide
agcggaccugaacgaugcc

SEQ ID NO: 1477712 - RNA, 19 nt, Artificial Sequence
  Description of Artificial Sequence: Synthetic oligonucleotide
gccgcugccgcagaguucg

SEQ ID NO: 1477713 - RNA, 19 nt, Artificial Sequence
  Description of Artificial Sequence: Synthetic oligonucleotide
auccuacguuuagucaaac

SEQ ID NO: 1477714 - RNA, 19 nt, Artificial Sequence
  Description of Artificial Sequence: Synthetic oligonucleotide
gugugaagacggacuaaag

SEQ ID NO: 1477715 - RNA, 19 nt, Artificial Sequence
  Description of Artificial Sequence: Synthetic oligonucleotide
cucuuacccuuaaaaugca

SEQ ID NO: 1477716 - RNA, 19 nt, Artificial Sequence
  Description of Artificial Sequence: Synthetic oligonucleotide
cuggucccgagcucagaag

SEQ ID NO: 1477717 - RNA, 19 nt, Artificial Sequence
  Description of Artificial Sequence: Synthetic oligonucleotide
accguuggauauucgggua

SEQ ID NO: 1477718 - RNA, 19 nt, Artificial Sequence
  Description of Artificial Sequence: Synthetic oligonucleotide
gacgugagugugaguauuc

SEQ ID NO: 1477719 - RNA, 19 nt, Artificial Sequence
  Description of Artificial Sequence: Synthetic oligonucleotide
cuccucgcuuuccuauuag

SEQ ID NO: 1477720 - RNA, 19 nt, Artificial Sequence
  Description of Artificial Sequence: Synthetic oligonucleotide
caauccguaagagcuguga

SEQ ID NO: 1477721 - RNA, 19 nt, Artificial Sequence
  Description of Artificial Sequence: Synthetic oligonucleotide
ugucugucucuuacccuua

SEQ ID NO: 1477722 - RNA, 19 nt, Artificial Sequence
  Description of Artificial Sequence: Synthetic oligonucleotide
cguuuagucaaaccauuug

SEQ ID NO: 1477723 - RNA, 19 nt, Artificial Sequence
  Description of Artificial Sequence: Synthetic oligonucleotide
gugaccgugcagcugugga

SEQ ID NO: 1477724 - RNA, 19 nt, Artificial Sequence
  Description of Artificial Sequence: Synthetic oligonucleotide
ugcaccagguaagcuauuu

SEQ ID NO: 1477725 - RNA, 19 nt, Artificial Sequence
  Description of Artificial Sequence: Synthetic oligonucleotide
ccggaugcuucccacgugg

SEQ ID NO: 1477726 - RNA, 19 nt, Artificial Sequence
  Description of Artificial Sequence: Synthetic oligonucleotide
caggucgcuaaagcugccg

SEQ ID NO: 1477727 - RNA, 19 nt, Artificial Sequence
  Description of Artificial Sequence: Synthetic oligonucleotide
caguaugugcacacggucu

SEQ ID NO: 1477728 - RNA, 19 nt, Artificial Sequence
  Description of Artificial Sequence: Synthetic oligonucleotide
aucuauaccguuggauauu

SEQ ID NO: 1477729 - RNA, 19 nt, Artificial Sequence
  Description of Artificial Sequence: Synthetic oligonucleotide
cauugccaacaaguuccgg

SEQ ID NO: 1477730 - RNA, 19 nt, Artificial Sequence
  Description of Artificial Sequence: Synthetic oligonucleotide
gaggaucagugaaauauau

SEQ ID NO: 1477731 - RNA, 19 nt, Artificial Sequence
  Description of Artificial Sequence: Synthetic oligonucleotide
cucucgauuuccgggagca

SEQ ID NO: 1477732 - RNA, 19 nt, Artificial Sequence
  Description of Artificial Sequence: Synthetic oligonucleotide
acggccugcaccagguaag

SEQ ID NO: 1477733 - RNA, 19 nt, Artificial Sequence
  Description of Artificial Sequence: Synthetic oligonucleotide
cccacauaucuuucgcccc

SEQ ID NO: 1477734 - RNA, 19 nt, Artificial Sequence
  Description of Artificial Sequence: Synthetic oligonucleotide
gaccccgccgccccauugc

SEQ ID NO: 1477735 - RNA, 19 nt, Artificial Sequence
  Description of Artificial Sequence: Synthetic oligonucleotide
ugcggguaguuggccaugc

SEQ ID NO: 1477736 - RNA, 19 nt, Artificial Sequence
  Description of Artificial Sequence: Synthetic oligonucleotide
acuguggaagaaagacgug

SEQ ID NO: 1477737 - RNA, 19 nt, Artificial Sequence
  Description of Artificial Sequence: Synthetic oligonucleotide
cccgagcucagaaggaaag

SEQ ID NO: 1477738 - RNA, 19 nt, Artificial Sequence
  Description of Artificial Sequence: Synthetic oligonucleotide
acgugagugugaguauuca

SEQ ID NO: 1477739 - RNA, 19 nt, Artificial Sequence
  Description of Artificial Sequence: Synthetic oligonucleotide
cauccuacguuuagucaaa

SEQ ID NO: 1477740 - RNA, 19 nt, Artificial Sequence
  Description of Artificial Sequence: Synthetic oligonucleotide
ccauccuacguuuagucaa

SEQ ID NO: 1477741 - RNA, 19 nt, Artificial Sequence
  Description of Artificial Sequence: Synthetic oligonucleotide
cagagacuuuaugcacugg

SEQ ID NO: 1477742 - RNA, 19 nt, Artificial Sequence
  Description of Artificial Sequence: Synthetic oligonucleotide
ugcgaccgcagaccuuuaa

SEQ ID NO: 1477743 - RNA, 19 nt, Artificial Sequence
  Description of Artificial Sequence: Synthetic oligonucleotide
cgaugccucaacaauagca

SEQ ID NO: 1477744 - RNA, 19 nt, Artificial Sequence
  Description of Artificial Sequence: Synthetic oligonucleotide
agacgugagugugaguauu

SEQ ID NO: 1477745 - RNA, 19 nt, Artificial Sequence
  Description of Artificial Sequence: Synthetic oligonucleotide
cucccaguaugugcacacg

SEQ ID NO: 1477746 - RNA, 19 nt, Artificial Sequence
  Description of Artificial Sequence: Synthetic oligonucleotide
ccaguaugugcacacgguc

SEQ ID NO: 1477747 - RNA, 19 nt, Artificial Sequence
  Description of Artificial Sequence: Synthetic oligonucleotide
guaugugcacacggucuug

SEQ ID NO: 1477748 - RNA, 19 nt, Artificial Sequence
  Description of Artificial Sequence: Synthetic oligonucleotide
ccauuugcgaccgcagacc

SEQ ID NO: 1477749 - RNA, 19 nt, Artificial Sequence
  Description of Artificial Sequence: Synthetic oligonucleotide
accggaugcuucccacgug

SEQ ID NO: 1477750 - RNA, 19 nt, Artificial Sequence
  Description of Artificial Sequence: Synthetic oligonucleotide
ccgcagaguucgaauaagc

SEQ ID NO: 1477751 - RNA, 19 nt, Artificial Sequence
  Description of Artificial Sequence: Synthetic oligonucleotide
gcgaggaucagugaaauau

SEQ ID NO: 1477752 - RNA, 19 nt, Artificial Sequence
  Description of Artificial Sequence: Synthetic oligonucleotide
agcacggaaagcgccggga

SEQ ID NO: 1477753 - RNA, 19 nt, Artificial Sequence
  Description of Artificial Sequence: Synthetic oligonucleotide
guggacaccacuccugaau

SEQ ID NO: 1477754 - RNA, 19 nt, Artificial Sequence
  Description of Artificial Sequence: Synthetic oligonucleotide
gugaaauauaucugccguu

SEQ ID NO: 1477755 - RNA, 19 nt, Artificial Sequence
  Description of Artificial Sequence: Synthetic oligonucleotide
cuugagcaaacagucugaa

SEQ ID NO: 1477756 - RNA, 19 nt, Artificial Sequence
  Description of Artificial Sequence: Synthetic oligonucleotide
acguuuagucaaaccauuu

SEQ ID NO: 1477757 - RNA, 19 nt, Artificial Sequence
  Description of Artificial Sequence: Synthetic oligonucleotide
cgagcucagaaggaaagcc

SEQ ID NO: 1477758 - RNA, 19 nt, Artificial Sequence
  Description of Artificial Sequence: Synthetic oligonucleotide
gccucaacaauagcaggug

SEQ ID NO: 1477759 - RNA, 19 nt, Artificial Sequence
  Description of Artificial Sequence: Synthetic oligonucleotide
aaagcgccgggagcaggga

SEQ ID NO: 1477760 - RNA, 19 nt, Artificial Sequence
  Description of Artificial Sequence: Synthetic oligonucleotide
gccguucaacuuaaguccc

SEQ ID NO: 1477761 - RNA, 19 nt, Artificial Sequence
  Description of Artificial Sequence: Synthetic oligonucleotide
acagucugaaaagcccuua

SEQ ID NO: 1477762 - RNA, 19 nt, Artificial Sequence
  Description of Artificial Sequence: Synthetic oligonucleotide
cuauuaggaggagcccguc

SEQ ID NO: 1477763 - RNA, 19 nt, Artificial Sequence
  Description of Artificial Sequence: Synthetic oligonucleotide
cguccucagagaacgaaug

SEQ ID NO: 1477764 - RNA, 19 nt, Artificial Sequence
  Description of Artificial Sequence: Synthetic oligonucleotide
ugcaucgcacuugccugcu

SEQ ID NO: 1477765 - RNA, 19 nt, Artificial Sequence
  Description of Artificial Sequence: Synthetic oligonucleotide
ccucgcuuuccuauuagga

SEQ ID NO: 1477766 - RNA, 19 nt, Artificial Sequence
  Description of Artificial Sequence: Synthetic oligonucleotide
acaaucccaugaguguuuu

SEQ ID NO: 1477767 - RNA, 19 nt, Artificial Sequence
  Description of Artificial Sequence: Synthetic oligonucleotide
caaucccaugaguguuuuc

SEQ ID NO: 1477768 - RNA, 19 nt, Artificial Sequence
  Description of Artificial Sequence: Synthetic oligonucleotide
aaguuccgggagcgacaga

SEQ ID NO: 1477769 - RNA, 19 nt, Artificial Sequence
  Description of Artificial Sequence: Synthetic oligonucleotide
gggagcaugaagugagugu

SEQ ID NO: 1477770 - RNA, 19 nt, Artificial Sequence
  Description of Artificial Sequence: Synthetic oligonucleotide
cauuugcgaccgcagaccu

SEQ ID NO: 1477771 - RNA, 19 nt, Artificial Sequence
  Description of Artificial Sequence: Synthetic oligonucleotide
cacggucuugauguucguc

SEQ ID NO: 1477772 - RNA, 19 nt, Artificial Sequence
  Description of Artificial Sequence: Synthetic oligonucleotide
caccgcgaggaucagugaa

SEQ ID NO: 1477773 - RNA, 19 nt, Artificial Sequence
  Description of Artificial Sequence: Synthetic oligonucleotide
ggaaagcgccgggagcagg

SEQ ID NO: 1477774 - RNA, 19 nt, Artificial Sequence
  Description of Artificial Sequence: Synthetic oligonucleotide
acacggucuugauguucgu

SEQ ID NO: 1477775 - RNA, 19 nt, Artificial Sequence
  Description of Artificial Sequence: Synthetic oligonucleotide
gcuugagcaaacagucuga

SEQ ID NO: 1477776 - RNA, 19 nt, Artificial Sequence
  Description of Artificial Sequence: Synthetic oligonucleotide
ggacaccacuccugaauuc

SEQ ID NO: 1477777 - RNA, 19 nt, Artificial Sequence
  Description of Artificial Sequence: Synthetic oligonucleotide
accgcgaggaucagugaaa

SEQ ID NO: 1477778 - RNA, 19 nt, Artificial Sequence
  Description of Artificial Sequence: Synthetic oligonucleotide
gccgcagaguucgaauaag

SEQ ID NO: 1477779 - RNA, 19 nt, Artificial Sequence
  Description of Artificial Sequence: Synthetic oligonucleotide
gaccugaacgaugccucaa

SEQ ID NO: 1477780 - RNA, 19 nt, Artificial Sequence
  Description of Artificial Sequence: Synthetic oligonucleotide
gccccauugccgcugccgc

SEQ ID NO: 1477781 - RNA, 19 nt, Artificial Sequence
  Description of Artificial Sequence: Synthetic oligonucleotide
aagucccauccuacguuua

SEQ ID NO: 1477782 - RNA, 19 nt, Artificial Sequence
  Description of Artificial Sequence: Synthetic oligonucleotide
gaguauucaccggaugcuu

SEQ ID NO: 1477783 - RNA, 19 nt, Artificial Sequence
  Description of Artificial Sequence: Synthetic oligonucleotide
cuuucgccccuuccuggca

SEQ ID NO: 1477784 - RNA, 19 nt, Artificial Sequence
  Description of Artificial Sequence: Synthetic oligonucleotide
ggguauuacugugugugua

SEQ ID NO: 1477785 - RNA, 19 nt, Artificial Sequence
  Description of Artificial Sequence: Synthetic oligonucleotide
uucgccccuuccuggcaau

SEQ ID NO: 1477786 - RNA, 19 nt, Artificial Sequence
  Description of Artificial Sequence: Synthetic oligonucleotide
auaagcugccuuggauguu

SEQ ID NO: 1477787 - RNA, 19 nt, Artificial Sequence
  Description of Artificial Sequence: Synthetic oligonucleotide
accuuucccgccacacaca

SEQ ID NO: 1477788 - RNA, 19 nt, Artificial Sequence
  Description of Artificial Sequence: Synthetic oligonucleotide
cggaccugaacgaugccuc

SEQ ID NO: 1477789 - RNA, 19 nt, Artificial Sequence
  Description of Artificial Sequence: Synthetic oligonucleotide
gcagcggaccugaacgaug

SEQ ID NO: 1477790 - RNA, 19 nt, Artificial Sequence
  Description of Artificial Sequence: Synthetic oligonucleotide
ggaccugaacgaugccuca

SEQ ID NO: 1477791 - RNA, 19 nt, Artificial Sequence
  Description of Artificial Sequence: Synthetic oligonucleotide
ucucgauuuccgggagcau

SEQ ID NO: 1477792 - RNA, 19 nt, Artificial Sequence
  Description of Artificial Sequence: Synthetic oligonucleotide
ccugaacgaugccucaaca

SEQ ID NO: 1477793 - RNA, 19 nt, Artificial Sequence
  Description of Artificial Sequence: Synthetic oligonucleotide
cccauccuacguuuaguca

SEQ ID NO: 1477794 - RNA, 19 nt, Artificial Sequence
  Description of Artificial Sequence: Synthetic oligonucleotide
ccgagcucagaaggaaagc

SEQ ID NO: 1477795 - RNA, 19 nt, Artificial Sequence
  Description of Artificial Sequence: Synthetic oligonucleotide
uugcaccgcgaggaucagu

SEQ ID NO: 1477796 - RNA, 19 nt, Artificial Sequence
  Description of Artificial Sequence: Synthetic oligonucleotide
gggagcgacagagacuuua

SEQ ID NO: 1477797 - RNA, 19 nt, Artificial Sequence
  Description of Artificial Sequence: Synthetic oligonucleotide
ggaaauccucccaguaugu

SEQ ID NO: 1477798 - RNA, 19 nt, Artificial Sequence
  Description of Artificial Sequence: Synthetic oligonucleotide
gcuucccacguggacacca

SEQ ID NO: 1477799 - RNA, 19 nt, Artificial Sequence
  Description of Artificial Sequence: Synthetic oligonucleotide
cgcuuuccuauuaggagga

SEQ ID NO: 1477800 - RNA, 19 nt, Artificial Sequence
  Description of Artificial Sequence: Synthetic oligonucleotide
caacguccucagagaacga

SEQ ID NO: 1477801 - RNA, 19 nt, Artificial Sequence
  Description of Artificial Sequence: Synthetic oligonucleotide
gaccaccuuucccgccaca

SEQ ID NO: 1477802 - RNA, 19 nt, Artificial Sequence
  Description of Artificial Sequence: Synthetic oligonucleotide
gcuuuccuauuaggaggag

SEQ ID NO: 1477803 - RNA, 19 nt, Artificial Sequence
  Description of Artificial Sequence: Synthetic oligonucleotide
guuccgggagcgacagaga

SEQ ID NO: 1477804 - RNA, 19 nt, Artificial Sequence
  Description of Artificial Sequence: Synthetic oligonucleotide
caccggaugcuucccacgu

SEQ ID NO: 1477805 - RNA, 19 nt, Artificial Sequence
  Description of Artificial Sequence: Synthetic oligonucleotide
gaguucgaauaagcugccu

SEQ ID NO: 1477806 - RNA, 19 nt, Artificial Sequence
  Description of Artificial Sequence: Synthetic oligonucleotide
ggcaauccguaagagcugu

SEQ ID NO: 1477807 - RNA, 19 nt, Artificial Sequence
  Description of Artificial Sequence: Synthetic oligonucleotide
cccacaaucccaugagugu

SEQ ID NO: 1477808 - RNA, 19 nt, Artificial Sequence
  Description of Artificial Sequence: Synthetic oligonucleotide
cugcggguaguuggccaug

SEQ ID NO: 1477809 - RNA, 19 nt, Artificial Sequence
  Description of Artificial Sequence: Synthetic oligonucleotide
ccuauuaggaggagcccgu

SEQ ID NO: 1477810 - RNA, 19 nt, Artificial Sequence
  Description of Artificial Sequence: Synthetic oligonucleotide
auuugcgaccgcagaccuu

SEQ ID NO: 1477811 - RNA, 19 nt, Artificial Sequence
  Description of Artificial Sequence: Synthetic oligonucleotide
uugcgaccgcagaccuuua

SEQ ID NO: 1477812 - RNA, 19 nt, Artificial Sequence
  Description of Artificial Sequence: Synthetic oligonucleotide
ggggaccuggucccgagcu

SEQ ID NO: 1477813 - RNA, 19 nt, Artificial Sequence
  Description of Artificial Sequence: Synthetic oligonucleotide
ccaggucgcuaaagcugcc

SEQ ID NO: 1477814 - RNA, 19 nt, Artificial Sequence
  Description of Artificial Sequence: Synthetic oligonucleotide
ggucccgagcucagaagga

SEQ ID NO: 1477815 - RNA, 19 nt, Artificial Sequence
  Description of Artificial Sequence: Synthetic oligonucleotide
gcacacggucuugauguuc

SEQ ID NO: 1477816 - RNA, 19 nt, Artificial Sequence
  Description of Artificial Sequence: Synthetic oligonucleotide
caacaaguuccgggagcga

SEQ ID NO: 1477817 - RNA, 19 nt, Artificial Sequence
  Description of Artificial Sequence: Synthetic oligonucleotide
gcaugaagugagugugggu

SEQ ID NO: 1477818 - RNA, 19 nt, Artificial Sequence
  Description of Artificial Sequence: Synthetic oligonucleotide
gcagaccuuuaaauaguua

SEQ ID NO: 1477819 - RNA, 19 nt, Artificial Sequence
  Description of Artificial Sequence: Synthetic oligonucleotide
cgaggaucagugaaauaua

SEQ ID NO: 1477820 - RNA, 19 nt, Artificial Sequence
  Description of Artificial Sequence: Synthetic oligonucleotide
gggaccuggucccgagcuc

SEQ ID NO: 1477821 - RNA, 19 nt, Artificial Sequence
  Description of Artificial Sequence: Synthetic oligonucleotide
ggaccccgccgccccauug

SEQ ID NO: 1477822 - RNA, 19 nt, Artificial Sequence
  Description of Artificial Sequence: Synthetic oligonucleotide
cagagaacgaauggcucuu

SEQ ID NO: 1477823 - RNA, 19 nt, Artificial Sequence
  Description of Artificial Sequence: Synthetic oligonucleotide
gcaauccguaagagcugug

SEQ ID NO: 1477824 - RNA, 19 nt, Artificial Sequence
  Description of Artificial Sequence: Synthetic oligonucleotide
ccguucaacuuaaguccca

SEQ ID NO: 1477825 - RNA, 19 nt, Artificial Sequence
  Description of Artificial Sequence: Synthetic oligonucleotide
caaaggcagcggaccugaa

SEQ ID NO: 1477826 - RNA, 19 nt, Artificial Sequence
  Description of Artificial Sequence: Synthetic oligonucleotide
gcaucgcacuugccugcug

SEQ ID NO: 1477827 - RNA, 19 nt, Artificial Sequence
  Description of Artificial Sequence: Synthetic oligonucleotide
cgggagcaugaagugagug

SEQ ID NO: 1477828 - RNA, 19 nt, Artificial Sequence
  Description of Artificial Sequence: Synthetic oligonucleotide
ccgcagaccuuuaaauagu

SEQ ID NO: 1477829 - RNA, 19 nt, Artificial Sequence
  Description of Artificial Sequence: Synthetic oligonucleotide
cccgccacacacaaccugu

SEQ ID NO: 1477830 - RNA, 19 nt, Artificial Sequence
  Description of Artificial Sequence: Synthetic oligonucleotide
cgaauaagcugccuuggau

SEQ ID NO: 1477831 - RNA, 19 nt, Artificial Sequence
  Description of Artificial Sequence: Synthetic oligonucleotide
ggagcgacagagacuuuau

SEQ ID NO: 1477832 - RNA, 19 nt, Artificial Sequence
  Description of Artificial Sequence: Synthetic oligonucleotide
ccaccuuucccgccacaca

SEQ ID NO: 1477833 - RNA, 19 nt, Artificial Sequence
  Description of Artificial Sequence: Synthetic oligonucleotide
gcgccgggagcagggaccc

SEQ ID NO: 1477834 - RNA, 19 nt, Artificial Sequence
  Description of Artificial Sequence: Synthetic oligonucleotide
gcaccgcgaggaucaguga

SEQ ID NO: 1477835 - RNA, 19 nt, Artificial Sequence
  Description of Artificial Sequence: Synthetic oligonucleotide
cccugcggguaguuggcca

SEQ ID NO: 1477836 - RNA, 19 nt, Artificial Sequence
  Description of Artificial Sequence: Synthetic oligonucleotide
ccgggagcgacagagacuu

SEQ ID NO: 1477837 - RNA, 19 nt, Artificial Sequence
  Description of Artificial Sequence: Synthetic oligonucleotide
ccgugcagcuguggaaauc

SEQ ID NO: 1477838 - RNA, 19 nt, Artificial Sequence
  Description of Artificial Sequence: Synthetic oligonucleotide
agggaccccgccgccccau

SEQ ID NO: 1477839 - RNA, 19 nt, Artificial Sequence
  Description of Artificial Sequence: Synthetic oligonucleotide
cgcuaaagcugccgagaga

SEQ ID NO: 1477840 - RNA, 19 nt, Artificial Sequence
  Description of Artificial Sequence: Synthetic oligonucleotide
ccguuggauauucggguau

SEQ ID NO: 1477841 - RNA, 19 nt, Artificial Sequence
  Description of Artificial Sequence: Synthetic oligonucleotide
cacauaucuuucgccccuu

SEQ ID NO: 1477842 - RNA, 19 nt, Artificial Sequence
  Description of Artificial Sequence: Synthetic oligonucleotide
ccccauugccgcugccgca

SEQ ID NO: 1477843 - RNA, 19 nt, Artificial Sequence
  Description of Artificial Sequence: Synthetic oligonucleotide
ggcagcggaccugaacgau

SEQ ID NO: 1477844 - RNA, 19 nt, Artificial Sequence
  Description of Artificial Sequence: Synthetic oligonucleotide
cagggaccccgccgcccca

SEQ ID NO: 1477845 - RNA, 19 nt, Artificial Sequence
  Description of Artificial Sequence: Synthetic oligonucleotide
ccugcggguaguuggccau

SEQ ID NO: 1477846 - RNA, 19 nt, Artificial Sequence
  Description of Artificial Sequence: Synthetic oligonucleotide
cggaugcuucccacgugga

SEQ ID NO: 1477847 - RNA, 19 nt, Artificial Sequence
  Description of Artificial Sequence: Synthetic oligonucleotide
cggaaagcgccgggagcag

SEQ ID NO: 1477848 - RNA, 19 nt, Artificial Sequence
  Description of Artificial Sequence: Synthetic oligonucleotide
ggggugaguuugccguuuu

SEQ ID NO: 1477849 - RNA, 19 nt, Artificial Sequence
  Description of Artificial Sequence: Synthetic oligonucleotide
ccauugccgcugccgcaga

SEQ ID NO: 1477850 - RNA, 19 nt, Artificial Sequence
  Description of Artificial Sequence: Synthetic oligonucleotide
cguucaacuuaagucccau

SEQ ID NO: 1477851 - RNA, 19 nt, Artificial Sequence
  Description of Artificial Sequence: Synthetic oligonucleotide
cagggccauuccugagauu

SEQ ID NO: 1477852 - RNA, 19 nt, Artificial Sequence
  Description of Artificial Sequence: Synthetic oligonucleotide
ccguaagagcugugaccgu

SEQ ID NO: 1477853 - RNA, 19 nt, Artificial Sequence
  Description of Artificial Sequence: Synthetic oligonucleotide
ccgggagcaugaagugagu

SEQ ID NO: 1477854 - RNA, 19 nt, Artificial Sequence
  Description of Artificial Sequence: Synthetic oligonucleotide
ccgcgaggaucagugaaau

SEQ ID NO: 1477855 - RNA, 19 nt, Artificial Sequence
  Description of Artificial Sequence: Synthetic oligonucleotide
cgauuuccgggagcaugaa

SEQ ID NO: 1477856 - RNA, 19 nt, Artificial Sequence
  Description of Artificial Sequence: Synthetic oligonucleotide
cgcugccgcagaguucgaa

SEQ ID NO: 1477857 - RNA, 19 nt, Artificial Sequence
  Description of Artificial Sequence: Synthetic oligonucleotide
ccgcugccgcagaguucga

SEQ ID NO: 1477858 - RNA, 19 nt, Artificial Sequence
  Description of Artificial Sequence: Synthetic oligonucleotide
gggaccccgccgccccauu

SEQ ID NO: 1477859 - RNA, 19 nt, Artificial Sequence
  Description of Artificial Sequence: Synthetic oligonucleotide
cgggagcgacagagacuuu

SEQ ID NO: 1477860 - RNA, 19 nt, Artificial Sequence
  Description of Artificial Sequence: Synthetic oligonucleotide
ucauccaucaauaaauagg

SEQ ID NO: 1477861 - RNA, 19 nt, Artificial Sequence
  Description of Artificial Sequence: Synthetic oligonucleotide
aaaugugugaagugguagc

SEQ ID NO: 1477862 - RNA, 19 nt, Artificial Sequence
  Description of Artificial Sequence: Synthetic oligonucleotide
aagacauuacacuguauac

SEQ ID NO: 1477863 - RNA, 19 nt, Artificial Sequence
  Description of Artificial Sequence: Synthetic oligonucleotide
ucuacuauuuacaaagccc

SEQ ID NO: 1477864 - RNA, 19 nt, Artificial Sequence
  Description of Artificial Sequence: Synthetic oligonucleotide
aacaggaaaucccuggugg

SEQ ID NO: 1477865 - RNA, 19 nt, Artificial Sequence
  Description of Artificial Sequence: Synthetic oligonucleotide
aacaaggacgaaugaauac

SEQ ID NO: 1477866 - RNA, 19 nt, Artificial Sequence
  Description of Artificial Sequence: Synthetic oligonucleotide
aagacauaggaaugaaguc

SEQ ID NO: 1477867 - RNA, 19 nt, Artificial Sequence
  Description of Artificial Sequence: Synthetic oligonucleotide
aguugaggcagcuugugcc

SEQ ID NO: 1477868 - RNA, 19 nt, Artificial Sequence
  Description of Artificial Sequence: Synthetic oligonucleotide
aggacgaaugaauacagcg

SEQ ID NO: 1477869 - RNA, 19 nt, Artificial Sequence
  Description of Artificial Sequence: Synthetic oligonucleotide
aauaaaugaacaaggacga

SEQ ID NO: 1477870 - RNA, 19 nt, Artificial Sequence
  Description of Artificial Sequence: Synthetic oligonucleotide
auaaauagguaguugauaa

SEQ ID NO: 1477871 - RNA, 19 nt, Artificial Sequence
  Description of Artificial Sequence: Synthetic oligonucleotide
ugaacaugcaggaugcugc

SEQ ID NO: 1477872 - RNA, 19 nt, Artificial Sequence
  Description of Artificial Sequence: Synthetic oligonucleotide
aagugcuaugugcaaagcg

SEQ ID NO: 1477873 - RNA, 19 nt, Artificial Sequence
  Description of Artificial Sequence: Synthetic oligonucleotide
gaauacagcgaucaagacc

SEQ ID NO: 1477874 - RNA, 19 nt, Artificial Sequence
  Description of Artificial Sequence: Synthetic oligonucleotide
cugucagugggucauaucg

SEQ ID NO: 1477875 - RNA, 19 nt, Artificial Sequence
  Description of Artificial Sequence: Synthetic oligonucleotide
agagcugacacuugacagc

SEQ ID NO: 1477876 - RNA, 19 nt, Artificial Sequence
  Description of Artificial Sequence: Synthetic oligonucleotide
aaucaugugugcuccugcg

SEQ ID NO: 1477877 - RNA, 19 nt, Artificial Sequence
  Description of Artificial Sequence: Synthetic oligonucleotide
caauggauguccauguucc

SEQ ID NO: 1477878 - RNA, 19 nt, Artificial Sequence
  Description of Artificial Sequence: Synthetic oligonucleotide
aaauagguaguugauaaau

SEQ ID NO: 1477879 - RNA, 19 nt, Artificial Sequence
  Description of Artificial Sequence: Synthetic oligonucleotide
uguguaggaucuaagugca

SEQ ID NO: 1477880 - RNA, 19 nt, Artificial Sequence
  Description of Artificial Sequence: Synthetic oligonucleotide
uaugugaucugcccuaaca

SEQ ID NO: 1477881 - RNA, 19 nt, Artificial Sequence
  Description of Artificial Sequence: Synthetic oligonucleotide
acguuuauuguucaagaug

SEQ ID NO: 1477882 - RNA, 19 nt, Artificial Sequence
  Description of Artificial Sequence: Synthetic oligonucleotide
guaguugauaaauaaguga

SEQ ID NO: 1477883 - RNA, 19 nt, Artificial Sequence
  Description of Artificial Sequence: Synthetic oligonucleotide
uguauacacaagacauagg

SEQ ID NO: 1477884 - RNA, 19 nt, Artificial Sequence
  Description of Artificial Sequence: Synthetic oligonucleotide
gguagagacagauaagugc

SEQ ID NO: 1477885 - RNA, 19 nt, Artificial Sequence
  Description of Artificial Sequence: Synthetic oligonucleotide
aagugcauguugugugccc

SEQ ID NO: 1477886 - RNA, 19 nt, Artificial Sequence
  Description of Artificial Sequence: Synthetic oligonucleotide
aaguugaguagcuccagca

SEQ ID NO: 1477887 - RNA, 19 nt, Artificial Sequence
  Description of Artificial Sequence: Synthetic oligonucleotide
auagguaguugauaaauaa

SEQ ID NO: 1477888 - RNA, 19 nt, Artificial Sequence
  Description of Artificial Sequence: Synthetic oligonucleotide
aggaagccccaucauagcc

SEQ ID NO: 1477889 - RNA, 19 nt, Artificial Sequence
  Description of Artificial Sequence: Synthetic oligonucleotide
caggguuuaaggcaugugg

SEQ ID NO: 1477890 - RNA, 19 nt, Artificial Sequence
  Description of Artificial Sequence: Synthetic oligonucleotide
agaaacacguuuauuguuc

SEQ ID NO: 1477891 - RNA, 19 nt, Artificial Sequence
  Description of Artificial Sequence: Synthetic oligonucleotide
ugggaaguugaguagcucc

SEQ ID NO: 1477892 - RNA, 19 nt, Artificial Sequence
  Description of Artificial Sequence: Synthetic oligonucleotide
guuuaaggcaugugggagg

SEQ ID NO: 1477893 - RNA, 19 nt, Artificial Sequence
  Description of Artificial Sequence: Synthetic oligonucleotide
aaugaacaaggacgaauga

SEQ ID NO: 1477894 - RNA, 19 nt, Artificial Sequence
  Description of Artificial Sequence: Synthetic oligonucleotide
uuuauuguucaagauggcu

SEQ ID NO: 1477895 - RNA, 19 nt, Artificial Sequence
  Description of Artificial Sequence: Synthetic oligonucleotide
uggccacacgcacauaucg

SEQ ID NO: 1477896 - RNA, 19 nt, Artificial Sequence
  Description of Artificial Sequence: Synthetic oligonucleotide
ucauaggacuccaccgucg

SEQ ID NO: 1477897 - RNA, 19 nt, Artificial Sequence
  Description of Artificial Sequence: Synthetic oligonucleotide
cuguauacacaagacauag

SEQ ID NO: 1477898 - RNA, 19 nt, Artificial Sequence
  Description of Artificial Sequence: Synthetic oligonucleotide
gugaugagcugucauaacc

SEQ ID NO: 1477899 - RNA, 19 nt, Artificial Sequence
  Description of Artificial Sequence: Synthetic oligonucleotide
ucugcccuaacauuuggug

SEQ ID NO: 1477900 - RNA, 19 nt, Artificial Sequence
  Description of Artificial Sequence: Synthetic oligonucleotide
ugcuauaucucuccacuga

SEQ ID NO: 1477901 - RNA, 19 nt, Artificial Sequence
  Description of Artificial Sequence: Synthetic oligonucleotide
aagugaguaaacaaacagu

SEQ ID NO: 1477902 - RNA, 19 nt, Artificial Sequence
  Description of Artificial Sequence: Synthetic oligonucleotide
agacauaggaaugaagucu

SEQ ID NO: 1477903 - RNA, 19 nt, Artificial Sequence
  Description of Artificial Sequence: Synthetic oligonucleotide
uaaaugaacaaggacgaau

SEQ ID NO: 1477904 - RNA, 19 nt, Artificial Sequence
  Description of Artificial Sequence: Synthetic oligonucleotide
ugugcaaagcgcuggcuag

SEQ ID NO: 1477905 - RNA, 19 nt, Artificial Sequence
  Description of Artificial Sequence: Synthetic oligonucleotide
ucguucagcacuguugagg

SEQ ID NO: 1477906 - RNA, 19 nt, Artificial Sequence
  Description of Artificial Sequence: Synthetic oligonucleotide
caaggacgaaugaauacag

SEQ ID NO: 1477907 - RNA, 19 nt, Artificial Sequence
  Description of Artificial Sequence: Synthetic oligonucleotide
aaugugugaagugguagcu

SEQ ID NO: 1477908 - RNA, 19 nt, Artificial Sequence
  Description of Artificial Sequence: Synthetic oligonucleotide
auauucaugggugccacag

SEQ ID NO: 1477909 - RNA, 19 nt, Artificial Sequence
  Description of Artificial Sequence: Synthetic oligonucleotide
ugcauacagaagcccaugc

SEQ ID NO: 1477910 - RNA, 19 nt, Artificial Sequence
  Description of Artificial Sequence: Synthetic oligonucleotide
agugaguaaacaaacagua

SEQ ID NO: 1477911 - RNA, 19 nt, Artificial Sequence
  Description of Artificial Sequence: Synthetic oligonucleotide
gacacagacagcgugggug

SEQ ID NO: 1477912 - RNA, 19 nt, Artificial Sequence
  Description of Artificial Sequence: Synthetic oligonucleotide
acaggaaaucccugguggg

SEQ ID NO: 1477913 - RNA, 19 nt, Artificial Sequence
  Description of Artificial Sequence: Synthetic oligonucleotide
caagacauaggaaugaagu

SEQ ID NO: 1477914 - RNA, 19 nt, Artificial Sequence
  Description of Artificial Sequence: Synthetic oligonucleotide
cugcccuaacauuuggugg

SEQ ID NO: 1477915 - RNA, 19 nt, Artificial Sequence
  Description of Artificial Sequence: Synthetic oligonucleotide
acaaggacgaaugaauaca

SEQ ID NO: 1477916 - RNA, 19 nt, Artificial Sequence
  Description of Artificial Sequence: Synthetic oligonucleotide
cuucagugaguauccaccc

SEQ ID NO: 1477917 - RNA, 19 nt, Artificial Sequence
  Description of Artificial Sequence: Synthetic oligonucleotide
acugcugcgucuugugaac

SEQ ID NO: 1477918 - RNA, 19 nt, Artificial Sequence
  Description of Artificial Sequence: Synthetic oligonucleotide
gacagauaagugcuaugug

SEQ ID NO: 1477919 - RNA, 19 nt, Artificial Sequence
  Description of Artificial Sequence: Synthetic oligonucleotide
aagugguagcuguagcacu

SEQ ID NO: 1477920 - RNA, 19 nt, Artificial Sequence
  Description of Artificial Sequence: Synthetic oligonucleotide
ugcagucugacuuguguca

SEQ ID NO: 1477921 - RNA, 19 nt, Artificial Sequence
  Description of Artificial Sequence: Synthetic oligonucleotide
uguacuucucuauggaguu

SEQ ID NO: 1477922 - RNA, 19 nt, Artificial Sequence
  Description of Artificial Sequence: Synthetic oligonucleotide
agacagauaagugcuaugu

SEQ ID NO: 1477923 - RNA, 19 nt, Artificial Sequence
  Description of Artificial Sequence: Synthetic oligonucleotide
ugacuugugucagaggcug

SEQ ID NO: 1477924 - RNA, 19 nt, Artificial Sequence
  Description of Artificial Sequence: Synthetic oligonucleotide
acagcgaucaagaccaaag

SEQ ID NO: 1477925 - RNA, 19 nt, Artificial Sequence
  Description of Artificial Sequence: Synthetic oligonucleotide
aggguuuaaggcauguggg

SEQ ID NO: 1477926 - RNA, 19 nt, Artificial Sequence
  Description of Artificial Sequence: Synthetic oligonucleotide
uggagcccaagaaacacgu

SEQ ID NO: 1477927 - RNA, 19 nt, Artificial Sequence
  Description of Artificial Sequence: Synthetic oligonucleotide
guucccaucaaguguggcc

SEQ ID NO: 1477928 - RNA, 19 nt, Artificial Sequence
  Description of Artificial Sequence: Synthetic oligonucleotide
cagauaagugcuaugugca

SEQ ID NO: 1477929 - RNA, 19 nt, Artificial Sequence
  Description of Artificial Sequence: Synthetic oligonucleotide
cuucuuugaaagccuuugc

SEQ ID NO: 1477930 - RNA, 19 nt, Artificial Sequence
  Description of Artificial Sequence: Synthetic oligonucleotide
uucagugaguauccacccc

SEQ ID NO: 1477931 - RNA, 19 nt, Artificial Sequence
  Description of Artificial Sequence: Synthetic oligonucleotide
ucugcccucuacuauuuac

SEQ ID NO: 1477932 - RNA, 19 nt, Artificial Sequence
  Description of Artificial Sequence: Synthetic oligonucleotide
aauagguaguugauaaaua

SEQ ID NO: 1477933 - RNA, 19 nt, Artificial Sequence
  Description of Artificial Sequence: Synthetic oligonucleotide
aucaugugugcuccugcgg

SEQ ID NO: 1477934 - RNA, 19 nt, Artificial Sequence
  Description of Artificial Sequence: Synthetic oligonucleotide
ugggguaugugaucugccc

SEQ ID NO: 1477935 - RNA, 19 nt, Artificial Sequence
  Description of Artificial Sequence: Synthetic oligonucleotide
gcacauaucgucuccgggg

SEQ ID NO: 1477936 - RNA, 19 nt, Artificial Sequence
  Description of Artificial Sequence: Synthetic oligonucleotide
agcgaucaagaccaaagaa

SEQ ID NO: 1477937 - RNA, 19 nt, Artificial Sequence
  Description of Artificial Sequence: Synthetic oligonucleotide
gguaguugauaaauaagug

SEQ ID NO: 1477938 - RNA, 19 nt, Artificial Sequence
  Description of Artificial Sequence: Synthetic oligonucleotide
ugcccauggacaccucggg

SEQ ID NO: 1477939 - RNA, 19 nt, Artificial Sequence
  Description of Artificial Sequence: Synthetic oligonucleotide
cugcggauauucaugggug

SEQ ID NO: 1477940 - RNA, 19 nt, Artificial Sequence
  Description of Artificial Sequence: Synthetic oligonucleotide
auaggacuccaccgucgcc

SEQ ID NO: 1477941 - RNA, 19 nt, Artificial Sequence
  Description of Artificial Sequence: Synthetic oligonucleotide
ugcggauauucaugggugc

SEQ ID NO: 1477942 - RNA, 19 nt, Artificial Sequence
  Description of Artificial Sequence: Synthetic oligonucleotide
ucauagcagcaauggaugu

SEQ ID NO: 1477943 - RNA, 19 nt, Artificial Sequence
  Description of Artificial Sequence: Synthetic oligonucleotide
cugcgucuugugaacaugc

SEQ ID NO: 1477944 - RNA, 19 nt, Artificial Sequence
  Description of Artificial Sequence: Synthetic oligonucleotide
cucuauggaguugaggcug

SEQ ID NO: 1477945 - RNA, 19 nt, Artificial Sequence
  Description of Artificial Sequence: Synthetic oligonucleotide
gacacuugacagcaaaugu

SEQ ID NO: 1477946 - RNA, 19 nt, Artificial Sequence
  Description of Artificial Sequence: Synthetic oligonucleotide
uguugugugcccagcucca

SEQ ID NO: 1477947 - RNA, 19 nt, Artificial Sequence
  Description of Artificial Sequence: Synthetic oligonucleotide
gagacagauaagugcuaug

SEQ ID NO: 1477948 - RNA, 19 nt, Artificial Sequence
  Description of Artificial Sequence: Synthetic oligonucleotide
cuaacauuugguggaggag

SEQ ID NO: 1477949 - RNA, 19 nt, Artificial Sequence
  Description of Artificial Sequence: Synthetic oligonucleotide
uccaccgucgccaggucug

SEQ ID NO: 1477950 - RNA, 19 nt, Artificial Sequence
  Description of Artificial Sequence: Synthetic oligonucleotide
gacgaaugaauacagcgau

SEQ ID NO: 1477951 - RNA, 19 nt, Artificial Sequence
  Description of Artificial Sequence: Synthetic oligonucleotide
uccggggugcucauagcag

SEQ ID NO: 1477952 - RNA, 19 nt, Artificial Sequence
  Description of Artificial Sequence: Synthetic oligonucleotide
uugugagaguugcucugcc

SEQ ID NO: 1477953 - RNA, 19 nt, Artificial Sequence
  Description of Artificial Sequence: Synthetic oligonucleotide
aaggcaugugggaggcugc

SEQ ID NO: 1477954 - RNA, 19 nt, Artificial Sequence
  Description of Artificial Sequence: Synthetic oligonucleotide
gaguugaggcagcuugugc

SEQ ID NO: 1477955 - RNA, 19 nt, Artificial Sequence
  Description of Artificial Sequence: Synthetic oligonucleotide
uuggguuguacuucucuau

SEQ ID NO: 1477956 - RNA, 19 nt, Artificial Sequence
  Description of Artificial Sequence: Synthetic oligonucleotide
gcuauaucucuccacugag

SEQ ID NO: 1477957 - RNA, 19 nt, Artificial Sequence
  Description of Artificial Sequence: Synthetic oligonucleotide
cauaggacuccaccgucgc

SEQ ID NO: 1477958 - RNA, 19 nt, Artificial Sequence
  Description of Artificial Sequence: Synthetic oligonucleotide
guagagacagauaagugcu

SEQ ID NO: 1477959 - RNA, 19 nt, Artificial Sequence
  Description of Artificial Sequence: Synthetic oligonucleotide
acaagacauaggaaugaag

SEQ ID NO: 1477960 - RNA, 19 nt, Artificial Sequence
  Description of Artificial Sequence: Synthetic oligonucleotide
aguugauaaauaagugagu

SEQ ID NO: 1477961 - RNA, 19 nt, Artificial Sequence
  Description of Artificial Sequence: Synthetic oligonucleotide
uauucaugggugccacagu

SEQ ID NO: 1477962 - RNA, 19 nt, Artificial Sequence
  Description of Artificial Sequence: Synthetic oligonucleotide
caggauucccggcugcucc

SEQ ID NO: 1477963 - RNA, 19 nt, Artificial Sequence
  Description of Artificial Sequence: Synthetic oligonucleotide
caggcguccaugaauucac

SEQ ID NO: 1477964 - RNA, 19 nt, Artificial Sequence
  Description of Artificial Sequence: Synthetic oligonucleotide
uucaccuggggcucguacu

SEQ ID NO: 1477965 - RNA, 19 nt, Artificial Sequence
  Description of Artificial Sequence: Synthetic oligonucleotide
ugcaaagcgcuggcuaggg

SEQ ID NO: 1477966 - RNA, 19 nt, Artificial Sequence
  Description of Artificial Sequence: Synthetic oligonucleotide
ugugaugagcugucauaac

SEQ ID NO: 1477967 - RNA, 19 nt, Artificial Sequence
  Description of Artificial Sequence: Synthetic oligonucleotide
cagcuugugccaucguugc

SEQ ID NO: 1477968 - RNA, 19 nt, Artificial Sequence
  Description of Artificial Sequence: Synthetic oligonucleotide
auagccgcccacagcauac

SEQ ID NO: 1477969 - RNA, 19 nt, Artificial Sequence
  Description of Artificial Sequence: Synthetic oligonucleotide
uuggugcuauaucucucca

SEQ ID NO: 1477970 - RNA, 19 nt, Artificial Sequence
  Description of Artificial Sequence: Synthetic oligonucleotide
cuugugagaguugcucugc

SEQ ID NO: 1477971 - RNA, 19 nt, Artificial Sequence
  Description of Artificial Sequence: Synthetic oligonucleotide
ugaauucaccuggggcucg

SEQ ID NO: 1477972 - RNA, 19 nt, Artificial Sequence
  Description of Artificial Sequence: Synthetic oligonucleotide
agauaagugcuaugugcaa

SEQ ID NO: 1477973 - RNA, 19 nt, Artificial Sequence
  Description of Artificial Sequence: Synthetic oligonucleotide
acauaggaaugaagucugc

SEQ ID NO: 1477974 - RNA, 19 nt, Artificial Sequence
  Description of Artificial Sequence: Synthetic oligonucleotide
gugaagugguagcuguagc

SEQ ID NO: 1477975 - RNA, 19 nt, Artificial Sequence
  Description of Artificial Sequence: Synthetic oligonucleotide
gucuccggggugcucauag

SEQ ID NO: 1477976 - RNA, 19 nt, Artificial Sequence
  Description of Artificial Sequence: Synthetic oligonucleotide
gaggcagcuugugccaucg

SEQ ID NO: 1477977 - RNA, 19 nt, Artificial Sequence
  Description of Artificial Sequence: Synthetic oligonucleotide
ugcccucuacuauuuacaa

SEQ ID NO: 1477978 - RNA, 19 nt, Artificial Sequence
  Description of Artificial Sequence: Synthetic oligonucleotide
ugaguugaggcagcuugug

SEQ ID NO: 1477979 - RNA, 19 nt, Artificial Sequence
  Description of Artificial Sequence: Synthetic oligonucleotide
acuucucauccaucaauaa

SEQ ID NO: 1477980 - RNA, 19 nt, Artificial Sequence
  Description of Artificial Sequence: Synthetic oligonucleotide
caaguguggccacacgcac

SEQ ID NO: 1477981 - RNA, 19 nt, Artificial Sequence
  Description of Artificial Sequence: Synthetic oligonucleotide
ugcgucuugugaacaugca

SEQ ID NO: 1477982 - RNA, 19 nt, Artificial Sequence
  Description of Artificial Sequence: Synthetic oligonucleotide
acgcacauaucgucuccgg

SEQ ID NO: 1477983 - RNA, 19 nt, Artificial Sequence
  Description of Artificial Sequence: Synthetic oligonucleotide
uuacaaagcccagcugugu

SEQ ID NO: 1477984 - RNA, 19 nt, Artificial Sequence
  Description of Artificial Sequence: Synthetic oligonucleotide
uccugcggauauucauggg

SEQ ID NO: 1477985 - RNA, 19 nt, Artificial Sequence
  Description of Artificial Sequence: Synthetic oligonucleotide
gagcugacacuugacagca

SEQ ID NO: 1477986 - RNA, 19 nt, Artificial Sequence
  Description of Artificial Sequence: Synthetic oligonucleotide
agagacagauaagugcuau

SEQ ID NO: 1477987 - RNA, 19 nt, Artificial Sequence
  Description of Artificial Sequence: Synthetic oligonucleotide
ggaagggccaccccacagg

SEQ ID NO: 1477988 - RNA, 19 nt, Artificial Sequence
  Description of Artificial Sequence: Synthetic oligonucleotide
uguguuguucauccuccuu

SEQ ID NO: 1477989 - RNA, 19 nt, Artificial Sequence
  Description of Artificial Sequence: Synthetic oligonucleotide
ggaagccccaucauagccg

SEQ ID NO: 1477990 - RNA, 19 nt, Artificial Sequence
  Description of Artificial Sequence: Synthetic oligonucleotide
gaacaaggacgaaugaaua

SEQ ID NO: 1477991 - RNA, 19 nt, Artificial Sequence
  Description of Artificial Sequence: Synthetic oligonucleotide
acgaaugaauacagcgauc

SEQ ID NO: 1477992 - RNA, 19 nt, Artificial Sequence
  Description of Artificial Sequence: Synthetic oligonucleotide
uucgccuugugcccaugga

SEQ ID NO: 1477993 - RNA, 19 nt, Artificial Sequence
  Description of Artificial Sequence: Synthetic oligonucleotide
ugcuccugcggauauucau

SEQ ID NO: 1477994 - RNA, 19 nt, Artificial Sequence
  Description of Artificial Sequence: Synthetic oligonucleotide
gacaccucgggcugccaug

SEQ ID NO: 1477995 - RNA, 19 nt, Artificial Sequence
  Description of Artificial Sequence: Synthetic oligonucleotide
cacagcguagagccagccg

SEQ ID NO: 1477996 - RNA, 19 nt, Artificial Sequence
  Description of Artificial Sequence: Synthetic oligonucleotide
ugugugcuccugcggauau

SEQ ID NO: 1477997 - RNA, 19 nt, Artificial Sequence
  Description of Artificial Sequence: Synthetic oligonucleotide
auguuccugucaguggguc

SEQ ID NO: 1477998 - RNA, 19 nt, Artificial Sequence
  Description of Artificial Sequence: Synthetic oligonucleotide
uggggcucguacuucucca

SEQ ID NO: 1477999 - RNA, 19 nt, Artificial Sequence
  Description of Artificial Sequence: Synthetic oligonucleotide
uagagacagauaagugcua

SEQ ID NO: 1478000 - RNA, 19 nt, Artificial Sequence
  Description of Artificial Sequence: Synthetic oligonucleotide
gaaugaauacagcgaucaa

SEQ ID NO: 1478001 - RNA, 19 nt, Artificial Sequence
  Description of Artificial Sequence: Synthetic oligonucleotide
gucauaggacuccaccguc

SEQ ID NO: 1478002 - RNA, 19 nt, Artificial Sequence
  Description of Artificial Sequence: Synthetic oligonucleotide
gcaauggauguccauguuc

SEQ ID NO: 1478003 - RNA, 19 nt, Artificial Sequence
  Description of Artificial Sequence: Synthetic oligonucleotide
gauauucaugggugccaca

SEQ ID NO: 1478004 - RNA, 19 nt, Artificial Sequence
  Description of Artificial Sequence: Synthetic oligonucleotide
aggaaaucccugguggggu

SEQ ID NO: 1478005 - RNA, 19 nt, Artificial Sequence
  Description of Artificial Sequence: Synthetic oligonucleotide
ugguccccuacaugcagga

SEQ ID NO: 1478006 - RNA, 19 nt, Artificial Sequence
  Description of Artificial Sequence: Synthetic oligonucleotide
cguucagcacuguugaggc

SEQ ID NO: 1478007 - RNA, 19 nt, Artificial Sequence
  Description of Artificial Sequence: Synthetic oligonucleotide
ggugcuauaucucuccacu

SEQ ID NO: 1478008 - RNA, 19 nt, Artificial Sequence
  Description of Artificial Sequence: Synthetic oligonucleotide
cacacgcacauaucgucuc

SEQ ID NO: 1478009 - RNA, 19 nt, Artificial Sequence
  Description of Artificial Sequence: Synthetic oligonucleotide
cuucgccuugugcccaugg

SEQ ID NO: 1478010 - RNA, 19 nt, Artificial Sequence
  Description of Artificial Sequence: Synthetic oligonucleotide
ggagagcugacacuugaca

SEQ ID NO: 1478011 - RNA, 19 nt, Artificial Sequence
  Description of Artificial Sequence: Synthetic oligonucleotide
cauagagggcacccuccag

SEQ ID NO: 1478012 - RNA, 19 nt, Artificial Sequence
  Description of Artificial Sequence: Synthetic oligonucleotide
cugcccucuacuauuuaca

SEQ ID NO: 1478013 - RNA, 19 nt, Artificial Sequence
  Description of Artificial Sequence: Synthetic oligonucleotide
cuacacccaggcagcuucg

SEQ ID NO: 1478014 - RNA, 19 nt, Artificial Sequence
  Description of Artificial Sequence: Synthetic oligonucleotide
cacgcacauaucgucuccg

SEQ ID NO: 1478015 - RNA, 19 nt, Artificial Sequence
  Description of Artificial Sequence: Synthetic oligonucleotide
ugcauguugugugcccagc

SEQ ID NO: 1478016 - RNA, 19 nt, Artificial Sequence
  Description of Artificial Sequence: Synthetic oligonucleotide
uccugcugagcugcgccgg

SEQ ID NO: 1478017 - RNA, 19 nt, Artificial Sequence
  Description of Artificial Sequence: Synthetic oligonucleotide
gugugaugagcugucauaa

SEQ ID NO: 1478018 - RNA, 19 nt, Artificial Sequence
  Description of Artificial Sequence: Synthetic oligonucleotide
gagcccaagaaacacguuu

SEQ ID NO: 1478019 - RNA, 19 nt, Artificial Sequence
  Description of Artificial Sequence: Synthetic oligonucleotide
auaaaugaacaaggacgaa

SEQ ID NO: 1478020 - RNA, 19 nt, Artificial Sequence
  Description of Artificial Sequence: Synthetic oligonucleotide
aggugugaugagcugucau

SEQ ID NO: 1478021 - RNA, 19 nt, Artificial Sequence
  Description of Artificial Sequence: Synthetic oligonucleotide
gucgccaggucugagguuc

SEQ ID NO: 1478022 - RNA, 19 nt, Artificial Sequence
  Description of Artificial Sequence: Synthetic oligonucleotide
acauaucgucuccggggug

SEQ ID NO: 1478023 - RNA, 19 nt, Artificial Sequence
  Description of Artificial Sequence: Synthetic oligonucleotide
agccuuggugcuauaucuc

SEQ ID NO: 1478024 - RNA, 19 nt, Artificial Sequence
  Description of Artificial Sequence: Synthetic oligonucleotide
acuguauacacaagacaua

SEQ ID NO: 1478025 - RNA, 19 nt, Artificial Sequence
  Description of Artificial Sequence: Synthetic oligonucleotide
uguccauguuccugucagu

SEQ ID NO: 1478026 - RNA, 19 nt, Artificial Sequence
  Description of Artificial Sequence: Synthetic oligonucleotide
gccaccaaaucaugugugc

SEQ ID NO: 1478027 - RNA, 19 nt, Artificial Sequence
  Description of Artificial Sequence: Synthetic oligonucleotide
aaguguggccacacgcaca

SEQ ID NO: 1478028 - RNA, 19 nt, Artificial Sequence
  Description of Artificial Sequence: Synthetic oligonucleotide
gacuugugucagaggcugg

SEQ ID NO: 1478029 - RNA, 19 nt, Artificial Sequence
  Description of Artificial Sequence: Synthetic oligonucleotide
gcgaucaagaccaaagaaa

SEQ ID NO: 1478030 - RNA, 19 nt, Artificial Sequence
  Description of Artificial Sequence: Synthetic oligonucleotide
ccucuacuauuuacaaagc

SEQ ID NO: 1478031 - RNA, 19 nt, Artificial Sequence
  Description of Artificial Sequence: Synthetic oligonucleotide
ggguuuaaggcauguggga

SEQ ID NO: 1478032 - RNA, 19 nt, Artificial Sequence
  Description of Artificial Sequence: Synthetic oligonucleotide
acauuacacuguauacaca

SEQ ID NO: 1478033 - RNA, 19 nt, Artificial Sequence
  Description of Artificial Sequence: Synthetic oligonucleotide
gugcaaagcgcuggcuagg

SEQ ID NO: 1478034 - RNA, 19 nt, Artificial Sequence
  Description of Artificial Sequence: Synthetic oligonucleotide
ggcucauauugcuguguag

SEQ ID NO: 1478035 - RNA, 19 nt, Artificial Sequence
  Description of Artificial Sequence: Synthetic oligonucleotide
cagcgaucaagaccaaaga

SEQ ID NO: 1478036 - RNA, 19 nt, Artificial Sequence
  Description of Artificial Sequence: Synthetic oligonucleotide
acaggguuuaaggcaugug

SEQ ID NO: 1478037 - RNA, 19 nt, Artificial Sequence
  Description of Artificial Sequence: Synthetic oligonucleotide
gugcauguugugugcccag

SEQ ID NO: 1478038 - RNA, 19 nt, Artificial Sequence
  Description of Artificial Sequence: Synthetic oligonucleotide
uaaccacccacggcguaca

SEQ ID NO: 1478039 - RNA, 19 nt, Artificial Sequence
  Description of Artificial Sequence: Synthetic oligonucleotide
ggaucuaagugcauguugu

SEQ ID NO: 1478040 - RNA, 19 nt, Artificial Sequence
  Description of Artificial Sequence: Synthetic oligonucleotide
ucuccggggugcucauagc

SEQ ID NO: 1478041 - RNA, 19 nt, Artificial Sequence
  Description of Artificial Sequence: Synthetic oligonucleotide
ggugugaugagcugucaua

SEQ ID NO: 1478042 - RNA, 19 nt, Artificial Sequence
  Description of Artificial Sequence: Synthetic oligonucleotide
cugcauacagaagcccaug

SEQ ID NO: 1478043 - RNA, 19 nt, Artificial Sequence
  Description of Artificial Sequence: Synthetic oligonucleotide
ucgggcugccauguauuug

SEQ ID NO: 1478044 - RNA, 19 nt, Artificial Sequence
  Description of Artificial Sequence: Synthetic oligonucleotide
auggcucauauugcugugu

SEQ ID NO: 1478045 - RNA, 19 nt, Artificial Sequence
  Description of Artificial Sequence: Synthetic oligonucleotide
accucgggcugccauguau

SEQ ID NO: 1478046 - RNA, 19 nt, Artificial Sequence
  Description of Artificial Sequence: Synthetic oligonucleotide
aguggccaggugugaugag

SEQ ID NO: 1478047 - RNA, 19 nt, Artificial Sequence
  Description of Artificial Sequence: Synthetic oligonucleotide
ugugaacaugcaggaugcu

SEQ ID NO: 1478048 - RNA, 19 nt, Artificial Sequence
  Description of Artificial Sequence: Synthetic oligonucleotide
agcccaagaaacacguuua

SEQ ID NO: 1478049 - RNA, 19 nt, Artificial Sequence
  Description of Artificial Sequence: Synthetic oligonucleotide
ccuacaugcaggagagcug

SEQ ID NO: 1478050 - RNA, 19 nt, Artificial Sequence
  Description of Artificial Sequence: Synthetic oligonucleotide
cuauaucucuccacugagu

SEQ ID NO: 1478051 - RNA, 19 nt, Artificial Sequence
  Description of Artificial Sequence: Synthetic oligonucleotide
guaugugaucugcccuaac

SEQ ID NO: 1478052 - RNA, 19 nt, Artificial Sequence
  Description of Artificial Sequence: Synthetic oligonucleotide
cucuugugagaguugcucu

SEQ ID NO: 1478053 - RNA, 19 nt, Artificial Sequence
  Description of Artificial Sequence: Synthetic oligonucleotide
gcugacacuugacagcaaa

SEQ ID NO: 1478054 - RNA, 19 nt, Artificial Sequence
  Description of Artificial Sequence: Synthetic oligonucleotide
cuccggggugcucauagca

SEQ ID NO: 1478055 - RNA, 19 nt, Artificial Sequence
  Description of Artificial Sequence: Synthetic oligonucleotide
gccacacgcacauaucguc

SEQ ID NO: 1478056 - RNA, 19 nt, Artificial Sequence
  Description of Artificial Sequence: Synthetic oligonucleotide
cuacuccugcugagcugcg

SEQ ID NO: 1478057 - RNA, 19 nt, Artificial Sequence
  Description of Artificial Sequence: Synthetic oligonucleotide
cagacagcgugggugagga

SEQ ID NO: 1478058 - RNA, 19 nt, Artificial Sequence
  Description of Artificial Sequence: Synthetic oligonucleotide
gcagcuacacccaggcagc

SEQ ID NO: 1478059 - RNA, 19 nt, Artificial Sequence
  Description of Artificial Sequence: Synthetic oligonucleotide
gcugcgccggcucagcaug

SEQ ID NO: 1478060 - RNA, 19 nt, Artificial Sequence
  Description of Artificial Sequence: Synthetic oligonucleotide
guagcacuucucauccauc

SEQ ID NO: 1478061 - RNA, 19 nt, Artificial Sequence
  Description of Artificial Sequence: Synthetic oligonucleotide
cagcaauggauguccaugu

SEQ ID NO: 1478062 - RNA, 19 nt, Artificial Sequence
  Description of Artificial Sequence: Synthetic oligonucleotide
cauaggaaugaagucugcu

SEQ ID NO: 1478063 - RNA, 19 nt, Artificial Sequence
  Description of Artificial Sequence: Synthetic oligonucleotide
acuucucuauggaguugag

SEQ ID NO: 1478064 - RNA, 19 nt, Artificial Sequence
  Description of Artificial Sequence: Synthetic oligonucleotide
gcuccugcggauauucaug

SEQ ID NO: 1478065 - RNA, 19 nt, Artificial Sequence
  Description of Artificial Sequence: Synthetic oligonucleotide
cacauaucgucuccggggu

SEQ ID NO: 1478066 - RNA, 19 nt, Artificial Sequence
  Description of Artificial Sequence: Synthetic oligonucleotide
cagcguagagccagccguc

SEQ ID NO: 1478067 - RNA, 19 nt, Artificial Sequence
  Description of Artificial Sequence: Synthetic oligonucleotide
auuugguggaggagacaga

SEQ ID NO: 1478068 - RNA, 19 nt, Artificial Sequence
  Description of Artificial Sequence: Synthetic oligonucleotide
aucugcccuaacauuuggu

SEQ ID NO: 1478069 - RNA, 19 nt, Artificial Sequence
  Description of Artificial Sequence: Synthetic oligonucleotide
cguacagguucccaucaag

SEQ ID NO: 1478070 - RNA, 19 nt, Artificial Sequence
  Description of Artificial Sequence: Synthetic oligonucleotide
gcaaagcgcuggcuagggg

SEQ ID NO: 1478071 - RNA, 19 nt, Artificial Sequence
  Description of Artificial Sequence: Synthetic oligonucleotide
cauggacaccucgggcugc

SEQ ID NO: 1478072 - RNA, 19 nt, Artificial Sequence
  Description of Artificial Sequence: Synthetic oligonucleotide
cacguuuauuguucaagau

SEQ ID NO: 1478073 - RNA, 19 nt, Artificial Sequence
  Description of Artificial Sequence: Synthetic oligonucleotide
gcggauauucaugggugcc

SEQ ID NO: 1478074 - RNA, 19 nt, Artificial Sequence
  Description of Artificial Sequence: Synthetic oligonucleotide
acccacuuguugguccuug

SEQ ID NO: 1478075 - RNA, 19 nt, Artificial Sequence
  Description of Artificial Sequence: Synthetic oligonucleotide
uccuuggguuguacuucuc

SEQ ID NO: 1478076 - RNA, 19 nt, Artificial Sequence
  Description of Artificial Sequence: Synthetic oligonucleotide
ggcguacagguucccauca

SEQ ID NO: 1478077 - RNA, 19 nt, Artificial Sequence
  Description of Artificial Sequence: Synthetic oligonucleotide
ggguaugugaucugcccua

SEQ ID NO: 1478078 - RNA, 19 nt, Artificial Sequence
  Description of Artificial Sequence: Synthetic oligonucleotide
uuaaggcaugugggaggcu

SEQ ID NO: 1478079 - RNA, 19 nt, Artificial Sequence
  Description of Artificial Sequence: Synthetic oligonucleotide
gauucccggcugcuccauc

SEQ ID NO: 1478080 - RNA, 19 nt, Artificial Sequence
  Description of Artificial Sequence: Synthetic oligonucleotide
gucagugggucauaucguu

SEQ ID NO: 1478081 - RNA, 19 nt, Artificial Sequence
  Description of Artificial Sequence: Synthetic oligonucleotide
gugcuaugugcaaagcgcu

SEQ ID NO: 1478082 - RNA, 19 nt, Artificial Sequence
  Description of Artificial Sequence: Synthetic oligonucleotide
agcugcgccggcucagcau

SEQ ID NO: 1478083 - RNA, 19 nt, Artificial Sequence
  Description of Artificial Sequence: Synthetic oligonucleotide
cgcacauaucgucuccggg

SEQ ID NO: 1478084 - RNA, 19 nt, Artificial Sequence
  Description of Artificial Sequence: Synthetic oligonucleotide
gugggaaguugaguagcuc

SEQ ID NO: 1478085 - RNA, 19 nt, Artificial Sequence
  Description of Artificial Sequence: Synthetic oligonucleotide
auccaucaauaaauaggua

SEQ ID NO: 1478086 - RNA, 19 nt, Artificial Sequence
  Description of Artificial Sequence: Synthetic oligonucleotide
aggcagcuacacccaggca

SEQ ID NO: 1478087 - RNA, 19 nt, Artificial Sequence
  Description of Artificial Sequence: Synthetic oligonucleotide
gcugcgucuugugaacaug

SEQ ID NO: 1478088 - RNA, 19 nt, Artificial Sequence
  Description of Artificial Sequence: Synthetic oligonucleotide
cagucugacuugugucaga

SEQ ID NO: 1478089 - RNA, 19 nt, Artificial Sequence
  Description of Artificial Sequence: Synthetic oligonucleotide
cugccacauagagggcacc

SEQ ID NO: 1478090 - RNA, 19 nt, Artificial Sequence
  Description of Artificial Sequence: Synthetic oligonucleotide
cugacacuugacagcaaau

SEQ ID NO: 1478091 - RNA, 19 nt, Artificial Sequence
  Description of Artificial Sequence: Synthetic oligonucleotide
gguucccaucaaguguggc

SEQ ID NO: 1478092 - RNA, 19 nt, Artificial Sequence
  Description of Artificial Sequence: Synthetic oligonucleotide
gggguaugugaucugcccu

SEQ ID NO: 1478093 - RNA, 19 nt, Artificial Sequence
  Description of Artificial Sequence: Synthetic oligonucleotide
augugugcuccugcggaua

SEQ ID NO: 1478094 - RNA, 19 nt, Artificial Sequence
  Description of Artificial Sequence: Synthetic oligonucleotide
uucuagcuucaggcccaug

SEQ ID NO: 1478095 - RNA, 19 nt, Artificial Sequence
  Description of Artificial Sequence: Synthetic oligonucleotide
guggccacacgcacauauc

SEQ ID NO: 1478096 - RNA, 19 nt, Artificial Sequence
  Description of Artificial Sequence: Synthetic oligonucleotide
gagcugcgccggcucagca

SEQ ID NO: 1478097 - RNA, 19 nt, Artificial Sequence
  Description of Artificial Sequence: Synthetic oligonucleotide
ccugcggauauucaugggu

SEQ ID NO: 1478098 - RNA, 19 nt, Artificial Sequence
  Description of Artificial Sequence: Synthetic oligonucleotide
ggccaggugugaugagcug

SEQ ID NO: 1478099 - RNA, 19 nt, Artificial Sequence
  Description of Artificial Sequence: Synthetic oligonucleotide
ucauagccgccagcugcau

SEQ ID NO: 1478100 - RNA, 19 nt, Artificial Sequence
  Description of Artificial Sequence: Synthetic oligonucleotide
ugccacccacuuguugguc

SEQ ID NO: 1478101 - RNA, 19 nt, Artificial Sequence
  Description of Artificial Sequence: Synthetic oligonucleotide
agcuucgccuugugcccau

SEQ ID NO: 1478102 - RNA, 19 nt, Artificial Sequence
  Description of Artificial Sequence: Synthetic oligonucleotide
ggaaaucccugguggggua

SEQ ID NO: 1478103 - RNA, 19 nt, Artificial Sequence
  Description of Artificial Sequence: Synthetic oligonucleotide
agugccugguagagacaga

SEQ ID NO: 1478104 - RNA, 19 nt, Artificial Sequence
  Description of Artificial Sequence: Synthetic oligonucleotide
gguaugugaucugcccuaa

SEQ ID NO: 1478105 - RNA, 19 nt, Artificial Sequence
  Description of Artificial Sequence: Synthetic oligonucleotide
gcccucuacuauuuacaaa

SEQ ID NO: 1478106 - RNA, 19 nt, Artificial Sequence
  Description of Artificial Sequence: Synthetic oligonucleotide
cuugugucagaggcuggua

SEQ ID NO: 1478107 - RNA, 19 nt, Artificial Sequence
  Description of Artificial Sequence: Synthetic oligonucleotide
ucgucuccggggugcucau

SEQ ID NO: 1478108 - RNA, 19 nt, Artificial Sequence
  Description of Artificial Sequence: Synthetic oligonucleotide
uugugcccauggacaccuc

SEQ ID NO: 1478109 - RNA, 19 nt, Artificial Sequence
  Description of Artificial Sequence: Synthetic oligonucleotide
gccccaucauagccgccag

SEQ ID NO: 1478110 - RNA, 19 nt, Artificial Sequence
  Description of Artificial Sequence: Synthetic oligonucleotide
gggcucuugguccccuaca

SEQ ID NO: 1478111 - RNA, 19 nt, Artificial Sequence
  Description of Artificial Sequence: Synthetic oligonucleotide
gcauguugugugcccagcu

SEQ ID NO: 1478112 - RNA, 19 nt, Artificial Sequence
  Description of Artificial Sequence: Synthetic oligonucleotide
uaucgucuccggggugcuc

SEQ ID NO: 1478113 - RNA, 19 nt, Artificial Sequence
  Description of Artificial Sequence: Synthetic oligonucleotide
cugcugcgucuugugaaca

SEQ ID NO: 1478114 - RNA, 19 nt, Artificial Sequence
  Description of Artificial Sequence: Synthetic oligonucleotide
cauagccgccagcugcaua

SEQ ID NO: 1478115 - RNA, 19 nt, Artificial Sequence
  Description of Artificial Sequence: Synthetic oligonucleotide
gugugaagugguagcugua

SEQ ID NO: 1478116 - RNA, 19 nt, Artificial Sequence
  Description of Artificial Sequence: Synthetic oligonucleotide
agcuacacccaggcagcuu

SEQ ID NO: 1478117 - RNA, 19 nt, Artificial Sequence
  Description of Artificial Sequence: Synthetic oligonucleotide
cccuacaugcaggagagcu

SEQ ID NO: 1478118 - RNA, 19 nt, Artificial Sequence
  Description of Artificial Sequence: Synthetic oligonucleotide
gguccccuacaugcaggag

SEQ ID NO: 1478119 - RNA, 19 nt, Artificial Sequence
  Description of Artificial Sequence: Synthetic oligonucleotide
agcccaugcaaggcagcua

SEQ ID NO: 1478120 - RNA, 19 nt, Artificial Sequence
  Description of Artificial Sequence: Synthetic oligonucleotide
cacaggguuuaaggcaugu

SEQ ID NO: 1478121 - RNA, 19 nt, Artificial Sequence
  Description of Artificial Sequence: Synthetic oligonucleotide
cacggcguacagguuccca

SEQ ID NO: 1478122 - RNA, 19 nt, Artificial Sequence
  Description of Artificial Sequence: Synthetic oligonucleotide
gcguagagccagccgucca

SEQ ID NO: 1478123 - RNA, 19 nt, Artificial Sequence
  Description of Artificial Sequence: Synthetic oligonucleotide
cagcuucgccuugugccca

SEQ ID NO: 1478124 - RNA, 19 nt, Artificial Sequence
  Description of Artificial Sequence: Synthetic oligonucleotide
ggacagugccugguagaga

SEQ ID NO: 1478125 - RNA, 19 nt, Artificial Sequence
  Description of Artificial Sequence: Synthetic oligonucleotide
ccacagcguagagccagcc

SEQ ID NO: 1478126 - RNA, 19 nt, Artificial Sequence
  Description of Artificial Sequence: Synthetic oligonucleotide
ccacacgcacauaucgucu

SEQ ID NO: 1478127 - RNA, 19 nt, Artificial Sequence
  Description of Artificial Sequence: Synthetic oligonucleotide
gcguacagguucccaucaa

SEQ ID NO: 1478128 - RNA, 19 nt, Artificial Sequence
  Description of Artificial Sequence: Synthetic oligonucleotide
cggcguacagguucccauc

SEQ ID NO: 1478129 - RNA, 19 nt, Artificial Sequence
  Description of Artificial Sequence: Synthetic oligonucleotide
agcugacacuugacagcaa

SEQ ID NO: 1478130 - RNA, 19 nt, Artificial Sequence
  Description of Artificial Sequence: Synthetic oligonucleotide
cucgggcugccauguauuu

SEQ ID NO: 1478131 - RNA, 19 nt, Artificial Sequence
  Description of Artificial Sequence: Synthetic oligonucleotide
ccaccaaaucaugugugcu

SEQ ID NO: 1478132 - RNA, 19 nt, Artificial Sequence
  Description of Artificial Sequence: Synthetic oligonucleotide
ggccacacgcacauaucgu

SEQ ID NO: 1478133 - RNA, 19 nt, Artificial Sequence
  Description of Artificial Sequence: Synthetic oligonucleotide
ggggugcucauagcagcaa

SEQ ID NO: 1478134 - RNA, 19 nt, Artificial Sequence
  Description of Artificial Sequence: Synthetic oligonucleotide
ggacacagacagcgugggu

SEQ ID NO: 1478135 - RNA, 19 nt, Artificial Sequence
  Description of Artificial Sequence: Synthetic oligonucleotide
ggacaccucgggcugccau

SEQ ID NO: 1478136 - RNA, 19 nt, Artificial Sequence
  Description of Artificial Sequence: Synthetic oligonucleotide
guguaggaucuaagugcau

SEQ ID NO: 1478137 - RNA, 19 nt, Artificial Sequence
  Description of Artificial Sequence: Synthetic oligonucleotide
ccgucgccaggucugaggu

SEQ ID NO: 1478138 - RNA, 19 nt, Artificial Sequence
  Description of Artificial Sequence: Synthetic oligonucleotide
gcuucgccuugugcccaug

SEQ ID NO: 1478139 - RNA, 19 nt, Artificial Sequence
  Description of Artificial Sequence: Synthetic oligonucleotide
ccccuacaugcaggagagc

SEQ ID NO: 1478140 - RNA, 19 nt, Artificial Sequence
  Description of Artificial Sequence: Synthetic oligonucleotide
cagcuacacccaggcagcu

SEQ ID NO: 1478141 - RNA, 19 nt, Artificial Sequence
  Description of Artificial Sequence: Synthetic oligonucleotide
ccacggcguacagguuccc

SEQ ID NO: 1478142 - RNA, 19 nt, Artificial Sequence
  Description of Artificial Sequence: Synthetic oligonucleotide
caccucgggcugccaugua

SEQ ID NO: 1478143 - RNA, 19 nt, Artificial Sequence
  Description of Artificial Sequence: Synthetic oligonucleotide
ggagcccaagaaacacguu

SEQ ID NO: 1478144 - RNA, 19 nt, Artificial Sequence
  Description of Artificial Sequence: Synthetic oligonucleotide
ggauucccggcugcuccau

SEQ ID NO: 1478145 - RNA, 19 nt, Artificial Sequence
  Description of Artificial Sequence: Synthetic oligonucleotide
caccagccuuggugcuaua

SEQ ID NO: 1478146 - RNA, 19 nt, Artificial Sequence
  Description of Artificial Sequence: Synthetic oligonucleotide
gcgcuggcuaggggcugca

SEQ ID NO: 1478147 - RNA, 19 nt, Artificial Sequence
  Description of Artificial Sequence: Synthetic oligonucleotide
cacccacuuguugguccuu

SEQ ID NO: 1478148 - RNA, 19 nt, Artificial Sequence
  Description of Artificial Sequence: Synthetic oligonucleotide
cgucgccaggucugagguu

SEQ ID NO: 1478149 - RNA, 19 nt, Artificial Sequence
  Description of Artificial Sequence: Synthetic oligonucleotide
cgucuccggggugcucaua

SEQ ID NO: 1478150 - RNA, 19 nt, Artificial Sequence
  Description of Artificial Sequence: Synthetic oligonucleotide
auaagauuuagguagauac

SEQ ID NO: 1478151 - RNA, 19 nt, Artificial Sequence
  Description of Artificial Sequence: Synthetic oligonucleotide
ucugauaagauuuagguag

SEQ ID NO: 1478152 - RNA, 19 nt, Artificial Sequence
  Description of Artificial Sequence: Synthetic oligonucleotide
ucugauacagucaugaggg

SEQ ID NO: 1478153 - RNA, 19 nt, Artificial Sequence
  Description of Artificial Sequence: Synthetic oligonucleotide
aagcauaaagauuauauuc

SEQ ID NO: 1478154 - RNA, 19 nt, Artificial Sequence
  Description of Artificial Sequence: Synthetic oligonucleotide
acugaaaugauuuauggcg

SEQ ID NO: 1478155 - RNA, 19 nt, Artificial Sequence
  Description of Artificial Sequence: Synthetic oligonucleotide
aacuuacuaaucuuauucc

SEQ ID NO: 1478156 - RNA, 19 nt, Artificial Sequence
  Description of Artificial Sequence: Synthetic oligonucleotide
aaacuuaaguuacuuauuc

SEQ ID NO: 1478157 - RNA, 19 nt, Artificial Sequence
  Description of Artificial Sequence: Synthetic oligonucleotide
auucauaucacuaaccugc

SEQ ID NO: 1478158 - RNA, 19 nt, Artificial Sequence
  Description of Artificial Sequence: Synthetic oligonucleotide
aaaucuagcuguuugccac

SEQ ID NO: 1478159 - RNA, 19 nt, Artificial Sequence
  Description of Artificial Sequence: Synthetic oligonucleotide
ugucaaaauacuuugaccu

SEQ ID NO: 1478160 - RNA, 19 nt, Artificial Sequence
  Description of Artificial Sequence: Synthetic oligonucleotide
ugauuuauggcguucaaag

SEQ ID NO: 1478161 - RNA, 19 nt, Artificial Sequence
  Description of Artificial Sequence: Synthetic oligonucleotide
uuucaagugacaaauggug

SEQ ID NO: 1478162 - RNA, 19 nt, Artificial Sequence
  Description of Artificial Sequence: Synthetic oligonucleotide
ucugucaaaagcaaaauau

SEQ ID NO: 1478163 - RNA, 19 nt, Artificial Sequence
  Description of Artificial Sequence: Synthetic oligonucleotide
auaauuaugaagcagugau

SEQ ID NO: 1478164 - RNA, 19 nt, Artificial Sequence
  Description of Artificial Sequence: Synthetic oligonucleotide
uaacuuacuaaucuuauuc

SEQ ID NO: 1478165 - RNA, 19 nt, Artificial Sequence
  Description of Artificial Sequence: Synthetic oligonucleotide
uauucuuuagaaaucuagc

SEQ ID NO: 1478166 - RNA, 19 nt, Artificial Sequence
  Description of Artificial Sequence: Synthetic oligonucleotide
uauggagugucucagagcu

SEQ ID NO: 1478167 - RNA, 19 nt, Artificial Sequence
  Description of Artificial Sequence: Synthetic oligonucleotide
aaauauuccuccauguuuc

SEQ ID NO: 1478168 - RNA, 19 nt, Artificial Sequence
  Description of Artificial Sequence: Synthetic oligonucleotide
auuuauggcguucaaagug

SEQ ID NO: 1478169 - RNA, 19 nt, Artificial Sequence
  Description of Artificial Sequence: Synthetic oligonucleotide
acuuaugaaagucaaauau

SEQ ID NO: 1478170 - RNA, 19 nt, Artificial Sequence
  Description of Artificial Sequence: Synthetic oligonucleotide
ucuauguucaguuacuuuc

SEQ ID NO: 1478171 - RNA, 19 nt, Artificial Sequence
  Description of Artificial Sequence: Synthetic oligonucleotide
gauacauuaagauauguua

SEQ ID NO: 1478172 - RNA, 19 nt, Artificial Sequence
  Description of Artificial Sequence: Synthetic oligonucleotide
aaaauacuuugaccugucc

SEQ ID NO: 1478173 - RNA, 19 nt, Artificial Sequence
  Description of Artificial Sequence: Synthetic oligonucleotide
aauuaugaagcagugauau

SEQ ID NO: 1478174 - RNA, 19 nt, Artificial Sequence
  Description of Artificial Sequence: Synthetic oligonucleotide
aagugaaccucucaauuag

SEQ ID NO: 1478175 - RNA, 19 nt, Artificial Sequence
  Description of Artificial Sequence: Synthetic oligonucleotide
ugaacaaucauccaucauu

SEQ ID NO: 1478176 - RNA, 19 nt, Artificial Sequence
  Description of Artificial Sequence: Synthetic oligonucleotide
aaagccuaaguuaaggcuc

SEQ ID NO: 1478177 - RNA, 19 nt, Artificial Sequence
  Description of Artificial Sequence: Synthetic oligonucleotide
aauacuuugaccuguccaa

SEQ ID NO: 1478178 - RNA, 19 nt, Artificial Sequence
  Description of Artificial Sequence: Synthetic oligonucleotide
aauucauaucacuaaccug

SEQ ID NO: 1478179 - RNA, 19 nt, Artificial Sequence
  Description of Artificial Sequence: Synthetic oligonucleotide
acaagcaucauuuguuaac

SEQ ID NO: 1478180 - RNA, 19 nt, Artificial Sequence
  Description of Artificial Sequence: Synthetic oligonucleotide
aaauauuguagaagcauuc

SEQ ID NO: 1478181 - RNA, 19 nt, Artificial Sequence
  Description of Artificial Sequence: Synthetic oligonucleotide
ucccuuuacagucugaaca

SEQ ID NO: 1478182 - RNA, 19 nt, Artificial Sequence
  Description of Artificial Sequence: Synthetic oligonucleotide
aagaaacuccauucuaguc

SEQ ID NO: 1478183 - RNA, 19 nt, Artificial Sequence
  Description of Artificial Sequence: Synthetic oligonucleotide
agaaacuccauucuaguca

SEQ ID NO: 1478184 - RNA, 19 nt, Artificial Sequence
  Description of Artificial Sequence: Synthetic oligonucleotide
acuaaccugcauuugaaag

SEQ ID NO: 1478185 - RNA, 19 nt, Artificial Sequence
  Description of Artificial Sequence: Synthetic oligonucleotide
uauuuuauucugcaaagua

SEQ ID NO: 1478186 - RNA, 19 nt, Artificial Sequence
  Description of Artificial Sequence: Synthetic oligonucleotide
ucuagucagaguaacacaa

SEQ ID NO: 1478187 - RNA, 19 nt, Artificial Sequence
  Description of Artificial Sequence: Synthetic oligonucleotide
uuacuaaucuuauuccacc

SEQ ID NO: 1478188 - RNA, 19 nt, Artificial Sequence
  Description of Artificial Sequence: Synthetic oligonucleotide
auucuagucagaguaacac

SEQ ID NO: 1478189 - RNA, 19 nt, Artificial Sequence
  Description of Artificial Sequence: Synthetic oligonucleotide
uuuauggcguucaaaguga

SEQ ID NO: 1478190 - RNA, 19 nt, Artificial Sequence
  Description of Artificial Sequence: Synthetic oligonucleotide
gauacugugaaccugucaa

SEQ ID NO: 1478191 - RNA, 19 nt, Artificial Sequence
  Description of Artificial Sequence: Synthetic oligonucleotide
gaaacuccauucuagucag

SEQ ID NO: 1478192 - RNA, 19 nt, Artificial Sequence
  Description of Artificial Sequence: Synthetic oligonucleotide
agaaaucuagcuguuugcc

SEQ ID NO: 1478193 - RNA, 19 nt, Artificial Sequence
  Description of Artificial Sequence: Synthetic oligonucleotide
aguaacacaagcauaaaga

SEQ ID NO: 1478194 - RNA, 19 nt, Artificial Sequence
  Description of Artificial Sequence: Synthetic oligonucleotide
gaguuuauauaucagguaa

SEQ ID NO: 1478195 - RNA, 19 nt, Artificial Sequence
  Description of Artificial Sequence: Synthetic oligonucleotide
uccaucauuauaagaaaac

SEQ ID NO: 1478196 - RNA, 19 nt, Artificial Sequence
  Description of Artificial Sequence: Synthetic oligonucleotide
aaagucaaauauuguagaa

SEQ ID NO: 1478197 - RNA, 19 nt, Artificial Sequence
  Description of Artificial Sequence: Synthetic oligonucleotide
aguaaagaaacuccauucu

SEQ ID NO: 1478198 - RNA, 19 nt, Artificial Sequence
  Description of Artificial Sequence: Synthetic oligonucleotide
augauuacaauuacugaac

SEQ ID NO: 1478199 - RNA, 19 nt, Artificial Sequence
  Description of Artificial Sequence: Synthetic oligonucleotide
ucuagugagaucuuccagu

SEQ ID NO: 1478200 - RNA, 19 nt, Artificial Sequence
  Description of Artificial Sequence: Synthetic oligonucleotide
ugugaaccugucaaaauac

SEQ ID NO: 1478201 - RNA, 19 nt, Artificial Sequence
  Description of Artificial Sequence: Synthetic oligonucleotide
cuuggaaccucuuucuugc

SEQ ID NO: 1478202 - RNA, 19 nt, Artificial Sequence
  Description of Artificial Sequence: Synthetic oligonucleotide
ucuucuagggaugaggaug

SEQ ID NO: 1478203 - RNA, 19 nt, Artificial Sequence
  Description of Artificial Sequence: Synthetic oligonucleotide
aacuuaaguuacuuauuca

SEQ ID NO: 1478204 - RNA, 19 nt, Artificial Sequence
  Description of Artificial Sequence: Synthetic oligonucleotide
ucuuuacaaagccaagugu

SEQ ID NO: 1478205 - RNA, 19 nt, Artificial Sequence
  Description of Artificial Sequence: Synthetic oligonucleotide
ugaucgaacacuucugcug

SEQ ID NO: 1478206 - RNA, 19 nt, Artificial Sequence
  Description of Artificial Sequence: Synthetic oligonucleotide
uguuaacuuacuaaucuua

SEQ ID NO: 1478207 - RNA, 19 nt, Artificial Sequence
  Description of Artificial Sequence: Synthetic oligonucleotide
uuacugaacaaucauccau

SEQ ID NO: 1478208 - RNA, 19 nt, Artificial Sequence
  Description of Artificial Sequence: Synthetic oligonucleotide
cuugaaucgucauuacacc

SEQ ID NO: 1478209 - RNA, 19 nt, Artificial Sequence
  Description of Artificial Sequence: Synthetic oligonucleotide
ugguuugggauacauuaag

SEQ ID NO: 1478210 - RNA, 19 nt, Artificial Sequence
  Description of Artificial Sequence: Synthetic oligonucleotide
ucuucuucuagggaugagg

SEQ ID NO: 1478211 - RNA, 19 nt, Artificial Sequence
  Description of Artificial Sequence: Synthetic oligonucleotide
ucaaauauuguagaagcau

SEQ ID NO: 1478212 - RNA, 19 nt, Artificial Sequence
  Description of Artificial Sequence: Synthetic oligonucleotide
ucacuuaugaaagucaaau

SEQ ID NO: 1478213 - RNA, 19 nt, Artificial Sequence
  Description of Artificial Sequence: Synthetic oligonucleotide
gaucgaacacuucugcugc

SEQ ID NO: 1478214 - RNA, 19 nt, Artificial Sequence
  Description of Artificial Sequence: Synthetic oligonucleotide
uaaagugggaagccaagga

SEQ ID NO: 1478215 - RNA, 19 nt, Artificial Sequence
  Description of Artificial Sequence: Synthetic oligonucleotide
ucauucuguauuuuauucu

SEQ ID NO: 1478216 - RNA, 19 nt, Artificial Sequence
  Description of Artificial Sequence: Synthetic oligonucleotide
uaaguuacuuauucacuug

SEQ ID NO: 1478217 - RNA, 19 nt, Artificial Sequence
  Description of Artificial Sequence: Synthetic oligonucleotide
gagaaagccuaaguuaagg

SEQ ID NO: 1478218 - RNA, 19 nt, Artificial Sequence
  Description of Artificial Sequence: Synthetic oligonucleotide
ugaaucgucauuacaccac

SEQ ID NO: 1478219 - RNA, 19 nt, Artificial Sequence
  Description of Artificial Sequence: Synthetic oligonucleotide
uucaagugacaaauggugu

SEQ ID NO: 1478220 - RNA, 19 nt, Artificial Sequence
  Description of Artificial Sequence: Synthetic oligonucleotide
agaagcauuccccugauuu

SEQ ID NO: 1478221 - RNA, 19 nt, Artificial Sequence
  Description of Artificial Sequence: Synthetic oligonucleotide
gucgaugccacuuucugcc

SEQ ID NO: 1478222 - RNA, 19 nt, Artificial Sequence
  Description of Artificial Sequence: Synthetic oligonucleotide
uucuagugagaucuuccag

SEQ ID NO: 1478223 - RNA, 19 nt, Artificial Sequence
  Description of Artificial Sequence: Synthetic oligonucleotide
uacauuaagauauguuaau

SEQ ID NO: 1478224 - RNA, 19 nt, Artificial Sequence
  Description of Artificial Sequence: Synthetic oligonucleotide
gaaccucucaauuaguaaa

SEQ ID NO: 1478225 - RNA, 19 nt, Artificial Sequence
  Description of Artificial Sequence: Synthetic oligonucleotide
uugaaucgucauuacacca

SEQ ID NO: 1478226 - RNA, 19 nt, Artificial Sequence
  Description of Artificial Sequence: Synthetic oligonucleotide
uccuacacuuuucaaguga

SEQ ID NO: 1478227 - RNA, 19 nt, Artificial Sequence
  Description of Artificial Sequence: Synthetic oligonucleotide
aaaugauuuauggcguuca

SEQ ID NO: 1478228 - RNA, 19 nt, Artificial Sequence
  Description of Artificial Sequence: Synthetic oligonucleotide
auauguuaauucauaucac

SEQ ID NO: 1478229 - RNA, 19 nt, Artificial Sequence
  Description of Artificial Sequence: Synthetic oligonucleotide
uuacuuauucacuuguguu

SEQ ID NO: 1478230 - RNA, 19 nt, Artificial Sequence
  Description of Artificial Sequence: Synthetic oligonucleotide
aagcauuccccugauuuuc

SEQ ID NO: 1478231 - RNA, 19 nt, Artificial Sequence
  Description of Artificial Sequence: Synthetic oligonucleotide
ccaagugugagcaacaaac

SEQ ID NO: 1478232 - RNA, 19 nt, Artificial Sequence
  Description of Artificial Sequence: Synthetic oligonucleotide
uuauuccaccuauaaauaa

SEQ ID NO: 1478233 - RNA, 19 nt, Artificial Sequence
  Description of Artificial Sequence: Synthetic oligonucleotide
uauuucuaccacauugguc

SEQ ID NO: 1478234 - RNA, 19 nt, Artificial Sequence
  Description of Artificial Sequence: Synthetic oligonucleotide
uuuaggcaugcuuccacag

SEQ ID NO: 1478235 - RNA, 19 nt, Artificial Sequence
  Description of Artificial Sequence: Synthetic oligonucleotide
uuuuaccagagaaagccua

SEQ ID NO: 1478236 - RNA, 19 nt, Artificial Sequence
  Description of Artificial Sequence: Synthetic oligonucleotide
aucacuaaccugcauuuga

SEQ ID NO: 1478237 - RNA, 19 nt, Artificial Sequence
  Description of Artificial Sequence: Synthetic oligonucleotide
uucaguuacuuucaauuuu

SEQ ID NO: 1478238 - RNA, 19 nt, Artificial Sequence
  Description of Artificial Sequence: Synthetic oligonucleotide
ugaagugauuuccaguuuu

SEQ ID NO: 1478239 - RNA, 19 nt, Artificial Sequence
  Description of Artificial Sequence: Synthetic oligonucleotide
agguaauauuuguuccuac

SEQ ID NO: 1478240 - RNA, 19 nt, Artificial Sequence
  Description of Artificial Sequence: Synthetic oligonucleotide
aaguaggugggucucugcu

SEQ ID NO: 1478241 - RNA, 19 nt, Artificial Sequence
  Description of Artificial Sequence: Synthetic oligonucleotide
gaggucuauguucaguuac

SEQ ID NO: 1478242 - RNA, 19 nt, Artificial Sequence
  Description of Artificial Sequence: Synthetic oligonucleotide
uacuuauucacuuguguuu

SEQ ID NO: 1478243 - RNA, 19 nt, Artificial Sequence
  Description of Artificial Sequence: Synthetic oligonucleotide
aacccauaauuaugaagca

SEQ ID NO: 1478244 - RNA, 19 nt, Artificial Sequence
  Description of Artificial Sequence: Synthetic oligonucleotide
auuacaccacucaagucac

SEQ ID NO: 1478245 - RNA, 19 nt, Artificial Sequence
  Description of Artificial Sequence: Synthetic oligonucleotide
uuuauauaucagguaauau

SEQ ID NO: 1478246 - RNA, 19 nt, Artificial Sequence
  Description of Artificial Sequence: Synthetic oligonucleotide
ucagaguaacacaagcaua

SEQ ID NO: 1478247 - RNA, 19 nt, Artificial Sequence
  Description of Artificial Sequence: Synthetic oligonucleotide
uucuagucagaguaacaca

SEQ ID NO: 1478248 - RNA, 19 nt, Artificial Sequence
  Description of Artificial Sequence: Synthetic oligonucleotide
uucuugcagucaaaguugc

SEQ ID NO: 1478249 - RNA, 19 nt, Artificial Sequence
  Description of Artificial Sequence: Synthetic oligonucleotide
uggguauccugccaucucc

SEQ ID NO: 1478250 - RNA, 19 nt, Artificial Sequence
  Description of Artificial Sequence: Synthetic oligonucleotide
acaaucauccaucauuaua

SEQ ID NO: 1478251 - RNA, 19 nt, Artificial Sequence
  Description of Artificial Sequence: Synthetic oligonucleotide
gacacgagacacgagcacg

SEQ ID NO: 1478252 - RNA, 19 nt, Artificial Sequence
  Description of Artificial Sequence: Synthetic oligonucleotide
uacuaaucuuauuccaccu

SEQ ID NO: 1478253 - RNA, 19 nt, Artificial Sequence
  Description of Artificial Sequence: Synthetic oligonucleotide
aucagugcugacacgagac

SEQ ID NO: 1478254 - RNA, 19 nt, Artificial Sequence
  Description of Artificial Sequence: Synthetic oligonucleotide
uuacaaagccaaguguuca

SEQ ID NO: 1478255 - RNA, 19 nt, Artificial Sequence
  Description of Artificial Sequence: Synthetic oligonucleotide
auaucacuaaccugcauuu

SEQ ID NO: 1478256 - RNA, 19 nt, Artificial Sequence
  Description of Artificial Sequence: Synthetic oligonucleotide
ugugaguugcagauuccca

SEQ ID NO: 1478257 - RNA, 19 nt, Artificial Sequence
  Description of Artificial Sequence: Synthetic oligonucleotide
caagugacaaauggugugg

SEQ ID NO: 1478258 - RNA, 19 nt, Artificial Sequence
  Description of Artificial Sequence: Synthetic oligonucleotide
uguuugccaccaaauguca

SEQ ID NO: 1478259 - RNA, 19 nt, Artificial Sequence
  Description of Artificial Sequence: Synthetic oligonucleotide
agcacuagagccccaggag

SEQ ID NO: 1478260 - RNA, 19 nt, Artificial Sequence
  Description of Artificial Sequence: Synthetic oligonucleotide
caaaguugcccucugauaa

SEQ ID NO: 1478261 - RNA, 19 nt, Artificial Sequence
  Description of Artificial Sequence: Synthetic oligonucleotide
uaauuaugaagcagugaua

SEQ ID NO: 1478262 - RNA, 19 nt, Artificial Sequence
  Description of Artificial Sequence: Synthetic oligonucleotide
ugaaccucucaauuaguaa

SEQ ID NO: 1478263 - RNA, 19 nt, Artificial Sequence
  Description of Artificial Sequence: Synthetic oligonucleotide
gaaagccuaaguuaaggcu

SEQ ID NO: 1478264 - RNA, 19 nt, Artificial Sequence
  Description of Artificial Sequence: Synthetic oligonucleotide
uucauaucacuaaccugca

SEQ ID NO: 1478265 - RNA, 19 nt, Artificial Sequence
  Description of Artificial Sequence: Synthetic oligonucleotide
ugauacagucaugagggga

SEQ ID NO: 1478266 - RNA, 19 nt, Artificial Sequence
  Description of Artificial Sequence: Synthetic oligonucleotide
aucgucauuacaccacuca

SEQ ID NO: 1478267 - RNA, 19 nt, Artificial Sequence
  Description of Artificial Sequence: Synthetic oligonucleotide
guauccugccaucuccugg

SEQ ID NO: 1478268 - RNA, 19 nt, Artificial Sequence
  Description of Artificial Sequence: Synthetic oligonucleotide
accagagaaagccuaaguu

SEQ ID NO: 1478269 - RNA, 19 nt, Artificial Sequence
  Description of Artificial Sequence: Synthetic oligonucleotide
uuaacuuacuaaucuuauu

SEQ ID NO: 1478270 - RNA, 19 nt, Artificial Sequence
  Description of Artificial Sequence: Synthetic oligonucleotide
agcaaacccauaauuauga

SEQ ID NO: 1478271 - RNA, 19 nt, Artificial Sequence
  Description of Artificial Sequence: Synthetic oligonucleotide
acugaacaaucauccauca

SEQ ID NO: 1478272 - RNA, 19 nt, Artificial Sequence
  Description of Artificial Sequence: Synthetic oligonucleotide
ucacuaaccugcauuugaa

SEQ ID NO: 1478273 - RNA, 19 nt, Artificial Sequence
  Description of Artificial Sequence: Synthetic oligonucleotide
ugucgaugccacuuucugc

SEQ ID NO: 1478274 - RNA, 19 nt, Artificial Sequence
  Description of Artificial Sequence: Synthetic oligonucleotide
aucgauggagcugagaaaa

SEQ ID NO: 1478275 - RNA, 19 nt, Artificial Sequence
  Description of Artificial Sequence: Synthetic oligonucleotide
ugggauacauuaagauaug

SEQ ID NO: 1478276 - RNA, 19 nt, Artificial Sequence
  Description of Artificial Sequence: Synthetic oligonucleotide
uuugccaccaaaugucaua

SEQ ID NO: 1478277 - RNA, 19 nt, Artificial Sequence
  Description of Artificial Sequence: Synthetic oligonucleotide
uaccagagaaagccuaagu

SEQ ID NO: 1478278 - RNA, 19 nt, Artificial Sequence
  Description of Artificial Sequence: Synthetic oligonucleotide
ucgucauuacaccacucaa

SEQ ID NO: 1478279 - RNA, 19 nt, Artificial Sequence
  Description of Artificial Sequence: Synthetic oligonucleotide
ugaccuguccaagugugag

SEQ ID NO: 1478280 - RNA, 19 nt, Artificial Sequence
  Description of Artificial Sequence: Synthetic oligonucleotide
uuguuaacuuacuaaucuu

SEQ ID NO: 1478281 - RNA, 19 nt, Artificial Sequence
  Description of Artificial Sequence: Synthetic oligonucleotide
gcugacacgagacacgagc

SEQ ID NO: 1478282 - RNA, 19 nt, Artificial Sequence
  Description of Artificial Sequence: Synthetic oligonucleotide
uguccaagugugagcaaca

SEQ ID NO: 1478283 - RNA, 19 nt, Artificial Sequence
  Description of Artificial Sequence: Synthetic oligonucleotide
aguugcagauucccagguc

SEQ ID NO: 1478284 - RNA, 19 nt, Artificial Sequence
  Description of Artificial Sequence: Synthetic oligonucleotide
gcuugaaucgucauuacac

SEQ ID NO: 1478285 - RNA, 19 nt, Artificial Sequence
  Description of Artificial Sequence: Synthetic oligonucleotide
uuuggcuugaaucgucauu

SEQ ID NO: 1478286 - RNA, 19 nt, Artificial Sequence
  Description of Artificial Sequence: Synthetic oligonucleotide
guuaaagugggaagccaag

SEQ ID NO: 1478287 - RNA, 19 nt, Artificial Sequence
  Description of Artificial Sequence: Synthetic oligonucleotide
uugguuugggauacauuaa

SEQ ID NO: 1478288 - RNA, 19 nt, Artificial Sequence
  Description of Artificial Sequence: Synthetic oligonucleotide
guuccuacacuuuucaagu

SEQ ID NO: 1478289 - RNA, 19 nt, Artificial Sequence
  Description of Artificial Sequence: Synthetic oligonucleotide
aucgaacacuucugcugcc

SEQ ID NO: 1478290 - RNA, 19 nt, Artificial Sequence
  Description of Artificial Sequence: Synthetic oligonucleotide
aaacaugaucgaacacuuc

SEQ ID NO: 1478291 - RNA, 19 nt, Artificial Sequence
  Description of Artificial Sequence: Synthetic oligonucleotide
agaggugaguuuauauauc

SEQ ID NO: 1478292 - RNA, 19 nt, Artificial Sequence
  Description of Artificial Sequence: Synthetic oligonucleotide
gucauuacaccacucaagu

SEQ ID NO: 1478293 - RNA, 19 nt, Artificial Sequence
  Description of Artificial Sequence: Synthetic oligonucleotide
gguaauauuuguuccuaca

SEQ ID NO: 1478294 - RNA, 19 nt, Artificial Sequence
  Description of Artificial Sequence: Synthetic oligonucleotide
gucacuguagaaguugcug

SEQ ID NO: 1478295 - RNA, 19 nt, Artificial Sequence
  Description of Artificial Sequence: Synthetic oligonucleotide
guccaaacaugaucgaaca

SEQ ID NO: 1478296 - RNA, 19 nt, Artificial Sequence
  Description of Artificial Sequence: Synthetic oligonucleotide
uuaccagagaaagccuaag

SEQ ID NO: 1478297 - RNA, 19 nt, Artificial Sequence
  Description of Artificial Sequence: Synthetic oligonucleotide
aacaaucauccaucauuau

SEQ ID NO: 1478298 - RNA, 19 nt, Artificial Sequence
  Description of Artificial Sequence: Synthetic oligonucleotide
ucagugcugacacgagaca

SEQ ID NO: 1478299 - RNA, 19 nt, Artificial Sequence
  Description of Artificial Sequence: Synthetic oligonucleotide
uaaucuuauuccaccuaua

SEQ ID NO: 1478300 - RNA, 19 nt, Artificial Sequence
  Description of Artificial Sequence: Synthetic oligonucleotide
uccauucuagucagaguaa

SEQ ID NO: 1478301 - RNA, 19 nt, Artificial Sequence
  Description of Artificial Sequence: Synthetic oligonucleotide
uccaucggcgucagggacc

SEQ ID NO: 1478302 - RNA, 19 nt, Artificial Sequence
  Description of Artificial Sequence: Synthetic oligonucleotide
aguugcuggaaaaucgaug

SEQ ID NO: 1478303 - RNA, 19 nt, Artificial Sequence
  Description of Artificial Sequence: Synthetic oligonucleotide
ugaaaugauuuauggcguu

SEQ ID NO: 1478304 - RNA, 19 nt, Artificial Sequence
  Description of Artificial Sequence: Synthetic oligonucleotide
acccauaauuaugaagcag

SEQ ID NO: 1478305 - RNA, 19 nt, Artificial Sequence
  Description of Artificial Sequence: Synthetic oligonucleotide
auccacgugguacaccucu

SEQ ID NO: 1478306 - RNA, 19 nt, Artificial Sequence
  Description of Artificial Sequence: Synthetic oligonucleotide
aggcucacuuaugaaaguc

SEQ ID NO: 1478307 - RNA, 19 nt, Artificial Sequence
  Description of Artificial Sequence: Synthetic oligonucleotide
auuaguaaagaaacuccau

SEQ ID NO: 1478308 - RNA, 19 nt, Artificial Sequence
  Description of Artificial Sequence: Synthetic oligonucleotide
gaaaugauuuauggcguuc

SEQ ID NO: 1478309 - RNA, 19 nt, Artificial Sequence
  Description of Artificial Sequence: Synthetic oligonucleotide
agugcugacacgagacacg

SEQ ID NO: 1478310 - RNA, 19 nt, Artificial Sequence
  Description of Artificial Sequence: Synthetic oligonucleotide
aaucgucauuacaccacuc

SEQ ID NO: 1478311 - RNA, 19 nt, Artificial Sequence
  Description of Artificial Sequence: Synthetic oligonucleotide
acauuaagauauguuaauu

SEQ ID NO: 1478312 - RNA, 19 nt, Artificial Sequence
  Description of Artificial Sequence: Synthetic oligonucleotide
guauggagugucucagagc

SEQ ID NO: 1478313 - RNA, 19 nt, Artificial Sequence
  Description of Artificial Sequence: Synthetic oligonucleotide
uggcguucaaagugaaccu

SEQ ID NO: 1478314 - RNA, 19 nt, Artificial Sequence
  Description of Artificial Sequence: Synthetic oligonucleotide
agauacugugaaccuguca

SEQ ID NO: 1478315 - RNA, 19 nt, Artificial Sequence
  Description of Artificial Sequence: Synthetic oligonucleotide
acuaaucuuauuccaccua

SEQ ID NO: 1478316 - RNA, 19 nt, Artificial Sequence
  Description of Artificial Sequence: Synthetic oligonucleotide
uuccuacacuuuucaagug

SEQ ID NO: 1478317 - RNA, 19 nt, Artificial Sequence
  Description of Artificial Sequence: Synthetic oligonucleotide
gauuuauggcguucaaagu

SEQ ID NO: 1478318 - RNA, 19 nt, Artificial Sequence
  Description of Artificial Sequence: Synthetic oligonucleotide
aaaaucgauggagcugaga

SEQ ID NO: 1478319 - RNA, 19 nt, Artificial Sequence
  Description of Artificial Sequence: Synthetic oligonucleotide
aaguugcccucugauaaga

SEQ ID NO: 1478320 - RNA, 19 nt, Artificial Sequence
  Description of Artificial Sequence: Synthetic oligonucleotide
ucagugagagaggugaguu

SEQ ID NO: 1478321 - RNA, 19 nt, Artificial Sequence
  Description of Artificial Sequence: Synthetic oligonucleotide
cuucuagugagaucuucca

SEQ ID NO: 1478322 - RNA, 19 nt, Artificial Sequence
  Description of Artificial Sequence: Synthetic oligonucleotide
auacuuugaccuguccaag

SEQ ID NO: 1478323 - RNA, 19 nt, Artificial Sequence
  Description of Artificial Sequence: Synthetic oligonucleotide
guuuauauaucagguaaua

SEQ ID NO: 1478324 - RNA, 19 nt, Artificial Sequence
  Description of Artificial Sequence: Synthetic oligonucleotide
cuaaccugcauuugaaagu

SEQ ID NO: 1478325 - RNA, 19 nt, Artificial Sequence
  Description of Artificial Sequence: Synthetic oligonucleotide
accuguccaagugugagca

SEQ ID NO: 1478326 - RNA, 19 nt, Artificial Sequence
  Description of Artificial Sequence: Synthetic oligonucleotide
uuauggcguucaaagugaa

SEQ ID NO: 1478327 - RNA, 19 nt, Artificial Sequence
  Description of Artificial Sequence: Synthetic oligonucleotide
uauggcguucaaagugaac

SEQ ID NO: 1478328 - RNA, 19 nt, Artificial Sequence
  Description of Artificial Sequence: Synthetic oligonucleotide
aagccuaaguuaaggcuca

SEQ ID NO: 1478329 - RNA, 19 nt, Artificial Sequence
  Description of Artificial Sequence: Synthetic oligonucleotide
aaguuaaggcucacuuaug

SEQ ID NO: 1478330 - RNA, 19 nt, Artificial Sequence
  Description of Artificial Sequence: Synthetic oligonucleotide
agauuuagguagauacugu

SEQ ID NO: 1478331 - RNA, 19 nt, Artificial Sequence
  Description of Artificial Sequence: Synthetic oligonucleotide
cacucugauacagucauga

SEQ ID NO: 1478332 - RNA, 19 nt, Artificial Sequence
  Description of Artificial Sequence: Synthetic oligonucleotide
gugaguuuauauaucaggu

SEQ ID NO: 1478333 - RNA, 19 nt, Artificial Sequence
  Description of Artificial Sequence: Synthetic oligonucleotide
cugugaguugcagauuccc

SEQ ID NO: 1478334 - RNA, 19 nt, Artificial Sequence
  Description of Artificial Sequence: Synthetic oligonucleotide
cucaagucacuguagaagu

SEQ ID NO: 1478335 - RNA, 19 nt, Artificial Sequence
  Description of Artificial Sequence: Synthetic oligonucleotide
aguuacuuauucacuugug

SEQ ID NO: 1478336 - RNA, 19 nt, Artificial Sequence
  Description of Artificial Sequence: Synthetic oligonucleotide
ucaagucacuguagaaguu

SEQ ID NO: 1478337 - RNA, 19 nt, Artificial Sequence
  Description of Artificial Sequence: Synthetic oligonucleotide
ugggaagccaaggauguau

SEQ ID NO: 1478338 - RNA, 19 nt, Artificial Sequence
  Description of Artificial Sequence: Synthetic oligonucleotide
cugauaagauuuagguaga

SEQ ID NO: 1478339 - RNA, 19 nt, Artificial Sequence
  Description of Artificial Sequence: Synthetic oligonucleotide
gcaucauuuguuaacuuac

SEQ ID NO: 1478340 - RNA, 19 nt, Artificial Sequence
  Description of Artificial Sequence: Synthetic oligonucleotide
gaccuguccaagugugagc

SEQ ID NO: 1478341 - RNA, 19 nt, Artificial Sequence
  Description of Artificial Sequence: Synthetic oligonucleotide
uaucacuaaccugcauuug

SEQ ID NO: 1478342 - RNA, 19 nt, Artificial Sequence
  Description of Artificial Sequence: Synthetic oligonucleotide
caugcuuccacagggguca

SEQ ID NO: 1478343 - RNA, 19 nt, Artificial Sequence
  Description of Artificial Sequence: Synthetic oligonucleotide
guuaaggcucacuuaugaa

SEQ ID NO: 1478344 - RNA, 19 nt, Artificial Sequence
  Description of Artificial Sequence: Synthetic oligonucleotide
agguccuucuagugagauc

SEQ ID NO: 1478345 - RNA, 19 nt, Artificial Sequence
  Description of Artificial Sequence: Synthetic oligonucleotide
cauucuagucagaguaaca

SEQ ID NO: 1478346 - RNA, 19 nt, Artificial Sequence
  Description of Artificial Sequence: Synthetic oligonucleotide
uugccaccaaaugucauau

SEQ ID NO: 1478347 - RNA, 19 nt, Artificial Sequence
  Description of Artificial Sequence: Synthetic oligonucleotide
ccauaauuaugaagcagug

SEQ ID NO: 1478348 - RNA, 19 nt, Artificial Sequence
  Description of Artificial Sequence: Synthetic oligonucleotide
gaaucgucauuacaccacu

SEQ ID NO: 1478349 - RNA, 19 nt, Artificial Sequence
  Description of Artificial Sequence: Synthetic oligonucleotide
cugugaaccugucaaaaua

SEQ ID NO: 1478350 - RNA, 19 nt, Artificial Sequence
  Description of Artificial Sequence: Synthetic oligonucleotide
ucauaucacuaaccugcau

SEQ ID NO: 1478351 - RNA, 19 nt, Artificial Sequence
  Description of Artificial Sequence: Synthetic oligonucleotide
cucaauuaguaaagaaacu

SEQ ID NO: 1478352 - RNA, 19 nt, Artificial Sequence
  Description of Artificial Sequence: Synthetic oligonucleotide
ucgauggagcugagaaaac

SEQ ID NO: 1478353 - RNA, 19 nt, Artificial Sequence
  Description of Artificial Sequence: Synthetic oligonucleotide
gugugagcaacaaacucca

SEQ ID NO: 1478354 - RNA, 19 nt, Artificial Sequence
  Description of Artificial Sequence: Synthetic oligonucleotide
ccuacacuuuucaagugac

SEQ ID NO: 1478355 - RNA, 19 nt, Artificial Sequence
  Description of Artificial Sequence: Synthetic oligonucleotide
cccauguuccagcaaaccc

SEQ ID NO: 1478356 - RNA, 19 nt, Artificial Sequence
  Description of Artificial Sequence: Synthetic oligonucleotide
uugguccaaacaugaucga

SEQ ID NO: 1478357 - RNA, 19 nt, Artificial Sequence
  Description of Artificial Sequence: Synthetic oligonucleotide
cauaucacuaaccugcauu

SEQ ID NO: 1478358 - RNA, 19 nt, Artificial Sequence
  Description of Artificial Sequence: Synthetic oligonucleotide
gaacacuucugcugccaca

SEQ ID NO: 1478359 - RNA, 19 nt, Artificial Sequence
  Description of Artificial Sequence: Synthetic oligonucleotide
gguagauacugugaaccug

SEQ ID NO: 1478360 - RNA, 19 nt, Artificial Sequence
  Description of Artificial Sequence: Synthetic oligonucleotide
uuguuccuacacuuuucaa

SEQ ID NO: 1478361 - RNA, 19 nt, Artificial Sequence
  Description of Artificial Sequence: Synthetic oligonucleotide
ugauaagauuuagguagau

SEQ ID NO: 1478362 - RNA, 19 nt, Artificial Sequence
  Description of Artificial Sequence: Synthetic oligonucleotide
cuaaucuuauuccaccuau

SEQ ID NO: 1478363 - RNA, 19 nt, Artificial Sequence
  Description of Artificial Sequence: Synthetic oligonucleotide
cacuuguguuucucuuggg

SEQ ID NO: 1478364 - RNA, 19 nt, Artificial Sequence
  Description of Artificial Sequence: Synthetic oligonucleotide
guagauacugugaaccugu

SEQ ID NO: 1478365 - RNA, 19 nt, Artificial Sequence
  Description of Artificial Sequence: Synthetic oligonucleotide
aaguugcuggaaaaucgau

SEQ ID NO: 1478366 - RNA, 19 nt, Artificial Sequence
  Description of Artificial Sequence: Synthetic oligonucleotide
cugacacgagacacgagca

SEQ ID NO: 1478367 - RNA, 19 nt, Artificial Sequence
  Description of Artificial Sequence: Synthetic oligonucleotide
cagugcugacacgagacac

SEQ ID NO: 1478368 - RNA, 19 nt, Artificial Sequence
  Description of Artificial Sequence: Synthetic oligonucleotide
cccucugauaagauuuagg

SEQ ID NO: 1478369 - RNA, 19 nt, Artificial Sequence
  Description of Artificial Sequence: Synthetic oligonucleotide
acuccaucggcgucaggga

SEQ ID NO: 1478370 - RNA, 19 nt, Artificial Sequence
  Description of Artificial Sequence: Synthetic oligonucleotide
guauuucuaccacauuggu

SEQ ID NO: 1478371 - RNA, 19 nt, Artificial Sequence
  Description of Artificial Sequence: Synthetic oligonucleotide
aaccucuuucuugcaguca

SEQ ID NO: 1478372 - RNA, 19 nt, Artificial Sequence
  Description of Artificial Sequence: Synthetic oligonucleotide
guuaacuuacuaaucuuau

SEQ ID NO: 1478373 - RNA, 19 nt, Artificial Sequence
  Description of Artificial Sequence: Synthetic oligonucleotide
cuagcuguuugccaccaaa

SEQ ID NO: 1478374 - RNA, 19 nt, Artificial Sequence
  Description of Artificial Sequence: Synthetic oligonucleotide
ugcugacacgagacacgag

SEQ ID NO: 1478375 - RNA, 19 nt, Artificial Sequence
  Description of Artificial Sequence: Synthetic oligonucleotide
gcuguuugccaccaaaugu

SEQ ID NO: 1478376 - RNA, 19 nt, Artificial Sequence
  Description of Artificial Sequence: Synthetic oligonucleotide
cgucauuacaccacucaag

SEQ ID NO: 1478377 - RNA, 19 nt, Artificial Sequence
  Description of Artificial Sequence: Synthetic oligonucleotide
cuggaaaaucgauggagcu

SEQ ID NO: 1478378 - RNA, 19 nt, Artificial Sequence
  Description of Artificial Sequence: Synthetic oligonucleotide
uuacaccacucaagucacu

SEQ ID NO: 1478379 - RNA, 19 nt, Artificial Sequence
  Description of Artificial Sequence: Synthetic oligonucleotide
caagugugagcaacaaacu

SEQ ID NO: 1478380 - RNA, 19 nt, Artificial Sequence
  Description of Artificial Sequence: Synthetic oligonucleotide
aaacuccaucggcgucagg

SEQ ID NO: 1478381 - RNA, 19 nt, Artificial Sequence
  Description of Artificial Sequence: Synthetic oligonucleotide
agugaaccucucaauuagu

SEQ ID NO: 1478382 - RNA, 19 nt, Artificial Sequence
  Description of Artificial Sequence: Synthetic oligonucleotide
cuccaucggcgucagggac

SEQ ID NO: 1478383 - RNA, 19 nt, Artificial Sequence
  Description of Artificial Sequence: Synthetic oligonucleotide
cucacuuaugaaagucaaa

SEQ ID NO: 1478384 - RNA, 19 nt, Artificial Sequence
  Description of Artificial Sequence: Synthetic oligonucleotide
gggaacaucagugcugaca

SEQ ID NO: 1478385 - RNA, 19 nt, Artificial Sequence
  Description of Artificial Sequence: Synthetic oligonucleotide
cacaagcaucauuuguuaa

SEQ ID NO: 1478386 - RNA, 19 nt, Artificial Sequence
  Description of Artificial Sequence: Synthetic oligonucleotide
gguuugggauacauuaaga

SEQ ID NO: 1478387 - RNA, 19 nt, Artificial Sequence
  Description of Artificial Sequence: Synthetic oligonucleotide
caucauuuguuaacuuacu

SEQ ID NO: 1478388 - RNA, 19 nt, Artificial Sequence
  Description of Artificial Sequence: Synthetic oligonucleotide
ucgaugccacuuucugccu

SEQ ID NO: 1478389 - RNA, 19 nt, Artificial Sequence
  Description of Artificial Sequence: Synthetic oligonucleotide
gaguugcagauucccaggu

SEQ ID NO: 1478390 - RNA, 19 nt, Artificial Sequence
  Description of Artificial Sequence: Synthetic oligonucleotide
ucuagcuguuugccaccaa

SEQ ID NO: 1478391 - RNA, 19 nt, Artificial Sequence
  Description of Artificial Sequence: Synthetic oligonucleotide
cuaccacauugguccaaac

SEQ ID NO: 1478392 - RNA, 19 nt, Artificial Sequence
  Description of Artificial Sequence: Synthetic oligonucleotide
acacgagacacgagcacgu

SEQ ID NO: 1478393 - RNA, 19 nt, Artificial Sequence
  Description of Artificial Sequence: Synthetic oligonucleotide
agccaaggauguauggagu

SEQ ID NO: 1478394 - RNA, 19 nt, Artificial Sequence
  Description of Artificial Sequence: Synthetic oligonucleotide
gguuaaagugggaagccaa

SEQ ID NO: 1478395 - RNA, 19 nt, Artificial Sequence
  Description of Artificial Sequence: Synthetic oligonucleotide
accugucaaaauacuuuga

SEQ ID NO: 1478396 - RNA, 19 nt, Artificial Sequence
  Description of Artificial Sequence: Synthetic oligonucleotide
gugaaccucucaauuagua

SEQ ID NO: 1478397 - RNA, 19 nt, Artificial Sequence
  Description of Artificial Sequence: Synthetic oligonucleotide
ggcuugaaucgucauuaca

SEQ ID NO: 1478398 - RNA, 19 nt, Artificial Sequence
  Description of Artificial Sequence: Synthetic oligonucleotide
cacuaaccugcauuugaaa

SEQ ID NO: 1478399 - RNA, 19 nt, Artificial Sequence
  Description of Artificial Sequence: Synthetic oligonucleotide
ccauucuagucagaguaac

SEQ ID NO: 1478400 - RNA, 19 nt, Artificial Sequence
  Description of Artificial Sequence: Synthetic oligonucleotide
gugcugacacgagacacga

SEQ ID NO: 1478401 - RNA, 19 nt, Artificial Sequence
  Description of Artificial Sequence: Synthetic oligonucleotide
gugcggaggucuauguuca

SEQ ID NO: 1478402 - RNA, 19 nt, Artificial Sequence
  Description of Artificial Sequence: Synthetic oligonucleotide
acaaugccacuuggaaccu

SEQ ID NO: 1478403 - RNA, 19 nt, Artificial Sequence
  Description of Artificial Sequence: Synthetic oligonucleotide
cgugcggaggucuauguuc

SEQ ID NO: 1478404 - RNA, 19 nt, Artificial Sequence
  Description of Artificial Sequence: Synthetic oligonucleotide
uagaagcauuccccugauu

SEQ ID NO: 1478405 - RNA, 19 nt, Artificial Sequence
  Description of Artificial Sequence: Synthetic oligonucleotide
uccacgugguacaccucuu

SEQ ID NO: 1478406 - RNA, 19 nt, Artificial Sequence
  Description of Artificial Sequence: Synthetic oligonucleotide
agccuaaguuaaggcucac

SEQ ID NO: 1478407 - RNA, 19 nt, Artificial Sequence
  Description of Artificial Sequence: Synthetic oligonucleotide
cagguaauauuuguuccua

SEQ ID NO: 1478408 - RNA, 19 nt, Artificial Sequence
  Description of Artificial Sequence: Synthetic oligonucleotide
gagugucucagagcuucga

SEQ ID NO: 1478409 - RNA, 19 nt, Artificial Sequence
  Description of Artificial Sequence: Synthetic oligonucleotide
gcauuccccugauuuuccc

SEQ ID NO: 1478410 - RNA, 19 nt, Artificial Sequence
  Description of Artificial Sequence: Synthetic oligonucleotide
caugucgaugccacuuucu

SEQ ID NO: 1478411 - RNA, 19 nt, Artificial Sequence
  Description of Artificial Sequence: Synthetic oligonucleotide
uuccauccacgugguacac

SEQ ID NO: 1478412 - RNA, 19 nt, Artificial Sequence
  Description of Artificial Sequence: Synthetic oligonucleotide
aaacuccauucuagucaga

SEQ ID NO: 1478413 - RNA, 19 nt, Artificial Sequence
  Description of Artificial Sequence: Synthetic oligonucleotide
ccuuuacagucugaacagc

SEQ ID NO: 1478414 - RNA, 19 nt, Artificial Sequence
  Description of Artificial Sequence: Synthetic oligonucleotide
gcucacuuaugaaagucaa

SEQ ID NO: 1478415 - RNA, 19 nt, Artificial Sequence
  Description of Artificial Sequence: Synthetic oligonucleotide
ccucacacaagcaucauuu

SEQ ID NO: 1478416 - RNA, 19 nt, Artificial Sequence
  Description of Artificial Sequence: Synthetic oligonucleotide
acgugcggaggucuauguu

SEQ ID NO: 1478417 - RNA, 19 nt, Artificial Sequence
  Description of Artificial Sequence: Synthetic oligonucleotide
gaagggguuuggcuugaau

SEQ ID NO: 1478418 - RNA, 19 nt, Artificial Sequence
  Description of Artificial Sequence: Synthetic oligonucleotide
ccuaaguuaaggcucacuu

SEQ ID NO: 1478419 - RNA, 19 nt, Artificial Sequence
  Description of Artificial Sequence: Synthetic oligonucleotide
ggauacauuaagauauguu

SEQ ID NO: 1478420 - RNA, 19 nt, Artificial Sequence
  Description of Artificial Sequence: Synthetic oligonucleotide
ggcguucaaagugaaccuc

SEQ ID NO: 1478421 - RNA, 19 nt, Artificial Sequence
  Description of Artificial Sequence: Synthetic oligonucleotide
ggagugucucagagcuucg

SEQ ID NO: 1478422 - RNA, 19 nt, Artificial Sequence
  Description of Artificial Sequence: Synthetic oligonucleotide
ucggcgucagggacccuuu

SEQ ID NO: 1478423 - RNA, 19 nt, Artificial Sequence
  Description of Artificial Sequence: Synthetic oligonucleotide
ucggaguguuggguucugu

SEQ ID NO: 1478424 - RNA, 19 nt, Artificial Sequence
  Description of Artificial Sequence: Synthetic oligonucleotide
cacaagcauaaagauuaua

SEQ ID NO: 1478425 - RNA, 19 nt, Artificial Sequence
  Description of Artificial Sequence: Synthetic oligonucleotide
guagaagcauuccccugau

SEQ ID NO: 1478426 - RNA, 19 nt, Artificial Sequence
  Description of Artificial Sequence: Synthetic oligonucleotide
acacucugauacagucaug

SEQ ID NO: 1478427 - RNA, 19 nt, Artificial Sequence
  Description of Artificial Sequence: Synthetic oligonucleotide
cacgagacacgagcacgug

SEQ ID NO: 1478428 - RNA, 19 nt, Artificial Sequence
  Description of Artificial Sequence: Synthetic oligonucleotide
ccacucaagucacuguaga

SEQ ID NO: 1478429 - RNA, 19 nt, Artificial Sequence
  Description of Artificial Sequence: Synthetic oligonucleotide
cacgugguacaccucuucu

SEQ ID NO: 1478430 - RNA, 19 nt, Artificial Sequence
  Description of Artificial Sequence: Synthetic oligonucleotide
aguugcccucugauaagau

SEQ ID NO: 1478431 - RNA, 19 nt, Artificial Sequence
  Description of Artificial Sequence: Synthetic oligonucleotide
guccaagugugagcaacaa

SEQ ID NO: 1478432 - RNA, 19 nt, Artificial Sequence
  Description of Artificial Sequence: Synthetic oligonucleotide
guuuggcuugaaucgucau

SEQ ID NO: 1478433 - RNA, 19 nt, Artificial Sequence
  Description of Artificial Sequence: Synthetic oligonucleotide
gcagauucccagguccuuc

SEQ ID NO: 1478434 - RNA, 19 nt, Artificial Sequence
  Description of Artificial Sequence: Synthetic oligonucleotide
gggauacauuaagauaugu

SEQ ID NO: 1478435 - RNA, 19 nt, Artificial Sequence
  Description of Artificial Sequence: Synthetic oligonucleotide
ccaucggcgucagggaccc

SEQ ID NO: 1478436 - RNA, 19 nt, Artificial Sequence
  Description of Artificial Sequence: Synthetic oligonucleotide
ugaagggguuuggcuugaa

SEQ ID NO: 1478437 - RNA, 19 nt, Artificial Sequence
  Description of Artificial Sequence: Synthetic oligonucleotide
cugaacaaucauccaucau

SEQ ID NO: 1478438 - RNA, 19 nt, Artificial Sequence
  Description of Artificial Sequence: Synthetic oligonucleotide
ccaugucgaugccacuuuc

SEQ ID NO: 1478439 - RNA, 19 nt, Artificial Sequence
  Description of Artificial Sequence: Synthetic oligonucleotide
ggguuuggcuugaaucguc

SEQ ID NO: 1478440 - RNA, 19 nt, Artificial Sequence
  Description of Artificial Sequence: Synthetic oligonucleotide
agcacgugcggaggucuau

SEQ ID NO: 1478441 - RNA, 19 nt, Artificial Sequence
  Description of Artificial Sequence: Synthetic oligonucleotide
guuugccaccaaaugucau

SEQ ID NO: 1478442 - RNA, 19 nt, Artificial Sequence
  Description of Artificial Sequence: Synthetic oligonucleotide
cacgugcggaggucuaugu

SEQ ID NO: 1478443 - RNA, 19 nt, Artificial Sequence
  Description of Artificial Sequence: Synthetic oligonucleotide
gcacgugcggaggucuaug

SEQ ID NO: 1478444 - RNA, 19 nt, Artificial Sequence
  Description of Artificial Sequence: Synthetic oligonucleotide
cagugagagaggugaguuu

SEQ ID NO: 1478445 - RNA, 19 nt, Artificial Sequence
  Description of Artificial Sequence: Synthetic oligonucleotide
ggaggaagcccaugucgau

SEQ ID NO: 1478446 - RNA, 19 nt, Artificial Sequence
  Description of Artificial Sequence: Synthetic oligonucleotide
auggagugucucagagcuu

SEQ ID NO: 1478447 - RNA, 19 nt, Artificial Sequence
  Description of Artificial Sequence: Synthetic oligonucleotide
gugagagaggugaguuuau

SEQ ID NO: 1478448 - RNA, 19 nt, Artificial Sequence
  Description of Artificial Sequence: Synthetic oligonucleotide
gagcacgugcggaggucua

SEQ ID NO: 1478449 - RNA, 19 nt, Artificial Sequence
  Description of Artificial Sequence: Synthetic oligonucleotide
ggguauccugccaucuccu

SEQ ID NO: 1478450 - RNA, 19 nt, Artificial Sequence
  Description of Artificial Sequence: Synthetic oligonucleotide
cugccucggaguguugggu

SEQ ID NO: 1478451 - RNA, 19 nt, Artificial Sequence
  Description of Artificial Sequence: Synthetic oligonucleotide
gccuaaguuaaggcucacu

SEQ ID NO: 1478452 - RNA, 19 nt, Artificial Sequence
  Description of Artificial Sequence: Synthetic oligonucleotide
cuagagccccaggagcuuu

SEQ ID NO: 1478453 - RNA, 19 nt, Artificial Sequence
  Description of Artificial Sequence: Synthetic oligonucleotide
cggaggucuauguucaguu

SEQ ID NO: 1478454 - RNA, 19 nt, Artificial Sequence
  Description of Artificial Sequence: Synthetic oligonucleotide
gcccaugucgaugccacuu

SEQ ID NO: 1478455 - RNA, 19 nt, Artificial Sequence
  Description of Artificial Sequence: Synthetic oligonucleotide
cccaugucgaugccacuuu

SEQ ID NO: 1478456 - RNA, 19 nt, Artificial Sequence
  Description of Artificial Sequence: Synthetic oligonucleotide
ggccaaggcuucccauguu

SEQ ID NO: 1478457 - RNA, 19 nt, Artificial Sequence
  Description of Artificial Sequence: Synthetic oligonucleotide
cgagcacgugcggaggucu

SEQ ID NO: 1478458 - RNA, 19 nt, Artificial Sequence
  Description of Artificial Sequence: Synthetic oligonucleotide
caucggcgucagggacccu

SEQ ID NO: 1478459 - RNA, 19 nt, Artificial Sequence
  Description of Artificial Sequence: Synthetic oligonucleotide
cggcgucagggacccuuuu

SEQ ID NO: 1478460 - RNA, 19 nt, Artificial Sequence
  Description of Artificial Sequence: Synthetic oligonucleotide
cuaaagaucacaaagaggg

SEQ ID NO: 1478461 - RNA, 19 nt, Artificial Sequence
  Description of Artificial Sequence: Synthetic oligonucleotide
acuacgaucauccuuagac

SEQ ID NO: 1478462 - RNA, 19 nt, Artificial Sequence
  Description of Artificial Sequence: Synthetic oligonucleotide
aauaacauuacugaaagga

SEQ ID NO: 1478463 - RNA, 19 nt, Artificial Sequence
  Description of Artificial Sequence: Synthetic oligonucleotide
ugauauuuggcauaauugg

SEQ ID NO: 1478464 - RNA, 19 nt, Artificial Sequence
  Description of Artificial Sequence: Synthetic oligonucleotide
ugauguaguaguaauaaag

SEQ ID NO: 1478465 - RNA, 19 nt, Artificial Sequence
  Description of Artificial Sequence: Synthetic oligonucleotide
aaggugauaagcccaaugg

SEQ ID NO: 1478466 - RNA, 19 nt, Artificial Sequence
  Description of Artificial Sequence: Synthetic oligonucleotide
ugaugcacgaacaugauca

SEQ ID NO: 1478467 - RNA, 19 nt, Artificial Sequence
  Description of Artificial Sequence: Synthetic oligonucleotide
aaagcuuuaaaagcaauuc

SEQ ID NO: 1478468 - RNA, 19 nt, Artificial Sequence
  Description of Artificial Sequence: Synthetic oligonucleotide
uuuaaaagcaauucgugca

SEQ ID NO: 1478469 - RNA, 19 nt, Artificial Sequence
  Description of Artificial Sequence: Synthetic oligonucleotide
aauaaagcucucucgagag

SEQ ID NO: 1478470 - RNA, 19 nt, Artificial Sequence
  Description of Artificial Sequence: Synthetic oligonucleotide
acuaguuaacagcacaccc

SEQ ID NO: 1478471 - RNA, 19 nt, Artificial Sequence
  Description of Artificial Sequence: Synthetic oligonucleotide
aagcuuuaaaagcaauucg

SEQ ID NO: 1478472 - RNA, 19 nt, Artificial Sequence
  Description of Artificial Sequence: Synthetic oligonucleotide
agaaaucuaauuccguagc

SEQ ID NO: 1478473 - RNA, 19 nt, Artificial Sequence
  Description of Artificial Sequence: Synthetic oligonucleotide
aaaacuaguuaacagcaca

SEQ ID NO: 1478474 - RNA, 19 nt, Artificial Sequence
  Description of Artificial Sequence: Synthetic oligonucleotide
aggggauguagcuagaggc

SEQ ID NO: 1478475 - RNA, 19 nt, Artificial Sequence
  Description of Artificial Sequence: Synthetic oligonucleotide
aauucgugcaaucagguaa

SEQ ID NO: 1478476 - RNA, 19 nt, Artificial Sequence
  Description of Artificial Sequence: Synthetic oligonucleotide
agucaaugaaacucaauac

SEQ ID NO: 1478477 - RNA, 19 nt, Artificial Sequence
  Description of Artificial Sequence: Synthetic oligonucleotide
uguuagauggaccaggaac

SEQ ID NO: 1478478 - RNA, 19 nt, Artificial Sequence
  Description of Artificial Sequence: Synthetic oligonucleotide
gacagcauaauucaagaug

SEQ ID NO: 1478479 - RNA, 19 nt, Artificial Sequence
  Description of Artificial Sequence: Synthetic oligonucleotide
ucagguuuaacauugcuuc

SEQ ID NO: 1478480 - RNA, 19 nt, Artificial Sequence
  Description of Artificial Sequence: Synthetic oligonucleotide
aacugagagaacaugagag

SEQ ID NO: 1478481 - RNA, 19 nt, Artificial Sequence
  Description of Artificial Sequence: Synthetic oligonucleotide
gaaacucaauaccauaugc

SEQ ID NO: 1478482 - RNA, 19 nt, Artificial Sequence
  Description of Artificial Sequence: Synthetic oligonucleotide
agcuuuacaagucccgugc

SEQ ID NO: 1478483 - RNA, 19 nt, Artificial Sequence
  Description of Artificial Sequence: Synthetic oligonucleotide
aguaauaaagcucucucga

SEQ ID NO: 1478484 - RNA, 19 nt, Artificial Sequence
  Description of Artificial Sequence: Synthetic oligonucleotide
aaucuaauuccguagcaga

SEQ ID NO: 1478485 - RNA, 19 nt, Artificial Sequence
  Description of Artificial Sequence: Synthetic oligonucleotide
uaguaauaaagcucucucg

SEQ ID NO: 1478486 - RNA, 19 nt, Artificial Sequence
  Description of Artificial Sequence: Synthetic oligonucleotide
uacgucacuacgaucaucc

SEQ ID NO: 1478487 - RNA, 19 nt, Artificial Sequence
  Description of Artificial Sequence: Synthetic oligonucleotide
ugucgagugucccagaacc

SEQ ID NO: 1478488 - RNA, 19 nt, Artificial Sequence
  Description of Artificial Sequence: Synthetic oligonucleotide
uggccauucacgcaguugg

SEQ ID NO: 1478489 - RNA, 19 nt, Artificial Sequence
  Description of Artificial Sequence: Synthetic oligonucleotide
aacaugagagaccaguaga

SEQ ID NO: 1478490 - RNA, 19 nt, Artificial Sequence
  Description of Artificial Sequence: Synthetic oligonucleotide
auaugcacaaugcacaaca

SEQ ID NO: 1478491 - RNA, 19 nt, Artificial Sequence
  Description of Artificial Sequence: Synthetic oligonucleotide
gaaguaacuaggcaauacc

SEQ ID NO: 1478492 - RNA, 19 nt, Artificial Sequence
  Description of Artificial Sequence: Synthetic oligonucleotide
aucagguaagaccagauga

SEQ ID NO: 1478493 - RNA, 19 nt, Artificial Sequence
  Description of Artificial Sequence: Synthetic oligonucleotide
cugauauuuggcauaauug

SEQ ID NO: 1478494 - RNA, 19 nt, Artificial Sequence
  Description of Artificial Sequence: Synthetic oligonucleotide
ucuuuuaacaucugugaac

SEQ ID NO: 1478495 - RNA, 19 nt, Artificial Sequence
  Description of Artificial Sequence: Synthetic oligonucleotide
guaacuaggcaauaccuag

SEQ ID NO: 1478496 - RNA, 19 nt, Artificial Sequence
  Description of Artificial Sequence: Synthetic oligonucleotide
uaauaaagcucucucgaga

SEQ ID NO: 1478497 - RNA, 19 nt, Artificial Sequence
  Description of Artificial Sequence: Synthetic oligonucleotide
uagacgaguaaccauaaaa

SEQ ID NO: 1478498 - RNA, 19 nt, Artificial Sequence
  Description of Artificial Sequence: Synthetic oligonucleotide
uuuaacaucugugaacuga

SEQ ID NO: 1478499 - RNA, 19 nt, Artificial Sequence
  Description of Artificial Sequence: Synthetic oligonucleotide
aaaucuaauuccguagcag

SEQ ID NO: 1478500 - RNA, 19 nt, Artificial Sequence
  Description of Artificial Sequence: Synthetic oligonucleotide
agagcuaauaacauuacug

SEQ ID NO: 1478501 - RNA, 19 nt, Artificial Sequence
  Description of Artificial Sequence: Synthetic oligonucleotide
agucccgugcucuucagcc

SEQ ID NO: 1478502 - RNA, 19 nt, Artificial Sequence
  Description of Artificial Sequence: Synthetic oligonucleotide
aagaguaaggcccaaucau

SEQ ID NO: 1478503 - RNA, 19 nt, Artificial Sequence
  Description of Artificial Sequence: Synthetic oligonucleotide
gucacuaucaggugguagg

SEQ ID NO: 1478504 - RNA, 19 nt, Artificial Sequence
  Description of Artificial Sequence: Synthetic oligonucleotide
aacuaggcaauaccuagug

SEQ ID NO: 1478505 - RNA, 19 nt, Artificial Sequence
  Description of Artificial Sequence: Synthetic oligonucleotide
guagcuagaggccacagug

SEQ ID NO: 1478506 - RNA, 19 nt, Artificial Sequence
  Description of Artificial Sequence: Synthetic oligonucleotide
auggauagauuccuagacg

SEQ ID NO: 1478507 - RNA, 19 nt, Artificial Sequence
  Description of Artificial Sequence: Synthetic oligonucleotide
uccacaauggauagauucc

SEQ ID NO: 1478508 - RNA, 19 nt, Artificial Sequence
  Description of Artificial Sequence: Synthetic oligonucleotide
ugcguugagaaguaacuag

SEQ ID NO: 1478509 - RNA, 19 nt, Artificial Sequence
  Description of Artificial Sequence: Synthetic oligonucleotide
aaggccauugaagagccac

SEQ ID NO: 1478510 - RNA, 19 nt, Artificial Sequence
  Description of Artificial Sequence: Synthetic oligonucleotide
cacaggacuguuaaugugg

SEQ ID NO: 1478511 - RNA, 19 nt, Artificial Sequence
  Description of Artificial Sequence: Synthetic oligonucleotide
acaauggauagauuccuag

SEQ ID NO: 1478512 - RNA, 19 nt, Artificial Sequence
  Description of Artificial Sequence: Synthetic oligonucleotide
acuaucaggugguaggaag

SEQ ID NO: 1478513 - RNA, 19 nt, Artificial Sequence
  Description of Artificial Sequence: Synthetic oligonucleotide
ugaacugugccccaaccca

SEQ ID NO: 1478514 - RNA, 19 nt, Artificial Sequence
  Description of Artificial Sequence: Synthetic oligonucleotide
gagcuaauaacauuacuga

SEQ ID NO: 1478515 - RNA, 19 nt, Artificial Sequence
  Description of Artificial Sequence: Synthetic oligonucleotide
aaucagguaagaccagaug

SEQ ID NO: 1478516 - RNA, 19 nt, Artificial Sequence
  Description of Artificial Sequence: Synthetic oligonucleotide
uguuuaggaggguugaaac

SEQ ID NO: 1478517 - RNA, 19 nt, Artificial Sequence
  Description of Artificial Sequence: Synthetic oligonucleotide
aguccgaggaaucauggag

SEQ ID NO: 1478518 - RNA, 19 nt, Artificial Sequence
  Description of Artificial Sequence: Synthetic oligonucleotide
uaccuagugguccugaacu

SEQ ID NO: 1478519 - RNA, 19 nt, Artificial Sequence
  Description of Artificial Sequence: Synthetic oligonucleotide
uaccauaugcacaaugcac

SEQ ID NO: 1478520 - RNA, 19 nt, Artificial Sequence
  Description of Artificial Sequence: Synthetic oligonucleotide
uccuugauccuccucagug

SEQ ID NO: 1478521 - RNA, 19 nt, Artificial Sequence
  Description of Artificial Sequence: Synthetic oligonucleotide
uggguaucuagccaaaguc

SEQ ID NO: 1478522 - RNA, 19 nt, Artificial Sequence
  Description of Artificial Sequence: Synthetic oligonucleotide
acuguuaauguggggaggc

SEQ ID NO: 1478523 - RNA, 19 nt, Artificial Sequence
  Description of Artificial Sequence: Synthetic oligonucleotide
caaggugucaaccagagaa

SEQ ID NO: 1478524 - RNA, 19 nt, Artificial Sequence
  Description of Artificial Sequence: Synthetic oligonucleotide
aaagcaauucgugcaauca

SEQ ID NO: 1478525 - RNA, 19 nt, Artificial Sequence
  Description of Artificial Sequence: Synthetic oligonucleotide
aggaaggggauguagcuag

SEQ ID NO: 1478526 - RNA, 19 nt, Artificial Sequence
  Description of Artificial Sequence: Synthetic oligonucleotide
gugauaagcccaauggugg

SEQ ID NO: 1478527 - RNA, 19 nt, Artificial Sequence
  Description of Artificial Sequence: Synthetic oligonucleotide
guaauaaagcucucucgag

SEQ ID NO: 1478528 - RNA, 19 nt, Artificial Sequence
  Description of Artificial Sequence: Synthetic oligonucleotide
aaacucaauaccauaugca

SEQ ID NO: 1478529 - RNA, 19 nt, Artificial Sequence
  Description of Artificial Sequence: Synthetic oligonucleotide
cuaucaggugguaggaagg

SEQ ID NO: 1478530 - RNA, 19 nt, Artificial Sequence
  Description of Artificial Sequence: Synthetic oligonucleotide
agacacauaaccaggguuc

SEQ ID NO: 1478531 - RNA, 19 nt, Artificial Sequence
  Description of Artificial Sequence: Synthetic oligonucleotide
ucccacucgaaccauguug

SEQ ID NO: 1478532 - RNA, 19 nt, Artificial Sequence
  Description of Artificial Sequence: Synthetic oligonucleotide
cucuacgucacuacgauca

SEQ ID NO: 1478533 - RNA, 19 nt, Artificial Sequence
  Description of Artificial Sequence: Synthetic oligonucleotide
aaguaacuaggcaauaccu

SEQ ID NO: 1478534 - RNA, 19 nt, Artificial Sequence
  Description of Artificial Sequence: Synthetic oligonucleotide
gaguggcugauauggauag

SEQ ID NO: 1478535 - RNA, 19 nt, Artificial Sequence
  Description of Artificial Sequence: Synthetic oligonucleotide
uaaaacuaguuaacagcac

SEQ ID NO: 1478536 - RNA, 19 nt, Artificial Sequence
  Description of Artificial Sequence: Synthetic oligonucleotide
guaaggcccaaucauuucc

SEQ ID NO: 1478537 - RNA, 19 nt, Artificial Sequence
  Description of Artificial Sequence: Synthetic oligonucleotide
uuuacaagucccgugcucu

SEQ ID NO: 1478538 - RNA, 19 nt, Artificial Sequence
  Description of Artificial Sequence: Synthetic oligonucleotide
agucccucuagucacagga

SEQ ID NO: 1478539 - RNA, 19 nt, Artificial Sequence
  Description of Artificial Sequence: Synthetic oligonucleotide
ugauccuggguaucuagcc

SEQ ID NO: 1478540 - RNA, 19 nt, Artificial Sequence
  Description of Artificial Sequence: Synthetic oligonucleotide
augaucaggaaguccuuuc

SEQ ID NO: 1478541 - RNA, 19 nt, Artificial Sequence
  Description of Artificial Sequence: Synthetic oligonucleotide
gaaggugauaagcccaaug

SEQ ID NO: 1478542 - RNA, 19 nt, Artificial Sequence
  Description of Artificial Sequence: Synthetic oligonucleotide
agaaccaaggugucaacca

SEQ ID NO: 1478543 - RNA, 19 nt, Artificial Sequence
  Description of Artificial Sequence: Synthetic oligonucleotide
gauuccuagacgaguaacc

SEQ ID NO: 1478544 - RNA, 19 nt, Artificial Sequence
  Description of Artificial Sequence: Synthetic oligonucleotide
gaaccuguaggaucaggag

SEQ ID NO: 1478545 - RNA, 19 nt, Artificial Sequence
  Description of Artificial Sequence: Synthetic oligonucleotide
gagacagcauaauucaaga

SEQ ID NO: 1478546 - RNA, 19 nt, Artificial Sequence
  Description of Artificial Sequence: Synthetic oligonucleotide
ugcucucuacgucacuacg

SEQ ID NO: 1478547 - RNA, 19 nt, Artificial Sequence
  Description of Artificial Sequence: Synthetic oligonucleotide
auuacugaaaggaccgggg

SEQ ID NO: 1478548 - RNA, 19 nt, Artificial Sequence
  Description of Artificial Sequence: Synthetic oligonucleotide
gauauggauaguucugcca

SEQ ID NO: 1478549 - RNA, 19 nt, Artificial Sequence
  Description of Artificial Sequence: Synthetic oligonucleotide
auaccuagugguccugaac

SEQ ID NO: 1478550 - RNA, 19 nt, Artificial Sequence
  Description of Artificial Sequence: Synthetic oligonucleotide
gauaguucugccagcacug

SEQ ID NO: 1478551 - RNA, 19 nt, Artificial Sequence
  Description of Artificial Sequence: Synthetic oligonucleotide
agagaaaucuaauuccgua

SEQ ID NO: 1478552 - RNA, 19 nt, Artificial Sequence
  Description of Artificial Sequence: Synthetic oligonucleotide
ggcauaauuggccagcuug

SEQ ID NO: 1478553 - RNA, 19 nt, Artificial Sequence
  Description of Artificial Sequence: Synthetic oligonucleotide
uccguaucucagcucaucc

SEQ ID NO: 1478554 - RNA, 19 nt, Artificial Sequence
  Description of Artificial Sequence: Synthetic oligonucleotide
uaaggcccaaucauuuccc

SEQ ID NO: 1478555 - RNA, 19 nt, Artificial Sequence
  Description of Artificial Sequence: Synthetic oligonucleotide
aaagagggugucacagagc

SEQ ID NO: 1478556 - RNA, 19 nt, Artificial Sequence
  Description of Artificial Sequence: Synthetic oligonucleotide
aguaaggcccaaucauuuc

SEQ ID NO: 1478557 - RNA, 19 nt, Artificial Sequence
  Description of Artificial Sequence: Synthetic oligonucleotide
uguugauguaagagaaggu

SEQ ID NO: 1478558 - RNA, 19 nt, Artificial Sequence
  Description of Artificial Sequence: Synthetic oligonucleotide
gaaaucuaauuccguagca

SEQ ID NO: 1478559 - RNA, 19 nt, Artificial Sequence
  Description of Artificial Sequence: Synthetic oligonucleotide
gagggugucacagagccgc

SEQ ID NO: 1478560 - RNA, 19 nt, Artificial Sequence
  Description of Artificial Sequence: Synthetic oligonucleotide
cucaauaccauaugcacaa

SEQ ID NO: 1478561 - RNA, 19 nt, Artificial Sequence
  Description of Artificial Sequence: Synthetic oligonucleotide
guaagaccagaugacaugc

SEQ ID NO: 1478562 - RNA, 19 nt, Artificial Sequence
  Description of Artificial Sequence: Synthetic oligonucleotide
uccuagacgaguaaccaua

SEQ ID NO: 1478563 - RNA, 19 nt, Artificial Sequence
  Description of Artificial Sequence: Synthetic oligonucleotide
gagagguuguuuguguggg

SEQ ID NO: 1478564 - RNA, 19 nt, Artificial Sequence
  Description of Artificial Sequence: Synthetic oligonucleotide
auaccauaugcacaaugca

SEQ ID NO: 1478565 - RNA, 19 nt, Artificial Sequence
  Description of Artificial Sequence: Synthetic oligonucleotide
acuaggcaauaccuagugg

SEQ ID NO: 1478566 - RNA, 19 nt, Artificial Sequence
  Description of Artificial Sequence: Synthetic oligonucleotide
gaaguccuuucuuuuaaca

SEQ ID NO: 1478567 - RNA, 19 nt, Artificial Sequence
  Description of Artificial Sequence: Synthetic oligonucleotide
gaaguccgaggaaucaugg

SEQ ID NO: 1478568 - RNA, 19 nt, Artificial Sequence
  Description of Artificial Sequence: Synthetic oligonucleotide
uuuuguuuaggaggguuga

SEQ ID NO: 1478569 - RNA, 19 nt, Artificial Sequence
  Description of Artificial Sequence: Synthetic oligonucleotide
acugagagaacaugagaga

SEQ ID NO: 1478570 - RNA, 19 nt, Artificial Sequence
  Description of Artificial Sequence: Synthetic oligonucleotide
agauuccuagacgaguaac

SEQ ID NO: 1478571 - RNA, 19 nt, Artificial Sequence
  Description of Artificial Sequence: Synthetic oligonucleotide
aagucccgugcucuucagc

SEQ ID NO: 1478572 - RNA, 19 nt, Artificial Sequence
  Description of Artificial Sequence: Synthetic oligonucleotide
aagaguggguugccaacag

SEQ ID NO: 1478573 - RNA, 19 nt, Artificial Sequence
  Description of Artificial Sequence: Synthetic oligonucleotide
cuuagagccucaagagccg

SEQ ID NO: 1478574 - RNA, 19 nt, Artificial Sequence
  Description of Artificial Sequence: Synthetic oligonucleotide
uugacaacaugaaacuguu

SEQ ID NO: 1478575 - RNA, 19 nt, Artificial Sequence
  Description of Artificial Sequence: Synthetic oligonucleotide
agcaauucgugcaaucagg

SEQ ID NO: 1478576 - RNA, 19 nt, Artificial Sequence
  Description of Artificial Sequence: Synthetic oligonucleotide
ucaaagcuuuaaaagcaau

SEQ ID NO: 1478577 - RNA, 19 nt, Artificial Sequence
  Description of Artificial Sequence: Synthetic oligonucleotide
aaaccuggagcugaaucug

SEQ ID NO: 1478578 - RNA, 19 nt, Artificial Sequence
  Description of Artificial Sequence: Synthetic oligonucleotide
cugauauggauaguucugc

SEQ ID NO: 1478579 - RNA, 19 nt, Artificial Sequence
  Description of Artificial Sequence: Synthetic oligonucleotide
agugauccuggguaucuag

SEQ ID NO: 1478580 - RNA, 19 nt, Artificial Sequence
  Description of Artificial Sequence: Synthetic oligonucleotide
cuaguuaacagcacaccca

SEQ ID NO: 1478581 - RNA, 19 nt, Artificial Sequence
  Description of Artificial Sequence: Synthetic oligonucleotide
uuagacaccuuuccccgga

SEQ ID NO: 1478582 - RNA, 19 nt, Artificial Sequence
  Description of Artificial Sequence: Synthetic oligonucleotide
cauuacugaaaggaccggg

SEQ ID NO: 1478583 - RNA, 19 nt, Artificial Sequence
  Description of Artificial Sequence: Synthetic oligonucleotide
cagaauccacaauggauag

SEQ ID NO: 1478584 - RNA, 19 nt, Artificial Sequence
  Description of Artificial Sequence: Synthetic oligonucleotide
agcugaaucuggcggcacc

SEQ ID NO: 1478585 - RNA, 19 nt, Artificial Sequence
  Description of Artificial Sequence: Synthetic oligonucleotide
ucaggagaaggccauugaa

SEQ ID NO: 1478586 - RNA, 19 nt, Artificial Sequence
  Description of Artificial Sequence: Synthetic oligonucleotide
ucacaggacuguuaaugug

SEQ ID NO: 1478587 - RNA, 19 nt, Artificial Sequence
  Description of Artificial Sequence: Synthetic oligonucleotide
auguaagagaaggugauaa

SEQ ID NO: 1478588 - RNA, 19 nt, Artificial Sequence
  Description of Artificial Sequence: Synthetic oligonucleotide
agcuaauaacauuacugaa

SEQ ID NO: 1478589 - RNA, 19 nt, Artificial Sequence
  Description of Artificial Sequence: Synthetic oligonucleotide
uaacuaggcaauaccuagu

SEQ ID NO: 1478590 - RNA, 19 nt, Artificial Sequence
  Description of Artificial Sequence: Synthetic oligonucleotide
uggaggugcguugagaagu

SEQ ID NO: 1478591 - RNA, 19 nt, Artificial Sequence
  Description of Artificial Sequence: Synthetic oligonucleotide
acaagaacguagauggucu

SEQ ID NO: 1478592 - RNA, 19 nt, Artificial Sequence
  Description of Artificial Sequence: Synthetic oligonucleotide
accauaugcacaaugcaca

SEQ ID NO: 1478593 - RNA, 19 nt, Artificial Sequence
  Description of Artificial Sequence: Synthetic oligonucleotide
cuugacaacaugaaacugu

SEQ ID NO: 1478594 - RNA, 19 nt, Artificial Sequence
  Description of Artificial Sequence: Synthetic oligonucleotide
agagccgcugauauuuggc

SEQ ID NO: 1478595 - RNA, 19 nt, Artificial Sequence
  Description of Artificial Sequence: Synthetic oligonucleotide
uuaggaggguugaaacacu

SEQ ID NO: 1478596 - RNA, 19 nt, Artificial Sequence
  Description of Artificial Sequence: Synthetic oligonucleotide
aaagcucucucgagagugg

SEQ ID NO: 1478597 - RNA, 19 nt, Artificial Sequence
  Description of Artificial Sequence: Synthetic oligonucleotide
ucccucuagucacaggacu

SEQ ID NO: 1478598 - RNA, 19 nt, Artificial Sequence
  Description of Artificial Sequence: Synthetic oligonucleotide
cuaggcaauaccuaguggu

SEQ ID NO: 1478599 - RNA, 19 nt, Artificial Sequence
  Description of Artificial Sequence: Synthetic oligonucleotide
aauaccuagugguccugaa

SEQ ID NO: 1478600 - RNA, 19 nt, Artificial Sequence
  Description of Artificial Sequence: Synthetic oligonucleotide
aucaguaguugucccuguc

SEQ ID NO: 1478601 - RNA, 19 nt, Artificial Sequence
  Description of Artificial Sequence: Synthetic oligonucleotide
cagguuuaacauugcuucc

SEQ ID NO: 1478602 - RNA, 19 nt, Artificial Sequence
  Description of Artificial Sequence: Synthetic oligonucleotide
cagacaaacacagagcuaa

SEQ ID NO: 1478603 - RNA, 19 nt, Artificial Sequence
  Description of Artificial Sequence: Synthetic oligonucleotide
uguagcuagaggccacagu

SEQ ID NO: 1478604 - RNA, 19 nt, Artificial Sequence
  Description of Artificial Sequence: Synthetic oligonucleotide
acgaucauccuuagacacc

SEQ ID NO: 1478605 - RNA, 19 nt, Artificial Sequence
  Description of Artificial Sequence: Synthetic oligonucleotide
caaagaguggguugccaac

SEQ ID NO: 1478606 - RNA, 19 nt, Artificial Sequence
  Description of Artificial Sequence: Synthetic oligonucleotide
ugcuccagaagaacuguuc

SEQ ID NO: 1478607 - RNA, 19 nt, Artificial Sequence
  Description of Artificial Sequence: Synthetic oligonucleotide
guuaauguggggaggcccc

SEQ ID NO: 1478608 - RNA, 19 nt, Artificial Sequence
  Description of Artificial Sequence: Synthetic oligonucleotide
uccgaggaaucauggagac

SEQ ID NO: 1478609 - RNA, 19 nt, Artificial Sequence
  Description of Artificial Sequence: Synthetic oligonucleotide
caacucucaaagaggguug

SEQ ID NO: 1478610 - RNA, 19 nt, Artificial Sequence
  Description of Artificial Sequence: Synthetic oligonucleotide
gaacguagauggucuggag

SEQ ID NO: 1478611 - RNA, 19 nt, Artificial Sequence
  Description of Artificial Sequence: Synthetic oligonucleotide
aggaacuuagagccucaag

SEQ ID NO: 1478612 - RNA, 19 nt, Artificial Sequence
  Description of Artificial Sequence: Synthetic oligonucleotide
gacuguuaauguggggagg

SEQ ID NO: 1478613 - RNA, 19 nt, Artificial Sequence
  Description of Artificial Sequence: Synthetic oligonucleotide
auuccuagacgaguaacca

SEQ ID NO: 1478614 - RNA, 19 nt, Artificial Sequence
  Description of Artificial Sequence: Synthetic oligonucleotide
gagguuguuugugugggug

SEQ ID NO: 1478615 - RNA, 19 nt, Artificial Sequence
  Description of Artificial Sequence: Synthetic oligonucleotide
aaguccgaggaaucaugga

SEQ ID NO: 1478616 - RNA, 19 nt, Artificial Sequence
  Description of Artificial Sequence: Synthetic oligonucleotide
uaagaccagaugacaugca

SEQ ID NO: 1478617 - RNA, 19 nt, Artificial Sequence
  Description of Artificial Sequence: Synthetic oligonucleotide
ugucacuaucaggugguag

SEQ ID NO: 1478618 - RNA, 19 nt, Artificial Sequence
  Description of Artificial Sequence: Synthetic oligonucleotide
cacgcaguuggcaccauug

SEQ ID NO: 1478619 - RNA, 19 nt, Artificial Sequence
  Description of Artificial Sequence: Synthetic oligonucleotide
gacacauaaccaggguucc

SEQ ID NO: 1478620 - RNA, 19 nt, Artificial Sequence
  Description of Artificial Sequence: Synthetic oligonucleotide
uggucuggagacagcauaa

SEQ ID NO: 1478621 - RNA, 19 nt, Artificial Sequence
  Description of Artificial Sequence: Synthetic oligonucleotide
auucgugcaaucagguaag

SEQ ID NO: 1478622 - RNA, 19 nt, Artificial Sequence
  Description of Artificial Sequence: Synthetic oligonucleotide
agaaccuguaggaucagga

SEQ ID NO: 1478623 - RNA, 19 nt, Artificial Sequence
  Description of Artificial Sequence: Synthetic oligonucleotide
uuguuuaggaggguugaaa

SEQ ID NO: 1478624 - RNA, 19 nt, Artificial Sequence
  Description of Artificial Sequence: Synthetic oligonucleotide
ucuagucacaggacuguua

SEQ ID NO: 1478625 - RNA, 19 nt, Artificial Sequence
  Description of Artificial Sequence: Synthetic oligonucleotide
ggagacaagaacguagaug

SEQ ID NO: 1478626 - RNA, 19 nt, Artificial Sequence
  Description of Artificial Sequence: Synthetic oligonucleotide
augauguaguaguaauaaa

SEQ ID NO: 1478627 - RNA, 19 nt, Artificial Sequence
  Description of Artificial Sequence: Synthetic oligonucleotide
gcggcaccauguuagaugg

SEQ ID NO: 1478628 - RNA, 19 nt, Artificial Sequence
  Description of Artificial Sequence: Synthetic oligonucleotide
uagcuagaggccacaguga

SEQ ID NO: 1478629 - RNA, 19 nt, Artificial Sequence
  Description of Artificial Sequence: Synthetic oligonucleotide
cuagucacaggacuguuaa

SEQ ID NO: 1478630 - RNA, 19 nt, Artificial Sequence
  Description of Artificial Sequence: Synthetic oligonucleotide
guuagauggaccaggaacu

SEQ ID NO: 1478631 - RNA, 19 nt, Artificial Sequence
  Description of Artificial Sequence: Synthetic oligonucleotide
uaucuagccaaaguccuua

SEQ ID NO: 1478632 - RNA, 19 nt, Artificial Sequence
  Description of Artificial Sequence: Synthetic oligonucleotide
agaccaguagaaagccagc

SEQ ID NO: 1478633 - RNA, 19 nt, Artificial Sequence
  Description of Artificial Sequence: Synthetic oligonucleotide
gagaacaugagagaccagu

SEQ ID NO: 1478634 - RNA, 19 nt, Artificial Sequence
  Description of Artificial Sequence: Synthetic oligonucleotide
auaaagcucucucgagagu

SEQ ID NO: 1478635 - RNA, 19 nt, Artificial Sequence
  Description of Artificial Sequence: Synthetic oligonucleotide
ugguaggaaggggauguag

SEQ ID NO: 1478636 - RNA, 19 nt, Artificial Sequence
  Description of Artificial Sequence: Synthetic oligonucleotide
gaaggggauguagcuagag

SEQ ID NO: 1478637 - RNA, 19 nt, Artificial Sequence
  Description of Artificial Sequence: Synthetic oligonucleotide
agcuagaggccacagugau

SEQ ID NO: 1478638 - RNA, 19 nt, Artificial Sequence
  Description of Artificial Sequence: Synthetic oligonucleotide
ucuagccaaaguccuuauc

SEQ ID NO: 1478639 - RNA, 19 nt, Artificial Sequence
  Description of Artificial Sequence: Synthetic oligonucleotide
uguuugguuccuugauccu

SEQ ID NO: 1478640 - RNA, 19 nt, Artificial Sequence
  Description of Artificial Sequence: Synthetic oligonucleotide
cuacgaucauccuuagaca

SEQ ID NO: 1478641 - RNA, 19 nt, Artificial Sequence
  Description of Artificial Sequence: Synthetic oligonucleotide
ucacuaucaggugguagga

SEQ ID NO: 1478642 - RNA, 19 nt, Artificial Sequence
  Description of Artificial Sequence: Synthetic oligonucleotide
cuuuacaagucccgugcuc

SEQ ID NO: 1478643 - RNA, 19 nt, Artificial Sequence
  Description of Artificial Sequence: Synthetic oligonucleotide
aggugcguugagaaguaac

SEQ ID NO: 1478644 - RNA, 19 nt, Artificial Sequence
  Description of Artificial Sequence: Synthetic oligonucleotide
aggguucccacucgaacca

SEQ ID NO: 1478645 - RNA, 19 nt, Artificial Sequence
  Description of Artificial Sequence: Synthetic oligonucleotide
aacucucaaagaggguugu

SEQ ID NO: 1478646 - RNA, 19 nt, Artificial Sequence
  Description of Artificial Sequence: Synthetic oligonucleotide
gcuaauaacauuacugaaa

SEQ ID NO: 1478647 - RNA, 19 nt, Artificial Sequence
  Description of Artificial Sequence: Synthetic oligonucleotide
acauuacugaaaggaccgg

SEQ ID NO: 1478648 - RNA, 19 nt, Artificial Sequence
  Description of Artificial Sequence: Synthetic oligonucleotide
aucaggagaaggccauuga

SEQ ID NO: 1478649 - RNA, 19 nt, Artificial Sequence
  Description of Artificial Sequence: Synthetic oligonucleotide
uggguugccaacagcuuua

SEQ ID NO: 1478650 - RNA, 19 nt, Artificial Sequence
  Description of Artificial Sequence: Synthetic oligonucleotide
ucccgugcucuucagccca

SEQ ID NO: 1478651 - RNA, 19 nt, Artificial Sequence
  Description of Artificial Sequence: Synthetic oligonucleotide
ggguaucuagccaaagucc

SEQ ID NO: 1478652 - RNA, 19 nt, Artificial Sequence
  Description of Artificial Sequence: Synthetic oligonucleotide
uuccuagacgaguaaccau

SEQ ID NO: 1478653 - RNA, 19 nt, Artificial Sequence
  Description of Artificial Sequence: Synthetic oligonucleotide
gcguugagaaguaacuagg

SEQ ID NO: 1478654 - RNA, 19 nt, Artificial Sequence
  Description of Artificial Sequence: Synthetic oligonucleotide
accuagugguccugaacug

SEQ ID NO: 1478655 - RNA, 19 nt, Artificial Sequence
  Description of Artificial Sequence: Synthetic oligonucleotide
uuuccccggaucaaagcuu

SEQ ID NO: 1478656 - RNA, 19 nt, Artificial Sequence
  Description of Artificial Sequence: Synthetic oligonucleotide
cgaggaaucauggagacac

SEQ ID NO: 1478657 - RNA, 19 nt, Artificial Sequence
  Description of Artificial Sequence: Synthetic oligonucleotide
auagauuccuagacgagua

SEQ ID NO: 1478658 - RNA, 19 nt, Artificial Sequence
  Description of Artificial Sequence: Synthetic oligonucleotide
agugucccagaaccaaggu

SEQ ID NO: 1478659 - RNA, 19 nt, Artificial Sequence
  Description of Artificial Sequence: Synthetic oligonucleotide
aguaacuaggcaauaccua

SEQ ID NO: 1478660 - RNA, 19 nt, Artificial Sequence
  Description of Artificial Sequence: Synthetic oligonucleotide
cagagccgcugauauuugg

SEQ ID NO: 1478661 - RNA, 19 nt, Artificial Sequence
  Description of Artificial Sequence: Synthetic oligonucleotide
caagaacguagauggucug

SEQ ID NO: 1478662 - RNA, 19 nt, Artificial Sequence
  Description of Artificial Sequence: Synthetic oligonucleotide
acagcuuuacaagucccgu

SEQ ID NO: 1478663 - RNA, 19 nt, Artificial Sequence
  Description of Artificial Sequence: Synthetic oligonucleotide
auggauaguucugccagca

SEQ ID NO: 1478664 - RNA, 19 nt, Artificial Sequence
  Description of Artificial Sequence: Synthetic oligonucleotide
acugugccccaacccaguc

SEQ ID NO: 1478665 - RNA, 19 nt, Artificial Sequence
  Description of Artificial Sequence: Synthetic oligonucleotide
cucccugcguaccauugag

SEQ ID NO: 1478666 - RNA, 19 nt, Artificial Sequence
  Description of Artificial Sequence: Synthetic oligonucleotide
agccucaagagccgggaga

SEQ ID NO: 1478667 - RNA, 19 nt, Artificial Sequence
  Description of Artificial Sequence: Synthetic oligonucleotide
ugucaaccagagaaaucua

SEQ ID NO: 1478668 - RNA, 19 nt, Artificial Sequence
  Description of Artificial Sequence: Synthetic oligonucleotide
ugcguaccauugagcaaag

SEQ ID NO: 1478669 - RNA, 19 nt, Artificial Sequence
  Description of Artificial Sequence: Synthetic oligonucleotide
aaggugucaaccagagaaa

SEQ ID NO: 1478670 - RNA, 19 nt, Artificial Sequence
  Description of Artificial Sequence: Synthetic oligonucleotide
ucacuacgaucauccuuag

SEQ ID NO: 1478671 - RNA, 19 nt, Artificial Sequence
  Description of Artificial Sequence: Synthetic oligonucleotide
ucccugcguaccauugagc

SEQ ID NO: 1478672 - RNA, 19 nt, Artificial Sequence
  Description of Artificial Sequence: Synthetic oligonucleotide
uggauaguucugccagcac

SEQ ID NO: 1478673 - RNA, 19 nt, Artificial Sequence
  Description of Artificial Sequence: Synthetic oligonucleotide
ucuacgucacuacgaucau

SEQ ID NO: 1478674 - RNA, 19 nt, Artificial Sequence
  Description of Artificial Sequence: Synthetic oligonucleotide
uuuguuuaggaggguugaa

SEQ ID NO: 1478675 - RNA, 19 nt, Artificial Sequence
  Description of Artificial Sequence: Synthetic oligonucleotide
ggcggcaccauguuagaug

SEQ ID NO: 1478676 - RNA, 19 nt, Artificial Sequence
  Description of Artificial Sequence: Synthetic oligonucleotide
ucgagugucccagaaccaa

SEQ ID NO: 1478677 - RNA, 19 nt, Artificial Sequence
  Description of Artificial Sequence: Synthetic oligonucleotide
acagugauccuggguaucu

SEQ ID NO: 1478678 - RNA, 19 nt, Artificial Sequence
  Description of Artificial Sequence: Synthetic oligonucleotide
acugucgagugucccagaa

SEQ ID NO: 1478679 - RNA, 19 nt, Artificial Sequence
  Description of Artificial Sequence: Synthetic oligonucleotide
aucuaauuccguagcagaa

SEQ ID NO: 1478680 - RNA, 19 nt, Artificial Sequence
  Description of Artificial Sequence: Synthetic oligonucleotide
aaucuggcggcaccauguu

SEQ ID NO: 1478681 - RNA, 19 nt, Artificial Sequence
  Description of Artificial Sequence: Synthetic oligonucleotide
gugaugcacgaacaugauc

SEQ ID NO: 1478682 - RNA, 19 nt, Artificial Sequence
  Description of Artificial Sequence: Synthetic oligonucleotide
uuccccggaucaaagcuuu

SEQ ID NO: 1478683 - RNA, 19 nt, Artificial Sequence
  Description of Artificial Sequence: Synthetic oligonucleotide
ggaggguugaaacacuuua

SEQ ID NO: 1478684 - RNA, 19 nt, Artificial Sequence
  Description of Artificial Sequence: Synthetic oligonucleotide
ccaacccagucaaugaaac

SEQ ID NO: 1478685 - RNA, 19 nt, Artificial Sequence
  Description of Artificial Sequence: Synthetic oligonucleotide
aaacugcacuaaagaucac

SEQ ID NO: 1478686 - RNA, 19 nt, Artificial Sequence
  Description of Artificial Sequence: Synthetic oligonucleotide
cauaugcacaaugcacaac

SEQ ID NO: 1478687 - RNA, 19 nt, Artificial Sequence
  Description of Artificial Sequence: Synthetic oligonucleotide
ggccaagugaugcacgaac

SEQ ID NO: 1478688 - RNA, 19 nt, Artificial Sequence
  Description of Artificial Sequence: Synthetic oligonucleotide
agguaagaccagaugacau

SEQ ID NO: 1478689 - RNA, 19 nt, Artificial Sequence
  Description of Artificial Sequence: Synthetic oligonucleotide
ucucuacgucacuacgauc

SEQ ID NO: 1478690 - RNA, 19 nt, Artificial Sequence
  Description of Artificial Sequence: Synthetic oligonucleotide
agaguaaggcccaaucauu

SEQ ID NO: 1478691 - RNA, 19 nt, Artificial Sequence
  Description of Artificial Sequence: Synthetic oligonucleotide
ucgugcaaucagguaagac

SEQ ID NO: 1478692 - RNA, 19 nt, Artificial Sequence
  Description of Artificial Sequence: Synthetic oligonucleotide
cugcguaccauugagcaaa

SEQ ID NO: 1478693 - RNA, 19 nt, Artificial Sequence
  Description of Artificial Sequence: Synthetic oligonucleotide
gucacaggacuguuaaugu

SEQ ID NO: 1478694 - RNA, 19 nt, Artificial Sequence
  Description of Artificial Sequence: Synthetic oligonucleotide
uuaauguggggaggcccca

SEQ ID NO: 1478695 - RNA, 19 nt, Artificial Sequence
  Description of Artificial Sequence: Synthetic oligonucleotide
uggcugccugccauguggc

SEQ ID NO: 1478696 - RNA, 19 nt, Artificial Sequence
  Description of Artificial Sequence: Synthetic oligonucleotide
ccgggagacaagaacguag

SEQ ID NO: 1478697 - RNA, 19 nt, Artificial Sequence
  Description of Artificial Sequence: Synthetic oligonucleotide
ggauagauuccuagacgag

SEQ ID NO: 1478698 - RNA, 19 nt, Artificial Sequence
  Description of Artificial Sequence: Synthetic oligonucleotide
gagccucaagagccgggag

SEQ ID NO: 1478699 - RNA, 19 nt, Artificial Sequence
  Description of Artificial Sequence: Synthetic oligonucleotide
agagguuguuugugugggu

SEQ ID NO: 1478700 - RNA, 19 nt, Artificial Sequence
  Description of Artificial Sequence: Synthetic oligonucleotide
auguuagauggaccaggaa

SEQ ID NO: 1478701 - RNA, 19 nt, Artificial Sequence
  Description of Artificial Sequence: Synthetic oligonucleotide
agccgcugauauuuggcau

SEQ ID NO: 1478702 - RNA, 19 nt, Artificial Sequence
  Description of Artificial Sequence: Synthetic oligonucleotide
guccgaggaaucauggaga

SEQ ID NO: 1478703 - RNA, 19 nt, Artificial Sequence
  Description of Artificial Sequence: Synthetic oligonucleotide
cuuuccccggaucaaagcu

SEQ ID NO: 1478704 - RNA, 19 nt, Artificial Sequence
  Description of Artificial Sequence: Synthetic oligonucleotide
gagaaggugauaagcccaa

SEQ ID NO: 1478705 - RNA, 19 nt, Artificial Sequence
  Description of Artificial Sequence: Synthetic oligonucleotide
ggauaguucugccagcacu

SEQ ID NO: 1478706 - RNA, 19 nt, Artificial Sequence
  Description of Artificial Sequence: Synthetic oligonucleotide
caaugguggccaagugaug

SEQ ID NO: 1478707 - RNA, 19 nt, Artificial Sequence
  Description of Artificial Sequence: Synthetic oligonucleotide
aguagaaagccagcuccau

SEQ ID NO: 1478708 - RNA, 19 nt, Artificial Sequence
  Description of Artificial Sequence: Synthetic oligonucleotide
agagccucaagagccggga

SEQ ID NO: 1478709 - RNA, 19 nt, Artificial Sequence
  Description of Artificial Sequence: Synthetic oligonucleotide
uuuguguggguggucucau

SEQ ID NO: 1478710 - RNA, 19 nt, Artificial Sequence
  Description of Artificial Sequence: Synthetic oligonucleotide
cugucgagugucccagaac

SEQ ID NO: 1478711 - RNA, 19 nt, Artificial Sequence
  Description of Artificial Sequence: Synthetic oligonucleotide
ggggauguagcuagaggcc

SEQ ID NO: 1478712 - RNA, 19 nt, Artificial Sequence
  Description of Artificial Sequence: Synthetic oligonucleotide
aucuagccaaaguccuuau

SEQ ID NO: 1478713 - RNA, 19 nt, Artificial Sequence
  Description of Artificial Sequence: Synthetic oligonucleotide
uuacaagucccgugcucuu

SEQ ID NO: 1478714 - RNA, 19 nt, Artificial Sequence
  Description of Artificial Sequence: Synthetic oligonucleotide
auguagcuagaggccacag

SEQ ID NO: 1478715 - RNA, 19 nt, Artificial Sequence
  Description of Artificial Sequence: Synthetic oligonucleotide
cacacccaguggcugcugc

SEQ ID NO: 1478716 - RNA, 19 nt, Artificial Sequence
  Description of Artificial Sequence: Synthetic oligonucleotide
uuccguaucucagcucauc

SEQ ID NO: 1478717 - RNA, 19 nt, Artificial Sequence
  Description of Artificial Sequence: Synthetic oligonucleotide
gcaucaguaguugucccug

SEQ ID NO: 1478718 - RNA, 19 nt, Artificial Sequence
  Description of Artificial Sequence: Synthetic oligonucleotide
caacaugaaacuguuuggu

SEQ ID NO: 1478719 - RNA, 19 nt, Artificial Sequence
  Description of Artificial Sequence: Synthetic oligonucleotide
ccuuccguaucucagcuca

SEQ ID NO: 1478720 - RNA, 19 nt, Artificial Sequence
  Description of Artificial Sequence: Synthetic oligonucleotide
ggcugauauggauaguucu

SEQ ID NO: 1478721 - RNA, 19 nt, Artificial Sequence
  Description of Artificial Sequence: Synthetic oligonucleotide
agcccaaugguggccaagu

SEQ ID NO: 1478722 - RNA, 19 nt, Artificial Sequence
  Description of Artificial Sequence: Synthetic oligonucleotide
uacaagucccgugcucuuc

SEQ ID NO: 1478723 - RNA, 19 nt, Artificial Sequence
  Description of Artificial Sequence: Synthetic oligonucleotide
gcagccaaugcugggcugg

SEQ ID NO: 1478724 - RNA, 19 nt, Artificial Sequence
  Description of Artificial Sequence: Synthetic oligonucleotide
ggugucacagagccgcuga

SEQ ID NO: 1478725 - RNA, 19 nt, Artificial Sequence
  Description of Artificial Sequence: Synthetic oligonucleotide
gcugauauuuggcauaauu

SEQ ID NO: 1478726 - RNA, 19 nt, Artificial Sequence
  Description of Artificial Sequence: Synthetic oligonucleotide
gguaucuagccaaaguccu

SEQ ID NO: 1478727 - RNA, 19 nt, Artificial Sequence
  Description of Artificial Sequence: Synthetic oligonucleotide
gcuggaggugcguugagaa

SEQ ID NO: 1478728 - RNA, 19 nt, Artificial Sequence
  Description of Artificial Sequence: Synthetic oligonucleotide
gguuguguucagaauccac

SEQ ID NO: 1478729 - RNA, 19 nt, Artificial Sequence
  Description of Artificial Sequence: Synthetic oligonucleotide
agagaccaguagaaagcca

SEQ ID NO: 1478730 - RNA, 19 nt, Artificial Sequence
  Description of Artificial Sequence: Synthetic oligonucleotide
ucaauaccauaugcacaau

SEQ ID NO: 1478731 - RNA, 19 nt, Artificial Sequence
  Description of Artificial Sequence: Synthetic oligonucleotide
uucgugcaaucagguaaga

SEQ ID NO: 1478732 - RNA, 19 nt, Artificial Sequence
  Description of Artificial Sequence: Synthetic oligonucleotide
uagacaccuuuccccggau

SEQ ID NO: 1478733 - RNA, 19 nt, Artificial Sequence
  Description of Artificial Sequence: Synthetic oligonucleotide
guggccauucacgcaguug

SEQ ID NO: 1478734 - RNA, 19 nt, Artificial Sequence
  Description of Artificial Sequence: Synthetic oligonucleotide
gagaaguaacuaggcaaua

SEQ ID NO: 1478735 - RNA, 19 nt, Artificial Sequence
  Description of Artificial Sequence: Synthetic oligonucleotide
cagucccucuagucacagg

SEQ ID NO: 1478736 - RNA, 19 nt, Artificial Sequence
  Description of Artificial Sequence: Synthetic oligonucleotide
cugcacuaaagaucacaaa

SEQ ID NO: 1478737 - RNA, 19 nt, Artificial Sequence
  Description of Artificial Sequence: Synthetic oligonucleotide
caauucgugcaaucaggua

SEQ ID NO: 1478738 - RNA, 19 nt, Artificial Sequence
  Description of Artificial Sequence: Synthetic oligonucleotide
ccuuuccccggaucaaagc

SEQ ID NO: 1478739 - RNA, 19 nt, Artificial Sequence
  Description of Artificial Sequence: Synthetic oligonucleotide
cccucuagucacaggacug

SEQ ID NO: 1478740 - RNA, 19 nt, Artificial Sequence
  Description of Artificial Sequence: Synthetic oligonucleotide
acgucacuacgaucauccu

SEQ ID NO: 1478741 - RNA, 19 nt, Artificial Sequence
  Description of Artificial Sequence: Synthetic oligonucleotide
gauggaccaggaacuuaga

SEQ ID NO: 1478742 - RNA, 19 nt, Artificial Sequence
  Description of Artificial Sequence: Synthetic oligonucleotide
cuggguaucuagccaaagu

SEQ ID NO: 1478743 - RNA, 19 nt, Artificial Sequence
  Description of Artificial Sequence: Synthetic oligonucleotide
cccugcguaccauugagca

SEQ ID NO: 1478744 - RNA, 19 nt, Artificial Sequence
  Description of Artificial Sequence: Synthetic oligonucleotide
ucacgcaguuggcaccauu

SEQ ID NO: 1478745 - RNA, 19 nt, Artificial Sequence
  Description of Artificial Sequence: Synthetic oligonucleotide
uguggccauucacgcaguu

SEQ ID NO: 1478746 - RNA, 19 nt, Artificial Sequence
  Description of Artificial Sequence: Synthetic oligonucleotide
cuacgucacuacgaucauc

SEQ ID NO: 1478747 - RNA, 19 nt, Artificial Sequence
  Description of Artificial Sequence: Synthetic oligonucleotide
gggauguagcuagaggcca

SEQ ID NO: 1478748 - RNA, 19 nt, Artificial Sequence
  Description of Artificial Sequence: Synthetic oligonucleotide
ggugcguugagaaguaacu

SEQ ID NO: 1478749 - RNA, 19 nt, Artificial Sequence
  Description of Artificial Sequence: Synthetic oligonucleotide
gggcaucaguaguuguccc

SEQ ID NO: 1478750 - RNA, 19 nt, Artificial Sequence
  Description of Artificial Sequence: Synthetic oligonucleotide
acagacaaacacagagcua

SEQ ID NO: 1478751 - RNA, 19 nt, Artificial Sequence
  Description of Artificial Sequence: Synthetic oligonucleotide
aguuaacagcacacccagu

SEQ ID NO: 1478752 - RNA, 19 nt, Artificial Sequence
  Description of Artificial Sequence: Synthetic oligonucleotide
ggugucaaccagagaaauc

SEQ ID NO: 1478753 - RNA, 19 nt, Artificial Sequence
  Description of Artificial Sequence: Synthetic oligonucleotide
cacagagccgcugauauuu

SEQ ID NO: 1478754 - RNA, 19 nt, Artificial Sequence
  Description of Artificial Sequence: Synthetic oligonucleotide
cuagacgaguaaccauaaa

SEQ ID NO: 1478755 - RNA, 19 nt, Artificial Sequence
  Description of Artificial Sequence: Synthetic oligonucleotide
agccgggagacaagaacgu

SEQ ID NO: 1478756 - RNA, 19 nt, Artificial Sequence
  Description of Artificial Sequence: Synthetic oligonucleotide
uaauguggggaggccccaa

SEQ ID NO: 1478757 - RNA, 19 nt, Artificial Sequence
  Description of Artificial Sequence: Synthetic oligonucleotide
caauaccuagugguccuga

SEQ ID NO: 1478758 - RNA, 19 nt, Artificial Sequence
  Description of Artificial Sequence: Synthetic oligonucleotide
cucucuacgucacuacgau

SEQ ID NO: 1478759 - RNA, 19 nt, Artificial Sequence
  Description of Artificial Sequence: Synthetic oligonucleotide
acagagccgcugauauuug

SEQ ID NO: 1478760 - RNA, 19 nt, Artificial Sequence
  Description of Artificial Sequence: Synthetic oligonucleotide
guggcugauauggauaguu

SEQ ID NO: 1478761 - RNA, 19 nt, Artificial Sequence
  Description of Artificial Sequence: Synthetic oligonucleotide
gugcguugagaaguaacua

SEQ ID NO: 1478762 - RNA, 19 nt, Artificial Sequence
  Description of Artificial Sequence: Synthetic oligonucleotide
gucccucuagucacaggac

SEQ ID NO: 1478763 - RNA, 19 nt, Artificial Sequence
  Description of Artificial Sequence: Synthetic oligonucleotide
aguggcugauauggauagu

SEQ ID NO: 1478764 - RNA, 19 nt, Artificial Sequence
  Description of Artificial Sequence: Synthetic oligonucleotide
guaucucagcucauccucu

SEQ ID NO: 1478765 - RNA, 19 nt, Artificial Sequence
  Description of Artificial Sequence: Synthetic oligonucleotide
gccaagugaugcacgaaca

SEQ ID NO: 1478766 - RNA, 19 nt, Artificial Sequence
  Description of Artificial Sequence: Synthetic oligonucleotide
aguggguugccaacagcuu

SEQ ID NO: 1478767 - RNA, 19 nt, Artificial Sequence
  Description of Artificial Sequence: Synthetic oligonucleotide
gucgagugucccagaacca

SEQ ID NO: 1478768 - RNA, 19 nt, Artificial Sequence
  Description of Artificial Sequence: Synthetic oligonucleotide
ggauguagcuagaggccac

SEQ ID NO: 1478769 - RNA, 19 nt, Artificial Sequence
  Description of Artificial Sequence: Synthetic oligonucleotide
cgagugucccagaaccaag

SEQ ID NO: 1478770 - RNA, 19 nt, Artificial Sequence
  Description of Artificial Sequence: Synthetic oligonucleotide
gcucucuacgucacuacga

SEQ ID NO: 1478771 - RNA, 19 nt, Artificial Sequence
  Description of Artificial Sequence: Synthetic oligonucleotide
caacccagucaaugaaacu

SEQ ID NO: 1478772 - RNA, 19 nt, Artificial Sequence
  Description of Artificial Sequence: Synthetic oligonucleotide
ccauaugcacaaugcacaa

SEQ ID NO: 1478773 - RNA, 19 nt, Artificial Sequence
  Description of Artificial Sequence: Synthetic oligonucleotide
gagcugaaucuggcggcac

SEQ ID NO: 1478774 - RNA, 19 nt, Artificial Sequence
  Description of Artificial Sequence: Synthetic oligonucleotide
ggagacacauaaccagggu

SEQ ID NO: 1478775 - RNA, 19 nt, Artificial Sequence
  Description of Artificial Sequence: Synthetic oligonucleotide
ccaugauguaguaguaaua

SEQ ID NO: 1478776 - RNA, 19 nt, Artificial Sequence
  Description of Artificial Sequence: Synthetic oligonucleotide
cacuacgaucauccuuaga

SEQ ID NO: 1478777 - RNA, 19 nt, Artificial Sequence
  Description of Artificial Sequence: Synthetic oligonucleotide
gugccuugcagucccucua

SEQ ID NO: 1478778 - RNA, 19 nt, Artificial Sequence
  Description of Artificial Sequence: Synthetic oligonucleotide
gcugaaucuggcggcacca

SEQ ID NO: 1478779 - RNA, 19 nt, Artificial Sequence
  Description of Artificial Sequence: Synthetic oligonucleotide
gguucccacucgaaccaug

SEQ ID NO: 1478780 - RNA, 19 nt, Artificial Sequence
  Description of Artificial Sequence: Synthetic oligonucleotide
ggcaucaguaguugucccu

SEQ ID NO: 1478781 - RNA, 19 nt, Artificial Sequence
  Description of Artificial Sequence: Synthetic oligonucleotide
gcaauucgugcaaucaggu

SEQ ID NO: 1478782 - RNA, 19 nt, Artificial Sequence
  Description of Artificial Sequence: Synthetic oligonucleotide
aggaggguugaaacacuuu

SEQ ID NO: 1478783 - RNA, 19 nt, Artificial Sequence
  Description of Artificial Sequence: Synthetic oligonucleotide
gccgcugauauuuggcaua

SEQ ID NO: 1478784 - RNA, 19 nt, Artificial Sequence
  Description of Artificial Sequence: Synthetic oligonucleotide
ccuagacgaguaaccauaa

SEQ ID NO: 1478785 - RNA, 19 nt, Artificial Sequence
  Description of Artificial Sequence: Synthetic oligonucleotide
uccccggaucaaagcuuua

SEQ ID NO: 1478786 - RNA, 19 nt, Artificial Sequence
  Description of Artificial Sequence: Synthetic oligonucleotide
gauggucuggagacagcau

SEQ ID NO: 1478787 - RNA, 19 nt, Artificial Sequence
  Description of Artificial Sequence: Synthetic oligonucleotide
ccugucacuaucagguggu

SEQ ID NO: 1478788 - RNA, 19 nt, Artificial Sequence
  Description of Artificial Sequence: Synthetic oligonucleotide
cacuaucaggugguaggaa

SEQ ID NO: 1478789 - RNA, 19 nt, Artificial Sequence
  Description of Artificial Sequence: Synthetic oligonucleotide
aggccccaaagaguggguu

SEQ ID NO: 1478790 - RNA, 19 nt, Artificial Sequence
  Description of Artificial Sequence: Synthetic oligonucleotide
gcccaaugguggccaagug

SEQ ID NO: 1478791 - RNA, 19 nt, Artificial Sequence
  Description of Artificial Sequence: Synthetic oligonucleotide
cgggagacaagaacguaga

SEQ ID NO: 1478792 - RNA, 19 nt, Artificial Sequence
  Description of Artificial Sequence: Synthetic oligonucleotide
gcuuuacaagucccgugcu

SEQ ID NO: 1478793 - RNA, 19 nt, Artificial Sequence
  Description of Artificial Sequence: Synthetic oligonucleotide
gaggugcguugagaaguaa

SEQ ID NO: 1478794 - RNA, 19 nt, Artificial Sequence
  Description of Artificial Sequence: Synthetic oligonucleotide
gguccugaacugugcccca

SEQ ID NO: 1478795 - RNA, 19 nt, Artificial Sequence
  Description of Artificial Sequence: Synthetic oligonucleotide
ccaacucucaaagaggguu

SEQ ID NO: 1478796 - RNA, 19 nt, Artificial Sequence
  Description of Artificial Sequence: Synthetic oligonucleotide
caugaucaggaaguccuuu

SEQ ID NO: 1478797 - RNA, 19 nt, Artificial Sequence
  Description of Artificial Sequence: Synthetic oligonucleotide
guaucuagccaaaguccuu

SEQ ID NO: 1478798 - RNA, 19 nt, Artificial Sequence
  Description of Artificial Sequence: Synthetic oligonucleotide
gcuagaggccacagugauc

SEQ ID NO: 1478799 - RNA, 19 nt, Artificial Sequence
  Description of Artificial Sequence: Synthetic oligonucleotide
cacugucgagugucccaga

SEQ ID NO: 1478800 - RNA, 19 nt, Artificial Sequence
  Description of Artificial Sequence: Synthetic oligonucleotide
cccggaucaaagcuuuaaa

SEQ ID NO: 1478801 - RNA, 19 nt, Artificial Sequence
  Description of Artificial Sequence: Synthetic oligonucleotide
ggguugccaacagcuuuac

SEQ ID NO: 1478802 - RNA, 19 nt, Artificial Sequence
  Description of Artificial Sequence: Synthetic oligonucleotide
caggaacuuagagccucaa

SEQ ID NO: 1478803 - RNA, 19 nt, Artificial Sequence
  Description of Artificial Sequence: Synthetic oligonucleotide
ccugcguaccauugagcaa

SEQ ID NO: 1478804 - RNA, 19 nt, Artificial Sequence
  Description of Artificial Sequence: Synthetic oligonucleotide
cccagucaaugaaacucaa

SEQ ID NO: 1478805 - RNA, 19 nt, Artificial Sequence
  Description of Artificial Sequence: Synthetic oligonucleotide
ggaggugcguugagaagua

SEQ ID NO: 1478806 - RNA, 19 nt, Artificial Sequence
  Description of Artificial Sequence: Synthetic oligonucleotide
gcuccaugauguaguagua

SEQ ID NO: 1478807 - RNA, 19 nt, Artificial Sequence
  Description of Artificial Sequence: Synthetic oligonucleotide
gggagacaagaacguagau

SEQ ID NO: 1478808 - RNA, 19 nt, Artificial Sequence
  Description of Artificial Sequence: Synthetic oligonucleotide
guccugaacugugccccaa

SEQ ID NO: 1478809 - RNA, 19 nt, Artificial Sequence
  Description of Artificial Sequence: Synthetic oligonucleotide
cuuccguaucucagcucau

SEQ ID NO: 1478810 - RNA, 19 nt, Artificial Sequence
  Description of Artificial Sequence: Synthetic oligonucleotide
gaggccccaaagagugggu

SEQ ID NO: 1478811 - RNA, 19 nt, Artificial Sequence
  Description of Artificial Sequence: Synthetic oligonucleotide
ccguaucucagcucauccu

SEQ ID NO: 1478812 - RNA, 19 nt, Artificial Sequence
  Description of Artificial Sequence: Synthetic oligonucleotide
caggaagaguaaggcccaa

SEQ ID NO: 1478813 - RNA, 19 nt, Artificial Sequence
  Description of Artificial Sequence: Synthetic oligonucleotide
ccccaaagaguggguugcc

SEQ ID NO: 1478814 - RNA, 19 nt, Artificial Sequence
  Description of Artificial Sequence: Synthetic oligonucleotide
cccaaagaguggguugcca

SEQ ID NO: 1478815 - RNA, 19 nt, Artificial Sequence
  Description of Artificial Sequence: Synthetic oligonucleotide
ccagucaaugaaacucaau

SEQ ID NO: 1478816 - RNA, 19 nt, Artificial Sequence
  Description of Artificial Sequence: Synthetic oligonucleotide
ccucccugcguaccauuga

SEQ ID NO: 1478817 - RNA, 19 nt, Artificial Sequence
  Description of Artificial Sequence: Synthetic oligonucleotide
ccuagugguccugaacugu

SEQ ID NO: 1478818 - RNA, 19 nt, Artificial Sequence
  Description of Artificial Sequence: Synthetic oligonucleotide
cucuagucacaggacuguu

SEQ ID NO: 1478819 - RNA, 19 nt, Artificial Sequence
  Description of Artificial Sequence: Synthetic oligonucleotide
ccgcugauauuuggcauaa

SEQ ID NO: 1478820 - RNA, 19 nt, Artificial Sequence
  Description of Artificial Sequence: Synthetic oligonucleotide
ggucuggagacagcauaau

SEQ ID NO: 1478821 - RNA, 19 nt, Artificial Sequence
  Description of Artificial Sequence: Synthetic oligonucleotide
cugaaucuggcggcaccau

SEQ ID NO: 1478822 - RNA, 19 nt, Artificial Sequence
  Description of Artificial Sequence: Synthetic oligonucleotide
ccccggaucaaagcuuuaa

SEQ ID NO: 1478823 - RNA, 19 nt, Artificial Sequence
  Description of Artificial Sequence: Synthetic oligonucleotide
ccacagugauccuggguau

SEQ ID NO: 1478824 - RNA, 19 nt, Artificial Sequence
  Description of Artificial Sequence: Synthetic oligonucleotide
gccgggagacaagaacgua

SEQ ID NO: 1478825 - RNA, 19 nt, Artificial Sequence
  Description of Artificial Sequence: Synthetic oligonucleotide
ccgaggaaucauggagaca

SEQ ID NO: 1478826 - RNA, 19 nt, Artificial Sequence
  Description of Artificial Sequence: Synthetic oligonucleotide
gccuugcagucccucuagu

SEQ ID NO: 1478827 - RNA, 19 nt, Artificial Sequence
  Description of Artificial Sequence: Synthetic oligonucleotide
gcguaccauugagcaaaga

SEQ ID NO: 1478828 - RNA, 19 nt, Artificial Sequence
  Description of Artificial Sequence: Synthetic oligonucleotide
ccucaagagccgggagaca

SEQ ID NO: 1478829 - RNA, 19 nt, Artificial Sequence
  Description of Artificial Sequence: Synthetic oligonucleotide
gcggccagagagguuguuu

SEQ ID NO: 1478830 - RNA, 19 nt, Artificial Sequence
  Description of Artificial Sequence: Synthetic oligonucleotide
ggguucccacucgaaccau

SEQ ID NO: 1478831 - RNA, 19 nt, Artificial Sequence
  Description of Artificial Sequence: Synthetic oligonucleotide
ccccucccugcguaccauu

SEQ ID NO: 1478832 - RNA, 19 nt, Artificial Sequence
  Description of Artificial Sequence: Synthetic oligonucleotide
cgcugauauuuggcauaau

SEQ ID NO: 1478833 - RNA, 19 nt, Artificial Sequence
  Description of Artificial Sequence: Synthetic oligonucleotide
uuuggaaugauaaaguucu

SEQ ID NO: 1478834 - RNA, 19 nt, Artificial Sequence
  Description of Artificial Sequence: Synthetic oligonucleotide
uucacuuuagaccaagagg

SEQ ID NO: 1478835 - RNA, 19 nt, Artificial Sequence
  Description of Artificial Sequence: Synthetic oligonucleotide
gaagccgagaauuagaccc

SEQ ID NO: 1478836 - RNA, 19 nt, Artificial Sequence
  Description of Artificial Sequence: Synthetic oligonucleotide
uuauacaugcggaugaggc

SEQ ID NO: 1478837 - RNA, 19 nt, Artificial Sequence
  Description of Artificial Sequence: Synthetic oligonucleotide
caauacucaacucaggccc

SEQ ID NO: 1478838 - RNA, 19 nt, Artificial Sequence
  Description of Artificial Sequence: Synthetic oligonucleotide
gaugugacuggauggaugg

SEQ ID NO: 1478839 - RNA, 19 nt, Artificial Sequence
  Description of Artificial Sequence: Synthetic oligonucleotide
uugucugcccaccagacgg

SEQ ID NO: 1478840 - RNA, 19 nt, Artificial Sequence
  Description of Artificial Sequence: Synthetic oligonucleotide
cauaucuggaacuguaugg

SEQ ID NO: 1478841 - RNA, 19 nt, Artificial Sequence
  Description of Artificial Sequence: Synthetic oligonucleotide
cagcguauuaagaagagcc

SEQ ID NO: 1478842 - RNA, 19 nt, Artificial Sequence
  Description of Artificial Sequence: Synthetic oligonucleotide
cauaccagguccuauaggc

SEQ ID NO: 1478843 - RNA, 19 nt, Artificial Sequence
  Description of Artificial Sequence: Synthetic oligonucleotide
aacaccuugaagacaaucg

SEQ ID NO: 1478844 - RNA, 19 nt, Artificial Sequence
  Description of Artificial Sequence: Synthetic oligonucleotide
uguaagcugccccagauga

SEQ ID NO: 1478845 - RNA, 19 nt, Artificial Sequence
  Description of Artificial Sequence: Synthetic oligonucleotide
ugaaggaacauguaguccu

SEQ ID NO: 1478846 - RNA, 19 nt, Artificial Sequence
  Description of Artificial Sequence: Synthetic oligonucleotide
ugaggguaaggauaaagcc

SEQ ID NO: 1478847 - RNA, 19 nt, Artificial Sequence
  Description of Artificial Sequence: Synthetic oligonucleotide
uguggaguucccaacagcc

SEQ ID NO: 1478848 - RNA, 19 nt, Artificial Sequence
  Description of Artificial Sequence: Synthetic oligonucleotide
guaccuaucaaacaccuug

SEQ ID NO: 1478849 - RNA, 19 nt, Artificial Sequence
  Description of Artificial Sequence: Synthetic oligonucleotide
uggucuaugagcuguaagc

SEQ ID NO: 1478850 - RNA, 19 nt, Artificial Sequence
  Description of Artificial Sequence: Synthetic oligonucleotide
uugaggguaaggauaaagc

SEQ ID NO: 1478851 - RNA, 19 nt, Artificial Sequence
  Description of Artificial Sequence: Synthetic oligonucleotide
auacaugcggaugaggccc

SEQ ID NO: 1478852 - RNA, 19 nt, Artificial Sequence
  Description of Artificial Sequence: Synthetic oligonucleotide
agagaaaugagcgccggcc

SEQ ID NO: 1478853 - RNA, 19 nt, Artificial Sequence
  Description of Artificial Sequence: Synthetic oligonucleotide
gaggguaaggauaaagccg

SEQ ID NO: 1478854 - RNA, 19 nt, Artificial Sequence
  Description of Artificial Sequence: Synthetic oligonucleotide
ucaauacucaacucaggcc

SEQ ID NO: 1478855 - RNA, 19 nt, Artificial Sequence
  Description of Artificial Sequence: Synthetic oligonucleotide
auaaagccgauguagucag

SEQ ID NO: 1478856 - RNA, 19 nt, Artificial Sequence
  Description of Artificial Sequence: Synthetic oligonucleotide
aaaccgccacuucagguac

SEQ ID NO: 1478857 - RNA, 19 nt, Artificial Sequence
  Description of Artificial Sequence: Synthetic oligonucleotide
caagguaccuaucaaacac

SEQ ID NO: 1478858 - RNA, 19 nt, Artificial Sequence
  Description of Artificial Sequence: Synthetic oligonucleotide
uucauugaggguaaggaua

SEQ ID NO: 1478859 - RNA, 19 nt, Artificial Sequence
  Description of Artificial Sequence: Synthetic oligonucleotide
cagcauaugccugagagcg

SEQ ID NO: 1478860 - RNA, 19 nt, Artificial Sequence
  Description of Artificial Sequence: Synthetic oligonucleotide
aagagaaaugagcgccggc

SEQ ID NO: 1478861 - RNA, 19 nt, Artificial Sequence
  Description of Artificial Sequence: Synthetic oligonucleotide
aagaacagaaggagggugg

SEQ ID NO: 1478862 - RNA, 19 nt, Artificial Sequence
  Description of Artificial Sequence: Synthetic oligonucleotide
aguaaacagccucucauca

SEQ ID NO: 1478863 - RNA, 19 nt, Artificial Sequence
  Description of Artificial Sequence: Synthetic oligonucleotide
ugauaaaguucugaguagc

SEQ ID NO: 1478864 - RNA, 19 nt, Artificial Sequence
  Description of Artificial Sequence: Synthetic oligonucleotide
ucaacucaggcccugcuca

SEQ ID NO: 1478865 - RNA, 19 nt, Artificial Sequence
  Description of Artificial Sequence: Synthetic oligonucleotide
gaaagcaaugggaagagca

SEQ ID NO: 1478866 - RNA, 19 nt, Artificial Sequence
  Description of Artificial Sequence: Synthetic oligonucleotide
aaacaccuugaagacaauc

SEQ ID NO: 1478867 - RNA, 19 nt, Artificial Sequence
  Description of Artificial Sequence: Synthetic oligonucleotide
uccguuaggagccggcgcg

SEQ ID NO: 1478868 - RNA, 19 nt, Artificial Sequence
  Description of Artificial Sequence: Synthetic oligonucleotide
ccucucaucaaacagaaag

SEQ ID NO: 1478869 - RNA, 19 nt, Artificial Sequence
  Description of Artificial Sequence: Synthetic oligonucleotide
ucauugaggguaaggauaa

SEQ ID NO: 1478870 - RNA, 19 nt, Artificial Sequence
  Description of Artificial Sequence: Synthetic oligonucleotide
uauacaugcggaugaggcc

SEQ ID NO: 1478871 - RNA, 19 nt, Artificial Sequence
  Description of Artificial Sequence: Synthetic oligonucleotide
guucacuuuagaccaagag

SEQ ID NO: 1478872 - RNA, 19 nt, Artificial Sequence
  Description of Artificial Sequence: Synthetic oligonucleotide
uccacuaagcuuccagaag

SEQ ID NO: 1478873 - RNA, 19 nt, Artificial Sequence
  Description of Artificial Sequence: Synthetic oligonucleotide
gcagguuccauucuguacg

SEQ ID NO: 1478874 - RNA, 19 nt, Artificial Sequence
  Description of Artificial Sequence: Synthetic oligonucleotide
gagaaaugagcgccggccg

SEQ ID NO: 1478875 - RNA, 19 nt, Artificial Sequence
  Description of Artificial Sequence: Synthetic oligonucleotide
cauucuguacgucuucugc

SEQ ID NO: 1478876 - RNA, 19 nt, Artificial Sequence
  Description of Artificial Sequence: Synthetic oligonucleotide
gauaaagccgauguaguca

SEQ ID NO: 1478877 - RNA, 19 nt, Artificial Sequence
  Description of Artificial Sequence: Synthetic oligonucleotide
ucaauccaccuauccagcg

SEQ ID NO: 1478878 - RNA, 19 nt, Artificial Sequence
  Description of Artificial Sequence: Synthetic oligonucleotide
aaaccgggaaggcuggucu

SEQ ID NO: 1478879 - RNA, 19 nt, Artificial Sequence
  Description of Artificial Sequence: Synthetic oligonucleotide
ucaagguaccuaucaaaca

SEQ ID NO: 1478880 - RNA, 19 nt, Artificial Sequence
  Description of Artificial Sequence: Synthetic oligonucleotide
uuccgcaugaccucaaggu

SEQ ID NO: 1478881 - RNA, 19 nt, Artificial Sequence
  Description of Artificial Sequence: Synthetic oligonucleotide
ucagagacuuuguagucga

SEQ ID NO: 1478882 - RNA, 19 nt, Artificial Sequence
  Description of Artificial Sequence: Synthetic oligonucleotide
uccugaucaaguuuggcau

SEQ ID NO: 1478883 - RNA, 19 nt, Artificial Sequence
  Description of Artificial Sequence: Synthetic oligonucleotide
auugaggguaaggauaaag

SEQ ID NO: 1478884 - RNA, 19 nt, Artificial Sequence
  Description of Artificial Sequence: Synthetic oligonucleotide
aguaaaccgccacuucagg

SEQ ID NO: 1478885 - RNA, 19 nt, Artificial Sequence
  Description of Artificial Sequence: Synthetic oligonucleotide
ucaucuacccggagcaccc

SEQ ID NO: 1478886 - RNA, 19 nt, Artificial Sequence
  Description of Artificial Sequence: Synthetic oligonucleotide
aaguaaaccgccacuucag

SEQ ID NO: 1478887 - RNA, 19 nt, Artificial Sequence
  Description of Artificial Sequence: Synthetic oligonucleotide
guaaggauaaagccgaugu

SEQ ID NO: 1478888 - RNA, 19 nt, Artificial Sequence
  Description of Artificial Sequence: Synthetic oligonucleotide
uccagcguauuaagaagag

SEQ ID NO: 1478889 - RNA, 19 nt, Artificial Sequence
  Description of Artificial Sequence: Synthetic oligonucleotide
agaaaugagcgccggccgg

SEQ ID NO: 1478890 - RNA, 19 nt, Artificial Sequence
  Description of Artificial Sequence: Synthetic oligonucleotide
caccuggucaucuacccgg

SEQ ID NO: 1478891 - RNA, 19 nt, Artificial Sequence
  Description of Artificial Sequence: Synthetic oligonucleotide
aaagccgauguagucagca

SEQ ID NO: 1478892 - RNA, 19 nt, Artificial Sequence
  Description of Artificial Sequence: Synthetic oligonucleotide
gaucaaguuuggcauacca

SEQ ID NO: 1478893 - RNA, 19 nt, Artificial Sequence
  Description of Artificial Sequence: Synthetic oligonucleotide
ucucuuagccugaugugac

SEQ ID NO: 1478894 - RNA, 19 nt, Artificial Sequence
  Description of Artificial Sequence: Synthetic oligonucleotide
uggaucacggggaacuucu

SEQ ID NO: 1478895 - RNA, 19 nt, Artificial Sequence
  Description of Artificial Sequence: Synthetic oligonucleotide
uaccuaucaaacaccuuga

SEQ ID NO: 1478896 - RNA, 19 nt, Artificial Sequence
  Description of Artificial Sequence: Synthetic oligonucleotide
ucagcauaugccugagagc

SEQ ID NO: 1478897 - RNA, 19 nt, Artificial Sequence
  Description of Artificial Sequence: Synthetic oligonucleotide
aagacaaucgccaccuggu

SEQ ID NO: 1478898 - RNA, 19 nt, Artificial Sequence
  Description of Artificial Sequence: Synthetic oligonucleotide
cucagccuuauacaugcgg

SEQ ID NO: 1478899 - RNA, 19 nt, Artificial Sequence
  Description of Artificial Sequence: Synthetic oligonucleotide
ugcccuugucuccacacag

SEQ ID NO: 1478900 - RNA, 19 nt, Artificial Sequence
  Description of Artificial Sequence: Synthetic oligonucleotide
caccuugaagacaaucgcc

SEQ ID NO: 1478901 - RNA, 19 nt, Artificial Sequence
  Description of Artificial Sequence: Synthetic oligonucleotide
uaaaccgccacuucaggua

SEQ ID NO: 1478902 - RNA, 19 nt, Artificial Sequence
  Description of Artificial Sequence: Synthetic oligonucleotide
ucgcaguucccucuccccg

SEQ ID NO: 1478903 - RNA, 19 nt, Artificial Sequence
  Description of Artificial Sequence: Synthetic oligonucleotide
caggcacucagccuuauac

SEQ ID NO: 1478904 - RNA, 19 nt, Artificial Sequence
  Description of Artificial Sequence: Synthetic oligonucleotide
aaacagccucucaucaaac

SEQ ID NO: 1478905 - RNA, 19 nt, Artificial Sequence
  Description of Artificial Sequence: Synthetic oligonucleotide
gaagagaaaugagcgccgg

SEQ ID NO: 1478906 - RNA, 19 nt, Artificial Sequence
  Description of Artificial Sequence: Synthetic oligonucleotide
aaggcuggucuaccggcgg

SEQ ID NO: 1478907 - RNA, 19 nt, Artificial Sequence
  Description of Artificial Sequence: Synthetic oligonucleotide
cuauccagcguauuaagaa

SEQ ID NO: 1478908 - RNA, 19 nt, Artificial Sequence
  Description of Artificial Sequence: Synthetic oligonucleotide
caucucaguaaacagccuc

SEQ ID NO: 1478909 - RNA, 19 nt, Artificial Sequence
  Description of Artificial Sequence: Synthetic oligonucleotide
ucugaagaaucuggcggcg

SEQ ID NO: 1478910 - RNA, 19 nt, Artificial Sequence
  Description of Artificial Sequence: Synthetic oligonucleotide
augaccucaagguaccuau

SEQ ID NO: 1478911 - RNA, 19 nt, Artificial Sequence
  Description of Artificial Sequence: Synthetic oligonucleotide
agacuuuguagucgaaggu

SEQ ID NO: 1478912 - RNA, 19 nt, Artificial Sequence
  Description of Artificial Sequence: Synthetic oligonucleotide
ucuuagccugaugugacug

SEQ ID NO: 1478913 - RNA, 19 nt, Artificial Sequence
  Description of Artificial Sequence: Synthetic oligonucleotide
ucaaguaaaccgccacuuc

SEQ ID NO: 1478914 - RNA, 19 nt, Artificial Sequence
  Description of Artificial Sequence: Synthetic oligonucleotide
uuuaccccgcaccuuuccc

SEQ ID NO: 1478915 - RNA, 19 nt, Artificial Sequence
  Description of Artificial Sequence: Synthetic oligonucleotide
ugugguucucacucacugc

SEQ ID NO: 1478916 - RNA, 19 nt, Artificial Sequence
  Description of Artificial Sequence: Synthetic oligonucleotide
cuuauacaugcggaugagg

SEQ ID NO: 1478917 - RNA, 19 nt, Artificial Sequence
  Description of Artificial Sequence: Synthetic oligonucleotide
cuuucacaccuucauugag

SEQ ID NO: 1478918 - RNA, 19 nt, Artificial Sequence
  Description of Artificial Sequence: Synthetic oligonucleotide
gacuuuguagucgaagguc

SEQ ID NO: 1478919 - RNA, 19 nt, Artificial Sequence
  Description of Artificial Sequence: Synthetic oligonucleotide
gaugcacugaaggaacaug

SEQ ID NO: 1478920 - RNA, 19 nt, Artificial Sequence
  Description of Artificial Sequence: Synthetic oligonucleotide
uuuggucaauacucaacuc

SEQ ID NO: 1478921 - RNA, 19 nt, Artificial Sequence
  Description of Artificial Sequence: Synthetic oligonucleotide
accuauccagcguauuaag

SEQ ID NO: 1478922 - RNA, 19 nt, Artificial Sequence
  Description of Artificial Sequence: Synthetic oligonucleotide
ucaauggccucagagacuu

SEQ ID NO: 1478923 - RNA, 19 nt, Artificial Sequence
  Description of Artificial Sequence: Synthetic oligonucleotide
cuucagguacagcagccgc

SEQ ID NO: 1478924 - RNA, 19 nt, Artificial Sequence
  Description of Artificial Sequence: Synthetic oligonucleotide
guauuaagaagagccacca

SEQ ID NO: 1478925 - RNA, 19 nt, Artificial Sequence
  Description of Artificial Sequence: Synthetic oligonucleotide
uucuguacgucuucugcaa

SEQ ID NO: 1478926 - RNA, 19 nt, Artificial Sequence
  Description of Artificial Sequence: Synthetic oligonucleotide
cuuuguagucgaaggucag

SEQ ID NO: 1478927 - RNA, 19 nt, Artificial Sequence
  Description of Artificial Sequence: Synthetic oligonucleotide
acuuuguagucgaagguca

SEQ ID NO: 1478928 - RNA, 19 nt, Artificial Sequence
  Description of Artificial Sequence: Synthetic oligonucleotide
uccccguuuaccccgcacc

SEQ ID NO: 1478929 - RNA, 19 nt, Artificial Sequence
  Description of Artificial Sequence: Synthetic oligonucleotide
agacaaucgccaccugguc

SEQ ID NO: 1478930 - RNA, 19 nt, Artificial Sequence
  Description of Artificial Sequence: Synthetic oligonucleotide
uucaaguaaaccgccacuu

SEQ ID NO: 1478931 - RNA, 19 nt, Artificial Sequence
  Description of Artificial Sequence: Synthetic oligonucleotide
uuuagaccaagaggggaca

SEQ ID NO: 1478932 - RNA, 19 nt, Artificial Sequence
  Description of Artificial Sequence: Synthetic oligonucleotide
uuaccccgcaccuuucccc

SEQ ID NO: 1478933 - RNA, 19 nt, Artificial Sequence
  Description of Artificial Sequence: Synthetic oligonucleotide
gaccucaagguaccuauca

SEQ ID NO: 1478934 - RNA, 19 nt, Artificial Sequence
  Description of Artificial Sequence: Synthetic oligonucleotide
uagucgaaggucagcuucu

SEQ ID NO: 1478935 - RNA, 19 nt, Artificial Sequence
  Description of Artificial Sequence: Synthetic oligonucleotide
agguacagcagccgccagg

SEQ ID NO: 1478936 - RNA, 19 nt, Artificial Sequence
  Description of Artificial Sequence: Synthetic oligonucleotide
ccuccuucaaguaaaccgc

SEQ ID NO: 1478937 - RNA, 19 nt, Artificial Sequence
  Description of Artificial Sequence: Synthetic oligonucleotide
aacucaggcccugcucagc

SEQ ID NO: 1478938 - RNA, 19 nt, Artificial Sequence
  Description of Artificial Sequence: Synthetic oligonucleotide
aggcucccgaacuugaagu

SEQ ID NO: 1478939 - RNA, 19 nt, Artificial Sequence
  Description of Artificial Sequence: Synthetic oligonucleotide
caaauucucugcuuccuga

SEQ ID NO: 1478940 - RNA, 19 nt, Artificial Sequence
  Description of Artificial Sequence: Synthetic oligonucleotide
gguccuauaggccuuguuc

SEQ ID NO: 1478941 - RNA, 19 nt, Artificial Sequence
  Description of Artificial Sequence: Synthetic oligonucleotide
cuuuggucaauacucaacu

SEQ ID NO: 1478942 - RNA, 19 nt, Artificial Sequence
  Description of Artificial Sequence: Synthetic oligonucleotide
cugugccauagucaaugcg

SEQ ID NO: 1478943 - RNA, 19 nt, Artificial Sequence
  Description of Artificial Sequence: Synthetic oligonucleotide
augagcgccggccggcuac

SEQ ID NO: 1478944 - RNA, 19 nt, Artificial Sequence
  Description of Artificial Sequence: Synthetic oligonucleotide
uaucuggaacuguauggau

SEQ ID NO: 1478945 - RNA, 19 nt, Artificial Sequence
  Description of Artificial Sequence: Synthetic oligonucleotide
ucuccguuaggagccggcg

SEQ ID NO: 1478946 - RNA, 19 nt, Artificial Sequence
  Description of Artificial Sequence: Synthetic oligonucleotide
gaaggcuggucuaccggcg

SEQ ID NO: 1478947 - RNA, 19 nt, Artificial Sequence
  Description of Artificial Sequence: Synthetic oligonucleotide
uccgcaugaccucaaggua

SEQ ID NO: 1478948 - RNA, 19 nt, Artificial Sequence
  Description of Artificial Sequence: Synthetic oligonucleotide
cugaucaaguuuggcauac

SEQ ID NO: 1478949 - RNA, 19 nt, Artificial Sequence
  Description of Artificial Sequence: Synthetic oligonucleotide
cccuuucacaccuucauug

SEQ ID NO: 1478950 - RNA, 19 nt, Artificial Sequence
  Description of Artificial Sequence: Synthetic oligonucleotide
aggcacucagccuuauaca

SEQ ID NO: 1478951 - RNA, 19 nt, Artificial Sequence
  Description of Artificial Sequence: Synthetic oligonucleotide
agucaaugcguguggaguu

SEQ ID NO: 1478952 - RNA, 19 nt, Artificial Sequence
  Description of Artificial Sequence: Synthetic oligonucleotide
aggccuaggcaggagagag

SEQ ID NO: 1478953 - RNA, 19 nt, Artificial Sequence
  Description of Artificial Sequence: Synthetic oligonucleotide
aaugcguguggaguuccca

SEQ ID NO: 1478954 - RNA, 19 nt, Artificial Sequence
  Description of Artificial Sequence: Synthetic oligonucleotide
ucgcccucagccaucuucu

SEQ ID NO: 1478955 - RNA, 19 nt, Artificial Sequence
  Description of Artificial Sequence: Synthetic oligonucleotide
auaugccugagagcgcuuc

SEQ ID NO: 1478956 - RNA, 19 nt, Artificial Sequence
  Description of Artificial Sequence: Synthetic oligonucleotide
aggauaaagccgauguagu

SEQ ID NO: 1478957 - RNA, 19 nt, Artificial Sequence
  Description of Artificial Sequence: Synthetic oligonucleotide
aucuacccggagcaccccg

SEQ ID NO: 1478958 - RNA, 19 nt, Artificial Sequence
  Description of Artificial Sequence: Synthetic oligonucleotide
uuuccccggcuccacuaag

SEQ ID NO: 1478959 - RNA, 19 nt, Artificial Sequence
  Description of Artificial Sequence: Synthetic oligonucleotide
cguauuaagaagagccacc

SEQ ID NO: 1478960 - RNA, 19 nt, Artificial Sequence
  Description of Artificial Sequence: Synthetic oligonucleotide
ggccucagagacuuuguag

SEQ ID NO: 1478961 - RNA, 19 nt, Artificial Sequence
  Description of Artificial Sequence: Synthetic oligonucleotide
agccuuauacaugcggaug

SEQ ID NO: 1478962 - RNA, 19 nt, Artificial Sequence
  Description of Artificial Sequence: Synthetic oligonucleotide
uuccccggcuccacuaagc

SEQ ID NO: 1478963 - RNA, 19 nt, Artificial Sequence
  Description of Artificial Sequence: Synthetic oligonucleotide
guuuaccccgcaccuuucc

SEQ ID NO: 1478964 - RNA, 19 nt, Artificial Sequence
  Description of Artificial Sequence: Synthetic oligonucleotide
gucaucuacccggagcacc

SEQ ID NO: 1478965 - RNA, 19 nt, Artificial Sequence
  Description of Artificial Sequence: Synthetic oligonucleotide
acccagucuugugagggcg

SEQ ID NO: 1478966 - RNA, 19 nt, Artificial Sequence
  Description of Artificial Sequence: Synthetic oligonucleotide
agcguauuaagaagagcca

SEQ ID NO: 1478967 - RNA, 19 nt, Artificial Sequence
  Description of Artificial Sequence: Synthetic oligonucleotide
ugcguguggaguucccaac

SEQ ID NO: 1478968 - RNA, 19 nt, Artificial Sequence
  Description of Artificial Sequence: Synthetic oligonucleotide
uacgaccggaagccgagaa

SEQ ID NO: 1478969 - RNA, 19 nt, Artificial Sequence
  Description of Artificial Sequence: Synthetic oligonucleotide
ggauaaagccgauguaguc

SEQ ID NO: 1478970 - RNA, 19 nt, Artificial Sequence
  Description of Artificial Sequence: Synthetic oligonucleotide
ggggugccgggucagaggg

SEQ ID NO: 1478971 - RNA, 19 nt, Artificial Sequence
  Description of Artificial Sequence: Synthetic oligonucleotide
ggcauaccagguccuauag

SEQ ID NO: 1478972 - RNA, 19 nt, Artificial Sequence
  Description of Artificial Sequence: Synthetic oligonucleotide
ucuacccggagcaccccga

SEQ ID NO: 1478973 - RNA, 19 nt, Artificial Sequence
  Description of Artificial Sequence: Synthetic oligonucleotide
gagagcgcuuccauuugcc

SEQ ID NO: 1478974 - RNA, 19 nt, Artificial Sequence
  Description of Artificial Sequence: Synthetic oligonucleotide
ugggaagagcaggaugccc

SEQ ID NO: 1478975 - RNA, 19 nt, Artificial Sequence
  Description of Artificial Sequence: Synthetic oligonucleotide
ugaagacaaucgccaccug

SEQ ID NO: 1478976 - RNA, 19 nt, Artificial Sequence
  Description of Artificial Sequence: Synthetic oligonucleotide
uaccggcgggguuucauca

SEQ ID NO: 1478977 - RNA, 19 nt, Artificial Sequence
  Description of Artificial Sequence: Synthetic oligonucleotide
cuuccugaucaaguuuggc

SEQ ID NO: 1478978 - RNA, 19 nt, Artificial Sequence
  Description of Artificial Sequence: Synthetic oligonucleotide
ugccauagucaaugcgugu

SEQ ID NO: 1478979 - RNA, 19 nt, Artificial Sequence
  Description of Artificial Sequence: Synthetic oligonucleotide
ugaguagcuggaggggucu

SEQ ID NO: 1478980 - RNA, 19 nt, Artificial Sequence
  Description of Artificial Sequence: Synthetic oligonucleotide
accucaagguaccuaucaa

SEQ ID NO: 1478981 - RNA, 19 nt, Artificial Sequence
  Description of Artificial Sequence: Synthetic oligonucleotide
agccgauguagucagcaua

SEQ ID NO: 1478982 - RNA, 19 nt, Artificial Sequence
  Description of Artificial Sequence: Synthetic oligonucleotide
cucucuuagccugauguga

SEQ ID NO: 1478983 - RNA, 19 nt, Artificial Sequence
  Description of Artificial Sequence: Synthetic oligonucleotide
accggaagccgagaauuag

SEQ ID NO: 1478984 - RNA, 19 nt, Artificial Sequence
  Description of Artificial Sequence: Synthetic oligonucleotide
agcauaugccugagagcgc

SEQ ID NO: 1478985 - RNA, 19 nt, Artificial Sequence
  Description of Artificial Sequence: Synthetic oligonucleotide
ucuucuccguuaggagccg

SEQ ID NO: 1478986 - RNA, 19 nt, Artificial Sequence
  Description of Artificial Sequence: Synthetic oligonucleotide
uggcauaccagguccuaua

SEQ ID NO: 1478987 - RNA, 19 nt, Artificial Sequence
  Description of Artificial Sequence: Synthetic oligonucleotide
ggaagccgagaauuagacc

SEQ ID NO: 1478988 - RNA, 19 nt, Artificial Sequence
  Description of Artificial Sequence: Synthetic oligonucleotide
acacuuuggucaauacuca

SEQ ID NO: 1478989 - RNA, 19 nt, Artificial Sequence
  Description of Artificial Sequence: Synthetic oligonucleotide
cacggggaacuucuccagg

SEQ ID NO: 1478990 - RNA, 19 nt, Artificial Sequence
  Description of Artificial Sequence: Synthetic oligonucleotide
aagccgagaauuagaccca

SEQ ID NO: 1478991 - RNA, 19 nt, Artificial Sequence
  Description of Artificial Sequence: Synthetic oligonucleotide
uccccggcuccacuaagcu

SEQ ID NO: 1478992 - RNA, 19 nt, Artificial Sequence
  Description of Artificial Sequence: Synthetic oligonucleotide
accuaucaaacaccuugaa

SEQ ID NO: 1478993 - RNA, 19 nt, Artificial Sequence
  Description of Artificial Sequence: Synthetic oligonucleotide
cuguaagcugccccagaug

SEQ ID NO: 1478994 - RNA, 19 nt, Artificial Sequence
  Description of Artificial Sequence: Synthetic oligonucleotide
gccuuauacaugcggauga

SEQ ID NO: 1478995 - RNA, 19 nt, Artificial Sequence
  Description of Artificial Sequence: Synthetic oligonucleotide
aaucgccaccuggucaucu

SEQ ID NO: 1478996 - RNA, 19 nt, Artificial Sequence
  Description of Artificial Sequence: Synthetic oligonucleotide
ccauaucuggaacuguaug

SEQ ID NO: 1478997 - RNA, 19 nt, Artificial Sequence
  Description of Artificial Sequence: Synthetic oligonucleotide
uagucagcauaugccugag

SEQ ID NO: 1478998 - RNA, 19 nt, Artificial Sequence
  Description of Artificial Sequence: Synthetic oligonucleotide
cucaacucaggcccugcuc

SEQ ID NO: 1478999 - RNA, 19 nt, Artificial Sequence
  Description of Artificial Sequence: Synthetic oligonucleotide
ggucaauacucaacucagg

SEQ ID NO: 1479000 - RNA, 19 nt, Artificial Sequence
  Description of Artificial Sequence: Synthetic oligonucleotide
gcauaccagguccuauagg

SEQ ID NO: 1479001 - RNA, 19 nt, Artificial Sequence
  Description of Artificial Sequence: Synthetic oligonucleotide
gugaugaacaggaugcacu

SEQ ID NO: 1479002 - RNA, 19 nt, Artificial Sequence
  Description of Artificial Sequence: Synthetic oligonucleotide
gguuucaucaauccaccua

SEQ ID NO: 1479003 - RNA, 19 nt, Artificial Sequence
  Description of Artificial Sequence: Synthetic oligonucleotide
uacaugcggaugaggcccu

SEQ ID NO: 1479004 - RNA, 19 nt, Artificial Sequence
  Description of Artificial Sequence: Synthetic oligonucleotide
cuccacuaagcuuccagaa

SEQ ID NO: 1479005 - RNA, 19 nt, Artificial Sequence
  Description of Artificial Sequence: Synthetic oligonucleotide
gaugcucgcaguucccucu

SEQ ID NO: 1479006 - RNA, 19 nt, Artificial Sequence
  Description of Artificial Sequence: Synthetic oligonucleotide
cuccguuaggagccggcgc

SEQ ID NO: 1479007 - RNA, 19 nt, Artificial Sequence
  Description of Artificial Sequence: Synthetic oligonucleotide
ggagugcucugcaaagggg

SEQ ID NO: 1479008 - RNA, 19 nt, Artificial Sequence
  Description of Artificial Sequence: Synthetic oligonucleotide
ccgagaauuagacccaguc

SEQ ID NO: 1479009 - RNA, 19 nt, Artificial Sequence
  Description of Artificial Sequence: Synthetic oligonucleotide
accccacacgcccuggcug

SEQ ID NO: 1479010 - RNA, 19 nt, Artificial Sequence
  Description of Artificial Sequence: Synthetic oligonucleotide
gccauagucaaugcgugug

SEQ ID NO: 1479011 - RNA, 19 nt, Artificial Sequence
  Description of Artificial Sequence: Synthetic oligonucleotide
cugagagcgcuuccauuug

SEQ ID NO: 1479012 - RNA, 19 nt, Artificial Sequence
  Description of Artificial Sequence: Synthetic oligonucleotide
gaaucuggcggcggcugcc

SEQ ID NO: 1479013 - RNA, 19 nt, Artificial Sequence
  Description of Artificial Sequence: Synthetic oligonucleotide
gguaaggauaaagccgaug

SEQ ID NO: 1479014 - RNA, 19 nt, Artificial Sequence
  Description of Artificial Sequence: Synthetic oligonucleotide
cgggguuucaucaauccac

SEQ ID NO: 1479015 - RNA, 19 nt, Artificial Sequence
  Description of Artificial Sequence: Synthetic oligonucleotide
caaugcguguggaguuccc

SEQ ID NO: 1479016 - RNA, 19 nt, Artificial Sequence
  Description of Artificial Sequence: Synthetic oligonucleotide
ggcgggguuucaucaaucc

SEQ ID NO: 1479017 - RNA, 19 nt, Artificial Sequence
  Description of Artificial Sequence: Synthetic oligonucleotide
caacucaggcccugcucag

SEQ ID NO: 1479018 - RNA, 19 nt, Artificial Sequence
  Description of Artificial Sequence: Synthetic oligonucleotide
gcguauuaagaagagccac

SEQ ID NO: 1479019 - RNA, 19 nt, Artificial Sequence
  Description of Artificial Sequence: Synthetic oligonucleotide
augcguguggaguucccaa

SEQ ID NO: 1479020 - RNA, 19 nt, Artificial Sequence
  Description of Artificial Sequence: Synthetic oligonucleotide
gcggaugaggcccugguuc

SEQ ID NO: 1479021 - RNA, 19 nt, Artificial Sequence
  Description of Artificial Sequence: Synthetic oligonucleotide
ccgcaugaccucaagguac

SEQ ID NO: 1479022 - RNA, 19 nt, Artificial Sequence
  Description of Artificial Sequence: Synthetic oligonucleotide
accagacggacagucaaaa

SEQ ID NO: 1479023 - RNA, 19 nt, Artificial Sequence
  Description of Artificial Sequence: Synthetic oligonucleotide
uacucaacucaggcccugc

SEQ ID NO: 1479024 - RNA, 19 nt, Artificial Sequence
  Description of Artificial Sequence: Synthetic oligonucleotide
cuucauugaggguaaggau

SEQ ID NO: 1479025 - RNA, 19 nt, Artificial Sequence
  Description of Artificial Sequence: Synthetic oligonucleotide
ggccuuguucccaaaccgg

SEQ ID NO: 1479026 - RNA, 19 nt, Artificial Sequence
  Description of Artificial Sequence: Synthetic oligonucleotide
gguuggagugcucugcaaa

SEQ ID NO: 1479027 - RNA, 19 nt, Artificial Sequence
  Description of Artificial Sequence: Synthetic oligonucleotide
uggucuaccggcgggguuu

SEQ ID NO: 1479028 - RNA, 19 nt, Artificial Sequence
  Description of Artificial Sequence: Synthetic oligonucleotide
ugcucgcaguucccucucc

SEQ ID NO: 1479029 - RNA, 19 nt, Artificial Sequence
  Description of Artificial Sequence: Synthetic oligonucleotide
gcaacuuccgcaugaccuc

SEQ ID NO: 1479030 - RNA, 19 nt, Artificial Sequence
  Description of Artificial Sequence: Synthetic oligonucleotide
gccaccuggucaucuaccc

SEQ ID NO: 1479031 - RNA, 19 nt, Artificial Sequence
  Description of Artificial Sequence: Synthetic oligonucleotide
agcacccaucucaguaaac

SEQ ID NO: 1479032 - RNA, 19 nt, Artificial Sequence
  Description of Artificial Sequence: Synthetic oligonucleotide
uuggcauaccagguccuau

SEQ ID NO: 1479033 - RNA, 19 nt, Artificial Sequence
  Description of Artificial Sequence: Synthetic oligonucleotide
agccgagaauuagacccag

SEQ ID NO: 1479034 - RNA, 19 nt, Artificial Sequence
  Description of Artificial Sequence: Synthetic oligonucleotide
cuaccggcgggguuucauc

SEQ ID NO: 1479035 - RNA, 19 nt, Artificial Sequence
  Description of Artificial Sequence: Synthetic oligonucleotide
ugguuggagugcucugcaa

SEQ ID NO: 1479036 - RNA, 19 nt, Artificial Sequence
  Description of Artificial Sequence: Synthetic oligonucleotide
cacuuuggucaauacucaa

SEQ ID NO: 1479037 - RNA, 19 nt, Artificial Sequence
  Description of Artificial Sequence: Synthetic oligonucleotide
auacucaacucaggcccug

SEQ ID NO: 1479038 - RNA, 19 nt, Artificial Sequence
  Description of Artificial Sequence: Synthetic oligonucleotide
ccaagaggggacagcacug

SEQ ID NO: 1479039 - RNA, 19 nt, Artificial Sequence
  Description of Artificial Sequence: Synthetic oligonucleotide
agcgccggccggcuacgac

SEQ ID NO: 1479040 - RNA, 19 nt, Artificial Sequence
  Description of Artificial Sequence: Synthetic oligonucleotide
guacgucuucugcaacuuc

SEQ ID NO: 1479041 - RNA, 19 nt, Artificial Sequence
  Description of Artificial Sequence: Synthetic oligonucleotide
ccggcuacgaccggaagcc

SEQ ID NO: 1479042 - RNA, 19 nt, Artificial Sequence
  Description of Artificial Sequence: Synthetic oligonucleotide
ugcaaaggggccggucuuc

SEQ ID NO: 1479043 - RNA, 19 nt, Artificial Sequence
  Description of Artificial Sequence: Synthetic oligonucleotide
acgaccggaagccgagaau

SEQ ID NO: 1479044 - RNA, 19 nt, Artificial Sequence
  Description of Artificial Sequence: Synthetic oligonucleotide
gcuccacuaagcuuccaga

SEQ ID NO: 1479045 - RNA, 19 nt, Artificial Sequence
  Description of Artificial Sequence: Synthetic oligonucleotide
gucuugugagggcggcagc

SEQ ID NO: 1479046 - RNA, 19 nt, Artificial Sequence
  Description of Artificial Sequence: Synthetic oligonucleotide
ugcccauaucuggaacugu

SEQ ID NO: 1479047 - RNA, 19 nt, Artificial Sequence
  Description of Artificial Sequence: Synthetic oligonucleotide
caugcggaugaggcccugg

SEQ ID NO: 1479048 - RNA, 19 nt, Artificial Sequence
  Description of Artificial Sequence: Synthetic oligonucleotide
gccggcuacgaccggaagc

SEQ ID NO: 1479049 - RNA, 19 nt, Artificial Sequence
  Description of Artificial Sequence: Synthetic oligonucleotide
augcccugugccauaguca

SEQ ID NO: 1479050 - RNA, 19 nt, Artificial Sequence
  Description of Artificial Sequence: Synthetic oligonucleotide
cugguuggagugcucugca

SEQ ID NO: 1479051 - RNA, 19 nt, Artificial Sequence
  Description of Artificial Sequence: Synthetic oligonucleotide
ucuaccggcgggguuucau

SEQ ID NO: 1479052 - RNA, 19 nt, Artificial Sequence
  Description of Artificial Sequence: Synthetic oligonucleotide
caaaccgggaaggcugguc

SEQ ID NO: 1479053 - RNA, 19 nt, Artificial Sequence
  Description of Artificial Sequence: Synthetic oligonucleotide
gcccugguucacuuuagac

SEQ ID NO: 1479054 - RNA, 19 nt, Artificial Sequence
  Description of Artificial Sequence: Synthetic oligonucleotide
aaugagcgccggccggcua

SEQ ID NO: 1479055 - RNA, 19 nt, Artificial Sequence
  Description of Artificial Sequence: Synthetic oligonucleotide
ugagcgccggccggcuacg

SEQ ID NO: 1479056 - RNA, 19 nt, Artificial Sequence
  Description of Artificial Sequence: Synthetic oligonucleotide
cggaagccgagaauuagac

SEQ ID NO: 1479057 - RNA, 19 nt, Artificial Sequence
  Description of Artificial Sequence: Synthetic oligonucleotide
gcuacgaccggaagccgag

SEQ ID NO: 1479058 - RNA, 19 nt, Artificial Sequence
  Description of Artificial Sequence: Synthetic oligonucleotide
caccuauccagcguauuaa

SEQ ID NO: 1479059 - RNA, 19 nt, Artificial Sequence
  Description of Artificial Sequence: Synthetic oligonucleotide
cuggaucacggggaacuuc

SEQ ID NO: 1479060 - RNA, 19 nt, Artificial Sequence
  Description of Artificial Sequence: Synthetic oligonucleotide
ccucucuuagccugaugug

SEQ ID NO: 1479061 - RNA, 19 nt, Artificial Sequence
  Description of Artificial Sequence: Synthetic oligonucleotide
cuucuccguuaggagccgg

SEQ ID NO: 1479062 - RNA, 19 nt, Artificial Sequence
  Description of Artificial Sequence: Synthetic oligonucleotide
cccaaaccgggaaggcugg

SEQ ID NO: 1479063 - RNA, 19 nt, Artificial Sequence
  Description of Artificial Sequence: Synthetic oligonucleotide
ugcccgcagguuccauucu

SEQ ID NO: 1479064 - RNA, 19 nt, Artificial Sequence
  Description of Artificial Sequence: Synthetic oligonucleotide
ccagcguauuaagaagagc

SEQ ID NO: 1479065 - RNA, 19 nt, Artificial Sequence
  Description of Artificial Sequence: Synthetic oligonucleotide
ggcacucagccuuauacau

SEQ ID NO: 1479066 - RNA, 19 nt, Artificial Sequence
  Description of Artificial Sequence: Synthetic oligonucleotide
ccuuauacaugcggaugag

SEQ ID NO: 1479067 - RNA, 19 nt, Artificial Sequence
  Description of Artificial Sequence: Synthetic oligonucleotide
ccucaagguaccuaucaaa

SEQ ID NO: 1479068 - RNA, 19 nt, Artificial Sequence
  Description of Artificial Sequence: Synthetic oligonucleotide
cgcaugaccucaagguacc

SEQ ID NO: 1479069 - RNA, 19 nt, Artificial Sequence
  Description of Artificial Sequence: Synthetic oligonucleotide
ccggucuucaucucaguga

SEQ ID NO: 1479070 - RNA, 19 nt, Artificial Sequence
  Description of Artificial Sequence: Synthetic oligonucleotide
gaagaaucuggcggcggcu

SEQ ID NO: 1479071 - RNA, 19 nt, Artificial Sequence
  Description of Artificial Sequence: Synthetic oligonucleotide
agguccuauaggccuuguu

SEQ ID NO: 1479072 - RNA, 19 nt, Artificial Sequence
  Description of Artificial Sequence: Synthetic oligonucleotide
uacccggagcaccccgauc

SEQ ID NO: 1479073 - RNA, 19 nt, Artificial Sequence
  Description of Artificial Sequence: Synthetic oligonucleotide
caauccaccuauccagcgu

SEQ ID NO: 1479074 - RNA, 19 nt, Artificial Sequence
  Description of Artificial Sequence: Synthetic oligonucleotide
ccaccuggucaucuacccg

SEQ ID NO: 1479075 - RNA, 19 nt, Artificial Sequence
  Description of Artificial Sequence: Synthetic oligonucleotide
gccacacuuuggucaauac

SEQ ID NO: 1479076 - RNA, 19 nt, Artificial Sequence
  Description of Artificial Sequence: Synthetic oligonucleotide
gcucgcaguucccucuccc

SEQ ID NO: 1479077 - RNA, 19 nt, Artificial Sequence
  Description of Artificial Sequence: Synthetic oligonucleotide
caacuuccgcaugaccuca

SEQ ID NO: 1479078 - RNA, 19 nt, Artificial Sequence
  Description of Artificial Sequence: Synthetic oligonucleotide
aucgccaccuggucaucua

SEQ ID NO: 1479079 - RNA, 19 nt, Artificial Sequence
  Description of Artificial Sequence: Synthetic oligonucleotide
gcacucagccuuauacaug

SEQ ID NO: 1479080 - RNA, 19 nt, Artificial Sequence
  Description of Artificial Sequence: Synthetic oligonucleotide
uccaccuauccagcguauu

SEQ ID NO: 1479081 - RNA, 19 nt, Artificial Sequence
  Description of Artificial Sequence: Synthetic oligonucleotide
accccgcaccuuuccccgg

SEQ ID NO: 1479082 - RNA, 19 nt, Artificial Sequence
  Description of Artificial Sequence: Synthetic oligonucleotide
cuugugagggcggcagcca

SEQ ID NO: 1479083 - RNA, 19 nt, Artificial Sequence
  Description of Artificial Sequence: Synthetic oligonucleotide
gcguguggaguucccaaca

SEQ ID NO: 1479084 - RNA, 19 nt, Artificial Sequence
  Description of Artificial Sequence: Synthetic oligonucleotide
ggaugcucgcaguucccuc

SEQ ID NO: 1479085 - RNA, 19 nt, Artificial Sequence
  Description of Artificial Sequence: Synthetic oligonucleotide
caucuacccggagcacccc

SEQ ID NO: 1479086 - RNA, 19 nt, Artificial Sequence
  Description of Artificial Sequence: Synthetic oligonucleotide
cuccccguuuaccccgcac

SEQ ID NO: 1479087 - RNA, 19 nt, Artificial Sequence
  Description of Artificial Sequence: Synthetic oligonucleotide
aacuuccgcaugaccucaa

SEQ ID NO: 1479088 - RNA, 19 nt, Artificial Sequence
  Description of Artificial Sequence: Synthetic oligonucleotide
ggugccgggucagagggca

SEQ ID NO: 1479089 - RNA, 19 nt, Artificial Sequence
  Description of Artificial Sequence: Synthetic oligonucleotide
gcccuugucuccacacagg

SEQ ID NO: 1479090 - RNA, 19 nt, Artificial Sequence
  Description of Artificial Sequence: Synthetic oligonucleotide
ggaacuguauggaucuccu

SEQ ID NO: 1479091 - RNA, 19 nt, Artificial Sequence
  Description of Artificial Sequence: Synthetic oligonucleotide
cguguggaguucccaacag

SEQ ID NO: 1479092 - RNA, 19 nt, Artificial Sequence
  Description of Artificial Sequence: Synthetic oligonucleotide
ggcuggucuaccggcgggg

SEQ ID NO: 1479093 - RNA, 19 nt, Artificial Sequence
  Description of Artificial Sequence: Synthetic oligonucleotide
gaugaggcccugguucacu

SEQ ID NO: 1479094 - RNA, 19 nt, Artificial Sequence
  Description of Artificial Sequence: Synthetic oligonucleotide
ucuccccguuuaccccgca

SEQ ID NO: 1479095 - RNA, 19 nt, Artificial Sequence
  Description of Artificial Sequence: Synthetic oligonucleotide
gcgccggccggcuacgacc

SEQ ID NO: 1479096 - RNA, 19 nt, Artificial Sequence
  Description of Artificial Sequence: Synthetic oligonucleotide
caccagacggacagucaaa

SEQ ID NO: 1479097 - RNA, 19 nt, Artificial Sequence
  Description of Artificial Sequence: Synthetic oligonucleotide
gcgggguuucaucaaucca

SEQ ID NO: 1479098 - RNA, 19 nt, Artificial Sequence
  Description of Artificial Sequence: Synthetic oligonucleotide
caugaccucaagguaccua

SEQ ID NO: 1479099 - RNA, 19 nt, Artificial Sequence
  Description of Artificial Sequence: Synthetic oligonucleotide
cgcggaugcucgcaguucc

SEQ ID NO: 1479100 - RNA, 19 nt, Artificial Sequence
  Description of Artificial Sequence: Synthetic oligonucleotide
guaagcugccccagaugaa

SEQ ID NO: 1479101 - RNA, 19 nt, Artificial Sequence
  Description of Artificial Sequence: Synthetic oligonucleotide
ccgaacuugaagugcugga

SEQ ID NO: 1479102 - RNA, 19 nt, Artificial Sequence
  Description of Artificial Sequence: Synthetic oligonucleotide
gaaggaacauguaguccuu

SEQ ID NO: 1479103 - RNA, 19 nt, Artificial Sequence
  Description of Artificial Sequence: Synthetic oligonucleotide
cucuuagccugaugugacu

SEQ ID NO: 1479104 - RNA, 19 nt, Artificial Sequence
  Description of Artificial Sequence: Synthetic oligonucleotide
accuggucaucuacccgga

SEQ ID NO: 1479105 - RNA, 19 nt, Artificial Sequence
  Description of Artificial Sequence: Synthetic oligonucleotide
gcaccccgaucuugcagag

SEQ ID NO: 1479106 - RNA, 19 nt, Artificial Sequence
  Description of Artificial Sequence: Synthetic oligonucleotide
gaccggaagccgagaauua

SEQ ID NO: 1479107 - RNA, 19 nt, Artificial Sequence
  Description of Artificial Sequence: Synthetic oligonucleotide
cuggaacuguauggaucuc

SEQ ID NO: 1479108 - RNA, 19 nt, Artificial Sequence
  Description of Artificial Sequence: Synthetic oligonucleotide
ccggaagccgagaauuaga

SEQ ID NO: 1479109 - RNA, 19 nt, Artificial Sequence
  Description of Artificial Sequence: Synthetic oligonucleotide
guuuggcauaccagguccu

SEQ ID NO: 1479110 - RNA, 19 nt, Artificial Sequence
  Description of Artificial Sequence: Synthetic oligonucleotide
cgggaaggcuggucuaccg

SEQ ID NO: 1479111 - RNA, 19 nt, Artificial Sequence
  Description of Artificial Sequence: Synthetic oligonucleotide
cagguuccauucuguacgu

SEQ ID NO: 1479112 - RNA, 19 nt, Artificial Sequence
  Description of Artificial Sequence: Synthetic oligonucleotide
gaccccacacgcccuggcu

SEQ ID NO: 1479113 - RNA, 19 nt, Artificial Sequence
  Description of Artificial Sequence: Synthetic oligonucleotide
cagagacuuuguagucgaa

SEQ ID NO: 1479114 - RNA, 19 nt, Artificial Sequence
  Description of Artificial Sequence: Synthetic oligonucleotide
acgcccuggcugcccgcag

SEQ ID NO: 1479115 - RNA, 19 nt, Artificial Sequence
  Description of Artificial Sequence: Synthetic oligonucleotide
ccgaucuugcagagacaac

SEQ ID NO: 1479116 - RNA, 19 nt, Artificial Sequence
  Description of Artificial Sequence: Synthetic oligonucleotide
caccuucauugaggguaag

SEQ ID NO: 1479117 - RNA, 19 nt, Artificial Sequence
  Description of Artificial Sequence: Synthetic oligonucleotide
ggcuacgaccggaagccga

SEQ ID NO: 1479118 - RNA, 19 nt, Artificial Sequence
  Description of Artificial Sequence: Synthetic oligonucleotide
cgagaauuagacccagucu

SEQ ID NO: 1479119 - RNA, 19 nt, Artificial Sequence
  Description of Artificial Sequence: Synthetic oligonucleotide
ggcccugguucacuuuaga

SEQ ID NO: 1479120 - RNA, 19 nt, Artificial Sequence
  Description of Artificial Sequence: Synthetic oligonucleotide
ccugaucaaguuuggcaua

SEQ ID NO: 1479121 - RNA, 19 nt, Artificial Sequence
  Description of Artificial Sequence: Synthetic oligonucleotide
auccaccuauccagcguau

SEQ ID NO: 1479122 - RNA, 19 nt, Artificial Sequence
  Description of Artificial Sequence: Synthetic oligonucleotide
ccaccuauccagcguauua

SEQ ID NO: 1479123 - RNA, 19 nt, Artificial Sequence
  Description of Artificial Sequence: Synthetic oligonucleotide
ggucaucuacccggagcac

SEQ ID NO: 1479124 - RNA, 19 nt, Artificial Sequence
  Description of Artificial Sequence: Synthetic oligonucleotide
ccuggucaucuacccggag

SEQ ID NO: 1479125 - RNA, 19 nt, Artificial Sequence
  Description of Artificial Sequence: Synthetic oligonucleotide
ggguuucaucaauccaccu

SEQ ID NO: 1479126 - RNA, 19 nt, Artificial Sequence
  Description of Artificial Sequence: Synthetic oligonucleotide
gcaaaggggccggucuuca

SEQ ID NO: 1479127 - RNA, 19 nt, Artificial Sequence
  Description of Artificial Sequence: Synthetic oligonucleotide
caaucgccaccuggucauc

SEQ ID NO: 1479128 - RNA, 19 nt, Artificial Sequence
  Description of Artificial Sequence: Synthetic oligonucleotide
ccggcuccacuaagcuucc

SEQ ID NO: 1479129 - RNA, 19 nt, Artificial Sequence
  Description of Artificial Sequence: Synthetic oligonucleotide
ggccggcuacgaccggaag

SEQ ID NO: 1479130 - RNA, 19 nt, Artificial Sequence
  Description of Artificial Sequence: Synthetic oligonucleotide
ggaugaggcccugguucac

SEQ ID NO: 1479131 - RNA, 19 nt, Artificial Sequence
  Description of Artificial Sequence: Synthetic oligonucleotide
gguggucuaugagcuguaa

SEQ ID NO: 1479132 - RNA, 19 nt, Artificial Sequence
  Description of Artificial Sequence: Synthetic oligonucleotide
cuacgaccggaagccgaga

SEQ ID NO: 1479133 - RNA, 19 nt, Artificial Sequence
  Description of Artificial Sequence: Synthetic oligonucleotide
gggaggggugccgggucag

SEQ ID NO: 1479134 - RNA, 19 nt, Artificial Sequence
  Description of Artificial Sequence: Synthetic oligonucleotide
ggacagcacugauguucca

SEQ ID NO: 1479135 - RNA, 19 nt, Artificial Sequence
  Description of Artificial Sequence: Synthetic oligonucleotide
ccgauguagucagcauaug

SEQ ID NO: 1479136 - RNA, 19 nt, Artificial Sequence
  Description of Artificial Sequence: Synthetic oligonucleotide
ccguuaggagccggcgcgg

SEQ ID NO: 1479137 - RNA, 19 nt, Artificial Sequence
  Description of Artificial Sequence: Synthetic oligonucleotide
ccggcgcggaugcucgcag

SEQ ID NO: 1479138 - RNA, 19 nt, Artificial Sequence
  Description of Artificial Sequence: Synthetic oligonucleotide
cacgcccuggcugcccgca

SEQ ID NO: 1479139 - RNA, 19 nt, Artificial Sequence
  Description of Artificial Sequence: Synthetic oligonucleotide
ggccuaggcaggagagaga

SEQ ID NO: 1479140 - RNA, 19 nt, Artificial Sequence
  Description of Artificial Sequence: Synthetic oligonucleotide
caaaggggccggucuucau

SEQ ID NO: 1479141 - RNA, 19 nt, Artificial Sequence
  Description of Artificial Sequence: Synthetic oligonucleotide
ggucuaccggcgggguuuc

SEQ ID NO: 1479142 - RNA, 19 nt, Artificial Sequence
  Description of Artificial Sequence: Synthetic oligonucleotide
cauaugccugagagcgcuu

SEQ ID NO: 1479143 - RNA, 19 nt, Artificial Sequence
  Description of Artificial Sequence: Synthetic oligonucleotide
gcagcaggcucccgaacuu

SEQ ID NO: 1479144 - RNA, 19 nt, Artificial Sequence
  Description of Artificial Sequence: Synthetic oligonucleotide
cuacccggagcaccccgau

SEQ ID NO: 1479145 - RNA, 19 nt, Artificial Sequence
  Description of Artificial Sequence: Synthetic oligonucleotide
cggcgggguuucaucaauc

SEQ ID NO: 1479146 - RNA, 19 nt, Artificial Sequence
  Description of Artificial Sequence: Synthetic oligonucleotide
gugccgggucagagggcac

SEQ ID NO: 1479147 - RNA, 19 nt, Artificial Sequence
  Description of Artificial Sequence: Synthetic oligonucleotide
ggcgcggaugcucgcaguu

SEQ ID NO: 1479148 - RNA, 19 nt, Artificial Sequence
  Description of Artificial Sequence: Synthetic oligonucleotide
gggugccgggucagagggc

SEQ ID NO: 1479149 - RNA, 19 nt, Artificial Sequence
  Description of Artificial Sequence: Synthetic oligonucleotide
ccguuuaccccgcaccuuu

SEQ ID NO: 1479150 - RNA, 19 nt, Artificial Sequence
  Description of Artificial Sequence: Synthetic oligonucleotide
cccgcagguuccauucugu

SEQ ID NO: 1479151 - RNA, 19 nt, Artificial Sequence
  Description of Artificial Sequence: Synthetic oligonucleotide
ccccguuuaccccgcaccu

SEQ ID NO: 1479152 - RNA, 19 nt, Artificial Sequence
  Description of Artificial Sequence: Synthetic oligonucleotide
cuggucuaccggcgggguu

SEQ ID NO: 1479153 - RNA, 19 nt, Artificial Sequence
  Description of Artificial Sequence: Synthetic oligonucleotide
gagcgccggccggcuacga

SEQ ID NO: 1479154 - RNA, 19 nt, Artificial Sequence
  Description of Artificial Sequence: Synthetic oligonucleotide
ggccggucuucaucucagu

SEQ ID NO: 1479155 - RNA, 19 nt, Artificial Sequence
  Description of Artificial Sequence: Synthetic oligonucleotide
gucuaccggcgggguuuca

SEQ ID NO: 1479156 - RNA, 19 nt, Artificial Sequence
  Description of Artificial Sequence: Synthetic oligonucleotide
cgaccggaagccgagaauu

SEQ ID NO: 1479157 - RNA, 19 nt, Artificial Sequence
  Description of Artificial Sequence: Synthetic oligonucleotide
gcuggucuaccggcggggu

SEQ ID NO: 1479158 - RNA, 19 nt, Artificial Sequence
  Description of Artificial Sequence: Synthetic oligonucleotide
cggcuacgaccggaagccg

SEQ ID NO: 1479159 - RNA, 19 nt, Artificial Sequence
  Description of Artificial Sequence: Synthetic oligonucleotide
ggguaaggauaaagccgau

SEQ ID NO: 1479160 - RNA, 19 nt, Artificial Sequence
  Description of Artificial Sequence: Synthetic oligonucleotide
gccgagaauuagacccagu

SEQ ID NO: 1479161 - RNA, 19 nt, Artificial Sequence
  Description of Artificial Sequence: Synthetic oligonucleotide
ccaggcacucagccuuaua

SEQ ID NO: 1479162 - RNA, 19 nt, Artificial Sequence
  Description of Artificial Sequence: Synthetic oligonucleotide
cgcaguucccucuccccgu

SEQ ID NO: 1479163 - RNA, 19 nt, Artificial Sequence
  Description of Artificial Sequence: Synthetic oligonucleotide
cagguccuauaggccuugu

SEQ ID NO: 1479164 - RNA, 19 nt, Artificial Sequence
  Description of Artificial Sequence: Synthetic oligonucleotide
cguuaggagccggcgcgga

SEQ ID NO: 1479165 - RNA, 19 nt, Artificial Sequence
  Description of Artificial Sequence: Synthetic oligonucleotide
ccggcgggguuucaucaau

SEQ ID NO: 1479166 - RNA, 19 nt, Artificial Sequence
  Description of Artificial Sequence: Synthetic oligonucleotide
ccaaaccgggaaggcuggu

SEQ ID NO: 1479167 - RNA, 19 nt, Artificial Sequence
  Description of Artificial Sequence: Synthetic oligonucleotide
gcccugugccauagucaau

SEQ ID NO: 1479168 - RNA, 19 nt, Artificial Sequence
  Description of Artificial Sequence: Synthetic oligonucleotide
cccgcaccuuuccccggcu

SEQ ID NO: 1479169 - RNA, 19 nt, Artificial Sequence
  Description of Artificial Sequence: Synthetic oligonucleotide
cccguuuaccccgcaccuu

SEQ ID NO: 1479170 - RNA, 19 nt, Artificial Sequence
  Description of Artificial Sequence: Synthetic oligonucleotide
cggcgcggaugcucgcagu

SEQ ID NO: 1479171 - RNA, 19 nt, Artificial Sequence
  Description of Artificial Sequence: Synthetic oligonucleotide
aauucuacagcacgguccc

SEQ ID NO: 1479172 - RNA, 19 nt, Artificial Sequence
  Description of Artificial Sequence: Synthetic oligonucleotide
ucuauaaucuucuucacca

SEQ ID NO: 1479173 - RNA, 19 nt, Artificial Sequence
  Description of Artificial Sequence: Synthetic oligonucleotide
uccccuuucaaccagaugc

SEQ ID NO: 1479174 - RNA, 19 nt, Artificial Sequence
  Description of Artificial Sequence: Synthetic oligonucleotide
aagagcaagcccuucuucc

SEQ ID NO: 1479175 - RNA, 19 nt, Artificial Sequence
  Description of Artificial Sequence: Synthetic oligonucleotide
uguccuaucgcucugaguc

SEQ ID NO: 1479176 - RNA, 19 nt, Artificial Sequence
  Description of Artificial Sequence: Synthetic oligonucleotide
uuucucucuaggaagagca

SEQ ID NO: 1479177 - RNA, 19 nt, Artificial Sequence
  Description of Artificial Sequence: Synthetic oligonucleotide
aagaagaugagcacguggg

SEQ ID NO: 1479178 - RNA, 19 nt, Artificial Sequence
  Description of Artificial Sequence: Synthetic oligonucleotide
acgucuauaaucuucuuca

SEQ ID NO: 1479179 - RNA, 19 nt, Artificial Sequence
  Description of Artificial Sequence: Synthetic oligonucleotide
ucugugagaagcacugagg

SEQ ID NO: 1479180 - RNA, 19 nt, Artificial Sequence
  Description of Artificial Sequence: Synthetic oligonucleotide
ucuaacugugugcagggcc

SEQ ID NO: 1479181 - RNA, 19 nt, Artificial Sequence
  Description of Artificial Sequence: Synthetic oligonucleotide
uggauugccacacucaaaa

SEQ ID NO: 1479182 - RNA, 19 nt, Artificial Sequence
  Description of Artificial Sequence: Synthetic oligonucleotide
guugcuaucuaacugugug

SEQ ID NO: 1479183 - RNA, 19 nt, Artificial Sequence
  Description of Artificial Sequence: Synthetic oligonucleotide
uggaccacgucuauaaucu

SEQ ID NO: 1479184 - RNA, 19 nt, Artificial Sequence
  Description of Artificial Sequence: Synthetic oligonucleotide
accggcaacaauuucaugu

SEQ ID NO: 1479185 - RNA, 19 nt, Artificial Sequence
  Description of Artificial Sequence: Synthetic oligonucleotide
acuggcauagaggagggcc

SEQ ID NO: 1479186 - RNA, 19 nt, Artificial Sequence
  Description of Artificial Sequence: Synthetic oligonucleotide
cacacucaaaauuaccugc

SEQ ID NO: 1479187 - RNA, 19 nt, Artificial Sequence
  Description of Artificial Sequence: Synthetic oligonucleotide
uaucuaacugugugcaggg

SEQ ID NO: 1479188 - RNA, 19 nt, Artificial Sequence
  Description of Artificial Sequence: Synthetic oligonucleotide
gaugcccacauccuuauug

SEQ ID NO: 1479189 - RNA, 19 nt, Artificial Sequence
  Description of Artificial Sequence: Synthetic oligonucleotide
gaugacuugcuggagagcc

SEQ ID NO: 1479190 - RNA, 19 nt, Artificial Sequence
  Description of Artificial Sequence: Synthetic oligonucleotide
cucaguauccaggugagcg

SEQ ID NO: 1479191 - RNA, 19 nt, Artificial Sequence
  Description of Artificial Sequence: Synthetic oligonucleotide
cuuauugcugcucaguauc

SEQ ID NO: 1479192 - RNA, 19 nt, Artificial Sequence
  Description of Artificial Sequence: Synthetic oligonucleotide
aaugccguaccccaccugu

SEQ ID NO: 1479193 - RNA, 19 nt, Artificial Sequence
  Description of Artificial Sequence: Synthetic oligonucleotide
gaauucuacagcacggucc

SEQ ID NO: 1479194 - RNA, 19 nt, Artificial Sequence
  Description of Artificial Sequence: Synthetic oligonucleotide
cacauagugguccuggacc

SEQ ID NO: 1479195 - RNA, 19 nt, Artificial Sequence
  Description of Artificial Sequence: Synthetic oligonucleotide
cuucccaucugugagaagc

SEQ ID NO: 1479196 - RNA, 19 nt, Artificial Sequence
  Description of Artificial Sequence: Synthetic oligonucleotide
cuaucuaacugugugcagg

SEQ ID NO: 1479197 - RNA, 19 nt, Artificial Sequence
  Description of Artificial Sequence: Synthetic oligonucleotide
augcccacauccuuauugc

SEQ ID NO: 1479198 - RNA, 19 nt, Artificial Sequence
  Description of Artificial Sequence: Synthetic oligonucleotide
aguaagacuggcauagagg

SEQ ID NO: 1479199 - RNA, 19 nt, Artificial Sequence
  Description of Artificial Sequence: Synthetic oligonucleotide
uccaccggcaacaauuuca

SEQ ID NO: 1479200 - RNA, 19 nt, Artificial Sequence
  Description of Artificial Sequence: Synthetic oligonucleotide
uuagcgauguacuccugag

SEQ ID NO: 1479201 - RNA, 19 nt, Artificial Sequence
  Description of Artificial Sequence: Synthetic oligonucleotide
ucucucacaguccaccggc

SEQ ID NO: 1479202 - RNA, 19 nt, Artificial Sequence
  Description of Artificial Sequence: Synthetic oligonucleotide
uaagaagcccacacguccc

SEQ ID NO: 1479203 - RNA, 19 nt, Artificial Sequence
  Description of Artificial Sequence: Synthetic oligonucleotide
ucuagcuuucgccaucugu

SEQ ID NO: 1479204 - RNA, 19 nt, Artificial Sequence
  Description of Artificial Sequence: Synthetic oligonucleotide
caggaauucuacagcacgg

SEQ ID NO: 1479205 - RNA, 19 nt, Artificial Sequence
  Description of Artificial Sequence: Synthetic oligonucleotide
uuauugcugcucaguaucc

SEQ ID NO: 1479206 - RNA, 19 nt, Artificial Sequence
  Description of Artificial Sequence: Synthetic oligonucleotide
aacaggcccuguccuaucg

SEQ ID NO: 1479207 - RNA, 19 nt, Artificial Sequence
  Description of Artificial Sequence: Synthetic oligonucleotide
ucccaguccacauaguggu

SEQ ID NO: 1479208 - RNA, 19 nt, Artificial Sequence
  Description of Artificial Sequence: Synthetic oligonucleotide
ugcuaucuaacugugugca

SEQ ID NO: 1479209 - RNA, 19 nt, Artificial Sequence
  Description of Artificial Sequence: Synthetic oligonucleotide
ucucgcacgugaaggaugc

SEQ ID NO: 1479210 - RNA, 19 nt, Artificial Sequence
  Description of Artificial Sequence: Synthetic oligonucleotide
uucucucacaguccaccgg

SEQ ID NO: 1479211 - RNA, 19 nt, Artificial Sequence
  Description of Artificial Sequence: Synthetic oligonucleotide
gauucagucuggauccggg

SEQ ID NO: 1479212 - RNA, 19 nt, Artificial Sequence
  Description of Artificial Sequence: Synthetic oligonucleotide
gagcacgugggugacagcg

SEQ ID NO: 1479213 - RNA, 19 nt, Artificial Sequence
  Description of Artificial Sequence: Synthetic oligonucleotide
gugggauucagucuggauc

SEQ ID NO: 1479214 - RNA, 19 nt, Artificial Sequence
  Description of Artificial Sequence: Synthetic oligonucleotide
ucaguauccaggugagcgc

SEQ ID NO: 1479215 - RNA, 19 nt, Artificial Sequence
  Description of Artificial Sequence: Synthetic oligonucleotide
uucgccaucuguacuucag

SEQ ID NO: 1479216 - RNA, 19 nt, Artificial Sequence
  Description of Artificial Sequence: Synthetic oligonucleotide
uaagacuggcauagaggag

SEQ ID NO: 1479217 - RNA, 19 nt, Artificial Sequence
  Description of Artificial Sequence: Synthetic oligonucleotide
uacgccgucggcucugugg

SEQ ID NO: 1479218 - RNA, 19 nt, Artificial Sequence
  Description of Artificial Sequence: Synthetic oligonucleotide
ucaaaauuaccugcuugga

SEQ ID NO: 1479219 - RNA, 19 nt, Artificial Sequence
  Description of Artificial Sequence: Synthetic oligonucleotide
uguccaucuccacaccagc

SEQ ID NO: 1479220 - RNA, 19 nt, Artificial Sequence
  Description of Artificial Sequence: Synthetic oligonucleotide
uccgggauucacuggaagc

SEQ ID NO: 1479221 - RNA, 19 nt, Artificial Sequence
  Description of Artificial Sequence: Synthetic oligonucleotide
uuccuuucugucaguaaga

SEQ ID NO: 1479222 - RNA, 19 nt, Artificial Sequence
  Description of Artificial Sequence: Synthetic oligonucleotide
acacucgcuucauacgccg

SEQ ID NO: 1479223 - RNA, 19 nt, Artificial Sequence
  Description of Artificial Sequence: Synthetic oligonucleotide
gacccuaagaagcccacac

SEQ ID NO: 1479224 - RNA, 19 nt, Artificial Sequence
  Description of Artificial Sequence: Synthetic oligonucleotide
ugccacacucaaaauuacc

SEQ ID NO: 1479225 - RNA, 19 nt, Artificial Sequence
  Description of Artificial Sequence: Synthetic oligonucleotide
caguaagacuggcauagag

SEQ ID NO: 1479226 - RNA, 19 nt, Artificial Sequence
  Description of Artificial Sequence: Synthetic oligonucleotide
cacacggugggauucaguc

SEQ ID NO: 1479227 - RNA, 19 nt, Artificial Sequence
  Description of Artificial Sequence: Synthetic oligonucleotide
uuuagcuucucuggauugc

SEQ ID NO: 1479228 - RNA, 19 nt, Artificial Sequence
  Description of Artificial Sequence: Synthetic oligonucleotide
aggagggcaaucaaggcag

SEQ ID NO: 1479229 - RNA, 19 nt, Artificial Sequence
  Description of Artificial Sequence: Synthetic oligonucleotide
ucacugguugcuaucuaac

SEQ ID NO: 1479230 - RNA, 19 nt, Artificial Sequence
  Description of Artificial Sequence: Synthetic oligonucleotide
ucgccaucuguacuucagg

SEQ ID NO: 1479231 - RNA, 19 nt, Artificial Sequence
  Description of Artificial Sequence: Synthetic oligonucleotide
ccaucuguacuucaggagg

SEQ ID NO: 1479232 - RNA, 19 nt, Artificial Sequence
  Description of Artificial Sequence: Synthetic oligonucleotide
uccuggaccacgucuauaa

SEQ ID NO: 1479233 - RNA, 19 nt, Artificial Sequence
  Description of Artificial Sequence: Synthetic oligonucleotide
uuuucucucuaggaagagc

SEQ ID NO: 1479234 - RNA, 19 nt, Artificial Sequence
  Description of Artificial Sequence: Synthetic oligonucleotide
uggagagccucccucucag

SEQ ID NO: 1479235 - RNA, 19 nt, Artificial Sequence
  Description of Artificial Sequence: Synthetic oligonucleotide
aggaugcccacauaugggu

SEQ ID NO: 1479236 - RNA, 19 nt, Artificial Sequence
  Description of Artificial Sequence: Synthetic oligonucleotide
gguaagacgagcagcagcc

SEQ ID NO: 1479237 - RNA, 19 nt, Artificial Sequence
  Description of Artificial Sequence: Synthetic oligonucleotide
uccuuauugcugcucagua

SEQ ID NO: 1479238 - RNA, 19 nt, Artificial Sequence
  Description of Artificial Sequence: Synthetic oligonucleotide
cacggugggauucagucug

SEQ ID NO: 1479239 - RNA, 19 nt, Artificial Sequence
  Description of Artificial Sequence: Synthetic oligonucleotide
auugccacacucaaaauua

SEQ ID NO: 1479240 - RNA, 19 nt, Artificial Sequence
  Description of Artificial Sequence: Synthetic oligonucleotide
acccuaagaagcccacacg

SEQ ID NO: 1479241 - RNA, 19 nt, Artificial Sequence
  Description of Artificial Sequence: Synthetic oligonucleotide
ucucuaggaagagcaagcc

SEQ ID NO: 1479242 - RNA, 19 nt, Artificial Sequence
  Description of Artificial Sequence: Synthetic oligonucleotide
uucacccagaggaugccca

SEQ ID NO: 1479243 - RNA, 19 nt, Artificial Sequence
  Description of Artificial Sequence: Synthetic oligonucleotide
cacguuagcgauguacucc

SEQ ID NO: 1479244 - RNA, 19 nt, Artificial Sequence
  Description of Artificial Sequence: Synthetic oligonucleotide
gaucaggaggccccacagg

SEQ ID NO: 1479245 - RNA, 19 nt, Artificial Sequence
  Description of Artificial Sequence: Synthetic oligonucleotide
acguuagcgauguacuccu

SEQ ID NO: 1479246 - RNA, 19 nt, Artificial Sequence
  Description of Artificial Sequence: Synthetic oligonucleotide
ugggugacagcggugagca

SEQ ID NO: 1479247 - RNA, 19 nt, Artificial Sequence
  Description of Artificial Sequence: Synthetic oligonucleotide
auauggguagcgcuccaug

SEQ ID NO: 1479248 - RNA, 19 nt, Artificial Sequence
  Description of Artificial Sequence: Synthetic oligonucleotide
ugguugcuaucuaacugug

SEQ ID NO: 1479249 - RNA, 19 nt, Artificial Sequence
  Description of Artificial Sequence: Synthetic oligonucleotide
cucuaggaagagcaagccc

SEQ ID NO: 1479250 - RNA, 19 nt, Artificial Sequence
  Description of Artificial Sequence: Synthetic oligonucleotide
agggcaaucaaggcaggcg

SEQ ID NO: 1479251 - RNA, 19 nt, Artificial Sequence
  Description of Artificial Sequence: Synthetic oligonucleotide
cuggaccacgucuauaauc

SEQ ID NO: 1479252 - RNA, 19 nt, Artificial Sequence
  Description of Artificial Sequence: Synthetic oligonucleotide
acgucccagaacugagacc

SEQ ID NO: 1479253 - RNA, 19 nt, Artificial Sequence
  Description of Artificial Sequence: Synthetic oligonucleotide
acucgcuucauacgccguc

SEQ ID NO: 1479254 - RNA, 19 nt, Artificial Sequence
  Description of Artificial Sequence: Synthetic oligonucleotide
aaccuugccgaggggcugc

SEQ ID NO: 1479255 - RNA, 19 nt, Artificial Sequence
  Description of Artificial Sequence: Synthetic oligonucleotide
ccaggaauucuacagcacg

SEQ ID NO: 1479256 - RNA, 19 nt, Artificial Sequence
  Description of Artificial Sequence: Synthetic oligonucleotide
cagccuacgcccauucggg

SEQ ID NO: 1479257 - RNA, 19 nt, Artificial Sequence
  Description of Artificial Sequence: Synthetic oligonucleotide
ucucccugcgacccuaaga

SEQ ID NO: 1479258 - RNA, 19 nt, Artificial Sequence
  Description of Artificial Sequence: Synthetic oligonucleotide
aacugugugcagggccucc

SEQ ID NO: 1479259 - RNA, 19 nt, Artificial Sequence
  Description of Artificial Sequence: Synthetic oligonucleotide
uaccccaccugugaggaag

SEQ ID NO: 1479260 - RNA, 19 nt, Artificial Sequence
  Description of Artificial Sequence: Synthetic oligonucleotide
agaugggucuuccccuuuc

SEQ ID NO: 1479261 - RNA, 19 nt, Artificial Sequence
  Description of Artificial Sequence: Synthetic oligonucleotide
cuggauccgggauucacug

SEQ ID NO: 1479262 - RNA, 19 nt, Artificial Sequence
  Description of Artificial Sequence: Synthetic oligonucleotide
uagcgauguacuccugagc

SEQ ID NO: 1479263 - RNA, 19 nt, Artificial Sequence
  Description of Artificial Sequence: Synthetic oligonucleotide
ucucagcuaaugaggcccc

SEQ ID NO: 1479264 - RNA, 19 nt, Artificial Sequence
  Description of Artificial Sequence: Synthetic oligonucleotide
cuagcuuucgccaucugua

SEQ ID NO: 1479265 - RNA, 19 nt, Artificial Sequence
  Description of Artificial Sequence: Synthetic oligonucleotide
agcucagaugggucuuccc

SEQ ID NO: 1479266 - RNA, 19 nt, Artificial Sequence
  Description of Artificial Sequence: Synthetic oligonucleotide
ggugaggcccgcuagauga

SEQ ID NO: 1479267 - RNA, 19 nt, Artificial Sequence
  Description of Artificial Sequence: Synthetic oligonucleotide
agagcaagcccuucuuccu

SEQ ID NO: 1479268 - RNA, 19 nt, Artificial Sequence
  Description of Artificial Sequence: Synthetic oligonucleotide
ucuucuagcuuucgccauc

SEQ ID NO: 1479269 - RNA, 19 nt, Artificial Sequence
  Description of Artificial Sequence: Synthetic oligonucleotide
augagcacgugggugacag

SEQ ID NO: 1479270 - RNA, 19 nt, Artificial Sequence
  Description of Artificial Sequence: Synthetic oligonucleotide
ggugucucgcacgugaagg

SEQ ID NO: 1479271 - RNA, 19 nt, Artificial Sequence
  Description of Artificial Sequence: Synthetic oligonucleotide
auagugguccuggaccacg

SEQ ID NO: 1479272 - RNA, 19 nt, Artificial Sequence
  Description of Artificial Sequence: Synthetic oligonucleotide
aucacugguugcuaucuaa

SEQ ID NO: 1479273 - RNA, 19 nt, Artificial Sequence
  Description of Artificial Sequence: Synthetic oligonucleotide
aggcagaccacuuggucca

SEQ ID NO: 1479274 - RNA, 19 nt, Artificial Sequence
  Description of Artificial Sequence: Synthetic oligonucleotide
aacugagaccaggagggca

SEQ ID NO: 1479275 - RNA, 19 nt, Artificial Sequence
  Description of Artificial Sequence: Synthetic oligonucleotide
aaucaaggcaggcgugaau

SEQ ID NO: 1479276 - RNA, 19 nt, Artificial Sequence
  Description of Artificial Sequence: Synthetic oligonucleotide
acgccgucggcucuguggg

SEQ ID NO: 1479277 - RNA, 19 nt, Artificial Sequence
  Description of Artificial Sequence: Synthetic oligonucleotide
ugcgacccuaagaagccca

SEQ ID NO: 1479278 - RNA, 19 nt, Artificial Sequence
  Description of Artificial Sequence: Synthetic oligonucleotide
agccacaaugccguacccc

SEQ ID NO: 1479279 - RNA, 19 nt, Artificial Sequence
  Description of Artificial Sequence: Synthetic oligonucleotide
gugagcgcggccucaaacc

SEQ ID NO: 1479280 - RNA, 19 nt, Artificial Sequence
  Description of Artificial Sequence: Synthetic oligonucleotide
uucggggccgggcagacuc

SEQ ID NO: 1479281 - RNA, 19 nt, Artificial Sequence
  Description of Artificial Sequence: Synthetic oligonucleotide
ugagaagcacugaggcaca

SEQ ID NO: 1479282 - RNA, 19 nt, Artificial Sequence
  Description of Artificial Sequence: Synthetic oligonucleotide
cuucauacgccgucggcuc

SEQ ID NO: 1479283 - RNA, 19 nt, Artificial Sequence
  Description of Artificial Sequence: Synthetic oligonucleotide
caggcggcagccuacgccc

SEQ ID NO: 1479284 - RNA, 19 nt, Artificial Sequence
  Description of Artificial Sequence: Synthetic oligonucleotide
cacaaugccguaccccacc

SEQ ID NO: 1479285 - RNA, 19 nt, Artificial Sequence
  Description of Artificial Sequence: Synthetic oligonucleotide
ucagaucacugguugcuau

SEQ ID NO: 1479286 - RNA, 19 nt, Artificial Sequence
  Description of Artificial Sequence: Synthetic oligonucleotide
agggcuugcccaucuucac

SEQ ID NO: 1479287 - RNA, 19 nt, Artificial Sequence
  Description of Artificial Sequence: Synthetic oligonucleotide
caguauccaggugagcgcg

SEQ ID NO: 1479288 - RNA, 19 nt, Artificial Sequence
  Description of Artificial Sequence: Synthetic oligonucleotide
gaaugagcaccaaaggucu

SEQ ID NO: 1479289 - RNA, 19 nt, Artificial Sequence
  Description of Artificial Sequence: Synthetic oligonucleotide
uugccacacucaaaauuac

SEQ ID NO: 1479290 - RNA, 19 nt, Artificial Sequence
  Description of Artificial Sequence: Synthetic oligonucleotide
cugcacagcaggccaacgg

SEQ ID NO: 1479291 - RNA, 19 nt, Artificial Sequence
  Description of Artificial Sequence: Synthetic oligonucleotide
uccuuucugucaguaagac

SEQ ID NO: 1479292 - RNA, 19 nt, Artificial Sequence
  Description of Artificial Sequence: Synthetic oligonucleotide
ucagucuggauccgggauu

SEQ ID NO: 1479293 - RNA, 19 nt, Artificial Sequence
  Description of Artificial Sequence: Synthetic oligonucleotide
gcagccuacgcccauucgg

SEQ ID NO: 1479294 - RNA, 19 nt, Artificial Sequence
  Description of Artificial Sequence: Synthetic oligonucleotide
augcccagguaagacgagc

SEQ ID NO: 1479295 - RNA, 19 nt, Artificial Sequence
  Description of Artificial Sequence: Synthetic oligonucleotide
caacggcccacacugcucc

SEQ ID NO: 1479296 - RNA, 19 nt, Artificial Sequence
  Description of Artificial Sequence: Synthetic oligonucleotide
guuagcgauguacuccuga

SEQ ID NO: 1479297 - RNA, 19 nt, Artificial Sequence
  Description of Artificial Sequence: Synthetic oligonucleotide
agaucacugguugcuaucu

SEQ ID NO: 1479298 - RNA, 19 nt, Artificial Sequence
  Description of Artificial Sequence: Synthetic oligonucleotide
cacgucccagaacugagac

SEQ ID NO: 1479299 - RNA, 19 nt, Artificial Sequence
  Description of Artificial Sequence: Synthetic oligonucleotide
cacacucgcuucauacgcc

SEQ ID NO: 1479300 - RNA, 19 nt, Artificial Sequence
  Description of Artificial Sequence: Synthetic oligonucleotide
ugcuggucacguuagcgau

SEQ ID NO: 1479301 - RNA, 19 nt, Artificial Sequence
  Description of Artificial Sequence: Synthetic oligonucleotide
ugucaguaagacuggcaua

SEQ ID NO: 1479302 - RNA, 19 nt, Artificial Sequence
  Description of Artificial Sequence: Synthetic oligonucleotide
ucgcuucauacgccgucgg

SEQ ID NO: 1479303 - RNA, 19 nt, Artificial Sequence
  Description of Artificial Sequence: Synthetic oligonucleotide
ucgcacgugaaggaugccc

SEQ ID NO: 1479304 - RNA, 19 nt, Artificial Sequence
  Description of Artificial Sequence: Synthetic oligonucleotide
cugcucccaguccacauag

SEQ ID NO: 1479305 - RNA, 19 nt, Artificial Sequence
  Description of Artificial Sequence: Synthetic oligonucleotide
aucuaacugugugcagggc

SEQ ID NO: 1479306 - RNA, 19 nt, Artificial Sequence
  Description of Artificial Sequence: Synthetic oligonucleotide
ucacguuagcgauguacuc

SEQ ID NO: 1479307 - RNA, 19 nt, Artificial Sequence
  Description of Artificial Sequence: Synthetic oligonucleotide
agaaggaagaaggcuuugu

SEQ ID NO: 1479308 - RNA, 19 nt, Artificial Sequence
  Description of Artificial Sequence: Synthetic oligonucleotide
ggcuugcccaucuucaccc

SEQ ID NO: 1479309 - RNA, 19 nt, Artificial Sequence
  Description of Artificial Sequence: Synthetic oligonucleotide
auccgggauucacuggaag

SEQ ID NO: 1479310 - RNA, 19 nt, Artificial Sequence
  Description of Artificial Sequence: Synthetic oligonucleotide
auucagucuggauccggga

SEQ ID NO: 1479311 - RNA, 19 nt, Artificial Sequence
  Description of Artificial Sequence: Synthetic oligonucleotide
caucuguacuucaggagga

SEQ ID NO: 1479312 - RNA, 19 nt, Artificial Sequence
  Description of Artificial Sequence: Synthetic oligonucleotide
gcgugaaugagcaccaaag

SEQ ID NO: 1479313 - RNA, 19 nt, Artificial Sequence
  Description of Artificial Sequence: Synthetic oligonucleotide
ugccguaccccaccuguga

SEQ ID NO: 1479314 - RNA, 19 nt, Artificial Sequence
  Description of Artificial Sequence: Synthetic oligonucleotide
acacucaaaauuaccugcu

SEQ ID NO: 1479315 - RNA, 19 nt, Artificial Sequence
  Description of Artificial Sequence: Synthetic oligonucleotide
gcggccucaaaccuugccg

SEQ ID NO: 1479316 - RNA, 19 nt, Artificial Sequence
  Description of Artificial Sequence: Synthetic oligonucleotide
cucgcuucauacgccgucg

SEQ ID NO: 1479317 - RNA, 19 nt, Artificial Sequence
  Description of Artificial Sequence: Synthetic oligonucleotide
aggaauucuacagcacggu

SEQ ID NO: 1479318 - RNA, 19 nt, Artificial Sequence
  Description of Artificial Sequence: Synthetic oligonucleotide
ucucacaguccaccggcaa

SEQ ID NO: 1479319 - RNA, 19 nt, Artificial Sequence
  Description of Artificial Sequence: Synthetic oligonucleotide
gcaggcgugaaugagcacc

SEQ ID NO: 1479320 - RNA, 19 nt, Artificial Sequence
  Description of Artificial Sequence: Synthetic oligonucleotide
cugguugcuaucuaacugu

SEQ ID NO: 1479321 - RNA, 19 nt, Artificial Sequence
  Description of Artificial Sequence: Synthetic oligonucleotide
cauagaggagggccucacc

SEQ ID NO: 1479322 - RNA, 19 nt, Artificial Sequence
  Description of Artificial Sequence: Synthetic oligonucleotide
cucccugcgacccuaagaa

SEQ ID NO: 1479323 - RNA, 19 nt, Artificial Sequence
  Description of Artificial Sequence: Synthetic oligonucleotide
ccucaaaccuugccgaggg

SEQ ID NO: 1479324 - RNA, 19 nt, Artificial Sequence
  Description of Artificial Sequence: Synthetic oligonucleotide
ucgcucugagucagagaag

SEQ ID NO: 1479325 - RNA, 19 nt, Artificial Sequence
  Description of Artificial Sequence: Synthetic oligonucleotide
aaugagcaccaaaggucug

SEQ ID NO: 1479326 - RNA, 19 nt, Artificial Sequence
  Description of Artificial Sequence: Synthetic oligonucleotide
uaucgcucugagucagaga

SEQ ID NO: 1479327 - RNA, 19 nt, Artificial Sequence
  Description of Artificial Sequence: Synthetic oligonucleotide
guacuucaggaggaucagg

SEQ ID NO: 1479328 - RNA, 19 nt, Artificial Sequence
  Description of Artificial Sequence: Synthetic oligonucleotide
acaaugccguaccccaccu

SEQ ID NO: 1479329 - RNA, 19 nt, Artificial Sequence
  Description of Artificial Sequence: Synthetic oligonucleotide
cagaccacuugguccacug

SEQ ID NO: 1479330 - RNA, 19 nt, Artificial Sequence
  Description of Artificial Sequence: Synthetic oligonucleotide
uucauacgccgucggcucu

SEQ ID NO: 1479331 - RNA, 19 nt, Artificial Sequence
  Description of Artificial Sequence: Synthetic oligonucleotide
ggaucaggaggccccacag

SEQ ID NO: 1479332 - RNA, 19 nt, Artificial Sequence
  Description of Artificial Sequence: Synthetic oligonucleotide
uauccaggugagcgcggcc

SEQ ID NO: 1479333 - RNA, 19 nt, Artificial Sequence
  Description of Artificial Sequence: Synthetic oligonucleotide
gaugggucuuccccuuuca

SEQ ID NO: 1479334 - RNA, 19 nt, Artificial Sequence
  Description of Artificial Sequence: Synthetic oligonucleotide
uuucgccaucuguacuuca

SEQ ID NO: 1479335 - RNA, 19 nt, Artificial Sequence
  Description of Artificial Sequence: Synthetic oligonucleotide
cgugaaugagcaccaaagg

SEQ ID NO: 1479336 - RNA, 19 nt, Artificial Sequence
  Description of Artificial Sequence: Synthetic oligonucleotide
agccuacgcccauucgggg

SEQ ID NO: 1479337 - RNA, 19 nt, Artificial Sequence
  Description of Artificial Sequence: Synthetic oligonucleotide
ucguacauggccugcucuu

SEQ ID NO: 1479338 - RNA, 19 nt, Artificial Sequence
  Description of Artificial Sequence: Synthetic oligonucleotide
ucugcuuggccuggcagaa

SEQ ID NO: 1479339 - RNA, 19 nt, Artificial Sequence
  Description of Artificial Sequence: Synthetic oligonucleotide
augagcaccaaaggucugu

SEQ ID NO: 1479340 - RNA, 19 nt, Artificial Sequence
  Description of Artificial Sequence: Synthetic oligonucleotide
ccacacucgcuucauacgc

SEQ ID NO: 1479341 - RNA, 19 nt, Artificial Sequence
  Description of Artificial Sequence: Synthetic oligonucleotide
cacuguugucaccagcuca

SEQ ID NO: 1479342 - RNA, 19 nt, Artificial Sequence
  Description of Artificial Sequence: Synthetic oligonucleotide
ggucacguuagcgauguac

SEQ ID NO: 1479343 - RNA, 19 nt, Artificial Sequence
  Description of Artificial Sequence: Synthetic oligonucleotide
caggacaggaaugcauuug

SEQ ID NO: 1479344 - RNA, 19 nt, Artificial Sequence
  Description of Artificial Sequence: Synthetic oligonucleotide
uagugguccuggaccacgu

SEQ ID NO: 1479345 - RNA, 19 nt, Artificial Sequence
  Description of Artificial Sequence: Synthetic oligonucleotide
gacaggaaugcauuugcuu

SEQ ID NO: 1479346 - RNA, 19 nt, Artificial Sequence
  Description of Artificial Sequence: Synthetic oligonucleotide
cuaacugugugcagggccu

SEQ ID NO: 1479347 - RNA, 19 nt, Artificial Sequence
  Description of Artificial Sequence: Synthetic oligonucleotide
cugcuggucacguuagcga

SEQ ID NO: 1479348 - RNA, 19 nt, Artificial Sequence
  Description of Artificial Sequence: Synthetic oligonucleotide
ugcccacauccuuauugcu

SEQ ID NO: 1479349 - RNA, 19 nt, Artificial Sequence
  Description of Artificial Sequence: Synthetic oligonucleotide
ggauccgggauucacugga

SEQ ID NO: 1479350 - RNA, 19 nt, Artificial Sequence
  Description of Artificial Sequence: Synthetic oligonucleotide
ucccgacccaccacccaag

SEQ ID NO: 1479351 - RNA, 19 nt, Artificial Sequence
  Description of Artificial Sequence: Synthetic oligonucleotide
ccgcuagaugacuugcugg

SEQ ID NO: 1479352 - RNA, 19 nt, Artificial Sequence
  Description of Artificial Sequence: Synthetic oligonucleotide
caccucccgacccaccacc

SEQ ID NO: 1479353 - RNA, 19 nt, Artificial Sequence
  Description of Artificial Sequence: Synthetic oligonucleotide
accagaugcccacauccuu

SEQ ID NO: 1479354 - RNA, 19 nt, Artificial Sequence
  Description of Artificial Sequence: Synthetic oligonucleotide
ucaguaagacuggcauaga

SEQ ID NO: 1479355 - RNA, 19 nt, Artificial Sequence
  Description of Artificial Sequence: Synthetic oligonucleotide
cucaaaccuugccgagggg

SEQ ID NO: 1479356 - RNA, 19 nt, Artificial Sequence
  Description of Artificial Sequence: Synthetic oligonucleotide
gcuaucuaacugugugcag

SEQ ID NO: 1479357 - RNA, 19 nt, Artificial Sequence
  Description of Artificial Sequence: Synthetic oligonucleotide
gccacaaugccguacccca

SEQ ID NO: 1479358 - RNA, 19 nt, Artificial Sequence
  Description of Artificial Sequence: Synthetic oligonucleotide
caagccaggggcuucagau

SEQ ID NO: 1479359 - RNA, 19 nt, Artificial Sequence
  Description of Artificial Sequence: Synthetic oligonucleotide
acggucccacacucgcuuc

SEQ ID NO: 1479360 - RNA, 19 nt, Artificial Sequence
  Description of Artificial Sequence: Synthetic oligonucleotide
uggaccccaccucccgacc

SEQ ID NO: 1479361 - RNA, 19 nt, Artificial Sequence
  Description of Artificial Sequence: Synthetic oligonucleotide
uggccuggcagaacucauc

SEQ ID NO: 1479362 - RNA, 19 nt, Artificial Sequence
  Description of Artificial Sequence: Synthetic oligonucleotide
ucauacgccgucggcucug

SEQ ID NO: 1479363 - RNA, 19 nt, Artificial Sequence
  Description of Artificial Sequence: Synthetic oligonucleotide
aagcacugaggcacaggca

SEQ ID NO: 1479364 - RNA, 19 nt, Artificial Sequence
  Description of Artificial Sequence: Synthetic oligonucleotide
gucacguuagcgauguacu

SEQ ID NO: 1479365 - RNA, 19 nt, Artificial Sequence
  Description of Artificial Sequence: Synthetic oligonucleotide
agaccacuugguccacugu

SEQ ID NO: 1479366 - RNA, 19 nt, Artificial Sequence
  Description of Artificial Sequence: Synthetic oligonucleotide
gucucgcacgugaaggaug

SEQ ID NO: 1479367 - RNA, 19 nt, Artificial Sequence
  Description of Artificial Sequence: Synthetic oligonucleotide
aggcaggcgugaaugagca

SEQ ID NO: 1479368 - RNA, 19 nt, Artificial Sequence
  Description of Artificial Sequence: Synthetic oligonucleotide
ugucucgcacgugaaggau

SEQ ID NO: 1479369 - RNA, 19 nt, Artificial Sequence
  Description of Artificial Sequence: Synthetic oligonucleotide
cuggaccccaccucccgac

SEQ ID NO: 1479370 - RNA, 19 nt, Artificial Sequence
  Description of Artificial Sequence: Synthetic oligonucleotide
guauccaggugagcgcggc

SEQ ID NO: 1479371 - RNA, 19 nt, Artificial Sequence
  Description of Artificial Sequence: Synthetic oligonucleotide
uggaacaggcccuguccua

SEQ ID NO: 1479372 - RNA, 19 nt, Artificial Sequence
  Description of Artificial Sequence: Synthetic oligonucleotide
cugcacuucccaucuguga

SEQ ID NO: 1479373 - RNA, 19 nt, Artificial Sequence
  Description of Artificial Sequence: Synthetic oligonucleotide
cagucuggauccgggauuc

SEQ ID NO: 1479374 - RNA, 19 nt, Artificial Sequence
  Description of Artificial Sequence: Synthetic oligonucleotide
ccgggauucacuggaagcc

SEQ ID NO: 1479375 - RNA, 19 nt, Artificial Sequence
  Description of Artificial Sequence: Synthetic oligonucleotide
caggcccuccacugcacag

SEQ ID NO: 1479376 - RNA, 19 nt, Artificial Sequence
  Description of Artificial Sequence: Synthetic oligonucleotide
guaagacgagcagcagccc

SEQ ID NO: 1479377 - RNA, 19 nt, Artificial Sequence
  Description of Artificial Sequence: Synthetic oligonucleotide
ggauucagucuggauccgg

SEQ ID NO: 1479378 - RNA, 19 nt, Artificial Sequence
  Description of Artificial Sequence: Synthetic oligonucleotide
gcaccagaagaagaugagc

SEQ ID NO: 1479379 - RNA, 19 nt, Artificial Sequence
  Description of Artificial Sequence: Synthetic oligonucleotide
ggugagcgcggccucaaac

SEQ ID NO: 1479380 - RNA, 19 nt, Artificial Sequence
  Description of Artificial Sequence: Synthetic oligonucleotide
caggcgugaaugagcacca

SEQ ID NO: 1479381 - RNA, 19 nt, Artificial Sequence
  Description of Artificial Sequence: Synthetic oligonucleotide
cuugccccagcugcguggc

SEQ ID NO: 1479382 - RNA, 19 nt, Artificial Sequence
  Description of Artificial Sequence: Synthetic oligonucleotide
ccccuuucaaccagaugcc

SEQ ID NO: 1479383 - RNA, 19 nt, Artificial Sequence
  Description of Artificial Sequence: Synthetic oligonucleotide
agcgcggccucaaaccuug

SEQ ID NO: 1479384 - RNA, 19 nt, Artificial Sequence
  Description of Artificial Sequence: Synthetic oligonucleotide
ccuaagaagcccacacguc

SEQ ID NO: 1479385 - RNA, 19 nt, Artificial Sequence
  Description of Artificial Sequence: Synthetic oligonucleotide
cucagaugggucuuccccu

SEQ ID NO: 1479386 - RNA, 19 nt, Artificial Sequence
  Description of Artificial Sequence: Synthetic oligonucleotide
caguccaccggcaacaauu

SEQ ID NO: 1479387 - RNA, 19 nt, Artificial Sequence
  Description of Artificial Sequence: Synthetic oligonucleotide
ccuacgcccauucggggcc

SEQ ID NO: 1479388 - RNA, 19 nt, Artificial Sequence
  Description of Artificial Sequence: Synthetic oligonucleotide
cuuucgccaucuguacuuc

SEQ ID NO: 1479389 - RNA, 19 nt, Artificial Sequence
  Description of Artificial Sequence: Synthetic oligonucleotide
aucucguacauggccugcu

SEQ ID NO: 1479390 - RNA, 19 nt, Artificial Sequence
  Description of Artificial Sequence: Synthetic oligonucleotide
gaucacugguugcuaucua

SEQ ID NO: 1479391 - RNA, 19 nt, Artificial Sequence
  Description of Artificial Sequence: Synthetic oligonucleotide
gggauucacuggaagccag

SEQ ID NO: 1479392 - RNA, 19 nt, Artificial Sequence
  Description of Artificial Sequence: Synthetic oligonucleotide
ugaggcccgcuagaugacu

SEQ ID NO: 1479393 - RNA, 19 nt, Artificial Sequence
  Description of Artificial Sequence: Synthetic oligonucleotide
aacggcccacacugcucca

SEQ ID NO: 1479394 - RNA, 19 nt, Artificial Sequence
  Description of Artificial Sequence: Synthetic oligonucleotide
uugccgaggggcugcuggu

SEQ ID NO: 1479395 - RNA, 19 nt, Artificial Sequence
  Description of Artificial Sequence: Synthetic oligonucleotide
cuucagaucacugguugcu

SEQ ID NO: 1479396 - RNA, 19 nt, Artificial Sequence
  Description of Artificial Sequence: Synthetic oligonucleotide
gucuggauccgggauucac

SEQ ID NO: 1479397 - RNA, 19 nt, Artificial Sequence
  Description of Artificial Sequence: Synthetic oligonucleotide
accucccgacccaccaccc

SEQ ID NO: 1479398 - RNA, 19 nt, Artificial Sequence
  Description of Artificial Sequence: Synthetic oligonucleotide
cugugugcagggccuccag

SEQ ID NO: 1479399 - RNA, 19 nt, Artificial Sequence
  Description of Artificial Sequence: Synthetic oligonucleotide
ugagcacgugggugacagc

SEQ ID NO: 1479400 - RNA, 19 nt, Artificial Sequence
  Description of Artificial Sequence: Synthetic oligonucleotide
gcuagaugacuugcuggag

SEQ ID NO: 1479401 - RNA, 19 nt, Artificial Sequence
  Description of Artificial Sequence: Synthetic oligonucleotide
ccuuucaaccagaugccca

SEQ ID NO: 1479402 - RNA, 19 nt, Artificial Sequence
  Description of Artificial Sequence: Synthetic oligonucleotide
ugcucccaguccacauagu

SEQ ID NO: 1479403 - RNA, 19 nt, Artificial Sequence
  Description of Artificial Sequence: Synthetic oligonucleotide
ccaucuccacaccagcaug

SEQ ID NO: 1479404 - RNA, 19 nt, Artificial Sequence
  Description of Artificial Sequence: Synthetic oligonucleotide
cacugguugcuaucuaacu

SEQ ID NO: 1479405 - RNA, 19 nt, Artificial Sequence
  Description of Artificial Sequence: Synthetic oligonucleotide
gcccacauccuuauugcug

SEQ ID NO: 1479406 - RNA, 19 nt, Artificial Sequence
  Description of Artificial Sequence: Synthetic oligonucleotide
ggcaacaauuucauguugu

SEQ ID NO: 1479407 - RNA, 19 nt, Artificial Sequence
  Description of Artificial Sequence: Synthetic oligonucleotide
gccacacucaaaauuaccu

SEQ ID NO: 1479408 - RNA, 19 nt, Artificial Sequence
  Description of Artificial Sequence: Synthetic oligonucleotide
agacuccaggcagaccacu

SEQ ID NO: 1479409 - RNA, 19 nt, Artificial Sequence
  Description of Artificial Sequence: Synthetic oligonucleotide
ggccucaaaccuugccgag

SEQ ID NO: 1479410 - RNA, 19 nt, Artificial Sequence
  Description of Artificial Sequence: Synthetic oligonucleotide
gccuacgcccauucggggc

SEQ ID NO: 1479411 - RNA, 19 nt, Artificial Sequence
  Description of Artificial Sequence: Synthetic oligonucleotide
acuggguguuuuggagcag

SEQ ID NO: 1479412 - RNA, 19 nt, Artificial Sequence
  Description of Artificial Sequence: Synthetic oligonucleotide
ccucucagcuaaugaggcc

SEQ ID NO: 1479413 - RNA, 19 nt, Artificial Sequence
  Description of Artificial Sequence: Synthetic oligonucleotide
ggcuggaccccaccucccg

SEQ ID NO: 1479414 - RNA, 19 nt, Artificial Sequence
  Description of Artificial Sequence: Synthetic oligonucleotide
caaugccguaccccaccug

SEQ ID NO: 1479415 - RNA, 19 nt, Artificial Sequence
  Description of Artificial Sequence: Synthetic oligonucleotide
cuggauugccacacucaaa

SEQ ID NO: 1479416 - RNA, 19 nt, Artificial Sequence
  Description of Artificial Sequence: Synthetic oligonucleotide
aucuguacuucaggaggau

SEQ ID NO: 1479417 - RNA, 19 nt, Artificial Sequence
  Description of Artificial Sequence: Synthetic oligonucleotide
cacccgcucucccugcgac

SEQ ID NO: 1479418 - RNA, 19 nt, Artificial Sequence
  Description of Artificial Sequence: Synthetic oligonucleotide
gcccacacgucccagaacu

SEQ ID NO: 1479419 - RNA, 19 nt, Artificial Sequence
  Description of Artificial Sequence: Synthetic oligonucleotide
uaacugugugcagggccuc

SEQ ID NO: 1479420 - RNA, 19 nt, Artificial Sequence
  Description of Artificial Sequence: Synthetic oligonucleotide
ccagaggaugcccagguaa

SEQ ID NO: 1479421 - RNA, 19 nt, Artificial Sequence
  Description of Artificial Sequence: Synthetic oligonucleotide
ugagaccaggagggcaauc

SEQ ID NO: 1479422 - RNA, 19 nt, Artificial Sequence
  Description of Artificial Sequence: Synthetic oligonucleotide
gucaccagcucagaugggu

SEQ ID NO: 1479423 - RNA, 19 nt, Artificial Sequence
  Description of Artificial Sequence: Synthetic oligonucleotide
ccacauagugguccuggac

SEQ ID NO: 1479424 - RNA, 19 nt, Artificial Sequence
  Description of Artificial Sequence: Synthetic oligonucleotide
gggcaaucaaggcaggcgu

SEQ ID NO: 1479425 - RNA, 19 nt, Artificial Sequence
  Description of Artificial Sequence: Synthetic oligonucleotide
cugcgacccuaagaagccc

SEQ ID NO: 1479426 - RNA, 19 nt, Artificial Sequence
  Description of Artificial Sequence: Synthetic oligonucleotide
ggcagccuacgcccauucg

SEQ ID NO: 1479427 - RNA, 19 nt, Artificial Sequence
  Description of Artificial Sequence: Synthetic oligonucleotide
cccgcuagaugacuugcug

SEQ ID NO: 1479428 - RNA, 19 nt, Artificial Sequence
  Description of Artificial Sequence: Synthetic oligonucleotide
acggugggauucagucugg

SEQ ID NO: 1479429 - RNA, 19 nt, Artificial Sequence
  Description of Artificial Sequence: Synthetic oligonucleotide
ugagggugucucgcacgug

SEQ ID NO: 1479430 - RNA, 19 nt, Artificial Sequence
  Description of Artificial Sequence: Synthetic oligonucleotide
acacgucccagaacugaga

SEQ ID NO: 1479431 - RNA, 19 nt, Artificial Sequence
  Description of Artificial Sequence: Synthetic oligonucleotide
ucggggccgggcagacucc

SEQ ID NO: 1479432 - RNA, 19 nt, Artificial Sequence
  Description of Artificial Sequence: Synthetic oligonucleotide
caccggcaacaauuucaug

SEQ ID NO: 1479433 - RNA, 19 nt, Artificial Sequence
  Description of Artificial Sequence: Synthetic oligonucleotide
gccguaccccaccugugag

SEQ ID NO: 1479434 - RNA, 19 nt, Artificial Sequence
  Description of Artificial Sequence: Synthetic oligonucleotide
gacuggcauagaggagggc

SEQ ID NO: 1479435 - RNA, 19 nt, Artificial Sequence
  Description of Artificial Sequence: Synthetic oligonucleotide
ggcaaucaaggcaggcgug

SEQ ID NO: 1479436 - RNA, 19 nt, Artificial Sequence
  Description of Artificial Sequence: Synthetic oligonucleotide
ccaggguuccaaccacugc

SEQ ID NO: 1479437 - RNA, 19 nt, Artificial Sequence
  Description of Artificial Sequence: Synthetic oligonucleotide
ggcgccgagggcuugccca

SEQ ID NO: 1479438 - RNA, 19 nt, Artificial Sequence
  Description of Artificial Sequence: Synthetic oligonucleotide
ggaccccaccucccgaccc

SEQ ID NO: 1479439 - RNA, 19 nt, Artificial Sequence
  Description of Artificial Sequence: Synthetic oligonucleotide
cucaggcggcagccuacgc

SEQ ID NO: 1479440 - RNA, 19 nt, Artificial Sequence
  Description of Artificial Sequence: Synthetic oligonucleotide
ccguaccccaccugugagg

SEQ ID NO: 1479441 - RNA, 19 nt, Artificial Sequence
  Description of Artificial Sequence: Synthetic oligonucleotide
cuggaacaggcccuguccu

SEQ ID NO: 1479442 - RNA, 19 nt, Artificial Sequence
  Description of Artificial Sequence: Synthetic oligonucleotide
ggcgugaaugagcaccaaa

SEQ ID NO: 1479443 - RNA, 19 nt, Artificial Sequence
  Description of Artificial Sequence: Synthetic oligonucleotide
uccaaccacugccccuguu

SEQ ID NO: 1479444 - RNA, 19 nt, Artificial Sequence
  Description of Artificial Sequence: Synthetic oligonucleotide
cucucccugcgacccuaag

SEQ ID NO: 1479445 - RNA, 19 nt, Artificial Sequence
  Description of Artificial Sequence: Synthetic oligonucleotide
cacgugaaggaugcccaca

SEQ ID NO: 1479446 - RNA, 19 nt, Artificial Sequence
  Description of Artificial Sequence: Synthetic oligonucleotide
cuggucacguuagcgaugu

SEQ ID NO: 1479447 - RNA, 19 nt, Artificial Sequence
  Description of Artificial Sequence: Synthetic oligonucleotide
gcacuucccaucugugaga

SEQ ID NO: 1479448 - RNA, 19 nt, Artificial Sequence
  Description of Artificial Sequence: Synthetic oligonucleotide
cgacccaccacccaagcca

SEQ ID NO: 1479449 - RNA, 19 nt, Artificial Sequence
  Description of Artificial Sequence: Synthetic oligonucleotide
cacccuggcucagggcugc

SEQ ID NO: 1479450 - RNA, 19 nt, Artificial Sequence
  Description of Artificial Sequence: Synthetic oligonucleotide
cuacgcccauucggggccg

SEQ ID NO: 1479451 - RNA, 19 nt, Artificial Sequence
  Description of Artificial Sequence: Synthetic oligonucleotide
gauccgggauucacuggaa

SEQ ID NO: 1479452 - RNA, 19 nt, Artificial Sequence
  Description of Artificial Sequence: Synthetic oligonucleotide
cccuaagaagcccacacgu

SEQ ID NO: 1479453 - RNA, 19 nt, Artificial Sequence
  Description of Artificial Sequence: Synthetic oligonucleotide
ccuguccuaucgcucugag

SEQ ID NO: 1479454 - RNA, 19 nt, Artificial Sequence
  Description of Artificial Sequence: Synthetic oligonucleotide
cccuuucaaccagaugccc

SEQ ID NO: 1479455 - RNA, 19 nt, Artificial Sequence
  Description of Artificial Sequence: Synthetic oligonucleotide
cagcggugagcagggcccg

SEQ ID NO: 1479456 - RNA, 19 nt, Artificial Sequence
  Description of Artificial Sequence: Synthetic oligonucleotide
ggagagccucccucucagc

SEQ ID NO: 1479457 - RNA, 19 nt, Artificial Sequence
  Description of Artificial Sequence: Synthetic oligonucleotide
augccguaccccaccugug

SEQ ID NO: 1479458 - RNA, 19 nt, Artificial Sequence
  Description of Artificial Sequence: Synthetic oligonucleotide
ggcccgcuagaugacuugc

SEQ ID NO: 1479459 - RNA, 19 nt, Artificial Sequence
  Description of Artificial Sequence: Synthetic oligonucleotide
ccagaugcccacauccuua

SEQ ID NO: 1479460 - RNA, 19 nt, Artificial Sequence
  Description of Artificial Sequence: Synthetic oligonucleotide
gcacgugaaggaugcccac

SEQ ID NO: 1479461 - RNA, 19 nt, Artificial Sequence
  Description of Artificial Sequence: Synthetic oligonucleotide
gcuggucacguuagcgaug

SEQ ID NO: 1479462 - RNA, 19 nt, Artificial Sequence
  Description of Artificial Sequence: Synthetic oligonucleotide
agcggugagcagggcccgg

SEQ ID NO: 1479463 - RNA, 19 nt, Artificial Sequence
  Description of Artificial Sequence: Synthetic oligonucleotide
auacgccgucggcucugug

SEQ ID NO: 1479464 - RNA, 19 nt, Artificial Sequence
  Description of Artificial Sequence: Synthetic oligonucleotide
caccaaaggucugugcccu

SEQ ID NO: 1479465 - RNA, 19 nt, Artificial Sequence
  Description of Artificial Sequence: Synthetic oligonucleotide
gcucaggcggcagccuacg

SEQ ID NO: 1479466 - RNA, 19 nt, Artificial Sequence
  Description of Artificial Sequence: Synthetic oligonucleotide
gcccacauauggguagcgc

SEQ ID NO: 1479467 - RNA, 19 nt, Artificial Sequence
  Description of Artificial Sequence: Synthetic oligonucleotide
caggcccuguccuaucgcu

SEQ ID NO: 1479468 - RNA, 19 nt, Artificial Sequence
  Description of Artificial Sequence: Synthetic oligonucleotide
gugaggcccgcuagaugac

SEQ ID NO: 1479469 - RNA, 19 nt, Artificial Sequence
  Description of Artificial Sequence: Synthetic oligonucleotide
cagaugcccacauccuuau

SEQ ID NO: 1479470 - RNA, 19 nt, Artificial Sequence
  Description of Artificial Sequence: Synthetic oligonucleotide
cucgcacgugaaggaugcc

SEQ ID NO: 1479471 - RNA, 19 nt, Artificial Sequence
  Description of Artificial Sequence: Synthetic oligonucleotide
ugccgaggggcugcugguc

SEQ ID NO: 1479472 - RNA, 19 nt, Artificial Sequence
  Description of Artificial Sequence: Synthetic oligonucleotide
cagcaggccaacggcccac

SEQ ID NO: 1479473 - RNA, 19 nt, Artificial Sequence
  Description of Artificial Sequence: Synthetic oligonucleotide
cuggcagaacucaucuguu

SEQ ID NO: 1479474 - RNA, 19 nt, Artificial Sequence
  Description of Artificial Sequence: Synthetic oligonucleotide
gggcugcuggucacguuag

SEQ ID NO: 1479475 - RNA, 19 nt, Artificial Sequence
  Description of Artificial Sequence: Synthetic oligonucleotide
ggcugcuggucacguuagc

SEQ ID NO: 1479476 - RNA, 19 nt, Artificial Sequence
  Description of Artificial Sequence: Synthetic oligonucleotide
cgcacgugaaggaugccca

SEQ ID NO: 1479477 - RNA, 19 nt, Artificial Sequence
  Description of Artificial Sequence: Synthetic oligonucleotide
ggcccuguccuaucgcucu

SEQ ID NO: 1479478 - RNA, 19 nt, Artificial Sequence
  Description of Artificial Sequence: Synthetic oligonucleotide
aggugagcgcggccucaaa

SEQ ID NO: 1479479 - RNA, 19 nt, Artificial Sequence
  Description of Artificial Sequence: Synthetic oligonucleotide
cuuccccuuucaaccagau

SEQ ID NO: 1479480 - RNA, 19 nt, Artificial Sequence
  Description of Artificial Sequence: Synthetic oligonucleotide
cuguccuaucgcucugagu

SEQ ID NO: 1479481 - RNA, 19 nt, Artificial Sequence
  Description of Artificial Sequence: Synthetic oligonucleotide
cgccaucuguacuucagga

SEQ ID NO: 1479482 - RNA, 19 nt, Artificial Sequence
  Description of Artificial Sequence: Synthetic oligonucleotide
gccgaggggcugcugguca

SEQ ID NO: 1479483 - RNA, 19 nt, Artificial Sequence
  Description of Artificial Sequence: Synthetic oligonucleotide
caggccaacggcccacacu

SEQ ID NO: 1479484 - RNA, 19 nt, Artificial Sequence
  Description of Artificial Sequence: Synthetic oligonucleotide
cccauucggggccgggcag

SEQ ID NO: 1479485 - RNA, 19 nt, Artificial Sequence
  Description of Artificial Sequence: Synthetic oligonucleotide
gcucaguauccaggugagc

SEQ ID NO: 1479486 - RNA, 19 nt, Artificial Sequence
  Description of Artificial Sequence: Synthetic oligonucleotide
ggugggauucagucuggau

SEQ ID NO: 1479487 - RNA, 19 nt, Artificial Sequence
  Description of Artificial Sequence: Synthetic oligonucleotide
ggauugccacacucaaaau

SEQ ID NO: 1479488 - RNA, 19 nt, Artificial Sequence
  Description of Artificial Sequence: Synthetic oligonucleotide
cgcuucauacgccgucggc

SEQ ID NO: 1479489 - RNA, 19 nt, Artificial Sequence
  Description of Artificial Sequence: Synthetic oligonucleotide
cccacacgucccagaacug

SEQ ID NO: 1479490 - RNA, 19 nt, Artificial Sequence
  Description of Artificial Sequence: Synthetic oligonucleotide
cacggucccacacucgcuu

SEQ ID NO: 1479491 - RNA, 19 nt, Artificial Sequence
  Description of Artificial Sequence: Synthetic oligonucleotide
ggaggaucaggaggcccca

SEQ ID NO: 1479492 - RNA, 19 nt, Artificial Sequence
  Description of Artificial Sequence: Synthetic oligonucleotide
acggcccacacugcuccau

SEQ ID NO: 1479493 - RNA, 19 nt, Artificial Sequence
  Description of Artificial Sequence: Synthetic oligonucleotide
gcuggaccccaccucccga

SEQ ID NO: 1479494 - RNA, 19 nt, Artificial Sequence
  Description of Artificial Sequence: Synthetic oligonucleotide
uggucacguuagcgaugua

SEQ ID NO: 1479495 - RNA, 19 nt, Artificial Sequence
  Description of Artificial Sequence: Synthetic oligonucleotide
ggacaggaaugcauuugcu

SEQ ID NO: 1479496 - RNA, 19 nt, Artificial Sequence
  Description of Artificial Sequence: Synthetic oligonucleotide
gccaacggcccacacugcu

SEQ ID NO: 1479497 - RNA, 19 nt, Artificial Sequence
  Description of Artificial Sequence: Synthetic oligonucleotide
ggcagacuccaggcagacc

SEQ ID NO: 1479498 - RNA, 19 nt, Artificial Sequence
  Description of Artificial Sequence: Synthetic oligonucleotide
ccacacgucccagaacuga

SEQ ID NO: 1479499 - RNA, 19 nt, Artificial Sequence
  Description of Artificial Sequence: Synthetic oligonucleotide
gguugcuaucuaacugugu

SEQ ID NO: 1479500 - RNA, 19 nt, Artificial Sequence
  Description of Artificial Sequence: Synthetic oligonucleotide
cggccucaaaccuugccga

SEQ ID NO: 1479501 - RNA, 19 nt, Artificial Sequence
  Description of Artificial Sequence: Synthetic oligonucleotide
ggcaggcgugaaugagcac

SEQ ID NO: 1479502 - RNA, 19 nt, Artificial Sequence
  Description of Artificial Sequence: Synthetic oligonucleotide
cguaccccaccugugagga

SEQ ID NO: 1479503 - RNA, 19 nt, Artificial Sequence
  Description of Artificial Sequence: Synthetic oligonucleotide
cauauggguagcgcuccau

SEQ ID NO: 1479504 - RNA, 19 nt, Artificial Sequence
  Description of Artificial Sequence: Synthetic oligonucleotide
guaccccaccugugaggaa

SEQ ID NO: 1479505 - RNA, 19 nt, Artificial Sequence
  Description of Artificial Sequence: Synthetic oligonucleotide
gcgacccuaagaagcccac

SEQ ID NO: 1479506 - RNA, 19 nt, Artificial Sequence
  Description of Artificial Sequence: Synthetic oligonucleotide
gcccuguccuaucgcucug

SEQ ID NO: 1479507 - RNA, 19 nt, Artificial Sequence
  Description of Artificial Sequence: Synthetic oligonucleotide
cacaguccaccggcaacaa

SEQ ID NO: 1479508 - RNA, 19 nt, Artificial Sequence
  Description of Artificial Sequence: Synthetic oligonucleotide
cgcggccucaaaccuugcc

SEQ ID NO: 1479509 - RNA, 19 nt, Artificial Sequence
  Description of Artificial Sequence: Synthetic oligonucleotide
cacucgcuucauacgccgu

SEQ ID NO: 1479510 - RNA, 19 nt, Artificial Sequence
  Description of Artificial Sequence: Synthetic oligonucleotide
ccggcaacaauuucauguu

SEQ ID NO: 1479511 - RNA, 19 nt, Artificial Sequence
  Description of Artificial Sequence: Synthetic oligonucleotide
ccgaggggcugcuggucac

SEQ ID NO: 1479512 - RNA, 19 nt, Artificial Sequence
  Description of Artificial Sequence: Synthetic oligonucleotide
gcaggccaacggcccacac

SEQ ID NO: 1479513 - RNA, 19 nt, Artificial Sequence
  Description of Artificial Sequence: Synthetic oligonucleotide
ccaccggcaacaauuucau

SEQ ID NO: 1479514 - RNA, 19 nt, Artificial Sequence
  Description of Artificial Sequence: Synthetic oligonucleotide
cguuagcgauguacuccug

SEQ ID NO: 1479515 - RNA, 19 nt, Artificial Sequence
  Description of Artificial Sequence: Synthetic oligonucleotide
ccagcucagaugggucuuc

SEQ ID NO: 1479516 - RNA, 19 nt, Artificial Sequence
  Description of Artificial Sequence: Synthetic oligonucleotide
ccaaccacugccccuguuu

SEQ ID NO: 1479517 - RNA, 19 nt, Artificial Sequence
  Description of Artificial Sequence: Synthetic oligonucleotide
caggugagcgcggccucaa

SEQ ID NO: 1479518 - RNA, 19 nt, Artificial Sequence
  Description of Artificial Sequence: Synthetic oligonucleotide
cccuugccccagcugcgug

SEQ ID NO: 1479519 - RNA, 19 nt, Artificial Sequence
  Description of Artificial Sequence: Synthetic oligonucleotide
cgggauucacuggaagcca

SEQ ID NO: 1479520 - RNA, 19 nt, Artificial Sequence
  Description of Artificial Sequence: Synthetic oligonucleotide
ccgccacacggugggauuc

SEQ ID NO: 1479521 - RNA, 19 nt, Artificial Sequence
  Description of Artificial Sequence: Synthetic oligonucleotide
gccgagggcuugcccaucu

SEQ ID NO: 1479522 - RNA, 19 nt, Artificial Sequence
  Description of Artificial Sequence: Synthetic oligonucleotide
ccugagccuccaggacagg

SEQ ID NO: 1479523 - RNA, 19 nt, Artificial Sequence
  Description of Artificial Sequence: Synthetic oligonucleotide
gagcgcggccucaaaccuu

SEQ ID NO: 1479524 - RNA, 19 nt, Artificial Sequence
  Description of Artificial Sequence: Synthetic oligonucleotide
ggaccacgucuauaaucuu

SEQ ID NO: 1479525 - RNA, 19 nt, Artificial Sequence
  Description of Artificial Sequence: Synthetic oligonucleotide
cagaugggucuuccccuuu

SEQ ID NO: 1479526 - RNA, 19 nt, Artificial Sequence
  Description of Artificial Sequence: Synthetic oligonucleotide
cauacgccgucggcucugu

SEQ ID NO: 1479527 - RNA, 19 nt, Artificial Sequence
  Description of Artificial Sequence: Synthetic oligonucleotide
ccauucggggccgggcaga

SEQ ID NO: 1479528 - RNA, 19 nt, Artificial Sequence
  Description of Artificial Sequence: Synthetic oligonucleotide
cugagaccaggagggcaau

SEQ ID NO: 1479529 - RNA, 19 nt, Artificial Sequence
  Description of Artificial Sequence: Synthetic oligonucleotide
cugcggcgccgagggcuug

SEQ ID NO: 1479530 - RNA, 19 nt, Artificial Sequence
  Description of Artificial Sequence: Synthetic oligonucleotide
cgccgucggcucugugggg

SEQ ID NO: 1479531 - RNA, 19 nt, Artificial Sequence
  Description of Artificial Sequence: Synthetic oligonucleotide
cgugaaggaugcccacaua

SEQ ID NO: 1479532 - RNA, 19 nt, Artificial Sequence
  Description of Artificial Sequence: Synthetic oligonucleotide
gcggcgccgagggcuugcc

SEQ ID NO: 1479533 - RNA, 19 nt, Artificial Sequence
  Description of Artificial Sequence: Synthetic oligonucleotide
gcccgcuagaugacuugcu

SEQ ID NO: 1479534 - RNA, 19 nt, Artificial Sequence
  Description of Artificial Sequence: Synthetic oligonucleotide
gcagaccacuugguccacu

SEQ ID NO: 1479535 - RNA, 19 nt, Artificial Sequence
  Description of Artificial Sequence: Synthetic oligonucleotide
ccuggaccacgucuauaau

SEQ ID NO: 1479536 - RNA, 19 nt, Artificial Sequence
  Description of Artificial Sequence: Synthetic oligonucleotide
cgacccuaagaagcccaca

SEQ ID NO: 1479537 - RNA, 19 nt, Artificial Sequence
  Description of Artificial Sequence: Synthetic oligonucleotide
ccuugccgaggggcugcug

SEQ ID NO: 1479538 - RNA, 19 nt, Artificial Sequence
  Description of Artificial Sequence: Synthetic oligonucleotide
ggcggcagccuacgcccau

SEQ ID NO: 1479539 - RNA, 19 nt, Artificial Sequence
  Description of Artificial Sequence: Synthetic oligonucleotide
gcgcggccucaaaccuugc

SEQ ID NO: 1479540 - RNA, 19 nt, Artificial Sequence
  Description of Artificial Sequence: Synthetic oligonucleotide
gcccuugccccagcugcgu

SEQ ID NO: 1479541 - RNA, 19 nt, Artificial Sequence
  Description of Artificial Sequence: Synthetic oligonucleotide
cccgccacacggugggauu

SEQ ID NO: 1479542 - RNA, 19 nt, Artificial Sequence
  Description of Artificial Sequence: Synthetic oligonucleotide
ccccgccacacggugggau

SEQ ID NO: 1479543 - RNA, 19 nt, Artificial Sequence
  Description of Artificial Sequence: Synthetic oligonucleotide
ccgagggcuugcccaucuu

SEQ ID NO: 1479544 - RNA, 19 nt, Artificial Sequence
  Description of Artificial Sequence: Synthetic oligonucleotide
aacaauauuggucggagcc

SEQ ID NO: 1479545 - RNA, 19 nt, Artificial Sequence
  Description of Artificial Sequence: Synthetic oligonucleotide
aacgaaauuaggcagaagg

SEQ ID NO: 1479546 - RNA, 19 nt, Artificial Sequence
  Description of Artificial Sequence: Synthetic oligonucleotide
aauggaguaacauuucuuc

SEQ ID NO: 1479547 - RNA, 19 nt, Artificial Sequence
  Description of Artificial Sequence: Synthetic oligonucleotide
aguagaauaaauguguccc

SEQ ID NO: 1479548 - RNA, 19 nt, Artificial Sequence
  Description of Artificial Sequence: Synthetic oligonucleotide
gaaaguucaauccuucugg

SEQ ID NO: 1479549 - RNA, 19 nt, Artificial Sequence
  Description of Artificial Sequence: Synthetic oligonucleotide
ugagauaugguacagggca

SEQ ID NO: 1479550 - RNA, 19 nt, Artificial Sequence
  Description of Artificial Sequence: Synthetic oligonucleotide
aacauauggacauuuauau

SEQ ID NO: 1479551 - RNA, 19 nt, Artificial Sequence
  Description of Artificial Sequence: Synthetic oligonucleotide
auaaaugugucccucauug

SEQ ID NO: 1479552 - RNA, 19 nt, Artificial Sequence
  Description of Artificial Sequence: Synthetic oligonucleotide
acugagauaugguacaggg

SEQ ID NO: 1479553 - RNA, 19 nt, Artificial Sequence
  Description of Artificial Sequence: Synthetic oligonucleotide
uucaagaggacauaagcug

SEQ ID NO: 1479554 - RNA, 19 nt, Artificial Sequence
  Description of Artificial Sequence: Synthetic oligonucleotide
uucugaaaagaccugaggu

SEQ ID NO: 1479555 - RNA, 19 nt, Artificial Sequence
  Description of Artificial Sequence: Synthetic oligonucleotide
uccacaguagaauaaaugu

SEQ ID NO: 1479556 - RNA, 19 nt, Artificial Sequence
  Description of Artificial Sequence: Synthetic oligonucleotide
gaaagcaacugagauaugg

SEQ ID NO: 1479557 - RNA, 19 nt, Artificial Sequence
  Description of Artificial Sequence: Synthetic oligonucleotide
ugaaaguaacaccacagac

SEQ ID NO: 1479558 - RNA, 19 nt, Artificial Sequence
  Description of Artificial Sequence: Synthetic oligonucleotide
aaacaauauuggucggagc

SEQ ID NO: 1479559 - RNA, 19 nt, Artificial Sequence
  Description of Artificial Sequence: Synthetic oligonucleotide
cugauuauucccacgauag

SEQ ID NO: 1479560 - RNA, 19 nt, Artificial Sequence
  Description of Artificial Sequence: Synthetic oligonucleotide
uaucuaugaaacuuguucu

SEQ ID NO: 1479561 - RNA, 19 nt, Artificial Sequence
  Description of Artificial Sequence: Synthetic oligonucleotide
gaaauuaggcagaagguag

SEQ ID NO: 1479562 - RNA, 19 nt, Artificial Sequence
  Description of Artificial Sequence: Synthetic oligonucleotide
auuuugaacacuucaucag

SEQ ID NO: 1479563 - RNA, 19 nt, Artificial Sequence
  Description of Artificial Sequence: Synthetic oligonucleotide
aaaugugucccucauugca

SEQ ID NO: 1479564 - RNA, 19 nt, Artificial Sequence
  Description of Artificial Sequence: Synthetic oligonucleotide
aguucaauccuucuggucu

SEQ ID NO: 1479565 - RNA, 19 nt, Artificial Sequence
  Description of Artificial Sequence: Synthetic oligonucleotide
aacccgcuauuccacaucc

SEQ ID NO: 1479566 - RNA, 19 nt, Artificial Sequence
  Description of Artificial Sequence: Synthetic oligonucleotide
uuucaagaggacauaagcu

SEQ ID NO: 1479567 - RNA, 19 nt, Artificial Sequence
  Description of Artificial Sequence: Synthetic oligonucleotide
cuugauugaggccacaggc

SEQ ID NO: 1479568 - RNA, 19 nt, Artificial Sequence
  Description of Artificial Sequence: Synthetic oligonucleotide
uuaagaaaucccacccugg

SEQ ID NO: 1479569 - RNA, 19 nt, Artificial Sequence
  Description of Artificial Sequence: Synthetic oligonucleotide
cucacuuaaaccuacuuuc

SEQ ID NO: 1479570 - RNA, 19 nt, Artificial Sequence
  Description of Artificial Sequence: Synthetic oligonucleotide
aguauuacuuaucaccuca

SEQ ID NO: 1479571 - RNA, 19 nt, Artificial Sequence
  Description of Artificial Sequence: Synthetic oligonucleotide
aagaacagaagcucccaag

SEQ ID NO: 1479572 - RNA, 19 nt, Artificial Sequence
  Description of Artificial Sequence: Synthetic oligonucleotide
cuuucaaucccguccaucc

SEQ ID NO: 1479573 - RNA, 19 nt, Artificial Sequence
  Description of Artificial Sequence: Synthetic oligonucleotide
uccucuuucaaucccgucc

SEQ ID NO: 1479574 - RNA, 19 nt, Artificial Sequence
  Description of Artificial Sequence: Synthetic oligonucleotide
gauuauucccacgauagug

SEQ ID NO: 1479575 - RNA, 19 nt, Artificial Sequence
  Description of Artificial Sequence: Synthetic oligonucleotide
agcagcauguuucaagagg

SEQ ID NO: 1479576 - RNA, 19 nt, Artificial Sequence
  Description of Artificial Sequence: Synthetic oligonucleotide
agaggacauaagcugagac

SEQ ID NO: 1479577 - RNA, 19 nt, Artificial Sequence
  Description of Artificial Sequence: Synthetic oligonucleotide
ugucugauuauucccacga

SEQ ID NO: 1479578 - RNA, 19 nt, Artificial Sequence
  Description of Artificial Sequence: Synthetic oligonucleotide
aaucucaacauucccaauu

SEQ ID NO: 1479579 - RNA, 19 nt, Artificial Sequence
  Description of Artificial Sequence: Synthetic oligonucleotide
acauucccaauuuugaaca

SEQ ID NO: 1479580 - RNA, 19 nt, Artificial Sequence
  Description of Artificial Sequence: Synthetic oligonucleotide
cuauuccacauccuggucg

SEQ ID NO: 1479581 - RNA, 19 nt, Artificial Sequence
  Description of Artificial Sequence: Synthetic oligonucleotide
cagaguagcagaaagcaac

SEQ ID NO: 1479582 - RNA, 19 nt, Artificial Sequence
  Description of Artificial Sequence: Synthetic oligonucleotide
uaaacauauggacauuuau

SEQ ID NO: 1479583 - RNA, 19 nt, Artificial Sequence
  Description of Artificial Sequence: Synthetic oligonucleotide
aguaacaccacagacccag

SEQ ID NO: 1479584 - RNA, 19 nt, Artificial Sequence
  Description of Artificial Sequence: Synthetic oligonucleotide
cugaaaagaccugaggugg

SEQ ID NO: 1479585 - RNA, 19 nt, Artificial Sequence
  Description of Artificial Sequence: Synthetic oligonucleotide
uugaaaguaacaccacaga

SEQ ID NO: 1479586 - RNA, 19 nt, Artificial Sequence
  Description of Artificial Sequence: Synthetic oligonucleotide
uguaaacaauauuggucgg

SEQ ID NO: 1479587 - RNA, 19 nt, Artificial Sequence
  Description of Artificial Sequence: Synthetic oligonucleotide
auauguuucuggaggaacc

SEQ ID NO: 1479588 - RNA, 19 nt, Artificial Sequence
  Description of Artificial Sequence: Synthetic oligonucleotide
aacccacuggcgaacaucc

SEQ ID NO: 1479589 - RNA, 19 nt, Artificial Sequence
  Description of Artificial Sequence: Synthetic oligonucleotide
gagaccuuaucuaugaaac

SEQ ID NO: 1479590 - RNA, 19 nt, Artificial Sequence
  Description of Artificial Sequence: Synthetic oligonucleotide
aaguucaauccuucugguc

SEQ ID NO: 1479591 - RNA, 19 nt, Artificial Sequence
  Description of Artificial Sequence: Synthetic oligonucleotide
uucacauauguuucuggag

SEQ ID NO: 1479592 - RNA, 19 nt, Artificial Sequence
  Description of Artificial Sequence: Synthetic oligonucleotide
gucuagcuccuuuugaacg

SEQ ID NO: 1479593 - RNA, 19 nt, Artificial Sequence
  Description of Artificial Sequence: Synthetic oligonucleotide
ugugucaacccacuggcga

SEQ ID NO: 1479594 - RNA, 19 nt, Artificial Sequence
  Description of Artificial Sequence: Synthetic oligonucleotide
ugaacgucuaaacaacaaa

SEQ ID NO: 1479595 - RNA, 19 nt, Artificial Sequence
  Description of Artificial Sequence: Synthetic oligonucleotide
aguagcagaaagcaacuga

SEQ ID NO: 1479596 - RNA, 19 nt, Artificial Sequence
  Description of Artificial Sequence: Synthetic oligonucleotide
acuuaaaccuacuuucagu

SEQ ID NO: 1479597 - RNA, 19 nt, Artificial Sequence
  Description of Artificial Sequence: Synthetic oligonucleotide
aucaccucaacaggaagcc

SEQ ID NO: 1479598 - RNA, 19 nt, Artificial Sequence
  Description of Artificial Sequence: Synthetic oligonucleotide
accucaugcucacuuaaac

SEQ ID NO: 1479599 - RNA, 19 nt, Artificial Sequence
  Description of Artificial Sequence: Synthetic oligonucleotide
uggacauuuauauuacaaa

SEQ ID NO: 1479600 - RNA, 19 nt, Artificial Sequence
  Description of Artificial Sequence: Synthetic oligonucleotide
aaaguucaauccuucuggu

SEQ ID NO: 1479601 - RNA, 19 nt, Artificial Sequence
  Description of Artificial Sequence: Synthetic oligonucleotide
aacagaagcucccaagcau

SEQ ID NO: 1479602 - RNA, 19 nt, Artificial Sequence
  Description of Artificial Sequence: Synthetic oligonucleotide
agcaacugagauaugguac

SEQ ID NO: 1479603 - RNA, 19 nt, Artificial Sequence
  Description of Artificial Sequence: Synthetic oligonucleotide
gaacgucuaaacaacaaac

SEQ ID NO: 1479604 - RNA, 19 nt, Artificial Sequence
  Description of Artificial Sequence: Synthetic oligonucleotide
uguuaagaaaucccacccu

SEQ ID NO: 1479605 - RNA, 19 nt, Artificial Sequence
  Description of Artificial Sequence: Synthetic oligonucleotide
ucgauuucuucucugccug

SEQ ID NO: 1479606 - RNA, 19 nt, Artificial Sequence
  Description of Artificial Sequence: Synthetic oligonucleotide
auaccagaaccucaugcuc

SEQ ID NO: 1479607 - RNA, 19 nt, Artificial Sequence
  Description of Artificial Sequence: Synthetic oligonucleotide
gugugaauugaccacuucc

SEQ ID NO: 1479608 - RNA, 19 nt, Artificial Sequence
  Description of Artificial Sequence: Synthetic oligonucleotide
caagccuugaucaaauuca

SEQ ID NO: 1479609 - RNA, 19 nt, Artificial Sequence
  Description of Artificial Sequence: Synthetic oligonucleotide
agaauaugugcagugaacu

SEQ ID NO: 1479610 - RNA, 19 nt, Artificial Sequence
  Description of Artificial Sequence: Synthetic oligonucleotide
guucugaaaagaccugagg

SEQ ID NO: 1479611 - RNA, 19 nt, Artificial Sequence
  Description of Artificial Sequence: Synthetic oligonucleotide
ucacuuaaaccuacuuuca

SEQ ID NO: 1479612 - RNA, 19 nt, Artificial Sequence
  Description of Artificial Sequence: Synthetic oligonucleotide
ucugauuauucccacgaua

SEQ ID NO: 1479613 - RNA, 19 nt, Artificial Sequence
  Description of Artificial Sequence: Synthetic oligonucleotide
cugugaaaucucaacauuc

SEQ ID NO: 1479614 - RNA, 19 nt, Artificial Sequence
  Description of Artificial Sequence: Synthetic oligonucleotide
ugcagcagucauaucaucu

SEQ ID NO: 1479615 - RNA, 19 nt, Artificial Sequence
  Description of Artificial Sequence: Synthetic oligonucleotide
caguagaauaaaugugucc

SEQ ID NO: 1479616 - RNA, 19 nt, Artificial Sequence
  Description of Artificial Sequence: Synthetic oligonucleotide
aacgucuaaacaacaaaca

SEQ ID NO: 1479617 - RNA, 19 nt, Artificial Sequence
  Description of Artificial Sequence: Synthetic oligonucleotide
auucccacgauagugaccu

SEQ ID NO: 1479618 - RNA, 19 nt, Artificial Sequence
  Description of Artificial Sequence: Synthetic oligonucleotide
auagugaccugugaaaucu

SEQ ID NO: 1479619 - RNA, 19 nt, Artificial Sequence
  Description of Artificial Sequence: Synthetic oligonucleotide
ucuguagauuuaaagugau

SEQ ID NO: 1479620 - RNA, 19 nt, Artificial Sequence
  Description of Artificial Sequence: Synthetic oligonucleotide
aaacauauggacauuuaua

SEQ ID NO: 1479621 - RNA, 19 nt, Artificial Sequence
  Description of Artificial Sequence: Synthetic oligonucleotide
caauuuugaacacuucauc

SEQ ID NO: 1479622 - RNA, 19 nt, Artificial Sequence
  Description of Artificial Sequence: Synthetic oligonucleotide
ugguuuuggaccacaguga

SEQ ID NO: 1479623 - RNA, 19 nt, Artificial Sequence
  Description of Artificial Sequence: Synthetic oligonucleotide
ugagaccuuaucuaugaaa

SEQ ID NO: 1479624 - RNA, 19 nt, Artificial Sequence
  Description of Artificial Sequence: Synthetic oligonucleotide
acgucuaaacaacaaacaa

SEQ ID NO: 1479625 - RNA, 19 nt, Artificial Sequence
  Description of Artificial Sequence: Synthetic oligonucleotide
aguaccugguuuuggacca

SEQ ID NO: 1479626 - RNA, 19 nt, Artificial Sequence
  Description of Artificial Sequence: Synthetic oligonucleotide
ugagcucuaguuacucugc

SEQ ID NO: 1479627 - RNA, 19 nt, Artificial Sequence
  Description of Artificial Sequence: Synthetic oligonucleotide
accuacuuucaguuguggg

SEQ ID NO: 1479628 - RNA, 19 nt, Artificial Sequence
  Description of Artificial Sequence: Synthetic oligonucleotide
ugaaaagaccugagguggc

SEQ ID NO: 1479629 - RNA, 19 nt, Artificial Sequence
  Description of Artificial Sequence: Synthetic oligonucleotide
aacugagauaugguacagg

SEQ ID NO: 1479630 - RNA, 19 nt, Artificial Sequence
  Description of Artificial Sequence: Synthetic oligonucleotide
aauaaaugugucccucauu

SEQ ID NO: 1479631 - RNA, 19 nt, Artificial Sequence
  Description of Artificial Sequence: Synthetic oligonucleotide
uaucaucuauuuuguaaac

SEQ ID NO: 1479632 - RNA, 19 nt, Artificial Sequence
  Description of Artificial Sequence: Synthetic oligonucleotide
ugauugaggccacaggcau

SEQ ID NO: 1479633 - RNA, 19 nt, Artificial Sequence
  Description of Artificial Sequence: Synthetic oligonucleotide
gggaaacgaaauuaggcag

SEQ ID NO: 1479634 - RNA, 19 nt, Artificial Sequence
  Description of Artificial Sequence: Synthetic oligonucleotide
uugaacgucuaaacaacaa

SEQ ID NO: 1479635 - RNA, 19 nt, Artificial Sequence
  Description of Artificial Sequence: Synthetic oligonucleotide
aacugucuagcuccuuuug

SEQ ID NO: 1479636 - RNA, 19 nt, Artificial Sequence
  Description of Artificial Sequence: Synthetic oligonucleotide
uggcgaacauccaugggug

SEQ ID NO: 1479637 - RNA, 19 nt, Artificial Sequence
  Description of Artificial Sequence: Synthetic oligonucleotide
uuucucaacugucuagcuc

SEQ ID NO: 1479638 - RNA, 19 nt, Artificial Sequence
  Description of Artificial Sequence: Synthetic oligonucleotide
gaauaugugcagugaacuc

SEQ ID NO: 1479639 - RNA, 19 nt, Artificial Sequence
  Description of Artificial Sequence: Synthetic oligonucleotide
aaggaaagugcaauuuuga

SEQ ID NO: 1479640 - RNA, 19 nt, Artificial Sequence
  Description of Artificial Sequence: Synthetic oligonucleotide
ugagguuauucccacugaa

SEQ ID NO: 1479641 - RNA, 19 nt, Artificial Sequence
  Description of Artificial Sequence: Synthetic oligonucleotide
ucacccauuccugaguugc

SEQ ID NO: 1479642 - RNA, 19 nt, Artificial Sequence
  Description of Artificial Sequence: Synthetic oligonucleotide
ucuuaaaggcuaccaggcu

SEQ ID NO: 1479643 - RNA, 19 nt, Artificial Sequence
  Description of Artificial Sequence: Synthetic oligonucleotide
caggggaaugaucuuaaag

SEQ ID NO: 1479644 - RNA, 19 nt, Artificial Sequence
  Description of Artificial Sequence: Synthetic oligonucleotide
aaagcaacugagauauggu

SEQ ID NO: 1479645 - RNA, 19 nt, Artificial Sequence
  Description of Artificial Sequence: Synthetic oligonucleotide
uaaaugugucccucauugc

SEQ ID NO: 1479646 - RNA, 19 nt, Artificial Sequence
  Description of Artificial Sequence: Synthetic oligonucleotide
ucucgaacccgcuauucca

SEQ ID NO: 1479647 - RNA, 19 nt, Artificial Sequence
  Description of Artificial Sequence: Synthetic oligonucleotide
ugaacucauucauaucuuc

SEQ ID NO: 1479648 - RNA, 19 nt, Artificial Sequence
  Description of Artificial Sequence: Synthetic oligonucleotide
aguccugacuagcuuaucu

SEQ ID NO: 1479649 - RNA, 19 nt, Artificial Sequence
  Description of Artificial Sequence: Synthetic oligonucleotide
cagaauaugugcagugaac

SEQ ID NO: 1479650 - RNA, 19 nt, Artificial Sequence
  Description of Artificial Sequence: Synthetic oligonucleotide
acaguagaauaaauguguc

SEQ ID NO: 1479651 - RNA, 19 nt, Artificial Sequence
  Description of Artificial Sequence: Synthetic oligonucleotide
aagcugagaccuuaucuau

SEQ ID NO: 1479652 - RNA, 19 nt, Artificial Sequence
  Description of Artificial Sequence: Synthetic oligonucleotide
ccuacuuucaguugugggc

SEQ ID NO: 1479653 - RNA, 19 nt, Artificial Sequence
  Description of Artificial Sequence: Synthetic oligonucleotide
uuugcuggcaugagguuau

SEQ ID NO: 1479654 - RNA, 19 nt, Artificial Sequence
  Description of Artificial Sequence: Synthetic oligonucleotide
gauagugaccugugaaauc

SEQ ID NO: 1479655 - RNA, 19 nt, Artificial Sequence
  Description of Artificial Sequence: Synthetic oligonucleotide
gagugggaaacgaaauuag

SEQ ID NO: 1479656 - RNA, 19 nt, Artificial Sequence
  Description of Artificial Sequence: Synthetic oligonucleotide
ugauuauucccacgauagu

SEQ ID NO: 1479657 - RNA, 19 nt, Artificial Sequence
  Description of Artificial Sequence: Synthetic oligonucleotide
auuaaacauauggacauuu

SEQ ID NO: 1479658 - RNA, 19 nt, Artificial Sequence
  Description of Artificial Sequence: Synthetic oligonucleotide
cagugaggccauuugcugg

SEQ ID NO: 1479659 - RNA, 19 nt, Artificial Sequence
  Description of Artificial Sequence: Synthetic oligonucleotide
augucugauuauucccacg

SEQ ID NO: 1479660 - RNA, 19 nt, Artificial Sequence
  Description of Artificial Sequence: Synthetic oligonucleotide
uuauucccacgauagugac

SEQ ID NO: 1479661 - RNA, 19 nt, Artificial Sequence
  Description of Artificial Sequence: Synthetic oligonucleotide
cacaguagaauaaaugugu

SEQ ID NO: 1479662 - RNA, 19 nt, Artificial Sequence
  Description of Artificial Sequence: Synthetic oligonucleotide
uugaccacuuccagaauau

SEQ ID NO: 1479663 - RNA, 19 nt, Artificial Sequence
  Description of Artificial Sequence: Synthetic oligonucleotide
ucaacugucuagcuccuuu

SEQ ID NO: 1479664 - RNA, 19 nt, Artificial Sequence
  Description of Artificial Sequence: Synthetic oligonucleotide
cucucgauuucuucucugc

SEQ ID NO: 1479665 - RNA, 19 nt, Artificial Sequence
  Description of Artificial Sequence: Synthetic oligonucleotide
caugcucacuuaaaccuac

SEQ ID NO: 1479666 - RNA, 19 nt, Artificial Sequence
  Description of Artificial Sequence: Synthetic oligonucleotide
uauguuucuggaggaacca

SEQ ID NO: 1479667 - RNA, 19 nt, Artificial Sequence
  Description of Artificial Sequence: Synthetic oligonucleotide
gguuuuggaccacagugag

SEQ ID NO: 1479668 - RNA, 19 nt, Artificial Sequence
  Description of Artificial Sequence: Synthetic oligonucleotide
accugugaaaucucaacau

SEQ ID NO: 1479669 - RNA, 19 nt, Artificial Sequence
  Description of Artificial Sequence: Synthetic oligonucleotide
uuggccuuaguauuacuua

SEQ ID NO: 1479670 - RNA, 19 nt, Artificial Sequence
  Description of Artificial Sequence: Synthetic oligonucleotide
ugucccucauugcacagaa

SEQ ID NO: 1479671 - RNA, 19 nt, Artificial Sequence
  Description of Artificial Sequence: Synthetic oligonucleotide
aaccuacuuucaguugugg

SEQ ID NO: 1479672 - RNA, 19 nt, Artificial Sequence
  Description of Artificial Sequence: Synthetic oligonucleotide
auuggucggagccuucucu

SEQ ID NO: 1479673 - RNA, 19 nt, Artificial Sequence
  Description of Artificial Sequence: Synthetic oligonucleotide
acgauagugaccugugaaa

SEQ ID NO: 1479674 - RNA, 19 nt, Artificial Sequence
  Description of Artificial Sequence: Synthetic oligonucleotide
ucuagaagccacuggccaa

SEQ ID NO: 1479675 - RNA, 19 nt, Artificial Sequence
  Description of Artificial Sequence: Synthetic oligonucleotide
aaucccguccauccagccu

SEQ ID NO: 1479676 - RNA, 19 nt, Artificial Sequence
  Description of Artificial Sequence: Synthetic oligonucleotide
aagaaaucccacccugguu

SEQ ID NO: 1479677 - RNA, 19 nt, Artificial Sequence
  Description of Artificial Sequence: Synthetic oligonucleotide
ucuaguuacucugcaucug

SEQ ID NO: 1479678 - RNA, 19 nt, Artificial Sequence
  Description of Artificial Sequence: Synthetic oligonucleotide
acugucuagcuccuuuuga

SEQ ID NO: 1479679 - RNA, 19 nt, Artificial Sequence
  Description of Artificial Sequence: Synthetic oligonucleotide
uggccaaaaccuacagagc

SEQ ID NO: 1479680 - RNA, 19 nt, Artificial Sequence
  Description of Artificial Sequence: Synthetic oligonucleotide
aagaccugagguggccagc

SEQ ID NO: 1479681 - RNA, 19 nt, Artificial Sequence
  Description of Artificial Sequence: Synthetic oligonucleotide
aaaucucaacauucccaau

SEQ ID NO: 1479682 - RNA, 19 nt, Artificial Sequence
  Description of Artificial Sequence: Synthetic oligonucleotide
agaccuuaucuaugaaacu

SEQ ID NO: 1479683 - RNA, 19 nt, Artificial Sequence
  Description of Artificial Sequence: Synthetic oligonucleotide
gaaaagaccugagguggcc

SEQ ID NO: 1479684 - RNA, 19 nt, Artificial Sequence
  Description of Artificial Sequence: Synthetic oligonucleotide
caugucugauuauucccac

SEQ ID NO: 1479685 - RNA, 19 nt, Artificial Sequence
  Description of Artificial Sequence: Synthetic oligonucleotide
ucaugcucacuuaaaccua

SEQ ID NO: 1479686 - RNA, 19 nt, Artificial Sequence
  Description of Artificial Sequence: Synthetic oligonucleotide
uggccuuaguauuacuuau

SEQ ID NO: 1479687 - RNA, 19 nt, Artificial Sequence
  Description of Artificial Sequence: Synthetic oligonucleotide
cacuggcgaacauccaugg

SEQ ID NO: 1479688 - RNA, 19 nt, Artificial Sequence
  Description of Artificial Sequence: Synthetic oligonucleotide
cuaugaaacuuguucuaga

SEQ ID NO: 1479689 - RNA, 19 nt, Artificial Sequence
  Description of Artificial Sequence: Synthetic oligonucleotide
guccugacuagcuuaucug

SEQ ID NO: 1479690 - RNA, 19 nt, Artificial Sequence
  Description of Artificial Sequence: Synthetic oligonucleotide
auggacauuuauauuacaa

SEQ ID NO: 1479691 - RNA, 19 nt, Artificial Sequence
  Description of Artificial Sequence: Synthetic oligonucleotide
aauauuggucggagccuuc

SEQ ID NO: 1479692 - RNA, 19 nt, Artificial Sequence
  Description of Artificial Sequence: Synthetic oligonucleotide
accuuaucuaugaaacuug

SEQ ID NO: 1479693 - RNA, 19 nt, Artificial Sequence
  Description of Artificial Sequence: Synthetic oligonucleotide
acauauggacauuuauauu

SEQ ID NO: 1479694 - RNA, 19 nt, Artificial Sequence
  Description of Artificial Sequence: Synthetic oligonucleotide
acgaaauuaggcagaaggu

SEQ ID NO: 1479695 - RNA, 19 nt, Artificial Sequence
  Description of Artificial Sequence: Synthetic oligonucleotide
agcauguuucaagaggaca

SEQ ID NO: 1479696 - RNA, 19 nt, Artificial Sequence
  Description of Artificial Sequence: Synthetic oligonucleotide
gggugcagcagucauauca

SEQ ID NO: 1479697 - RNA, 19 nt, Artificial Sequence
  Description of Artificial Sequence: Synthetic oligonucleotide
acccugguuuacuucuuuc

SEQ ID NO: 1479698 - RNA, 19 nt, Artificial Sequence
  Description of Artificial Sequence: Synthetic oligonucleotide
aaacgaaauuaggcagaag

SEQ ID NO: 1479699 - RNA, 19 nt, Artificial Sequence
  Description of Artificial Sequence: Synthetic oligonucleotide
uccaggggaaugaucuuaa

SEQ ID NO: 1479700 - RNA, 19 nt, Artificial Sequence
  Description of Artificial Sequence: Synthetic oligonucleotide
ccuugaucaaauucaguac

SEQ ID NO: 1479701 - RNA, 19 nt, Artificial Sequence
  Description of Artificial Sequence: Synthetic oligonucleotide
caucagucagaguagcaga

SEQ ID NO: 1479702 - RNA, 19 nt, Artificial Sequence
  Description of Artificial Sequence: Synthetic oligonucleotide
caaugugcugggaucggac

SEQ ID NO: 1479703 - RNA, 19 nt, Artificial Sequence
  Description of Artificial Sequence: Synthetic oligonucleotide
acaauauuggucggagccu

SEQ ID NO: 1479704 - RNA, 19 nt, Artificial Sequence
  Description of Artificial Sequence: Synthetic oligonucleotide
aaaucccacccugguuuac

SEQ ID NO: 1479705 - RNA, 19 nt, Artificial Sequence
  Description of Artificial Sequence: Synthetic oligonucleotide
cucugccugagacagugug

SEQ ID NO: 1479706 - RNA, 19 nt, Artificial Sequence
  Description of Artificial Sequence: Synthetic oligonucleotide
cuacuuucaguugugggca

SEQ ID NO: 1479707 - RNA, 19 nt, Artificial Sequence
  Description of Artificial Sequence: Synthetic oligonucleotide
uauucccacugaaguuucc

SEQ ID NO: 1479708 - RNA, 19 nt, Artificial Sequence
  Description of Artificial Sequence: Synthetic oligonucleotide
ggaaccacaguguuuucac

SEQ ID NO: 1479709 - RNA, 19 nt, Artificial Sequence
  Description of Artificial Sequence: Synthetic oligonucleotide
uguugagagcugguuguug

SEQ ID NO: 1479710 - RNA, 19 nt, Artificial Sequence
  Description of Artificial Sequence: Synthetic oligonucleotide
aguuuccuggcucacccau

SEQ ID NO: 1479711 - RNA, 19 nt, Artificial Sequence
  Description of Artificial Sequence: Synthetic oligonucleotide
ccacaguagaauaaaugug

SEQ ID NO: 1479712 - RNA, 19 nt, Artificial Sequence
  Description of Artificial Sequence: Synthetic oligonucleotide
ccucaugcucacuuaaacc

SEQ ID NO: 1479713 - RNA, 19 nt, Artificial Sequence
  Description of Artificial Sequence: Synthetic oligonucleotide
guaaacaauauuggucgga

SEQ ID NO: 1479714 - RNA, 19 nt, Artificial Sequence
  Description of Artificial Sequence: Synthetic oligonucleotide
auagcuggagccgccgccg

SEQ ID NO: 1479715 - RNA, 19 nt, Artificial Sequence
  Description of Artificial Sequence: Synthetic oligonucleotide
cacauauguuucuggagga

SEQ ID NO: 1479716 - RNA, 19 nt, Artificial Sequence
  Description of Artificial Sequence: Synthetic oligonucleotide
augagguuauucccacuga

SEQ ID NO: 1479717 - RNA, 19 nt, Artificial Sequence
  Description of Artificial Sequence: Synthetic oligonucleotide
cauucccaauuuugaacac

SEQ ID NO: 1479718 - RNA, 19 nt, Artificial Sequence
  Description of Artificial Sequence: Synthetic oligonucleotide
cauaagcugagaccuuauc

SEQ ID NO: 1479719 - RNA, 19 nt, Artificial Sequence
  Description of Artificial Sequence: Synthetic oligonucleotide
gguacagggcacaaugugc

SEQ ID NO: 1479720 - RNA, 19 nt, Artificial Sequence
  Description of Artificial Sequence: Synthetic oligonucleotide
gaaacgaaauuaggcagaa

SEQ ID NO: 1479721 - RNA, 19 nt, Artificial Sequence
  Description of Artificial Sequence: Synthetic oligonucleotide
ugcucacuuaaaccuacuu

SEQ ID NO: 1479722 - RNA, 19 nt, Artificial Sequence
  Description of Artificial Sequence: Synthetic oligonucleotide
ugugggcgagccgaagccg

SEQ ID NO: 1479723 - RNA, 19 nt, Artificial Sequence
  Description of Artificial Sequence: Synthetic oligonucleotide
gcaacugagauaugguaca

SEQ ID NO: 1479724 - RNA, 19 nt, Artificial Sequence
  Description of Artificial Sequence: Synthetic oligonucleotide
cucgaacccgcuauuccac

SEQ ID NO: 1479725 - RNA, 19 nt, Artificial Sequence
  Description of Artificial Sequence: Synthetic oligonucleotide
uguuggauuugcugagcau

SEQ ID NO: 1479726 - RNA, 19 nt, Artificial Sequence
  Description of Artificial Sequence: Synthetic oligonucleotide
aagaggacauaagcugaga

SEQ ID NO: 1479727 - RNA, 19 nt, Artificial Sequence
  Description of Artificial Sequence: Synthetic oligonucleotide
aaguuuccuggcucaccca

SEQ ID NO: 1479728 - RNA, 19 nt, Artificial Sequence
  Description of Artificial Sequence: Synthetic oligonucleotide
gaaccucaugcucacuuaa

SEQ ID NO: 1479729 - RNA, 19 nt, Artificial Sequence
  Description of Artificial Sequence: Synthetic oligonucleotide
ggaguaacauuucuuccuc

SEQ ID NO: 1479730 - RNA, 19 nt, Artificial Sequence
  Description of Artificial Sequence: Synthetic oligonucleotide
ugggaucggacucucgauu

SEQ ID NO: 1479731 - RNA, 19 nt, Artificial Sequence
  Description of Artificial Sequence: Synthetic oligonucleotide
gagauaugguacagggcac

SEQ ID NO: 1479732 - RNA, 19 nt, Artificial Sequence
  Description of Artificial Sequence: Synthetic oligonucleotide
uuucaguugugggcaagac

SEQ ID NO: 1479733 - RNA, 19 nt, Artificial Sequence
  Description of Artificial Sequence: Synthetic oligonucleotide
gccuuaguauuacuuauca

SEQ ID NO: 1479734 - RNA, 19 nt, Artificial Sequence
  Description of Artificial Sequence: Synthetic oligonucleotide
ugugcugggaucggacucu

SEQ ID NO: 1479735 - RNA, 19 nt, Artificial Sequence
  Description of Artificial Sequence: Synthetic oligonucleotide
gauuuaaagugaucaucau

SEQ ID NO: 1479736 - RNA, 19 nt, Artificial Sequence
  Description of Artificial Sequence: Synthetic oligonucleotide
ucucaacugucuagcuccu

SEQ ID NO: 1479737 - RNA, 19 nt, Artificial Sequence
  Description of Artificial Sequence: Synthetic oligonucleotide
cuagcuuaucuggaauuuc

SEQ ID NO: 1479738 - RNA, 19 nt, Artificial Sequence
  Description of Artificial Sequence: Synthetic oligonucleotide
cacgauagugaccugugaa

SEQ ID NO: 1479739 - RNA, 19 nt, Artificial Sequence
  Description of Artificial Sequence: Synthetic oligonucleotide
agacccagagugggaaacg

SEQ ID NO: 1479740 - RNA, 19 nt, Artificial Sequence
  Description of Artificial Sequence: Synthetic oligonucleotide
guagaauaaaugugucccu

SEQ ID NO: 1479741 - RNA, 19 nt, Artificial Sequence
  Description of Artificial Sequence: Synthetic oligonucleotide
ucccaauuuugaacacuuc

SEQ ID NO: 1479742 - RNA, 19 nt, Artificial Sequence
  Description of Artificial Sequence: Synthetic oligonucleotide
gugugggcgagccgaagcc

SEQ ID NO: 1479743 - RNA, 19 nt, Artificial Sequence
  Description of Artificial Sequence: Synthetic oligonucleotide
gcacaaugugcugggaucg

SEQ ID NO: 1479744 - RNA, 19 nt, Artificial Sequence
  Description of Artificial Sequence: Synthetic oligonucleotide
cucaacaggaagccuuuca

SEQ ID NO: 1479745 - RNA, 19 nt, Artificial Sequence
  Description of Artificial Sequence: Synthetic oligonucleotide
cacugcuugcuugauugag

SEQ ID NO: 1479746 - RNA, 19 nt, Artificial Sequence
  Description of Artificial Sequence: Synthetic oligonucleotide
uauuggucggagccuucuc

SEQ ID NO: 1479747 - RNA, 19 nt, Artificial Sequence
  Description of Artificial Sequence: Synthetic oligonucleotide
agaaccucaugcucacuua

SEQ ID NO: 1479748 - RNA, 19 nt, Artificial Sequence
  Description of Artificial Sequence: Synthetic oligonucleotide
ccacuuccagaauaugugc

SEQ ID NO: 1479749 - RNA, 19 nt, Artificial Sequence
  Description of Artificial Sequence: Synthetic oligonucleotide
ugagauccugaaaguucaa

SEQ ID NO: 1479750 - RNA, 19 nt, Artificial Sequence
  Description of Artificial Sequence: Synthetic oligonucleotide
gaccuuaucuaugaaacuu

SEQ ID NO: 1479751 - RNA, 19 nt, Artificial Sequence
  Description of Artificial Sequence: Synthetic oligonucleotide
auaugugcagugaacucau

SEQ ID NO: 1479752 - RNA, 19 nt, Artificial Sequence
  Description of Artificial Sequence: Synthetic oligonucleotide
ucgaacccgcuauuccaca

SEQ ID NO: 1479753 - RNA, 19 nt, Artificial Sequence
  Description of Artificial Sequence: Synthetic oligonucleotide
gagccgaagccgccggcgg

SEQ ID NO: 1479754 - RNA, 19 nt, Artificial Sequence
  Description of Artificial Sequence: Synthetic oligonucleotide
caacugagauaugguacag

SEQ ID NO: 1479755 - RNA, 19 nt, Artificial Sequence
  Description of Artificial Sequence: Synthetic oligonucleotide
caaugagcucuaguuacuc

SEQ ID NO: 1479756 - RNA, 19 nt, Artificial Sequence
  Description of Artificial Sequence: Synthetic oligonucleotide
agugaccugugaaaucuca

SEQ ID NO: 1479757 - RNA, 19 nt, Artificial Sequence
  Description of Artificial Sequence: Synthetic oligonucleotide
ucccacgauagugaccugu

SEQ ID NO: 1479758 - RNA, 19 nt, Artificial Sequence
  Description of Artificial Sequence: Synthetic oligonucleotide
ggcacaaugugcugggauc

SEQ ID NO: 1479759 - RNA, 19 nt, Artificial Sequence
  Description of Artificial Sequence: Synthetic oligonucleotide
auauuggucggagccuucu

SEQ ID NO: 1479760 - RNA, 19 nt, Artificial Sequence
  Description of Artificial Sequence: Synthetic oligonucleotide
caaucccguccauccagcc

SEQ ID NO: 1479761 - RNA, 19 nt, Artificial Sequence
  Description of Artificial Sequence: Synthetic oligonucleotide
cuggcgaacauccaugggu

SEQ ID NO: 1479762 - RNA, 19 nt, Artificial Sequence
  Description of Artificial Sequence: Synthetic oligonucleotide
uccugagauccugaaaguu

SEQ ID NO: 1479763 - RNA, 19 nt, Artificial Sequence
  Description of Artificial Sequence: Synthetic oligonucleotide
ucagucagaguagcagaaa

SEQ ID NO: 1479764 - RNA, 19 nt, Artificial Sequence
  Description of Artificial Sequence: Synthetic oligonucleotide
ggaaacgaaauuaggcaga

SEQ ID NO: 1479765 - RNA, 19 nt, Artificial Sequence
  Description of Artificial Sequence: Synthetic oligonucleotide
aguugcugauagauggccu

SEQ ID NO: 1479766 - RNA, 19 nt, Artificial Sequence
  Description of Artificial Sequence: Synthetic oligonucleotide
gcagcauguuucaagagga

SEQ ID NO: 1479767 - RNA, 19 nt, Artificial Sequence
  Description of Artificial Sequence: Synthetic oligonucleotide
cagcauguuucaagaggac

SEQ ID NO: 1479768 - RNA, 19 nt, Artificial Sequence
  Description of Artificial Sequence: Synthetic oligonucleotide
ccuuaguauuacuuaucac

SEQ ID NO: 1479769 - RNA, 19 nt, Artificial Sequence
  Description of Artificial Sequence: Synthetic oligonucleotide
uguagccgcccgcuccgcc

SEQ ID NO: 1479770 - RNA, 19 nt, Artificial Sequence
  Description of Artificial Sequence: Synthetic oligonucleotide
agacagugugggcgagccg

SEQ ID NO: 1479771 - RNA, 19 nt, Artificial Sequence
  Description of Artificial Sequence: Synthetic oligonucleotide
uucaauccuucuggucuug

SEQ ID NO: 1479772 - RNA, 19 nt, Artificial Sequence
  Description of Artificial Sequence: Synthetic oligonucleotide
cucuaguuacucugcaucu

SEQ ID NO: 1479773 - RNA, 19 nt, Artificial Sequence
  Description of Artificial Sequence: Synthetic oligonucleotide
cuaguuacucugcaucugu

SEQ ID NO: 1479774 - RNA, 19 nt, Artificial Sequence
  Description of Artificial Sequence: Synthetic oligonucleotide
ugucaacccacuggcgaac

SEQ ID NO: 1479775 - RNA, 19 nt, Artificial Sequence
  Description of Artificial Sequence: Synthetic oligonucleotide
ggcaugagguuauucccac

SEQ ID NO: 1479776 - RNA, 19 nt, Artificial Sequence
  Description of Artificial Sequence: Synthetic oligonucleotide
ccgcuauuccacauccugg

SEQ ID NO: 1479777 - RNA, 19 nt, Artificial Sequence
  Description of Artificial Sequence: Synthetic oligonucleotide
agcugagaccuuaucuaug

SEQ ID NO: 1479778 - RNA, 19 nt, Artificial Sequence
  Description of Artificial Sequence: Synthetic oligonucleotide
uggucgcugcuuuccugag

SEQ ID NO: 1479779 - RNA, 19 nt, Artificial Sequence
  Description of Artificial Sequence: Synthetic oligonucleotide
gauaugguacagggcacaa

SEQ ID NO: 1479780 - RNA, 19 nt, Artificial Sequence
  Description of Artificial Sequence: Synthetic oligonucleotide
gaagguaguggguucuuuu

SEQ ID NO: 1479781 - RNA, 19 nt, Artificial Sequence
  Description of Artificial Sequence: Synthetic oligonucleotide
caucugugucaacccacug

SEQ ID NO: 1479782 - RNA, 19 nt, Artificial Sequence
  Description of Artificial Sequence: Synthetic oligonucleotide
cacaaugugcugggaucgg

SEQ ID NO: 1479783 - RNA, 19 nt, Artificial Sequence
  Description of Artificial Sequence: Synthetic oligonucleotide
uacuuucaguugugggcaa

SEQ ID NO: 1479784 - RNA, 19 nt, Artificial Sequence
  Description of Artificial Sequence: Synthetic oligonucleotide
aaccucaugcucacuuaaa

SEQ ID NO: 1479785 - RNA, 19 nt, Artificial Sequence
  Description of Artificial Sequence: Synthetic oligonucleotide
acaaugugcugggaucgga

SEQ ID NO: 1479786 - RNA, 19 nt, Artificial Sequence
  Description of Artificial Sequence: Synthetic oligonucleotide
gugucaacccacuggcgaa

SEQ ID NO: 1479787 - RNA, 19 nt, Artificial Sequence
  Description of Artificial Sequence: Synthetic oligonucleotide
ucaacccacuggcgaacau

SEQ ID NO: 1479788 - RNA, 19 nt, Artificial Sequence
  Description of Artificial Sequence: Synthetic oligonucleotide
guacagggcacaaugugcu

SEQ ID NO: 1479789 - RNA, 19 nt, Artificial Sequence
  Description of Artificial Sequence: Synthetic oligonucleotide
ggacucucgauuucuucuc

SEQ ID NO: 1479790 - RNA, 19 nt, Artificial Sequence
  Description of Artificial Sequence: Synthetic oligonucleotide
ugggcgagccgaagccgcc

SEQ ID NO: 1479791 - RNA, 19 nt, Artificial Sequence
  Description of Artificial Sequence: Synthetic oligonucleotide
ugccugagacagugugggc

SEQ ID NO: 1479792 - RNA, 19 nt, Artificial Sequence
  Description of Artificial Sequence: Synthetic oligonucleotide
cccugugaggccaccauac

SEQ ID NO: 1479793 - RNA, 19 nt, Artificial Sequence
  Description of Artificial Sequence: Synthetic oligonucleotide
guauuacuuaucaccucaa

SEQ ID NO: 1479794 - RNA, 19 nt, Artificial Sequence
  Description of Artificial Sequence: Synthetic oligonucleotide
gacccagagugggaaacga

SEQ ID NO: 1479795 - RNA, 19 nt, Artificial Sequence
  Description of Artificial Sequence: Synthetic oligonucleotide
gcugggaucggacucucga

SEQ ID NO: 1479796 - RNA, 19 nt, Artificial Sequence
  Description of Artificial Sequence: Synthetic oligonucleotide
accuacagagcuggagaca

SEQ ID NO: 1479797 - RNA, 19 nt, Artificial Sequence
  Description of Artificial Sequence: Synthetic oligonucleotide
gcggacugcguguagccgc

SEQ ID NO: 1479798 - RNA, 19 nt, Artificial Sequence
  Description of Artificial Sequence: Synthetic oligonucleotide
cccgcuauuccacauccug

SEQ ID NO: 1479799 - RNA, 19 nt, Artificial Sequence
  Description of Artificial Sequence: Synthetic oligonucleotide
gcaugucugauuauuccca

SEQ ID NO: 1479800 - RNA, 19 nt, Artificial Sequence
  Description of Artificial Sequence: Synthetic oligonucleotide
cugaaaguucaauccuucu

SEQ ID NO: 1479801 - RNA, 19 nt, Artificial Sequence
  Description of Artificial Sequence: Synthetic oligonucleotide
gaagccgccggcggacugc

SEQ ID NO: 1479802 - RNA, 19 nt, Artificial Sequence
  Description of Artificial Sequence: Synthetic oligonucleotide
cccgcuccgccauagcugg

SEQ ID NO: 1479803 - RNA, 19 nt, Artificial Sequence
  Description of Artificial Sequence: Synthetic oligonucleotide
gacucucgauuucuucucu

SEQ ID NO: 1479804 - RNA, 19 nt, Artificial Sequence
  Description of Artificial Sequence: Synthetic oligonucleotide
uaugugcagugaacucauu

SEQ ID NO: 1479805 - RNA, 19 nt, Artificial Sequence
  Description of Artificial Sequence: Synthetic oligonucleotide
ucccacccugguuuacuuc

SEQ ID NO: 1479806 - RNA, 19 nt, Artificial Sequence
  Description of Artificial Sequence: Synthetic oligonucleotide
cuuucucaacugucuagcu

SEQ ID NO: 1479807 - RNA, 19 nt, Artificial Sequence
  Description of Artificial Sequence: Synthetic oligonucleotide
cuagaagccacuggccaaa

SEQ ID NO: 1479808 - RNA, 19 nt, Artificial Sequence
  Description of Artificial Sequence: Synthetic oligonucleotide
gaucggacucucgauuucu

SEQ ID NO: 1479809 - RNA, 19 nt, Artificial Sequence
  Description of Artificial Sequence: Synthetic oligonucleotide
cugagcaucaugugugaau

SEQ ID NO: 1479810 - RNA, 19 nt, Artificial Sequence
  Description of Artificial Sequence: Synthetic oligonucleotide
acacuucaucagucagagu

SEQ ID NO: 1479811 - RNA, 19 nt, Artificial Sequence
  Description of Artificial Sequence: Synthetic oligonucleotide
ugcuggcaugagguuauuc

SEQ ID NO: 1479812 - RNA, 19 nt, Artificial Sequence
  Description of Artificial Sequence: Synthetic oligonucleotide
ccucuuucaaucccgucca

SEQ ID NO: 1479813 - RNA, 19 nt, Artificial Sequence
  Description of Artificial Sequence: Synthetic oligonucleotide
acauaagcugagaccuuau

SEQ ID NO: 1479814 - RNA, 19 nt, Artificial Sequence
  Description of Artificial Sequence: Synthetic oligonucleotide
ggcgaacauccaugggugc

SEQ ID NO: 1479815 - RNA, 19 nt, Artificial Sequence
  Description of Artificial Sequence: Synthetic oligonucleotide
cauccuggucgcugcuuuc

SEQ ID NO: 1479816 - RNA, 19 nt, Artificial Sequence
  Description of Artificial Sequence: Synthetic oligonucleotide
agaagguaguggguucuuu

SEQ ID NO: 1479817 - RNA, 19 nt, Artificial Sequence
  Description of Artificial Sequence: Synthetic oligonucleotide
gugggcgagccgaagccgc

SEQ ID NO: 1479818 - RNA, 19 nt, Artificial Sequence
  Description of Artificial Sequence: Synthetic oligonucleotide
aucccacccugguuuacuu

SEQ ID NO: 1479819 - RNA, 19 nt, Artificial Sequence
  Description of Artificial Sequence: Synthetic oligonucleotide
ugcguguagccgcccgcuc

SEQ ID NO: 1479820 - RNA, 19 nt, Artificial Sequence
  Description of Artificial Sequence: Synthetic oligonucleotide
cccacgauagugaccugug

SEQ ID NO: 1479821 - RNA, 19 nt, Artificial Sequence
  Description of Artificial Sequence: Synthetic oligonucleotide
ucccuguugagagcugguu

SEQ ID NO: 1479822 - RNA, 19 nt, Artificial Sequence
  Description of Artificial Sequence: Synthetic oligonucleotide
gugaccugugaaaucucaa

SEQ ID NO: 1479823 - RNA, 19 nt, Artificial Sequence
  Description of Artificial Sequence: Synthetic oligonucleotide
gcucacuuaaaccuacuuu

SEQ ID NO: 1479824 - RNA, 19 nt, Artificial Sequence
  Description of Artificial Sequence: Synthetic oligonucleotide
gccgaagcucucgaacccg

SEQ ID NO: 1479825 - RNA, 19 nt, Artificial Sequence
  Description of Artificial Sequence: Synthetic oligonucleotide
caugggugcagcagucaua

SEQ ID NO: 1479826 - RNA, 19 nt, Artificial Sequence
  Description of Artificial Sequence: Synthetic oligonucleotide
gcguguagccgcccgcucc

SEQ ID NO: 1479827 - RNA, 19 nt, Artificial Sequence
  Description of Artificial Sequence: Synthetic oligonucleotide
cauccacaguagaauaaau

SEQ ID NO: 1479828 - RNA, 19 nt, Artificial Sequence
  Description of Artificial Sequence: Synthetic oligonucleotide
caccucaacaggaagccuu

SEQ ID NO: 1479829 - RNA, 19 nt, Artificial Sequence
  Description of Artificial Sequence: Synthetic oligonucleotide
guucaauccuucuggucuu

SEQ ID NO: 1479830 - RNA, 19 nt, Artificial Sequence
  Description of Artificial Sequence: Synthetic oligonucleotide
agaaagcaacugagauaug

SEQ ID NO: 1479831 - RNA, 19 nt, Artificial Sequence
  Description of Artificial Sequence: Synthetic oligonucleotide
caccauaccagaaccucau

SEQ ID NO: 1479832 - RNA, 19 nt, Artificial Sequence
  Description of Artificial Sequence: Synthetic oligonucleotide
ggccuuaguauuacuuauc

SEQ ID NO: 1479833 - RNA, 19 nt, Artificial Sequence
  Description of Artificial Sequence: Synthetic oligonucleotide
ccugugaggccaccauacc

SEQ ID NO: 1479834 - RNA, 19 nt, Artificial Sequence
  Description of Artificial Sequence: Synthetic oligonucleotide
ggaucggacucucgauuuc

SEQ ID NO: 1479835 - RNA, 19 nt, Artificial Sequence
  Description of Artificial Sequence: Synthetic oligonucleotide
cugcaucuguagauuuaaa

SEQ ID NO: 1479836 - RNA, 19 nt, Artificial Sequence
  Description of Artificial Sequence: Synthetic oligonucleotide
cugagaccuuaucuaugaa

SEQ ID NO: 1479837 - RNA, 19 nt, Artificial Sequence
  Description of Artificial Sequence: Synthetic oligonucleotide
augcucacuuaaaccuacu

SEQ ID NO: 1479838 - RNA, 19 nt, Artificial Sequence
  Description of Artificial Sequence: Synthetic oligonucleotide
agccacuuucacauauguu

SEQ ID NO: 1479839 - RNA, 19 nt, Artificial Sequence
  Description of Artificial Sequence: Synthetic oligonucleotide
gucugauuauucccacgau

SEQ ID NO: 1479840 - RNA, 19 nt, Artificial Sequence
  Description of Artificial Sequence: Synthetic oligonucleotide
gucaacccacuggcgaaca

SEQ ID NO: 1479841 - RNA, 19 nt, Artificial Sequence
  Description of Artificial Sequence: Synthetic oligonucleotide
gaguccugacuagcuuauc

SEQ ID NO: 1479842 - RNA, 19 nt, Artificial Sequence
  Description of Artificial Sequence: Synthetic oligonucleotide
cguguagccgcccgcuccg

SEQ ID NO: 1479843 - RNA, 19 nt, Artificial Sequence
  Description of Artificial Sequence: Synthetic oligonucleotide
guaacaccacagacccaga

SEQ ID NO: 1479844 - RNA, 19 nt, Artificial Sequence
  Description of Artificial Sequence: Synthetic oligonucleotide
agguccagcuggaaauauu

SEQ ID NO: 1479845 - RNA, 19 nt, Artificial Sequence
  Description of Artificial Sequence: Synthetic oligonucleotide
cagcagucauaucaucuau

SEQ ID NO: 1479846 - RNA, 19 nt, Artificial Sequence
  Description of Artificial Sequence: Synthetic oligonucleotide
caauauuggucggagccuu

SEQ ID NO: 1479847 - RNA, 19 nt, Artificial Sequence
  Description of Artificial Sequence: Synthetic oligonucleotide
cagucauaucaucuauuuu

SEQ ID NO: 1479848 - RNA, 19 nt, Artificial Sequence
  Description of Artificial Sequence: Synthetic oligonucleotide
caacugucuagcuccuuuu

SEQ ID NO: 1479849 - RNA, 19 nt, Artificial Sequence
  Description of Artificial Sequence: Synthetic oligonucleotide
guaccugguuuuggaccac

SEQ ID NO: 1479850 - RNA, 19 nt, Artificial Sequence
  Description of Artificial Sequence: Synthetic oligonucleotide
ccguccauccagccuggag

SEQ ID NO: 1479851 - RNA, 19 nt, Artificial Sequence
  Description of Artificial Sequence: Synthetic oligonucleotide
agccacuggccaaaaccua

SEQ ID NO: 1479852 - RNA, 19 nt, Artificial Sequence
  Description of Artificial Sequence: Synthetic oligonucleotide
ggugcagcagucauaucau

SEQ ID NO: 1479853 - RNA, 19 nt, Artificial Sequence
  Description of Artificial Sequence: Synthetic oligonucleotide
cugggaucggacucucgau

SEQ ID NO: 1479854 - RNA, 19 nt, Artificial Sequence
  Description of Artificial Sequence: Synthetic oligonucleotide
gggaucggacucucgauuu

SEQ ID NO: 1479855 - RNA, 19 nt, Artificial Sequence
  Description of Artificial Sequence: Synthetic oligonucleotide
gcucucgaacccgcuauuc

SEQ ID NO: 1479856 - RNA, 19 nt, Artificial Sequence
  Description of Artificial Sequence: Synthetic oligonucleotide
cgccgaagcucucgaaccc

SEQ ID NO: 1479857 - RNA, 19 nt, Artificial Sequence
  Description of Artificial Sequence: Synthetic oligonucleotide
agauucccaaugagcucua

SEQ ID NO: 1479858 - RNA, 19 nt, Artificial Sequence
  Description of Artificial Sequence: Synthetic oligonucleotide
gcccgcuccgccauagcug

SEQ ID NO: 1479859 - RNA, 19 nt, Artificial Sequence
  Description of Artificial Sequence: Synthetic oligonucleotide
cccacccugguuuacuucu

SEQ ID NO: 1479860 - RNA, 19 nt, Artificial Sequence
  Description of Artificial Sequence: Synthetic oligonucleotide
gggcgagccgaagccgccg

SEQ ID NO: 1479861 - RNA, 19 nt, Artificial Sequence
  Description of Artificial Sequence: Synthetic oligonucleotide
ccaaugagcucuaguuacu

SEQ ID NO: 1479862 - RNA, 19 nt, Artificial Sequence
  Description of Artificial Sequence: Synthetic oligonucleotide
gcagaagguaguggguucu

SEQ ID NO: 1479863 - RNA, 19 nt, Artificial Sequence
  Description of Artificial Sequence: Synthetic oligonucleotide
acccgcuauuccacauccu

SEQ ID NO: 1479864 - RNA, 19 nt, Artificial Sequence
  Description of Artificial Sequence: Synthetic oligonucleotide
ccuggaguccugacuagcu

SEQ ID NO: 1479865 - RNA, 19 nt, Artificial Sequence
  Description of Artificial Sequence: Synthetic oligonucleotide
gcucccaagcaugacaguu

SEQ ID NO: 1479866 - RNA, 19 nt, Artificial Sequence
  Description of Artificial Sequence: Synthetic oligonucleotide
ccgccauagcuggagccgc

SEQ ID NO: 1479867 - RNA, 19 nt, Artificial Sequence
  Description of Artificial Sequence: Synthetic oligonucleotide
cucccuguugagagcuggu

SEQ ID NO: 1479868 - RNA, 19 nt, Artificial Sequence
  Description of Artificial Sequence: Synthetic oligonucleotide
ccggcggacugcguguagc

SEQ ID NO: 1479869 - RNA, 19 nt, Artificial Sequence
  Description of Artificial Sequence: Synthetic oligonucleotide
cggcggacugcguguagcc

SEQ ID NO: 1479870 - RNA, 19 nt, Artificial Sequence
  Description of Artificial Sequence: Synthetic oligonucleotide
ggucuugggcaagccuuga

SEQ ID NO: 1479871 - RNA, 19 nt, Artificial Sequence
  Description of Artificial Sequence: Synthetic oligonucleotide
gcucacccauuccugaguu

SEQ ID NO: 1479872 - RNA, 19 nt, Artificial Sequence
  Description of Artificial Sequence: Synthetic oligonucleotide
gcaugagguuauucccacu

SEQ ID NO: 1479873 - RNA, 19 nt, Artificial Sequence
  Description of Artificial Sequence: Synthetic oligonucleotide
ggaguccugacuagcuuau

SEQ ID NO: 1479874 - RNA, 19 nt, Artificial Sequence
  Description of Artificial Sequence: Synthetic oligonucleotide
uugcuggcaugagguuauu

SEQ ID NO: 1479875 - RNA, 19 nt, Artificial Sequence
  Description of Artificial Sequence: Synthetic oligonucleotide
ccacagacccagaguggga

SEQ ID NO: 1479876 - RNA, 19 nt, Artificial Sequence
  Description of Artificial Sequence: Synthetic oligonucleotide
guuuccuggcucacccauu

SEQ ID NO: 1479877 - RNA, 19 nt, Artificial Sequence
  Description of Artificial Sequence: Synthetic oligonucleotide
gccggcggacugcguguag

SEQ ID NO: 1479878 - RNA, 19 nt, Artificial Sequence
  Description of Artificial Sequence: Synthetic oligonucleotide
ccaggggaaugaucuuaaa

SEQ ID NO: 1479879 - RNA, 19 nt, Artificial Sequence
  Description of Artificial Sequence: Synthetic oligonucleotide
cugcguguagccgcccgcu

SEQ ID NO: 1479880 - RNA, 19 nt, Artificial Sequence
  Description of Artificial Sequence: Synthetic oligonucleotide
cgauagugaccugugaaau

SEQ ID NO: 1479881 - RNA, 19 nt, Artificial Sequence
  Description of Artificial Sequence: Synthetic oligonucleotide
gcccuuggccuuaguauua

SEQ ID NO: 1479882 - RNA, 19 nt, Artificial Sequence
  Description of Artificial Sequence: Synthetic oligonucleotide
cuguugagagcugguuguu

SEQ ID NO: 1479883 - RNA, 19 nt, Artificial Sequence
  Description of Artificial Sequence: Synthetic oligonucleotide
ggccaccauaccagaaccu

SEQ ID NO: 1479884 - RNA, 19 nt, Artificial Sequence
  Description of Artificial Sequence: Synthetic oligonucleotide
cugagguggccagccacuu

SEQ ID NO: 1479885 - RNA, 19 nt, Artificial Sequence
  Description of Artificial Sequence: Synthetic oligonucleotide
ggacauaagcugagaccuu

SEQ ID NO: 1479886 - RNA, 19 nt, Artificial Sequence
  Description of Artificial Sequence: Synthetic oligonucleotide
cgaagccgccggcggacug

SEQ ID NO: 1479887 - RNA, 19 nt, Artificial Sequence
  Description of Artificial Sequence: Synthetic oligonucleotide
ccgcccgcuccgccauagc

SEQ ID NO: 1479888 - RNA, 19 nt, Artificial Sequence
  Description of Artificial Sequence: Synthetic oligonucleotide
agccgccggcggacugcgu

SEQ ID NO: 1479889 - RNA, 19 nt, Artificial Sequence
  Description of Artificial Sequence: Synthetic oligonucleotide
ccgccggcggacugcgugu

SEQ ID NO: 1479890 - RNA, 19 nt, Artificial Sequence
  Description of Artificial Sequence: Synthetic oligonucleotide
ccgcuccgccauagcugga

SEQ ID NO: 1479891 - RNA, 19 nt, Artificial Sequence
  Description of Artificial Sequence: Synthetic oligonucleotide
cgccgccgaagcucucgaa

SEQ ID NO: 1479892 - RNA, 19 nt, Artificial Sequence
  Description of Artificial Sequence: Synthetic oligonucleotide
ccgaagccgccggcggacu

SEQ ID NO: 1479893 - RNA, 19 nt, Artificial Sequence
  Description of Artificial Sequence: Synthetic oligonucleotide
cgccggcggacugcgugua

SEQ ID NO: 1479894 - RNA, 19 nt, Artificial Sequence
  Description of Artificial Sequence: Synthetic oligonucleotide
ucuaugaaaaccuuggcag

SEQ ID NO: 1479895 - RNA, 19 nt, Artificial Sequence
  Description of Artificial Sequence: Synthetic oligonucleotide
aaucagaagaucuucucac

SEQ ID NO: 1479896 - RNA, 19 nt, Artificial Sequence
  Description of Artificial Sequence: Synthetic oligonucleotide
aaauauuuucccuucagca

SEQ ID NO: 1479897 - RNA, 19 nt, Artificial Sequence
  Description of Artificial Sequence: Synthetic oligonucleotide
uguacuugacgccacaucg

SEQ ID NO: 1479898 - RNA, 19 nt, Artificial Sequence
  Description of Artificial Sequence: Synthetic oligonucleotide
auugucauaacuuacaaaa

SEQ ID NO: 1479899 - RNA, 19 nt, Artificial Sequence
  Description of Artificial Sequence: Synthetic oligonucleotide
aauauuuucccuucagcag

SEQ ID NO: 1479900 - RNA, 19 nt, Artificial Sequence
  Description of Artificial Sequence: Synthetic oligonucleotide
uugucuuuaaaacuaagca

SEQ ID NO: 1479901 - RNA, 19 nt, Artificial Sequence
  Description of Artificial Sequence: Synthetic oligonucleotide
uuuauauucaaaugcaagu

SEQ ID NO: 1479902 - RNA, 19 nt, Artificial Sequence
  Description of Artificial Sequence: Synthetic oligonucleotide
ugucauaacuuacaaaacc

SEQ ID NO: 1479903 - RNA, 19 nt, Artificial Sequence
  Description of Artificial Sequence: Synthetic oligonucleotide
uuaggcacaacgaugaaca

SEQ ID NO: 1479904 - RNA, 19 nt, Artificial Sequence
  Description of Artificial Sequence: Synthetic oligonucleotide
aggaacaaagccuggaagc

SEQ ID NO: 1479905 - RNA, 19 nt, Artificial Sequence
  Description of Artificial Sequence: Synthetic oligonucleotide
aacggcaggaaucagaaga

SEQ ID NO: 1479906 - RNA, 19 nt, Artificial Sequence
  Description of Artificial Sequence: Synthetic oligonucleotide
acaacgaugaacaaacggc

SEQ ID NO: 1479907 - RNA, 19 nt, Artificial Sequence
  Description of Artificial Sequence: Synthetic oligonucleotide
acaucgacaugcuuuaggc

SEQ ID NO: 1479908 - RNA, 19 nt, Artificial Sequence
  Description of Artificial Sequence: Synthetic oligonucleotide
aucgacaugcuuuaggcac

SEQ ID NO: 1479909 - RNA, 19 nt, Artificial Sequence
  Description of Artificial Sequence: Synthetic oligonucleotide
guuacaaagaauuggaauc

SEQ ID NO: 1479910 - RNA, 19 nt, Artificial Sequence
  Description of Artificial Sequence: Synthetic oligonucleotide
ucaaaugcaaguuuaaaua

SEQ ID NO: 1479911 - RNA, 19 nt, Artificial Sequence
  Description of Artificial Sequence: Synthetic oligonucleotide
agagacagggauuuggacg

SEQ ID NO: 1479912 - RNA, 19 nt, Artificial Sequence
  Description of Artificial Sequence: Synthetic oligonucleotide
aaaccaaaacacuugcuca

SEQ ID NO: 1479913 - RNA, 19 nt, Artificial Sequence
  Description of Artificial Sequence: Synthetic oligonucleotide
aagugguuaucuuaugaag

SEQ ID NO: 1479914 - RNA, 19 nt, Artificial Sequence
  Description of Artificial Sequence: Synthetic oligonucleotide
agaugaacagguuggcucc

SEQ ID NO: 1479915 - RNA, 19 nt, Artificial Sequence
  Description of Artificial Sequence: Synthetic oligonucleotide
auaaauucugguuguacag

SEQ ID NO: 1479916 - RNA, 19 nt, Artificial Sequence
  Description of Artificial Sequence: Synthetic oligonucleotide
gauaccagaauaugccugg

SEQ ID NO: 1479917 - RNA, 19 nt, Artificial Sequence
  Description of Artificial Sequence: Synthetic oligonucleotide
uggacgauguacuugacgc

SEQ ID NO: 1479918 - RNA, 19 nt, Artificial Sequence
  Description of Artificial Sequence: Synthetic oligonucleotide
ugaaguucuagaaaauaga

SEQ ID NO: 1479919 - RNA, 19 nt, Artificial Sequence
  Description of Artificial Sequence: Synthetic oligonucleotide
ugcacuuuaagccucuuca

SEQ ID NO: 1479920 - RNA, 19 nt, Artificial Sequence
  Description of Artificial Sequence: Synthetic oligonucleotide
acaugcuuuaggcacaacg

SEQ ID NO: 1479921 - RNA, 19 nt, Artificial Sequence
  Description of Artificial Sequence: Synthetic oligonucleotide
uaucuuaugaaguucuaga

SEQ ID NO: 1479922 - RNA, 19 nt, Artificial Sequence
  Description of Artificial Sequence: Synthetic oligonucleotide
aaaaccuuggcagacacga

SEQ ID NO: 1479923 - RNA, 19 nt, Artificial Sequence
  Description of Artificial Sequence: Synthetic oligonucleotide
agugcuaaguacugcagcg

SEQ ID NO: 1479924 - RNA, 19 nt, Artificial Sequence
  Description of Artificial Sequence: Synthetic oligonucleotide
aaaacuaagcacacagagg

SEQ ID NO: 1479925 - RNA, 19 nt, Artificial Sequence
  Description of Artificial Sequence: Synthetic oligonucleotide
aauuggaaucacaaaauca

SEQ ID NO: 1479926 - RNA, 19 nt, Artificial Sequence
  Description of Artificial Sequence: Synthetic oligonucleotide
gacaucguuuauuucauug

SEQ ID NO: 1479927 - RNA, 19 nt, Artificial Sequence
  Description of Artificial Sequence: Synthetic oligonucleotide
gauacaaacaccacacggc

SEQ ID NO: 1479928 - RNA, 19 nt, Artificial Sequence
  Description of Artificial Sequence: Synthetic oligonucleotide
aaaucaagugguuaucuua

SEQ ID NO: 1479929 - RNA, 19 nt, Artificial Sequence
  Description of Artificial Sequence: Synthetic oligonucleotide
aagagacagggauuuggac

SEQ ID NO: 1479930 - RNA, 19 nt, Artificial Sequence
  Description of Artificial Sequence: Synthetic oligonucleotide
ugagaguucaagcaucaga

SEQ ID NO: 1479931 - RNA, 19 nt, Artificial Sequence
  Description of Artificial Sequence: Synthetic oligonucleotide
auucuucgaacguuugagc

SEQ ID NO: 1479932 - RNA, 19 nt, Artificial Sequence
  Description of Artificial Sequence: Synthetic oligonucleotide
aguuacaaagaauuggaau

SEQ ID NO: 1479933 - RNA, 19 nt, Artificial Sequence
  Description of Artificial Sequence: Synthetic oligonucleotide
aaacuccuggggcaggugg

SEQ ID NO: 1479934 - RNA, 19 nt, Artificial Sequence
  Description of Artificial Sequence: Synthetic oligonucleotide
ugaagagacagggauuugg

SEQ ID NO: 1479935 - RNA, 19 nt, Artificial Sequence
  Description of Artificial Sequence: Synthetic oligonucleotide
aauaaagugcuaaguacug

SEQ ID NO: 1479936 - RNA, 19 nt, Artificial Sequence
  Description of Artificial Sequence: Synthetic oligonucleotide
auauuuucccuucagcagu

SEQ ID NO: 1479937 - RNA, 19 nt, Artificial Sequence
  Description of Artificial Sequence: Synthetic oligonucleotide
aacacaaggucaaagguga

SEQ ID NO: 1479938 - RNA, 19 nt, Artificial Sequence
  Description of Artificial Sequence: Synthetic oligonucleotide
uuaaaacuaagcacacaga

SEQ ID NO: 1479939 - RNA, 19 nt, Artificial Sequence
  Description of Artificial Sequence: Synthetic oligonucleotide
auuuggacgauguacuuga

SEQ ID NO: 1479940 - RNA, 19 nt, Artificial Sequence
  Description of Artificial Sequence: Synthetic oligonucleotide
uucauuccaaucugaaagc

SEQ ID NO: 1479941 - RNA, 19 nt, Artificial Sequence
  Description of Artificial Sequence: Synthetic oligonucleotide
aaagccuggaagcggacug

SEQ ID NO: 1479942 - RNA, 19 nt, Artificial Sequence
  Description of Artificial Sequence: Synthetic oligonucleotide
uuacaaagaauuggaauca

SEQ ID NO: 1479943 - RNA, 19 nt, Artificial Sequence
  Description of Artificial Sequence: Synthetic oligonucleotide
cacaacgaugaacaaacgg

SEQ ID NO: 1479944 - RNA, 19 nt, Artificial Sequence
  Description of Artificial Sequence: Synthetic oligonucleotide
gacacgacauucccaaagg

SEQ ID NO: 1479945 - RNA, 19 nt, Artificial Sequence
  Description of Artificial Sequence: Synthetic oligonucleotide
agggauuuggacgauguac

SEQ ID NO: 1479946 - RNA, 19 nt, Artificial Sequence
  Description of Artificial Sequence: Synthetic oligonucleotide
uccagcuaauguuugcagg

SEQ ID NO: 1479947 - RNA, 19 nt, Artificial Sequence
  Description of Artificial Sequence: Synthetic oligonucleotide
ugccaaagagccaacguug

SEQ ID NO: 1479948 - RNA, 19 nt, Artificial Sequence
  Description of Artificial Sequence: Synthetic oligonucleotide
ugcuaucauucuucgaacg

SEQ ID NO: 1479949 - RNA, 19 nt, Artificial Sequence
  Description of Artificial Sequence: Synthetic oligonucleotide
uuaucuuaugaaguucuag

SEQ ID NO: 1479950 - RNA, 19 nt, Artificial Sequence
  Description of Artificial Sequence: Synthetic oligonucleotide
auuuaacccucccauuggg

SEQ ID NO: 1479951 - RNA, 19 nt, Artificial Sequence
  Description of Artificial Sequence: Synthetic oligonucleotide
uagaugaacagguuggcuc

SEQ ID NO: 1479952 - RNA, 19 nt, Artificial Sequence
  Description of Artificial Sequence: Synthetic oligonucleotide
auaaagugcuaaguacugc

SEQ ID NO: 1479953 - RNA, 19 nt, Artificial Sequence
  Description of Artificial Sequence: Synthetic oligonucleotide
uguguguucacagggauac

SEQ ID NO: 1479954 - RNA, 19 nt, Artificial Sequence
  Description of Artificial Sequence: Synthetic oligonucleotide
acaaggucaaaggugagag

SEQ ID NO: 1479955 - RNA, 19 nt, Artificial Sequence
  Description of Artificial Sequence: Synthetic oligonucleotide
acgaugaacaaacggcagg

SEQ ID NO: 1479956 - RNA, 19 nt, Artificial Sequence
  Description of Artificial Sequence: Synthetic oligonucleotide
cuggugaguacgcugaggg

SEQ ID NO: 1479957 - RNA, 19 nt, Artificial Sequence
  Description of Artificial Sequence: Synthetic oligonucleotide
ugcuuuaggcacaacgaug

SEQ ID NO: 1479958 - RNA, 19 nt, Artificial Sequence
  Description of Artificial Sequence: Synthetic oligonucleotide
uguucacagggauacaaac

SEQ ID NO: 1479959 - RNA, 19 nt, Artificial Sequence
  Description of Artificial Sequence: Synthetic oligonucleotide
uucuucgaacguuugagcu

SEQ ID NO: 1479960 - RNA, 19 nt, Artificial Sequence
  Description of Artificial Sequence: Synthetic oligonucleotide
guagugagggcauugguac

SEQ ID NO: 1479961 - RNA, 19 nt, Artificial Sequence
  Description of Artificial Sequence: Synthetic oligonucleotide
cauuccaaucugaaagccg

SEQ ID NO: 1479962 - RNA, 19 nt, Artificial Sequence
  Description of Artificial Sequence: Synthetic oligonucleotide
aaccuuggcagacacgaca

SEQ ID NO: 1479963 - RNA, 19 nt, Artificial Sequence
  Description of Artificial Sequence: Synthetic oligonucleotide
gacugcuggauguagugag

SEQ ID NO: 1479964 - RNA, 19 nt, Artificial Sequence
  Description of Artificial Sequence: Synthetic oligonucleotide
uggagcucggugaagauuc

SEQ ID NO: 1479965 - RNA, 19 nt, Artificial Sequence
  Description of Artificial Sequence: Synthetic oligonucleotide
caaaggucaacacaagguc

SEQ ID NO: 1479966 - RNA, 19 nt, Artificial Sequence
  Description of Artificial Sequence: Synthetic oligonucleotide
ugcugaacuggugaguacg

SEQ ID NO: 1479967 - RNA, 19 nt, Artificial Sequence
  Description of Artificial Sequence: Synthetic oligonucleotide
caaagagccaacguugagg

SEQ ID NO: 1479968 - RNA, 19 nt, Artificial Sequence
  Description of Artificial Sequence: Synthetic oligonucleotide
cacggcaugugcuaguagg

SEQ ID NO: 1479969 - RNA, 19 nt, Artificial Sequence
  Description of Artificial Sequence: Synthetic oligonucleotide
agacacgacauucccaaag

SEQ ID NO: 1479970 - RNA, 19 nt, Artificial Sequence
  Description of Artificial Sequence: Synthetic oligonucleotide
cuugcuaucauucuucgaa

SEQ ID NO: 1479971 - RNA, 19 nt, Artificial Sequence
  Description of Artificial Sequence: Synthetic oligonucleotide
ucguuuauuucauuguuua

SEQ ID NO: 1479972 - RNA, 19 nt, Artificial Sequence
  Description of Artificial Sequence: Synthetic oligonucleotide
accgccauucaaugcagcc

SEQ ID NO: 1479973 - RNA, 19 nt, Artificial Sequence
  Description of Artificial Sequence: Synthetic oligonucleotide
ugaacuggugaguacgcug

SEQ ID NO: 1479974 - RNA, 19 nt, Artificial Sequence
  Description of Artificial Sequence: Synthetic oligonucleotide
uugcauuuaacccucccau

SEQ ID NO: 1479975 - RNA, 19 nt, Artificial Sequence
  Description of Artificial Sequence: Synthetic oligonucleotide
uuuuguagcugcauugcau

SEQ ID NO: 1479976 - RNA, 19 nt, Artificial Sequence
  Description of Artificial Sequence: Synthetic oligonucleotide
aaggucaaaggugagaguu

SEQ ID NO: 1479977 - RNA, 19 nt, Artificial Sequence
  Description of Artificial Sequence: Synthetic oligonucleotide
ugcuaaguacugcagcggc

SEQ ID NO: 1479978 - RNA, 19 nt, Artificial Sequence
  Description of Artificial Sequence: Synthetic oligonucleotide
aagggcauaaacaucugca

SEQ ID NO: 1479979 - RNA, 19 nt, Artificial Sequence
  Description of Artificial Sequence: Synthetic oligonucleotide
ugcagccaaauuuuguagc

SEQ ID NO: 1479980 - RNA, 19 nt, Artificial Sequence
  Description of Artificial Sequence: Synthetic oligonucleotide
uugucauaacuuacaaaac

SEQ ID NO: 1479981 - RNA, 19 nt, Artificial Sequence
  Description of Artificial Sequence: Synthetic oligonucleotide
cacgacauucccaaagggc

SEQ ID NO: 1479982 - RNA, 19 nt, Artificial Sequence
  Description of Artificial Sequence: Synthetic oligonucleotide
acuugguguguucugagcu

SEQ ID NO: 1479983 - RNA, 19 nt, Artificial Sequence
  Description of Artificial Sequence: Synthetic oligonucleotide
aaucugaaagccguucaug

SEQ ID NO: 1479984 - RNA, 19 nt, Artificial Sequence
  Description of Artificial Sequence: Synthetic oligonucleotide
gagacagggauuuggacga

SEQ ID NO: 1479985 - RNA, 19 nt, Artificial Sequence
  Description of Artificial Sequence: Synthetic oligonucleotide
cauucuucgaacguuugag

SEQ ID NO: 1479986 - RNA, 19 nt, Artificial Sequence
  Description of Artificial Sequence: Synthetic oligonucleotide
uguagugagggcauuggua

SEQ ID NO: 1479987 - RNA, 19 nt, Artificial Sequence
  Description of Artificial Sequence: Synthetic oligonucleotide
ucuucgaacguuugagcug

SEQ ID NO: 1479988 - RNA, 19 nt, Artificial Sequence
  Description of Artificial Sequence: Synthetic oligonucleotide
aucuuaugaaguucuagaa

SEQ ID NO: 1479989 - RNA, 19 nt, Artificial Sequence
  Description of Artificial Sequence: Synthetic oligonucleotide
cugaaagccguucauggac

SEQ ID NO: 1479990 - RNA, 19 nt, Artificial Sequence
  Description of Artificial Sequence: Synthetic oligonucleotide
uaacccucccauugggugg

SEQ ID NO: 1479991 - RNA, 19 nt, Artificial Sequence
  Description of Artificial Sequence: Synthetic oligonucleotide
guucaagcaucagagaagc

SEQ ID NO: 1479992 - RNA, 19 nt, Artificial Sequence
  Description of Artificial Sequence: Synthetic oligonucleotide
aaucaagugguuaucuuau

SEQ ID NO: 1479993 - RNA, 19 nt, Artificial Sequence
  Description of Artificial Sequence: Synthetic oligonucleotide
agaagaucuucucacucca

SEQ ID NO: 1479994 - RNA, 19 nt, Artificial Sequence
  Description of Artificial Sequence: Synthetic oligonucleotide
gucuaugaaaaccuuggca

SEQ ID NO: 1479995 - RNA, 19 nt, Artificial Sequence
  Description of Artificial Sequence: Synthetic oligonucleotide
ugaaggagcugcaaauaaa

SEQ ID NO: 1479996 - RNA, 19 nt, Artificial Sequence
  Description of Artificial Sequence: Synthetic oligonucleotide
ugaaagccguucauggacu

SEQ ID NO: 1479997 - RNA, 19 nt, Artificial Sequence
  Description of Artificial Sequence: Synthetic oligonucleotide
ugcauugcauuuaacccuc

SEQ ID NO: 1479998 - RNA, 19 nt, Artificial Sequence
  Description of Artificial Sequence: Synthetic oligonucleotide
uaaauucugguuguacaga

SEQ ID NO: 1479999 - RNA, 19 nt, Artificial Sequence
  Description of Artificial Sequence: Synthetic oligonucleotide
agugguuaucuuaugaagu

SEQ ID NO: 1480000 - RNA, 19 nt, Artificial Sequence
  Description of Artificial Sequence: Synthetic oligonucleotide
cagucguucuagcaaaacc

SEQ ID NO: 1480001 - RNA, 19 nt, Artificial Sequence
  Description of Artificial Sequence: Synthetic oligonucleotide
agcuagugcagccaaauuu

SEQ ID NO: 1480002 - RNA, 19 nt, Artificial Sequence
  Description of Artificial Sequence: Synthetic oligonucleotide
cuucgaacguuugagcugc

SEQ ID NO: 1480003 - RNA, 19 nt, Artificial Sequence
  Description of Artificial Sequence: Synthetic oligonucleotide
uuuagugacaucguuuauu

SEQ ID NO: 1480004 - RNA, 19 nt, Artificial Sequence
  Description of Artificial Sequence: Synthetic oligonucleotide
ucauuccaaucugaaagcc

SEQ ID NO: 1480005 - RNA, 19 nt, Artificial Sequence
  Description of Artificial Sequence: Synthetic oligonucleotide
uuuaggcacaacgaugaac

SEQ ID NO: 1480006 - RNA, 19 nt, Artificial Sequence
  Description of Artificial Sequence: Synthetic oligonucleotide
cacaucgacaugcuuuagg

SEQ ID NO: 1480007 - RNA, 19 nt, Artificial Sequence
  Description of Artificial Sequence: Synthetic oligonucleotide
caugcuuuaggcacaacga

SEQ ID NO: 1480008 - RNA, 19 nt, Artificial Sequence
  Description of Artificial Sequence: Synthetic oligonucleotide
auguacuugacgccacauc

SEQ ID NO: 1480009 - RNA, 19 nt, Artificial Sequence
  Description of Artificial Sequence: Synthetic oligonucleotide
acacgacauucccaaaggg

SEQ ID NO: 1480010 - RNA, 19 nt, Artificial Sequence
  Description of Artificial Sequence: Synthetic oligonucleotide
cauucaaugcagccauucc

SEQ ID NO: 1480011 - RNA, 19 nt, Artificial Sequence
  Description of Artificial Sequence: Synthetic oligonucleotide
agugccauuggaaaggcca

SEQ ID NO: 1480012 - RNA, 19 nt, Artificial Sequence
  Description of Artificial Sequence: Synthetic oligonucleotide
uacuugacgccacaucgac

SEQ ID NO: 1480013 - RNA, 19 nt, Artificial Sequence
  Description of Artificial Sequence: Synthetic oligonucleotide
gaacaaagccuggaagcgg

SEQ ID NO: 1480014 - RNA, 19 nt, Artificial Sequence
  Description of Artificial Sequence: Synthetic oligonucleotide
agugcagccaaauuuugua

SEQ ID NO: 1480015 - RNA, 19 nt, Artificial Sequence
  Description of Artificial Sequence: Synthetic oligonucleotide
gauuuggacgauguacuug

SEQ ID NO: 1480016 - RNA, 19 nt, Artificial Sequence
  Description of Artificial Sequence: Synthetic oligonucleotide
cugcaaauaaagugcuaag

SEQ ID NO: 1480017 - RNA, 19 nt, Artificial Sequence
  Description of Artificial Sequence: Synthetic oligonucleotide
uaucauucuucgaacguuu

SEQ ID NO: 1480018 - RNA, 19 nt, Artificial Sequence
  Description of Artificial Sequence: Synthetic oligonucleotide
aguucaagcaucagagaag

SEQ ID NO: 1480019 - RNA, 19 nt, Artificial Sequence
  Description of Artificial Sequence: Synthetic oligonucleotide
ucucaguagggcuugcuau

SEQ ID NO: 1480020 - RNA, 19 nt, Artificial Sequence
  Description of Artificial Sequence: Synthetic oligonucleotide
agacaggauugucauaacu

SEQ ID NO: 1480021 - RNA, 19 nt, Artificial Sequence
  Description of Artificial Sequence: Synthetic oligonucleotide
caagcaucagagaagcuga

SEQ ID NO: 1480022 - RNA, 19 nt, Artificial Sequence
  Description of Artificial Sequence: Synthetic oligonucleotide
auuuuguagcugcauugca

SEQ ID NO: 1480023 - RNA, 19 nt, Artificial Sequence
  Description of Artificial Sequence: Synthetic oligonucleotide
cuaauguuugcagggcucc

SEQ ID NO: 1480024 - RNA, 19 nt, Artificial Sequence
  Description of Artificial Sequence: Synthetic oligonucleotide
caacgaugaacaaacggca

SEQ ID NO: 1480025 - RNA, 19 nt, Artificial Sequence
  Description of Artificial Sequence: Synthetic oligonucleotide
caggauugucauaacuuac

SEQ ID NO: 1480026 - RNA, 19 nt, Artificial Sequence
  Description of Artificial Sequence: Synthetic oligonucleotide
gauugucauaacuuacaaa

SEQ ID NO: 1480027 - RNA, 19 nt, Artificial Sequence
  Description of Artificial Sequence: Synthetic oligonucleotide
uguguucacagggauacaa

SEQ ID NO: 1480028 - RNA, 19 nt, Artificial Sequence
  Description of Artificial Sequence: Synthetic oligonucleotide
uugcuaucauucuucgaac

SEQ ID NO: 1480029 - RNA, 19 nt, Artificial Sequence
  Description of Artificial Sequence: Synthetic oligonucleotide
acgacauucccaaagggca

SEQ ID NO: 1480030 - RNA, 19 nt, Artificial Sequence
  Description of Artificial Sequence: Synthetic oligonucleotide
ggcacaacgaugaacaaac

SEQ ID NO: 1480031 - RNA, 19 nt, Artificial Sequence
  Description of Artificial Sequence: Synthetic oligonucleotide
gguguugagguucccagag

SEQ ID NO: 1480032 - RNA, 19 nt, Artificial Sequence
  Description of Artificial Sequence: Synthetic oligonucleotide
ugguuguacagagugggga

SEQ ID NO: 1480033 - RNA, 19 nt, Artificial Sequence
  Description of Artificial Sequence: Synthetic oligonucleotide
ugacgccacaucgacaugc

SEQ ID NO: 1480034 - RNA, 19 nt, Artificial Sequence
  Description of Artificial Sequence: Synthetic oligonucleotide
ccagcuaauguuugcaggg

SEQ ID NO: 1480035 - RNA, 19 nt, Artificial Sequence
  Description of Artificial Sequence: Synthetic oligonucleotide
aucagaagaucuucucacu

SEQ ID NO: 1480036 - RNA, 19 nt, Artificial Sequence
  Description of Artificial Sequence: Synthetic oligonucleotide
uauuuucccuucagcaguc

SEQ ID NO: 1480037 - RNA, 19 nt, Artificial Sequence
  Description of Artificial Sequence: Synthetic oligonucleotide
ggaacaaagccuggaagcg

SEQ ID NO: 1480038 - RNA, 19 nt, Artificial Sequence
  Description of Artificial Sequence: Synthetic oligonucleotide
gaacaaacggcaggaauca

SEQ ID NO: 1480039 - RNA, 19 nt, Artificial Sequence
  Description of Artificial Sequence: Synthetic oligonucleotide
gugcagccaaauuuuguag

SEQ ID NO: 1480040 - RNA, 19 nt, Artificial Sequence
  Description of Artificial Sequence: Synthetic oligonucleotide
cuaaguacugcagcggcug

SEQ ID NO: 1480041 - RNA, 19 nt, Artificial Sequence
  Description of Artificial Sequence: Synthetic oligonucleotide
aaacggcaggaaucagaag

SEQ ID NO: 1480042 - RNA, 19 nt, Artificial Sequence
  Description of Artificial Sequence: Synthetic oligonucleotide
ugaggggacugcuggaugu

SEQ ID NO: 1480043 - RNA, 19 nt, Artificial Sequence
  Description of Artificial Sequence: Synthetic oligonucleotide
gguuguacagaguggggag

SEQ ID NO: 1480044 - RNA, 19 nt, Artificial Sequence
  Description of Artificial Sequence: Synthetic oligonucleotide
aucagagaagcugaagaga

SEQ ID NO: 1480045 - RNA, 19 nt, Artificial Sequence
  Description of Artificial Sequence: Synthetic oligonucleotide
ucccagugccauuggaaag

SEQ ID NO: 1480046 - RNA, 19 nt, Artificial Sequence
  Description of Artificial Sequence: Synthetic oligonucleotide
uggcagacacgacauuccc

SEQ ID NO: 1480047 - RNA, 19 nt, Artificial Sequence
  Description of Artificial Sequence: Synthetic oligonucleotide
agcuaauguuugcagggcu

SEQ ID NO: 1480048 - RNA, 19 nt, Artificial Sequence
  Description of Artificial Sequence: Synthetic oligonucleotide
acgcugaggggacugcugg

SEQ ID NO: 1480049 - RNA, 19 nt, Artificial Sequence
  Description of Artificial Sequence: Synthetic oligonucleotide
gaggggagcacucucagua

SEQ ID NO: 1480050 - RNA, 19 nt, Artificial Sequence
  Description of Artificial Sequence: Synthetic oligonucleotide
uuuucccuucagcagucgu

SEQ ID NO: 1480051 - RNA, 19 nt, Artificial Sequence
  Description of Artificial Sequence: Synthetic oligonucleotide
agaggaacaaagccuggaa

SEQ ID NO: 1480052 - RNA, 19 nt, Artificial Sequence
  Description of Artificial Sequence: Synthetic oligonucleotide
aacuggugaguacgcugag

SEQ ID NO: 1480053 - RNA, 19 nt, Artificial Sequence
  Description of Artificial Sequence: Synthetic oligonucleotide
auuccugccaaagagccaa

SEQ ID NO: 1480054 - RNA, 19 nt, Artificial Sequence
  Description of Artificial Sequence: Synthetic oligonucleotide
cuaagcacacagaggaaca

SEQ ID NO: 1480055 - RNA, 19 nt, Artificial Sequence
  Description of Artificial Sequence: Synthetic oligonucleotide
cauugcauuuaacccuccc

SEQ ID NO: 1480056 - RNA, 19 nt, Artificial Sequence
  Description of Artificial Sequence: Synthetic oligonucleotide
cuaugaaaaccuuggcaga

SEQ ID NO: 1480057 - RNA, 19 nt, Artificial Sequence
  Description of Artificial Sequence: Synthetic oligonucleotide
ucacaaaaucaagugguua

SEQ ID NO: 1480058 - RNA, 19 nt, Artificial Sequence
  Description of Artificial Sequence: Synthetic oligonucleotide
ugcuggauaccagaauaug

SEQ ID NO: 1480059 - RNA, 19 nt, Artificial Sequence
  Description of Artificial Sequence: Synthetic oligonucleotide
uuuuagugacaucguuuau

SEQ ID NO: 1480060 - RNA, 19 nt, Artificial Sequence
  Description of Artificial Sequence: Synthetic oligonucleotide
caaacggcaggaaucagaa

SEQ ID NO: 1480061 - RNA, 19 nt, Artificial Sequence
  Description of Artificial Sequence: Synthetic oligonucleotide
augcuuuaggcacaacgau

SEQ ID NO: 1480062 - RNA, 19 nt, Artificial Sequence
  Description of Artificial Sequence: Synthetic oligonucleotide
gcaucagagaagcugaaga

SEQ ID NO: 1480063 - RNA, 19 nt, Artificial Sequence
  Description of Artificial Sequence: Synthetic oligonucleotide
cuagugcagccaaauuuug

SEQ ID NO: 1480064 - RNA, 19 nt, Artificial Sequence
  Description of Artificial Sequence: Synthetic oligonucleotide
uacaaagaauuggaaucac

SEQ ID NO: 1480065 - RNA, 19 nt, Artificial Sequence
  Description of Artificial Sequence: Synthetic oligonucleotide
gacgauguacuugacgcca

SEQ ID NO: 1480066 - RNA, 19 nt, Artificial Sequence
  Description of Artificial Sequence: Synthetic oligonucleotide
gaagcggacuggcugugug

SEQ ID NO: 1480067 - RNA, 19 nt, Artificial Sequence
  Description of Artificial Sequence: Synthetic oligonucleotide
aggauugucauaacuuaca

SEQ ID NO: 1480068 - RNA, 19 nt, Artificial Sequence
  Description of Artificial Sequence: Synthetic oligonucleotide
uuguacagaguggggagug

SEQ ID NO: 1480069 - RNA, 19 nt, Artificial Sequence
  Description of Artificial Sequence: Synthetic oligonucleotide
agggcauugguaccacuug

SEQ ID NO: 1480070 - RNA, 19 nt, Artificial Sequence
  Description of Artificial Sequence: Synthetic oligonucleotide
aucaagugguuaucuuaug

SEQ ID NO: 1480071 - RNA, 19 nt, Artificial Sequence
  Description of Artificial Sequence: Synthetic oligonucleotide
aaggagcugcaaauaaagu

SEQ ID NO: 1480072 - RNA, 19 nt, Artificial Sequence
  Description of Artificial Sequence: Synthetic oligonucleotide
gaagagacagggauuugga

SEQ ID NO: 1480073 - RNA, 19 nt, Artificial Sequence
  Description of Artificial Sequence: Synthetic oligonucleotide
uaccagaauaugccugggu

SEQ ID NO: 1480074 - RNA, 19 nt, Artificial Sequence
  Description of Artificial Sequence: Synthetic oligonucleotide
cuccagcuaauguuugcag

SEQ ID NO: 1480075 - RNA, 19 nt, Artificial Sequence
  Description of Artificial Sequence: Synthetic oligonucleotide
agguuugucugcuugucua

SEQ ID NO: 1480076 - RNA, 19 nt, Artificial Sequence
  Description of Artificial Sequence: Synthetic oligonucleotide
cugguuguacagagugggg

SEQ ID NO: 1480077 - RNA, 19 nt, Artificial Sequence
  Description of Artificial Sequence: Synthetic oligonucleotide
agcagcauauugcuggaua

SEQ ID NO: 1480078 - RNA, 19 nt, Artificial Sequence
  Description of Artificial Sequence: Synthetic oligonucleotide
gaacuggugaguacgcuga

SEQ ID NO: 1480079 - RNA, 19 nt, Artificial Sequence
  Description of Artificial Sequence: Synthetic oligonucleotide
cucaguagggcuugcuauc

SEQ ID NO: 1480080 - RNA, 19 nt, Artificial Sequence
  Description of Artificial Sequence: Synthetic oligonucleotide
aaaccuuggcagacacgac

SEQ ID NO: 1480081 - RNA, 19 nt, Artificial Sequence
  Description of Artificial Sequence: Synthetic oligonucleotide
uaugggguugacagaguua

SEQ ID NO: 1480082 - RNA, 19 nt, Artificial Sequence
  Description of Artificial Sequence: Synthetic oligonucleotide
ugguuaucuuaugaaguuc

SEQ ID NO: 1480083 - RNA, 19 nt, Artificial Sequence
  Description of Artificial Sequence: Synthetic oligonucleotide
agacaguuacaaagaauug

SEQ ID NO: 1480084 - RNA, 19 nt, Artificial Sequence
  Description of Artificial Sequence: Synthetic oligonucleotide
uacaaacaccacacggcau

SEQ ID NO: 1480085 - RNA, 19 nt, Artificial Sequence
  Description of Artificial Sequence: Synthetic oligonucleotide
aauguuugcagggcuccaa

SEQ ID NO: 1480086 - RNA, 19 nt, Artificial Sequence
  Description of Artificial Sequence: Synthetic oligonucleotide
cagaccgccauucaaugca

SEQ ID NO: 1480087 - RNA, 19 nt, Artificial Sequence
  Description of Artificial Sequence: Synthetic oligonucleotide
aguacgcugaggggacugc

SEQ ID NO: 1480088 - RNA, 19 nt, Artificial Sequence
  Description of Artificial Sequence: Synthetic oligonucleotide
ugaggccagcuguugcucc

SEQ ID NO: 1480089 - RNA, 19 nt, Artificial Sequence
  Description of Artificial Sequence: Synthetic oligonucleotide
cacaaaaucaagugguuau

SEQ ID NO: 1480090 - RNA, 19 nt, Artificial Sequence
  Description of Artificial Sequence: Synthetic oligonucleotide
uccaaucugaaagccguuc

SEQ ID NO: 1480091 - RNA, 19 nt, Artificial Sequence
  Description of Artificial Sequence: Synthetic oligonucleotide
guguugagguucccagagg

SEQ ID NO: 1480092 - RNA, 19 nt, Artificial Sequence
  Description of Artificial Sequence: Synthetic oligonucleotide
auguagugagggcauuggu

SEQ ID NO: 1480093 - RNA, 19 nt, Artificial Sequence
  Description of Artificial Sequence: Synthetic oligonucleotide
uacgcugaggggacugcug

SEQ ID NO: 1480094 - RNA, 19 nt, Artificial Sequence
  Description of Artificial Sequence: Synthetic oligonucleotide
acaaacggcaggaaucaga

SEQ ID NO: 1480095 - RNA, 19 nt, Artificial Sequence
  Description of Artificial Sequence: Synthetic oligonucleotide
aagcggacuggcugugugu

SEQ ID NO: 1480096 - RNA, 19 nt, Artificial Sequence
  Description of Artificial Sequence: Synthetic oligonucleotide
uccugccaaagagccaacg

SEQ ID NO: 1480097 - RNA, 19 nt, Artificial Sequence
  Description of Artificial Sequence: Synthetic oligonucleotide
ugcauuuaacccucccauu

SEQ ID NO: 1480098 - RNA, 19 nt, Artificial Sequence
  Description of Artificial Sequence: Synthetic oligonucleotide
gggcauugguaccacuugg

SEQ ID NO: 1480099 - RNA, 19 nt, Artificial Sequence
  Description of Artificial Sequence: Synthetic oligonucleotide
cuugacgccacaucgacau

SEQ ID NO: 1480100 - RNA, 19 nt, Artificial Sequence
  Description of Artificial Sequence: Synthetic oligonucleotide
uguagcugcauugcauuua

SEQ ID NO: 1480101 - RNA, 19 nt, Artificial Sequence
  Description of Artificial Sequence: Synthetic oligonucleotide
gugcuaaguacugcagcgg

SEQ ID NO: 1480102 - RNA, 19 nt, Artificial Sequence
  Description of Artificial Sequence: Synthetic oligonucleotide
ugcuaguagggcugcucug

SEQ ID NO: 1480103 - RNA, 19 nt, Artificial Sequence
  Description of Artificial Sequence: Synthetic oligonucleotide
gaacguuugagcugcacuu

SEQ ID NO: 1480104 - RNA, 19 nt, Artificial Sequence
  Description of Artificial Sequence: Synthetic oligonucleotide
ggcuugcuaucauucuucg

SEQ ID NO: 1480105 - RNA, 19 nt, Artificial Sequence
  Description of Artificial Sequence: Synthetic oligonucleotide
ggguugacagaguuacugc

SEQ ID NO: 1480106 - RNA, 19 nt, Artificial Sequence
  Description of Artificial Sequence: Synthetic oligonucleotide
acggcaugugcuaguaggg

SEQ ID NO: 1480107 - RNA, 19 nt, Artificial Sequence
  Description of Artificial Sequence: Synthetic oligonucleotide
gcuuuaggcacaacgauga

SEQ ID NO: 1480108 - RNA, 19 nt, Artificial Sequence
  Description of Artificial Sequence: Synthetic oligonucleotide
gcagcauauugcuggauac

SEQ ID NO: 1480109 - RNA, 19 nt, Artificial Sequence
  Description of Artificial Sequence: Synthetic oligonucleotide
gugucaauaaauucugguu

SEQ ID NO: 1480110 - RNA, 19 nt, Artificial Sequence
  Description of Artificial Sequence: Synthetic oligonucleotide
cugcacuagcugcagcagc

SEQ ID NO: 1480111 - RNA, 19 nt, Artificial Sequence
  Description of Artificial Sequence: Synthetic oligonucleotide
ggauaccagaauaugccug

SEQ ID NO: 1480112 - RNA, 19 nt, Artificial Sequence
  Description of Artificial Sequence: Synthetic oligonucleotide
uuuggacgauguacuugac

SEQ ID NO: 1480113 - RNA, 19 nt, Artificial Sequence
  Description of Artificial Sequence: Synthetic oligonucleotide
cugcauugcauuuaacccu

SEQ ID NO: 1480114 - RNA, 19 nt, Artificial Sequence
  Description of Artificial Sequence: Synthetic oligonucleotide
uguacagaguggggagugc

SEQ ID NO: 1480115 - RNA, 19 nt, Artificial Sequence
  Description of Artificial Sequence: Synthetic oligonucleotide
cagcauauugcuggauacc

SEQ ID NO: 1480116 - RNA, 19 nt, Artificial Sequence
  Description of Artificial Sequence: Synthetic oligonucleotide
acagggauuuggacgaugu

SEQ ID NO: 1480117 - RNA, 19 nt, Artificial Sequence
  Description of Artificial Sequence: Synthetic oligonucleotide
uucaagcaucagagaagcu

SEQ ID NO: 1480118 - RNA, 19 nt, Artificial Sequence
  Description of Artificial Sequence: Synthetic oligonucleotide
ggugaguacgcugagggga

SEQ ID NO: 1480119 - RNA, 19 nt, Artificial Sequence
  Description of Artificial Sequence: Synthetic oligonucleotide
ggucaacacaaggucaaag

SEQ ID NO: 1480120 - RNA, 19 nt, Artificial Sequence
  Description of Artificial Sequence: Synthetic oligonucleotide
aacguuugagcugcacuuu

SEQ ID NO: 1480121 - RNA, 19 nt, Artificial Sequence
  Description of Artificial Sequence: Synthetic oligonucleotide
gaugaacagguuggcuccc

SEQ ID NO: 1480122 - RNA, 19 nt, Artificial Sequence
  Description of Artificial Sequence: Synthetic oligonucleotide
gagacaggauugucauaac

SEQ ID NO: 1480123 - RNA, 19 nt, Artificial Sequence
  Description of Artificial Sequence: Synthetic oligonucleotide
cagguccuggucuccaaac

SEQ ID NO: 1480124 - RNA, 19 nt, Artificial Sequence
  Description of Artificial Sequence: Synthetic oligonucleotide
ugugcuaguagggcugcuc

SEQ ID NO: 1480125 - RNA, 19 nt, Artificial Sequence
  Description of Artificial Sequence: Synthetic oligonucleotide
uuguagcugcauugcauuu

SEQ ID NO: 1480126 - RNA, 19 nt, Artificial Sequence
  Description of Artificial Sequence: Synthetic oligonucleotide
ggaaaggccacugcugccc

SEQ ID NO: 1480127 - RNA, 19 nt, Artificial Sequence
  Description of Artificial Sequence: Synthetic oligonucleotide
ggggagcacucucaguagg

SEQ ID NO: 1480128 - RNA, 19 nt, Artificial Sequence
  Description of Artificial Sequence: Synthetic oligonucleotide
uaauguuugcagggcucca

SEQ ID NO: 1480129 - RNA, 19 nt, Artificial Sequence
  Description of Artificial Sequence: Synthetic oligonucleotide
cagcuaauguuugcagggc

SEQ ID NO: 1480130 - RNA, 19 nt, Artificial Sequence
  Description of Artificial Sequence: Synthetic oligonucleotide
auauugcuggauaccagaa

SEQ ID NO: 1480131 - RNA, 19 nt, Artificial Sequence
  Description of Artificial Sequence: Synthetic oligonucleotide
aaacaccacacggcaugug

SEQ ID NO: 1480132 - RNA, 19 nt, Artificial Sequence
  Description of Artificial Sequence: Synthetic oligonucleotide
uucugcugaacuggugagu

SEQ ID NO: 1480133 - RNA, 19 nt, Artificial Sequence
  Description of Artificial Sequence: Synthetic oligonucleotide
caucgacaugcuuuaggca

SEQ ID NO: 1480134 - RNA, 19 nt, Artificial Sequence
  Description of Artificial Sequence: Synthetic oligonucleotide
aucauucuucgaacguuug

SEQ ID NO: 1480135 - RNA, 19 nt, Artificial Sequence
  Description of Artificial Sequence: Synthetic oligonucleotide
cauuggaaaggccacugcu

SEQ ID NO: 1480136 - RNA, 19 nt, Artificial Sequence
  Description of Artificial Sequence: Synthetic oligonucleotide
accacuugguguguucuga

SEQ ID NO: 1480137 - RNA, 19 nt, Artificial Sequence
  Description of Artificial Sequence: Synthetic oligonucleotide
ggacgauguacuugacgcc

SEQ ID NO: 1480138 - RNA, 19 nt, Artificial Sequence
  Description of Artificial Sequence: Synthetic oligonucleotide
caugugcuaguagggcugc

SEQ ID NO: 1480139 - RNA, 19 nt, Artificial Sequence
  Description of Artificial Sequence: Synthetic oligonucleotide
gacagggauuuggacgaug

SEQ ID NO: 1480140 - RNA, 19 nt, Artificial Sequence
  Description of Artificial Sequence: Synthetic oligonucleotide
cugagcugcacuagcugca

SEQ ID NO: 1480141 - RNA, 19 nt, Artificial Sequence
  Description of Artificial Sequence: Synthetic oligonucleotide
aacccucccauugggugga

SEQ ID NO: 1480142 - RNA, 19 nt, Artificial Sequence
  Description of Artificial Sequence: Synthetic oligonucleotide
acacggcaugugcuaguag

SEQ ID NO: 1480143 - RNA, 19 nt, Artificial Sequence
  Description of Artificial Sequence: Synthetic oligonucleotide
acguuugagcugcacuuua

SEQ ID NO: 1480144 - RNA, 19 nt, Artificial Sequence
  Description of Artificial Sequence: Synthetic oligonucleotide
ggucaaaggugagaguuca

SEQ ID NO: 1480145 - RNA, 19 nt, Artificial Sequence
  Description of Artificial Sequence: Synthetic oligonucleotide
accacacggcaugugcuag

SEQ ID NO: 1480146 - RNA, 19 nt, Artificial Sequence
  Description of Artificial Sequence: Synthetic oligonucleotide
aggcacaacgaugaacaaa

SEQ ID NO: 1480147 - RNA, 19 nt, Artificial Sequence
  Description of Artificial Sequence: Synthetic oligonucleotide
uaggcacaacgaugaacaa

SEQ ID NO: 1480148 - RNA, 19 nt, Artificial Sequence
  Description of Artificial Sequence: Synthetic oligonucleotide
ggugcucccagugccauug

SEQ ID NO: 1480149 - RNA, 19 nt, Artificial Sequence
  Description of Artificial Sequence: Synthetic oligonucleotide
cugaggggacugcuggaug

SEQ ID NO: 1480150 - RNA, 19 nt, Artificial Sequence
  Description of Artificial Sequence: Synthetic oligonucleotide
gaguacgcugaggggacug

SEQ ID NO: 1480151 - RNA, 19 nt, Artificial Sequence
  Description of Artificial Sequence: Synthetic oligonucleotide
ucucagaggggagcacucu

SEQ ID NO: 1480152 - RNA, 19 nt, Artificial Sequence
  Description of Artificial Sequence: Synthetic oligonucleotide
uugacgccacaucgacaug

SEQ ID NO: 1480153 - RNA, 19 nt, Artificial Sequence
  Description of Artificial Sequence: Synthetic oligonucleotide
gaugaacaaacggcaggaa

SEQ ID NO: 1480154 - RNA, 19 nt, Artificial Sequence
  Description of Artificial Sequence: Synthetic oligonucleotide
acacuugcucagguuuguc

SEQ ID NO: 1480155 - RNA, 19 nt, Artificial Sequence
  Description of Artificial Sequence: Synthetic oligonucleotide
gugaguacgcugaggggac

SEQ ID NO: 1480156 - RNA, 19 nt, Artificial Sequence
  Description of Artificial Sequence: Synthetic oligonucleotide
aacguugaggccagcuguu

SEQ ID NO: 1480157 - RNA, 19 nt, Artificial Sequence
  Description of Artificial Sequence: Synthetic oligonucleotide
gguugacagaguuacugcu

SEQ ID NO: 1480158 - RNA, 19 nt, Artificial Sequence
  Description of Artificial Sequence: Synthetic oligonucleotide
caacguugaggccagcugu

SEQ ID NO: 1480159 - RNA, 19 nt, Artificial Sequence
  Description of Artificial Sequence: Synthetic oligonucleotide
gaacagguuggcucccucu

SEQ ID NO: 1480160 - RNA, 19 nt, Artificial Sequence
  Description of Artificial Sequence: Synthetic oligonucleotide
cagcagucguucuagcaaa

SEQ ID NO: 1480161 - RNA, 19 nt, Artificial Sequence
  Description of Artificial Sequence: Synthetic oligonucleotide
ugggguugacagaguuacu

SEQ ID NO: 1480162 - RNA, 19 nt, Artificial Sequence
  Description of Artificial Sequence: Synthetic oligonucleotide
cacaaggucaaaggugaga

SEQ ID NO: 1480163 - RNA, 19 nt, Artificial Sequence
  Description of Artificial Sequence: Synthetic oligonucleotide
gcuccaagugaggcuaugg

SEQ ID NO: 1480164 - RNA, 19 nt, Artificial Sequence
  Description of Artificial Sequence: Synthetic oligonucleotide
cagugccauuggaaaggcc

SEQ ID NO: 1480165 - RNA, 19 nt, Artificial Sequence
  Description of Artificial Sequence: Synthetic oligonucleotide
agaccgccauucaaugcag

SEQ ID NO: 1480166 - RNA, 19 nt, Artificial Sequence
  Description of Artificial Sequence: Synthetic oligonucleotide
cagaguuacugcugcugga

SEQ ID NO: 1480167 - RNA, 19 nt, Artificial Sequence
  Description of Artificial Sequence: Synthetic oligonucleotide
ggauguagugagggcauug

SEQ ID NO: 1480168 - RNA, 19 nt, Artificial Sequence
  Description of Artificial Sequence: Synthetic oligonucleotide
guacuugacgccacaucga

SEQ ID NO: 1480169 - RNA, 19 nt, Artificial Sequence
  Description of Artificial Sequence: Synthetic oligonucleotide
acggcaggaaucagaagau

SEQ ID NO: 1480170 - RNA, 19 nt, Artificial Sequence
  Description of Artificial Sequence: Synthetic oligonucleotide
ucgaacguuugagcugcac

SEQ ID NO: 1480171 - RNA, 19 nt, Artificial Sequence
  Description of Artificial Sequence: Synthetic oligonucleotide
caucguuuauuucauuguu

SEQ ID NO: 1480172 - RNA, 19 nt, Artificial Sequence
  Description of Artificial Sequence: Synthetic oligonucleotide
cccaaagggcauaaacauc

SEQ ID NO: 1480173 - RNA, 19 nt, Artificial Sequence
  Description of Artificial Sequence: Synthetic oligonucleotide
guuaucuuaugaaguucua

SEQ ID NO: 1480174 - RNA, 19 nt, Artificial Sequence
  Description of Artificial Sequence: Synthetic oligonucleotide
gcuaauguuugcagggcuc

SEQ ID NO: 1480175 - RNA, 19 nt, Artificial Sequence
  Description of Artificial Sequence: Synthetic oligonucleotide
cauggugcucccagugcca

SEQ ID NO: 1480176 - RNA, 19 nt, Artificial Sequence
  Description of Artificial Sequence: Synthetic oligonucleotide
gcuaucauucuucgaacgu

SEQ ID NO: 1480177 - RNA, 19 nt, Artificial Sequence
  Description of Artificial Sequence: Synthetic oligonucleotide
guacugcagcggcugcacc

SEQ ID NO: 1480178 - RNA, 19 nt, Artificial Sequence
  Description of Artificial Sequence: Synthetic oligonucleotide
gguaccacuugguguguuc

SEQ ID NO: 1480179 - RNA, 19 nt, Artificial Sequence
  Description of Artificial Sequence: Synthetic oligonucleotide
ggagcacucucaguagggc

SEQ ID NO: 1480180 - RNA, 19 nt, Artificial Sequence
  Description of Artificial Sequence: Synthetic oligonucleotide
guugcuccagcuaauguuu

SEQ ID NO: 1480181 - RNA, 19 nt, Artificial Sequence
  Description of Artificial Sequence: Synthetic oligonucleotide
uuccugccaaagagccaac

SEQ ID NO: 1480182 - RNA, 19 nt, Artificial Sequence
  Description of Artificial Sequence: Synthetic oligonucleotide
gcugagacaggauugucau

SEQ ID NO: 1480183 - RNA, 19 nt, Artificial Sequence
  Description of Artificial Sequence: Synthetic oligonucleotide
ccagaccgccauucaaugc

SEQ ID NO: 1480184 - RNA, 19 nt, Artificial Sequence
  Description of Artificial Sequence: Synthetic oligonucleotide
acuugacgccacaucgaca

SEQ ID NO: 1480185 - RNA, 19 nt, Artificial Sequence
  Description of Artificial Sequence: Synthetic oligonucleotide
uucgaacguuugagcugca

SEQ ID NO: 1480186 - RNA, 19 nt, Artificial Sequence
  Description of Artificial Sequence: Synthetic oligonucleotide
gggauuuggacgauguacu

SEQ ID NO: 1480187 - RNA, 19 nt, Artificial Sequence
  Description of Artificial Sequence: Synthetic oligonucleotide
guagaugaacagguuggcu

SEQ ID NO: 1480188 - RNA, 19 nt, Artificial Sequence
  Description of Artificial Sequence: Synthetic oligonucleotide
gcagccaaauuuuguagcu

SEQ ID NO: 1480189 - RNA, 19 nt, Artificial Sequence
  Description of Artificial Sequence: Synthetic oligonucleotide
ccauuggaaaggccacugc

SEQ ID NO: 1480190 - RNA, 19 nt, Artificial Sequence
  Description of Artificial Sequence: Synthetic oligonucleotide
ccaaagagccaacguugag

SEQ ID NO: 1480191 - RNA, 19 nt, Artificial Sequence
  Description of Artificial Sequence: Synthetic oligonucleotide
gccguucauggacuggaug

SEQ ID NO: 1480192 - RNA, 19 nt, Artificial Sequence
  Description of Artificial Sequence: Synthetic oligonucleotide
gccauuggaaaggccacug

SEQ ID NO: 1480193 - RNA, 19 nt, Artificial Sequence
  Description of Artificial Sequence: Synthetic oligonucleotide
cucucaguagggcuugcua

SEQ ID NO: 1480194 - RNA, 19 nt, Artificial Sequence
  Description of Artificial Sequence: Synthetic oligonucleotide
cugcugaggccgagucccg

SEQ ID NO: 1480195 - RNA, 19 nt, Artificial Sequence
  Description of Artificial Sequence: Synthetic oligonucleotide
ccauucaaugcagccauuc

SEQ ID NO: 1480196 - RNA, 19 nt, Artificial Sequence
  Description of Artificial Sequence: Synthetic oligonucleotide
gaccgccauucaaugcagc

SEQ ID NO: 1480197 - RNA, 19 nt, Artificial Sequence
  Description of Artificial Sequence: Synthetic oligonucleotide
gcugaacuggugaguacgc

SEQ ID NO: 1480198 - RNA, 19 nt, Artificial Sequence
  Description of Artificial Sequence: Synthetic oligonucleotide
ggagccuccgcgucccgcc

SEQ ID NO: 1480199 - RNA, 19 nt, Artificial Sequence
  Description of Artificial Sequence: Synthetic oligonucleotide
acguugaggccagcuguug

SEQ ID NO: 1480200 - RNA, 19 nt, Artificial Sequence
  Description of Artificial Sequence: Synthetic oligonucleotide
ugaguacgcugaggggacu

SEQ ID NO: 1480201 - RNA, 19 nt, Artificial Sequence
  Description of Artificial Sequence: Synthetic oligonucleotide
cccagaccgccauucaaug

SEQ ID NO: 1480202 - RNA, 19 nt, Artificial Sequence
  Description of Artificial Sequence: Synthetic oligonucleotide
gcuaguagggcugcucuga

SEQ ID NO: 1480203 - RNA, 19 nt, Artificial Sequence
  Description of Artificial Sequence: Synthetic oligonucleotide
guguucacagggauacaaa

SEQ ID NO: 1480204 - RNA, 19 nt, Artificial Sequence
  Description of Artificial Sequence: Synthetic oligonucleotide
gauguacuugacgccacau

SEQ ID NO: 1480205 - RNA, 19 nt, Artificial Sequence
  Description of Artificial Sequence: Synthetic oligonucleotide
gauacucugcugugucaau

SEQ ID NO: 1480206 - RNA, 19 nt, Artificial Sequence
  Description of Artificial Sequence: Synthetic oligonucleotide
gcacaacgaugaacaaacg

SEQ ID NO: 1480207 - RNA, 19 nt, Artificial Sequence
  Description of Artificial Sequence: Synthetic oligonucleotide
cuaucauucuucgaacguu

SEQ ID NO: 1480208 - RNA, 19 nt, Artificial Sequence
  Description of Artificial Sequence: Synthetic oligonucleotide
cuggaagcggacuggcugu

SEQ ID NO: 1480209 - RNA, 19 nt, Artificial Sequence
  Description of Artificial Sequence: Synthetic oligonucleotide
caaaacacuugcucagguu

SEQ ID NO: 1480210 - RNA, 19 nt, Artificial Sequence
  Description of Artificial Sequence: Synthetic oligonucleotide
agcggacuggcuguguguu

SEQ ID NO: 1480211 - RNA, 19 nt, Artificial Sequence
  Description of Artificial Sequence: Synthetic oligonucleotide
uuccagcagcaccgauacu

SEQ ID NO: 1480212 - RNA, 19 nt, Artificial Sequence
  Description of Artificial Sequence: Synthetic oligonucleotide
cuaugggguugacagaguu

SEQ ID NO: 1480213 - RNA, 19 nt, Artificial Sequence
  Description of Artificial Sequence: Synthetic oligonucleotide
guuguacagaguggggagu

SEQ ID NO: 1480214 - RNA, 19 nt, Artificial Sequence
  Description of Artificial Sequence: Synthetic oligonucleotide
cuggauguagugagggcau

SEQ ID NO: 1480215 - RNA, 19 nt, Artificial Sequence
  Description of Artificial Sequence: Synthetic oligonucleotide
guaccacuugguguguucu

SEQ ID NO: 1480216 - RNA, 19 nt, Artificial Sequence
  Description of Artificial Sequence: Synthetic oligonucleotide
gcucaggguguugagguuc

SEQ ID NO: 1480217 - RNA, 19 nt, Artificial Sequence
  Description of Artificial Sequence: Synthetic oligonucleotide
gguguguucugagcugcac

SEQ ID NO: 1480218 - RNA, 19 nt, Artificial Sequence
  Description of Artificial Sequence: Synthetic oligonucleotide
gagggcauugguaccacuu

SEQ ID NO: 1480219 - RNA, 19 nt, Artificial Sequence
  Description of Artificial Sequence: Synthetic oligonucleotide
gcuugcuaucauucuucga

SEQ ID NO: 1480220 - RNA, 19 nt, Artificial Sequence
  Description of Artificial Sequence: Synthetic oligonucleotide
gcuagugcagccaaauuuu

SEQ ID NO: 1480221 - RNA, 19 nt, Artificial Sequence
  Description of Artificial Sequence: Synthetic oligonucleotide
cuguugcuccagcuaaugu

SEQ ID NO: 1480222 - RNA, 19 nt, Artificial Sequence
  Description of Artificial Sequence: Synthetic oligonucleotide
cccauuggguggaggcugc

SEQ ID NO: 1480223 - RNA, 19 nt, Artificial Sequence
  Description of Artificial Sequence: Synthetic oligonucleotide
cguucauggacuggauggc

SEQ ID NO: 1480224 - RNA, 19 nt, Artificial Sequence
  Description of Artificial Sequence: Synthetic oligonucleotide
gcagucguucuagcaaaac

SEQ ID NO: 1480225 - RNA, 19 nt, Artificial Sequence
  Description of Artificial Sequence: Synthetic oligonucleotide
caccacacggcaugugcua

SEQ ID NO: 1480226 - RNA, 19 nt, Artificial Sequence
  Description of Artificial Sequence: Synthetic oligonucleotide
gccaaauuuuguagcugca

SEQ ID NO: 1480227 - RNA, 19 nt, Artificial Sequence
  Description of Artificial Sequence: Synthetic oligonucleotide
gacaugcuuuaggcacaac

SEQ ID NO: 1480228 - RNA, 19 nt, Artificial Sequence
  Description of Artificial Sequence: Synthetic oligonucleotide
agcagucguucuagcaaaa

SEQ ID NO: 1480229 - RNA, 19 nt, Artificial Sequence
  Description of Artificial Sequence: Synthetic oligonucleotide
cagcaccgauacucugcug

SEQ ID NO: 1480230 - RNA, 19 nt, Artificial Sequence
  Description of Artificial Sequence: Synthetic oligonucleotide
cgaugaacaaacggcagga

SEQ ID NO: 1480231 - RNA, 19 nt, Artificial Sequence
  Description of Artificial Sequence: Synthetic oligonucleotide
gguuugucugcuugucuau

SEQ ID NO: 1480232 - RNA, 19 nt, Artificial Sequence
  Description of Artificial Sequence: Synthetic oligonucleotide
gcugcccagaccgccauuc

SEQ ID NO: 1480233 - RNA, 19 nt, Artificial Sequence
  Description of Artificial Sequence: Synthetic oligonucleotide
ugguaccacuugguguguu

SEQ ID NO: 1480234 - RNA, 19 nt, Artificial Sequence
  Description of Artificial Sequence: Synthetic oligonucleotide
gcacucucaguagggcuug

SEQ ID NO: 1480235 - RNA, 19 nt, Artificial Sequence
  Description of Artificial Sequence: Synthetic oligonucleotide
cguucuagcaaaaccaauu

SEQ ID NO: 1480236 - RNA, 19 nt, Artificial Sequence
  Description of Artificial Sequence: Synthetic oligonucleotide
gacgccacaucgacaugcu

SEQ ID NO: 1480237 - RNA, 19 nt, Artificial Sequence
  Description of Artificial Sequence: Synthetic oligonucleotide
acgccacaucgacaugcuu

SEQ ID NO: 1480238 - RNA, 19 nt, Artificial Sequence
  Description of Artificial Sequence: Synthetic oligonucleotide
gcacuuuaagccucuucau

SEQ ID NO: 1480239 - RNA, 19 nt, Artificial Sequence
  Description of Artificial Sequence: Synthetic oligonucleotide
cagggauuuggacgaugua

SEQ ID NO: 1480240 - RNA, 19 nt, Artificial Sequence
  Description of Artificial Sequence: Synthetic oligonucleotide
agccaacguugaggccagc

SEQ ID NO: 1480241 - RNA, 19 nt, Artificial Sequence
  Description of Artificial Sequence: Synthetic oligonucleotide
gcuuccagcagcaccgaua

SEQ ID NO: 1480242 - RNA, 19 nt, Artificial Sequence
  Description of Artificial Sequence: Synthetic oligonucleotide
augugcuaguagggcugcu

SEQ ID NO: 1480243 - RNA, 19 nt, Artificial Sequence
  Description of Artificial Sequence: Synthetic oligonucleotide
uggugcucccagugccauu

SEQ ID NO: 1480244 - RNA, 19 nt, Artificial Sequence
  Description of Artificial Sequence: Synthetic oligonucleotide
caaagccuggaagcggacu

SEQ ID NO: 1480245 - RNA, 19 nt, Artificial Sequence
  Description of Artificial Sequence: Synthetic oligonucleotide
agcagcuagugcagccaaa

SEQ ID NO: 1480246 - RNA, 19 nt, Artificial Sequence
  Description of Artificial Sequence: Synthetic oligonucleotide
ggauuuggacgauguacuu

SEQ ID NO: 1480247 - RNA, 19 nt, Artificial Sequence
  Description of Artificial Sequence: Synthetic oligonucleotide
gcucccagugccauuggaa

SEQ ID NO: 1480248 - RNA, 19 nt, Artificial Sequence
  Description of Artificial Sequence: Synthetic oligonucleotide
ggcauugguaccacuuggu

SEQ ID NO: 1480249 - RNA, 19 nt, Artificial Sequence
  Description of Artificial Sequence: Synthetic oligonucleotide
gaggggacugcuggaugua

SEQ ID NO: 1480250 - RNA, 19 nt, Artificial Sequence
  Description of Artificial Sequence: Synthetic oligonucleotide
cacacggcaugugcuagua

SEQ ID NO: 1480251 - RNA, 19 nt, Artificial Sequence
  Description of Artificial Sequence: Synthetic oligonucleotide
ugcugcccagaccgccauu

SEQ ID NO: 1480252 - RNA, 19 nt, Artificial Sequence
  Description of Artificial Sequence: Synthetic oligonucleotide
gcauugcauuuaacccucc

SEQ ID NO: 1480253 - RNA, 19 nt, Artificial Sequence
  Description of Artificial Sequence: Synthetic oligonucleotide
cugaacuggugaguacgcu

SEQ ID NO: 1480254 - RNA, 19 nt, Artificial Sequence
  Description of Artificial Sequence: Synthetic oligonucleotide
agacagggauuuggacgau

SEQ ID NO: 1480255 - RNA, 19 nt, Artificial Sequence
  Description of Artificial Sequence: Synthetic oligonucleotide
cugcccagaccgccauuca

SEQ ID NO: 1480256 - RNA, 19 nt, Artificial Sequence
  Description of Artificial Sequence: Synthetic oligonucleotide
ggcuccaagugaggcuaug

SEQ ID NO: 1480257 - RNA, 19 nt, Artificial Sequence
  Description of Artificial Sequence: Synthetic oligonucleotide
agccguucauggacuggau

SEQ ID NO: 1480258 - RNA, 19 nt, Artificial Sequence
  Description of Artificial Sequence: Synthetic oligonucleotide
cggcaugugcuaguagggc

SEQ ID NO: 1480259 - RNA, 19 nt, Artificial Sequence
  Description of Artificial Sequence: Synthetic oligonucleotide
ccugccaaagagccaacgu

SEQ ID NO: 1480260 - RNA, 19 nt, Artificial Sequence
  Description of Artificial Sequence: Synthetic oligonucleotide
guacgcugaggggacugcu

SEQ ID NO: 1480261 - RNA, 19 nt, Artificial Sequence
  Description of Artificial Sequence: Synthetic oligonucleotide
cgaacguuugagcugcacu

SEQ ID NO: 1480262 - RNA, 19 nt, Artificial Sequence
  Description of Artificial Sequence: Synthetic oligonucleotide
ccgccauucaaugcagcca

SEQ ID NO: 1480263 - RNA, 19 nt, Artificial Sequence
  Description of Artificial Sequence: Synthetic oligonucleotide
ccacaucgacaugcuuuag

SEQ ID NO: 1480264 - RNA, 19 nt, Artificial Sequence
  Description of Artificial Sequence: Synthetic oligonucleotide
gcggacuggcuguguguuc

SEQ ID NO: 1480265 - RNA, 19 nt, Artificial Sequence
  Description of Artificial Sequence: Synthetic oligonucleotide
cguuuauuucauuguuuau

SEQ ID NO: 1480266 - RNA, 19 nt, Artificial Sequence
  Description of Artificial Sequence: Synthetic oligonucleotide
cagcuagugcagccaaauu

SEQ ID NO: 1480267 - RNA, 19 nt, Artificial Sequence
  Description of Artificial Sequence: Synthetic oligonucleotide
gccaacguugaggccagcu

SEQ ID NO: 1480268 - RNA, 19 nt, Artificial Sequence
  Description of Artificial Sequence: Synthetic oligonucleotide
ggggacugcuggauguagu

SEQ ID NO: 1480269 - RNA, 19 nt, Artificial Sequence
  Description of Artificial Sequence: Synthetic oligonucleotide
cgccauucaaugcagccau

SEQ ID NO: 1480270 - RNA, 19 nt, Artificial Sequence
  Description of Artificial Sequence: Synthetic oligonucleotide
gcccagaccgccauucaau

SEQ ID NO: 1480271 - RNA, 19 nt, Artificial Sequence
  Description of Artificial Sequence: Synthetic oligonucleotide
cggcaggaaucagaagauc

SEQ ID NO: 1480272 - RNA, 19 nt, Artificial Sequence
  Description of Artificial Sequence: Synthetic oligonucleotide
cucgcugcugaggccgagu

SEQ ID NO: 1480273 - RNA, 19 nt, Artificial Sequence
  Description of Artificial Sequence: Synthetic oligonucleotide
gcuaugggguugacagagu

SEQ ID NO: 1480274 - RNA, 19 nt, Artificial Sequence
  Description of Artificial Sequence: Synthetic oligonucleotide
gcacuagcugcagcagcua

SEQ ID NO: 1480275 - RNA, 19 nt, Artificial Sequence
  Description of Artificial Sequence: Synthetic oligonucleotide
cugcugcccagaccgccau

SEQ ID NO: 1480276 - RNA, 19 nt, Artificial Sequence
  Description of Artificial Sequence: Synthetic oligonucleotide
ggaagcggacuggcugugu

SEQ ID NO: 1480277 - RNA, 19 nt, Artificial Sequence
  Description of Artificial Sequence: Synthetic oligonucleotide
ccacacggcaugugcuagu

SEQ ID NO: 1480278 - RNA, 19 nt, Artificial Sequence
  Description of Artificial Sequence: Synthetic oligonucleotide
cagcagcauauugcuggau

SEQ ID NO: 1480279 - RNA, 19 nt, Artificial Sequence
  Description of Artificial Sequence: Synthetic oligonucleotide
gccauucaaugcagccauu

SEQ ID NO: 1480280 - RNA, 19 nt, Artificial Sequence
  Description of Artificial Sequence: Synthetic oligonucleotide
gggcuccaagugaggcuau

SEQ ID NO: 1480281 - RNA, 19 nt, Artificial Sequence
  Description of Artificial Sequence: Synthetic oligonucleotide
aauagcuuaauacagacau

SEQ ID NO: 1480282 - RNA, 19 nt, Artificial Sequence
  Description of Artificial Sequence: Synthetic oligonucleotide
aguaucacgauauucaauc

SEQ ID NO: 1480283 - RNA, 19 nt, Artificial Sequence
  Description of Artificial Sequence: Synthetic oligonucleotide
uuagaaauaauacucggug

SEQ ID NO: 1480284 - RNA, 19 nt, Artificial Sequence
  Description of Artificial Sequence: Synthetic oligonucleotide
uuaaauugaaagcagcuug

SEQ ID NO: 1480285 - RNA, 19 nt, Artificial Sequence
  Description of Artificial Sequence: Synthetic oligonucleotide
gaagguuugaucuggaagg

SEQ ID NO: 1480286 - RNA, 19 nt, Artificial Sequence
  Description of Artificial Sequence: Synthetic oligonucleotide
aauugaaagcagcuugugc

SEQ ID NO: 1480287 - RNA, 19 nt, Artificial Sequence
  Description of Artificial Sequence: Synthetic oligonucleotide
gauauucaauccuagagag

SEQ ID NO: 1480288 - RNA, 19 nt, Artificial Sequence
  Description of Artificial Sequence: Synthetic oligonucleotide
uuuugauugaaacuguccc

SEQ ID NO: 1480289 - RNA, 19 nt, Artificial Sequence
  Description of Artificial Sequence: Synthetic oligonucleotide
agaaauaauacucggugac

SEQ ID NO: 1480290 - RNA, 19 nt, Artificial Sequence
  Description of Artificial Sequence: Synthetic oligonucleotide
uauaauugccuuuugcugc

SEQ ID NO: 1480291 - RNA, 19 nt, Artificial Sequence
  Description of Artificial Sequence: Synthetic oligonucleotide
aauccguuagaaauaauac

SEQ ID NO: 1480292 - RNA, 19 nt, Artificial Sequence
  Description of Artificial Sequence: Synthetic oligonucleotide
ucaaaugauauguaagagc

SEQ ID NO: 1480293 - RNA, 19 nt, Artificial Sequence
  Description of Artificial Sequence: Synthetic oligonucleotide
uuuuaaauugaaagcagcu

SEQ ID NO: 1480294 - RNA, 19 nt, Artificial Sequence
  Description of Artificial Sequence: Synthetic oligonucleotide
ucuauaauugccuuuugcu

SEQ ID NO: 1480295 - RNA, 19 nt, Artificial Sequence
  Description of Artificial Sequence: Synthetic oligonucleotide
uccguuagaaauaauacuc

SEQ ID NO: 1480296 - RNA, 19 nt, Artificial Sequence
  Description of Artificial Sequence: Synthetic oligonucleotide
auugaaagcagcuugugcu

SEQ ID NO: 1480297 - RNA, 19 nt, Artificial Sequence
  Description of Artificial Sequence: Synthetic oligonucleotide
cuuuugaugcauaaggcag

SEQ ID NO: 1480298 - RNA, 19 nt, Artificial Sequence
  Description of Artificial Sequence: Synthetic oligonucleotide
ugaagguuugaucuggaag

SEQ ID NO: 1480299 - RNA, 19 nt, Artificial Sequence
  Description of Artificial Sequence: Synthetic oligonucleotide
ggugacaucauuuuauugg

SEQ ID NO: 1480300 - RNA, 19 nt, Artificial Sequence
  Description of Artificial Sequence: Synthetic oligonucleotide
cuucaucucaagaagauac

SEQ ID NO: 1480301 - RNA, 19 nt, Artificial Sequence
  Description of Artificial Sequence: Synthetic oligonucleotide
uuuugaugcauaaggcagg

SEQ ID NO: 1480302 - RNA, 19 nt, Artificial Sequence
  Description of Artificial Sequence: Synthetic oligonucleotide
aaacucuguggucauguac

SEQ ID NO: 1480303 - RNA, 19 nt, Artificial Sequence
  Description of Artificial Sequence: Synthetic oligonucleotide
acgauauucaauccuagag

SEQ ID NO: 1480304 - RNA, 19 nt, Artificial Sequence
  Description of Artificial Sequence: Synthetic oligonucleotide
uauuucucaggcauuaugu

SEQ ID NO: 1480305 - RNA, 19 nt, Artificial Sequence
  Description of Artificial Sequence: Synthetic oligonucleotide
uaaucaacagcucauuggu

SEQ ID NO: 1480306 - RNA, 19 nt, Artificial Sequence
  Description of Artificial Sequence: Synthetic oligonucleotide
uuuugcugcaguuugaaaa

SEQ ID NO: 1480307 - RNA, 19 nt, Artificial Sequence
  Description of Artificial Sequence: Synthetic oligonucleotide
ucugugacuuccaaucugg

SEQ ID NO: 1480308 - RNA, 19 nt, Artificial Sequence
  Description of Artificial Sequence: Synthetic oligonucleotide
auauguaagagccuuguga

SEQ ID NO: 1480309 - RNA, 19 nt, Artificial Sequence
  Description of Artificial Sequence: Synthetic oligonucleotide
uuaauacagacauaguauc

SEQ ID NO: 1480310 - RNA, 19 nt, Artificial Sequence
  Description of Artificial Sequence: Synthetic oligonucleotide
caucauagcuucauggugg

SEQ ID NO: 1480311 - RNA, 19 nt, Artificial Sequence
  Description of Artificial Sequence: Synthetic oligonucleotide
uagcuuaauacagacauag

SEQ ID NO: 1480312 - RNA, 19 nt, Artificial Sequence
  Description of Artificial Sequence: Synthetic oligonucleotide
uucuauggcaaacagguaa

SEQ ID NO: 1480313 - RNA, 19 nt, Artificial Sequence
  Description of Artificial Sequence: Synthetic oligonucleotide
ucuaucauauuuaucuuuc

SEQ ID NO: 1480314 - RNA, 19 nt, Artificial Sequence
  Description of Artificial Sequence: Synthetic oligonucleotide
aaaucucuaauauccacau

SEQ ID NO: 1480315 - RNA, 19 nt, Artificial Sequence
  Description of Artificial Sequence: Synthetic oligonucleotide
uuugagaaauuucuugaac

SEQ ID NO: 1480316 - RNA, 19 nt, Artificial Sequence
  Description of Artificial Sequence: Synthetic oligonucleotide
uaauccguuagaaauaaua

SEQ ID NO: 1480317 - RNA, 19 nt, Artificial Sequence
  Description of Artificial Sequence: Synthetic oligonucleotide
uauguaagagccuugugaa

SEQ ID NO: 1480318 - RNA, 19 nt, Artificial Sequence
  Description of Artificial Sequence: Synthetic oligonucleotide
auuuccuagcagcaagacc

SEQ ID NO: 1480319 - RNA, 19 nt, Artificial Sequence
  Description of Artificial Sequence: Synthetic oligonucleotide
aucucuaauauccacauuu

SEQ ID NO: 1480320 - RNA, 19 nt, Artificial Sequence
  Description of Artificial Sequence: Synthetic oligonucleotide
ucaaagguccugauucugg

SEQ ID NO: 1480321 - RNA, 19 nt, Artificial Sequence
  Description of Artificial Sequence: Synthetic oligonucleotide
aauccuagagaguucugug

SEQ ID NO: 1480322 - RNA, 19 nt, Artificial Sequence
  Description of Artificial Sequence: Synthetic oligonucleotide
uggaagguuaauuucuacc

SEQ ID NO: 1480323 - RNA, 19 nt, Artificial Sequence
  Description of Artificial Sequence: Synthetic oligonucleotide
ucugcucuauuucucaggc

SEQ ID NO: 1480324 - RNA, 19 nt, Artificial Sequence
  Description of Artificial Sequence: Synthetic oligonucleotide
ucucgaucuuccuucaggg

SEQ ID NO: 1480325 - RNA, 19 nt, Artificial Sequence
  Description of Artificial Sequence: Synthetic oligonucleotide
uucuuugccaucaaagguc

SEQ ID NO: 1480326 - RNA, 19 nt, Artificial Sequence
  Description of Artificial Sequence: Synthetic oligonucleotide
ucaacugcaucauagcuuc

SEQ ID NO: 1480327 - RNA, 19 nt, Artificial Sequence
  Description of Artificial Sequence: Synthetic oligonucleotide
ucuucgggaaguaucacga

SEQ ID NO: 1480328 - RNA, 19 nt, Artificial Sequence
  Description of Artificial Sequence: Synthetic oligonucleotide
ucuugcaacuucucggagg

SEQ ID NO: 1480329 - RNA, 19 nt, Artificial Sequence
  Description of Artificial Sequence: Synthetic oligonucleotide
aaugauauguaagagccuu

SEQ ID NO: 1480330 - RNA, 19 nt, Artificial Sequence
  Description of Artificial Sequence: Synthetic oligonucleotide
uauucaauccuagagaguu

SEQ ID NO: 1480331 - RNA, 19 nt, Artificial Sequence
  Description of Artificial Sequence: Synthetic oligonucleotide
uguaagagccuugugaaga

SEQ ID NO: 1480332 - RNA, 19 nt, Artificial Sequence
  Description of Artificial Sequence: Synthetic oligonucleotide
aauuuauacugcuguuucu

SEQ ID NO: 1480333 - RNA, 19 nt, Artificial Sequence
  Description of Artificial Sequence: Synthetic oligonucleotide
uagaaauaauacucgguga

SEQ ID NO: 1480334 - RNA, 19 nt, Artificial Sequence
  Description of Artificial Sequence: Synthetic oligonucleotide
ugugcuaucugcuuguaau

SEQ ID NO: 1480335 - RNA, 19 nt, Artificial Sequence
  Description of Artificial Sequence: Synthetic oligonucleotide
uccaauucauuuaucugca

SEQ ID NO: 1480336 - RNA, 19 nt, Artificial Sequence
  Description of Artificial Sequence: Synthetic oligonucleotide
ggucaaaucucuaauaucc

SEQ ID NO: 1480337 - RNA, 19 nt, Artificial Sequence
  Description of Artificial Sequence: Synthetic oligonucleotide
gaaacugucccuccaauuc

SEQ ID NO: 1480338 - RNA, 19 nt, Artificial Sequence
  Description of Artificial Sequence: Synthetic oligonucleotide
uuccuuaaucaacagcuca

SEQ ID NO: 1480339 - RNA, 19 nt, Artificial Sequence
  Description of Artificial Sequence: Synthetic oligonucleotide
uuuuccaauuuauacugcu

SEQ ID NO: 1480340 - RNA, 19 nt, Artificial Sequence
  Description of Artificial Sequence: Synthetic oligonucleotide
aacuuuugaguuggaauuc

SEQ ID NO: 1480341 - RNA, 19 nt, Artificial Sequence
  Description of Artificial Sequence: Synthetic oligonucleotide
ggaagguuaauuucuaccc

SEQ ID NO: 1480342 - RNA, 19 nt, Artificial Sequence
  Description of Artificial Sequence: Synthetic oligonucleotide
aaauaauacucggugacau

SEQ ID NO: 1480343 - RNA, 19 nt, Artificial Sequence
  Description of Artificial Sequence: Synthetic oligonucleotide
cuugguucucuauaauugc

SEQ ID NO: 1480344 - RNA, 19 nt, Artificial Sequence
  Description of Artificial Sequence: Synthetic oligonucleotide
auuucucaggcauuauguc

SEQ ID NO: 1480345 - RNA, 19 nt, Artificial Sequence
  Description of Artificial Sequence: Synthetic oligonucleotide
uuugauugaaacugucccu

SEQ ID NO: 1480346 - RNA, 19 nt, Artificial Sequence
  Description of Artificial Sequence: Synthetic oligonucleotide
ugcucuauuucucaggcau

SEQ ID NO: 1480347 - RNA, 19 nt, Artificial Sequence
  Description of Artificial Sequence: Synthetic oligonucleotide
aggcauuggccuuagcucg

SEQ ID NO: 1480348 - RNA, 19 nt, Artificial Sequence
  Description of Artificial Sequence: Synthetic oligonucleotide
uaucacgauauucaauccu

SEQ ID NO: 1480349 - RNA, 19 nt, Artificial Sequence
  Description of Artificial Sequence: Synthetic oligonucleotide
aagguccugauucuggggu

SEQ ID NO: 1480350 - RNA, 19 nt, Artificial Sequence
  Description of Artificial Sequence: Synthetic oligonucleotide
ucuauggcaaacagguaac

SEQ ID NO: 1480351 - RNA, 19 nt, Artificial Sequence
  Description of Artificial Sequence: Synthetic oligonucleotide
gaaagaauugcuccacuuc

SEQ ID NO: 1480352 - RNA, 19 nt, Artificial Sequence
  Description of Artificial Sequence: Synthetic oligonucleotide
uugucaauuucuaccuugc

SEQ ID NO: 1480353 - RNA, 19 nt, Artificial Sequence
  Description of Artificial Sequence: Synthetic oligonucleotide
uucauggugggcucucucg

SEQ ID NO: 1480354 - RNA, 19 nt, Artificial Sequence
  Description of Artificial Sequence: Synthetic oligonucleotide
aagauuacauacaucugcu

SEQ ID NO: 1480355 - RNA, 19 nt, Artificial Sequence
  Description of Artificial Sequence: Synthetic oligonucleotide
caauuuauacugcuguuuc

SEQ ID NO: 1480356 - RNA, 19 nt, Artificial Sequence
  Description of Artificial Sequence: Synthetic oligonucleotide
ugugauuucugcuggguaa

SEQ ID NO: 1480357 - RNA, 19 nt, Artificial Sequence
  Description of Artificial Sequence: Synthetic oligonucleotide
agaggcauuggccuuagcu

SEQ ID NO: 1480358 - RNA, 19 nt, Artificial Sequence
  Description of Artificial Sequence: Synthetic oligonucleotide
gaugcauaaggcaggaaug

SEQ ID NO: 1480359 - RNA, 19 nt, Artificial Sequence
  Description of Artificial Sequence: Synthetic oligonucleotide
uuucugucguguuucagcu

SEQ ID NO: 1480360 - RNA, 19 nt, Artificial Sequence
  Description of Artificial Sequence: Synthetic oligonucleotide
auccguuagaaauaauacu

SEQ ID NO: 1480361 - RNA, 19 nt, Artificial Sequence
  Description of Artificial Sequence: Synthetic oligonucleotide
ugaucuggaagguuaauuu

SEQ ID NO: 1480362 - RNA, 19 nt, Artificial Sequence
  Description of Artificial Sequence: Synthetic oligonucleotide
caaucucaagacuuucucc

SEQ ID NO: 1480363 - RNA, 19 nt, Artificial Sequence
  Description of Artificial Sequence: Synthetic oligonucleotide
aacucuguggucauguaca

SEQ ID NO: 1480364 - RNA, 19 nt, Artificial Sequence
  Description of Artificial Sequence: Synthetic oligonucleotide
cuuaaucaacagcucauug

SEQ ID NO: 1480365 - RNA, 19 nt, Artificial Sequence
  Description of Artificial Sequence: Synthetic oligonucleotide
caggcauuaugucagaguc

SEQ ID NO: 1480366 - RNA, 19 nt, Artificial Sequence
  Description of Artificial Sequence: Synthetic oligonucleotide
aauacagacauaguaucuu

SEQ ID NO: 1480367 - RNA, 19 nt, Artificial Sequence
  Description of Artificial Sequence: Synthetic oligonucleotide
ucguguuucagcuuccuuc

SEQ ID NO: 1480368 - RNA, 19 nt, Artificial Sequence
  Description of Artificial Sequence: Synthetic oligonucleotide
uccuagagaguucugugac

SEQ ID NO: 1480369 - RNA, 19 nt, Artificial Sequence
  Description of Artificial Sequence: Synthetic oligonucleotide
uuuauuggagucugauacu

SEQ ID NO: 1480370 - RNA, 19 nt, Artificial Sequence
  Description of Artificial Sequence: Synthetic oligonucleotide
uucugcucuauuucucagg

SEQ ID NO: 1480371 - RNA, 19 nt, Artificial Sequence
  Description of Artificial Sequence: Synthetic oligonucleotide
gacaccaauuucuauggca

SEQ ID NO: 1480372 - RNA, 19 nt, Artificial Sequence
  Description of Artificial Sequence: Synthetic oligonucleotide
ucacgauauucaauccuag

SEQ ID NO: 1480373 - RNA, 19 nt, Artificial Sequence
  Description of Artificial Sequence: Synthetic oligonucleotide
ucgggaaguaucacgauau

SEQ ID NO: 1480374 - RNA, 19 nt, Artificial Sequence
  Description of Artificial Sequence: Synthetic oligonucleotide
uuuaaauugaaagcagcuu

SEQ ID NO: 1480375 - RNA, 19 nt, Artificial Sequence
  Description of Artificial Sequence: Synthetic oligonucleotide
aucugcauaguauacuuau

SEQ ID NO: 1480376 - RNA, 19 nt, Artificial Sequence
  Description of Artificial Sequence: Synthetic oligonucleotide
ugcaucauagcuucauggu

SEQ ID NO: 1480377 - RNA, 19 nt, Artificial Sequence
  Description of Artificial Sequence: Synthetic oligonucleotide
guugguacuguguucuuug

SEQ ID NO: 1480378 - RNA, 19 nt, Artificial Sequence
  Description of Artificial Sequence: Synthetic oligonucleotide
uucugugacuuccaaucug

SEQ ID NO: 1480379 - RNA, 19 nt, Artificial Sequence
  Description of Artificial Sequence: Synthetic oligonucleotide
gaaucugcuguuucacuug

SEQ ID NO: 1480380 - RNA, 19 nt, Artificial Sequence
  Description of Artificial Sequence: Synthetic oligonucleotide
uagaacucgaccuguauuu

SEQ ID NO: 1480381 - RNA, 19 nt, Artificial Sequence
  Description of Artificial Sequence: Synthetic oligonucleotide
ugacuuucuugcaacuucu

SEQ ID NO: 1480382 - RNA, 19 nt, Artificial Sequence
  Description of Artificial Sequence: Synthetic oligonucleotide
uguaauccguuagaaauaa

SEQ ID NO: 1480383 - RNA, 19 nt, Artificial Sequence
  Description of Artificial Sequence: Synthetic oligonucleotide
uucaauccuagagaguucu

SEQ ID NO: 1480384 - RNA, 19 nt, Artificial Sequence
  Description of Artificial Sequence: Synthetic oligonucleotide
aucauagcuucaugguggg

SEQ ID NO: 1480385 - RNA, 19 nt, Artificial Sequence
  Description of Artificial Sequence: Synthetic oligonucleotide
uuagaacucgaccuguauu

SEQ ID NO: 1480386 - RNA, 19 nt, Artificial Sequence
  Description of Artificial Sequence: Synthetic oligonucleotide
cagguaacuuuugaguugg

SEQ ID NO: 1480387 - RNA, 19 nt, Artificial Sequence
  Description of Artificial Sequence: Synthetic oligonucleotide
ucucggagguuuucugucg

SEQ ID NO: 1480388 - RNA, 19 nt, Artificial Sequence
  Description of Artificial Sequence: Synthetic oligonucleotide
uccuuaaucaacagcucau

SEQ ID NO: 1480389 - RNA, 19 nt, Artificial Sequence
  Description of Artificial Sequence: Synthetic oligonucleotide
ugggguauucuguucuucc

SEQ ID NO: 1480390 - RNA, 19 nt, Artificial Sequence
  Description of Artificial Sequence: Synthetic oligonucleotide
gucuucgggaaguaucacg

SEQ ID NO: 1480391 - RNA, 19 nt, Artificial Sequence
  Description of Artificial Sequence: Synthetic oligonucleotide
gauauguaagagccuugug

SEQ ID NO: 1480392 - RNA, 19 nt, Artificial Sequence
  Description of Artificial Sequence: Synthetic oligonucleotide
cucucgaucuuccuucagg

SEQ ID NO: 1480393 - RNA, 19 nt, Artificial Sequence
  Description of Artificial Sequence: Synthetic oligonucleotide
uugaacauauucagagcaa

SEQ ID NO: 1480394 - RNA, 19 nt, Artificial Sequence
  Description of Artificial Sequence: Synthetic oligonucleotide
ucgauucauuuccuugucc

SEQ ID NO: 1480395 - RNA, 19 nt, Artificial Sequence
  Description of Artificial Sequence: Synthetic oligonucleotide
gaggcuuagaacucgaccu

SEQ ID NO: 1480396 - RNA, 19 nt, Artificial Sequence
  Description of Artificial Sequence: Synthetic oligonucleotide
auaauugccuuuugcugca

SEQ ID NO: 1480397 - RNA, 19 nt, Artificial Sequence
  Description of Artificial Sequence: Synthetic oligonucleotide
ugucaauuucuaccuugcc

SEQ ID NO: 1480398 - RNA, 19 nt, Artificial Sequence
  Description of Artificial Sequence: Synthetic oligonucleotide
uugauugaaacugucccuc

SEQ ID NO: 1480399 - RNA, 19 nt, Artificial Sequence
  Description of Artificial Sequence: Synthetic oligonucleotide
ugauauguaagagccuugu

SEQ ID NO: 1480400 - RNA, 19 nt, Artificial Sequence
  Description of Artificial Sequence: Synthetic oligonucleotide
uuucuccacugucagaaau

SEQ ID NO: 1480401 - RNA, 19 nt, Artificial Sequence
  Description of Artificial Sequence: Synthetic oligonucleotide
uauucuguucuucccgcac

SEQ ID NO: 1480402 - RNA, 19 nt, Artificial Sequence
  Description of Artificial Sequence: Synthetic oligonucleotide
auggugggcucucucggcc

SEQ ID NO: 1480403 - RNA, 19 nt, Artificial Sequence
  Description of Artificial Sequence: Synthetic oligonucleotide
uucagagcaagauuacaua

SEQ ID NO: 1480404 - RNA, 19 nt, Artificial Sequence
  Description of Artificial Sequence: Synthetic oligonucleotide
gaacucgaccuguauuucc

SEQ ID NO: 1480405 - RNA, 19 nt, Artificial Sequence
  Description of Artificial Sequence: Synthetic oligonucleotide
ugauccugcuucuucaaau

SEQ ID NO: 1480406 - RNA, 19 nt, Artificial Sequence
  Description of Artificial Sequence: Synthetic oligonucleotide
ugcuaucugcuuguaaugc

SEQ ID NO: 1480407 - RNA, 19 nt, Artificial Sequence
  Description of Artificial Sequence: Synthetic oligonucleotide
ucaggcauuaugucagagu

SEQ ID NO: 1480408 - RNA, 19 nt, Artificial Sequence
  Description of Artificial Sequence: Synthetic oligonucleotide
ggugaugaagguuugaucu

SEQ ID NO: 1480409 - RNA, 19 nt, Artificial Sequence
  Description of Artificial Sequence: Synthetic oligonucleotide
ugauugaaacugucccucc

SEQ ID NO: 1480410 - RNA, 19 nt, Artificial Sequence
  Description of Artificial Sequence: Synthetic oligonucleotide
auauucagagcaagauuac

SEQ ID NO: 1480411 - RNA, 19 nt, Artificial Sequence
  Description of Artificial Sequence: Synthetic oligonucleotide
guaucacgauauucaaucc

SEQ ID NO: 1480412 - RNA, 19 nt, Artificial Sequence
  Description of Artificial Sequence: Synthetic oligonucleotide
ggaaguaucacgauauuca

SEQ ID NO: 1480413 - RNA, 19 nt, Artificial Sequence
  Description of Artificial Sequence: Synthetic oligonucleotide
auacacguucucuuuaaaa

SEQ ID NO: 1480414 - RNA, 19 nt, Artificial Sequence
  Description of Artificial Sequence: Synthetic oligonucleotide
ugguacuguguucuuugcc

SEQ ID NO: 1480415 - RNA, 19 nt, Artificial Sequence
  Description of Artificial Sequence: Synthetic oligonucleotide
uauucagagcaagauuaca

SEQ ID NO: 1480416 - RNA, 19 nt, Artificial Sequence
  Description of Artificial Sequence: Synthetic oligonucleotide
ugugaagauacacguucuc

SEQ ID NO: 1480417 - RNA, 19 nt, Artificial Sequence
  Description of Artificial Sequence: Synthetic oligonucleotide
ugcucaacugcaucauagc

SEQ ID NO: 1480418 - RNA, 19 nt, Artificial Sequence
  Description of Artificial Sequence: Synthetic oligonucleotide
uuugcucccaggucaaauc

SEQ ID NO: 1480419 - RNA, 19 nt, Artificial Sequence
  Description of Artificial Sequence: Synthetic oligonucleotide
cuggguaaguugcauaauc

SEQ ID NO: 1480420 - RNA, 19 nt, Artificial Sequence
  Description of Artificial Sequence: Synthetic oligonucleotide
uuugaugcauaaggcagga

SEQ ID NO: 1480421 - RNA, 19 nt, Artificial Sequence
  Description of Artificial Sequence: Synthetic oligonucleotide
gaaauaauacucggugaca

SEQ ID NO: 1480422 - RNA, 19 nt, Artificial Sequence
  Description of Artificial Sequence: Synthetic oligonucleotide
uugaguuggaauucucuuu

SEQ ID NO: 1480423 - RNA, 19 nt, Artificial Sequence
  Description of Artificial Sequence: Synthetic oligonucleotide
aaagcagcuugugcuaucu

SEQ ID NO: 1480424 - RNA, 19 nt, Artificial Sequence
  Description of Artificial Sequence: Synthetic oligonucleotide
ugagugcuuggccauuucu

SEQ ID NO: 1480425 - RNA, 19 nt, Artificial Sequence
  Description of Artificial Sequence: Synthetic oligonucleotide
auuuuauuggagucugaua

SEQ ID NO: 1480426 - RNA, 19 nt, Artificial Sequence
  Description of Artificial Sequence: Synthetic oligonucleotide
cauuuaucugcauaguaua

SEQ ID NO: 1480427 - RNA, 19 nt, Artificial Sequence
  Description of Artificial Sequence: Synthetic oligonucleotide
agaaagaauugcuccacuu

SEQ ID NO: 1480428 - RNA, 19 nt, Artificial Sequence
  Description of Artificial Sequence: Synthetic oligonucleotide
uggccucccaaagagaggc

SEQ ID NO: 1480429 - RNA, 19 nt, Artificial Sequence
  Description of Artificial Sequence: Synthetic oligonucleotide
auacaucugcuuuucugcu

SEQ ID NO: 1480430 - RNA, 19 nt, Artificial Sequence
  Description of Artificial Sequence: Synthetic oligonucleotide
aaagagaggcauuggccuu

SEQ ID NO: 1480431 - RNA, 19 nt, Artificial Sequence
  Description of Artificial Sequence: Synthetic oligonucleotide
gcuuaauacagacauagua

SEQ ID NO: 1480432 - RNA, 19 nt, Artificial Sequence
  Description of Artificial Sequence: Synthetic oligonucleotide
uuucuaccuugccugcuug

SEQ ID NO: 1480433 - RNA, 19 nt, Artificial Sequence
  Description of Artificial Sequence: Synthetic oligonucleotide
auguaagagccuugugaag

SEQ ID NO: 1480434 - RNA, 19 nt, Artificial Sequence
  Description of Artificial Sequence: Synthetic oligonucleotide
aggaaugacuuucuugcaa

SEQ ID NO: 1480435 - RNA, 19 nt, Artificial Sequence
  Description of Artificial Sequence: Synthetic oligonucleotide
ucgaccuguauuuccuagc

SEQ ID NO: 1480436 - RNA, 19 nt, Artificial Sequence
  Description of Artificial Sequence: Synthetic oligonucleotide
uucgggaaguaucacgaua

SEQ ID NO: 1480437 - RNA, 19 nt, Artificial Sequence
  Description of Artificial Sequence: Synthetic oligonucleotide
aguccuguaauccguuaga

SEQ ID NO: 1480438 - RNA, 19 nt, Artificial Sequence
  Description of Artificial Sequence: Synthetic oligonucleotide
caauuucuaccuugccugc

SEQ ID NO: 1480439 - RNA, 19 nt, Artificial Sequence
  Description of Artificial Sequence: Synthetic oligonucleotide
uucuaccuugccugcuugg

SEQ ID NO: 1480440 - RNA, 19 nt, Artificial Sequence
  Description of Artificial Sequence: Synthetic oligonucleotide
aauugccuuuugcugcagu

SEQ ID NO: 1480441 - RNA, 19 nt, Artificial Sequence
  Description of Artificial Sequence: Synthetic oligonucleotide
aagaauugcuccacuucug

SEQ ID NO: 1480442 - RNA, 19 nt, Artificial Sequence
  Description of Artificial Sequence: Synthetic oligonucleotide
auuggccuuagcucguuca

SEQ ID NO: 1480443 - RNA, 19 nt, Artificial Sequence
  Description of Artificial Sequence: Synthetic oligonucleotide
aaaugauauguaagagccu

SEQ ID NO: 1480444 - RNA, 19 nt, Artificial Sequence
  Description of Artificial Sequence: Synthetic oligonucleotide
ggaaugacuuucuugcaac

SEQ ID NO: 1480445 - RNA, 19 nt, Artificial Sequence
  Description of Artificial Sequence: Synthetic oligonucleotide
ucucuauaauugccuuuug

SEQ ID NO: 1480446 - RNA, 19 nt, Artificial Sequence
  Description of Artificial Sequence: Synthetic oligonucleotide
ccguuagaaauaauacucg

SEQ ID NO: 1480447 - RNA, 19 nt, Artificial Sequence
  Description of Artificial Sequence: Synthetic oligonucleotide
auugaaacugucccuccaa

SEQ ID NO: 1480448 - RNA, 19 nt, Artificial Sequence
  Description of Artificial Sequence: Synthetic oligonucleotide
auucagagcaagauuacau

SEQ ID NO: 1480449 - RNA, 19 nt, Artificial Sequence
  Description of Artificial Sequence: Synthetic oligonucleotide
agccuugugaagauacacg

SEQ ID NO: 1480450 - RNA, 19 nt, Artificial Sequence
  Description of Artificial Sequence: Synthetic oligonucleotide
uaccuugccugcuugguuc

SEQ ID NO: 1480451 - RNA, 19 nt, Artificial Sequence
  Description of Artificial Sequence: Synthetic oligonucleotide
ugcuugguucucuauaauu

SEQ ID NO: 1480452 - RNA, 19 nt, Artificial Sequence
  Description of Artificial Sequence: Synthetic oligonucleotide
uuccguuuccauguucucc

SEQ ID NO: 1480453 - RNA, 19 nt, Artificial Sequence
  Description of Artificial Sequence: Synthetic oligonucleotide
aaugacuuucuugcaacuu

SEQ ID NO: 1480454 - RNA, 19 nt, Artificial Sequence
  Description of Artificial Sequence: Synthetic oligonucleotide
uguaaugcuuccuguugau

SEQ ID NO: 1480455 - RNA, 19 nt, Artificial Sequence
  Description of Artificial Sequence: Synthetic oligonucleotide
agucugauacuggagcuug

SEQ ID NO: 1480456 - RNA, 19 nt, Artificial Sequence
  Description of Artificial Sequence: Synthetic oligonucleotide
gugcucaacugcaucauag

SEQ ID NO: 1480457 - RNA, 19 nt, Artificial Sequence
  Description of Artificial Sequence: Synthetic oligonucleotide
auacagacauaguaucuuu

SEQ ID NO: 1480458 - RNA, 19 nt, Artificial Sequence
  Description of Artificial Sequence: Synthetic oligonucleotide
aagguuugaucuggaaggu

SEQ ID NO: 1480459 - RNA, 19 nt, Artificial Sequence
  Description of Artificial Sequence: Synthetic oligonucleotide
uugaaacugucccuccaau

SEQ ID NO: 1480460 - RNA, 19 nt, Artificial Sequence
  Description of Artificial Sequence: Synthetic oligonucleotide
aggcauuaugucagagucc

SEQ ID NO: 1480461 - RNA, 19 nt, Artificial Sequence
  Description of Artificial Sequence: Synthetic oligonucleotide
auuucucagccuccaugag

SEQ ID NO: 1480462 - RNA, 19 nt, Artificial Sequence
  Description of Artificial Sequence: Synthetic oligonucleotide
aacucgaccuguauuuccu

SEQ ID NO: 1480463 - RNA, 19 nt, Artificial Sequence
  Description of Artificial Sequence: Synthetic oligonucleotide
ugagaucaugauucacacu

SEQ ID NO: 1480464 - RNA, 19 nt, Artificial Sequence
  Description of Artificial Sequence: Synthetic oligonucleotide
aauuucuaccuugccugcu

SEQ ID NO: 1480465 - RNA, 19 nt, Artificial Sequence
  Description of Artificial Sequence: Synthetic oligonucleotide
uucucggagguuuucuguc

SEQ ID NO: 1480466 - RNA, 19 nt, Artificial Sequence
  Description of Artificial Sequence: Synthetic oligonucleotide
ugucccuccaauucauuua

SEQ ID NO: 1480467 - RNA, 19 nt, Artificial Sequence
  Description of Artificial Sequence: Synthetic oligonucleotide
cucgaucuuccuucagggg

SEQ ID NO: 1480468 - RNA, 19 nt, Artificial Sequence
  Description of Artificial Sequence: Synthetic oligonucleotide
uccaauuuauacugcuguu

SEQ ID NO: 1480469 - RNA, 19 nt, Artificial Sequence
  Description of Artificial Sequence: Synthetic oligonucleotide
ggaggcuuagaacucgacc

SEQ ID NO: 1480470 - RNA, 19 nt, Artificial Sequence
  Description of Artificial Sequence: Synthetic oligonucleotide
uccuguaauccguuagaaa

SEQ ID NO: 1480471 - RNA, 19 nt, Artificial Sequence
  Description of Artificial Sequence: Synthetic oligonucleotide
cguuagaaauaauacucgg

SEQ ID NO: 1480472 - RNA, 19 nt, Artificial Sequence
  Description of Artificial Sequence: Synthetic oligonucleotide
cucgaccuguauuuccuag

SEQ ID NO: 1480473 - RNA, 19 nt, Artificial Sequence
  Description of Artificial Sequence: Synthetic oligonucleotide
agaacucgaccuguauuuc

SEQ ID NO: 1480474 - RNA, 19 nt, Artificial Sequence
  Description of Artificial Sequence: Synthetic oligonucleotide
aguuccguuuccauguucu

SEQ ID NO: 1480475 - RNA, 19 nt, Artificial Sequence
  Description of Artificial Sequence: Synthetic oligonucleotide
gugcuaucugcuuguaaug

SEQ ID NO: 1480476 - RNA, 19 nt, Artificial Sequence
  Description of Artificial Sequence: Synthetic oligonucleotide
ucugauacuggagcuugcu

SEQ ID NO: 1480477 - RNA, 19 nt, Artificial Sequence
  Description of Artificial Sequence: Synthetic oligonucleotide
aacuucucggagguuuucu

SEQ ID NO: 1480478 - RNA, 19 nt, Artificial Sequence
  Description of Artificial Sequence: Synthetic oligonucleotide
aaucucuaauauccacauu

SEQ ID NO: 1480479 - RNA, 19 nt, Artificial Sequence
  Description of Artificial Sequence: Synthetic oligonucleotide
ucugcuuuucugcucuauu

SEQ ID NO: 1480480 - RNA, 19 nt, Artificial Sequence
  Description of Artificial Sequence: Synthetic oligonucleotide
cuggaagguuaauuucuac

SEQ ID NO: 1480481 - RNA, 19 nt, Artificial Sequence
  Description of Artificial Sequence: Synthetic oligonucleotide
ucaauccuagagaguucug

SEQ ID NO: 1480482 - RNA, 19 nt, Artificial Sequence
  Description of Artificial Sequence: Synthetic oligonucleotide
ugcaacuucucggagguuu

SEQ ID NO: 1480483 - RNA, 19 nt, Artificial Sequence
  Description of Artificial Sequence: Synthetic oligonucleotide
gucagaaauauagucugga

SEQ ID NO: 1480484 - RNA, 19 nt, Artificial Sequence
  Description of Artificial Sequence: Synthetic oligonucleotide
gcaucauagcuucauggug

SEQ ID NO: 1480485 - RNA, 19 nt, Artificial Sequence
  Description of Artificial Sequence: Synthetic oligonucleotide
uacucggugacaucauuuu

SEQ ID NO: 1480486 - RNA, 19 nt, Artificial Sequence
  Description of Artificial Sequence: Synthetic oligonucleotide
aucaugauucacacuguug

SEQ ID NO: 1480487 - RNA, 19 nt, Artificial Sequence
  Description of Artificial Sequence: Synthetic oligonucleotide
acuuuugaguuggaauucu

SEQ ID NO: 1480488 - RNA, 19 nt, Artificial Sequence
  Description of Artificial Sequence: Synthetic oligonucleotide
ucauuucuccacugucaga

SEQ ID NO: 1480489 - RNA, 19 nt, Artificial Sequence
  Description of Artificial Sequence: Synthetic oligonucleotide
aaguaucacgauauucaau

SEQ ID NO: 1480490 - RNA, 19 nt, Artificial Sequence
  Description of Artificial Sequence: Synthetic oligonucleotide
ucuccacugucagaaauau

SEQ ID NO: 1480491 - RNA, 19 nt, Artificial Sequence
  Description of Artificial Sequence: Synthetic oligonucleotide
auugccuuuugcugcaguu

SEQ ID NO: 1480492 - RNA, 19 nt, Artificial Sequence
  Description of Artificial Sequence: Synthetic oligonucleotide
ucccaggucaaaucucuaa

SEQ ID NO: 1480493 - RNA, 19 nt, Artificial Sequence
  Description of Artificial Sequence: Synthetic oligonucleotide
uucuguucuucccgcacau

SEQ ID NO: 1480494 - RNA, 19 nt, Artificial Sequence
  Description of Artificial Sequence: Synthetic oligonucleotide
auuaugucagaguccugua

SEQ ID NO: 1480495 - RNA, 19 nt, Artificial Sequence
  Description of Artificial Sequence: Synthetic oligonucleotide
uacaucugcuuuucugcuc

SEQ ID NO: 1480496 - RNA, 19 nt, Artificial Sequence
  Description of Artificial Sequence: Synthetic oligonucleotide
ucacacuguugguacugug

SEQ ID NO: 1480497 - RNA, 19 nt, Artificial Sequence
  Description of Artificial Sequence: Synthetic oligonucleotide
uuccaaucuggccucccaa

SEQ ID NO: 1480498 - RNA, 19 nt, Artificial Sequence
  Description of Artificial Sequence: Synthetic oligonucleotide
ugcauaaggcaggaaugac

SEQ ID NO: 1480499 - RNA, 19 nt, Artificial Sequence
  Description of Artificial Sequence: Synthetic oligonucleotide
auucaauccuagagaguuc

SEQ ID NO: 1480500 - RNA, 19 nt, Artificial Sequence
  Description of Artificial Sequence: Synthetic oligonucleotide
aucaaagguccugauucug

SEQ ID NO: 1480501 - RNA, 19 nt, Artificial Sequence
  Description of Artificial Sequence: Synthetic oligonucleotide
guuagaaauaauacucggu

SEQ ID NO: 1480502 - RNA, 19 nt, Artificial Sequence
  Description of Artificial Sequence: Synthetic oligonucleotide
cugauacuggagcuugcug

SEQ ID NO: 1480503 - RNA, 19 nt, Artificial Sequence
  Description of Artificial Sequence: Synthetic oligonucleotide
auuucuaccuugccugcuu

SEQ ID NO: 1480504 - RNA, 19 nt, Artificial Sequence
  Description of Artificial Sequence: Synthetic oligonucleotide
uucaggggagacaccaauu

SEQ ID NO: 1480505 - RNA, 19 nt, Artificial Sequence
  Description of Artificial Sequence: Synthetic oligonucleotide
cagucuucgggaaguauca

SEQ ID NO: 1480506 - RNA, 19 nt, Artificial Sequence
  Description of Artificial Sequence: Synthetic oligonucleotide
ugcuuccuguugaucagaa

SEQ ID NO: 1480507 - RNA, 19 nt, Artificial Sequence
  Description of Artificial Sequence: Synthetic oligonucleotide
uuuugcucccaggucaaau

SEQ ID NO: 1480508 - RNA, 19 nt, Artificial Sequence
  Description of Artificial Sequence: Synthetic oligonucleotide
aucacgauauucaauccua

SEQ ID NO: 1480509 - RNA, 19 nt, Artificial Sequence
  Description of Artificial Sequence: Synthetic oligonucleotide
ucggugacaucauuuuauu

SEQ ID NO: 1480510 - RNA, 19 nt, Artificial Sequence
  Description of Artificial Sequence: Synthetic oligonucleotide
aacagcucauugguuuccu

SEQ ID NO: 1480511 - RNA, 19 nt, Artificial Sequence
  Description of Artificial Sequence: Synthetic oligonucleotide
gcaaucucaagacuuucuc

SEQ ID NO: 1480512 - RNA, 19 nt, Artificial Sequence
  Description of Artificial Sequence: Synthetic oligonucleotide
augauucacacuguuggua

SEQ ID NO: 1480513 - RNA, 19 nt, Artificial Sequence
  Description of Artificial Sequence: Synthetic oligonucleotide
cauggugggcucucucggc

SEQ ID NO: 1480514 - RNA, 19 nt, Artificial Sequence
  Description of Artificial Sequence: Synthetic oligonucleotide
gauacacguucucuuuaaa

SEQ ID NO: 1480515 - RNA, 19 nt, Artificial Sequence
  Description of Artificial Sequence: Synthetic oligonucleotide
cugugacuuccaaucuggc

SEQ ID NO: 1480516 - RNA, 19 nt, Artificial Sequence
  Description of Artificial Sequence: Synthetic oligonucleotide
gagugcuuggccauuucuc

SEQ ID NO: 1480517 - RNA, 19 nt, Artificial Sequence
  Description of Artificial Sequence: Synthetic oligonucleotide
cacgauauucaauccuaga

SEQ ID NO: 1480518 - RNA, 19 nt, Artificial Sequence
  Description of Artificial Sequence: Synthetic oligonucleotide
cucgauucauuuccuuguc

SEQ ID NO: 1480519 - RNA, 19 nt, Artificial Sequence
  Description of Artificial Sequence: Synthetic oligonucleotide
gaaagcagcuugugcuauc

SEQ ID NO: 1480520 - RNA, 19 nt, Artificial Sequence
  Description of Artificial Sequence: Synthetic oligonucleotide
gaagauacacguucucuuu

SEQ ID NO: 1480521 - RNA, 19 nt, Artificial Sequence
  Description of Artificial Sequence: Synthetic oligonucleotide
ccuagcagcaagaccauuc

SEQ ID NO: 1480522 - RNA, 19 nt, Artificial Sequence
  Description of Artificial Sequence: Synthetic oligonucleotide
ccaggauguucuuagccag

SEQ ID NO: 1480523 - RNA, 19 nt, Artificial Sequence
  Description of Artificial Sequence: Synthetic oligonucleotide
acuuccaaucuggccuccc

SEQ ID NO: 1480524 - RNA, 19 nt, Artificial Sequence
  Description of Artificial Sequence: Synthetic oligonucleotide
agucuucgggaaguaucac

SEQ ID NO: 1480525 - RNA, 19 nt, Artificial Sequence
  Description of Artificial Sequence: Synthetic oligonucleotide
cauuaugucagaguccugu

SEQ ID NO: 1480526 - RNA, 19 nt, Artificial Sequence
  Description of Artificial Sequence: Synthetic oligonucleotide
auauucaauccuagagagu

SEQ ID NO: 1480527 - RNA, 19 nt, Artificial Sequence
  Description of Artificial Sequence: Synthetic oligonucleotide
ccuguaauccguuagaaau

SEQ ID NO: 1480528 - RNA, 19 nt, Artificial Sequence
  Description of Artificial Sequence: Synthetic oligonucleotide
gaaugacuuucuugcaacu

SEQ ID NO: 1480529 - RNA, 19 nt, Artificial Sequence
  Description of Artificial Sequence: Synthetic oligonucleotide
ugcucccaggucaaaucuc

SEQ ID NO: 1480530 - RNA, 19 nt, Artificial Sequence
  Description of Artificial Sequence: Synthetic oligonucleotide
uugccagucuucgggaagu

SEQ ID NO: 1480531 - RNA, 19 nt, Artificial Sequence
  Description of Artificial Sequence: Synthetic oligonucleotide
cauagcuucauggugggcu

SEQ ID NO: 1480532 - RNA, 19 nt, Artificial Sequence
  Description of Artificial Sequence: Synthetic oligonucleotide
aaucaacagcucauugguu

SEQ ID NO: 1480533 - RNA, 19 nt, Artificial Sequence
  Description of Artificial Sequence: Synthetic oligonucleotide
gggguauucuguucuuccc

SEQ ID NO: 1480534 - RNA, 19 nt, Artificial Sequence
  Description of Artificial Sequence: Synthetic oligonucleotide
ucuauuucucaggcauuau

SEQ ID NO: 1480535 - RNA, 19 nt, Artificial Sequence
  Description of Artificial Sequence: Synthetic oligonucleotide
cauguacaccuucuucuga

SEQ ID NO: 1480536 - RNA, 19 nt, Artificial Sequence
  Description of Artificial Sequence: Synthetic oligonucleotide
acucggugacaucauuuua

SEQ ID NO: 1480537 - RNA, 19 nt, Artificial Sequence
  Description of Artificial Sequence: Synthetic oligonucleotide
uuugagugcuuggccauuu

SEQ ID NO: 1480538 - RNA, 19 nt, Artificial Sequence
  Description of Artificial Sequence: Synthetic oligonucleotide
cucggugacaucauuuuau

SEQ ID NO: 1480539 - RNA, 19 nt, Artificial Sequence
  Description of Artificial Sequence: Synthetic oligonucleotide
cgauauucaauccuagaga

SEQ ID NO: 1480540 - RNA, 19 nt, Artificial Sequence
  Description of Artificial Sequence: Synthetic oligonucleotide
agcuuccuucaaaugauau

SEQ ID NO: 1480541 - RNA, 19 nt, Artificial Sequence
  Description of Artificial Sequence: Synthetic oligonucleotide
gauucacacuguugguacu

SEQ ID NO: 1480542 - RNA, 19 nt, Artificial Sequence
  Description of Artificial Sequence: Synthetic oligonucleotide
agcuuaauacagacauagu

SEQ ID NO: 1480543 - RNA, 19 nt, Artificial Sequence
  Description of Artificial Sequence: Synthetic oligonucleotide
gggugaugaagguuugauc

SEQ ID NO: 1480544 - RNA, 19 nt, Artificial Sequence
  Description of Artificial Sequence: Synthetic oligonucleotide
cucaacugcaucauagcuu

SEQ ID NO: 1480545 - RNA, 19 nt, Artificial Sequence
  Description of Artificial Sequence: Synthetic oligonucleotide
gguucagagcaucuagaaa

SEQ ID NO: 1480546 - RNA, 19 nt, Artificial Sequence
  Description of Artificial Sequence: Synthetic oligonucleotide
ucugggguauucuguucuu

SEQ ID NO: 1480547 - RNA, 19 nt, Artificial Sequence
  Description of Artificial Sequence: Synthetic oligonucleotide
uugccuuuugcugcaguuu

SEQ ID NO: 1480548 - RNA, 19 nt, Artificial Sequence
  Description of Artificial Sequence: Synthetic oligonucleotide
caggaaugacuuucuugca

SEQ ID NO: 1480549 - RNA, 19 nt, Artificial Sequence
  Description of Artificial Sequence: Synthetic oligonucleotide
cucuauuucucaggcauua

SEQ ID NO: 1480550 - RNA, 19 nt, Artificial Sequence
  Description of Artificial Sequence: Synthetic oligonucleotide
gccuugugaagauacacgu

SEQ ID NO: 1480551 - RNA, 19 nt, Artificial Sequence
  Description of Artificial Sequence: Synthetic oligonucleotide
caugauucacacuguuggu

SEQ ID NO: 1480552 - RNA, 19 nt, Artificial Sequence
  Description of Artificial Sequence: Synthetic oligonucleotide
cauuuuauuggagucugau

SEQ ID NO: 1480553 - RNA, 19 nt, Artificial Sequence
  Description of Artificial Sequence: Synthetic oligonucleotide
auagcuuaauacagacaua

SEQ ID NO: 1480554 - RNA, 19 nt, Artificial Sequence
  Description of Artificial Sequence: Synthetic oligonucleotide
cuuccaaucuggccuccca

SEQ ID NO: 1480555 - RNA, 19 nt, Artificial Sequence
  Description of Artificial Sequence: Synthetic oligonucleotide
ucccuccaauucauuuauc

SEQ ID NO: 1480556 - RNA, 19 nt, Artificial Sequence
  Description of Artificial Sequence: Synthetic oligonucleotide
agagaggcauuggccuuag

SEQ ID NO: 1480557 - RNA, 19 nt, Artificial Sequence
  Description of Artificial Sequence: Synthetic oligonucleotide
uuuugagugcuuggccauu

SEQ ID NO: 1480558 - RNA, 19 nt, Artificial Sequence
  Description of Artificial Sequence: Synthetic oligonucleotide
cgaucuuccuucaggggag

SEQ ID NO: 1480559 - RNA, 19 nt, Artificial Sequence
  Description of Artificial Sequence: Synthetic oligonucleotide
ugguuuccuuuugaugcau

SEQ ID NO: 1480560 - RNA, 19 nt, Artificial Sequence
  Description of Artificial Sequence: Synthetic oligonucleotide
ugccaucaaagguccugau

SEQ ID NO: 1480561 - RNA, 19 nt, Artificial Sequence
  Description of Artificial Sequence: Synthetic oligonucleotide
guaagagccuugugaagau

SEQ ID NO: 1480562 - RNA, 19 nt, Artificial Sequence
  Description of Artificial Sequence: Synthetic oligonucleotide
caucaaagguccugauucu

SEQ ID NO: 1480563 - RNA, 19 nt, Artificial Sequence
  Description of Artificial Sequence: Synthetic oligonucleotide
caccggcucucgaucuucc

SEQ ID NO: 1480564 - RNA, 19 nt, Artificial Sequence
  Description of Artificial Sequence: Synthetic oligonucleotide
caauccuagagaguucugu

SEQ ID NO: 1480565 - RNA, 19 nt, Artificial Sequence
  Description of Artificial Sequence: Synthetic oligonucleotide
gguccaggauguucuuagc

SEQ ID NO: 1480566 - RNA, 19 nt, Artificial Sequence
  Description of Artificial Sequence: Synthetic oligonucleotide
uucaccggcucucgaucuu

SEQ ID NO: 1480567 - RNA, 19 nt, Artificial Sequence
  Description of Artificial Sequence: Synthetic oligonucleotide
guccuguaauccguuagaa

SEQ ID NO: 1480568 - RNA, 19 nt, Artificial Sequence
  Description of Artificial Sequence: Synthetic oligonucleotide
gguaaguugcauaaucuuu

SEQ ID NO: 1480569 - RNA, 19 nt, Artificial Sequence
  Description of Artificial Sequence: Synthetic oligonucleotide
cugggguauucuguucuuc

SEQ ID NO: 1480570 - RNA, 19 nt, Artificial Sequence
  Description of Artificial Sequence: Synthetic oligonucleotide
caguuccguuuccauguuc

SEQ ID NO: 1480571 - RNA, 19 nt, Artificial Sequence
  Description of Artificial Sequence: Synthetic oligonucleotide
cuagagaguucugugacuu

SEQ ID NO: 1480572 - RNA, 19 nt, Artificial Sequence
  Description of Artificial Sequence: Synthetic oligonucleotide
ucaccggcucucgaucuuc

SEQ ID NO: 1480573 - RNA, 19 nt, Artificial Sequence
  Description of Artificial Sequence: Synthetic oligonucleotide
gcucaacugcaucauagcu

SEQ ID NO: 1480574 - RNA, 19 nt, Artificial Sequence
  Description of Artificial Sequence: Synthetic oligonucleotide
gucugauacuggagcuugc

SEQ ID NO: 1480575 - RNA, 19 nt, Artificial Sequence
  Description of Artificial Sequence: Synthetic oligonucleotide
cuuagaacucgaccuguau

SEQ ID NO: 1480576 - RNA, 19 nt, Artificial Sequence
  Description of Artificial Sequence: Synthetic oligonucleotide
uggccuuagcucguucaau

SEQ ID NO: 1480577 - RNA, 19 nt, Artificial Sequence
  Description of Artificial Sequence: Synthetic oligonucleotide
cauuggccuuagcucguuc

SEQ ID NO: 1480578 - RNA, 19 nt, Artificial Sequence
  Description of Artificial Sequence: Synthetic oligonucleotide
cugcuuuucugcucuauuu

SEQ ID NO: 1480579 - RNA, 19 nt, Artificial Sequence
  Description of Artificial Sequence: Synthetic oligonucleotide
auacuggagcuugcugggu

SEQ ID NO: 1480580 - RNA, 19 nt, Artificial Sequence
  Description of Artificial Sequence: Synthetic oligonucleotide
cugcucuauuucucaggca

SEQ ID NO: 1480581 - RNA, 19 nt, Artificial Sequence
  Description of Artificial Sequence: Synthetic oligonucleotide
cuguauuuccuagcagcaa

SEQ ID NO: 1480582 - RNA, 19 nt, Artificial Sequence
  Description of Artificial Sequence: Synthetic oligonucleotide
ggugggcucucucggccag

SEQ ID NO: 1480583 - RNA, 19 nt, Artificial Sequence
  Description of Artificial Sequence: Synthetic oligonucleotide
accggcucucgaucuuccu

SEQ ID NO: 1480584 - RNA, 19 nt, Artificial Sequence
  Description of Artificial Sequence: Synthetic oligonucleotide
ugccugcuugguucucuau

SEQ ID NO: 1480585 - RNA, 19 nt, Artificial Sequence
  Description of Artificial Sequence: Synthetic oligonucleotide
caaacucuguggucaugua

SEQ ID NO: 1480586 - RNA, 19 nt, Artificial Sequence
  Description of Artificial Sequence: Synthetic oligonucleotide
cuucaccggcucucgaucu

SEQ ID NO: 1480587 - RNA, 19 nt, Artificial Sequence
  Description of Artificial Sequence: Synthetic oligonucleotide
ggguaaguugcauaaucuu

SEQ ID NO: 1480588 - RNA, 19 nt, Artificial Sequence
  Description of Artificial Sequence: Synthetic oligonucleotide
gagaggcauuggccuuagc

SEQ ID NO: 1480589 - RNA, 19 nt, Artificial Sequence
  Description of Artificial Sequence: Synthetic oligonucleotide
ccuucaccggcucucgauc

SEQ ID NO: 1480590 - RNA, 19 nt, Artificial Sequence
  Description of Artificial Sequence: Synthetic oligonucleotide
cccuccaauucauuuaucu

SEQ ID NO: 1480591 - RNA, 19 nt, Artificial Sequence
  Description of Artificial Sequence: Synthetic oligonucleotide
cugcuggguaaguugcaua

SEQ ID NO: 1480592 - RNA, 19 nt, Artificial Sequence
  Description of Artificial Sequence: Synthetic oligonucleotide
ccaugagaucaugauucac

SEQ ID NO: 1480593 - RNA, 19 nt, Artificial Sequence
  Description of Artificial Sequence: Synthetic oligonucleotide
cggugacaucauuuuauug

SEQ ID NO: 1480594 - RNA, 19 nt, Artificial Sequence
  Description of Artificial Sequence: Synthetic oligonucleotide
ccaggucaaaucucuaaua

SEQ ID NO: 1480595 - RNA, 19 nt, Artificial Sequence
  Description of Artificial Sequence: Synthetic oligonucleotide
gcucucgaucuuccuucag

SEQ ID NO: 1480596 - RNA, 19 nt, Artificial Sequence
  Description of Artificial Sequence: Synthetic oligonucleotide
uccuagcagcaagaccauu

SEQ ID NO: 1480597 - RNA, 19 nt, Artificial Sequence
  Description of Artificial Sequence: Synthetic oligonucleotide
cucggagguuuucugucgu

SEQ ID NO: 1480598 - RNA, 19 nt, Artificial Sequence
  Description of Artificial Sequence: Synthetic oligonucleotide
gagucugauacuggagcuu

SEQ ID NO: 1480599 - RNA, 19 nt, Artificial Sequence
  Description of Artificial Sequence: Synthetic oligonucleotide
gccugcuugguucucuaua

SEQ ID NO: 1480600 - RNA, 19 nt, Artificial Sequence
  Description of Artificial Sequence: Synthetic oligonucleotide
ggcucucgaucuuccuuca

SEQ ID NO: 1480601 - RNA, 19 nt, Artificial Sequence
  Description of Artificial Sequence: Synthetic oligonucleotide
cgaccuguauuuccuagca

SEQ ID NO: 1480602 - RNA, 19 nt, Artificial Sequence
  Description of Artificial Sequence: Synthetic oligonucleotide
gcagcuugugcuaucugcu

SEQ ID NO: 1480603 - RNA, 19 nt, Artificial Sequence
  Description of Artificial Sequence: Synthetic oligonucleotide
cuccacugucagaaauaua

SEQ ID NO: 1480604 - RNA, 19 nt, Artificial Sequence
  Description of Artificial Sequence: Synthetic oligonucleotide
cuucgggaaguaucacgau

SEQ ID NO: 1480605 - RNA, 19 nt, Artificial Sequence
  Description of Artificial Sequence: Synthetic oligonucleotide
cucccaggucaaaucucua

SEQ ID NO: 1480606 - RNA, 19 nt, Artificial Sequence
  Description of Artificial Sequence: Synthetic oligonucleotide
ggagguuuucugucguguu

SEQ ID NO: 1480607 - RNA, 19 nt, Artificial Sequence
  Description of Artificial Sequence: Synthetic oligonucleotide
ccuuuugcugcaguuugaa

SEQ ID NO: 1480608 - RNA, 19 nt, Artificial Sequence
  Description of Artificial Sequence: Synthetic oligonucleotide
uugcaacuucucggagguu

SEQ ID NO: 1480609 - RNA, 19 nt, Artificial Sequence
  Description of Artificial Sequence: Synthetic oligonucleotide
guaauccguuagaaauaau

SEQ ID NO: 1480610 - RNA, 19 nt, Artificial Sequence
  Description of Artificial Sequence: Synthetic oligonucleotide
ccuagagaguucugugacu

SEQ ID NO: 1480611 - RNA, 19 nt, Artificial Sequence
  Description of Artificial Sequence: Synthetic oligonucleotide
cagaguccuguaauccguu

SEQ ID NO: 1480612 - RNA, 19 nt, Artificial Sequence
  Description of Artificial Sequence: Synthetic oligonucleotide
uccucugguccaggauguu

SEQ ID NO: 1480613 - RNA, 19 nt, Artificial Sequence
  Description of Artificial Sequence: Synthetic oligonucleotide
cugcuugguucucuauaau

SEQ ID NO: 1480614 - RNA, 19 nt, Artificial Sequence
  Description of Artificial Sequence: Synthetic oligonucleotide
gcuuagaacucgaccugua

SEQ ID NO: 1480615 - RNA, 19 nt, Artificial Sequence
  Description of Artificial Sequence: Synthetic oligonucleotide
gccuuuugcugcaguuuga

SEQ ID NO: 1480616 - RNA, 19 nt, Artificial Sequence
  Description of Artificial Sequence: Synthetic oligonucleotide
caucugcuuuucugcucua

SEQ ID NO: 1480617 - RNA, 19 nt, Artificial Sequence
  Description of Artificial Sequence: Synthetic oligonucleotide
cccaggucaaaucucuaau

SEQ ID NO: 1480618 - RNA, 19 nt, Artificial Sequence
  Description of Artificial Sequence: Synthetic oligonucleotide
cagcuugugcuaucugcuu

SEQ ID NO: 1480619 - RNA, 19 nt, Artificial Sequence
  Description of Artificial Sequence: Synthetic oligonucleotide
cuggaacaggaggcuuaga

SEQ ID NO: 1480620 - RNA, 19 nt, Artificial Sequence
  Description of Artificial Sequence: Synthetic oligonucleotide
ccuugugaagauacacguu

SEQ ID NO: 1480621 - RNA, 19 nt, Artificial Sequence
  Description of Artificial Sequence: Synthetic oligonucleotide
ccaauucauuuaucugcau

SEQ ID NO: 1480622 - RNA, 19 nt, Artificial Sequence
  Description of Artificial Sequence: Synthetic oligonucleotide
ggcauuggccuuagcucgu

SEQ ID NO: 1480623 - RNA, 19 nt, Artificial Sequence
  Description of Artificial Sequence: Synthetic oligonucleotide
gcucuauuucucaggcauu

SEQ ID NO: 1480624 - RNA, 19 nt, Artificial Sequence
  Description of Artificial Sequence: Synthetic oligonucleotide
ggccucccaaagagaggca

SEQ ID NO: 1480625 - RNA, 19 nt, Artificial Sequence
  Description of Artificial Sequence: Synthetic oligonucleotide
guccugauucugggguauu

SEQ ID NO: 1480626 - RNA, 19 nt, Artificial Sequence
  Description of Artificial Sequence: Synthetic oligonucleotide
cccgcacaugcugcgcuca

SEQ ID NO: 1480627 - RNA, 19 nt, Artificial Sequence
  Description of Artificial Sequence: Synthetic oligonucleotide
gccagucuucgggaaguau

SEQ ID NO: 1480628 - RNA, 19 nt, Artificial Sequence
  Description of Artificial Sequence: Synthetic oligonucleotide
ccggcucucgaucuuccuu

SEQ ID NO: 1480629 - RNA, 19 nt, Artificial Sequence
  Description of Artificial Sequence: Synthetic oligonucleotide
cgggaaguaucacgauauu

SEQ ID NO: 1480630 - RNA, 19 nt, Artificial Sequence
  Description of Artificial Sequence: Synthetic oligonucleotide
ccgcacaugcugcgcucau

SEQ ID NO: 1480631 - RNA, 19 nt, Artificial Sequence
  Description of Artificial Sequence: Synthetic oligonucleotide
aguggaauaaaacacagcc

SEQ ID NO: 1480632 - RNA, 19 nt, Artificial Sequence
  Description of Artificial Sequence: Synthetic oligonucleotide
aaaacuuggccacauuugc

SEQ ID NO: 1480633 - RNA, 19 nt, Artificial Sequence
  Description of Artificial Sequence: Synthetic oligonucleotide
ugaaguaucaguuaaggga

SEQ ID NO: 1480634 - RNA, 19 nt, Artificial Sequence
  Description of Artificial Sequence: Synthetic oligonucleotide
uuaaacuugaaauacgucu

SEQ ID NO: 1480635 - RNA, 19 nt, Artificial Sequence
  Description of Artificial Sequence: Synthetic oligonucleotide
aaaucacuauuacauuucc

SEQ ID NO: 1480636 - RNA, 19 nt, Artificial Sequence
  Description of Artificial Sequence: Synthetic oligonucleotide
auuaaaaugacugucaagu

SEQ ID NO: 1480637 - RNA, 19 nt, Artificial Sequence
  Description of Artificial Sequence: Synthetic oligonucleotide
aaugugacauuuaaagccc

SEQ ID NO: 1480638 - RNA, 19 nt, Artificial Sequence
  Description of Artificial Sequence: Synthetic oligonucleotide
ucaguuaagggaaagucag

SEQ ID NO: 1480639 - RNA, 19 nt, Artificial Sequence
  Description of Artificial Sequence: Synthetic oligonucleotide
uggaauaaaacacagccgu

SEQ ID NO: 1480640 - RNA, 19 nt, Artificial Sequence
  Description of Artificial Sequence: Synthetic oligonucleotide
gaaaaccucacuucuacgg

SEQ ID NO: 1480641 - RNA, 19 nt, Artificial Sequence
  Description of Artificial Sequence: Synthetic oligonucleotide
uuaagggaaagucagcuga

SEQ ID NO: 1480642 - RNA, 19 nt, Artificial Sequence
  Description of Artificial Sequence: Synthetic oligonucleotide
cacuauuacauuuccaagg

SEQ ID NO: 1480643 - RNA, 19 nt, Artificial Sequence
  Description of Artificial Sequence: Synthetic oligonucleotide
uauuacauuuccaaggguc

SEQ ID NO: 1480644 - RNA, 19 nt, Artificial Sequence
  Description of Artificial Sequence: Synthetic oligonucleotide
aagagguaaucgcugaguc

SEQ ID NO: 1480645 - RNA, 19 nt, Artificial Sequence
  Description of Artificial Sequence: Synthetic oligonucleotide
ugacaaguggaauaaaaca

SEQ ID NO: 1480646 - RNA, 19 nt, Artificial Sequence
  Description of Artificial Sequence: Synthetic oligonucleotide
auaaauaucccucuuccca

SEQ ID NO: 1480647 - RNA, 19 nt, Artificial Sequence
  Description of Artificial Sequence: Synthetic oligonucleotide
auuagugccugacacuggc

SEQ ID NO: 1480648 - RNA, 19 nt, Artificial Sequence
  Description of Artificial Sequence: Synthetic oligonucleotide
uuuucuagucauucgugcg

SEQ ID NO: 1480649 - RNA, 19 nt, Artificial Sequence
  Description of Artificial Sequence: Synthetic oligonucleotide
aauuaaacuugaaauacgu

SEQ ID NO: 1480650 - RNA, 19 nt, Artificial Sequence
  Description of Artificial Sequence: Synthetic oligonucleotide
uacgucuggauucuuaaag

SEQ ID NO: 1480651 - RNA, 19 nt, Artificial Sequence
  Description of Artificial Sequence: Synthetic oligonucleotide
accuauuagugccugacac

SEQ ID NO: 1480652 - RNA, 19 nt, Artificial Sequence
  Description of Artificial Sequence: Synthetic oligonucleotide
uuuaagugagccucucugg

SEQ ID NO: 1480653 - RNA, 19 nt, Artificial Sequence
  Description of Artificial Sequence: Synthetic oligonucleotide
gacauugcagcugacaggg

SEQ ID NO: 1480654 - RNA, 19 nt, Artificial Sequence
  Description of Artificial Sequence: Synthetic oligonucleotide
agaggauucuccaaguugc

SEQ ID NO: 1480655 - RNA, 19 nt, Artificial Sequence
  Description of Artificial Sequence: Synthetic oligonucleotide
uuuaaagccccauuggcac

SEQ ID NO: 1480656 - RNA, 19 nt, Artificial Sequence
  Description of Artificial Sequence: Synthetic oligonucleotide
caauuaaacuugaaauacg

SEQ ID NO: 1480657 - RNA, 19 nt, Artificial Sequence
  Description of Artificial Sequence: Synthetic oligonucleotide
uauuagacaaagaauuuua

SEQ ID NO: 1480658 - RNA, 19 nt, Artificial Sequence
  Description of Artificial Sequence: Synthetic oligonucleotide
aauuacucaguggaaaaug

SEQ ID NO: 1480659 - RNA, 19 nt, Artificial Sequence
  Description of Artificial Sequence: Synthetic oligonucleotide
agagggaucauaaaacugg

SEQ ID NO: 1480660 - RNA, 19 nt, Artificial Sequence
  Description of Artificial Sequence: Synthetic oligonucleotide
ugcggaauuuauuagacaa

SEQ ID NO: 1480661 - RNA, 19 nt, Artificial Sequence
  Description of Artificial Sequence: Synthetic oligonucleotide
aaggucguguauuuuaagu

SEQ ID NO: 1480662 - RNA, 19 nt, Artificial Sequence
  Description of Artificial Sequence: Synthetic oligonucleotide
uccuugaacagccagaguu

SEQ ID NO: 1480663 - RNA, 19 nt, Artificial Sequence
  Description of Artificial Sequence: Synthetic oligonucleotide
ucgaggaggacuuaggccu

SEQ ID NO: 1480664 - RNA, 19 nt, Artificial Sequence
  Description of Artificial Sequence: Synthetic oligonucleotide
cauuuaaagccccauuggc

SEQ ID NO: 1480665 - RNA, 19 nt, Artificial Sequence
  Description of Artificial Sequence: Synthetic oligonucleotide
aauaucccucuucccaagg

SEQ ID NO: 1480666 - RNA, 19 nt, Artificial Sequence
  Description of Artificial Sequence: Synthetic oligonucleotide
uuccccuuuauaaauguga

SEQ ID NO: 1480667 - RNA, 19 nt, Artificial Sequence
  Description of Artificial Sequence: Synthetic oligonucleotide
aauacgucuggauucuuaa

SEQ ID NO: 1480668 - RNA, 19 nt, Artificial Sequence
  Description of Artificial Sequence: Synthetic oligonucleotide
ugugauuaaaaugacuguc

SEQ ID NO: 1480669 - RNA, 19 nt, Artificial Sequence
  Description of Artificial Sequence: Synthetic oligonucleotide
ucacuauuacauuuccaag

SEQ ID NO: 1480670 - RNA, 19 nt, Artificial Sequence
  Description of Artificial Sequence: Synthetic oligonucleotide
gauucuccaaguugcaccc

SEQ ID NO: 1480671 - RNA, 19 nt, Artificial Sequence
  Description of Artificial Sequence: Synthetic oligonucleotide
cauaaaccagccaagugug

SEQ ID NO: 1480672 - RNA, 19 nt, Artificial Sequence
  Description of Artificial Sequence: Synthetic oligonucleotide
caaguggaauaaaacacag

SEQ ID NO: 1480673 - RNA, 19 nt, Artificial Sequence
  Description of Artificial Sequence: Synthetic oligonucleotide
ugcauaucuggcuauggug

SEQ ID NO: 1480674 - RNA, 19 nt, Artificial Sequence
  Description of Artificial Sequence: Synthetic oligonucleotide
gaggacuuaggccuguucc

SEQ ID NO: 1480675 - RNA, 19 nt, Artificial Sequence
  Description of Artificial Sequence: Synthetic oligonucleotide
auuacauuuccaagggucg

SEQ ID NO: 1480676 - RNA, 19 nt, Artificial Sequence
  Description of Artificial Sequence: Synthetic oligonucleotide
uacucaguggaaaaugcac

SEQ ID NO: 1480677 - RNA, 19 nt, Artificial Sequence
  Description of Artificial Sequence: Synthetic oligonucleotide
cuugucaauccacuguucc

SEQ ID NO: 1480678 - RNA, 19 nt, Artificial Sequence
  Description of Artificial Sequence: Synthetic oligonucleotide
ugaaaaccucacuucuacg

SEQ ID NO: 1480679 - RNA, 19 nt, Artificial Sequence
  Description of Artificial Sequence: Synthetic oligonucleotide
acgucuggauucuuaaagg

SEQ ID NO: 1480680 - RNA, 19 nt, Artificial Sequence
  Description of Artificial Sequence: Synthetic oligonucleotide
aaguggaauaaaacacagc

SEQ ID NO: 1480681 - RNA, 19 nt, Artificial Sequence
  Description of Artificial Sequence: Synthetic oligonucleotide
ucguguggaccacagaagc

SEQ ID NO: 1480682 - RNA, 19 nt, Artificial Sequence
  Description of Artificial Sequence: Synthetic oligonucleotide
gugaaguaucaguuaaggg

SEQ ID NO: 1480683 - RNA, 19 nt, Artificial Sequence
  Description of Artificial Sequence: Synthetic oligonucleotide
aauaggcccuuccuugaag

SEQ ID NO: 1480684 - RNA, 19 nt, Artificial Sequence
  Description of Artificial Sequence: Synthetic oligonucleotide
aagugugacaucggagggc

SEQ ID NO: 1480685 - RNA, 19 nt, Artificial Sequence
  Description of Artificial Sequence: Synthetic oligonucleotide
acggcagaccuauuagugc

SEQ ID NO: 1480686 - RNA, 19 nt, Artificial Sequence
  Description of Artificial Sequence: Synthetic oligonucleotide
aggucguguauuuuaagug

SEQ ID NO: 1480687 - RNA, 19 nt, Artificial Sequence
  Description of Artificial Sequence: Synthetic oligonucleotide
auaggcccuuccuugaagg

SEQ ID NO: 1480688 - RNA, 19 nt, Artificial Sequence
  Description of Artificial Sequence: Synthetic oligonucleotide
auggagaggauucuccaag

SEQ ID NO: 1480689 - RNA, 19 nt, Artificial Sequence
  Description of Artificial Sequence: Synthetic oligonucleotide
aagggucgcugguacauuc

SEQ ID NO: 1480690 - RNA, 19 nt, Artificial Sequence
  Description of Artificial Sequence: Synthetic oligonucleotide
cauaaauaucccucuuccc

SEQ ID NO: 1480691 - RNA, 19 nt, Artificial Sequence
  Description of Artificial Sequence: Synthetic oligonucleotide
ucucauucaucacucuucu

SEQ ID NO: 1480692 - RNA, 19 nt, Artificial Sequence
  Description of Artificial Sequence: Synthetic oligonucleotide
uaaagguucagucgugauc

SEQ ID NO: 1480693 - RNA, 19 nt, Artificial Sequence
  Description of Artificial Sequence: Synthetic oligonucleotide
uaucaguuaagggaaaguc

SEQ ID NO: 1480694 - RNA, 19 nt, Artificial Sequence
  Description of Artificial Sequence: Synthetic oligonucleotide
uucagucgugaucacuggg

SEQ ID NO: 1480695 - RNA, 19 nt, Artificial Sequence
  Description of Artificial Sequence: Synthetic oligonucleotide
uuuauaaaugugacauuua

SEQ ID NO: 1480696 - RNA, 19 nt, Artificial Sequence
  Description of Artificial Sequence: Synthetic oligonucleotide
acagagggaucauaaaacu

SEQ ID NO: 1480697 - RNA, 19 nt, Artificial Sequence
  Description of Artificial Sequence: Synthetic oligonucleotide
gacagagggaucauaaaac

SEQ ID NO: 1480698 - RNA, 19 nt, Artificial Sequence
  Description of Artificial Sequence: Synthetic oligonucleotide
uuacucaguggaaaaugca

SEQ ID NO: 1480699 - RNA, 19 nt, Artificial Sequence
  Description of Artificial Sequence: Synthetic oligonucleotide
agaaugugacggcagaccu

SEQ ID NO: 1480700 - RNA, 19 nt, Artificial Sequence
  Description of Artificial Sequence: Synthetic oligonucleotide
auuuaucacugggaugugc

SEQ ID NO: 1480701 - RNA, 19 nt, Artificial Sequence
  Description of Artificial Sequence: Synthetic oligonucleotide
uagaaugaaagccgugagu

SEQ ID NO: 1480702 - RNA, 19 nt, Artificial Sequence
  Description of Artificial Sequence: Synthetic oligonucleotide
uugugauuaaaaugacugu

SEQ ID NO: 1480703 - RNA, 19 nt, Artificial Sequence
  Description of Artificial Sequence: Synthetic oligonucleotide
ucagucgugaucacuggga

SEQ ID NO: 1480704 - RNA, 19 nt, Artificial Sequence
  Description of Artificial Sequence: Synthetic oligonucleotide
aguuaagggaaagucagcu

SEQ ID NO: 1480705 - RNA, 19 nt, Artificial Sequence
  Description of Artificial Sequence: Synthetic oligonucleotide
ggaaagucagcugagaaug

SEQ ID NO: 1480706 - RNA, 19 nt, Artificial Sequence
  Description of Artificial Sequence: Synthetic oligonucleotide
ugaagagguaaucgcugag

SEQ ID NO: 1480707 - RNA, 19 nt, Artificial Sequence
  Description of Artificial Sequence: Synthetic oligonucleotide
ucauaaaacugggaugggc

SEQ ID NO: 1480708 - RNA, 19 nt, Artificial Sequence
  Description of Artificial Sequence: Synthetic oligonucleotide
gacauuuaucacugggaug

SEQ ID NO: 1480709 - RNA, 19 nt, Artificial Sequence
  Description of Artificial Sequence: Synthetic oligonucleotide
guagaaugaaagccgugag

SEQ ID NO: 1480710 - RNA, 19 nt, Artificial Sequence
  Description of Artificial Sequence: Synthetic oligonucleotide
cugaaaaccucacuucuac

SEQ ID NO: 1480711 - RNA, 19 nt, Artificial Sequence
  Description of Artificial Sequence: Synthetic oligonucleotide
cuauuagugccugacacug

SEQ ID NO: 1480712 - RNA, 19 nt, Artificial Sequence
  Description of Artificial Sequence: Synthetic oligonucleotide
caagaggcaccacacgucg

SEQ ID NO: 1480713 - RNA, 19 nt, Artificial Sequence
  Description of Artificial Sequence: Synthetic oligonucleotide
uaaucgcugagucuguuua

SEQ ID NO: 1480714 - RNA, 19 nt, Artificial Sequence
  Description of Artificial Sequence: Synthetic oligonucleotide
uauuagugccugacacugg

SEQ ID NO: 1480715 - RNA, 19 nt, Artificial Sequence
  Description of Artificial Sequence: Synthetic oligonucleotide
ucuggcuauggugaagagg

SEQ ID NO: 1480716 - RNA, 19 nt, Artificial Sequence
  Description of Artificial Sequence: Synthetic oligonucleotide
uggacaagaggcaccacac

SEQ ID NO: 1480717 - RNA, 19 nt, Artificial Sequence
  Description of Artificial Sequence: Synthetic oligonucleotide
ccaagugugacaucggagg

SEQ ID NO: 1480718 - RNA, 19 nt, Artificial Sequence
  Description of Artificial Sequence: Synthetic oligonucleotide
uucgugcggaauuuauuag

SEQ ID NO: 1480719 - RNA, 19 nt, Artificial Sequence
  Description of Artificial Sequence: Synthetic oligonucleotide
auucgugcggaauuuauua

SEQ ID NO: 1480720 - RNA, 19 nt, Artificial Sequence
  Description of Artificial Sequence: Synthetic oligonucleotide
cucagaggugacuaaacuc

SEQ ID NO: 1480721 - RNA, 19 nt, Artificial Sequence
  Description of Artificial Sequence: Synthetic oligonucleotide
uuccccuacacuguggcag

SEQ ID NO: 1480722 - RNA, 19 nt, Artificial Sequence
  Description of Artificial Sequence: Synthetic oligonucleotide
uugaaggucguguauuuua

SEQ ID NO: 1480723 - RNA, 19 nt, Artificial Sequence
  Description of Artificial Sequence: Synthetic oligonucleotide
gagaugacggcgcaggcca

SEQ ID NO: 1480724 - RNA, 19 nt, Artificial Sequence
  Description of Artificial Sequence: Synthetic oligonucleotide
cauuuggacaagaggcacc

SEQ ID NO: 1480725 - RNA, 19 nt, Artificial Sequence
  Description of Artificial Sequence: Synthetic oligonucleotide
ucguguauuuuaagugagc

SEQ ID NO: 1480726 - RNA, 19 nt, Artificial Sequence
  Description of Artificial Sequence: Synthetic oligonucleotide
cuugaacagccagaguugg

SEQ ID NO: 1480727 - RNA, 19 nt, Artificial Sequence
  Description of Artificial Sequence: Synthetic oligonucleotide
cuucgaggaggacuuaggc

SEQ ID NO: 1480728 - RNA, 19 nt, Artificial Sequence
  Description of Artificial Sequence: Synthetic oligonucleotide
ugggacagagggaucauaa

SEQ ID NO: 1480729 - RNA, 19 nt, Artificial Sequence
  Description of Artificial Sequence: Synthetic oligonucleotide
ugugacggcagaccuauua

SEQ ID NO: 1480730 - RNA, 19 nt, Artificial Sequence
  Description of Artificial Sequence: Synthetic oligonucleotide
uaucuggcuauggugaaga

SEQ ID NO: 1480731 - RNA, 19 nt, Artificial Sequence
  Description of Artificial Sequence: Synthetic oligonucleotide
gagaaugugacggcagacc

SEQ ID NO: 1480732 - RNA, 19 nt, Artificial Sequence
  Description of Artificial Sequence: Synthetic oligonucleotide
ucgugcggaauuuauuaga

SEQ ID NO: 1480733 - RNA, 19 nt, Artificial Sequence
  Description of Artificial Sequence: Synthetic oligonucleotide
ucaggcucuggaaauuacu

SEQ ID NO: 1480734 - RNA, 19 nt, Artificial Sequence
  Description of Artificial Sequence: Synthetic oligonucleotide
aacaacagccgugaaguau

SEQ ID NO: 1480735 - RNA, 19 nt, Artificial Sequence
  Description of Artificial Sequence: Synthetic oligonucleotide
aguaucaguuaagggaaag

SEQ ID NO: 1480736 - RNA, 19 nt, Artificial Sequence
  Description of Artificial Sequence: Synthetic oligonucleotide
uugucaauccacuguucca

SEQ ID NO: 1480737 - RNA, 19 nt, Artificial Sequence
  Description of Artificial Sequence: Synthetic oligonucleotide
agcgcugagcugcucuugc

SEQ ID NO: 1480738 - RNA, 19 nt, Artificial Sequence
  Description of Artificial Sequence: Synthetic oligonucleotide
cuggaguacuugucaaucc

SEQ ID NO: 1480739 - RNA, 19 nt, Artificial Sequence
  Description of Artificial Sequence: Synthetic oligonucleotide
cagagggaucauaaaacug

SEQ ID NO: 1480740 - RNA, 19 nt, Artificial Sequence
  Description of Artificial Sequence: Synthetic oligonucleotide
gggguugugauuaaaauga

SEQ ID NO: 1480741 - RNA, 19 nt, Artificial Sequence
  Description of Artificial Sequence: Synthetic oligonucleotide
acgucguucggcucggcgg

SEQ ID NO: 1480742 - RNA, 19 nt, Artificial Sequence
  Description of Artificial Sequence: Synthetic oligonucleotide
ggcucuggaaauuacucag

SEQ ID NO: 1480743 - RNA, 19 nt, Artificial Sequence
  Description of Artificial Sequence: Synthetic oligonucleotide
acuaaacuccucaagccug

SEQ ID NO: 1480744 - RNA, 19 nt, Artificial Sequence
  Description of Artificial Sequence: Synthetic oligonucleotide
gaguuggcaguucauguuc

SEQ ID NO: 1480745 - RNA, 19 nt, Artificial Sequence
  Description of Artificial Sequence: Synthetic oligonucleotide
cuggcuauggugaagaggu

SEQ ID NO: 1480746 - RNA, 19 nt, Artificial Sequence
  Description of Artificial Sequence: Synthetic oligonucleotide
uccguuucucccauuugga

SEQ ID NO: 1480747 - RNA, 19 nt, Artificial Sequence
  Description of Artificial Sequence: Synthetic oligonucleotide
aucaguuaagggaaaguca

SEQ ID NO: 1480748 - RNA, 19 nt, Artificial Sequence
  Description of Artificial Sequence: Synthetic oligonucleotide
gacaucggagggcucagug

SEQ ID NO: 1480749 - RNA, 19 nt, Artificial Sequence
  Description of Artificial Sequence: Synthetic oligonucleotide
agcagugacaaguggaaua

SEQ ID NO: 1480750 - RNA, 19 nt, Artificial Sequence
  Description of Artificial Sequence: Synthetic oligonucleotide
gacggcagaccuauuagug

SEQ ID NO: 1480751 - RNA, 19 nt, Artificial Sequence
  Description of Artificial Sequence: Synthetic oligonucleotide
caucggagggcucagugac

SEQ ID NO: 1480752 - RNA, 19 nt, Artificial Sequence
  Description of Artificial Sequence: Synthetic oligonucleotide
aaguugcaccccuguggac

SEQ ID NO: 1480753 - RNA, 19 nt, Artificial Sequence
  Description of Artificial Sequence: Synthetic oligonucleotide
aaucacuauuacauuucca

SEQ ID NO: 1480754 - RNA, 19 nt, Artificial Sequence
  Description of Artificial Sequence: Synthetic oligonucleotide
ggugacuaaacuccucaag

SEQ ID NO: 1480755 - RNA, 19 nt, Artificial Sequence
  Description of Artificial Sequence: Synthetic oligonucleotide
gugacggcagaccuauuag

SEQ ID NO: 1480756 - RNA, 19 nt, Artificial Sequence
  Description of Artificial Sequence: Synthetic oligonucleotide
auagugagaagcagcagca

SEQ ID NO: 1480757 - RNA, 19 nt, Artificial Sequence
  Description of Artificial Sequence: Synthetic oligonucleotide
uaaagccccauuggcacag

SEQ ID NO: 1480758 - RNA, 19 nt, Artificial Sequence
  Description of Artificial Sequence: Synthetic oligonucleotide
ggggacauuuaucacuggg

SEQ ID NO: 1480759 - RNA, 19 nt, Artificial Sequence
  Description of Artificial Sequence: Synthetic oligonucleotide
uagucauucgugcggaauu

SEQ ID NO: 1480760 - RNA, 19 nt, Artificial Sequence
  Description of Artificial Sequence: Synthetic oligonucleotide
cauaaaacugggaugggcu

SEQ ID NO: 1480761 - RNA, 19 nt, Artificial Sequence
  Description of Artificial Sequence: Synthetic oligonucleotide
ucauucgugcggaauuuau

SEQ ID NO: 1480762 - RNA, 19 nt, Artificial Sequence
  Description of Artificial Sequence: Synthetic oligonucleotide
uuaaagccccauuggcaca

SEQ ID NO: 1480763 - RNA, 19 nt, Artificial Sequence
  Description of Artificial Sequence: Synthetic oligonucleotide
gucguguauuuuaagugag

SEQ ID NO: 1480764 - RNA, 19 nt, Artificial Sequence
  Description of Artificial Sequence: Synthetic oligonucleotide
gcagacgucgagaugacgg

SEQ ID NO: 1480765 - RNA, 19 nt, Artificial Sequence
  Description of Artificial Sequence: Synthetic oligonucleotide
uuaaagguucagucgugau

SEQ ID NO: 1480766 - RNA, 19 nt, Artificial Sequence
  Description of Artificial Sequence: Synthetic oligonucleotide
acagccgucguguggacca

SEQ ID NO: 1480767 - RNA, 19 nt, Artificial Sequence
  Description of Artificial Sequence: Synthetic oligonucleotide
aagucagcugagaauguga

SEQ ID NO: 1480768 - RNA, 19 nt, Artificial Sequence
  Description of Artificial Sequence: Synthetic oligonucleotide
ugguacauuccaaauccuu

SEQ ID NO: 1480769 - RNA, 19 nt, Artificial Sequence
  Description of Artificial Sequence: Synthetic oligonucleotide
guucagucgugaucacugg

SEQ ID NO: 1480770 - RNA, 19 nt, Artificial Sequence
  Description of Artificial Sequence: Synthetic oligonucleotide
acaauaggcccuuccuuga

SEQ ID NO: 1480771 - RNA, 19 nt, Artificial Sequence
  Description of Artificial Sequence: Synthetic oligonucleotide
gacaagaggcaccacacgu

SEQ ID NO: 1480772 - RNA, 19 nt, Artificial Sequence
  Description of Artificial Sequence: Synthetic oligonucleotide
agugacaaguggaauaaaa

SEQ ID NO: 1480773 - RNA, 19 nt, Artificial Sequence
  Description of Artificial Sequence: Synthetic oligonucleotide
gucgagaugacggcgcagg

SEQ ID NO: 1480774 - RNA, 19 nt, Artificial Sequence
  Description of Artificial Sequence: Synthetic oligonucleotide
gaugugcuacaaguucagg

SEQ ID NO: 1480775 - RNA, 19 nt, Artificial Sequence
  Description of Artificial Sequence: Synthetic oligonucleotide
ucaagugcugcugggcuug

SEQ ID NO: 1480776 - RNA, 19 nt, Artificial Sequence
  Description of Artificial Sequence: Synthetic oligonucleotide
ugacggcagaccuauuagu

SEQ ID NO: 1480777 - RNA, 19 nt, Artificial Sequence
  Description of Artificial Sequence: Synthetic oligonucleotide
uugaacagccagaguuggc

SEQ ID NO: 1480778 - RNA, 19 nt, Artificial Sequence
  Description of Artificial Sequence: Synthetic oligonucleotide
aaucgcugagucuguuuaa

SEQ ID NO: 1480779 - RNA, 19 nt, Artificial Sequence
  Description of Artificial Sequence: Synthetic oligonucleotide
uucuagucauucgugcgga

SEQ ID NO: 1480780 - RNA, 19 nt, Artificial Sequence
  Description of Artificial Sequence: Synthetic oligonucleotide
ccaaguugcaccccugugg

SEQ ID NO: 1480781 - RNA, 19 nt, Artificial Sequence
  Description of Artificial Sequence: Synthetic oligonucleotide
ugucgggaggugcugggga

SEQ ID NO: 1480782 - RNA, 19 nt, Artificial Sequence
  Description of Artificial Sequence: Synthetic oligonucleotide
gguucagucgugaucacug

SEQ ID NO: 1480783 - RNA, 19 nt, Artificial Sequence
  Description of Artificial Sequence: Synthetic oligonucleotide
cagacgucgagaugacggc

SEQ ID NO: 1480784 - RNA, 19 nt, Artificial Sequence
  Description of Artificial Sequence: Synthetic oligonucleotide
auaucccucuucccaagga

SEQ ID NO: 1480785 - RNA, 19 nt, Artificial Sequence
  Description of Artificial Sequence: Synthetic oligonucleotide
agggccgcggcucugaaaa

SEQ ID NO: 1480786 - RNA, 19 nt, Artificial Sequence
  Description of Artificial Sequence: Synthetic oligonucleotide
ugagaaugugacggcagac

SEQ ID NO: 1480787 - RNA, 19 nt, Artificial Sequence
  Description of Artificial Sequence: Synthetic oligonucleotide
aggaucguggaguggccag

SEQ ID NO: 1480788 - RNA, 19 nt, Artificial Sequence
  Description of Artificial Sequence: Synthetic oligonucleotide
gcauaaaccagccaagugu

SEQ ID NO: 1480789 - RNA, 19 nt, Artificial Sequence
  Description of Artificial Sequence: Synthetic oligonucleotide
accucacuucuacggcugc

SEQ ID NO: 1480790 - RNA, 19 nt, Artificial Sequence
  Description of Artificial Sequence: Synthetic oligonucleotide
acagccugaaaaccucacu

SEQ ID NO: 1480791 - RNA, 19 nt, Artificial Sequence
  Description of Artificial Sequence: Synthetic oligonucleotide
ugaggaucguggaguggcc

SEQ ID NO: 1480792 - RNA, 19 nt, Artificial Sequence
  Description of Artificial Sequence: Synthetic oligonucleotide
gguagaaugaaagccguga

SEQ ID NO: 1480793 - RNA, 19 nt, Artificial Sequence
  Description of Artificial Sequence: Synthetic oligonucleotide
aggcaccacacgucguucg

SEQ ID NO: 1480794 - RNA, 19 nt, Artificial Sequence
  Description of Artificial Sequence: Synthetic oligonucleotide
uacauuuccaagggucgcu

SEQ ID NO: 1480795 - RNA, 19 nt, Artificial Sequence
  Description of Artificial Sequence: Synthetic oligonucleotide
cauugcagcugacagggga

SEQ ID NO: 1480796 - RNA, 19 nt, Artificial Sequence
  Description of Artificial Sequence: Synthetic oligonucleotide
aaauacgucuggauucuua

SEQ ID NO: 1480797 - RNA, 19 nt, Artificial Sequence
  Description of Artificial Sequence: Synthetic oligonucleotide
gugaagagguaaucgcuga

SEQ ID NO: 1480798 - RNA, 19 nt, Artificial Sequence
  Description of Artificial Sequence: Synthetic oligonucleotide
caaguugcaccccugugga

SEQ ID NO: 1480799 - RNA, 19 nt, Artificial Sequence
  Description of Artificial Sequence: Synthetic oligonucleotide
ugacugucaagugcugcug

SEQ ID NO: 1480800 - RNA, 19 nt, Artificial Sequence
  Description of Artificial Sequence: Synthetic oligonucleotide
agacgucgagaugacggcg

SEQ ID NO: 1480801 - RNA, 19 nt, Artificial Sequence
  Description of Artificial Sequence: Synthetic oligonucleotide
ucuccaaguugcaccccug

SEQ ID NO: 1480802 - RNA, 19 nt, Artificial Sequence
  Description of Artificial Sequence: Synthetic oligonucleotide
ccuaggccaguucugagcc

SEQ ID NO: 1480803 - RNA, 19 nt, Artificial Sequence
  Description of Artificial Sequence: Synthetic oligonucleotide
augaaagccgugagugggg

SEQ ID NO: 1480804 - RNA, 19 nt, Artificial Sequence
  Description of Artificial Sequence: Synthetic oligonucleotide
gacgucgagaugacggcgc

SEQ ID NO: 1480805 - RNA, 19 nt, Artificial Sequence
  Description of Artificial Sequence: Synthetic oligonucleotide
ucgagaugacggcgcaggc

SEQ ID NO: 1480806 - RNA, 19 nt, Artificial Sequence
  Description of Artificial Sequence: Synthetic oligonucleotide
ggugaagagguaaucgcug

SEQ ID NO: 1480807 - RNA, 19 nt, Artificial Sequence
  Description of Artificial Sequence: Synthetic oligonucleotide
gagccgacgugccuucgag

SEQ ID NO: 1480808 - RNA, 19 nt, Artificial Sequence
  Description of Artificial Sequence: Synthetic oligonucleotide
cagugacagccugaaaacc

SEQ ID NO: 1480809 - RNA, 19 nt, Artificial Sequence
  Description of Artificial Sequence: Synthetic oligonucleotide
ggaaauuacucaguggaaa

SEQ ID NO: 1480810 - RNA, 19 nt, Artificial Sequence
  Description of Artificial Sequence: Synthetic oligonucleotide
gggaucauaaaacugggau

SEQ ID NO: 1480811 - RNA, 19 nt, Artificial Sequence
  Description of Artificial Sequence: Synthetic oligonucleotide
uguggaccacagaagcaua

SEQ ID NO: 1480812 - RNA, 19 nt, Artificial Sequence
  Description of Artificial Sequence: Synthetic oligonucleotide
ccuguucccgucuuccucg

SEQ ID NO: 1480813 - RNA, 19 nt, Artificial Sequence
  Description of Artificial Sequence: Synthetic oligonucleotide
aaacugggaugggcugucg

SEQ ID NO: 1480814 - RNA, 19 nt, Artificial Sequence
  Description of Artificial Sequence: Synthetic oligonucleotide
gaccuauuagugccugaca

SEQ ID NO: 1480815 - RNA, 19 nt, Artificial Sequence
  Description of Artificial Sequence: Synthetic oligonucleotide
cuuaaagguucagucguga

SEQ ID NO: 1480816 - RNA, 19 nt, Artificial Sequence
  Description of Artificial Sequence: Synthetic oligonucleotide
agccagaguuggcaguuca

SEQ ID NO: 1480817 - RNA, 19 nt, Artificial Sequence
  Description of Artificial Sequence: Synthetic oligonucleotide
auacgucuggauucuuaaa

SEQ ID NO: 1480818 - RNA, 19 nt, Artificial Sequence
  Description of Artificial Sequence: Synthetic oligonucleotide
ugcagacgucgagaugacg

SEQ ID NO: 1480819 - RNA, 19 nt, Artificial Sequence
  Description of Artificial Sequence: Synthetic oligonucleotide
aacagccgugaaguaucag

SEQ ID NO: 1480820 - RNA, 19 nt, Artificial Sequence
  Description of Artificial Sequence: Synthetic oligonucleotide
ccuugaacagccagaguug

SEQ ID NO: 1480821 - RNA, 19 nt, Artificial Sequence
  Description of Artificial Sequence: Synthetic oligonucleotide
aucuggcuauggugaagag

SEQ ID NO: 1480822 - RNA, 19 nt, Artificial Sequence
  Description of Artificial Sequence: Synthetic oligonucleotide
ggacuuaggccuguucccg

SEQ ID NO: 1480823 - RNA, 19 nt, Artificial Sequence
  Description of Artificial Sequence: Synthetic oligonucleotide
agggucgcugguacauucc

SEQ ID NO: 1480824 - RNA, 19 nt, Artificial Sequence
  Description of Artificial Sequence: Synthetic oligonucleotide
aagccccauuggcacaggu

SEQ ID NO: 1480825 - RNA, 19 nt, Artificial Sequence
  Description of Artificial Sequence: Synthetic oligonucleotide
ucgcugguacauuccaaau

SEQ ID NO: 1480826 - RNA, 19 nt, Artificial Sequence
  Description of Artificial Sequence: Synthetic oligonucleotide
accacacgucguucggcuc

SEQ ID NO: 1480827 - RNA, 19 nt, Artificial Sequence
  Description of Artificial Sequence: Synthetic oligonucleotide
gaagagguaaucgcugagu

SEQ ID NO: 1480828 - RNA, 19 nt, Artificial Sequence
  Description of Artificial Sequence: Synthetic oligonucleotide
cucggcggcacacggcccg

SEQ ID NO: 1480829 - RNA, 19 nt, Artificial Sequence
  Description of Artificial Sequence: Synthetic oligonucleotide
cacgucguucggcucggcg

SEQ ID NO: 1480830 - RNA, 19 nt, Artificial Sequence
  Description of Artificial Sequence: Synthetic oligonucleotide
uccaagggucgcugguaca

SEQ ID NO: 1480831 - RNA, 19 nt, Artificial Sequence
  Description of Artificial Sequence: Synthetic oligonucleotide
uaggcccuuccuugaaggu

SEQ ID NO: 1480832 - RNA, 19 nt, Artificial Sequence
  Description of Artificial Sequence: Synthetic oligonucleotide
gaugacggcgcaggccaag

SEQ ID NO: 1480833 - RNA, 19 nt, Artificial Sequence
  Description of Artificial Sequence: Synthetic oligonucleotide
gugcggaauuuauuagaca

SEQ ID NO: 1480834 - RNA, 19 nt, Artificial Sequence
  Description of Artificial Sequence: Synthetic oligonucleotide
ucgggaggugcuggggagg

SEQ ID NO: 1480835 - RNA, 19 nt, Artificial Sequence
  Description of Artificial Sequence: Synthetic oligonucleotide
ucuagucauucgugcggaa

SEQ ID NO: 1480836 - RNA, 19 nt, Artificial Sequence
  Description of Artificial Sequence: Synthetic oligonucleotide
cgugcggaauuuauuagac

SEQ ID NO: 1480837 - RNA, 19 nt, Artificial Sequence
  Description of Artificial Sequence: Synthetic oligonucleotide
ccuucgaggaggacuuagg

SEQ ID NO: 1480838 - RNA, 19 nt, Artificial Sequence
  Description of Artificial Sequence: Synthetic oligonucleotide
uggaccacagaagcauaaa

SEQ ID NO: 1480839 - RNA, 19 nt, Artificial Sequence
  Description of Artificial Sequence: Synthetic oligonucleotide
gggagggccgcccaccucc

SEQ ID NO: 1480840 - RNA, 19 nt, Artificial Sequence
  Description of Artificial Sequence: Synthetic oligonucleotide
augacggcgcaggccaagg

SEQ ID NO: 1480841 - RNA, 19 nt, Artificial Sequence
  Description of Artificial Sequence: Synthetic oligonucleotide
uugcauccguuucucccau

SEQ ID NO: 1480842 - RNA, 19 nt, Artificial Sequence
  Description of Artificial Sequence: Synthetic oligonucleotide
ggacauuuaucacugggau

SEQ ID NO: 1480843 - RNA, 19 nt, Artificial Sequence
  Description of Artificial Sequence: Synthetic oligonucleotide
gccuaggccaguucugagc

SEQ ID NO: 1480844 - RNA, 19 nt, Artificial Sequence
  Description of Artificial Sequence: Synthetic oligonucleotide
cucaguggaaaaugcacau

SEQ ID NO: 1480845 - RNA, 19 nt, Artificial Sequence
  Description of Artificial Sequence: Synthetic oligonucleotide
agccgugaaguaucaguua

SEQ ID NO: 1480846 - RNA, 19 nt, Artificial Sequence
  Description of Artificial Sequence: Synthetic oligonucleotide
gccgugaaguaucaguuaa

SEQ ID NO: 1480847 - RNA, 19 nt, Artificial Sequence
  Description of Artificial Sequence: Synthetic oligonucleotide
ccacacgucguucggcucg

SEQ ID NO: 1480848 - RNA, 19 nt, Artificial Sequence
  Description of Artificial Sequence: Synthetic oligonucleotide
auaaaccagccaaguguga

SEQ ID NO: 1480849 - RNA, 19 nt, Artificial Sequence
  Description of Artificial Sequence: Synthetic oligonucleotide
agucauucgugcggaauuu

SEQ ID NO: 1480850 - RNA, 19 nt, Artificial Sequence
  Description of Artificial Sequence: Synthetic oligonucleotide
cggcagaccuauuagugcc

SEQ ID NO: 1480851 - RNA, 19 nt, Artificial Sequence
  Description of Artificial Sequence: Synthetic oligonucleotide
ggcaccacacgucguucgg

SEQ ID NO: 1480852 - RNA, 19 nt, Artificial Sequence
  Description of Artificial Sequence: Synthetic oligonucleotide
ggaauaaaacacagccguc

SEQ ID NO: 1480853 - RNA, 19 nt, Artificial Sequence
  Description of Artificial Sequence: Synthetic oligonucleotide
gcuggaguacuugucaauc

SEQ ID NO: 1480854 - RNA, 19 nt, Artificial Sequence
  Description of Artificial Sequence: Synthetic oligonucleotide
agguagaaugaaagccgug

SEQ ID NO: 1480855 - RNA, 19 nt, Artificial Sequence
  Description of Artificial Sequence: Synthetic oligonucleotide
guaucaguuaagggaaagu

SEQ ID NO: 1480856 - RNA, 19 nt, Artificial Sequence
  Description of Artificial Sequence: Synthetic oligonucleotide
ugcccugauggagaggauu

SEQ ID NO: 1480857 - RNA, 19 nt, Artificial Sequence
  Description of Artificial Sequence: Synthetic oligonucleotide
gccaagugugacaucggag

SEQ ID NO: 1480858 - RNA, 19 nt, Artificial Sequence
  Description of Artificial Sequence: Synthetic oligonucleotide
cauuuaucacugggaugug

SEQ ID NO: 1480859 - RNA, 19 nt, Artificial Sequence
  Description of Artificial Sequence: Synthetic oligonucleotide
acgucgagaugacggcgca

SEQ ID NO: 1480860 - RNA, 19 nt, Artificial Sequence
  Description of Artificial Sequence: Synthetic oligonucleotide
ggugacauugcagcugaca

SEQ ID NO: 1480861 - RNA, 19 nt, Artificial Sequence
  Description of Artificial Sequence: Synthetic oligonucleotide
caagccugccugccuuccc

SEQ ID NO: 1480862 - RNA, 19 nt, Artificial Sequence
  Description of Artificial Sequence: Synthetic oligonucleotide
cuguucccgucuuccucgc

SEQ ID NO: 1480863 - RNA, 19 nt, Artificial Sequence
  Description of Artificial Sequence: Synthetic oligonucleotide
ugcaccccuguggaccugc

SEQ ID NO: 1480864 - RNA, 19 nt, Artificial Sequence
  Description of Artificial Sequence: Synthetic oligonucleotide
ccauuuggacaagaggcac

SEQ ID NO: 1480865 - RNA, 19 nt, Artificial Sequence
  Description of Artificial Sequence: Synthetic oligonucleotide
guauuuuaagugagccucu

SEQ ID NO: 1480866 - RNA, 19 nt, Artificial Sequence
  Description of Artificial Sequence: Synthetic oligonucleotide
aagaggcaccacacgucgu

SEQ ID NO: 1480867 - RNA, 19 nt, Artificial Sequence
  Description of Artificial Sequence: Synthetic oligonucleotide
uuucucccauuuggacaag

SEQ ID NO: 1480868 - RNA, 19 nt, Artificial Sequence
  Description of Artificial Sequence: Synthetic oligonucleotide
gcagugacaaguggaauaa

SEQ ID NO: 1480869 - RNA, 19 nt, Artificial Sequence
  Description of Artificial Sequence: Synthetic oligonucleotide
uuuggacaagaggcaccac

SEQ ID NO: 1480870 - RNA, 19 nt, Artificial Sequence
  Description of Artificial Sequence: Synthetic oligonucleotide
uguucccgucuuccucgcu

SEQ ID NO: 1480871 - RNA, 19 nt, Artificial Sequence
  Description of Artificial Sequence: Synthetic oligonucleotide
acuggcgaugucauuucau

SEQ ID NO: 1480872 - RNA, 19 nt, Artificial Sequence
  Description of Artificial Sequence: Synthetic oligonucleotide
uggcugcauaucuggcuau

SEQ ID NO: 1480873 - RNA, 19 nt, Artificial Sequence
  Description of Artificial Sequence: Synthetic oligonucleotide
cacggcccggcagaagugc

SEQ ID NO: 1480874 - RNA, 19 nt, Artificial Sequence
  Description of Artificial Sequence: Synthetic oligonucleotide
ggccgcggcucugaaaacg

SEQ ID NO: 1480875 - RNA, 19 nt, Artificial Sequence
  Description of Artificial Sequence: Synthetic oligonucleotide
gaaugugacggcagaccua

SEQ ID NO: 1480876 - RNA, 19 nt, Artificial Sequence
  Description of Artificial Sequence: Synthetic oligonucleotide
cacacgucguucggcucgg

SEQ ID NO: 1480877 - RNA, 19 nt, Artificial Sequence
  Description of Artificial Sequence: Synthetic oligonucleotide
ggcuauggugaagagguaa

SEQ ID NO: 1480878 - RNA, 19 nt, Artificial Sequence
  Description of Artificial Sequence: Synthetic oligonucleotide
gguucucggggcugccucc

SEQ ID NO: 1480879 - RNA, 19 nt, Artificial Sequence
  Description of Artificial Sequence: Synthetic oligonucleotide
caacagccgugaaguauca

SEQ ID NO: 1480880 - RNA, 19 nt, Artificial Sequence
  Description of Artificial Sequence: Synthetic oligonucleotide
gccugaaaaccucacuucu

SEQ ID NO: 1480881 - RNA, 19 nt, Artificial Sequence
  Description of Artificial Sequence: Synthetic oligonucleotide
ggcucugaaaacggggaca

SEQ ID NO: 1480882 - RNA, 19 nt, Artificial Sequence
  Description of Artificial Sequence: Synthetic oligonucleotide
uggcuauggugaagaggua

SEQ ID NO: 1480883 - RNA, 19 nt, Artificial Sequence
  Description of Artificial Sequence: Synthetic oligonucleotide
guguggaccacagaagcau

SEQ ID NO: 1480884 - RNA, 19 nt, Artificial Sequence
  Description of Artificial Sequence: Synthetic oligonucleotide
ggguugugauuaaaaugac

SEQ ID NO: 1480885 - RNA, 19 nt, Artificial Sequence
  Description of Artificial Sequence: Synthetic oligonucleotide
gguugugauuaaaaugacu

SEQ ID NO: 1480886 - RNA, 19 nt, Artificial Sequence
  Description of Artificial Sequence: Synthetic oligonucleotide
gggaaagucagcugagaau

SEQ ID NO: 1480887 - RNA, 19 nt, Artificial Sequence
  Description of Artificial Sequence: Synthetic oligonucleotide
cacacggcccggcagaagu

SEQ ID NO: 1480888 - RNA, 19 nt, Artificial Sequence
  Description of Artificial Sequence: Synthetic oligonucleotide
ggauucuuaaagguucagu

SEQ ID NO: 1480889 - RNA, 19 nt, Artificial Sequence
  Description of Artificial Sequence: Synthetic oligonucleotide
guggaccacagaagcauaa

SEQ ID NO: 1480890 - RNA, 19 nt, Artificial Sequence
  Description of Artificial Sequence: Synthetic oligonucleotide
caauaggcccuuccuugaa

SEQ ID NO: 1480891 - RNA, 19 nt, Artificial Sequence
  Description of Artificial Sequence: Synthetic oligonucleotide
gugccugacacuggccgac

SEQ ID NO: 1480892 - RNA, 19 nt, Artificial Sequence
  Description of Artificial Sequence: Synthetic oligonucleotide
cacagccgucguguggacc

SEQ ID NO: 1480893 - RNA, 19 nt, Artificial Sequence
  Description of Artificial Sequence: Synthetic oligonucleotide
gccgcggcucugaaaacgg

SEQ ID NO: 1480894 - RNA, 19 nt, Artificial Sequence
  Description of Artificial Sequence: Synthetic oligonucleotide
gcucagaggugacuaaacu

SEQ ID NO: 1480895 - RNA, 19 nt, Artificial Sequence
  Description of Artificial Sequence: Synthetic oligonucleotide
gccuuucauaaauaucccu

SEQ ID NO: 1480896 - RNA, 19 nt, Artificial Sequence
  Description of Artificial Sequence: Synthetic oligonucleotide
cagaccuauuagugccuga

SEQ ID NO: 1480897 - RNA, 19 nt, Artificial Sequence
  Description of Artificial Sequence: Synthetic oligonucleotide
cagccgugaaguaucaguu

SEQ ID NO: 1480898 - RNA, 19 nt, Artificial Sequence
  Description of Artificial Sequence: Synthetic oligonucleotide
ggaggacuuaggccuguuc

SEQ ID NO: 1480899 - RNA, 19 nt, Artificial Sequence
  Description of Artificial Sequence: Synthetic oligonucleotide
guaaucgcugagucuguuu

SEQ ID NO: 1480900 - RNA, 19 nt, Artificial Sequence
  Description of Artificial Sequence: Synthetic oligonucleotide
cauucgugcggaauuuauu

SEQ ID NO: 1480901 - RNA, 19 nt, Artificial Sequence
  Description of Artificial Sequence: Synthetic oligonucleotide
ugacaucggagggcucagu

SEQ ID NO: 1480902 - RNA, 19 nt, Artificial Sequence
  Description of Artificial Sequence: Synthetic oligonucleotide
gcagaccuauuagugccug

SEQ ID NO: 1480903 - RNA, 19 nt, Artificial Sequence
  Description of Artificial Sequence: Synthetic oligonucleotide
agguaaucgcugagucugu

SEQ ID NO: 1480904 - RNA, 19 nt, Artificial Sequence
  Description of Artificial Sequence: Synthetic oligonucleotide
gcacagguaaaucacuauu

SEQ ID NO: 1480905 - RNA, 19 nt, Artificial Sequence
  Description of Artificial Sequence: Synthetic oligonucleotide
caagugcugcugggcuugg

SEQ ID NO: 1480906 - RNA, 19 nt, Artificial Sequence
  Description of Artificial Sequence: Synthetic oligonucleotide
gccuucgaggaggacuuag

SEQ ID NO: 1480907 - RNA, 19 nt, Artificial Sequence
  Description of Artificial Sequence: Synthetic oligonucleotide
cgacgugccuucgaggagg

SEQ ID NO: 1480908 - RNA, 19 nt, Artificial Sequence
  Description of Artificial Sequence: Synthetic oligonucleotide
gugacauuuaaagccccau

SEQ ID NO: 1480909 - RNA, 19 nt, Artificial Sequence
  Description of Artificial Sequence: Synthetic oligonucleotide
cgucguguggaccacagaa

SEQ ID NO: 1480910 - RNA, 19 nt, Artificial Sequence
  Description of Artificial Sequence: Synthetic oligonucleotide
cacuggcgaugucauuuca

SEQ ID NO: 1480911 - RNA, 19 nt, Artificial Sequence
  Description of Artificial Sequence: Synthetic oligonucleotide
caccacacgucguucggcu

SEQ ID NO: 1480912 - RNA, 19 nt, Artificial Sequence
  Description of Artificial Sequence: Synthetic oligonucleotide
ucggcggcacacggcccgg

SEQ ID NO: 1480913 - RNA, 19 nt, Artificial Sequence
  Description of Artificial Sequence: Synthetic oligonucleotide
gugagccucucuggcugag

SEQ ID NO: 1480914 - RNA, 19 nt, Artificial Sequence
  Description of Artificial Sequence: Synthetic oligonucleotide
gacagcccgggguugugau

SEQ ID NO: 1480915 - RNA, 19 nt, Artificial Sequence
  Description of Artificial Sequence: Synthetic oligonucleotide
gcggaauuuauuagacaaa

SEQ ID NO: 1480916 - RNA, 19 nt, Artificial Sequence
  Description of Artificial Sequence: Synthetic oligonucleotide
gacgugccuucgaggagga

SEQ ID NO: 1480917 - RNA, 19 nt, Artificial Sequence
  Description of Artificial Sequence: Synthetic oligonucleotide
ccuauuagugccugacacu

SEQ ID NO: 1480918 - RNA, 19 nt, Artificial Sequence
  Description of Artificial Sequence: Synthetic oligonucleotide
acagcccgggguugugauu

SEQ ID NO: 1480919 - RNA, 19 nt, Artificial Sequence
  Description of Artificial Sequence: Synthetic oligonucleotide
cuagucauucgugcggaau

SEQ ID NO: 1480920 - RNA, 19 nt, Artificial Sequence
  Description of Artificial Sequence: Synthetic oligonucleotide
gucauucgugcggaauuua

SEQ ID NO: 1480921 - RNA, 19 nt, Artificial Sequence
  Description of Artificial Sequence: Synthetic oligonucleotide
cagcucagaggugacuaaa

SEQ ID NO: 1480922 - RNA, 19 nt, Artificial Sequence
  Description of Artificial Sequence: Synthetic oligonucleotide
guucggcucggcggcacac

SEQ ID NO: 1480923 - RNA, 19 nt, Artificial Sequence
  Description of Artificial Sequence: Synthetic oligonucleotide
ucguucggcucggcggcac

SEQ ID NO: 1480924 - RNA, 19 nt, Artificial Sequence
  Description of Artificial Sequence: Synthetic oligonucleotide
cgucguucggcucggcggc

SEQ ID NO: 1480925 - RNA, 19 nt, Artificial Sequence
  Description of Artificial Sequence: Synthetic oligonucleotide
gcggcucugaaaacgggga

SEQ ID NO: 1480926 - RNA, 19 nt, Artificial Sequence
  Description of Artificial Sequence: Synthetic oligonucleotide
acacggcccggcagaagug

SEQ ID NO: 1480927 - RNA, 19 nt, Artificial Sequence
  Description of Artificial Sequence: Synthetic oligonucleotide
gucaagugcugcugggcuu

SEQ ID NO: 1480928 - RNA, 19 nt, Artificial Sequence
  Description of Artificial Sequence: Synthetic oligonucleotide
ugcauccguuucucccauu

SEQ ID NO: 1480929 - RNA, 19 nt, Artificial Sequence
  Description of Artificial Sequence: Synthetic oligonucleotide
cuccaaguugcaccccugu

SEQ ID NO: 1480930 - RNA, 19 nt, Artificial Sequence
  Description of Artificial Sequence: Synthetic oligonucleotide
cgagaugacggcgcaggcc

SEQ ID NO: 1480931 - RNA, 19 nt, Artificial Sequence
  Description of Artificial Sequence: Synthetic oligonucleotide
ggcccggcagaagugcagc

SEQ ID NO: 1480932 - RNA, 19 nt, Artificial Sequence
  Description of Artificial Sequence: Synthetic oligonucleotide
cagcgcugagcugcucuug

SEQ ID NO: 1480933 - RNA, 19 nt, Artificial Sequence
  Description of Artificial Sequence: Synthetic oligonucleotide
gccacauuugcauccguuu

SEQ ID NO: 1480934 - RNA, 19 nt, Artificial Sequence
  Description of Artificial Sequence: Synthetic oligonucleotide
guucucggggcugccucca

SEQ ID NO: 1480935 - RNA, 19 nt, Artificial Sequence
  Description of Artificial Sequence: Synthetic oligonucleotide
gcggcacacggcccggcag

SEQ ID NO: 1480936 - RNA, 19 nt, Artificial Sequence
  Description of Artificial Sequence: Synthetic oligonucleotide
gcgcugagcugcucuugcc

SEQ ID NO: 1480937 - RNA, 19 nt, Artificial Sequence
  Description of Artificial Sequence: Synthetic oligonucleotide
gccgucguguggaccacag

SEQ ID NO: 1480938 - RNA, 19 nt, Artificial Sequence
  Description of Artificial Sequence: Synthetic oligonucleotide
gcaccacacgucguucggc

SEQ ID NO: 1480939 - RNA, 19 nt, Artificial Sequence
  Description of Artificial Sequence: Synthetic oligonucleotide
ggagccgacgugccuucga

SEQ ID NO: 1480940 - RNA, 19 nt, Artificial Sequence
  Description of Artificial Sequence: Synthetic oligonucleotide
ggagaggauucuccaaguu

SEQ ID NO: 1480941 - RNA, 19 nt, Artificial Sequence
  Description of Artificial Sequence: Synthetic oligonucleotide
ccgcggcucugaaaacggg

SEQ ID NO: 1480942 - RNA, 19 nt, Artificial Sequence
  Description of Artificial Sequence: Synthetic oligonucleotide
cccgggguugugauuaaaa

SEQ ID NO: 1480943 - RNA, 19 nt, Artificial Sequence
  Description of Artificial Sequence: Synthetic oligonucleotide
ccgacgugccuucgaggag

SEQ ID NO: 1480944 - RNA, 19 nt, Artificial Sequence
  Description of Artificial Sequence: Synthetic oligonucleotide
gaaauacgucuggauucuu

SEQ ID NO: 1480945 - RNA, 19 nt, Artificial Sequence
  Description of Artificial Sequence: Synthetic oligonucleotide
cagugacaaguggaauaaa

SEQ ID NO: 1480946 - RNA, 19 nt, Artificial Sequence
  Description of Artificial Sequence: Synthetic oligonucleotide
gcauccguuucucccauuu

SEQ ID NO: 1480947 - RNA, 19 nt, Artificial Sequence
  Description of Artificial Sequence: Synthetic oligonucleotide
acggcccggcagaagugca

SEQ ID NO: 1480948 - RNA, 19 nt, Artificial Sequence
  Description of Artificial Sequence: Synthetic oligonucleotide
agcccgggguugugauuaa

SEQ ID NO: 1480949 - RNA, 19 nt, Artificial Sequence
  Description of Artificial Sequence: Synthetic oligonucleotide
ggcuggaguacuugucaau

SEQ ID NO: 1480950 - RNA, 19 nt, Artificial Sequence
  Description of Artificial Sequence: Synthetic oligonucleotide
agccgucguguggaccaca

SEQ ID NO: 1480951 - RNA, 19 nt, Artificial Sequence
  Description of Artificial Sequence: Synthetic oligonucleotide
gagguucucggggcugccu

SEQ ID NO: 1480952 - RNA, 19 nt, Artificial Sequence
  Description of Artificial Sequence: Synthetic oligonucleotide
agaugacggcgcaggccaa

SEQ ID NO: 1480953 - RNA, 19 nt, Artificial Sequence
  Description of Artificial Sequence: Synthetic oligonucleotide
cucauucaucacucuucuu

SEQ ID NO: 1480954 - RNA, 19 nt, Artificial Sequence
  Description of Artificial Sequence: Synthetic oligonucleotide
ggucgcugguacauuccaa

SEQ ID NO: 1480955 - RNA, 19 nt, Artificial Sequence
  Description of Artificial Sequence: Synthetic oligonucleotide
ccgggguugugauuaaaau

SEQ ID NO: 1480956 - RNA, 19 nt, Artificial Sequence
  Description of Artificial Sequence: Synthetic oligonucleotide
cagccgucguguggaccac

SEQ ID NO: 1480957 - RNA, 19 nt, Artificial Sequence
  Description of Artificial Sequence: Synthetic oligonucleotide
guggaccugcagcugucuu

SEQ ID NO: 1480958 - RNA, 19 nt, Artificial Sequence
  Description of Artificial Sequence: Synthetic oligonucleotide
ggcgcaggccaaggcggcc

SEQ ID NO: 1480959 - RNA, 19 nt, Artificial Sequence
  Description of Artificial Sequence: Synthetic oligonucleotide
ccggcagaagugcagcgcu

SEQ ID NO: 1480960 - RNA, 19 nt, Artificial Sequence
  Description of Artificial Sequence: Synthetic oligonucleotide
gucguucggcucggcggca

SEQ ID NO: 1480961 - RNA, 19 nt, Artificial Sequence
  Description of Artificial Sequence: Synthetic oligonucleotide
gggccgcggcucugaaaac

SEQ ID NO: 1480962 - RNA, 19 nt, Artificial Sequence
  Description of Artificial Sequence: Synthetic oligonucleotide
ccgcccaccuccugcccug

SEQ ID NO: 1480963 - RNA, 19 nt, Artificial Sequence
  Description of Artificial Sequence: Synthetic oligonucleotide
ccacaauaggcccuuccuu

SEQ ID NO: 1480964 - RNA, 19 nt, Artificial Sequence
  Description of Artificial Sequence: Synthetic oligonucleotide
gguaaucgcugagucuguu

SEQ ID NO: 1480965 - RNA, 19 nt, Artificial Sequence
  Description of Artificial Sequence: Synthetic oligonucleotide
ccaagggucgcugguacau

SEQ ID NO: 1480966 - RNA, 19 nt, Artificial Sequence
  Description of Artificial Sequence: Synthetic oligonucleotide
ggggagggccgcccaccuc

SEQ ID NO: 1480967 - RNA, 19 nt, Artificial Sequence
  Description of Artificial Sequence: Synthetic oligonucleotide
cgucgagaugacggcgcag

SEQ ID NO: 1480968 - RNA, 19 nt, Artificial Sequence
  Description of Artificial Sequence: Synthetic oligonucleotide
gggugacauugcagcugac

SEQ ID NO: 1480969 - RNA, 19 nt, Artificial Sequence
  Description of Artificial Sequence: Synthetic oligonucleotide
gccugccuuccccuuuaua

SEQ ID NO: 1480970 - RNA, 19 nt, Artificial Sequence
  Description of Artificial Sequence: Synthetic oligonucleotide
ccccuacacuguggcagug

SEQ ID NO: 1480971 - RNA, 19 nt, Artificial Sequence
  Description of Artificial Sequence: Synthetic oligonucleotide
caagggucgcugguacauu

SEQ ID NO: 1480972 - RNA, 19 nt, Artificial Sequence
  Description of Artificial Sequence: Synthetic oligonucleotide
gccgcccaccuccugcccu

SEQ ID NO: 1480973 - RNA, 19 nt, Artificial Sequence
  Description of Artificial Sequence: Synthetic oligonucleotide
gccagaguuggcaguucau

SEQ ID NO: 1480974 - RNA, 19 nt, Artificial Sequence
  Description of Artificial Sequence: Synthetic oligonucleotide
ccgucguguggaccacaga

SEQ ID NO: 1480975 - RNA, 19 nt, Artificial Sequence
  Description of Artificial Sequence: Synthetic oligonucleotide
cguucggcucggcggcaca

SEQ ID NO: 1480976 - RNA, 19 nt, Artificial Sequence
  Description of Artificial Sequence: Synthetic oligonucleotide
ggagggccgcccaccuccu

SEQ ID NO: 1480977 - RNA, 19 nt, Artificial Sequence
  Description of Artificial Sequence: Synthetic oligonucleotide
gcccaccuccugcccugau

SEQ ID NO: 1480978 - RNA, 19 nt, Artificial Sequence
  Description of Artificial Sequence: Synthetic oligonucleotide
aacuauauacuucagacag

SEQ ID NO: 1480979 - RNA, 19 nt, Artificial Sequence
  Description of Artificial Sequence: Synthetic oligonucleotide
aaaucuuugagauccugcc

SEQ ID NO: 1480980 - RNA, 19 nt, Artificial Sequence
  Description of Artificial Sequence: Synthetic oligonucleotide
cuucauuuaguuuaggucg

SEQ ID NO: 1480981 - RNA, 19 nt, Artificial Sequence
  Description of Artificial Sequence: Synthetic oligonucleotide
aaucuuaacauaucugaac

SEQ ID NO: 1480982 - RNA, 19 nt, Artificial Sequence
  Description of Artificial Sequence: Synthetic oligonucleotide
auauacuucagacagucac

SEQ ID NO: 1480983 - RNA, 19 nt, Artificial Sequence
  Description of Artificial Sequence: Synthetic oligonucleotide
aaugcuuuaguuauaaaag

SEQ ID NO: 1480984 - RNA, 19 nt, Artificial Sequence
  Description of Artificial Sequence: Synthetic oligonucleotide
aagcuauuaguuuaauugg

SEQ ID NO: 1480985 - RNA, 19 nt, Artificial Sequence
  Description of Artificial Sequence: Synthetic oligonucleotide
ucuacaaagaaauccagcc

SEQ ID NO: 1480986 - RNA, 19 nt, Artificial Sequence
  Description of Artificial Sequence: Synthetic oligonucleotide
aauucucaacuauaagucg

SEQ ID NO: 1480987 - RNA, 19 nt, Artificial Sequence
  Description of Artificial Sequence: Synthetic oligonucleotide
uuaguuauaaaagagcucu

SEQ ID NO: 1480988 - RNA, 19 nt, Artificial Sequence
  Description of Artificial Sequence: Synthetic oligonucleotide
auuaguuuucaacaacccc

SEQ ID NO: 1480989 - RNA, 19 nt, Artificial Sequence
  Description of Artificial Sequence: Synthetic oligonucleotide
ucuucgacuacuaaaucgg

SEQ ID NO: 1480990 - RNA, 19 nt, Artificial Sequence
  Description of Artificial Sequence: Synthetic oligonucleotide
uuuaauuggaguaauuaaa

SEQ ID NO: 1480991 - RNA, 19 nt, Artificial Sequence
  Description of Artificial Sequence: Synthetic oligonucleotide
uacuaaaucggucagagua

SEQ ID NO: 1480992 - RNA, 19 nt, Artificial Sequence
  Description of Artificial Sequence: Synthetic oligonucleotide
uuaauuggaguaauuaaac

SEQ ID NO: 1480993 - RNA, 19 nt, Artificial Sequence
  Description of Artificial Sequence: Synthetic oligonucleotide
aauaucucugauccguccg

SEQ ID NO: 1480994 - RNA, 19 nt, Artificial Sequence
  Description of Artificial Sequence: Synthetic oligonucleotide
aauuggaguaauuaaacua

SEQ ID NO: 1480995 - RNA, 19 nt, Artificial Sequence
  Description of Artificial Sequence: Synthetic oligonucleotide
gagaccuacuaccagaacg

SEQ ID NO: 1480996 - RNA, 19 nt, Artificial Sequence
  Description of Artificial Sequence: Synthetic oligonucleotide
uuauaaaagagcucuguca

SEQ ID NO: 1480997 - RNA, 19 nt, Artificial Sequence
  Description of Artificial Sequence: Synthetic oligonucleotide
uauaaaagagcucugucaa

SEQ ID NO: 1480998 - RNA, 19 nt, Artificial Sequence
  Description of Artificial Sequence: Synthetic oligonucleotide
aaaagcacauacuuaccag

SEQ ID NO: 1480999 - RNA, 19 nt, Artificial Sequence
  Description of Artificial Sequence: Synthetic oligonucleotide
acuuagaucuacuugaaga

SEQ ID NO: 1481000 - RNA, 19 nt, Artificial Sequence
  Description of Artificial Sequence: Synthetic oligonucleotide
ucaauaguaacccuuucac

SEQ ID NO: 1481001 - RNA, 19 nt, Artificial Sequence
  Description of Artificial Sequence: Synthetic oligonucleotide
uagaucuacuugaagaacc

SEQ ID NO: 1481002 - RNA, 19 nt, Artificial Sequence
  Description of Artificial Sequence: Synthetic oligonucleotide
auaguaacccuuucacugc

SEQ ID NO: 1481003 - RNA, 19 nt, Artificial Sequence
  Description of Artificial Sequence: Synthetic oligonucleotide
cuguuaaugggugagaagg

SEQ ID NO: 1481004 - RNA, 19 nt, Artificial Sequence
  Description of Artificial Sequence: Synthetic oligonucleotide
uuuaguuuaggucggugug

SEQ ID NO: 1481005 - RNA, 19 nt, Artificial Sequence
  Description of Artificial Sequence: Synthetic oligonucleotide
ucucuucagaucaauaucu

SEQ ID NO: 1481006 - RNA, 19 nt, Artificial Sequence
  Description of Artificial Sequence: Synthetic oligonucleotide
aacgagaucggcuacggga

SEQ ID NO: 1481007 - RNA, 19 nt, Artificial Sequence
  Description of Artificial Sequence: Synthetic oligonucleotide
uuuagucucccgaugaaca

SEQ ID NO: 1481008 - RNA, 19 nt, Artificial Sequence
  Description of Artificial Sequence: Synthetic oligonucleotide
uauacacaaacuauauacu

SEQ ID NO: 1481009 - RNA, 19 nt, Artificial Sequence
  Description of Artificial Sequence: Synthetic oligonucleotide
cuaaucuuaacauaucuga

SEQ ID NO: 1481010 - RNA, 19 nt, Artificial Sequence
  Description of Artificial Sequence: Synthetic oligonucleotide
caaaagugugagcagaagg

SEQ ID NO: 1481011 - RNA, 19 nt, Artificial Sequence
  Description of Artificial Sequence: Synthetic oligonucleotide
uucauuuaguuuaggucgg

SEQ ID NO: 1481012 - RNA, 19 nt, Artificial Sequence
  Description of Artificial Sequence: Synthetic oligonucleotide
ugucaauauacacaaacua

SEQ ID NO: 1481013 - RNA, 19 nt, Artificial Sequence
  Description of Artificial Sequence: Synthetic oligonucleotide
gagacuuagaucuacuuga

SEQ ID NO: 1481014 - RNA, 19 nt, Artificial Sequence
  Description of Artificial Sequence: Synthetic oligonucleotide
uuagagcucuuuuaaagug

SEQ ID NO: 1481015 - RNA, 19 nt, Artificial Sequence
  Description of Artificial Sequence: Synthetic oligonucleotide
auagcauucuuuaagucac

SEQ ID NO: 1481016 - RNA, 19 nt, Artificial Sequence
  Description of Artificial Sequence: Synthetic oligonucleotide
ggaaaacucauauuaagcc

SEQ ID NO: 1481017 - RNA, 19 nt, Artificial Sequence
  Description of Artificial Sequence: Synthetic oligonucleotide
uccuacgggaacgagaucg

SEQ ID NO: 1481018 - RNA, 19 nt, Artificial Sequence
  Description of Artificial Sequence: Synthetic oligonucleotide
uuacagguggagcauuucg

SEQ ID NO: 1481019 - RNA, 19 nt, Artificial Sequence
  Description of Artificial Sequence: Synthetic oligonucleotide
agcauguucaauaguaacc

SEQ ID NO: 1481020 - RNA, 19 nt, Artificial Sequence
  Description of Artificial Sequence: Synthetic oligonucleotide
aaagcacauacuuaccaga

SEQ ID NO: 1481021 - RNA, 19 nt, Artificial Sequence
  Description of Artificial Sequence: Synthetic oligonucleotide
ucgacuacuaaaucgguca

SEQ ID NO: 1481022 - RNA, 19 nt, Artificial Sequence
  Description of Artificial Sequence: Synthetic oligonucleotide
uucaauaguaacccuuuca

SEQ ID NO: 1481023 - RNA, 19 nt, Artificial Sequence
  Description of Artificial Sequence: Synthetic oligonucleotide
gucuucgacuacuaaaucg

SEQ ID NO: 1481024 - RNA, 19 nt, Artificial Sequence
  Description of Artificial Sequence: Synthetic oligonucleotide
ugugcauccgcaaagguua

SEQ ID NO: 1481025 - RNA, 19 nt, Artificial Sequence
  Description of Artificial Sequence: Synthetic oligonucleotide
aaagguuacuuccccagcu

SEQ ID NO: 1481026 - RNA, 19 nt, Artificial Sequence
  Description of Artificial Sequence: Synthetic oligonucleotide
ucuggcgauccacagaugc

SEQ ID NO: 1481027 - RNA, 19 nt, Artificial Sequence
  Description of Artificial Sequence: Synthetic oligonucleotide
aaucggucagaguaucguc

SEQ ID NO: 1481028 - RNA, 19 nt, Artificial Sequence
  Description of Artificial Sequence: Synthetic oligonucleotide
cuuuuaaaguguccaaagc

SEQ ID NO: 1481029 - RNA, 19 nt, Artificial Sequence
  Description of Artificial Sequence: Synthetic oligonucleotide
agaaggcuuaucaaaagac

SEQ ID NO: 1481030 - RNA, 19 nt, Artificial Sequence
  Description of Artificial Sequence: Synthetic oligonucleotide
ucaacuauaagucgauuuu

SEQ ID NO: 1481031 - RNA, 19 nt, Artificial Sequence
  Description of Artificial Sequence: Synthetic oligonucleotide
uuucgucuaucauuucucg

SEQ ID NO: 1481032 - RNA, 19 nt, Artificial Sequence
  Description of Artificial Sequence: Synthetic oligonucleotide
uaauuggaguaauuaaacu

SEQ ID NO: 1481033 - RNA, 19 nt, Artificial Sequence
  Description of Artificial Sequence: Synthetic oligonucleotide
uauacuucagacagucaca

SEQ ID NO: 1481034 - RNA, 19 nt, Artificial Sequence
  Description of Artificial Sequence: Synthetic oligonucleotide
uguccuacagcuguuaaug

SEQ ID NO: 1481035 - RNA, 19 nt, Artificial Sequence
  Description of Artificial Sequence: Synthetic oligonucleotide
uguaagacuugcuccuacg

SEQ ID NO: 1481036 - RNA, 19 nt, Artificial Sequence
  Description of Artificial Sequence: Synthetic oligonucleotide
acuacuaaaucggucagag

SEQ ID NO: 1481037 - RNA, 19 nt, Artificial Sequence
  Description of Artificial Sequence: Synthetic oligonucleotide
uuaaaguguccaaagcuau

SEQ ID NO: 1481038 - RNA, 19 nt, Artificial Sequence
  Description of Artificial Sequence: Synthetic oligonucleotide
uccuacagcuguuaauggg

SEQ ID NO: 1481039 - RNA, 19 nt, Artificial Sequence
  Description of Artificial Sequence: Synthetic oligonucleotide
uaaucuuaacauaucugaa

SEQ ID NO: 1481040 - RNA, 19 nt, Artificial Sequence
  Description of Artificial Sequence: Synthetic oligonucleotide
uuuaggucggugugcaucc

SEQ ID NO: 1481041 - RNA, 19 nt, Artificial Sequence
  Description of Artificial Sequence: Synthetic oligonucleotide
uacuugaagaaccacguuu

SEQ ID NO: 1481042 - RNA, 19 nt, Artificial Sequence
  Description of Artificial Sequence: Synthetic oligonucleotide
uucagaucaauaucucuga

SEQ ID NO: 1481043 - RNA, 19 nt, Artificial Sequence
  Description of Artificial Sequence: Synthetic oligonucleotide
uguuaaugggugagaaggc

SEQ ID NO: 1481044 - RNA, 19 nt, Artificial Sequence
  Description of Artificial Sequence: Synthetic oligonucleotide
uccauagcauucuuuaagu

SEQ ID NO: 1481045 - RNA, 19 nt, Artificial Sequence
  Description of Artificial Sequence: Synthetic oligonucleotide
ucgucuaucauuucucggu

SEQ ID NO: 1481046 - RNA, 19 nt, Artificial Sequence
  Description of Artificial Sequence: Synthetic oligonucleotide
cuacaaagaaauccagccc

SEQ ID NO: 1481047 - RNA, 19 nt, Artificial Sequence
  Description of Artificial Sequence: Synthetic oligonucleotide
aaacuaaucuuaacauauc

SEQ ID NO: 1481048 - RNA, 19 nt, Artificial Sequence
  Description of Artificial Sequence: Synthetic oligonucleotide
uaccccuucauuuaguuua

SEQ ID NO: 1481049 - RNA, 19 nt, Artificial Sequence
  Description of Artificial Sequence: Synthetic oligonucleotide
uaaugggugagaaggcacc

SEQ ID NO: 1481050 - RNA, 19 nt, Artificial Sequence
  Description of Artificial Sequence: Synthetic oligonucleotide
ugucaacugaucuggaccu

SEQ ID NO: 1481051 - RNA, 19 nt, Artificial Sequence
  Description of Artificial Sequence: Synthetic oligonucleotide
uaagucgauuuucuguucu

SEQ ID NO: 1481052 - RNA, 19 nt, Artificial Sequence
  Description of Artificial Sequence: Synthetic oligonucleotide
gucucaugaaaucuuugag

SEQ ID NO: 1481053 - RNA, 19 nt, Artificial Sequence
  Description of Artificial Sequence: Synthetic oligonucleotide
uucgucuaucauuucucgg

SEQ ID NO: 1481054 - RNA, 19 nt, Artificial Sequence
  Description of Artificial Sequence: Synthetic oligonucleotide
aacaaccccuugguggucc

SEQ ID NO: 1481055 - RNA, 19 nt, Artificial Sequence
  Description of Artificial Sequence: Synthetic oligonucleotide
aacuauaagucgauuuucu

SEQ ID NO: 1481056 - RNA, 19 nt, Artificial Sequence
  Description of Artificial Sequence: Synthetic oligonucleotide
acccuugaagaaucuuucc

SEQ ID NO: 1481057 - RNA, 19 nt, Artificial Sequence
  Description of Artificial Sequence: Synthetic oligonucleotide
uugacccuaacaaggaaaa

SEQ ID NO: 1481058 - RNA, 19 nt, Artificial Sequence
  Description of Artificial Sequence: Synthetic oligonucleotide
auuuagucucccgaugaac

SEQ ID NO: 1481059 - RNA, 19 nt, Artificial Sequence
  Description of Artificial Sequence: Synthetic oligonucleotide
uguucaauaguaacccuuu

SEQ ID NO: 1481060 - RNA, 19 nt, Artificial Sequence
  Description of Artificial Sequence: Synthetic oligonucleotide
agaccuacuaccagaacgg

SEQ ID NO: 1481061 - RNA, 19 nt, Artificial Sequence
  Description of Artificial Sequence: Synthetic oligonucleotide
gaucaauaucucugauccg

SEQ ID NO: 1481062 - RNA, 19 nt, Artificial Sequence
  Description of Artificial Sequence: Synthetic oligonucleotide
aaaucggucagaguaucgu

SEQ ID NO: 1481063 - RNA, 19 nt, Artificial Sequence
  Description of Artificial Sequence: Synthetic oligonucleotide
auuucgucuaucauuucuc

SEQ ID NO: 1481064 - RNA, 19 nt, Artificial Sequence
  Description of Artificial Sequence: Synthetic oligonucleotide
auaagucgauuuucuguuc

SEQ ID NO: 1481065 - RNA, 19 nt, Artificial Sequence
  Description of Artificial Sequence: Synthetic oligonucleotide
acccuaacaaggaaaacuc

SEQ ID NO: 1481066 - RNA, 19 nt, Artificial Sequence
  Description of Artificial Sequence: Synthetic oligonucleotide
aacucaacuaccccuucau

SEQ ID NO: 1481067 - RNA, 19 nt, Artificial Sequence
  Description of Artificial Sequence: Synthetic oligonucleotide
ggaguaauuaaacuaaucu

SEQ ID NO: 1481068 - RNA, 19 nt, Artificial Sequence
  Description of Artificial Sequence: Synthetic oligonucleotide
gaccuagaggaacuccugg

SEQ ID NO: 1481069 - RNA, 19 nt, Artificial Sequence
  Description of Artificial Sequence: Synthetic oligonucleotide
acuaaucuuaacauaucug

SEQ ID NO: 1481070 - RNA, 19 nt, Artificial Sequence
  Description of Artificial Sequence: Synthetic oligonucleotide
uccgcaaagguuacuuccc

SEQ ID NO: 1481071 - RNA, 19 nt, Artificial Sequence
  Description of Artificial Sequence: Synthetic oligonucleotide
ucccguuaauuucuuuucc

SEQ ID NO: 1481072 - RNA, 19 nt, Artificial Sequence
  Description of Artificial Sequence: Synthetic oligonucleotide
uaacccuuucacugcaaag

SEQ ID NO: 1481073 - RNA, 19 nt, Artificial Sequence
  Description of Artificial Sequence: Synthetic oligonucleotide
uuaguuuaggucggugugc

SEQ ID NO: 1481074 - RNA, 19 nt, Artificial Sequence
  Description of Artificial Sequence: Synthetic oligonucleotide
uaguuauaaaagagcucug

SEQ ID NO: 1481075 - RNA, 19 nt, Artificial Sequence
  Description of Artificial Sequence: Synthetic oligonucleotide
gacuuagaucuacuugaag

SEQ ID NO: 1481076 - RNA, 19 nt, Artificial Sequence
  Description of Artificial Sequence: Synthetic oligonucleotide
cauauuaagccuuuauaua

SEQ ID NO: 1481077 - RNA, 19 nt, Artificial Sequence
  Description of Artificial Sequence: Synthetic oligonucleotide
aguuuaauugccacuguca

SEQ ID NO: 1481078 - RNA, 19 nt, Artificial Sequence
  Description of Artificial Sequence: Synthetic oligonucleotide
uauauacuucagacaguca

SEQ ID NO: 1481079 - RNA, 19 nt, Artificial Sequence
  Description of Artificial Sequence: Synthetic oligonucleotide
gaagaaccacguuucuggc

SEQ ID NO: 1481080 - RNA, 19 nt, Artificial Sequence
  Description of Artificial Sequence: Synthetic oligonucleotide
uccaaagcuauuaguuuaa

SEQ ID NO: 1481081 - RNA, 19 nt, Artificial Sequence
  Description of Artificial Sequence: Synthetic oligonucleotide
gaaggcuuaucaaaagaca

SEQ ID NO: 1481082 - RNA, 19 nt, Artificial Sequence
  Description of Artificial Sequence: Synthetic oligonucleotide
cugccuucaauuaauuuga

SEQ ID NO: 1481083 - RNA, 19 nt, Artificial Sequence
  Description of Artificial Sequence: Synthetic oligonucleotide
uucgacuacuaaaucgguc

SEQ ID NO: 1481084 - RNA, 19 nt, Artificial Sequence
  Description of Artificial Sequence: Synthetic oligonucleotide
uuaguuuaauuggaguaau

SEQ ID NO: 1481085 - RNA, 19 nt, Artificial Sequence
  Description of Artificial Sequence: Synthetic oligonucleotide
agcucuuuuaaagugucca

SEQ ID NO: 1481086 - RNA, 19 nt, Artificial Sequence
  Description of Artificial Sequence: Synthetic oligonucleotide
ucggucuucgacuacuaaa

SEQ ID NO: 1481087 - RNA, 19 nt, Artificial Sequence
  Description of Artificial Sequence: Synthetic oligonucleotide
ucuaucauuucucggucuu

SEQ ID NO: 1481088 - RNA, 19 nt, Artificial Sequence
  Description of Artificial Sequence: Synthetic oligonucleotide
cagaucaauaucucugauc

SEQ ID NO: 1481089 - RNA, 19 nt, Artificial Sequence
  Description of Artificial Sequence: Synthetic oligonucleotide
uguccaaagcuauuaguuu

SEQ ID NO: 1481090 - RNA, 19 nt, Artificial Sequence
  Description of Artificial Sequence: Synthetic oligonucleotide
ucccgaugaacacucgaca

SEQ ID NO: 1481091 - RNA, 19 nt, Artificial Sequence
  Description of Artificial Sequence: Synthetic oligonucleotide
ucugauccguccguaaccc

SEQ ID NO: 1481092 - RNA, 19 nt, Artificial Sequence
  Description of Artificial Sequence: Synthetic oligonucleotide
guaauuaaacuaaucuuaa

SEQ ID NO: 1481093 - RNA, 19 nt, Artificial Sequence
  Description of Artificial Sequence: Synthetic oligonucleotide
uugagcggcuguaagacuu

SEQ ID NO: 1481094 - RNA, 19 nt, Artificial Sequence
  Description of Artificial Sequence: Synthetic oligonucleotide
aaagagcucugucaauaua

SEQ ID NO: 1481095 - RNA, 19 nt, Artificial Sequence
  Description of Artificial Sequence: Synthetic oligonucleotide
ccuacuaccagaacgggac

SEQ ID NO: 1481096 - RNA, 19 nt, Artificial Sequence
  Description of Artificial Sequence: Synthetic oligonucleotide
uuagucucccgaugaacac

SEQ ID NO: 1481097 - RNA, 19 nt, Artificial Sequence
  Description of Artificial Sequence: Synthetic oligonucleotide
uugaccugugccuuuugcu

SEQ ID NO: 1481098 - RNA, 19 nt, Artificial Sequence
  Description of Artificial Sequence: Synthetic oligonucleotide
agccuuuauauacaagcaa

SEQ ID NO: 1481099 - RNA, 19 nt, Artificial Sequence
  Description of Artificial Sequence: Synthetic oligonucleotide
ugacucuugaugacaaauu

SEQ ID NO: 1481100 - RNA, 19 nt, Artificial Sequence
  Description of Artificial Sequence: Synthetic oligonucleotide
uacgggaacgagaucggcu

SEQ ID NO: 1481101 - RNA, 19 nt, Artificial Sequence
  Description of Artificial Sequence: Synthetic oligonucleotide
uaguaacccuuucacugca

SEQ ID NO: 1481102 - RNA, 19 nt, Artificial Sequence
  Description of Artificial Sequence: Synthetic oligonucleotide
agaaauccagcccgaccuc

SEQ ID NO: 1481103 - RNA, 19 nt, Artificial Sequence
  Description of Artificial Sequence: Synthetic oligonucleotide
ugaaaucuuugagauccug

SEQ ID NO: 1481104 - RNA, 19 nt, Artificial Sequence
  Description of Artificial Sequence: Synthetic oligonucleotide
cucgcugcuggauuuaguc

SEQ ID NO: 1481105 - RNA, 19 nt, Artificial Sequence
  Description of Artificial Sequence: Synthetic oligonucleotide
gagagguccguagucggcg

SEQ ID NO: 1481106 - RNA, 19 nt, Artificial Sequence
  Description of Artificial Sequence: Synthetic oligonucleotide
acagaugcuggagacuuag

SEQ ID NO: 1481107 - RNA, 19 nt, Artificial Sequence
  Description of Artificial Sequence: Synthetic oligonucleotide
cucugauccguccguaacc

SEQ ID NO: 1481108 - RNA, 19 nt, Artificial Sequence
  Description of Artificial Sequence: Synthetic oligonucleotide
uagucggcgaccgacggag

SEQ ID NO: 1481109 - RNA, 19 nt, Artificial Sequence
  Description of Artificial Sequence: Synthetic oligonucleotide
cauaagaggcaaacucaac

SEQ ID NO: 1481110 - RNA, 19 nt, Artificial Sequence
  Description of Artificial Sequence: Synthetic oligonucleotide
accauaagaggcaaacuca

SEQ ID NO: 1481111 - RNA, 19 nt, Artificial Sequence
  Description of Artificial Sequence: Synthetic oligonucleotide
uggugguccacaucuacaa

SEQ ID NO: 1481112 - RNA, 19 nt, Artificial Sequence
  Description of Artificial Sequence: Synthetic oligonucleotide
ugcuccuacgggaacgaga

SEQ ID NO: 1481113 - RNA, 19 nt, Artificial Sequence
  Description of Artificial Sequence: Synthetic oligonucleotide
ucagaucaauaucucugau

SEQ ID NO: 1481114 - RNA, 19 nt, Artificial Sequence
  Description of Artificial Sequence: Synthetic oligonucleotide
ggcuacgggaccuagagga

SEQ ID NO: 1481115 - RNA, 19 nt, Artificial Sequence
  Description of Artificial Sequence: Synthetic oligonucleotide
acgagaucggcuacgggac

SEQ ID NO: 1481116 - RNA, 19 nt, Artificial Sequence
  Description of Artificial Sequence: Synthetic oligonucleotide
gucaccauaagaggcaaac

SEQ ID NO: 1481117 - RNA, 19 nt, Artificial Sequence
  Description of Artificial Sequence: Synthetic oligonucleotide
agguuacuuccccagcuug

SEQ ID NO: 1481118 - RNA, 19 nt, Artificial Sequence
  Description of Artificial Sequence: Synthetic oligonucleotide
uacgggaccuagaggaacu

SEQ ID NO: 1481119 - RNA, 19 nt, Artificial Sequence
  Description of Artificial Sequence: Synthetic oligonucleotide
cuugaccugugccuuuugc

SEQ ID NO: 1481120 - RNA, 19 nt, Artificial Sequence
  Description of Artificial Sequence: Synthetic oligonucleotide
guccuacagcuguuaaugg

SEQ ID NO: 1481121 - RNA, 19 nt, Artificial Sequence
  Description of Artificial Sequence: Synthetic oligonucleotide
agcauuucgucuaucauuu

SEQ ID NO: 1481122 - RNA, 19 nt, Artificial Sequence
  Description of Artificial Sequence: Synthetic oligonucleotide
agaguaucguccucuuccu

SEQ ID NO: 1481123 - RNA, 19 nt, Artificial Sequence
  Description of Artificial Sequence: Synthetic oligonucleotide
auaucucugauccguccgu

SEQ ID NO: 1481124 - RNA, 19 nt, Artificial Sequence
  Description of Artificial Sequence: Synthetic oligonucleotide
agcuauuaguuuaauugga

SEQ ID NO: 1481125 - RNA, 19 nt, Artificial Sequence
  Description of Artificial Sequence: Synthetic oligonucleotide
cuacagcuguuaaugggug

SEQ ID NO: 1481126 - RNA, 19 nt, Artificial Sequence
  Description of Artificial Sequence: Synthetic oligonucleotide
ucccuggcggcugagaccc

SEQ ID NO: 1481127 - RNA, 19 nt, Artificial Sequence
  Description of Artificial Sequence: Synthetic oligonucleotide
cuugacccuaacaaggaaa

SEQ ID NO: 1481128 - RNA, 19 nt, Artificial Sequence
  Description of Artificial Sequence: Synthetic oligonucleotide
gcuauuaguuuaauuggag

SEQ ID NO: 1481129 - RNA, 19 nt, Artificial Sequence
  Description of Artificial Sequence: Synthetic oligonucleotide
uaguuuaggucggugugca

SEQ ID NO: 1481130 - RNA, 19 nt, Artificial Sequence
  Description of Artificial Sequence: Synthetic oligonucleotide
uccugguccgagaucguga

SEQ ID NO: 1481131 - RNA, 19 nt, Artificial Sequence
  Description of Artificial Sequence: Synthetic oligonucleotide
caguuuaauugccacuguc

SEQ ID NO: 1481132 - RNA, 19 nt, Artificial Sequence
  Description of Artificial Sequence: Synthetic oligonucleotide
gacccuaacaaggaaaacu

SEQ ID NO: 1481133 - RNA, 19 nt, Artificial Sequence
  Description of Artificial Sequence: Synthetic oligonucleotide
aagguuacuuccccagcuu

SEQ ID NO: 1481134 - RNA, 19 nt, Artificial Sequence
  Description of Artificial Sequence: Synthetic oligonucleotide
cacccuugacccuaacaag

SEQ ID NO: 1481135 - RNA, 19 nt, Artificial Sequence
  Description of Artificial Sequence: Synthetic oligonucleotide
gaaauccagcccgaccucc

SEQ ID NO: 1481136 - RNA, 19 nt, Artificial Sequence
  Description of Artificial Sequence: Synthetic oligonucleotide
cucccgaugaacacucgac

SEQ ID NO: 1481137 - RNA, 19 nt, Artificial Sequence
  Description of Artificial Sequence: Synthetic oligonucleotide
uacagcuguuaauggguga

SEQ ID NO: 1481138 - RNA, 19 nt, Artificial Sequence
  Description of Artificial Sequence: Synthetic oligonucleotide
ugagacccggagagguccg

SEQ ID NO: 1481139 - RNA, 19 nt, Artificial Sequence
  Description of Artificial Sequence: Synthetic oligonucleotide
ucuguccuacagcuguuaa

SEQ ID NO: 1481140 - RNA, 19 nt, Artificial Sequence
  Description of Artificial Sequence: Synthetic oligonucleotide
agucucccgaugaacacuc

SEQ ID NO: 1481141 - RNA, 19 nt, Artificial Sequence
  Description of Artificial Sequence: Synthetic oligonucleotide
guuaaugggugagaaggca

SEQ ID NO: 1481142 - RNA, 19 nt, Artificial Sequence
  Description of Artificial Sequence: Synthetic oligonucleotide
aacgggacuugcuccggcu

SEQ ID NO: 1481143 - RNA, 19 nt, Artificial Sequence
  Description of Artificial Sequence: Synthetic oligonucleotide
guaucguccucuuccucgc

SEQ ID NO: 1481144 - RNA, 19 nt, Artificial Sequence
  Description of Artificial Sequence: Synthetic oligonucleotide
ggauuuagucucccgauga

SEQ ID NO: 1481145 - RNA, 19 nt, Artificial Sequence
  Description of Artificial Sequence: Synthetic oligonucleotide
gaacgagaucggcuacggg

SEQ ID NO: 1481146 - RNA, 19 nt, Artificial Sequence
  Description of Artificial Sequence: Synthetic oligonucleotide
guuuaggucggugugcauc

SEQ ID NO: 1481147 - RNA, 19 nt, Artificial Sequence
  Description of Artificial Sequence: Synthetic oligonucleotide
caccucgagaccgagcccg

SEQ ID NO: 1481148 - RNA, 19 nt, Artificial Sequence
  Description of Artificial Sequence: Synthetic oligonucleotide
cuaaaucggucagaguauc

SEQ ID NO: 1481149 - RNA, 19 nt, Artificial Sequence
  Description of Artificial Sequence: Synthetic oligonucleotide
gauuuagucucccgaugaa

SEQ ID NO: 1481150 - RNA, 19 nt, Artificial Sequence
  Description of Artificial Sequence: Synthetic oligonucleotide
ugagcggcuguaagacuug

SEQ ID NO: 1481151 - RNA, 19 nt, Artificial Sequence
  Description of Artificial Sequence: Synthetic oligonucleotide
gcucugucaauauacacaa

SEQ ID NO: 1481152 - RNA, 19 nt, Artificial Sequence
  Description of Artificial Sequence: Synthetic oligonucleotide
agaucuacuugaagaacca

SEQ ID NO: 1481153 - RNA, 19 nt, Artificial Sequence
  Description of Artificial Sequence: Synthetic oligonucleotide
uccguaacccuugaagaau

SEQ ID NO: 1481154 - RNA, 19 nt, Artificial Sequence
  Description of Artificial Sequence: Synthetic oligonucleotide
aagucgauuuucuguucuu

SEQ ID NO: 1481155 - RNA, 19 nt, Artificial Sequence
  Description of Artificial Sequence: Synthetic oligonucleotide
acuaaaucggucagaguau

SEQ ID NO: 1481156 - RNA, 19 nt, Artificial Sequence
  Description of Artificial Sequence: Synthetic oligonucleotide
acuaccccuucauuuaguu

SEQ ID NO: 1481157 - RNA, 19 nt, Artificial Sequence
  Description of Artificial Sequence: Synthetic oligonucleotide
agcauucuuuaagucacca

SEQ ID NO: 1481158 - RNA, 19 nt, Artificial Sequence
  Description of Artificial Sequence: Synthetic oligonucleotide
caccccacagaaaagcaca

SEQ ID NO: 1481159 - RNA, 19 nt, Artificial Sequence
  Description of Artificial Sequence: Synthetic oligonucleotide
agcccgagcauguucaaua

SEQ ID NO: 1481160 - RNA, 19 nt, Artificial Sequence
  Description of Artificial Sequence: Synthetic oligonucleotide
cuguaagacuugcuccuac

SEQ ID NO: 1481161 - RNA, 19 nt, Artificial Sequence
  Description of Artificial Sequence: Synthetic oligonucleotide
gaccuacuaccagaacggg

SEQ ID NO: 1481162 - RNA, 19 nt, Artificial Sequence
  Description of Artificial Sequence: Synthetic oligonucleotide
ccguuaauuucuuuuccag

SEQ ID NO: 1481163 - RNA, 19 nt, Artificial Sequence
  Description of Artificial Sequence: Synthetic oligonucleotide
cauuuaguuuaggucggug

SEQ ID NO: 1481164 - RNA, 19 nt, Artificial Sequence
  Description of Artificial Sequence: Synthetic oligonucleotide
uaggucggugugcauccgc

SEQ ID NO: 1481165 - RNA, 19 nt, Artificial Sequence
  Description of Artificial Sequence: Synthetic oligonucleotide
acgggaacgagaucggcua

SEQ ID NO: 1481166 - RNA, 19 nt, Artificial Sequence
  Description of Artificial Sequence: Synthetic oligonucleotide
uccguagucggcgaccgac

SEQ ID NO: 1481167 - RNA, 19 nt, Artificial Sequence
  Description of Artificial Sequence: Synthetic oligonucleotide
gacccggagagguccguag

SEQ ID NO: 1481168 - RNA, 19 nt, Artificial Sequence
  Description of Artificial Sequence: Synthetic oligonucleotide
guucaauaguaacccuuuc

SEQ ID NO: 1481169 - RNA, 19 nt, Artificial Sequence
  Description of Artificial Sequence: Synthetic oligonucleotide
agcacauacuuaccagaau

SEQ ID NO: 1481170 - RNA, 19 nt, Artificial Sequence
  Description of Artificial Sequence: Synthetic oligonucleotide
gagcauuucgucuaucauu

SEQ ID NO: 1481171 - RNA, 19 nt, Artificial Sequence
  Description of Artificial Sequence: Synthetic oligonucleotide
cagucacaaaagugugagc

SEQ ID NO: 1481172 - RNA, 19 nt, Artificial Sequence
  Description of Artificial Sequence: Synthetic oligonucleotide
auguucaauaguaacccuu

SEQ ID NO: 1481173 - RNA, 19 nt, Artificial Sequence
  Description of Artificial Sequence: Synthetic oligonucleotide
cauuucgucuaucauuucu

SEQ ID NO: 1481174 - RNA, 19 nt, Artificial Sequence
  Description of Artificial Sequence: Synthetic oligonucleotide
ucacugcaaaguucuuuuc

SEQ ID NO: 1481175 - RNA, 19 nt, Artificial Sequence
  Description of Artificial Sequence: Synthetic oligonucleotide
agguggagcauuucgucua

SEQ ID NO: 1481176 - RNA, 19 nt, Artificial Sequence
  Description of Artificial Sequence: Synthetic oligonucleotide
gcuguuaaugggugagaag

SEQ ID NO: 1481177 - RNA, 19 nt, Artificial Sequence
  Description of Artificial Sequence: Synthetic oligonucleotide
ugcccggcuaguguuuccg

SEQ ID NO: 1481178 - RNA, 19 nt, Artificial Sequence
  Description of Artificial Sequence: Synthetic oligonucleotide
agguccguagucggcgacc

SEQ ID NO: 1481179 - RNA, 19 nt, Artificial Sequence
  Description of Artificial Sequence: Synthetic oligonucleotide
agcuguuaaugggugagaa

SEQ ID NO: 1481180 - RNA, 19 nt, Artificial Sequence
  Description of Artificial Sequence: Synthetic oligonucleotide
gcuggauuuagucucccga

SEQ ID NO: 1481181 - RNA, 19 nt, Artificial Sequence
  Description of Artificial Sequence: Synthetic oligonucleotide
agcaaauuuagagcucuuu

SEQ ID NO: 1481182 - RNA, 19 nt, Artificial Sequence
  Description of Artificial Sequence: Synthetic oligonucleotide
ccagaacgggacuugcucc

SEQ ID NO: 1481183 - RNA, 19 nt, Artificial Sequence
  Description of Artificial Sequence: Synthetic oligonucleotide
cccgaugaacacucgacag

SEQ ID NO: 1481184 - RNA, 19 nt, Artificial Sequence
  Description of Artificial Sequence: Synthetic oligonucleotide
gaacgggacuugcuccggc

SEQ ID NO: 1481185 - RNA, 19 nt, Artificial Sequence
  Description of Artificial Sequence: Synthetic oligonucleotide
ucauuuaguuuaggucggu

SEQ ID NO: 1481186 - RNA, 19 nt, Artificial Sequence
  Description of Artificial Sequence: Synthetic oligonucleotide
cuccuugagcggcuguaag

SEQ ID NO: 1481187 - RNA, 19 nt, Artificial Sequence
  Description of Artificial Sequence: Synthetic oligonucleotide
guccguaacccuugaagaa

SEQ ID NO: 1481188 - RNA, 19 nt, Artificial Sequence
  Description of Artificial Sequence: Synthetic oligonucleotide
uuucucucucgcugcugga

SEQ ID NO: 1481189 - RNA, 19 nt, Artificial Sequence
  Description of Artificial Sequence: Synthetic oligonucleotide
ggaacgagaucggcuacgg

SEQ ID NO: 1481190 - RNA, 19 nt, Artificial Sequence
  Description of Artificial Sequence: Synthetic oligonucleotide
guaacccuuucacugcaaa

SEQ ID NO: 1481191 - RNA, 19 nt, Artificial Sequence
  Description of Artificial Sequence: Synthetic oligonucleotide
gacuacuaaaucggucaga

SEQ ID NO: 1481192 - RNA, 19 nt, Artificial Sequence
  Description of Artificial Sequence: Synthetic oligonucleotide
augcccggcuaguguuucc

SEQ ID NO: 1481193 - RNA, 19 nt, Artificial Sequence
  Description of Artificial Sequence: Synthetic oligonucleotide
ucucgcugcuggauuuagu

SEQ ID NO: 1481194 - RNA, 19 nt, Artificial Sequence
  Description of Artificial Sequence: Synthetic oligonucleotide
uuaggucggugugcauccg

SEQ ID NO: 1481195 - RNA, 19 nt, Artificial Sequence
  Description of Artificial Sequence: Synthetic oligonucleotide
cuacgggaccuagaggaac

SEQ ID NO: 1481196 - RNA, 19 nt, Artificial Sequence
  Description of Artificial Sequence: Synthetic oligonucleotide
uuucucggucuucgacuac

SEQ ID NO: 1481197 - RNA, 19 nt, Artificial Sequence
  Description of Artificial Sequence: Synthetic oligonucleotide
ugacccuaacaaggaaaac

SEQ ID NO: 1481198 - RNA, 19 nt, Artificial Sequence
  Description of Artificial Sequence: Synthetic oligonucleotide
gaccgacggagcuggcugc

SEQ ID NO: 1481199 - RNA, 19 nt, Artificial Sequence
  Description of Artificial Sequence: Synthetic oligonucleotide
agaacgggacuugcuccgg

SEQ ID NO: 1481200 - RNA, 19 nt, Artificial Sequence
  Description of Artificial Sequence: Synthetic oligonucleotide
ccguccguaacccuugaag

SEQ ID NO: 1481201 - RNA, 19 nt, Artificial Sequence
  Description of Artificial Sequence: Synthetic oligonucleotide
ccgaugaacacucgacagc

SEQ ID NO: 1481202 - RNA, 19 nt, Artificial Sequence
  Description of Artificial Sequence: Synthetic oligonucleotide
cuaucauuucucggucuuc

SEQ ID NO: 1481203 - RNA, 19 nt, Artificial Sequence
  Description of Artificial Sequence: Synthetic oligonucleotide
aucucugauccguccguaa

SEQ ID NO: 1481204 - RNA, 19 nt, Artificial Sequence
  Description of Artificial Sequence: Synthetic oligonucleotide
aacucauauuaagccuuua

SEQ ID NO: 1481205 - RNA, 19 nt, Artificial Sequence
  Description of Artificial Sequence: Synthetic oligonucleotide
ggcuaguguuuccggacag

SEQ ID NO: 1481206 - RNA, 19 nt, Artificial Sequence
  Description of Artificial Sequence: Synthetic oligonucleotide
agucgauuuucuguucuua

SEQ ID NO: 1481207 - RNA, 19 nt, Artificial Sequence
  Description of Artificial Sequence: Synthetic oligonucleotide
agagguccguagucggcga

SEQ ID NO: 1481208 - RNA, 19 nt, Artificial Sequence
  Description of Artificial Sequence: Synthetic oligonucleotide
uggcggcugagacccggag

SEQ ID NO: 1481209 - RNA, 19 nt, Artificial Sequence
  Description of Artificial Sequence: Synthetic oligonucleotide
ugccuuuugcugccuucaa

SEQ ID NO: 1481210 - RNA, 19 nt, Artificial Sequence
  Description of Artificial Sequence: Synthetic oligonucleotide
accgacggagcuggcugcc

SEQ ID NO: 1481211 - RNA, 19 nt, Artificial Sequence
  Description of Artificial Sequence: Synthetic oligonucleotide
accuacuaccagaacggga

SEQ ID NO: 1481212 - RNA, 19 nt, Artificial Sequence
  Description of Artificial Sequence: Synthetic oligonucleotide
ccuugagcggcuguaagac

SEQ ID NO: 1481213 - RNA, 19 nt, Artificial Sequence
  Description of Artificial Sequence: Synthetic oligonucleotide
aucgggaccucuggcgauc

SEQ ID NO: 1481214 - RNA, 19 nt, Artificial Sequence
  Description of Artificial Sequence: Synthetic oligonucleotide
agacuuagaucuacuugaa

SEQ ID NO: 1481215 - RNA, 19 nt, Artificial Sequence
  Description of Artificial Sequence: Synthetic oligonucleotide
ccauagcauucuuuaaguc

SEQ ID NO: 1481216 - RNA, 19 nt, Artificial Sequence
  Description of Artificial Sequence: Synthetic oligonucleotide
guguccaaagcuauuaguu

SEQ ID NO: 1481217 - RNA, 19 nt, Artificial Sequence
  Description of Artificial Sequence: Synthetic oligonucleotide
uccggacagggucccuggc

SEQ ID NO: 1481218 - RNA, 19 nt, Artificial Sequence
  Description of Artificial Sequence: Synthetic oligonucleotide
cuacgggaacgagaucggc

SEQ ID NO: 1481219 - RNA, 19 nt, Artificial Sequence
  Description of Artificial Sequence: Synthetic oligonucleotide
gggaacgagaucggcuacg

SEQ ID NO: 1481220 - RNA, 19 nt, Artificial Sequence
  Description of Artificial Sequence: Synthetic oligonucleotide
ccuacgggaacgagaucgg

SEQ ID NO: 1481221 - RNA, 19 nt, Artificial Sequence
  Description of Artificial Sequence: Synthetic oligonucleotide
gaacuccugguccgagauc

SEQ ID NO: 1481222 - RNA, 19 nt, Artificial Sequence
  Description of Artificial Sequence: Synthetic oligonucleotide
ugaugcccggcuaguguuu

SEQ ID NO: 1481223 - RNA, 19 nt, Artificial Sequence
  Description of Artificial Sequence: Synthetic oligonucleotide
aggagaccuacuaccagaa

SEQ ID NO: 1481224 - RNA, 19 nt, Artificial Sequence
  Description of Artificial Sequence: Synthetic oligonucleotide
uaucucugauccguccgua

SEQ ID NO: 1481225 - RNA, 19 nt, Artificial Sequence
  Description of Artificial Sequence: Synthetic oligonucleotide
ggucuucgacuacuaaauc

SEQ ID NO: 1481226 - RNA, 19 nt, Artificial Sequence
  Description of Artificial Sequence: Synthetic oligonucleotide
gguccguagucggcgaccg

SEQ ID NO: 1481227 - RNA, 19 nt, Artificial Sequence
  Description of Artificial Sequence: Synthetic oligonucleotide
gcuaguguuuccggacagg

SEQ ID NO: 1481228 - RNA, 19 nt, Artificial Sequence
  Description of Artificial Sequence: Synthetic oligonucleotide
accacguuucuggcucuuc

SEQ ID NO: 1481229 - RNA, 19 nt, Artificial Sequence
  Description of Artificial Sequence: Synthetic oligonucleotide
gcccgagcauguucaauag

SEQ ID NO: 1481230 - RNA, 19 nt, Artificial Sequence
  Description of Artificial Sequence: Synthetic oligonucleotide
ccgagcauguucaauagua

SEQ ID NO: 1481231 - RNA, 19 nt, Artificial Sequence
  Description of Artificial Sequence: Synthetic oligonucleotide
ucggcgaccgacggagcug

SEQ ID NO: 1481232 - RNA, 19 nt, Artificial Sequence
  Description of Artificial Sequence: Synthetic oligonucleotide
acccggagagguccguagu

SEQ ID NO: 1481233 - RNA, 19 nt, Artificial Sequence
  Description of Artificial Sequence: Synthetic oligonucleotide
gucuaucauuucucggucu

SEQ ID NO: 1481234 - RNA, 19 nt, Artificial Sequence
  Description of Artificial Sequence: Synthetic oligonucleotide
cuggauuuagucucccgau

SEQ ID NO: 1481235 - RNA, 19 nt, Artificial Sequence
  Description of Artificial Sequence: Synthetic oligonucleotide
gaugcccggcuaguguuuc

SEQ ID NO: 1481236 - RNA, 19 nt, Artificial Sequence
  Description of Artificial Sequence: Synthetic oligonucleotide
ccguaacccuugaagaauc

SEQ ID NO: 1481237 - RNA, 19 nt, Artificial Sequence
  Description of Artificial Sequence: Synthetic oligonucleotide
gagguccguagucggcgac

SEQ ID NO: 1481238 - RNA, 19 nt, Artificial Sequence
  Description of Artificial Sequence: Synthetic oligonucleotide
accgagaucgggaccucug

SEQ ID NO: 1481239 - RNA, 19 nt, Artificial Sequence
  Description of Artificial Sequence: Synthetic oligonucleotide
acgggaccuagaggaacuc

SEQ ID NO: 1481240 - RNA, 19 nt, Artificial Sequence
  Description of Artificial Sequence: Synthetic oligonucleotide
cugguccgagaucgugacc

SEQ ID NO: 1481241 - RNA, 19 nt, Artificial Sequence
  Description of Artificial Sequence: Synthetic oligonucleotide
gucaacugaucuggaccug

SEQ ID NO: 1481242 - RNA, 19 nt, Artificial Sequence
  Description of Artificial Sequence: Synthetic oligonucleotide
cucucgcugcuggauuuag

SEQ ID NO: 1481243 - RNA, 19 nt, Artificial Sequence
  Description of Artificial Sequence: Synthetic oligonucleotide
uccguccguaacccuugaa

SEQ ID NO: 1481244 - RNA, 19 nt, Artificial Sequence
  Description of Artificial Sequence: Synthetic oligonucleotide
cccguuaauuucuuuucca

SEQ ID NO: 1481245 - RNA, 19 nt, Artificial Sequence
  Description of Artificial Sequence: Synthetic oligonucleotide
ccugguccgagaucgugac

SEQ ID NO: 1481246 - RNA, 19 nt, Artificial Sequence
  Description of Artificial Sequence: Synthetic oligonucleotide
ccuaacaaggaaaacucau

SEQ ID NO: 1481247 - RNA, 19 nt, Artificial Sequence
  Description of Artificial Sequence: Synthetic oligonucleotide
uugcuccuacgggaacgag

SEQ ID NO: 1481248 - RNA, 19 nt, Artificial Sequence
  Description of Artificial Sequence: Synthetic oligonucleotide
cuucgacuacuaaaucggu

SEQ ID NO: 1481249 - RNA, 19 nt, Artificial Sequence
  Description of Artificial Sequence: Synthetic oligonucleotide
ugcauccgcaaagguuacu

SEQ ID NO: 1481250 - RNA, 19 nt, Artificial Sequence
  Description of Artificial Sequence: Synthetic oligonucleotide
guagucggcgaccgacgga

SEQ ID NO: 1481251 - RNA, 19 nt, Artificial Sequence
  Description of Artificial Sequence: Synthetic oligonucleotide
ccgagaucgggaccucugg

SEQ ID NO: 1481252 - RNA, 19 nt, Artificial Sequence
  Description of Artificial Sequence: Synthetic oligonucleotide
accccuuggugguccacau

SEQ ID NO: 1481253 - RNA, 19 nt, Artificial Sequence
  Description of Artificial Sequence: Synthetic oligonucleotide
cguccguaacccuugaaga

SEQ ID NO: 1481254 - RNA, 19 nt, Artificial Sequence
  Description of Artificial Sequence: Synthetic oligonucleotide
agaccgagcccgagcaugu

SEQ ID NO: 1481255 - RNA, 19 nt, Artificial Sequence
  Description of Artificial Sequence: Synthetic oligonucleotide
ucgcccaccucgagaccga

SEQ ID NO: 1481256 - RNA, 19 nt, Artificial Sequence
  Description of Artificial Sequence: Synthetic oligonucleotide
ccggagagguccguagucg

SEQ ID NO: 1481257 - RNA, 19 nt, Artificial Sequence
  Description of Artificial Sequence: Synthetic oligonucleotide
ggagaccuacuaccagaac

SEQ ID NO: 1481258 - RNA, 19 nt, Artificial Sequence
  Description of Artificial Sequence: Synthetic oligonucleotide
ccuuuauauacaagcaaau

SEQ ID NO: 1481259 - RNA, 19 nt, Artificial Sequence
  Description of Artificial Sequence: Synthetic oligonucleotide
cgacuacuaaaucggucag

SEQ ID NO: 1481260 - RNA, 19 nt, Artificial Sequence
  Description of Artificial Sequence: Synthetic oligonucleotide
ccguagucggcgaccgacg

SEQ ID NO: 1481261 - RNA, 19 nt, Artificial Sequence
  Description of Artificial Sequence: Synthetic oligonucleotide
ccggacagggucccuggcg

SEQ ID NO: 1481262 - RNA, 19 nt, Artificial Sequence
  Description of Artificial Sequence: Synthetic oligonucleotide
cucuggcgauccacagaug

SEQ ID NO: 1481263 - RNA, 19 nt, Artificial Sequence
  Description of Artificial Sequence: Synthetic oligonucleotide
ggagagguccguagucggc

SEQ ID NO: 1481264 - RNA, 19 nt, Artificial Sequence
  Description of Artificial Sequence: Synthetic oligonucleotide
cuacuaaaucggucagagu

SEQ ID NO: 1481265 - RNA, 19 nt, Artificial Sequence
  Description of Artificial Sequence: Synthetic oligonucleotide
auccguccguaacccuuga

SEQ ID NO: 1481266 - RNA, 19 nt, Artificial Sequence
  Description of Artificial Sequence: Synthetic oligonucleotide
gucucccgaugaacacucg

SEQ ID NO: 1481267 - RNA, 19 nt, Artificial Sequence
  Description of Artificial Sequence: Synthetic oligonucleotide
aggcacccuugacccuaac

SEQ ID NO: 1481268 - RNA, 19 nt, Artificial Sequence
  Description of Artificial Sequence: Synthetic oligonucleotide
cgucuaucauuucucgguc

SEQ ID NO: 1481269 - RNA, 19 nt, Artificial Sequence
  Description of Artificial Sequence: Synthetic oligonucleotide
cguagucggcgaccgacgg

SEQ ID NO: 1481270 - RNA, 19 nt, Artificial Sequence
  Description of Artificial Sequence: Synthetic oligonucleotide
ggaacuccugguccgagau

SEQ ID NO: 1481271 - RNA, 19 nt, Artificial Sequence
  Description of Artificial Sequence: Synthetic oligonucleotide
cuugagcggcuguaagacu

SEQ ID NO: 1481272 - RNA, 19 nt, Artificial Sequence
  Description of Artificial Sequence: Synthetic oligonucleotide
ggagcauuucgucuaucau

SEQ ID NO: 1481273 - RNA, 19 nt, Artificial Sequence
  Description of Artificial Sequence: Synthetic oligonucleotide
gaaccacguuucuggcucu

SEQ ID NO: 1481274 - RNA, 19 nt, Artificial Sequence
  Description of Artificial Sequence: Synthetic oligonucleotide
cuggcgauccacagaugcu

SEQ ID NO: 1481275 - RNA, 19 nt, Artificial Sequence
  Description of Artificial Sequence: Synthetic oligonucleotide
gguccgagaucgugaccug

SEQ ID NO: 1481276 - RNA, 19 nt, Artificial Sequence
  Description of Artificial Sequence: Synthetic oligonucleotide
gggaccucuggcgauccac

SEQ ID NO: 1481277 - RNA, 19 nt, Artificial Sequence
  Description of Artificial Sequence: Synthetic oligonucleotide
cuguccuacagcuguuaau

SEQ ID NO: 1481278 - RNA, 19 nt, Artificial Sequence
  Description of Artificial Sequence: Synthetic oligonucleotide
cucggucuucgacuacuaa

SEQ ID NO: 1481279 - RNA, 19 nt, Artificial Sequence
  Description of Artificial Sequence: Synthetic oligonucleotide
cgagaucgggaccucuggc

SEQ ID NO: 1481280 - RNA, 19 nt, Artificial Sequence
  Description of Artificial Sequence: Synthetic oligonucleotide
gugcauccgcaaagguuac

SEQ ID NO: 1481281 - RNA, 19 nt, Artificial Sequence
  Description of Artificial Sequence: Synthetic oligonucleotide
aaggcacccuugacccuaa

SEQ ID NO: 1481282 - RNA, 19 nt, Artificial Sequence
  Description of Artificial Sequence: Synthetic oligonucleotide
agucaccauaagaggcaaa

SEQ ID NO: 1481283 - RNA, 19 nt, Artificial Sequence
  Description of Artificial Sequence: Synthetic oligonucleotide
cuacuaccagaacgggacu

SEQ ID NO: 1481284 - RNA, 19 nt, Artificial Sequence
  Description of Artificial Sequence: Synthetic oligonucleotide
gcccggcuaguguuuccgg

SEQ ID NO: 1481285 - RNA, 19 nt, Artificial Sequence
  Description of Artificial Sequence: Synthetic oligonucleotide
cagcuguuaaugggugaga

SEQ ID NO: 1481286 - RNA, 19 nt, Artificial Sequence
  Description of Artificial Sequence: Synthetic oligonucleotide
gcuccuacgggaacgagau

SEQ ID NO: 1481287 - RNA, 19 nt, Artificial Sequence
  Description of Artificial Sequence: Synthetic oligonucleotide
cgaccgacggagcuggcug

SEQ ID NO: 1481288 - RNA, 19 nt, Artificial Sequence
  Description of Artificial Sequence: Synthetic oligonucleotide
gucggcgaccgacggagcu

SEQ ID NO: 1481289 - RNA, 19 nt, Artificial Sequence
  Description of Artificial Sequence: Synthetic oligonucleotide
gcauuucgucuaucauuuc

SEQ ID NO: 1481290 - RNA, 19 nt, Artificial Sequence
  Description of Artificial Sequence: Synthetic oligonucleotide
cuccuacgggaacgagauc

SEQ ID NO: 1481291 - RNA, 19 nt, Artificial Sequence
  Description of Artificial Sequence: Synthetic oligonucleotide
caacaaccccuuggugguc

SEQ ID NO: 1481292 - RNA, 19 nt, Artificial Sequence
  Description of Artificial Sequence: Synthetic oligonucleotide
cuaccccuucauuuaguuu

SEQ ID NO: 1481293 - RNA, 19 nt, Artificial Sequence
  Description of Artificial Sequence: Synthetic oligonucleotide
cccggagagguccguaguc

SEQ ID NO: 1481294 - RNA, 19 nt, Artificial Sequence
  Description of Artificial Sequence: Synthetic oligonucleotide
gcgauccacagaugcugga

SEQ ID NO: 1481295 - RNA, 19 nt, Artificial Sequence
  Description of Artificial Sequence: Synthetic oligonucleotide
guggagcauuucgucuauc

SEQ ID NO: 1481296 - RNA, 19 nt, Artificial Sequence
  Description of Artificial Sequence: Synthetic oligonucleotide
ggacuugcuccggcuccgg

SEQ ID NO: 1481297 - RNA, 19 nt, Artificial Sequence
  Description of Artificial Sequence: Synthetic oligonucleotide
ccuugacccuaacaaggaa

SEQ ID NO: 1481298 - RNA, 19 nt, Artificial Sequence
  Description of Artificial Sequence: Synthetic oligonucleotide
ggucggugugcauccgcaa

SEQ ID NO: 1481299 - RNA, 19 nt, Artificial Sequence
  Description of Artificial Sequence: Synthetic oligonucleotide
cgcaaagguuacuucccca

SEQ ID NO: 1481300 - RNA, 19 nt, Artificial Sequence
  Description of Artificial Sequence: Synthetic oligonucleotide
agacccggagagguccgua

SEQ ID NO: 1481301 - RNA, 19 nt, Artificial Sequence
  Description of Artificial Sequence: Synthetic oligonucleotide
cggucuucgacuacuaaau

SEQ ID NO: 1481302 - RNA, 19 nt, Artificial Sequence
  Description of Artificial Sequence: Synthetic oligonucleotide
ccaccucgagaccgagccc

SEQ ID NO: 1481303 - RNA, 19 nt, Artificial Sequence
  Description of Artificial Sequence: Synthetic oligonucleotide
cugauccguccguaacccu

SEQ ID NO: 1481304 - RNA, 19 nt, Artificial Sequence
  Description of Artificial Sequence: Synthetic oligonucleotide
gguggagcauuucgucuau

SEQ ID NO: 1481305 - RNA, 19 nt, Artificial Sequence
  Description of Artificial Sequence: Synthetic oligonucleotide
cccggcuaguguuuccgga

SEQ ID NO: 1481306 - RNA, 19 nt, Artificial Sequence
  Description of Artificial Sequence: Synthetic oligonucleotide
accucgagaccgagcccga

SEQ ID NO: 1481307 - RNA, 19 nt, Artificial Sequence
  Description of Artificial Sequence: Synthetic oligonucleotide
gaccgagaucgggaccucu

SEQ ID NO: 1481308 - RNA, 19 nt, Artificial Sequence
  Description of Artificial Sequence: Synthetic oligonucleotide
guccguagucggcgaccga

SEQ ID NO: 1481309 - RNA, 19 nt, Artificial Sequence
  Description of Artificial Sequence: Synthetic oligonucleotide
gccuuuugcugccuucaau

SEQ ID NO: 1481310 - RNA, 19 nt, Artificial Sequence
  Description of Artificial Sequence: Synthetic oligonucleotide
gcuacgggaccuagaggaa

SEQ ID NO: 1481311 - RNA, 19 nt, Artificial Sequence
  Description of Artificial Sequence: Synthetic oligonucleotide
gagcccgagcauguucaau

SEQ ID NO: 1481312 - RNA, 19 nt, Artificial Sequence
  Description of Artificial Sequence: Synthetic oligonucleotide
cggcgaccgacggagcugg

SEQ ID NO: 1481313 - RNA, 19 nt, Artificial Sequence
  Description of Artificial Sequence: Synthetic oligonucleotide
ccccagggcaaguuauuua

SEQ ID NO: 1481314 - RNA, 19 nt, Artificial Sequence
  Description of Artificial Sequence: Synthetic oligonucleotide
cgggaacgagaucggcuac

SEQ ID NO: 1481315 - RNA, 19 nt, Artificial Sequence
  Description of Artificial Sequence: Synthetic oligonucleotide
gagacccggagagguccgu

SEQ ID NO: 1481316 - RNA, 19 nt, Artificial Sequence
  Description of Artificial Sequence: Synthetic oligonucleotide
cggcuaguguuuccggaca

SEQ ID NO: 1481317 - RNA, 19 nt, Artificial Sequence
  Description of Artificial Sequence: Synthetic oligonucleotide
cagcccgaccucccuccaa

SEQ ID NO: 1481318 - RNA, 19 nt, Artificial Sequence
  Description of Artificial Sequence: Synthetic oligonucleotide
cgacggagcuggcugccuc

SEQ ID NO: 1481319 - RNA, 19 nt, Artificial Sequence
  Description of Artificial Sequence: Synthetic oligonucleotide
ccuuggugguccacaucua

SEQ ID NO: 1481320 - RNA, 19 nt, Artificial Sequence
  Description of Artificial Sequence: Synthetic oligonucleotide
cccgagcauguucaauagu

SEQ ID NO: 1481321 - RNA, 19 nt, Artificial Sequence
  Description of Artificial Sequence: Synthetic oligonucleotide
gcgaccgacggagcuggcu

SEQ ID NO: 1481322 - RNA, 19 nt, Artificial Sequence
  Description of Artificial Sequence: Synthetic oligonucleotide
cccuggcggcugagacccg

SEQ ID NO: 1481323 - RNA, 19 nt, Artificial Sequence
  Description of Artificial Sequence: Synthetic oligonucleotide
gaccgagcccgagcauguu

SEQ ID NO: 1481324 - RNA, 19 nt, Artificial Sequence
  Description of Artificial Sequence: Synthetic oligonucleotide
ggcgaccgacggagcuggc

SEQ ID NO: 1481325 - RNA, 19 nt, Artificial Sequence
  Description of Artificial Sequence: Synthetic oligonucleotide
ccagcccgaccucccucca

SEQ ID NO: 1481326 - RNA, 19 nt, Artificial Sequence
  Description of Artificial Sequence: Synthetic oligonucleotide
cgggaccucuggcgaucca

SEQ ID NO: 1481327 - RNA, 19 nt, Artificial Sequence
  Description of Artificial Sequence: Synthetic oligonucleotide
cgagaccgagcccgagcau

SEQ ID NO: 1481328 - RNA, 19 nt, Artificial Sequence
  Description of Artificial Sequence: Synthetic oligonucleotide
aucauuaagagccugcagg

SEQ ID NO: 1481329 - RNA, 19 nt, Artificial Sequence
  Description of Artificial Sequence: Synthetic oligonucleotide
cugcagaucauuaagagcc

SEQ ID NO: 1481330 - RNA, 19 nt, Artificial Sequence
  Description of Artificial Sequence: Synthetic oligonucleotide
aaggucaugacacgcaagg

SEQ ID NO: 1481331 - RNA, 19 nt, Artificial Sequence
  Description of Artificial Sequence: Synthetic oligonucleotide
uuucggaucagcaugcaag

SEQ ID NO: 1481332 - RNA, 19 nt, Artificial Sequence
  Description of Artificial Sequence: Synthetic oligonucleotide
ucaggaaacgcucuggcag

SEQ ID NO: 1481333 - RNA, 19 nt, Artificial Sequence
  Description of Artificial Sequence: Synthetic oligonucleotide
aaccccuugugauucaaac

SEQ ID NO: 1481334 - RNA, 19 nt, Artificial Sequence
  Description of Artificial Sequence: Synthetic oligonucleotide
auguuacucagaucaaccc

SEQ ID NO: 1481335 - RNA, 19 nt, Artificial Sequence
  Description of Artificial Sequence: Synthetic oligonucleotide
gaauucauuccgcacagcc

SEQ ID NO: 1481336 - RNA, 19 nt, Artificial Sequence
  Description of Artificial Sequence: Synthetic oligonucleotide
uguuacucagaucaacccc

SEQ ID NO: 1481337 - RNA, 19 nt, Artificial Sequence
  Description of Artificial Sequence: Synthetic oligonucleotide
cuuggcaugcucaugggcg

SEQ ID NO: 1481338 - RNA, 19 nt, Artificial Sequence
  Description of Artificial Sequence: Synthetic oligonucleotide
cacgauguuacucagauca

SEQ ID NO: 1481339 - RNA, 19 nt, Artificial Sequence
  Description of Artificial Sequence: Synthetic oligonucleotide
uuucauggccuguagugcg

SEQ ID NO: 1481340 - RNA, 19 nt, Artificial Sequence
  Description of Artificial Sequence: Synthetic oligonucleotide
uguaccgccugccuggacg

SEQ ID NO: 1481341 - RNA, 19 nt, Artificial Sequence
  Description of Artificial Sequence: Synthetic oligonucleotide
gauguuacucagaucaacc

SEQ ID NO: 1481342 - RNA, 19 nt, Artificial Sequence
  Description of Artificial Sequence: Synthetic oligonucleotide
aaguuucggaucagcaugc

SEQ ID NO: 1481343 - RNA, 19 nt, Artificial Sequence
  Description of Artificial Sequence: Synthetic oligonucleotide
ugcgugaugcgcuuggaag

SEQ ID NO: 1481344 - RNA, 19 nt, Artificial Sequence
  Description of Artificial Sequence: Synthetic oligonucleotide
aaggugggccgacaccucc

SEQ ID NO: 1481345 - RNA, 19 nt, Artificial Sequence
  Description of Artificial Sequence: Synthetic oligonucleotide
ucgaggaugggcuuggaga

SEQ ID NO: 1481346 - RNA, 19 nt, Artificial Sequence
  Description of Artificial Sequence: Synthetic oligonucleotide
aggcauggcgcacacagcg

SEQ ID NO: 1481347 - RNA, 19 nt, Artificial Sequence
  Description of Artificial Sequence: Synthetic oligonucleotide
aaugacccggcuauucucg

SEQ ID NO: 1481348 - RNA, 19 nt, Artificial Sequence
  Description of Artificial Sequence: Synthetic oligonucleotide
aaucgggcaaggugggccg

SEQ ID NO: 1481349 - RNA, 19 nt, Artificial Sequence
  Description of Artificial Sequence: Synthetic oligonucleotide
auuccgcacagccaggcgg

SEQ ID NO: 1481350 - RNA, 19 nt, Artificial Sequence
  Description of Artificial Sequence: Synthetic oligonucleotide
uguaauagcagcgguuagc

SEQ ID NO: 1481351 - RNA, 19 nt, Artificial Sequence
  Description of Artificial Sequence: Synthetic oligonucleotide
caugcaagccuguuucugg

SEQ ID NO: 1481352 - RNA, 19 nt, Artificial Sequence
  Description of Artificial Sequence: Synthetic oligonucleotide
uuccguaaggcaaggacac

SEQ ID NO: 1481353 - RNA, 19 nt, Artificial Sequence
  Description of Artificial Sequence: Synthetic oligonucleotide
uguuucuggacaccggccu

SEQ ID NO: 1481354 - RNA, 19 nt, Artificial Sequence
  Description of Artificial Sequence: Synthetic oligonucleotide
uucacaucgucguugccug

SEQ ID NO: 1481355 - RNA, 19 nt, Artificial Sequence
  Description of Artificial Sequence: Synthetic oligonucleotide
ugcaggacaucaugugugg

SEQ ID NO: 1481356 - RNA, 19 nt, Artificial Sequence
  Description of Artificial Sequence: Synthetic oligonucleotide
cacaauggacucuguaccg

SEQ ID NO: 1481357 - RNA, 19 nt, Artificial Sequence
  Description of Artificial Sequence: Synthetic oligonucleotide
gaucauuaagagccugcag

SEQ ID NO: 1481358 - RNA, 19 nt, Artificial Sequence
  Description of Artificial Sequence: Synthetic oligonucleotide
cuacgggacaccaaguuuc

SEQ ID NO: 1481359 - RNA, 19 nt, Artificial Sequence
  Description of Artificial Sequence: Synthetic oligonucleotide
ucagaucaaccccuuguga

SEQ ID NO: 1481360 - RNA, 19 nt, Artificial Sequence
  Description of Artificial Sequence: Synthetic oligonucleotide
uuaagagccugcaggacau

SEQ ID NO: 1481361 - RNA, 19 nt, Artificial Sequence
  Description of Artificial Sequence: Synthetic oligonucleotide
guuggcggcauucugugcc

SEQ ID NO: 1481362 - RNA, 19 nt, Artificial Sequence
  Description of Artificial Sequence: Synthetic oligonucleotide
acucagaucaaccccuugu

SEQ ID NO: 1481363 - RNA, 19 nt, Artificial Sequence
  Description of Artificial Sequence: Synthetic oligonucleotide
acaauggacucuguaccgc

SEQ ID NO: 1481364 - RNA, 19 nt, Artificial Sequence
  Description of Artificial Sequence: Synthetic oligonucleotide
uguguaauagcagcgguua

SEQ ID NO: 1481365 - RNA, 19 nt, Artificial Sequence
  Description of Artificial Sequence: Synthetic oligonucleotide
ucagaguucgcugagccaa

SEQ ID NO: 1481366 - RNA, 19 nt, Artificial Sequence
  Description of Artificial Sequence: Synthetic oligonucleotide
uggccaucagucagcauag

SEQ ID NO: 1481367 - RNA, 19 nt, Artificial Sequence
  Description of Artificial Sequence: Synthetic oligonucleotide
uccggcuuucaccaggccc

SEQ ID NO: 1481368 - RNA, 19 nt, Artificial Sequence
  Description of Artificial Sequence: Synthetic oligonucleotide
ugcuguguaauagcagcgg

SEQ ID NO: 1481369 - RNA, 19 nt, Artificial Sequence
  Description of Artificial Sequence: Synthetic oligonucleotide
uacgggacaccaaguuucg

SEQ ID NO: 1481370 - RNA, 19 nt, Artificial Sequence
  Description of Artificial Sequence: Synthetic oligonucleotide
ugggugugcuuucauggcc

SEQ ID NO: 1481371 - RNA, 19 nt, Artificial Sequence
  Description of Artificial Sequence: Synthetic oligonucleotide
gucgaugaccuccuggcag

SEQ ID NO: 1481372 - RNA, 19 nt, Artificial Sequence
  Description of Artificial Sequence: Synthetic oligonucleotide
cuaugcuguguaauagcag

SEQ ID NO: 1481373 - RNA, 19 nt, Artificial Sequence
  Description of Artificial Sequence: Synthetic oligonucleotide
auagcagcgguuagcaggg

SEQ ID NO: 1481374 - RNA, 19 nt, Artificial Sequence
  Description of Artificial Sequence: Synthetic oligonucleotide
gucaugacacgcaaggccc

SEQ ID NO: 1481375 - RNA, 19 nt, Artificial Sequence
  Description of Artificial Sequence: Synthetic oligonucleotide
caacacuccggcuuucacc

SEQ ID NO: 1481376 - RNA, 19 nt, Artificial Sequence
  Description of Artificial Sequence: Synthetic oligonucleotide
agcagcgguuagcaggggc

SEQ ID NO: 1481377 - RNA, 19 nt, Artificial Sequence
  Description of Artificial Sequence: Synthetic oligonucleotide
gacaccggccuccuguggg

SEQ ID NO: 1481378 - RNA, 19 nt, Artificial Sequence
  Description of Artificial Sequence: Synthetic oligonucleotide
cuggcuacgggacaccaag

SEQ ID NO: 1481379 - RNA, 19 nt, Artificial Sequence
  Description of Artificial Sequence: Synthetic oligonucleotide
caaugagcaccuucagacc

SEQ ID NO: 1481380 - RNA, 19 nt, Artificial Sequence
  Description of Artificial Sequence: Synthetic oligonucleotide
ucgucguugccugcaaugg

SEQ ID NO: 1481381 - RNA, 19 nt, Artificial Sequence
  Description of Artificial Sequence: Synthetic oligonucleotide
cuuccguaaggcaaggaca

SEQ ID NO: 1481382 - RNA, 19 nt, Artificial Sequence
  Description of Artificial Sequence: Synthetic oligonucleotide
gaaucgggcaaggugggcc

SEQ ID NO: 1481383 - RNA, 19 nt, Artificial Sequence
  Description of Artificial Sequence: Synthetic oligonucleotide
uugucaggaaacgcucugg

SEQ ID NO: 1481384 - RNA, 19 nt, Artificial Sequence
  Description of Artificial Sequence: Synthetic oligonucleotide
caauggacucuguaccgcc

SEQ ID NO: 1481385 - RNA, 19 nt, Artificial Sequence
  Description of Artificial Sequence: Synthetic oligonucleotide
uccgaggucgaugaccucc

SEQ ID NO: 1481386 - RNA, 19 nt, Artificial Sequence
  Description of Artificial Sequence: Synthetic oligonucleotide
ggaagcucgggcuugugag

SEQ ID NO: 1481387 - RNA, 19 nt, Artificial Sequence
  Description of Artificial Sequence: Synthetic oligonucleotide
uccuucacaucgucguugc

SEQ ID NO: 1481388 - RNA, 19 nt, Artificial Sequence
  Description of Artificial Sequence: Synthetic oligonucleotide
ugacacgcaaggcccagca

SEQ ID NO: 1481389 - RNA, 19 nt, Artificial Sequence
  Description of Artificial Sequence: Synthetic oligonucleotide
aucgucguugccugcaaug

SEQ ID NO: 1481390 - RNA, 19 nt, Artificial Sequence
  Description of Artificial Sequence: Synthetic oligonucleotide
caguucucgaagcuccacg

SEQ ID NO: 1481391 - RNA, 19 nt, Artificial Sequence
  Description of Artificial Sequence: Synthetic oligonucleotide
uguagugcggccagugcuc

SEQ ID NO: 1481392 - RNA, 19 nt, Artificial Sequence
  Description of Artificial Sequence: Synthetic oligonucleotide
ucgggcuuccguaaggcaa

SEQ ID NO: 1481393 - RNA, 19 nt, Artificial Sequence
  Description of Artificial Sequence: Synthetic oligonucleotide
gacaucaugugugggcucc

SEQ ID NO: 1481394 - RNA, 19 nt, Artificial Sequence
  Description of Artificial Sequence: Synthetic oligonucleotide
guaauagcagcgguuagca

SEQ ID NO: 1481395 - RNA, 19 nt, Artificial Sequence
  Description of Artificial Sequence: Synthetic oligonucleotide
aggaugggcuuggagaagg

SEQ ID NO: 1481396 - RNA, 19 nt, Artificial Sequence
  Description of Artificial Sequence: Synthetic oligonucleotide
ucaugggcguggccaaagg

SEQ ID NO: 1481397 - RNA, 19 nt, Artificial Sequence
  Description of Artificial Sequence: Synthetic oligonucleotide
aaggacacagagugccgca

SEQ ID NO: 1481398 - RNA, 19 nt, Artificial Sequence
  Description of Artificial Sequence: Synthetic oligonucleotide
uggcuaugcuguguaauag

SEQ ID NO: 1481399 - RNA, 19 nt, Artificial Sequence
  Description of Artificial Sequence: Synthetic oligonucleotide
ucccugaccacaucggcgu

SEQ ID NO: 1481400 - RNA, 19 nt, Artificial Sequence
  Description of Artificial Sequence: Synthetic oligonucleotide
cagcggaucccacagcagg

SEQ ID NO: 1481401 - RNA, 19 nt, Artificial Sequence
  Description of Artificial Sequence: Synthetic oligonucleotide
aaaggucaugacacgcaag

SEQ ID NO: 1481402 - RNA, 19 nt, Artificial Sequence
  Description of Artificial Sequence: Synthetic oligonucleotide
aagucuccugcgugaugcg

SEQ ID NO: 1481403 - RNA, 19 nt, Artificial Sequence
  Description of Artificial Sequence: Synthetic oligonucleotide
cagcaugcaagccuguuuc

SEQ ID NO: 1481404 - RNA, 19 nt, Artificial Sequence
  Description of Artificial Sequence: Synthetic oligonucleotide
aaaaggcccuggucgcuug

SEQ ID NO: 1481405 - RNA, 19 nt, Artificial Sequence
  Description of Artificial Sequence: Synthetic oligonucleotide
guugucaggaaacgcucug

SEQ ID NO: 1481406 - RNA, 19 nt, Artificial Sequence
  Description of Artificial Sequence: Synthetic oligonucleotide
agaucauuaagagccugca

SEQ ID NO: 1481407 - RNA, 19 nt, Artificial Sequence
  Description of Artificial Sequence: Synthetic oligonucleotide
gaucaaccccuugugauuc

SEQ ID NO: 1481408 - RNA, 19 nt, Artificial Sequence
  Description of Artificial Sequence: Synthetic oligonucleotide
aggucaugacacgcaaggc

SEQ ID NO: 1481409 - RNA, 19 nt, Artificial Sequence
  Description of Artificial Sequence: Synthetic oligonucleotide
gacccggcuauucucgggc

SEQ ID NO: 1481410 - RNA, 19 nt, Artificial Sequence
  Description of Artificial Sequence: Synthetic oligonucleotide
ucucguaaugcggccuugg

SEQ ID NO: 1481411 - RNA, 19 nt, Artificial Sequence
  Description of Artificial Sequence: Synthetic oligonucleotide
caagccuguuucuggacac

SEQ ID NO: 1481412 - RNA, 19 nt, Artificial Sequence
  Description of Artificial Sequence: Synthetic oligonucleotide
cuguuucuggacaccggcc

SEQ ID NO: 1481413 - RNA, 19 nt, Artificial Sequence
  Description of Artificial Sequence: Synthetic oligonucleotide
uggcagaauucauuccgca

SEQ ID NO: 1481414 - RNA, 19 nt, Artificial Sequence
  Description of Artificial Sequence: Synthetic oligonucleotide
gacgauggcguccuucaca

SEQ ID NO: 1481415 - RNA, 19 nt, Artificial Sequence
  Description of Artificial Sequence: Synthetic oligonucleotide
ggcaaggacacagagugcc

SEQ ID NO: 1481416 - RNA, 19 nt, Artificial Sequence
  Description of Artificial Sequence: Synthetic oligonucleotide
ugucuucacgauguuacuc

SEQ ID NO: 1481417 - RNA, 19 nt, Artificial Sequence
  Description of Artificial Sequence: Synthetic oligonucleotide
caucagucagcauagccaa

SEQ ID NO: 1481418 - RNA, 19 nt, Artificial Sequence
  Description of Artificial Sequence: Synthetic oligonucleotide
ucaugacacgcaaggccca

SEQ ID NO: 1481419 - RNA, 19 nt, Artificial Sequence
  Description of Artificial Sequence: Synthetic oligonucleotide
acucuguaccgccugccug

SEQ ID NO: 1481420 - RNA, 19 nt, Artificial Sequence
  Description of Artificial Sequence: Synthetic oligonucleotide
ccccuugugauucaaacug

SEQ ID NO: 1481421 - RNA, 19 nt, Artificial Sequence
  Description of Artificial Sequence: Synthetic oligonucleotide
uucgcugagccaaggucac

SEQ ID NO: 1481422 - RNA, 19 nt, Artificial Sequence
  Description of Artificial Sequence: Synthetic oligonucleotide
accccuugugauucaaacu

SEQ ID NO: 1481423 - RNA, 19 nt, Artificial Sequence
  Description of Artificial Sequence: Synthetic oligonucleotide
agaucaaccccuugugauu

SEQ ID NO: 1481424 - RNA, 19 nt, Artificial Sequence
  Description of Artificial Sequence: Synthetic oligonucleotide
ggucacaaggaugccaagg

SEQ ID NO: 1481425 - RNA, 19 nt, Artificial Sequence
  Description of Artificial Sequence: Synthetic oligonucleotide
guguaauagcagcgguuag

SEQ ID NO: 1481426 - RNA, 19 nt, Artificial Sequence
  Description of Artificial Sequence: Synthetic oligonucleotide
agcacccaucucaaacucc

SEQ ID NO: 1481427 - RNA, 19 nt, Artificial Sequence
  Description of Artificial Sequence: Synthetic oligonucleotide
uacucagaucaaccccuug

SEQ ID NO: 1481428 - RNA, 19 nt, Artificial Sequence
  Description of Artificial Sequence: Synthetic oligonucleotide
aaugacacuuugggugcug

SEQ ID NO: 1481429 - RNA, 19 nt, Artificial Sequence
  Description of Artificial Sequence: Synthetic oligonucleotide
guucgcugagccaagguca

SEQ ID NO: 1481430 - RNA, 19 nt, Artificial Sequence
  Description of Artificial Sequence: Synthetic oligonucleotide
ucucagggcgcugagcacu

SEQ ID NO: 1481431 - RNA, 19 nt, Artificial Sequence
  Description of Artificial Sequence: Synthetic oligonucleotide
ugggugggaagcucgggcu

SEQ ID NO: 1481432 - RNA, 19 nt, Artificial Sequence
  Description of Artificial Sequence: Synthetic oligonucleotide
uuggcaugcucaugggcgu

SEQ ID NO: 1481433 - RNA, 19 nt, Artificial Sequence
  Description of Artificial Sequence: Synthetic oligonucleotide
caaggacacagagugccgc

SEQ ID NO: 1481434 - RNA, 19 nt, Artificial Sequence
  Description of Artificial Sequence: Synthetic oligonucleotide
uggcgcacacagcggaucc

SEQ ID NO: 1481435 - RNA, 19 nt, Artificial Sequence
  Description of Artificial Sequence: Synthetic oligonucleotide
ugacccggcuauucucggg

SEQ ID NO: 1481436 - RNA, 19 nt, Artificial Sequence
  Description of Artificial Sequence: Synthetic oligonucleotide
caaugacccggcuauucuc

SEQ ID NO: 1481437 - RNA, 19 nt, Artificial Sequence
  Description of Artificial Sequence: Synthetic oligonucleotide
aggcgggacaaggugcugc

SEQ ID NO: 1481438 - RNA, 19 nt, Artificial Sequence
  Description of Artificial Sequence: Synthetic oligonucleotide
agccaguugccaggcagcc

SEQ ID NO: 1481439 - RNA, 19 nt, Artificial Sequence
  Description of Artificial Sequence: Synthetic oligonucleotide
aguucacucaggacucccg

SEQ ID NO: 1481440 - RNA, 19 nt, Artificial Sequence
  Description of Artificial Sequence: Synthetic oligonucleotide
augacccggcuauucucgg

SEQ ID NO: 1481441 - RNA, 19 nt, Artificial Sequence
  Description of Artificial Sequence: Synthetic oligonucleotide
uggccaaagggcacucgga

SEQ ID NO: 1481442 - RNA, 19 nt, Artificial Sequence
  Description of Artificial Sequence: Synthetic oligonucleotide
aucggcgugcuggcuaugc

SEQ ID NO: 1481443 - RNA, 19 nt, Artificial Sequence
  Description of Artificial Sequence: Synthetic oligonucleotide
cacagucugggugggaagc

SEQ ID NO: 1481444 - RNA, 19 nt, Artificial Sequence
  Description of Artificial Sequence: Synthetic oligonucleotide
agaaucgggcaaggugggc

SEQ ID NO: 1481445 - RNA, 19 nt, Artificial Sequence
  Description of Artificial Sequence: Synthetic oligonucleotide
gcauugagagccuggagca

SEQ ID NO: 1481446 - RNA, 19 nt, Artificial Sequence
  Description of Artificial Sequence: Synthetic oligonucleotide
gcuuccguaaggcaaggac

SEQ ID NO: 1481447 - RNA, 19 nt, Artificial Sequence
  Description of Artificial Sequence: Synthetic oligonucleotide
aggggcaacacuccggcuu

SEQ ID NO: 1481448 - RNA, 19 nt, Artificial Sequence
  Description of Artificial Sequence: Synthetic oligonucleotide
guuacucagaucaaccccu

SEQ ID NO: 1481449 - RNA, 19 nt, Artificial Sequence
  Description of Artificial Sequence: Synthetic oligonucleotide
cucguaaugcggccuuggc

SEQ ID NO: 1481450 - RNA, 19 nt, Artificial Sequence
  Description of Artificial Sequence: Synthetic oligonucleotide
accaaguuucggaucagca

SEQ ID NO: 1481451 - RNA, 19 nt, Artificial Sequence
  Description of Artificial Sequence: Synthetic oligonucleotide
acuccggcuuucaccaggc

SEQ ID NO: 1481452 - RNA, 19 nt, Artificial Sequence
  Description of Artificial Sequence: Synthetic oligonucleotide
cauuaagagccugcaggac

SEQ ID NO: 1481453 - RNA, 19 nt, Artificial Sequence
  Description of Artificial Sequence: Synthetic oligonucleotide
gccaucagucagcauagcc

SEQ ID NO: 1481454 - RNA, 19 nt, Artificial Sequence
  Description of Artificial Sequence: Synthetic oligonucleotide
ucugggugggaagcucggg

SEQ ID NO: 1481455 - RNA, 19 nt, Artificial Sequence
  Description of Artificial Sequence: Synthetic oligonucleotide
aggccuccgaggucgauga

SEQ ID NO: 1481456 - RNA, 19 nt, Artificial Sequence
  Description of Artificial Sequence: Synthetic oligonucleotide
gucgaggaugggcuuggag

SEQ ID NO: 1481457 - RNA, 19 nt, Artificial Sequence
  Description of Artificial Sequence: Synthetic oligonucleotide
cacggugccaggucacccc

SEQ ID NO: 1481458 - RNA, 19 nt, Artificial Sequence
  Description of Artificial Sequence: Synthetic oligonucleotide
ugugccagcguggccacga

SEQ ID NO: 1481459 - RNA, 19 nt, Artificial Sequence
  Description of Artificial Sequence: Synthetic oligonucleotide
cugagccaaggucacggug

SEQ ID NO: 1481460 - RNA, 19 nt, Artificial Sequence
  Description of Artificial Sequence: Synthetic oligonucleotide
gaagcucgggcuugugaga

SEQ ID NO: 1481461 - RNA, 19 nt, Artificial Sequence
  Description of Artificial Sequence: Synthetic oligonucleotide
uguuggcggcauucugugc

SEQ ID NO: 1481462 - RNA, 19 nt, Artificial Sequence
  Description of Artificial Sequence: Synthetic oligonucleotide
cauuccgcacagccaggcg

SEQ ID NO: 1481463 - RNA, 19 nt, Artificial Sequence
  Description of Artificial Sequence: Synthetic oligonucleotide
cuggcuaagugucggguca

SEQ ID NO: 1481464 - RNA, 19 nt, Artificial Sequence
  Description of Artificial Sequence: Synthetic oligonucleotide
gacacgcaaggcccagcag

SEQ ID NO: 1481465 - RNA, 19 nt, Artificial Sequence
  Description of Artificial Sequence: Synthetic oligonucleotide
agaguucgcugagccaagg

SEQ ID NO: 1481466 - RNA, 19 nt, Artificial Sequence
  Description of Artificial Sequence: Synthetic oligonucleotide
ggcagaauucauuccgcac

SEQ ID NO: 1481467 - RNA, 19 nt, Artificial Sequence
  Description of Artificial Sequence: Synthetic oligonucleotide
cacagcggaucccacagca

SEQ ID NO: 1481468 - RNA, 19 nt, Artificial Sequence
  Description of Artificial Sequence: Synthetic oligonucleotide
ucggaucagcaugcaagcc

SEQ ID NO: 1481469 - RNA, 19 nt, Artificial Sequence
  Description of Artificial Sequence: Synthetic oligonucleotide
guaccggcuggccuucugc

SEQ ID NO: 1481470 - RNA, 19 nt, Artificial Sequence
  Description of Artificial Sequence: Synthetic oligonucleotide
gucaggaaacgcucuggca

SEQ ID NO: 1481471 - RNA, 19 nt, Artificial Sequence
  Description of Artificial Sequence: Synthetic oligonucleotide
gcuaagugucgggucaugg

SEQ ID NO: 1481472 - RNA, 19 nt, Artificial Sequence
  Description of Artificial Sequence: Synthetic oligonucleotide
caaaggucaugacacgcaa

SEQ ID NO: 1481473 - RNA, 19 nt, Artificial Sequence
  Description of Artificial Sequence: Synthetic oligonucleotide
augacacgcaaggcccagc

SEQ ID NO: 1481474 - RNA, 19 nt, Artificial Sequence
  Description of Artificial Sequence: Synthetic oligonucleotide
cacaaugacccggcuauuc

SEQ ID NO: 1481475 - RNA, 19 nt, Artificial Sequence
  Description of Artificial Sequence: Synthetic oligonucleotide
uucauguuucaggcaggca

SEQ ID NO: 1481476 - RNA, 19 nt, Artificial Sequence
  Description of Artificial Sequence: Synthetic oligonucleotide
cuauucucgggcuuccgua

SEQ ID NO: 1481477 - RNA, 19 nt, Artificial Sequence
  Description of Artificial Sequence: Synthetic oligonucleotide
cguaaugcggccuuggcca

SEQ ID NO: 1481478 - RNA, 19 nt, Artificial Sequence
  Description of Artificial Sequence: Synthetic oligonucleotide
ugagcaccuucagaccucu

SEQ ID NO: 1481479 - RNA, 19 nt, Artificial Sequence
  Description of Artificial Sequence: Synthetic oligonucleotide
acccuccacaaugacccgg

SEQ ID NO: 1481480 - RNA, 19 nt, Artificial Sequence
  Description of Artificial Sequence: Synthetic oligonucleotide
aggucaccccucuuuccug

SEQ ID NO: 1481481 - RNA, 19 nt, Artificial Sequence
  Description of Artificial Sequence: Synthetic oligonucleotide
gcuaugcuguguaauagca

SEQ ID NO: 1481482 - RNA, 19 nt, Artificial Sequence
  Description of Artificial Sequence: Synthetic oligonucleotide
auggcgcacacagcggauc

SEQ ID NO: 1481483 - RNA, 19 nt, Artificial Sequence
  Description of Artificial Sequence: Synthetic oligonucleotide
ggucgcuuguggcagccag

SEQ ID NO: 1481484 - RNA, 19 nt, Artificial Sequence
  Description of Artificial Sequence: Synthetic oligonucleotide
aggcaaggacacagagugc

SEQ ID NO: 1481485 - RNA, 19 nt, Artificial Sequence
  Description of Artificial Sequence: Synthetic oligonucleotide
ucacggugccaggucaccc

SEQ ID NO: 1481486 - RNA, 19 nt, Artificial Sequence
  Description of Artificial Sequence: Synthetic oligonucleotide
cagaguucgcugagccaag

SEQ ID NO: 1481487 - RNA, 19 nt, Artificial Sequence
  Description of Artificial Sequence: Synthetic oligonucleotide
gcucucagggcgcugagca

SEQ ID NO: 1481488 - RNA, 19 nt, Artificial Sequence
  Description of Artificial Sequence: Synthetic oligonucleotide
gcccaggucucguaaugcg

SEQ ID NO: 1481489 - RNA, 19 nt, Artificial Sequence
  Description of Artificial Sequence: Synthetic oligonucleotide
uggcuacgggacaccaagu

SEQ ID NO: 1481490 - RNA, 19 nt, Artificial Sequence
  Description of Artificial Sequence: Synthetic oligonucleotide
ugucgggucauggcagcca

SEQ ID NO: 1481491 - RNA, 19 nt, Artificial Sequence
  Description of Artificial Sequence: Synthetic oligonucleotide
ugcucaugggcguggccaa

SEQ ID NO: 1481492 - RNA, 19 nt, Artificial Sequence
  Description of Artificial Sequence: Synthetic oligonucleotide
cagaucaaccccuugugau

SEQ ID NO: 1481493 - RNA, 19 nt, Artificial Sequence
  Description of Artificial Sequence: Synthetic oligonucleotide
cccuugugauucaaacugc

SEQ ID NO: 1481494 - RNA, 19 nt, Artificial Sequence
  Description of Artificial Sequence: Synthetic oligonucleotide
cagcauagccaaggcauug

SEQ ID NO: 1481495 - RNA, 19 nt, Artificial Sequence
  Description of Artificial Sequence: Synthetic oligonucleotide
ucacaucgucguugccugc

SEQ ID NO: 1481496 - RNA, 19 nt, Artificial Sequence
  Description of Artificial Sequence: Synthetic oligonucleotide
cccaggucucguaaugcgg

SEQ ID NO: 1481497 - RNA, 19 nt, Artificial Sequence
  Description of Artificial Sequence: Synthetic oligonucleotide
acaucggcgugcuggcuau

SEQ ID NO: 1481498 - RNA, 19 nt, Artificial Sequence
  Description of Artificial Sequence: Synthetic oligonucleotide
guuucggaucagcaugcaa

SEQ ID NO: 1481499 - RNA, 19 nt, Artificial Sequence
  Description of Artificial Sequence: Synthetic oligonucleotide
aaacgcucuggcagccuca

SEQ ID NO: 1481500 - RNA, 19 nt, Artificial Sequence
  Description of Artificial Sequence: Synthetic oligonucleotide
ccgauucuguucauguuuc

SEQ ID NO: 1481501 - RNA, 19 nt, Artificial Sequence
  Description of Artificial Sequence: Synthetic oligonucleotide
guaaugcggccuuggccac

SEQ ID NO: 1481502 - RNA, 19 nt, Artificial Sequence
  Description of Artificial Sequence: Synthetic oligonucleotide
cacagagugccgcacagcu

SEQ ID NO: 1481503 - RNA, 19 nt, Artificial Sequence
  Description of Artificial Sequence: Synthetic oligonucleotide
caggcauggcgcacacagc

SEQ ID NO: 1481504 - RNA, 19 nt, Artificial Sequence
  Description of Artificial Sequence: Synthetic oligonucleotide
gucagaguucgcugagcca

SEQ ID NO: 1481505 - RNA, 19 nt, Artificial Sequence
  Description of Artificial Sequence: Synthetic oligonucleotide
caugacacgcaaggcccag

SEQ ID NO: 1481506 - RNA, 19 nt, Artificial Sequence
  Description of Artificial Sequence: Synthetic oligonucleotide
cuucacaucgucguugccu

SEQ ID NO: 1481507 - RNA, 19 nt, Artificial Sequence
  Description of Artificial Sequence: Synthetic oligonucleotide
ccgagacccagucagggac

SEQ ID NO: 1481508 - RNA, 19 nt, Artificial Sequence
  Description of Artificial Sequence: Synthetic oligonucleotide
aucaaccccuugugauuca

SEQ ID NO: 1481509 - RNA, 19 nt, Artificial Sequence
  Description of Artificial Sequence: Synthetic oligonucleotide
ccguaaggcaaggacacag

SEQ ID NO: 1481510 - RNA, 19 nt, Artificial Sequence
  Description of Artificial Sequence: Synthetic oligonucleotide
aagggcacucggaugucau

SEQ ID NO: 1481511 - RNA, 19 nt, Artificial Sequence
  Description of Artificial Sequence: Synthetic oligonucleotide
aaggugcugcagaguucac

SEQ ID NO: 1481512 - RNA, 19 nt, Artificial Sequence
  Description of Artificial Sequence: Synthetic oligonucleotide
ucaaccccuugugauucaa

SEQ ID NO: 1481513 - RNA, 19 nt, Artificial Sequence
  Description of Artificial Sequence: Synthetic oligonucleotide
guagugcggccagugcucc

SEQ ID NO: 1481514 - RNA, 19 nt, Artificial Sequence
  Description of Artificial Sequence: Synthetic oligonucleotide
aaggcccuggucgcuugug

SEQ ID NO: 1481515 - RNA, 19 nt, Artificial Sequence
  Description of Artificial Sequence: Synthetic oligonucleotide
gaccuccuggcagaauuca

SEQ ID NO: 1481516 - RNA, 19 nt, Artificial Sequence
  Description of Artificial Sequence: Synthetic oligonucleotide
acggugccaggucaccccu

SEQ ID NO: 1481517 - RNA, 19 nt, Artificial Sequence
  Description of Artificial Sequence: Synthetic oligonucleotide
ucgcuuguggcagccaguu

SEQ ID NO: 1481518 - RNA, 19 nt, Artificial Sequence
  Description of Artificial Sequence: Synthetic oligonucleotide
uccguaaggcaaggacaca

SEQ ID NO: 1481519 - RNA, 19 nt, Artificial Sequence
  Description of Artificial Sequence: Synthetic oligonucleotide
cugccgauucuguucaugu

SEQ ID NO: 1481520 - RNA, 19 nt, Artificial Sequence
  Description of Artificial Sequence: Synthetic oligonucleotide
ugccugcaauggcucucag

SEQ ID NO: 1481521 - RNA, 19 nt, Artificial Sequence
  Description of Artificial Sequence: Synthetic oligonucleotide
cucucagggcgcugagcac

SEQ ID NO: 1481522 - RNA, 19 nt, Artificial Sequence
  Description of Artificial Sequence: Synthetic oligonucleotide
ggcaaggugggccgacacc

SEQ ID NO: 1481523 - RNA, 19 nt, Artificial Sequence
  Description of Artificial Sequence: Synthetic oligonucleotide
gugggccgacaccuccugg

SEQ ID NO: 1481524 - RNA, 19 nt, Artificial Sequence
  Description of Artificial Sequence: Synthetic oligonucleotide
guaccgccugccuggacga

SEQ ID NO: 1481525 - RNA, 19 nt, Artificial Sequence
  Description of Artificial Sequence: Synthetic oligonucleotide
agcggaucccacagcaggu

SEQ ID NO: 1481526 - RNA, 19 nt, Artificial Sequence
  Description of Artificial Sequence: Synthetic oligonucleotide
ucgcugagccaaggucacg

SEQ ID NO: 1481527 - RNA, 19 nt, Artificial Sequence
  Description of Artificial Sequence: Synthetic oligonucleotide
gcaaggacacagagugccg

SEQ ID NO: 1481528 - RNA, 19 nt, Artificial Sequence
  Description of Artificial Sequence: Synthetic oligonucleotide
cacccuccacaaugacccg

SEQ ID NO: 1481529 - RNA, 19 nt, Artificial Sequence
  Description of Artificial Sequence: Synthetic oligonucleotide
ugcuggcuaugcuguguaa

SEQ ID NO: 1481530 - RNA, 19 nt, Artificial Sequence
  Description of Artificial Sequence: Synthetic oligonucleotide
aguuucggaucagcaugca

SEQ ID NO: 1481531 - RNA, 19 nt, Artificial Sequence
  Description of Artificial Sequence: Synthetic oligonucleotide
aggucucguaaugcggccu

SEQ ID NO: 1481532 - RNA, 19 nt, Artificial Sequence
  Description of Artificial Sequence: Synthetic oligonucleotide
acgggacaccaaguuucgg

SEQ ID NO: 1481533 - RNA, 19 nt, Artificial Sequence
  Description of Artificial Sequence: Synthetic oligonucleotide
ucgggucauggcagccaca

SEQ ID NO: 1481534 - RNA, 19 nt, Artificial Sequence
  Description of Artificial Sequence: Synthetic oligonucleotide
gcagaucauuaagagccug

SEQ ID NO: 1481535 - RNA, 19 nt, Artificial Sequence
  Description of Artificial Sequence: Synthetic oligonucleotide
ggcguccuucacaucgucg

SEQ ID NO: 1481536 - RNA, 19 nt, Artificial Sequence
  Description of Artificial Sequence: Synthetic oligonucleotide
cagagugccgcacagcuuu

SEQ ID NO: 1481537 - RNA, 19 nt, Artificial Sequence
  Description of Artificial Sequence: Synthetic oligonucleotide
gacucuguaccgccugccu

SEQ ID NO: 1481538 - RNA, 19 nt, Artificial Sequence
  Description of Artificial Sequence: Synthetic oligonucleotide
gagugccgcacagcuuugc

SEQ ID NO: 1481539 - RNA, 19 nt, Artificial Sequence
  Description of Artificial Sequence: Synthetic oligonucleotide
ggacaccaaguuucggauc

SEQ ID NO: 1481540 - RNA, 19 nt, Artificial Sequence
  Description of Artificial Sequence: Synthetic oligonucleotide
agcucgggcuugugagaug

SEQ ID NO: 1481541 - RNA, 19 nt, Artificial Sequence
  Description of Artificial Sequence: Synthetic oligonucleotide
uaaugcggccuuggccaca

SEQ ID NO: 1481542 - RNA, 19 nt, Artificial Sequence
  Description of Artificial Sequence: Synthetic oligonucleotide
acccggcuauucucgggcu

SEQ ID NO: 1481543 - RNA, 19 nt, Artificial Sequence
  Description of Artificial Sequence: Synthetic oligonucleotide
caaggugggccgacaccuc

SEQ ID NO: 1481544 - RNA, 19 nt, Artificial Sequence
  Description of Artificial Sequence: Synthetic oligonucleotide
cacaucgucguugccugca

SEQ ID NO: 1481545 - RNA, 19 nt, Artificial Sequence
  Description of Artificial Sequence: Synthetic oligonucleotide
ccgccugccuggacgaugg

SEQ ID NO: 1481546 - RNA, 19 nt, Artificial Sequence
  Description of Artificial Sequence: Synthetic oligonucleotide
uccacgcggcagcccaggu

SEQ ID NO: 1481547 - RNA, 19 nt, Artificial Sequence
  Description of Artificial Sequence: Synthetic oligonucleotide
ccaggucaccccucuuucc

SEQ ID NO: 1481548 - RNA, 19 nt, Artificial Sequence
  Description of Artificial Sequence: Synthetic oligonucleotide
cucgggcuuccguaaggca

SEQ ID NO: 1481549 - RNA, 19 nt, Artificial Sequence
  Description of Artificial Sequence: Synthetic oligonucleotide
gccuccgaggucgaugacc

SEQ ID NO: 1481550 - RNA, 19 nt, Artificial Sequence
  Description of Artificial Sequence: Synthetic oligonucleotide
cacaucggcgugcuggcua

SEQ ID NO: 1481551 - RNA, 19 nt, Artificial Sequence
  Description of Artificial Sequence: Synthetic oligonucleotide
uggcuaagugucgggucau

SEQ ID NO: 1481552 - RNA, 19 nt, Artificial Sequence
  Description of Artificial Sequence: Synthetic oligonucleotide
accgccugccuggacgaug

SEQ ID NO: 1481553 - RNA, 19 nt, Artificial Sequence
  Description of Artificial Sequence: Synthetic oligonucleotide
ggacucccggguugucagg

SEQ ID NO: 1481554 - RNA, 19 nt, Artificial Sequence
  Description of Artificial Sequence: Synthetic oligonucleotide
ggacaccggccuccugugg

SEQ ID NO: 1481555 - RNA, 19 nt, Artificial Sequence
  Description of Artificial Sequence: Synthetic oligonucleotide
caggucaccccucuuuccu

SEQ ID NO: 1481556 - RNA, 19 nt, Artificial Sequence
  Description of Artificial Sequence: Synthetic oligonucleotide
gucucguaaugcggccuug

SEQ ID NO: 1481557 - RNA, 19 nt, Artificial Sequence
  Description of Artificial Sequence: Synthetic oligonucleotide
cuccacgcggcagcccagg

SEQ ID NO: 1481558 - RNA, 19 nt, Artificial Sequence
  Description of Artificial Sequence: Synthetic oligonucleotide
gggucacaaggaugccaag

SEQ ID NO: 1481559 - RNA, 19 nt, Artificial Sequence
  Description of Artificial Sequence: Synthetic oligonucleotide
gcucgggcuugugagauga

SEQ ID NO: 1481560 - RNA, 19 nt, Artificial Sequence
  Description of Artificial Sequence: Synthetic oligonucleotide
gugucgggucauggcagcc

SEQ ID NO: 1481561 - RNA, 19 nt, Artificial Sequence
  Description of Artificial Sequence: Synthetic oligonucleotide
caaagggcacucggauguc

SEQ ID NO: 1481562 - RNA, 19 nt, Artificial Sequence
  Description of Artificial Sequence: Synthetic oligonucleotide
gcagcgguuagcaggggca

SEQ ID NO: 1481563 - RNA, 19 nt, Artificial Sequence
  Description of Artificial Sequence: Synthetic oligonucleotide
cucgaagcuccacgcggca

SEQ ID NO: 1481564 - RNA, 19 nt, Artificial Sequence
  Description of Artificial Sequence: Synthetic oligonucleotide
cuccggcuuucaccaggcc

SEQ ID NO: 1481565 - RNA, 19 nt, Artificial Sequence
  Description of Artificial Sequence: Synthetic oligonucleotide
ccaaggucacggugccagg

SEQ ID NO: 1481566 - RNA, 19 nt, Artificial Sequence
  Description of Artificial Sequence: Synthetic oligonucleotide
gcccugccgauucuguuca

SEQ ID NO: 1481567 - RNA, 19 nt, Artificial Sequence
  Description of Artificial Sequence: Synthetic oligonucleotide
gcaaggugggccgacaccu

SEQ ID NO: 1481568 - RNA, 19 nt, Artificial Sequence
  Description of Artificial Sequence: Synthetic oligonucleotide
cugcgugaugcgcuuggaa

SEQ ID NO: 1481569 - RNA, 19 nt, Artificial Sequence
  Description of Artificial Sequence: Synthetic oligonucleotide
ggacaucaugugugggcuc

SEQ ID NO: 1481570 - RNA, 19 nt, Artificial Sequence
  Description of Artificial Sequence: Synthetic oligonucleotide
cgggcuuccguaaggcaag

SEQ ID NO: 1481571 - RNA, 19 nt, Artificial Sequence
  Description of Artificial Sequence: Synthetic oligonucleotide
ggcuauucucgggcuuccg

SEQ ID NO: 1481572 - RNA, 19 nt, Artificial Sequence
  Description of Artificial Sequence: Synthetic oligonucleotide
agagugccgcacagcuuug

SEQ ID NO: 1481573 - RNA, 19 nt, Artificial Sequence
  Description of Artificial Sequence: Synthetic oligonucleotide
ggcggcauucugugccagc

SEQ ID NO: 1481574 - RNA, 19 nt, Artificial Sequence
  Description of Artificial Sequence: Synthetic oligonucleotide
gcuauucucgggcuuccgu

SEQ ID NO: 1481575 - RNA, 19 nt, Artificial Sequence
  Description of Artificial Sequence: Synthetic oligonucleotide
ccuugugauucaaacugcu

SEQ ID NO: 1481576 - RNA, 19 nt, Artificial Sequence
  Description of Artificial Sequence: Synthetic oligonucleotide
ucgggcaaggugggccgac

SEQ ID NO: 1481577 - RNA, 19 nt, Artificial Sequence
  Description of Artificial Sequence: Synthetic oligonucleotide
ccugaccacaucggcgugc

SEQ ID NO: 1481578 - RNA, 19 nt, Artificial Sequence
  Description of Artificial Sequence: Synthetic oligonucleotide
gggcaaggugggccgacac

SEQ ID NO: 1481579 - RNA, 19 nt, Artificial Sequence
  Description of Artificial Sequence: Synthetic oligonucleotide
ccggguugucaggaaacgc

SEQ ID NO: 1481580 - RNA, 19 nt, Artificial Sequence
  Description of Artificial Sequence: Synthetic oligonucleotide
cauugagagccuggagcaa

SEQ ID NO: 1481581 - RNA, 19 nt, Artificial Sequence
  Description of Artificial Sequence: Synthetic oligonucleotide
uggucgcuuguggcagcca

SEQ ID NO: 1481582 - RNA, 19 nt, Artificial Sequence
  Description of Artificial Sequence: Synthetic oligonucleotide
ggccaaagggcacucggau

SEQ ID NO: 1481583 - RNA, 19 nt, Artificial Sequence
  Description of Artificial Sequence: Synthetic oligonucleotide
cccuggucgcuuguggcag

SEQ ID NO: 1481584 - RNA, 19 nt, Artificial Sequence
  Description of Artificial Sequence: Synthetic oligonucleotide
gcccuggucgcuuguggca

SEQ ID NO: 1481585 - RNA, 19 nt, Artificial Sequence
  Description of Artificial Sequence: Synthetic oligonucleotide
gggcuuccguaaggcaagg

SEQ ID NO: 1481586 - RNA, 19 nt, Artificial Sequence
  Description of Artificial Sequence: Synthetic oligonucleotide
gcggaucccacagcaggug

SEQ ID NO: 1481587 - RNA, 19 nt, Artificial Sequence
  Description of Artificial Sequence: Synthetic oligonucleotide
gcuacgggacaccaaguuu

SEQ ID NO: 1481588 - RNA, 19 nt, Artificial Sequence
  Description of Artificial Sequence: Synthetic oligonucleotide
cuguaccgccugccuggac

SEQ ID NO: 1481589 - RNA, 19 nt, Artificial Sequence
  Description of Artificial Sequence: Synthetic oligonucleotide
gccgagacccagucaggga

SEQ ID NO: 1481590 - RNA, 19 nt, Artificial Sequence
  Description of Artificial Sequence: Synthetic oligonucleotide
ccuccgaggucgaugaccu

SEQ ID NO: 1481591 - RNA, 19 nt, Artificial Sequence
  Description of Artificial Sequence: Synthetic oligonucleotide
ggcuaagugucgggucaug

SEQ ID NO: 1481592 - RNA, 19 nt, Artificial Sequence
  Description of Artificial Sequence: Synthetic oligonucleotide
ggucaccccucuuuccugu

SEQ ID NO: 1481593 - RNA, 19 nt, Artificial Sequence
  Description of Artificial Sequence: Synthetic oligonucleotide
caaggucacggugccaggu

SEQ ID NO: 1481594 - RNA, 19 nt, Artificial Sequence
  Description of Artificial Sequence: Synthetic oligonucleotide
ggucacggugccaggucac

SEQ ID NO: 1481595 - RNA, 19 nt, Artificial Sequence
  Description of Artificial Sequence: Synthetic oligonucleotide
ccuggucgcuuguggcagc

SEQ ID NO: 1481596 - RNA, 19 nt, Artificial Sequence
  Description of Artificial Sequence: Synthetic oligonucleotide
cagguaccggcuggccuuc

SEQ ID NO: 1481597 - RNA, 19 nt, Artificial Sequence
  Description of Artificial Sequence: Synthetic oligonucleotide
cuccgaggucgaugaccuc

SEQ ID NO: 1481598 - RNA, 19 nt, Artificial Sequence
  Description of Artificial Sequence: Synthetic oligonucleotide
ggcuacgggacaccaaguu

SEQ ID NO: 1481599 - RNA, 19 nt, Artificial Sequence
  Description of Artificial Sequence: Synthetic oligonucleotide
aucgggcaaggugggccga

SEQ ID NO: 1481600 - RNA, 19 nt, Artificial Sequence
  Description of Artificial Sequence: Synthetic oligonucleotide
gggugugcuuucauggccu

SEQ ID NO: 1481601 - RNA, 19 nt, Artificial Sequence
  Description of Artificial Sequence: Synthetic oligonucleotide
gcagggucacaaggaugcc

SEQ ID NO: 1481602 - RNA, 19 nt, Artificial Sequence
  Description of Artificial Sequence: Synthetic oligonucleotide
ccggcuauucucgggcuuc

SEQ ID NO: 1481603 - RNA, 19 nt, Artificial Sequence
  Description of Artificial Sequence: Synthetic oligonucleotide
cggguugucaggaaacgcu

SEQ ID NO: 1481604 - RNA, 19 nt, Artificial Sequence
  Description of Artificial Sequence: Synthetic oligonucleotide
cagggcgcugagcacuugu

SEQ ID NO: 1481605 - RNA, 19 nt, Artificial Sequence
  Description of Artificial Sequence: Synthetic oligonucleotide
gcgugcuggcuaugcugug

SEQ ID NO: 1481606 - RNA, 19 nt, Artificial Sequence
  Description of Artificial Sequence: Synthetic oligonucleotide
acgcucuggcagccucaau

SEQ ID NO: 1481607 - RNA, 19 nt, Artificial Sequence
  Description of Artificial Sequence: Synthetic oligonucleotide
ggucucguaaugcggccuu

SEQ ID NO: 1481608 - RNA, 19 nt, Artificial Sequence
  Description of Artificial Sequence: Synthetic oligonucleotide
gucgcuuguggcagccagu

SEQ ID NO: 1481609 - RNA, 19 nt, Artificial Sequence
  Description of Artificial Sequence: Synthetic oligonucleotide
gccgcacagcuuugcucac

SEQ ID NO: 1481610 - RNA, 19 nt, Artificial Sequence
  Description of Artificial Sequence: Synthetic oligonucleotide
caucggcgugcuggcuaug

SEQ ID NO: 1481611 - RNA, 19 nt, Artificial Sequence
  Description of Artificial Sequence: Synthetic oligonucleotide
ccgacaccuccuggggccg

SEQ ID NO: 1481612 - RNA, 19 nt, Artificial Sequence
  Description of Artificial Sequence: Synthetic oligonucleotide
caucgucguugccugcaau

SEQ ID NO: 1481613 - RNA, 19 nt, Artificial Sequence
  Description of Artificial Sequence: Synthetic oligonucleotide
ggggcaacacuccggcuuu

SEQ ID NO: 1481614 - RNA, 19 nt, Artificial Sequence
  Description of Artificial Sequence: Synthetic oligonucleotide
cacucaggacucccggguu

SEQ ID NO: 1481615 - RNA, 19 nt, Artificial Sequence
  Description of Artificial Sequence: Synthetic oligonucleotide
cguggccaaagggcacucg

SEQ ID NO: 1481616 - RNA, 19 nt, Artificial Sequence
  Description of Artificial Sequence: Synthetic oligonucleotide
uaccgccugccuggacgau

SEQ ID NO: 1481617 - RNA, 19 nt, Artificial Sequence
  Description of Artificial Sequence: Synthetic oligonucleotide
gccuggcuacgggacacca

SEQ ID NO: 1481618 - RNA, 19 nt, Artificial Sequence
  Description of Artificial Sequence: Synthetic oligonucleotide
agguaccggcuggccuucu

SEQ ID NO: 1481619 - RNA, 19 nt, Artificial Sequence
  Description of Artificial Sequence: Synthetic oligonucleotide
ggcguggccaaagggcacu

SEQ ID NO: 1481620 - RNA, 19 nt, Artificial Sequence
  Description of Artificial Sequence: Synthetic oligonucleotide
gugggaagcucgggcuugu

SEQ ID NO: 1481621 - RNA, 19 nt, Artificial Sequence
  Description of Artificial Sequence: Synthetic oligonucleotide
gcagcccaggucucguaau

SEQ ID NO: 1481622 - RNA, 19 nt, Artificial Sequence
  Description of Artificial Sequence: Synthetic oligonucleotide
cggaucccacagcagguga

SEQ ID NO: 1481623 - RNA, 19 nt, Artificial Sequence
  Description of Artificial Sequence: Synthetic oligonucleotide
ccuggcuacgggacaccaa

SEQ ID NO: 1481624 - RNA, 19 nt, Artificial Sequence
  Description of Artificial Sequence: Synthetic oligonucleotide
caggggcaacacuccggcu

SEQ ID NO: 1481625 - RNA, 19 nt, Artificial Sequence
  Description of Artificial Sequence: Synthetic oligonucleotide
ggccuccgaggucgaugac

SEQ ID NO: 1481626 - RNA, 19 nt, Artificial Sequence
  Description of Artificial Sequence: Synthetic oligonucleotide
cggcuauucucgggcuucc

SEQ ID NO: 1481627 - RNA, 19 nt, Artificial Sequence
  Description of Artificial Sequence: Synthetic oligonucleotide
gggugggaagcucgggcuu

SEQ ID NO: 1481628 - RNA, 19 nt, Artificial Sequence
  Description of Artificial Sequence: Synthetic oligonucleotide
gccuggacgauggcguccu

SEQ ID NO: 1481629 - RNA, 19 nt, Artificial Sequence
  Description of Artificial Sequence: Synthetic oligonucleotide
ccgaggucgaugaccuccu

SEQ ID NO: 1481630 - RNA, 19 nt, Artificial Sequence
  Description of Artificial Sequence: Synthetic oligonucleotide
ccggccuccugugggugug

SEQ ID NO: 1481631 - RNA, 19 nt, Artificial Sequence
  Description of Artificial Sequence: Synthetic oligonucleotide
gugccaggucaccccucuu

SEQ ID NO: 1481632 - RNA, 19 nt, Artificial Sequence
  Description of Artificial Sequence: Synthetic oligonucleotide
ccgcacagcuuugcucaca

SEQ ID NO: 1481633 - RNA, 19 nt, Artificial Sequence
  Description of Artificial Sequence: Synthetic oligonucleotide
cccggcuauucucgggcuu

SEQ ID NO: 1481634 - RNA, 19 nt, Artificial Sequence
  Description of Artificial Sequence: Synthetic oligonucleotide
ccacaucggcgugcuggcu

SEQ ID NO: 1481635 - RNA, 19 nt, Artificial Sequence
  Description of Artificial Sequence: Synthetic oligonucleotide
ccacaaugacccggcuauu

SEQ ID NO: 1481636 - RNA, 19 nt, Artificial Sequence
  Description of Artificial Sequence: Synthetic oligonucleotide
ugauaaaauagccaaaggc

SEQ ID NO: 1481637 - RNA, 19 nt, Artificial Sequence
  Description of Artificial Sequence: Synthetic oligonucleotide
aaagacaugauguuucccg

SEQ ID NO: 1481638 - RNA, 19 nt, Artificial Sequence
  Description of Artificial Sequence: Synthetic oligonucleotide
aaagucaugacauugcuga

SEQ ID NO: 1481639 - RNA, 19 nt, Artificial Sequence
  Description of Artificial Sequence: Synthetic oligonucleotide
ucagcuguagguaauaccg

SEQ ID NO: 1481640 - RNA, 19 nt, Artificial Sequence
  Description of Artificial Sequence: Synthetic oligonucleotide
aagaugaugaaccaggcgu

SEQ ID NO: 1481641 - RNA, 19 nt, Artificial Sequence
  Description of Artificial Sequence: Synthetic oligonucleotide
aaaugaguuaaugagcacg

SEQ ID NO: 1481642 - RNA, 19 nt, Artificial Sequence
  Description of Artificial Sequence: Synthetic oligonucleotide
aaagaguugaggcagguga

SEQ ID NO: 1481643 - RNA, 19 nt, Artificial Sequence
  Description of Artificial Sequence: Synthetic oligonucleotide
auaagauccaacuuggucu

SEQ ID NO: 1481644 - RNA, 19 nt, Artificial Sequence
  Description of Artificial Sequence: Synthetic oligonucleotide
aguaguagcucuuccaggc

SEQ ID NO: 1481645 - RNA, 19 nt, Artificial Sequence
  Description of Artificial Sequence: Synthetic oligonucleotide
gaugaaaacgagcaggaag

SEQ ID NO: 1481646 - RNA, 19 nt, Artificial Sequence
  Description of Artificial Sequence: Synthetic oligonucleotide
acugauaagauccaacuug

SEQ ID NO: 1481647 - RNA, 19 nt, Artificial Sequence
  Description of Artificial Sequence: Synthetic oligonucleotide
gauccgaacagacugagag

SEQ ID NO: 1481648 - RNA, 19 nt, Artificial Sequence
  Description of Artificial Sequence: Synthetic oligonucleotide
auagaauuccagccgaggc

SEQ ID NO: 1481649 - RNA, 19 nt, Artificial Sequence
  Description of Artificial Sequence: Synthetic oligonucleotide
auagcugugagacuccggc

SEQ ID NO: 1481650 - RNA, 19 nt, Artificial Sequence
  Description of Artificial Sequence: Synthetic oligonucleotide
augagcacgaucuugauca

SEQ ID NO: 1481651 - RNA, 19 nt, Artificial Sequence
  Description of Artificial Sequence: Synthetic oligonucleotide
auaaacacgauccuggaga

SEQ ID NO: 1481652 - RNA, 19 nt, Artificial Sequence
  Description of Artificial Sequence: Synthetic oligonucleotide
aggggaauaaacacgaucc

SEQ ID NO: 1481653 - RNA, 19 nt, Artificial Sequence
  Description of Artificial Sequence: Synthetic oligonucleotide
aaaacgagcaggaagcggg

SEQ ID NO: 1481654 - RNA, 19 nt, Artificial Sequence
  Description of Artificial Sequence: Synthetic oligonucleotide
acauugaaauuuaagaaac

SEQ ID NO: 1481655 - RNA, 19 nt, Artificial Sequence
  Description of Artificial Sequence: Synthetic oligonucleotide
augaaaacgagcaggaagc

SEQ ID NO: 1481656 - RNA, 19 nt, Artificial Sequence
  Description of Artificial Sequence: Synthetic oligonucleotide
auaccgauagaauuccagc

SEQ ID NO: 1481657 - RNA, 19 nt, Artificial Sequence
  Description of Artificial Sequence: Synthetic oligonucleotide
ugugauaaaauagccaaag

SEQ ID NO: 1481658 - RNA, 19 nt, Artificial Sequence
  Description of Artificial Sequence: Synthetic oligonucleotide
augcaaauagcugugagac

SEQ ID NO: 1481659 - RNA, 19 nt, Artificial Sequence
  Description of Artificial Sequence: Synthetic oligonucleotide
aaguauagccuugauagag

SEQ ID NO: 1481660 - RNA, 19 nt, Artificial Sequence
  Description of Artificial Sequence: Synthetic oligonucleotide
ucugucugucccuacaugg

SEQ ID NO: 1481661 - RNA, 19 nt, Artificial Sequence
  Description of Artificial Sequence: Synthetic oligonucleotide
cuuugcauagcaaaagcag

SEQ ID NO: 1481662 - RNA, 19 nt, Artificial Sequence
  Description of Artificial Sequence: Synthetic oligonucleotide
caauacagcucccagagcc

SEQ ID NO: 1481663 - RNA, 19 nt, Artificial Sequence
  Description of Artificial Sequence: Synthetic oligonucleotide
aaaugaagcagacggacaa

SEQ ID NO: 1481664 - RNA, 19 nt, Artificial Sequence
  Description of Artificial Sequence: Synthetic oligonucleotide
aaugagcacgaucuugauc

SEQ ID NO: 1481665 - RNA, 19 nt, Artificial Sequence
  Description of Artificial Sequence: Synthetic oligonucleotide
uuacugauaagauccaacu

SEQ ID NO: 1481666 - RNA, 19 nt, Artificial Sequence
  Description of Artificial Sequence: Synthetic oligonucleotide
cuggagaccaccaaaacug

SEQ ID NO: 1481667 - RNA, 19 nt, Artificial Sequence
  Description of Artificial Sequence: Synthetic oligonucleotide
agccauacugccuuauacc

SEQ ID NO: 1481668 - RNA, 19 nt, Artificial Sequence
  Description of Artificial Sequence: Synthetic oligonucleotide
ugcaaaacggcaccaaaug

SEQ ID NO: 1481669 - RNA, 19 nt, Artificial Sequence
  Description of Artificial Sequence: Synthetic oligonucleotide
agagcugcgagcugguacc

SEQ ID NO: 1481670 - RNA, 19 nt, Artificial Sequence
  Description of Artificial Sequence: Synthetic oligonucleotide
guaguuggcaggcaggacg

SEQ ID NO: 1481671 - RNA, 19 nt, Artificial Sequence
  Description of Artificial Sequence: Synthetic oligonucleotide
aaguaguagcucuuccagg

SEQ ID NO: 1481672 - RNA, 19 nt, Artificial Sequence
  Description of Artificial Sequence: Synthetic oligonucleotide
caaaacggcaccaaaugag

SEQ ID NO: 1481673 - RNA, 19 nt, Artificial Sequence
  Description of Artificial Sequence: Synthetic oligonucleotide
aaaggcacuuucugacagc

SEQ ID NO: 1481674 - RNA, 19 nt, Artificial Sequence
  Description of Artificial Sequence: Synthetic oligonucleotide
gauaagauccaacuugguc

SEQ ID NO: 1481675 - RNA, 19 nt, Artificial Sequence
  Description of Artificial Sequence: Synthetic oligonucleotide
gacagugaaaaugaagcag

SEQ ID NO: 1481676 - RNA, 19 nt, Artificial Sequence
  Description of Artificial Sequence: Synthetic oligonucleotide
accgauagaauuccagccg

SEQ ID NO: 1481677 - RNA, 19 nt, Artificial Sequence
  Description of Artificial Sequence: Synthetic oligonucleotide
cuguagguaauaccgauag

SEQ ID NO: 1481678 - RNA, 19 nt, Artificial Sequence
  Description of Artificial Sequence: Synthetic oligonucleotide
aauaccgauagaauuccag

SEQ ID NO: 1481679 - RNA, 19 nt, Artificial Sequence
  Description of Artificial Sequence: Synthetic oligonucleotide
accaccaaaacuggcaacc

SEQ ID NO: 1481680 - RNA, 19 nt, Artificial Sequence
  Description of Artificial Sequence: Synthetic oligonucleotide
acaggaaggacaauacagc

SEQ ID NO: 1481681 - RNA, 19 nt, Artificial Sequence
  Description of Artificial Sequence: Synthetic oligonucleotide
ggcaacauggcacacaaag

SEQ ID NO: 1481682 - RNA, 19 nt, Artificial Sequence
  Description of Artificial Sequence: Synthetic oligonucleotide
aaaccucuggaccccacuc

SEQ ID NO: 1481683 - RNA, 19 nt, Artificial Sequence
  Description of Artificial Sequence: Synthetic oligonucleotide
agaucauggccacagaggu

SEQ ID NO: 1481684 - RNA, 19 nt, Artificial Sequence
  Description of Artificial Sequence: Synthetic oligonucleotide
uaccgauagaauuccagcc

SEQ ID NO: 1481685 - RNA, 19 nt, Artificial Sequence
  Description of Artificial Sequence: Synthetic oligonucleotide
ggaauaaacacgauccugg

SEQ ID NO: 1481686 - RNA, 19 nt, Artificial Sequence
  Description of Artificial Sequence: Synthetic oligonucleotide
cagaagaaagccaagguca

SEQ ID NO: 1481687 - RNA, 19 nt, Artificial Sequence
  Description of Artificial Sequence: Synthetic oligonucleotide
aacaacccaauggugacag

SEQ ID NO: 1481688 - RNA, 19 nt, Artificial Sequence
  Description of Artificial Sequence: Synthetic oligonucleotide
ucaaccucaguagucacag

SEQ ID NO: 1481689 - RNA, 19 nt, Artificial Sequence
  Description of Artificial Sequence: Synthetic oligonucleotide
ugaguuaaugagcacgauc

SEQ ID NO: 1481690 - RNA, 19 nt, Artificial Sequence
  Description of Artificial Sequence: Synthetic oligonucleotide
cugagagauccucugaugc

SEQ ID NO: 1481691 - RNA, 19 nt, Artificial Sequence
  Description of Artificial Sequence: Synthetic oligonucleotide
uauagccuugauagagugg

SEQ ID NO: 1481692 - RNA, 19 nt, Artificial Sequence
  Description of Artificial Sequence: Synthetic oligonucleotide
acugagaggacuucgcucu

SEQ ID NO: 1481693 - RNA, 19 nt, Artificial Sequence
  Description of Artificial Sequence: Synthetic oligonucleotide
uagaauuccagccgaggca

SEQ ID NO: 1481694 - RNA, 19 nt, Artificial Sequence
  Description of Artificial Sequence: Synthetic oligonucleotide
aaugaguuaaugagcacga

SEQ ID NO: 1481695 - RNA, 19 nt, Artificial Sequence
  Description of Artificial Sequence: Synthetic oligonucleotide
acagaucauggccacagag

SEQ ID NO: 1481696 - RNA, 19 nt, Artificial Sequence
  Description of Artificial Sequence: Synthetic oligonucleotide
cacaaagucaugacauugc

SEQ ID NO: 1481697 - RNA, 19 nt, Artificial Sequence
  Description of Artificial Sequence: Synthetic oligonucleotide
gauagaauuccagccgagg

SEQ ID NO: 1481698 - RNA, 19 nt, Artificial Sequence
  Description of Artificial Sequence: Synthetic oligonucleotide
uccuuaccaggccacaugc

SEQ ID NO: 1481699 - RNA, 19 nt, Artificial Sequence
  Description of Artificial Sequence: Synthetic oligonucleotide
agaggcuauccuuaccagg

SEQ ID NO: 1481700 - RNA, 19 nt, Artificial Sequence
  Description of Artificial Sequence: Synthetic oligonucleotide
gagacuccggccuagccag

SEQ ID NO: 1481701 - RNA, 19 nt, Artificial Sequence
  Description of Artificial Sequence: Synthetic oligonucleotide
auagccuugauagaguggu

SEQ ID NO: 1481702 - RNA, 19 nt, Artificial Sequence
  Description of Artificial Sequence: Synthetic oligonucleotide
ucuccuuuacugauaagau

SEQ ID NO: 1481703 - RNA, 19 nt, Artificial Sequence
  Description of Artificial Sequence: Synthetic oligonucleotide
ucacuuugcauagcaaaag

SEQ ID NO: 1481704 - RNA, 19 nt, Artificial Sequence
  Description of Artificial Sequence: Synthetic oligonucleotide
aaccagaggcuauccuuac

SEQ ID NO: 1481705 - RNA, 19 nt, Artificial Sequence
  Description of Artificial Sequence: Synthetic oligonucleotide
guagguaauaccgauagaa

SEQ ID NO: 1481706 - RNA, 19 nt, Artificial Sequence
  Description of Artificial Sequence: Synthetic oligonucleotide
aggacugagauauucuuaa

SEQ ID NO: 1481707 - RNA, 19 nt, Artificial Sequence
  Description of Artificial Sequence: Synthetic oligonucleotide
acaugcaaauagcugugag

SEQ ID NO: 1481708 - RNA, 19 nt, Artificial Sequence
  Description of Artificial Sequence: Synthetic oligonucleotide
guaauaccgauagaauucc

SEQ ID NO: 1481709 - RNA, 19 nt, Artificial Sequence
  Description of Artificial Sequence: Synthetic oligonucleotide
gaguuaaugagcacgaucu

SEQ ID NO: 1481710 - RNA, 19 nt, Artificial Sequence
  Description of Artificial Sequence: Synthetic oligonucleotide
ugcuugguuugucaguggc

SEQ ID NO: 1481711 - RNA, 19 nt, Artificial Sequence
  Description of Artificial Sequence: Synthetic oligonucleotide
gauguuucccgcugucucc

SEQ ID NO: 1481712 - RNA, 19 nt, Artificial Sequence
  Description of Artificial Sequence: Synthetic oligonucleotide
ugcauagcaaaagcagggg

SEQ ID NO: 1481713 - RNA, 19 nt, Artificial Sequence
  Description of Artificial Sequence: Synthetic oligonucleotide
aaaacggcaccaaaugagu

SEQ ID NO: 1481714 - RNA, 19 nt, Artificial Sequence
  Description of Artificial Sequence: Synthetic oligonucleotide
aaaauagccaaaggcacuu

SEQ ID NO: 1481715 - RNA, 19 nt, Artificial Sequence
  Description of Artificial Sequence: Synthetic oligonucleotide
guauagccuugauagagug

SEQ ID NO: 1481716 - RNA, 19 nt, Artificial Sequence
  Description of Artificial Sequence: Synthetic oligonucleotide
uacugaguugcugucauga

SEQ ID NO: 1481717 - RNA, 19 nt, Artificial Sequence
  Description of Artificial Sequence: Synthetic oligonucleotide
gaaaacgagcaggaagcgg

SEQ ID NO: 1481718 - RNA, 19 nt, Artificial Sequence
  Description of Artificial Sequence: Synthetic oligonucleotide
ugauguuucccgcugucuc

SEQ ID NO: 1481719 - RNA, 19 nt, Artificial Sequence
  Description of Artificial Sequence: Synthetic oligonucleotide
auucaaccucaguagucac

SEQ ID NO: 1481720 - RNA, 19 nt, Artificial Sequence
  Description of Artificial Sequence: Synthetic oligonucleotide
aauuccaggggagcaaugu

SEQ ID NO: 1481721 - RNA, 19 nt, Artificial Sequence
  Description of Artificial Sequence: Synthetic oligonucleotide
cucuggaccccacucaucc

SEQ ID NO: 1481722 - RNA, 19 nt, Artificial Sequence
  Description of Artificial Sequence: Synthetic oligonucleotide
aagauucacuuugcauagc

SEQ ID NO: 1481723 - RNA, 19 nt, Artificial Sequence
  Description of Artificial Sequence: Synthetic oligonucleotide
uagguaauaccgauagaau

SEQ ID NO: 1481724 - RNA, 19 nt, Artificial Sequence
  Description of Artificial Sequence: Synthetic oligonucleotide
ucagccagaagagcaaacc

SEQ ID NO: 1481725 - RNA, 19 nt, Artificial Sequence
  Description of Artificial Sequence: Synthetic oligonucleotide
augcagaaaagaguugagg

SEQ ID NO: 1481726 - RNA, 19 nt, Artificial Sequence
  Description of Artificial Sequence: Synthetic oligonucleotide
gaugaugaaccaggcgucg

SEQ ID NO: 1481727 - RNA, 19 nt, Artificial Sequence
  Description of Artificial Sequence: Synthetic oligonucleotide
aggaaugaaguaguagcuc

SEQ ID NO: 1481728 - RNA, 19 nt, Artificial Sequence
  Description of Artificial Sequence: Synthetic oligonucleotide
ugucccuacauggucaccc

SEQ ID NO: 1481729 - RNA, 19 nt, Artificial Sequence
  Description of Artificial Sequence: Synthetic oligonucleotide
agccagguaacacacuaug

SEQ ID NO: 1481730 - RNA, 19 nt, Artificial Sequence
  Description of Artificial Sequence: Synthetic oligonucleotide
gucagagggccccucaagg

SEQ ID NO: 1481731 - RNA, 19 nt, Artificial Sequence
  Description of Artificial Sequence: Synthetic oligonucleotide
uugcaaaacggcaccaaau

SEQ ID NO: 1481732 - RNA, 19 nt, Artificial Sequence
  Description of Artificial Sequence: Synthetic oligonucleotide
aguagucacagcagggaac

SEQ ID NO: 1481733 - RNA, 19 nt, Artificial Sequence
  Description of Artificial Sequence: Synthetic oligonucleotide
gagccauacugccuuauac

SEQ ID NO: 1481734 - RNA, 19 nt, Artificial Sequence
  Description of Artificial Sequence: Synthetic oligonucleotide
uccgaacagacugagagau

SEQ ID NO: 1481735 - RNA, 19 nt, Artificial Sequence
  Description of Artificial Sequence: Synthetic oligonucleotide
gacacauucugguacaggu

SEQ ID NO: 1481736 - RNA, 19 nt, Artificial Sequence
  Description of Artificial Sequence: Synthetic oligonucleotide
agacggacaaagccaggac

SEQ ID NO: 1481737 - RNA, 19 nt, Artificial Sequence
  Description of Artificial Sequence: Synthetic oligonucleotide
uccucugaugcagaaaaga

SEQ ID NO: 1481738 - RNA, 19 nt, Artificial Sequence
  Description of Artificial Sequence: Synthetic oligonucleotide
aacggcaccaaaugaguua

SEQ ID NO: 1481739 - RNA, 19 nt, Artificial Sequence
  Description of Artificial Sequence: Synthetic oligonucleotide
gguaauaccgauagaauuc

SEQ ID NO: 1481740 - RNA, 19 nt, Artificial Sequence
  Description of Artificial Sequence: Synthetic oligonucleotide
uucaaccucaguagucaca

SEQ ID NO: 1481741 - RNA, 19 nt, Artificial Sequence
  Description of Artificial Sequence: Synthetic oligonucleotide
acuauggccaagaugacaa

SEQ ID NO: 1481742 - RNA, 19 nt, Artificial Sequence
  Description of Artificial Sequence: Synthetic oligonucleotide
agccacaggaaugaaguag

SEQ ID NO: 1481743 - RNA, 19 nt, Artificial Sequence
  Description of Artificial Sequence: Synthetic oligonucleotide
cuggcuugcaaaacggcac

SEQ ID NO: 1481744 - RNA, 19 nt, Artificial Sequence
  Description of Artificial Sequence: Synthetic oligonucleotide
caugaagaugaugaaccag

SEQ ID NO: 1481745 - RNA, 19 nt, Artificial Sequence
  Description of Artificial Sequence: Synthetic oligonucleotide
gaugcagaaaagaguugag

SEQ ID NO: 1481746 - RNA, 19 nt, Artificial Sequence
  Description of Artificial Sequence: Synthetic oligonucleotide
aaacgagcaggaagcgggc

SEQ ID NO: 1481747 - RNA, 19 nt, Artificial Sequence
  Description of Artificial Sequence: Synthetic oligonucleotide
cucaagguucagcuguagg

SEQ ID NO: 1481748 - RNA, 19 nt, Artificial Sequence
  Description of Artificial Sequence: Synthetic oligonucleotide
cugguacagguccaggcgg

SEQ ID NO: 1481749 - RNA, 19 nt, Artificial Sequence
  Description of Artificial Sequence: Synthetic oligonucleotide
aagcagacggacaaagcca

SEQ ID NO: 1481750 - RNA, 19 nt, Artificial Sequence
  Description of Artificial Sequence: Synthetic oligonucleotide
gacugagauauucuuaagu

SEQ ID NO: 1481751 - RNA, 19 nt, Artificial Sequence
  Description of Artificial Sequence: Synthetic oligonucleotide
uacagguccaggcgguuug

SEQ ID NO: 1481752 - RNA, 19 nt, Artificial Sequence
  Description of Artificial Sequence: Synthetic oligonucleotide
agaugaugaaccaggcguc

SEQ ID NO: 1481753 - RNA, 19 nt, Artificial Sequence
  Description of Artificial Sequence: Synthetic oligonucleotide
accagaggcuauccuuacc

SEQ ID NO: 1481754 - RNA, 19 nt, Artificial Sequence
  Description of Artificial Sequence: Synthetic oligonucleotide
ucguggguaaagauucacu

SEQ ID NO: 1481755 - RNA, 19 nt, Artificial Sequence
  Description of Artificial Sequence: Synthetic oligonucleotide
agcugugagacuccggccu

SEQ ID NO: 1481756 - RNA, 19 nt, Artificial Sequence
  Description of Artificial Sequence: Synthetic oligonucleotide
gaaagucagggcauccacc

SEQ ID NO: 1481757 - RNA, 19 nt, Artificial Sequence
  Description of Artificial Sequence: Synthetic oligonucleotide
uccucuccuuuacugauaa

SEQ ID NO: 1481758 - RNA, 19 nt, Artificial Sequence
  Description of Artificial Sequence: Synthetic oligonucleotide
caaauagcugugagacucc

SEQ ID NO: 1481759 - RNA, 19 nt, Artificial Sequence
  Description of Artificial Sequence: Synthetic oligonucleotide
uguagguaauaccgauaga

SEQ ID NO: 1481760 - RNA, 19 nt, Artificial Sequence
  Description of Artificial Sequence: Synthetic oligonucleotide
cucuccuuuacugauaaga

SEQ ID NO: 1481761 - RNA, 19 nt, Artificial Sequence
  Description of Artificial Sequence: Synthetic oligonucleotide
agaccaaagaggcuggcuu

SEQ ID NO: 1481762 - RNA, 19 nt, Artificial Sequence
  Description of Artificial Sequence: Synthetic oligonucleotide
acuuucugacagcuuggag

SEQ ID NO: 1481763 - RNA, 19 nt, Artificial Sequence
  Description of Artificial Sequence: Synthetic oligonucleotide
aggacuucgcucuggcaag

SEQ ID NO: 1481764 - RNA, 19 nt, Artificial Sequence
  Description of Artificial Sequence: Synthetic oligonucleotide
caugcaaauagcugugaga

SEQ ID NO: 1481765 - RNA, 19 nt, Artificial Sequence
  Description of Artificial Sequence: Synthetic oligonucleotide
uagccguuggagaaggcaa

SEQ ID NO: 1481766 - RNA, 19 nt, Artificial Sequence
  Description of Artificial Sequence: Synthetic oligonucleotide
acuuugcauagcaaaagca

SEQ ID NO: 1481767 - RNA, 19 nt, Artificial Sequence
  Description of Artificial Sequence: Synthetic oligonucleotide
aaccucuggaccccacuca

SEQ ID NO: 1481768 - RNA, 19 nt, Artificial Sequence
  Description of Artificial Sequence: Synthetic oligonucleotide
uuaccaggccacaugcaaa

SEQ ID NO: 1481769 - RNA, 19 nt, Artificial Sequence
  Description of Artificial Sequence: Synthetic oligonucleotide
gcaaauagcugugagacuc

SEQ ID NO: 1481770 - RNA, 19 nt, Artificial Sequence
  Description of Artificial Sequence: Synthetic oligonucleotide
gaagcgggcaggcagugca

SEQ ID NO: 1481771 - RNA, 19 nt, Artificial Sequence
  Description of Artificial Sequence: Synthetic oligonucleotide
uaacacacuauggccaaga

SEQ ID NO: 1481772 - RNA, 19 nt, Artificial Sequence
  Description of Artificial Sequence: Synthetic oligonucleotide
caggacgccagccagacca

SEQ ID NO: 1481773 - RNA, 19 nt, Artificial Sequence
  Description of Artificial Sequence: Synthetic oligonucleotide
uucuuaaguauagccuuga

SEQ ID NO: 1481774 - RNA, 19 nt, Artificial Sequence
  Description of Artificial Sequence: Synthetic oligonucleotide
uaauaccgauagaauucca

SEQ ID NO: 1481775 - RNA, 19 nt, Artificial Sequence
  Description of Artificial Sequence: Synthetic oligonucleotide
caggggaauaaacacgauc

SEQ ID NO: 1481776 - RNA, 19 nt, Artificial Sequence
  Description of Artificial Sequence: Synthetic oligonucleotide
cagacugagagauccucug

SEQ ID NO: 1481777 - RNA, 19 nt, Artificial Sequence
  Description of Artificial Sequence: Synthetic oligonucleotide
aagcacaugcagaggcugg

SEQ ID NO: 1481778 - RNA, 19 nt, Artificial Sequence
  Description of Artificial Sequence: Synthetic oligonucleotide
augaaccaggcgucguggg

SEQ ID NO: 1481779 - RNA, 19 nt, Artificial Sequence
  Description of Artificial Sequence: Synthetic oligonucleotide
auggucacccaagugcccg

SEQ ID NO: 1481780 - RNA, 19 nt, Artificial Sequence
  Description of Artificial Sequence: Synthetic oligonucleotide
cuguguaguuggcaggcag

SEQ ID NO: 1481781 - RNA, 19 nt, Artificial Sequence
  Description of Artificial Sequence: Synthetic oligonucleotide
ucuuaaguauagccuugau

SEQ ID NO: 1481782 - RNA, 19 nt, Artificial Sequence
  Description of Artificial Sequence: Synthetic oligonucleotide
agguaacacacuauggcca

SEQ ID NO: 1481783 - RNA, 19 nt, Artificial Sequence
  Description of Artificial Sequence: Synthetic oligonucleotide
agcuguagguaauaccgau

SEQ ID NO: 1481784 - RNA, 19 nt, Artificial Sequence
  Description of Artificial Sequence: Synthetic oligonucleotide
ucagagggccccucaaggu

SEQ ID NO: 1481785 - RNA, 19 nt, Artificial Sequence
  Description of Artificial Sequence: Synthetic oligonucleotide
auggcacacaaagucauga

SEQ ID NO: 1481786 - RNA, 19 nt, Artificial Sequence
  Description of Artificial Sequence: Synthetic oligonucleotide
aauacagcucccagagcca

SEQ ID NO: 1481787 - RNA, 19 nt, Artificial Sequence
  Description of Artificial Sequence: Synthetic oligonucleotide
uauggccaagaugacaaau

SEQ ID NO: 1481788 - RNA, 19 nt, Artificial Sequence
  Description of Artificial Sequence: Synthetic oligonucleotide
cuugacuuucuugggcccg

SEQ ID NO: 1481789 - RNA, 19 nt, Artificial Sequence
  Description of Artificial Sequence: Synthetic oligonucleotide
auccuuaccaggccacaug

SEQ ID NO: 1481790 - RNA, 19 nt, Artificial Sequence
  Description of Artificial Sequence: Synthetic oligonucleotide
caggcagggaugaaaacga

SEQ ID NO: 1481791 - RNA, 19 nt, Artificial Sequence
  Description of Artificial Sequence: Synthetic oligonucleotide
agcagacggacaaagccag

SEQ ID NO: 1481792 - RNA, 19 nt, Artificial Sequence
  Description of Artificial Sequence: Synthetic oligonucleotide
uccuggagaccaccaaaac

SEQ ID NO: 1481793 - RNA, 19 nt, Artificial Sequence
  Description of Artificial Sequence: Synthetic oligonucleotide
acggacaaagccaggacug

SEQ ID NO: 1481794 - RNA, 19 nt, Artificial Sequence
  Description of Artificial Sequence: Synthetic oligonucleotide
uucgcucuggcaaggucac

SEQ ID NO: 1481795 - RNA, 19 nt, Artificial Sequence
  Description of Artificial Sequence: Synthetic oligonucleotide
acuggugccggcaaugcug

SEQ ID NO: 1481796 - RNA, 19 nt, Artificial Sequence
  Description of Artificial Sequence: Synthetic oligonucleotide
ggaacaacccaauggugac

SEQ ID NO: 1481797 - RNA, 19 nt, Artificial Sequence
  Description of Artificial Sequence: Synthetic oligonucleotide
agugcccguaacaggaagg

SEQ ID NO: 1481798 - RNA, 19 nt, Artificial Sequence
  Description of Artificial Sequence: Synthetic oligonucleotide
gcagugaugaggaacacca

SEQ ID NO: 1481799 - RNA, 19 nt, Artificial Sequence
  Description of Artificial Sequence: Synthetic oligonucleotide
cacugagaggacuucgcuc

SEQ ID NO: 1481800 - RNA, 19 nt, Artificial Sequence
  Description of Artificial Sequence: Synthetic oligonucleotide
ugucaguggcugaggacac

SEQ ID NO: 1481801 - RNA, 19 nt, Artificial Sequence
  Description of Artificial Sequence: Synthetic oligonucleotide
aguauagccuugauagagu

SEQ ID NO: 1481802 - RNA, 19 nt, Artificial Sequence
  Description of Artificial Sequence: Synthetic oligonucleotide
uggcacacaaagucaugac

SEQ ID NO: 1481803 - RNA, 19 nt, Artificial Sequence
  Description of Artificial Sequence: Synthetic oligonucleotide
auguuucccgcugucuccg

SEQ ID NO: 1481804 - RNA, 19 nt, Artificial Sequence
  Description of Artificial Sequence: Synthetic oligonucleotide
acccaagugcccguaacag

SEQ ID NO: 1481805 - RNA, 19 nt, Artificial Sequence
  Description of Artificial Sequence: Synthetic oligonucleotide
uggguggagagcugcgagc

SEQ ID NO: 1481806 - RNA, 19 nt, Artificial Sequence
  Description of Artificial Sequence: Synthetic oligonucleotide
uggcacugagaggacuucg

SEQ ID NO: 1481807 - RNA, 19 nt, Artificial Sequence
  Description of Artificial Sequence: Synthetic oligonucleotide
gguaaagauucacuuugca

SEQ ID NO: 1481808 - RNA, 19 nt, Artificial Sequence
  Description of Artificial Sequence: Synthetic oligonucleotide
cuuaccaggccacaugcaa

SEQ ID NO: 1481809 - RNA, 19 nt, Artificial Sequence
  Description of Artificial Sequence: Synthetic oligonucleotide
gaccccacucaucccaggc

SEQ ID NO: 1481810 - RNA, 19 nt, Artificial Sequence
  Description of Artificial Sequence: Synthetic oligonucleotide
acaugauguuucccgcugu

SEQ ID NO: 1481811 - RNA, 19 nt, Artificial Sequence
  Description of Artificial Sequence: Synthetic oligonucleotide
cuacauggucacccaagug

SEQ ID NO: 1481812 - RNA, 19 nt, Artificial Sequence
  Description of Artificial Sequence: Synthetic oligonucleotide
cgaacagacugagagaucc

SEQ ID NO: 1481813 - RNA, 19 nt, Artificial Sequence
  Description of Artificial Sequence: Synthetic oligonucleotide
ccaggcagggaugaaaacg

SEQ ID NO: 1481814 - RNA, 19 nt, Artificial Sequence
  Description of Artificial Sequence: Synthetic oligonucleotide
cagaggcuauccuuaccag

SEQ ID NO: 1481815 - RNA, 19 nt, Artificial Sequence
  Description of Artificial Sequence: Synthetic oligonucleotide
agguagccguuggagaagg

SEQ ID NO: 1481816 - RNA, 19 nt, Artificial Sequence
  Description of Artificial Sequence: Synthetic oligonucleotide
caggcgguuugugaaauac

SEQ ID NO: 1481817 - RNA, 19 nt, Artificial Sequence
  Description of Artificial Sequence: Synthetic oligonucleotide
uuucaccaagauggcagug

SEQ ID NO: 1481818 - RNA, 19 nt, Artificial Sequence
  Description of Artificial Sequence: Synthetic oligonucleotide
ccgaagcacaugcagaggc

SEQ ID NO: 1481819 - RNA, 19 nt, Artificial Sequence
  Description of Artificial Sequence: Synthetic oligonucleotide
acuggcaauggcacagauc

SEQ ID NO: 1481820 - RNA, 19 nt, Artificial Sequence
  Description of Artificial Sequence: Synthetic oligonucleotide
agagggccccucaagguuc

SEQ ID NO: 1481821 - RNA, 19 nt, Artificial Sequence
  Description of Artificial Sequence: Synthetic oligonucleotide
uugguuccucuccuuuacu

SEQ ID NO: 1481822 - RNA, 19 nt, Artificial Sequence
  Description of Artificial Sequence: Synthetic oligonucleotide
aguuaaugagcacgaucuu

SEQ ID NO: 1481823 - RNA, 19 nt, Artificial Sequence
  Description of Artificial Sequence: Synthetic oligonucleotide
uaaugagcacgaucuugau

SEQ ID NO: 1481824 - RNA, 19 nt, Artificial Sequence
  Description of Artificial Sequence: Synthetic oligonucleotide
aggauccgaacagacugag

SEQ ID NO: 1481825 - RNA, 19 nt, Artificial Sequence
  Description of Artificial Sequence: Synthetic oligonucleotide
ugagccauacugccuuaua

SEQ ID NO: 1481826 - RNA, 19 nt, Artificial Sequence
  Description of Artificial Sequence: Synthetic oligonucleotide
gaccaccaaaacuggcaac

SEQ ID NO: 1481827 - RNA, 19 nt, Artificial Sequence
  Description of Artificial Sequence: Synthetic oligonucleotide
cauggucacccaagugccc

SEQ ID NO: 1481828 - RNA, 19 nt, Artificial Sequence
  Description of Artificial Sequence: Synthetic oligonucleotide
caaggucagccagaagagc

SEQ ID NO: 1481829 - RNA, 19 nt, Artificial Sequence
  Description of Artificial Sequence: Synthetic oligonucleotide
ucaguggcugaggacacau

SEQ ID NO: 1481830 - RNA, 19 nt, Artificial Sequence
  Description of Artificial Sequence: Synthetic oligonucleotide
ucuccuggucagagggccc

SEQ ID NO: 1481831 - RNA, 19 nt, Artificial Sequence
  Description of Artificial Sequence: Synthetic oligonucleotide
gcaaaacggcaccaaauga

SEQ ID NO: 1481832 - RNA, 19 nt, Artificial Sequence
  Description of Artificial Sequence: Synthetic oligonucleotide
cuugcaaaacggcaccaaa

SEQ ID NO: 1481833 - RNA, 19 nt, Artificial Sequence
  Description of Artificial Sequence: Synthetic oligonucleotide
ggcaagguagccguuggag

SEQ ID NO: 1481834 - RNA, 19 nt, Artificial Sequence
  Description of Artificial Sequence: Synthetic oligonucleotide
auacugaguugcugucaug

SEQ ID NO: 1481835 - RNA, 19 nt, Artificial Sequence
  Description of Artificial Sequence: Synthetic oligonucleotide
acugaguugcugucaugaa

SEQ ID NO: 1481836 - RNA, 19 nt, Artificial Sequence
  Description of Artificial Sequence: Synthetic oligonucleotide
aaacggcaccaaaugaguu

SEQ ID NO: 1481837 - RNA, 19 nt, Artificial Sequence
  Description of Artificial Sequence: Synthetic oligonucleotide
cugaguugcugucaugaaa

SEQ ID NO: 1481838 - RNA, 19 nt, Artificial Sequence
  Description of Artificial Sequence: Synthetic oligonucleotide
caggaaugaaguaguagcu

SEQ ID NO: 1481839 - RNA, 19 nt, Artificial Sequence
  Description of Artificial Sequence: Synthetic oligonucleotide
aaccaggcgucguggguaa

SEQ ID NO: 1481840 - RNA, 19 nt, Artificial Sequence
  Description of Artificial Sequence: Synthetic oligonucleotide
acggcaccaaaugaguuaa

SEQ ID NO: 1481841 - RNA, 19 nt, Artificial Sequence
  Description of Artificial Sequence: Synthetic oligonucleotide
ggacugagauauucuuaag

SEQ ID NO: 1481842 - RNA, 19 nt, Artificial Sequence
  Description of Artificial Sequence: Synthetic oligonucleotide
ccaagugcccguaacagga

SEQ ID NO: 1481843 - RNA, 19 nt, Artificial Sequence
  Description of Artificial Sequence: Synthetic oligonucleotide
ggacaauacagcucccaga

SEQ ID NO: 1481844 - RNA, 19 nt, Artificial Sequence
  Description of Artificial Sequence: Synthetic oligonucleotide
gccagguaacacacuaugg

SEQ ID NO: 1481845 - RNA, 19 nt, Artificial Sequence
  Description of Artificial Sequence: Synthetic oligonucleotide
uugacuuucuugggcccga

SEQ ID NO: 1481846 - RNA, 19 nt, Artificial Sequence
  Description of Artificial Sequence: Synthetic oligonucleotide
uguaguuggcaggcaggac

SEQ ID NO: 1481847 - RNA, 19 nt, Artificial Sequence
  Description of Artificial Sequence: Synthetic oligonucleotide
uauccuuaccaggccacau

SEQ ID NO: 1481848 - RNA, 19 nt, Artificial Sequence
  Description of Artificial Sequence: Synthetic oligonucleotide
ugaggaacaccagcaggau

SEQ ID NO: 1481849 - RNA, 19 nt, Artificial Sequence
  Description of Artificial Sequence: Synthetic oligonucleotide
aacgagcaggaagcgggca

SEQ ID NO: 1481850 - RNA, 19 nt, Artificial Sequence
  Description of Artificial Sequence: Synthetic oligonucleotide
caaccagaggcuauccuua

SEQ ID NO: 1481851 - RNA, 19 nt, Artificial Sequence
  Description of Artificial Sequence: Synthetic oligonucleotide
uggcaagguagccguugga

SEQ ID NO: 1481852 - RNA, 19 nt, Artificial Sequence
  Description of Artificial Sequence: Synthetic oligonucleotide
accucuggaccccacucau

SEQ ID NO: 1481853 - RNA, 19 nt, Artificial Sequence
  Description of Artificial Sequence: Synthetic oligonucleotide
gugagacuccggccuagcc

SEQ ID NO: 1481854 - RNA, 19 nt, Artificial Sequence
  Description of Artificial Sequence: Synthetic oligonucleotide
gagcaaaccucuggacccc

SEQ ID NO: 1481855 - RNA, 19 nt, Artificial Sequence
  Description of Artificial Sequence: Synthetic oligonucleotide
ugugagacuccggccuagc

SEQ ID NO: 1481856 - RNA, 19 nt, Artificial Sequence
  Description of Artificial Sequence: Synthetic oligonucleotide
aaauagccaaaggcacuuu

SEQ ID NO: 1481857 - RNA, 19 nt, Artificial Sequence
  Description of Artificial Sequence: Synthetic oligonucleotide
cuggaccccacucauccca

SEQ ID NO: 1481858 - RNA, 19 nt, Artificial Sequence
  Description of Artificial Sequence: Synthetic oligonucleotide
uagcaaaagcaggggaaua

SEQ ID NO: 1481859 - RNA, 19 nt, Artificial Sequence
  Description of Artificial Sequence: Synthetic oligonucleotide
gucguggguaaagauucac

SEQ ID NO: 1481860 - RNA, 19 nt, Artificial Sequence
  Description of Artificial Sequence: Synthetic oligonucleotide
guaacacacuauggccaag

SEQ ID NO: 1481861 - RNA, 19 nt, Artificial Sequence
  Description of Artificial Sequence: Synthetic oligonucleotide
gagcacgaucuugaucaug

SEQ ID NO: 1481862 - RNA, 19 nt, Artificial Sequence
  Description of Artificial Sequence: Synthetic oligonucleotide
accccggauuccucucuuc

SEQ ID NO: 1481863 - RNA, 19 nt, Artificial Sequence
  Description of Artificial Sequence: Synthetic oligonucleotide
ugcgagcugguaccccgga

SEQ ID NO: 1481864 - RNA, 19 nt, Artificial Sequence
  Description of Artificial Sequence: Synthetic oligonucleotide
ccacaugcaaauagcugug

SEQ ID NO: 1481865 - RNA, 19 nt, Artificial Sequence
  Description of Artificial Sequence: Synthetic oligonucleotide
cucagcuggcuugacuuuc

SEQ ID NO: 1481866 - RNA, 19 nt, Artificial Sequence
  Description of Artificial Sequence: Synthetic oligonucleotide
guccuugcuugguuuguca

SEQ ID NO: 1481867 - RNA, 19 nt, Artificial Sequence
  Description of Artificial Sequence: Synthetic oligonucleotide
cacgauccuggagaccacc

SEQ ID NO: 1481868 - RNA, 19 nt, Artificial Sequence
  Description of Artificial Sequence: Synthetic oligonucleotide
gcuugacuuucuugggccc

SEQ ID NO: 1481869 - RNA, 19 nt, Artificial Sequence
  Description of Artificial Sequence: Synthetic oligonucleotide
gcgucguggguaaagauuc

SEQ ID NO: 1481870 - RNA, 19 nt, Artificial Sequence
  Description of Artificial Sequence: Synthetic oligonucleotide
ggauucaaccucaguaguc

SEQ ID NO: 1481871 - RNA, 19 nt, Artificial Sequence
  Description of Artificial Sequence: Synthetic oligonucleotide
ucgguguccuugcuugguu

SEQ ID NO: 1481872 - RNA, 19 nt, Artificial Sequence
  Description of Artificial Sequence: Synthetic oligonucleotide
auccuggagaccaccaaaa

SEQ ID NO: 1481873 - RNA, 19 nt, Artificial Sequence
  Description of Artificial Sequence: Synthetic oligonucleotide
caaccucaguagucacagc

SEQ ID NO: 1481874 - RNA, 19 nt, Artificial Sequence
  Description of Artificial Sequence: Synthetic oligonucleotide
cagacggacaaagccagga

SEQ ID NO: 1481875 - RNA, 19 nt, Artificial Sequence
  Description of Artificial Sequence: Synthetic oligonucleotide
uggcaaccagaggcuaucc

SEQ ID NO: 1481876 - RNA, 19 nt, Artificial Sequence
  Description of Artificial Sequence: Synthetic oligonucleotide
uccaggcgguuugugaaau

SEQ ID NO: 1481877 - RNA, 19 nt, Artificial Sequence
  Description of Artificial Sequence: Synthetic oligonucleotide
ccagucaaagacauugaaa

SEQ ID NO: 1481878 - RNA, 19 nt, Artificial Sequence
  Description of Artificial Sequence: Synthetic oligonucleotide
gaaccaggcgucgugggua

SEQ ID NO: 1481879 - RNA, 19 nt, Artificial Sequence
  Description of Artificial Sequence: Synthetic oligonucleotide
gccauacugccuuauaccu

SEQ ID NO: 1481880 - RNA, 19 nt, Artificial Sequence
  Description of Artificial Sequence: Synthetic oligonucleotide
cauugcugaagauggcacu

SEQ ID NO: 1481881 - RNA, 19 nt, Artificial Sequence
  Description of Artificial Sequence: Synthetic oligonucleotide
cagcuguagguaauaccga

SEQ ID NO: 1481882 - RNA, 19 nt, Artificial Sequence
  Description of Artificial Sequence: Synthetic oligonucleotide
cacuauggccaagaugaca

SEQ ID NO: 1481883 - RNA, 19 nt, Artificial Sequence
  Description of Artificial Sequence: Synthetic oligonucleotide
cuggcaaccagaggcuauc

SEQ ID NO: 1481884 - RNA, 19 nt, Artificial Sequence
  Description of Artificial Sequence: Synthetic oligonucleotide
gcccguaacaggaaggaca

SEQ ID NO: 1481885 - RNA, 19 nt, Artificial Sequence
  Description of Artificial Sequence: Synthetic oligonucleotide
ugagcacgaucuugaucau

SEQ ID NO: 1481886 - RNA, 19 nt, Artificial Sequence
  Description of Artificial Sequence: Synthetic oligonucleotide
ggcuauccuuaccaggcca

SEQ ID NO: 1481887 - RNA, 19 nt, Artificial Sequence
  Description of Artificial Sequence: Synthetic oligonucleotide
cacccaagugcccguaaca

SEQ ID NO: 1481888 - RNA, 19 nt, Artificial Sequence
  Description of Artificial Sequence: Synthetic oligonucleotide
uccgccucagcuggcuuga

SEQ ID NO: 1481889 - RNA, 19 nt, Artificial Sequence
  Description of Artificial Sequence: Synthetic oligonucleotide
ggcccagacaaagaaagaa

SEQ ID NO: 1481890 - RNA, 19 nt, Artificial Sequence
  Description of Artificial Sequence: Synthetic oligonucleotide
uggucacccaagugcccgu

SEQ ID NO: 1481891 - RNA, 19 nt, Artificial Sequence
  Description of Artificial Sequence: Synthetic oligonucleotide
ugcccguaacaggaaggac

SEQ ID NO: 1481892 - RNA, 19 nt, Artificial Sequence
  Description of Artificial Sequence: Synthetic oligonucleotide
augaguuaaugagcacgau

SEQ ID NO: 1481893 - RNA, 19 nt, Artificial Sequence
  Description of Artificial Sequence: Synthetic oligonucleotide
aggcgucguggguaaagau

SEQ ID NO: 1481894 - RNA, 19 nt, Artificial Sequence
  Description of Artificial Sequence: Synthetic oligonucleotide
uccagccgaggcagagcca

SEQ ID NO: 1481895 - RNA, 19 nt, Artificial Sequence
  Description of Artificial Sequence: Synthetic oligonucleotide
ugccggcaaugcuggauuc

SEQ ID NO: 1481896 - RNA, 19 nt, Artificial Sequence
  Description of Artificial Sequence: Synthetic oligonucleotide
aggcagggaugaaaacgag

SEQ ID NO: 1481897 - RNA, 19 nt, Artificial Sequence
  Description of Artificial Sequence: Synthetic oligonucleotide
acuccggccuagccaguca

SEQ ID NO: 1481898 - RNA, 19 nt, Artificial Sequence
  Description of Artificial Sequence: Synthetic oligonucleotide
ggcacugagaggacuucgc

SEQ ID NO: 1481899 - RNA, 19 nt, Artificial Sequence
  Description of Artificial Sequence: Synthetic oligonucleotide
agccagucaaagacauuga

SEQ ID NO: 1481900 - RNA, 19 nt, Artificial Sequence
  Description of Artificial Sequence: Synthetic oligonucleotide
caaagaggcuggcuugcaa

SEQ ID NO: 1481901 - RNA, 19 nt, Artificial Sequence
  Description of Artificial Sequence: Synthetic oligonucleotide
aggcgguuugugaaauacu

SEQ ID NO: 1481902 - RNA, 19 nt, Artificial Sequence
  Description of Artificial Sequence: Synthetic oligonucleotide
uccggccuagccagucaaa

SEQ ID NO: 1481903 - RNA, 19 nt, Artificial Sequence
  Description of Artificial Sequence: Synthetic oligonucleotide
gucccuacauggucaccca

SEQ ID NO: 1481904 - RNA, 19 nt, Artificial Sequence
  Description of Artificial Sequence: Synthetic oligonucleotide
cacuuucaccaagauggca

SEQ ID NO: 1481905 - RNA, 19 nt, Artificial Sequence
  Description of Artificial Sequence: Synthetic oligonucleotide
uagccuugauagagugguu

SEQ ID NO: 1481906 - RNA, 19 nt, Artificial Sequence
  Description of Artificial Sequence: Synthetic oligonucleotide
gcuauccuuaccaggccac

SEQ ID NO: 1481907 - RNA, 19 nt, Artificial Sequence
  Description of Artificial Sequence: Synthetic oligonucleotide
cugugagacuccggccuag

SEQ ID NO: 1481908 - RNA, 19 nt, Artificial Sequence
  Description of Artificial Sequence: Synthetic oligonucleotide
ccgauagaauuccagccga

SEQ ID NO: 1481909 - RNA, 19 nt, Artificial Sequence
  Description of Artificial Sequence: Synthetic oligonucleotide
acuggcaaccagaggcuau

SEQ ID NO: 1481910 - RNA, 19 nt, Artificial Sequence
  Description of Artificial Sequence: Synthetic oligonucleotide
ccagccgaggcagagccag

SEQ ID NO: 1481911 - RNA, 19 nt, Artificial Sequence
  Description of Artificial Sequence: Synthetic oligonucleotide
cuauccuuaccaggccaca

SEQ ID NO: 1481912 - RNA, 19 nt, Artificial Sequence
  Description of Artificial Sequence: Synthetic oligonucleotide
cuauggccaagaugacaaa

SEQ ID NO: 1481913 - RNA, 19 nt, Artificial Sequence
  Description of Artificial Sequence: Synthetic oligonucleotide
ccccggauuccucucuucc

SEQ ID NO: 1481914 - RNA, 19 nt, Artificial Sequence
  Description of Artificial Sequence: Synthetic oligonucleotide
ccuuuacugauaagaucca

SEQ ID NO: 1481915 - RNA, 19 nt, Artificial Sequence
  Description of Artificial Sequence: Synthetic oligonucleotide
gagcugcgagcugguaccc

SEQ ID NO: 1481916 - RNA, 19 nt, Artificial Sequence
  Description of Artificial Sequence: Synthetic oligonucleotide
cccguaacaggaaggacaa

SEQ ID NO: 1481917 - RNA, 19 nt, Artificial Sequence
  Description of Artificial Sequence: Synthetic oligonucleotide
cgauagaauuccagccgag

SEQ ID NO: 1481918 - RNA, 19 nt, Artificial Sequence
  Description of Artificial Sequence: Synthetic oligonucleotide
augagccauacugccuuau

SEQ ID NO: 1481919 - RNA, 19 nt, Artificial Sequence
  Description of Artificial Sequence: Synthetic oligonucleotide
agcaaaccucuggacccca

SEQ ID NO: 1481920 - RNA, 19 nt, Artificial Sequence
  Description of Artificial Sequence: Synthetic oligonucleotide
gccagaagagcaaaccucu

SEQ ID NO: 1481921 - RNA, 19 nt, Artificial Sequence
  Description of Artificial Sequence: Synthetic oligonucleotide
ccguuggagaaggcaaagg

SEQ ID NO: 1481922 - RNA, 19 nt, Artificial Sequence
  Description of Artificial Sequence: Synthetic oligonucleotide
gguaccccggauuccucuc

SEQ ID NO: 1481923 - RNA, 19 nt, Artificial Sequence
  Description of Artificial Sequence: Synthetic oligonucleotide
aggcccagacaaagaaaga

SEQ ID NO: 1481924 - RNA, 19 nt, Artificial Sequence
  Description of Artificial Sequence: Synthetic oligonucleotide
caagugcccguaacaggaa

SEQ ID NO: 1481925 - RNA, 19 nt, Artificial Sequence
  Description of Artificial Sequence: Synthetic oligonucleotide
gacuccggccuagccaguc

SEQ ID NO: 1481926 - RNA, 19 nt, Artificial Sequence
  Description of Artificial Sequence: Synthetic oligonucleotide
ggccccucaagguucagcu

SEQ ID NO: 1481927 - RNA, 19 nt, Artificial Sequence
  Description of Artificial Sequence: Synthetic oligonucleotide
guccaggcgguuugugaaa

SEQ ID NO: 1481928 - RNA, 19 nt, Artificial Sequence
  Description of Artificial Sequence: Synthetic oligonucleotide
ggcuggcuugcaaaacggc

SEQ ID NO: 1481929 - RNA, 19 nt, Artificial Sequence
  Description of Artificial Sequence: Synthetic oligonucleotide
augcuggauucaaccucag

SEQ ID NO: 1481930 - RNA, 19 nt, Artificial Sequence
  Description of Artificial Sequence: Synthetic oligonucleotide
cccacucaucccaggcagg

SEQ ID NO: 1481931 - RNA, 19 nt, Artificial Sequence
  Description of Artificial Sequence: Synthetic oligonucleotide
gaacagacugagagauccu

SEQ ID NO: 1481932 - RNA, 19 nt, Artificial Sequence
  Description of Artificial Sequence: Synthetic oligonucleotide
ggcaggacgccagccagac

SEQ ID NO: 1481933 - RNA, 19 nt, Artificial Sequence
  Description of Artificial Sequence: Synthetic oligonucleotide
cugucccuacauggucacc

SEQ ID NO: 1481934 - RNA, 19 nt, Artificial Sequence
  Description of Artificial Sequence: Synthetic oligonucleotide
caaaccucuggaccccacu

SEQ ID NO: 1481935 - RNA, 19 nt, Artificial Sequence
  Description of Artificial Sequence: Synthetic oligonucleotide
agagccaggcccagacaaa

SEQ ID NO: 1481936 - RNA, 19 nt, Artificial Sequence
  Description of Artificial Sequence: Synthetic oligonucleotide
ccggccuagccagucaaag

SEQ ID NO: 1481937 - RNA, 19 nt, Artificial Sequence
  Description of Artificial Sequence: Synthetic oligonucleotide
caggcgucguggguaaaga

SEQ ID NO: 1481938 - RNA, 19 nt, Artificial Sequence
  Description of Artificial Sequence: Synthetic oligonucleotide
cuugggcccgaagcacaug

SEQ ID NO: 1481939 - RNA, 19 nt, Artificial Sequence
  Description of Artificial Sequence: Synthetic oligonucleotide
ggggagcaauguccccagg

SEQ ID NO: 1481940 - RNA, 19 nt, Artificial Sequence
  Description of Artificial Sequence: Synthetic oligonucleotide
caauguccccaggcccagc

SEQ ID NO: 1481941 - RNA, 19 nt, Artificial Sequence
  Description of Artificial Sequence: Synthetic oligonucleotide
ccucgguguccuugcuugg

SEQ ID NO: 1481942 - RNA, 19 nt, Artificial Sequence
  Description of Artificial Sequence: Synthetic oligonucleotide
gcaacauggcacacaaagu

SEQ ID NO: 1481943 - RNA, 19 nt, Artificial Sequence
  Description of Artificial Sequence: Synthetic oligonucleotide
ggcccgaagcacaugcaga

SEQ ID NO: 1481944 - RNA, 19 nt, Artificial Sequence
  Description of Artificial Sequence: Synthetic oligonucleotide
cuccggccuagccagucaa

SEQ ID NO: 1481945 - RNA, 19 nt, Artificial Sequence
  Description of Artificial Sequence: Synthetic oligonucleotide
gcuguagguaauaccgaua

SEQ ID NO: 1481946 - RNA, 19 nt, Artificial Sequence
  Description of Artificial Sequence: Synthetic oligonucleotide
ggggcaggcaaggccucgg

SEQ ID NO: 1481947 - RNA, 19 nt, Artificial Sequence
  Description of Artificial Sequence: Synthetic oligonucleotide
cccaggcagggaugaaaac

SEQ ID NO: 1481948 - RNA, 19 nt, Artificial Sequence
  Description of Artificial Sequence: Synthetic oligonucleotide
uggugccggcaaugcugga

SEQ ID NO: 1481949 - RNA, 19 nt, Artificial Sequence
  Description of Artificial Sequence: Synthetic oligonucleotide
guaccccggauuccucucu

SEQ ID NO: 1481950 - RNA, 19 nt, Artificial Sequence
  Description of Artificial Sequence: Synthetic oligonucleotide
ccaggcgucguggguaaag

SEQ ID NO: 1481951 - RNA, 19 nt, Artificial Sequence
  Description of Artificial Sequence: Synthetic oligonucleotide
gugccggcaaugcuggauu

SEQ ID NO: 1481952 - RNA, 19 nt, Artificial Sequence
  Description of Artificial Sequence: Synthetic oligonucleotide
ccgaggcagagccagguaa

SEQ ID NO: 1481953 - RNA, 19 nt, Artificial Sequence
  Description of Artificial Sequence: Synthetic oligonucleotide
ggcuugcaaaacggcacca

SEQ ID NO: 1481954 - RNA, 19 nt, Artificial Sequence
  Description of Artificial Sequence: Synthetic oligonucleotide
ccgaacagacugagagauc

SEQ ID NO: 1481955 - RNA, 19 nt, Artificial Sequence
  Description of Artificial Sequence: Synthetic oligonucleotide
gagccagguaacacacuau

SEQ ID NO: 1481956 - RNA, 19 nt, Artificial Sequence
  Description of Artificial Sequence: Synthetic oligonucleotide
ggcaaccagaggcuauccu

SEQ ID NO: 1481957 - RNA, 19 nt, Artificial Sequence
  Description of Artificial Sequence: Synthetic oligonucleotide
ccccucaagguucagcugu

SEQ ID NO: 1481958 - RNA, 19 nt, Artificial Sequence
  Description of Artificial Sequence: Synthetic oligonucleotide
ccucaagguucagcuguag

SEQ ID NO: 1481959 - RNA, 19 nt, Artificial Sequence
  Description of Artificial Sequence: Synthetic oligonucleotide
ggaagcgggcaggcagugc

SEQ ID NO: 1481960 - RNA, 19 nt, Artificial Sequence
  Description of Artificial Sequence: Synthetic oligonucleotide
cagagggccccucaagguu

SEQ ID NO: 1481961 - RNA, 19 nt, Artificial Sequence
  Description of Artificial Sequence: Synthetic oligonucleotide
ccuuaccaggccacaugca

SEQ ID NO: 1481962 - RNA, 19 nt, Artificial Sequence
  Description of Artificial Sequence: Synthetic oligonucleotide
cacucaucccaggcaggga

SEQ ID NO: 1481963 - RNA, 19 nt, Artificial Sequence
  Description of Artificial Sequence: Synthetic oligonucleotide
ccaggcccagacaaagaaa

SEQ ID NO: 1481964 - RNA, 19 nt, Artificial Sequence
  Description of Artificial Sequence: Synthetic oligonucleotide
ggauccgaacagacugaga

SEQ ID NO: 1481965 - RNA, 19 nt, Artificial Sequence
  Description of Artificial Sequence: Synthetic oligonucleotide
gcugugagacuccggccua

SEQ ID NO: 1481966 - RNA, 19 nt, Artificial Sequence
  Description of Artificial Sequence: Synthetic oligonucleotide
gggccccucaagguucagc

SEQ ID NO: 1481967 - RNA, 19 nt, Artificial Sequence
  Description of Artificial Sequence: Synthetic oligonucleotide
cuagccagucaaagacauu

SEQ ID NO: 1481968 - RNA, 19 nt, Artificial Sequence
  Description of Artificial Sequence: Synthetic oligonucleotide
ggcgucguggguaaagauu

SEQ ID NO: 1481969 - RNA, 19 nt, Artificial Sequence
  Description of Artificial Sequence: Synthetic oligonucleotide
aggacgccagccagaccaa

SEQ ID NO: 1481970 - RNA, 19 nt, Artificial Sequence
  Description of Artificial Sequence: Synthetic oligonucleotide
cucgguguccuugcuuggu

SEQ ID NO: 1481971 - RNA, 19 nt, Artificial Sequence
  Description of Artificial Sequence: Synthetic oligonucleotide
gcaaaccucuggaccccac

SEQ ID NO: 1481972 - RNA, 19 nt, Artificial Sequence
  Description of Artificial Sequence: Synthetic oligonucleotide
cggcaaugcuggauucaac

SEQ ID NO: 1481973 - RNA, 19 nt, Artificial Sequence
  Description of Artificial Sequence: Synthetic oligonucleotide
gccggcaaugcuggauuca

SEQ ID NO: 1481974 - RNA, 19 nt, Artificial Sequence
  Description of Artificial Sequence: Synthetic oligonucleotide
guacagguccaggcgguuu

SEQ ID NO: 1481975 - RNA, 19 nt, Artificial Sequence
  Description of Artificial Sequence: Synthetic oligonucleotide
agggccccucaagguucag

SEQ ID NO: 1481976 - RNA, 19 nt, Artificial Sequence
  Description of Artificial Sequence: Synthetic oligonucleotide
agacuccggccuagccagu

SEQ ID NO: 1481977 - RNA, 19 nt, Artificial Sequence
  Description of Artificial Sequence: Synthetic oligonucleotide
ccggcaaugcuggauucaa

SEQ ID NO: 1481978 - RNA, 19 nt, Artificial Sequence
  Description of Artificial Sequence: Synthetic oligonucleotide
cggccuagccagucaaaga

SEQ ID NO: 1481979 - RNA, 19 nt, Artificial Sequence
  Description of Artificial Sequence: Synthetic oligonucleotide
cccggauuccucucuuccu

SEQ ID NO: 1481980 - RNA, 19 nt, Artificial Sequence
  Description of Artificial Sequence: Synthetic oligonucleotide
cgucguggguaaagauuca

SEQ ID NO: 1481981 - RNA, 19 nt, Artificial Sequence
  Description of Artificial Sequence: Synthetic oligonucleotide
cccucaagguucagcugua

SEQ ID NO: 1481982 - RNA, 19 nt, Artificial Sequence
  Description of Artificial Sequence: Synthetic oligonucleotide
accaggcgucguggguaaa

SEQ ID NO: 1481983 - RNA, 19 nt, Artificial Sequence
  Description of Artificial Sequence: Synthetic oligonucleotide
ggucacccaagugcccgua

SEQ ID NO: 1481984 - RNA, 19 nt, Artificial Sequence
  Description of Artificial Sequence: Synthetic oligonucleotide
ggacgccagccagaccaaa

SEQ ID NO: 1481985 - RNA, 19 nt, Artificial Sequence
  Description of Artificial Sequence: Synthetic oligonucleotide
ggagagcugcgagcuggua

SEQ ID NO: 1481986 - RNA, 19 nt, Artificial Sequence
  Description of Artificial Sequence: Synthetic oligonucleotide
gggcaggcaaggccucggu

SEQ ID NO: 1481987 - RNA, 19 nt, Artificial Sequence
  Description of Artificial Sequence: Synthetic oligonucleotide
ccaggcgguuugugaaaua

SEQ ID NO: 1481988 - RNA, 19 nt, Artificial Sequence
  Description of Artificial Sequence: Synthetic oligonucleotide
gggcaacauggcacacaaa

SEQ ID NO: 1481989 - RNA, 19 nt, Artificial Sequence
  Description of Artificial Sequence: Synthetic oligonucleotide
gcgagcugguaccccggau

SEQ ID NO: 1481990 - RNA, 19 nt, Artificial Sequence
  Description of Artificial Sequence: Synthetic oligonucleotide
gguacagguccaggcgguu

SEQ ID NO: 1481991 - RNA, 19 nt, Artificial Sequence
  Description of Artificial Sequence: Synthetic oligonucleotide
cgguguccuugcuugguuu

SEQ ID NO: 1481992 - RNA, 19 nt, Artificial Sequence
  Description of Artificial Sequence: Synthetic oligonucleotide
ccgccucagcuggcuugac

SEQ ID NO: 1481993 - RNA, 19 nt, Artificial Sequence
  Description of Artificial Sequence: Synthetic oligonucleotide
ccguaacaggaaggacaau

SEQ ID NO: 1481994 - RNA, 19 nt, Artificial Sequence
  Description of Artificial Sequence: Synthetic oligonucleotide
aaaauaauagaucugagag

SEQ ID NO: 1481995 - RNA, 19 nt, Artificial Sequence
  Description of Artificial Sequence: Synthetic oligonucleotide
aaaacaacaagccccaggg

SEQ ID NO: 1481996 - RNA, 19 nt, Artificial Sequence
  Description of Artificial Sequence: Synthetic oligonucleotide
ugaaguaaaauaaaacugc

SEQ ID NO: 1481997 - RNA, 19 nt, Artificial Sequence
  Description of Artificial Sequence: Synthetic oligonucleotide
ugaguuuguguaaagagcg

SEQ ID NO: 1481998 - RNA, 19 nt, Artificial Sequence
  Description of Artificial Sequence: Synthetic oligonucleotide
aagaaauuuacuuuuggga

SEQ ID NO: 1481999 - RNA, 19 nt, Artificial Sequence
  Description of Artificial Sequence: Synthetic oligonucleotide
aaaauuccuaccaaguccc

SEQ ID NO: 1482000 - RNA, 19 nt, Artificial Sequence
  Description of Artificial Sequence: Synthetic oligonucleotide
uguaucgaaauuucgaucc

SEQ ID NO: 1482001 - RNA, 19 nt, Artificial Sequence
  Description of Artificial Sequence: Synthetic oligonucleotide
caaacaauuacuauauccc

SEQ ID NO: 1482002 - RNA, 19 nt, Artificial Sequence
  Description of Artificial Sequence: Synthetic oligonucleotide
aauaauagaucugagagau

SEQ ID NO: 1482003 - RNA, 19 nt, Artificial Sequence
  Description of Artificial Sequence: Synthetic oligonucleotide
aaacacuacagccacaucu

SEQ ID NO: 1482004 - RNA, 19 nt, Artificial Sequence
  Description of Artificial Sequence: Synthetic oligonucleotide
uaagcuggagauuacagag

SEQ ID NO: 1482005 - RNA, 19 nt, Artificial Sequence
  Description of Artificial Sequence: Synthetic oligonucleotide
uucacuucaaccuucgaag

SEQ ID NO: 1482006 - RNA, 19 nt, Artificial Sequence
  Description of Artificial Sequence: Synthetic oligonucleotide
aaacacuuaccuaaaacac

SEQ ID NO: 1482007 - RNA, 19 nt, Artificial Sequence
  Description of Artificial Sequence: Synthetic oligonucleotide
aagaagcaagaccaaacac

SEQ ID NO: 1482008 - RNA, 19 nt, Artificial Sequence
  Description of Artificial Sequence: Synthetic oligonucleotide
agcaagaccaaacacuuac

SEQ ID NO: 1482009 - RNA, 19 nt, Artificial Sequence
  Description of Artificial Sequence: Synthetic oligonucleotide
cauacaagaagcaagacca

SEQ ID NO: 1482010 - RNA, 19 nt, Artificial Sequence
  Description of Artificial Sequence: Synthetic oligonucleotide
agaagcagaggucagguac

SEQ ID NO: 1482011 - RNA, 19 nt, Artificial Sequence
  Description of Artificial Sequence: Synthetic oligonucleotide
uuaccuaaaacacuacagc

SEQ ID NO: 1482012 - RNA, 19 nt, Artificial Sequence
  Description of Artificial Sequence: Synthetic oligonucleotide
uuacuauaucccaagaucu

SEQ ID NO: 1482013 - RNA, 19 nt, Artificial Sequence
  Description of Artificial Sequence: Synthetic oligonucleotide
aaauguaaacaacuacuug

SEQ ID NO: 1482014 - RNA, 19 nt, Artificial Sequence
  Description of Artificial Sequence: Synthetic oligonucleotide
aggucugucaaucagagca

SEQ ID NO: 1482015 - RNA, 19 nt, Artificial Sequence
  Description of Artificial Sequence: Synthetic oligonucleotide
augaaguucauuccuaguc

SEQ ID NO: 1482016 - RNA, 19 nt, Artificial Sequence
  Description of Artificial Sequence: Synthetic oligonucleotide
aaauaauagaucugagaga

SEQ ID NO: 1482017 - RNA, 19 nt, Artificial Sequence
  Description of Artificial Sequence: Synthetic oligonucleotide
gacaucagaagucuggucc

SEQ ID NO: 1482018 - RNA, 19 nt, Artificial Sequence
  Description of Artificial Sequence: Synthetic oligonucleotide
ucuaguucacugaugcugg

SEQ ID NO: 1482019 - RNA, 19 nt, Artificial Sequence
  Description of Artificial Sequence: Synthetic oligonucleotide
uugacucuugucuaaaucc

SEQ ID NO: 1482020 - RNA, 19 nt, Artificial Sequence
  Description of Artificial Sequence: Synthetic oligonucleotide
aacaacaagccccagggcu

SEQ ID NO: 1482021 - RNA, 19 nt, Artificial Sequence
  Description of Artificial Sequence: Synthetic oligonucleotide
ugagcauuggggaugcugg

SEQ ID NO: 1482022 - RNA, 19 nt, Artificial Sequence
  Description of Artificial Sequence: Synthetic oligonucleotide
ucuagaauuaggaaucuaa

SEQ ID NO: 1482023 - RNA, 19 nt, Artificial Sequence
  Description of Artificial Sequence: Synthetic oligonucleotide
aaacaauuacuauauccca

SEQ ID NO: 1482024 - RNA, 19 nt, Artificial Sequence
  Description of Artificial Sequence: Synthetic oligonucleotide
cuauuugucaaauguaaac

SEQ ID NO: 1482025 - RNA, 19 nt, Artificial Sequence
  Description of Artificial Sequence: Synthetic oligonucleotide
aauuacuauaucccaagau

SEQ ID NO: 1482026 - RNA, 19 nt, Artificial Sequence
  Description of Artificial Sequence: Synthetic oligonucleotide
auuacagaggcccuguuug

SEQ ID NO: 1482027 - RNA, 19 nt, Artificial Sequence
  Description of Artificial Sequence: Synthetic oligonucleotide
aauagcacacucaaaacca

SEQ ID NO: 1482028 - RNA, 19 nt, Artificial Sequence
  Description of Artificial Sequence: Synthetic oligonucleotide
guaaagagcgcucagccag

SEQ ID NO: 1482029 - RNA, 19 nt, Artificial Sequence
  Description of Artificial Sequence: Synthetic oligonucleotide
auuacugccuaucuuaccu

SEQ ID NO: 1482030 - RNA, 19 nt, Artificial Sequence
  Description of Artificial Sequence: Synthetic oligonucleotide
ucuaaauccuuccauugcu

SEQ ID NO: 1482031 - RNA, 19 nt, Artificial Sequence
  Description of Artificial Sequence: Synthetic oligonucleotide
auaucccaagaucuguugc

SEQ ID NO: 1482032 - RNA, 19 nt, Artificial Sequence
  Description of Artificial Sequence: Synthetic oligonucleotide
ucaaaaccaguucaaaguc

SEQ ID NO: 1482033 - RNA, 19 nt, Artificial Sequence
  Description of Artificial Sequence: Synthetic oligonucleotide
ucaacccucaugaaguuca

SEQ ID NO: 1482034 - RNA, 19 nt, Artificial Sequence
  Description of Artificial Sequence: Synthetic oligonucleotide
aaauuuacuuuugggaaug

SEQ ID NO: 1482035 - RNA, 19 nt, Artificial Sequence
  Description of Artificial Sequence: Synthetic oligonucleotide
aggcaaaucuguuuguagg

SEQ ID NO: 1482036 - RNA, 19 nt, Artificial Sequence
  Description of Artificial Sequence: Synthetic oligonucleotide
aaacaacaagccccagggc

SEQ ID NO: 1482037 - RNA, 19 nt, Artificial Sequence
  Description of Artificial Sequence: Synthetic oligonucleotide
cuuaccuaagcauuuucag

SEQ ID NO: 1482038 - RNA, 19 nt, Artificial Sequence
  Description of Artificial Sequence: Synthetic oligonucleotide
uccuauuugucaaauguaa

SEQ ID NO: 1482039 - RNA, 19 nt, Artificial Sequence
  Description of Artificial Sequence: Synthetic oligonucleotide
agaccaaacacuuaccuaa

SEQ ID NO: 1482040 - RNA, 19 nt, Artificial Sequence
  Description of Artificial Sequence: Synthetic oligonucleotide
ucuuaccuaagcauuuuca

SEQ ID NO: 1482041 - RNA, 19 nt, Artificial Sequence
  Description of Artificial Sequence: Synthetic oligonucleotide
uucuaguucacugaugcug

SEQ ID NO: 1482042 - RNA, 19 nt, Artificial Sequence
  Description of Artificial Sequence: Synthetic oligonucleotide
uccuagucuagaauuagga

SEQ ID NO: 1482043 - RNA, 19 nt, Artificial Sequence
  Description of Artificial Sequence: Synthetic oligonucleotide
gauagugccaagcccagug

SEQ ID NO: 1482044 - RNA, 19 nt, Artificial Sequence
  Description of Artificial Sequence: Synthetic oligonucleotide
aggaaaucuacuucugaag

SEQ ID NO: 1482045 - RNA, 19 nt, Artificial Sequence
  Description of Artificial Sequence: Synthetic oligonucleotide
uaauagaucugagagauuu

SEQ ID NO: 1482046 - RNA, 19 nt, Artificial Sequence
  Description of Artificial Sequence: Synthetic oligonucleotide
cuuaaggugggccacgccc

SEQ ID NO: 1482047 - RNA, 19 nt, Artificial Sequence
  Description of Artificial Sequence: Synthetic oligonucleotide
caaaaccaguucaaagucg

SEQ ID NO: 1482048 - RNA, 19 nt, Artificial Sequence
  Description of Artificial Sequence: Synthetic oligonucleotide
ccaaacaauuacuauaucc

SEQ ID NO: 1482049 - RNA, 19 nt, Artificial Sequence
  Description of Artificial Sequence: Synthetic oligonucleotide
uaggaaucuaagaagcuuc

SEQ ID NO: 1482050 - RNA, 19 nt, Artificial Sequence
  Description of Artificial Sequence: Synthetic oligonucleotide
aagcauuuucaguuggacu

SEQ ID NO: 1482051 - RNA, 19 nt, Artificial Sequence
  Description of Artificial Sequence: Synthetic oligonucleotide
uuugacucuugucuaaauc

SEQ ID NO: 1482052 - RNA, 19 nt, Artificial Sequence
  Description of Artificial Sequence: Synthetic oligonucleotide
acaagaagcaagaccaaac

SEQ ID NO: 1482053 - RNA, 19 nt, Artificial Sequence
  Description of Artificial Sequence: Synthetic oligonucleotide
agaucugagagauuuguaa

SEQ ID NO: 1482054 - RNA, 19 nt, Artificial Sequence
  Description of Artificial Sequence: Synthetic oligonucleotide
uuuguuacuguggugugcc

SEQ ID NO: 1482055 - RNA, 19 nt, Artificial Sequence
  Description of Artificial Sequence: Synthetic oligonucleotide
ucuaagaagcuuccaggca

SEQ ID NO: 1482056 - RNA, 19 nt, Artificial Sequence
  Description of Artificial Sequence: Synthetic oligonucleotide
aaacaacuacuugauauga

SEQ ID NO: 1482057 - RNA, 19 nt, Artificial Sequence
  Description of Artificial Sequence: Synthetic oligonucleotide
gucaaauguaaacaacuac

SEQ ID NO: 1482058 - RNA, 19 nt, Artificial Sequence
  Description of Artificial Sequence: Synthetic oligonucleotide
uaccuaagcauuuucaguu

SEQ ID NO: 1482059 - RNA, 19 nt, Artificial Sequence
  Description of Artificial Sequence: Synthetic oligonucleotide
guaaacaacuacuugauau

SEQ ID NO: 1482060 - RNA, 19 nt, Artificial Sequence
  Description of Artificial Sequence: Synthetic oligonucleotide
agaccaaacaauuacuaua

SEQ ID NO: 1482061 - RNA, 19 nt, Artificial Sequence
  Description of Artificial Sequence: Synthetic oligonucleotide
uuuacaaagcuccuucauu

SEQ ID NO: 1482062 - RNA, 19 nt, Artificial Sequence
  Description of Artificial Sequence: Synthetic oligonucleotide
aaagucgcugaguuugugu

SEQ ID NO: 1482063 - RNA, 19 nt, Artificial Sequence
  Description of Artificial Sequence: Synthetic oligonucleotide
gucacuuugggaaaauucc

SEQ ID NO: 1482064 - RNA, 19 nt, Artificial Sequence
  Description of Artificial Sequence: Synthetic oligonucleotide
cuucuauuucccaugagca

SEQ ID NO: 1482065 - RNA, 19 nt, Artificial Sequence
  Description of Artificial Sequence: Synthetic oligonucleotide
ucugugaccugacucugag

SEQ ID NO: 1482066 - RNA, 19 nt, Artificial Sequence
  Description of Artificial Sequence: Synthetic oligonucleotide
uaucccaagaucuguugcc

SEQ ID NO: 1482067 - RNA, 19 nt, Artificial Sequence
  Description of Artificial Sequence: Synthetic oligonucleotide
uacuauaucccaagaucug

SEQ ID NO: 1482068 - RNA, 19 nt, Artificial Sequence
  Description of Artificial Sequence: Synthetic oligonucleotide
ugugccugagucacuuugg

SEQ ID NO: 1482069 - RNA, 19 nt, Artificial Sequence
  Description of Artificial Sequence: Synthetic oligonucleotide
acuguaucgaaauuucgau

SEQ ID NO: 1482070 - RNA, 19 nt, Artificial Sequence
  Description of Artificial Sequence: Synthetic oligonucleotide
agggacaagaaauuuacuu

SEQ ID NO: 1482071 - RNA, 19 nt, Artificial Sequence
  Description of Artificial Sequence: Synthetic oligonucleotide
uuggguuuguuacuguggu

SEQ ID NO: 1482072 - RNA, 19 nt, Artificial Sequence
  Description of Artificial Sequence: Synthetic oligonucleotide
acggggauagugccaagcc

SEQ ID NO: 1482073 - RNA, 19 nt, Artificial Sequence
  Description of Artificial Sequence: Synthetic oligonucleotide
agaagcaagaccaaacacu

SEQ ID NO: 1482074 - RNA, 19 nt, Artificial Sequence
  Description of Artificial Sequence: Synthetic oligonucleotide
gaguuagccuccuugggug

SEQ ID NO: 1482075 - RNA, 19 nt, Artificial Sequence
  Description of Artificial Sequence: Synthetic oligonucleotide
aucugucacuaugaaaggc

SEQ ID NO: 1482076 - RNA, 19 nt, Artificial Sequence
  Description of Artificial Sequence: Synthetic oligonucleotide
aaaacacuacagccacauc

SEQ ID NO: 1482077 - RNA, 19 nt, Artificial Sequence
  Description of Artificial Sequence: Synthetic oligonucleotide
uuaaggugggccacgcccc

SEQ ID NO: 1482078 - RNA, 19 nt, Artificial Sequence
  Description of Artificial Sequence: Synthetic oligonucleotide
aauccuuccauugcuuucu

SEQ ID NO: 1482079 - RNA, 19 nt, Artificial Sequence
  Description of Artificial Sequence: Synthetic oligonucleotide
ucgaaauuucgaucccagg

SEQ ID NO: 1482080 - RNA, 19 nt, Artificial Sequence
  Description of Artificial Sequence: Synthetic oligonucleotide
gaaaggcgcagacagcagc

SEQ ID NO: 1482081 - RNA, 19 nt, Artificial Sequence
  Description of Artificial Sequence: Synthetic oligonucleotide
aauuuacuuuugggaaugg

SEQ ID NO: 1482082 - RNA, 19 nt, Artificial Sequence
  Description of Artificial Sequence: Synthetic oligonucleotide
ugauuacugccuaucuuac

SEQ ID NO: 1482083 - RNA, 19 nt, Artificial Sequence
  Description of Artificial Sequence: Synthetic oligonucleotide
acaacuacuugauaugauu

SEQ ID NO: 1482084 - RNA, 19 nt, Artificial Sequence
  Description of Artificial Sequence: Synthetic oligonucleotide
aacacuacagccacaucug

SEQ ID NO: 1482085 - RNA, 19 nt, Artificial Sequence
  Description of Artificial Sequence: Synthetic oligonucleotide
uuuguguaaagagcgcuca

SEQ ID NO: 1482086 - RNA, 19 nt, Artificial Sequence
  Description of Artificial Sequence: Synthetic oligonucleotide
uaaagagcgcucagccagg

SEQ ID NO: 1482087 - RNA, 19 nt, Artificial Sequence
  Description of Artificial Sequence: Synthetic oligonucleotide
ucacuucaaccuucgaagc

SEQ ID NO: 1482088 - RNA, 19 nt, Artificial Sequence
  Description of Artificial Sequence: Synthetic oligonucleotide
auuccuaccaagucccuga

SEQ ID NO: 1482089 - RNA, 19 nt, Artificial Sequence
  Description of Artificial Sequence: Synthetic oligonucleotide
aucuuaccuaagcauuuuc

SEQ ID NO: 1482090 - RNA, 19 nt, Artificial Sequence
  Description of Artificial Sequence: Synthetic oligonucleotide
gaagucugguccaauuucc

SEQ ID NO: 1482091 - RNA, 19 nt, Artificial Sequence
  Description of Artificial Sequence: Synthetic oligonucleotide
aagaccaaacacuuaccua

SEQ ID NO: 1482092 - RNA, 19 nt, Artificial Sequence
  Description of Artificial Sequence: Synthetic oligonucleotide
aacaauuacuauaucccaa

SEQ ID NO: 1482093 - RNA, 19 nt, Artificial Sequence
  Description of Artificial Sequence: Synthetic oligonucleotide
uguguaaagagcgcucagc

SEQ ID NO: 1482094 - RNA, 19 nt, Artificial Sequence
  Description of Artificial Sequence: Synthetic oligonucleotide
aaagaccaaacaauuacua

SEQ ID NO: 1482095 - RNA, 19 nt, Artificial Sequence
  Description of Artificial Sequence: Synthetic oligonucleotide
aggaaucuaagaagcuucc

SEQ ID NO: 1482096 - RNA, 19 nt, Artificial Sequence
  Description of Artificial Sequence: Synthetic oligonucleotide
ugagcaauggcuggugcag

SEQ ID NO: 1482097 - RNA, 19 nt, Artificial Sequence
  Description of Artificial Sequence: Synthetic oligonucleotide
ugccuaucuuaccuaagca

SEQ ID NO: 1482098 - RNA, 19 nt, Artificial Sequence
  Description of Artificial Sequence: Synthetic oligonucleotide
gucaucaaaauaauagauc

SEQ ID NO: 1482099 - RNA, 19 nt, Artificial Sequence
  Description of Artificial Sequence: Synthetic oligonucleotide
cuauuucccaugagcauug

SEQ ID NO: 1482100 - RNA, 19 nt, Artificial Sequence
  Description of Artificial Sequence: Synthetic oligonucleotide
uucauuccuagucuagaau

SEQ ID NO: 1482101 - RNA, 19 nt, Artificial Sequence
  Description of Artificial Sequence: Synthetic oligonucleotide
gauuacugccuaucuuacc

SEQ ID NO: 1482102 - RNA, 19 nt, Artificial Sequence
  Description of Artificial Sequence: Synthetic oligonucleotide
uguggcuuccuuccguaug

SEQ ID NO: 1482103 - RNA, 19 nt, Artificial Sequence
  Description of Artificial Sequence: Synthetic oligonucleotide
gaaggaaaucuacuucuga

SEQ ID NO: 1482104 - RNA, 19 nt, Artificial Sequence
  Description of Artificial Sequence: Synthetic oligonucleotide
ccuaccaagucccugaccc

SEQ ID NO: 1482105 - RNA, 19 nt, Artificial Sequence
  Description of Artificial Sequence: Synthetic oligonucleotide
cugucacuaugaaaggcgc

SEQ ID NO: 1482106 - RNA, 19 nt, Artificial Sequence
  Description of Artificial Sequence: Synthetic oligonucleotide
gucacuaugaaaggcgcag

SEQ ID NO: 1482107 - RNA, 19 nt, Artificial Sequence
  Description of Artificial Sequence: Synthetic oligonucleotide
aauagccauacaagaagca

SEQ ID NO: 1482108 - RNA, 19 nt, Artificial Sequence
  Description of Artificial Sequence: Synthetic oligonucleotide
augaaaggcgcagacagca

SEQ ID NO: 1482109 - RNA, 19 nt, Artificial Sequence
  Description of Artificial Sequence: Synthetic oligonucleotide
gaauacacugcuggccugg

SEQ ID NO: 1482110 - RNA, 19 nt, Artificial Sequence
  Description of Artificial Sequence: Synthetic oligonucleotide
caucugucacuaugaaagg

SEQ ID NO: 1482111 - RNA, 19 nt, Artificial Sequence
  Description of Artificial Sequence: Synthetic oligonucleotide
cucaaaaccaguucaaagu

SEQ ID NO: 1482112 - RNA, 19 nt, Artificial Sequence
  Description of Artificial Sequence: Synthetic oligonucleotide
auuucccaugagcauuggg

SEQ ID NO: 1482113 - RNA, 19 nt, Artificial Sequence
  Description of Artificial Sequence: Synthetic oligonucleotide
uuguguaaagagcgcucag

SEQ ID NO: 1482114 - RNA, 19 nt, Artificial Sequence
  Description of Artificial Sequence: Synthetic oligonucleotide
uccguaugcuugcucacug

SEQ ID NO: 1482115 - RNA, 19 nt, Artificial Sequence
  Description of Artificial Sequence: Synthetic oligonucleotide
uuaggaaucuaagaagcuu

SEQ ID NO: 1482116 - RNA, 19 nt, Artificial Sequence
  Description of Artificial Sequence: Synthetic oligonucleotide
uugucuaaauccuuccauu

SEQ ID NO: 1482117 - RNA, 19 nt, Artificial Sequence
  Description of Artificial Sequence: Synthetic oligonucleotide
cuuccuuccguaugcuugc

SEQ ID NO: 1482118 - RNA, 19 nt, Artificial Sequence
  Description of Artificial Sequence: Synthetic oligonucleotide
aauuccuaccaagucccug

SEQ ID NO: 1482119 - RNA, 19 nt, Artificial Sequence
  Description of Artificial Sequence: Synthetic oligonucleotide
aguuuguguaaagagcgcu

SEQ ID NO: 1482120 - RNA, 19 nt, Artificial Sequence
  Description of Artificial Sequence: Synthetic oligonucleotide
cuggaugcccguuugcuug

SEQ ID NO: 1482121 - RNA, 19 nt, Artificial Sequence
  Description of Artificial Sequence: Synthetic oligonucleotide
accaaacaauuacuauauc

SEQ ID NO: 1482122 - RNA, 19 nt, Artificial Sequence
  Description of Artificial Sequence: Synthetic oligonucleotide
cuagucuagaauuaggaau

SEQ ID NO: 1482123 - RNA, 19 nt, Artificial Sequence
  Description of Artificial Sequence: Synthetic oligonucleotide
acuauaucccaagaucugu

SEQ ID NO: 1482124 - RNA, 19 nt, Artificial Sequence
  Description of Artificial Sequence: Synthetic oligonucleotide
cuguaucgaaauuucgauc

SEQ ID NO: 1482125 - RNA, 19 nt, Artificial Sequence
  Description of Artificial Sequence: Synthetic oligonucleotide
cuaagaagcuuccaggcaa

SEQ ID NO: 1482126 - RNA, 19 nt, Artificial Sequence
  Description of Artificial Sequence: Synthetic oligonucleotide
uuucuuaaggugggccacg

SEQ ID NO: 1482127 - RNA, 19 nt, Artificial Sequence
  Description of Artificial Sequence: Synthetic oligonucleotide
ccauacaagaagcaagacc

SEQ ID NO: 1482128 - RNA, 19 nt, Artificial Sequence
  Description of Artificial Sequence: Synthetic oligonucleotide
ggggaugcuggcuaggccg

SEQ ID NO: 1482129 - RNA, 19 nt, Artificial Sequence
  Description of Artificial Sequence: Synthetic oligonucleotide
auuccuagucuagaauuag

SEQ ID NO: 1482130 - RNA, 19 nt, Artificial Sequence
  Description of Artificial Sequence: Synthetic oligonucleotide
ugugcuugaguccggccac

SEQ ID NO: 1482131 - RNA, 19 nt, Artificial Sequence
  Description of Artificial Sequence: Synthetic oligonucleotide
cugauuacugccuaucuua

SEQ ID NO: 1482132 - RNA, 19 nt, Artificial Sequence
  Description of Artificial Sequence: Synthetic oligonucleotide
cacuguaucgaaauuucga

SEQ ID NO: 1482133 - RNA, 19 nt, Artificial Sequence
  Description of Artificial Sequence: Synthetic oligonucleotide
aguuagccuccuugggugg

SEQ ID NO: 1482134 - RNA, 19 nt, Artificial Sequence
  Description of Artificial Sequence: Synthetic oligonucleotide
ugucacuaugaaaggcgca

SEQ ID NO: 1482135 - RNA, 19 nt, Artificial Sequence
  Description of Artificial Sequence: Synthetic oligonucleotide
acaucagaagucuggucca

SEQ ID NO: 1482136 - RNA, 19 nt, Artificial Sequence
  Description of Artificial Sequence: Synthetic oligonucleotide
ggcaaaucuguuuguaggc

SEQ ID NO: 1482137 - RNA, 19 nt, Artificial Sequence
  Description of Artificial Sequence: Synthetic oligonucleotide
uucgaucccagggacaaga

SEQ ID NO: 1482138 - RNA, 19 nt, Artificial Sequence
  Description of Artificial Sequence: Synthetic oligonucleotide
uaucgaaauuucgauccca

SEQ ID NO: 1482139 - RNA, 19 nt, Artificial Sequence
  Description of Artificial Sequence: Synthetic oligonucleotide
uugacgggugccccuggcg

SEQ ID NO: 1482140 - RNA, 19 nt, Artificial Sequence
  Description of Artificial Sequence: Synthetic oligonucleotide
ugcuguccgcucaaagugc

SEQ ID NO: 1482141 - RNA, 19 nt, Artificial Sequence
  Description of Artificial Sequence: Synthetic oligonucleotide
gaagcagaggucagguacc

SEQ ID NO: 1482142 - RNA, 19 nt, Artificial Sequence
  Description of Artificial Sequence: Synthetic oligonucleotide
caagagagaagcagagguc

SEQ ID NO: 1482143 - RNA, 19 nt, Artificial Sequence
  Description of Artificial Sequence: Synthetic oligonucleotide
gagcaggucugucaaucag

SEQ ID NO: 1482144 - RNA, 19 nt, Artificial Sequence
  Description of Artificial Sequence: Synthetic oligonucleotide
accuaaaacacuacagcca

SEQ ID NO: 1482145 - RNA, 19 nt, Artificial Sequence
  Description of Artificial Sequence: Synthetic oligonucleotide
ggaaaauuccuaccaaguc

SEQ ID NO: 1482146 - RNA, 19 nt, Artificial Sequence
  Description of Artificial Sequence: Synthetic oligonucleotide
uccaucaaggcuccuggau

SEQ ID NO: 1482147 - RNA, 19 nt, Artificial Sequence
  Description of Artificial Sequence: Synthetic oligonucleotide
uguuacuguggugugccug

SEQ ID NO: 1482148 - RNA, 19 nt, Artificial Sequence
  Description of Artificial Sequence: Synthetic oligonucleotide
guaucgaaauuucgauccc

SEQ ID NO: 1482149 - RNA, 19 nt, Artificial Sequence
  Description of Artificial Sequence: Synthetic oligonucleotide
aauacacugcuggccuggg

SEQ ID NO: 1482150 - RNA, 19 nt, Artificial Sequence
  Description of Artificial Sequence: Synthetic oligonucleotide
uacuuuugggaaugguguc

SEQ ID NO: 1482151 - RNA, 19 nt, Artificial Sequence
  Description of Artificial Sequence: Synthetic oligonucleotide
cacuaugaaaggcgcagac

SEQ ID NO: 1482152 - RNA, 19 nt, Artificial Sequence
  Description of Artificial Sequence: Synthetic oligonucleotide
agguacccaggucugaagu

SEQ ID NO: 1482153 - RNA, 19 nt, Artificial Sequence
  Description of Artificial Sequence: Synthetic oligonucleotide
aucgaaauuucgaucccag

SEQ ID NO: 1482154 - RNA, 19 nt, Artificial Sequence
  Description of Artificial Sequence: Synthetic oligonucleotide
caggucugaaguccugacg

SEQ ID NO: 1482155 - RNA, 19 nt, Artificial Sequence
  Description of Artificial Sequence: Synthetic oligonucleotide
uagcacacucaaaaccagu

SEQ ID NO: 1482156 - RNA, 19 nt, Artificial Sequence
  Description of Artificial Sequence: Synthetic oligonucleotide
uccugacggggauagugcc

SEQ ID NO: 1482157 - RNA, 19 nt, Artificial Sequence
  Description of Artificial Sequence: Synthetic oligonucleotide
uuuugacgggugccccugg

SEQ ID NO: 1482158 - RNA, 19 nt, Artificial Sequence
  Description of Artificial Sequence: Synthetic oligonucleotide
auagccauacaagaagcaa

SEQ ID NO: 1482159 - RNA, 19 nt, Artificial Sequence
  Description of Artificial Sequence: Synthetic oligonucleotide
ucaaagucgcugaguuugu

SEQ ID NO: 1482160 - RNA, 19 nt, Artificial Sequence
  Description of Artificial Sequence: Synthetic oligonucleotide
acacuuaccuaaaacacua

SEQ ID NO: 1482161 - RNA, 19 nt, Artificial Sequence
  Description of Artificial Sequence: Synthetic oligonucleotide
aauuucgaucccagggaca

SEQ ID NO: 1482162 - RNA, 19 nt, Artificial Sequence
  Description of Artificial Sequence: Synthetic oligonucleotide
gucugguccaauuuccaga

SEQ ID NO: 1482163 - RNA, 19 nt, Artificial Sequence
  Description of Artificial Sequence: Synthetic oligonucleotide
uugggugguuugaaggaaa

SEQ ID NO: 1482164 - RNA, 19 nt, Artificial Sequence
  Description of Artificial Sequence: Synthetic oligonucleotide
acuacuugauaugauucau

SEQ ID NO: 1482165 - RNA, 19 nt, Artificial Sequence
  Description of Artificial Sequence: Synthetic oligonucleotide
auuucgaucccagggacaa

SEQ ID NO: 1482166 - RNA, 19 nt, Artificial Sequence
  Description of Artificial Sequence: Synthetic oligonucleotide
gucugaaguccugacgggg

SEQ ID NO: 1482167 - RNA, 19 nt, Artificial Sequence
  Description of Artificial Sequence: Synthetic oligonucleotide
uggagauuacagaggcccu

SEQ ID NO: 1482168 - RNA, 19 nt, Artificial Sequence
  Description of Artificial Sequence: Synthetic oligonucleotide
uagaucugagagauuugua

SEQ ID NO: 1482169 - RNA, 19 nt, Artificial Sequence
  Description of Artificial Sequence: Synthetic oligonucleotide
ucuuaaggugggccacgcc

SEQ ID NO: 1482170 - RNA, 19 nt, Artificial Sequence
  Description of Artificial Sequence: Synthetic oligonucleotide
uacugccuaucuuaccuaa

SEQ ID NO: 1482171 - RNA, 19 nt, Artificial Sequence
  Description of Artificial Sequence: Synthetic oligonucleotide
guacccaggucugaagucc

SEQ ID NO: 1482172 - RNA, 19 nt, Artificial Sequence
  Description of Artificial Sequence: Synthetic oligonucleotide
aacaacuacuugauaugau

SEQ ID NO: 1482173 - RNA, 19 nt, Artificial Sequence
  Description of Artificial Sequence: Synthetic oligonucleotide
acuaugaaaggcgcagaca

SEQ ID NO: 1482174 - RNA, 19 nt, Artificial Sequence
  Description of Artificial Sequence: Synthetic oligonucleotide
cugucaacccucaugaagu

SEQ ID NO: 1482175 - RNA, 19 nt, Artificial Sequence
  Description of Artificial Sequence: Synthetic oligonucleotide
agccauacaagaagcaaga

SEQ ID NO: 1482176 - RNA, 19 nt, Artificial Sequence
  Description of Artificial Sequence: Synthetic oligonucleotide
gaguuuguguaaagagcgc

SEQ ID NO: 1482177 - RNA, 19 nt, Artificial Sequence
  Description of Artificial Sequence: Synthetic oligonucleotide
uuugacgggugccccuggc

SEQ ID NO: 1482178 - RNA, 19 nt, Artificial Sequence
  Description of Artificial Sequence: Synthetic oligonucleotide
augagcauuggggaugcug

SEQ ID NO: 1482179 - RNA, 19 nt, Artificial Sequence
  Description of Artificial Sequence: Synthetic oligonucleotide
uucaaccuucgaagcuucc

SEQ ID NO: 1482180 - RNA, 19 nt, Artificial Sequence
  Description of Artificial Sequence: Synthetic oligonucleotide
ccugucaacccucaugaag

SEQ ID NO: 1482181 - RNA, 19 nt, Artificial Sequence
  Description of Artificial Sequence: Synthetic oligonucleotide
guuuguuacuguggugugc

SEQ ID NO: 1482182 - RNA, 19 nt, Artificial Sequence
  Description of Artificial Sequence: Synthetic oligonucleotide
uguccgcucaaagugcgga

SEQ ID NO: 1482183 - RNA, 19 nt, Artificial Sequence
  Description of Artificial Sequence: Synthetic oligonucleotide
cuucaaccuucgaagcuuc

SEQ ID NO: 1482184 - RNA, 19 nt, Artificial Sequence
  Description of Artificial Sequence: Synthetic oligonucleotide
cuugccuggucugugcuug

SEQ ID NO: 1482185 - RNA, 19 nt, Artificial Sequence
  Description of Artificial Sequence: Synthetic oligonucleotide
uggguuuguuacuguggug

SEQ ID NO: 1482186 - RNA, 19 nt, Artificial Sequence
  Description of Artificial Sequence: Synthetic oligonucleotide
cuaagcauuuucaguugga

SEQ ID NO: 1482187 - RNA, 19 nt, Artificial Sequence
  Description of Artificial Sequence: Synthetic oligonucleotide
ucggucuguggacucggca

SEQ ID NO: 1482188 - RNA, 19 nt, Artificial Sequence
  Description of Artificial Sequence: Synthetic oligonucleotide
agccugauuacugccuauc

SEQ ID NO: 1482189 - RNA, 19 nt, Artificial Sequence
  Description of Artificial Sequence: Synthetic oligonucleotide
aagagcgcucagccaggag

SEQ ID NO: 1482190 - RNA, 19 nt, Artificial Sequence
  Description of Artificial Sequence: Synthetic oligonucleotide
acuucaaccuucgaagcuu

SEQ ID NO: 1482191 - RNA, 19 nt, Artificial Sequence
  Description of Artificial Sequence: Synthetic oligonucleotide
uccuaccaagucccugacc

SEQ ID NO: 1482192 - RNA, 19 nt, Artificial Sequence
  Description of Artificial Sequence: Synthetic oligonucleotide
cuguggacucggcagcugc

SEQ ID NO: 1482193 - RNA, 19 nt, Artificial Sequence
  Description of Artificial Sequence: Synthetic oligonucleotide
cuaguucacugaugcuggc

SEQ ID NO: 1482194 - RNA, 19 nt, Artificial Sequence
  Description of Artificial Sequence: Synthetic oligonucleotide
caaagugcggagcaggucu

SEQ ID NO: 1482195 - RNA, 19 nt, Artificial Sequence
  Description of Artificial Sequence: Synthetic oligonucleotide
uucuuaaggugggccacgc

SEQ ID NO: 1482196 - RNA, 19 nt, Artificial Sequence
  Description of Artificial Sequence: Synthetic oligonucleotide
aaucuacuucugaaguaaa

SEQ ID NO: 1482197 - RNA, 19 nt, Artificial Sequence
  Description of Artificial Sequence: Synthetic oligonucleotide
caauuacuauaucccaaga

SEQ ID NO: 1482198 - RNA, 19 nt, Artificial Sequence
  Description of Artificial Sequence: Synthetic oligonucleotide
uugaguccggccacuguau

SEQ ID NO: 1482199 - RNA, 19 nt, Artificial Sequence
  Description of Artificial Sequence: Synthetic oligonucleotide
ugccugagucacuuuggga

SEQ ID NO: 1482200 - RNA, 19 nt, Artificial Sequence
  Description of Artificial Sequence: Synthetic oligonucleotide
ugggugguuugaaggaaau

SEQ ID NO: 1482201 - RNA, 19 nt, Artificial Sequence
  Description of Artificial Sequence: Synthetic oligonucleotide
ucacuaugaaaggcgcaga

SEQ ID NO: 1482202 - RNA, 19 nt, Artificial Sequence
  Description of Artificial Sequence: Synthetic oligonucleotide
gagcauuggggaugcuggc

SEQ ID NO: 1482203 - RNA, 19 nt, Artificial Sequence
  Description of Artificial Sequence: Synthetic oligonucleotide
uccgcucaaagugcggagc

SEQ ID NO: 1482204 - RNA, 19 nt, Artificial Sequence
  Description of Artificial Sequence: Synthetic oligonucleotide
uccaggcaaaucuguuugu

SEQ ID NO: 1482205 - RNA, 19 nt, Artificial Sequence
  Description of Artificial Sequence: Synthetic oligonucleotide
gacggggauagugccaagc

SEQ ID NO: 1482206 - RNA, 19 nt, Artificial Sequence
  Description of Artificial Sequence: Synthetic oligonucleotide
uuacugccuaucuuaccua

SEQ ID NO: 1482207 - RNA, 19 nt, Artificial Sequence
  Description of Artificial Sequence: Synthetic oligonucleotide
agucccugacccuggagau

SEQ ID NO: 1482208 - RNA, 19 nt, Artificial Sequence
  Description of Artificial Sequence: Synthetic oligonucleotide
aaagugcggagcaggucug

SEQ ID NO: 1482209 - RNA, 19 nt, Artificial Sequence
  Description of Artificial Sequence: Synthetic oligonucleotide
ucgaagcuuccuucugugu

SEQ ID NO: 1482210 - RNA, 19 nt, Artificial Sequence
  Description of Artificial Sequence: Synthetic oligonucleotide
acuucggucuguggacucg

SEQ ID NO: 1482211 - RNA, 19 nt, Artificial Sequence
  Description of Artificial Sequence: Synthetic oligonucleotide
cauuccuagucuagaauua

SEQ ID NO: 1482212 - RNA, 19 nt, Artificial Sequence
  Description of Artificial Sequence: Synthetic oligonucleotide
cuuccguaugcuugcucac

SEQ ID NO: 1482213 - RNA, 19 nt, Artificial Sequence
  Description of Artificial Sequence: Synthetic oligonucleotide
caagaccaaacacuuaccu

SEQ ID NO: 1482214 - RNA, 19 nt, Artificial Sequence
  Description of Artificial Sequence: Synthetic oligonucleotide
uacccaggucugaaguccu

SEQ ID NO: 1482215 - RNA, 19 nt, Artificial Sequence
  Description of Artificial Sequence: Synthetic oligonucleotide
uggaugcccguuugcuugc

SEQ ID NO: 1482216 - RNA, 19 nt, Artificial Sequence
  Description of Artificial Sequence: Synthetic oligonucleotide
aguuggacucugcugccau

SEQ ID NO: 1482217 - RNA, 19 nt, Artificial Sequence
  Description of Artificial Sequence: Synthetic oligonucleotide
gccagaaauccugucaacc

SEQ ID NO: 1482218 - RNA, 19 nt, Artificial Sequence
  Description of Artificial Sequence: Synthetic oligonucleotide
aucagagcacuggcuugcc

SEQ ID NO: 1482219 - RNA, 19 nt, Artificial Sequence
  Description of Artificial Sequence: Synthetic oligonucleotide
uuccuaccaagucccugac

SEQ ID NO: 1482220 - RNA, 19 nt, Artificial Sequence
  Description of Artificial Sequence: Synthetic oligonucleotide
cagcagccugauuacugcc

SEQ ID NO: 1482221 - RNA, 19 nt, Artificial Sequence
  Description of Artificial Sequence: Synthetic oligonucleotide
cuugcuguccgcucaaagu

SEQ ID NO: 1482222 - RNA, 19 nt, Artificial Sequence
  Description of Artificial Sequence: Synthetic oligonucleotide
uaucuuaccuaagcauuuu

SEQ ID NO: 1482223 - RNA, 19 nt, Artificial Sequence
  Description of Artificial Sequence: Synthetic oligonucleotide
gcuuccuuccguaugcuug

SEQ ID NO: 1482224 - RNA, 19 nt, Artificial Sequence
  Description of Artificial Sequence: Synthetic oligonucleotide
cuggugcagaggugggccg

SEQ ID NO: 1482225 - RNA, 19 nt, Artificial Sequence
  Description of Artificial Sequence: Synthetic oligonucleotide
gguuuguuacuguggugug

SEQ ID NO: 1482226 - RNA, 19 nt, Artificial Sequence
  Description of Artificial Sequence: Synthetic oligonucleotide
aaagagcgcucagccagga

SEQ ID NO: 1482227 - RNA, 19 nt, Artificial Sequence
  Description of Artificial Sequence: Synthetic oligonucleotide
cuacuugauaugauucaua

SEQ ID NO: 1482228 - RNA, 19 nt, Artificial Sequence
  Description of Artificial Sequence: Synthetic oligonucleotide
ucaaagugcggagcagguc

SEQ ID NO: 1482229 - RNA, 19 nt, Artificial Sequence
  Description of Artificial Sequence: Synthetic oligonucleotide
aguccggccacuguaucga

SEQ ID NO: 1482230 - RNA, 19 nt, Artificial Sequence
  Description of Artificial Sequence: Synthetic oligonucleotide
agucgcugaguuuguguaa

SEQ ID NO: 1482231 - RNA, 19 nt, Artificial Sequence
  Description of Artificial Sequence: Synthetic oligonucleotide
cugagcaauggcuggugca

SEQ ID NO: 1482232 - RNA, 19 nt, Artificial Sequence
  Description of Artificial Sequence: Synthetic oligonucleotide
cuugucuaaauccuuccau

SEQ ID NO: 1482233 - RNA, 19 nt, Artificial Sequence
  Description of Artificial Sequence: Synthetic oligonucleotide
aaauuccuaccaagucccu

SEQ ID NO: 1482234 - RNA, 19 nt, Artificial Sequence
  Description of Artificial Sequence: Synthetic oligonucleotide
cuugaguccggccacugua

SEQ ID NO: 1482235 - RNA, 19 nt, Artificial Sequence
  Description of Artificial Sequence: Synthetic oligonucleotide
uuccguaugcuugcucacu

SEQ ID NO: 1482236 - RNA, 19 nt, Artificial Sequence
  Description of Artificial Sequence: Synthetic oligonucleotide
ugucaacccucaugaaguu

SEQ ID NO: 1482237 - RNA, 19 nt, Artificial Sequence
  Description of Artificial Sequence: Synthetic oligonucleotide
agcaggucugucaaucaga

SEQ ID NO: 1482238 - RNA, 19 nt, Artificial Sequence
  Description of Artificial Sequence: Synthetic oligonucleotide
aggugggccgaggacuucg

SEQ ID NO: 1482239 - RNA, 19 nt, Artificial Sequence
  Description of Artificial Sequence: Synthetic oligonucleotide
cagguacccaggucugaag

SEQ ID NO: 1482240 - RNA, 19 nt, Artificial Sequence
  Description of Artificial Sequence: Synthetic oligonucleotide
cuucggucuguggacucgg

SEQ ID NO: 1482241 - RNA, 19 nt, Artificial Sequence
  Description of Artificial Sequence: Synthetic oligonucleotide
ccauuucuuaaggugggcc

SEQ ID NO: 1482242 - RNA, 19 nt, Artificial Sequence
  Description of Artificial Sequence: Synthetic oligonucleotide
cugugaccugacucugagc

SEQ ID NO: 1482243 - RNA, 19 nt, Artificial Sequence
  Description of Artificial Sequence: Synthetic oligonucleotide
aucuacuucugaaguaaaa

SEQ ID NO: 1482244 - RNA, 19 nt, Artificial Sequence
  Description of Artificial Sequence: Synthetic oligonucleotide
guccugacggggauagugc

SEQ ID NO: 1482245 - RNA, 19 nt, Artificial Sequence
  Description of Artificial Sequence: Synthetic oligonucleotide
gauuacagaggcccuguuu

SEQ ID NO: 1482246 - RNA, 19 nt, Artificial Sequence
  Description of Artificial Sequence: Synthetic oligonucleotide
ccggaguuagccuccuugg

SEQ ID NO: 1482247 - RNA, 19 nt, Artificial Sequence
  Description of Artificial Sequence: Synthetic oligonucleotide
guccgcucaaagugcggag

SEQ ID NO: 1482248 - RNA, 19 nt, Artificial Sequence
  Description of Artificial Sequence: Synthetic oligonucleotide
ucgaucccagggacaagaa

SEQ ID NO: 1482249 - RNA, 19 nt, Artificial Sequence
  Description of Artificial Sequence: Synthetic oligonucleotide
guuugcuugcuguccgcuc

SEQ ID NO: 1482250 - RNA, 19 nt, Artificial Sequence
  Description of Artificial Sequence: Synthetic oligonucleotide
uucggucuguggacucggc

SEQ ID NO: 1482251 - RNA, 19 nt, Artificial Sequence
  Description of Artificial Sequence: Synthetic oligonucleotide
ggggauagugccaagccca

SEQ ID NO: 1482252 - RNA, 19 nt, Artificial Sequence
  Description of Artificial Sequence: Synthetic oligonucleotide
gggacaagaaauuuacuuu

SEQ ID NO: 1482253 - RNA, 19 nt, Artificial Sequence
  Description of Artificial Sequence: Synthetic oligonucleotide
uuacuguggugugccugag

SEQ ID NO: 1482254 - RNA, 19 nt, Artificial Sequence
  Description of Artificial Sequence: Synthetic oligonucleotide
gcaguuggguuuguuacug

SEQ ID NO: 1482255 - RNA, 19 nt, Artificial Sequence
  Description of Artificial Sequence: Synthetic oligonucleotide
gaugcccguuugcuugcug

SEQ ID NO: 1482256 - RNA, 19 nt, Artificial Sequence
  Description of Artificial Sequence: Synthetic oligonucleotide
ggagauuacagaggcccug

SEQ ID NO: 1482257 - RNA, 19 nt, Artificial Sequence
  Description of Artificial Sequence: Synthetic oligonucleotide
gacuucggucuguggacuc

SEQ ID NO: 1482258 - RNA, 19 nt, Artificial Sequence
  Description of Artificial Sequence: Synthetic oligonucleotide
uuguuacuguggugugccu

SEQ ID NO: 1482259 - RNA, 19 nt, Artificial Sequence
  Description of Artificial Sequence: Synthetic oligonucleotide
uccuuccguaugcuugcuc

SEQ ID NO: 1482260 - RNA, 19 nt, Artificial Sequence
  Description of Artificial Sequence: Synthetic oligonucleotide
uuucgaucccagggacaag

SEQ ID NO: 1482261 - RNA, 19 nt, Artificial Sequence
  Description of Artificial Sequence: Synthetic oligonucleotide
acaacaagccccagggcuu

SEQ ID NO: 1482262 - RNA, 19 nt, Artificial Sequence
  Description of Artificial Sequence: Synthetic oligonucleotide
gguacccaggucugaaguc

SEQ ID NO: 1482263 - RNA, 19 nt, Artificial Sequence
  Description of Artificial Sequence: Synthetic oligonucleotide
ugcccguuugcuugcuguc

SEQ ID NO: 1482264 - RNA, 19 nt, Artificial Sequence
  Description of Artificial Sequence: Synthetic oligonucleotide
cguaugcuugcucacugcc

SEQ ID NO: 1482265 - RNA, 19 nt, Artificial Sequence
  Description of Artificial Sequence: Synthetic oligonucleotide
caaagucgcugaguuugug

SEQ ID NO: 1482266 - RNA, 19 nt, Artificial Sequence
  Description of Artificial Sequence: Synthetic oligonucleotide
uccggccacuguaucgaaa

SEQ ID NO: 1482267 - RNA, 19 nt, Artificial Sequence
  Description of Artificial Sequence: Synthetic oligonucleotide
agcuuccaggcaaaucugu

SEQ ID NO: 1482268 - RNA, 19 nt, Artificial Sequence
  Description of Artificial Sequence: Synthetic oligonucleotide
ccuuccguaugcuugcuca

SEQ ID NO: 1482269 - RNA, 19 nt, Artificial Sequence
  Description of Artificial Sequence: Synthetic oligonucleotide
uggugugccugagucacuu

SEQ ID NO: 1482270 - RNA, 19 nt, Artificial Sequence
  Description of Artificial Sequence: Synthetic oligonucleotide
gcaagaccaaacacuuacc

SEQ ID NO: 1482271 - RNA, 19 nt, Artificial Sequence
  Description of Artificial Sequence: Synthetic oligonucleotide
agauuacagaggcccuguu

SEQ ID NO: 1482272 - RNA, 19 nt, Artificial Sequence
  Description of Artificial Sequence: Synthetic oligonucleotide
ugcuugaguccggccacug

SEQ ID NO: 1482273 - RNA, 19 nt, Artificial Sequence
  Description of Artificial Sequence: Synthetic oligonucleotide
uccugucaacccucaugaa

SEQ ID NO: 1482274 - RNA, 19 nt, Artificial Sequence
  Description of Artificial Sequence: Synthetic oligonucleotide
cccguuugcuugcuguccg

SEQ ID NO: 1482275 - RNA, 19 nt, Artificial Sequence
  Description of Artificial Sequence: Synthetic oligonucleotide
gagauuacagaggcccugu

SEQ ID NO: 1482276 - RNA, 19 nt, Artificial Sequence
  Description of Artificial Sequence: Synthetic oligonucleotide
gacccuggagaugggaaaa

SEQ ID NO: 1482277 - RNA, 19 nt, Artificial Sequence
  Description of Artificial Sequence: Synthetic oligonucleotide
ccaagcccagugcuaaaag

SEQ ID NO: 1482278 - RNA, 19 nt, Artificial Sequence
  Description of Artificial Sequence: Synthetic oligonucleotide
ugaaguccugacggggaua

SEQ ID NO: 1482279 - RNA, 19 nt, Artificial Sequence
  Description of Artificial Sequence: Synthetic oligonucleotide
ugacggggauagugccaag

SEQ ID NO: 1482280 - RNA, 19 nt, Artificial Sequence
  Description of Artificial Sequence: Synthetic oligonucleotide
cuauaucccaagaucuguu

SEQ ID NO: 1482281 - RNA, 19 nt, Artificial Sequence
  Description of Artificial Sequence: Synthetic oligonucleotide
aagcaagaccaaacacuua

SEQ ID NO: 1482282 - RNA, 19 nt, Artificial Sequence
  Description of Artificial Sequence: Synthetic oligonucleotide
gucaacccucaugaaguuc

SEQ ID NO: 1482283 - RNA, 19 nt, Artificial Sequence
  Description of Artificial Sequence: Synthetic oligonucleotide
ggcuucuauuucccaugag

SEQ ID NO: 1482284 - RNA, 19 nt, Artificial Sequence
  Description of Artificial Sequence: Synthetic oligonucleotide
cucaaagugcggagcaggu

SEQ ID NO: 1482285 - RNA, 19 nt, Artificial Sequence
  Description of Artificial Sequence: Synthetic oligonucleotide
cccggaguuagccuccuug

SEQ ID NO: 1482286 - RNA, 19 nt, Artificial Sequence
  Description of Artificial Sequence: Synthetic oligonucleotide
gcugccauaguuccuauuu

SEQ ID NO: 1482287 - RNA, 19 nt, Artificial Sequence
  Description of Artificial Sequence: Synthetic oligonucleotide
ccuucagcccucagccgcg

SEQ ID NO: 1482288 - RNA, 19 nt, Artificial Sequence
  Description of Artificial Sequence: Synthetic oligonucleotide
gcuaggccggaacuccagc

SEQ ID NO: 1482289 - RNA, 19 nt, Artificial Sequence
  Description of Artificial Sequence: Synthetic oligonucleotide
auaauagaucugagagauu

SEQ ID NO: 1482290 - RNA, 19 nt, Artificial Sequence
  Description of Artificial Sequence: Synthetic oligonucleotide
gccauaguuccuauuuguc

SEQ ID NO: 1482291 - RNA, 19 nt, Artificial Sequence
  Description of Artificial Sequence: Synthetic oligonucleotide
aacccucaugaaguucauu

SEQ ID NO: 1482292 - RNA, 19 nt, Artificial Sequence
  Description of Artificial Sequence: Synthetic oligonucleotide
cugacggggauagugccaa

SEQ ID NO: 1482293 - RNA, 19 nt, Artificial Sequence
  Description of Artificial Sequence: Synthetic oligonucleotide
caacaagccccagggcuuc

SEQ ID NO: 1482294 - RNA, 19 nt, Artificial Sequence
  Description of Artificial Sequence: Synthetic oligonucleotide
gccuaucuuaccuaagcau

SEQ ID NO: 1482295 - RNA, 19 nt, Artificial Sequence
  Description of Artificial Sequence: Synthetic oligonucleotide
cuccagcuccauuucuuaa

SEQ ID NO: 1482296 - RNA, 19 nt, Artificial Sequence
  Description of Artificial Sequence: Synthetic oligonucleotide
ugcuggcauugauugucuu

SEQ ID NO: 1482297 - RNA, 19 nt, Artificial Sequence
  Description of Artificial Sequence: Synthetic oligonucleotide
ccuaucuuaccuaagcauu

SEQ ID NO: 1482298 - RNA, 19 nt, Artificial Sequence
  Description of Artificial Sequence: Synthetic oligonucleotide
cccaugagcauuggggaug

SEQ ID NO: 1482299 - RNA, 19 nt, Artificial Sequence
  Description of Artificial Sequence: Synthetic oligonucleotide
gggauagugccaagcccag

SEQ ID NO: 1482300 - RNA, 19 nt, Artificial Sequence
  Description of Artificial Sequence: Synthetic oligonucleotide
ccaggucugaaguccugac

SEQ ID NO: 1482301 - RNA, 19 nt, Artificial Sequence
  Description of Artificial Sequence: Synthetic oligonucleotide
aacaagccccagggcuucu

SEQ ID NO: 1482302 - RNA, 19 nt, Artificial Sequence
  Description of Artificial Sequence: Synthetic oligonucleotide
ccaugagcauuggggaugc

SEQ ID NO: 1482303 - RNA, 19 nt, Artificial Sequence
  Description of Artificial Sequence: Synthetic oligonucleotide
cuucagcccucagccgcgg

SEQ ID NO: 1482304 - RNA, 19 nt, Artificial Sequence
  Description of Artificial Sequence: Synthetic oligonucleotide
ccguaugcuugcucacugc

SEQ ID NO: 1482305 - RNA, 19 nt, Artificial Sequence
  Description of Artificial Sequence: Synthetic oligonucleotide
gucuagaauuaggaaucua

SEQ ID NO: 1482306 - RNA, 19 nt, Artificial Sequence
  Description of Artificial Sequence: Synthetic oligonucleotide
gccauacaagaagcaagac

SEQ ID NO: 1482307 - RNA, 19 nt, Artificial Sequence
  Description of Artificial Sequence: Synthetic oligonucleotide
gcuggagauuacagaggcc

SEQ ID NO: 1482308 - RNA, 19 nt, Artificial Sequence
  Description of Artificial Sequence: Synthetic oligonucleotide
uuagccuccuugggugguu

SEQ ID NO: 1482309 - RNA, 19 nt, Artificial Sequence
  Description of Artificial Sequence: Synthetic oligonucleotide
cggaguuagccuccuuggg

SEQ ID NO: 1482310 - RNA, 19 nt, Artificial Sequence
  Description of Artificial Sequence: Synthetic oligonucleotide
cggggauagugccaagccc

SEQ ID NO: 1482311 - RNA, 19 nt, Artificial Sequence
  Description of Artificial Sequence: Synthetic oligonucleotide
cagggacaagaaauuuacu

SEQ ID NO: 1482312 - RNA, 19 nt, Artificial Sequence
  Description of Artificial Sequence: Synthetic oligonucleotide
aaguccugacggggauagu

SEQ ID NO: 1482313 - RNA, 19 nt, Artificial Sequence
  Description of Artificial Sequence: Synthetic oligonucleotide
ucacugcccuucagcccuc

SEQ ID NO: 1482314 - RNA, 19 nt, Artificial Sequence
  Description of Artificial Sequence: Synthetic oligonucleotide
cagggcuucuauuucccau

SEQ ID NO: 1482315 - RNA, 19 nt, Artificial Sequence
  Description of Artificial Sequence: Synthetic oligonucleotide
guuggacucugcugccaua

SEQ ID NO: 1482316 - RNA, 19 nt, Artificial Sequence
  Description of Artificial Sequence: Synthetic oligonucleotide
gucagguacccaggucuga

SEQ ID NO: 1482317 - RNA, 19 nt, Artificial Sequence
  Description of Artificial Sequence: Synthetic oligonucleotide
agacugcuguggcuuccuu

SEQ ID NO: 1482318 - RNA, 19 nt, Artificial Sequence
  Description of Artificial Sequence: Synthetic oligonucleotide
ggacucggcagcugcucca

SEQ ID NO: 1482319 - RNA, 19 nt, Artificial Sequence
  Description of Artificial Sequence: Synthetic oligonucleotide
cuaccaagucccugacccu

SEQ ID NO: 1482320 - RNA, 19 nt, Artificial Sequence
  Description of Artificial Sequence: Synthetic oligonucleotide
caucagaagucugguccaa

SEQ ID NO: 1482321 - RNA, 19 nt, Artificial Sequence
  Description of Artificial Sequence: Synthetic oligonucleotide
gcccguuugcuugcugucc

SEQ ID NO: 1482322 - RNA, 19 nt, Artificial Sequence
  Description of Artificial Sequence: Synthetic oligonucleotide
gcagccugauuacugccua

SEQ ID NO: 1482323 - RNA, 19 nt, Artificial Sequence
  Description of Artificial Sequence: Synthetic oligonucleotide
ggcugccagaaauccuguc

SEQ ID NO: 1482324 - RNA, 19 nt, Artificial Sequence
  Description of Artificial Sequence: Synthetic oligonucleotide
cagcuccauuucuuaaggu

SEQ ID NO: 1482325 - RNA, 19 nt, Artificial Sequence
  Description of Artificial Sequence: Synthetic oligonucleotide
gccccuggcgcuucuguga

SEQ ID NO: 1482326 - RNA, 19 nt, Artificial Sequence
  Description of Artificial Sequence: Synthetic oligonucleotide
aggcagcaagagagaagca

SEQ ID NO: 1482327 - RNA, 19 nt, Artificial Sequence
  Description of Artificial Sequence: Synthetic oligonucleotide
gcuguggcuuccuuccgua

SEQ ID NO: 1482328 - RNA, 19 nt, Artificial Sequence
  Description of Artificial Sequence: Synthetic oligonucleotide
ccguuugcuugcuguccgc

SEQ ID NO: 1482329 - RNA, 19 nt, Artificial Sequence
  Description of Artificial Sequence: Synthetic oligonucleotide
ccugacggggauagugcca

SEQ ID NO: 1482330 - RNA, 19 nt, Artificial Sequence
  Description of Artificial Sequence: Synthetic oligonucleotide
guuagccuccuuggguggu

SEQ ID NO: 1482331 - RNA, 19 nt, Artificial Sequence
  Description of Artificial Sequence: Synthetic oligonucleotide
ggccgaggacuucggucug

SEQ ID NO: 1482332 - RNA, 19 nt, Artificial Sequence
  Description of Artificial Sequence: Synthetic oligonucleotide
ccgcggcugccagaaaucc

SEQ ID NO: 1482333 - RNA, 19 nt, Artificial Sequence
  Description of Artificial Sequence: Synthetic oligonucleotide
ccccuggcgcuucugugac

SEQ ID NO: 1482334 - RNA, 19 nt, Artificial Sequence
  Description of Artificial Sequence: Synthetic oligonucleotide
gucuguggacucggcagcu

SEQ ID NO: 1482335 - RNA, 19 nt, Artificial Sequence
  Description of Artificial Sequence: Synthetic oligonucleotide
cucagccgcggcugccaga

SEQ ID NO: 1482336 - RNA, 19 nt, Artificial Sequence
  Description of Artificial Sequence: Synthetic oligonucleotide
ccacaucugucacuaugaa

SEQ ID NO: 1482337 - RNA, 19 nt, Artificial Sequence
  Description of Artificial Sequence: Synthetic oligonucleotide
acaagccccagggcuucua

SEQ ID NO: 1482338 - RNA, 19 nt, Artificial Sequence
  Description of Artificial Sequence: Synthetic oligonucleotide
gaggugggccgaggacuuc

SEQ ID NO: 1482339 - RNA, 19 nt, Artificial Sequence
  Description of Artificial Sequence: Synthetic oligonucleotide
guccggccacuguaucgaa

SEQ ID NO: 1482340 - RNA, 19 nt, Artificial Sequence
  Description of Artificial Sequence: Synthetic oligonucleotide
ccugauuacugccuaucuu

SEQ ID NO: 1482341 - RNA, 19 nt, Artificial Sequence
  Description of Artificial Sequence: Synthetic oligonucleotide
ggcuugccuggucugugcu

SEQ ID NO: 1482342 - RNA, 19 nt, Artificial Sequence
  Description of Artificial Sequence: Synthetic oligonucleotide
ggacuucggucuguggacu

SEQ ID NO: 1482343 - RNA, 19 nt, Artificial Sequence
  Description of Artificial Sequence: Synthetic oligonucleotide
ccaggcaaaucuguuugua

SEQ ID NO: 1482344 - RNA, 19 nt, Artificial Sequence
  Description of Artificial Sequence: Synthetic oligonucleotide
ccggccacuguaucgaaau

SEQ ID NO: 1482345 - RNA, 19 nt, Artificial Sequence
  Description of Artificial Sequence: Synthetic oligonucleotide
cggaacuccagcuccauuu

SEQ ID NO: 1482346 - RNA, 19 nt, Artificial Sequence
  Description of Artificial Sequence: Synthetic oligonucleotide
ccgaggacuucggucugug

SEQ ID NO: 1482347 - RNA, 19 nt, Artificial Sequence
  Description of Artificial Sequence: Synthetic oligonucleotide
caagccccagggcuucuau

SEQ ID NO: 1482348 - RNA, 19 nt, Artificial Sequence
  Description of Artificial Sequence: Synthetic oligonucleotide
gcuugaguccggccacugu

SEQ ID NO: 1482349 - RNA, 19 nt, Artificial Sequence
  Description of Artificial Sequence: Synthetic oligonucleotide
cuguggcuuccuuccguau

SEQ ID NO: 1482350 - RNA, 19 nt, Artificial Sequence
  Description of Artificial Sequence: Synthetic oligonucleotide
cagccugauuacugccuau

SEQ ID NO: 1482351 - RNA, 19 nt, Artificial Sequence
  Description of Artificial Sequence: Synthetic oligonucleotide
ccugacccuggagauggga

SEQ ID NO: 1482352 - RNA, 19 nt, Artificial Sequence
  Description of Artificial Sequence: Synthetic oligonucleotide
cccuggcgcuucugugacc

SEQ ID NO: 1482353 - RNA, 19 nt, Artificial Sequence
  Description of Artificial Sequence: Synthetic oligonucleotide
ggguccccggaguuagccu

SEQ ID NO: 1482354 - RNA, 19 nt, Artificial Sequence
  Description of Artificial Sequence: Synthetic oligonucleotide
ggaugcuggcuaggccgga

SEQ ID NO: 1482355 - RNA, 19 nt, Artificial Sequence
  Description of Artificial Sequence: Synthetic oligonucleotide
gggaggguccccggaguua

SEQ ID NO: 1482356 - RNA, 19 nt, Artificial Sequence
  Description of Artificial Sequence: Synthetic oligonucleotide
guggugugccugagucacu

SEQ ID NO: 1482357 - RNA, 19 nt, Artificial Sequence
  Description of Artificial Sequence: Synthetic oligonucleotide
gcuugccuggucugugcuu

SEQ ID NO: 1482358 - RNA, 19 nt, Artificial Sequence
  Description of Artificial Sequence: Synthetic oligonucleotide
ggugugccugagucacuuu

SEQ ID NO: 1482359 - RNA, 19 nt, Artificial Sequence
  Description of Artificial Sequence: Synthetic oligonucleotide
gcgcuucugugaccugacu

SEQ ID NO: 1482360 - RNA, 19 nt, Artificial Sequence
  Description of Artificial Sequence: Synthetic oligonucleotide
caugagcauuggggaugcu

SEQ ID NO: 1482361 - RNA, 19 nt, Artificial Sequence
  Description of Artificial Sequence: Synthetic oligonucleotide
cagccacaucugucacuau

SEQ ID NO: 1482362 - RNA, 19 nt, Artificial Sequence
  Description of Artificial Sequence: Synthetic oligonucleotide
ggaugcccguuugcuugcu

SEQ ID NO: 1482363 - RNA, 19 nt, Artificial Sequence
  Description of Artificial Sequence: Synthetic oligonucleotide
gccgaggacuucggucugu

SEQ ID NO: 1482364 - RNA, 19 nt, Artificial Sequence
  Description of Artificial Sequence: Synthetic oligonucleotide
gccggaacuccagcuccau

SEQ ID NO: 1482365 - RNA, 19 nt, Artificial Sequence
  Description of Artificial Sequence: Synthetic oligonucleotide
ccggaacuccagcuccauu

SEQ ID NO: 1482366 - RNA, 19 nt, Artificial Sequence
  Description of Artificial Sequence: Synthetic oligonucleotide
cggccacuguaucgaaauu

SEQ ID NO: 1482367 - RNA, 19 nt, Artificial Sequence
  Description of Artificial Sequence: Synthetic oligonucleotide
ccccggaguuagccuccuu

SEQ ID NO: 1482368 - RNA, 19 nt, Artificial Sequence
  Description of Artificial Sequence: Synthetic oligonucleotide
aauauaggccucuacauga

SEQ ID NO: 1482369 - RNA, 19 nt, Artificial Sequence
  Description of Artificial Sequence: Synthetic oligonucleotide
uggggugucucuaauaggg

SEQ ID NO: 1482370 - RNA, 19 nt, Artificial Sequence
  Description of Artificial Sequence: Synthetic oligonucleotide
uccgaagucaauauaggcc

SEQ ID NO: 1482371 - RNA, 19 nt, Artificial Sequence
  Description of Artificial Sequence: Synthetic oligonucleotide
agcggugucacucagcaac

SEQ ID NO: 1482372 - RNA, 19 nt, Artificial Sequence
  Description of Artificial Sequence: Synthetic oligonucleotide
caacauguaccccugagcg

SEQ ID NO: 1482373 - RNA, 19 nt, Artificial Sequence
  Description of Artificial Sequence: Synthetic oligonucleotide
ucuuagaucaagaucuagu

SEQ ID NO: 1482374 - RNA, 19 nt, Artificial Sequence
  Description of Artificial Sequence: Synthetic oligonucleotide
cuuagaucaagaucuagug

SEQ ID NO: 1482375 - RNA, 19 nt, Artificial Sequence
  Description of Artificial Sequence: Synthetic oligonucleotide
ugagccagagccuugguga

SEQ ID NO: 1482376 - RNA, 19 nt, Artificial Sequence
  Description of Artificial Sequence: Synthetic oligonucleotide
ucaguuuccgcguggauca

SEQ ID NO: 1482377 - RNA, 19 nt, Artificial Sequence
  Description of Artificial Sequence: Synthetic oligonucleotide
cucuccgaagucaauauag

SEQ ID NO: 1482378 - RNA, 19 nt, Artificial Sequence
  Description of Artificial Sequence: Synthetic oligonucleotide
uuccgcguggaucagaucu

SEQ ID NO: 1482379 - RNA, 19 nt, Artificial Sequence
  Description of Artificial Sequence: Synthetic oligonucleotide
uugaccagaguacucuugc

SEQ ID NO: 1482380 - RNA, 19 nt, Artificial Sequence
  Description of Artificial Sequence: Synthetic oligonucleotide
ucuaauaggguggugucgc

SEQ ID NO: 1482381 - RNA, 19 nt, Artificial Sequence
  Description of Artificial Sequence: Synthetic oligonucleotide
ggaauuuugagauccugag

SEQ ID NO: 1482382 - RNA, 19 nt, Artificial Sequence
  Description of Artificial Sequence: Synthetic oligonucleotide
ugggcgaaugcccuccugg

SEQ ID NO: 1482383 - RNA, 19 nt, Artificial Sequence
  Description of Artificial Sequence: Synthetic oligonucleotide
gaaccagaggacgagcgcg

SEQ ID NO: 1482384 - RNA, 19 nt, Artificial Sequence
  Description of Artificial Sequence: Synthetic oligonucleotide
ucugacuuguugagaagca

SEQ ID NO: 1482385 - RNA, 19 nt, Artificial Sequence
  Description of Artificial Sequence: Synthetic oligonucleotide
cugagcgcgaagauggugc

SEQ ID NO: 1482386 - RNA, 19 nt, Artificial Sequence
  Description of Artificial Sequence: Synthetic oligonucleotide
cuuuccaugggcgaaugcc

SEQ ID NO: 1482387 - RNA, 19 nt, Artificial Sequence
  Description of Artificial Sequence: Synthetic oligonucleotide
aaauugucauccucuccga

SEQ ID NO: 1482388 - RNA, 19 nt, Artificial Sequence
  Description of Artificial Sequence: Synthetic oligonucleotide
uuugagauccugaguggca

SEQ ID NO: 1482389 - RNA, 19 nt, Artificial Sequence
  Description of Artificial Sequence: Synthetic oligonucleotide
uguacgacacugucggggc

SEQ ID NO: 1482390 - RNA, 19 nt, Artificial Sequence
  Description of Artificial Sequence: Synthetic oligonucleotide
aucuagugggaauuuugag

SEQ ID NO: 1482391 - RNA, 19 nt, Artificial Sequence
  Description of Artificial Sequence: Synthetic oligonucleotide
ucuacaugagccagagccu

SEQ ID NO: 1482392 - RNA, 19 nt, Artificial Sequence
  Description of Artificial Sequence: Synthetic oligonucleotide
gugucugcgagccaggcgc

SEQ ID NO: 1482393 - RNA, 19 nt, Artificial Sequence
  Description of Artificial Sequence: Synthetic oligonucleotide
cuccgaagucaauauaggc

SEQ ID NO: 1482394 - RNA, 19 nt, Artificial Sequence
  Description of Artificial Sequence: Synthetic oligonucleotide
caauauaggccucuacaug

SEQ ID NO: 1482395 - RNA, 19 nt, Artificial Sequence
  Description of Artificial Sequence: Synthetic oligonucleotide
ugugcuaccaguggggcca

SEQ ID NO: 1482396 - RNA, 19 nt, Artificial Sequence
  Description of Artificial Sequence: Synthetic oligonucleotide
cuagcucgggucaggagcg

SEQ ID NO: 1482397 - RNA, 19 nt, Artificial Sequence
  Description of Artificial Sequence: Synthetic oligonucleotide
gacggguccccacacacag

SEQ ID NO: 1482398 - RNA, 19 nt, Artificial Sequence
  Description of Artificial Sequence: Synthetic oligonucleotide
uguuccagccuuuggcgag

SEQ ID NO: 1482399 - RNA, 19 nt, Artificial Sequence
  Description of Artificial Sequence: Synthetic oligonucleotide
ucgaaugucucuguccacc

SEQ ID NO: 1482400 - RNA, 19 nt, Artificial Sequence
  Description of Artificial Sequence: Synthetic oligonucleotide
caauccucacccgugaagc

SEQ ID NO: 1482401 - RNA, 19 nt, Artificial Sequence
  Description of Artificial Sequence: Synthetic oligonucleotide
ucuggggacacgauggaua

SEQ ID NO: 1482402 - RNA, 19 nt, Artificial Sequence
  Description of Artificial Sequence: Synthetic oligonucleotide
ugcucaaccgcgcccacgc

SEQ ID NO: 1482403 - RNA, 19 nt, Artificial Sequence
  Description of Artificial Sequence: Synthetic oligonucleotide
acugucggggcuuugugcu

SEQ ID NO: 1482404 - RNA, 19 nt, Artificial Sequence
  Description of Artificial Sequence: Synthetic oligonucleotide
acccgugaagcuccggggc

SEQ ID NO: 1482405 - RNA, 19 nt, Artificial Sequence
  Description of Artificial Sequence: Synthetic oligonucleotide
agauugaccagaguacucu

SEQ ID NO: 1482406 - RNA, 19 nt, Artificial Sequence
  Description of Artificial Sequence: Synthetic oligonucleotide
acuacccaacgccugcagg

SEQ ID NO: 1482407 - RNA, 19 nt, Artificial Sequence
  Description of Artificial Sequence: Synthetic oligonucleotide
cuguacgacacugucgggg

SEQ ID NO: 1482408 - RNA, 19 nt, Artificial Sequence
  Description of Artificial Sequence: Synthetic oligonucleotide
uccucacccgugaagcucc

SEQ ID NO: 1482409 - RNA, 19 nt, Artificial Sequence
  Description of Artificial Sequence: Synthetic oligonucleotide
ucgcaagugggaauccagc

SEQ ID NO: 1482410 - RNA, 19 nt, Artificial Sequence
  Description of Artificial Sequence: Synthetic oligonucleotide
ucucuaauagggugguguc

SEQ ID NO: 1482411 - RNA, 19 nt, Artificial Sequence
  Description of Artificial Sequence: Synthetic oligonucleotide
aaccagaggacgagcgcgc

SEQ ID NO: 1482412 - RNA, 19 nt, Artificial Sequence
  Description of Artificial Sequence: Synthetic oligonucleotide
gugcggaucaccgcgacgg

SEQ ID NO: 1482413 - RNA, 19 nt, Artificial Sequence
  Description of Artificial Sequence: Synthetic oligonucleotide
aauugucauccucuccgaa

SEQ ID NO: 1482414 - RNA, 19 nt, Artificial Sequence
  Description of Artificial Sequence: Synthetic oligonucleotide
acauguaccccugagcgga

SEQ ID NO: 1482415 - RNA, 19 nt, Artificial Sequence
  Description of Artificial Sequence: Synthetic oligonucleotide
ucaagaucuagugggaauu

SEQ ID NO: 1482416 - RNA, 19 nt, Artificial Sequence
  Description of Artificial Sequence: Synthetic oligonucleotide
ugagauccugaguggcagg

SEQ ID NO: 1482417 - RNA, 19 nt, Artificial Sequence
  Description of Artificial Sequence: Synthetic oligonucleotide
ccaucuuagaucaagaucu

SEQ ID NO: 1482418 - RNA, 19 nt, Artificial Sequence
  Description of Artificial Sequence: Synthetic oligonucleotide
uuugugcuaccaguggggc

SEQ ID NO: 1482419 - RNA, 19 nt, Artificial Sequence
  Description of Artificial Sequence: Synthetic oligonucleotide
aauccucacccgugaagcu

SEQ ID NO: 1482420 - RNA, 19 nt, Artificial Sequence
  Description of Artificial Sequence: Synthetic oligonucleotide
gaucuagugggaauuuuga

SEQ ID NO: 1482421 - RNA, 19 nt, Artificial Sequence
  Description of Artificial Sequence: Synthetic oligonucleotide
acacgauggauacaggcuu

SEQ ID NO: 1482422 - RNA, 19 nt, Artificial Sequence
  Description of Artificial Sequence: Synthetic oligonucleotide
agaucuagugggaauuuug

SEQ ID NO: 1482423 - RNA, 19 nt, Artificial Sequence
  Description of Artificial Sequence: Synthetic oligonucleotide
ggugucucuaauagggugg

SEQ ID NO: 1482424 - RNA, 19 nt, Artificial Sequence
  Description of Artificial Sequence: Synthetic oligonucleotide
uguaccccugagcggagcc

SEQ ID NO: 1482425 - RNA, 19 nt, Artificial Sequence
  Description of Artificial Sequence: Synthetic oligonucleotide
agcacgucacggguggucc

SEQ ID NO: 1482426 - RNA, 19 nt, Artificial Sequence
  Description of Artificial Sequence: Synthetic oligonucleotide
cuagugggaauuuugagau

SEQ ID NO: 1482427 - RNA, 19 nt, Artificial Sequence
  Description of Artificial Sequence: Synthetic oligonucleotide
gcuuugugcuaccaguggg

SEQ ID NO: 1482428 - RNA, 19 nt, Artificial Sequence
  Description of Artificial Sequence: Synthetic oligonucleotide
ggacacgauggauacaggc

SEQ ID NO: 1482429 - RNA, 19 nt, Artificial Sequence
  Description of Artificial Sequence: Synthetic oligonucleotide
gucggaggcguccaguacc

SEQ ID NO: 1482430 - RNA, 19 nt, Artificial Sequence
  Description of Artificial Sequence: Synthetic oligonucleotide
cucuaauaggguggugucg

SEQ ID NO: 1482431 - RNA, 19 nt, Artificial Sequence
  Description of Artificial Sequence: Synthetic oligonucleotide
cucgcaagugggaauccag

SEQ ID NO: 1482432 - RNA, 19 nt, Artificial Sequence
  Description of Artificial Sequence: Synthetic oligonucleotide
uggacggguccccacacac

SEQ ID NO: 1482433 - RNA, 19 nt, Artificial Sequence
  Description of Artificial Sequence: Synthetic oligonucleotide
accuucuugcucaaccgcg

SEQ ID NO: 1482434 - RNA, 19 nt, Artificial Sequence
  Description of Artificial Sequence: Synthetic oligonucleotide
auaggguggugucgccagc

SEQ ID NO: 1482435 - RNA, 19 nt, Artificial Sequence
  Description of Artificial Sequence: Synthetic oligonucleotide
gcuggugcggaucaccgcg

SEQ ID NO: 1482436 - RNA, 19 nt, Artificial Sequence
  Description of Artificial Sequence: Synthetic oligonucleotide
ggcacuagcgggaagcagg

SEQ ID NO: 1482437 - RNA, 19 nt, Artificial Sequence
  Description of Artificial Sequence: Synthetic oligonucleotide
aucaccgcgacggcgcagc

SEQ ID NO: 1482438 - RNA, 19 nt, Artificial Sequence
  Description of Artificial Sequence: Synthetic oligonucleotide
ucggaggcguccaguaccc

SEQ ID NO: 1482439 - RNA, 19 nt, Artificial Sequence
  Description of Artificial Sequence: Synthetic oligonucleotide
guggggugucucuaauagg

SEQ ID NO: 1482440 - RNA, 19 nt, Artificial Sequence
  Description of Artificial Sequence: Synthetic oligonucleotide
acgccuggcaucucgcaag

SEQ ID NO: 1482441 - RNA, 19 nt, Artificial Sequence
  Description of Artificial Sequence: Synthetic oligonucleotide
cucaguuuccgcguggauc

SEQ ID NO: 1482442 - RNA, 19 nt, Artificial Sequence
  Description of Artificial Sequence: Synthetic oligonucleotide
ccuagcucgggucaggagc

SEQ ID NO: 1482443 - RNA, 19 nt, Artificial Sequence
  Description of Artificial Sequence: Synthetic oligonucleotide
ggggacacgauggauacag

SEQ ID NO: 1482444 - RNA, 19 nt, Artificial Sequence
  Description of Artificial Sequence: Synthetic oligonucleotide
uaauaggguggugucgcca

SEQ ID NO: 1482445 - RNA, 19 nt, Artificial Sequence
  Description of Artificial Sequence: Synthetic oligonucleotide
cuaauaggguggugucgcc

SEQ ID NO: 1482446 - RNA, 19 nt, Artificial Sequence
  Description of Artificial Sequence: Synthetic oligonucleotide
uccucuccgaagucaauau

SEQ ID NO: 1482447 - RNA, 19 nt, Artificial Sequence
  Description of Artificial Sequence: Synthetic oligonucleotide
uccgugcacgugcaacucc

SEQ ID NO: 1482448 - RNA, 19 nt, Artificial Sequence
  Description of Artificial Sequence: Synthetic oligonucleotide
cuacccaacgccugcagga

SEQ ID NO: 1482449 - RNA, 19 nt, Artificial Sequence
  Description of Artificial Sequence: Synthetic oligonucleotide
uugugcuaccaguggggcc

SEQ ID NO: 1482450 - RNA, 19 nt, Artificial Sequence
  Description of Artificial Sequence: Synthetic oligonucleotide
cacugucggggcuuugugc

SEQ ID NO: 1482451 - RNA, 19 nt, Artificial Sequence
  Description of Artificial Sequence: Synthetic oligonucleotide
gacgccgugaggcugcgga

SEQ ID NO: 1482452 - RNA, 19 nt, Artificial Sequence
  Description of Artificial Sequence: Synthetic oligonucleotide
guacucuugcccgcguugg

SEQ ID NO: 1482453 - RNA, 19 nt, Artificial Sequence
  Description of Artificial Sequence: Synthetic oligonucleotide
aacuccccggccucagcug

SEQ ID NO: 1482454 - RNA, 19 nt, Artificial Sequence
  Description of Artificial Sequence: Synthetic oligonucleotide
cugagcggagccucugacc

SEQ ID NO: 1482455 - RNA, 19 nt, Artificial Sequence
  Description of Artificial Sequence: Synthetic oligonucleotide
uccgcguggaucagaucug

SEQ ID NO: 1482456 - RNA, 19 nt, Artificial Sequence
  Description of Artificial Sequence: Synthetic oligonucleotide
ugucucagcgccugacgac

SEQ ID NO: 1482457 - RNA, 19 nt, Artificial Sequence
  Description of Artificial Sequence: Synthetic oligonucleotide
auauaggccucuacaugag

SEQ ID NO: 1482458 - RNA, 19 nt, Artificial Sequence
  Description of Artificial Sequence: Synthetic oligonucleotide
ggcuuugugcuaccagugg

SEQ ID NO: 1482459 - RNA, 19 nt, Artificial Sequence
  Description of Artificial Sequence: Synthetic oligonucleotide
cuggccggagcugagcgcg

SEQ ID NO: 1482460 - RNA, 19 nt, Artificial Sequence
  Description of Artificial Sequence: Synthetic oligonucleotide
accuccgugcacgugcaac

SEQ ID NO: 1482461 - RNA, 19 nt, Artificial Sequence
  Description of Artificial Sequence: Synthetic oligonucleotide
gcaagugggaauccagcgc

SEQ ID NO: 1482462 - RNA, 19 nt, Artificial Sequence
  Description of Artificial Sequence: Synthetic oligonucleotide
cacccgugaagcuccgggg

SEQ ID NO: 1482463 - RNA, 19 nt, Artificial Sequence
  Description of Artificial Sequence: Synthetic oligonucleotide
cgcuguacgacacugucgg

SEQ ID NO: 1482464 - RNA, 19 nt, Artificial Sequence
  Description of Artificial Sequence: Synthetic oligonucleotide
aucucgcaagugggaaucc

SEQ ID NO: 1482465 - RNA, 19 nt, Artificial Sequence
  Description of Artificial Sequence: Synthetic oligonucleotide
uggaucagaucugccaguc

SEQ ID NO: 1482466 - RNA, 19 nt, Artificial Sequence
  Description of Artificial Sequence: Synthetic oligonucleotide
ucacggguggucccuggcu

SEQ ID NO: 1482467 - RNA, 19 nt, Artificial Sequence
  Description of Artificial Sequence: Synthetic oligonucleotide
agaucaagaucuaguggga

SEQ ID NO: 1482468 - RNA, 19 nt, Artificial Sequence
  Description of Artificial Sequence: Synthetic oligonucleotide
caucucgcaagugggaauc

SEQ ID NO: 1482469 - RNA, 19 nt, Artificial Sequence
  Description of Artificial Sequence: Synthetic oligonucleotide
gaagcuccggggcccuggg

SEQ ID NO: 1482470 - RNA, 19 nt, Artificial Sequence
  Description of Artificial Sequence: Synthetic oligonucleotide
agcaggaggcgcuguacga

SEQ ID NO: 1482471 - RNA, 19 nt, Artificial Sequence
  Description of Artificial Sequence: Synthetic oligonucleotide
gaucaagaucuagugggaa

SEQ ID NO: 1482472 - RNA, 19 nt, Artificial Sequence
  Description of Artificial Sequence: Synthetic oligonucleotide
ucucagcgccugacgacgc

SEQ ID NO: 1482473 - RNA, 19 nt, Artificial Sequence
  Description of Artificial Sequence: Synthetic oligonucleotide
cacgauggauacaggcuuc

SEQ ID NO: 1482474 - RNA, 19 nt, Artificial Sequence
  Description of Artificial Sequence: Synthetic oligonucleotide
gacacgauggauacaggcu

SEQ ID NO: 1482475 - RNA, 19 nt, Artificial Sequence
  Description of Artificial Sequence: Synthetic oligonucleotide
cagaguacucuugcccgcg

SEQ ID NO: 1482476 - RNA, 19 nt, Artificial Sequence
  Description of Artificial Sequence: Synthetic oligonucleotide
agugaggcucagcuuucca

SEQ ID NO: 1482477 - RNA, 19 nt, Artificial Sequence
  Description of Artificial Sequence: Synthetic oligonucleotide
gcaauccucacccgugaag

SEQ ID NO: 1482478 - RNA, 19 nt, Artificial Sequence
  Description of Artificial Sequence: Synthetic oligonucleotide
cagccuuuggcgagcccgg

SEQ ID NO: 1482479 - RNA, 19 nt, Artificial Sequence
  Description of Artificial Sequence: Synthetic oligonucleotide
gucucuaauaggguggugu

SEQ ID NO: 1482480 - RNA, 19 nt, Artificial Sequence
  Description of Artificial Sequence: Synthetic oligonucleotide
uacucuugcccgcguugga

SEQ ID NO: 1482481 - RNA, 19 nt, Artificial Sequence
  Description of Artificial Sequence: Synthetic oligonucleotide
ucucgcaagugggaaucca

SEQ ID NO: 1482482 - RNA, 19 nt, Artificial Sequence
  Description of Artificial Sequence: Synthetic oligonucleotide
gcacggguggcggagaagg

SEQ ID NO: 1482483 - RNA, 19 nt, Artificial Sequence
  Description of Artificial Sequence: Synthetic oligonucleotide
ucaaccgcgcccacgccuu

SEQ ID NO: 1482484 - RNA, 19 nt, Artificial Sequence
  Description of Artificial Sequence: Synthetic oligonucleotide
cucgggucaggagcggugg

SEQ ID NO: 1482485 - RNA, 19 nt, Artificial Sequence
  Description of Artificial Sequence: Synthetic oligonucleotide
uagugggaauuuugagauc

SEQ ID NO: 1482486 - RNA, 19 nt, Artificial Sequence
  Description of Artificial Sequence: Synthetic oligonucleotide
ggugucugcgagccaggcg

SEQ ID NO: 1482487 - RNA, 19 nt, Artificial Sequence
  Description of Artificial Sequence: Synthetic oligonucleotide
uugcucaaccgcgcccacg

SEQ ID NO: 1482488 - RNA, 19 nt, Artificial Sequence
  Description of Artificial Sequence: Synthetic oligonucleotide
gaagucaauauaggccucu

SEQ ID NO: 1482489 - RNA, 19 nt, Artificial Sequence
  Description of Artificial Sequence: Synthetic oligonucleotide
ugucggggcuuugugcuac

SEQ ID NO: 1482490 - RNA, 19 nt, Artificial Sequence
  Description of Artificial Sequence: Synthetic oligonucleotide
gcgaaugcccuccugguga

SEQ ID NO: 1482491 - RNA, 19 nt, Artificial Sequence
  Description of Artificial Sequence: Synthetic oligonucleotide
agcgggaagcaggucugac

SEQ ID NO: 1482492 - RNA, 19 nt, Artificial Sequence
  Description of Artificial Sequence: Synthetic oligonucleotide
auguaccccugagcggagc

SEQ ID NO: 1482493 - RNA, 19 nt, Artificial Sequence
  Description of Artificial Sequence: Synthetic oligonucleotide
cguggaucagaucugccag

SEQ ID NO: 1482494 - RNA, 19 nt, Artificial Sequence
  Description of Artificial Sequence: Synthetic oligonucleotide
ugucagccuguuccagccu

SEQ ID NO: 1482495 - RNA, 19 nt, Artificial Sequence
  Description of Artificial Sequence: Synthetic oligonucleotide
cagggcucgaaugucucug

SEQ ID NO: 1482496 - RNA, 19 nt, Artificial Sequence
  Description of Artificial Sequence: Synthetic oligonucleotide
ugcccacacagaaguccug

SEQ ID NO: 1482497 - RNA, 19 nt, Artificial Sequence
  Description of Artificial Sequence: Synthetic oligonucleotide
cgcaagugggaauccagcg

SEQ ID NO: 1482498 - RNA, 19 nt, Artificial Sequence
  Description of Artificial Sequence: Synthetic oligonucleotide
cuccccggagcacgggugg

SEQ ID NO: 1482499 - RNA, 19 nt, Artificial Sequence
  Description of Artificial Sequence: Synthetic oligonucleotide
aggagcggugggccugugg

SEQ ID NO: 1482500 - RNA, 19 nt, Artificial Sequence
  Description of Artificial Sequence: Synthetic oligonucleotide
agaguacucuugcccgcgu

SEQ ID NO: 1482501 - RNA, 19 nt, Artificial Sequence
  Description of Artificial Sequence: Synthetic oligonucleotide
gaggacgagcgcgcggucc

SEQ ID NO: 1482502 - RNA, 19 nt, Artificial Sequence
  Description of Artificial Sequence: Synthetic oligonucleotide
uccgguguggcaggacagc

SEQ ID NO: 1482503 - RNA, 19 nt, Artificial Sequence
  Description of Artificial Sequence: Synthetic oligonucleotide
ugcggaucaccgcgacggc

SEQ ID NO: 1482504 - RNA, 19 nt, Artificial Sequence
  Description of Artificial Sequence: Synthetic oligonucleotide
ccuucuugcucaaccgcgc

SEQ ID NO: 1482505 - RNA, 19 nt, Artificial Sequence
  Description of Artificial Sequence: Synthetic oligonucleotide
agggcucgaaugucucugu

SEQ ID NO: 1482506 - RNA, 19 nt, Artificial Sequence
  Description of Artificial Sequence: Synthetic oligonucleotide
ggagcggugggccugugga

SEQ ID NO: 1482507 - RNA, 19 nt, Artificial Sequence
  Description of Artificial Sequence: Synthetic oligonucleotide
gagaaggcgcagggaggcg

SEQ ID NO: 1482508 - RNA, 19 nt, Artificial Sequence
  Description of Artificial Sequence: Synthetic oligonucleotide
cauguaccccugagcggag

SEQ ID NO: 1482509 - RNA, 19 nt, Artificial Sequence
  Description of Artificial Sequence: Synthetic oligonucleotide
cucuggcccucacuugccc

SEQ ID NO: 1482510 - RNA, 19 nt, Artificial Sequence
  Description of Artificial Sequence: Synthetic oligonucleotide
ccgaagucaauauaggccu

SEQ ID NO: 1482511 - RNA, 19 nt, Artificial Sequence
  Description of Artificial Sequence: Synthetic oligonucleotide
uacccaacgccugcaggac

SEQ ID NO: 1482512 - RNA, 19 nt, Artificial Sequence
  Description of Artificial Sequence: Synthetic oligonucleotide
ugucucuaauaggguggug

SEQ ID NO: 1482513 - RNA, 19 nt, Artificial Sequence
  Description of Artificial Sequence: Synthetic oligonucleotide
cuggugccuagcucggguc

SEQ ID NO: 1482514 - RNA, 19 nt, Artificial Sequence
  Description of Artificial Sequence: Synthetic oligonucleotide
uccaugggcgaaugcccuc

SEQ ID NO: 1482515 - RNA, 19 nt, Artificial Sequence
  Description of Artificial Sequence: Synthetic oligonucleotide
uggugcggaucaccgcgac

SEQ ID NO: 1482516 - RNA, 19 nt, Artificial Sequence
  Description of Artificial Sequence: Synthetic oligonucleotide
accagaggacgagcgcgcg

SEQ ID NO: 1482517 - RNA, 19 nt, Artificial Sequence
  Description of Artificial Sequence: Synthetic oligonucleotide
ccuuuggcgagcccggcgc

SEQ ID NO: 1482518 - RNA, 19 nt, Artificial Sequence
  Description of Artificial Sequence: Synthetic oligonucleotide
cuggccgaacaguccuggc

SEQ ID NO: 1482519 - RNA, 19 nt, Artificial Sequence
  Description of Artificial Sequence: Synthetic oligonucleotide
ggcgcuguacgacacuguc

SEQ ID NO: 1482520 - RNA, 19 nt, Artificial Sequence
  Description of Artificial Sequence: Synthetic oligonucleotide
gucacggguggucccuggc

SEQ ID NO: 1482521 - RNA, 19 nt, Artificial Sequence
  Description of Artificial Sequence: Synthetic oligonucleotide
acggguggucccuggcucu

SEQ ID NO: 1482522 - RNA, 19 nt, Artificial Sequence
  Description of Artificial Sequence: Synthetic oligonucleotide
gauugaccagaguacucuu

SEQ ID NO: 1482523 - RNA, 19 nt, Artificial Sequence
  Description of Artificial Sequence: Synthetic oligonucleotide
ggugcggaucaccgcgacg

SEQ ID NO: 1482524 - RNA, 19 nt, Artificial Sequence
  Description of Artificial Sequence: Synthetic oligonucleotide
uacgacacugucggggcuu

SEQ ID NO: 1482525 - RNA, 19 nt, Artificial Sequence
  Description of Artificial Sequence: Synthetic oligonucleotide
caggaggcgcuguacgaca

SEQ ID NO: 1482526 - RNA, 19 nt, Artificial Sequence
  Description of Artificial Sequence: Synthetic oligonucleotide
caucuuagaucaagaucua

SEQ ID NO: 1482527 - RNA, 19 nt, Artificial Sequence
  Description of Artificial Sequence: Synthetic oligonucleotide
aggacgccggugaccaccg

SEQ ID NO: 1482528 - RNA, 19 nt, Artificial Sequence
  Description of Artificial Sequence: Synthetic oligonucleotide
acgccgugaggcugcggag

SEQ ID NO: 1482529 - RNA, 19 nt, Artificial Sequence
  Description of Artificial Sequence: Synthetic oligonucleotide
ucgccagccagggcacuag

SEQ ID NO: 1482530 - RNA, 19 nt, Artificial Sequence
  Description of Artificial Sequence: Synthetic oligonucleotide
augggcgaaugcccuccug

SEQ ID NO: 1482531 - RNA, 19 nt, Artificial Sequence
  Description of Artificial Sequence: Synthetic oligonucleotide
guuccagccuuuggcgagc

SEQ ID NO: 1482532 - RNA, 19 nt, Artificial Sequence
  Description of Artificial Sequence: Synthetic oligonucleotide
ugccuagcucgggucagga

SEQ ID NO: 1482533 - RNA, 19 nt, Artificial Sequence
  Description of Artificial Sequence: Synthetic oligonucleotide
ggcgaaugcccuccuggug

SEQ ID NO: 1482534 - RNA, 19 nt, Artificial Sequence
  Description of Artificial Sequence: Synthetic oligonucleotide
accaccgccggaccuccgu

SEQ ID NO: 1482535 - RNA, 19 nt, Artificial Sequence
  Description of Artificial Sequence: Synthetic oligonucleotide
uuuggcgagcccggcgcac

SEQ ID NO: 1482536 - RNA, 19 nt, Artificial Sequence
  Description of Artificial Sequence: Synthetic oligonucleotide
uuuccgcguggaucagauc

SEQ ID NO: 1482537 - RNA, 19 nt, Artificial Sequence
  Description of Artificial Sequence: Synthetic oligonucleotide
gugcaacuccaggcaaucc

SEQ ID NO: 1482538 - RNA, 19 nt, Artificial Sequence
  Description of Artificial Sequence: Synthetic oligonucleotide
cuccccguccagcugucuc

SEQ ID NO: 1482539 - RNA, 19 nt, Artificial Sequence
  Description of Artificial Sequence: Synthetic oligonucleotide
aguuuccgcguggaucaga

SEQ ID NO: 1482540 - RNA, 19 nt, Artificial Sequence
  Description of Artificial Sequence: Synthetic oligonucleotide
gcuggccgaacaguccugg

SEQ ID NO: 1482541 - RNA, 19 nt, Artificial Sequence
  Description of Artificial Sequence: Synthetic oligonucleotide
ggggcuuugugcuaccagu

SEQ ID NO: 1482542 - RNA, 19 nt, Artificial Sequence
  Description of Artificial Sequence: Synthetic oligonucleotide
gcuguacgacacugucggg

SEQ ID NO: 1482543 - RNA, 19 nt, Artificial Sequence
  Description of Artificial Sequence: Synthetic oligonucleotide
gccuuuggcgagcccggcg

SEQ ID NO: 1482544 - RNA, 19 nt, Artificial Sequence
  Description of Artificial Sequence: Synthetic oligonucleotide
uuggcgagcccggcgcaca

SEQ ID NO: 1482545 - RNA, 19 nt, Artificial Sequence
  Description of Artificial Sequence: Synthetic oligonucleotide
gugaggcucagcuuuccau

SEQ ID NO: 1482546 - RNA, 19 nt, Artificial Sequence
  Description of Artificial Sequence: Synthetic oligonucleotide
gcgcuguacgacacugucg

SEQ ID NO: 1482547 - RNA, 19 nt, Artificial Sequence
  Description of Artificial Sequence: Synthetic oligonucleotide
gaucaccgcgacggcgcag

SEQ ID NO: 1482548 - RNA, 19 nt, Artificial Sequence
  Description of Artificial Sequence: Synthetic oligonucleotide
cgccugacgacgcugggcc

SEQ ID NO: 1482549 - RNA, 19 nt, Artificial Sequence
  Description of Artificial Sequence: Synthetic oligonucleotide
cucagcccagcggugucac

SEQ ID NO: 1482550 - RNA, 19 nt, Artificial Sequence
  Description of Artificial Sequence: Synthetic oligonucleotide
agggcacuagcgggaagca

SEQ ID NO: 1482551 - RNA, 19 nt, Artificial Sequence
  Description of Artificial Sequence: Synthetic oligonucleotide
ccgcuggugcggaucaccg

SEQ ID NO: 1482552 - RNA, 19 nt, Artificial Sequence
  Description of Artificial Sequence: Synthetic oligonucleotide
cacgugcaacuccaggcaa

SEQ ID NO: 1482553 - RNA, 19 nt, Artificial Sequence
  Description of Artificial Sequence: Synthetic oligonucleotide
gcuccgguguggcaggaca

SEQ ID NO: 1482554 - RNA, 19 nt, Artificial Sequence
  Description of Artificial Sequence: Synthetic oligonucleotide
cggaccuccgugcacgugc

SEQ ID NO: 1482555 - RNA, 19 nt, Artificial Sequence
  Description of Artificial Sequence: Synthetic oligonucleotide
cggaucaccgcgacggcgc

SEQ ID NO: 1482556 - RNA, 19 nt, Artificial Sequence
  Description of Artificial Sequence: Synthetic oligonucleotide
uggggacacgauggauaca

SEQ ID NO: 1482557 - RNA, 19 nt, Artificial Sequence
  Description of Artificial Sequence: Synthetic oligonucleotide
agcuccgguguggcaggac

SEQ ID NO: 1482558 - RNA, 19 nt, Artificial Sequence
  Description of Artificial Sequence: Synthetic oligonucleotide
gugccuagcucgggucagg

SEQ ID NO: 1482559 - RNA, 19 nt, Artificial Sequence
  Description of Artificial Sequence: Synthetic oligonucleotide
gcagauugaccagaguacu

SEQ ID NO: 1482560 - RNA, 19 nt, Artificial Sequence
  Description of Artificial Sequence: Synthetic oligonucleotide
uggcgagcccggcgcacac

SEQ ID NO: 1482561 - RNA, 19 nt, Artificial Sequence
  Description of Artificial Sequence: Synthetic oligonucleotide
gcggaucaccgcgacggcg

SEQ ID NO: 1482562 - RNA, 19 nt, Artificial Sequence
  Description of Artificial Sequence: Synthetic oligonucleotide
cuccgugcacgugcaacuc

SEQ ID NO: 1482563 - RNA, 19 nt, Artificial Sequence
  Description of Artificial Sequence: Synthetic oligonucleotide
gaggccaggucggaggcgu

SEQ ID NO: 1482564 - RNA, 19 nt, Artificial Sequence
  Description of Artificial Sequence: Synthetic oligonucleotide
acgugcaacuccaggcaau

SEQ ID NO: 1482565 - RNA, 19 nt, Artificial Sequence
  Description of Artificial Sequence: Synthetic oligonucleotide
gcugagcgcgaagauggug

SEQ ID NO: 1482566 - RNA, 19 nt, Artificial Sequence
  Description of Artificial Sequence: Synthetic oligonucleotide
ccagucaccacaacaugua

SEQ ID NO: 1482567 - RNA, 19 nt, Artificial Sequence
  Description of Artificial Sequence: Synthetic oligonucleotide
gucggggcuuugugcuacc

SEQ ID NO: 1482568 - RNA, 19 nt, Artificial Sequence
  Description of Artificial Sequence: Synthetic oligonucleotide
ccaugggcgaaugcccucc

SEQ ID NO: 1482569 - RNA, 19 nt, Artificial Sequence
  Description of Artificial Sequence: Synthetic oligonucleotide
guuuccgcguggaucagau

SEQ ID NO: 1482570 - RNA, 19 nt, Artificial Sequence
  Description of Artificial Sequence: Synthetic oligonucleotide
ccugagcggagccucugac

SEQ ID NO: 1482571 - RNA, 19 nt, Artificial Sequence
  Description of Artificial Sequence: Synthetic oligonucleotide
gggacacgauggauacagg

SEQ ID NO: 1482572 - RNA, 19 nt, Artificial Sequence
  Description of Artificial Sequence: Synthetic oligonucleotide
cuggugcggaucaccgcga

SEQ ID NO: 1482573 - RNA, 19 nt, Artificial Sequence
  Description of Artificial Sequence: Synthetic oligonucleotide
cucaaccgcgcccacgccu

SEQ ID NO: 1482574 - RNA, 19 nt, Artificial Sequence
  Description of Artificial Sequence: Synthetic oligonucleotide
cuuuggcgagcccggcgca

SEQ ID NO: 1482575 - RNA, 19 nt, Artificial Sequence
  Description of Artificial Sequence: Synthetic oligonucleotide
cugaccacgccuggcaucu

SEQ ID NO: 1482576 - RNA, 19 nt, Artificial Sequence
  Description of Artificial Sequence: Synthetic oligonucleotide
ccagaggacgagcgcgcgg

SEQ ID NO: 1482577 - RNA, 19 nt, Artificial Sequence
  Description of Artificial Sequence: Synthetic oligonucleotide
cacgccuggcaucucgcaa

SEQ ID NO: 1482578 - RNA, 19 nt, Artificial Sequence
  Description of Artificial Sequence: Synthetic oligonucleotide
ggcaucucgcaagugggaa

SEQ ID NO: 1482579 - RNA, 19 nt, Artificial Sequence
  Description of Artificial Sequence: Synthetic oligonucleotide
gugucucuaauaggguggu

SEQ ID NO: 1482580 - RNA, 19 nt, Artificial Sequence
  Description of Artificial Sequence: Synthetic oligonucleotide
gagcacggguggcggagaa

SEQ ID NO: 1482581 - RNA, 19 nt, Artificial Sequence
  Description of Artificial Sequence: Synthetic oligonucleotide
gcacacuacccaacgccug

SEQ ID NO: 1482582 - RNA, 19 nt, Artificial Sequence
  Description of Artificial Sequence: Synthetic oligonucleotide
guggacggguccccacaca

SEQ ID NO: 1482583 - RNA, 19 nt, Artificial Sequence
  Description of Artificial Sequence: Synthetic oligonucleotide
agcucgggucaggagcggu

SEQ ID NO: 1482584 - RNA, 19 nt, Artificial Sequence
  Description of Artificial Sequence: Synthetic oligonucleotide
ggcgcacaccuucuugcuc

SEQ ID NO: 1482585 - RNA, 19 nt, Artificial Sequence
  Description of Artificial Sequence: Synthetic oligonucleotide
gccuagcucgggucaggag

SEQ ID NO: 1482586 - RNA, 19 nt, Artificial Sequence
  Description of Artificial Sequence: Synthetic oligonucleotide
ugcccgcguuggagggucc

SEQ ID NO: 1482587 - RNA, 19 nt, Artificial Sequence
  Description of Artificial Sequence: Synthetic oligonucleotide
gucugcgagccaggcgcag

SEQ ID NO: 1482588 - RNA, 19 nt, Artificial Sequence
  Description of Artificial Sequence: Synthetic oligonucleotide
cagcgcagccuccagggcu

SEQ ID NO: 1482589 - RNA, 19 nt, Artificial Sequence
  Description of Artificial Sequence: Synthetic oligonucleotide
gcguuggaggguccaguca

SEQ ID NO: 1482590 - RNA, 19 nt, Artificial Sequence
  Description of Artificial Sequence: Synthetic oligonucleotide
caguuuccgcguggaucag

SEQ ID NO: 1482591 - RNA, 19 nt, Artificial Sequence
  Description of Artificial Sequence: Synthetic oligonucleotide
gggcacuagcgggaagcag

SEQ ID NO: 1482592 - RNA, 19 nt, Artificial Sequence
  Description of Artificial Sequence: Synthetic oligonucleotide
gggcucgaaugucucuguc

SEQ ID NO: 1482593 - RNA, 19 nt, Artificial Sequence
  Description of Artificial Sequence: Synthetic oligonucleotide
ggcacacuacccaacgccu

SEQ ID NO: 1482594 - RNA, 19 nt, Artificial Sequence
  Description of Artificial Sequence: Synthetic oligonucleotide
gcacgucacgggugguccc

SEQ ID NO: 1482595 - RNA, 19 nt, Artificial Sequence
  Description of Artificial Sequence: Synthetic oligonucleotide
gagcgcgagcgcgcuggcc

SEQ ID NO: 1482596 - RNA, 19 nt, Artificial Sequence
  Description of Artificial Sequence: Synthetic oligonucleotide
guacgacacugucggggcu

SEQ ID NO: 1482597 - RNA, 19 nt, Artificial Sequence
  Description of Artificial Sequence: Synthetic oligonucleotide
cccagcggugucacucagc

SEQ ID NO: 1482598 - RNA, 19 nt, Artificial Sequence
  Description of Artificial Sequence: Synthetic oligonucleotide
ggcaauccucacccgugaa

SEQ ID NO: 1482599 - RNA, 19 nt, Artificial Sequence
  Description of Artificial Sequence: Synthetic oligonucleotide
ucggcacaguuggcccagc

SEQ ID NO: 1482600 - RNA, 19 nt, Artificial Sequence
  Description of Artificial Sequence: Synthetic oligonucleotide
acgucacggguggucccug

SEQ ID NO: 1482601 - RNA, 19 nt, Artificial Sequence
  Description of Artificial Sequence: Synthetic oligonucleotide
aggcgcuguacgacacugu

SEQ ID NO: 1482602 - RNA, 19 nt, Artificial Sequence
  Description of Artificial Sequence: Synthetic oligonucleotide
gggucuccgcccagccucg

SEQ ID NO: 1482603 - RNA, 19 nt, Artificial Sequence
  Description of Artificial Sequence: Synthetic oligonucleotide
caagaucuagugggaauuu

SEQ ID NO: 1482604 - RNA, 19 nt, Artificial Sequence
  Description of Artificial Sequence: Synthetic oligonucleotide
ccggugaccaccgccggac

SEQ ID NO: 1482605 - RNA, 19 nt, Artificial Sequence
  Description of Artificial Sequence: Synthetic oligonucleotide
ccgaacaguccuggcacac

SEQ ID NO: 1482606 - RNA, 19 nt, Artificial Sequence
  Description of Artificial Sequence: Synthetic oligonucleotide
gccgaacaguccuggcaca

SEQ ID NO: 1482607 - RNA, 19 nt, Artificial Sequence
  Description of Artificial Sequence: Synthetic oligonucleotide
cccuccuggugaacucccc

SEQ ID NO: 1482608 - RNA, 19 nt, Artificial Sequence
  Description of Artificial Sequence: Synthetic oligonucleotide
cugacgacgcugggccuca

SEQ ID NO: 1482609 - RNA, 19 nt, Artificial Sequence
  Description of Artificial Sequence: Synthetic oligonucleotide
ugacgacgcugggccucag

SEQ ID NO: 1482610 - RNA, 19 nt, Artificial Sequence
  Description of Artificial Sequence: Synthetic oligonucleotide
gacgacgcugggccucagu

SEQ ID NO: 1482611 - RNA, 19 nt, Artificial Sequence
  Description of Artificial Sequence: Synthetic oligonucleotide
ggugaccaccgccggaccu

SEQ ID NO: 1482612 - RNA, 19 nt, Artificial Sequence
  Description of Artificial Sequence: Synthetic oligonucleotide
ggaucaccgcgacggcgca

SEQ ID NO: 1482613 - RNA, 19 nt, Artificial Sequence
  Description of Artificial Sequence: Synthetic oligonucleotide
ccgcguggaucagaucugc

SEQ ID NO: 1482614 - RNA, 19 nt, Artificial Sequence
  Description of Artificial Sequence: Synthetic oligonucleotide
cacuagcgggaagcagguc

SEQ ID NO: 1482615 - RNA, 19 nt, Artificial Sequence
  Description of Artificial Sequence: Synthetic oligonucleotide
gcgggaagcaggucugacu

SEQ ID NO: 1482616 - RNA, 19 nt, Artificial Sequence
  Description of Artificial Sequence: Synthetic oligonucleotide
cccggcgcacaccuucuug

SEQ ID NO: 1482617 - RNA, 19 nt, Artificial Sequence
  Description of Artificial Sequence: Synthetic oligonucleotide
gccggagcugagcgcgaag

SEQ ID NO: 1482618 - RNA, 19 nt, Artificial Sequence
  Description of Artificial Sequence: Synthetic oligonucleotide
gcucaaccgcgcccacgcc

SEQ ID NO: 1482619 - RNA, 19 nt, Artificial Sequence
  Description of Artificial Sequence: Synthetic oligonucleotide
gcgcgagcgcgcuggccgg

SEQ ID NO: 1482620 - RNA, 19 nt, Artificial Sequence
  Description of Artificial Sequence: Synthetic oligonucleotide
acgacacugucggggcuuu

SEQ ID NO: 1482621 - RNA, 19 nt, Artificial Sequence
  Description of Artificial Sequence: Synthetic oligonucleotide
gcggugucacucagcaaca

SEQ ID NO: 1482622 - RNA, 19 nt, Artificial Sequence
  Description of Artificial Sequence: Synthetic oligonucleotide
gcgcccgggacgccgugag

SEQ ID NO: 1482623 - RNA, 19 nt, Artificial Sequence
  Description of Artificial Sequence: Synthetic oligonucleotide
cgcguuggaggguccaguc

SEQ ID NO: 1482624 - RNA, 19 nt, Artificial Sequence
  Description of Artificial Sequence: Synthetic oligonucleotide
cgcguggaucagaucugcc

SEQ ID NO: 1482625 - RNA, 19 nt, Artificial Sequence
  Description of Artificial Sequence: Synthetic oligonucleotide
gcccagcggugucacucag

SEQ ID NO: 1482626 - RNA, 19 nt, Artificial Sequence
  Description of Artificial Sequence: Synthetic oligonucleotide
cugucggggcuuugugcua

SEQ ID NO: 1482627 - RNA, 19 nt, Artificial Sequence
  Description of Artificial Sequence: Synthetic oligonucleotide
gcuccccggagcacgggug

SEQ ID NO: 1482628 - RNA, 19 nt, Artificial Sequence
  Description of Artificial Sequence: Synthetic oligonucleotide
cccggagcacggguggcgg

SEQ ID NO: 1482629 - RNA, 19 nt, Artificial Sequence
  Description of Artificial Sequence: Synthetic oligonucleotide
gcccuccuggugaacuccc

SEQ ID NO: 1482630 - RNA, 19 nt, Artificial Sequence
  Description of Artificial Sequence: Synthetic oligonucleotide
gggcgaaugcccuccuggu

SEQ ID NO: 1482631 - RNA, 19 nt, Artificial Sequence
  Description of Artificial Sequence: Synthetic oligonucleotide
gcaucucgcaagugggaau

SEQ ID NO: 1482632 - RNA, 19 nt, Artificial Sequence
  Description of Artificial Sequence: Synthetic oligonucleotide
gcgccugacgacgcugggc

SEQ ID NO: 1482633 - RNA, 19 nt, Artificial Sequence
  Description of Artificial Sequence: Synthetic oligonucleotide
cgccggaccuccgugcacg

SEQ ID NO: 1482634 - RNA, 19 nt, Artificial Sequence
  Description of Artificial Sequence: Synthetic oligonucleotide
caugagccagagccuuggu

SEQ ID NO: 1482635 - RNA, 19 nt, Artificial Sequence
  Description of Artificial Sequence: Synthetic oligonucleotide
gaccuccgugcacgugcaa

SEQ ID NO: 1482636 - RNA, 19 nt, Artificial Sequence
  Description of Artificial Sequence: Synthetic oligonucleotide
caaccgcgcccacgccuuc

SEQ ID NO: 1482637 - RNA, 19 nt, Artificial Sequence
  Description of Artificial Sequence: Synthetic oligonucleotide
cagcggcccuggccggagc

SEQ ID NO: 1482638 - RNA, 19 nt, Artificial Sequence
  Description of Artificial Sequence: Synthetic oligonucleotide
ggaggugaugcuggugccu

SEQ ID NO: 1482639 - RNA, 19 nt, Artificial Sequence
  Description of Artificial Sequence: Synthetic oligonucleotide
ggaccuccgugcacgugca

SEQ ID NO: 1482640 - RNA, 19 nt, Artificial Sequence
  Description of Artificial Sequence: Synthetic oligonucleotide
cgucacggguggucccugg

SEQ ID NO: 1482641 - RNA, 19 nt, Artificial Sequence
  Description of Artificial Sequence: Synthetic oligonucleotide
ccggagcugagcgcgaaga

SEQ ID NO: 1482642 - RNA, 19 nt, Artificial Sequence
  Description of Artificial Sequence: Synthetic oligonucleotide
cagcggugucacucagcaa

SEQ ID NO: 1482643 - RNA, 19 nt, Artificial Sequence
  Description of Artificial Sequence: Synthetic oligonucleotide
cgcuggugcggaucaccgc

SEQ ID NO: 1482644 - RNA, 19 nt, Artificial Sequence
  Description of Artificial Sequence: Synthetic oligonucleotide
ccucuccgaagucaauaua

SEQ ID NO: 1482645 - RNA, 19 nt, Artificial Sequence
  Description of Artificial Sequence: Synthetic oligonucleotide
ugaccacgccuggcaucuc

SEQ ID NO: 1482646 - RNA, 19 nt, Artificial Sequence
  Description of Artificial Sequence: Synthetic oligonucleotide
ccaccgccggaccuccgug

SEQ ID NO: 1482647 - RNA, 19 nt, Artificial Sequence
  Description of Artificial Sequence: Synthetic oligonucleotide
gucgccagccagggcacua

SEQ ID NO: 1482648 - RNA, 19 nt, Artificial Sequence
  Description of Artificial Sequence: Synthetic oligonucleotide
caugggcgaaugcccuccu

SEQ ID NO: 1482649 - RNA, 19 nt, Artificial Sequence
  Description of Artificial Sequence: Synthetic oligonucleotide
gcacuagcgggaagcaggu

SEQ ID NO: 1482650 - RNA, 19 nt, Artificial Sequence
  Description of Artificial Sequence: Synthetic oligonucleotide
gcgagcccggcgcacaccu

SEQ ID NO: 1482651 - RNA, 19 nt, Artificial Sequence
  Description of Artificial Sequence: Synthetic oligonucleotide
ccccggagcacggguggcg

SEQ ID NO: 1482652 - RNA, 19 nt, Artificial Sequence
  Description of Artificial Sequence: Synthetic oligonucleotide
cgccgugaggcugcggagc

SEQ ID NO: 1482653 - RNA, 19 nt, Artificial Sequence
  Description of Artificial Sequence: Synthetic oligonucleotide
ggucuccgcccagccucgg

SEQ ID NO: 1482654 - RNA, 19 nt, Artificial Sequence
  Description of Artificial Sequence: Synthetic oligonucleotide
gggacgccgugaggcugcg

SEQ ID NO: 1482655 - RNA, 19 nt, Artificial Sequence
  Description of Artificial Sequence: Synthetic oligonucleotide
cacgucacggguggucccu

SEQ ID NO: 1482656 - RNA, 19 nt, Artificial Sequence
  Description of Artificial Sequence: Synthetic oligonucleotide
ccccguccagcugucucag

SEQ ID NO: 1482657 - RNA, 19 nt, Artificial Sequence
  Description of Artificial Sequence: Synthetic oligonucleotide
gccggugaccaccgccgga

SEQ ID NO: 1482658 - RNA, 19 nt, Artificial Sequence
  Description of Artificial Sequence: Synthetic oligonucleotide
ggaggcgcuguacgacacu

SEQ ID NO: 1482659 - RNA, 19 nt, Artificial Sequence
  Description of Artificial Sequence: Synthetic oligonucleotide
ccgguguggcaggacagca

SEQ ID NO: 1482660 - RNA, 19 nt, Artificial Sequence
  Description of Artificial Sequence: Synthetic oligonucleotide
cccucagcccagcgguguc

SEQ ID NO: 1482661 - RNA, 19 nt, Artificial Sequence
  Description of Artificial Sequence: Synthetic oligonucleotide
caggucggaggcguccagu

SEQ ID NO: 1482662 - RNA, 19 nt, Artificial Sequence
  Description of Artificial Sequence: Synthetic oligonucleotide
cccgcguuggaggguccag

SEQ ID NO: 1482663 - RNA, 19 nt, Artificial Sequence
  Description of Artificial Sequence: Synthetic oligonucleotide
ggcuccccggagcacgggu

SEQ ID NO: 1482664 - RNA, 19 nt, Artificial Sequence
  Description of Artificial Sequence: Synthetic oligonucleotide
cuugcccgcguuggagggu

SEQ ID NO: 1482665 - RNA, 19 nt, Artificial Sequence
  Description of Artificial Sequence: Synthetic oligonucleotide
ggacgccgugaggcugcgg

SEQ ID NO: 1482666 - RNA, 19 nt, Artificial Sequence
  Description of Artificial Sequence: Synthetic oligonucleotide
cccugagcggagccucuga

SEQ ID NO: 1482667 - RNA, 19 nt, Artificial Sequence
  Description of Artificial Sequence: Synthetic oligonucleotide
cgccggugaccaccgccgg

SEQ ID NO: 1482668 - RNA, 19 nt, Artificial Sequence
  Description of Artificial Sequence: Synthetic oligonucleotide
cggugaccaccgccggacc

SEQ ID NO: 1482669 - RNA, 19 nt, Artificial Sequence
  Description of Artificial Sequence: Synthetic oligonucleotide
caggagcggugggccugug

SEQ ID NO: 1482670 - RNA, 19 nt, Artificial Sequence
  Description of Artificial Sequence: Synthetic oligonucleotide
gcggagcgcgagcgcgcug

SEQ ID NO: 1482671 - RNA, 19 nt, Artificial Sequence
  Description of Artificial Sequence: Synthetic oligonucleotide
gcgagcgcgcuggccgggc

SEQ ID NO: 1482672 - RNA, 19 nt, Artificial Sequence
  Description of Artificial Sequence: Synthetic oligonucleotide
ccgccggaccuccgugcac

SEQ ID NO: 1482673 - RNA, 19 nt, Artificial Sequence
  Description of Artificial Sequence: Synthetic oligonucleotide
gccugacgacgcugggccu

SEQ ID NO: 1482674 - RNA, 19 nt, Artificial Sequence
  Description of Artificial Sequence: Synthetic oligonucleotide
ccggaccuccgugcacgug

SEQ ID NO: 1482675 - RNA, 19 nt, Artificial Sequence
  Description of Artificial Sequence: Synthetic oligonucleotide
gcccgcguuggagggucca

SEQ ID NO: 1482676 - RNA, 19 nt, Artificial Sequence
  Description of Artificial Sequence: Synthetic oligonucleotide
cggaggcguccaguacccc

SEQ ID NO: 1482677 - RNA, 19 nt, Artificial Sequence
  Description of Artificial Sequence: Synthetic oligonucleotide
gccggaccuccgugcacgu

SEQ ID NO: 1482678 - RNA, 19 nt, Artificial Sequence
  Description of Artificial Sequence: Synthetic oligonucleotide
ccaguccuuccaccucagu

SEQ ID NO: 1482679 - RNA, 19 nt, Artificial Sequence
  Description of Artificial Sequence: Synthetic oligonucleotide
cgaacaguccuggcacacu

SEQ ID NO: 1482680 - RNA, 19 nt, Artificial Sequence
  Description of Artificial Sequence: Synthetic oligonucleotide
ccggccucagcuggccgaa

SEQ ID NO: 1482681 - RNA, 19 nt, Artificial Sequence
  Description of Artificial Sequence: Synthetic oligonucleotide
ccgcguuggaggguccagu

SEQ ID NO: 1482682 - RNA, 19 nt, Artificial Sequence
  Description of Artificial Sequence: Synthetic oligonucleotide
cgccuggcaucucgcaagu

SEQ ID NO: 1482683 - RNA, 19 nt, Artificial Sequence
  Description of Artificial Sequence: Synthetic oligonucleotide
cgugaagcuccggggcccu

SEQ ID NO: 1482684 - RNA, 19 nt, Artificial Sequence
  Description of Artificial Sequence: Synthetic oligonucleotide
gcccggcgcacaccuucuu

SEQ ID NO: 1482685 - RNA, 19 nt, Artificial Sequence
  Description of Artificial Sequence: Synthetic oligonucleotide
gcgcgcuggccgggccgcu

SEQ ID NO: 1482686 - RNA, 19 nt, Artificial Sequence
  Description of Artificial Sequence: Synthetic oligonucleotide
aauaguagagcccaaguug

SEQ ID NO: 1482687 - RNA, 19 nt, Artificial Sequence
  Description of Artificial Sequence: Synthetic oligonucleotide
aagacgacuagagagagcc

SEQ ID NO: 1482688 - RNA, 19 nt, Artificial Sequence
  Description of Artificial Sequence: Synthetic oligonucleotide
aaccaagacgacuagagag

SEQ ID NO: 1482689 - RNA, 19 nt, Artificial Sequence
  Description of Artificial Sequence: Synthetic oligonucleotide
acaaggaucggacaggagc

SEQ ID NO: 1482690 - RNA, 19 nt, Artificial Sequence
  Description of Artificial Sequence: Synthetic oligonucleotide
gaaguugaaguccuuaggg

SEQ ID NO: 1482691 - RNA, 19 nt, Artificial Sequence
  Description of Artificial Sequence: Synthetic oligonucleotide
aguugaaguccuuaggggc

SEQ ID NO: 1482692 - RNA, 19 nt, Artificial Sequence
  Description of Artificial Sequence: Synthetic oligonucleotide
aagacucucaugcuucugc

SEQ ID NO: 1482693 - RNA, 19 nt, Artificial Sequence
  Description of Artificial Sequence: Synthetic oligonucleotide
uguuacaaagcucaaguca

SEQ ID NO: 1482694 - RNA, 19 nt, Artificial Sequence
  Description of Artificial Sequence: Synthetic oligonucleotide
agauauacaggcuguagac

SEQ ID NO: 1482695 - RNA, 19 nt, Artificial Sequence
  Description of Artificial Sequence: Synthetic oligonucleotide
ucaacaugaaaucuggccu

SEQ ID NO: 1482696 - RNA, 19 nt, Artificial Sequence
  Description of Artificial Sequence: Synthetic oligonucleotide
aaugaauuacuguucagaa

SEQ ID NO: 1482697 - RNA, 19 nt, Artificial Sequence
  Description of Artificial Sequence: Synthetic oligonucleotide
augaaaucuggccuugucc

SEQ ID NO: 1482698 - RNA, 19 nt, Artificial Sequence
  Description of Artificial Sequence: Synthetic oligonucleotide
acagcaaacgcguuggcac

SEQ ID NO: 1482699 - RNA, 19 nt, Artificial Sequence
  Description of Artificial Sequence: Synthetic oligonucleotide
uguacuacugauacaguug

SEQ ID NO: 1482700 - RNA, 19 nt, Artificial Sequence
  Description of Artificial Sequence: Synthetic oligonucleotide
ugaaaucuggccuuguccc

SEQ ID NO: 1482701 - RNA, 19 nt, Artificial Sequence
  Description of Artificial Sequence: Synthetic oligonucleotide
ugaaguugaaguccuuagg

SEQ ID NO: 1482702 - RNA, 19 nt, Artificial Sequence
  Description of Artificial Sequence: Synthetic oligonucleotide
auccuaauggccugaauac

SEQ ID NO: 1482703 - RNA, 19 nt, Artificial Sequence
  Description of Artificial Sequence: Synthetic oligonucleotide
agauccucuguauagguuc

SEQ ID NO: 1482704 - RNA, 19 nt, Artificial Sequence
  Description of Artificial Sequence: Synthetic oligonucleotide
ucgguaguggugcagaucc

SEQ ID NO: 1482705 - RNA, 19 nt, Artificial Sequence
  Description of Artificial Sequence: Synthetic oligonucleotide
aagcucaagucauuguagg

SEQ ID NO: 1482706 - RNA, 19 nt, Artificial Sequence
  Description of Artificial Sequence: Synthetic oligonucleotide
agacaguccagucaguagg

SEQ ID NO: 1482707 - RNA, 19 nt, Artificial Sequence
  Description of Artificial Sequence: Synthetic oligonucleotide
aaaugaauuacuguucaga

SEQ ID NO: 1482708 - RNA, 19 nt, Artificial Sequence
  Description of Artificial Sequence: Synthetic oligonucleotide
uugaaaucaaaguucaaua

SEQ ID NO: 1482709 - RNA, 19 nt, Artificial Sequence
  Description of Artificial Sequence: Synthetic oligonucleotide
gucauguuuaccccaaagg

SEQ ID NO: 1482710 - RNA, 19 nt, Artificial Sequence
  Description of Artificial Sequence: Synthetic oligonucleotide
aguagguuacgccuuuuac

SEQ ID NO: 1482711 - RNA, 19 nt, Artificial Sequence
  Description of Artificial Sequence: Synthetic oligonucleotide
guaaggaaguuccaccugg

SEQ ID NO: 1482712 - RNA, 19 nt, Artificial Sequence
  Description of Artificial Sequence: Synthetic oligonucleotide
augagcacaauaguagagc

SEQ ID NO: 1482713 - RNA, 19 nt, Artificial Sequence
  Description of Artificial Sequence: Synthetic oligonucleotide
gaagcagugauagucuccg

SEQ ID NO: 1482714 - RNA, 19 nt, Artificial Sequence
  Description of Artificial Sequence: Synthetic oligonucleotide
ugagcacaauaguagagcc

SEQ ID NO: 1482715 - RNA, 19 nt, Artificial Sequence
  Description of Artificial Sequence: Synthetic oligonucleotide
aagaucaacaugaaaucug

SEQ ID NO: 1482716 - RNA, 19 nt, Artificial Sequence
  Description of Artificial Sequence: Synthetic oligonucleotide
ucuugcaaugaaaugaauu

SEQ ID NO: 1482717 - RNA, 19 nt, Artificial Sequence
  Description of Artificial Sequence: Synthetic oligonucleotide
aggaacaaggaucggacag

SEQ ID NO: 1482718 - RNA, 19 nt, Artificial Sequence
  Description of Artificial Sequence: Synthetic oligonucleotide
uaaguacugaccaccacac

SEQ ID NO: 1482719 - RNA, 19 nt, Artificial Sequence
  Description of Artificial Sequence: Synthetic oligonucleotide
aauucacccaggugcucgc

SEQ ID NO: 1482720 - RNA, 19 nt, Artificial Sequence
  Description of Artificial Sequence: Synthetic oligonucleotide
aacccguguuuccaguccc

SEQ ID NO: 1482721 - RNA, 19 nt, Artificial Sequence
  Description of Artificial Sequence: Synthetic oligonucleotide
uggaaagaucccuuggcag

SEQ ID NO: 1482722 - RNA, 19 nt, Artificial Sequence
  Description of Artificial Sequence: Synthetic oligonucleotide
acugccgucaaugagaaga

SEQ ID NO: 1482723 - RNA, 19 nt, Artificial Sequence
  Description of Artificial Sequence: Synthetic oligonucleotide
uuacuguucagaagacucc

SEQ ID NO: 1482724 - RNA, 19 nt, Artificial Sequence
  Description of Artificial Sequence: Synthetic oligonucleotide
acaucaaggaaccugggaa

SEQ ID NO: 1482725 - RNA, 19 nt, Artificial Sequence
  Description of Artificial Sequence: Synthetic oligonucleotide
ucaaugagaagaacccgug

SEQ ID NO: 1482726 - RNA, 19 nt, Artificial Sequence
  Description of Artificial Sequence: Synthetic oligonucleotide
aaagcucaagucauuguag

SEQ ID NO: 1482727 - RNA, 19 nt, Artificial Sequence
  Description of Artificial Sequence: Synthetic oligonucleotide
augaauuacuguucagaag

SEQ ID NO: 1482728 - RNA, 19 nt, Artificial Sequence
  Description of Artificial Sequence: Synthetic oligonucleotide
agaucaacaugaaaucugg

SEQ ID NO: 1482729 - RNA, 19 nt, Artificial Sequence
  Description of Artificial Sequence: Synthetic oligonucleotide
uucauacaaaauacuguac

SEQ ID NO: 1482730 - RNA, 19 nt, Artificial Sequence
  Description of Artificial Sequence: Synthetic oligonucleotide
aaagcggaucuuuugcccu

SEQ ID NO: 1482731 - RNA, 19 nt, Artificial Sequence
  Description of Artificial Sequence: Synthetic oligonucleotide
uccaacacagccccuagac

SEQ ID NO: 1482732 - RNA, 19 nt, Artificial Sequence
  Description of Artificial Sequence: Synthetic oligonucleotide
uguauagguucgaggaccc

SEQ ID NO: 1482733 - RNA, 19 nt, Artificial Sequence
  Description of Artificial Sequence: Synthetic oligonucleotide
cuugcaaugaaaugaauua

SEQ ID NO: 1482734 - RNA, 19 nt, Artificial Sequence
  Description of Artificial Sequence: Synthetic oligonucleotide
agagcucuuugauccaucg

SEQ ID NO: 1482735 - RNA, 19 nt, Artificial Sequence
  Description of Artificial Sequence: Synthetic oligonucleotide
ugucuugcaaugaaaugaa

SEQ ID NO: 1482736 - RNA, 19 nt, Artificial Sequence
  Description of Artificial Sequence: Synthetic oligonucleotide
gacuagagagagcccagcg

SEQ ID NO: 1482737 - RNA, 19 nt, Artificial Sequence
  Description of Artificial Sequence: Synthetic oligonucleotide
uuuugcccugccuucagcc

SEQ ID NO: 1482738 - RNA, 19 nt, Artificial Sequence
  Description of Artificial Sequence: Synthetic oligonucleotide
uacugauacaguugaaauc

SEQ ID NO: 1482739 - RNA, 19 nt, Artificial Sequence
  Description of Artificial Sequence: Synthetic oligonucleotide
cucuguauagguucgagga

SEQ ID NO: 1482740 - RNA, 19 nt, Artificial Sequence
  Description of Artificial Sequence: Synthetic oligonucleotide
acaaccaagacgacuagag

SEQ ID NO: 1482741 - RNA, 19 nt, Artificial Sequence
  Description of Artificial Sequence: Synthetic oligonucleotide
cucaagucauuguaggaac

SEQ ID NO: 1482742 - RNA, 19 nt, Artificial Sequence
  Description of Artificial Sequence: Synthetic oligonucleotide
uagguuacgccuuuuacuu

SEQ ID NO: 1482743 - RNA, 19 nt, Artificial Sequence
  Description of Artificial Sequence: Synthetic oligonucleotide
aaguugaauucacccaggu

SEQ ID NO: 1482744 - RNA, 19 nt, Artificial Sequence
  Description of Artificial Sequence: Synthetic oligonucleotide
uauagguucgaggacccag

SEQ ID NO: 1482745 - RNA, 19 nt, Artificial Sequence
  Description of Artificial Sequence: Synthetic oligonucleotide
ugacagaagagcucuuuga

SEQ ID NO: 1482746 - RNA, 19 nt, Artificial Sequence
  Description of Artificial Sequence: Synthetic oligonucleotide
gaugagcacaauaguagag

SEQ ID NO: 1482747 - RNA, 19 nt, Artificial Sequence
  Description of Artificial Sequence: Synthetic oligonucleotide
ucacaauucuucaccugcc

SEQ ID NO: 1482748 - RNA, 19 nt, Artificial Sequence
  Description of Artificial Sequence: Synthetic oligonucleotide
acuccuacuuuucauacaa

SEQ ID NO: 1482749 - RNA, 19 nt, Artificial Sequence
  Description of Artificial Sequence: Synthetic oligonucleotide
gucccuauuacugggaucc

SEQ ID NO: 1482750 - RNA, 19 nt, Artificial Sequence
  Description of Artificial Sequence: Synthetic oligonucleotide
agaugagcacaauaguaga

SEQ ID NO: 1482751 - RNA, 19 nt, Artificial Sequence
  Description of Artificial Sequence: Synthetic oligonucleotide
uucuaaguacugaccacca

SEQ ID NO: 1482752 - RNA, 19 nt, Artificial Sequence
  Description of Artificial Sequence: Synthetic oligonucleotide
aauuacuguucagaagacu

SEQ ID NO: 1482753 - RNA, 19 nt, Artificial Sequence
  Description of Artificial Sequence: Synthetic oligonucleotide
ucuguauagguucgaggac

SEQ ID NO: 1482754 - RNA, 19 nt, Artificial Sequence
  Description of Artificial Sequence: Synthetic oligonucleotide
acucucaugcuucugcgug

SEQ ID NO: 1482755 - RNA, 19 nt, Artificial Sequence
  Description of Artificial Sequence: Synthetic oligonucleotide
cuguauagguucgaggacc

SEQ ID NO: 1482756 - RNA, 19 nt, Artificial Sequence
  Description of Artificial Sequence: Synthetic oligonucleotide
ucaguaggggaguggaagc

SEQ ID NO: 1482757 - RNA, 19 nt, Artificial Sequence
  Description of Artificial Sequence: Synthetic oligonucleotide
caaagcggaucuuuugccc

SEQ ID NO: 1482758 - RNA, 19 nt, Artificial Sequence
  Description of Artificial Sequence: Synthetic oligonucleotide
gugacuggcaaguuugggc

SEQ ID NO: 1482759 - RNA, 19 nt, Artificial Sequence
  Description of Artificial Sequence: Synthetic oligonucleotide
cucgcugagguuucgguag

SEQ ID NO: 1482760 - RNA, 19 nt, Artificial Sequence
  Description of Artificial Sequence: Synthetic oligonucleotide
agacucucaugcuucugcg

SEQ ID NO: 1482761 - RNA, 19 nt, Artificial Sequence
  Description of Artificial Sequence: Synthetic oligonucleotide
cuaaguacugaccaccaca

SEQ ID NO: 1482762 - RNA, 19 nt, Artificial Sequence
  Description of Artificial Sequence: Synthetic oligonucleotide
guccuuaggggccucaaag

SEQ ID NO: 1482763 - RNA, 19 nt, Artificial Sequence
  Description of Artificial Sequence: Synthetic oligonucleotide
ucugggacuguuugugugc

SEQ ID NO: 1482764 - RNA, 19 nt, Artificial Sequence
  Description of Artificial Sequence: Synthetic oligonucleotide
ugaauaccguuuucuaagu

SEQ ID NO: 1482765 - RNA, 19 nt, Artificial Sequence
  Description of Artificial Sequence: Synthetic oligonucleotide
guuccugaaggagucacgg

SEQ ID NO: 1482766 - RNA, 19 nt, Artificial Sequence
  Description of Artificial Sequence: Synthetic oligonucleotide
cuugcgucggaagaacucg

SEQ ID NO: 1482767 - RNA, 19 nt, Artificial Sequence
  Description of Artificial Sequence: Synthetic oligonucleotide
cacacgcucauugugacag

SEQ ID NO: 1482768 - RNA, 19 nt, Artificial Sequence
  Description of Artificial Sequence: Synthetic oligonucleotide
caaguugaauucacccagg

SEQ ID NO: 1482769 - RNA, 19 nt, Artificial Sequence
  Description of Artificial Sequence: Synthetic oligonucleotide
ccuaauggccugaauaccg

SEQ ID NO: 1482770 - RNA, 19 nt, Artificial Sequence
  Description of Artificial Sequence: Synthetic oligonucleotide
gagacaguccagucaguag

SEQ ID NO: 1482771 - RNA, 19 nt, Artificial Sequence
  Description of Artificial Sequence: Synthetic oligonucleotide
gaagaacccguguuuccag

SEQ ID NO: 1482772 - RNA, 19 nt, Artificial Sequence
  Description of Artificial Sequence: Synthetic oligonucleotide
ugauccaucgggccaugcc

SEQ ID NO: 1482773 - RNA, 19 nt, Artificial Sequence
  Description of Artificial Sequence: Synthetic oligonucleotide
gaaagaucccuuggcagcc

SEQ ID NO: 1482774 - RNA, 19 nt, Artificial Sequence
  Description of Artificial Sequence: Synthetic oligonucleotide
auaguagagcccaaguuga

SEQ ID NO: 1482775 - RNA, 19 nt, Artificial Sequence
  Description of Artificial Sequence: Synthetic oligonucleotide
ggaaagaucccuuggcagc

SEQ ID NO: 1482776 - RNA, 19 nt, Artificial Sequence
  Description of Artificial Sequence: Synthetic oligonucleotide
acaauucuucaccugccca

SEQ ID NO: 1482777 - RNA, 19 nt, Artificial Sequence
  Description of Artificial Sequence: Synthetic oligonucleotide
uugcgcaugggaaugcccu

SEQ ID NO: 1482778 - RNA, 19 nt, Artificial Sequence
  Description of Artificial Sequence: Synthetic oligonucleotide
uuccaccugguucaggcga

SEQ ID NO: 1482779 - RNA, 19 nt, Artificial Sequence
  Description of Artificial Sequence: Synthetic oligonucleotide
gauccaucgggccaugcca

SEQ ID NO: 1482780 - RNA, 19 nt, Artificial Sequence
  Description of Artificial Sequence: Synthetic oligonucleotide
gauggagcccacguuagug

SEQ ID NO: 1482781 - RNA, 19 nt, Artificial Sequence
  Description of Artificial Sequence: Synthetic oligonucleotide
ugggcggaaucuccaaucc

SEQ ID NO: 1482782 - RNA, 19 nt, Artificial Sequence
  Description of Artificial Sequence: Synthetic oligonucleotide
agaacccguguuuccaguc

SEQ ID NO: 1482783 - RNA, 19 nt, Artificial Sequence
  Description of Artificial Sequence: Synthetic oligonucleotide
ucuaaguacugaccaccac

SEQ ID NO: 1482784 - RNA, 19 nt, Artificial Sequence
  Description of Artificial Sequence: Synthetic oligonucleotide
aacccuugcuguaucuggg

SEQ ID NO: 1482785 - RNA, 19 nt, Artificial Sequence
  Description of Artificial Sequence: Synthetic oligonucleotide
aacucgcugagguuucggu

SEQ ID NO: 1482786 - RNA, 19 nt, Artificial Sequence
  Description of Artificial Sequence: Synthetic oligonucleotide
gguuacgccuuuuacuugc

SEQ ID NO: 1482787 - RNA, 19 nt, Artificial Sequence
  Description of Artificial Sequence: Synthetic oligonucleotide
cauacccaccaccuguugc

SEQ ID NO: 1482788 - RNA, 19 nt, Artificial Sequence
  Description of Artificial Sequence: Synthetic oligonucleotide
guaucugggacuguuugug

SEQ ID NO: 1482789 - RNA, 19 nt, Artificial Sequence
  Description of Artificial Sequence: Synthetic oligonucleotide
gacaguccagucaguaggg

SEQ ID NO: 1482790 - RNA, 19 nt, Artificial Sequence
  Description of Artificial Sequence: Synthetic oligonucleotide
ucaggcgaccccaggcacg

SEQ ID NO: 1482791 - RNA, 19 nt, Artificial Sequence
  Description of Artificial Sequence: Synthetic oligonucleotide
ccaaguugaauucacccag

SEQ ID NO: 1482792 - RNA, 19 nt, Artificial Sequence
  Description of Artificial Sequence: Synthetic oligonucleotide
aguccagucaguaggggag

SEQ ID NO: 1482793 - RNA, 19 nt, Artificial Sequence
  Description of Artificial Sequence: Synthetic oligonucleotide
gcagugauagucuccgggg

SEQ ID NO: 1482794 - RNA, 19 nt, Artificial Sequence
  Description of Artificial Sequence: Synthetic oligonucleotide
ggcaccgacuuguacaggg

SEQ ID NO: 1482795 - RNA, 19 nt, Artificial Sequence
  Description of Artificial Sequence: Synthetic oligonucleotide
aggggccucaaagaugagc

SEQ ID NO: 1482796 - RNA, 19 nt, Artificial Sequence
  Description of Artificial Sequence: Synthetic oligonucleotide
aagaacccguguuuccagu

SEQ ID NO: 1482797 - RNA, 19 nt, Artificial Sequence
  Description of Artificial Sequence: Synthetic oligonucleotide
cacaauucuucaccugccc

SEQ ID NO: 1482798 - RNA, 19 nt, Artificial Sequence
  Description of Artificial Sequence: Synthetic oligonucleotide
gacaucaaggaaccuggga

SEQ ID NO: 1482799 - RNA, 19 nt, Artificial Sequence
  Description of Artificial Sequence: Synthetic oligonucleotide
acaggagcaguauggauuu

SEQ ID NO: 1482800 - RNA, 19 nt, Artificial Sequence
  Description of Artificial Sequence: Synthetic oligonucleotide
gaacccguguuuccagucc

SEQ ID NO: 1482801 - RNA, 19 nt, Artificial Sequence
  Description of Artificial Sequence: Synthetic oligonucleotide
aggaucuugccaucugaug

SEQ ID NO: 1482802 - RNA, 19 nt, Artificial Sequence
  Description of Artificial Sequence: Synthetic oligonucleotide
uccuaauggccugaauacc

SEQ ID NO: 1482803 - RNA, 19 nt, Artificial Sequence
  Description of Artificial Sequence: Synthetic oligonucleotide
cagauauacaggcuguaga

SEQ ID NO: 1482804 - RNA, 19 nt, Artificial Sequence
  Description of Artificial Sequence: Synthetic oligonucleotide
cucucaugcuucugcgugg

SEQ ID NO: 1482805 - RNA, 19 nt, Artificial Sequence
  Description of Artificial Sequence: Synthetic oligonucleotide
gagcucuuugauccaucgg

SEQ ID NO: 1482806 - RNA, 19 nt, Artificial Sequence
  Description of Artificial Sequence: Synthetic oligonucleotide
gacgacuagagagagccca

SEQ ID NO: 1482807 - RNA, 19 nt, Artificial Sequence
  Description of Artificial Sequence: Synthetic oligonucleotide
agccccuagaccaauagca

SEQ ID NO: 1482808 - RNA, 19 nt, Artificial Sequence
  Description of Artificial Sequence: Synthetic oligonucleotide
ugcguggaaagaucccuug

SEQ ID NO: 1482809 - RNA, 19 nt, Artificial Sequence
  Description of Artificial Sequence: Synthetic oligonucleotide
aggacccaggaaugacucc

SEQ ID NO: 1482810 - RNA, 19 nt, Artificial Sequence
  Description of Artificial Sequence: Synthetic oligonucleotide
auaccguuuucuaaguacu

SEQ ID NO: 1482811 - RNA, 19 nt, Artificial Sequence
  Description of Artificial Sequence: Synthetic oligonucleotide
uucccuucccgagugacca

SEQ ID NO: 1482812 - RNA, 19 nt, Artificial Sequence
  Description of Artificial Sequence: Synthetic oligonucleotide
aagcagugauagucuccgg

SEQ ID NO: 1482813 - RNA, 19 nt, Artificial Sequence
  Description of Artificial Sequence: Synthetic oligonucleotide
gaauuacuguucagaagac

SEQ ID NO: 1482814 - RNA, 19 nt, Artificial Sequence
  Description of Artificial Sequence: Synthetic oligonucleotide
ggguucacugacaucaagg

SEQ ID NO: 1482815 - RNA, 19 nt, Artificial Sequence
  Description of Artificial Sequence: Synthetic oligonucleotide
ccgucaaugagaagaaccc

SEQ ID NO: 1482816 - RNA, 19 nt, Artificial Sequence
  Description of Artificial Sequence: Synthetic oligonucleotide
gacuggcaaguuugggcgg

SEQ ID NO: 1482817 - RNA, 19 nt, Artificial Sequence
  Description of Artificial Sequence: Synthetic oligonucleotide
cagccugaaguugaagucc

SEQ ID NO: 1482818 - RNA, 19 nt, Artificial Sequence
  Description of Artificial Sequence: Synthetic oligonucleotide
guagguuacgccuuuuacu

SEQ ID NO: 1482819 - RNA, 19 nt, Artificial Sequence
  Description of Artificial Sequence: Synthetic oligonucleotide
ggcagccacaaccaagacg

SEQ ID NO: 1482820 - RNA, 19 nt, Artificial Sequence
  Description of Artificial Sequence: Synthetic oligonucleotide
cucauucccuucccgagug

SEQ ID NO: 1482821 - RNA, 19 nt, Artificial Sequence
  Description of Artificial Sequence: Synthetic oligonucleotide
uugggcggaaucuccaauc

SEQ ID NO: 1482822 - RNA, 19 nt, Artificial Sequence
  Description of Artificial Sequence: Synthetic oligonucleotide
gaaguggcgccgaugugag

SEQ ID NO: 1482823 - RNA, 19 nt, Artificial Sequence
  Description of Artificial Sequence: Synthetic oligonucleotide
agcuucugaucccuguacu

SEQ ID NO: 1482824 - RNA, 19 nt, Artificial Sequence
  Description of Artificial Sequence: Synthetic oligonucleotide
guugaaaucaaaguucaau

SEQ ID NO: 1482825 - RNA, 19 nt, Artificial Sequence
  Description of Artificial Sequence: Synthetic oligonucleotide
aauucuucaccugcccaaa

SEQ ID NO: 1482826 - RNA, 19 nt, Artificial Sequence
  Description of Artificial Sequence: Synthetic oligonucleotide
uguuuaccccaaaggucca

SEQ ID NO: 1482827 - RNA, 19 nt, Artificial Sequence
  Description of Artificial Sequence: Synthetic oligonucleotide
uguaggaacccuugcugua

SEQ ID NO: 1482828 - RNA, 19 nt, Artificial Sequence
  Description of Artificial Sequence: Synthetic oligonucleotide
acguuaguggcgcccacug

SEQ ID NO: 1482829 - RNA, 19 nt, Artificial Sequence
  Description of Artificial Sequence: Synthetic oligonucleotide
gaccccaggcacgugacag

SEQ ID NO: 1482830 - RNA, 19 nt, Artificial Sequence
  Description of Artificial Sequence: Synthetic oligonucleotide
ucaaggaaccugggaagug

SEQ ID NO: 1482831 - RNA, 19 nt, Artificial Sequence
  Description of Artificial Sequence: Synthetic oligonucleotide
uaucugggacuguuugugu

SEQ ID NO: 1482832 - RNA, 19 nt, Artificial Sequence
  Description of Artificial Sequence: Synthetic oligonucleotide
uccucuguauagguucgag

SEQ ID NO: 1482833 - RNA, 19 nt, Artificial Sequence
  Description of Artificial Sequence: Synthetic oligonucleotide
ggaacaaggaucggacagg

SEQ ID NO: 1482834 - RNA, 19 nt, Artificial Sequence
  Description of Artificial Sequence: Synthetic oligonucleotide
gcccaaguugaauucaccc

SEQ ID NO: 1482835 - RNA, 19 nt, Artificial Sequence
  Description of Artificial Sequence: Synthetic oligonucleotide
uugcgucggaagaacucgc

SEQ ID NO: 1482836 - RNA, 19 nt, Artificial Sequence
  Description of Artificial Sequence: Synthetic oligonucleotide
uugucccuauuacugggau

SEQ ID NO: 1482837 - RNA, 19 nt, Artificial Sequence
  Description of Artificial Sequence: Synthetic oligonucleotide
uucaggcgaccccaggcac

SEQ ID NO: 1482838 - RNA, 19 nt, Artificial Sequence
  Description of Artificial Sequence: Synthetic oligonucleotide
ugaucacacugugcaagcc

SEQ ID NO: 1482839 - RNA, 19 nt, Artificial Sequence
  Description of Artificial Sequence: Synthetic oligonucleotide
caccgacuuguacagggcc

SEQ ID NO: 1482840 - RNA, 19 nt, Artificial Sequence
  Description of Artificial Sequence: Synthetic oligonucleotide
cagcaaacgcguuggcacc

SEQ ID NO: 1482841 - RNA, 19 nt, Artificial Sequence
  Description of Artificial Sequence: Synthetic oligonucleotide
accaagacgacuagagaga

SEQ ID NO: 1482842 - RNA, 19 nt, Artificial Sequence
  Description of Artificial Sequence: Synthetic oligonucleotide
cuagaccaauagcagcaug

SEQ ID NO: 1482843 - RNA, 19 nt, Artificial Sequence
  Description of Artificial Sequence: Synthetic oligonucleotide
aguaggggaguggaagcag

SEQ ID NO: 1482844 - RNA, 19 nt, Artificial Sequence
  Description of Artificial Sequence: Synthetic oligonucleotide
ugagacaguccagucagua

SEQ ID NO: 1482845 - RNA, 19 nt, Artificial Sequence
  Description of Artificial Sequence: Synthetic oligonucleotide
guagacuggccuccgcagc

SEQ ID NO: 1482846 - RNA, 19 nt, Artificial Sequence
  Description of Artificial Sequence: Synthetic oligonucleotide
gcacgugacagcaaacgcg

SEQ ID NO: 1482847 - RNA, 19 nt, Artificial Sequence
  Description of Artificial Sequence: Synthetic oligonucleotide
aaggaucggacaggagcag

SEQ ID NO: 1482848 - RNA, 19 nt, Artificial Sequence
  Description of Artificial Sequence: Synthetic oligonucleotide
gaacaaggaucggacagga

SEQ ID NO: 1482849 - RNA, 19 nt, Artificial Sequence
  Description of Artificial Sequence: Synthetic oligonucleotide
accguuuucuaaguacuga

SEQ ID NO: 1482850 - RNA, 19 nt, Artificial Sequence
  Description of Artificial Sequence: Synthetic oligonucleotide
gccgucaaugagaagaacc

SEQ ID NO: 1482851 - RNA, 19 nt, Artificial Sequence
  Description of Artificial Sequence: Synthetic oligonucleotide
aucaaggaaccugggaagu

SEQ ID NO: 1482852 - RNA, 19 nt, Artificial Sequence
  Description of Artificial Sequence: Synthetic oligonucleotide
caagacgacuagagagagc

SEQ ID NO: 1482853 - RNA, 19 nt, Artificial Sequence
  Description of Artificial Sequence: Synthetic oligonucleotide
gacuccuacuuuucauaca

SEQ ID NO: 1482854 - RNA, 19 nt, Artificial Sequence
  Description of Artificial Sequence: Synthetic oligonucleotide
aaccugggaaguggcgccg

SEQ ID NO: 1482855 - RNA, 19 nt, Artificial Sequence
  Description of Artificial Sequence: Synthetic oligonucleotide
agguuacgccuuuuacuug

SEQ ID NO: 1482856 - RNA, 19 nt, Artificial Sequence
  Description of Artificial Sequence: Synthetic oligonucleotide
agcaaacgcguuggcaccg

SEQ ID NO: 1482857 - RNA, 19 nt, Artificial Sequence
  Description of Artificial Sequence: Synthetic oligonucleotide
uccagggaguagguuacgc

SEQ ID NO: 1482858 - RNA, 19 nt, Artificial Sequence
  Description of Artificial Sequence: Synthetic oligonucleotide
gguucaggcgaccccaggc

SEQ ID NO: 1482859 - RNA, 19 nt, Artificial Sequence
  Description of Artificial Sequence: Synthetic oligonucleotide
gauauacaggcuguagacu

SEQ ID NO: 1482860 - RNA, 19 nt, Artificial Sequence
  Description of Artificial Sequence: Synthetic oligonucleotide
ccaaagcggaucuuuugcc

SEQ ID NO: 1482861 - RNA, 19 nt, Artificial Sequence
  Description of Artificial Sequence: Synthetic oligonucleotide
ugcgucggaagaacucgcu

SEQ ID NO: 1482862 - RNA, 19 nt, Artificial Sequence
  Description of Artificial Sequence: Synthetic oligonucleotide
ugucccuauuacugggauc

SEQ ID NO: 1482863 - RNA, 19 nt, Artificial Sequence
  Description of Artificial Sequence: Synthetic oligonucleotide
gggacuguuugugugcagg

SEQ ID NO: 1482864 - RNA, 19 nt, Artificial Sequence
  Description of Artificial Sequence: Synthetic oligonucleotide
gaacucgcugagguuucgg

SEQ ID NO: 1482865 - RNA, 19 nt, Artificial Sequence
  Description of Artificial Sequence: Synthetic oligonucleotide
aacaaggaucggacaggag

SEQ ID NO: 1482866 - RNA, 19 nt, Artificial Sequence
  Description of Artificial Sequence: Synthetic oligonucleotide
uccaccugguucaggcgac

SEQ ID NO: 1482867 - RNA, 19 nt, Artificial Sequence
  Description of Artificial Sequence: Synthetic oligonucleotide
gaauaccguuuucuaagua

SEQ ID NO: 1482868 - RNA, 19 nt, Artificial Sequence
  Description of Artificial Sequence: Synthetic oligonucleotide
gccgguacccugcauaccc

SEQ ID NO: 1482869 - RNA, 19 nt, Artificial Sequence
  Description of Artificial Sequence: Synthetic oligonucleotide
gaugcggauggagcccacg

SEQ ID NO: 1482870 - RNA, 19 nt, Artificial Sequence
  Description of Artificial Sequence: Synthetic oligonucleotide
auggccugaauaccguuuu

SEQ ID NO: 1482871 - RNA, 19 nt, Artificial Sequence
  Description of Artificial Sequence: Synthetic oligonucleotide
ugcuucugcguggaaagau

SEQ ID NO: 1482872 - RNA, 19 nt, Artificial Sequence
  Description of Artificial Sequence: Synthetic oligonucleotide
ccucuguauagguucgagg

SEQ ID NO: 1482873 - RNA, 19 nt, Artificial Sequence
  Description of Artificial Sequence: Synthetic oligonucleotide
ggcacgugacagcaaacgc

SEQ ID NO: 1482874 - RNA, 19 nt, Artificial Sequence
  Description of Artificial Sequence: Synthetic oligonucleotide
agagcccaaguugaauuca

SEQ ID NO: 1482875 - RNA, 19 nt, Artificial Sequence
  Description of Artificial Sequence: Synthetic oligonucleotide
cugccgguacccugcauac

SEQ ID NO: 1482876 - RNA, 19 nt, Artificial Sequence
  Description of Artificial Sequence: Synthetic oligonucleotide
cugggauccuaauggccug

SEQ ID NO: 1482877 - RNA, 19 nt, Artificial Sequence
  Description of Artificial Sequence: Synthetic oligonucleotide
ggaaccugggaaguggcgc

SEQ ID NO: 1482878 - RNA, 19 nt, Artificial Sequence
  Description of Artificial Sequence: Synthetic oligonucleotide
gucaaugagaagaacccgu

SEQ ID NO: 1482879 - RNA, 19 nt, Artificial Sequence
  Description of Artificial Sequence: Synthetic oligonucleotide
uuacgccuuuuacuugcuc

SEQ ID NO: 1482880 - RNA, 19 nt, Artificial Sequence
  Description of Artificial Sequence: Synthetic oligonucleotide
agccucugucauguuuacc

SEQ ID NO: 1482881 - RNA, 19 nt, Artificial Sequence
  Description of Artificial Sequence: Synthetic oligonucleotide
ggccuugucccuauuacug

SEQ ID NO: 1482882 - RNA, 19 nt, Artificial Sequence
  Description of Artificial Sequence: Synthetic oligonucleotide
uuucgguaguggugcagau

SEQ ID NO: 1482883 - RNA, 19 nt, Artificial Sequence
  Description of Artificial Sequence: Synthetic oligonucleotide
guacagggccaccucccag

SEQ ID NO: 1482884 - RNA, 19 nt, Artificial Sequence
  Description of Artificial Sequence: Synthetic oligonucleotide
ugcaagccacagacaggcc

SEQ ID NO: 1482885 - RNA, 19 nt, Artificial Sequence
  Description of Artificial Sequence: Synthetic oligonucleotide
aaagaucccuuggcagcca

SEQ ID NO: 1482886 - RNA, 19 nt, Artificial Sequence
  Description of Artificial Sequence: Synthetic oligonucleotide
aaacgcguuggcaccgacu

SEQ ID NO: 1482887 - RNA, 19 nt, Artificial Sequence
  Description of Artificial Sequence: Synthetic oligonucleotide
caguaaggaaguuccaccu

SEQ ID NO: 1482888 - RNA, 19 nt, Artificial Sequence
  Description of Artificial Sequence: Synthetic oligonucleotide
cauucccuucccgagugac

SEQ ID NO: 1482889 - RNA, 19 nt, Artificial Sequence
  Description of Artificial Sequence: Synthetic oligonucleotide
caaccaagacgacuagaga

SEQ ID NO: 1482890 - RNA, 19 nt, Artificial Sequence
  Description of Artificial Sequence: Synthetic oligonucleotide
cagccccuagaccaauagc

SEQ ID NO: 1482891 - RNA, 19 nt, Artificial Sequence
  Description of Artificial Sequence: Synthetic oligonucleotide
acucgcugagguuucggua

SEQ ID NO: 1482892 - RNA, 19 nt, Artificial Sequence
  Description of Artificial Sequence: Synthetic oligonucleotide
agacgacuagagagagccc

SEQ ID NO: 1482893 - RNA, 19 nt, Artificial Sequence
  Description of Artificial Sequence: Synthetic oligonucleotide
gcguggaaagaucccuugg

SEQ ID NO: 1482894 - RNA, 19 nt, Artificial Sequence
  Description of Artificial Sequence: Synthetic oligonucleotide
gcaggaacaaggaucggac

SEQ ID NO: 1482895 - RNA, 19 nt, Artificial Sequence
  Description of Artificial Sequence: Synthetic oligonucleotide
ucccuguacuucucauacu

SEQ ID NO: 1482896 - RNA, 19 nt, Artificial Sequence
  Description of Artificial Sequence: Synthetic oligonucleotide
gacuguuugugugcagguc

SEQ ID NO: 1482897 - RNA, 19 nt, Artificial Sequence
  Description of Artificial Sequence: Synthetic oligonucleotide
ggaaguggcgccgauguga

SEQ ID NO: 1482898 - RNA, 19 nt, Artificial Sequence
  Description of Artificial Sequence: Synthetic oligonucleotide
gaaaucuggccuugucccu

SEQ ID NO: 1482899 - RNA, 19 nt, Artificial Sequence
  Description of Artificial Sequence: Synthetic oligonucleotide
uccccaaagcggaucuuuu

SEQ ID NO: 1482900 - RNA, 19 nt, Artificial Sequence
  Description of Artificial Sequence: Synthetic oligonucleotide
cacgugacagcaaacgcgu

SEQ ID NO: 1482901 - RNA, 19 nt, Artificial Sequence
  Description of Artificial Sequence: Synthetic oligonucleotide
ugggacuguuugugugcag

SEQ ID NO: 1482902 - RNA, 19 nt, Artificial Sequence
  Description of Artificial Sequence: Synthetic oligonucleotide
aggaaccugggaaguggcg

SEQ ID NO: 1482903 - RNA, 19 nt, Artificial Sequence
  Description of Artificial Sequence: Synthetic oligonucleotide
guuuaccccaaagguccag

SEQ ID NO: 1482904 - RNA, 19 nt, Artificial Sequence
  Description of Artificial Sequence: Synthetic oligonucleotide
ucgcugagguuucgguagu

SEQ ID NO: 1482905 - RNA, 19 nt, Artificial Sequence
  Description of Artificial Sequence: Synthetic oligonucleotide
uccagucaguaggggagug

SEQ ID NO: 1482906 - RNA, 19 nt, Artificial Sequence
  Description of Artificial Sequence: Synthetic oligonucleotide
aucuuuugcccugccuuca

SEQ ID NO: 1482907 - RNA, 19 nt, Artificial Sequence
  Description of Artificial Sequence: Synthetic oligonucleotide
aacacagccccuagaccaa

SEQ ID NO: 1482908 - RNA, 19 nt, Artificial Sequence
  Description of Artificial Sequence: Synthetic oligonucleotide
agccugaaguugaaguccu

SEQ ID NO: 1482909 - RNA, 19 nt, Artificial Sequence
  Description of Artificial Sequence: Synthetic oligonucleotide
acgacuagagagagcccag

SEQ ID NO: 1482910 - RNA, 19 nt, Artificial Sequence
  Description of Artificial Sequence: Synthetic oligonucleotide
ggcaaguuugggcggaauc

SEQ ID NO: 1482911 - RNA, 19 nt, Artificial Sequence
  Description of Artificial Sequence: Synthetic oligonucleotide
cccuagaccaauagcagca

SEQ ID NO: 1482912 - RNA, 19 nt, Artificial Sequence
  Description of Artificial Sequence: Synthetic oligonucleotide
ccccuagaccaauagcagc

SEQ ID NO: 1482913 - RNA, 19 nt, Artificial Sequence
  Description of Artificial Sequence: Synthetic oligonucleotide
aguccuuaggggccucaaa

SEQ ID NO: 1482914 - RNA, 19 nt, Artificial Sequence
  Description of Artificial Sequence: Synthetic oligonucleotide
caggaacaaggaucggaca

SEQ ID NO: 1482915 - RNA, 19 nt, Artificial Sequence
  Description of Artificial Sequence: Synthetic oligonucleotide
uggcgccgaugugagacag

SEQ ID NO: 1482916 - RNA, 19 nt, Artificial Sequence
  Description of Artificial Sequence: Synthetic oligonucleotide
ugcgcaugggaaugcccuc

SEQ ID NO: 1482917 - RNA, 19 nt, Artificial Sequence
  Description of Artificial Sequence: Synthetic oligonucleotide
ggcggaaucuccaauccca

SEQ ID NO: 1482918 - RNA, 19 nt, Artificial Sequence
  Description of Artificial Sequence: Synthetic oligonucleotide
ccaagacgacuagagagag

SEQ ID NO: 1482919 - RNA, 19 nt, Artificial Sequence
  Description of Artificial Sequence: Synthetic oligonucleotide
cauguguuacaaagcucaa

SEQ ID NO: 1482920 - RNA, 19 nt, Artificial Sequence
  Description of Artificial Sequence: Synthetic oligonucleotide
ccagauauacaggcuguag

SEQ ID NO: 1482921 - RNA, 19 nt, Artificial Sequence
  Description of Artificial Sequence: Synthetic oligonucleotide
gcucaagucauuguaggaa

SEQ ID NO: 1482922 - RNA, 19 nt, Artificial Sequence
  Description of Artificial Sequence: Synthetic oligonucleotide
cuaauggccugaauaccgu

SEQ ID NO: 1482923 - RNA, 19 nt, Artificial Sequence
  Description of Artificial Sequence: Synthetic oligonucleotide
ccuauuacugggauccuaa

SEQ ID NO: 1482924 - RNA, 19 nt, Artificial Sequence
  Description of Artificial Sequence: Synthetic oligonucleotide
cccaaguugaauucaccca

SEQ ID NO: 1482925 - RNA, 19 nt, Artificial Sequence
  Description of Artificial Sequence: Synthetic oligonucleotide
cccaaagguccagauauac

SEQ ID NO: 1482926 - RNA, 19 nt, Artificial Sequence
  Description of Artificial Sequence: Synthetic oligonucleotide
cugcauacccaccaccugu

SEQ ID NO: 1482927 - RNA, 19 nt, Artificial Sequence
  Description of Artificial Sequence: Synthetic oligonucleotide
guuugggcggaaucuccaa

SEQ ID NO: 1482928 - RNA, 19 nt, Artificial Sequence
  Description of Artificial Sequence: Synthetic oligonucleotide
uugauccaucgggccaugc

SEQ ID NO: 1482929 - RNA, 19 nt, Artificial Sequence
  Description of Artificial Sequence: Synthetic oligonucleotide
acgcucauugugacagaag

SEQ ID NO: 1482930 - RNA, 19 nt, Artificial Sequence
  Description of Artificial Sequence: Synthetic oligonucleotide
gguaguggugcagauccuc

SEQ ID NO: 1482931 - RNA, 19 nt, Artificial Sequence
  Description of Artificial Sequence: Synthetic oligonucleotide
gccacaaccaagacgacua

SEQ ID NO: 1482932 - RNA, 19 nt, Artificial Sequence
  Description of Artificial Sequence: Synthetic oligonucleotide
aggaucggacaggagcagu

SEQ ID NO: 1482933 - RNA, 19 nt, Artificial Sequence
  Description of Artificial Sequence: Synthetic oligonucleotide
ggccuccgcagccaguaag

SEQ ID NO: 1482934 - RNA, 19 nt, Artificial Sequence
  Description of Artificial Sequence: Synthetic oligonucleotide
gacucucaugcuucugcgu

SEQ ID NO: 1482935 - RNA, 19 nt, Artificial Sequence
  Description of Artificial Sequence: Synthetic oligonucleotide
cgucaaugagaagaacccg

SEQ ID NO: 1482936 - RNA, 19 nt, Artificial Sequence
  Description of Artificial Sequence: Synthetic oligonucleotide
ugccgucaaugagaagaac

SEQ ID NO: 1482937 - RNA, 19 nt, Artificial Sequence
  Description of Artificial Sequence: Synthetic oligonucleotide
caaacgcguuggcaccgac

SEQ ID NO: 1482938 - RNA, 19 nt, Artificial Sequence
  Description of Artificial Sequence: Synthetic oligonucleotide
gggcggaaucuccaauccc

SEQ ID NO: 1482939 - RNA, 19 nt, Artificial Sequence
  Description of Artificial Sequence: Synthetic oligonucleotide
uggcaccgacuuguacagg

SEQ ID NO: 1482940 - RNA, 19 nt, Artificial Sequence
  Description of Artificial Sequence: Synthetic oligonucleotide
cacaaccaagacgacuaga

SEQ ID NO: 1482941 - RNA, 19 nt, Artificial Sequence
  Description of Artificial Sequence: Synthetic oligonucleotide
agguuucgguaguggugca

SEQ ID NO: 1482942 - RNA, 19 nt, Artificial Sequence
  Description of Artificial Sequence: Synthetic oligonucleotide
gccuccgcagccaguaagg

SEQ ID NO: 1482943 - RNA, 19 nt, Artificial Sequence
  Description of Artificial Sequence: Synthetic oligonucleotide
ccucacaauucuucaccug

SEQ ID NO: 1482944 - RNA, 19 nt, Artificial Sequence
  Description of Artificial Sequence: Synthetic oligonucleotide
ccaccucacaauucuucac

SEQ ID NO: 1482945 - RNA, 19 nt, Artificial Sequence
  Description of Artificial Sequence: Synthetic oligonucleotide
gccccuagaccaauagcag

SEQ ID NO: 1482946 - RNA, 19 nt, Artificial Sequence
  Description of Artificial Sequence: Synthetic oligonucleotide
acacgcucauugugacaga

SEQ ID NO: 1482947 - RNA, 19 nt, Artificial Sequence
  Description of Artificial Sequence: Synthetic oligonucleotide
caguaggggaguggaagca

SEQ ID NO: 1482948 - RNA, 19 nt, Artificial Sequence
  Description of Artificial Sequence: Synthetic oligonucleotide
acgcguuggcaccgacuug

SEQ ID NO: 1482949 - RNA, 19 nt, Artificial Sequence
  Description of Artificial Sequence: Synthetic oligonucleotide
agcuugcgucggaagaacu

SEQ ID NO: 1482950 - RNA, 19 nt, Artificial Sequence
  Description of Artificial Sequence: Synthetic oligonucleotide
ugccgguacccugcauacc

SEQ ID NO: 1482951 - RNA, 19 nt, Artificial Sequence
  Description of Artificial Sequence: Synthetic oligonucleotide
cuccagggaguagguuacg

SEQ ID NO: 1482952 - RNA, 19 nt, Artificial Sequence
  Description of Artificial Sequence: Synthetic oligonucleotide
ccucccagugacuggcaag

SEQ ID NO: 1482953 - RNA, 19 nt, Artificial Sequence
  Description of Artificial Sequence: Synthetic oligonucleotide
gcggaaucuccaaucccag

SEQ ID NO: 1482954 - RNA, 19 nt, Artificial Sequence
  Description of Artificial Sequence: Synthetic oligonucleotide
cugggacuguuugugugca

SEQ ID NO: 1482955 - RNA, 19 nt, Artificial Sequence
  Description of Artificial Sequence: Synthetic oligonucleotide
gguacccugcauacccacc

SEQ ID NO: 1482956 - RNA, 19 nt, Artificial Sequence
  Description of Artificial Sequence: Synthetic oligonucleotide
gcuucugcguggaaagauc

SEQ ID NO: 1482957 - RNA, 19 nt, Artificial Sequence
  Description of Artificial Sequence: Synthetic oligonucleotide
cuccgcagccaguaaggaa

SEQ ID NO: 1482958 - RNA, 19 nt, Artificial Sequence
  Description of Artificial Sequence: Synthetic oligonucleotide
cagacaggccgugccugag

SEQ ID NO: 1482959 - RNA, 19 nt, Artificial Sequence
  Description of Artificial Sequence: Synthetic oligonucleotide
ucccuauuacugggauccu

SEQ ID NO: 1482960 - RNA, 19 nt, Artificial Sequence
  Description of Artificial Sequence: Synthetic oligonucleotide
cucgcccuugcgcauggga

SEQ ID NO: 1482961 - RNA, 19 nt, Artificial Sequence
  Description of Artificial Sequence: Synthetic oligonucleotide
cccuugcuguaucugggac

SEQ ID NO: 1482962 - RNA, 19 nt, Artificial Sequence
  Description of Artificial Sequence: Synthetic oligonucleotide
cacgcucauugugacagaa

SEQ ID NO: 1482963 - RNA, 19 nt, Artificial Sequence
  Description of Artificial Sequence: Synthetic oligonucleotide
gccugaauaccguuuucua

SEQ ID NO: 1482964 - RNA, 19 nt, Artificial Sequence
  Description of Artificial Sequence: Synthetic oligonucleotide
ccgaugugagacaguccag

SEQ ID NO: 1482965 - RNA, 19 nt, Artificial Sequence
  Description of Artificial Sequence: Synthetic oligonucleotide
agccaguaaggaaguucca

SEQ ID NO: 1482966 - RNA, 19 nt, Artificial Sequence
  Description of Artificial Sequence: Synthetic oligonucleotide
cgucggaagaacucgcuga

SEQ ID NO: 1482967 - RNA, 19 nt, Artificial Sequence
  Description of Artificial Sequence: Synthetic oligonucleotide
gcauacccaccaccuguug

SEQ ID NO: 1482968 - RNA, 19 nt, Artificial Sequence
  Description of Artificial Sequence: Synthetic oligonucleotide
ccacaaccaagacgacuag

SEQ ID NO: 1482969 - RNA, 19 nt, Artificial Sequence
  Description of Artificial Sequence: Synthetic oligonucleotide
guauagguucgaggaccca

SEQ ID NO: 1482970 - RNA, 19 nt, Artificial Sequence
  Description of Artificial Sequence: Synthetic oligonucleotide
acccaccaccuguugccaa

SEQ ID NO: 1482971 - RNA, 19 nt, Artificial Sequence
  Description of Artificial Sequence: Synthetic oligonucleotide
guaggggaguggaagcagu

SEQ ID NO: 1482972 - RNA, 19 nt, Artificial Sequence
  Description of Artificial Sequence: Synthetic oligonucleotide
cacugccgucaaugagaag

SEQ ID NO: 1482973 - RNA, 19 nt, Artificial Sequence
  Description of Artificial Sequence: Synthetic oligonucleotide
gaucggacaggagcaguau

SEQ ID NO: 1482974 - RNA, 19 nt, Artificial Sequence
  Description of Artificial Sequence: Synthetic oligonucleotide
cggauggagcccacguuag

SEQ ID NO: 1482975 - RNA, 19 nt, Artificial Sequence
  Description of Artificial Sequence: Synthetic oligonucleotide
cagccacaaccaagacgac

SEQ ID NO: 1482976 - RNA, 19 nt, Artificial Sequence
  Description of Artificial Sequence: Synthetic oligonucleotide
ggcuguagacuggccuccg

SEQ ID NO: 1482977 - RNA, 19 nt, Artificial Sequence
  Description of Artificial Sequence: Synthetic oligonucleotide
gcgcaugggaaugcccucc

SEQ ID NO: 1482978 - RNA, 19 nt, Artificial Sequence
  Description of Artificial Sequence: Synthetic oligonucleotide
cugucauguuuaccccaaa

SEQ ID NO: 1482979 - RNA, 19 nt, Artificial Sequence
  Description of Artificial Sequence: Synthetic oligonucleotide
ggaucggacaggagcagua

SEQ ID NO: 1482980 - RNA, 19 nt, Artificial Sequence
  Description of Artificial Sequence: Synthetic oligonucleotide
ccguguuuccaguccccac

SEQ ID NO: 1482981 - RNA, 19 nt, Artificial Sequence
  Description of Artificial Sequence: Synthetic oligonucleotide
ccuugcgcaugggaaugcc

SEQ ID NO: 1482982 - RNA, 19 nt, Artificial Sequence
  Description of Artificial Sequence: Synthetic oligonucleotide
gugcucgcccuugcgcaug

SEQ ID NO: 1482983 - RNA, 19 nt, Artificial Sequence
  Description of Artificial Sequence: Synthetic oligonucleotide
cccuucccgagugaccagc

SEQ ID NO: 1482984 - RNA, 19 nt, Artificial Sequence
  Description of Artificial Sequence: Synthetic oligonucleotide
cguuaguggcgcccacugc

SEQ ID NO: 1482985 - RNA, 19 nt, Artificial Sequence
  Description of Artificial Sequence: Synthetic oligonucleotide
gcucauucccuucccgagu

SEQ ID NO: 1482986 - RNA, 19 nt, Artificial Sequence
  Description of Artificial Sequence: Synthetic oligonucleotide
guuacgccuuuuacuugcu

SEQ ID NO: 1482987 - RNA, 19 nt, Artificial Sequence
  Description of Artificial Sequence: Synthetic oligonucleotide
gcggaucuuuugcccugcc

SEQ ID NO: 1482988 - RNA, 19 nt, Artificial Sequence
  Description of Artificial Sequence: Synthetic oligonucleotide
gucuugcaaugaaaugaau

SEQ ID NO: 1482989 - RNA, 19 nt, Artificial Sequence
  Description of Artificial Sequence: Synthetic oligonucleotide
cacagccccuagaccaaua

SEQ ID NO: 1482990 - RNA, 19 nt, Artificial Sequence
  Description of Artificial Sequence: Synthetic oligonucleotide
gcccacguuaguggcgccc

SEQ ID NO: 1482991 - RNA, 19 nt, Artificial Sequence
  Description of Artificial Sequence: Synthetic oligonucleotide
caucgggccaugccagggu

SEQ ID NO: 1482992 - RNA, 19 nt, Artificial Sequence
  Description of Artificial Sequence: Synthetic oligonucleotide
cugcguggaaagaucccuu

SEQ ID NO: 1482993 - RNA, 19 nt, Artificial Sequence
  Description of Artificial Sequence: Synthetic oligonucleotide
cgacuagagagagcccagc

SEQ ID NO: 1482994 - RNA, 19 nt, Artificial Sequence
  Description of Artificial Sequence: Synthetic oligonucleotide
ggauggagcccacguuagu

SEQ ID NO: 1482995 - RNA, 19 nt, Artificial Sequence
  Description of Artificial Sequence: Synthetic oligonucleotide
uggcgcccacugccgucaa

SEQ ID NO: 1482996 - RNA, 19 nt, Artificial Sequence
  Description of Artificial Sequence: Synthetic oligonucleotide
cccuugcgcaugggaaugc

SEQ ID NO: 1482997 - RNA, 19 nt, Artificial Sequence
  Description of Artificial Sequence: Synthetic oligonucleotide
cacguuaguggcgcccacu

SEQ ID NO: 1482998 - RNA, 19 nt, Artificial Sequence
  Description of Artificial Sequence: Synthetic oligonucleotide
acgugacagcaaacgcguu

SEQ ID NO: 1482999 - RNA, 19 nt, Artificial Sequence
  Description of Artificial Sequence: Synthetic oligonucleotide
ccacacgcucauugugaca

SEQ ID NO: 1483000 - RNA, 19 nt, Artificial Sequence
  Description of Artificial Sequence: Synthetic oligonucleotide
ggauccuaauggccugaau

SEQ ID NO: 1483001 - RNA, 19 nt, Artificial Sequence
  Description of Artificial Sequence: Synthetic oligonucleotide
gugagacaguccagucagu

SEQ ID NO: 1483002 - RNA, 19 nt, Artificial Sequence
  Description of Artificial Sequence: Synthetic oligonucleotide
gggauccuaauggccugaa

SEQ ID NO: 1483003 - RNA, 19 nt, Artificial Sequence
  Description of Artificial Sequence: Synthetic oligonucleotide
caggcgaccccaggcacgu

SEQ ID NO: 1483004 - RNA, 19 nt, Artificial Sequence
  Description of Artificial Sequence: Synthetic oligonucleotide
ccacguuaguggcgcccac

SEQ ID NO: 1483005 - RNA, 19 nt, Artificial Sequence
  Description of Artificial Sequence: Synthetic oligonucleotide
gcaaacgcguuggcaccga

SEQ ID NO: 1483006 - RNA, 19 nt, Artificial Sequence
  Description of Artificial Sequence: Synthetic oligonucleotide
ccgguacccugcauaccca

SEQ ID NO: 1483007 - RNA, 19 nt, Artificial Sequence
  Description of Artificial Sequence: Synthetic oligonucleotide
cccacguuaguggcgccca

SEQ ID NO: 1483008 - RNA, 19 nt, Artificial Sequence
  Description of Artificial Sequence: Synthetic oligonucleotide
cccuauuacugggauccua

SEQ ID NO: 1483009 - RNA, 19 nt, Artificial Sequence
  Description of Artificial Sequence: Synthetic oligonucleotide
aggcgaccccaggcacgug

SEQ ID NO: 1483010 - RNA, 19 nt, Artificial Sequence
  Description of Artificial Sequence: Synthetic oligonucleotide
gcucgcccuugcgcauggg

SEQ ID NO: 1483011 - RNA, 19 nt, Artificial Sequence
  Description of Artificial Sequence: Synthetic oligonucleotide
gcguuggcaccgacuugua

SEQ ID NO: 1483012 - RNA, 19 nt, Artificial Sequence
  Description of Artificial Sequence: Synthetic oligonucleotide
cgaccccaggcacgugaca

SEQ ID NO: 1483013 - RNA, 19 nt, Artificial Sequence
  Description of Artificial Sequence: Synthetic oligonucleotide
cgcaugggaaugcccuccu

SEQ ID NO: 1483014 - RNA, 19 nt, Artificial Sequence
  Description of Artificial Sequence: Synthetic oligonucleotide
cgguaguggugcagauccu

SEQ ID NO: 1483015 - RNA, 19 nt, Artificial Sequence
  Description of Artificial Sequence: Synthetic oligonucleotide
ggcgcccacugccgucaau

SEQ ID NO: 1483016 - RNA, 19 nt, Artificial Sequence
  Description of Artificial Sequence: Synthetic oligonucleotide
ccacacccucugccuccaa

SEQ ID NO: 1483017 - RNA, 19 nt, Artificial Sequence
  Description of Artificial Sequence: Synthetic oligonucleotide
aauucgaaggacaugaggc

SEQ ID NO: 1483018 - RNA, 19 nt, Artificial Sequence
  Description of Artificial Sequence: Synthetic oligonucleotide
acaaauagcuuccaggugc

SEQ ID NO: 1483019 - RNA, 19 nt, Artificial Sequence
  Description of Artificial Sequence: Synthetic oligonucleotide
aguguuuugauaaagaaag

SEQ ID NO: 1483020 - RNA, 19 nt, Artificial Sequence
  Description of Artificial Sequence: Synthetic oligonucleotide
aaugucauuuuacuggaug

SEQ ID NO: 1483021 - RNA, 19 nt, Artificial Sequence
  Description of Artificial Sequence: Synthetic oligonucleotide
ugaauggugaaguaggggc

SEQ ID NO: 1483022 - RNA, 19 nt, Artificial Sequence
  Description of Artificial Sequence: Synthetic oligonucleotide
auaccaaccaucgaaaugg

SEQ ID NO: 1483023 - RNA, 19 nt, Artificial Sequence
  Description of Artificial Sequence: Synthetic oligonucleotide
aauaacugugucgauguac

SEQ ID NO: 1483024 - RNA, 19 nt, Artificial Sequence
  Description of Artificial Sequence: Synthetic oligonucleotide
ugaaugacgacucccauga

SEQ ID NO: 1483025 - RNA, 19 nt, Artificial Sequence
  Description of Artificial Sequence: Synthetic oligonucleotide
gaagcaccuaaacagaucc

SEQ ID NO: 1483026 - RNA, 19 nt, Artificial Sequence
  Description of Artificial Sequence: Synthetic oligonucleotide
guauaugagguguagaggc

SEQ ID NO: 1483027 - RNA, 19 nt, Artificial Sequence
  Description of Artificial Sequence: Synthetic oligonucleotide
uuaagcuugaccugcuuag

SEQ ID NO: 1483028 - RNA, 19 nt, Artificial Sequence
  Description of Artificial Sequence: Synthetic oligonucleotide
uucuguacgcccuugagca

SEQ ID NO: 1483029 - RNA, 19 nt, Artificial Sequence
  Description of Artificial Sequence: Synthetic oligonucleotide
auucgaaggacaugaggcc

SEQ ID NO: 1483030 - RNA, 19 nt, Artificial Sequence
  Description of Artificial Sequence: Synthetic oligonucleotide
ugccuuucaccguagaggg

SEQ ID NO: 1483031 - RNA, 19 nt, Artificial Sequence
  Description of Artificial Sequence: Synthetic oligonucleotide
aaugacgacucccaugaca

SEQ ID NO: 1483032 - RNA, 19 nt, Artificial Sequence
  Description of Artificial Sequence: Synthetic oligonucleotide
aaaacgccuguagaggccc

SEQ ID NO: 1483033 - RNA, 19 nt, Artificial Sequence
  Description of Artificial Sequence: Synthetic oligonucleotide
uccgacuuguccuucaucc

SEQ ID NO: 1483034 - RNA, 19 nt, Artificial Sequence
  Description of Artificial Sequence: Synthetic oligonucleotide
gagaaugcaggugagcugg

SEQ ID NO: 1483035 - RNA, 19 nt, Artificial Sequence
  Description of Artificial Sequence: Synthetic oligonucleotide
acuggucagggcuagcacc

SEQ ID NO: 1483036 - RNA, 19 nt, Artificial Sequence
  Description of Artificial Sequence: Synthetic oligonucleotide
acagauccaguucauggac

SEQ ID NO: 1483037 - RNA, 19 nt, Artificial Sequence
  Description of Artificial Sequence: Synthetic oligonucleotide
caguauaugagguguagag

SEQ ID NO: 1483038 - RNA, 19 nt, Artificial Sequence
  Description of Artificial Sequence: Synthetic oligonucleotide
uuuaugucguugccgauac

SEQ ID NO: 1483039 - RNA, 19 nt, Artificial Sequence
  Description of Artificial Sequence: Synthetic oligonucleotide
gauaccaaccaucgaaaug

SEQ ID NO: 1483040 - RNA, 19 nt, Artificial Sequence
  Description of Artificial Sequence: Synthetic oligonucleotide
gugucaagagucuucagcc

SEQ ID NO: 1483041 - RNA, 19 nt, Artificial Sequence
  Description of Artificial Sequence: Synthetic oligonucleotide
auggacacuagugaggacg

SEQ ID NO: 1483042 - RNA, 19 nt, Artificial Sequence
  Description of Artificial Sequence: Synthetic oligonucleotide
uuugugacucccaggacca

SEQ ID NO: 1483043 - RNA, 19 nt, Artificial Sequence
  Description of Artificial Sequence: Synthetic oligonucleotide
aguauaugagguguagagg

SEQ ID NO: 1483044 - RNA, 19 nt, Artificial Sequence
  Description of Artificial Sequence: Synthetic oligonucleotide
uuuacuggaugggacagag

SEQ ID NO: 1483045 - RNA, 19 nt, Artificial Sequence
  Description of Artificial Sequence: Synthetic oligonucleotide
auguucgccucacaaauag

SEQ ID NO: 1483046 - RNA, 19 nt, Artificial Sequence
  Description of Artificial Sequence: Synthetic oligonucleotide
accuaaacagauccaguuc

SEQ ID NO: 1483047 - RNA, 19 nt, Artificial Sequence
  Description of Artificial Sequence: Synthetic oligonucleotide
uaugucguugccgauacca

SEQ ID NO: 1483048 - RNA, 19 nt, Artificial Sequence
  Description of Artificial Sequence: Synthetic oligonucleotide
aacuuggcagacuuaggcu

SEQ ID NO: 1483049 - RNA, 19 nt, Artificial Sequence
  Description of Artificial Sequence: Synthetic oligonucleotide
uauaugagguguagaggcc

SEQ ID NO: 1483050 - RNA, 19 nt, Artificial Sequence
  Description of Artificial Sequence: Synthetic oligonucleotide
cuuugugcaucccauggcc

SEQ ID NO: 1483051 - RNA, 19 nt, Artificial Sequence
  Description of Artificial Sequence: Synthetic oligonucleotide
ucuugggcuccccaauucg

SEQ ID NO: 1483052 - RNA, 19 nt, Artificial Sequence
  Description of Artificial Sequence: Synthetic oligonucleotide
uguacagcugagcacgcug

SEQ ID NO: 1483053 - RNA, 19 nt, Artificial Sequence
  Description of Artificial Sequence: Synthetic oligonucleotide
caauucgaaggacaugagg

SEQ ID NO: 1483054 - RNA, 19 nt, Artificial Sequence
  Description of Artificial Sequence: Synthetic oligonucleotide
ugcuggaguguuuugauaa

SEQ ID NO: 1483055 - RNA, 19 nt, Artificial Sequence
  Description of Artificial Sequence: Synthetic oligonucleotide
ucucuuuaugucguugccg

SEQ ID NO: 1483056 - RNA, 19 nt, Artificial Sequence
  Description of Artificial Sequence: Synthetic oligonucleotide
uaagcagugcuuugucccg

SEQ ID NO: 1483057 - RNA, 19 nt, Artificial Sequence
  Description of Artificial Sequence: Synthetic oligonucleotide
caugaauggugaaguaggg

SEQ ID NO: 1483058 - RNA, 19 nt, Artificial Sequence
  Description of Artificial Sequence: Synthetic oligonucleotide
uuuaagcuugaccugcuua

SEQ ID NO: 1483059 - RNA, 19 nt, Artificial Sequence
  Description of Artificial Sequence: Synthetic oligonucleotide
ggucacacugcuuuggagg

SEQ ID NO: 1483060 - RNA, 19 nt, Artificial Sequence
  Description of Artificial Sequence: Synthetic oligonucleotide
agaggaaugaugaaacucu

SEQ ID NO: 1483061 - RNA, 19 nt, Artificial Sequence
  Description of Artificial Sequence: Synthetic oligonucleotide
cacuuugugcaucccaugg

SEQ ID NO: 1483062 - RNA, 19 nt, Artificial Sequence
  Description of Artificial Sequence: Synthetic oligonucleotide
cuagugaggacgacugggg

SEQ ID NO: 1483063 - RNA, 19 nt, Artificial Sequence
  Description of Artificial Sequence: Synthetic oligonucleotide
guuagcacuggccggaagc

SEQ ID NO: 1483064 - RNA, 19 nt, Artificial Sequence
  Description of Artificial Sequence: Synthetic oligonucleotide
uguugugagcuccuugaac

SEQ ID NO: 1483065 - RNA, 19 nt, Artificial Sequence
  Description of Artificial Sequence: Synthetic oligonucleotide
ucauggacacuagugagga

SEQ ID NO: 1483066 - RNA, 19 nt, Artificial Sequence
  Description of Artificial Sequence: Synthetic oligonucleotide
agcucuaggaggugccgcc

SEQ ID NO: 1483067 - RNA, 19 nt, Artificial Sequence
  Description of Artificial Sequence: Synthetic oligonucleotide
ggagccaauaacugugucg

SEQ ID NO: 1483068 - RNA, 19 nt, Artificial Sequence
  Description of Artificial Sequence: Synthetic oligonucleotide
gaauguuccaggcuacgca

SEQ ID NO: 1483069 - RNA, 19 nt, Artificial Sequence
  Description of Artificial Sequence: Synthetic oligonucleotide
augacgacucccaugacag

SEQ ID NO: 1483070 - RNA, 19 nt, Artificial Sequence
  Description of Artificial Sequence: Synthetic oligonucleotide
uggaggauugggauuccag

SEQ ID NO: 1483071 - RNA, 19 nt, Artificial Sequence
  Description of Artificial Sequence: Synthetic oligonucleotide
gucaugaauggugaaguag

SEQ ID NO: 1483072 - RNA, 19 nt, Artificial Sequence
  Description of Artificial Sequence: Synthetic oligonucleotide
uggcuuggugucaagaguc

SEQ ID NO: 1483073 - RNA, 19 nt, Artificial Sequence
  Description of Artificial Sequence: Synthetic oligonucleotide
auuuuacuggaugggacag

SEQ ID NO: 1483074 - RNA, 19 nt, Artificial Sequence
  Description of Artificial Sequence: Synthetic oligonucleotide
cugccuuucaccguagagg

SEQ ID NO: 1483075 - RNA, 19 nt, Artificial Sequence
  Description of Artificial Sequence: Synthetic oligonucleotide
cuucuguacgcccuugagc

SEQ ID NO: 1483076 - RNA, 19 nt, Artificial Sequence
  Description of Artificial Sequence: Synthetic oligonucleotide
agcaccuaaacagauccag

SEQ ID NO: 1483077 - RNA, 19 nt, Artificial Sequence
  Description of Artificial Sequence: Synthetic oligonucleotide
ggugucaagagucuucagc

SEQ ID NO: 1483078 - RNA, 19 nt, Artificial Sequence
  Description of Artificial Sequence: Synthetic oligonucleotide
ucaagagucuucagccgug

SEQ ID NO: 1483079 - RNA, 19 nt, Artificial Sequence
  Description of Artificial Sequence: Synthetic oligonucleotide
augaauggugaaguagggg

SEQ ID NO: 1483080 - RNA, 19 nt, Artificial Sequence
  Description of Artificial Sequence: Synthetic oligonucleotide
agcggcauaaggcuggcca

SEQ ID NO: 1483081 - RNA, 19 nt, Artificial Sequence
  Description of Artificial Sequence: Synthetic oligonucleotide
gagccaauaacugugucga

SEQ ID NO: 1483082 - RNA, 19 nt, Artificial Sequence
  Description of Artificial Sequence: Synthetic oligonucleotide
guugugagcuccuugaacu

SEQ ID NO: 1483083 - RNA, 19 nt, Artificial Sequence
  Description of Artificial Sequence: Synthetic oligonucleotide
aucccauggccuuuucuuc

SEQ ID NO: 1483084 - RNA, 19 nt, Artificial Sequence
  Description of Artificial Sequence: Synthetic oligonucleotide
uguguucguguugugagcu

SEQ ID NO: 1483085 - RNA, 19 nt, Artificial Sequence
  Description of Artificial Sequence: Synthetic oligonucleotide
uaagcuugaccugcuuagg

SEQ ID NO: 1483086 - RNA, 19 nt, Artificial Sequence
  Description of Artificial Sequence: Synthetic oligonucleotide
caccguagagggaacuugg

SEQ ID NO: 1483087 - RNA, 19 nt, Artificial Sequence
  Description of Artificial Sequence: Synthetic oligonucleotide
uaccaaccaucgaaauggg

SEQ ID NO: 1483088 - RNA, 19 nt, Artificial Sequence
  Description of Artificial Sequence: Synthetic oligonucleotide
uaggaagguccccugacau

SEQ ID NO: 1483089 - RNA, 19 nt, Artificial Sequence
  Description of Artificial Sequence: Synthetic oligonucleotide
cucuuuaugucguugccga

SEQ ID NO: 1483090 - RNA, 19 nt, Artificial Sequence
  Description of Artificial Sequence: Synthetic oligonucleotide
augaugaaacucuguguga

SEQ ID NO: 1483091 - RNA, 19 nt, Artificial Sequence
  Description of Artificial Sequence: Synthetic oligonucleotide
ucccgaauguuccaggcua

SEQ ID NO: 1483092 - RNA, 19 nt, Artificial Sequence
  Description of Artificial Sequence: Synthetic oligonucleotide
uggacacuagugaggacga

SEQ ID NO: 1483093 - RNA, 19 nt, Artificial Sequence
  Description of Artificial Sequence: Synthetic oligonucleotide
ucgccucacaaauagcuuc

SEQ ID NO: 1483094 - RNA, 19 nt, Artificial Sequence
  Description of Artificial Sequence: Synthetic oligonucleotide
gaaaggguuugugacuccc

SEQ ID NO: 1483095 - RNA, 19 nt, Artificial Sequence
  Description of Artificial Sequence: Synthetic oligonucleotide
aggggcggaagucacagca

SEQ ID NO: 1483096 - RNA, 19 nt, Artificial Sequence
  Description of Artificial Sequence: Synthetic oligonucleotide
uagugaggacgacuggggc

SEQ ID NO: 1483097 - RNA, 19 nt, Artificial Sequence
  Description of Artificial Sequence: Synthetic oligonucleotide
cugaaugacgacucccaug

SEQ ID NO: 1483098 - RNA, 19 nt, Artificial Sequence
  Description of Artificial Sequence: Synthetic oligonucleotide
agacacaucaggugagggu

SEQ ID NO: 1483099 - RNA, 19 nt, Artificial Sequence
  Description of Artificial Sequence: Synthetic oligonucleotide
cuagcaccagcucugaaga

SEQ ID NO: 1483100 - RNA, 19 nt, Artificial Sequence
  Description of Artificial Sequence: Synthetic oligonucleotide
uguagugcuccagaggaau

SEQ ID NO: 1483101 - RNA, 19 nt, Artificial Sequence
  Description of Artificial Sequence: Synthetic oligonucleotide
aaguaggggcggaagucac

SEQ ID NO: 1483102 - RNA, 19 nt, Artificial Sequence
  Description of Artificial Sequence: Synthetic oligonucleotide
uguucgccucacaaauagc

SEQ ID NO: 1483103 - RNA, 19 nt, Artificial Sequence
  Description of Artificial Sequence: Synthetic oligonucleotide
gcagacuuaggcucuaggc

SEQ ID NO: 1483104 - RNA, 19 nt, Artificial Sequence
  Description of Artificial Sequence: Synthetic oligonucleotide
ggaggauugggauuccagc

SEQ ID NO: 1483105 - RNA, 19 nt, Artificial Sequence
  Description of Artificial Sequence: Synthetic oligonucleotide
ugucguugccgauaccaac

SEQ ID NO: 1483106 - RNA, 19 nt, Artificial Sequence
  Description of Artificial Sequence: Synthetic oligonucleotide
uaacugugucgauguacag

SEQ ID NO: 1483107 - RNA, 19 nt, Artificial Sequence
  Description of Artificial Sequence: Synthetic oligonucleotide
ucuuguccuagggagggca

SEQ ID NO: 1483108 - RNA, 19 nt, Artificial Sequence
  Description of Artificial Sequence: Synthetic oligonucleotide
ucguuuaagcagugcuuug

SEQ ID NO: 1483109 - RNA, 19 nt, Artificial Sequence
  Description of Artificial Sequence: Synthetic oligonucleotide
gaggaaugaugaaacucug

SEQ ID NO: 1483110 - RNA, 19 nt, Artificial Sequence
  Description of Artificial Sequence: Synthetic oligonucleotide
auaugagguguagaggccu

SEQ ID NO: 1483111 - RNA, 19 nt, Artificial Sequence
  Description of Artificial Sequence: Synthetic oligonucleotide
gucguugccgauaccaacc

SEQ ID NO: 1483112 - RNA, 19 nt, Artificial Sequence
  Description of Artificial Sequence: Synthetic oligonucleotide
ucguguugugagcuccuug

SEQ ID NO: 1483113 - RNA, 19 nt, Artificial Sequence
  Description of Artificial Sequence: Synthetic oligonucleotide
ucaccguagagggaacuug

SEQ ID NO: 1483114 - RNA, 19 nt, Artificial Sequence
  Description of Artificial Sequence: Synthetic oligonucleotide
cuugagaaugcaggugagc

SEQ ID NO: 1483115 - RNA, 19 nt, Artificial Sequence
  Description of Artificial Sequence: Synthetic oligonucleotide
ucguugccgauaccaacca

SEQ ID NO: 1483116 - RNA, 19 nt, Artificial Sequence
  Description of Artificial Sequence: Synthetic oligonucleotide
aagcagugcuuugucccgg

SEQ ID NO: 1483117 - RNA, 19 nt, Artificial Sequence
  Description of Artificial Sequence: Synthetic oligonucleotide
augugcaccugaaugacga

SEQ ID NO: 1483118 - RNA, 19 nt, Artificial Sequence
  Description of Artificial Sequence: Synthetic oligonucleotide
uccccaauucgaaggacau

SEQ ID NO: 1483119 - RNA, 19 nt, Artificial Sequence
  Description of Artificial Sequence: Synthetic oligonucleotide
gaccacguuugguggagcc

SEQ ID NO: 1483120 - RNA, 19 nt, Artificial Sequence
  Description of Artificial Sequence: Synthetic oligonucleotide
uguccuagggagggcacag

SEQ ID NO: 1483121 - RNA, 19 nt, Artificial Sequence
  Description of Artificial Sequence: Synthetic oligonucleotide
guaggggcggaagucacag

SEQ ID NO: 1483122 - RNA, 19 nt, Artificial Sequence
  Description of Artificial Sequence: Synthetic oligonucleotide
guugccgauaccaaccauc

SEQ ID NO: 1483123 - RNA, 19 nt, Artificial Sequence
  Description of Artificial Sequence: Synthetic oligonucleotide
accugcuuaggaagguccc

SEQ ID NO: 1483124 - RNA, 19 nt, Artificial Sequence
  Description of Artificial Sequence: Synthetic oligonucleotide
agcuugguggaugccugcc

SEQ ID NO: 1483125 - RNA, 19 nt, Artificial Sequence
  Description of Artificial Sequence: Synthetic oligonucleotide
cuaggggcuccccaaggag

SEQ ID NO: 1483126 - RNA, 19 nt, Artificial Sequence
  Description of Artificial Sequence: Synthetic oligonucleotide
auugggauuccagcuuguc

SEQ ID NO: 1483127 - RNA, 19 nt, Artificial Sequence
  Description of Artificial Sequence: Synthetic oligonucleotide
acuaggggcuccccaagga

SEQ ID NO: 1483128 - RNA, 19 nt, Artificial Sequence
  Description of Artificial Sequence: Synthetic oligonucleotide
cuucauccaggccucgaug

SEQ ID NO: 1483129 - RNA, 19 nt, Artificial Sequence
  Description of Artificial Sequence: Synthetic oligonucleotide
gucauuuuacuggauggga

SEQ ID NO: 1483130 - RNA, 19 nt, Artificial Sequence
  Description of Artificial Sequence: Synthetic oligonucleotide
ucuguacgcccuugagcag

SEQ ID NO: 1483131 - RNA, 19 nt, Artificial Sequence
  Description of Artificial Sequence: Synthetic oligonucleotide
gacgacuggggcuggcagc

SEQ ID NO: 1483132 - RNA, 19 nt, Artificial Sequence
  Description of Artificial Sequence: Synthetic oligonucleotide
uuuuaagcuugaccugcuu

SEQ ID NO: 1483133 - RNA, 19 nt, Artificial Sequence
  Description of Artificial Sequence: Synthetic oligonucleotide
ggauugggauuccagcuug

SEQ ID NO: 1483134 - RNA, 19 nt, Artificial Sequence
  Description of Artificial Sequence: Synthetic oligonucleotide
ggugugaugcucuucugca

SEQ ID NO: 1483135 - RNA, 19 nt, Artificial Sequence
  Description of Artificial Sequence: Synthetic oligonucleotide
cuaggucuaccacuuccac

SEQ ID NO: 1483136 - RNA, 19 nt, Artificial Sequence
  Description of Artificial Sequence: Synthetic oligonucleotide
ggcuaggucuaccacuucc

SEQ ID NO: 1483137 - RNA, 19 nt, Artificial Sequence
  Description of Artificial Sequence: Synthetic oligonucleotide
ugucgauguacagcugagc

SEQ ID NO: 1483138 - RNA, 19 nt, Artificial Sequence
  Description of Artificial Sequence: Synthetic oligonucleotide
ugacgacucccaugacagg

SEQ ID NO: 1483139 - RNA, 19 nt, Artificial Sequence
  Description of Artificial Sequence: Synthetic oligonucleotide
caaauagcuuccaggugca

SEQ ID NO: 1483140 - RNA, 19 nt, Artificial Sequence
  Description of Artificial Sequence: Synthetic oligonucleotide
uuuuacuggaugggacaga

SEQ ID NO: 1483141 - RNA, 19 nt, Artificial Sequence
  Description of Artificial Sequence: Synthetic oligonucleotide
ugcuuaggaagguccccug

SEQ ID NO: 1483142 - RNA, 19 nt, Artificial Sequence
  Description of Artificial Sequence: Synthetic oligonucleotide
uucgccucacaaauagcuu

SEQ ID NO: 1483143 - RNA, 19 nt, Artificial Sequence
  Description of Artificial Sequence: Synthetic oligonucleotide
uacgcccuugagcagucgu

SEQ ID NO: 1483144 - RNA, 19 nt, Artificial Sequence
  Description of Artificial Sequence: Synthetic oligonucleotide
uugggcuccccaauucgaa

SEQ ID NO: 1483145 - RNA, 19 nt, Artificial Sequence
  Description of Artificial Sequence: Synthetic oligonucleotide
cugagcacgcugcaguguc

SEQ ID NO: 1483146 - RNA, 19 nt, Artificial Sequence
  Description of Artificial Sequence: Synthetic oligonucleotide
accguagagggaacuuggc

SEQ ID NO: 1483147 - RNA, 19 nt, Artificial Sequence
  Description of Artificial Sequence: Synthetic oligonucleotide
aguuggcucuuguccuagg

SEQ ID NO: 1483148 - RNA, 19 nt, Artificial Sequence
  Description of Artificial Sequence: Synthetic oligonucleotide
gcugucaugaauggugaag

SEQ ID NO: 1483149 - RNA, 19 nt, Artificial Sequence
  Description of Artificial Sequence: Synthetic oligonucleotide
gugggcaguauaugaggug

SEQ ID NO: 1483150 - RNA, 19 nt, Artificial Sequence
  Description of Artificial Sequence: Synthetic oligonucleotide
gcuacgcaggaaaucaucc

SEQ ID NO: 1483151 - RNA, 19 nt, Artificial Sequence
  Description of Artificial Sequence: Synthetic oligonucleotide
ggaggugggcaguauauga

SEQ ID NO: 1483152 - RNA, 19 nt, Artificial Sequence
  Description of Artificial Sequence: Synthetic oligonucleotide
cacuagugaggacgacugg

SEQ ID NO: 1483153 - RNA, 19 nt, Artificial Sequence
  Description of Artificial Sequence: Synthetic oligonucleotide
gccgauaccaaccaucgaa

SEQ ID NO: 1483154 - RNA, 19 nt, Artificial Sequence
  Description of Artificial Sequence: Synthetic oligonucleotide
aggaccacuaggggcuccc

SEQ ID NO: 1483155 - RNA, 19 nt, Artificial Sequence
  Description of Artificial Sequence: Synthetic oligonucleotide
cacuaggggcuccccaagg

SEQ ID NO: 1483156 - RNA, 19 nt, Artificial Sequence
  Description of Artificial Sequence: Synthetic oligonucleotide
uuaugucguugccgauacc

SEQ ID NO: 1483157 - RNA, 19 nt, Artificial Sequence
  Description of Artificial Sequence: Synthetic oligonucleotide
uggaggugggcaguauaug

SEQ ID NO: 1483158 - RNA, 19 nt, Artificial Sequence
  Description of Artificial Sequence: Synthetic oligonucleotide
gauguacagcugagcacgc

SEQ ID NO: 1483159 - RNA, 19 nt, Artificial Sequence
  Description of Artificial Sequence: Synthetic oligonucleotide
caggcuacgcaggaaauca

SEQ ID NO: 1483160 - RNA, 19 nt, Artificial Sequence
  Description of Artificial Sequence: Synthetic oligonucleotide
caggaccacacaaguuggc

SEQ ID NO: 1483161 - RNA, 19 nt, Artificial Sequence
  Description of Artificial Sequence: Synthetic oligonucleotide
cucgauguucgccucacaa

SEQ ID NO: 1483162 - RNA, 19 nt, Artificial Sequence
  Description of Artificial Sequence: Synthetic oligonucleotide
uuucaccguagagggaacu

SEQ ID NO: 1483163 - RNA, 19 nt, Artificial Sequence
  Description of Artificial Sequence: Synthetic oligonucleotide
accaaccaucgaaaugggg

SEQ ID NO: 1483164 - RNA, 19 nt, Artificial Sequence
  Description of Artificial Sequence: Synthetic oligonucleotide
cuagggagggcacaggacu

SEQ ID NO: 1483165 - RNA, 19 nt, Artificial Sequence
  Description of Artificial Sequence: Synthetic oligonucleotide
ucuuuaugucguugccgau

SEQ ID NO: 1483166 - RNA, 19 nt, Artificial Sequence
  Description of Artificial Sequence: Synthetic oligonucleotide
gccaauaacugugucgaug

SEQ ID NO: 1483167 - RNA, 19 nt, Artificial Sequence
  Description of Artificial Sequence: Synthetic oligonucleotide
cugcuuuggaggauuggga

SEQ ID NO: 1483168 - RNA, 19 nt, Artificial Sequence
  Description of Artificial Sequence: Synthetic oligonucleotide
cuggucagggcuagcacca

SEQ ID NO: 1483169 - RNA, 19 nt, Artificial Sequence
  Description of Artificial Sequence: Synthetic oligonucleotide
uccacccuggacgggaugu

SEQ ID NO: 1483170 - RNA, 19 nt, Artificial Sequence
  Description of Artificial Sequence: Synthetic oligonucleotide
uccaggcuacgcaggaaau

SEQ ID NO: 1483171 - RNA, 19 nt, Artificial Sequence
  Description of Artificial Sequence: Synthetic oligonucleotide
guucgccucacaaauagcu

SEQ ID NO: 1483172 - RNA, 19 nt, Artificial Sequence
  Description of Artificial Sequence: Synthetic oligonucleotide
cacauggguuagcacuggc

SEQ ID NO: 1483173 - RNA, 19 nt, Artificial Sequence
  Description of Artificial Sequence: Synthetic oligonucleotide
uguacgcccuugagcaguc

SEQ ID NO: 1483174 - RNA, 19 nt, Artificial Sequence
  Description of Artificial Sequence: Synthetic oligonucleotide
aaaugucauuuuacuggau

SEQ ID NO: 1483175 - RNA, 19 nt, Artificial Sequence
  Description of Artificial Sequence: Synthetic oligonucleotide
gucaagagucuucagccgu

SEQ ID NO: 1483176 - RNA, 19 nt, Artificial Sequence
  Description of Artificial Sequence: Synthetic oligonucleotide
ugugcaccugaaugacgac

SEQ ID NO: 1483177 - RNA, 19 nt, Artificial Sequence
  Description of Artificial Sequence: Synthetic oligonucleotide
ccgggagagaggcugaagc

SEQ ID NO: 1483178 - RNA, 19 nt, Artificial Sequence
  Description of Artificial Sequence: Synthetic oligonucleotide
aacgccuguagaggcccag

SEQ ID NO: 1483179 - RNA, 19 nt, Artificial Sequence
  Description of Artificial Sequence: Synthetic oligonucleotide
gacacuagugaggacgacu

SEQ ID NO: 1483180 - RNA, 19 nt, Artificial Sequence
  Description of Artificial Sequence: Synthetic oligonucleotide
gacucccaugacagguagg

SEQ ID NO: 1483181 - RNA, 19 nt, Artificial Sequence
  Description of Artificial Sequence: Synthetic oligonucleotide
aggaccacguuugguggag

SEQ ID NO: 1483182 - RNA, 19 nt, Artificial Sequence
  Description of Artificial Sequence: Synthetic oligonucleotide
ugccgauaccaaccaucga

SEQ ID NO: 1483183 - RNA, 19 nt, Artificial Sequence
  Description of Artificial Sequence: Synthetic oligonucleotide
agucguuuaagcagugcuu

SEQ ID NO: 1483184 - RNA, 19 nt, Artificial Sequence
  Description of Artificial Sequence: Synthetic oligonucleotide
cagucguuuaagcagugcu

SEQ ID NO: 1483185 - RNA, 19 nt, Artificial Sequence
  Description of Artificial Sequence: Synthetic oligonucleotide
guagugcuccagaggaaug

SEQ ID NO: 1483186 - RNA, 19 nt, Artificial Sequence
  Description of Artificial Sequence: Synthetic oligonucleotide
cuuuaugucguugccgaua

SEQ ID NO: 1483187 - RNA, 19 nt, Artificial Sequence
  Description of Artificial Sequence: Synthetic oligonucleotide
gaaugacgacucccaugac

SEQ ID NO: 1483188 - RNA, 19 nt, Artificial Sequence
  Description of Artificial Sequence: Synthetic oligonucleotide
acuggccggaagcaccuaa

SEQ ID NO: 1483189 - RNA, 19 nt, Artificial Sequence
  Description of Artificial Sequence: Synthetic oligonucleotide
acgacuggggcuggcagca

SEQ ID NO: 1483190 - RNA, 19 nt, Artificial Sequence
  Description of Artificial Sequence: Synthetic oligonucleotide
uuggaggauugggauucca

SEQ ID NO: 1483191 - RNA, 19 nt, Artificial Sequence
  Description of Artificial Sequence: Synthetic oligonucleotide
acgccuguagaggcccagc

SEQ ID NO: 1483192 - RNA, 19 nt, Artificial Sequence
  Description of Artificial Sequence: Synthetic oligonucleotide
ggaugugcaccugaaugac

SEQ ID NO: 1483193 - RNA, 19 nt, Artificial Sequence
  Description of Artificial Sequence: Synthetic oligonucleotide
cauggacacuagugaggac

SEQ ID NO: 1483194 - RNA, 19 nt, Artificial Sequence
  Description of Artificial Sequence: Synthetic oligonucleotide
cacaggacugcuuguaggu

SEQ ID NO: 1483195 - RNA, 19 nt, Artificial Sequence
  Description of Artificial Sequence: Synthetic oligonucleotide
ccaauaacugugucgaugu

SEQ ID NO: 1483196 - RNA, 19 nt, Artificial Sequence
  Description of Artificial Sequence: Synthetic oligonucleotide
gcugaagccgagguaggag

SEQ ID NO: 1483197 - RNA, 19 nt, Artificial Sequence
  Description of Artificial Sequence: Synthetic oligonucleotide
uggggucccgaauguucca

SEQ ID NO: 1483198 - RNA, 19 nt, Artificial Sequence
  Description of Artificial Sequence: Synthetic oligonucleotide
cagcuugguggaugccugc

SEQ ID NO: 1483199 - RNA, 19 nt, Artificial Sequence
  Description of Artificial Sequence: Synthetic oligonucleotide
agggcacuuugugcauccc

SEQ ID NO: 1483200 - RNA, 19 nt, Artificial Sequence
  Description of Artificial Sequence: Synthetic oligonucleotide
caccuaaacagauccaguu

SEQ ID NO: 1483201 - RNA, 19 nt, Artificial Sequence
  Description of Artificial Sequence: Synthetic oligonucleotide
uccgggagagaggcugaag

SEQ ID NO: 1483202 - RNA, 19 nt, Artificial Sequence
  Description of Artificial Sequence: Synthetic oligonucleotide
guagaggcccagccaguca

SEQ ID NO: 1483203 - RNA, 19 nt, Artificial Sequence
  Description of Artificial Sequence: Synthetic oligonucleotide
gauguucgccucacaaaua

SEQ ID NO: 1483204 - RNA, 19 nt, Artificial Sequence
  Description of Artificial Sequence: Synthetic oligonucleotide
ccugccuuucaccguagag

SEQ ID NO: 1483205 - RNA, 19 nt, Artificial Sequence
  Description of Artificial Sequence: Synthetic oligonucleotide
caucccauggccuuuucuu

SEQ ID NO: 1483206 - RNA, 19 nt, Artificial Sequence
  Description of Artificial Sequence: Synthetic oligonucleotide
agagggaacuuggcagacu

SEQ ID NO: 1483207 - RNA, 19 nt, Artificial Sequence
  Description of Artificial Sequence: Synthetic oligonucleotide
ggccggaagcaccuaaaca

SEQ ID NO: 1483208 - RNA, 19 nt, Artificial Sequence
  Description of Artificial Sequence: Synthetic oligonucleotide
gguuugugacucccaggac

SEQ ID NO: 1483209 - RNA, 19 nt, Artificial Sequence
  Description of Artificial Sequence: Synthetic oligonucleotide
cucuaggaggugccgccuc

SEQ ID NO: 1483210 - RNA, 19 nt, Artificial Sequence
  Description of Artificial Sequence: Synthetic oligonucleotide
cugugucgauguacagcug

SEQ ID NO: 1483211 - RNA, 19 nt, Artificial Sequence
  Description of Artificial Sequence: Synthetic oligonucleotide
cuuugucccgguggaggug

SEQ ID NO: 1483212 - RNA, 19 nt, Artificial Sequence
  Description of Artificial Sequence: Synthetic oligonucleotide
ggaagcaccuaaacagauc

SEQ ID NO: 1483213 - RNA, 19 nt, Artificial Sequence
  Description of Artificial Sequence: Synthetic oligonucleotide
gucguuuaagcagugcuuu

SEQ ID NO: 1483214 - RNA, 19 nt, Artificial Sequence
  Description of Artificial Sequence: Synthetic oligonucleotide
ccuugagcagucguuuaag

SEQ ID NO: 1483215 - RNA, 19 nt, Artificial Sequence
  Description of Artificial Sequence: Synthetic oligonucleotide
uggagccuguguucguguu

SEQ ID NO: 1483216 - RNA, 19 nt, Artificial Sequence
  Description of Artificial Sequence: Synthetic oligonucleotide
agccaauaacugugucgau

SEQ ID NO: 1483217 - RNA, 19 nt, Artificial Sequence
  Description of Artificial Sequence: Synthetic oligonucleotide
gcaccagcucugaagacac

SEQ ID NO: 1483218 - RNA, 19 nt, Artificial Sequence
  Description of Artificial Sequence: Synthetic oligonucleotide
guguugugagcuccuugaa

SEQ ID NO: 1483219 - RNA, 19 nt, Artificial Sequence
  Description of Artificial Sequence: Synthetic oligonucleotide
gguuagcacuggccggaag

SEQ ID NO: 1483220 - RNA, 19 nt, Artificial Sequence
  Description of Artificial Sequence: Synthetic oligonucleotide
auguacagcugagcacgcu

SEQ ID NO: 1483221 - RNA, 19 nt, Artificial Sequence
  Description of Artificial Sequence: Synthetic oligonucleotide
guguucguguugugagcuc

SEQ ID NO: 1483222 - RNA, 19 nt, Artificial Sequence
  Description of Artificial Sequence: Synthetic oligonucleotide
ccuagggagggcacaggac

SEQ ID NO: 1483223 - RNA, 19 nt, Artificial Sequence
  Description of Artificial Sequence: Synthetic oligonucleotide
augucguugccgauaccaa

SEQ ID NO: 1483224 - RNA, 19 nt, Artificial Sequence
  Description of Artificial Sequence: Synthetic oligonucleotide
guccuagggagggcacagg

SEQ ID NO: 1483225 - RNA, 19 nt, Artificial Sequence
  Description of Artificial Sequence: Synthetic oligonucleotide
ccuuucaccguagagggaa

SEQ ID NO: 1483226 - RNA, 19 nt, Artificial Sequence
  Description of Artificial Sequence: Synthetic oligonucleotide
gcuaggucuaccacuucca

SEQ ID NO: 1483227 - RNA, 19 nt, Artificial Sequence
  Description of Artificial Sequence: Synthetic oligonucleotide
gacgggaugugcaccugaa

SEQ ID NO: 1483228 - RNA, 19 nt, Artificial Sequence
  Description of Artificial Sequence: Synthetic oligonucleotide
cucuuguccuagggagggc

SEQ ID NO: 1483229 - RNA, 19 nt, Artificial Sequence
  Description of Artificial Sequence: Synthetic oligonucleotide
ccacguuugguggagccug

SEQ ID NO: 1483230 - RNA, 19 nt, Artificial Sequence
  Description of Artificial Sequence: Synthetic oligonucleotide
aaacgccuguagaggccca

SEQ ID NO: 1483231 - RNA, 19 nt, Artificial Sequence
  Description of Artificial Sequence: Synthetic oligonucleotide
ggcaacuggucagggcuag

SEQ ID NO: 1483232 - RNA, 19 nt, Artificial Sequence
  Description of Artificial Sequence: Synthetic oligonucleotide
ggcuacgcaggaaaucauc

SEQ ID NO: 1483233 - RNA, 19 nt, Artificial Sequence
  Description of Artificial Sequence: Synthetic oligonucleotide
uccaggccucgauguucgc

SEQ ID NO: 1483234 - RNA, 19 nt, Artificial Sequence
  Description of Artificial Sequence: Synthetic oligonucleotide
ccugcuuaggaaggucccc

SEQ ID NO: 1483235 - RNA, 19 nt, Artificial Sequence
  Description of Artificial Sequence: Synthetic oligonucleotide
acccuggacgggaugugca

SEQ ID NO: 1483236 - RNA, 19 nt, Artificial Sequence
  Description of Artificial Sequence: Synthetic oligonucleotide
uucguguugugagcuccuu

SEQ ID NO: 1483237 - RNA, 19 nt, Artificial Sequence
  Description of Artificial Sequence: Synthetic oligonucleotide
cagaggugguuccgggaga

SEQ ID NO: 1483238 - RNA, 19 nt, Artificial Sequence
  Description of Artificial Sequence: Synthetic oligonucleotide
cacacaaguuggcucuugu

SEQ ID NO: 1483239 - RNA, 19 nt, Artificial Sequence
  Description of Artificial Sequence: Synthetic oligonucleotide
gcagucguuuaagcagugc

SEQ ID NO: 1483240 - RNA, 19 nt, Artificial Sequence
  Description of Artificial Sequence: Synthetic oligonucleotide
ccgauaccaaccaucgaaa

SEQ ID NO: 1483241 - RNA, 19 nt, Artificial Sequence
  Description of Artificial Sequence: Synthetic oligonucleotide
gcuggaguguuuugauaaa

SEQ ID NO: 1483242 - RNA, 19 nt, Artificial Sequence
  Description of Artificial Sequence: Synthetic oligonucleotide
gggagccaauaacuguguc

SEQ ID NO: 1483243 - RNA, 19 nt, Artificial Sequence
  Description of Artificial Sequence: Synthetic oligonucleotide
gugcaccugaaugacgacu

SEQ ID NO: 1483244 - RNA, 19 nt, Artificial Sequence
  Description of Artificial Sequence: Synthetic oligonucleotide
cgaauguuccaggcuacgc

SEQ ID NO: 1483245 - RNA, 19 nt, Artificial Sequence
  Description of Artificial Sequence: Synthetic oligonucleotide
cuggccggaagcaccuaaa

SEQ ID NO: 1483246 - RNA, 19 nt, Artificial Sequence
  Description of Artificial Sequence: Synthetic oligonucleotide
caauaacugugucgaugua

SEQ ID NO: 1483247 - RNA, 19 nt, Artificial Sequence
  Description of Artificial Sequence: Synthetic oligonucleotide
gauugggauuccagcuugu

SEQ ID NO: 1483248 - RNA, 19 nt, Artificial Sequence
  Description of Artificial Sequence: Synthetic oligonucleotide
aaacucugugugagcucua

SEQ ID NO: 1483249 - RNA, 19 nt, Artificial Sequence
  Description of Artificial Sequence: Synthetic oligonucleotide
ccgaauguuccaggcuacg

SEQ ID NO: 1483250 - RNA, 19 nt, Artificial Sequence
  Description of Artificial Sequence: Synthetic oligonucleotide
ccguagagggaacuuggca

SEQ ID NO: 1483251 - RNA, 19 nt, Artificial Sequence
  Description of Artificial Sequence: Synthetic oligonucleotide
ggggcggaagucacagcag

SEQ ID NO: 1483252 - RNA, 19 nt, Artificial Sequence
  Description of Artificial Sequence: Synthetic oligonucleotide
ccuggacgggaugugcacc

SEQ ID NO: 1483253 - RNA, 19 nt, Artificial Sequence
  Description of Artificial Sequence: Synthetic oligonucleotide
guacgcccuugagcagucg

SEQ ID NO: 1483254 - RNA, 19 nt, Artificial Sequence
  Description of Artificial Sequence: Synthetic oligonucleotide
cuguacgcccuugagcagu

SEQ ID NO: 1483255 - RNA, 19 nt, Artificial Sequence
  Description of Artificial Sequence: Synthetic oligonucleotide
ccacuaggggcuccccaag

SEQ ID NO: 1483256 - RNA, 19 nt, Artificial Sequence
  Description of Artificial Sequence: Synthetic oligonucleotide
aggcuacgcaggaaaucau

SEQ ID NO: 1483257 - RNA, 19 nt, Artificial Sequence
  Description of Artificial Sequence: Synthetic oligonucleotide
ggccaaggcugggaguccc

SEQ ID NO: 1483258 - RNA, 19 nt, Artificial Sequence
  Description of Artificial Sequence: Synthetic oligonucleotide
gcuccagaggaaugaugaa

SEQ ID NO: 1483259 - RNA, 19 nt, Artificial Sequence
  Description of Artificial Sequence: Synthetic oligonucleotide
gccuguguucguguuguga

SEQ ID NO: 1483260 - RNA, 19 nt, Artificial Sequence
  Description of Artificial Sequence: Synthetic oligonucleotide
cccuggacgggaugugcac

SEQ ID NO: 1483261 - RNA, 19 nt, Artificial Sequence
  Description of Artificial Sequence: Synthetic oligonucleotide
ccaggcuacgcaggaaauc

SEQ ID NO: 1483262 - RNA, 19 nt, Artificial Sequence
  Description of Artificial Sequence: Synthetic oligonucleotide
ggcacuuugugcaucccau

SEQ ID NO: 1483263 - RNA, 19 nt, Artificial Sequence
  Description of Artificial Sequence: Synthetic oligonucleotide
cgccuguagaggcccagcc

SEQ ID NO: 1483264 - RNA, 19 nt, Artificial Sequence
  Description of Artificial Sequence: Synthetic oligonucleotide
cuguagaggcccagccagu

SEQ ID NO: 1483265 - RNA, 19 nt, Artificial Sequence
  Description of Artificial Sequence: Synthetic oligonucleotide
cuuaggcucuaggccucca

SEQ ID NO: 1483266 - RNA, 19 nt, Artificial Sequence
  Description of Artificial Sequence: Synthetic oligonucleotide
acgcccuugagcagucguu

SEQ ID NO: 1483267 - RNA, 19 nt, Artificial Sequence
  Description of Artificial Sequence: Synthetic oligonucleotide
ccgacuuguccuucaucca

SEQ ID NO: 1483268 - RNA, 19 nt, Artificial Sequence
  Description of Artificial Sequence: Synthetic oligonucleotide
cgauguucgccucacaaau

SEQ ID NO: 1483269 - RNA, 19 nt, Artificial Sequence
  Description of Artificial Sequence: Synthetic oligonucleotide
gcacgcugcagugucaccu

SEQ ID NO: 1483270 - RNA, 19 nt, Artificial Sequence
  Description of Artificial Sequence: Synthetic oligonucleotide
agggaacuuggcagacuua

SEQ ID NO: 1483271 - RNA, 19 nt, Artificial Sequence
  Description of Artificial Sequence: Synthetic oligonucleotide
guucguguugugagcuccu

SEQ ID NO: 1483272 - RNA, 19 nt, Artificial Sequence
  Description of Artificial Sequence: Synthetic oligonucleotide
ggaccacguuugguggagc

SEQ ID NO: 1483273 - RNA, 19 nt, Artificial Sequence
  Description of Artificial Sequence: Synthetic oligonucleotide
cuccaggaccacacaaguu

SEQ ID NO: 1483274 - RNA, 19 nt, Artificial Sequence
  Description of Artificial Sequence: Synthetic oligonucleotide
ccuucacggggaccuggug

SEQ ID NO: 1483275 - RNA, 19 nt, Artificial Sequence
  Description of Artificial Sequence: Synthetic oligonucleotide
gccgagguaggaggccaag

SEQ ID NO: 1483276 - RNA, 19 nt, Artificial Sequence
  Description of Artificial Sequence: Synthetic oligonucleotide
gcaccuaaacagauccagu

SEQ ID NO: 1483277 - RNA, 19 nt, Artificial Sequence
  Description of Artificial Sequence: Synthetic oligonucleotide
cccuugagcagucguuuaa

SEQ ID NO: 1483278 - RNA, 19 nt, Artificial Sequence
  Description of Artificial Sequence: Synthetic oligonucleotide
cgaaguuucagggcuaggu

SEQ ID NO: 1483279 - RNA, 19 nt, Artificial Sequence
  Description of Artificial Sequence: Synthetic oligonucleotide
ggacacuagugaggacgac

SEQ ID NO: 1483280 - RNA, 19 nt, Artificial Sequence
  Description of Artificial Sequence: Synthetic oligonucleotide
cacguuugguggagccugu

SEQ ID NO: 1483281 - RNA, 19 nt, Artificial Sequence
  Description of Artificial Sequence: Synthetic oligonucleotide
gcaucccauggccuuuucu

SEQ ID NO: 1483282 - RNA, 19 nt, Artificial Sequence
  Description of Artificial Sequence: Synthetic oligonucleotide
gcaacuggucagggcuagc

SEQ ID NO: 1483283 - RNA, 19 nt, Artificial Sequence
  Description of Artificial Sequence: Synthetic oligonucleotide
ggaccacuaggggcucccc

SEQ ID NO: 1483284 - RNA, 19 nt, Artificial Sequence
  Description of Artificial Sequence: Synthetic oligonucleotide
gcccuugagcagucguuua

SEQ ID NO: 1483285 - RNA, 19 nt, Artificial Sequence
  Description of Artificial Sequence: Synthetic oligonucleotide
gcggcauaaggcuggccau

SEQ ID NO: 1483286 - RNA, 19 nt, Artificial Sequence
  Description of Artificial Sequence: Synthetic oligonucleotide
gcauaaggcuggccaugua

SEQ ID NO: 1483287 - RNA, 19 nt, Artificial Sequence
  Description of Artificial Sequence: Synthetic oligonucleotide
gggcaguauaugaggugua

SEQ ID NO: 1483288 - RNA, 19 nt, Artificial Sequence
  Description of Artificial Sequence: Synthetic oligonucleotide
gccuuucaccguagaggga

SEQ ID NO: 1483289 - RNA, 19 nt, Artificial Sequence
  Description of Artificial Sequence: Synthetic oligonucleotide
cgauaccaaccaucgaaau

SEQ ID NO: 1483290 - RNA, 19 nt, Artificial Sequence
  Description of Artificial Sequence: Synthetic oligonucleotide
ccgcaccagcuuuucccga

SEQ ID NO: 1483291 - RNA, 19 nt, Artificial Sequence
  Description of Artificial Sequence: Synthetic oligonucleotide
gcucuaggaggugccgccu

SEQ ID NO: 1483292 - RNA, 19 nt, Artificial Sequence
  Description of Artificial Sequence: Synthetic oligonucleotide
cacuggccggaagcaccua

SEQ ID NO: 1483293 - RNA, 19 nt, Artificial Sequence
  Description of Artificial Sequence: Synthetic oligonucleotide
uaaaauauugcauaggucu

SEQ ID NO: 1483294 - RNA, 19 nt, Artificial Sequence
  Description of Artificial Sequence: Synthetic oligonucleotide
aauaauaauaauaauauaa

SEQ ID NO: 1483295 - RNA, 19 nt, Artificial Sequence
  Description of Artificial Sequence: Synthetic oligonucleotide
  modified_base (7)..(7): a, c, u, g, unknown or other
uuauuanaaaguaaaauau

SEQ ID NO: 1483296 - RNA, 19 nt, Artificial Sequence
  Description of Artificial Sequence: Synthetic oligonucleotide
agauacacgaacuaucucc

SEQ ID NO: 1483297 - RNA, 19 nt, Artificial Sequence
  Description of Artificial Sequence: Synthetic oligonucleotide
aauacuugaacaucaagug

SEQ ID NO: 1483298 - RNA, 19 nt, Artificial Sequence
  Description of Artificial Sequence: Synthetic oligonucleotide
  modified_base (8)..(8): a, c, u, g, unknown or other
uuuauuanaaaguaaaaua

SEQ ID NO: 1483299 - RNA, 19 nt, Artificial Sequence
  Description of Artificial Sequence: Synthetic oligonucleotide
  modified_base (4)..(4): a, c, u, g, unknown or other
uuanaaaguaaaauauugc

SEQ ID NO: 1483300 - RNA, 19 nt, Artificial Sequence
  Description of Artificial Sequence: Synthetic oligonucleotide
  modified_base (3)..(3): a, c, u, g, unknown or other
uanaaaguaaaauauugca

SEQ ID NO: 1483301 - RNA, 19 nt, Artificial Sequence
  Description of Artificial Sequence: Synthetic oligonucleotide
uuucaagugucaaagaucc

SEQ ID NO: 1483302 - RNA, 19 nt, Artificial Sequence
  Description of Artificial Sequence: Synthetic oligonucleotide
auugcauaggucuuaauac

SEQ ID NO: 1483303 - RNA, 19 nt, Artificial Sequence
  Description of Artificial Sequence: Synthetic oligonucleotide
aguacuaagagcaugugcc

SEQ ID NO: 1483304 - RNA, 19 nt, Artificial Sequence
  Description of Artificial Sequence: Synthetic oligonucleotide
uacucuuacauucaugcgg

SEQ ID NO: 1483305 - RNA, 19 nt, Artificial Sequence
  Description of Artificial Sequence: Synthetic oligonucleotide
uggauuuugggccagaggc

SEQ ID NO: 1483306 - RNA, 19 nt, Artificial Sequence
  Description of Artificial Sequence: Synthetic oligonucleotide
aguagugaagcucccaucc

SEQ ID NO: 1483307 - RNA, 19 nt, Artificial Sequence
  Description of Artificial Sequence: Synthetic oligonucleotide
ugcuacaguacuaagagca

SEQ ID NO: 1483308 - RNA, 19 nt, Artificial Sequence
  Description of Artificial Sequence: Synthetic oligonucleotide
auugucagcuuucuaacgc

SEQ ID NO: 1483309 - RNA, 19 nt, Artificial Sequence
  Description of Artificial Sequence: Synthetic oligonucleotide
  modified_base (5)..(5): a, c, u, g, unknown or other
auuanaaaguaaaauauug

SEQ ID NO: 1483310 - RNA, 19 nt, Artificial Sequence
  Description of Artificial Sequence: Synthetic oligonucleotide
aguaaaauauugcauaggu

SEQ ID NO: 1483311 - RNA, 19 nt, Artificial Sequence
  Description of Artificial Sequence: Synthetic oligonucleotide
aaaugaucccaacacccac

SEQ ID NO: 1483312 - RNA, 19 nt, Artificial Sequence
  Description of Artificial Sequence: Synthetic oligonucleotide
aaacgacaaacacacuugg

SEQ ID NO: 1483313 - RNA, 19 nt, Artificial Sequence
  Description of Artificial Sequence: Synthetic oligonucleotide
aguucuagauggaagaccc

SEQ ID NO: 1483314 - RNA, 19 nt, Artificial Sequence
  Description of Artificial Sequence: Synthetic oligonucleotide
aguaauaauaauaauaaua

SEQ ID NO: 1483315 - RNA, 19 nt, Artificial Sequence
  Description of Artificial Sequence: Synthetic oligonucleotide
uuaauacuugaacaucaag

SEQ ID NO: 1483316 - RNA, 19 nt, Artificial Sequence
  Description of Artificial Sequence: Synthetic oligonucleotide
ugaaccgugaguaucuuca

SEQ ID NO: 1483317 - RNA, 19 nt, Artificial Sequence
  Description of Artificial Sequence: Synthetic oligonucleotide
uguccaaggacucacaguc

SEQ ID NO: 1483318 - RNA, 19 nt, Artificial Sequence
  Description of Artificial Sequence: Synthetic oligonucleotide
  modified_base (6)..(6): a, c, u, g, unknown or other
uauuanaaaguaaaauauu

SEQ ID NO: 1483319 - RNA, 19 nt, Artificial Sequence
  Description of Artificial Sequence: Synthetic oligonucleotide
uaauaauauaaaagguaca

SEQ ID NO: 1483320 - RNA, 19 nt, Artificial Sequence
  Description of Artificial Sequence: Synthetic oligonucleotide
  modified_base (2)..(2): a, c, u, g, unknown or other
anaaaguaaaauauugcau

SEQ ID NO: 1483321 - RNA, 19 nt, Artificial Sequence
  Description of Artificial Sequence: Synthetic oligonucleotide
gacacuuccuucuccaacg

SEQ ID NO: 1483322 - RNA, 19 nt, Artificial Sequence
  Description of Artificial Sequence: Synthetic oligonucleotide
aagauagcugccucgaaca

SEQ ID NO: 1483323 - RNA, 19 nt, Artificial Sequence
  Description of Artificial Sequence: Synthetic oligonucleotide
uguuucaugcuacaguacu

SEQ ID NO: 1483324 - RNA, 19 nt, Artificial Sequence
  Description of Artificial Sequence: Synthetic oligonucleotide
uauugcauaggucuuaaua

SEQ ID NO: 1483325 - RNA, 19 nt, Artificial Sequence
  Description of Artificial Sequence: Synthetic oligonucleotide
uugaacaucaaguguauuc

SEQ ID NO: 1483326 - RNA, 19 nt, Artificial Sequence
  Description of Artificial Sequence: Synthetic oligonucleotide
ugagauacacgaacuaucu

SEQ ID NO: 1483327 - RNA, 19 nt, Artificial Sequence
  Description of Artificial Sequence: Synthetic oligonucleotide
uacuugaacaucaagugua

SEQ ID NO: 1483328 - RNA, 19 nt, Artificial Sequence
  Description of Artificial Sequence: Synthetic oligonucleotide
acaucaaguguauucauga

SEQ ID NO: 1483329 - RNA, 19 nt, Artificial Sequence
  Description of Artificial Sequence: Synthetic oligonucleotide
ucaacacucuucaaugagc

SEQ ID NO: 1483330 - RNA, 19 nt, Artificial Sequence
  Description of Artificial Sequence: Synthetic oligonucleotide
uugaugacucugaagccgg

SEQ ID NO: 1483331 - RNA, 19 nt, Artificial Sequence
  Description of Artificial Sequence: Synthetic oligonucleotide
auaauaauaauaauauaaa

SEQ ID NO: 1483332 - RNA, 19 nt, Artificial Sequence
  Description of Artificial Sequence: Synthetic oligonucleotide
ucaugcuacaguacuaaga

SEQ ID NO: 1483333 - RNA, 19 nt, Artificial Sequence
  Description of Artificial Sequence: Synthetic oligonucleotide
ugaacaucaaguguauuca

SEQ ID NO: 1483334 - RNA, 19 nt, Artificial Sequence
  Description of Artificial Sequence: Synthetic oligonucleotide
uauucaugaaccgugagua

SEQ ID NO: 1483335 - RNA, 19 nt, Artificial Sequence
  Description of Artificial Sequence: Synthetic oligonucleotide
cucgcuguaagccaggcgc

SEQ ID NO: 1483336 - RNA, 19 nt, Artificial Sequence
  Description of Artificial Sequence: Synthetic oligonucleotide
ucuaacgcaggcaucaguc

SEQ ID NO: 1483337 - RNA, 19 nt, Artificial Sequence
  Description of Artificial Sequence: Synthetic oligonucleotide
acaaacgacaaacacacuu

SEQ ID NO: 1483338 - RNA, 19 nt, Artificial Sequence
  Description of Artificial Sequence: Synthetic oligonucleotide
guaauaauaauaauaauau

SEQ ID NO: 1483339 - RNA, 19 nt, Artificial Sequence
  Description of Artificial Sequence: Synthetic oligonucleotide
cagaccaugagauacacga

SEQ ID NO: 1483340 - RNA, 19 nt, Artificial Sequence
  Description of Artificial Sequence: Synthetic oligonucleotide
uaauaauaauaauaauaua

SEQ ID NO: 1483341 - RNA, 19 nt, Artificial Sequence
  Description of Artificial Sequence: Synthetic oligonucleotide
agcggaacucaacagcccc

SEQ ID NO: 1483342 - RNA, 19 nt, Artificial Sequence
  Description of Artificial Sequence: Synthetic oligonucleotide
uacacgaacuaucucccag

SEQ ID NO: 1483343 - RNA, 19 nt, Artificial Sequence
  Description of Artificial Sequence: Synthetic oligonucleotide
augaucccaacacccaccc

SEQ ID NO: 1483344 - RNA, 19 nt, Artificial Sequence
  Description of Artificial Sequence: Synthetic oligonucleotide
acacuugguccuuucagac

SEQ ID NO: 1483345 - RNA, 19 nt, Artificial Sequence
  Description of Artificial Sequence: Synthetic oligonucleotide
acuaaacuuuccugucugc

SEQ ID NO: 1483346 - RNA, 19 nt, Artificial Sequence
  Description of Artificial Sequence: Synthetic oligonucleotide
guaacugucaguaauaaua

SEQ ID NO: 1483347 - RNA, 19 nt, Artificial Sequence
  Description of Artificial Sequence: Synthetic oligonucleotide
gcuacauacacauccagcc

SEQ ID NO: 1483348 - RNA, 19 nt, Artificial Sequence
  Description of Artificial Sequence: Synthetic oligonucleotide
aaaagguacaugcuacaua

SEQ ID NO: 1483349 - RNA, 19 nt, Artificial Sequence
  Description of Artificial Sequence: Synthetic oligonucleotide
ucaugaaccgugaguaucu

SEQ ID NO: 1483350 - RNA, 19 nt, Artificial Sequence
  Description of Artificial Sequence: Synthetic oligonucleotide
accgugaguaucuucaugu

SEQ ID NO: 1483351 - RNA, 19 nt, Artificial Sequence
  Description of Artificial Sequence: Synthetic oligonucleotide
aggucaguagugaagcucc

SEQ ID NO: 1483352 - RNA, 19 nt, Artificial Sequence
  Description of Artificial Sequence: Synthetic oligonucleotide
ccuacucuuacauucaugc

SEQ ID NO: 1483353 - RNA, 19 nt, Artificial Sequence
  Description of Artificial Sequence: Synthetic oligonucleotide
ugucacacuacuguuguug

SEQ ID NO: 1483354 - RNA, 19 nt, Artificial Sequence
  Description of Artificial Sequence: Synthetic oligonucleotide
uucuagauggaagacccag

SEQ ID NO: 1483355 - RNA, 19 nt, Artificial Sequence
  Description of Artificial Sequence: Synthetic oligonucleotide
cuggcuuggcauuagcagg

SEQ ID NO: 1483356 - RNA, 19 nt, Artificial Sequence
  Description of Artificial Sequence: Synthetic oligonucleotide
auacuugaacaucaagugu

SEQ ID NO: 1483357 - RNA, 19 nt, Artificial Sequence
  Description of Artificial Sequence: Synthetic oligonucleotide
gauacacgaacuaucuccc

SEQ ID NO: 1483358 - RNA, 19 nt, Artificial Sequence
  Description of Artificial Sequence: Synthetic oligonucleotide
gaccaugagauacacgaac

SEQ ID NO: 1483359 - RNA, 19 nt, Artificial Sequence
  Description of Artificial Sequence: Synthetic oligonucleotide
uccaccacuaaacuuuccu

SEQ ID NO: 1483360 - RNA, 19 nt, Artificial Sequence
  Description of Artificial Sequence: Synthetic oligonucleotide
  modified_base (13)..(13): a, c, u, g, unknown or other
cuauguuuauuanaaagua

SEQ ID NO: 1483361 - RNA, 19 nt, Artificial Sequence
  Description of Artificial Sequence: Synthetic oligonucleotide
cugucaguaauaauaauaa

SEQ ID NO: 1483362 - RNA, 19 nt, Artificial Sequence
  Description of Artificial Sequence: Synthetic oligonucleotide
ucaaagucgggcagggaca

SEQ ID NO: 1483363 - RNA, 19 nt, Artificial Sequence
  Description of Artificial Sequence: Synthetic oligonucleotide
augagauacacgaacuauc

SEQ ID NO: 1483364 - RNA, 19 nt, Artificial Sequence
  Description of Artificial Sequence: Synthetic oligonucleotide
uagugaagcucccaucccc

SEQ ID NO: 1483365 - RNA, 19 nt, Artificial Sequence
  Description of Artificial Sequence: Synthetic oligonucleotide
ugaguaucuucauguaaca

SEQ ID NO: 1483366 - RNA, 19 nt, Artificial Sequence
  Description of Artificial Sequence: Synthetic oligonucleotide
caaguguauucaugaaccg

SEQ ID NO: 1483367 - RNA, 19 nt, Artificial Sequence
  Description of Artificial Sequence: Synthetic oligonucleotide
augcuacaguacuaagagc

SEQ ID NO: 1483368 - RNA, 19 nt, Artificial Sequence
  Description of Artificial Sequence: Synthetic oligonucleotide
aguuagcggaacucaacag

SEQ ID NO: 1483369 - RNA, 19 nt, Artificial Sequence
  Description of Artificial Sequence: Synthetic oligonucleotide
aggagucuuccuccggucc

SEQ ID NO: 1483370 - RNA, 19 nt, Artificial Sequence
  Description of Artificial Sequence: Synthetic oligonucleotide
uguaagauagcugccucga

SEQ ID NO: 1483371 - RNA, 19 nt, Artificial Sequence
  Description of Artificial Sequence: Synthetic oligonucleotide
uuagcaggcgcgcggggcg

SEQ ID NO: 1483372 - RNA, 19 nt, Artificial Sequence
  Description of Artificial Sequence: Synthetic oligonucleotide
ugucagcuuucuaacgcag

SEQ ID NO: 1483373 - RNA, 19 nt, Artificial Sequence
  Description of Artificial Sequence: Synthetic oligonucleotide
agaccagcugcccuuuugg

SEQ ID NO: 1483374 - RNA, 19 nt, Artificial Sequence
  Description of Artificial Sequence: Synthetic oligonucleotide
aacucaacagccccuggau

SEQ ID NO: 1483375 - RNA, 19 nt, Artificial Sequence
  Description of Artificial Sequence: Synthetic oligonucleotide
aacacucuucaaugagcag

SEQ ID NO: 1483376 - RNA, 19 nt, Artificial Sequence
  Description of Artificial Sequence: Synthetic oligonucleotide
aaguguauucaugaaccgu

SEQ ID NO: 1483377 - RNA, 19 nt, Artificial Sequence
  Description of Artificial Sequence: Synthetic oligonucleotide
cuaucucccagaccuaccc

SEQ ID NO: 1483378 - RNA, 19 nt, Artificial Sequence
  Description of Artificial Sequence: Synthetic oligonucleotide
aagccuuuguuucaugcua

SEQ ID NO: 1483379 - RNA, 19 nt, Artificial Sequence
  Description of Artificial Sequence: Synthetic oligonucleotide
uaagccuuuguuucaugcu

SEQ ID NO: 1483380 - RNA, 19 nt, Artificial Sequence
  Description of Artificial Sequence: Synthetic oligonucleotide
caguacuaagagcaugugc

SEQ ID NO: 1483381 - RNA, 19 nt, Artificial Sequence
  Description of Artificial Sequence: Synthetic oligonucleotide
uggcuuggcauuagcaggc

SEQ ID NO: 1483382 - RNA, 19 nt, Artificial Sequence
  Description of Artificial Sequence: Synthetic oligonucleotide
acgaacuaucucccagacc

SEQ ID NO: 1483383 - RNA, 19 nt, Artificial Sequence
  Description of Artificial Sequence: Synthetic oligonucleotide
uaacgcaggcaucaguccu

SEQ ID NO: 1483384 - RNA, 19 nt, Artificial Sequence
  Description of Artificial Sequence: Synthetic oligonucleotide
acacuacuguuguuguaac

SEQ ID NO: 1483385 - RNA, 19 nt, Artificial Sequence
  Description of Artificial Sequence: Synthetic oligonucleotide
aauauugcauaggucuuaa

SEQ ID NO: 1483386 - RNA, 19 nt, Artificial Sequence
  Description of Artificial Sequence: Synthetic oligonucleotide
aaccgugaguaucuucaug

SEQ ID NO: 1483387 - RNA, 19 nt, Artificial Sequence
  Description of Artificial Sequence: Synthetic oligonucleotide
uguucggagcuguagaguu

SEQ ID NO: 1483388 - RNA, 19 nt, Artificial Sequence
  Description of Artificial Sequence: Synthetic oligonucleotide
uucauguaacaguucuaga

SEQ ID NO: 1483389 - RNA, 19 nt, Artificial Sequence
  Description of Artificial Sequence: Synthetic oligonucleotide
accugcacacaaccuagcg

SEQ ID NO: 1483390 - RNA, 19 nt, Artificial Sequence
  Description of Artificial Sequence: Synthetic oligonucleotide
uugucagcuuucuaacgca

SEQ ID NO: 1483391 - RNA, 19 nt, Artificial Sequence
  Description of Artificial Sequence: Synthetic oligonucleotide
ugaggagucuuccuccggu

SEQ ID NO: 1483392 - RNA, 19 nt, Artificial Sequence
  Description of Artificial Sequence: Synthetic oligonucleotide
uucaugaaccgugaguauc

SEQ ID NO: 1483393 - RNA, 19 nt, Artificial Sequence
  Description of Artificial Sequence: Synthetic oligonucleotide
guacuaagagcaugugccc

SEQ ID NO: 1483394 - RNA, 19 nt, Artificial Sequence
  Description of Artificial Sequence: Synthetic oligonucleotide
cuaacgcaggcaucagucc

SEQ ID NO: 1483395 - RNA, 19 nt, Artificial Sequence
  Description of Artificial Sequence: Synthetic oligonucleotide
aaauauugcauaggucuua

SEQ ID NO: 1483396 - RNA, 19 nt, Artificial Sequence
  Description of Artificial Sequence: Synthetic oligonucleotide
agggucagcugaaaggugg

SEQ ID NO: 1483397 - RNA, 19 nt, Artificial Sequence
  Description of Artificial Sequence: Synthetic oligonucleotide
gcuauugucagcuuucuaa

SEQ ID NO: 1483398 - RNA, 19 nt, Artificial Sequence
  Description of Artificial Sequence: Synthetic oligonucleotide
uccuacucuuacauucaug

SEQ ID NO: 1483399 - RNA, 19 nt, Artificial Sequence
  Description of Artificial Sequence: Synthetic oligonucleotide
agaguuagcggaacucaac

SEQ ID NO: 1483400 - RNA, 19 nt, Artificial Sequence
  Description of Artificial Sequence: Synthetic oligonucleotide
uuuggcucugucacacuac

SEQ ID NO: 1483401 - RNA, 19 nt, Artificial Sequence
  Description of Artificial Sequence: Synthetic oligonucleotide
guaaaauauugcauagguc

SEQ ID NO: 1483402 - RNA, 19 nt, Artificial Sequence
  Description of Artificial Sequence: Synthetic oligonucleotide
guacaugcuacauacacau

SEQ ID NO: 1483403 - RNA, 19 nt, Artificial Sequence
  Description of Artificial Sequence: Synthetic oligonucleotide
acagaugcucauccuccgg

SEQ ID NO: 1483404 - RNA, 19 nt, Artificial Sequence
  Description of Artificial Sequence: Synthetic oligonucleotide
augcuacauacacauccag

SEQ ID NO: 1483405 - RNA, 19 nt, Artificial Sequence
  Description of Artificial Sequence: Synthetic oligonucleotide
augaaccgugaguaucuuc

SEQ ID NO: 1483406 - RNA, 19 nt, Artificial Sequence
  Description of Artificial Sequence: Synthetic oligonucleotide
uuguuucaugcuacaguac

SEQ ID NO: 1483407 - RNA, 19 nt, Artificial Sequence
  Description of Artificial Sequence: Synthetic oligonucleotide
uacuguuguuguaacuguc

SEQ ID NO: 1483408 - RNA, 19 nt, Artificial Sequence
  Description of Artificial Sequence: Synthetic oligonucleotide
cauaggucuuaauacuuga

SEQ ID NO: 1483409 - RNA, 19 nt, Artificial Sequence
  Description of Artificial Sequence: Synthetic oligonucleotide
agauagcugccucgaacag

SEQ ID NO: 1483410 - RNA, 19 nt, Artificial Sequence
  Description of Artificial Sequence: Synthetic oligonucleotide
aguuccuugcccaccuggc

SEQ ID NO: 1483411 - RNA, 19 nt, Artificial Sequence
  Description of Artificial Sequence: Synthetic oligonucleotide
gaagccggugcucagcguc

SEQ ID NO: 1483412 - RNA, 19 nt, Artificial Sequence
  Description of Artificial Sequence: Synthetic oligonucleotide
uucuaacgcaggcaucagu

SEQ ID NO: 1483413 - RNA, 19 nt, Artificial Sequence
  Description of Artificial Sequence: Synthetic oligonucleotide
cuugacacuuccuucucca

SEQ ID NO: 1483414 - RNA, 19 nt, Artificial Sequence
  Description of Artificial Sequence: Synthetic oligonucleotide
caguucuagauggaagacc

SEQ ID NO: 1483415 - RNA, 19 nt, Artificial Sequence
  Description of Artificial Sequence: Synthetic oligonucleotide
cuggauuuugggccagagg

SEQ ID NO: 1483416 - RNA, 19 nt, Artificial Sequence
  Description of Artificial Sequence: Synthetic oligonucleotide
acacgaacuaucucccaga

SEQ ID NO: 1483417 - RNA, 19 nt, Artificial Sequence
  Description of Artificial Sequence: Synthetic oligonucleotide
uucaagugucaaagauccc

SEQ ID NO: 1483418 - RNA, 19 nt, Artificial Sequence
  Description of Artificial Sequence: Synthetic oligonucleotide
gaacucaacagccccugga

SEQ ID NO: 1483419 - RNA, 19 nt, Artificial Sequence
  Description of Artificial Sequence: Synthetic oligonucleotide
ugacucugaagccggugcu

SEQ ID NO: 1483420 - RNA, 19 nt, Artificial Sequence
  Description of Artificial Sequence: Synthetic oligonucleotide
gguccuuucagaccaugag

SEQ ID NO: 1483421 - RNA, 19 nt, Artificial Sequence
  Description of Artificial Sequence: Synthetic oligonucleotide
caaaugaucccaacaccca

SEQ ID NO: 1483422 - RNA, 19 nt, Artificial Sequence
  Description of Artificial Sequence: Synthetic oligonucleotide
agcuguucggagcuguaga

SEQ ID NO: 1483423 - RNA, 19 nt, Artificial Sequence
  Description of Artificial Sequence: Synthetic oligonucleotide
acuaucucccagaccuacc

SEQ ID NO: 1483424 - RNA, 19 nt, Artificial Sequence
  Description of Artificial Sequence: Synthetic oligonucleotide
guagugaagcucccauccc

SEQ ID NO: 1483425 - RNA, 19 nt, Artificial Sequence
  Description of Artificial Sequence: Synthetic oligonucleotide
gagauacacgaacuaucuc

SEQ ID NO: 1483426 - RNA, 19 nt, Artificial Sequence
  Description of Artificial Sequence: Synthetic oligonucleotide
caugcuacauacacaucca

SEQ ID NO: 1483427 - RNA, 19 nt, Artificial Sequence
  Description of Artificial Sequence: Synthetic oligonucleotide
cgacaaacacacuuggucc

SEQ ID NO: 1483428 - RNA, 19 nt, Artificial Sequence
  Description of Artificial Sequence: Synthetic oligonucleotide
guauucaugaaccgugagu

SEQ ID NO: 1483429 - RNA, 19 nt, Artificial Sequence
  Description of Artificial Sequence: Synthetic oligonucleotide
accaugagauacacgaacu

SEQ ID NO: 1483430 - RNA, 19 nt, Artificial Sequence
  Description of Artificial Sequence: Synthetic oligonucleotide
gucgagggccagcugagcc

SEQ ID NO: 1483431 - RNA, 19 nt, Artificial Sequence
  Description of Artificial Sequence: Synthetic oligonucleotide
cuagcgaccuuccuugaca

SEQ ID NO: 1483432 - RNA, 19 nt, Artificial Sequence
  Description of Artificial Sequence: Synthetic oligonucleotide
acacaaccuagcgaccuuc

SEQ ID NO: 1483433 - RNA, 19 nt, Artificial Sequence
  Description of Artificial Sequence: Synthetic oligonucleotide
uucggagcuguagaguuuc

SEQ ID NO: 1483434 - RNA, 19 nt, Artificial Sequence
  Description of Artificial Sequence: Synthetic oligonucleotide
cacgaacuaucucccagac

SEQ ID NO: 1483435 - RNA, 19 nt, Artificial Sequence
  Description of Artificial Sequence: Synthetic oligonucleotide
uccaggcucgcgcagcggu

SEQ ID NO: 1483436 - RNA, 19 nt, Artificial Sequence
  Description of Artificial Sequence: Synthetic oligonucleotide
aaagucgggcagggacacc

SEQ ID NO: 1483437 - RNA, 19 nt, Artificial Sequence
  Description of Artificial Sequence: Synthetic oligonucleotide
cacaaccuagcgaccuucc

SEQ ID NO: 1483438 - RNA, 19 nt, Artificial Sequence
  Description of Artificial Sequence: Synthetic oligonucleotide
gaugacucugaagccggug

SEQ ID NO: 1483439 - RNA, 19 nt, Artificial Sequence
  Description of Artificial Sequence: Synthetic oligonucleotide
ggcauuagcaggcgcgcgg

SEQ ID NO: 1483440 - RNA, 19 nt, Artificial Sequence
  Description of Artificial Sequence: Synthetic oligonucleotide
auucaugaaccgugaguau

SEQ ID NO: 1483441 - RNA, 19 nt, Artificial Sequence
  Description of Artificial Sequence: Synthetic oligonucleotide
ggagucuuccuccgguccg

SEQ ID NO: 1483442 - RNA, 19 nt, Artificial Sequence
  Description of Artificial Sequence: Synthetic oligonucleotide
guccauggcagggaauggg

SEQ ID NO: 1483443 - RNA, 19 nt, Artificial Sequence
  Description of Artificial Sequence: Synthetic oligonucleotide
ggauuuugggccagaggcg

SEQ ID NO: 1483444 - RNA, 19 nt, Artificial Sequence
  Description of Artificial Sequence: Synthetic oligonucleotide
uccuucaguccuugccugc

SEQ ID NO: 1483445 - RNA, 19 nt, Artificial Sequence
  Description of Artificial Sequence: Synthetic oligonucleotide
ucgcuguaagccaggcgca

SEQ ID NO: 1483446 - RNA, 19 nt, Artificial Sequence
  Description of Artificial Sequence: Synthetic oligonucleotide
caagugucaaagaucccaa

SEQ ID NO: 1483447 - RNA, 19 nt, Artificial Sequence
  Description of Artificial Sequence: Synthetic oligonucleotide
caugcggcuguaagauagc

SEQ ID NO: 1483448 - RNA, 19 nt, Artificial Sequence
  Description of Artificial Sequence: Synthetic oligonucleotide
caaagcucccagguguuac

SEQ ID NO: 1483449 - RNA, 19 nt, Artificial Sequence
  Description of Artificial Sequence: Synthetic oligonucleotide
gcuguucggagcuguagag

SEQ ID NO: 1483450 - RNA, 19 nt, Artificial Sequence
  Description of Artificial Sequence: Synthetic oligonucleotide
auacacgaacuaucuccca

SEQ ID NO: 1483451 - RNA, 19 nt, Artificial Sequence
  Description of Artificial Sequence: Synthetic oligonucleotide
acaaccuagcgaccuuccu

SEQ ID NO: 1483452 - RNA, 19 nt, Artificial Sequence
  Description of Artificial Sequence: Synthetic oligonucleotide
cuguagccagggaccaagg

SEQ ID NO: 1483453 - RNA, 19 nt, Artificial Sequence
  Description of Artificial Sequence: Synthetic oligonucleotide
cuagauggaagacccaggu

SEQ ID NO: 1483454 - RNA, 19 nt, Artificial Sequence
  Description of Artificial Sequence: Synthetic oligonucleotide
guaucuucauguaacaguu

SEQ ID NO: 1483455 - RNA, 19 nt, Artificial Sequence
  Description of Artificial Sequence: Synthetic oligonucleotide
aguccgagcucuccaggcu

SEQ ID NO: 1483456 - RNA, 19 nt, Artificial Sequence
  Description of Artificial Sequence: Synthetic oligonucleotide
caguagugaagcucccauc

SEQ ID NO: 1483457 - RNA, 19 nt, Artificial Sequence
  Description of Artificial Sequence: Synthetic oligonucleotide
acaguacuaagagcaugug

SEQ ID NO: 1483458 - RNA, 19 nt, Artificial Sequence
  Description of Artificial Sequence: Synthetic oligonucleotide
ggucuuaauacuugaacau

SEQ ID NO: 1483459 - RNA, 19 nt, Artificial Sequence
  Description of Artificial Sequence: Synthetic oligonucleotide
agcccaaucgcgccuggga

SEQ ID NO: 1483460 - RNA, 19 nt, Artificial Sequence
  Description of Artificial Sequence: Synthetic oligonucleotide
ggugcucagcgucagggac

SEQ ID NO: 1483461 - RNA, 19 nt, Artificial Sequence
  Description of Artificial Sequence: Synthetic oligonucleotide
agcggucaaggcccucuuc

SEQ ID NO: 1483462 - RNA, 19 nt, Artificial Sequence
  Description of Artificial Sequence: Synthetic oligonucleotide
agcgcagaccagcugcccu

SEQ ID NO: 1483463 - RNA, 19 nt, Artificial Sequence
  Description of Artificial Sequence: Synthetic oligonucleotide
uccaacgggcccugcgccc

SEQ ID NO: 1483464 - RNA, 19 nt, Artificial Sequence
  Description of Artificial Sequence: Synthetic oligonucleotide
agugaagcucccaucccca

SEQ ID NO: 1483465 - RNA, 19 nt, Artificial Sequence
  Description of Artificial Sequence: Synthetic oligonucleotide
caccacuaaacuuuccugu

SEQ ID NO: 1483466 - RNA, 19 nt, Artificial Sequence
  Description of Artificial Sequence: Synthetic oligonucleotide
cuccaacgggcccugcgcc

SEQ ID NO: 1483467 - RNA, 19 nt, Artificial Sequence
  Description of Artificial Sequence: Synthetic oligonucleotide
caccagggucagcugaaag

SEQ ID NO: 1483468 - RNA, 19 nt, Artificial Sequence
  Description of Artificial Sequence: Synthetic oligonucleotide
aagguacaugcuacauaca

SEQ ID NO: 1483469 - RNA, 19 nt, Artificial Sequence
  Description of Artificial Sequence: Synthetic oligonucleotide
uccuccgguccgaagccac

SEQ ID NO: 1483470 - RNA, 19 nt, Artificial Sequence
  Description of Artificial Sequence: Synthetic oligonucleotide
gcauaggucuuaauacuug

SEQ ID NO: 1483471 - RNA, 19 nt, Artificial Sequence
  Description of Artificial Sequence: Synthetic oligonucleotide
gguacaugcuacauacaca

SEQ ID NO: 1483472 - RNA, 19 nt, Artificial Sequence
  Description of Artificial Sequence: Synthetic oligonucleotide
cccaggacgaaguucaaca

SEQ ID NO: 1483473 - RNA, 19 nt, Artificial Sequence
  Description of Artificial Sequence: Synthetic oligonucleotide
ucacacuacuguuguugua

SEQ ID NO: 1483474 - RNA, 19 nt, Artificial Sequence
  Description of Artificial Sequence: Synthetic oligonucleotide
cacucuucaaugagcagcu

SEQ ID NO: 1483475 - RNA, 19 nt, Artificial Sequence
  Description of Artificial Sequence: Synthetic oligonucleotide
auauugcauaggucuuaau

SEQ ID NO: 1483476 - RNA, 19 nt, Artificial Sequence
  Description of Artificial Sequence: Synthetic oligonucleotide
cuugccugcucgucuccac

SEQ ID NO: 1483477 - RNA, 19 nt, Artificial Sequence
  Description of Artificial Sequence: Synthetic oligonucleotide
ccaccacuaaacuuuccug

SEQ ID NO: 1483478 - RNA, 19 nt, Artificial Sequence
  Description of Artificial Sequence: Synthetic oligonucleotide
ggcucugucacacuacugu

SEQ ID NO: 1483479 - RNA, 19 nt, Artificial Sequence
  Description of Artificial Sequence: Synthetic oligonucleotide
cagaggcgagaguccaggc

SEQ ID NO: 1483480 - RNA, 19 nt, Artificial Sequence
  Description of Artificial Sequence: Synthetic oligonucleotide
uccgguccgaagccacugu

SEQ ID NO: 1483481 - RNA, 19 nt, Artificial Sequence
  Description of Artificial Sequence: Synthetic oligonucleotide
gucuccaccacuaaacuuu

SEQ ID NO: 1483482 - RNA, 19 nt, Artificial Sequence
  Description of Artificial Sequence: Synthetic oligonucleotide
caccccguccuacucuuac

SEQ ID NO: 1483483 - RNA, 19 nt, Artificial Sequence
  Description of Artificial Sequence: Synthetic oligonucleotide
aucaguccuucaguccuug

SEQ ID NO: 1483484 - RNA, 19 nt, Artificial Sequence
  Description of Artificial Sequence: Synthetic oligonucleotide
gcugccucgaacaggucag

SEQ ID NO: 1483485 - RNA, 19 nt, Artificial Sequence
  Description of Artificial Sequence: Synthetic oligonucleotide
ucgcgccugggacaggcuc

SEQ ID NO: 1483486 - RNA, 19 nt, Artificial Sequence
  Description of Artificial Sequence: Synthetic oligonucleotide
ugcucgucuccaccacuaa

SEQ ID NO: 1483487 - RNA, 19 nt, Artificial Sequence
  Description of Artificial Sequence: Synthetic oligonucleotide
caugagauacacgaacuau

SEQ ID NO: 1483488 - RNA, 19 nt, Artificial Sequence
  Description of Artificial Sequence: Synthetic oligonucleotide
guaagauagcugccucgaa

SEQ ID NO: 1483489 - RNA, 19 nt, Artificial Sequence
  Description of Artificial Sequence: Synthetic oligonucleotide
cucaacagccccuggauuu

SEQ ID NO: 1483490 - RNA, 19 nt, Artificial Sequence
  Description of Artificial Sequence: Synthetic oligonucleotide
acggcucgcuguaagccag

SEQ ID NO: 1483491 - RNA, 19 nt, Artificial Sequence
  Description of Artificial Sequence: Synthetic oligonucleotide
augcggcuguaagauagcu

SEQ ID NO: 1483492 - RNA, 19 nt, Artificial Sequence
  Description of Artificial Sequence: Synthetic oligonucleotide
gcauuagcaggcgcgcggg

SEQ ID NO: 1483493 - RNA, 19 nt, Artificial Sequence
  Description of Artificial Sequence: Synthetic oligonucleotide
agucgggcagggacacccc

SEQ ID NO: 1483494 - RNA, 19 nt, Artificial Sequence
  Description of Artificial Sequence: Synthetic oligonucleotide
ucggagcuguagaguuucu

SEQ ID NO: 1483495 - RNA, 19 nt, Artificial Sequence
  Description of Artificial Sequence: Synthetic oligonucleotide
ucgggcagggacaccccau

SEQ ID NO: 1483496 - RNA, 19 nt, Artificial Sequence
  Description of Artificial Sequence: Synthetic oligonucleotide
cacggcucgcuguaagcca

SEQ ID NO: 1483497 - RNA, 19 nt, Artificial Sequence
  Description of Artificial Sequence: Synthetic oligonucleotide
ggaagacccagguggccac

SEQ ID NO: 1483498 - RNA, 19 nt, Artificial Sequence
  Description of Artificial Sequence: Synthetic oligonucleotide
accccguccuacucuuaca

SEQ ID NO: 1483499 - RNA, 19 nt, Artificial Sequence
  Description of Artificial Sequence: Synthetic oligonucleotide
ggggucgagggccagcuga

SEQ ID NO: 1483500 - RNA, 19 nt, Artificial Sequence
  Description of Artificial Sequence: Synthetic oligonucleotide
gucaguagugaagcuccca

SEQ ID NO: 1483501 - RNA, 19 nt, Artificial Sequence
  Description of Artificial Sequence: Synthetic oligonucleotide
gcuauggcagcucuugccu

SEQ ID NO: 1483502 - RNA, 19 nt, Artificial Sequence
  Description of Artificial Sequence: Synthetic oligonucleotide
gucuuccuccgguccgaag

SEQ ID NO: 1483503 - RNA, 19 nt, Artificial Sequence
  Description of Artificial Sequence: Synthetic oligonucleotide
agaccaugagauacacgaa

SEQ ID NO: 1483504 - RNA, 19 nt, Artificial Sequence
  Description of Artificial Sequence: Synthetic oligonucleotide
agcgaccuuccuugacacu

SEQ ID NO: 1483505 - RNA, 19 nt, Artificial Sequence
  Description of Artificial Sequence: Synthetic oligonucleotide
gucaaagaucccaaaugau

SEQ ID NO: 1483506 - RNA, 19 nt, Artificial Sequence
  Description of Artificial Sequence: Synthetic oligonucleotide
gagcccaaucgcgccuggg

SEQ ID NO: 1483507 - RNA, 19 nt, Artificial Sequence
  Description of Artificial Sequence: Synthetic oligonucleotide
cgcuauggcagcucuugcc

SEQ ID NO: 1483508 - RNA, 19 nt, Artificial Sequence
  Description of Artificial Sequence: Synthetic oligonucleotide
gcucgcgcagcggucaagg

SEQ ID NO: 1483509 - RNA, 19 nt, Artificial Sequence
  Description of Artificial Sequence: Synthetic oligonucleotide
cagcuuucuaacgcaggca

SEQ ID NO: 1483510 - RNA, 19 nt, Artificial Sequence
  Description of Artificial Sequence: Synthetic oligonucleotide
gcacggcucgcuguaagcc

SEQ ID NO: 1483511 - RNA, 19 nt, Artificial Sequence
  Description of Artificial Sequence: Synthetic oligonucleotide
agccacgcuauggcagcuc

SEQ ID NO: 1483512 - RNA, 19 nt, Artificial Sequence
  Description of Artificial Sequence: Synthetic oligonucleotide
guucuagauggaagaccca

SEQ ID NO: 1483513 - RNA, 19 nt, Artificial Sequence
  Description of Artificial Sequence: Synthetic oligonucleotide
caggcaucaguccuucagu

SEQ ID NO: 1483514 - RNA, 19 nt, Artificial Sequence
  Description of Artificial Sequence: Synthetic oligonucleotide
ccaaucgcgccugggacag

SEQ ID NO: 1483515 - RNA, 19 nt, Artificial Sequence
  Description of Artificial Sequence: Synthetic oligonucleotide
uguggccccuaagccuuug

SEQ ID NO: 1483516 - RNA, 19 nt, Artificial Sequence
  Description of Artificial Sequence: Synthetic oligonucleotide
ggacucacaguccgagcuc

SEQ ID NO: 1483517 - RNA, 19 nt, Artificial Sequence
  Description of Artificial Sequence: Synthetic oligonucleotide
gcccaaucgcgccugggac

SEQ ID NO: 1483518 - RNA, 19 nt, Artificial Sequence
  Description of Artificial Sequence: Synthetic oligonucleotide
acccauccccucacaguuc

SEQ ID NO: 1483519 - RNA, 19 nt, Artificial Sequence
  Description of Artificial Sequence: Synthetic oligonucleotide
cuccgguccgaagccacug

SEQ ID NO: 1483520 - RNA, 19 nt, Artificial Sequence
  Description of Artificial Sequence: Synthetic oligonucleotide
gaaccgugaguaucuucau

SEQ ID NO: 1483521 - RNA, 19 nt, Artificial Sequence
  Description of Artificial Sequence: Synthetic oligonucleotide
aggccgcacggcucgcugu

SEQ ID NO: 1483522 - RNA, 19 nt, Artificial Sequence
  Description of Artificial Sequence: Synthetic oligonucleotide
ggcuuggcauuagcaggcg

SEQ ID NO: 1483523 - RNA, 19 nt, Artificial Sequence
  Description of Artificial Sequence: Synthetic oligonucleotide
caaccuagcgaccuuccuu

SEQ ID NO: 1483524 - RNA, 19 nt, Artificial Sequence
  Description of Artificial Sequence: Synthetic oligonucleotide
gcgcaggaguuccuugccc

SEQ ID NO: 1483525 - RNA, 19 nt, Artificial Sequence
  Description of Artificial Sequence: Synthetic oligonucleotide
ccuagcgaccuuccuugac

SEQ ID NO: 1483526 - RNA, 19 nt, Artificial Sequence
  Description of Artificial Sequence: Synthetic oligonucleotide
cacagacguccagcagugc

SEQ ID NO: 1483527 - RNA, 19 nt, Artificial Sequence
  Description of Artificial Sequence: Synthetic oligonucleotide
ccucgaacaggucaguagu

SEQ ID NO: 1483528 - RNA, 19 nt, Artificial Sequence
  Description of Artificial Sequence: Synthetic oligonucleotide
gcggucaaggcccucuucu

SEQ ID NO: 1483529 - RNA, 19 nt, Artificial Sequence
  Description of Artificial Sequence: Synthetic oligonucleotide
gggucgagggccagcugag

SEQ ID NO: 1483530 - RNA, 19 nt, Artificial Sequence
  Description of Artificial Sequence: Synthetic oligonucleotide
ccaugagauacacgaacua

SEQ ID NO: 1483531 - RNA, 19 nt, Artificial Sequence
  Description of Artificial Sequence: Synthetic oligonucleotide
guccuacucuuacauucau

SEQ ID NO: 1483532 - RNA, 19 nt, Artificial Sequence
  Description of Artificial Sequence: Synthetic oligonucleotide
gcuuucuaacgcaggcauc

SEQ ID NO: 1483533 - RNA, 19 nt, Artificial Sequence
  Description of Artificial Sequence: Synthetic oligonucleotide
acaccccauccagguauga

SEQ ID NO: 1483534 - RNA, 19 nt, Artificial Sequence
  Description of Artificial Sequence: Synthetic oligonucleotide
cccauccccucacaguuca

SEQ ID NO: 1483535 - RNA, 19 nt, Artificial Sequence
  Description of Artificial Sequence: Synthetic oligonucleotide
cccuccgguggcuauuguc

SEQ ID NO: 1483536 - RNA, 19 nt, Artificial Sequence
  Description of Artificial Sequence: Synthetic oligonucleotide
guccgaagccacuguugcu

SEQ ID NO: 1483537 - RNA, 19 nt, Artificial Sequence
  Description of Artificial Sequence: Synthetic oligonucleotide
cuguucggagcuguagagu

SEQ ID NO: 1483538 - RNA, 19 nt, Artificial Sequence
  Description of Artificial Sequence: Synthetic oligonucleotide
cccaaucgcgccugggaca

SEQ ID NO: 1483539 - RNA, 19 nt, Artificial Sequence
  Description of Artificial Sequence: Synthetic oligonucleotide
ggcuauugucagcuuucua

SEQ ID NO: 1483540 - RNA, 19 nt, Artificial Sequence
  Description of Artificial Sequence: Synthetic oligonucleotide
cguccuacucuuacauuca

SEQ ID NO: 1483541 - RNA, 19 nt, Artificial Sequence
  Description of Artificial Sequence: Synthetic oligonucleotide
cuauggcagcucuugccuu

SEQ ID NO: 1483542 - RNA, 19 nt, Artificial Sequence
  Description of Artificial Sequence: Synthetic oligonucleotide
caggcucgcgcagcgguca

SEQ ID NO: 1483543 - RNA, 19 nt, Artificial Sequence
  Description of Artificial Sequence: Synthetic oligonucleotide
cgcacggcucgcuguaagc

SEQ ID NO: 1483544 - RNA, 19 nt, Artificial Sequence
  Description of Artificial Sequence: Synthetic oligonucleotide
ccacuaaacuuuccugucu

SEQ ID NO: 1483545 - RNA, 19 nt, Artificial Sequence
  Description of Artificial Sequence: Synthetic oligonucleotide
cggcuguaagauagcugcc

SEQ ID NO: 1483546 - RNA, 19 nt, Artificial Sequence
  Description of Artificial Sequence: Synthetic oligonucleotide
ccaaggacucacaguccga

SEQ ID NO: 1483547 - RNA, 19 nt, Artificial Sequence
  Description of Artificial Sequence: Synthetic oligonucleotide
cuugaacaucaaguguauu

SEQ ID NO: 1483548 - RNA, 19 nt, Artificial Sequence
  Description of Artificial Sequence: Synthetic oligonucleotide
ccaacgggcccugcgcccc

SEQ ID NO: 1483549 - RNA, 19 nt, Artificial Sequence
  Description of Artificial Sequence: Synthetic oligonucleotide
caaucgcgccugggacagg

SEQ ID NO: 1483550 - RNA, 19 nt, Artificial Sequence
  Description of Artificial Sequence: Synthetic oligonucleotide
ggucgagggccagcugagc

SEQ ID NO: 1483551 - RNA, 19 nt, Artificial Sequence
  Description of Artificial Sequence: Synthetic oligonucleotide
gcgaccuuccuugacacuu

SEQ ID NO: 1483552 - RNA, 19 nt, Artificial Sequence
  Description of Artificial Sequence: Synthetic oligonucleotide
ccauccagguaugaggagu

SEQ ID NO: 1483553 - RNA, 19 nt, Artificial Sequence
  Description of Artificial Sequence: Synthetic oligonucleotide
gccacgcuauggcagcucu

SEQ ID NO: 1483554 - RNA, 19 nt, Artificial Sequence
  Description of Artificial Sequence: Synthetic oligonucleotide
aggcucgcgcagcggucaa

SEQ ID NO: 1483555 - RNA, 19 nt, Artificial Sequence
  Description of Artificial Sequence: Synthetic oligonucleotide
gcuacaguacuaagagcau

SEQ ID NO: 1483556 - RNA, 19 nt, Artificial Sequence
  Description of Artificial Sequence: Synthetic oligonucleotide
ccgcacggcucgcuguaag

SEQ ID NO: 1483557 - RNA, 19 nt, Artificial Sequence
  Description of Artificial Sequence: Synthetic oligonucleotide
ccaacacccaccccguccu

SEQ ID NO: 1483558 - RNA, 19 nt, Artificial Sequence
  Description of Artificial Sequence: Synthetic oligonucleotide
ggacgaaguucaacacucu

SEQ ID NO: 1483559 - RNA, 19 nt, Artificial Sequence
  Description of Artificial Sequence: Synthetic oligonucleotide
ccaggcucgcgcagcgguc

SEQ ID NO: 1483560 - RNA, 19 nt, Artificial Sequence
  Description of Artificial Sequence: Synthetic oligonucleotide
cacacaaccuagcgaccuu

SEQ ID NO: 1483561 - RNA, 19 nt, Artificial Sequence
  Description of Artificial Sequence: Synthetic oligonucleotide
ccugcgccccuccgguggc

SEQ ID NO: 1483562 - RNA, 19 nt, Artificial Sequence
  Description of Artificial Sequence: Synthetic oligonucleotide
ccgugaguaucuucaugua

SEQ ID NO: 1483563 - RNA, 19 nt, Artificial Sequence
  Description of Artificial Sequence: Synthetic oligonucleotide
gggcuggacaaagcuccca

SEQ ID NO: 1483564 - RNA, 19 nt, Artificial Sequence
  Description of Artificial Sequence: Synthetic oligonucleotide
cccgcaggccgcacggcuc

SEQ ID NO: 1483565 - RNA, 19 nt, Artificial Sequence
  Description of Artificial Sequence: Synthetic oligonucleotide
gagccacgcuauggcagcu

SEQ ID NO: 1483566 - RNA, 19 nt, Artificial Sequence
  Description of Artificial Sequence: Synthetic oligonucleotide
ggcucgcgcagcggucaag

SEQ ID NO: 1483567 - RNA, 19 nt, Artificial Sequence
  Description of Artificial Sequence: Synthetic oligonucleotide
gcagcggucaaggcccucu

SEQ ID NO: 1483568 - RNA, 19 nt, Artificial Sequence
  Description of Artificial Sequence: Synthetic oligonucleotide
caugaaccgugaguaucuu

SEQ ID NO: 1483569 - RNA, 19 nt, Artificial Sequence
  Description of Artificial Sequence: Synthetic oligonucleotide
cggcucgcuguaagccagg

SEQ ID NO: 1483570 - RNA, 19 nt, Artificial Sequence
  Description of Artificial Sequence: Synthetic oligonucleotide
ggccgcacggcucgcugua

SEQ ID NO: 1483571 - RNA, 19 nt, Artificial Sequence
  Description of Artificial Sequence: Synthetic oligonucleotide
caacacccaccccguccua

SEQ ID NO: 1483572 - RNA, 19 nt, Artificial Sequence
  Description of Artificial Sequence: Synthetic oligonucleotide
ccccguccuacucuuacau

SEQ ID NO: 1483573 - RNA, 19 nt, Artificial Sequence
  Description of Artificial Sequence: Synthetic oligonucleotide
ccgagcucuccaggcucgc

SEQ ID NO: 1483574 - RNA, 19 nt, Artificial Sequence
  Description of Artificial Sequence: Synthetic oligonucleotide
gcgucagggacuggcugua

SEQ ID NO: 1483575 - RNA, 19 nt, Artificial Sequence
  Description of Artificial Sequence: Synthetic oligonucleotide
ccccuggauuuugggccag

SEQ ID NO: 1483576 - RNA, 19 nt, Artificial Sequence
  Description of Artificial Sequence: Synthetic oligonucleotide
gcgcagaccagcugcccuu

SEQ ID NO: 1483577 - RNA, 19 nt, Artificial Sequence
  Description of Artificial Sequence: Synthetic oligonucleotide
cgucagggacuggcuguag

SEQ ID NO: 1483578 - RNA, 19 nt, Artificial Sequence
  Description of Artificial Sequence: Synthetic oligonucleotide
gggcgccgcgagcccaauc

SEQ ID NO: 1483579 - RNA, 19 nt, Artificial Sequence
  Description of Artificial Sequence: Synthetic oligonucleotide
caacgggcccugcgccccu

SEQ ID NO: 1483580 - RNA, 19 nt, Artificial Sequence
  Description of Artificial Sequence: Synthetic oligonucleotide
ccuccgguccgaagccacu

SEQ ID NO: 1483581 - RNA, 19 nt, Artificial Sequence
  Description of Artificial Sequence: Synthetic oligonucleotide
cccguccuacucuuacauu

SEQ ID NO: 1483582 - RNA, 19 nt, Artificial Sequence
  Description of Artificial Sequence: Synthetic oligonucleotide
cgcaggcaucaguccuuca

SEQ ID NO: 1483583 - RNA, 19 nt, Artificial Sequence
  Description of Artificial Sequence: Synthetic oligonucleotide
gccgcacggcucgcuguaa

SEQ ID NO: 1483584 - RNA, 19 nt, Artificial Sequence
  Description of Artificial Sequence: Synthetic oligonucleotide
ccgguccgaagccacuguu

SEQ ID NO: 1483585 - RNA, 19 nt, Artificial Sequence
  Description of Artificial Sequence: Synthetic oligonucleotide
gcaggccgcacggcucgcu

SEQ ID NO: 1483586 - RNA, 19 nt, Artificial Sequence
  Description of Artificial Sequence: Synthetic oligonucleotide
cgcgagcccaaucgcgccu

SEQ ID NO: 1483587 - RNA, 19 nt, Artificial Sequence
  Description of Artificial Sequence: Synthetic oligonucleotide
ccacgcuauggcagcucuu

SEQ ID NO: 1483588 - RNA, 19 nt, Artificial Sequence
  Description of Artificial Sequence: Synthetic oligonucleotide
cugcgccccuccgguggcu

SEQ ID NO: 1483589 - RNA, 19 nt, Artificial Sequence
  Description of Artificial Sequence: Synthetic oligonucleotide
ccccuccgguggcuauugu

SEQ ID NO: 1483590 - RNA, 19 nt, Artificial Sequence
  Description of Artificial Sequence: Synthetic oligonucleotide
ggggcgccgcgagcccaau

SEQ ID NO: 1483591 - RNA, 19 nt, Artificial Sequence
  Description of Artificial Sequence: Synthetic oligonucleotide
uaaaccauagacauuaaag

SEQ ID NO: 1483592 - RNA, 19 nt, Artificial Sequence
  Description of Artificial Sequence: Synthetic oligonucleotide
auaacuagccuccuaaacc

SEQ ID NO: 1483593 - RNA, 19 nt, Artificial Sequence
  Description of Artificial Sequence: Synthetic oligonucleotide
gauccuuuggaaaagagcg

SEQ ID NO: 1483594 - RNA, 19 nt, Artificial Sequence
  Description of Artificial Sequence: Synthetic oligonucleotide
aaaccauagacauuaaaga

SEQ ID NO: 1483595 - RNA, 19 nt, Artificial Sequence
  Description of Artificial Sequence: Synthetic oligonucleotide
uaagcuugcaucaucaccc

SEQ ID NO: 1483596 - RNA, 19 nt, Artificial Sequence
  Description of Artificial Sequence: Synthetic oligonucleotide
auagacauuaaagaagggc

SEQ ID NO: 1483597 - RNA, 19 nt, Artificial Sequence
  Description of Artificial Sequence: Synthetic oligonucleotide
aacguugacuucuaggauc

SEQ ID NO: 1483598 - RNA, 19 nt, Artificial Sequence
  Description of Artificial Sequence: Synthetic oligonucleotide
uccuaguuaaccuaggacc

SEQ ID NO: 1483599 - RNA, 19 nt, Artificial Sequence
  Description of Artificial Sequence: Synthetic oligonucleotide
aguuauaaaccauagacau

SEQ ID NO: 1483600 - RNA, 19 nt, Artificial Sequence
  Description of Artificial Sequence: Synthetic oligonucleotide
aacaggaggaaauacuaag

SEQ ID NO: 1483601 - RNA, 19 nt, Artificial Sequence
  Description of Artificial Sequence: Synthetic oligonucleotide
uucaaagugugauuguugg

SEQ ID NO: 1483602 - RNA, 19 nt, Artificial Sequence
  Description of Artificial Sequence: Synthetic oligonucleotide
auacguaugguucaaagug

SEQ ID NO: 1483603 - RNA, 19 nt, Artificial Sequence
  Description of Artificial Sequence: Synthetic oligonucleotide
gauaacguugacuucuagg

SEQ ID NO: 1483604 - RNA, 19 nt, Artificial Sequence
  Description of Artificial Sequence: Synthetic oligonucleotide
acagauagcagacacagcu

SEQ ID NO: 1483605 - RNA, 19 nt, Artificial Sequence
  Description of Artificial Sequence: Synthetic oligonucleotide
uuaaccuaggaccuucagg

SEQ ID NO: 1483606 - RNA, 19 nt, Artificial Sequence
  Description of Artificial Sequence: Synthetic oligonucleotide
auaacguugacuucuagga

SEQ ID NO: 1483607 - RNA, 19 nt, Artificial Sequence
  Description of Artificial Sequence: Synthetic oligonucleotide
ggaguuauaaaccauagac

SEQ ID NO: 1483608 - RNA, 19 nt, Artificial Sequence
  Description of Artificial Sequence: Synthetic oligonucleotide
aaacccgugacugaacacc

SEQ ID NO: 1483609 - RNA, 19 nt, Artificial Sequence
  Description of Artificial Sequence: Synthetic oligonucleotide
aaucaaucaauccucuccu

SEQ ID NO: 1483610 - RNA, 19 nt, Artificial Sequence
  Description of Artificial Sequence: Synthetic oligonucleotide
ucuucgaaaagacagccac

SEQ ID NO: 1483611 - RNA, 19 nt, Artificial Sequence
  Description of Artificial Sequence: Synthetic oligonucleotide
caaucaaucaauccucucc

SEQ ID NO: 1483612 - RNA, 19 nt, Artificial Sequence
  Description of Artificial Sequence: Synthetic oligonucleotide
ucugcuaucuggauaacgu

SEQ ID NO: 1483613 - RNA, 19 nt, Artificial Sequence
  Description of Artificial Sequence: Synthetic oligonucleotide
cuuccuauaggcuuguaug

SEQ ID NO: 1483614 - RNA, 19 nt, Artificial Sequence
  Description of Artificial Sequence: Synthetic oligonucleotide
ugauccuuuggaaaagagc

SEQ ID NO: 1483615 - RNA, 19 nt, Artificial Sequence
  Description of Artificial Sequence: Synthetic oligonucleotide
uuuucgcuggaaaaguccc

SEQ ID NO: 1483616 - RNA, 19 nt, Artificial Sequence
  Description of Artificial Sequence: Synthetic oligonucleotide
uauaacuagccuccuaaac

SEQ ID NO: 1483617 - RNA, 19 nt, Artificial Sequence
  Description of Artificial Sequence: Synthetic oligonucleotide
gaaaagagcguuucuaguc

SEQ ID NO: 1483618 - RNA, 19 nt, Artificial Sequence
  Description of Artificial Sequence: Synthetic oligonucleotide
ucaaucaaucaaucaauca

SEQ ID NO: 1483619 - RNA, 19 nt, Artificial Sequence
  Description of Artificial Sequence: Synthetic oligonucleotide
ucucuaaagcgccauauaa

SEQ ID NO: 1483620 - RNA, 19 nt, Artificial Sequence
  Description of Artificial Sequence: Synthetic oligonucleotide
caagauaccgguaaccaug

SEQ ID NO: 1483621 - RNA, 19 nt, Artificial Sequence
  Description of Artificial Sequence: Synthetic oligonucleotide
uaacuagccuccuaaacca

SEQ ID NO: 1483622 - RNA, 19 nt, Artificial Sequence
  Description of Artificial Sequence: Synthetic oligonucleotide
guguuuacaagaaaacccg

SEQ ID NO: 1483623 - RNA, 19 nt, Artificial Sequence
  Description of Artificial Sequence: Synthetic oligonucleotide
auugagcacauacguaugg

SEQ ID NO: 1483624 - RNA, 19 nt, Artificial Sequence
  Description of Artificial Sequence: Synthetic oligonucleotide
aaugggaauguaugcccgg

SEQ ID NO: 1483625 - RNA, 19 nt, Artificial Sequence
  Description of Artificial Sequence: Synthetic oligonucleotide
gauaccgguaaccauggug

SEQ ID NO: 1483626 - RNA, 19 nt, Artificial Sequence
  Description of Artificial Sequence: Synthetic oligonucleotide
uucugcacggcucacauaa

SEQ ID NO: 1483627 - RNA, 19 nt, Artificial Sequence
  Description of Artificial Sequence: Synthetic oligonucleotide
aaaacccgugacugaacac

SEQ ID NO: 1483628 - RNA, 19 nt, Artificial Sequence
  Description of Artificial Sequence: Synthetic oligonucleotide
uuccauugagcacauacgu

SEQ ID NO: 1483629 - RNA, 19 nt, Artificial Sequence
  Description of Artificial Sequence: Synthetic oligonucleotide
aggcucuucucacagauag

SEQ ID NO: 1483630 - RNA, 19 nt, Artificial Sequence
  Description of Artificial Sequence: Synthetic oligonucleotide
aagacuuagggcauccccg

SEQ ID NO: 1483631 - RNA, 19 nt, Artificial Sequence
  Description of Artificial Sequence: Synthetic oligonucleotide
guaucuguuuaucuggcag

SEQ ID NO: 1483632 - RNA, 19 nt, Artificial Sequence
  Description of Artificial Sequence: Synthetic oligonucleotide
agcguuucuagucccgugc

SEQ ID NO: 1483633 - RNA, 19 nt, Artificial Sequence
  Description of Artificial Sequence: Synthetic oligonucleotide
aacacucaggcuuuugccu

SEQ ID NO: 1483634 - RNA, 19 nt, Artificial Sequence
  Description of Artificial Sequence: Synthetic oligonucleotide
guuucaucagaugaguucc

SEQ ID NO: 1483635 - RNA, 19 nt, Artificial Sequence
  Description of Artificial Sequence: Synthetic oligonucleotide
caaagugugauuguuggag

SEQ ID NO: 1483636 - RNA, 19 nt, Artificial Sequence
  Description of Artificial Sequence: Synthetic oligonucleotide
uuucccgucacucuucaga

SEQ ID NO: 1483637 - RNA, 19 nt, Artificial Sequence
  Description of Artificial Sequence: Synthetic oligonucleotide
ugaaauaaccguaucuguu

SEQ ID NO: 1483638 - RNA, 19 nt, Artificial Sequence
  Description of Artificial Sequence: Synthetic oligonucleotide
uuacaagaaaacccgugac

SEQ ID NO: 1483639 - RNA, 19 nt, Artificial Sequence
  Description of Artificial Sequence: Synthetic oligonucleotide
uugaaggcucuucucacag

SEQ ID NO: 1483640 - RNA, 19 nt, Artificial Sequence
  Description of Artificial Sequence: Synthetic oligonucleotide
acauacguaugguucaaag

SEQ ID NO: 1483641 - RNA, 19 nt, Artificial Sequence
  Description of Artificial Sequence: Synthetic oligonucleotide
acaaugauccuuuggaaaa

SEQ ID NO: 1483642 - RNA, 19 nt, Artificial Sequence
  Description of Artificial Sequence: Synthetic oligonucleotide
ugagguuaagauugaaggu

SEQ ID NO: 1483643 - RNA, 19 nt, Artificial Sequence
  Description of Artificial Sequence: Synthetic oligonucleotide
acuaagucauuucaugccu

SEQ ID NO: 1483644 - RNA, 19 nt, Artificial Sequence
  Description of Artificial Sequence: Synthetic oligonucleotide
cuaagcuugcaucaucacc

SEQ ID NO: 1483645 - RNA, 19 nt, Artificial Sequence
  Description of Artificial Sequence: Synthetic oligonucleotide
gaagacuuagggcaucccc

SEQ ID NO: 1483646 - RNA, 19 nt, Artificial Sequence
  Description of Artificial Sequence: Synthetic oligonucleotide
aggacaucgaacacaaugg

SEQ ID NO: 1483647 - RNA, 19 nt, Artificial Sequence
  Description of Artificial Sequence: Synthetic oligonucleotide
uuccuauaggcuuguaugc

SEQ ID NO: 1483648 - RNA, 19 nt, Artificial Sequence
  Description of Artificial Sequence: Synthetic oligonucleotide
ggagcaauugacuuucccg

SEQ ID NO: 1483649 - RNA, 19 nt, Artificial Sequence
  Description of Artificial Sequence: Synthetic oligonucleotide
gaagguuucaucagaugag

SEQ ID NO: 1483650 - RNA, 19 nt, Artificial Sequence
  Description of Artificial Sequence: Synthetic oligonucleotide
gaagguuccauugagcaca

SEQ ID NO: 1483651 - RNA, 19 nt, Artificial Sequence
  Description of Artificial Sequence: Synthetic oligonucleotide
ugggacgucugcuaucugg

SEQ ID NO: 1483652 - RNA, 19 nt, Artificial Sequence
  Description of Artificial Sequence: Synthetic oligonucleotide
caaucaaucaaucaaucaa

SEQ ID NO: 1483653 - RNA, 19 nt, Artificial Sequence
  Description of Artificial Sequence: Synthetic oligonucleotide
uucagacacagugugugcg

SEQ ID NO: 1483654 - RNA, 19 nt, Artificial Sequence
  Description of Artificial Sequence: Synthetic oligonucleotide
ugaacaccgacccaguuuu

SEQ ID NO: 1483655 - RNA, 19 nt, Artificial Sequence
  Description of Artificial Sequence: Synthetic oligonucleotide
agccgauggagaucaaggc

SEQ ID NO: 1483656 - RNA, 19 nt, Artificial Sequence
  Description of Artificial Sequence: Synthetic oligonucleotide
ugggcuccuggucagaaag

SEQ ID NO: 1483657 - RNA, 19 nt, Artificial Sequence
  Description of Artificial Sequence: Synthetic oligonucleotide
aaagcgccauauaacuagc

SEQ ID NO: 1483658 - RNA, 19 nt, Artificial Sequence
  Description of Artificial Sequence: Synthetic oligonucleotide
ucaauccucuccuaguuaa

SEQ ID NO: 1483659 - RNA, 19 nt, Artificial Sequence
  Description of Artificial Sequence: Synthetic oligonucleotide
aucauagauauuuuacaau

SEQ ID NO: 1483660 - RNA, 19 nt, Artificial Sequence
  Description of Artificial Sequence: Synthetic oligonucleotide
uacguaugguucaaagugu

SEQ ID NO: 1483661 - RNA, 19 nt, Artificial Sequence
  Description of Artificial Sequence: Synthetic oligonucleotide
aggagcaauugacuuuccc

SEQ ID NO: 1483662 - RNA, 19 nt, Artificial Sequence
  Description of Artificial Sequence: Synthetic oligonucleotide
aaucugaucuguugucaca

SEQ ID NO: 1483663 - RNA, 19 nt, Artificial Sequence
  Description of Artificial Sequence: Synthetic oligonucleotide
gacaucgaacacaaugggg

SEQ ID NO: 1483664 - RNA, 19 nt, Artificial Sequence
  Description of Artificial Sequence: Synthetic oligonucleotide
ugauggugcaaacuucugu

SEQ ID NO: 1483665 - RNA, 19 nt, Artificial Sequence
  Description of Artificial Sequence: Synthetic oligonucleotide
aagauaccgguaaccaugg

SEQ ID NO: 1483666 - RNA, 19 nt, Artificial Sequence
  Description of Artificial Sequence: Synthetic oligonucleotide
ugacugaacaccgacccag

SEQ ID NO: 1483667 - RNA, 19 nt, Artificial Sequence
  Description of Artificial Sequence: Synthetic oligonucleotide
ugucuucgaaaagacagcc

SEQ ID NO: 1483668 - RNA, 19 nt, Artificial Sequence
  Description of Artificial Sequence: Synthetic oligonucleotide
aaauaaccguaucuguuua

SEQ ID NO: 1483669 - RNA, 19 nt, Artificial Sequence
  Description of Artificial Sequence: Synthetic oligonucleotide
gaguuauaaaccauagaca

SEQ ID NO: 1483670 - RNA, 19 nt, Artificial Sequence
  Description of Artificial Sequence: Synthetic oligonucleotide
aagaaggcugaagacuuag

SEQ ID NO: 1483671 - RNA, 19 nt, Artificial Sequence
  Description of Artificial Sequence: Synthetic oligonucleotide
uguuuacaagaaaacccgu

SEQ ID NO: 1483672 - RNA, 19 nt, Artificial Sequence
  Description of Artificial Sequence: Synthetic oligonucleotide
guacaugccagacccauug

SEQ ID NO: 1483673 - RNA, 19 nt, Artificial Sequence
  Description of Artificial Sequence: Synthetic oligonucleotide
uccuacuuacaacaguaaa

SEQ ID NO: 1483674 - RNA, 19 nt, Artificial Sequence
  Description of Artificial Sequence: Synthetic oligonucleotide
cugaucuguugucacauag

SEQ ID NO: 1483675 - RNA, 19 nt, Artificial Sequence
  Description of Artificial Sequence: Synthetic oligonucleotide
uucaugccuucucuaaagc

SEQ ID NO: 1483676 - RNA, 19 nt, Artificial Sequence
  Description of Artificial Sequence: Synthetic oligonucleotide
auaaccguaucuguuuauc

SEQ ID NO: 1483677 - RNA, 19 nt, Artificial Sequence
  Description of Artificial Sequence: Synthetic oligonucleotide
gacauuaaagaagggcuug

SEQ ID NO: 1483678 - RNA, 19 nt, Artificial Sequence
  Description of Artificial Sequence: Synthetic oligonucleotide
ugcacggugagguuaagau

SEQ ID NO: 1483679 - RNA, 19 nt, Artificial Sequence
  Description of Artificial Sequence: Synthetic oligonucleotide
ugaucuguugucacauaga

SEQ ID NO: 1483680 - RNA, 19 nt, Artificial Sequence
  Description of Artificial Sequence: Synthetic oligonucleotide
ccuuugaccaucuuccugg

SEQ ID NO: 1483681 - RNA, 19 nt, Artificial Sequence
  Description of Artificial Sequence: Synthetic oligonucleotide
ugaaguucacacaguacau

SEQ ID NO: 1483682 - RNA, 19 nt, Artificial Sequence
  Description of Artificial Sequence: Synthetic oligonucleotide
agucccgugcuucugcacg

SEQ ID NO: 1483683 - RNA, 19 nt, Artificial Sequence
  Description of Artificial Sequence: Synthetic oligonucleotide
uggaguuauaaaccauaga

SEQ ID NO: 1483684 - RNA, 19 nt, Artificial Sequence
  Description of Artificial Sequence: Synthetic oligonucleotide
aagaacggggccuuugcau

SEQ ID NO: 1483685 - RNA, 19 nt, Artificial Sequence
  Description of Artificial Sequence: Synthetic oligonucleotide
cauaaacacacuggagugg

SEQ ID NO: 1483686 - RNA, 19 nt, Artificial Sequence
  Description of Artificial Sequence: Synthetic oligonucleotide
gaaaacccgugacugaaca

SEQ ID NO: 1483687 - RNA, 19 nt, Artificial Sequence
  Description of Artificial Sequence: Synthetic oligonucleotide
uuaagauugaagguuccau

SEQ ID NO: 1483688 - RNA, 19 nt, Artificial Sequence
  Description of Artificial Sequence: Synthetic oligonucleotide
cucacauaaacacacugga

SEQ ID NO: 1483689 - RNA, 19 nt, Artificial Sequence
  Description of Artificial Sequence: Synthetic oligonucleotide
agacuuagggcauccccgg

SEQ ID NO: 1483690 - RNA, 19 nt, Artificial Sequence
  Description of Artificial Sequence: Synthetic oligonucleotide
ggaagguuucaucagauga

SEQ ID NO: 1483691 - RNA, 19 nt, Artificial Sequence
  Description of Artificial Sequence: Synthetic oligonucleotide
uggucacaaauauaggaau

SEQ ID NO: 1483692 - RNA, 19 nt, Artificial Sequence
  Description of Artificial Sequence: Synthetic oligonucleotide
guuccauugagcacauacg

SEQ ID NO: 1483693 - RNA, 19 nt, Artificial Sequence
  Description of Artificial Sequence: Synthetic oligonucleotide
ugacaaacaggcccaggca

SEQ ID NO: 1483694 - RNA, 19 nt, Artificial Sequence
  Description of Artificial Sequence: Synthetic oligonucleotide
uauaggcuuguaugccugg

SEQ ID NO: 1483695 - RNA, 19 nt, Artificial Sequence
  Description of Artificial Sequence: Synthetic oligonucleotide
caucagaugaguuccgguc

SEQ ID NO: 1483696 - RNA, 19 nt, Artificial Sequence
  Description of Artificial Sequence: Synthetic oligonucleotide
caucauagauauuuuacaa

SEQ ID NO: 1483697 - RNA, 19 nt, Artificial Sequence
  Description of Artificial Sequence: Synthetic oligonucleotide
cuacaauugugaugguggc

SEQ ID NO: 1483698 - RNA, 19 nt, Artificial Sequence
  Description of Artificial Sequence: Synthetic oligonucleotide
agcaauugacuuucccguc

SEQ ID NO: 1483699 - RNA, 19 nt, Artificial Sequence
  Description of Artificial Sequence: Synthetic oligonucleotide
agcagccggauccuucucc

SEQ ID NO: 1483700 - RNA, 19 nt, Artificial Sequence
  Description of Artificial Sequence: Synthetic oligonucleotide
ucuccuaguuaaccuagga

SEQ ID NO: 1483701 - RNA, 19 nt, Artificial Sequence
  Description of Artificial Sequence: Synthetic oligonucleotide
ggaaauggcagagucauug

SEQ ID NO: 1483702 - RNA, 19 nt, Artificial Sequence
  Description of Artificial Sequence: Synthetic oligonucleotide
acauuaaagaagggcuugg

SEQ ID NO: 1483703 - RNA, 19 nt, Artificial Sequence
  Description of Artificial Sequence: Synthetic oligonucleotide
uaaagaagggcuugguguu

SEQ ID NO: 1483704 - RNA, 19 nt, Artificial Sequence
  Description of Artificial Sequence: Synthetic oligonucleotide
uaaccguaucuguuuaucu

SEQ ID NO: 1483705 - RNA, 19 nt, Artificial Sequence
  Description of Artificial Sequence: Synthetic oligonucleotide
aauaaccguaucuguuuau

SEQ ID NO: 1483706 - RNA, 19 nt, Artificial Sequence
  Description of Artificial Sequence: Synthetic oligonucleotide
auaccgguaaccaugguga

SEQ ID NO: 1483707 - RNA, 19 nt, Artificial Sequence
  Description of Artificial Sequence: Synthetic oligonucleotide
gaucaaggcaccguuugcc

SEQ ID NO: 1483708 - RNA, 19 nt, Artificial Sequence
  Description of Artificial Sequence: Synthetic oligonucleotide
aaccaucauagauauuuua

SEQ ID NO: 1483709 - RNA, 19 nt, Artificial Sequence
  Description of Artificial Sequence: Synthetic oligonucleotide
uauuggcuguguuuacaag

SEQ ID NO: 1483710 - RNA, 19 nt, Artificial Sequence
  Description of Artificial Sequence: Synthetic oligonucleotide
caggaggaaauacuaaguc

SEQ ID NO: 1483711 - RNA, 19 nt, Artificial Sequence
  Description of Artificial Sequence: Synthetic oligonucleotide
agauugaagguuccauuga

SEQ ID NO: 1483712 - RNA, 19 nt, Artificial Sequence
  Description of Artificial Sequence: Synthetic oligonucleotide
guuuacaagaaaacccgug

SEQ ID NO: 1483713 - RNA, 19 nt, Artificial Sequence
  Description of Artificial Sequence: Synthetic oligonucleotide
uucuccggaagaacggggc

SEQ ID NO: 1483714 - RNA, 19 nt, Artificial Sequence
  Description of Artificial Sequence: Synthetic oligonucleotide
ugaccugauggccaagggu

SEQ ID NO: 1483715 - RNA, 19 nt, Artificial Sequence
  Description of Artificial Sequence: Synthetic oligonucleotide
cauugaaggcucuucucac

SEQ ID NO: 1483716 - RNA, 19 nt, Artificial Sequence
  Description of Artificial Sequence: Synthetic oligonucleotide
uuugcauggcugaggaaaa

SEQ ID NO: 1483717 - RNA, 19 nt, Artificial Sequence
  Description of Artificial Sequence: Synthetic oligonucleotide
aaccuaggaccuucaggag

SEQ ID NO: 1483718 - RNA, 19 nt, Artificial Sequence
  Description of Artificial Sequence: Synthetic oligonucleotide
ugugcguccuacuuacaac

SEQ ID NO: 1483719 - RNA, 19 nt, Artificial Sequence
  Description of Artificial Sequence: Synthetic oligonucleotide
acaaacaggaggaaauacu

SEQ ID NO: 1483720 - RNA, 19 nt, Artificial Sequence
  Description of Artificial Sequence: Synthetic oligonucleotide
guuuucgcuggaaaagucc

SEQ ID NO: 1483721 - RNA, 19 nt, Artificial Sequence
  Description of Artificial Sequence: Synthetic oligonucleotide
gauauuuuacaaugauccu

SEQ ID NO: 1483722 - RNA, 19 nt, Artificial Sequence
  Description of Artificial Sequence: Synthetic oligonucleotide
gaccugauggccaaggguc

SEQ ID NO: 1483723 - RNA, 19 nt, Artificial Sequence
  Description of Artificial Sequence: Synthetic oligonucleotide
aagcgccauauaacuagcc

SEQ ID NO: 1483724 - RNA, 19 nt, Artificial Sequence
  Description of Artificial Sequence: Synthetic oligonucleotide
ugaguuccggucauucuuc

SEQ ID NO: 1483725 - RNA, 19 nt, Artificial Sequence
  Description of Artificial Sequence: Synthetic oligonucleotide
aacccgugacugaacaccg

SEQ ID NO: 1483726 - RNA, 19 nt, Artificial Sequence
  Description of Artificial Sequence: Synthetic oligonucleotide
uucgaaaagacagccacuu

SEQ ID NO: 1483727 - RNA, 19 nt, Artificial Sequence
  Description of Artificial Sequence: Synthetic oligonucleotide
auggaguuauaaaccauag

SEQ ID NO: 1483728 - RNA, 19 nt, Artificial Sequence
  Description of Artificial Sequence: Synthetic oligonucleotide
gaacggggccuuugcaugg

SEQ ID NO: 1483729 - RNA, 19 nt, Artificial Sequence
  Description of Artificial Sequence: Synthetic oligonucleotide
agcgccauauaacuagccu

SEQ ID NO: 1483730 - RNA, 19 nt, Artificial Sequence
  Description of Artificial Sequence: Synthetic oligonucleotide
auugaaggcucuucucaca

SEQ ID NO: 1483731 - RNA, 19 nt, Artificial Sequence
  Description of Artificial Sequence: Synthetic oligonucleotide
gaugguggcucugaaauaa

SEQ ID NO: 1483732 - RNA, 19 nt, Artificial Sequence
  Description of Artificial Sequence: Synthetic oligonucleotide
uaugguucaaagugugauu

SEQ ID NO: 1483733 - RNA, 19 nt, Artificial Sequence
  Description of Artificial Sequence: Synthetic oligonucleotide
ucaucagaugaguuccggu

SEQ ID NO: 1483734 - RNA, 19 nt, Artificial Sequence
  Description of Artificial Sequence: Synthetic oligonucleotide
guaaccauggugacaaaca

SEQ ID NO: 1483735 - RNA, 19 nt, Artificial Sequence
  Description of Artificial Sequence: Synthetic oligonucleotide
gaaauaaccguaucuguuu

SEQ ID NO: 1483736 - RNA, 19 nt, Artificial Sequence
  Description of Artificial Sequence: Synthetic oligonucleotide
uaacguugacuucuaggau

SEQ ID NO: 1483737 - RNA, 19 nt, Artificial Sequence
  Description of Artificial Sequence: Synthetic oligonucleotide
gguuucaucagaugaguuc

SEQ ID NO: 1483738 - RNA, 19 nt, Artificial Sequence
  Description of Artificial Sequence: Synthetic oligonucleotide
gagcaauugacuuucccgu

SEQ ID NO: 1483739 - RNA, 19 nt, Artificial Sequence
  Description of Artificial Sequence: Synthetic oligonucleotide
ggacaucgaacacaauggg

SEQ ID NO: 1483740 - RNA, 19 nt, Artificial Sequence
  Description of Artificial Sequence: Synthetic oligonucleotide
acacacuggagugggcucc

SEQ ID NO: 1483741 - RNA, 19 nt, Artificial Sequence
  Description of Artificial Sequence: Synthetic oligonucleotide
augggaauguaugcccggc

SEQ ID NO: 1483742 - RNA, 19 nt, Artificial Sequence
  Description of Artificial Sequence: Synthetic oligonucleotide
aggcuuguaugccuggugu

SEQ ID NO: 1483743 - RNA, 19 nt, Artificial Sequence
  Description of Artificial Sequence: Synthetic oligonucleotide
augaccugauggccaaggg

SEQ ID NO: 1483744 - RNA, 19 nt, Artificial Sequence
  Description of Artificial Sequence: Synthetic oligonucleotide
guucaaagugugauuguug

SEQ ID NO: 1483745 - RNA, 19 nt, Artificial Sequence
  Description of Artificial Sequence: Synthetic oligonucleotide
uaggcuuguaugccuggug

SEQ ID NO: 1483746 - RNA, 19 nt, Artificial Sequence
  Description of Artificial Sequence: Synthetic oligonucleotide
uccauugagcacauacgua

SEQ ID NO: 1483747 - RNA, 19 nt, Artificial Sequence
  Description of Artificial Sequence: Synthetic oligonucleotide
aguuuucgcuggaaaaguc

SEQ ID NO: 1483748 - RNA, 19 nt, Artificial Sequence
  Description of Artificial Sequence: Synthetic oligonucleotide
ugggaauguaugcccggcc

SEQ ID NO: 1483749 - RNA, 19 nt, Artificial Sequence
  Description of Artificial Sequence: Synthetic oligonucleotide
ucuccggaagaacggggcc

SEQ ID NO: 1483750 - RNA, 19 nt, Artificial Sequence
  Description of Artificial Sequence: Synthetic oligonucleotide
gaaauggcagagucauuga

SEQ ID NO: 1483751 - RNA, 19 nt, Artificial Sequence
  Description of Artificial Sequence: Synthetic oligonucleotide
gaucuguugucacauagau

SEQ ID NO: 1483752 - RNA, 19 nt, Artificial Sequence
  Description of Artificial Sequence: Synthetic oligonucleotide
guuucuccggaagaacggg

SEQ ID NO: 1483753 - RNA, 19 nt, Artificial Sequence
  Description of Artificial Sequence: Synthetic oligonucleotide
gccuccuaaaccaucauag

SEQ ID NO: 1483754 - RNA, 19 nt, Artificial Sequence
  Description of Artificial Sequence: Synthetic oligonucleotide
guuaaccuaggaccuucag

SEQ ID NO: 1483755 - RNA, 19 nt, Artificial Sequence
  Description of Artificial Sequence: Synthetic oligonucleotide
gaggcucggucuuugccag

SEQ ID NO: 1483756 - RNA, 19 nt, Artificial Sequence
  Description of Artificial Sequence: Synthetic oligonucleotide
ucagacacagugugugcgu

SEQ ID NO: 1483757 - RNA, 19 nt, Artificial Sequence
  Description of Artificial Sequence: Synthetic oligonucleotide
guugacuucuaggaucccc

SEQ ID NO: 1483758 - RNA, 19 nt, Artificial Sequence
  Description of Artificial Sequence: Synthetic oligonucleotide
aaacaggaggaaauacuaa

SEQ ID NO: 1483759 - RNA, 19 nt, Artificial Sequence
  Description of Artificial Sequence: Synthetic oligonucleotide
uaggauccccucuacaauu

SEQ ID NO: 1483760 - RNA, 19 nt, Artificial Sequence
  Description of Artificial Sequence: Synthetic oligonucleotide
uucucuaaagcgccauaua

SEQ ID NO: 1483761 - RNA, 19 nt, Artificial Sequence
  Description of Artificial Sequence: Synthetic oligonucleotide
ucauauuggcuguguuuac

SEQ ID NO: 1483762 - RNA, 19 nt, Artificial Sequence
  Description of Artificial Sequence: Synthetic oligonucleotide
uggcucugaaauaaccgua

SEQ ID NO: 1483763 - RNA, 19 nt, Artificial Sequence
  Description of Artificial Sequence: Synthetic oligonucleotide
ucagaugaguuccggucau

SEQ ID NO: 1483764 - RNA, 19 nt, Artificial Sequence
  Description of Artificial Sequence: Synthetic oligonucleotide
acuucuaggauccccucua

SEQ ID NO: 1483765 - RNA, 19 nt, Artificial Sequence
  Description of Artificial Sequence: Synthetic oligonucleotide
gugcguccuacuuacaaca

SEQ ID NO: 1483766 - RNA, 19 nt, Artificial Sequence
  Description of Artificial Sequence: Synthetic oligonucleotide
ccguuugccauucucagag

SEQ ID NO: 1483767 - RNA, 19 nt, Artificial Sequence
  Description of Artificial Sequence: Synthetic oligonucleotide
uuucgcuggaaaagucccu

SEQ ID NO: 1483768 - RNA, 19 nt, Artificial Sequence
  Description of Artificial Sequence: Synthetic oligonucleotide
agcuccauggaguuauaaa

SEQ ID NO: 1483769 - RNA, 19 nt, Artificial Sequence
  Description of Artificial Sequence: Synthetic oligonucleotide
aauugugaugguggcucug

SEQ ID NO: 1483770 - RNA, 19 nt, Artificial Sequence
  Description of Artificial Sequence: Synthetic oligonucleotide
gguagggucagagaugaug

SEQ ID NO: 1483771 - RNA, 19 nt, Artificial Sequence
  Description of Artificial Sequence: Synthetic oligonucleotide
caugaccugauggccaagg

SEQ ID NO: 1483772 - RNA, 19 nt, Artificial Sequence
  Description of Artificial Sequence: Synthetic oligonucleotide
uuucuagucccgugcuucu

SEQ ID NO: 1483773 - RNA, 19 nt, Artificial Sequence
  Description of Artificial Sequence: Synthetic oligonucleotide
ugacccagacacugcagcu

SEQ ID NO: 1483774 - RNA, 19 nt, Artificial Sequence
  Description of Artificial Sequence: Synthetic oligonucleotide
aagucauuucaugccuucu

SEQ ID NO: 1483775 - RNA, 19 nt, Artificial Sequence
  Description of Artificial Sequence: Synthetic oligonucleotide
gucauauuggcuguguuua

SEQ ID NO: 1483776 - RNA, 19 nt, Artificial Sequence
  Description of Artificial Sequence: Synthetic oligonucleotide
gaauguaugcccggccgug

SEQ ID NO: 1483777 - RNA, 19 nt, Artificial Sequence
  Description of Artificial Sequence: Synthetic oligonucleotide
gucugcuaucuggauaacg

SEQ ID NO: 1483778 - RNA, 19 nt, Artificial Sequence
  Description of Artificial Sequence: Synthetic oligonucleotide
cucuccuaguuaaccuagg

SEQ ID NO: 1483779 - RNA, 19 nt, Artificial Sequence
  Description of Artificial Sequence: Synthetic oligonucleotide
caauugacuuucccgucac

SEQ ID NO: 1483780 - RNA, 19 nt, Artificial Sequence
  Description of Artificial Sequence: Synthetic oligonucleotide
uggggcggcuuccuauagg

SEQ ID NO: 1483781 - RNA, 19 nt, Artificial Sequence
  Description of Artificial Sequence: Synthetic oligonucleotide
gcaguuuucgcuggaaaag

SEQ ID NO: 1483782 - RNA, 19 nt, Artificial Sequence
  Description of Artificial Sequence: Synthetic oligonucleotide
aacggggccuuugcauggc

SEQ ID NO: 1483783 - RNA, 19 nt, Artificial Sequence
  Description of Artificial Sequence: Synthetic oligonucleotide
cauuucaugccuucucuaa

SEQ ID NO: 1483784 - RNA, 19 nt, Artificial Sequence
  Description of Artificial Sequence: Synthetic oligonucleotide
uaguuaaccuaggaccuuc

SEQ ID NO: 1483785 - RNA, 19 nt, Artificial Sequence
  Description of Artificial Sequence: Synthetic oligonucleotide
gaaagaaggcugaagacuu

SEQ ID NO: 1483786 - RNA, 19 nt, Artificial Sequence
  Description of Artificial Sequence: Synthetic oligonucleotide
caauggggaggucucuaag

SEQ ID NO: 1483787 - RNA, 19 nt, Artificial Sequence
  Description of Artificial Sequence: Synthetic oligonucleotide
auguaugcccggccguguc

SEQ ID NO: 1483788 - RNA, 19 nt, Artificial Sequence
  Description of Artificial Sequence: Synthetic oligonucleotide
ucgaaaagacagccacuuc

SEQ ID NO: 1483789 - RNA, 19 nt, Artificial Sequence
  Description of Artificial Sequence: Synthetic oligonucleotide
agugugugcguccuacuua

SEQ ID NO: 1483790 - RNA, 19 nt, Artificial Sequence
  Description of Artificial Sequence: Synthetic oligonucleotide
augauccuuuggaaaagag

SEQ ID NO: 1483791 - RNA, 19 nt, Artificial Sequence
  Description of Artificial Sequence: Synthetic oligonucleotide
uccucuccuaguuaaccua

SEQ ID NO: 1483792 - RNA, 19 nt, Artificial Sequence
  Description of Artificial Sequence: Synthetic oligonucleotide
gacacaaacaggaggaaau

SEQ ID NO: 1483793 - RNA, 19 nt, Artificial Sequence
  Description of Artificial Sequence: Synthetic oligonucleotide
uguaugcccggccgugucu

SEQ ID NO: 1483794 - RNA, 19 nt, Artificial Sequence
  Description of Artificial Sequence: Synthetic oligonucleotide
aauguaugcccggccgugu

SEQ ID NO: 1483795 - RNA, 19 nt, Artificial Sequence
  Description of Artificial Sequence: Synthetic oligonucleotide
gaagaacggggccuuugca

SEQ ID NO: 1483796 - RNA, 19 nt, Artificial Sequence
  Description of Artificial Sequence: Synthetic oligonucleotide
acugggacgucugcuaucu

SEQ ID NO: 1483797 - RNA, 19 nt, Artificial Sequence
  Description of Artificial Sequence: Synthetic oligonucleotide
gguuucuccggaagaacgg

SEQ ID NO: 1483798 - RNA, 19 nt, Artificial Sequence
  Description of Artificial Sequence: Synthetic oligonucleotide
cauugaggaaguggcuggg

SEQ ID NO: 1483799 - RNA, 19 nt, Artificial Sequence
  Description of Artificial Sequence: Synthetic oligonucleotide
gugucuucgaaaagacagc

SEQ ID NO: 1483800 - RNA, 19 nt, Artificial Sequence
  Description of Artificial Sequence: Synthetic oligonucleotide
guuaagauugaagguucca

SEQ ID NO: 1483801 - RNA, 19 nt, Artificial Sequence
  Description of Artificial Sequence: Synthetic oligonucleotide
cuggaaaagucccucagcu

SEQ ID NO: 1483802 - RNA, 19 nt, Artificial Sequence
  Description of Artificial Sequence: Synthetic oligonucleotide
acguaugguucaaagugug

SEQ ID NO: 1483803 - RNA, 19 nt, Artificial Sequence
  Description of Artificial Sequence: Synthetic oligonucleotide
uucgcuggaaaagucccuc

SEQ ID NO: 1483804 - RNA, 19 nt, Artificial Sequence
  Description of Artificial Sequence: Synthetic oligonucleotide
gcacggcucacauaaacac

SEQ ID NO: 1483805 - RNA, 19 nt, Artificial Sequence
  Description of Artificial Sequence: Synthetic oligonucleotide
guguuggaaggugaagggc

SEQ ID NO: 1483806 - RNA, 19 nt, Artificial Sequence
  Description of Artificial Sequence: Synthetic oligonucleotide
caccugagcaaugggaaug

SEQ ID NO: 1483807 - RNA, 19 nt, Artificial Sequence
  Description of Artificial Sequence: Synthetic oligonucleotide
cauacguaugguucaaagu

SEQ ID NO: 1483808 - RNA, 19 nt, Artificial Sequence
  Description of Artificial Sequence: Synthetic oligonucleotide
cgugacugaacaccgaccc

SEQ ID NO: 1483809 - RNA, 19 nt, Artificial Sequence
  Description of Artificial Sequence: Synthetic oligonucleotide
acaauggggaggucucuaa

SEQ ID NO: 1483810 - RNA, 19 nt, Artificial Sequence
  Description of Artificial Sequence: Synthetic oligonucleotide
ggaagaacggggccuuugc

SEQ ID NO: 1483811 - RNA, 19 nt, Artificial Sequence
  Description of Artificial Sequence: Synthetic oligonucleotide
uguuguccccaaaguucca

SEQ ID NO: 1483812 - RNA, 19 nt, Artificial Sequence
  Description of Artificial Sequence: Synthetic oligonucleotide
gcuguguuuacaagaaaac

SEQ ID NO: 1483813 - RNA, 19 nt, Artificial Sequence
  Description of Artificial Sequence: Synthetic oligonucleotide
ugaugguggcucugaaaua

SEQ ID NO: 1483814 - RNA, 19 nt, Artificial Sequence
  Description of Artificial Sequence: Synthetic oligonucleotide
ugugauuguuggagacaaa

SEQ ID NO: 1483815 - RNA, 19 nt, Artificial Sequence
  Description of Artificial Sequence: Synthetic oligonucleotide
gagcguuucuagucccgug

SEQ ID NO: 1483816 - RNA, 19 nt, Artificial Sequence
  Description of Artificial Sequence: Synthetic oligonucleotide
caauccucuccuaguuaac

SEQ ID NO: 1483817 - RNA, 19 nt, Artificial Sequence
  Description of Artificial Sequence: Synthetic oligonucleotide
guaggaaauggcagaguca

SEQ ID NO: 1483818 - RNA, 19 nt, Artificial Sequence
  Description of Artificial Sequence: Synthetic oligonucleotide
cgccauauaacuagccucc

SEQ ID NO: 1483819 - RNA, 19 nt, Artificial Sequence
  Description of Artificial Sequence: Synthetic oligonucleotide
gucccgugcuucugcacgg

SEQ ID NO: 1483820 - RNA, 19 nt, Artificial Sequence
  Description of Artificial Sequence: Synthetic oligonucleotide
cccaaaguuccacuuguag

SEQ ID NO: 1483821 - RNA, 19 nt, Artificial Sequence
  Description of Artificial Sequence: Synthetic oligonucleotide
ggggcggcuuccuauaggc

SEQ ID NO: 1483822 - RNA, 19 nt, Artificial Sequence
  Description of Artificial Sequence: Synthetic oligonucleotide
agcuugcaucaucacccag

SEQ ID NO: 1483823 - RNA, 19 nt, Artificial Sequence
  Description of Artificial Sequence: Synthetic oligonucleotide
aggucucuaaggaagguuu

SEQ ID NO: 1483824 - RNA, 19 nt, Artificial Sequence
  Description of Artificial Sequence: Synthetic oligonucleotide
agacagccacuuccaugac

SEQ ID NO: 1483825 - RNA, 19 nt, Artificial Sequence
  Description of Artificial Sequence: Synthetic oligonucleotide
cuucuaggauccccucuac

SEQ ID NO: 1483826 - RNA, 19 nt, Artificial Sequence
  Description of Artificial Sequence: Synthetic oligonucleotide
ugauggccaagggucauau

SEQ ID NO: 1483827 - RNA, 19 nt, Artificial Sequence
  Description of Artificial Sequence: Synthetic oligonucleotide
aggcagccgauggagauca

SEQ ID NO: 1483828 - RNA, 19 nt, Artificial Sequence
  Description of Artificial Sequence: Synthetic oligonucleotide
cccgucacucuucagacac

SEQ ID NO: 1483829 - RNA, 19 nt, Artificial Sequence
  Description of Artificial Sequence: Synthetic oligonucleotide
ggaggaaauacuaagucau

SEQ ID NO: 1483830 - RNA, 19 nt, Artificial Sequence
  Description of Artificial Sequence: Synthetic oligonucleotide
gguuaagauugaagguucc

SEQ ID NO: 1483831 - RNA, 19 nt, Artificial Sequence
  Description of Artificial Sequence: Synthetic oligonucleotide
cuccuaaaccaucauagau

SEQ ID NO: 1483832 - RNA, 19 nt, Artificial Sequence
  Description of Artificial Sequence: Synthetic oligonucleotide
gcaauugacuuucccguca

SEQ ID NO: 1483833 - RNA, 19 nt, Artificial Sequence
  Description of Artificial Sequence: Synthetic oligonucleotide
gcgccauauaacuagccuc

SEQ ID NO: 1483834 - RNA, 19 nt, Artificial Sequence
  Description of Artificial Sequence: Synthetic oligonucleotide
ggcuguguuuacaagaaaa

SEQ ID NO: 1483835 - RNA, 19 nt, Artificial Sequence
  Description of Artificial Sequence: Synthetic oligonucleotide
gugugcguccuacuuacaa

SEQ ID NO: 1483836 - RNA, 19 nt, Artificial Sequence
  Description of Artificial Sequence: Synthetic oligonucleotide
acagugugugcguccuacu

SEQ ID NO: 1483837 - RNA, 19 nt, Artificial Sequence
  Description of Artificial Sequence: Synthetic oligonucleotide
ccucuccuaguuaaccuag

SEQ ID NO: 1483838 - RNA, 19 nt, Artificial Sequence
  Description of Artificial Sequence: Synthetic oligonucleotide
ggaggcucggucuuugcca

SEQ ID NO: 1483839 - RNA, 19 nt, Artificial Sequence
  Description of Artificial Sequence: Synthetic oligonucleotide
agccuccuaaaccaucaua

SEQ ID NO: 1483840 - RNA, 19 nt, Artificial Sequence
  Description of Artificial Sequence: Synthetic oligonucleotide
ugugugcguccuacuuaca

SEQ ID NO: 1483841 - RNA, 19 nt, Artificial Sequence
  Description of Artificial Sequence: Synthetic oligonucleotide
ggcaguuuucgcuggaaaa

SEQ ID NO: 1483842 - RNA, 19 nt, Artificial Sequence
  Description of Artificial Sequence: Synthetic oligonucleotide
ccacuuguaggaaauggca

SEQ ID NO: 1483843 - RNA, 19 nt, Artificial Sequence
  Description of Artificial Sequence: Synthetic oligonucleotide
uugcacggugagguuaaga

SEQ ID NO: 1483844 - RNA, 19 nt, Artificial Sequence
  Description of Artificial Sequence: Synthetic oligonucleotide
ggaccuucaggagcaauug

SEQ ID NO: 1483845 - RNA, 19 nt, Artificial Sequence
  Description of Artificial Sequence: Synthetic oligonucleotide
auaggcuuguaugccuggu

SEQ ID NO: 1483846 - RNA, 19 nt, Artificial Sequence
  Description of Artificial Sequence: Synthetic oligonucleotide
aggaaaacacucaggcuuu

SEQ ID NO: 1483847 - RNA, 19 nt, Artificial Sequence
  Description of Artificial Sequence: Synthetic oligonucleotide
aggauccccucuacaauug

SEQ ID NO: 1483848 - RNA, 19 nt, Artificial Sequence
  Description of Artificial Sequence: Synthetic oligonucleotide
gccgauggagaucaaggca

SEQ ID NO: 1483849 - RNA, 19 nt, Artificial Sequence
  Description of Artificial Sequence: Synthetic oligonucleotide
uucuagucccgugcuucug

SEQ ID NO: 1483850 - RNA, 19 nt, Artificial Sequence
  Description of Artificial Sequence: Synthetic oligonucleotide
ggaaaagagcguuucuagu

SEQ ID NO: 1483851 - RNA, 19 nt, Artificial Sequence
  Description of Artificial Sequence: Synthetic oligonucleotide
agagcguuucuagucccgu

SEQ ID NO: 1483852 - RNA, 19 nt, Artificial Sequence
  Description of Artificial Sequence: Synthetic oligonucleotide
ucccgucacucuucagaca

SEQ ID NO: 1483853 - RNA, 19 nt, Artificial Sequence
  Description of Artificial Sequence: Synthetic oligonucleotide
ccuaaaccaucauagauau

SEQ ID NO: 1483854 - RNA, 19 nt, Artificial Sequence
  Description of Artificial Sequence: Synthetic oligonucleotide
aacuagccuccuaaaccau

SEQ ID NO: 1483855 - RNA, 19 nt, Artificial Sequence
  Description of Artificial Sequence: Synthetic oligonucleotide
ccguaucuguuuaucuggc

SEQ ID NO: 1483856 - RNA, 19 nt, Artificial Sequence
  Description of Artificial Sequence: Synthetic oligonucleotide
aguuaaccuaggaccuuca

SEQ ID NO: 1483857 - RNA, 19 nt, Artificial Sequence
  Description of Artificial Sequence: Synthetic oligonucleotide
ucugcacggcucacauaaa

SEQ ID NO: 1483858 - RNA, 19 nt, Artificial Sequence
  Description of Artificial Sequence: Synthetic oligonucleotide
uugcauggcugaggaaaac

SEQ ID NO: 1483859 - RNA, 19 nt, Artificial Sequence
  Description of Artificial Sequence: Synthetic oligonucleotide
uggugacaaacaggcccag

SEQ ID NO: 1483860 - RNA, 19 nt, Artificial Sequence
  Description of Artificial Sequence: Synthetic oligonucleotide
ccggucauucuucugggac

SEQ ID NO: 1483861 - RNA, 19 nt, Artificial Sequence
  Description of Artificial Sequence: Synthetic oligonucleotide
ucuguuuaucuggcaguuu

SEQ ID NO: 1483862 - RNA, 19 nt, Artificial Sequence
  Description of Artificial Sequence: Synthetic oligonucleotide
cuuucccgucacucuucag

SEQ ID NO: 1483863 - RNA, 19 nt, Artificial Sequence
  Description of Artificial Sequence: Synthetic oligonucleotide
cuucgaaaagacagccacu

SEQ ID NO: 1483864 - RNA, 19 nt, Artificial Sequence
  Description of Artificial Sequence: Synthetic oligonucleotide
gucuucgaaaagacagcca

SEQ ID NO: 1483865 - RNA, 19 nt, Artificial Sequence
  Description of Artificial Sequence: Synthetic oligonucleotide
gcuaagcuugcaucaucac

SEQ ID NO: 1483866 - RNA, 19 nt, Artificial Sequence
  Description of Artificial Sequence: Synthetic oligonucleotide
cagccggauccuucucccg

SEQ ID NO: 1483867 - RNA, 19 nt, Artificial Sequence
  Description of Artificial Sequence: Synthetic oligonucleotide
uagucccgugcuucugcac

SEQ ID NO: 1483868 - RNA, 19 nt, Artificial Sequence
  Description of Artificial Sequence: Synthetic oligonucleotide
ccuaguuaaccuaggaccu

SEQ ID NO: 1483869 - RNA, 19 nt, Artificial Sequence
  Description of Artificial Sequence: Synthetic oligonucleotide
agauaccgguaaccauggu

SEQ ID NO: 1483870 - RNA, 19 nt, Artificial Sequence
  Description of Artificial Sequence: Synthetic oligonucleotide
augcccggccgugucuucg

SEQ ID NO: 1483871 - RNA, 19 nt, Artificial Sequence
  Description of Artificial Sequence: Synthetic oligonucleotide
ugaggacaucgaacacaau

SEQ ID NO: 1483872 - RNA, 19 nt, Artificial Sequence
  Description of Artificial Sequence: Synthetic oligonucleotide
cagacacagugugugcguc

SEQ ID NO: 1483873 - RNA, 19 nt, Artificial Sequence
  Description of Artificial Sequence: Synthetic oligonucleotide
cuggggcggcuuccuauag

SEQ ID NO: 1483874 - RNA, 19 nt, Artificial Sequence
  Description of Artificial Sequence: Synthetic oligonucleotide
ggcaccguuugccauucuc

SEQ ID NO: 1483875 - RNA, 19 nt, Artificial Sequence
  Description of Artificial Sequence: Synthetic oligonucleotide
ccgugacugaacaccgacc

SEQ ID NO: 1483876 - RNA, 19 nt, Artificial Sequence
  Description of Artificial Sequence: Synthetic oligonucleotide
gcucugaaauaaccguauc

SEQ ID NO: 1483877 - RNA, 19 nt, Artificial Sequence
  Description of Artificial Sequence: Synthetic oligonucleotide
caagggucauauuggcugu

SEQ ID NO: 1483878 - RNA, 19 nt, Artificial Sequence
  Description of Artificial Sequence: Synthetic oligonucleotide
ggaaguggcugggaucaug

SEQ ID NO: 1483879 - RNA, 19 nt, Artificial Sequence
  Description of Artificial Sequence: Synthetic oligonucleotide
ggccgugucuucgaaaaga

SEQ ID NO: 1483880 - RNA, 19 nt, Artificial Sequence
  Description of Artificial Sequence: Synthetic oligonucleotide
cuaggauccccucuacaau

SEQ ID NO: 1483881 - RNA, 19 nt, Artificial Sequence
  Description of Artificial Sequence: Synthetic oligonucleotide
cuucucuaaagcgccauau

SEQ ID NO: 1483882 - RNA, 19 nt, Artificial Sequence
  Description of Artificial Sequence: Synthetic oligonucleotide
cauuaaagaagggcuuggu

SEQ ID NO: 1483883 - RNA, 19 nt, Artificial Sequence
  Description of Artificial Sequence: Synthetic oligonucleotide
cccgugacugaacaccgac

SEQ ID NO: 1483884 - RNA, 19 nt, Artificial Sequence
  Description of Artificial Sequence: Synthetic oligonucleotide
uccggaagaacggggccuu

SEQ ID NO: 1483885 - RNA, 19 nt, Artificial Sequence
  Description of Artificial Sequence: Synthetic oligonucleotide
agugggcuccuggucagaa

SEQ ID NO: 1483886 - RNA, 19 nt, Artificial Sequence
  Description of Artificial Sequence: Synthetic oligonucleotide
ggucauauuggcuguguuu

SEQ ID NO: 1483887 - RNA, 19 nt, Artificial Sequence
  Description of Artificial Sequence: Synthetic oligonucleotide
caguuuucgcuggaaaagu

SEQ ID NO: 1483888 - RNA, 19 nt, Artificial Sequence
  Description of Artificial Sequence: Synthetic oligonucleotide
gggacgucugcuaucugga

SEQ ID NO: 1483889 - RNA, 19 nt, Artificial Sequence
  Description of Artificial Sequence: Synthetic oligonucleotide
cguccuacuuacaacagua

SEQ ID NO: 1483890 - RNA, 19 nt, Artificial Sequence
  Description of Artificial Sequence: Synthetic oligonucleotide
cugaacaccgacccaguuu

SEQ ID NO: 1483891 - RNA, 19 nt, Artificial Sequence
  Description of Artificial Sequence: Synthetic oligonucleotide
acaguacaugccagaccca

SEQ ID NO: 1483892 - RNA, 19 nt, Artificial Sequence
  Description of Artificial Sequence: Synthetic oligonucleotide
gaggaaauacuaagucauu

SEQ ID NO: 1483893 - RNA, 19 nt, Artificial Sequence
  Description of Artificial Sequence: Synthetic oligonucleotide
gggcuaagcuugcaucauc

SEQ ID NO: 1483894 - RNA, 19 nt, Artificial Sequence
  Description of Artificial Sequence: Synthetic oligonucleotide
ccagacccauugaaggcuc

SEQ ID NO: 1483895 - RNA, 19 nt, Artificial Sequence
  Description of Artificial Sequence: Synthetic oligonucleotide
ccuccuaaaccaucauaga

SEQ ID NO: 1483896 - RNA, 19 nt, Artificial Sequence
  Description of Artificial Sequence: Synthetic oligonucleotide
aguacaugccagacccauu

SEQ ID NO: 1483897 - RNA, 19 nt, Artificial Sequence
  Description of Artificial Sequence: Synthetic oligonucleotide
gcggcuuccuauaggcuug

SEQ ID NO: 1483898 - RNA, 19 nt, Artificial Sequence
  Description of Artificial Sequence: Synthetic oligonucleotide
uaugcccggccgugucuuc

SEQ ID NO: 1483899 - RNA, 19 nt, Artificial Sequence
  Description of Artificial Sequence: Synthetic oligonucleotide
acggugagguuaagauuga

SEQ ID NO: 1483900 - RNA, 19 nt, Artificial Sequence
  Description of Artificial Sequence: Synthetic oligonucleotide
ggaauguaugcccggccgu

SEQ ID NO: 1483901 - RNA, 19 nt, Artificial Sequence
  Description of Artificial Sequence: Synthetic oligonucleotide
cuugcacggugagguuaag

SEQ ID NO: 1483902 - RNA, 19 nt, Artificial Sequence
  Description of Artificial Sequence: Synthetic oligonucleotide
agacccauugaaggcucuu

SEQ ID NO: 1483903 - RNA, 19 nt, Artificial Sequence
  Description of Artificial Sequence: Synthetic oligonucleotide
ccuauaggcuuguaugccu

SEQ ID NO: 1483904 - RNA, 19 nt, Artificial Sequence
  Description of Artificial Sequence: Synthetic oligonucleotide
uuccuggggcggcuuccua

SEQ ID NO: 1483905 - RNA, 19 nt, Artificial Sequence
  Description of Artificial Sequence: Synthetic oligonucleotide
ggcggcuuccuauaggcuu

SEQ ID NO: 1483906 - RNA, 19 nt, Artificial Sequence
  Description of Artificial Sequence: Synthetic oligonucleotide
ggcauccccggcuugcugu

SEQ ID NO: 1483907 - RNA, 19 nt, Artificial Sequence
  Description of Artificial Sequence: Synthetic oligonucleotide
cuuagggcauccccggcuu

SEQ ID NO: 1483908 - RNA, 19 nt, Artificial Sequence
  Description of Artificial Sequence: Synthetic oligonucleotide
caaggcaccguuugccauu

SEQ ID NO: 1483909 - RNA, 19 nt, Artificial Sequence
  Description of Artificial Sequence: Synthetic oligonucleotide
caguacaugccagacccau

SEQ ID NO: 1483910 - RNA, 19 nt, Artificial Sequence
  Description of Artificial Sequence: Synthetic oligonucleotide
cugggacgucugcuaucug

SEQ ID NO: 1483911 - RNA, 19 nt, Artificial Sequence
  Description of Artificial Sequence: Synthetic oligonucleotide
cauccccggcuugcugugc

SEQ ID NO: 1483912 - RNA, 19 nt, Artificial Sequence
  Description of Artificial Sequence: Synthetic oligonucleotide
agggcauccccggcuugcu

SEQ ID NO: 1483913 - RNA, 19 nt, Artificial Sequence
  Description of Artificial Sequence: Synthetic oligonucleotide
cacauacguaugguucaaa

SEQ ID NO: 1483914 - RNA, 19 nt, Artificial Sequence
  Description of Artificial Sequence: Synthetic oligonucleotide
ggcucugaaauaaccguau

SEQ ID NO: 1483915 - RNA, 19 nt, Artificial Sequence
  Description of Artificial Sequence: Synthetic oligonucleotide
ccgugcuucugcacggcuc

SEQ ID NO: 1483916 - RNA, 19 nt, Artificial Sequence
  Description of Artificial Sequence: Synthetic oligonucleotide
ccggccgugucuucgaaaa

SEQ ID NO: 1483917 - RNA, 19 nt, Artificial Sequence
  Description of Artificial Sequence: Synthetic oligonucleotide
guacagcaagauaccggua

SEQ ID NO: 1483918 - RNA, 19 nt, Artificial Sequence
  Description of Artificial Sequence: Synthetic oligonucleotide
cggucauucuucugggaca

SEQ ID NO: 1483919 - RNA, 19 nt, Artificial Sequence
  Description of Artificial Sequence: Synthetic oligonucleotide
ggucagaaagaaggcugaa

SEQ ID NO: 1483920 - RNA, 19 nt, Artificial Sequence
  Description of Artificial Sequence: Synthetic oligonucleotide
aggaaauggcagagucauu

SEQ ID NO: 1483921 - RNA, 19 nt, Artificial Sequence
  Description of Artificial Sequence: Synthetic oligonucleotide
gcuugcacggugagguuaa

SEQ ID NO: 1483922 - RNA, 19 nt, Artificial Sequence
  Description of Artificial Sequence: Synthetic oligonucleotide
ccgguuucuccggaagaac

SEQ ID NO: 1483923 - RNA, 19 nt, Artificial Sequence
  Description of Artificial Sequence: Synthetic oligonucleotide
cagugugugcguccuacuu

SEQ ID NO: 1483924 - RNA, 19 nt, Artificial Sequence
  Description of Artificial Sequence: Synthetic oligonucleotide
ccgugucuucgaaaagaca

SEQ ID NO: 1483925 - RNA, 19 nt, Artificial Sequence
  Description of Artificial Sequence: Synthetic oligonucleotide
acccgugacugaacaccga

SEQ ID NO: 1483926 - RNA, 19 nt, Artificial Sequence
  Description of Artificial Sequence: Synthetic oligonucleotide
cuccggaagaacggggccu

SEQ ID NO: 1483927 - RNA, 19 nt, Artificial Sequence
  Description of Artificial Sequence: Synthetic oligonucleotide
cagcuccauggaguuauaa

SEQ ID NO: 1483928 - RNA, 19 nt, Artificial Sequence
  Description of Artificial Sequence: Synthetic oligonucleotide
cuaguuaaccuaggaccuu

SEQ ID NO: 1483929 - RNA, 19 nt, Artificial Sequence
  Description of Artificial Sequence: Synthetic oligonucleotide
gauggccaagggucauauu

SEQ ID NO: 1483930 - RNA, 19 nt, Artificial Sequence
  Description of Artificial Sequence: Synthetic oligonucleotide
gggcauccccggcuugcug

SEQ ID NO: 1483931 - RNA, 19 nt, Artificial Sequence
  Description of Artificial Sequence: Synthetic oligonucleotide
gcguuucuagucccgugcu

SEQ ID NO: 1483932 - RNA, 19 nt, Artificial Sequence
  Description of Artificial Sequence: Synthetic oligonucleotide
gcacauacguaugguucaa

SEQ ID NO: 1483933 - RNA, 19 nt, Artificial Sequence
  Description of Artificial Sequence: Synthetic oligonucleotide
gcacggugagguuaagauu

SEQ ID NO: 1483934 - RNA, 19 nt, Artificial Sequence
  Description of Artificial Sequence: Synthetic oligonucleotide
cugauggccaagggucaua

SEQ ID NO: 1483935 - RNA, 19 nt, Artificial Sequence
  Description of Artificial Sequence: Synthetic oligonucleotide
aggcaccguuugccauucu

SEQ ID NO: 1483936 - RNA, 19 nt, Artificial Sequence
  Description of Artificial Sequence: Synthetic oligonucleotide
gcuuguaugccugguguuu

SEQ ID NO: 1483937 - RNA, 19 nt, Artificial Sequence
  Description of Artificial Sequence: Synthetic oligonucleotide
cagacccauugaaggcucu

SEQ ID NO: 1483938 - RNA, 19 nt, Artificial Sequence
  Description of Artificial Sequence: Synthetic oligonucleotide
ccauggaguuauaaaccau

SEQ ID NO: 1483939 - RNA, 19 nt, Artificial Sequence
  Description of Artificial Sequence: Synthetic oligonucleotide
cccggcuugcugugcagca

SEQ ID NO: 1483940 - RNA, 19 nt, Artificial Sequence
  Description of Artificial Sequence: Synthetic oligonucleotide
gggcuccuggucagaaaga

SEQ ID NO: 1483941 - RNA, 19 nt, Artificial Sequence
  Description of Artificial Sequence: Synthetic oligonucleotide
gggucauauuggcuguguu

SEQ ID NO: 1483942 - RNA, 19 nt, Artificial Sequence
  Description of Artificial Sequence: Synthetic oligonucleotide
gccaagggucauauuggcu

SEQ ID NO: 1483943 - RNA, 19 nt, Artificial Sequence
  Description of Artificial Sequence: Synthetic oligonucleotide
guaugcccggccgugucuu

SEQ ID NO: 1483944 - RNA, 19 nt, Artificial Sequence
  Description of Artificial Sequence: Synthetic oligonucleotide
ggacagagaucagggugcu

SEQ ID NO: 1483945 - RNA, 19 nt, Artificial Sequence
  Description of Artificial Sequence: Synthetic oligonucleotide
cccgguuucuccggaagaa

SEQ ID NO: 1483946 - RNA, 19 nt, Artificial Sequence
  Description of Artificial Sequence: Synthetic oligonucleotide
ggacgucugcuaucuggau

SEQ ID NO: 1483947 - RNA, 19 nt, Artificial Sequence
  Description of Artificial Sequence: Synthetic oligonucleotide
gccauauaacuagccuccu

SEQ ID NO: 1483948 - RNA, 19 nt, Artificial Sequence
  Description of Artificial Sequence: Synthetic oligonucleotide
agguagggucagagaugau

SEQ ID NO: 1483949 - RNA, 19 nt, Artificial Sequence
  Description of Artificial Sequence: Synthetic oligonucleotide
ccuggggcggcuuccuaua

SEQ ID NO: 1483950 - RNA, 19 nt, Artificial Sequence
  Description of Artificial Sequence: Synthetic oligonucleotide
ccgucacucuucagacaca

SEQ ID NO: 1483951 - RNA, 19 nt, Artificial Sequence
  Description of Artificial Sequence: Synthetic oligonucleotide
cagaugaguuccggucauu

SEQ ID NO: 1483952 - RNA, 19 nt, Artificial Sequence
  Description of Artificial Sequence: Synthetic oligonucleotide
cgucugcuaucuggauaac

SEQ ID NO: 1483953 - RNA, 19 nt, Artificial Sequence
  Description of Artificial Sequence: Synthetic oligonucleotide
cccggccgugucuucgaaa

SEQ ID NO: 1483954 - RNA, 19 nt, Artificial Sequence
  Description of Artificial Sequence: Synthetic oligonucleotide
gggcggcuuccuauaggcu

SEQ ID NO: 1483955 - RNA, 19 nt, Artificial Sequence
  Description of Artificial Sequence: Synthetic oligonucleotide
cccgugcuucugcacggcu

SEQ ID NO: 1483956 - RNA, 19 nt, Artificial Sequence
  Description of Artificial Sequence: Synthetic oligonucleotide
cguuucuagucccgugcuu

SEQ ID NO: 1483957 - RNA, 19 nt, Artificial Sequence
  Description of Artificial Sequence: Synthetic oligonucleotide
ggcagccgauggagaucaa

SEQ ID NO: 1483958 - RNA, 19 nt, Artificial Sequence
  Description of Artificial Sequence: Synthetic oligonucleotide
ccggaagaacggggccuuu

SEQ ID NO: 1483959 - RNA, 19 nt, Artificial Sequence
  Description of Artificial Sequence: Synthetic oligonucleotide
uuuuguuaagaaaacaacc

SEQ ID NO: 1483960 - RNA, 19 nt, Artificial Sequence
  Description of Artificial Sequence: Synthetic oligonucleotide
uaucguagagaucauggcg

SEQ ID NO: 1483961 - RNA, 19 nt, Artificial Sequence
  Description of Artificial Sequence: Synthetic oligonucleotide
acucauaggauucaaaaug

SEQ ID NO: 1483962 - RNA, 19 nt, Artificial Sequence
  Description of Artificial Sequence: Synthetic oligonucleotide
aguaguauggcucauugug

SEQ ID NO: 1483963 - RNA, 19 nt, Artificial Sequence
  Description of Artificial Sequence: Synthetic oligonucleotide
uuaccauuggguaagucag

SEQ ID NO: 1483964 - RNA, 19 nt, Artificial Sequence
  Description of Artificial Sequence: Synthetic oligonucleotide
gauaucguagagaucaugg

SEQ ID NO: 1483965 - RNA, 19 nt, Artificial Sequence
  Description of Artificial Sequence: Synthetic oligonucleotide
uuaaaaguggccacagugc

SEQ ID NO: 1483966 - RNA, 19 nt, Artificial Sequence
  Description of Artificial Sequence: Synthetic oligonucleotide
ucaaaauggggccaucagg

SEQ ID NO: 1483967 - RNA, 19 nt, Artificial Sequence
  Description of Artificial Sequence: Synthetic oligonucleotide
guuaaaaguggccacagug

SEQ ID NO: 1483968 - RNA, 19 nt, Artificial Sequence
  Description of Artificial Sequence: Synthetic oligonucleotide
cucauaggauucaaaaugg

SEQ ID NO: 1483969 - RNA, 19 nt, Artificial Sequence
  Description of Artificial Sequence: Synthetic oligonucleotide
cuugguaccucucugacag

SEQ ID NO: 1483970 - RNA, 19 nt, Artificial Sequence
  Description of Artificial Sequence: Synthetic oligonucleotide
aaauggggccaucaggagg

SEQ ID NO: 1483971 - RNA, 19 nt, Artificial Sequence
  Description of Artificial Sequence: Synthetic oligonucleotide
cauaggauucaaaaugggg

SEQ ID NO: 1483972 - RNA, 19 nt, Artificial Sequence
  Description of Artificial Sequence: Synthetic oligonucleotide
gaagucacggcagauaggg

SEQ ID NO: 1483973 - RNA, 19 nt, Artificial Sequence
  Description of Artificial Sequence: Synthetic oligonucleotide
cuugacaguacucuugucc

SEQ ID NO: 1483974 - RNA, 19 nt, Artificial Sequence
  Description of Artificial Sequence: Synthetic oligonucleotide
cauaggaguaguaguaugg

SEQ ID NO: 1483975 - RNA, 19 nt, Artificial Sequence
  Description of Artificial Sequence: Synthetic oligonucleotide
auaucguagagaucauggc

SEQ ID NO: 1483976 - RNA, 19 nt, Artificial Sequence
  Description of Artificial Sequence: Synthetic oligonucleotide
aacacggucccuuaguccu

SEQ ID NO: 1483977 - RNA, 19 nt, Artificial Sequence
  Description of Artificial Sequence: Synthetic oligonucleotide
uuccuaugagcgaacacgg

SEQ ID NO: 1483978 - RNA, 19 nt, Artificial Sequence
  Description of Artificial Sequence: Synthetic oligonucleotide
gaagcaaugggguaaguca

SEQ ID NO: 1483979 - RNA, 19 nt, Artificial Sequence
  Description of Artificial Sequence: Synthetic oligonucleotide
ucauaggauucaaaauggg

SEQ ID NO: 1483980 - RNA, 19 nt, Artificial Sequence
  Description of Artificial Sequence: Synthetic oligonucleotide
cuuccuaugagcgaacacg

SEQ ID NO: 1483981 - RNA, 19 nt, Artificial Sequence
  Description of Artificial Sequence: Synthetic oligonucleotide
aggaaggucguagauaucg

SEQ ID NO: 1483982 - RNA, 19 nt, Artificial Sequence
  Description of Artificial Sequence: Synthetic oligonucleotide
agggcgaggcuguagagcc

SEQ ID NO: 1483983 - RNA, 19 nt, Artificial Sequence
  Description of Artificial Sequence: Synthetic oligonucleotide
cuaugagcgaacacggucc

SEQ ID NO: 1483984 - RNA, 19 nt, Artificial Sequence
  Description of Artificial Sequence: Synthetic oligonucleotide
aguagaguguccauuaguc

SEQ ID NO: 1483985 - RNA, 19 nt, Artificial Sequence
  Description of Artificial Sequence: Synthetic oligonucleotide
ucguagauaucguagagau

SEQ ID NO: 1483986 - RNA, 19 nt, Artificial Sequence
  Description of Artificial Sequence: Synthetic oligonucleotide
ucaggaaggucguagauau

SEQ ID NO: 1483987 - RNA, 19 nt, Artificial Sequence
  Description of Artificial Sequence: Synthetic oligonucleotide
uuucucucuucccauacca

SEQ ID NO: 1483988 - RNA, 19 nt, Artificial Sequence
  Description of Artificial Sequence: Synthetic oligonucleotide
uuuggguuggaguauuaug

SEQ ID NO: 1483989 - RNA, 19 nt, Artificial Sequence
  Description of Artificial Sequence: Synthetic oligonucleotide
auacucauaggauucaaaa

SEQ ID NO: 1483990 - RNA, 19 nt, Artificial Sequence
  Description of Artificial Sequence: Synthetic oligonucleotide
auaggaguaguaguauggc

SEQ ID NO: 1483991 - RNA, 19 nt, Artificial Sequence
  Description of Artificial Sequence: Synthetic oligonucleotide
uugacaguacucuuguccu

SEQ ID NO: 1483992 - RNA, 19 nt, Artificial Sequence
  Description of Artificial Sequence: Synthetic oligonucleotide
gaguauuauggucccagcc

SEQ ID NO: 1483993 - RNA, 19 nt, Artificial Sequence
  Description of Artificial Sequence: Synthetic oligonucleotide
uuauggaaaguagugggca

SEQ ID NO: 1483994 - RNA, 19 nt, Artificial Sequence
  Description of Artificial Sequence: Synthetic oligonucleotide
aaggucguagauaucguag

SEQ ID NO: 1483995 - RNA, 19 nt, Artificial Sequence
  Description of Artificial Sequence: Synthetic oligonucleotide
agugaauguuccccuaguc

SEQ ID NO: 1483996 - RNA, 19 nt, Artificial Sequence
  Description of Artificial Sequence: Synthetic oligonucleotide
ggaauuugcacuugguacc

SEQ ID NO: 1483997 - RNA, 19 nt, Artificial Sequence
  Description of Artificial Sequence: Synthetic oligonucleotide
caaaauggggccaucagga

SEQ ID NO: 1483998 - RNA, 19 nt, Artificial Sequence
  Description of Artificial Sequence: Synthetic oligonucleotide
guaguaguauggcucauug

SEQ ID NO: 1483999 - RNA, 19 nt, Artificial Sequence
  Description of Artificial Sequence: Synthetic oligonucleotide
gagaucauggcgucguccc

SEQ ID NO: 1484000 - RNA, 19 nt, Artificial Sequence
  Description of Artificial Sequence: Synthetic oligonucleotide
uucacaagcgaggacaaga

SEQ ID NO: 1484001 - RNA, 19 nt, Artificial Sequence
  Description of Artificial Sequence: Synthetic oligonucleotide
ugugauacgcaugcucugg

SEQ ID NO: 1484002 - RNA, 19 nt, Artificial Sequence
  Description of Artificial Sequence: Synthetic oligonucleotide
aaguaccucauugguggcc

SEQ ID NO: 1484003 - RNA, 19 nt, Artificial Sequence
  Description of Artificial Sequence: Synthetic oligonucleotide
acagauuuccaggccaagc

SEQ ID NO: 1484004 - RNA, 19 nt, Artificial Sequence
  Description of Artificial Sequence: Synthetic oligonucleotide
agucacggcagauagggga

SEQ ID NO: 1484005 - RNA, 19 nt, Artificial Sequence
  Description of Artificial Sequence: Synthetic oligonucleotide
ugguaagugaauguucccc

SEQ ID NO: 1484006 - RNA, 19 nt, Artificial Sequence
  Description of Artificial Sequence: Synthetic oligonucleotide
ucaccauaggaguaguagu

SEQ ID NO: 1484007 - RNA, 19 nt, Artificial Sequence
  Description of Artificial Sequence: Synthetic oligonucleotide
ggccagauuauacucauag

SEQ ID NO: 1484008 - RNA, 19 nt, Artificial Sequence
  Description of Artificial Sequence: Synthetic oligonucleotide
uggaguauuauggucccag

SEQ ID NO: 1484009 - RNA, 19 nt, Artificial Sequence
  Description of Artificial Sequence: Synthetic oligonucleotide
auuauggucccagccuucc

SEQ ID NO: 1484010 - RNA, 19 nt, Artificial Sequence
  Description of Artificial Sequence: Synthetic oligonucleotide
ugugagucugggcaaugcc

SEQ ID NO: 1484011 - RNA, 19 nt, Artificial Sequence
  Description of Artificial Sequence: Synthetic oligonucleotide
cauuaguccugucagugug

SEQ ID NO: 1484012 - RNA, 19 nt, Artificial Sequence
  Description of Artificial Sequence: Synthetic oligonucleotide
gucagcaggggaaagaccc

SEQ ID NO: 1484013 - RNA, 19 nt, Artificial Sequence
  Description of Artificial Sequence: Synthetic oligonucleotide
cugggcgaugguuugagcc

SEQ ID NO: 1484014 - RNA, 19 nt, Artificial Sequence
  Description of Artificial Sequence: Synthetic oligonucleotide
uauacucauaggauucaaa

SEQ ID NO: 1484015 - RNA, 19 nt, Artificial Sequence
  Description of Artificial Sequence: Synthetic oligonucleotide
uacucauaggauucaaaau

SEQ ID NO: 1484016 - RNA, 19 nt, Artificial Sequence
  Description of Artificial Sequence: Synthetic oligonucleotide
cagaugacggaauuugcac

SEQ ID NO: 1484017 - RNA, 19 nt, Artificial Sequence
  Description of Artificial Sequence: Synthetic oligonucleotide
ucgggcaucaaauuucaaa

SEQ ID NO: 1484018 - RNA, 19 nt, Artificial Sequence
  Description of Artificial Sequence: Synthetic oligonucleotide
cucuccggcgcuuagggcc

SEQ ID NO: 1484019 - RNA, 19 nt, Artificial Sequence
  Description of Artificial Sequence: Synthetic oligonucleotide
caugguuaaaaguggccac

SEQ ID NO: 1484020 - RNA, 19 nt, Artificial Sequence
  Description of Artificial Sequence: Synthetic oligonucleotide
agaugacggaauuugcacu

SEQ ID NO: 1484021 - RNA, 19 nt, Artificial Sequence
  Description of Artificial Sequence: Synthetic oligonucleotide
ggugcaguggagcucaggg

SEQ ID NO: 1484022 - RNA, 19 nt, Artificial Sequence
  Description of Artificial Sequence: Synthetic oligonucleotide
guagaguguccauuagucc

SEQ ID NO: 1484023 - RNA, 19 nt, Artificial Sequence
  Description of Artificial Sequence: Synthetic oligonucleotide
uccuugacaguacucuugu

SEQ ID NO: 1484024 - RNA, 19 nt, Artificial Sequence
  Description of Artificial Sequence: Synthetic oligonucleotide
cuucccauaccagugcugg

SEQ ID NO: 1484025 - RNA, 19 nt, Artificial Sequence
  Description of Artificial Sequence: Synthetic oligonucleotide
gaacagagccuguggagcc

SEQ ID NO: 1484026 - RNA, 19 nt, Artificial Sequence
  Description of Artificial Sequence: Synthetic oligonucleotide
ugcagaugacggaauuugc

SEQ ID NO: 1484027 - RNA, 19 nt, Artificial Sequence
  Description of Artificial Sequence: Synthetic oligonucleotide
uauggaaaguagugggcac

SEQ ID NO: 1484028 - RNA, 19 nt, Artificial Sequence
  Description of Artificial Sequence: Synthetic oligonucleotide
uccacucguuuccugagca

SEQ ID NO: 1484029 - RNA, 19 nt, Artificial Sequence
  Description of Artificial Sequence: Synthetic oligonucleotide
ugcacuugguaccucucug

SEQ ID NO: 1484030 - RNA, 19 nt, Artificial Sequence
  Description of Artificial Sequence: Synthetic oligonucleotide
ucucucuucccauaccagu

SEQ ID NO: 1484031 - RNA, 19 nt, Artificial Sequence
  Description of Artificial Sequence: Synthetic oligonucleotide
gguuggaguauuauggucc

SEQ ID NO: 1484032 - RNA, 19 nt, Artificial Sequence
  Description of Artificial Sequence: Synthetic oligonucleotide
auuggguaagucagcaggg

SEQ ID NO: 1484033 - RNA, 19 nt, Artificial Sequence
  Description of Artificial Sequence: Synthetic oligonucleotide
guuggaguauuaugguccc

SEQ ID NO: 1484034 - RNA, 19 nt, Artificial Sequence
  Description of Artificial Sequence: Synthetic oligonucleotide
uaugagcgaacacgguccc

SEQ ID NO: 1484035 - RNA, 19 nt, Artificial Sequence
  Description of Artificial Sequence: Synthetic oligonucleotide
uucucucuucccauaccag

SEQ ID NO: 1484036 - RNA, 19 nt, Artificial Sequence
  Description of Artificial Sequence: Synthetic oligonucleotide
cuuggccugauuucggaac

SEQ ID NO: 1484037 - RNA, 19 nt, Artificial Sequence
  Description of Artificial Sequence: Synthetic oligonucleotide
uacagggcgaggcuguaga

SEQ ID NO: 1484038 - RNA, 19 nt, Artificial Sequence
  Description of Artificial Sequence: Synthetic oligonucleotide
gaacacggucccuuagucc

SEQ ID NO: 1484039 - RNA, 19 nt, Artificial Sequence
  Description of Artificial Sequence: Synthetic oligonucleotide
guauggcucauugugauuc

SEQ ID NO: 1484040 - RNA, 19 nt, Artificial Sequence
  Description of Artificial Sequence: Synthetic oligonucleotide
uggguaagucagcagggga

SEQ ID NO: 1484041 - RNA, 19 nt, Artificial Sequence
  Description of Artificial Sequence: Synthetic oligonucleotide
caggcauccaccucuccgg

SEQ ID NO: 1484042 - RNA, 19 nt, Artificial Sequence
  Description of Artificial Sequence: Synthetic oligonucleotide
ucuagcagucugcacucca

SEQ ID NO: 1484043 - RNA, 19 nt, Artificial Sequence
  Description of Artificial Sequence: Synthetic oligonucleotide
uugguaagugaauguuccc

SEQ ID NO: 1484044 - RNA, 19 nt, Artificial Sequence
  Description of Artificial Sequence: Synthetic oligonucleotide
ccagauuauacucauagga

SEQ ID NO: 1484045 - RNA, 19 nt, Artificial Sequence
  Description of Artificial Sequence: Synthetic oligonucleotide
auggcgucgucccuugggg

SEQ ID NO: 1484046 - RNA, 19 nt, Artificial Sequence
  Description of Artificial Sequence: Synthetic oligonucleotide
aguacucuuguccuaguuu

SEQ ID NO: 1484047 - RNA, 19 nt, Artificial Sequence
  Description of Artificial Sequence: Synthetic oligonucleotide
agaggcgugaucucugggu

SEQ ID NO: 1484048 - RNA, 19 nt, Artificial Sequence
  Description of Artificial Sequence: Synthetic oligonucleotide
uuggguaagucagcagggg

SEQ ID NO: 1484049 - RNA, 19 nt, Artificial Sequence
  Description of Artificial Sequence: Synthetic oligonucleotide
accucuccggcgcuuaggg

SEQ ID NO: 1484050 - RNA, 19 nt, Artificial Sequence
  Description of Artificial Sequence: Synthetic oligonucleotide
aaagccccuuucaggaagg

SEQ ID NO: 1484051 - RNA, 19 nt, Artificial Sequence
  Description of Artificial Sequence: Synthetic oligonucleotide
caagcgaggacaagaccag

SEQ ID NO: 1484052 - RNA, 19 nt, Artificial Sequence
  Description of Artificial Sequence: Synthetic oligonucleotide
cuaguucuugcugggauac

SEQ ID NO: 1484053 - RNA, 19 nt, Artificial Sequence
  Description of Artificial Sequence: Synthetic oligonucleotide
uccaacuuccuaugagcga

SEQ ID NO: 1484054 - RNA, 19 nt, Artificial Sequence
  Description of Artificial Sequence: Synthetic oligonucleotide
cugcccuacagauuuccag

SEQ ID NO: 1484055 - RNA, 19 nt, Artificial Sequence
  Description of Artificial Sequence: Synthetic oligonucleotide
ugggcgaugguuugagcca

SEQ ID NO: 1484056 - RNA, 19 nt, Artificial Sequence
  Description of Artificial Sequence: Synthetic oligonucleotide
gugauacgcaugcucuggg

SEQ ID NO: 1484057 - RNA, 19 nt, Artificial Sequence
  Description of Artificial Sequence: Synthetic oligonucleotide
gauacgcaugcucugggaa

SEQ ID NO: 1484058 - RNA, 19 nt, Artificial Sequence
  Description of Artificial Sequence: Synthetic oligonucleotide
gccccuuucaggaaggucg

SEQ ID NO: 1484059 - RNA, 19 nt, Artificial Sequence
  Description of Artificial Sequence: Synthetic oligonucleotide
agauaggggaccuccuccu

SEQ ID NO: 1484060 - RNA, 19 nt, Artificial Sequence
  Description of Artificial Sequence: Synthetic oligonucleotide
agcaaugggguaagucacc

SEQ ID NO: 1484061 - RNA, 19 nt, Artificial Sequence
  Description of Artificial Sequence: Synthetic oligonucleotide
ugauuucggaacugggcau

SEQ ID NO: 1484062 - RNA, 19 nt, Artificial Sequence
  Description of Artificial Sequence: Synthetic oligonucleotide
ucuuuccuugacaguacuc

SEQ ID NO: 1484063 - RNA, 19 nt, Artificial Sequence
  Description of Artificial Sequence: Synthetic oligonucleotide
cugaaggcucgugugaggc

SEQ ID NO: 1484064 - RNA, 19 nt, Artificial Sequence
  Description of Artificial Sequence: Synthetic oligonucleotide
aggaguaguucugggcccc

SEQ ID NO: 1484065 - RNA, 19 nt, Artificial Sequence
  Description of Artificial Sequence: Synthetic oligonucleotide
guaguucugggccccaaac

SEQ ID NO: 1484066 - RNA, 19 nt, Artificial Sequence
  Description of Artificial Sequence: Synthetic oligonucleotide
uacgcaugcucugggaagc

SEQ ID NO: 1484067 - RNA, 19 nt, Artificial Sequence
  Description of Artificial Sequence: Synthetic oligonucleotide
uugcacuugguaccucucu

SEQ ID NO: 1484068 - RNA, 19 nt, Artificial Sequence
  Description of Artificial Sequence: Synthetic oligonucleotide
cuguucacaagcgaggaca

SEQ ID NO: 1484069 - RNA, 19 nt, Artificial Sequence
  Description of Artificial Sequence: Synthetic oligonucleotide
cuccuuaccauuggguaag

SEQ ID NO: 1484070 - RNA, 19 nt, Artificial Sequence
  Description of Artificial Sequence: Synthetic oligonucleotide
uaguaguauggcucauugu

SEQ ID NO: 1484071 - RNA, 19 nt, Artificial Sequence
  Description of Artificial Sequence: Synthetic oligonucleotide
uggacuugugcuguucaca

SEQ ID NO: 1484072 - RNA, 19 nt, Artificial Sequence
  Description of Artificial Sequence: Synthetic oligonucleotide
cauggcgucgucccuuggg

SEQ ID NO: 1484073 - RNA, 19 nt, Artificial Sequence
  Description of Artificial Sequence: Synthetic oligonucleotide
uccccuagucuuuggguug

SEQ ID NO: 1484074 - RNA, 19 nt, Artificial Sequence
  Description of Artificial Sequence: Synthetic oligonucleotide
agcgaggacaagaccaggg

SEQ ID NO: 1484075 - RNA, 19 nt, Artificial Sequence
  Description of Artificial Sequence: Synthetic oligonucleotide
ucccuuaguccuuucuuuc

SEQ ID NO: 1484076 - RNA, 19 nt, Artificial Sequence
  Description of Artificial Sequence: Synthetic oligonucleotide
uggcauggcugugauacgc

SEQ ID NO: 1484077 - RNA, 19 nt, Artificial Sequence
  Description of Artificial Sequence: Synthetic oligonucleotide
cugaccgcccacuuucccc

SEQ ID NO: 1484078 - RNA, 19 nt, Artificial Sequence
  Description of Artificial Sequence: Synthetic oligonucleotide
ccugauuucggaacugggc

SEQ ID NO: 1484079 - RNA, 19 nt, Artificial Sequence
  Description of Artificial Sequence: Synthetic oligonucleotide
cauugugauuccugccaag

SEQ ID NO: 1484080 - RNA, 19 nt, Artificial Sequence
  Description of Artificial Sequence: Synthetic oligonucleotide
gauuccugccaagggcugg

SEQ ID NO: 1484081 - RNA, 19 nt, Artificial Sequence
  Description of Artificial Sequence: Synthetic oligonucleotide
ggccacuaguucuugcugg

SEQ ID NO: 1484082 - RNA, 19 nt, Artificial Sequence
  Description of Artificial Sequence: Synthetic oligonucleotide
ugaccgcccacuuucccca

SEQ ID NO: 1484083 - RNA, 19 nt, Artificial Sequence
  Description of Artificial Sequence: Synthetic oligonucleotide
ucgugugaggccuucucuc

SEQ ID NO: 1484084 - RNA, 19 nt, Artificial Sequence
  Description of Artificial Sequence: Synthetic oligonucleotide
ugggauacagggcgaggcu

SEQ ID NO: 1484085 - RNA, 19 nt, Artificial Sequence
  Description of Artificial Sequence: Synthetic oligonucleotide
cuagcagucugcacuccac

SEQ ID NO: 1484086 - RNA, 19 nt, Artificial Sequence
  Description of Artificial Sequence: Synthetic oligonucleotide
agauaucguagagaucaug

SEQ ID NO: 1484087 - RNA, 19 nt, Artificial Sequence
  Description of Artificial Sequence: Synthetic oligonucleotide
uuauggucccagccuuccc

SEQ ID NO: 1484088 - RNA, 19 nt, Artificial Sequence
  Description of Artificial Sequence: Synthetic oligonucleotide
acuugguaccucucugaca

SEQ ID NO: 1484089 - RNA, 19 nt, Artificial Sequence
  Description of Artificial Sequence: Synthetic oligonucleotide
ggucguagauaucguagag

SEQ ID NO: 1484090 - RNA, 19 nt, Artificial Sequence
  Description of Artificial Sequence: Synthetic oligonucleotide
ggcucauugugauuccugc

SEQ ID NO: 1484091 - RNA, 19 nt, Artificial Sequence
  Description of Artificial Sequence: Synthetic oligonucleotide
uucaggaaggucguagaua

SEQ ID NO: 1484092 - RNA, 19 nt, Artificial Sequence
  Description of Artificial Sequence: Synthetic oligonucleotide
aagcgaggacaagaccagg

SEQ ID NO: 1484093 - RNA, 19 nt, Artificial Sequence
  Description of Artificial Sequence: Synthetic oligonucleotide
augguuaaaaguggccaca

SEQ ID NO: 1484094 - RNA, 19 nt, Artificial Sequence
  Description of Artificial Sequence: Synthetic oligonucleotide
uuccccuagucuuuggguu

SEQ ID NO: 1484095 - RNA, 19 nt, Artificial Sequence
  Description of Artificial Sequence: Synthetic oligonucleotide
aacuuccuaugagcgaaca

SEQ ID NO: 1484096 - RNA, 19 nt, Artificial Sequence
  Description of Artificial Sequence: Synthetic oligonucleotide
acuaguucuugcugggaua

SEQ ID NO: 1484097 - RNA, 19 nt, Artificial Sequence
  Description of Artificial Sequence: Synthetic oligonucleotide
gguaagucaccauaggagu

SEQ ID NO: 1484098 - RNA, 19 nt, Artificial Sequence
  Description of Artificial Sequence: Synthetic oligonucleotide
augguuugagccagagcgg

SEQ ID NO: 1484099 - RNA, 19 nt, Artificial Sequence
  Description of Artificial Sequence: Synthetic oligonucleotide
cuccugaccgcccacuuuc

SEQ ID NO: 1484100 - RNA, 19 nt, Artificial Sequence
  Description of Artificial Sequence: Synthetic oligonucleotide
guaguauggcucauuguga

SEQ ID NO: 1484101 - RNA, 19 nt, Artificial Sequence
  Description of Artificial Sequence: Synthetic oligonucleotide
ucccuuugcagaugacgga

SEQ ID NO: 1484102 - RNA, 19 nt, Artificial Sequence
  Description of Artificial Sequence: Synthetic oligonucleotide
ugggaagcaaugggguaag

SEQ ID NO: 1484103 - RNA, 19 nt, Artificial Sequence
  Description of Artificial Sequence: Synthetic oligonucleotide
aacugggcauucuguucca

SEQ ID NO: 1484104 - RNA, 19 nt, Artificial Sequence
  Description of Artificial Sequence: Synthetic oligonucleotide
gaaggucguagauaucgua

SEQ ID NO: 1484105 - RNA, 19 nt, Artificial Sequence
  Description of Artificial Sequence: Synthetic oligonucleotide
caccuuugaggaagucacg

SEQ ID NO: 1484106 - RNA, 19 nt, Artificial Sequence
  Description of Artificial Sequence: Synthetic oligonucleotide
ccaggguuugcucagucgc

SEQ ID NO: 1484107 - RNA, 19 nt, Artificial Sequence
  Description of Artificial Sequence: Synthetic oligonucleotide
aggcgugaucucuggguuc

SEQ ID NO: 1484108 - RNA, 19 nt, Artificial Sequence
  Description of Artificial Sequence: Synthetic oligonucleotide
uccuaugagcgaacacggu

SEQ ID NO: 1484109 - RNA, 19 nt, Artificial Sequence
  Description of Artificial Sequence: Synthetic oligonucleotide
cugugauacgcaugcucug

SEQ ID NO: 1484110 - RNA, 19 nt, Artificial Sequence
  Description of Artificial Sequence: Synthetic oligonucleotide
agaguguccauuaguccug

SEQ ID NO: 1484111 - RNA, 19 nt, Artificial Sequence
  Description of Artificial Sequence: Synthetic oligonucleotide
gaugacggaauuugcacuu

SEQ ID NO: 1484112 - RNA, 19 nt, Artificial Sequence
  Description of Artificial Sequence: Synthetic oligonucleotide
ugagcauggcauucuccuc

SEQ ID NO: 1484113 - RNA, 19 nt, Artificial Sequence
  Description of Artificial Sequence: Synthetic oligonucleotide
auggaaaguagugggcacu

SEQ ID NO: 1484114 - RNA, 19 nt, Artificial Sequence
  Description of Artificial Sequence: Synthetic oligonucleotide
agcgaacacggucccuuag

SEQ ID NO: 1484115 - RNA, 19 nt, Artificial Sequence
  Description of Artificial Sequence: Synthetic oligonucleotide
aggauucaaaauggggcca

SEQ ID NO: 1484116 - RNA, 19 nt, Artificial Sequence
  Description of Artificial Sequence: Synthetic oligonucleotide
ugacagggaguagaguguc

SEQ ID NO: 1484117 - RNA, 19 nt, Artificial Sequence
  Description of Artificial Sequence: Synthetic oligonucleotide
cacucguuuccugagcaug

SEQ ID NO: 1484118 - RNA, 19 nt, Artificial Sequence
  Description of Artificial Sequence: Synthetic oligonucleotide
gaguagaguguccauuagu

SEQ ID NO: 1484119 - RNA, 19 nt, Artificial Sequence
  Description of Artificial Sequence: Synthetic oligonucleotide
uagauaucguagagaucau

SEQ ID NO: 1484120 - RNA, 19 nt, Artificial Sequence
  Description of Artificial Sequence: Synthetic oligonucleotide
ccuaugagcgaacacgguc

SEQ ID NO: 1484121 - RNA, 19 nt, Artificial Sequence
  Description of Artificial Sequence: Synthetic oligonucleotide
caccauaggaguaguagua

SEQ ID NO: 1484122 - RNA, 19 nt, Artificial Sequence
  Description of Artificial Sequence: Synthetic oligonucleotide
ggaguagaguguccauuag

SEQ ID NO: 1484123 - RNA, 19 nt, Artificial Sequence
  Description of Artificial Sequence: Synthetic oligonucleotide
aucauggcgucgucccuug

SEQ ID NO: 1484124 - RNA, 19 nt, Artificial Sequence
  Description of Artificial Sequence: Synthetic oligonucleotide
guaagucagcaggggaaag

SEQ ID NO: 1484125 - RNA, 19 nt, Artificial Sequence
  Description of Artificial Sequence: Synthetic oligonucleotide
aaccaucugaaggcucgug

SEQ ID NO: 1484126 - RNA, 19 nt, Artificial Sequence
  Description of Artificial Sequence: Synthetic oligonucleotide
acagggcgaggcuguagag

SEQ ID NO: 1484127 - RNA, 19 nt, Artificial Sequence
  Description of Artificial Sequence: Synthetic oligonucleotide
guacucuuguccuaguuuu

SEQ ID NO: 1484128 - RNA, 19 nt, Artificial Sequence
  Description of Artificial Sequence: Synthetic oligonucleotide
gucguagauaucguagaga

SEQ ID NO: 1484129 - RNA, 19 nt, Artificial Sequence
  Description of Artificial Sequence: Synthetic oligonucleotide
gccagagcggcugacagag

SEQ ID NO: 1484130 - RNA, 19 nt, Artificial Sequence
  Description of Artificial Sequence: Synthetic oligonucleotide
ggaguauuauggucccagc

SEQ ID NO: 1484131 - RNA, 19 nt, Artificial Sequence
  Description of Artificial Sequence: Synthetic oligonucleotide
cucggacgcugugacaggg

SEQ ID NO: 1484132 - RNA, 19 nt, Artificial Sequence
  Description of Artificial Sequence: Synthetic oligonucleotide
ucuccggcgcuuagggccu

SEQ ID NO: 1484133 - RNA, 19 nt, Artificial Sequence
  Description of Artificial Sequence: Synthetic oligonucleotide
accauaggaguaguaguau

SEQ ID NO: 1484134 - RNA, 19 nt, Artificial Sequence
  Description of Artificial Sequence: Synthetic oligonucleotide
gugagucugggcaaugcca

SEQ ID NO: 1484135 - RNA, 19 nt, Artificial Sequence
  Description of Artificial Sequence: Synthetic oligonucleotide
ucuuuggguuggaguauua

SEQ ID NO: 1484136 - RNA, 19 nt, Artificial Sequence
  Description of Artificial Sequence: Synthetic oligonucleotide
aguauggcucauugugauu

SEQ ID NO: 1484137 - RNA, 19 nt, Artificial Sequence
  Description of Artificial Sequence: Synthetic oligonucleotide
ccauaggaguaguaguaug

SEQ ID NO: 1484138 - RNA, 19 nt, Artificial Sequence
  Description of Artificial Sequence: Synthetic oligonucleotide
cacugcccuacagauuucc

SEQ ID NO: 1484139 - RNA, 19 nt, Artificial Sequence
  Description of Artificial Sequence: Synthetic oligonucleotide
ggugccauacccugggcga

SEQ ID NO: 1484140 - RNA, 19 nt, Artificial Sequence
  Description of Artificial Sequence: Synthetic oligonucleotide
gcucauugugauuccugcc

SEQ ID NO: 1484141 - RNA, 19 nt, Artificial Sequence
  Description of Artificial Sequence: Synthetic oligonucleotide
aguguccauuaguccuguc

SEQ ID NO: 1484142 - RNA, 19 nt, Artificial Sequence
  Description of Artificial Sequence: Synthetic oligonucleotide
uccugaccgcccacuuucc

SEQ ID NO: 1484143 - RNA, 19 nt, Artificial Sequence
  Description of Artificial Sequence: Synthetic oligonucleotide
guggcauggcugugauacg

SEQ ID NO: 1484144 - RNA, 19 nt, Artificial Sequence
  Description of Artificial Sequence: Synthetic oligonucleotide
gguaagugaauguuccccu

SEQ ID NO: 1484145 - RNA, 19 nt, Artificial Sequence
  Description of Artificial Sequence: Synthetic oligonucleotide
ucauggcgucgucccuugg

SEQ ID NO: 1484146 - RNA, 19 nt, Artificial Sequence
  Description of Artificial Sequence: Synthetic oligonucleotide
cucuucuagcagucugcac

SEQ ID NO: 1484147 - RNA, 19 nt, Artificial Sequence
  Description of Artificial Sequence: Synthetic oligonucleotide
caacuuccuaugagcgaac

SEQ ID NO: 1484148 - RNA, 19 nt, Artificial Sequence
  Description of Artificial Sequence: Synthetic oligonucleotide
guauuauggucccagccuu

SEQ ID NO: 1484149 - RNA, 19 nt, Artificial Sequence
  Description of Artificial Sequence: Synthetic oligonucleotide
ccuuucaggaaggucguag

SEQ ID NO: 1484150 - RNA, 19 nt, Artificial Sequence
  Description of Artificial Sequence: Synthetic oligonucleotide
ggacuugugcuguucacaa

SEQ ID NO: 1484151 - RNA, 19 nt, Artificial Sequence
  Description of Artificial Sequence: Synthetic oligonucleotide
ggcugugauacgcaugcuc

SEQ ID NO: 1484152 - RNA, 19 nt, Artificial Sequence
  Description of Artificial Sequence: Synthetic oligonucleotide
uagagaucauggcgucguc

SEQ ID NO: 1484153 - RNA, 19 nt, Artificial Sequence
  Description of Artificial Sequence: Synthetic oligonucleotide
gauucaaaauggggccauc

SEQ ID NO: 1484154 - RNA, 19 nt, Artificial Sequence
  Description of Artificial Sequence: Synthetic oligonucleotide
ugguccucaaagccccuuu

SEQ ID NO: 1484155 - RNA, 19 nt, Artificial Sequence
  Description of Artificial Sequence: Synthetic oligonucleotide
guagugggcacugcccuac

SEQ ID NO: 1484156 - RNA, 19 nt, Artificial Sequence
  Description of Artificial Sequence: Synthetic oligonucleotide
ggaagcaaugggguaaguc

SEQ ID NO: 1484157 - RNA, 19 nt, Artificial Sequence
  Description of Artificial Sequence: Synthetic oligonucleotide
ucggacgcugugacaggga

SEQ ID NO: 1484158 - RNA, 19 nt, Artificial Sequence
  Description of Artificial Sequence: Synthetic oligonucleotide
uaccucauugguggccagc

SEQ ID NO: 1484159 - RNA, 19 nt, Artificial Sequence
  Description of Artificial Sequence: Synthetic oligonucleotide
augacggaauuugcacuug

SEQ ID NO: 1484160 - RNA, 19 nt, Artificial Sequence
  Description of Artificial Sequence: Synthetic oligonucleotide
cagggcgaggcuguagagc

SEQ ID NO: 1484161 - RNA, 19 nt, Artificial Sequence
  Description of Artificial Sequence: Synthetic oligonucleotide
cagcccagcggccacuuuc

SEQ ID NO: 1484162 - RNA, 19 nt, Artificial Sequence
  Description of Artificial Sequence: Synthetic oligonucleotide
gcccuacagauuuccaggc

SEQ ID NO: 1484163 - RNA, 19 nt, Artificial Sequence
  Description of Artificial Sequence: Synthetic oligonucleotide
uucuagcagucugcacucc

SEQ ID NO: 1484164 - RNA, 19 nt, Artificial Sequence
  Description of Artificial Sequence: Synthetic oligonucleotide
uggugcaguggagcucagg

SEQ ID NO: 1484165 - RNA, 19 nt, Artificial Sequence
  Description of Artificial Sequence: Synthetic oligonucleotide
cagcaggggaaagacccag

SEQ ID NO: 1484166 - RNA, 19 nt, Artificial Sequence
  Description of Artificial Sequence: Synthetic oligonucleotide
aguagugggcacugcccua

SEQ ID NO: 1484167 - RNA, 19 nt, Artificial Sequence
  Description of Artificial Sequence: Synthetic oligonucleotide
uuggaguauuaugguccca

SEQ ID NO: 1484168 - RNA, 19 nt, Artificial Sequence
  Description of Artificial Sequence: Synthetic oligonucleotide
uggcgucgucccuugggga

SEQ ID NO: 1484169 - RNA, 19 nt, Artificial Sequence
  Description of Artificial Sequence: Synthetic oligonucleotide
gcagaugacggaauuugca

SEQ ID NO: 1484170 - RNA, 19 nt, Artificial Sequence
  Description of Artificial Sequence: Synthetic oligonucleotide
gggaguagaguguccauua

SEQ ID NO: 1484171 - RNA, 19 nt, Artificial Sequence
  Description of Artificial Sequence: Synthetic oligonucleotide
guucacaagcgaggacaag

SEQ ID NO: 1484172 - RNA, 19 nt, Artificial Sequence
  Description of Artificial Sequence: Synthetic oligonucleotide
ggaagucacggcagauagg

SEQ ID NO: 1484173 - RNA, 19 nt, Artificial Sequence
  Description of Artificial Sequence: Synthetic oligonucleotide
ggcacugcccuacagauuu

SEQ ID NO: 1484174 - RNA, 19 nt, Artificial Sequence
  Description of Artificial Sequence: Synthetic oligonucleotide
ccaugguuaaaaguggcca

SEQ ID NO: 1484175 - RNA, 19 nt, Artificial Sequence
  Description of Artificial Sequence: Synthetic oligonucleotide
gccaugguuaaaaguggcc

SEQ ID NO: 1484176 - RNA, 19 nt, Artificial Sequence
  Description of Artificial Sequence: Synthetic oligonucleotide
uggccugauuucggaacug

SEQ ID NO: 1484177 - RNA, 19 nt, Artificial Sequence
  Description of Artificial Sequence: Synthetic oligonucleotide
guuccccuagucuuugggu

SEQ ID NO: 1484178 - RNA, 19 nt, Artificial Sequence
  Description of Artificial Sequence: Synthetic oligonucleotide
caucuccaacuuccuauga

SEQ ID NO: 1484179 - RNA, 19 nt, Artificial Sequence
  Description of Artificial Sequence: Synthetic oligonucleotide
guaccucauugguggccag

SEQ ID NO: 1484180 - RNA, 19 nt, Artificial Sequence
  Description of Artificial Sequence: Synthetic oligonucleotide
aggggcccaggaguaguuc

SEQ ID NO: 1484181 - RNA, 19 nt, Artificial Sequence
  Description of Artificial Sequence: Synthetic oligonucleotide
gaggcgugaucucuggguu

SEQ ID NO: 1484182 - RNA, 19 nt, Artificial Sequence
  Description of Artificial Sequence: Synthetic oligonucleotide
gcugugauacgcaugcucu

SEQ ID NO: 1484183 - RNA, 19 nt, Artificial Sequence
  Description of Artificial Sequence: Synthetic oligonucleotide
cgugugaggccuucucucc

SEQ ID NO: 1484184 - RNA, 19 nt, Artificial Sequence
  Description of Artificial Sequence: Synthetic oligonucleotide
gguaagucagcaggggaaa

SEQ ID NO: 1484185 - RNA, 19 nt, Artificial Sequence
  Description of Artificial Sequence: Synthetic oligonucleotide
cccuacagauuuccaggcc

SEQ ID NO: 1484186 - RNA, 19 nt, Artificial Sequence
  Description of Artificial Sequence: Synthetic oligonucleotide
gcuguucacaagcgaggac

SEQ ID NO: 1484187 - RNA, 19 nt, Artificial Sequence
  Description of Artificial Sequence: Synthetic oligonucleotide
gcgaggacaagaccaggga

SEQ ID NO: 1484188 - RNA, 19 nt, Artificial Sequence
  Description of Artificial Sequence: Synthetic oligonucleotide
aagccccuuucaggaaggu

SEQ ID NO: 1484189 - RNA, 19 nt, Artificial Sequence
  Description of Artificial Sequence: Synthetic oligonucleotide
caggaaggucguagauauc

SEQ ID NO: 1484190 - RNA, 19 nt, Artificial Sequence
  Description of Artificial Sequence: Synthetic oligonucleotide
acggucccuuaguccuuuc

SEQ ID NO: 1484191 - RNA, 19 nt, Artificial Sequence
  Description of Artificial Sequence: Synthetic oligonucleotide
cacuaguucuugcugggau

SEQ ID NO: 1484192 - RNA, 19 nt, Artificial Sequence
  Description of Artificial Sequence: Synthetic oligonucleotide
uccuuaccauuggguaagu

SEQ ID NO: 1484193 - RNA, 19 nt, Artificial Sequence
  Description of Artificial Sequence: Synthetic oligonucleotide
acggcagauaggggaccuc

SEQ ID NO: 1484194 - RNA, 19 nt, Artificial Sequence
  Description of Artificial Sequence: Synthetic oligonucleotide
cccagcggccacuuucugc

SEQ ID NO: 1484195 - RNA, 19 nt, Artificial Sequence
  Description of Artificial Sequence: Synthetic oligonucleotide
gauuucggaacugggcauu

SEQ ID NO: 1484196 - RNA, 19 nt, Artificial Sequence
  Description of Artificial Sequence: Synthetic oligonucleotide
ucgucccuuggggaacaga

SEQ ID NO: 1484197 - RNA, 19 nt, Artificial Sequence
  Description of Artificial Sequence: Synthetic oligonucleotide
gcgcuuagggccuggcuca

SEQ ID NO: 1484198 - RNA, 19 nt, Artificial Sequence
  Description of Artificial Sequence: Synthetic oligonucleotide
cucgugugaggccuucucu

SEQ ID NO: 1484199 - RNA, 19 nt, Artificial Sequence
  Description of Artificial Sequence: Synthetic oligonucleotide
agcccagcggccacuuucu

SEQ ID NO: 1484200 - RNA, 19 nt, Artificial Sequence
  Description of Artificial Sequence: Synthetic oligonucleotide
gcgaugguuugagccagag

SEQ ID NO: 1484201 - RNA, 19 nt, Artificial Sequence
  Description of Artificial Sequence: Synthetic oligonucleotide
cgaacacggucccuuaguc

SEQ ID NO: 1484202 - RNA, 19 nt, Artificial Sequence
  Description of Artificial Sequence: Synthetic oligonucleotide
cguagauaucguagagauc

SEQ ID NO: 1484203 - RNA, 19 nt, Artificial Sequence
  Description of Artificial Sequence: Synthetic oligonucleotide
ggcgucgucccuuggggaa

SEQ ID NO: 1484204 - RNA, 19 nt, Artificial Sequence
  Description of Artificial Sequence: Synthetic oligonucleotide
ugccucagccgaggaggca

SEQ ID NO: 1484205 - RNA, 19 nt, Artificial Sequence
  Description of Artificial Sequence: Synthetic oligonucleotide
ccuagucuuuggguuggag

SEQ ID NO: 1484206 - RNA, 19 nt, Artificial Sequence
  Description of Artificial Sequence: Synthetic oligonucleotide
uccggcgcuuagggccugg

SEQ ID NO: 1484207 - RNA, 19 nt, Artificial Sequence
  Description of Artificial Sequence: Synthetic oligonucleotide
cuuuggguuggaguauuau

SEQ ID NO: 1484208 - RNA, 19 nt, Artificial Sequence
  Description of Artificial Sequence: Synthetic oligonucleotide
ccugaccgcccacuuuccc

SEQ ID NO: 1484209 - RNA, 19 nt, Artificial Sequence
  Description of Artificial Sequence: Synthetic oligonucleotide
acgcaugcucugggaagca

SEQ ID NO: 1484210 - RNA, 19 nt, Artificial Sequence
  Description of Artificial Sequence: Synthetic oligonucleotide
gaguguccauuaguccugu

SEQ ID NO: 1484211 - RNA, 19 nt, Artificial Sequence
  Description of Artificial Sequence: Synthetic oligonucleotide
gaguaguucugggccccaa

SEQ ID NO: 1484212 - RNA, 19 nt, Artificial Sequence
  Description of Artificial Sequence: Synthetic oligonucleotide
ccucggacgcugugacagg

SEQ ID NO: 1484213 - RNA, 19 nt, Artificial Sequence
  Description of Artificial Sequence: Synthetic oligonucleotide
ccuugacaguacucuuguc

SEQ ID NO: 1484214 - RNA, 19 nt, Artificial Sequence
  Description of Artificial Sequence: Synthetic oligonucleotide
ccugggcgaugguuugagc

SEQ ID NO: 1484215 - RNA, 19 nt, Artificial Sequence
  Description of Artificial Sequence: Synthetic oligonucleotide
ggggccagauuauacucau

SEQ ID NO: 1484216 - RNA, 19 nt, Artificial Sequence
  Description of Artificial Sequence: Synthetic oligonucleotide
ccuuaguccuuucuuuccu

SEQ ID NO: 1484217 - RNA, 19 nt, Artificial Sequence
  Description of Artificial Sequence: Synthetic oligonucleotide
cggcagauaggggaccucc

SEQ ID NO: 1484218 - RNA, 19 nt, Artificial Sequence
  Description of Artificial Sequence: Synthetic oligonucleotide
acgcugugacagggaguag

SEQ ID NO: 1484219 - RNA, 19 nt, Artificial Sequence
  Description of Artificial Sequence: Synthetic oligonucleotide
gcgaacacggucccuuagu

SEQ ID NO: 1484220 - RNA, 19 nt, Artificial Sequence
  Description of Artificial Sequence: Synthetic oligonucleotide
ggauucaaaauggggccau

SEQ ID NO: 1484221 - RNA, 19 nt, Artificial Sequence
  Description of Artificial Sequence: Synthetic oligonucleotide
ggaaggucguagauaucgu

SEQ ID NO: 1484222 - RNA, 19 nt, Artificial Sequence
  Description of Artificial Sequence: Synthetic oligonucleotide
gcggccacuuucugccuca

SEQ ID NO: 1484223 - RNA, 19 nt, Artificial Sequence
  Description of Artificial Sequence: Synthetic oligonucleotide
caggccaagcuugguaagu

SEQ ID NO: 1484224 - RNA, 19 nt, Artificial Sequence
  Description of Artificial Sequence: Synthetic oligonucleotide
ccagagcggcugacagagg

SEQ ID NO: 1484225 - RNA, 19 nt, Artificial Sequence
  Description of Artificial Sequence: Synthetic oligonucleotide
gaguaguaguauggcucau

SEQ ID NO: 1484226 - RNA, 19 nt, Artificial Sequence
  Description of Artificial Sequence: Synthetic oligonucleotide
gucgucccuuggggaacag

SEQ ID NO: 1484227 - RNA, 19 nt, Artificial Sequence
  Description of Artificial Sequence: Synthetic oligonucleotide
gggcggggccagauuauac

SEQ ID NO: 1484228 - RNA, 19 nt, Artificial Sequence
  Description of Artificial Sequence: Synthetic oligonucleotide
gcggcugacagaggcguga

SEQ ID NO: 1484229 - RNA, 19 nt, Artificial Sequence
  Description of Artificial Sequence: Synthetic oligonucleotide
ccuuaccauuggguaaguc

SEQ ID NO: 1484230 - RNA, 19 nt, Artificial Sequence
  Description of Artificial Sequence: Synthetic oligonucleotide
ccuuggccugauuucggaa

SEQ ID NO: 1484231 - RNA, 19 nt, Artificial Sequence
  Description of Artificial Sequence: Synthetic oligonucleotide
gguggggaauuucucucuu

SEQ ID NO: 1484232 - RNA, 19 nt, Artificial Sequence
  Description of Artificial Sequence: Synthetic oligonucleotide
cguuuccugagcauggcau

SEQ ID NO: 1484233 - RNA, 19 nt, Artificial Sequence
  Description of Artificial Sequence: Synthetic oligonucleotide
cgcugugacagggaguaga

SEQ ID NO: 1484234 - RNA, 19 nt, Artificial Sequence
  Description of Artificial Sequence: Synthetic oligonucleotide
acacggucccuuaguccuu

SEQ ID NO: 1484235 - RNA, 19 nt, Artificial Sequence
  Description of Artificial Sequence: Synthetic oligonucleotide
gccuggcucaugguccuca

SEQ ID NO: 1484236 - RNA, 19 nt, Artificial Sequence
  Description of Artificial Sequence: Synthetic oligonucleotide
ggaguaguucugggcccca

SEQ ID NO: 1484237 - RNA, 19 nt, Artificial Sequence
  Description of Artificial Sequence: Synthetic oligonucleotide
gcgucgucccuuggggaac

SEQ ID NO: 1484238 - RNA, 19 nt, Artificial Sequence
  Description of Artificial Sequence: Synthetic oligonucleotide
ggaccuccuccuuaccauu

SEQ ID NO: 1484239 - RNA, 19 nt, Artificial Sequence
  Description of Artificial Sequence: Synthetic oligonucleotide
cagcuacaggggccaugga

SEQ ID NO: 1484240 - RNA, 19 nt, Artificial Sequence
  Description of Artificial Sequence: Synthetic oligonucleotide
ccaccucuccggcgcuuag

SEQ ID NO: 1484241 - RNA, 19 nt, Artificial Sequence
  Description of Artificial Sequence: Synthetic oligonucleotide
gcccacuuuccccaucuuu

SEQ ID NO: 1484242 - RNA, 19 nt, Artificial Sequence
  Description of Artificial Sequence: Synthetic oligonucleotide
gcccagcggccacuuucug

SEQ ID NO: 1484243 - RNA, 19 nt, Artificial Sequence
  Description of Artificial Sequence: Synthetic oligonucleotide
ccuuugcagaugacggaau

SEQ ID NO: 1484244 - RNA, 19 nt, Artificial Sequence
  Description of Artificial Sequence: Synthetic oligonucleotide
cauccaccucuccggcgcu

SEQ ID NO: 1484245 - RNA, 19 nt, Artificial Sequence
  Description of Artificial Sequence: Synthetic oligonucleotide
ggcgaugguuugagccaga

SEQ ID NO: 1484246 - RNA, 19 nt, Artificial Sequence
  Description of Artificial Sequence: Synthetic oligonucleotide
gaccgcccacuuuccccau

SEQ ID NO: 1484247 - RNA, 19 nt, Artificial Sequence
  Description of Artificial Sequence: Synthetic oligonucleotide
gcccucggacgcugugaca

SEQ ID NO: 1484248 - RNA, 19 nt, Artificial Sequence
  Description of Artificial Sequence: Synthetic oligonucleotide
cuccggcgcuuagggccug

SEQ ID NO: 1484249 - RNA, 19 nt, Artificial Sequence
  Description of Artificial Sequence: Synthetic oligonucleotide
gggccagauuauacucaua

SEQ ID NO: 1484250 - RNA, 19 nt, Artificial Sequence
  Description of Artificial Sequence: Synthetic oligonucleotide
ggggcggggccagauuaua

SEQ ID NO: 1484251 - RNA, 19 nt, Artificial Sequence
  Description of Artificial Sequence: Synthetic oligonucleotide
ccgcccacuuuccccaucu

SEQ ID NO: 1484252 - RNA, 19 nt, Artificial Sequence
  Description of Artificial Sequence: Synthetic oligonucleotide
cacggucccuuaguccuuu

SEQ ID NO: 1484253 - RNA, 19 nt, Artificial Sequence
  Description of Artificial Sequence: Synthetic oligonucleotide
ccacucguuuccugagcau

SEQ ID NO: 1484254 - RNA, 19 nt, Artificial Sequence
  Description of Artificial Sequence: Synthetic oligonucleotide
cucagccgaggaggcaguu

SEQ ID NO: 1484255 - RNA, 19 nt, Artificial Sequence
  Description of Artificial Sequence: Synthetic oligonucleotide
ggcucgugugaggccuucu

SEQ ID NO: 1484256 - RNA, 19 nt, Artificial Sequence
  Description of Artificial Sequence: Synthetic oligonucleotide
cacggggcggggccagauu

SEQ ID NO: 1484257 - RNA, 19 nt, Artificial Sequence
  Description of Artificial Sequence: Synthetic oligonucleotide
cgucgucccuuggggaaca

SEQ ID NO: 1484258 - RNA, 19 nt, Artificial Sequence
  Description of Artificial Sequence: Synthetic oligonucleotide
cccuagucuuuggguugga

SEQ ID NO: 1484259 - RNA, 19 nt, Artificial Sequence
  Description of Artificial Sequence: Synthetic oligonucleotide
gcgugaucucuggguucaa

SEQ ID NO: 1484260 - RNA, 19 nt, Artificial Sequence
  Description of Artificial Sequence: Synthetic oligonucleotide
cccuuucaggaaggucgua

SEQ ID NO: 1484261 - RNA, 19 nt, Artificial Sequence
  Description of Artificial Sequence: Synthetic oligonucleotide
aaacucaguaacuaaagac

SEQ ID NO: 1484262 - RNA, 19 nt, Artificial Sequence
  Description of Artificial Sequence: Synthetic oligonucleotide
aggaaaaucagcuugcugg

SEQ ID NO: 1484263 - RNA, 19 nt, Artificial Sequence
  Description of Artificial Sequence: Synthetic oligonucleotide
aaagaaacucuugaggugc

SEQ ID NO: 1484264 - RNA, 19 nt, Artificial Sequence
  Description of Artificial Sequence: Synthetic oligonucleotide
aacacugagaauccaagac

SEQ ID NO: 1484265 - RNA, 19 nt, Artificial Sequence
  Description of Artificial Sequence: Synthetic oligonucleotide
aucaguaacacugagaauc

SEQ ID NO: 1484266 - RNA, 19 nt, Artificial Sequence
  Description of Artificial Sequence: Synthetic oligonucleotide
aguaacuaaagacugcugg

SEQ ID NO: 1484267 - RNA, 19 nt, Artificial Sequence
  Description of Artificial Sequence: Synthetic oligonucleotide
cuuaagucgacacacauac

SEQ ID NO: 1484268 - RNA, 19 nt, Artificial Sequence
  Description of Artificial Sequence: Synthetic oligonucleotide
uuaauuugggaaaccaaug

SEQ ID NO: 1484269 - RNA, 19 nt, Artificial Sequence
  Description of Artificial Sequence: Synthetic oligonucleotide
ucaaggugaacucucagca

SEQ ID NO: 1484270 - RNA, 19 nt, Artificial Sequence
  Description of Artificial Sequence: Synthetic oligonucleotide
aauacagcgcgucuccgcg

SEQ ID NO: 1484271 - RNA, 19 nt, Artificial Sequence
  Description of Artificial Sequence: Synthetic oligonucleotide
aaauacagcgcgucuccgc

SEQ ID NO: 1484272 - RNA, 19 nt, Artificial Sequence
  Description of Artificial Sequence: Synthetic oligonucleotide
ucccugaucaguaacacug

SEQ ID NO: 1484273 - RNA, 19 nt, Artificial Sequence
  Description of Artificial Sequence: Synthetic oligonucleotide
auguaacaaacccaaacuc

SEQ ID NO: 1484274 - RNA, 19 nt, Artificial Sequence
  Description of Artificial Sequence: Synthetic oligonucleotide
gaaagauugccugugaggc

SEQ ID NO: 1484275 - RNA, 19 nt, Artificial Sequence
  Description of Artificial Sequence: Synthetic oligonucleotide
ugaaaaccaauccuucucc

SEQ ID NO: 1484276 - RNA, 19 nt, Artificial Sequence
  Description of Artificial Sequence: Synthetic oligonucleotide
ugauuacugcaaaaggucc

SEQ ID NO: 1484277 - RNA, 19 nt, Artificial Sequence
  Description of Artificial Sequence: Synthetic oligonucleotide
aaggugaacucucagcaug

SEQ ID NO: 1484278 - RNA, 19 nt, Artificial Sequence
  Description of Artificial Sequence: Synthetic oligonucleotide
aagaaagauugccugugag

SEQ ID NO: 1484279 - RNA, 19 nt, Artificial Sequence
  Description of Artificial Sequence: Synthetic oligonucleotide
aacucaguaacuaaagacu

SEQ ID NO: 1484280 - RNA, 19 nt, Artificial Sequence
  Description of Artificial Sequence: Synthetic oligonucleotide
aguguuugcaggauggacc

SEQ ID NO: 1484281 - RNA, 19 nt, Artificial Sequence
  Description of Artificial Sequence: Synthetic oligonucleotide
caaggagucacugauauac

SEQ ID NO: 1484282 - RNA, 19 nt, Artificial Sequence
  Description of Artificial Sequence: Synthetic oligonucleotide
aaaaccuacccagacagca

SEQ ID NO: 1484283 - RNA, 19 nt, Artificial Sequence
  Description of Artificial Sequence: Synthetic oligonucleotide
aaucccauguuaacaaagg

SEQ ID NO: 1484284 - RNA, 19 nt, Artificial Sequence
  Description of Artificial Sequence: Synthetic oligonucleotide
ucaaaaucccauguuaaca

SEQ ID NO: 1484285 - RNA, 19 nt, Artificial Sequence
  Description of Artificial Sequence: Synthetic oligonucleotide
uccuacuuggaugucaagg

SEQ ID NO: 1484286 - RNA, 19 nt, Artificial Sequence
  Description of Artificial Sequence: Synthetic oligonucleotide
guuguucgaagguugagcc

SEQ ID NO: 1484287 - RNA, 19 nt, Artificial Sequence
  Description of Artificial Sequence: Synthetic oligonucleotide
aauagcaaggagucacuga

SEQ ID NO: 1484288 - RNA, 19 nt, Artificial Sequence
  Description of Artificial Sequence: Synthetic oligonucleotide
cugguucuaagccaaaggc

SEQ ID NO: 1484289 - RNA, 19 nt, Artificial Sequence
  Description of Artificial Sequence: Synthetic oligonucleotide
auuucugcguagucguucg

SEQ ID NO: 1484290 - RNA, 19 nt, Artificial Sequence
  Description of Artificial Sequence: Synthetic oligonucleotide
ugucauacagcugcguccg

SEQ ID NO: 1484291 - RNA, 19 nt, Artificial Sequence
  Description of Artificial Sequence: Synthetic oligonucleotide
cuagcugucgcacucuuag

SEQ ID NO: 1484292 - RNA, 19 nt, Artificial Sequence
  Description of Artificial Sequence: Synthetic oligonucleotide
cucagagccauacugccgg

SEQ ID NO: 1484293 - RNA, 19 nt, Artificial Sequence
  Description of Artificial Sequence: Synthetic oligonucleotide
auagcaaggagucacugau

SEQ ID NO: 1484294 - RNA, 19 nt, Artificial Sequence
  Description of Artificial Sequence: Synthetic oligonucleotide
ugguucuaagccaaaggca

SEQ ID NO: 1484295 - RNA, 19 nt, Artificial Sequence
  Description of Artificial Sequence: Synthetic oligonucleotide
ucaguaacuaaagacugcu

SEQ ID NO: 1484296 - RNA, 19 nt, Artificial Sequence
  Description of Artificial Sequence: Synthetic oligonucleotide
auaaacucaguaacuaaag

SEQ ID NO: 1484297 - RNA, 19 nt, Artificial Sequence
  Description of Artificial Sequence: Synthetic oligonucleotide
ugggaaaccaauguaacaa

SEQ ID NO: 1484298 - RNA, 19 nt, Artificial Sequence
  Description of Artificial Sequence: Synthetic oligonucleotide
ugcguagucguucgcaugc

SEQ ID NO: 1484299 - RNA, 19 nt, Artificial Sequence
  Description of Artificial Sequence: Synthetic oligonucleotide
agucgacacacauacaccu

SEQ ID NO: 1484300 - RNA, 19 nt, Artificial Sequence
  Description of Artificial Sequence: Synthetic oligonucleotide
uguucgaagguugagccug

SEQ ID NO: 1484301 - RNA, 19 nt, Artificial Sequence
  Description of Artificial Sequence: Synthetic oligonucleotide
agugauuacugcaaaaggu

SEQ ID NO: 1484302 - RNA, 19 nt, Artificial Sequence
  Description of Artificial Sequence: Synthetic oligonucleotide
uggaauagcaaggagucac

SEQ ID NO: 1484303 - RNA, 19 nt, Artificial Sequence
  Description of Artificial Sequence: Synthetic oligonucleotide
uccacccacccuuaagucg

SEQ ID NO: 1484304 - RNA, 19 nt, Artificial Sequence
  Description of Artificial Sequence: Synthetic oligonucleotide
ucgacacacauacaccuca

SEQ ID NO: 1484305 - RNA, 19 nt, Artificial Sequence
  Description of Artificial Sequence: Synthetic oligonucleotide
uguuugucauacagcugcg

SEQ ID NO: 1484306 - RNA, 19 nt, Artificial Sequence
  Description of Artificial Sequence: Synthetic oligonucleotide
gaaaaccaauccuucuccc

SEQ ID NO: 1484307 - RNA, 19 nt, Artificial Sequence
  Description of Artificial Sequence: Synthetic oligonucleotide
acacugagaauccaagaca

SEQ ID NO: 1484308 - RNA, 19 nt, Artificial Sequence
  Description of Artificial Sequence: Synthetic oligonucleotide
ucugucuccccaaugugga

SEQ ID NO: 1484309 - RNA, 19 nt, Artificial Sequence
  Description of Artificial Sequence: Synthetic oligonucleotide
caauguggaaauacagcgc

SEQ ID NO: 1484310 - RNA, 19 nt, Artificial Sequence
  Description of Artificial Sequence: Synthetic oligonucleotide
uguuguucgaagguugagc

SEQ ID NO: 1484311 - RNA, 19 nt, Artificial Sequence
  Description of Artificial Sequence: Synthetic oligonucleotide
aaugugaaccugcccucag

SEQ ID NO: 1484312 - RNA, 19 nt, Artificial Sequence
  Description of Artificial Sequence: Synthetic oligonucleotide
ucucccuucccacagccug

SEQ ID NO: 1484313 - RNA, 19 nt, Artificial Sequence
  Description of Artificial Sequence: Synthetic oligonucleotide
uucuuggaauagcaaggag

SEQ ID NO: 1484314 - RNA, 19 nt, Artificial Sequence
  Description of Artificial Sequence: Synthetic oligonucleotide
agcugcguccgauaguuuc

SEQ ID NO: 1484315 - RNA, 19 nt, Artificial Sequence
  Description of Artificial Sequence: Synthetic oligonucleotide
agcgauuucugcguagucg

SEQ ID NO: 1484316 - RNA, 19 nt, Artificial Sequence
  Description of Artificial Sequence: Synthetic oligonucleotide
ucacugauauacccugacc

SEQ ID NO: 1484317 - RNA, 19 nt, Artificial Sequence
  Description of Artificial Sequence: Synthetic oligonucleotide
aaagauugccugugaggcu

SEQ ID NO: 1484318 - RNA, 19 nt, Artificial Sequence
  Description of Artificial Sequence: Synthetic oligonucleotide
cucaaaaucccauguuaac

SEQ ID NO: 1484319 - RNA, 19 nt, Artificial Sequence
  Description of Artificial Sequence: Synthetic oligonucleotide
cucaguaacuaaagacugc

SEQ ID NO: 1484320 - RNA, 19 nt, Artificial Sequence
  Description of Artificial Sequence: Synthetic oligonucleotide
uccggaauuuccucaauaa

SEQ ID NO: 1484321 - RNA, 19 nt, Artificial Sequence
  Description of Artificial Sequence: Synthetic oligonucleotide
ugggauccuuucuugcacg

SEQ ID NO: 1484322 - RNA, 19 nt, Artificial Sequence
  Description of Artificial Sequence: Synthetic oligonucleotide
cuuucuugcacggcaaccc

SEQ ID NO: 1484323 - RNA, 19 nt, Artificial Sequence
  Description of Artificial Sequence: Synthetic oligonucleotide
uuggccuguuaccagcugc

SEQ ID NO: 1484324 - RNA, 19 nt, Artificial Sequence
  Description of Artificial Sequence: Synthetic oligonucleotide
uuucuugcacggcaacccc

SEQ ID NO: 1484325 - RNA, 19 nt, Artificial Sequence
  Description of Artificial Sequence: Synthetic oligonucleotide
agagggagaacuuggugga

SEQ ID NO: 1484326 - RNA, 19 nt, Artificial Sequence
  Description of Artificial Sequence: Synthetic oligonucleotide
uggaagaaagauugccugu

SEQ ID NO: 1484327 - RNA, 19 nt, Artificial Sequence
  Description of Artificial Sequence: Synthetic oligonucleotide
ucgaagguugagccugagg

SEQ ID NO: 1484328 - RNA, 19 nt, Artificial Sequence
  Description of Artificial Sequence: Synthetic oligonucleotide
agcugucgcacucuuagcu

SEQ ID NO: 1484329 - RNA, 19 nt, Artificial Sequence
  Description of Artificial Sequence: Synthetic oligonucleotide
accaauguaacaaacccaa

SEQ ID NO: 1484330 - RNA, 19 nt, Artificial Sequence
  Description of Artificial Sequence: Synthetic oligonucleotide
gugauuacugcaaaagguc

SEQ ID NO: 1484331 - RNA, 19 nt, Artificial Sequence
  Description of Artificial Sequence: Synthetic oligonucleotide
cacaacacucgcugguugg

SEQ ID NO: 1484332 - RNA, 19 nt, Artificial Sequence
  Description of Artificial Sequence: Synthetic oligonucleotide
caagggugucaccaggucc

SEQ ID NO: 1484333 - RNA, 19 nt, Artificial Sequence
  Description of Artificial Sequence: Synthetic oligonucleotide
auggccacgaggaugagug

SEQ ID NO: 1484334 - RNA, 19 nt, Artificial Sequence
  Description of Artificial Sequence: Synthetic oligonucleotide
uccccaauguggaaauaca

SEQ ID NO: 1484335 - RNA, 19 nt, Artificial Sequence
  Description of Artificial Sequence: Synthetic oligonucleotide
gcauuagccagccaaguug

SEQ ID NO: 1484336 - RNA, 19 nt, Artificial Sequence
  Description of Artificial Sequence: Synthetic oligonucleotide
aaguguccggguggggucc

SEQ ID NO: 1484337 - RNA, 19 nt, Artificial Sequence
  Description of Artificial Sequence: Synthetic oligonucleotide
cggaauuuccucaauaaag

SEQ ID NO: 1484338 - RNA, 19 nt, Artificial Sequence
  Description of Artificial Sequence: Synthetic oligonucleotide
cacccgcucagcauuagcc

SEQ ID NO: 1484339 - RNA, 19 nt, Artificial Sequence
  Description of Artificial Sequence: Synthetic oligonucleotide
aagauugccugugaggcuu

SEQ ID NO: 1484340 - RNA, 19 nt, Artificial Sequence
  Description of Artificial Sequence: Synthetic oligonucleotide
cuauggcugaaaaccaauc

SEQ ID NO: 1484341 - RNA, 19 nt, Artificial Sequence
  Description of Artificial Sequence: Synthetic oligonucleotide
gaugucaaggugaacucuc

SEQ ID NO: 1484342 - RNA, 19 nt, Artificial Sequence
  Description of Artificial Sequence: Synthetic oligonucleotide
aguuguuguucgaagguug

SEQ ID NO: 1484343 - RNA, 19 nt, Artificial Sequence
  Description of Artificial Sequence: Synthetic oligonucleotide
ugcucaagucccagaaaga

SEQ ID NO: 1484344 - RNA, 19 nt, Artificial Sequence
  Description of Artificial Sequence: Synthetic oligonucleotide
ucuccuacuuggaugucaa

SEQ ID NO: 1484345 - RNA, 19 nt, Artificial Sequence
  Description of Artificial Sequence: Synthetic oligonucleotide
cugucgcacucuuagcugc

SEQ ID NO: 1484346 - RNA, 19 nt, Artificial Sequence
  Description of Artificial Sequence: Synthetic oligonucleotide
gaaauacagcgcgucuccg

SEQ ID NO: 1484347 - RNA, 19 nt, Artificial Sequence
  Description of Artificial Sequence: Synthetic oligonucleotide
ggaaauacagcgcgucucc

SEQ ID NO: 1484348 - RNA, 19 nt, Artificial Sequence
  Description of Artificial Sequence: Synthetic oligonucleotide
cuucccucccaaaaccuac

SEQ ID NO: 1484349 - RNA, 19 nt, Artificial Sequence
  Description of Artificial Sequence: Synthetic oligonucleotide
ccaaguuguuguucgaagg

SEQ ID NO: 1484350 - RNA, 19 nt, Artificial Sequence
  Description of Artificial Sequence: Synthetic oligonucleotide
cuacuuggaugucaaggug

SEQ ID NO: 1484351 - RNA, 19 nt, Artificial Sequence
  Description of Artificial Sequence: Synthetic oligonucleotide
uggaugucaaggugaacuc

SEQ ID NO: 1484352 - RNA, 19 nt, Artificial Sequence
  Description of Artificial Sequence: Synthetic oligonucleotide
aaaccuacccagacagcag

SEQ ID NO: 1484353 - RNA, 19 nt, Artificial Sequence
  Description of Artificial Sequence: Synthetic oligonucleotide
cucagcauuagccagccaa

SEQ ID NO: 1484354 - RNA, 19 nt, Artificial Sequence
  Description of Artificial Sequence: Synthetic oligonucleotide
acugagaauccaagacacc

SEQ ID NO: 1484355 - RNA, 19 nt, Artificial Sequence
  Description of Artificial Sequence: Synthetic oligonucleotide
caucccucgucccagcaag

SEQ ID NO: 1484356 - RNA, 19 nt, Artificial Sequence
  Description of Artificial Sequence: Synthetic oligonucleotide
uuaagucgacacacauaca

SEQ ID NO: 1484357 - RNA, 19 nt, Artificial Sequence
  Description of Artificial Sequence: Synthetic oligonucleotide
guuugcaggauggaccacc

SEQ ID NO: 1484358 - RNA, 19 nt, Artificial Sequence
  Description of Artificial Sequence: Synthetic oligonucleotide
guguucaccagggguaugg

SEQ ID NO: 1484359 - RNA, 19 nt, Artificial Sequence
  Description of Artificial Sequence: Synthetic oligonucleotide
acgaggaugaguguuugca

SEQ ID NO: 1484360 - RNA, 19 nt, Artificial Sequence
  Description of Artificial Sequence: Synthetic oligonucleotide
aagcgcuccucccgccacc

SEQ ID NO: 1484361 - RNA, 19 nt, Artificial Sequence
  Description of Artificial Sequence: Synthetic oligonucleotide
uggaaauacagcgcgucuc

SEQ ID NO: 1484362 - RNA, 19 nt, Artificial Sequence
  Description of Artificial Sequence: Synthetic oligonucleotide
gggucuuucaccuccacga

SEQ ID NO: 1484363 - RNA, 19 nt, Artificial Sequence
  Description of Artificial Sequence: Synthetic oligonucleotide
cacccuuaagucgacacac

SEQ ID NO: 1484364 - RNA, 19 nt, Artificial Sequence
  Description of Artificial Sequence: Synthetic oligonucleotide
agucguucgcaugcucucc

SEQ ID NO: 1484365 - RNA, 19 nt, Artificial Sequence
  Description of Artificial Sequence: Synthetic oligonucleotide
cuccacuugcuccacuagc

SEQ ID NO: 1484366 - RNA, 19 nt, Artificial Sequence
  Description of Artificial Sequence: Synthetic oligonucleotide
gucacugauauacccugac

SEQ ID NO: 1484367 - RNA, 19 nt, Artificial Sequence
  Description of Artificial Sequence: Synthetic oligonucleotide
uucccucccaaaaccuacc

SEQ ID NO: 1484368 - RNA, 19 nt, Artificial Sequence
  Description of Artificial Sequence: Synthetic oligonucleotide
aaguuguuguucgaagguu

SEQ ID NO: 1484369 - RNA, 19 nt, Artificial Sequence
  Description of Artificial Sequence: Synthetic oligonucleotide
aauuggagugaaggcagau

SEQ ID NO: 1484370 - RNA, 19 nt, Artificial Sequence
  Description of Artificial Sequence: Synthetic oligonucleotide
ucuugcacggcaaccccuc

SEQ ID NO: 1484371 - RNA, 19 nt, Artificial Sequence
  Description of Artificial Sequence: Synthetic oligonucleotide
uucuugcacggcaaccccu

SEQ ID NO: 1484372 - RNA, 19 nt, Artificial Sequence
  Description of Artificial Sequence: Synthetic oligonucleotide
aguaacacugagaauccaa

SEQ ID NO: 1484373 - RNA, 19 nt, Artificial Sequence
  Description of Artificial Sequence: Synthetic oligonucleotide
ugcacggcaaccccuccac

SEQ ID NO: 1484374 - RNA, 19 nt, Artificial Sequence
  Description of Artificial Sequence: Synthetic oligonucleotide
cuuuggcagcgauuucugc

SEQ ID NO: 1484375 - RNA, 19 nt, Artificial Sequence
  Description of Artificial Sequence: Synthetic oligonucleotide
ucgcaugcucuccuacuug

SEQ ID NO: 1484376 - RNA, 19 nt, Artificial Sequence
  Description of Artificial Sequence: Synthetic oligonucleotide
agcaagguucuuggaauag

SEQ ID NO: 1484377 - RNA, 19 nt, Artificial Sequence
  Description of Artificial Sequence: Synthetic oligonucleotide
ucccuccagaacaucuaug

SEQ ID NO: 1484378 - RNA, 19 nt, Artificial Sequence
  Description of Artificial Sequence: Synthetic oligonucleotide
cugaucaguaacacugaga

SEQ ID NO: 1484379 - RNA, 19 nt, Artificial Sequence
  Description of Artificial Sequence: Synthetic oligonucleotide
uguucaccagggguauggg

SEQ ID NO: 1484380 - RNA, 19 nt, Artificial Sequence
  Description of Artificial Sequence: Synthetic oligonucleotide
ucugcguagucguucgcau

SEQ ID NO: 1484381 - RNA, 19 nt, Artificial Sequence
  Description of Artificial Sequence: Synthetic oligonucleotide
caguaacuaaagacugcug

SEQ ID NO: 1484382 - RNA, 19 nt, Artificial Sequence
  Description of Artificial Sequence: Synthetic oligonucleotide
cugggauccuuucuugcac

SEQ ID NO: 1484383 - RNA, 19 nt, Artificial Sequence
  Description of Artificial Sequence: Synthetic oligonucleotide
uuguucgaagguugagccu

SEQ ID NO: 1484384 - RNA, 19 nt, Artificial Sequence
  Description of Artificial Sequence: Synthetic oligonucleotide
cacaucccugaucaguaac

SEQ ID NO: 1484385 - RNA, 19 nt, Artificial Sequence
  Description of Artificial Sequence: Synthetic oligonucleotide
uggccuguuaccagcugcu

SEQ ID NO: 1484386 - RNA, 19 nt, Artificial Sequence
  Description of Artificial Sequence: Synthetic oligonucleotide
gaguguuugcaggauggac

SEQ ID NO: 1484387 - RNA, 19 nt, Artificial Sequence
  Description of Artificial Sequence: Synthetic oligonucleotide
aaucagcuugcuggcccac

SEQ ID NO: 1484388 - RNA, 19 nt, Artificial Sequence
  Description of Artificial Sequence: Synthetic oligonucleotide
uucugcguagucguucgca

SEQ ID NO: 1484389 - RNA, 19 nt, Artificial Sequence
  Description of Artificial Sequence: Synthetic oligonucleotide
ucagagccauacugccggg

SEQ ID NO: 1484390 - RNA, 19 nt, Artificial Sequence
  Description of Artificial Sequence: Synthetic oligonucleotide
uacugccgggccaggauga

SEQ ID NO: 1484391 - RNA, 19 nt, Artificial Sequence
  Description of Artificial Sequence: Synthetic oligonucleotide
aaggcagaucugguguuca

SEQ ID NO: 1484392 - RNA, 19 nt, Artificial Sequence
  Description of Artificial Sequence: Synthetic oligonucleotide
guacuccucgcgcuguuug

SEQ ID NO: 1484393 - RNA, 19 nt, Artificial Sequence
  Description of Artificial Sequence: Synthetic oligonucleotide
caauccuucucccuuccca

SEQ ID NO: 1484394 - RNA, 19 nt, Artificial Sequence
  Description of Artificial Sequence: Synthetic oligonucleotide
ggaaaccaauguaacaaac

SEQ ID NO: 1484395 - RNA, 19 nt, Artificial Sequence
  Description of Artificial Sequence: Synthetic oligonucleotide
gccaaguuguuguucgaag

SEQ ID NO: 1484396 - RNA, 19 nt, Artificial Sequence
  Description of Artificial Sequence: Synthetic oligonucleotide
auacagcgcgucuccgcgg

SEQ ID NO: 1484397 - RNA, 19 nt, Artificial Sequence
  Description of Artificial Sequence: Synthetic oligonucleotide
ucgcacucuuagcugcagc

SEQ ID NO: 1484398 - RNA, 19 nt, Artificial Sequence
  Description of Artificial Sequence: Synthetic oligonucleotide
uagucguucgcaugcucuc

SEQ ID NO: 1484399 - RNA, 19 nt, Artificial Sequence
  Description of Artificial Sequence: Synthetic oligonucleotide
cacgccuugcuccgcagcc

SEQ ID NO: 1484400 - RNA, 19 nt, Artificial Sequence
  Description of Artificial Sequence: Synthetic oligonucleotide
acagcugcguccgauaguu

SEQ ID NO: 1484401 - RNA, 19 nt, Artificial Sequence
  Description of Artificial Sequence: Synthetic oligonucleotide
aucccugaucaguaacacu

SEQ ID NO: 1484402 - RNA, 19 nt, Artificial Sequence
  Description of Artificial Sequence: Synthetic oligonucleotide
ggugaaugugaaccugccc

SEQ ID NO: 1484403 - RNA, 19 nt, Artificial Sequence
  Description of Artificial Sequence: Synthetic oligonucleotide
aggcuuggcacggcuacac

SEQ ID NO: 1484404 - RNA, 19 nt, Artificial Sequence
  Description of Artificial Sequence: Synthetic oligonucleotide
ggucccggaacuccgcacg

SEQ ID NO: 1484405 - RNA, 19 nt, Artificial Sequence
  Description of Artificial Sequence: Synthetic oligonucleotide
uacagcugcguccgauagu

SEQ ID NO: 1484406 - RNA, 19 nt, Artificial Sequence
  Description of Artificial Sequence: Synthetic oligonucleotide
ugucgcacucuuagcugca

SEQ ID NO: 1484407 - RNA, 19 nt, Artificial Sequence
  Description of Artificial Sequence: Synthetic oligonucleotide
uugcacggcaaccccucca

SEQ ID NO: 1484408 - RNA, 19 nt, Artificial Sequence
  Description of Artificial Sequence: Synthetic oligonucleotide
caucccugaucaguaacac

SEQ ID NO: 1484409 - RNA, 19 nt, Artificial Sequence
  Description of Artificial Sequence: Synthetic oligonucleotide
cacgaacaugccaagccca

SEQ ID NO: 1484410 - RNA, 19 nt, Artificial Sequence
  Description of Artificial Sequence: Synthetic oligonucleotide
uuucugcguagucguucgc

SEQ ID NO: 1484411 - RNA, 19 nt, Artificial Sequence
  Description of Artificial Sequence: Synthetic oligonucleotide
gcaccgaagucucugcuug

SEQ ID NO: 1484412 - RNA, 19 nt, Artificial Sequence
  Description of Artificial Sequence: Synthetic oligonucleotide
ugcgcaggcgcagaccgcc

SEQ ID NO: 1484413 - RNA, 19 nt, Artificial Sequence
  Description of Artificial Sequence: Synthetic oligonucleotide
cacggcuacaccaacuucu

SEQ ID NO: 1484414 - RNA, 19 nt, Artificial Sequence
  Description of Artificial Sequence: Synthetic oligonucleotide
gaaugugaaccugcccuca

SEQ ID NO: 1484415 - RNA, 19 nt, Artificial Sequence
  Description of Artificial Sequence: Synthetic oligonucleotide
ugguuugccggaagcgcuc

SEQ ID NO: 1484416 - RNA, 19 nt, Artificial Sequence
  Description of Artificial Sequence: Synthetic oligonucleotide
ccccaauguggaaauacag

SEQ ID NO: 1484417 - RNA, 19 nt, Artificial Sequence
  Description of Artificial Sequence: Synthetic oligonucleotide
ucguccggaauuuccucaa

SEQ ID NO: 1484418 - RNA, 19 nt, Artificial Sequence
  Description of Artificial Sequence: Synthetic oligonucleotide
guuguuguucgaagguuga

SEQ ID NO: 1484419 - RNA, 19 nt, Artificial Sequence
  Description of Artificial Sequence: Synthetic oligonucleotide
uagcugucgcacucuuagc

SEQ ID NO: 1484420 - RNA, 19 nt, Artificial Sequence
  Description of Artificial Sequence: Synthetic oligonucleotide
uuacugcaaaagguccaga

SEQ ID NO: 1484421 - RNA, 19 nt, Artificial Sequence
  Description of Artificial Sequence: Synthetic oligonucleotide
cacgaggaugaguguuugc

SEQ ID NO: 1484422 - RNA, 19 nt, Artificial Sequence
  Description of Artificial Sequence: Synthetic oligonucleotide
uugcuccacuagcugucgc

SEQ ID NO: 1484423 - RNA, 19 nt, Artificial Sequence
  Description of Artificial Sequence: Synthetic oligonucleotide
gccaucuugccccaccggc

SEQ ID NO: 1484424 - RNA, 19 nt, Artificial Sequence
  Description of Artificial Sequence: Synthetic oligonucleotide
cucgcgcuguuugucauac

SEQ ID NO: 1484425 - RNA, 19 nt, Artificial Sequence
  Description of Artificial Sequence: Synthetic oligonucleotide
ccacuucccucccaaaacc

SEQ ID NO: 1484426 - RNA, 19 nt, Artificial Sequence
  Description of Artificial Sequence: Synthetic oligonucleotide
cucguccggaauuuccuca

SEQ ID NO: 1484427 - RNA, 19 nt, Artificial Sequence
  Description of Artificial Sequence: Synthetic oligonucleotide
uacuccucgcgcuguuugu

SEQ ID NO: 1484428 - RNA, 19 nt, Artificial Sequence
  Description of Artificial Sequence: Synthetic oligonucleotide
ugucuuuggcagcgauuuc

SEQ ID NO: 1484429 - RNA, 19 nt, Artificial Sequence
  Description of Artificial Sequence: Synthetic oligonucleotide
ccacgaacaugccaagccc

SEQ ID NO: 1484430 - RNA, 19 nt, Artificial Sequence
  Description of Artificial Sequence: Synthetic oligonucleotide
gauugccugugaggcuugg

SEQ ID NO: 1484431 - RNA, 19 nt, Artificial Sequence
  Description of Artificial Sequence: Synthetic oligonucleotide
cuccgcacgccuugcuccg

SEQ ID NO: 1484432 - RNA, 19 nt, Artificial Sequence
  Description of Artificial Sequence: Synthetic oligonucleotide
gaagcgcuccucccgccac

SEQ ID NO: 1484433 - RNA, 19 nt, Artificial Sequence
  Description of Artificial Sequence: Synthetic oligonucleotide
cuuggcacggcuacaccaa

SEQ ID NO: 1484434 - RNA, 19 nt, Artificial Sequence
  Description of Artificial Sequence: Synthetic oligonucleotide
cugcguccgauaguuuccg

SEQ ID NO: 1484435 - RNA, 19 nt, Artificial Sequence
  Description of Artificial Sequence: Synthetic oligonucleotide
cugcguagucguucgcaug

SEQ ID NO: 1484436 - RNA, 19 nt, Artificial Sequence
  Description of Artificial Sequence: Synthetic oligonucleotide
uucucccuucccacagccu

SEQ ID NO: 1484437 - RNA, 19 nt, Artificial Sequence
  Description of Artificial Sequence: Synthetic oligonucleotide
gaauuggagugaaggcaga

SEQ ID NO: 1484438 - RNA, 19 nt, Artificial Sequence
  Description of Artificial Sequence: Synthetic oligonucleotide
gggguaugggaggugaaug

SEQ ID NO: 1484439 - RNA, 19 nt, Artificial Sequence
  Description of Artificial Sequence: Synthetic oligonucleotide
cuugcacggcaaccccucc

SEQ ID NO: 1484440 - RNA, 19 nt, Artificial Sequence
  Description of Artificial Sequence: Synthetic oligonucleotide
ggggcaugcuugcaguccc

SEQ ID NO: 1484441 - RNA, 19 nt, Artificial Sequence
  Description of Artificial Sequence: Synthetic oligonucleotide
gggaaaccaauguaacaaa

SEQ ID NO: 1484442 - RNA, 19 nt, Artificial Sequence
  Description of Artificial Sequence: Synthetic oligonucleotide
ucccucgucccagcaagug

SEQ ID NO: 1484443 - RNA, 19 nt, Artificial Sequence
  Description of Artificial Sequence: Synthetic oligonucleotide
cagcaaguguccggguggg

SEQ ID NO: 1484444 - RNA, 19 nt, Artificial Sequence
  Description of Artificial Sequence: Synthetic oligonucleotide
gguugagccugaggaacgg

SEQ ID NO: 1484445 - RNA, 19 nt, Artificial Sequence
  Description of Artificial Sequence: Synthetic oligonucleotide
uucgaagguugagccugag

SEQ ID NO: 1484446 - RNA, 19 nt, Artificial Sequence
  Description of Artificial Sequence: Synthetic oligonucleotide
ccucagagccauacugccg

SEQ ID NO: 1484447 - RNA, 19 nt, Artificial Sequence
  Description of Artificial Sequence: Synthetic oligonucleotide
augucaaggugaacucuca

SEQ ID NO: 1484448 - RNA, 19 nt, Artificial Sequence
  Description of Artificial Sequence: Synthetic oligonucleotide
uggggucccggaacuccgc

SEQ ID NO: 1484449 - RNA, 19 nt, Artificial Sequence
  Description of Artificial Sequence: Synthetic oligonucleotide
ucuccgcgggcugcaaacc

SEQ ID NO: 1484450 - RNA, 19 nt, Artificial Sequence
  Description of Artificial Sequence: Synthetic oligonucleotide
cuccuacuuggaugucaag

SEQ ID NO: 1484451 - RNA, 19 nt, Artificial Sequence
  Description of Artificial Sequence: Synthetic oligonucleotide
ggcagaucugguguucacc

SEQ ID NO: 1484452 - RNA, 19 nt, Artificial Sequence
  Description of Artificial Sequence: Synthetic oligonucleotide
ccaucuugccccaccggcc

SEQ ID NO: 1484453 - RNA, 19 nt, Artificial Sequence
  Description of Artificial Sequence: Synthetic oligonucleotide
caggauggaccaccacaac

SEQ ID NO: 1484454 - RNA, 19 nt, Artificial Sequence
  Description of Artificial Sequence: Synthetic oligonucleotide
agccaaguuguuguucgaa

SEQ ID NO: 1484455 - RNA, 19 nt, Artificial Sequence
  Description of Artificial Sequence: Synthetic oligonucleotide
guccggaauuuccucaaua

SEQ ID NO: 1484456 - RNA, 19 nt, Artificial Sequence
  Description of Artificial Sequence: Synthetic oligonucleotide
agucacugauauacccuga

SEQ ID NO: 1484457 - RNA, 19 nt, Artificial Sequence
  Description of Artificial Sequence: Synthetic oligonucleotide
guagucguucgcaugcucu

SEQ ID NO: 1484458 - RNA, 19 nt, Artificial Sequence
  Description of Artificial Sequence: Synthetic oligonucleotide
guggaaauacagcgcgucu

SEQ ID NO: 1484459 - RNA, 19 nt, Artificial Sequence
  Description of Artificial Sequence: Synthetic oligonucleotide
cgaggaugaguguuugcag

SEQ ID NO: 1484460 - RNA, 19 nt, Artificial Sequence
  Description of Artificial Sequence: Synthetic oligonucleotide
ugcguccgauaguuuccga

SEQ ID NO: 1484461 - RNA, 19 nt, Artificial Sequence
  Description of Artificial Sequence: Synthetic oligonucleotide
gucccggaacuccgcacgc

SEQ ID NO: 1484462 - RNA, 19 nt, Artificial Sequence
  Description of Artificial Sequence: Synthetic oligonucleotide
gcgauuucugcguagucgu

SEQ ID NO: 1484463 - RNA, 19 nt, Artificial Sequence
  Description of Artificial Sequence: Synthetic oligonucleotide
cuguuaccagcugcucaag

SEQ ID NO: 1484464 - RNA, 19 nt, Artificial Sequence
  Description of Artificial Sequence: Synthetic oligonucleotide
gcugcguccgauaguuucc

SEQ ID NO: 1484465 - RNA, 19 nt, Artificial Sequence
  Description of Artificial Sequence: Synthetic oligonucleotide
agcgcuccucccgccaccg

SEQ ID NO: 1484466 - RNA, 19 nt, Artificial Sequence
  Description of Artificial Sequence: Synthetic oligonucleotide
ccuguuaccagcugcucaa

SEQ ID NO: 1484467 - RNA, 19 nt, Artificial Sequence
  Description of Artificial Sequence: Synthetic oligonucleotide
gcuccacuugcuccacuag

SEQ ID NO: 1484468 - RNA, 19 nt, Artificial Sequence
  Description of Artificial Sequence: Synthetic oligonucleotide
cagcgauuucugcguaguc

SEQ ID NO: 1484469 - RNA, 19 nt, Artificial Sequence
  Description of Artificial Sequence: Synthetic oligonucleotide
ccagcaccgaagucucugc

SEQ ID NO: 1484470 - RNA, 19 nt, Artificial Sequence
  Description of Artificial Sequence: Synthetic oligonucleotide
acucgcugguuggugcucu

SEQ ID NO: 1484471 - RNA, 19 nt, Artificial Sequence
  Description of Artificial Sequence: Synthetic oligonucleotide
ucccggaacuccgcacgcc

SEQ ID NO: 1484472 - RNA, 19 nt, Artificial Sequence
  Description of Artificial Sequence: Synthetic oligonucleotide
gucgcacucuuagcugcag

SEQ ID NO: 1484473 - RNA, 19 nt, Artificial Sequence
  Description of Artificial Sequence: Synthetic oligonucleotide
ucguucgcaugcucuccua

SEQ ID NO: 1484474 - RNA, 19 nt, Artificial Sequence
  Description of Artificial Sequence: Synthetic oligonucleotide
acccuuaagucgacacaca

SEQ ID NO: 1484475 - RNA, 19 nt, Artificial Sequence
  Description of Artificial Sequence: Synthetic oligonucleotide
ggagucacugauauacccu

SEQ ID NO: 1484476 - RNA, 19 nt, Artificial Sequence
  Description of Artificial Sequence: Synthetic oligonucleotide
ucccagcaaguguccgggu

SEQ ID NO: 1484477 - RNA, 19 nt, Artificial Sequence
  Description of Artificial Sequence: Synthetic oligonucleotide
agauugccugugaggcuug

SEQ ID NO: 1484478 - RNA, 19 nt, Artificial Sequence
  Description of Artificial Sequence: Synthetic oligonucleotide
caguaacacugagaaucca

SEQ ID NO: 1484479 - RNA, 19 nt, Artificial Sequence
  Description of Artificial Sequence: Synthetic oligonucleotide
gguuugccggaagcgcucc

SEQ ID NO: 1484480 - RNA, 19 nt, Artificial Sequence
  Description of Artificial Sequence: Synthetic oligonucleotide
caccacaacacucgcuggu

SEQ ID NO: 1484481 - RNA, 19 nt, Artificial Sequence
  Description of Artificial Sequence: Synthetic oligonucleotide
gucguucgcaugcucuccu

SEQ ID NO: 1484482 - RNA, 19 nt, Artificial Sequence
  Description of Artificial Sequence: Synthetic oligonucleotide
ccuuaagucgacacacaua

SEQ ID NO: 1484483 - RNA, 19 nt, Artificial Sequence
  Description of Artificial Sequence: Synthetic oligonucleotide
agccagccaaguuguuguu

SEQ ID NO: 1484484 - RNA, 19 nt, Artificial Sequence
  Description of Artificial Sequence: Synthetic oligonucleotide
guuugucauacagcugcgu

SEQ ID NO: 1484485 - RNA, 19 nt, Artificial Sequence
  Description of Artificial Sequence: Synthetic oligonucleotide
ucgcgcuguuugucauaca

SEQ ID NO: 1484486 - RNA, 19 nt, Artificial Sequence
  Description of Artificial Sequence: Synthetic oligonucleotide
acggcuacaccaacuucuu

SEQ ID NO: 1484487 - RNA, 19 nt, Artificial Sequence
  Description of Artificial Sequence: Synthetic oligonucleotide
gcuccacuagcugucgcac

SEQ ID NO: 1484488 - RNA, 19 nt, Artificial Sequence
  Description of Artificial Sequence: Synthetic oligonucleotide
ggaacuccgcacgccuugc

SEQ ID NO: 1484489 - RNA, 19 nt, Artificial Sequence
  Description of Artificial Sequence: Synthetic oligonucleotide
ccggaauuuccucaauaaa

SEQ ID NO: 1484490 - RNA, 19 nt, Artificial Sequence
  Description of Artificial Sequence: Synthetic oligonucleotide
accagggguaugggaggug

SEQ ID NO: 1484491 - RNA, 19 nt, Artificial Sequence
  Description of Artificial Sequence: Synthetic oligonucleotide
ugucuccaaccagcaccga

SEQ ID NO: 1484492 - RNA, 19 nt, Artificial Sequence
  Description of Artificial Sequence: Synthetic oligonucleotide
ccaauccuucucccuuccc

SEQ ID NO: 1484493 - RNA, 19 nt, Artificial Sequence
  Description of Artificial Sequence: Synthetic oligonucleotide
accacccgcucagcauuag

SEQ ID NO: 1484494 - RNA, 19 nt, Artificial Sequence
  Description of Artificial Sequence: Synthetic oligonucleotide
cacccacccuuaagucgac

SEQ ID NO: 1484495 - RNA, 19 nt, Artificial Sequence
  Description of Artificial Sequence: Synthetic oligonucleotide
cucgcugguuggugcucuc

SEQ ID NO: 1484496 - RNA, 19 nt, Artificial Sequence
  Description of Artificial Sequence: Synthetic oligonucleotide
ggaauagcaaggagucacu

SEQ ID NO: 1484497 - RNA, 19 nt, Artificial Sequence
  Description of Artificial Sequence: Synthetic oligonucleotide
acuagcugucgcacucuua

SEQ ID NO: 1484498 - RNA, 19 nt, Artificial Sequence
  Description of Artificial Sequence: Synthetic oligonucleotide
cuugcuggcccacccacuu

SEQ ID NO: 1484499 - RNA, 19 nt, Artificial Sequence
  Description of Artificial Sequence: Synthetic oligonucleotide
cugucuccccaauguggaa

SEQ ID NO: 1484500 - RNA, 19 nt, Artificial Sequence
  Description of Artificial Sequence: Synthetic oligonucleotide
gcacucuuagcugcagcuc

SEQ ID NO: 1484501 - RNA, 19 nt, Artificial Sequence
  Description of Artificial Sequence: Synthetic oligonucleotide
acgccuugcuccgcagcca

SEQ ID NO: 1484502 - RNA, 19 nt, Artificial Sequence
  Description of Artificial Sequence: Synthetic oligonucleotide
gcacggcuacaccaacuuc

SEQ ID NO: 1484503 - RNA, 19 nt, Artificial Sequence
  Description of Artificial Sequence: Synthetic oligonucleotide
gcgggcugcaaaccacaac

SEQ ID NO: 1484504 - RNA, 19 nt, Artificial Sequence
  Description of Artificial Sequence: Synthetic oligonucleotide
ccacccuuaagucgacaca

SEQ ID NO: 1484505 - RNA, 19 nt, Artificial Sequence
  Description of Artificial Sequence: Synthetic oligonucleotide
gcacgccuugcuccgcagc

SEQ ID NO: 1484506 - RNA, 19 nt, Artificial Sequence
  Description of Artificial Sequence: Synthetic oligonucleotide
uccgcacgccuugcuccgc

SEQ ID NO: 1484507 - RNA, 19 nt, Artificial Sequence
  Description of Artificial Sequence: Synthetic oligonucleotide
cugcucaaaaucccauguu

SEQ ID NO: 1484508 - RNA, 19 nt, Artificial Sequence
  Description of Artificial Sequence: Synthetic oligonucleotide
accaaccucugggauccuu

SEQ ID NO: 1484509 - RNA, 19 nt, Artificial Sequence
  Description of Artificial Sequence: Synthetic oligonucleotide
gggucccggaacuccgcac

SEQ ID NO: 1484510 - RNA, 19 nt, Artificial Sequence
  Description of Artificial Sequence: Synthetic oligonucleotide
cguucgcaugcucuccuac

SEQ ID NO: 1484511 - RNA, 19 nt, Artificial Sequence
  Description of Artificial Sequence: Synthetic oligonucleotide
gguguucaccagggguaug

SEQ ID NO: 1484512 - RNA, 19 nt, Artificial Sequence
  Description of Artificial Sequence: Synthetic oligonucleotide
ccacccgcucagcauuagc

SEQ ID NO: 1484513 - RNA, 19 nt, Artificial Sequence
  Description of Artificial Sequence: Synthetic oligonucleotide
aaccaaccucugggauccu

SEQ ID NO: 1484514 - RNA, 19 nt, Artificial Sequence
  Description of Artificial Sequence: Synthetic oligonucleotide
gcacggcaaccccuccacc

SEQ ID NO: 1484515 - RNA, 19 nt, Artificial Sequence
  Description of Artificial Sequence: Synthetic oligonucleotide
ggcacggcuacaccaacuu

SEQ ID NO: 1484516 - RNA, 19 nt, Artificial Sequence
  Description of Artificial Sequence: Synthetic oligonucleotide
cuccacuagcugucgcacu

SEQ ID NO: 1484517 - RNA, 19 nt, Artificial Sequence
  Description of Artificial Sequence: Synthetic oligonucleotide
guccggguggggucccgga

SEQ ID NO: 1484518 - RNA, 19 nt, Artificial Sequence
  Description of Artificial Sequence: Synthetic oligonucleotide
gcaaggagucacugauaua

SEQ ID NO: 1484519 - RNA, 19 nt, Artificial Sequence
  Description of Artificial Sequence: Synthetic oligonucleotide
cucagaucagcaggcuggu

SEQ ID NO: 1484520 - RNA, 19 nt, Artificial Sequence
  Description of Artificial Sequence: Synthetic oligonucleotide
ccagggguaugggagguga

SEQ ID NO: 1484521 - RNA, 19 nt, Artificial Sequence
  Description of Artificial Sequence: Synthetic oligonucleotide
cggaacuccgcacgccuug

SEQ ID NO: 1484522 - RNA, 19 nt, Artificial Sequence
  Description of Artificial Sequence: Synthetic oligonucleotide
cccgcaucccucgucccag

SEQ ID NO: 1484523 - RNA, 19 nt, Artificial Sequence
  Description of Artificial Sequence: Synthetic oligonucleotide
ggggucccggaacuccgca

SEQ ID NO: 1484524 - RNA, 19 nt, Artificial Sequence
  Description of Artificial Sequence: Synthetic oligonucleotide
gcguccgauaguuuccgau

SEQ ID NO: 1484525 - RNA, 19 nt, Artificial Sequence
  Description of Artificial Sequence: Synthetic oligonucleotide
gcaugcuugcagucccucu

SEQ ID NO: 1484526 - RNA, 19 nt, Artificial Sequence
  Description of Artificial Sequence: Synthetic oligonucleotide
gcagcgauuucugcguagu

SEQ ID NO: 1484527 - RNA, 19 nt, Artificial Sequence
  Description of Artificial Sequence: Synthetic oligonucleotide
caccaggucccagagugau

SEQ ID NO: 1484528 - RNA, 19 nt, Artificial Sequence
  Description of Artificial Sequence: Synthetic oligonucleotide
gcuugucuuuggcagcgau

SEQ ID NO: 1484529 - RNA, 19 nt, Artificial Sequence
  Description of Artificial Sequence: Synthetic oligonucleotide
cccuuaagucgacacacau

SEQ ID NO: 1484530 - RNA, 19 nt, Artificial Sequence
  Description of Artificial Sequence: Synthetic oligonucleotide
gccccaccggccugcgcag

SEQ ID NO: 1484531 - RNA, 19 nt, Artificial Sequence
  Description of Artificial Sequence: Synthetic oligonucleotide
caccgcugguaguucugcu

SEQ ID NO: 1484532 - RNA, 19 nt, Artificial Sequence
  Description of Artificial Sequence: Synthetic oligonucleotide
gcccgcaucccucguccca

SEQ ID NO: 1484533 - RNA, 19 nt, Artificial Sequence
  Description of Artificial Sequence: Synthetic oligonucleotide
accggccugcgcaggcgca

SEQ ID NO: 1484534 - RNA, 19 nt, Artificial Sequence
  Description of Artificial Sequence: Synthetic oligonucleotide
ccaagacaccaaggguguc

SEQ ID NO: 1484535 - RNA, 19 nt, Artificial Sequence
  Description of Artificial Sequence: Synthetic oligonucleotide
ccuugcuccgcagccaucu

SEQ ID NO: 1484536 - RNA, 19 nt, Artificial Sequence
  Description of Artificial Sequence: Synthetic oligonucleotide
cacuagcugucgcacucuu

SEQ ID NO: 1484537 - RNA, 19 nt, Artificial Sequence
  Description of Artificial Sequence: Synthetic oligonucleotide
ccgcaucccucgucccagc

SEQ ID NO: 1484538 - RNA, 19 nt, Artificial Sequence
  Description of Artificial Sequence: Synthetic oligonucleotide
ccgcgggcugcaaaccaca

SEQ ID NO: 1484539 - RNA, 19 nt, Artificial Sequence
  Description of Artificial Sequence: Synthetic oligonucleotide
gcgcaggcgcagaccgccg

SEQ ID NO: 1484540 - RNA, 19 nt, Artificial Sequence
  Description of Artificial Sequence: Synthetic oligonucleotide
ccaaccucugggauccuuu

SEQ ID NO: 1484541 - RNA, 19 nt, Artificial Sequence
  Description of Artificial Sequence: Synthetic oligonucleotide
gccacgaggaugaguguuu

SEQ ID NO: 1484542 - RNA, 19 nt, Artificial Sequence
  Description of Artificial Sequence: Synthetic oligonucleotide
cgcacgccuugcuccgcag

SEQ ID NO: 1484543 - RNA, 19 nt, Artificial Sequence
  Description of Artificial Sequence: Synthetic oligonucleotide
cccggaacuccgcacgccu

SEQ ID NO: 1484544 - RNA, 19 nt, Artificial Sequence
  Description of Artificial Sequence: Synthetic oligonucleotide
cagcgcgucuccgcgggcu

SEQ ID NO: 1484545 - RNA, 19 nt, Artificial Sequence
  Description of Artificial Sequence: Synthetic oligonucleotide
ccucgcgcuguuugucaua

SEQ ID NO: 1484546 - RNA, 19 nt, Artificial Sequence
  Description of Artificial Sequence: Synthetic oligonucleotide
gcguagucguucgcaugcu

SEQ ID NO: 1484547 - RNA, 19 nt, Artificial Sequence
  Description of Artificial Sequence: Synthetic oligonucleotide
ccgcacgccuugcuccgca

SEQ ID NO: 1484548 - RNA, 19 nt, Artificial Sequence
  Description of Artificial Sequence: Synthetic oligonucleotide
gccuugcuccgcagccauc

SEQ ID NO: 1484549 - RNA, 19 nt, Artificial Sequence
  Description of Artificial Sequence: Synthetic oligonucleotide
ccccaccggccugcgcagg

SEQ ID NO: 1484550 - RNA, 19 nt, Artificial Sequence
  Description of Artificial Sequence: Synthetic oligonucleotide
ccgccaccgcugguaguuc

SEQ ID NO: 1484551 - RNA, 19 nt, Artificial Sequence
  Description of Artificial Sequence: Synthetic oligonucleotide
ccggaacuccgcacgccuu

SEQ ID NO: 1484552 - RNA, 19 nt, Artificial Sequence
  Description of Artificial Sequence: Synthetic oligonucleotide
cgccaccgcugguaguucu

SEQ ID NO: 1484553 - RNA, 19 nt, Artificial Sequence
  Description of Artificial Sequence: Synthetic oligonucleotide
cguccggaauuuccucaau

SEQ ID NO: 1484554 - RNA, 19 nt, Artificial Sequence
  Description of Artificial Sequence: Synthetic oligonucleotide
cgccuugcuccgcagccau

SEQ ID NO: 1484555 - RNA, 19 nt, Artificial Sequence
  Description of Artificial Sequence: Synthetic oligonucleotide
aauaucagcuuccagcugc

SEQ ID NO: 1484556 - RNA, 19 nt, Artificial Sequence
  Description of Artificial Sequence: Synthetic oligonucleotide
agaacgaugaugcagaggg

SEQ ID NO: 1484557 - RNA, 19 nt, Artificial Sequence
  Description of Artificial Sequence: Synthetic oligonucleotide
acaaauguuaaacuaagac

SEQ ID NO: 1484558 - RNA, 19 nt, Artificial Sequence
  Description of Artificial Sequence: Synthetic oligonucleotide
aauaaauuccccaaaacuc

SEQ ID NO: 1484559 - RNA, 19 nt, Artificial Sequence
  Description of Artificial Sequence: Synthetic oligonucleotide
uacaaugugagcaaaaccc

SEQ ID NO: 1484560 - RNA, 19 nt, Artificial Sequence
  Description of Artificial Sequence: Synthetic oligonucleotide
aacagcauggacauuauac

SEQ ID NO: 1484561 - RNA, 19 nt, Artificial Sequence
  Description of Artificial Sequence: Synthetic oligonucleotide
uccaaguugauucagaguc

SEQ ID NO: 1484562 - RNA, 19 nt, Artificial Sequence
  Description of Artificial Sequence: Synthetic oligonucleotide
uuaauguccaaaauaucag

SEQ ID NO: 1484563 - RNA, 19 nt, Artificial Sequence
  Description of Artificial Sequence: Synthetic oligonucleotide
aggacaagaacgaugaugc

SEQ ID NO: 1484564 - RNA, 19 nt, Artificial Sequence
  Description of Artificial Sequence: Synthetic oligonucleotide
ucucucaugaauaaggcgu

SEQ ID NO: 1484565 - RNA, 19 nt, Artificial Sequence
  Description of Artificial Sequence: Synthetic oligonucleotide
uauuuaguuacuauuucac

SEQ ID NO: 1484566 - RNA, 19 nt, Artificial Sequence
  Description of Artificial Sequence: Synthetic oligonucleotide
cuauauaagaccaucauaa

SEQ ID NO: 1484567 - RNA, 19 nt, Artificial Sequence
  Description of Artificial Sequence: Synthetic oligonucleotide
ucagaucgaauucaaaaga

SEQ ID NO: 1484568 - RNA, 19 nt, Artificial Sequence
  Description of Artificial Sequence: Synthetic oligonucleotide
gaucgaauucaaaagaacc

SEQ ID NO: 1484569 - RNA, 19 nt, Artificial Sequence
  Description of Artificial Sequence: Synthetic oligonucleotide
aucagaucgaauucaaaag

SEQ ID NO: 1484570 - RNA, 19 nt, Artificial Sequence
  Description of Artificial Sequence: Synthetic oligonucleotide
guuaaacuaagacaacucc

SEQ ID NO: 1484571 - RNA, 19 nt, Artificial Sequence
  Description of Artificial Sequence: Synthetic oligonucleotide
agauuagugcauuaaaaca

SEQ ID NO: 1484572 - RNA, 19 nt, Artificial Sequence
  Description of Artificial Sequence: Synthetic oligonucleotide
cauacgaugagacagauaa

SEQ ID NO: 1484573 - RNA, 19 nt, Artificial Sequence
  Description of Artificial Sequence: Synthetic oligonucleotide
aggaaaaccacccgauacc

SEQ ID NO: 1484574 - RNA, 19 nt, Artificial Sequence
  Description of Artificial Sequence: Synthetic oligonucleotide
aaguugguuaguauauugc

SEQ ID NO: 1484575 - RNA, 19 nt, Artificial Sequence
  Description of Artificial Sequence: Synthetic oligonucleotide
uggauguuagaagagaugc

SEQ ID NO: 1484576 - RNA, 19 nt, Artificial Sequence
  Description of Artificial Sequence: Synthetic oligonucleotide
uaucagaucgaauucaaaa

SEQ ID NO: 1484577 - RNA, 19 nt, Artificial Sequence
  Description of Artificial Sequence: Synthetic oligonucleotide
aaucacaaguccaacgacg

SEQ ID NO: 1484578 - RNA, 19 nt, Artificial Sequence
  Description of Artificial Sequence: Synthetic oligonucleotide
gacauuauaccagcaaugg

SEQ ID NO: 1484579 - RNA, 19 nt, Artificial Sequence
  Description of Artificial Sequence: Synthetic oligonucleotide
uuugacgcuguucacuggg

SEQ ID NO: 1484580 - RNA, 19 nt, Artificial Sequence
  Description of Artificial Sequence: Synthetic oligonucleotide
acaauagaaagugaccucg

SEQ ID NO: 1484581 - RNA, 19 nt, Artificial Sequence
  Description of Artificial Sequence: Synthetic oligonucleotide
aaggcaagugaguucauug

SEQ ID NO: 1484582 - RNA, 19 nt, Artificial Sequence
  Description of Artificial Sequence: Synthetic oligonucleotide
uguaagacauggcugguug

SEQ ID NO: 1484583 - RNA, 19 nt, Artificial Sequence
  Description of Artificial Sequence: Synthetic oligonucleotide
ucucacucgagcaacaaac

SEQ ID NO: 1484584 - RNA, 19 nt, Artificial Sequence
  Description of Artificial Sequence: Synthetic oligonucleotide
ugaacuaaacagcauggac

SEQ ID NO: 1484585 - RNA, 19 nt, Artificial Sequence
  Description of Artificial Sequence: Synthetic oligonucleotide
gauguuagaagagaugcgc

SEQ ID NO: 1484586 - RNA, 19 nt, Artificial Sequence
  Description of Artificial Sequence: Synthetic oligonucleotide
aagaccaucauaaaacaca

SEQ ID NO: 1484587 - RNA, 19 nt, Artificial Sequence
  Description of Artificial Sequence: Synthetic oligonucleotide
gacagauaaucacaagucc

SEQ ID NO: 1484588 - RNA, 19 nt, Artificial Sequence
  Description of Artificial Sequence: Synthetic oligonucleotide
ucuggauuugcgcugauaa

SEQ ID NO: 1484589 - RNA, 19 nt, Artificial Sequence
  Description of Artificial Sequence: Synthetic oligonucleotide
uggaguguaagacauggcu

SEQ ID NO: 1484590 - RNA, 19 nt, Artificial Sequence
  Description of Artificial Sequence: Synthetic oligonucleotide
cauugaacuaaacagcaug

SEQ ID NO: 1484591 - RNA, 19 nt, Artificial Sequence
  Description of Artificial Sequence: Synthetic oligonucleotide
ucagauuagugcauuaaaa

SEQ ID NO: 1484592 - RNA, 19 nt, Artificial Sequence
  Description of Artificial Sequence: Synthetic oligonucleotide
acuuaucuguuucuuucgc

SEQ ID NO: 1484593 - RNA, 19 nt, Artificial Sequence
  Description of Artificial Sequence: Synthetic oligonucleotide
ugaagacucucucucauga

SEQ ID NO: 1484594 - RNA, 19 nt, Artificial Sequence
  Description of Artificial Sequence: Synthetic oligonucleotide
uuaaucuaaugaaguauga

SEQ ID NO: 1484595 - RNA, 19 nt, Artificial Sequence
  Description of Artificial Sequence: Synthetic oligonucleotide
cagauuagugcauuaaaac

SEQ ID NO: 1484596 - RNA, 19 nt, Artificial Sequence
  Description of Artificial Sequence: Synthetic oligonucleotide
ugcucaugaaucaucauuc

SEQ ID NO: 1484597 - RNA, 19 nt, Artificial Sequence
  Description of Artificial Sequence: Synthetic oligonucleotide
uaauguacuuaucuguuuc

SEQ ID NO: 1484598 - RNA, 19 nt, Artificial Sequence
  Description of Artificial Sequence: Synthetic oligonucleotide
ugcgcugauaaucugcugc

SEQ ID NO: 1484599 - RNA, 19 nt, Artificial Sequence
  Description of Artificial Sequence: Synthetic oligonucleotide
uguaaauucugccacuaau

SEQ ID NO: 1484600 - RNA, 19 nt, Artificial Sequence
  Description of Artificial Sequence: Synthetic oligonucleotide
agugcauuaaaacauugau

SEQ ID NO: 1484601 - RNA, 19 nt, Artificial Sequence
  Description of Artificial Sequence: Synthetic oligonucleotide
aaauaucagaucgaauuca

SEQ ID NO: 1484602 - RNA, 19 nt, Artificial Sequence
  Description of Artificial Sequence: Synthetic oligonucleotide
uuuaauguacuuaucuguu

SEQ ID NO: 1484603 - RNA, 19 nt, Artificial Sequence
  Description of Artificial Sequence: Synthetic oligonucleotide
uaagacaacuccuuuuaca

SEQ ID NO: 1484604 - RNA, 19 nt, Artificial Sequence
  Description of Artificial Sequence: Synthetic oligonucleotide
aaugugagcaaaacccaac

SEQ ID NO: 1484605 - RNA, 19 nt, Artificial Sequence
  Description of Artificial Sequence: Synthetic oligonucleotide
ucaugaauaaggcguaggu

SEQ ID NO: 1484606 - RNA, 19 nt, Artificial Sequence
  Description of Artificial Sequence: Synthetic oligonucleotide
auugaacuaaacagcaugg

SEQ ID NO: 1484607 - RNA, 19 nt, Artificial Sequence
  Description of Artificial Sequence: Synthetic oligonucleotide
acauuaaacaaugacuuca

SEQ ID NO: 1484608 - RNA, 19 nt, Artificial Sequence
  Description of Artificial Sequence: Synthetic oligonucleotide
aauguacuuaucuguuucu

SEQ ID NO: 1484609 - RNA, 19 nt, Artificial Sequence
  Description of Artificial Sequence: Synthetic oligonucleotide
uaaacuaagacaacuccuu

SEQ ID NO: 1484610 - RNA, 19 nt, Artificial Sequence
  Description of Artificial Sequence: Synthetic oligonucleotide
uuagugcauuaaaacauug

SEQ ID NO: 1484611 - RNA, 19 nt, Artificial Sequence
  Description of Artificial Sequence: Synthetic oligonucleotide
gacaagaacgaugaugcag

SEQ ID NO: 1484612 - RNA, 19 nt, Artificial Sequence
  Description of Artificial Sequence: Synthetic oligonucleotide
aacccaacagucauugaac

SEQ ID NO: 1484613 - RNA, 19 nt, Artificial Sequence
  Description of Artificial Sequence: Synthetic oligonucleotide
gaacuaaacagcauggaca

SEQ ID NO: 1484614 - RNA, 19 nt, Artificial Sequence
  Description of Artificial Sequence: Synthetic oligonucleotide
agacagauaaucacaaguc

SEQ ID NO: 1484615 - RNA, 19 nt, Artificial Sequence
  Description of Artificial Sequence: Synthetic oligonucleotide
ugugagcaaaacccaacag

SEQ ID NO: 1484616 - RNA, 19 nt, Artificial Sequence
  Description of Artificial Sequence: Synthetic oligonucleotide
ugcaaggauacaauuauuu

SEQ ID NO: 1484617 - RNA, 19 nt, Artificial Sequence
  Description of Artificial Sequence: Synthetic oligonucleotide
auuuaguuacuauuucacu

SEQ ID NO: 1484618 - RNA, 19 nt, Artificial Sequence
  Description of Artificial Sequence: Synthetic oligonucleotide
ucuuugacgcuguucacug

SEQ ID NO: 1484619 - RNA, 19 nt, Artificial Sequence
  Description of Artificial Sequence: Synthetic oligonucleotide
gaugcaaguggguugugug

SEQ ID NO: 1484620 - RNA, 19 nt, Artificial Sequence
  Description of Artificial Sequence: Synthetic oligonucleotide
uggacauuauaccagcaau

SEQ ID NO: 1484621 - RNA, 19 nt, Artificial Sequence
  Description of Artificial Sequence: Synthetic oligonucleotide
aauaaggcguaggucaucu

SEQ ID NO: 1484622 - RNA, 19 nt, Artificial Sequence
  Description of Artificial Sequence: Synthetic oligonucleotide
auagaaagugaccucgaga

SEQ ID NO: 1484623 - RNA, 19 nt, Artificial Sequence
  Description of Artificial Sequence: Synthetic oligonucleotide
uuucaguccccauacgaug

SEQ ID NO: 1484624 - RNA, 19 nt, Artificial Sequence
  Description of Artificial Sequence: Synthetic oligonucleotide
uccccauacgaugagacag

SEQ ID NO: 1484625 - RNA, 19 nt, Artificial Sequence
  Description of Artificial Sequence: Synthetic oligonucleotide
aacccagacgacgucgugc

SEQ ID NO: 1484626 - RNA, 19 nt, Artificial Sequence
  Description of Artificial Sequence: Synthetic oligonucleotide
aaaguaugggaccauccuu

SEQ ID NO: 1484627 - RNA, 19 nt, Artificial Sequence
  Description of Artificial Sequence: Synthetic oligonucleotide
ucgagcaacaaacucuuuc

SEQ ID NO: 1484628 - RNA, 19 nt, Artificial Sequence
  Description of Artificial Sequence: Synthetic oligonucleotide
caaguugguuaguauauug

SEQ ID NO: 1484629 - RNA, 19 nt, Artificial Sequence
  Description of Artificial Sequence: Synthetic oligonucleotide
agccuuucaguccccauac

SEQ ID NO: 1484630 - RNA, 19 nt, Artificial Sequence
  Description of Artificial Sequence: Synthetic oligonucleotide
acaaaguaugggaccaucc

SEQ ID NO: 1484631 - RNA, 19 nt, Artificial Sequence
  Description of Artificial Sequence: Synthetic oligonucleotide
aaacucaguacaaacaaua

SEQ ID NO: 1484632 - RNA, 19 nt, Artificial Sequence
  Description of Artificial Sequence: Synthetic oligonucleotide
aacuaagacaacuccuuuu

SEQ ID NO: 1484633 - RNA, 19 nt, Artificial Sequence
  Description of Artificial Sequence: Synthetic oligonucleotide
agaucgaauucaaaagaac

SEQ ID NO: 1484634 - RNA, 19 nt, Artificial Sequence
  Description of Artificial Sequence: Synthetic oligonucleotide
gaggacaagaacgaugaug

SEQ ID NO: 1484635 - RNA, 19 nt, Artificial Sequence
  Description of Artificial Sequence: Synthetic oligonucleotide
cacaaguccaacgacgagg

SEQ ID NO: 1484636 - RNA, 19 nt, Artificial Sequence
  Description of Artificial Sequence: Synthetic oligonucleotide
cauugugugaucuuuugga

SEQ ID NO: 1484637 - RNA, 19 nt, Artificial Sequence
  Description of Artificial Sequence: Synthetic oligonucleotide
uauauaagaccaucauaaa

SEQ ID NO: 1484638 - RNA, 19 nt, Artificial Sequence
  Description of Artificial Sequence: Synthetic oligonucleotide
uucuuaaucuaaugaagua

SEQ ID NO: 1484639 - RNA, 19 nt, Artificial Sequence
  Description of Artificial Sequence: Synthetic oligonucleotide
ucgagaaucugccuacaga

SEQ ID NO: 1484640 - RNA, 19 nt, Artificial Sequence
  Description of Artificial Sequence: Synthetic oligonucleotide
cuuuuggauguuagaagag

SEQ ID NO: 1484641 - RNA, 19 nt, Artificial Sequence
  Description of Artificial Sequence: Synthetic oligonucleotide
uaaucacaaguccaacgac

SEQ ID NO: 1484642 - RNA, 19 nt, Artificial Sequence
  Description of Artificial Sequence: Synthetic oligonucleotide
uacagaacccagacgacgu

SEQ ID NO: 1484643 - RNA, 19 nt, Artificial Sequence
  Description of Artificial Sequence: Synthetic oligonucleotide
uggauuugcgcugauaauc

SEQ ID NO: 1484644 - RNA, 19 nt, Artificial Sequence
  Description of Artificial Sequence: Synthetic oligonucleotide
uugaacguguaccucugca

SEQ ID NO: 1484645 - RNA, 19 nt, Artificial Sequence
  Description of Artificial Sequence: Synthetic oligonucleotide
uucaguccccauacgauga

SEQ ID NO: 1484646 - RNA, 19 nt, Artificial Sequence
  Description of Artificial Sequence: Synthetic oligonucleotide
aucagaugcaaguggguug

SEQ ID NO: 1484647 - RNA, 19 nt, Artificial Sequence
  Description of Artificial Sequence: Synthetic oligonucleotide
uuagaagagaugcgcugug

SEQ ID NO: 1484648 - RNA, 19 nt, Artificial Sequence
  Description of Artificial Sequence: Synthetic oligonucleotide
uaaucgguccuucuguauc

SEQ ID NO: 1484649 - RNA, 19 nt, Artificial Sequence
  Description of Artificial Sequence: Synthetic oligonucleotide
ucugccacuaaucgguccu

SEQ ID NO: 1484650 - RNA, 19 nt, Artificial Sequence
  Description of Artificial Sequence: Synthetic oligonucleotide
uugcucaugaaucaucauu

SEQ ID NO: 1484651 - RNA, 19 nt, Artificial Sequence
  Description of Artificial Sequence: Synthetic oligonucleotide
ucuaugcugucaaucacau

SEQ ID NO: 1484652 - RNA, 19 nt, Artificial Sequence
  Description of Artificial Sequence: Synthetic oligonucleotide
ucgaauucaaaagaaccuc

SEQ ID NO: 1484653 - RNA, 19 nt, Artificial Sequence
  Description of Artificial Sequence: Synthetic oligonucleotide
aacuccuuuuacagcauuc

SEQ ID NO: 1484654 - RNA, 19 nt, Artificial Sequence
  Description of Artificial Sequence: Synthetic oligonucleotide
gaaucaucauucccaaguc

SEQ ID NO: 1484655 - RNA, 19 nt, Artificial Sequence
  Description of Artificial Sequence: Synthetic oligonucleotide
agauaaucacaaguccaac

SEQ ID NO: 1484656 - RNA, 19 nt, Artificial Sequence
  Description of Artificial Sequence: Synthetic oligonucleotide
augcaaguggguugugugg

SEQ ID NO: 1484657 - RNA, 19 nt, Artificial Sequence
  Description of Artificial Sequence: Synthetic oligonucleotide
ugacuucacuagcaaacug

SEQ ID NO: 1484658 - RNA, 19 nt, Artificial Sequence
  Description of Artificial Sequence: Synthetic oligonucleotide
acagauaaucacaagucca

SEQ ID NO: 1484659 - RNA, 19 nt, Artificial Sequence
  Description of Artificial Sequence: Synthetic oligonucleotide
aucgaauucaaaagaaccu

SEQ ID NO: 1484660 - RNA, 19 nt, Artificial Sequence
  Description of Artificial Sequence: Synthetic oligonucleotide
guugauucagaguccuuug

SEQ ID NO: 1484661 - RNA, 19 nt, Artificial Sequence
  Description of Artificial Sequence: Synthetic oligonucleotide
acaagaacgaugaugcaga

SEQ ID NO: 1484662 - RNA, 19 nt, Artificial Sequence
  Description of Artificial Sequence: Synthetic oligonucleotide
ugaacguguaccucugcac

SEQ ID NO: 1484663 - RNA, 19 nt, Artificial Sequence
  Description of Artificial Sequence: Synthetic oligonucleotide
acucaguacaaacaauaau

SEQ ID NO: 1484664 - RNA, 19 nt, Artificial Sequence
  Description of Artificial Sequence: Synthetic oligonucleotide
uguugaacguguaccucug

SEQ ID NO: 1484665 - RNA, 19 nt, Artificial Sequence
  Description of Artificial Sequence: Synthetic oligonucleotide
guugccucaguucugguga

SEQ ID NO: 1484666 - RNA, 19 nt, Artificial Sequence
  Description of Artificial Sequence: Synthetic oligonucleotide
aauaucagaucgaauucaa

SEQ ID NO: 1484667 - RNA, 19 nt, Artificial Sequence
  Description of Artificial Sequence: Synthetic oligonucleotide
augugagcaaaacccaaca

SEQ ID NO: 1484668 - RNA, 19 nt, Artificial Sequence
  Description of Artificial Sequence: Synthetic oligonucleotide
uaagacauggcugguuggc

SEQ ID NO: 1484669 - RNA, 19 nt, Artificial Sequence
  Description of Artificial Sequence: Synthetic oligonucleotide
aaagugaccucgagaaucu

SEQ ID NO: 1484670 - RNA, 19 nt, Artificial Sequence
  Description of Artificial Sequence: Synthetic oligonucleotide
uaaucuaaugaaguaugau

SEQ ID NO: 1484671 - RNA, 19 nt, Artificial Sequence
  Description of Artificial Sequence: Synthetic oligonucleotide
cuacagaacccagacgacg

SEQ ID NO: 1484672 - RNA, 19 nt, Artificial Sequence
  Description of Artificial Sequence: Synthetic oligonucleotide
uuaauguacuuaucuguuu

SEQ ID NO: 1484673 - RNA, 19 nt, Artificial Sequence
  Description of Artificial Sequence: Synthetic oligonucleotide
gucauugaacuaaacagca

SEQ ID NO: 1484674 - RNA, 19 nt, Artificial Sequence
  Description of Artificial Sequence: Synthetic oligonucleotide
cugguucgccuguugaacg

SEQ ID NO: 1484675 - RNA, 19 nt, Artificial Sequence
  Description of Artificial Sequence: Synthetic oligonucleotide
uuaguauauugcugcuucu

SEQ ID NO: 1484676 - RNA, 19 nt, Artificial Sequence
  Description of Artificial Sequence: Synthetic oligonucleotide
ugaauaaggcguaggucau

SEQ ID NO: 1484677 - RNA, 19 nt, Artificial Sequence
  Description of Artificial Sequence: Synthetic oligonucleotide
cuaaugaaguaugauaaaa

SEQ ID NO: 1484678 - RNA, 19 nt, Artificial Sequence
  Description of Artificial Sequence: Synthetic oligonucleotide
cagcauucagauuagugca

SEQ ID NO: 1484679 - RNA, 19 nt, Artificial Sequence
  Description of Artificial Sequence: Synthetic oligonucleotide
aacgaugaugcagaggguu

SEQ ID NO: 1484680 - RNA, 19 nt, Artificial Sequence
  Description of Artificial Sequence: Synthetic oligonucleotide
ucagaugcaaguggguugu

SEQ ID NO: 1484681 - RNA, 19 nt, Artificial Sequence
  Description of Artificial Sequence: Synthetic oligonucleotide
agagaugcgcugugccagc

SEQ ID NO: 1484682 - RNA, 19 nt, Artificial Sequence
  Description of Artificial Sequence: Synthetic oligonucleotide
gacgaggacaagaacgaug

SEQ ID NO: 1484683 - RNA, 19 nt, Artificial Sequence
  Description of Artificial Sequence: Synthetic oligonucleotide
aaaacucaguacaaacaau

SEQ ID NO: 1484684 - RNA, 19 nt, Artificial Sequence
  Description of Artificial Sequence: Synthetic oligonucleotide
agcauggacauuauaccag

SEQ ID NO: 1484685 - RNA, 19 nt, Artificial Sequence
  Description of Artificial Sequence: Synthetic oligonucleotide
augacaaaguaugggacca

SEQ ID NO: 1484686 - RNA, 19 nt, Artificial Sequence
  Description of Artificial Sequence: Synthetic oligonucleotide
uccuuuacaccacugccuu

SEQ ID NO: 1484687 - RNA, 19 nt, Artificial Sequence
  Description of Artificial Sequence: Synthetic oligonucleotide
cacauuaaacaaugacuuc

SEQ ID NO: 1484688 - RNA, 19 nt, Artificial Sequence
  Description of Artificial Sequence: Synthetic oligonucleotide
uccaacgacgaggacaaga

SEQ ID NO: 1484689 - RNA, 19 nt, Artificial Sequence
  Description of Artificial Sequence: Synthetic oligonucleotide
acgaggacaagaacgauga

SEQ ID NO: 1484690 - RNA, 19 nt, Artificial Sequence
  Description of Artificial Sequence: Synthetic oligonucleotide
cucaugaauaaggcguagg

SEQ ID NO: 1484691 - RNA, 19 nt, Artificial Sequence
  Description of Artificial Sequence: Synthetic oligonucleotide
ugguuuucuaggagucacc

SEQ ID NO: 1484692 - RNA, 19 nt, Artificial Sequence
  Description of Artificial Sequence: Synthetic oligonucleotide
aaguaugggaccauccuuu

SEQ ID NO: 1484693 - RNA, 19 nt, Artificial Sequence
  Description of Artificial Sequence: Synthetic oligonucleotide
auggacauuauaccagcaa

SEQ ID NO: 1484694 - RNA, 19 nt, Artificial Sequence
  Description of Artificial Sequence: Synthetic oligonucleotide
ucgcaaguugguuaguaua

SEQ ID NO: 1484695 - RNA, 19 nt, Artificial Sequence
  Description of Artificial Sequence: Synthetic oligonucleotide
ucccuggaguguaagacau

SEQ ID NO: 1484696 - RNA, 19 nt, Artificial Sequence
  Description of Artificial Sequence: Synthetic oligonucleotide
caugaauaaggcguagguc

SEQ ID NO: 1484697 - RNA, 19 nt, Artificial Sequence
  Description of Artificial Sequence: Synthetic oligonucleotide
uuuucuggauuugcgcuga

SEQ ID NO: 1484698 - RNA, 19 nt, Artificial Sequence
  Description of Artificial Sequence: Synthetic oligonucleotide
gauuugcgcugauaaucug

SEQ ID NO: 1484699 - RNA, 19 nt, Artificial Sequence
  Description of Artificial Sequence: Synthetic oligonucleotide
uccacagagcauuguguga

SEQ ID NO: 1484700 - RNA, 19 nt, Artificial Sequence
  Description of Artificial Sequence: Synthetic oligonucleotide
cagauaaucacaaguccaa

SEQ ID NO: 1484701 - RNA, 19 nt, Artificial Sequence
  Description of Artificial Sequence: Synthetic oligonucleotide
auacccuggagcuggcucu

SEQ ID NO: 1484702 - RNA, 19 nt, Artificial Sequence
  Description of Artificial Sequence: Synthetic oligonucleotide
cagaucgaauucaaaagaa

SEQ ID NO: 1484703 - RNA, 19 nt, Artificial Sequence
  Description of Artificial Sequence: Synthetic oligonucleotide
guugugugguuuucuagga

SEQ ID NO: 1484704 - RNA, 19 nt, Artificial Sequence
  Description of Artificial Sequence: Synthetic oligonucleotide
auaucagcuuccagcugcc

SEQ ID NO: 1484705 - RNA, 19 nt, Artificial Sequence
  Description of Artificial Sequence: Synthetic oligonucleotide
aacguguaccucugcacuu

SEQ ID NO: 1484706 - RNA, 19 nt, Artificial Sequence
  Description of Artificial Sequence: Synthetic oligonucleotide
uccuugcucaugaaucauc

SEQ ID NO: 1484707 - RNA, 19 nt, Artificial Sequence
  Description of Artificial Sequence: Synthetic oligonucleotide
acagaacccagacgacguc

SEQ ID NO: 1484708 - RNA, 19 nt, Artificial Sequence
  Description of Artificial Sequence: Synthetic oligonucleotide
ugguuaguauauugcugcu

SEQ ID NO: 1484709 - RNA, 19 nt, Artificial Sequence
  Description of Artificial Sequence: Synthetic oligonucleotide
gugagcaaaacccaacagu

SEQ ID NO: 1484710 - RNA, 19 nt, Artificial Sequence
  Description of Artificial Sequence: Synthetic oligonucleotide
uccccaaaacucaguacaa

SEQ ID NO: 1484711 - RNA, 19 nt, Artificial Sequence
  Description of Artificial Sequence: Synthetic oligonucleotide
acaaguccaacgacgagga

SEQ ID NO: 1484712 - RNA, 19 nt, Artificial Sequence
  Description of Artificial Sequence: Synthetic oligonucleotide
uucgcaaguugguuaguau

SEQ ID NO: 1484713 - RNA, 19 nt, Artificial Sequence
  Description of Artificial Sequence: Synthetic oligonucleotide
caagaacgaugaugcagag

SEQ ID NO: 1484714 - RNA, 19 nt, Artificial Sequence
  Description of Artificial Sequence: Synthetic oligonucleotide
cagaacccagacgacgucg

SEQ ID NO: 1484715 - RNA, 19 nt, Artificial Sequence
  Description of Artificial Sequence: Synthetic oligonucleotide
gauucagaguccuuuggau

SEQ ID NO: 1484716 - RNA, 19 nt, Artificial Sequence
  Description of Artificial Sequence: Synthetic oligonucleotide
agaccaucauaaaacacaa

SEQ ID NO: 1484717 - RNA, 19 nt, Artificial Sequence
  Description of Artificial Sequence: Synthetic oligonucleotide
ggacauuauaccagcaaug

SEQ ID NO: 1484718 - RNA, 19 nt, Artificial Sequence
  Description of Artificial Sequence: Synthetic oligonucleotide
cuuugacgcuguucacugg

SEQ ID NO: 1484719 - RNA, 19 nt, Artificial Sequence
  Description of Artificial Sequence: Synthetic oligonucleotide
ggaguguaagacauggcug

SEQ ID NO: 1484720 - RNA, 19 nt, Artificial Sequence
  Description of Artificial Sequence: Synthetic oligonucleotide
uguucccauuuaaaggcuu

SEQ ID NO: 1484721 - RNA, 19 nt, Artificial Sequence
  Description of Artificial Sequence: Synthetic oligonucleotide
cugcuauauaagaccauca

SEQ ID NO: 1484722 - RNA, 19 nt, Artificial Sequence
  Description of Artificial Sequence: Synthetic oligonucleotide
gaacguguaccucugcacu

SEQ ID NO: 1484723 - RNA, 19 nt, Artificial Sequence
  Description of Artificial Sequence: Synthetic oligonucleotide
auuagugcauuaaaacauu

SEQ ID NO: 1484724 - RNA, 19 nt, Artificial Sequence
  Description of Artificial Sequence: Synthetic oligonucleotide
guaccucugcacuuucuac

SEQ ID NO: 1484725 - RNA, 19 nt, Artificial Sequence
  Description of Artificial Sequence: Synthetic oligonucleotide
ugucagugauguuguaaau

SEQ ID NO: 1484726 - RNA, 19 nt, Artificial Sequence
  Description of Artificial Sequence: Synthetic oligonucleotide
acgaugagacagauaauca

SEQ ID NO: 1484727 - RNA, 19 nt, Artificial Sequence
  Description of Artificial Sequence: Synthetic oligonucleotide
uucccauuuaaaggcuuca

SEQ ID NO: 1484728 - RNA, 19 nt, Artificial Sequence
  Description of Artificial Sequence: Synthetic oligonucleotide
uaccagcaaugguauuuag

SEQ ID NO: 1484729 - RNA, 19 nt, Artificial Sequence
  Description of Artificial Sequence: Synthetic oligonucleotide
aguccaacgacgaggacaa

SEQ ID NO: 1484730 - RNA, 19 nt, Artificial Sequence
  Description of Artificial Sequence: Synthetic oligonucleotide
acuaaucgguccuucugua

SEQ ID NO: 1484731 - RNA, 19 nt, Artificial Sequence
  Description of Artificial Sequence: Synthetic oligonucleotide
cucgagaaucugccuacag

SEQ ID NO: 1484732 - RNA, 19 nt, Artificial Sequence
  Description of Artificial Sequence: Synthetic oligonucleotide
acagagcauugugugaucu

SEQ ID NO: 1484733 - RNA, 19 nt, Artificial Sequence
  Description of Artificial Sequence: Synthetic oligonucleotide
auccuuuacaccacugccu

SEQ ID NO: 1484734 - RNA, 19 nt, Artificial Sequence
  Description of Artificial Sequence: Synthetic oligonucleotide
aaaggcaagugaguucauu

SEQ ID NO: 1484735 - RNA, 19 nt, Artificial Sequence
  Description of Artificial Sequence: Synthetic oligonucleotide
uuucgcaaguugguuagua

SEQ ID NO: 1484736 - RNA, 19 nt, Artificial Sequence
  Description of Artificial Sequence: Synthetic oligonucleotide
ugagguguuccaaguugau

SEQ ID NO: 1484737 - RNA, 19 nt, Artificial Sequence
  Description of Artificial Sequence: Synthetic oligonucleotide
cacucgagcaacaaacucu

SEQ ID NO: 1484738 - RNA, 19 nt, Artificial Sequence
  Description of Artificial Sequence: Synthetic oligonucleotide
acgacgaggacaagaacga

SEQ ID NO: 1484739 - RNA, 19 nt, Artificial Sequence
  Description of Artificial Sequence: Synthetic oligonucleotide
caauagaaagugaccucga

SEQ ID NO: 1484740 - RNA, 19 nt, Artificial Sequence
  Description of Artificial Sequence: Synthetic oligonucleotide
cugccuuuaaaauaacaau

SEQ ID NO: 1484741 - RNA, 19 nt, Artificial Sequence
  Description of Artificial Sequence: Synthetic oligonucleotide
ugguucgccuguugaacgu

SEQ ID NO: 1484742 - RNA, 19 nt, Artificial Sequence
  Description of Artificial Sequence: Synthetic oligonucleotide
gagcaaaacccaacaguca

SEQ ID NO: 1484743 - RNA, 19 nt, Artificial Sequence
  Description of Artificial Sequence: Synthetic oligonucleotide
guugaacguguaccucugc

SEQ ID NO: 1484744 - RNA, 19 nt, Artificial Sequence
  Description of Artificial Sequence: Synthetic oligonucleotide
ccaaguugauucagagucc

SEQ ID NO: 1484745 - RNA, 19 nt, Artificial Sequence
  Description of Artificial Sequence: Synthetic oligonucleotide
ucgugcagcgguccacucu

SEQ ID NO: 1484746 - RNA, 19 nt, Artificial Sequence
  Description of Artificial Sequence: Synthetic oligonucleotide
uggguugugugguuuucua

SEQ ID NO: 1484747 - RNA, 19 nt, Artificial Sequence
  Description of Artificial Sequence: Synthetic oligonucleotide
ggguugugugguuuucuag

SEQ ID NO: 1484748 - RNA, 19 nt, Artificial Sequence
  Description of Artificial Sequence: Synthetic oligonucleotide
aaccacccgauacccugga

SEQ ID NO: 1484749 - RNA, 19 nt, Artificial Sequence
  Description of Artificial Sequence: Synthetic oligonucleotide
cgaugagacagauaaucac

SEQ ID NO: 1484750 - RNA, 19 nt, Artificial Sequence
  Description of Artificial Sequence: Synthetic oligonucleotide
ccauccuuuacaccacugc

SEQ ID NO: 1484751 - RNA, 19 nt, Artificial Sequence
  Description of Artificial Sequence: Synthetic oligonucleotide
guaugggaccauccuuuac

SEQ ID NO: 1484752 - RNA, 19 nt, Artificial Sequence
  Description of Artificial Sequence: Synthetic oligonucleotide
gacgacgucgugcagcggu

SEQ ID NO: 1484753 - RNA, 19 nt, Artificial Sequence
  Description of Artificial Sequence: Synthetic oligonucleotide
agaugcaaguggguugugu

SEQ ID NO: 1484754 - RNA, 19 nt, Artificial Sequence
  Description of Artificial Sequence: Synthetic oligonucleotide
aguaugggaccauccuuua

SEQ ID NO: 1484755 - RNA, 19 nt, Artificial Sequence
  Description of Artificial Sequence: Synthetic oligonucleotide
caaaguaugggaccauccu

SEQ ID NO: 1484756 - RNA, 19 nt, Artificial Sequence
  Description of Artificial Sequence: Synthetic oligonucleotide
ugaccucgagaaucugccu

SEQ ID NO: 1484757 - RNA, 19 nt, Artificial Sequence
  Description of Artificial Sequence: Synthetic oligonucleotide
guuagaagagaugcgcugu

SEQ ID NO: 1484758 - RNA, 19 nt, Artificial Sequence
  Description of Artificial Sequence: Synthetic oligonucleotide
gccacauuaaacaaugacu

SEQ ID NO: 1484759 - RNA, 19 nt, Artificial Sequence
  Description of Artificial Sequence: Synthetic oligonucleotide
caacgacgaggacaagaac

SEQ ID NO: 1484760 - RNA, 19 nt, Artificial Sequence
  Description of Artificial Sequence: Synthetic oligonucleotide
aggcguaggucaucuucug

SEQ ID NO: 1484761 - RNA, 19 nt, Artificial Sequence
  Description of Artificial Sequence: Synthetic oligonucleotide
aacugcuauauaagaccau

SEQ ID NO: 1484762 - RNA, 19 nt, Artificial Sequence
  Description of Artificial Sequence: Synthetic oligonucleotide
guguuccaaguugauucag

SEQ ID NO: 1484763 - RNA, 19 nt, Artificial Sequence
  Description of Artificial Sequence: Synthetic oligonucleotide
uuauaccagcaaugguauu

SEQ ID NO: 1484764 - RNA, 19 nt, Artificial Sequence
  Description of Artificial Sequence: Synthetic oligonucleotide
uugcgcugauaaucugcug

SEQ ID NO: 1484765 - RNA, 19 nt, Artificial Sequence
  Description of Artificial Sequence: Synthetic oligonucleotide
agacucucucucaugaaua

SEQ ID NO: 1484766 - RNA, 19 nt, Artificial Sequence
  Description of Artificial Sequence: Synthetic oligonucleotide
ugcagcgguccacucucac

SEQ ID NO: 1484767 - RNA, 19 nt, Artificial Sequence
  Description of Artificial Sequence: Synthetic oligonucleotide
gaacccagacgacgucgug

SEQ ID NO: 1484768 - RNA, 19 nt, Artificial Sequence
  Description of Artificial Sequence: Synthetic oligonucleotide
gaauaaggcguaggucauc

SEQ ID NO: 1484769 - RNA, 19 nt, Artificial Sequence
  Description of Artificial Sequence: Synthetic oligonucleotide
gaauccugagguguuccaa

SEQ ID NO: 1484770 - RNA, 19 nt, Artificial Sequence
  Description of Artificial Sequence: Synthetic oligonucleotide
uggcucucacucgagcaac

SEQ ID NO: 1484771 - RNA, 19 nt, Artificial Sequence
  Description of Artificial Sequence: Synthetic oligonucleotide
cuaugcugucaaucacauc

SEQ ID NO: 1484772 - RNA, 19 nt, Artificial Sequence
  Description of Artificial Sequence: Synthetic oligonucleotide
ggaccugcacuugaggcug

SEQ ID NO: 1484773 - RNA, 19 nt, Artificial Sequence
  Description of Artificial Sequence: Synthetic oligonucleotide
cauucagauuagugcauua

SEQ ID NO: 1484774 - RNA, 19 nt, Artificial Sequence
  Description of Artificial Sequence: Synthetic oligonucleotide
cagcaaugguauuuagaaa

SEQ ID NO: 1484775 - RNA, 19 nt, Artificial Sequence
  Description of Artificial Sequence: Synthetic oligonucleotide
cccgauacccuggagcugg

SEQ ID NO: 1484776 - RNA, 19 nt, Artificial Sequence
  Description of Artificial Sequence: Synthetic oligonucleotide
gugccagcugagcaggguc

SEQ ID NO: 1484777 - RNA, 19 nt, Artificial Sequence
  Description of Artificial Sequence: Synthetic oligonucleotide
cacuaaucgguccuucugu

SEQ ID NO: 1484778 - RNA, 19 nt, Artificial Sequence
  Description of Artificial Sequence: Synthetic oligonucleotide
gcaagugaguucauuggca

SEQ ID NO: 1484779 - RNA, 19 nt, Artificial Sequence
  Description of Artificial Sequence: Synthetic oligonucleotide
agcauucagauuagugcau

SEQ ID NO: 1484780 - RNA, 19 nt, Artificial Sequence
  Description of Artificial Sequence: Synthetic oligonucleotide
agaacccagacgacgucgu

SEQ ID NO: 1484781 - RNA, 19 nt, Artificial Sequence
  Description of Artificial Sequence: Synthetic oligonucleotide
ccuuucaguccccauacga

SEQ ID NO: 1484782 - RNA, 19 nt, Artificial Sequence
  Description of Artificial Sequence: Synthetic oligonucleotide
guccccauacgaugagaca

SEQ ID NO: 1484783 - RNA, 19 nt, Artificial Sequence
  Description of Artificial Sequence: Synthetic oligonucleotide
caaguugauucagaguccu

SEQ ID NO: 1484784 - RNA, 19 nt, Artificial Sequence
  Description of Artificial Sequence: Synthetic oligonucleotide
acgucgugcagcgguccac

SEQ ID NO: 1484785 - RNA, 19 nt, Artificial Sequence
  Description of Artificial Sequence: Synthetic oligonucleotide
ccaacgacgaggacaagaa

SEQ ID NO: 1484786 - RNA, 19 nt, Artificial Sequence
  Description of Artificial Sequence: Synthetic oligonucleotide
ccuacagaacccagacgac

SEQ ID NO: 1484787 - RNA, 19 nt, Artificial Sequence
  Description of Artificial Sequence: Synthetic oligonucleotide
cagugauguuguaaauucu

SEQ ID NO: 1484788 - RNA, 19 nt, Artificial Sequence
  Description of Artificial Sequence: Synthetic oligonucleotide
ccagacgacgucgugcagc

SEQ ID NO: 1484789 - RNA, 19 nt, Artificial Sequence
  Description of Artificial Sequence: Synthetic oligonucleotide
gcagcgguccacucucacc

SEQ ID NO: 1484790 - RNA, 19 nt, Artificial Sequence
  Description of Artificial Sequence: Synthetic oligonucleotide
gacgucgugcagcggucca

SEQ ID NO: 1484791 - RNA, 19 nt, Artificial Sequence
  Description of Artificial Sequence: Synthetic oligonucleotide
ggauuugcgcugauaaucu

SEQ ID NO: 1484792 - RNA, 19 nt, Artificial Sequence
  Description of Artificial Sequence: Synthetic oligonucleotide
gcugguucgccuguugaac

SEQ ID NO: 1484793 - RNA, 19 nt, Artificial Sequence
  Description of Artificial Sequence: Synthetic oligonucleotide
acgacgucgugcagcgguc

SEQ ID NO: 1484794 - RNA, 19 nt, Artificial Sequence
  Description of Artificial Sequence: Synthetic oligonucleotide
cuucacuagcaaacugcua

SEQ ID NO: 1484795 - RNA, 19 nt, Artificial Sequence
  Description of Artificial Sequence: Synthetic oligonucleotide
ucgguccuucuguaucuuu

SEQ ID NO: 1484796 - RNA, 19 nt, Artificial Sequence
  Description of Artificial Sequence: Synthetic oligonucleotide
acgaugaugcagaggguuu

SEQ ID NO: 1484797 - RNA, 19 nt, Artificial Sequence
  Description of Artificial Sequence: Synthetic oligonucleotide
ugccacuaaucgguccuuc

SEQ ID NO: 1484798 - RNA, 19 nt, Artificial Sequence
  Description of Artificial Sequence: Synthetic oligonucleotide
cugcugguucgccuguuga

SEQ ID NO: 1484799 - RNA, 19 nt, Artificial Sequence
  Description of Artificial Sequence: Synthetic oligonucleotide
gcugccugaugucaucaga

SEQ ID NO: 1484800 - RNA, 19 nt, Artificial Sequence
  Description of Artificial Sequence: Synthetic oligonucleotide
cugccacauuaaacaauga

SEQ ID NO: 1484801 - RNA, 19 nt, Artificial Sequence
  Description of Artificial Sequence: Synthetic oligonucleotide
auaaggcguaggucaucuu

SEQ ID NO: 1484802 - RNA, 19 nt, Artificial Sequence
  Description of Artificial Sequence: Synthetic oligonucleotide
auacgaugagacagauaau

SEQ ID NO: 1484803 - RNA, 19 nt, Artificial Sequence
  Description of Artificial Sequence: Synthetic oligonucleotide
gccuuucaguccccauacg

SEQ ID NO: 1484804 - RNA, 19 nt, Artificial Sequence
  Description of Artificial Sequence: Synthetic oligonucleotide
caccacucagccuuucagu

SEQ ID NO: 1484805 - RNA, 19 nt, Artificial Sequence
  Description of Artificial Sequence: Synthetic oligonucleotide
ggcugccugaugucaucag

SEQ ID NO: 1484806 - RNA, 19 nt, Artificial Sequence
  Description of Artificial Sequence: Synthetic oligonucleotide
cuaaucgguccuucuguau

SEQ ID NO: 1484807 - RNA, 19 nt, Artificial Sequence
  Description of Artificial Sequence: Synthetic oligonucleotide
guggugggcagugauccaa

SEQ ID NO: 1484808 - RNA, 19 nt, Artificial Sequence
  Description of Artificial Sequence: Synthetic oligonucleotide
acguguaccucugcacuuu

SEQ ID NO: 1484809 - RNA, 19 nt, Artificial Sequence
  Description of Artificial Sequence: Synthetic oligonucleotide
cgccuguugaacguguacc

SEQ ID NO: 1484810 - RNA, 19 nt, Artificial Sequence
  Description of Artificial Sequence: Synthetic oligonucleotide
cagagccugccacauuaaa

SEQ ID NO: 1484811 - RNA, 19 nt, Artificial Sequence
  Description of Artificial Sequence: Synthetic oligonucleotide
caucagaugcaaguggguu

SEQ ID NO: 1484812 - RNA, 19 nt, Artificial Sequence
  Description of Artificial Sequence: Synthetic oligonucleotide
acuaaacagcauggacauu

SEQ ID NO: 1484813 - RNA, 19 nt, Artificial Sequence
  Description of Artificial Sequence: Synthetic oligonucleotide
cugcuugcaaggauacaau

SEQ ID NO: 1484814 - RNA, 19 nt, Artificial Sequence
  Description of Artificial Sequence: Synthetic oligonucleotide
gagguguuccaaguugauu

SEQ ID NO: 1484815 - RNA, 19 nt, Artificial Sequence
  Description of Artificial Sequence: Synthetic oligonucleotide
gcugagcaggguccccacc

SEQ ID NO: 1484816 - RNA, 19 nt, Artificial Sequence
  Description of Artificial Sequence: Synthetic oligonucleotide
gguccacucucaccacuca

SEQ ID NO: 1484817 - RNA, 19 nt, Artificial Sequence
  Description of Artificial Sequence: Synthetic oligonucleotide
gaacgaugaugcagagggu

SEQ ID NO: 1484818 - RNA, 19 nt, Artificial Sequence
  Description of Artificial Sequence: Synthetic oligonucleotide
gcucuugacagcugcuggu

SEQ ID NO: 1484819 - RNA, 19 nt, Artificial Sequence
  Description of Artificial Sequence: Synthetic oligonucleotide
gucgugcagcgguccacuc

SEQ ID NO: 1484820 - RNA, 19 nt, Artificial Sequence
  Description of Artificial Sequence: Synthetic oligonucleotide
cacuagcaaacugcuauau

SEQ ID NO: 1484821 - RNA, 19 nt, Artificial Sequence
  Description of Artificial Sequence: Synthetic oligonucleotide
gcgcugugccagcugagca

SEQ ID NO: 1484822 - RNA, 19 nt, Artificial Sequence
  Description of Artificial Sequence: Synthetic oligonucleotide
accugcacuugaggcugug

SEQ ID NO: 1484823 - RNA, 19 nt, Artificial Sequence
  Description of Artificial Sequence: Synthetic oligonucleotide
gagcauugugugaucuuuu

SEQ ID NO: 1484824 - RNA, 19 nt, Artificial Sequence
  Description of Artificial Sequence: Synthetic oligonucleotide
cguaggucaucuucuguaa

SEQ ID NO: 1484825 - RNA, 19 nt, Artificial Sequence
  Description of Artificial Sequence: Synthetic oligonucleotide
caguccccauacgaugaga

SEQ ID NO: 1484826 - RNA, 19 nt, Artificial Sequence
  Description of Artificial Sequence: Synthetic oligonucleotide
ccccauacgaugagacaga

SEQ ID NO: 1484827 - RNA, 19 nt, Artificial Sequence
  Description of Artificial Sequence: Synthetic oligonucleotide
cagaugcaaguggguugug

SEQ ID NO: 1484828 - RNA, 19 nt, Artificial Sequence
  Description of Artificial Sequence: Synthetic oligonucleotide
gccacuaaucgguccuucu

SEQ ID NO: 1484829 - RNA, 19 nt, Artificial Sequence
  Description of Artificial Sequence: Synthetic oligonucleotide
gguuaguauauugcugcuu

SEQ ID NO: 1484830 - RNA, 19 nt, Artificial Sequence
  Description of Artificial Sequence: Synthetic oligonucleotide
gagaugcgcugugccagcu

SEQ ID NO: 1484831 - RNA, 19 nt, Artificial Sequence
  Description of Artificial Sequence: Synthetic oligonucleotide
caacuccuuuuacagcauu

SEQ ID NO: 1484832 - RNA, 19 nt, Artificial Sequence
  Description of Artificial Sequence: Synthetic oligonucleotide
cgguccacucucaccacuc

SEQ ID NO: 1484833 - RNA, 19 nt, Artificial Sequence
  Description of Artificial Sequence: Synthetic oligonucleotide
caaguggguugugugguuu

SEQ ID NO: 1484834 - RNA, 19 nt, Artificial Sequence
  Description of Artificial Sequence: Synthetic oligonucleotide
guguaccucugcacuuucu

SEQ ID NO: 1484835 - RNA, 19 nt, Artificial Sequence
  Description of Artificial Sequence: Synthetic oligonucleotide
guccaacgacgaggacaag

SEQ ID NO: 1484836 - RNA, 19 nt, Artificial Sequence
  Description of Artificial Sequence: Synthetic oligonucleotide
cguguaccucugcacuuuc

SEQ ID NO: 1484837 - RNA, 19 nt, Artificial Sequence
  Description of Artificial Sequence: Synthetic oligonucleotide
cuuucgcaaguugguuagu

SEQ ID NO: 1484838 - RNA, 19 nt, Artificial Sequence
  Description of Artificial Sequence: Synthetic oligonucleotide
ccgauacccuggagcuggc

SEQ ID NO: 1484839 - RNA, 19 nt, Artificial Sequence
  Description of Artificial Sequence: Synthetic oligonucleotide
ccauacgaugagacagaua

SEQ ID NO: 1484840 - RNA, 19 nt, Artificial Sequence
  Description of Artificial Sequence: Synthetic oligonucleotide
gcaaguugguuaguauauu

SEQ ID NO: 1484841 - RNA, 19 nt, Artificial Sequence
  Description of Artificial Sequence: Synthetic oligonucleotide
ccccaaaacucaguacaaa

SEQ ID NO: 1484842 - RNA, 19 nt, Artificial Sequence
  Description of Artificial Sequence: Synthetic oligonucleotide
gccugccacauuaaacaau

SEQ ID NO: 1484843 - RNA, 19 nt, Artificial Sequence
  Description of Artificial Sequence: Synthetic oligonucleotide
cgacgucgugcagcggucc

SEQ ID NO: 1484844 - RNA, 19 nt, Artificial Sequence
  Description of Artificial Sequence: Synthetic oligonucleotide
ccucgagaaucugccuaca

SEQ ID NO: 1484845 - RNA, 19 nt, Artificial Sequence
  Description of Artificial Sequence: Synthetic oligonucleotide
ccaccaaucccuggagugu

SEQ ID NO: 1484846 - RNA, 19 nt, Artificial Sequence
  Description of Artificial Sequence: Synthetic oligonucleotide
cgucgugcagcgguccacu

SEQ ID NO: 1484847 - RNA, 19 nt, Artificial Sequence
  Description of Artificial Sequence: Synthetic oligonucleotide
cgaggacaagaacgaugau

SEQ ID NO: 1484848 - RNA, 19 nt, Artificial Sequence
  Description of Artificial Sequence: Synthetic oligonucleotide
cgacgaggacaagaacgau

SEQ ID NO: 1484849 - RNA, 19 nt, Artificial Sequence
  Description of Artificial Sequence: Synthetic oligonucleotide
aaagaacggagccagauuc

SEQ ID NO: 1484850 - RNA, 19 nt, Artificial Sequence
  Description of Artificial Sequence: Synthetic oligonucleotide
gaauaaaugguucccagcc

SEQ ID NO: 1484851 - RNA, 19 nt, Artificial Sequence
  Description of Artificial Sequence: Synthetic oligonucleotide
uguaaguauguuuccagcg

SEQ ID NO: 1484852 - RNA, 19 nt, Artificial Sequence
  Description of Artificial Sequence: Synthetic oligonucleotide
aucacgucgucccagaggc

SEQ ID NO: 1484853 - RNA, 19 nt, Artificial Sequence
  Description of Artificial Sequence: Synthetic oligonucleotide
uccagaugacacaugaugg

SEQ ID NO: 1484854 - RNA, 19 nt, Artificial Sequence
  Description of Artificial Sequence: Synthetic oligonucleotide
caauuugcuauucugaggc

SEQ ID NO: 1484855 - RNA, 19 nt, Artificial Sequence
  Description of Artificial Sequence: Synthetic oligonucleotide
ugugagaacaucuucgccc

SEQ ID NO: 1484856 - RNA, 19 nt, Artificial Sequence
  Description of Artificial Sequence: Synthetic oligonucleotide
auauaaaggagaccucccc

SEQ ID NO: 1484857 - RNA, 19 nt, Artificial Sequence
  Description of Artificial Sequence: Synthetic oligonucleotide
aacaucuucgcccacagau

SEQ ID NO: 1484858 - RNA, 19 nt, Artificial Sequence
  Description of Artificial Sequence: Synthetic oligonucleotide
uguaguauggagcacggac

SEQ ID NO: 1484859 - RNA, 19 nt, Artificial Sequence
  Description of Artificial Sequence: Synthetic oligonucleotide
uucauuauauuuuccuucc

SEQ ID NO: 1484860 - RNA, 19 nt, Artificial Sequence
  Description of Artificial Sequence: Synthetic oligonucleotide
aguucuugauauugggccc

SEQ ID NO: 1484861 - RNA, 19 nt, Artificial Sequence
  Description of Artificial Sequence: Synthetic oligonucleotide
gaugauauaaaggagaccu

SEQ ID NO: 1484862 - RNA, 19 nt, Artificial Sequence
  Description of Artificial Sequence: Synthetic oligonucleotide
uuauauuuuccuuccauuc

SEQ ID NO: 1484863 - RNA, 19 nt, Artificial Sequence
  Description of Artificial Sequence: Synthetic oligonucleotide
caguucuugauauugggcc

SEQ ID NO: 1484864 - RNA, 19 nt, Artificial Sequence
  Description of Artificial Sequence: Synthetic oligonucleotide
ucgagguaugcccaggacg

SEQ ID NO: 1484865 - RNA, 19 nt, Artificial Sequence
  Description of Artificial Sequence: Synthetic oligonucleotide
ugauuugccguccagguau

SEQ ID NO: 1484866 - RNA, 19 nt, Artificial Sequence
  Description of Artificial Sequence: Synthetic oligonucleotide
uauaaaggagaccucccca

SEQ ID NO: 1484867 - RNA, 19 nt, Artificial Sequence
  Description of Artificial Sequence: Synthetic oligonucleotide
gagacgaauaaaugguucc

SEQ ID NO: 1484868 - RNA, 19 nt, Artificial Sequence
  Description of Artificial Sequence: Synthetic oligonucleotide
uguaucuucagguccgcag

SEQ ID NO: 1484869 - RNA, 19 nt, Artificial Sequence
  Description of Artificial Sequence: Synthetic oligonucleotide
uugccguccagguauauag

SEQ ID NO: 1484870 - RNA, 19 nt, Artificial Sequence
  Description of Artificial Sequence: Synthetic oligonucleotide
gaagggcgcagauagaggc

SEQ ID NO: 1484871 - RNA, 19 nt, Artificial Sequence
  Description of Artificial Sequence: Synthetic oligonucleotide
acugggagccgauagcggc

SEQ ID NO: 1484872 - RNA, 19 nt, Artificial Sequence
  Description of Artificial Sequence: Synthetic oligonucleotide
auaaaggagaccuccccag

SEQ ID NO: 1484873 - RNA, 19 nt, Artificial Sequence
  Description of Artificial Sequence: Synthetic oligonucleotide
aggauguuccuggagacgc

SEQ ID NO: 1484874 - RNA, 19 nt, Artificial Sequence
  Description of Artificial Sequence: Synthetic oligonucleotide
uaugauuugccguccaggu

SEQ ID NO: 1484875 - RNA, 19 nt, Artificial Sequence
  Description of Artificial Sequence: Synthetic oligonucleotide
uagagagcggugcucaucc

SEQ ID NO: 1484876 - RNA, 19 nt, Artificial Sequence
  Description of Artificial Sequence: Synthetic oligonucleotide
ugauauugggcccuuugcu

SEQ ID NO: 1484877 - RNA, 19 nt, Artificial Sequence
  Description of Artificial Sequence: Synthetic oligonucleotide
uugauauugggcccuuugc

SEQ ID NO: 1484878 - RNA, 19 nt, Artificial Sequence
  Description of Artificial Sequence: Synthetic oligonucleotide
acaacagucauugaugaca

SEQ ID NO: 1484879 - RNA, 19 nt, Artificial Sequence
  Description of Artificial Sequence: Synthetic oligonucleotide
cucggaacagcuuacuggc

SEQ ID NO: 1484880 - RNA, 19 nt, Artificial Sequence
  Description of Artificial Sequence: Synthetic oligonucleotide
gauuucacgggcuugucca

SEQ ID NO: 1484881 - RNA, 19 nt, Artificial Sequence
  Description of Artificial Sequence: Synthetic oligonucleotide
augaacauaaacacaccac

SEQ ID NO: 1484882 - RNA, 19 nt, Artificial Sequence
  Description of Artificial Sequence: Synthetic oligonucleotide
auucggacucucuuuuccc

SEQ ID NO: 1484883 - RNA, 19 nt, Artificial Sequence
  Description of Artificial Sequence: Synthetic oligonucleotide
guaaguauguuuccagcgc

SEQ ID NO: 1484884 - RNA, 19 nt, Artificial Sequence
  Description of Artificial Sequence: Synthetic oligonucleotide
agauaggcuaggcugguag

SEQ ID NO: 1484885 - RNA, 19 nt, Artificial Sequence
  Description of Artificial Sequence: Synthetic oligonucleotide
ggcacgaugauauaaagga

SEQ ID NO: 1484886 - RNA, 19 nt, Artificial Sequence
  Description of Artificial Sequence: Synthetic oligonucleotide
uauuggcucggcuucgagg

SEQ ID NO: 1484887 - RNA, 19 nt, Artificial Sequence
  Description of Artificial Sequence: Synthetic oligonucleotide
agacgaauaaaugguuccc

SEQ ID NO: 1484888 - RNA, 19 nt, Artificial Sequence
  Description of Artificial Sequence: Synthetic oligonucleotide
guagugagaggucacuucc

SEQ ID NO: 1484889 - RNA, 19 nt, Artificial Sequence
  Description of Artificial Sequence: Synthetic oligonucleotide
auuggcucggcuucgaggu

SEQ ID NO: 1484890 - RNA, 19 nt, Artificial Sequence
  Description of Artificial Sequence: Synthetic oligonucleotide
acgaugauauaaaggagac

SEQ ID NO: 1484891 - RNA, 19 nt, Artificial Sequence
  Description of Artificial Sequence: Synthetic oligonucleotide
acgaauaaaugguucccag

SEQ ID NO: 1484892 - RNA, 19 nt, Artificial Sequence
  Description of Artificial Sequence: Synthetic oligonucleotide
gauauugggcccuuugcuc

SEQ ID NO: 1484893 - RNA, 19 nt, Artificial Sequence
  Description of Artificial Sequence: Synthetic oligonucleotide
gacgguuucaugaacauaa

SEQ ID NO: 1484894 - RNA, 19 nt, Artificial Sequence
  Description of Artificial Sequence: Synthetic oligonucleotide
agacuucuaugauuugccg

SEQ ID NO: 1484895 - RNA, 19 nt, Artificial Sequence
  Description of Artificial Sequence: Synthetic oligonucleotide
caacagucauugaugacag

SEQ ID NO: 1484896 - RNA, 19 nt, Artificial Sequence
  Description of Artificial Sequence: Synthetic oligonucleotide
ucuaugauuugccguccag

SEQ ID NO: 1484897 - RNA, 19 nt, Artificial Sequence
  Description of Artificial Sequence: Synthetic oligonucleotide
caagcaacaccgauuaauc

SEQ ID NO: 1484898 - RNA, 19 nt, Artificial Sequence
  Description of Artificial Sequence: Synthetic oligonucleotide
cuuguaguauggagcacgg

SEQ ID NO: 1484899 - RNA, 19 nt, Artificial Sequence
  Description of Artificial Sequence: Synthetic oligonucleotide
auaggcuaggcugguagcc

SEQ ID NO: 1484900 - RNA, 19 nt, Artificial Sequence
  Description of Artificial Sequence: Synthetic oligonucleotide
uguacucagugaagagacg

SEQ ID NO: 1484901 - RNA, 19 nt, Artificial Sequence
  Description of Artificial Sequence: Synthetic oligonucleotide
aagcaacaccgauuaauca

SEQ ID NO: 1484902 - RNA, 19 nt, Artificial Sequence
  Description of Artificial Sequence: Synthetic oligonucleotide
agugaagagacgaauaaau

SEQ ID NO: 1484903 - RNA, 19 nt, Artificial Sequence
  Description of Artificial Sequence: Synthetic oligonucleotide
gagauuugcaguuggcaca

SEQ ID NO: 1484904 - RNA, 19 nt, Artificial Sequence
  Description of Artificial Sequence: Synthetic oligonucleotide
agagacgaauaaaugguuc

SEQ ID NO: 1484905 - RNA, 19 nt, Artificial Sequence
  Description of Artificial Sequence: Synthetic oligonucleotide
guauggagcacggacagcc

SEQ ID NO: 1484906 - RNA, 19 nt, Artificial Sequence
  Description of Artificial Sequence: Synthetic oligonucleotide
uccauucaggcagauaggc

SEQ ID NO: 1484907 - RNA, 19 nt, Artificial Sequence
  Description of Artificial Sequence: Synthetic oligonucleotide
acuccuuacaucuguguga

SEQ ID NO: 1484908 - RNA, 19 nt, Artificial Sequence
  Description of Artificial Sequence: Synthetic oligonucleotide
agcaguaccgagugccucg

SEQ ID NO: 1484909 - RNA, 19 nt, Artificial Sequence
  Description of Artificial Sequence: Synthetic oligonucleotide
uugucagcagugucugugg

SEQ ID NO: 1484910 - RNA, 19 nt, Artificial Sequence
  Description of Artificial Sequence: Synthetic oligonucleotide
cuuugcucagguagauucg

SEQ ID NO: 1484911 - RNA, 19 nt, Artificial Sequence
  Description of Artificial Sequence: Synthetic oligonucleotide
auuucugggacuaguagug

SEQ ID NO: 1484912 - RNA, 19 nt, Artificial Sequence
  Description of Artificial Sequence: Synthetic oligonucleotide
ugaggcacgaugauauaaa

SEQ ID NO: 1484913 - RNA, 19 nt, Artificial Sequence
  Description of Artificial Sequence: Synthetic oligonucleotide
gaaagcauggcaccccgac

SEQ ID NO: 1484914 - RNA, 19 nt, Artificial Sequence
  Description of Artificial Sequence: Synthetic oligonucleotide
accgauuaaucaccagggg

SEQ ID NO: 1484915 - RNA, 19 nt, Artificial Sequence
  Description of Artificial Sequence: Synthetic oligonucleotide
agaucugcacaucggccac

SEQ ID NO: 1484916 - RNA, 19 nt, Artificial Sequence
  Description of Artificial Sequence: Synthetic oligonucleotide
gaggcacgaugauauaaag

SEQ ID NO: 1484917 - RNA, 19 nt, Artificial Sequence
  Description of Artificial Sequence: Synthetic oligonucleotide
cuaugauuugccguccagg

SEQ ID NO: 1484918 - RNA, 19 nt, Artificial Sequence
  Description of Artificial Sequence: Synthetic oligonucleotide
caguauggcagccaauuug

SEQ ID NO: 1484919 - RNA, 19 nt, Artificial Sequence
  Description of Artificial Sequence: Synthetic oligonucleotide
agauucauuuugucagcag

SEQ ID NO: 1484920 - RNA, 19 nt, Artificial Sequence
  Description of Artificial Sequence: Synthetic oligonucleotide
ucauuuugucagcaguguc

SEQ ID NO: 1484921 - RNA, 19 nt, Artificial Sequence
  Description of Artificial Sequence: Synthetic oligonucleotide
ugucagcagugucuguggg

SEQ ID NO: 1484922 - RNA, 19 nt, Artificial Sequence
  Description of Artificial Sequence: Synthetic oligonucleotide
gauucauuuugucagcagu

SEQ ID NO: 1484923 - RNA, 19 nt, Artificial Sequence
  Description of Artificial Sequence: Synthetic oligonucleotide
cugagaucugcacaucggc

SEQ ID NO: 1484924 - RNA, 19 nt, Artificial Sequence
  Description of Artificial Sequence: Synthetic oligonucleotide
gccaauuuguaucuucagg

SEQ ID NO: 1484925 - RNA, 19 nt, Artificial Sequence
  Description of Artificial Sequence: Synthetic oligonucleotide
cuugauauugggcccuuug

SEQ ID NO: 1484926 - RNA, 19 nt, Artificial Sequence
  Description of Artificial Sequence: Synthetic oligonucleotide
gauuucugggacuaguagu

SEQ ID NO: 1484927 - RNA, 19 nt, Artificial Sequence
  Description of Artificial Sequence: Synthetic oligonucleotide
aaagcauggcaccccgaca

SEQ ID NO: 1484928 - RNA, 19 nt, Artificial Sequence
  Description of Artificial Sequence: Synthetic oligonucleotide
acagaccccaauuugcuau

SEQ ID NO: 1484929 - RNA, 19 nt, Artificial Sequence
  Description of Artificial Sequence: Synthetic oligonucleotide
cucagguagauucggacuc

SEQ ID NO: 1484930 - RNA, 19 nt, Artificial Sequence
  Description of Artificial Sequence: Synthetic oligonucleotide
caggccucaaagaacggag

SEQ ID NO: 1484931 - RNA, 19 nt, Artificial Sequence
  Description of Artificial Sequence: Synthetic oligonucleotide
gauaggcuaggcugguagc

SEQ ID NO: 1484932 - RNA, 19 nt, Artificial Sequence
  Description of Artificial Sequence: Synthetic oligonucleotide
agcuuacuggcccugguca

SEQ ID NO: 1484933 - RNA, 19 nt, Artificial Sequence
  Description of Artificial Sequence: Synthetic oligonucleotide
uccccuagcuuguaguaug

SEQ ID NO: 1484934 - RNA, 19 nt, Artificial Sequence
  Description of Artificial Sequence: Synthetic oligonucleotide
uaccgagugccucgguugg

SEQ ID NO: 1484935 - RNA, 19 nt, Artificial Sequence
  Description of Artificial Sequence: Synthetic oligonucleotide
uggucaggucaucaguaug

SEQ ID NO: 1484936 - RNA, 19 nt, Artificial Sequence
  Description of Artificial Sequence: Synthetic oligonucleotide
aguauggcagccaauuugu

SEQ ID NO: 1484937 - RNA, 19 nt, Artificial Sequence
  Description of Artificial Sequence: Synthetic oligonucleotide
gguauauagagagcggugc

SEQ ID NO: 1484938 - RNA, 19 nt, Artificial Sequence
  Description of Artificial Sequence: Synthetic oligonucleotide
aggaugagguugucagugg

SEQ ID NO: 1484939 - RNA, 19 nt, Artificial Sequence
  Description of Artificial Sequence: Synthetic oligonucleotide
cugaagggcgcagauagag

SEQ ID NO: 1484940 - RNA, 19 nt, Artificial Sequence
  Description of Artificial Sequence: Synthetic oligonucleotide
gugaagagacgaauaaaug

SEQ ID NO: 1484941 - RNA, 19 nt, Artificial Sequence
  Description of Artificial Sequence: Synthetic oligonucleotide
accccaauuugcuauucug

SEQ ID NO: 1484942 - RNA, 19 nt, Artificial Sequence
  Description of Artificial Sequence: Synthetic oligonucleotide
ucaaagaacggagccagau

SEQ ID NO: 1484943 - RNA, 19 nt, Artificial Sequence
  Description of Artificial Sequence: Synthetic oligonucleotide
ugcucagguagauucggac

SEQ ID NO: 1484944 - RNA, 19 nt, Artificial Sequence
  Description of Artificial Sequence: Synthetic oligonucleotide
agccaacugagaucugcac

SEQ ID NO: 1484945 - RNA, 19 nt, Artificial Sequence
  Description of Artificial Sequence: Synthetic oligonucleotide
ggagcuguaaguauguuuc

SEQ ID NO: 1484946 - RNA, 19 nt, Artificial Sequence
  Description of Artificial Sequence: Synthetic oligonucleotide
acgccucuuccauucuucc

SEQ ID NO: 1484947 - RNA, 19 nt, Artificial Sequence
  Description of Artificial Sequence: Synthetic oligonucleotide
agucauugaugacaggguu

SEQ ID NO: 1484948 - RNA, 19 nt, Artificial Sequence
  Description of Artificial Sequence: Synthetic oligonucleotide
cucggagauuugcaguugg

SEQ ID NO: 1484949 - RNA, 19 nt, Artificial Sequence
  Description of Artificial Sequence: Synthetic oligonucleotide
acauccacggugauugggg

SEQ ID NO: 1484950 - RNA, 19 nt, Artificial Sequence
  Description of Artificial Sequence: Synthetic oligonucleotide
agucggugcacagacaugu

SEQ ID NO: 1484951 - RNA, 19 nt, Artificial Sequence
  Description of Artificial Sequence: Synthetic oligonucleotide
agauagaggcugcugugca

SEQ ID NO: 1484952 - RNA, 19 nt, Artificial Sequence
  Description of Artificial Sequence: Synthetic oligonucleotide
uguccaagcaacaccgauu

SEQ ID NO: 1484953 - RNA, 19 nt, Artificial Sequence
  Description of Artificial Sequence: Synthetic oligonucleotide
agccaauuuguaucuucag

SEQ ID NO: 1484954 - RNA, 19 nt, Artificial Sequence
  Description of Artificial Sequence: Synthetic oligonucleotide
acuaguagugagaggucac

SEQ ID NO: 1484955 - RNA, 19 nt, Artificial Sequence
  Description of Artificial Sequence: Synthetic oligonucleotide
aagcggggaucuccucugc

SEQ ID NO: 1484956 - RNA, 19 nt, Artificial Sequence
  Description of Artificial Sequence: Synthetic oligonucleotide
augacaggguucucucggg

SEQ ID NO: 1484957 - RNA, 19 nt, Artificial Sequence
  Description of Artificial Sequence: Synthetic oligonucleotide
uguguggugggaacuccca

SEQ ID NO: 1484958 - RNA, 19 nt, Artificial Sequence
  Description of Artificial Sequence: Synthetic oligonucleotide
caaagggaagggcucuccg

SEQ ID NO: 1484959 - RNA, 19 nt, Artificial Sequence
  Description of Artificial Sequence: Synthetic oligonucleotide
ucgaugggcacuccuuaca

SEQ ID NO: 1484960 - RNA, 19 nt, Artificial Sequence
  Description of Artificial Sequence: Synthetic oligonucleotide
agagcggugcucauccagc

SEQ ID NO: 1484961 - RNA, 19 nt, Artificial Sequence
  Description of Artificial Sequence: Synthetic oligonucleotide
ugcaugucuucgauuucug

SEQ ID NO: 1484962 - RNA, 19 nt, Artificial Sequence
  Description of Artificial Sequence: Synthetic oligonucleotide
uuguccaagcaacaccgau

SEQ ID NO: 1484963 - RNA, 19 nt, Artificial Sequence
  Description of Artificial Sequence: Synthetic oligonucleotide
uucgcccacagauucauuu

SEQ ID NO: 1484964 - RNA, 19 nt, Artificial Sequence
  Description of Artificial Sequence: Synthetic oligonucleotide
ugggaacucccacuccugc

SEQ ID NO: 1484965 - RNA, 19 nt, Artificial Sequence
  Description of Artificial Sequence: Synthetic oligonucleotide
aggcacgaugauauaaagg

SEQ ID NO: 1484966 - RNA, 19 nt, Artificial Sequence
  Description of Artificial Sequence: Synthetic oligonucleotide
ggaugucuccccuagcuug

SEQ ID NO: 1484967 - RNA, 19 nt, Artificial Sequence
  Description of Artificial Sequence: Synthetic oligonucleotide
aacagcuuacuggcccugg

SEQ ID NO: 1484968 - RNA, 19 nt, Artificial Sequence
  Description of Artificial Sequence: Synthetic oligonucleotide
ugcggcagacgcaaaggga

SEQ ID NO: 1484969 - RNA, 19 nt, Artificial Sequence
  Description of Artificial Sequence: Synthetic oligonucleotide
gacuaguagugagagguca

SEQ ID NO: 1484970 - RNA, 19 nt, Artificial Sequence
  Description of Artificial Sequence: Synthetic oligonucleotide
cugggacuaguagugagag

SEQ ID NO: 1484971 - RNA, 19 nt, Artificial Sequence
  Description of Artificial Sequence: Synthetic oligonucleotide
gcuauucugaggcacgaug

SEQ ID NO: 1484972 - RNA, 19 nt, Artificial Sequence
  Description of Artificial Sequence: Synthetic oligonucleotide
uggagcuguaaguauguuu

SEQ ID NO: 1484973 - RNA, 19 nt, Artificial Sequence
  Description of Artificial Sequence: Synthetic oligonucleotide
cugugagaacaucuucgcc

SEQ ID NO: 1484974 - RNA, 19 nt, Artificial Sequence
  Description of Artificial Sequence: Synthetic oligonucleotide
guaccgagugccucgguug

SEQ ID NO: 1484975 - RNA, 19 nt, Artificial Sequence
  Description of Artificial Sequence: Synthetic oligonucleotide
ucggugcacagacauguaa

SEQ ID NO: 1484976 - RNA, 19 nt, Artificial Sequence
  Description of Artificial Sequence: Synthetic oligonucleotide
ccaauuugcuauucugagg

SEQ ID NO: 1484977 - RNA, 19 nt, Artificial Sequence
  Description of Artificial Sequence: Synthetic oligonucleotide
augauauaaaggagaccuc

SEQ ID NO: 1484978 - RNA, 19 nt, Artificial Sequence
  Description of Artificial Sequence: Synthetic oligonucleotide
ucuucgauuucugggacua

SEQ ID NO: 1484979 - RNA, 19 nt, Artificial Sequence
  Description of Artificial Sequence: Synthetic oligonucleotide
ucaggucaucaguauggca

SEQ ID NO: 1484980 - RNA, 19 nt, Artificial Sequence
  Description of Artificial Sequence: Synthetic oligonucleotide
uaaaugguucccagccaaa

SEQ ID NO: 1484981 - RNA, 19 nt, Artificial Sequence
  Description of Artificial Sequence: Synthetic oligonucleotide
uucacgggcuuguccaagc

SEQ ID NO: 1484982 - RNA, 19 nt, Artificial Sequence
  Description of Artificial Sequence: Synthetic oligonucleotide
ucggagauuugcaguuggc

SEQ ID NO: 1484983 - RNA, 19 nt, Artificial Sequence
  Description of Artificial Sequence: Synthetic oligonucleotide
gacaacagucauugaugac

SEQ ID NO: 1484984 - RNA, 19 nt, Artificial Sequence
  Description of Artificial Sequence: Synthetic oligonucleotide
gacgaauaaaugguuccca

SEQ ID NO: 1484985 - RNA, 19 nt, Artificial Sequence
  Description of Artificial Sequence: Synthetic oligonucleotide
ugggacuaguagugagagg

SEQ ID NO: 1484986 - RNA, 19 nt, Artificial Sequence
  Description of Artificial Sequence: Synthetic oligonucleotide
aucaguauggcagccaauu

SEQ ID NO: 1484987 - RNA, 19 nt, Artificial Sequence
  Description of Artificial Sequence: Synthetic oligonucleotide
guaguauggagcacggaca

SEQ ID NO: 1484988 - RNA, 19 nt, Artificial Sequence
  Description of Artificial Sequence: Synthetic oligonucleotide
caucuucgggcaaggagac

SEQ ID NO: 1484989 - RNA, 19 nt, Artificial Sequence
  Description of Artificial Sequence: Synthetic oligonucleotide
aguauggagcacggacagc

SEQ ID NO: 1484990 - RNA, 19 nt, Artificial Sequence
  Description of Artificial Sequence: Synthetic oligonucleotide
agguacaauuucauuauau

SEQ ID NO: 1484991 - RNA, 19 nt, Artificial Sequence
  Description of Artificial Sequence: Synthetic oligonucleotide
ccuagcuuguaguauggag

SEQ ID NO: 1484992 - RNA, 19 nt, Artificial Sequence
  Description of Artificial Sequence: Synthetic oligonucleotide
gacuucuaugauuugccgu

SEQ ID NO: 1484993 - RNA, 19 nt, Artificial Sequence
  Description of Artificial Sequence: Synthetic oligonucleotide
cacgucgucccagaggcgg

SEQ ID NO: 1484994 - RNA, 19 nt, Artificial Sequence
  Description of Artificial Sequence: Synthetic oligonucleotide
aauauuggcucggcuucga

SEQ ID NO: 1484995 - RNA, 19 nt, Artificial Sequence
  Description of Artificial Sequence: Synthetic oligonucleotide
ugucuccccuagcuuguag

SEQ ID NO: 1484996 - RNA, 19 nt, Artificial Sequence
  Description of Artificial Sequence: Synthetic oligonucleotide
guacccggcaugcauccag

SEQ ID NO: 1484997 - RNA, 19 nt, Artificial Sequence
  Description of Artificial Sequence: Synthetic oligonucleotide
ucaguauggcagccaauuu

SEQ ID NO: 1484998 - RNA, 19 nt, Artificial Sequence
  Description of Artificial Sequence: Synthetic oligonucleotide
agggcaauauuggcucggc

SEQ ID NO: 1484999 - RNA, 19 nt, Artificial Sequence
  Description of Artificial Sequence: Synthetic oligonucleotide
auauuggcucggcuucgag

SEQ ID NO: 1485000 - RNA, 19 nt, Artificial Sequence
  Description of Artificial Sequence: Synthetic oligonucleotide
acuauccucugcggcagac

SEQ ID NO: 1485001 - RNA, 19 nt, Artificial Sequence
  Description of Artificial Sequence: Synthetic oligonucleotide
caauauuggcucggcuucg

SEQ ID NO: 1485002 - RNA, 19 nt, Artificial Sequence
  Description of Artificial Sequence: Synthetic oligonucleotide
gcaauauuggcucggcuuc

SEQ ID NO: 1485003 - RNA, 19 nt, Artificial Sequence
  Description of Artificial Sequence: Synthetic oligonucleotide
cgagguaugcccaggacgg

SEQ ID NO: 1485004 - RNA, 19 nt, Artificial Sequence
  Description of Artificial Sequence: Synthetic oligonucleotide
aacacaccacagguugcag

SEQ ID NO: 1485005 - RNA, 19 nt, Artificial Sequence
  Description of Artificial Sequence: Synthetic oligonucleotide
agguauauagagagcggug

SEQ ID NO: 1485006 - RNA, 19 nt, Artificial Sequence
  Description of Artificial Sequence: Synthetic oligonucleotide
ucggguugccacugggagc

SEQ ID NO: 1485007 - RNA, 19 nt, Artificial Sequence
  Description of Artificial Sequence: Synthetic oligonucleotide
ucggacucucuuuucccga

SEQ ID NO: 1485008 - RNA, 19 nt, Artificial Sequence
  Description of Artificial Sequence: Synthetic oligonucleotide
aggccucaaagaacggagc

SEQ ID NO: 1485009 - RNA, 19 nt, Artificial Sequence
  Description of Artificial Sequence: Synthetic oligonucleotide
ucugaagggcgcagauaga

SEQ ID NO: 1485010 - RNA, 19 nt, Artificial Sequence
  Description of Artificial Sequence: Synthetic oligonucleotide
aagaacggagccagauucu

SEQ ID NO: 1485011 - RNA, 19 nt, Artificial Sequence
  Description of Artificial Sequence: Synthetic oligonucleotide
ccgacaacagucauugaug

SEQ ID NO: 1485012 - RNA, 19 nt, Artificial Sequence
  Description of Artificial Sequence: Synthetic oligonucleotide
agacgcaaagggaagggcu

SEQ ID NO: 1485013 - RNA, 19 nt, Artificial Sequence
  Description of Artificial Sequence: Synthetic oligonucleotide
gaggaguggcuccggauuc

SEQ ID NO: 1485014 - RNA, 19 nt, Artificial Sequence
  Description of Artificial Sequence: Synthetic oligonucleotide
ggcagauaggcuaggcugg

SEQ ID NO: 1485015 - RNA, 19 nt, Artificial Sequence
  Description of Artificial Sequence: Synthetic oligonucleotide
aggucacuuccagaguggg

SEQ ID NO: 1485016 - RNA, 19 nt, Artificial Sequence
  Description of Artificial Sequence: Synthetic oligonucleotide
uuucacgggcuuguccaag

SEQ ID NO: 1485017 - RNA, 19 nt, Artificial Sequence
  Description of Artificial Sequence: Synthetic oligonucleotide
uggugcaguugacauccac

SEQ ID NO: 1485018 - RNA, 19 nt, Artificial Sequence
  Description of Artificial Sequence: Synthetic oligonucleotide
cagccaauuuguaucuuca

SEQ ID NO: 1485019 - RNA, 19 nt, Artificial Sequence
  Description of Artificial Sequence: Synthetic oligonucleotide
uccggauucuccagagcuc

SEQ ID NO: 1485020 - RNA, 19 nt, Artificial Sequence
  Description of Artificial Sequence: Synthetic oligonucleotide
caggacgguuucaugaaca

SEQ ID NO: 1485021 - RNA, 19 nt, Artificial Sequence
  Description of Artificial Sequence: Synthetic oligonucleotide
aguaccgagugccucgguu

SEQ ID NO: 1485022 - RNA, 19 nt, Artificial Sequence
  Description of Artificial Sequence: Synthetic oligonucleotide
ggccucaaagaacggagcc

SEQ ID NO: 1485023 - RNA, 19 nt, Artificial Sequence
  Description of Artificial Sequence: Synthetic oligonucleotide
cucagugaagagacgaaua

SEQ ID NO: 1485024 - RNA, 19 nt, Artificial Sequence
  Description of Artificial Sequence: Synthetic oligonucleotide
ucucucggguugccacugg

SEQ ID NO: 1485025 - RNA, 19 nt, Artificial Sequence
  Description of Artificial Sequence: Synthetic oligonucleotide
cacaucggccacuauccuc

SEQ ID NO: 1485026 - RNA, 19 nt, Artificial Sequence
  Description of Artificial Sequence: Synthetic oligonucleotide
ucacgggcuuguccaagca

SEQ ID NO: 1485027 - RNA, 19 nt, Artificial Sequence
  Description of Artificial Sequence: Synthetic oligonucleotide
ccgauagcggcucagcagc

SEQ ID NO: 1485028 - RNA, 19 nt, Artificial Sequence
  Description of Artificial Sequence: Synthetic oligonucleotide
ugggccagaccuguggcca

SEQ ID NO: 1485029 - RNA, 19 nt, Artificial Sequence
  Description of Artificial Sequence: Synthetic oligonucleotide
aggacgguuucaugaacau

SEQ ID NO: 1485030 - RNA, 19 nt, Artificial Sequence
  Description of Artificial Sequence: Synthetic oligonucleotide
ucuccccuagcuuguagua

SEQ ID NO: 1485031 - RNA, 19 nt, Artificial Sequence
  Description of Artificial Sequence: Synthetic oligonucleotide
uacccggcaugcauccagc

SEQ ID NO: 1485032 - RNA, 19 nt, Artificial Sequence
  Description of Artificial Sequence: Synthetic oligonucleotide
cacugggagccgauagcgg

SEQ ID NO: 1485033 - RNA, 19 nt, Artificial Sequence
  Description of Artificial Sequence: Synthetic oligonucleotide
gggacuaguagugagaggu

SEQ ID NO: 1485034 - RNA, 19 nt, Artificial Sequence
  Description of Artificial Sequence: Synthetic oligonucleotide
cucgaugggcacuccuuac

SEQ ID NO: 1485035 - RNA, 19 nt, Artificial Sequence
  Description of Artificial Sequence: Synthetic oligonucleotide
ugccguccagguauauaga

SEQ ID NO: 1485036 - RNA, 19 nt, Artificial Sequence
  Description of Artificial Sequence: Synthetic oligonucleotide
gccguccagguauauagag

SEQ ID NO: 1485037 - RNA, 19 nt, Artificial Sequence
  Description of Artificial Sequence: Synthetic oligonucleotide
ggcacagaccccaauuugc

SEQ ID NO: 1485038 - RNA, 19 nt, Artificial Sequence
  Description of Artificial Sequence: Synthetic oligonucleotide
uugcuauucugaggcacga

SEQ ID NO: 1485039 - RNA, 19 nt, Artificial Sequence
  Description of Artificial Sequence: Synthetic oligonucleotide
ucgucccagaggcggagga

SEQ ID NO: 1485040 - RNA, 19 nt, Artificial Sequence
  Description of Artificial Sequence: Synthetic oligonucleotide
guauauagagagcggugcu

SEQ ID NO: 1485041 - RNA, 19 nt, Artificial Sequence
  Description of Artificial Sequence: Synthetic oligonucleotide
ucuucgcccacagauucau

SEQ ID NO: 1485042 - RNA, 19 nt, Artificial Sequence
  Description of Artificial Sequence: Synthetic oligonucleotide
gguucucucggguugccac

SEQ ID NO: 1485043 - RNA, 19 nt, Artificial Sequence
  Description of Artificial Sequence: Synthetic oligonucleotide
ggagacgccucuuccauuc

SEQ ID NO: 1485044 - RNA, 19 nt, Artificial Sequence
  Description of Artificial Sequence: Synthetic oligonucleotide
ugggcacuccuuacaucug

SEQ ID NO: 1485045 - RNA, 19 nt, Artificial Sequence
  Description of Artificial Sequence: Synthetic oligonucleotide
agccgauagcggcucagca

SEQ ID NO: 1485046 - RNA, 19 nt, Artificial Sequence
  Description of Artificial Sequence: Synthetic oligonucleotide
uccuuacaucugugugagg

SEQ ID NO: 1485047 - RNA, 19 nt, Artificial Sequence
  Description of Artificial Sequence: Synthetic oligonucleotide
agcuuguaguauggagcac

SEQ ID NO: 1485048 - RNA, 19 nt, Artificial Sequence
  Description of Artificial Sequence: Synthetic oligonucleotide
cuauccucugcggcagacg

SEQ ID NO: 1485049 - RNA, 19 nt, Artificial Sequence
  Description of Artificial Sequence: Synthetic oligonucleotide
ucacgucgucccagaggcg

SEQ ID NO: 1485050 - RNA, 19 nt, Artificial Sequence
  Description of Artificial Sequence: Synthetic oligonucleotide
uuacuggcccuggucaggu

SEQ ID NO: 1485051 - RNA, 19 nt, Artificial Sequence
  Description of Artificial Sequence: Synthetic oligonucleotide
agcggugcucauccagcag

SEQ ID NO: 1485052 - RNA, 19 nt, Artificial Sequence
  Description of Artificial Sequence: Synthetic oligonucleotide
agugccucgguuggugcag

SEQ ID NO: 1485053 - RNA, 19 nt, Artificial Sequence
  Description of Artificial Sequence: Synthetic oligonucleotide
ggccacagggcaauauugg

SEQ ID NO: 1485054 - RNA, 19 nt, Artificial Sequence
  Description of Artificial Sequence: Synthetic oligonucleotide
cagacgcaaagggaagggc

SEQ ID NO: 1485055 - RNA, 19 nt, Artificial Sequence
  Description of Artificial Sequence: Synthetic oligonucleotide
aggagacuucuaugauuug

SEQ ID NO: 1485056 - RNA, 19 nt, Artificial Sequence
  Description of Artificial Sequence: Synthetic oligonucleotide
cagggcaauauuggcucgg

SEQ ID NO: 1485057 - RNA, 19 nt, Artificial Sequence
  Description of Artificial Sequence: Synthetic oligonucleotide
gacauguaagcggggaucu

SEQ ID NO: 1485058 - RNA, 19 nt, Artificial Sequence
  Description of Artificial Sequence: Synthetic oligonucleotide
agaccccaauuugcuauuc

SEQ ID NO: 1485059 - RNA, 19 nt, Artificial Sequence
  Description of Artificial Sequence: Synthetic oligonucleotide
ggagguacaauuucauuau

SEQ ID NO: 1485060 - RNA, 19 nt, Artificial Sequence
  Description of Artificial Sequence: Synthetic oligonucleotide
gccgauagcggcucagcag

SEQ ID NO: 1485061 - RNA, 19 nt, Artificial Sequence
  Description of Artificial Sequence: Synthetic oligonucleotide
gccacagggcaauauuggc

SEQ ID NO: 1485062 - RNA, 19 nt, Artificial Sequence
  Description of Artificial Sequence: Synthetic oligonucleotide
guauguuuccagcgcuguc

SEQ ID NO: 1485063 - RNA, 19 nt, Artificial Sequence
  Description of Artificial Sequence: Synthetic oligonucleotide
gagguacaauuucauuaua

SEQ ID NO: 1485064 - RNA, 19 nt, Artificial Sequence
  Description of Artificial Sequence: Synthetic oligonucleotide
uguaagcggggaucuccuc

SEQ ID NO: 1485065 - RNA, 19 nt, Artificial Sequence
  Description of Artificial Sequence: Synthetic oligonucleotide
auuucacgggcuuguccaa

SEQ ID NO: 1485066 - RNA, 19 nt, Artificial Sequence
  Description of Artificial Sequence: Synthetic oligonucleotide
gccaacugagaucugcaca

SEQ ID NO: 1485067 - RNA, 19 nt, Artificial Sequence
  Description of Artificial Sequence: Synthetic oligonucleotide
ggcagacgcaaagggaagg

SEQ ID NO: 1485068 - RNA, 19 nt, Artificial Sequence
  Description of Artificial Sequence: Synthetic oligonucleotide
cuccggauucuccagagcu

SEQ ID NO: 1485069 - RNA, 19 nt, Artificial Sequence
  Description of Artificial Sequence: Synthetic oligonucleotide
aagggcgcagauagaggcu

SEQ ID NO: 1485070 - RNA, 19 nt, Artificial Sequence
  Description of Artificial Sequence: Synthetic oligonucleotide
acauguaagcggggaucuc

SEQ ID NO: 1485071 - RNA, 19 nt, Artificial Sequence
  Description of Artificial Sequence: Synthetic oligonucleotide
gcaugcauccagccaacug

SEQ ID NO: 1485072 - RNA, 19 nt, Artificial Sequence
  Description of Artificial Sequence: Synthetic oligonucleotide
guaagcggggaucuccucu

SEQ ID NO: 1485073 - RNA, 19 nt, Artificial Sequence
  Description of Artificial Sequence: Synthetic oligonucleotide
guagauucggacucucuuu

SEQ ID NO: 1485074 - RNA, 19 nt, Artificial Sequence
  Description of Artificial Sequence: Synthetic oligonucleotide
cugugcaugucuucgauuu

SEQ ID NO: 1485075 - RNA, 19 nt, Artificial Sequence
  Description of Artificial Sequence: Synthetic oligonucleotide
uuugccguccagguauaua

SEQ ID NO: 1485076 - RNA, 19 nt, Artificial Sequence
  Description of Artificial Sequence: Synthetic oligonucleotide
acggugauuggggacucug

SEQ ID NO: 1485077 - RNA, 19 nt, Artificial Sequence
  Description of Artificial Sequence: Synthetic oligonucleotide
ggugauuggggacucugaa

SEQ ID NO: 1485078 - RNA, 19 nt, Artificial Sequence
  Description of Artificial Sequence: Synthetic oligonucleotide
gcuuacuggcccuggucag

SEQ ID NO: 1485079 - RNA, 19 nt, Artificial Sequence
  Description of Artificial Sequence: Synthetic oligonucleotide
ccggauucuccagagcucg

SEQ ID NO: 1485080 - RNA, 19 nt, Artificial Sequence
  Description of Artificial Sequence: Synthetic oligonucleotide
gagugccucgguuggugca

SEQ ID NO: 1485081 - RNA, 19 nt, Artificial Sequence
  Description of Artificial Sequence: Synthetic oligonucleotide
uucgggcaaggagacuucu

SEQ ID NO: 1485082 - RNA, 19 nt, Artificial Sequence
  Description of Artificial Sequence: Synthetic oligonucleotide
guguggugggaacucccac

SEQ ID NO: 1485083 - RNA, 19 nt, Artificial Sequence
  Description of Artificial Sequence: Synthetic oligonucleotide
cuucgagguaugcccagga

SEQ ID NO: 1485084 - RNA, 19 nt, Artificial Sequence
  Description of Artificial Sequence: Synthetic oligonucleotide
cuucgggcaaggagacuuc

SEQ ID NO: 1485085 - RNA, 19 nt, Artificial Sequence
  Description of Artificial Sequence: Synthetic oligonucleotide
ccacugggagccgauagcg

SEQ ID NO: 1485086 - RNA, 19 nt, Artificial Sequence
  Description of Artificial Sequence: Synthetic oligonucleotide
agaacggagccagauucuu

SEQ ID NO: 1485087 - RNA, 19 nt, Artificial Sequence
  Description of Artificial Sequence: Synthetic oligonucleotide
cagcuuacuggcccugguc

SEQ ID NO: 1485088 - RNA, 19 nt, Artificial Sequence
  Description of Artificial Sequence: Synthetic oligonucleotide
cugaggcacgaugauauaa

SEQ ID NO: 1485089 - RNA, 19 nt, Artificial Sequence
  Description of Artificial Sequence: Synthetic oligonucleotide
ggcuccggauucuccagag

SEQ ID NO: 1485090 - RNA, 19 nt, Artificial Sequence
  Description of Artificial Sequence: Synthetic oligonucleotide
ugguguguggugggaacuc

SEQ ID NO: 1485091 - RNA, 19 nt, Artificial Sequence
  Description of Artificial Sequence: Synthetic oligonucleotide
guguguggugggaacuccc

SEQ ID NO: 1485092 - RNA, 19 nt, Artificial Sequence
  Description of Artificial Sequence: Synthetic oligonucleotide
cagucauugaugacagggu

SEQ ID NO: 1485093 - RNA, 19 nt, Artificial Sequence
  Description of Artificial Sequence: Synthetic oligonucleotide
aggguucucucggguugcc

SEQ ID NO: 1485094 - RNA, 19 nt, Artificial Sequence
  Description of Artificial Sequence: Synthetic oligonucleotide
gcccaggacgguuucauga

SEQ ID NO: 1485095 - RNA, 19 nt, Artificial Sequence
  Description of Artificial Sequence: Synthetic oligonucleotide
cugacaccucgaugggcac

SEQ ID NO: 1485096 - RNA, 19 nt, Artificial Sequence
  Description of Artificial Sequence: Synthetic oligonucleotide
ucgggcaaggagacuucua

SEQ ID NO: 1485097 - RNA, 19 nt, Artificial Sequence
  Description of Artificial Sequence: Synthetic oligonucleotide
gagccgauagcggcucagc

SEQ ID NO: 1485098 - RNA, 19 nt, Artificial Sequence
  Description of Artificial Sequence: Synthetic oligonucleotide
ggguacccggcaugcaucc

SEQ ID NO: 1485099 - RNA, 19 nt, Artificial Sequence
  Description of Artificial Sequence: Synthetic oligonucleotide
gauagaggcugcugugcau

SEQ ID NO: 1485100 - RNA, 19 nt, Artificial Sequence
  Description of Artificial Sequence: Synthetic oligonucleotide
ggcaauauuggcucggcuu

SEQ ID NO: 1485101 - RNA, 19 nt, Artificial Sequence
  Description of Artificial Sequence: Synthetic oligonucleotide
cuucgauuucugggacuag

SEQ ID NO: 1485102 - RNA, 19 nt, Artificial Sequence
  Description of Artificial Sequence: Synthetic oligonucleotide
gggccacagggcaauauug

SEQ ID NO: 1485103 - RNA, 19 nt, Artificial Sequence
  Description of Artificial Sequence: Synthetic oligonucleotide
agacgccucuuccauucuu

SEQ ID NO: 1485104 - RNA, 19 nt, Artificial Sequence
  Description of Artificial Sequence: Synthetic oligonucleotide
ugcuauucugaggcacgau

SEQ ID NO: 1485105 - RNA, 19 nt, Artificial Sequence
  Description of Artificial Sequence: Synthetic oligonucleotide
gaccccaauuugcuauucu

SEQ ID NO: 1485106 - RNA, 19 nt, Artificial Sequence
  Description of Artificial Sequence: Synthetic oligonucleotide
gugcaugucuucgauuucu

SEQ ID NO: 1485107 - RNA, 19 nt, Artificial Sequence
  Description of Artificial Sequence: Synthetic oligonucleotide
gguagauucggacucucuu

SEQ ID NO: 1485108 - RNA, 19 nt, Artificial Sequence
  Description of Artificial Sequence: Synthetic oligonucleotide
ggugggaacucccacuccu

SEQ ID NO: 1485109 - RNA, 19 nt, Artificial Sequence
  Description of Artificial Sequence: Synthetic oligonucleotide
gaugucuccccuagcuugu

SEQ ID NO: 1485110 - RNA, 19 nt, Artificial Sequence
  Description of Artificial Sequence: Synthetic oligonucleotide
gccacugggagccgauagc

SEQ ID NO: 1485111 - RNA, 19 nt, Artificial Sequence
  Description of Artificial Sequence: Synthetic oligonucleotide
ccccuagcuuguaguaugg

SEQ ID NO: 1485112 - RNA, 19 nt, Artificial Sequence
  Description of Artificial Sequence: Synthetic oligonucleotide
gguguguggugggaacucc

SEQ ID NO: 1485113 - RNA, 19 nt, Artificial Sequence
  Description of Artificial Sequence: Synthetic oligonucleotide
gugggaacucccacuccug

SEQ ID NO: 1485114 - RNA, 19 nt, Artificial Sequence
  Description of Artificial Sequence: Synthetic oligonucleotide
cucauggacagggccccac

SEQ ID NO: 1485115 - RNA, 19 nt, Artificial Sequence
  Description of Artificial Sequence: Synthetic oligonucleotide
gucuccccuagcuuguagu

SEQ ID NO: 1485116 - RNA, 19 nt, Artificial Sequence
  Description of Artificial Sequence: Synthetic oligonucleotide
cagugucugugggcguugg

SEQ ID NO: 1485117 - RNA, 19 nt, Artificial Sequence
  Description of Artificial Sequence: Synthetic oligonucleotide
caacugagaucugcacauc

SEQ ID NO: 1485118 - RNA, 19 nt, Artificial Sequence
  Description of Artificial Sequence: Synthetic oligonucleotide
acggaccaggauguuccug

SEQ ID NO: 1485119 - RNA, 19 nt, Artificial Sequence
  Description of Artificial Sequence: Synthetic oligonucleotide
gcuucgagguaugcccagg

SEQ ID NO: 1485120 - RNA, 19 nt, Artificial Sequence
  Description of Artificial Sequence: Synthetic oligonucleotide
cuaguagugagaggucacu

SEQ ID NO: 1485121 - RNA, 19 nt, Artificial Sequence
  Description of Artificial Sequence: Synthetic oligonucleotide
ggugaugggcacagacccc

SEQ ID NO: 1485122 - RNA, 19 nt, Artificial Sequence
  Description of Artificial Sequence: Synthetic oligonucleotide
ggggccucggaacagcuua

SEQ ID NO: 1485123 - RNA, 19 nt, Artificial Sequence
  Description of Artificial Sequence: Synthetic oligonucleotide
gucgucccagaggcggagg

SEQ ID NO: 1485124 - RNA, 19 nt, Artificial Sequence
  Description of Artificial Sequence: Synthetic oligonucleotide
gucuucgauuucugggacu

SEQ ID NO: 1485125 - RNA, 19 nt, Artificial Sequence
  Description of Artificial Sequence: Synthetic oligonucleotide
gguccgcagaggcagcauc

SEQ ID NO: 1485126 - RNA, 19 nt, Artificial Sequence
  Description of Artificial Sequence: Synthetic oligonucleotide
uuggcucggcuucgaggua

SEQ ID NO: 1485127 - RNA, 19 nt, Artificial Sequence
  Description of Artificial Sequence: Synthetic oligonucleotide
cgaugauauaaaggagacc

SEQ ID NO: 1485128 - RNA, 19 nt, Artificial Sequence
  Description of Artificial Sequence: Synthetic oligonucleotide
guucucucggguugccacu

SEQ ID NO: 1485129 - RNA, 19 nt, Artificial Sequence
  Description of Artificial Sequence: Synthetic oligonucleotide
ggacucucuuuucccgaac

SEQ ID NO: 1485130 - RNA, 19 nt, Artificial Sequence
  Description of Artificial Sequence: Synthetic oligonucleotide
gcggcagacgcaaagggaa

SEQ ID NO: 1485131 - RNA, 19 nt, Artificial Sequence
  Description of Artificial Sequence: Synthetic oligonucleotide
cagcaguaccgagugccuc

SEQ ID NO: 1485132 - RNA, 19 nt, Artificial Sequence
  Description of Artificial Sequence: Synthetic oligonucleotide
caaagaacggagccagauu

SEQ ID NO: 1485133 - RNA, 19 nt, Artificial Sequence
  Description of Artificial Sequence: Synthetic oligonucleotide
ggaacagcuuacuggcccu

SEQ ID NO: 1485134 - RNA, 19 nt, Artificial Sequence
  Description of Artificial Sequence: Synthetic oligonucleotide
gccucaaagaacggagcca

SEQ ID NO: 1485135 - RNA, 19 nt, Artificial Sequence
  Description of Artificial Sequence: Synthetic oligonucleotide
ccaggacgguuucaugaac

SEQ ID NO: 1485136 - RNA, 19 nt, Artificial Sequence
  Description of Artificial Sequence: Synthetic oligonucleotide
cacgggcuuguccaagcaa

SEQ ID NO: 1485137 - RNA, 19 nt, Artificial Sequence
  Description of Artificial Sequence: Synthetic oligonucleotide
gcuccggauucuccagagc

SEQ ID NO: 1485138 - RNA, 19 nt, Artificial Sequence
  Description of Artificial Sequence: Synthetic oligonucleotide
accucgaugggcacuccuu

SEQ ID NO: 1485139 - RNA, 19 nt, Artificial Sequence
  Description of Artificial Sequence: Synthetic oligonucleotide
ggagccgauagcggcucag

SEQ ID NO: 1485140 - RNA, 19 nt, Artificial Sequence
  Description of Artificial Sequence: Synthetic oligonucleotide
ggacuaguagugagagguc

SEQ ID NO: 1485141 - RNA, 19 nt, Artificial Sequence
  Description of Artificial Sequence: Synthetic oligonucleotide
cagguugcagguggcuuca

SEQ ID NO: 1485142 - RNA, 19 nt, Artificial Sequence
  Description of Artificial Sequence: Synthetic oligonucleotide
ccguccagguauauagaga

SEQ ID NO: 1485143 - RNA, 19 nt, Artificial Sequence
  Description of Artificial Sequence: Synthetic oligonucleotide
ggaggaguggcuccggauu

SEQ ID NO: 1485144 - RNA, 19 nt, Artificial Sequence
  Description of Artificial Sequence: Synthetic oligonucleotide
cugggagccgauagcggcu

SEQ ID NO: 1485145 - RNA, 19 nt, Artificial Sequence
  Description of Artificial Sequence: Synthetic oligonucleotide
ccacagggcaauauuggcu

SEQ ID NO: 1485146 - RNA, 19 nt, Artificial Sequence
  Description of Artificial Sequence: Synthetic oligonucleotide
cccgacaacagucauugau

SEQ ID NO: 1485147 - RNA, 19 nt, Artificial Sequence
  Description of Artificial Sequence: Synthetic oligonucleotide
gagacgccucuuccauucu

SEQ ID NO: 1485148 - RNA, 19 nt, Artificial Sequence
  Description of Artificial Sequence: Synthetic oligonucleotide
ccuucacggugaugggcac

SEQ ID NO: 1485149 - RNA, 19 nt, Artificial Sequence
  Description of Artificial Sequence: Synthetic oligonucleotide
uugccacugggagccgaua

SEQ ID NO: 1485150 - RNA, 19 nt, Artificial Sequence
  Description of Artificial Sequence: Synthetic oligonucleotide
guccgcagaggcagcaucu

SEQ ID NO: 1485151 - RNA, 19 nt, Artificial Sequence
  Description of Artificial Sequence: Synthetic oligonucleotide
gggcacuccuuacaucugu

SEQ ID NO: 1485152 - RNA, 19 nt, Artificial Sequence
  Description of Artificial Sequence: Synthetic oligonucleotide
cccuugguccugaugagcu

SEQ ID NO: 1485153 - RNA, 19 nt, Artificial Sequence
  Description of Artificial Sequence: Synthetic oligonucleotide
ggcccuuugcucagguaga

SEQ ID NO: 1485154 - RNA, 19 nt, Artificial Sequence
  Description of Artificial Sequence: Synthetic oligonucleotide
acgucgucccagaggcgga

SEQ ID NO: 1485155 - RNA, 19 nt, Artificial Sequence
  Description of Artificial Sequence: Synthetic oligonucleotide
cggcagacgcaaagggaag

SEQ ID NO: 1485156 - RNA, 19 nt, Artificial Sequence
  Description of Artificial Sequence: Synthetic oligonucleotide
ggaucuccucugcaggaau

SEQ ID NO: 1485157 - RNA, 19 nt, Artificial Sequence
  Description of Artificial Sequence: Synthetic oligonucleotide
cagugguguguggugggaa

SEQ ID NO: 1485158 - RNA, 19 nt, Artificial Sequence
  Description of Artificial Sequence: Synthetic oligonucleotide
ccaggccucaaagaacgga

SEQ ID NO: 1485159 - RNA, 19 nt, Artificial Sequence
  Description of Artificial Sequence: Synthetic oligonucleotide
ggacgguuucaugaacaua

SEQ ID NO: 1485160 - RNA, 19 nt, Artificial Sequence
  Description of Artificial Sequence: Synthetic oligonucleotide
cggagauuugcaguuggca

SEQ ID NO: 1485161 - RNA, 19 nt, Artificial Sequence
  Description of Artificial Sequence: Synthetic oligonucleotide
agguccgcagaggcagcau

SEQ ID NO: 1485162 - RNA, 19 nt, Artificial Sequence
  Description of Artificial Sequence: Synthetic oligonucleotide
gagguaugcccaggacggu

SEQ ID NO: 1485163 - RNA, 19 nt, Artificial Sequence
  Description of Artificial Sequence: Synthetic oligonucleotide
ggcggaggaguggcuccgg

SEQ ID NO: 1485164 - RNA, 19 nt, Artificial Sequence
  Description of Artificial Sequence: Synthetic oligonucleotide
gcguuggucugguuucugu

SEQ ID NO: 1485165 - RNA, 19 nt, Artificial Sequence
  Description of Artificial Sequence: Synthetic oligonucleotide
cggccacuauccucugcgg

SEQ ID NO: 1485166 - RNA, 19 nt, Artificial Sequence
  Description of Artificial Sequence: Synthetic oligonucleotide
ccugcaucacgucguccca

SEQ ID NO: 1485167 - RNA, 19 nt, Artificial Sequence
  Description of Artificial Sequence: Synthetic oligonucleotide
cagaccccaauuugcuauu

SEQ ID NO: 1485168 - RNA, 19 nt, Artificial Sequence
  Description of Artificial Sequence: Synthetic oligonucleotide
augucuccccuagcuugua

SEQ ID NO: 1485169 - RNA, 19 nt, Artificial Sequence
  Description of Artificial Sequence: Synthetic oligonucleotide
gggcaauauuggcucggcu

SEQ ID NO: 1485170 - RNA, 19 nt, Artificial Sequence
  Description of Artificial Sequence: Synthetic oligonucleotide
ccucgaugggcacuccuua

SEQ ID NO: 1485171 - RNA, 19 nt, Artificial Sequence
  Description of Artificial Sequence: Synthetic oligonucleotide
gucggugcacagacaugua

SEQ ID NO: 1485172 - RNA, 19 nt, Artificial Sequence
  Description of Artificial Sequence: Synthetic oligonucleotide
cuccccuagcuuguaguau

SEQ ID NO: 1485173 - RNA, 19 nt, Artificial Sequence
  Description of Artificial Sequence: Synthetic oligonucleotide
ggcucggcuucgagguaug

SEQ ID NO: 1485174 - RNA, 19 nt, Artificial Sequence
  Description of Artificial Sequence: Synthetic oligonucleotide
ggggccacagggcaauauu

SEQ ID NO: 1485175 - RNA, 19 nt, Artificial Sequence
  Description of Artificial Sequence: Synthetic oligonucleotide
gcucggcuucgagguaugc

SEQ ID NO: 1485176 - RNA, 19 nt, Artificial Sequence
  Description of Artificial Sequence: Synthetic oligonucleotide
gccccacagccccuugguc

SEQ ID NO: 1485177 - RNA, 19 nt, Artificial Sequence
  Description of Artificial Sequence: Synthetic oligonucleotide
cggcaugcauccagccaac

SEQ ID NO: 1485178 - RNA, 19 nt, Artificial Sequence
  Description of Artificial Sequence: Synthetic oligonucleotide
cggugauuggggacucuga

SEQ ID NO: 1485179 - RNA, 19 nt, Artificial Sequence
  Description of Artificial Sequence: Synthetic oligonucleotide
gguacccggcaugcaucca

SEQ ID NO: 1485180 - RNA, 19 nt, Artificial Sequence
  Description of Artificial Sequence: Synthetic oligonucleotide
ccucaggagucggugcaca

SEQ ID NO: 1485181 - RNA, 19 nt, Artificial Sequence
  Description of Artificial Sequence: Synthetic oligonucleotide
cagaggcggaggaguggcu

SEQ ID NO: 1485182 - RNA, 19 nt, Artificial Sequence
  Description of Artificial Sequence: Synthetic oligonucleotide
ccacggugauuggggacuc

SEQ ID NO: 1485183 - RNA, 19 nt, Artificial Sequence
  Description of Artificial Sequence: Synthetic oligonucleotide
cggacucucuuuucccgaa

SEQ ID NO: 1485184 - RNA, 19 nt, Artificial Sequence
  Description of Artificial Sequence: Synthetic oligonucleotide
ggcgcagauagaggcugcu

SEQ ID NO: 1485185 - RNA, 19 nt, Artificial Sequence
  Description of Artificial Sequence: Synthetic oligonucleotide
cuucgcccacagauucauu

SEQ ID NO: 1485186 - RNA, 19 nt, Artificial Sequence
  Description of Artificial Sequence: Synthetic oligonucleotide
cgucgucccagaggcggag

SEQ ID NO: 1485187 - RNA, 19 nt, Artificial Sequence
  Description of Artificial Sequence: Synthetic oligonucleotide
gcuaggcugguagccaguu

SEQ ID NO: 1485188 - RNA, 19 nt, Artificial Sequence
  Description of Artificial Sequence: Synthetic oligonucleotide
ggcaugcauccagccaacu

SEQ ID NO: 1485189 - RNA, 19 nt, Artificial Sequence
  Description of Artificial Sequence: Synthetic oligonucleotide
cugugggcguuggucuggu

SEQ ID NO: 1485190 - RNA, 19 nt, Artificial Sequence
  Description of Artificial Sequence: Synthetic oligonucleotide
caguaccgagugccucggu

SEQ ID NO: 1485191 - RNA, 19 nt, Artificial Sequence
  Description of Artificial Sequence: Synthetic oligonucleotide
cacggugauuggggacucu

SEQ ID NO: 1485192 - RNA, 19 nt, Artificial Sequence
  Description of Artificial Sequence: Synthetic oligonucleotide
ccccgacaacagucauuga

SEQ ID NO: 1485193 - RNA, 19 nt, Artificial Sequence
  Description of Artificial Sequence: Synthetic oligonucleotide
ggcagccaauuuguaucuu

SEQ ID NO: 1485194 - RNA, 19 nt, Artificial Sequence
  Description of Artificial Sequence: Synthetic oligonucleotide
ccccacggaccaggauguu

SEQ ID NO: 1485195 - RNA, 19 nt, Artificial Sequence
  Description of Artificial Sequence: Synthetic oligonucleotide
auaauuuauauguacaacc

SEQ ID NO: 1485196 - RNA, 19 nt, Artificial Sequence
  Description of Artificial Sequence: Synthetic oligonucleotide
aaguauaauuuauauguac

SEQ ID NO: 1485197 - RNA, 19 nt, Artificial Sequence
  Description of Artificial Sequence: Synthetic oligonucleotide
cugacaaucauuuaguggg

SEQ ID NO: 1485198 - RNA, 19 nt, Artificial Sequence
  Description of Artificial Sequence: Synthetic oligonucleotide
uuauagaggggcaaaaggg

SEQ ID NO: 1485199 - RNA, 19 nt, Artificial Sequence
  Description of Artificial Sequence: Synthetic oligonucleotide
ucaaauuuagucuguaucc

SEQ ID NO: 1485200 - RNA, 19 nt, Artificial Sequence
  Description of Artificial Sequence: Synthetic oligonucleotide
acaaccgauaaccugauac

SEQ ID NO: 1485201 - RNA, 19 nt, Artificial Sequence
  Description of Artificial Sequence: Synthetic oligonucleotide
uguuccuaauacaagaugc

SEQ ID NO: 1485202 - RNA, 19 nt, Artificial Sequence
  Description of Artificial Sequence: Synthetic oligonucleotide
ucacaaaaguuccuaaagg

SEQ ID NO: 1485203 - RNA, 19 nt, Artificial Sequence
  Description of Artificial Sequence: Synthetic oligonucleotide
uccuaauacaagaugcugg

SEQ ID NO: 1485204 - RNA, 19 nt, Artificial Sequence
  Description of Artificial Sequence: Synthetic oligonucleotide
aauaaggguacuuggaaga

SEQ ID NO: 1485205 - RNA, 19 nt, Artificial Sequence
  Description of Artificial Sequence: Synthetic oligonucleotide
gauaaccugauacagaaga

SEQ ID NO: 1485206 - RNA, 19 nt, Artificial Sequence
  Description of Artificial Sequence: Synthetic oligonucleotide
aaucauuuagugggaagcc

SEQ ID NO: 1485207 - RNA, 19 nt, Artificial Sequence
  Description of Artificial Sequence: Synthetic oligonucleotide
gaagccguguauuuggugg

SEQ ID NO: 1485208 - RNA, 19 nt, Artificial Sequence
  Description of Artificial Sequence: Synthetic oligonucleotide
cuuacucaaauuuagucug

SEQ ID NO: 1485209 - RNA, 19 nt, Artificial Sequence
  Description of Artificial Sequence: Synthetic oligonucleotide
ucagucgucuaucaaauca

SEQ ID NO: 1485210 - RNA, 19 nt, Artificial Sequence
  Description of Artificial Sequence: Synthetic oligonucleotide
uuauauguacaaccgauaa

SEQ ID NO: 1485211 - RNA, 19 nt, Artificial Sequence
  Description of Artificial Sequence: Synthetic oligonucleotide
uaucaaaucaccuccccug

SEQ ID NO: 1485212 - RNA, 19 nt, Artificial Sequence
  Description of Artificial Sequence: Synthetic oligonucleotide
aauuuagucuguauccagg

SEQ ID NO: 1485213 - RNA, 19 nt, Artificial Sequence
  Description of Artificial Sequence: Synthetic oligonucleotide
uuagucuguauccaggccu

SEQ ID NO: 1485214 - RNA, 19 nt, Artificial Sequence
  Description of Artificial Sequence: Synthetic oligonucleotide
aauacaagaugcugguaca

SEQ ID NO: 1485215 - RNA, 19 nt, Artificial Sequence
  Description of Artificial Sequence: Synthetic oligonucleotide
uuauccacuauguugcucu

SEQ ID NO: 1485216 - RNA, 19 nt, Artificial Sequence
  Description of Artificial Sequence: Synthetic oligonucleotide
gaggaauaaggguacuugg

SEQ ID NO: 1485217 - RNA, 19 nt, Artificial Sequence
  Description of Artificial Sequence: Synthetic oligonucleotide
aaggugacaagccgccacc

SEQ ID NO: 1485218 - RNA, 19 nt, Artificial Sequence
  Description of Artificial Sequence: Synthetic oligonucleotide
aaaucaccuccccugcucg

SEQ ID NO: 1485219 - RNA, 19 nt, Artificial Sequence
  Description of Artificial Sequence: Synthetic oligonucleotide
uguaauuggcgccugcggc

SEQ ID NO: 1485220 - RNA, 19 nt, Artificial Sequence
  Description of Artificial Sequence: Synthetic oligonucleotide
aucaaaucaccuccccugc

SEQ ID NO: 1485221 - RNA, 19 nt, Artificial Sequence
  Description of Artificial Sequence: Synthetic oligonucleotide
ucuagguuuccuagaacag

SEQ ID NO: 1485222 - RNA, 19 nt, Artificial Sequence
  Description of Artificial Sequence: Synthetic oligonucleotide
uuccuuccgauccagcccg

SEQ ID NO: 1485223 - RNA, 19 nt, Artificial Sequence
  Description of Artificial Sequence: Synthetic oligonucleotide
uauauguacaaccgauaac

SEQ ID NO: 1485224 - RNA, 19 nt, Artificial Sequence
  Description of Artificial Sequence: Synthetic oligonucleotide
ugagaugugggucggcucc

SEQ ID NO: 1485225 - RNA, 19 nt, Artificial Sequence
  Description of Artificial Sequence: Synthetic oligonucleotide
ucauuuagugggaagccgu

SEQ ID NO: 1485226 - RNA, 19 nt, Artificial Sequence
  Description of Artificial Sequence: Synthetic oligonucleotide
uagguuuccuagaacaggu

SEQ ID NO: 1485227 - RNA, 19 nt, Artificial Sequence
  Description of Artificial Sequence: Synthetic oligonucleotide
uuuauauguacaaccgaua

SEQ ID NO: 1485228 - RNA, 19 nt, Artificial Sequence
  Description of Artificial Sequence: Synthetic oligonucleotide
ucuaucaaaucaccucccc

SEQ ID NO: 1485229 - RNA, 19 nt, Artificial Sequence
  Description of Artificial Sequence: Synthetic oligonucleotide
caucugacuguaauuggcg

SEQ ID NO: 1485230 - RNA, 19 nt, Artificial Sequence
  Description of Artificial Sequence: Synthetic oligonucleotide
acuuggaagacccugcuaa

SEQ ID NO: 1485231 - RNA, 19 nt, Artificial Sequence
  Description of Artificial Sequence: Synthetic oligonucleotide
uuuagucuguauccaggcc

SEQ ID NO: 1485232 - RNA, 19 nt, Artificial Sequence
  Description of Artificial Sequence: Synthetic oligonucleotide
uagccuguuauccacuaug

SEQ ID NO: 1485233 - RNA, 19 nt, Artificial Sequence
  Description of Artificial Sequence: Synthetic oligonucleotide
aagguagucuccugacuag

SEQ ID NO: 1485234 - RNA, 19 nt, Artificial Sequence
  Description of Artificial Sequence: Synthetic oligonucleotide
aaccgauaaccugauacag

SEQ ID NO: 1485235 - RNA, 19 nt, Artificial Sequence
  Description of Artificial Sequence: Synthetic oligonucleotide
ucugacuguaauuggcgcc

SEQ ID NO: 1485236 - RNA, 19 nt, Artificial Sequence
  Description of Artificial Sequence: Synthetic oligonucleotide
ugaggaauaaggguacuug

SEQ ID NO: 1485237 - RNA, 19 nt, Artificial Sequence
  Description of Artificial Sequence: Synthetic oligonucleotide
acaaucauuuagugggaag

SEQ ID NO: 1485238 - RNA, 19 nt, Artificial Sequence
  Description of Artificial Sequence: Synthetic oligonucleotide
guaauuggcgccugcggcg

SEQ ID NO: 1485239 - RNA, 19 nt, Artificial Sequence
  Description of Artificial Sequence: Synthetic oligonucleotide
uuaacucuuuguaggggug

SEQ ID NO: 1485240 - RNA, 19 nt, Artificial Sequence
  Description of Artificial Sequence: Synthetic oligonucleotide
aaguuccuaaaggccaggc

SEQ ID NO: 1485241 - RNA, 19 nt, Artificial Sequence
  Description of Artificial Sequence: Synthetic oligonucleotide
gaggcggagagagauaggg

SEQ ID NO: 1485242 - RNA, 19 nt, Artificial Sequence
  Description of Artificial Sequence: Synthetic oligonucleotide
uggaagacccugcuaacca

SEQ ID NO: 1485243 - RNA, 19 nt, Artificial Sequence
  Description of Artificial Sequence: Synthetic oligonucleotide
augacuuacucaaauuuag

SEQ ID NO: 1485244 - RNA, 19 nt, Artificial Sequence
  Description of Artificial Sequence: Synthetic oligonucleotide
auuuauauguacaaccgau

SEQ ID NO: 1485245 - RNA, 19 nt, Artificial Sequence
  Description of Artificial Sequence: Synthetic oligonucleotide
uuccuaaaggccaggcaag

SEQ ID NO: 1485246 - RNA, 19 nt, Artificial Sequence
  Description of Artificial Sequence: Synthetic oligonucleotide
ucaagguuuggugggaaag

SEQ ID NO: 1485247 - RNA, 19 nt, Artificial Sequence
  Description of Artificial Sequence: Synthetic oligonucleotide
aggccugagauccagucag

SEQ ID NO: 1485248 - RNA, 19 nt, Artificial Sequence
  Description of Artificial Sequence: Synthetic oligonucleotide
uuuccuagaacaggucggg

SEQ ID NO: 1485249 - RNA, 19 nt, Artificial Sequence
  Description of Artificial Sequence: Synthetic oligonucleotide
uagucuccugacuaggccc

SEQ ID NO: 1485250 - RNA, 19 nt, Artificial Sequence
  Description of Artificial Sequence: Synthetic oligonucleotide
ucgucuaucaaaucaccuc

SEQ ID NO: 1485251 - RNA, 19 nt, Artificial Sequence
  Description of Artificial Sequence: Synthetic oligonucleotide
cuagguuuccuagaacagg

SEQ ID NO: 1485252 - RNA, 19 nt, Artificial Sequence
  Description of Artificial Sequence: Synthetic oligonucleotide
acgggugcggcgcugaagg

SEQ ID NO: 1485253 - RNA, 19 nt, Artificial Sequence
  Description of Artificial Sequence: Synthetic oligonucleotide
aucauuuagugggaagccg

SEQ ID NO: 1485254 - RNA, 19 nt, Artificial Sequence
  Description of Artificial Sequence: Synthetic oligonucleotide
ugugaugaaggacccugca

SEQ ID NO: 1485255 - RNA, 19 nt, Artificial Sequence
  Description of Artificial Sequence: Synthetic oligonucleotide
auaaggguacuuggaagac

SEQ ID NO: 1485256 - RNA, 19 nt, Artificial Sequence
  Description of Artificial Sequence: Synthetic oligonucleotide
uccuagaacaggucgggga

SEQ ID NO: 1485257 - RNA, 19 nt, Artificial Sequence
  Description of Artificial Sequence: Synthetic oligonucleotide
ucacccaaccguuaacucu

SEQ ID NO: 1485258 - RNA, 19 nt, Artificial Sequence
  Description of Artificial Sequence: Synthetic oligonucleotide
uacacaggaggugaggcgc

SEQ ID NO: 1485259 - RNA, 19 nt, Artificial Sequence
  Description of Artificial Sequence: Synthetic oligonucleotide
ugaaggacccugcaggcau

SEQ ID NO: 1485260 - RNA, 19 nt, Artificial Sequence
  Description of Artificial Sequence: Synthetic oligonucleotide
uaacucuuuguaggggugg

SEQ ID NO: 1485261 - RNA, 19 nt, Artificial Sequence
  Description of Artificial Sequence: Synthetic oligonucleotide
aguuauagaggggcaaaag

SEQ ID NO: 1485262 - RNA, 19 nt, Artificial Sequence
  Description of Artificial Sequence: Synthetic oligonucleotide
guuccuaaaggccaggcaa

SEQ ID NO: 1485263 - RNA, 19 nt, Artificial Sequence
  Description of Artificial Sequence: Synthetic oligonucleotide
ucucccuagccuguuaucc

SEQ ID NO: 1485264 - RNA, 19 nt, Artificial Sequence
  Description of Artificial Sequence: Synthetic oligonucleotide
uuuagugggaagccgugua

SEQ ID NO: 1485265 - RNA, 19 nt, Artificial Sequence
  Description of Artificial Sequence: Synthetic oligonucleotide
uccugacaaucauuuagug

SEQ ID NO: 1485266 - RNA, 19 nt, Artificial Sequence
  Description of Artificial Sequence: Synthetic oligonucleotide
aggccugagaugugggucg

SEQ ID NO: 1485267 - RNA, 19 nt, Artificial Sequence
  Description of Artificial Sequence: Synthetic oligonucleotide
ggugauacugcagggaagg

SEQ ID NO: 1485268 - RNA, 19 nt, Artificial Sequence
  Description of Artificial Sequence: Synthetic oligonucleotide
uuacucaaauuuagucugu

SEQ ID NO: 1485269 - RNA, 19 nt, Artificial Sequence
  Description of Artificial Sequence: Synthetic oligonucleotide
agucgucuaucaaaucacc

SEQ ID NO: 1485270 - RNA, 19 nt, Artificial Sequence
  Description of Artificial Sequence: Synthetic oligonucleotide
aucacccaaccguuaacuc

SEQ ID NO: 1485271 - RNA, 19 nt, Artificial Sequence
  Description of Artificial Sequence: Synthetic oligonucleotide
aggagugggagccaagccu

SEQ ID NO: 1485272 - RNA, 19 nt, Artificial Sequence
  Description of Artificial Sequence: Synthetic oligonucleotide
aaucaccuccccugcucgg

SEQ ID NO: 1485273 - RNA, 19 nt, Artificial Sequence
  Description of Artificial Sequence: Synthetic oligonucleotide
ugacaaucauuuaguggga

SEQ ID NO: 1485274 - RNA, 19 nt, Artificial Sequence
  Description of Artificial Sequence: Synthetic oligonucleotide
uccguccugacaaucauuu

SEQ ID NO: 1485275 - RNA, 19 nt, Artificial Sequence
  Description of Artificial Sequence: Synthetic oligonucleotide
gaaggugacaagccgccac

SEQ ID NO: 1485276 - RNA, 19 nt, Artificial Sequence
  Description of Artificial Sequence: Synthetic oligonucleotide
acuguaauuggcgccugcg

SEQ ID NO: 1485277 - RNA, 19 nt, Artificial Sequence
  Description of Artificial Sequence: Synthetic oligonucleotide
cagucgucuaucaaaucac

SEQ ID NO: 1485278 - RNA, 19 nt, Artificial Sequence
  Description of Artificial Sequence: Synthetic oligonucleotide
aguaucacccaaccguuaa

SEQ ID NO: 1485279 - RNA, 19 nt, Artificial Sequence
  Description of Artificial Sequence: Synthetic oligonucleotide
guacacaggaggugaggcg

SEQ ID NO: 1485280 - RNA, 19 nt, Artificial Sequence
  Description of Artificial Sequence: Synthetic oligonucleotide
ugaggcgcaacagcaauca

SEQ ID NO: 1485281 - RNA, 19 nt, Artificial Sequence
  Description of Artificial Sequence: Synthetic oligonucleotide
uccuaaaggccaggcaagg

SEQ ID NO: 1485282 - RNA, 19 nt, Artificial Sequence
  Description of Artificial Sequence: Synthetic oligonucleotide
uuugguggugaggaauaag

SEQ ID NO: 1485283 - RNA, 19 nt, Artificial Sequence
  Description of Artificial Sequence: Synthetic oligonucleotide
auaaccugauacagaagag

SEQ ID NO: 1485284 - RNA, 19 nt, Artificial Sequence
  Description of Artificial Sequence: Synthetic oligonucleotide
uggcaugacuuacucaaau

SEQ ID NO: 1485285 - RNA, 19 nt, Artificial Sequence
  Description of Artificial Sequence: Synthetic oligonucleotide
ugagggaguaucacccaac

SEQ ID NO: 1485286 - RNA, 19 nt, Artificial Sequence
  Description of Artificial Sequence: Synthetic oligonucleotide
guuccuuccgauccagccc

SEQ ID NO: 1485287 - RNA, 19 nt, Artificial Sequence
  Description of Artificial Sequence: Synthetic oligonucleotide
uuggaagacccugcuaacc

SEQ ID NO: 1485288 - RNA, 19 nt, Artificial Sequence
  Description of Artificial Sequence: Synthetic oligonucleotide
aagccguguauuugguggu

SEQ ID NO: 1485289 - RNA, 19 nt, Artificial Sequence
  Description of Artificial Sequence: Synthetic oligonucleotide
uaaggguacuuggaagacc

SEQ ID NO: 1485290 - RNA, 19 nt, Artificial Sequence
  Description of Artificial Sequence: Synthetic oligonucleotide
uugugcaggacggcguugg

SEQ ID NO: 1485291 - RNA, 19 nt, Artificial Sequence
  Description of Artificial Sequence: Synthetic oligonucleotide
aggcgcaacagcaaucaac

SEQ ID NO: 1485292 - RNA, 19 nt, Artificial Sequence
  Description of Artificial Sequence: Synthetic oligonucleotide
caggccuugaggagggagg

SEQ ID NO: 1485293 - RNA, 19 nt, Artificial Sequence
  Description of Artificial Sequence: Synthetic oligonucleotide
aguuccuaaaggccaggca

SEQ ID NO: 1485294 - RNA, 19 nt, Artificial Sequence
  Description of Artificial Sequence: Synthetic oligonucleotide
uaauuggcgccugcggcgg

SEQ ID NO: 1485295 - RNA, 19 nt, Artificial Sequence
  Description of Artificial Sequence: Synthetic oligonucleotide
cauuuagugggaagccgug

SEQ ID NO: 1485296 - RNA, 19 nt, Artificial Sequence
  Description of Artificial Sequence: Synthetic oligonucleotide
uuagugggaagccguguau

SEQ ID NO: 1485297 - RNA, 19 nt, Artificial Sequence
  Description of Artificial Sequence: Synthetic oligonucleotide
guggcucucggcuaggcac

SEQ ID NO: 1485298 - RNA, 19 nt, Artificial Sequence
  Description of Artificial Sequence: Synthetic oligonucleotide
ugcccauaucucccuagcc

SEQ ID NO: 1485299 - RNA, 19 nt, Artificial Sequence
  Description of Artificial Sequence: Synthetic oligonucleotide
caugacuuacucaaauuua

SEQ ID NO: 1485300 - RNA, 19 nt, Artificial Sequence
  Description of Artificial Sequence: Synthetic oligonucleotide
uugagggaguaucacccaa

SEQ ID NO: 1485301 - RNA, 19 nt, Artificial Sequence
  Description of Artificial Sequence: Synthetic oligonucleotide
ucaaaucaccuccccugcu

SEQ ID NO: 1485302 - RNA, 19 nt, Artificial Sequence
  Description of Artificial Sequence: Synthetic oligonucleotide
acucaaauuuagucuguau

SEQ ID NO: 1485303 - RNA, 19 nt, Artificial Sequence
  Description of Artificial Sequence: Synthetic oligonucleotide
ucggggagcuccucuuugg

SEQ ID NO: 1485304 - RNA, 19 nt, Artificial Sequence
  Description of Artificial Sequence: Synthetic oligonucleotide
aaguuauagaggggcaaaa

SEQ ID NO: 1485305 - RNA, 19 nt, Artificial Sequence
  Description of Artificial Sequence: Synthetic oligonucleotide
uauucucucccacccuuuc

SEQ ID NO: 1485306 - RNA, 19 nt, Artificial Sequence
  Description of Artificial Sequence: Synthetic oligonucleotide
caaccgauaaccugauaca

SEQ ID NO: 1485307 - RNA, 19 nt, Artificial Sequence
  Description of Artificial Sequence: Synthetic oligonucleotide
uccagucagucgucuauca

SEQ ID NO: 1485308 - RNA, 19 nt, Artificial Sequence
  Description of Artificial Sequence: Synthetic oligonucleotide
caaauuuagucuguaucca

SEQ ID NO: 1485309 - RNA, 19 nt, Artificial Sequence
  Description of Artificial Sequence: Synthetic oligonucleotide
ucucucccacccuuucuag

SEQ ID NO: 1485310 - RNA, 19 nt, Artificial Sequence
  Description of Artificial Sequence: Synthetic oligonucleotide
cuuggaagacccugcuaac

SEQ ID NO: 1485311 - RNA, 19 nt, Artificial Sequence
  Description of Artificial Sequence: Synthetic oligonucleotide
ggguauucgggacagcgug

SEQ ID NO: 1485312 - RNA, 19 nt, Artificial Sequence
  Description of Artificial Sequence: Synthetic oligonucleotide
ccgucugacaccaacgccc

SEQ ID NO: 1485313 - RNA, 19 nt, Artificial Sequence
  Description of Artificial Sequence: Synthetic oligonucleotide
auagaggggcaaaagggcu

SEQ ID NO: 1485314 - RNA, 19 nt, Artificial Sequence
  Description of Artificial Sequence: Synthetic oligonucleotide
agaggggauugggacagac

SEQ ID NO: 1485315 - RNA, 19 nt, Artificial Sequence
  Description of Artificial Sequence: Synthetic oligonucleotide
gcuugagggaguaucaccc

SEQ ID NO: 1485316 - RNA, 19 nt, Artificial Sequence
  Description of Artificial Sequence: Synthetic oligonucleotide
ggaauaaggguacuuggaa

SEQ ID NO: 1485317 - RNA, 19 nt, Artificial Sequence
  Description of Artificial Sequence: Synthetic oligonucleotide
agaaguuauagaggggcaa

SEQ ID NO: 1485318 - RNA, 19 nt, Artificial Sequence
  Description of Artificial Sequence: Synthetic oligonucleotide
gacagcguggcuggcaggc

SEQ ID NO: 1485319 - RNA, 19 nt, Artificial Sequence
  Description of Artificial Sequence: Synthetic oligonucleotide
aacucuuuguagggguggu

SEQ ID NO: 1485320 - RNA, 19 nt, Artificial Sequence
  Description of Artificial Sequence: Synthetic oligonucleotide
agagauagggguccuucuu

SEQ ID NO: 1485321 - RNA, 19 nt, Artificial Sequence
  Description of Artificial Sequence: Synthetic oligonucleotide
uuccuagaacaggucgggg

SEQ ID NO: 1485322 - RNA, 19 nt, Artificial Sequence
  Description of Artificial Sequence: Synthetic oligonucleotide
agccaagccugggaaaggg

SEQ ID NO: 1485323 - RNA, 19 nt, Artificial Sequence
  Description of Artificial Sequence: Synthetic oligonucleotide
guggugaggaauaagggua

SEQ ID NO: 1485324 - RNA, 19 nt, Artificial Sequence
  Description of Artificial Sequence: Synthetic oligonucleotide
caagguagucuccugacua

SEQ ID NO: 1485325 - RNA, 19 nt, Artificial Sequence
  Description of Artificial Sequence: Synthetic oligonucleotide
ugauacagaagaggggauu

SEQ ID NO: 1485326 - RNA, 19 nt, Artificial Sequence
  Description of Artificial Sequence: Synthetic oligonucleotide
gggaguaucacccaaccgu

SEQ ID NO: 1485327 - RNA, 19 nt, Artificial Sequence
  Description of Artificial Sequence: Synthetic oligonucleotide
aggcaagguagucuccuga

SEQ ID NO: 1485328 - RNA, 19 nt, Artificial Sequence
  Description of Artificial Sequence: Synthetic oligonucleotide
cagucagucgucuaucaaa

SEQ ID NO: 1485329 - RNA, 19 nt, Artificial Sequence
  Description of Artificial Sequence: Synthetic oligonucleotide
agucagucgucuaucaaau

SEQ ID NO: 1485330 - RNA, 19 nt, Artificial Sequence
  Description of Artificial Sequence: Synthetic oligonucleotide
aggugacaagccgccaccc

SEQ ID NO: 1485331 - RNA, 19 nt, Artificial Sequence
  Description of Artificial Sequence: Synthetic oligonucleotide
ugagauccagucagucguc

SEQ ID NO: 1485332 - RNA, 19 nt, Artificial Sequence
  Description of Artificial Sequence: Synthetic oligonucleotide
gacggcguuggcuggcuug

SEQ ID NO: 1485333 - RNA, 19 nt, Artificial Sequence
  Description of Artificial Sequence: Synthetic oligonucleotide
ugacuaggccccuggcaug

SEQ ID NO: 1485334 - RNA, 19 nt, Artificial Sequence
  Description of Artificial Sequence: Synthetic oligonucleotide
ccuagaacaggucggggag

SEQ ID NO: 1485335 - RNA, 19 nt, Artificial Sequence
  Description of Artificial Sequence: Synthetic oligonucleotide
agugggaagccguguauuu

SEQ ID NO: 1485336 - RNA, 19 nt, Artificial Sequence
  Description of Artificial Sequence: Synthetic oligonucleotide
cguccugacaaucauuuag

SEQ ID NO: 1485337 - RNA, 19 nt, Artificial Sequence
  Description of Artificial Sequence: Synthetic oligonucleotide
gucuaucaaaucaccuccc

SEQ ID NO: 1485338 - RNA, 19 nt, Artificial Sequence
  Description of Artificial Sequence: Synthetic oligonucleotide
aaagguguguggaggcgga

SEQ ID NO: 1485339 - RNA, 19 nt, Artificial Sequence
  Description of Artificial Sequence: Synthetic oligonucleotide
gacuguaauuggcgccugc

SEQ ID NO: 1485340 - RNA, 19 nt, Artificial Sequence
  Description of Artificial Sequence: Synthetic oligonucleotide
guauucgggacagcguggc

SEQ ID NO: 1485341 - RNA, 19 nt, Artificial Sequence
  Description of Artificial Sequence: Synthetic oligonucleotide
caaccguuaacucuuugua

SEQ ID NO: 1485342 - RNA, 19 nt, Artificial Sequence
  Description of Artificial Sequence: Synthetic oligonucleotide
ugacaagccgccaccccuc

SEQ ID NO: 1485343 - RNA, 19 nt, Artificial Sequence
  Description of Artificial Sequence: Synthetic oligonucleotide
guucccaugcaaacugccc

SEQ ID NO: 1485344 - RNA, 19 nt, Artificial Sequence
  Description of Artificial Sequence: Synthetic oligonucleotide
auuuagugggaagccgugu

SEQ ID NO: 1485345 - RNA, 19 nt, Artificial Sequence
  Description of Artificial Sequence: Synthetic oligonucleotide
ggcuugagggaguaucacc

SEQ ID NO: 1485346 - RNA, 19 nt, Artificial Sequence
  Description of Artificial Sequence: Synthetic oligonucleotide
guaucacccaaccguuaac

SEQ ID NO: 1485347 - RNA, 19 nt, Artificial Sequence
  Description of Artificial Sequence: Synthetic oligonucleotide
ccguuaacucuuuguaggg

SEQ ID NO: 1485348 - RNA, 19 nt, Artificial Sequence
  Description of Artificial Sequence: Synthetic oligonucleotide
cuagaacaggucggggagc

SEQ ID NO: 1485349 - RNA, 19 nt, Artificial Sequence
  Description of Artificial Sequence: Synthetic oligonucleotide
auccacuauguugcucugg

SEQ ID NO: 1485350 - RNA, 19 nt, Artificial Sequence
  Description of Artificial Sequence: Synthetic oligonucleotide
ccuggcaugacuuacucaa

SEQ ID NO: 1485351 - RNA, 19 nt, Artificial Sequence
  Description of Artificial Sequence: Synthetic oligonucleotide
gagaugugggucggcuccg

SEQ ID NO: 1485352 - RNA, 19 nt, Artificial Sequence
  Description of Artificial Sequence: Synthetic oligonucleotide
uccgauccagcccgucuga

SEQ ID NO: 1485353 - RNA, 19 nt, Artificial Sequence
  Description of Artificial Sequence: Synthetic oligonucleotide
ucggggccuaggugaaggg

SEQ ID NO: 1485354 - RNA, 19 nt, Artificial Sequence
  Description of Artificial Sequence: Synthetic oligonucleotide
uccugacuaggccccuggc

SEQ ID NO: 1485355 - RNA, 19 nt, Artificial Sequence
  Description of Artificial Sequence: Synthetic oligonucleotide
ggaggagaaauguuccuaa

SEQ ID NO: 1485356 - RNA, 19 nt, Artificial Sequence
  Description of Artificial Sequence: Synthetic oligonucleotide
cugaaggcgggcugcgaug

SEQ ID NO: 1485357 - RNA, 19 nt, Artificial Sequence
  Description of Artificial Sequence: Synthetic oligonucleotide
uaucccgaugcugcgcucu

SEQ ID NO: 1485358 - RNA, 19 nt, Artificial Sequence
  Description of Artificial Sequence: Synthetic oligonucleotide
gacaaucauuuagugggaa

SEQ ID NO: 1485359 - RNA, 19 nt, Artificial Sequence
  Description of Artificial Sequence: Synthetic oligonucleotide
gaggggauugggacagacc

SEQ ID NO: 1485360 - RNA, 19 nt, Artificial Sequence
  Description of Artificial Sequence: Synthetic oligonucleotide
auuggcgccugcggcggcc

SEQ ID NO: 1485361 - RNA, 19 nt, Artificial Sequence
  Description of Artificial Sequence: Synthetic oligonucleotide
cugccccguaucccgaugc

SEQ ID NO: 1485362 - RNA, 19 nt, Artificial Sequence
  Description of Artificial Sequence: Synthetic oligonucleotide
agccuguuauccacuaugu

SEQ ID NO: 1485363 - RNA, 19 nt, Artificial Sequence
  Description of Artificial Sequence: Synthetic oligonucleotide
agcccgucugacaccaacg

SEQ ID NO: 1485364 - RNA, 19 nt, Artificial Sequence
  Description of Artificial Sequence: Synthetic oligonucleotide
gguauucgggacagcgugg

SEQ ID NO: 1485365 - RNA, 19 nt, Artificial Sequence
  Description of Artificial Sequence: Synthetic oligonucleotide
cuugagggaguaucaccca

SEQ ID NO: 1485366 - RNA, 19 nt, Artificial Sequence
  Description of Artificial Sequence: Synthetic oligonucleotide
cugagaugugggucggcuc

SEQ ID NO: 1485367 - RNA, 19 nt, Artificial Sequence
  Description of Artificial Sequence: Synthetic oligonucleotide
ccgauaaccugauacagaa

SEQ ID NO: 1485368 - RNA, 19 nt, Artificial Sequence
  Description of Artificial Sequence: Synthetic oligonucleotide
cccuuucuagguuuccuag

SEQ ID NO: 1485369 - RNA, 19 nt, Artificial Sequence
  Description of Artificial Sequence: Synthetic oligonucleotide
cagcguggcuggcaggcgg

SEQ ID NO: 1485370 - RNA, 19 nt, Artificial Sequence
  Description of Artificial Sequence: Synthetic oligonucleotide
gacaagccgccaccccucc

SEQ ID NO: 1485371 - RNA, 19 nt, Artificial Sequence
  Description of Artificial Sequence: Synthetic oligonucleotide
gggacagaccaggaguggg

SEQ ID NO: 1485372 - RNA, 19 nt, Artificial Sequence
  Description of Artificial Sequence: Synthetic oligonucleotide
agguuuccuagaacagguc

SEQ ID NO: 1485373 - RNA, 19 nt, Artificial Sequence
  Description of Artificial Sequence: Synthetic oligonucleotide
ugggucggcuccggggucg

SEQ ID NO: 1485374 - RNA, 19 nt, Artificial Sequence
  Description of Artificial Sequence: Synthetic oligonucleotide
cuaucaaaucaccuccccu

SEQ ID NO: 1485375 - RNA, 19 nt, Artificial Sequence
  Description of Artificial Sequence: Synthetic oligonucleotide
ccacuuuugcaggaggcgg

SEQ ID NO: 1485376 - RNA, 19 nt, Artificial Sequence
  Description of Artificial Sequence: Synthetic oligonucleotide
aagccgccaccccuccucu

SEQ ID NO: 1485377 - RNA, 19 nt, Artificial Sequence
  Description of Artificial Sequence: Synthetic oligonucleotide
gucggggagcuccucuuug

SEQ ID NO: 1485378 - RNA, 19 nt, Artificial Sequence
  Description of Artificial Sequence: Synthetic oligonucleotide
aggcggagagagauagggg

SEQ ID NO: 1485379 - RNA, 19 nt, Artificial Sequence
  Description of Artificial Sequence: Synthetic oligonucleotide
gcguuggcuggcuuguucc

SEQ ID NO: 1485380 - RNA, 19 nt, Artificial Sequence
  Description of Artificial Sequence: Synthetic oligonucleotide
ccccguaucccgaugcugc

SEQ ID NO: 1485381 - RNA, 19 nt, Artificial Sequence
  Description of Artificial Sequence: Synthetic oligonucleotide
uuccguccugacaaucauu

SEQ ID NO: 1485382 - RNA, 19 nt, Artificial Sequence
  Description of Artificial Sequence: Synthetic oligonucleotide
gggacagcguggcuggcag

SEQ ID NO: 1485383 - RNA, 19 nt, Artificial Sequence
  Description of Artificial Sequence: Synthetic oligonucleotide
ggaggcggaggugauacug

SEQ ID NO: 1485384 - RNA, 19 nt, Artificial Sequence
  Description of Artificial Sequence: Synthetic oligonucleotide
ggaagccguguauuuggug

SEQ ID NO: 1485385 - RNA, 19 nt, Artificial Sequence
  Description of Artificial Sequence: Synthetic oligonucleotide
ggcggagagagauaggggu

SEQ ID NO: 1485386 - RNA, 19 nt, Artificial Sequence
  Description of Artificial Sequence: Synthetic oligonucleotide
gggagaaguuauagagggg

SEQ ID NO: 1485387 - RNA, 19 nt, Artificial Sequence
  Description of Artificial Sequence: Synthetic oligonucleotide
cuccuagcccagugguggc

SEQ ID NO: 1485388 - RNA, 19 nt, Artificial Sequence
  Description of Artificial Sequence: Synthetic oligonucleotide
ugacuguaauuggcgccug

SEQ ID NO: 1485389 - RNA, 19 nt, Artificial Sequence
  Description of Artificial Sequence: Synthetic oligonucleotide
gucagucgucuaucaaauc

SEQ ID NO: 1485390 - RNA, 19 nt, Artificial Sequence
  Description of Artificial Sequence: Synthetic oligonucleotide
gcaugacuuacucaaauuu

SEQ ID NO: 1485391 - RNA, 19 nt, Artificial Sequence
  Description of Artificial Sequence: Synthetic oligonucleotide
guauuugguggugaggaau

SEQ ID NO: 1485392 - RNA, 19 nt, Artificial Sequence
  Description of Artificial Sequence: Synthetic oligonucleotide
gacuaggccccuggcauga

SEQ ID NO: 1485393 - RNA, 19 nt, Artificial Sequence
  Description of Artificial Sequence: Synthetic oligonucleotide
ggcggggaaggugacaagc

SEQ ID NO: 1485394 - RNA, 19 nt, Artificial Sequence
  Description of Artificial Sequence: Synthetic oligonucleotide
uacaaccgauaaccugaua

SEQ ID NO: 1485395 - RNA, 19 nt, Artificial Sequence
  Description of Artificial Sequence: Synthetic oligonucleotide
agauccagucagucgucua

SEQ ID NO: 1485396 - RNA, 19 nt, Artificial Sequence
  Description of Artificial Sequence: Synthetic oligonucleotide
gugacaagccgccaccccu

SEQ ID NO: 1485397 - RNA, 19 nt, Artificial Sequence
  Description of Artificial Sequence: Synthetic oligonucleotide
uacgggugcggcgcugaag

SEQ ID NO: 1485398 - RNA, 19 nt, Artificial Sequence
  Description of Artificial Sequence: Synthetic oligonucleotide
ggugacaagccgccacccc

SEQ ID NO: 1485399 - RNA, 19 nt, Artificial Sequence
  Description of Artificial Sequence: Synthetic oligonucleotide
uccuagcccagugguggcc

SEQ ID NO: 1485400 - RNA, 19 nt, Artificial Sequence
  Description of Artificial Sequence: Synthetic oligonucleotide
cagcccgucugacaccaac

SEQ ID NO: 1485401 - RNA, 19 nt, Artificial Sequence
  Description of Artificial Sequence: Synthetic oligonucleotide
auaucucccuagccuguua

SEQ ID NO: 1485402 - RNA, 19 nt, Artificial Sequence
  Description of Artificial Sequence: Synthetic oligonucleotide
ggcgcaacagcaaucaacu

SEQ ID NO: 1485403 - RNA, 19 nt, Artificial Sequence
  Description of Artificial Sequence: Synthetic oligonucleotide
ccuaauacaagaugcuggu

SEQ ID NO: 1485404 - RNA, 19 nt, Artificial Sequence
  Description of Artificial Sequence: Synthetic oligonucleotide
ugccccguaucccgaugcu

SEQ ID NO: 1485405 - RNA, 19 nt, Artificial Sequence
  Description of Artificial Sequence: Synthetic oligonucleotide
cucgggguuccuuccgauc

SEQ ID NO: 1485406 - RNA, 19 nt, Artificial Sequence
  Description of Artificial Sequence: Synthetic oligonucleotide
guccugacaaucauuuagu

SEQ ID NO: 1485407 - RNA, 19 nt, Artificial Sequence
  Description of Artificial Sequence: Synthetic oligonucleotide
cugacuaggccccuggcau

SEQ ID NO: 1485408 - RNA, 19 nt, Artificial Sequence
  Description of Artificial Sequence: Synthetic oligonucleotide
cccacuuuugcaggaggcg

SEQ ID NO: 1485409 - RNA, 19 nt, Artificial Sequence
  Description of Artificial Sequence: Synthetic oligonucleotide
gucgucuaucaaaucaccu

SEQ ID NO: 1485410 - RNA, 19 nt, Artificial Sequence
  Description of Artificial Sequence: Synthetic oligonucleotide
ggugcggcgcugaaggcug

SEQ ID NO: 1485411 - RNA, 19 nt, Artificial Sequence
  Description of Artificial Sequence: Synthetic oligonucleotide
cugacuguaauuggcgccu

SEQ ID NO: 1485412 - RNA, 19 nt, Artificial Sequence
  Description of Artificial Sequence: Synthetic oligonucleotide
agcguggcuggcaggcggg

SEQ ID NO: 1485413 - RNA, 19 nt, Artificial Sequence
  Description of Artificial Sequence: Synthetic oligonucleotide
agccguguauuugguggug

SEQ ID NO: 1485414 - RNA, 19 nt, Artificial Sequence
  Description of Artificial Sequence: Synthetic oligonucleotide
ccguguauuugguggugag

SEQ ID NO: 1485415 - RNA, 19 nt, Artificial Sequence
  Description of Artificial Sequence: Synthetic oligonucleotide
cugagccccagaguggaga

SEQ ID NO: 1485416 - RNA, 19 nt, Artificial Sequence
  Description of Artificial Sequence: Synthetic oligonucleotide
gugaggcgcaacagcaauc

SEQ ID NO: 1485417 - RNA, 19 nt, Artificial Sequence
  Description of Artificial Sequence: Synthetic oligonucleotide
cacccaaccguuaacucuu

SEQ ID NO: 1485418 - RNA, 19 nt, Artificial Sequence
  Description of Artificial Sequence: Synthetic oligonucleotide
cuggcaugacuuacucaaa

SEQ ID NO: 1485419 - RNA, 19 nt, Artificial Sequence
  Description of Artificial Sequence: Synthetic oligonucleotide
cucccacccagaccucuuc

SEQ ID NO: 1485420 - RNA, 19 nt, Artificial Sequence
  Description of Artificial Sequence: Synthetic oligonucleotide
cccgucugacaccaacgcc

SEQ ID NO: 1485421 - RNA, 19 nt, Artificial Sequence
  Description of Artificial Sequence: Synthetic oligonucleotide
gcaggacggcguuggcugg

SEQ ID NO: 1485422 - RNA, 19 nt, Artificial Sequence
  Description of Artificial Sequence: Synthetic oligonucleotide
gaguaucacccaaccguua

SEQ ID NO: 1485423 - RNA, 19 nt, Artificial Sequence
  Description of Artificial Sequence: Synthetic oligonucleotide
aggaggcggaggugauacu

SEQ ID NO: 1485424 - RNA, 19 nt, Artificial Sequence
  Description of Artificial Sequence: Synthetic oligonucleotide
cgucugacaccaacgcccc

SEQ ID NO: 1485425 - RNA, 19 nt, Artificial Sequence
  Description of Artificial Sequence: Synthetic oligonucleotide
cugauacagaagaggggau

SEQ ID NO: 1485426 - RNA, 19 nt, Artificial Sequence
  Description of Artificial Sequence: Synthetic oligonucleotide
gcggggaaggugacaagcc

SEQ ID NO: 1485427 - RNA, 19 nt, Artificial Sequence
  Description of Artificial Sequence: Synthetic oligonucleotide
gagauccagucagucgucu

SEQ ID NO: 1485428 - RNA, 19 nt, Artificial Sequence
  Description of Artificial Sequence: Synthetic oligonucleotide
acacaggaggugaggcgca

SEQ ID NO: 1485429 - RNA, 19 nt, Artificial Sequence
  Description of Artificial Sequence: Synthetic oligonucleotide
gccgccaccccuccucucc

SEQ ID NO: 1485430 - RNA, 19 nt, Artificial Sequence
  Description of Artificial Sequence: Synthetic oligonucleotide
gaggcgcaacagcaaucaa

SEQ ID NO: 1485431 - RNA, 19 nt, Artificial Sequence
  Description of Artificial Sequence: Synthetic oligonucleotide
ggcguuggcuggcuuguuc

SEQ ID NO: 1485432 - RNA, 19 nt, Artificial Sequence
  Description of Artificial Sequence: Synthetic oligonucleotide
uccuuccgauccagcccgu

SEQ ID NO: 1485433 - RNA, 19 nt, Artificial Sequence
  Description of Artificial Sequence: Synthetic oligonucleotide
gugauacugcagggaagga

SEQ ID NO: 1485434 - RNA, 19 nt, Artificial Sequence
  Description of Artificial Sequence: Synthetic oligonucleotide
ggccccuacgggugcggcg

SEQ ID NO: 1485435 - RNA, 19 nt, Artificial Sequence
  Description of Artificial Sequence: Synthetic oligonucleotide
ccaaccguuaacucuuugu

SEQ ID NO: 1485436 - RNA, 19 nt, Artificial Sequence
  Description of Artificial Sequence: Synthetic oligonucleotide
cuuccgauccagcccgucu

SEQ ID NO: 1485437 - RNA, 19 nt, Artificial Sequence
  Description of Artificial Sequence: Synthetic oligonucleotide
agccgccaccccuccucuc

SEQ ID NO: 1485438 - RNA, 19 nt, Artificial Sequence
  Description of Artificial Sequence: Synthetic oligonucleotide
ggugaggcgcaacagcaau

SEQ ID NO: 1485439 - RNA, 19 nt, Artificial Sequence
  Description of Artificial Sequence: Synthetic oligonucleotide
guaucccgaugcugcgcuc

SEQ ID NO: 1485440 - RNA, 19 nt, Artificial Sequence
  Description of Artificial Sequence: Synthetic oligonucleotide
gcaaucaacucccucucuu

SEQ ID NO: 1485441 - RNA, 19 nt, Artificial Sequence
  Description of Artificial Sequence: Synthetic oligonucleotide
ggcaugacuuacucaaauu

SEQ ID NO: 1485442 - RNA, 19 nt, Artificial Sequence
  Description of Artificial Sequence: Synthetic oligonucleotide
ucccgaugcugcgcucuga

SEQ ID NO: 1485443 - RNA, 19 nt, Artificial Sequence
  Description of Artificial Sequence: Synthetic oligonucleotide
ggaggcggagagagauagg

SEQ ID NO: 1485444 - RNA, 19 nt, Artificial Sequence
  Description of Artificial Sequence: Synthetic oligonucleotide
cagcacuggagggccguug

SEQ ID NO: 1485445 - RNA, 19 nt, Artificial Sequence
  Description of Artificial Sequence: Synthetic oligonucleotide
agggccguuggugguggcu

SEQ ID NO: 1485446 - RNA, 19 nt, Artificial Sequence
  Description of Artificial Sequence: Synthetic oligonucleotide
cuuccguccugacaaucau

SEQ ID NO: 1485447 - RNA, 19 nt, Artificial Sequence
  Description of Artificial Sequence: Synthetic oligonucleotide
aggugaggcgcaacagcaa

SEQ ID NO: 1485448 - RNA, 19 nt, Artificial Sequence
  Description of Artificial Sequence: Synthetic oligonucleotide
ccuagcccagugguggccc

SEQ ID NO: 1485449 - RNA, 19 nt, Artificial Sequence
  Description of Artificial Sequence: Synthetic oligonucleotide
cuguauucucucccacccu

SEQ ID NO: 1485450 - RNA, 19 nt, Artificial Sequence
  Description of Artificial Sequence: Synthetic oligonucleotide
gcaagguagucuccugacu

SEQ ID NO: 1485451 - RNA, 19 nt, Artificial Sequence
  Description of Artificial Sequence: Synthetic oligonucleotide
ccauccggaagaggcgggg

SEQ ID NO: 1485452 - RNA, 19 nt, Artificial Sequence
  Description of Artificial Sequence: Synthetic oligonucleotide
gccccuacgggugcggcgc

SEQ ID NO: 1485453 - RNA, 19 nt, Artificial Sequence
  Description of Artificial Sequence: Synthetic oligonucleotide
cauccggaagaggcgggga

SEQ ID NO: 1485454 - RNA, 19 nt, Artificial Sequence
  Description of Artificial Sequence: Synthetic oligonucleotide
ggaagacccugcuaaccau

SEQ ID NO: 1485455 - RNA, 19 nt, Artificial Sequence
  Description of Artificial Sequence: Synthetic oligonucleotide
cuugaggagggaggauuua

SEQ ID NO: 1485456 - RNA, 19 nt, Artificial Sequence
  Description of Artificial Sequence: Synthetic oligonucleotide
cuagcccagugguggccca

SEQ ID NO: 1485457 - RNA, 19 nt, Artificial Sequence
  Description of Artificial Sequence: Synthetic oligonucleotide
ccaggccuugaggagggag

SEQ ID NO: 1485458 - RNA, 19 nt, Artificial Sequence
  Description of Artificial Sequence: Synthetic oligonucleotide
agggccccuacgggugcgg

SEQ ID NO: 1485459 - RNA, 19 nt, Artificial Sequence
  Description of Artificial Sequence: Synthetic oligonucleotide
gugaggaauaaggguacuu

SEQ ID NO: 1485460 - RNA, 19 nt, Artificial Sequence
  Description of Artificial Sequence: Synthetic oligonucleotide
ggaguaucacccaaccguu

SEQ ID NO: 1485461 - RNA, 19 nt, Artificial Sequence
  Description of Artificial Sequence: Synthetic oligonucleotide
ggcuccuagcccaguggug

SEQ ID NO: 1485462 - RNA, 19 nt, Artificial Sequence
  Description of Artificial Sequence: Synthetic oligonucleotide
ccaagucuggcccucugua

SEQ ID NO: 1485463 - RNA, 19 nt, Artificial Sequence
  Description of Artificial Sequence: Synthetic oligonucleotide
guacaaccgauaaccugau

SEQ ID NO: 1485464 - RNA, 19 nt, Artificial Sequence
  Description of Artificial Sequence: Synthetic oligonucleotide
gcugccccguaucccgaug

SEQ ID NO: 1485465 - RNA, 19 nt, Artificial Sequence
  Description of Artificial Sequence: Synthetic oligonucleotide
cccugcucgggguuccuuc

SEQ ID NO: 1485466 - RNA, 19 nt, Artificial Sequence
  Description of Artificial Sequence: Synthetic oligonucleotide
gugggucggcuccgggguc

SEQ ID NO: 1485467 - RNA, 19 nt, Artificial Sequence
  Description of Artificial Sequence: Synthetic oligonucleotide
uagcccagugguggcccaa

SEQ ID NO: 1485468 - RNA, 19 nt, Artificial Sequence
  Description of Artificial Sequence: Synthetic oligonucleotide
gcgcaacagcaaucaacuc

SEQ ID NO: 1485469 - RNA, 19 nt, Artificial Sequence
  Description of Artificial Sequence: Synthetic oligonucleotide
ucgggacagcguggcuggc

SEQ ID NO: 1485470 - RNA, 19 nt, Artificial Sequence
  Description of Artificial Sequence: Synthetic oligonucleotide
cuagccuguuauccacuau

SEQ ID NO: 1485471 - RNA, 19 nt, Artificial Sequence
  Description of Artificial Sequence: Synthetic oligonucleotide
cccaaccguuaacucuuug

SEQ ID NO: 1485472 - RNA, 19 nt, Artificial Sequence
  Description of Artificial Sequence: Synthetic oligonucleotide
ggguccuucuugagggaga

SEQ ID NO: 1485473 - RNA, 19 nt, Artificial Sequence
  Description of Artificial Sequence: Synthetic oligonucleotide
ggccccuggcaugacuuac

SEQ ID NO: 1485474 - RNA, 19 nt, Artificial Sequence
  Description of Artificial Sequence: Synthetic oligonucleotide
gcgccugcggcggccaggg

SEQ ID NO: 1485475 - RNA, 19 nt, Artificial Sequence
  Description of Artificial Sequence: Synthetic oligonucleotide
ccuagccuguuauccacua

SEQ ID NO: 1485476 - RNA, 19 nt, Artificial Sequence
  Description of Artificial Sequence: Synthetic oligonucleotide
gccccguaucccgaugcug

SEQ ID NO: 1485477 - RNA, 19 nt, Artificial Sequence
  Description of Artificial Sequence: Synthetic oligonucleotide
ccagucagucgucuaucaa

SEQ ID NO: 1485478 - RNA, 19 nt, Artificial Sequence
  Description of Artificial Sequence: Synthetic oligonucleotide
ggugaggaauaaggguacu

SEQ ID NO: 1485479 - RNA, 19 nt, Artificial Sequence
  Description of Artificial Sequence: Synthetic oligonucleotide
ggcgccugcggcggccagg

SEQ ID NO: 1485480 - RNA, 19 nt, Artificial Sequence
  Description of Artificial Sequence: Synthetic oligonucleotide
guggaggcggagagagaua

SEQ ID NO: 1485481 - RNA, 19 nt, Artificial Sequence
  Description of Artificial Sequence: Synthetic oligonucleotide
cauaucucccuagccuguu

SEQ ID NO: 1485482 - RNA, 19 nt, Artificial Sequence
  Description of Artificial Sequence: Synthetic oligonucleotide
ccauaucucccuagccugu

SEQ ID NO: 1485483 - RNA, 19 nt, Artificial Sequence
  Description of Artificial Sequence: Synthetic oligonucleotide
ggucggggccuaggugaag

SEQ ID NO: 1485484 - RNA, 19 nt, Artificial Sequence
  Description of Artificial Sequence: Synthetic oligonucleotide
acccaaccguuaacucuuu

SEQ ID NO: 1485485 - RNA, 19 nt, Artificial Sequence
  Description of Artificial Sequence: Synthetic oligonucleotide
cggggccuaggugaagggc

SEQ ID NO: 1485486 - RNA, 19 nt, Artificial Sequence
  Description of Artificial Sequence: Synthetic oligonucleotide
gggugcggcgcugaaggcu

SEQ ID NO: 1485487 - RNA, 19 nt, Artificial Sequence
  Description of Artificial Sequence: Synthetic oligonucleotide
cuacgggugcggcgcugaa

SEQ ID NO: 1485488 - RNA, 19 nt, Artificial Sequence
  Description of Artificial Sequence: Synthetic oligonucleotide
ccccaagucuggcccucug

SEQ ID NO: 1485489 - RNA, 19 nt, Artificial Sequence
  Description of Artificial Sequence: Synthetic oligonucleotide
cguaucccgaugcugcgcu

SEQ ID NO: 1485490 - RNA, 19 nt, Artificial Sequence
  Description of Artificial Sequence: Synthetic oligonucleotide
gggaagccguguauuuggu

SEQ ID NO: 1485491 - RNA, 19 nt, Artificial Sequence
  Description of Artificial Sequence: Synthetic oligonucleotide
ccgauccagcccgucugac

SEQ ID NO: 1485492 - RNA, 19 nt, Artificial Sequence
  Description of Artificial Sequence: Synthetic oligonucleotide
ggcucucggcuaggcacuc

SEQ ID NO: 1485493 - RNA, 19 nt, Artificial Sequence
  Description of Artificial Sequence: Synthetic oligonucleotide
gggccccuacgggugcggc

SEQ ID NO: 1485494 - RNA, 19 nt, Artificial Sequence
  Description of Artificial Sequence: Synthetic oligonucleotide
ccuacgggugcggcgcuga

SEQ ID NO: 1485495 - RNA, 19 nt, Artificial Sequence
  Description of Artificial Sequence: Synthetic oligonucleotide
ccuuccgauccagcccguc

SEQ ID NO: 1485496 - RNA, 19 nt, Artificial Sequence
  Description of Artificial Sequence: Synthetic oligonucleotide
gucuccugacuaggccccu

SEQ ID NO: 1485497 - RNA, 19 nt, Artificial Sequence
  Description of Artificial Sequence: Synthetic oligonucleotide
cgggugcggcgcugaaggc

SEQ ID NO: 1485498 - RNA, 19 nt, Artificial Sequence
  Description of Artificial Sequence: Synthetic oligonucleotide
ccguccugacaaucauuua

SEQ ID NO: 1485499 - RNA, 19 nt, Artificial Sequence
  Description of Artificial Sequence: Synthetic oligonucleotide
gggucggggccuaggugaa

SEQ ID NO: 1485500 - RNA, 19 nt, Artificial Sequence
  Description of Artificial Sequence: Synthetic oligonucleotide
gcacuggagggccguuggu

SEQ ID NO: 1485501 - RNA, 19 nt, Artificial Sequence
  Description of Artificial Sequence: Synthetic oligonucleotide
cccuacgggugcggcgcug

SEQ ID NO: 1485502 - RNA, 19 nt, Artificial Sequence
  Description of Artificial Sequence: Synthetic oligonucleotide
ggacggcguuggcuggcuu

SEQ ID NO: 1485503 - RNA, 19 nt, Artificial Sequence
  Description of Artificial Sequence: Synthetic oligonucleotide
cgcugaaggcugccccgua

SEQ ID NO: 1485504 - RNA, 19 nt, Artificial Sequence
  Description of Artificial Sequence: Synthetic oligonucleotide
gcguggcuggcaggcgggu

SEQ ID NO: 1485505 - RNA, 19 nt, Artificial Sequence
  Description of Artificial Sequence: Synthetic oligonucleotide
ccccuacgggugcggcgcu

SEQ ID NO: 1485506 - RNA, 19 nt, Artificial Sequence
  Description of Artificial Sequence: Synthetic oligonucleotide
cggcguuggcuggcuuguu

SEQ ID NO: 1485507 - RNA, 19 nt, Artificial Sequence
  Description of Artificial Sequence: Synthetic oligonucleotide
guugaauuaacuuagcgcg

SEQ ID NO: 1485508 - RNA, 19 nt, Artificial Sequence
  Description of Artificial Sequence: Synthetic oligonucleotide
aaugcaauaacucacaauu

SEQ ID NO: 1485509 - RNA, 19 nt, Artificial Sequence
  Description of Artificial Sequence: Synthetic oligonucleotide
aauaaaugcaauaacucac

SEQ ID NO: 1485510 - RNA, 19 nt, Artificial Sequence
  Description of Artificial Sequence: Synthetic oligonucleotide
cuugauuuuagguugaacc

SEQ ID NO: 1485511 - RNA, 19 nt, Artificial Sequence
  Description of Artificial Sequence: Synthetic oligonucleotide
aguauuauucuuuucuugg

SEQ ID NO: 1485512 - RNA, 19 nt, Artificial Sequence
  Description of Artificial Sequence: Synthetic oligonucleotide
acaauuaucaguugggaag

SEQ ID NO: 1485513 - RNA, 19 nt, Artificial Sequence
  Description of Artificial Sequence: Synthetic oligonucleotide
auuuguauuauauaugccu

SEQ ID NO: 1485514 - RNA, 19 nt, Artificial Sequence
  Description of Artificial Sequence: Synthetic oligonucleotide
uuuugcauugcucacagca

SEQ ID NO: 1485515 - RNA, 19 nt, Artificial Sequence
  Description of Artificial Sequence: Synthetic oligonucleotide
uuaaagaauggguauaaug

SEQ ID NO: 1485516 - RNA, 19 nt, Artificial Sequence
  Description of Artificial Sequence: Synthetic oligonucleotide
aauaacucacaauuaucag

SEQ ID NO: 1485517 - RNA, 19 nt, Artificial Sequence
  Description of Artificial Sequence: Synthetic oligonucleotide
aaacacaaggguuuaaaga

SEQ ID NO: 1485518 - RNA, 19 nt, Artificial Sequence
  Description of Artificial Sequence: Synthetic oligonucleotide
uuuaccaauagccauuugu

SEQ ID NO: 1485519 - RNA, 19 nt, Artificial Sequence
  Description of Artificial Sequence: Synthetic oligonucleotide
uauuauauaugccuucaug

SEQ ID NO: 1485520 - RNA, 19 nt, Artificial Sequence
  Description of Artificial Sequence: Synthetic oligonucleotide
aaaacacaaggguuuaaag

SEQ ID NO: 1485521 - RNA, 19 nt, Artificial Sequence
  Description of Artificial Sequence: Synthetic oligonucleotide
auauccaaacacaugaagc

SEQ ID NO: 1485522 - RNA, 19 nt, Artificial Sequence
  Description of Artificial Sequence: Synthetic oligonucleotide
ucugcuaucccuuugauuu

SEQ ID NO: 1485523 - RNA, 19 nt, Artificial Sequence
  Description of Artificial Sequence: Synthetic oligonucleotide
ucaacuuaaugguaauggg

SEQ ID NO: 1485524 - RNA, 19 nt, Artificial Sequence
  Description of Artificial Sequence: Synthetic oligonucleotide
aaaauagaaaacucuggau

SEQ ID NO: 1485525 - RNA, 19 nt, Artificial Sequence
  Description of Artificial Sequence: Synthetic oligonucleotide
uugauuuuagguugaaccc

SEQ ID NO: 1485526 - RNA, 19 nt, Artificial Sequence
  Description of Artificial Sequence: Synthetic oligonucleotide
aaagaaauugcgccaucuc

SEQ ID NO: 1485527 - RNA, 19 nt, Artificial Sequence
  Description of Artificial Sequence: Synthetic oligonucleotide
uaaacacuuauugacaagc

SEQ ID NO: 1485528 - RNA, 19 nt, Artificial Sequence
  Description of Artificial Sequence: Synthetic oligonucleotide
uauccaaacacaugaagca

SEQ ID NO: 1485529 - RNA, 19 nt, Artificial Sequence
  Description of Artificial Sequence: Synthetic oligonucleotide
aagaaauugcgccaucucu

SEQ ID NO: 1485530 - RNA, 19 nt, Artificial Sequence
  Description of Artificial Sequence: Synthetic oligonucleotide
uauaaugguugaauuaacu

SEQ ID NO: 1485531 - RNA, 19 nt, Artificial Sequence
  Description of Artificial Sequence: Synthetic oligonucleotide
caacuuaaugguaaugggg

SEQ ID NO: 1485532 - RNA, 19 nt, Artificial Sequence
  Description of Artificial Sequence: Synthetic oligonucleotide
ugguugaauuaacuuagcg

SEQ ID NO: 1485533 - RNA, 19 nt, Artificial Sequence
  Description of Artificial Sequence: Synthetic oligonucleotide
ugggauauggcccuggaga

SEQ ID NO: 1485534 - RNA, 19 nt, Artificial Sequence
  Description of Artificial Sequence: Synthetic oligonucleotide
acucacaauuaucaguugg

SEQ ID NO: 1485535 - RNA, 19 nt, Artificial Sequence
  Description of Artificial Sequence: Synthetic oligonucleotide
agggauacauuccuguugg

SEQ ID NO: 1485536 - RNA, 19 nt, Artificial Sequence
  Description of Artificial Sequence: Synthetic oligonucleotide
aguagaccaguccuggccc

SEQ ID NO: 1485537 - RNA, 19 nt, Artificial Sequence
  Description of Artificial Sequence: Synthetic oligonucleotide
auaacucacaauuaucagu

SEQ ID NO: 1485538 - RNA, 19 nt, Artificial Sequence
  Description of Artificial Sequence: Synthetic oligonucleotide
gaccuaaaguaccagcugg

SEQ ID NO: 1485539 - RNA, 19 nt, Artificial Sequence
  Description of Artificial Sequence: Synthetic oligonucleotide
aauaaucugauuguaccca

SEQ ID NO: 1485540 - RNA, 19 nt, Artificial Sequence
  Description of Artificial Sequence: Synthetic oligonucleotide
gauauggcccuggagaucg

SEQ ID NO: 1485541 - RNA, 19 nt, Artificial Sequence
  Description of Artificial Sequence: Synthetic oligonucleotide
caugaugcucuacauaucc

SEQ ID NO: 1485542 - RNA, 19 nt, Artificial Sequence
  Description of Artificial Sequence: Synthetic oligonucleotide
uaaugguugaauuaacuua

SEQ ID NO: 1485543 - RNA, 19 nt, Artificial Sequence
  Description of Artificial Sequence: Synthetic oligonucleotide
uacacacacacacacacac

SEQ ID NO: 1485544 - RNA, 19 nt, Artificial Sequence
  Description of Artificial Sequence: Synthetic oligonucleotide
uuuaguagaccaguccugg

SEQ ID NO: 1485545 - RNA, 19 nt, Artificial Sequence
  Description of Artificial Sequence: Synthetic oligonucleotide
uaacucacaauuaucaguu

SEQ ID NO: 1485546 - RNA, 19 nt, Artificial Sequence
  Description of Artificial Sequence: Synthetic oligonucleotide
gaaacacucuaccuugagg

SEQ ID NO: 1485547 - RNA, 19 nt, Artificial Sequence
  Description of Artificial Sequence: Synthetic oligonucleotide
caccauacggccuagguag

SEQ ID NO: 1485548 - RNA, 19 nt, Artificial Sequence
  Description of Artificial Sequence: Synthetic oligonucleotide
uauuauucuuuucuugggu

SEQ ID NO: 1485549 - RNA, 19 nt, Artificial Sequence
  Description of Artificial Sequence: Synthetic oligonucleotide
cucacaauuaucaguuggg

SEQ ID NO: 1485550 - RNA, 19 nt, Artificial Sequence
  Description of Artificial Sequence: Synthetic oligonucleotide
acuuggguuacuccaaggg

SEQ ID NO: 1485551 - RNA, 19 nt, Artificial Sequence
  Description of Artificial Sequence: Synthetic oligonucleotide
caauaacucacaauuauca

SEQ ID NO: 1485552 - RNA, 19 nt, Artificial Sequence
  Description of Artificial Sequence: Synthetic oligonucleotide
ugcaauaacucacaauuau

SEQ ID NO: 1485553 - RNA, 19 nt, Artificial Sequence
  Description of Artificial Sequence: Synthetic oligonucleotide
aauuaacuuagcgcgugcg

SEQ ID NO: 1485554 - RNA, 19 nt, Artificial Sequence
  Description of Artificial Sequence: Synthetic oligonucleotide
uuuguauuauauaugccuu

SEQ ID NO: 1485555 - RNA, 19 nt, Artificial Sequence
  Description of Artificial Sequence: Synthetic oligonucleotide
ucaggaacgcccuuuacca

SEQ ID NO: 1485556 - RNA, 19 nt, Artificial Sequence
  Description of Artificial Sequence: Synthetic oligonucleotide
guauuauucuuuucuuggg

SEQ ID NO: 1485557 - RNA, 19 nt, Artificial Sequence
  Description of Artificial Sequence: Synthetic oligonucleotide
gacgguuuggcagaggacg

SEQ ID NO: 1485558 - RNA, 19 nt, Artificial Sequence
  Description of Artificial Sequence: Synthetic oligonucleotide
uguucugaaaacaguauua

SEQ ID NO: 1485559 - RNA, 19 nt, Artificial Sequence
  Description of Artificial Sequence: Synthetic oligonucleotide
acgaaaauucaucugacau

SEQ ID NO: 1485560 - RNA, 19 nt, Artificial Sequence
  Description of Artificial Sequence: Synthetic oligonucleotide
gguugaauuaacuuagcgc

SEQ ID NO: 1485561 - RNA, 19 nt, Artificial Sequence
  Description of Artificial Sequence: Synthetic oligonucleotide
uugggaaguacaaaacaca

SEQ ID NO: 1485562 - RNA, 19 nt, Artificial Sequence
  Description of Artificial Sequence: Synthetic oligonucleotide
uuuagguugaacccagaaa

SEQ ID NO: 1485563 - RNA, 19 nt, Artificial Sequence
  Description of Artificial Sequence: Synthetic oligonucleotide
caugaagcaggccaggagc

SEQ ID NO: 1485564 - RNA, 19 nt, Artificial Sequence
  Description of Artificial Sequence: Synthetic oligonucleotide
cuggcgugggauaugaucc

SEQ ID NO: 1485565 - RNA, 19 nt, Artificial Sequence
  Description of Artificial Sequence: Synthetic oligonucleotide
uacuccaaggguuggagcc

SEQ ID NO: 1485566 - RNA, 19 nt, Artificial Sequence
  Description of Artificial Sequence: Synthetic oligonucleotide
aggagaaauguucugagaa

SEQ ID NO: 1485567 - RNA, 19 nt, Artificial Sequence
  Description of Artificial Sequence: Synthetic oligonucleotide
acgcccuuuaccaauagcc

SEQ ID NO: 1485568 - RNA, 19 nt, Artificial Sequence
  Description of Artificial Sequence: Synthetic oligonucleotide
uuaccaauagccauuugua

SEQ ID NO: 1485569 - RNA, 19 nt, Artificial Sequence
  Description of Artificial Sequence: Synthetic oligonucleotide
uguauuauauaugccuuca

SEQ ID NO: 1485570 - RNA, 19 nt, Artificial Sequence
  Description of Artificial Sequence: Synthetic oligonucleotide
auaaggaccacuagguggg

SEQ ID NO: 1485571 - RNA, 19 nt, Artificial Sequence
  Description of Artificial Sequence: Synthetic oligonucleotide
aacgaaaauucaucugaca

SEQ ID NO: 1485572 - RNA, 19 nt, Artificial Sequence
  Description of Artificial Sequence: Synthetic oligonucleotide
ccauuuguauuauauaugc

SEQ ID NO: 1485573 - RNA, 19 nt, Artificial Sequence
  Description of Artificial Sequence: Synthetic oligonucleotide
aaaugcaauaacucacaau

SEQ ID NO: 1485574 - RNA, 19 nt, Artificial Sequence
  Description of Artificial Sequence: Synthetic oligonucleotide
uaggcuaucuuuuauuuua

SEQ ID NO: 1485575 - RNA, 19 nt, Artificial Sequence
  Description of Artificial Sequence: Synthetic oligonucleotide
cauugcucacagcagacgg

SEQ ID NO: 1485576 - RNA, 19 nt, Artificial Sequence
  Description of Artificial Sequence: Synthetic oligonucleotide
acuaaacacuuauugacaa

SEQ ID NO: 1485577 - RNA, 19 nt, Artificial Sequence
  Description of Artificial Sequence: Synthetic oligonucleotide
uaguagaccaguccuggcc

SEQ ID NO: 1485578 - RNA, 19 nt, Artificial Sequence
  Description of Artificial Sequence: Synthetic oligonucleotide
cacacacacacacacacag

SEQ ID NO: 1485579 - RNA, 19 nt, Artificial Sequence
  Description of Artificial Sequence: Synthetic oligonucleotide
auguacauguacuucaaaa

SEQ ID NO: 1485580 - RNA, 19 nt, Artificial Sequence
  Description of Artificial Sequence: Synthetic oligonucleotide
ugugggugcaccauacggc

SEQ ID NO: 1485581 - RNA, 19 nt, Artificial Sequence
  Description of Artificial Sequence: Synthetic oligonucleotide
ugcguacacacacacacac

SEQ ID NO: 1485582 - RNA, 19 nt, Artificial Sequence
  Description of Artificial Sequence: Synthetic oligonucleotide
uucuuuuccucauuaggcu

SEQ ID NO: 1485583 - RNA, 19 nt, Artificial Sequence
  Description of Artificial Sequence: Synthetic oligonucleotide
uccagaaggaggaaagggu

SEQ ID NO: 1485584 - RNA, 19 nt, Artificial Sequence
  Description of Artificial Sequence: Synthetic oligonucleotide
acaucuucccggcaggauc

SEQ ID NO: 1485585 - RNA, 19 nt, Artificial Sequence
  Description of Artificial Sequence: Synthetic oligonucleotide
cauuuguauuauauaugcc

SEQ ID NO: 1485586 - RNA, 19 nt, Artificial Sequence
  Description of Artificial Sequence: Synthetic oligonucleotide
uguacccacaugaugcucu

SEQ ID NO: 1485587 - RNA, 19 nt, Artificial Sequence
  Description of Artificial Sequence: Synthetic oligonucleotide
uuuuagguugaacccagaa

SEQ ID NO: 1485588 - RNA, 19 nt, Artificial Sequence
  Description of Artificial Sequence: Synthetic oligonucleotide
ugauuuuagguugaaccca

SEQ ID NO: 1485589 - RNA, 19 nt, Artificial Sequence
  Description of Artificial Sequence: Synthetic oligonucleotide
uccacucuuacauuaaaua

SEQ ID NO: 1485590 - RNA, 19 nt, Artificial Sequence
  Description of Artificial Sequence: Synthetic oligonucleotide
acgaaaguuguucuuucag

SEQ ID NO: 1485591 - RNA, 19 nt, Artificial Sequence
  Description of Artificial Sequence: Synthetic oligonucleotide
aacaggagaaauguucuga

SEQ ID NO: 1485592 - RNA, 19 nt, Artificial Sequence
  Description of Artificial Sequence: Synthetic oligonucleotide
aaaguuguucuuucaggaa

SEQ ID NO: 1485593 - RNA, 19 nt, Artificial Sequence
  Description of Artificial Sequence: Synthetic oligonucleotide
ucuuuucuuggguuaaaac

SEQ ID NO: 1485594 - RNA, 19 nt, Artificial Sequence
  Description of Artificial Sequence: Synthetic oligonucleotide
cacacacacacacacagac

SEQ ID NO: 1485595 - RNA, 19 nt, Artificial Sequence
  Description of Artificial Sequence: Synthetic oligonucleotide
ugagguacgaaaguuguuc

SEQ ID NO: 1485596 - RNA, 19 nt, Artificial Sequence
  Description of Artificial Sequence: Synthetic oligonucleotide
auuaucaguugggaaguac

SEQ ID NO: 1485597 - RNA, 19 nt, Artificial Sequence
  Description of Artificial Sequence: Synthetic oligonucleotide
cacacacacacacacacac

SEQ ID NO: 1485598 - RNA, 19 nt, Artificial Sequence
  Description of Artificial Sequence: Synthetic oligonucleotide
aguuuggccagcuuuugca

SEQ ID NO: 1485599 - RNA, 19 nt, Artificial Sequence
  Description of Artificial Sequence: Synthetic oligonucleotide
acacuuauugacaagcugu

SEQ ID NO: 1485600 - RNA, 19 nt, Artificial Sequence
  Description of Artificial Sequence: Synthetic oligonucleotide
cagaggacgguucaggcag

SEQ ID NO: 1485601 - RNA, 19 nt, Artificial Sequence
  Description of Artificial Sequence: Synthetic oligonucleotide
agccuugaguaguuuggcc

SEQ ID NO: 1485602 - RNA, 19 nt, Artificial Sequence
  Description of Artificial Sequence: Synthetic oligonucleotide
ggaaggggcauauuuggcg

SEQ ID NO: 1485603 - RNA, 19 nt, Artificial Sequence
  Description of Artificial Sequence: Synthetic oligonucleotide
uugaauuaacuuagcgcgu

SEQ ID NO: 1485604 - RNA, 19 nt, Artificial Sequence
  Description of Artificial Sequence: Synthetic oligonucleotide
caguauuauucuuuucuug

SEQ ID NO: 1485605 - RNA, 19 nt, Artificial Sequence
  Description of Artificial Sequence: Synthetic oligonucleotide
agaauggguauaaugguug

SEQ ID NO: 1485606 - RNA, 19 nt, Artificial Sequence
  Description of Artificial Sequence: Synthetic oligonucleotide
cuaaacacuuauugacaag

SEQ ID NO: 1485607 - RNA, 19 nt, Artificial Sequence
  Description of Artificial Sequence: Synthetic oligonucleotide
uuucuugauuuuagguuga

SEQ ID NO: 1485608 - RNA, 19 nt, Artificial Sequence
  Description of Artificial Sequence: Synthetic oligonucleotide
uuggguuacuccaaggguu

SEQ ID NO: 1485609 - RNA, 19 nt, Artificial Sequence
  Description of Artificial Sequence: Synthetic oligonucleotide
ugccaacgaaaauucaucu

SEQ ID NO: 1485610 - RNA, 19 nt, Artificial Sequence
  Description of Artificial Sequence: Synthetic oligonucleotide
aaaggcacagugauaggug

SEQ ID NO: 1485611 - RNA, 19 nt, Artificial Sequence
  Description of Artificial Sequence: Synthetic oligonucleotide
aauugcgccaucucuucau

SEQ ID NO: 1485612 - RNA, 19 nt, Artificial Sequence
  Description of Artificial Sequence: Synthetic oligonucleotide
uagagggauacauuccugu

SEQ ID NO: 1485613 - RNA, 19 nt, Artificial Sequence
  Description of Artificial Sequence: Synthetic oligonucleotide
uuguauuauauaugccuuc

SEQ ID NO: 1485614 - RNA, 19 nt, Artificial Sequence
  Description of Artificial Sequence: Synthetic oligonucleotide
guugggaaguacaaaacac

SEQ ID NO: 1485615 - RNA, 19 nt, Artificial Sequence
  Description of Artificial Sequence: Synthetic oligonucleotide
caucucuucauccacuguc

SEQ ID NO: 1485616 - RNA, 19 nt, Artificial Sequence
  Description of Artificial Sequence: Synthetic oligonucleotide
auaaaugcaauaacucaca

SEQ ID NO: 1485617 - RNA, 19 nt, Artificial Sequence
  Description of Artificial Sequence: Synthetic oligonucleotide
cuacauauccaaacacaug

SEQ ID NO: 1485618 - RNA, 19 nt, Artificial Sequence
  Description of Artificial Sequence: Synthetic oligonucleotide
accaauagccauuuguauu

SEQ ID NO: 1485619 - RNA, 19 nt, Artificial Sequence
  Description of Artificial Sequence: Synthetic oligonucleotide
cacagacuuaaaaugauaa

SEQ ID NO: 1485620 - RNA, 19 nt, Artificial Sequence
  Description of Artificial Sequence: Synthetic oligonucleotide
auuaacuuagcgcgugcgu

SEQ ID NO: 1485621 - RNA, 19 nt, Artificial Sequence
  Description of Artificial Sequence: Synthetic oligonucleotide
uggguuacuccaaggguug

SEQ ID NO: 1485622 - RNA, 19 nt, Artificial Sequence
  Description of Artificial Sequence: Synthetic oligonucleotide
agaaacacucuaccuugag

SEQ ID NO: 1485623 - RNA, 19 nt, Artificial Sequence
  Description of Artificial Sequence: Synthetic oligonucleotide
cuaaaguaccagcuggauc

SEQ ID NO: 1485624 - RNA, 19 nt, Artificial Sequence
  Description of Artificial Sequence: Synthetic oligonucleotide
aacucacaauuaucaguug

SEQ ID NO: 1485625 - RNA, 19 nt, Artificial Sequence
  Description of Artificial Sequence: Synthetic oligonucleotide
gaaauugcgccaucucuuc

SEQ ID NO: 1485626 - RNA, 19 nt, Artificial Sequence
  Description of Artificial Sequence: Synthetic oligonucleotide
caacgaaaauucaucugac

SEQ ID NO: 1485627 - RNA, 19 nt, Artificial Sequence
  Description of Artificial Sequence: Synthetic oligonucleotide
auauaugccuucaugugca

SEQ ID NO: 1485628 - RNA, 19 nt, Artificial Sequence
  Description of Artificial Sequence: Synthetic oligonucleotide
acaugaagcaggccaggag

SEQ ID NO: 1485629 - RNA, 19 nt, Artificial Sequence
  Description of Artificial Sequence: Synthetic oligonucleotide
ucauuaggcuaucuuuuau

SEQ ID NO: 1485630 - RNA, 19 nt, Artificial Sequence
  Description of Artificial Sequence: Synthetic oligonucleotide
acagacuuaaaaugauaaa

SEQ ID NO: 1485631 - RNA, 19 nt, Artificial Sequence
  Description of Artificial Sequence: Synthetic oligonucleotide
guugaacccagaaacacuc

SEQ ID NO: 1485632 - RNA, 19 nt, Artificial Sequence
  Description of Artificial Sequence: Synthetic oligonucleotide
uaacaggagaaauguucug

SEQ ID NO: 1485633 - RNA, 19 nt, Artificial Sequence
  Description of Artificial Sequence: Synthetic oligonucleotide
acagugauaggugcugcac

SEQ ID NO: 1485634 - RNA, 19 nt, Artificial Sequence
  Description of Artificial Sequence: Synthetic oligonucleotide
aaauugcgccaucucuuca

SEQ ID NO: 1485635 - RNA, 19 nt, Artificial Sequence
  Description of Artificial Sequence: Synthetic oligonucleotide
cuaggcgcggcacaguggc

SEQ ID NO: 1485636 - RNA, 19 nt, Artificial Sequence
  Description of Artificial Sequence: Synthetic oligonucleotide
cagaagguccugaaggcac

SEQ ID NO: 1485637 - RNA, 19 nt, Artificial Sequence
  Description of Artificial Sequence: Synthetic oligonucleotide
aaacacuuauugacaagcu

SEQ ID NO: 1485638 - RNA, 19 nt, Artificial Sequence
  Description of Artificial Sequence: Synthetic oligonucleotide
ggcauagagggauacauuc

SEQ ID NO: 1485639 - RNA, 19 nt, Artificial Sequence
  Description of Artificial Sequence: Synthetic oligonucleotide
ucuuuuccucauuaggcua

SEQ ID NO: 1485640 - RNA, 19 nt, Artificial Sequence
  Description of Artificial Sequence: Synthetic oligonucleotide
uacgaaaguuguucuuuca

SEQ ID NO: 1485641 - RNA, 19 nt, Artificial Sequence
  Description of Artificial Sequence: Synthetic oligonucleotide
gauggcauagcagguggag

SEQ ID NO: 1485642 - RNA, 19 nt, Artificial Sequence
  Description of Artificial Sequence: Synthetic oligonucleotide
uggguauaaugguugaauu

SEQ ID NO: 1485643 - RNA, 19 nt, Artificial Sequence
  Description of Artificial Sequence: Synthetic oligonucleotide
acaguggcggcgaugaguc

SEQ ID NO: 1485644 - RNA, 19 nt, Artificial Sequence
  Description of Artificial Sequence: Synthetic oligonucleotide
acaaggguuuaaagaaugg

SEQ ID NO: 1485645 - RNA, 19 nt, Artificial Sequence
  Description of Artificial Sequence: Synthetic oligonucleotide
cugccaacgaaaauucauc

SEQ ID NO: 1485646 - RNA, 19 nt, Artificial Sequence
  Description of Artificial Sequence: Synthetic oligonucleotide
uaacuuagcgcgugcguac

SEQ ID NO: 1485647 - RNA, 19 nt, Artificial Sequence
  Description of Artificial Sequence: Synthetic oligonucleotide
uaccaauagccauuuguau

SEQ ID NO: 1485648 - RNA, 19 nt, Artificial Sequence
  Description of Artificial Sequence: Synthetic oligonucleotide
uuaacuuagcgcgugcgua

SEQ ID NO: 1485649 - RNA, 19 nt, Artificial Sequence
  Description of Artificial Sequence: Synthetic oligonucleotide
ugucaacuuaaugguaaug

SEQ ID NO: 1485650 - RNA, 19 nt, Artificial Sequence
  Description of Artificial Sequence: Synthetic oligonucleotide
auuguacccacaugaugcu

SEQ ID NO: 1485651 - RNA, 19 nt, Artificial Sequence
  Description of Artificial Sequence: Synthetic oligonucleotide
cacuuauugacaagcuguc

SEQ ID NO: 1485652 - RNA, 19 nt, Artificial Sequence
  Description of Artificial Sequence: Synthetic oligonucleotide
gagcacuuggguuacucca

SEQ ID NO: 1485653 - RNA, 19 nt, Artificial Sequence
  Description of Artificial Sequence: Synthetic oligonucleotide
gaauggguauaaugguuga

SEQ ID NO: 1485654 - RNA, 19 nt, Artificial Sequence
  Description of Artificial Sequence: Synthetic oligonucleotide
gguauaaugguugaauuaa

SEQ ID NO: 1485655 - RNA, 19 nt, Artificial Sequence
  Description of Artificial Sequence: Synthetic oligonucleotide
auugcgccaucucuucauc

SEQ ID NO: 1485656 - RNA, 19 nt, Artificial Sequence
  Description of Artificial Sequence: Synthetic oligonucleotide
caguugggaaguacaaaac

SEQ ID NO: 1485657 - RNA, 19 nt, Artificial Sequence
  Description of Artificial Sequence: Synthetic oligonucleotide
guuacuccaaggguuggag

SEQ ID NO: 1485658 - RNA, 19 nt, Artificial Sequence
  Description of Artificial Sequence: Synthetic oligonucleotide
cagugauaggugcugcacc

SEQ ID NO: 1485659 - RNA, 19 nt, Artificial Sequence
  Description of Artificial Sequence: Synthetic oligonucleotide
acccacaugaugcucuaca

SEQ ID NO: 1485660 - RNA, 19 nt, Artificial Sequence
  Description of Artificial Sequence: Synthetic oligonucleotide
caucugacaucuucccggc

SEQ ID NO: 1485661 - RNA, 19 nt, Artificial Sequence
  Description of Artificial Sequence: Synthetic oligonucleotide
augguugaauuaacuuagc

SEQ ID NO: 1485662 - RNA, 19 nt, Artificial Sequence
  Description of Artificial Sequence: Synthetic oligonucleotide
aggauccgagcccuaggcg

SEQ ID NO: 1485663 - RNA, 19 nt, Artificial Sequence
  Description of Artificial Sequence: Synthetic oligonucleotide
uuagcgcgugcguacacac

SEQ ID NO: 1485664 - RNA, 19 nt, Artificial Sequence
  Description of Artificial Sequence: Synthetic oligonucleotide
uggagaucgauauggcaua

SEQ ID NO: 1485665 - RNA, 19 nt, Artificial Sequence
  Description of Artificial Sequence: Synthetic oligonucleotide
cuuggugggaguccagaug

SEQ ID NO: 1485666 - RNA, 19 nt, Artificial Sequence
  Description of Artificial Sequence: Synthetic oligonucleotide
caugugcauguacauguac

SEQ ID NO: 1485667 - RNA, 19 nt, Artificial Sequence
  Description of Artificial Sequence: Synthetic oligonucleotide
ugcuaucccuuugauuucc

SEQ ID NO: 1485668 - RNA, 19 nt, Artificial Sequence
  Description of Artificial Sequence: Synthetic oligonucleotide
ccagaaacacucuaccuug

SEQ ID NO: 1485669 - RNA, 19 nt, Artificial Sequence
  Description of Artificial Sequence: Synthetic oligonucleotide
ugaggguaacaggagaaau

SEQ ID NO: 1485670 - RNA, 19 nt, Artificial Sequence
  Description of Artificial Sequence: Synthetic oligonucleotide
caugaugguccagaaggag

SEQ ID NO: 1485671 - RNA, 19 nt, Artificial Sequence
  Description of Artificial Sequence: Synthetic oligonucleotide
cacaguaggggcuggauaa

SEQ ID NO: 1485672 - RNA, 19 nt, Artificial Sequence
  Description of Artificial Sequence: Synthetic oligonucleotide
aucugauuguacccacaug

SEQ ID NO: 1485673 - RNA, 19 nt, Artificial Sequence
  Description of Artificial Sequence: Synthetic oligonucleotide
cuugaggguaacaggagaa

SEQ ID NO: 1485674 - RNA, 19 nt, Artificial Sequence
  Description of Artificial Sequence: Synthetic oligonucleotide
uuauucggaguaggauggg

SEQ ID NO: 1485675 - RNA, 19 nt, Artificial Sequence
  Description of Artificial Sequence: Synthetic oligonucleotide
ccgaaaggcacagugauag

SEQ ID NO: 1485676 - RNA, 19 nt, Artificial Sequence
  Description of Artificial Sequence: Synthetic oligonucleotide
aggguuuaaagaaugggua

SEQ ID NO: 1485677 - RNA, 19 nt, Artificial Sequence
  Description of Artificial Sequence: Synthetic oligonucleotide
caggauccgagcccuaggc

SEQ ID NO: 1485678 - RNA, 19 nt, Artificial Sequence
  Description of Artificial Sequence: Synthetic oligonucleotide
ggauccgagcccuaggcgc

SEQ ID NO: 1485679 - RNA, 19 nt, Artificial Sequence
  Description of Artificial Sequence: Synthetic oligonucleotide
gauccgagcccuaggcgcg

SEQ ID NO: 1485680 - RNA, 19 nt, Artificial Sequence
  Description of Artificial Sequence: Synthetic oligonucleotide
guacgaaaguuguucuuuc

SEQ ID NO: 1485681 - RNA, 19 nt, Artificial Sequence
  Description of Artificial Sequence: Synthetic oligonucleotide
augugcauguacauguacu

SEQ ID NO: 1485682 - RNA, 19 nt, Artificial Sequence
  Description of Artificial Sequence: Synthetic oligonucleotide
uugaacccagaaacacucu

SEQ ID NO: 1485683 - RNA, 19 nt, Artificial Sequence
  Description of Artificial Sequence: Synthetic oligonucleotide
cacaauuaucaguugggaa

SEQ ID NO: 1485684 - RNA, 19 nt, Artificial Sequence
  Description of Artificial Sequence: Synthetic oligonucleotide
cgaaaguuguucuuucagg

SEQ ID NO: 1485685 - RNA, 19 nt, Artificial Sequence
  Description of Artificial Sequence: Synthetic oligonucleotide
aauggguauaaugguugaa

SEQ ID NO: 1485686 - RNA, 19 nt, Artificial Sequence
  Description of Artificial Sequence: Synthetic oligonucleotide
uuucaggaacgcccuuuac

SEQ ID NO: 1485687 - RNA, 19 nt, Artificial Sequence
  Description of Artificial Sequence: Synthetic oligonucleotide
acuuagcgcgugcguacac

SEQ ID NO: 1485688 - RNA, 19 nt, Artificial Sequence
  Description of Artificial Sequence: Synthetic oligonucleotide
agaaauugcgccaucucuu

SEQ ID NO: 1485689 - RNA, 19 nt, Artificial Sequence
  Description of Artificial Sequence: Synthetic oligonucleotide
gaaaggcacagugauaggu

SEQ ID NO: 1485690 - RNA, 19 nt, Artificial Sequence
  Description of Artificial Sequence: Synthetic oligonucleotide
uucauccacugucaacuua

SEQ ID NO: 1485691 - RNA, 19 nt, Artificial Sequence
  Description of Artificial Sequence: Synthetic oligonucleotide
agugcaucugccaacgaaa

SEQ ID NO: 1485692 - RNA, 19 nt, Artificial Sequence
  Description of Artificial Sequence: Synthetic oligonucleotide
auacggccuagguagcucu

SEQ ID NO: 1485693 - RNA, 19 nt, Artificial Sequence
  Description of Artificial Sequence: Synthetic oligonucleotide
guaacaggagaaauguucu

SEQ ID NO: 1485694 - RNA, 19 nt, Artificial Sequence
  Description of Artificial Sequence: Synthetic oligonucleotide
cuucccggcaggauccgag

SEQ ID NO: 1485695 - RNA, 19 nt, Artificial Sequence
  Description of Artificial Sequence: Synthetic oligonucleotide
aguccagauggcauagcag

SEQ ID NO: 1485696 - RNA, 19 nt, Artificial Sequence
  Description of Artificial Sequence: Synthetic oligonucleotide
cguacacacacacacacac

SEQ ID NO: 1485697 - RNA, 19 nt, Artificial Sequence
  Description of Artificial Sequence: Synthetic oligonucleotide
cgugcguacacacacacac

SEQ ID NO: 1485698 - RNA, 19 nt, Artificial Sequence
  Description of Artificial Sequence: Synthetic oligonucleotide
cauagagggauacauuccu

SEQ ID NO: 1485699 - RNA, 19 nt, Artificial Sequence
  Description of Artificial Sequence: Synthetic oligonucleotide
caguccuggcccagcaagg

SEQ ID NO: 1485700 - RNA, 19 nt, Artificial Sequence
  Description of Artificial Sequence: Synthetic oligonucleotide
ucccuuugauuuccacucu

SEQ ID NO: 1485701 - RNA, 19 nt, Artificial Sequence
  Description of Artificial Sequence: Synthetic oligonucleotide
agagggauacauuccuguu

SEQ ID NO: 1485702 - RNA, 19 nt, Artificial Sequence
  Description of Artificial Sequence: Synthetic oligonucleotide
auauuuggcguagcauaug

SEQ ID NO: 1485703 - RNA, 19 nt, Artificial Sequence
  Description of Artificial Sequence: Synthetic oligonucleotide
gcccuggagaucgauaugg

SEQ ID NO: 1485704 - RNA, 19 nt, Artificial Sequence
  Description of Artificial Sequence: Synthetic oligonucleotide
ggaccuaaaguaccagcug

SEQ ID NO: 1485705 - RNA, 19 nt, Artificial Sequence
  Description of Artificial Sequence: Synthetic oligonucleotide
uucugcuaucccuuugauu

SEQ ID NO: 1485706 - RNA, 19 nt, Artificial Sequence
  Description of Artificial Sequence: Synthetic oligonucleotide
cagacgguuuggcagagga

SEQ ID NO: 1485707 - RNA, 19 nt, Artificial Sequence
  Description of Artificial Sequence: Synthetic oligonucleotide
aguaguuuggccagcuuuu

SEQ ID NO: 1485708 - RNA, 19 nt, Artificial Sequence
  Description of Artificial Sequence: Synthetic oligonucleotide
auagagggauacauuccug

SEQ ID NO: 1485709 - RNA, 19 nt, Artificial Sequence
  Description of Artificial Sequence: Synthetic oligonucleotide
aacuuagcgcgugcguaca

SEQ ID NO: 1485710 - RNA, 19 nt, Artificial Sequence
  Description of Artificial Sequence: Synthetic oligonucleotide
gagguacgaaaguuguucu

SEQ ID NO: 1485711 - RNA, 19 nt, Artificial Sequence
  Description of Artificial Sequence: Synthetic oligonucleotide
cgaaaauucaucugacauc

SEQ ID NO: 1485712 - RNA, 19 nt, Artificial Sequence
  Description of Artificial Sequence: Synthetic oligonucleotide
aguggcggcgaugagucca

SEQ ID NO: 1485713 - RNA, 19 nt, Artificial Sequence
  Description of Artificial Sequence: Synthetic oligonucleotide
ccuugaguaguuuggccag

SEQ ID NO: 1485714 - RNA, 19 nt, Artificial Sequence
  Description of Artificial Sequence: Synthetic oligonucleotide
ucuuucaggaacgcccuuu

SEQ ID NO: 1485715 - RNA, 19 nt, Artificial Sequence
  Description of Artificial Sequence: Synthetic oligonucleotide
cauggaccuaaaguaccag

SEQ ID NO: 1485716 - RNA, 19 nt, Artificial Sequence
  Description of Artificial Sequence: Synthetic oligonucleotide
caguaggggcuggauaagg

SEQ ID NO: 1485717 - RNA, 19 nt, Artificial Sequence
  Description of Artificial Sequence: Synthetic oligonucleotide
gccuugaguaguuuggcca

SEQ ID NO: 1485718 - RNA, 19 nt, Artificial Sequence
  Description of Artificial Sequence: Synthetic oligonucleotide
uccgaaaggcacagugaua

SEQ ID NO: 1485719 - RNA, 19 nt, Artificial Sequence
  Description of Artificial Sequence: Synthetic oligonucleotide
aauuaucaguugggaagua

SEQ ID NO: 1485720 - RNA, 19 nt, Artificial Sequence
  Description of Artificial Sequence: Synthetic oligonucleotide
cagcuuuugcauugcucac

SEQ ID NO: 1485721 - RNA, 19 nt, Artificial Sequence
  Description of Artificial Sequence: Synthetic oligonucleotide
acgguuuggcagaggacgg

SEQ ID NO: 1485722 - RNA, 19 nt, Artificial Sequence
  Description of Artificial Sequence: Synthetic oligonucleotide
cuugaguaguuuggccagc

SEQ ID NO: 1485723 - RNA, 19 nt, Artificial Sequence
  Description of Artificial Sequence: Synthetic oligonucleotide
ggacgguucaggcagugca

SEQ ID NO: 1485724 - RNA, 19 nt, Artificial Sequence
  Description of Artificial Sequence: Synthetic oligonucleotide
ggcagugcaucugccaacg

SEQ ID NO: 1485725 - RNA, 19 nt, Artificial Sequence
  Description of Artificial Sequence: Synthetic oligonucleotide
ggacaugaugguccagaag

SEQ ID NO: 1485726 - RNA, 19 nt, Artificial Sequence
  Description of Artificial Sequence: Synthetic oligonucleotide
ggguauaaugguugaauua

SEQ ID NO: 1485727 - RNA, 19 nt, Artificial Sequence
  Description of Artificial Sequence: Synthetic oligonucleotide
aguaggggcuggauaagga

SEQ ID NO: 1485728 - RNA, 19 nt, Artificial Sequence
  Description of Artificial Sequence: Synthetic oligonucleotide
ggagcacuuggguuacucc

SEQ ID NO: 1485729 - RNA, 19 nt, Artificial Sequence
  Description of Artificial Sequence: Synthetic oligonucleotide
cacacacacacacagacuu

SEQ ID NO: 1485730 - RNA, 19 nt, Artificial Sequence
  Description of Artificial Sequence: Synthetic oligonucleotide
uggaggcauagagggauac

SEQ ID NO: 1485731 - RNA, 19 nt, Artificial Sequence
  Description of Artificial Sequence: Synthetic oligonucleotide
guaguuuggccagcuuuug

SEQ ID NO: 1485732 - RNA, 19 nt, Artificial Sequence
  Description of Artificial Sequence: Synthetic oligonucleotide
aggacgguucaggcagugc

SEQ ID NO: 1485733 - RNA, 19 nt, Artificial Sequence
  Description of Artificial Sequence: Synthetic oligonucleotide
agacgguuuggcagaggac

SEQ ID NO: 1485734 - RNA, 19 nt, Artificial Sequence
  Description of Artificial Sequence: Synthetic oligonucleotide
caggagaaauguucugaga

SEQ ID NO: 1485735 - RNA, 19 nt, Artificial Sequence
  Description of Artificial Sequence: Synthetic oligonucleotide
accauacggccuagguagc

SEQ ID NO: 1485736 - RNA, 19 nt, Artificial Sequence
  Description of Artificial Sequence: Synthetic oligonucleotide
accuaaaguaccagcugga

SEQ ID NO: 1485737 - RNA, 19 nt, Artificial Sequence
  Description of Artificial Sequence: Synthetic oligonucleotide
uccaaggguuggagccggg

SEQ ID NO: 1485738 - RNA, 19 nt, Artificial Sequence
  Description of Artificial Sequence: Synthetic oligonucleotide
gacaggcaauggagaaccg

SEQ ID NO: 1485739 - RNA, 19 nt, Artificial Sequence
  Description of Artificial Sequence: Synthetic oligonucleotide
cucauuaggcuaucuuuua

SEQ ID NO: 1485740 - RNA, 19 nt, Artificial Sequence
  Description of Artificial Sequence: Synthetic oligonucleotide
cuuggguuacuccaagggu

SEQ ID NO: 1485741 - RNA, 19 nt, Artificial Sequence
  Description of Artificial Sequence: Synthetic oligonucleotide
gcauagagggauacauucc

SEQ ID NO: 1485742 - RNA, 19 nt, Artificial Sequence
  Description of Artificial Sequence: Synthetic oligonucleotide
acaguaggggcuggauaag

SEQ ID NO: 1485743 - RNA, 19 nt, Artificial Sequence
  Description of Artificial Sequence: Synthetic oligonucleotide
agccgggccagccuugagu

SEQ ID NO: 1485744 - RNA, 19 nt, Artificial Sequence
  Description of Artificial Sequence: Synthetic oligonucleotide
uuuccucauuaggcuaucu

SEQ ID NO: 1485745 - RNA, 19 nt, Artificial Sequence
  Description of Artificial Sequence: Synthetic oligonucleotide
acacaaggguuuaaagaau

SEQ ID NO: 1485746 - RNA, 19 nt, Artificial Sequence
  Description of Artificial Sequence: Synthetic oligonucleotide
uggcgugggauaugauccu

SEQ ID NO: 1485747 - RNA, 19 nt, Artificial Sequence
  Description of Artificial Sequence: Synthetic oligonucleotide
gcauauggcccuguggggc

SEQ ID NO: 1485748 - RNA, 19 nt, Artificial Sequence
  Description of Artificial Sequence: Synthetic oligonucleotide
uggagcacuuggguuacuc

SEQ ID NO: 1485749 - RNA, 19 nt, Artificial Sequence
  Description of Artificial Sequence: Synthetic oligonucleotide
ugaguaguuuggccagcuu

SEQ ID NO: 1485750 - RNA, 19 nt, Artificial Sequence
  Description of Artificial Sequence: Synthetic oligonucleotide
caauuaucaguugggaagu

SEQ ID NO: 1485751 - RNA, 19 nt, Artificial Sequence
  Description of Artificial Sequence: Synthetic oligonucleotide
uacggccuagguagcucug

SEQ ID NO: 1485752 - RNA, 19 nt, Artificial Sequence
  Description of Artificial Sequence: Synthetic oligonucleotide
agcaaggcuuguucugaaa

SEQ ID NO: 1485753 - RNA, 19 nt, Artificial Sequence
  Description of Artificial Sequence: Synthetic oligonucleotide
cugcuaucccuuugauuuc

SEQ ID NO: 1485754 - RNA, 19 nt, Artificial Sequence
  Description of Artificial Sequence: Synthetic oligonucleotide
gcggcgaugaguccaaaga

SEQ ID NO: 1485755 - RNA, 19 nt, Artificial Sequence
  Description of Artificial Sequence: Synthetic oligonucleotide
uucuugauuuuagguugaa

SEQ ID NO: 1485756 - RNA, 19 nt, Artificial Sequence
  Description of Artificial Sequence: Synthetic oligonucleotide
uuuuccucauuaggcuauc

SEQ ID NO: 1485757 - RNA, 19 nt, Artificial Sequence
  Description of Artificial Sequence: Synthetic oligonucleotide
gcuuguucugaaaacagua

SEQ ID NO: 1485758 - RNA, 19 nt, Artificial Sequence
  Description of Artificial Sequence: Synthetic oligonucleotide
uggauccccauggaccuaa

SEQ ID NO: 1485759 - RNA, 19 nt, Artificial Sequence
  Description of Artificial Sequence: Synthetic oligonucleotide
cacagcagacgguuuggca

SEQ ID NO: 1485760 - RNA, 19 nt, Artificial Sequence
  Description of Artificial Sequence: Synthetic oligonucleotide
acggccuagguagcucugg

SEQ ID NO: 1485761 - RNA, 19 nt, Artificial Sequence
  Description of Artificial Sequence: Synthetic oligonucleotide
ccuggcgugggauaugauc

SEQ ID NO: 1485762 - RNA, 19 nt, Artificial Sequence
  Description of Artificial Sequence: Synthetic oligonucleotide
guccgaaaggcacagugau

SEQ ID NO: 1485763 - RNA, 19 nt, Artificial Sequence
  Description of Artificial Sequence: Synthetic oligonucleotide
cagaaacacucuaccuuga

SEQ ID NO: 1485764 - RNA, 19 nt, Artificial Sequence
  Description of Artificial Sequence: Synthetic oligonucleotide
uaggcgcggcacaguggcg

SEQ ID NO: 1485765 - RNA, 19 nt, Artificial Sequence
  Description of Artificial Sequence: Synthetic oligonucleotide
cacacacacacagacuuaa

SEQ ID NO: 1485766 - RNA, 19 nt, Artificial Sequence
  Description of Artificial Sequence: Synthetic oligonucleotide
auagcagguggagcacuug

SEQ ID NO: 1485767 - RNA, 19 nt, Artificial Sequence
  Description of Artificial Sequence: Synthetic oligonucleotide
acacacacacacacagacu

SEQ ID NO: 1485768 - RNA, 19 nt, Artificial Sequence
  Description of Artificial Sequence: Synthetic oligonucleotide
cacagugauaggugcugca

SEQ ID NO: 1485769 - RNA, 19 nt, Artificial Sequence
  Description of Artificial Sequence: Synthetic oligonucleotide
ccaguccuggcccagcaag

SEQ ID NO: 1485770 - RNA, 19 nt, Artificial Sequence
  Description of Artificial Sequence: Synthetic oligonucleotide
uuguacccacaugaugcuc

SEQ ID NO: 1485771 - RNA, 19 nt, Artificial Sequence
  Description of Artificial Sequence: Synthetic oligonucleotide
uagcgcgugcguacacaca

SEQ ID NO: 1485772 - RNA, 19 nt, Artificial Sequence
  Description of Artificial Sequence: Synthetic oligonucleotide
cagugcaucugccaacgaa

SEQ ID NO: 1485773 - RNA, 19 nt, Artificial Sequence
  Description of Artificial Sequence: Synthetic oligonucleotide
gguccaguuggaggcauag

SEQ ID NO: 1485774 - RNA, 19 nt, Artificial Sequence
  Description of Artificial Sequence: Synthetic oligonucleotide
cauacggccuagguagcuc

SEQ ID NO: 1485775 - RNA, 19 nt, Artificial Sequence
  Description of Artificial Sequence: Synthetic oligonucleotide
cuuucaggaacgcccuuua

SEQ ID NO: 1485776 - RNA, 19 nt, Artificial Sequence
  Description of Artificial Sequence: Synthetic oligonucleotide
gcacuuggguuacuccaag

SEQ ID NO: 1485777 - RNA, 19 nt, Artificial Sequence
  Description of Artificial Sequence: Synthetic oligonucleotide
guagaccaguccuggccca

SEQ ID NO: 1485778 - RNA, 19 nt, Artificial Sequence
  Description of Artificial Sequence: Synthetic oligonucleotide
gaccaguccuggcccagca

SEQ ID NO: 1485779 - RNA, 19 nt, Artificial Sequence
  Description of Artificial Sequence: Synthetic oligonucleotide
uucuuucaggaacgcccuu

SEQ ID NO: 1485780 - RNA, 19 nt, Artificial Sequence
  Description of Artificial Sequence: Synthetic oligonucleotide
guacacacacacacacaca

SEQ ID NO: 1485781 - RNA, 19 nt, Artificial Sequence
  Description of Artificial Sequence: Synthetic oligonucleotide
acacacacacacacacaca

SEQ ID NO: 1485782 - RNA, 19 nt, Artificial Sequence
  Description of Artificial Sequence: Synthetic oligonucleotide
agcacuuggguuacuccaa

SEQ ID NO: 1485783 - RNA, 19 nt, Artificial Sequence
  Description of Artificial Sequence: Synthetic oligonucleotide
aucugacaucuucccggca

SEQ ID NO: 1485784 - RNA, 19 nt, Artificial Sequence
  Description of Artificial Sequence: Synthetic oligonucleotide
acacacacacacacacaga

SEQ ID NO: 1485785 - RNA, 19 nt, Artificial Sequence
  Description of Artificial Sequence: Synthetic oligonucleotide
gggaguccagauggcauag

SEQ ID NO: 1485786 - RNA, 19 nt, Artificial Sequence
  Description of Artificial Sequence: Synthetic oligonucleotide
agcccuaggcgcggcacag

SEQ ID NO: 1485787 - RNA, 19 nt, Artificial Sequence
  Description of Artificial Sequence: Synthetic oligonucleotide
cuuagcgcgugcguacaca

SEQ ID NO: 1485788 - RNA, 19 nt, Artificial Sequence
  Description of Artificial Sequence: Synthetic oligonucleotide
gcagaggacgguucaggca

SEQ ID NO: 1485789 - RNA, 19 nt, Artificial Sequence
  Description of Artificial Sequence: Synthetic oligonucleotide
acucuaccuugaggguaac

SEQ ID NO: 1485790 - RNA, 19 nt, Artificial Sequence
  Description of Artificial Sequence: Synthetic oligonucleotide
gcaucugccaacgaaaauu

SEQ ID NO: 1485791 - RNA, 19 nt, Artificial Sequence
  Description of Artificial Sequence: Synthetic oligonucleotide
aucuucccggcaggauccg

SEQ ID NO: 1485792 - RNA, 19 nt, Artificial Sequence
  Description of Artificial Sequence: Synthetic oligonucleotide
gugcaucugccaacgaaaa

SEQ ID NO: 1485793 - RNA, 19 nt, Artificial Sequence
  Description of Artificial Sequence: Synthetic oligonucleotide
ccuggagaucgauauggca

SEQ ID NO: 1485794 - RNA, 19 nt, Artificial Sequence
  Description of Artificial Sequence: Synthetic oligonucleotide
ccauggaccuaaaguacca

SEQ ID NO: 1485795 - RNA, 19 nt, Artificial Sequence
  Description of Artificial Sequence: Synthetic oligonucleotide
ugguccaguuggaggcaua

SEQ ID NO: 1485796 - RNA, 19 nt, Artificial Sequence
  Description of Artificial Sequence: Synthetic oligonucleotide
gguccgaaaggcacaguga

SEQ ID NO: 1485797 - RNA, 19 nt, Artificial Sequence
  Description of Artificial Sequence: Synthetic oligonucleotide
gauaggugcugcaccacuu

SEQ ID NO: 1485798 - RNA, 19 nt, Artificial Sequence
  Description of Artificial Sequence: Synthetic oligonucleotide
cccuggagaucgauauggc

SEQ ID NO: 1485799 - RNA, 19 nt, Artificial Sequence
  Description of Artificial Sequence: Synthetic oligonucleotide
ccuaggcgcggcacagugg

SEQ ID NO: 1485800 - RNA, 19 nt, Artificial Sequence
  Description of Artificial Sequence: Synthetic oligonucleotide
uauggcccuguggggccag

SEQ ID NO: 1485801 - RNA, 19 nt, Artificial Sequence
  Description of Artificial Sequence: Synthetic oligonucleotide
gguacgaaaguuguucuuu

SEQ ID NO: 1485802 - RNA, 19 nt, Artificial Sequence
  Description of Artificial Sequence: Synthetic oligonucleotide
gccaggaacuggcacagua

SEQ ID NO: 1485803 - RNA, 19 nt, Artificial Sequence
  Description of Artificial Sequence: Synthetic oligonucleotide
aggcauagagggauacauu

SEQ ID NO: 1485804 - RNA, 19 nt, Artificial Sequence
  Description of Artificial Sequence: Synthetic oligonucleotide
ucuucccggcaggauccga

SEQ ID NO: 1485805 - RNA, 19 nt, Artificial Sequence
  Description of Artificial Sequence: Synthetic oligonucleotide
ggcaggauccgagcccuag

SEQ ID NO: 1485806 - RNA, 19 nt, Artificial Sequence
  Description of Artificial Sequence: Synthetic oligonucleotide
gguugaacccagaaacacu

SEQ ID NO: 1485807 - RNA, 19 nt, Artificial Sequence
  Description of Artificial Sequence: Synthetic oligonucleotide
gugcguacacacacacaca

SEQ ID NO: 1485808 - RNA, 19 nt, Artificial Sequence
  Description of Artificial Sequence: Synthetic oligonucleotide
cugucaacuuaaugguaau

SEQ ID NO: 1485809 - RNA, 19 nt, Artificial Sequence
  Description of Artificial Sequence: Synthetic oligonucleotide
gguggagcacuuggguuac

SEQ ID NO: 1485810 - RNA, 19 nt, Artificial Sequence
  Description of Artificial Sequence: Synthetic oligonucleotide
auccgagcccuaggcgcgg

SEQ ID NO: 1485811 - RNA, 19 nt, Artificial Sequence
  Description of Artificial Sequence: Synthetic oligonucleotide
guacccacaugaugcucua

SEQ ID NO: 1485812 - RNA, 19 nt, Artificial Sequence
  Description of Artificial Sequence: Synthetic oligonucleotide
caggaacgcccuuuaccaa

SEQ ID NO: 1485813 - RNA, 19 nt, Artificial Sequence
  Description of Artificial Sequence: Synthetic oligonucleotide
gcaccauacggccuaggua

SEQ ID NO: 1485814 - RNA, 19 nt, Artificial Sequence
  Description of Artificial Sequence: Synthetic oligonucleotide
gcacagugauaggugcugc

SEQ ID NO: 1485815 - RNA, 19 nt, Artificial Sequence
  Description of Artificial Sequence: Synthetic oligonucleotide
acacacacacacagacuua

SEQ ID NO: 1485816 - RNA, 19 nt, Artificial Sequence
  Description of Artificial Sequence: Synthetic oligonucleotide
auauggcccuguggggcca

SEQ ID NO: 1485817 - RNA, 19 nt, Artificial Sequence
  Description of Artificial Sequence: Synthetic oligonucleotide
gcgugggauaugauccugc

SEQ ID NO: 1485818 - RNA, 19 nt, Artificial Sequence
  Description of Artificial Sequence: Synthetic oligonucleotide
cagcaaggcuuguucugaa

SEQ ID NO: 1485819 - RNA, 19 nt, Artificial Sequence
  Description of Artificial Sequence: Synthetic oligonucleotide
gcagguggagcacuugggu

SEQ ID NO: 1485820 - RNA, 19 nt, Artificial Sequence
  Description of Artificial Sequence: Synthetic oligonucleotide
cccggcaggauccgagccc

SEQ ID NO: 1485821 - RNA, 19 nt, Artificial Sequence
  Description of Artificial Sequence: Synthetic oligonucleotide
ggcgugggauaugauccug

SEQ ID NO: 1485822 - RNA, 19 nt, Artificial Sequence
  Description of Artificial Sequence: Synthetic oligonucleotide
cccuaggcgcggcacagug

SEQ ID NO: 1485823 - RNA, 19 nt, Artificial Sequence
  Description of Artificial Sequence: Synthetic oligonucleotide
ggauauggcccuggagauc

SEQ ID NO: 1485824 - RNA, 19 nt, Artificial Sequence
  Description of Artificial Sequence: Synthetic oligonucleotide
gcacaguaggggcuggaua

SEQ ID NO: 1485825 - RNA, 19 nt, Artificial Sequence
  Description of Artificial Sequence: Synthetic oligonucleotide
gcccuuuaccaauagccau

SEQ ID NO: 1485826 - RNA, 19 nt, Artificial Sequence
  Description of Artificial Sequence: Synthetic oligonucleotide
agaggacgguucaggcagu

SEQ ID NO: 1485827 - RNA, 19 nt, Artificial Sequence
  Description of Artificial Sequence: Synthetic oligonucleotide
ggaggcauagagggauaca

SEQ ID NO: 1485828 - RNA, 19 nt, Artificial Sequence
  Description of Artificial Sequence: Synthetic oligonucleotide
gacgguucaggcagugcau

SEQ ID NO: 1485829 - RNA, 19 nt, Artificial Sequence
  Description of Artificial Sequence: Synthetic oligonucleotide
cauagcagguggagcacuu

SEQ ID NO: 1485830 - RNA, 19 nt, Artificial Sequence
  Description of Artificial Sequence: Synthetic oligonucleotide
ccaaggguuggagccgggc

SEQ ID NO: 1485831 - RNA, 19 nt, Artificial Sequence
  Description of Artificial Sequence: Synthetic oligonucleotide
auggcccuggagaucgaua

SEQ ID NO: 1485832 - RNA, 19 nt, Artificial Sequence
  Description of Artificial Sequence: Synthetic oligonucleotide
ccacaugaugcucuacaua

SEQ ID NO: 1485833 - RNA, 19 nt, Artificial Sequence
  Description of Artificial Sequence: Synthetic oligonucleotide
cgugggauaugauccugca

SEQ ID NO: 1485834 - RNA, 19 nt, Artificial Sequence
  Description of Artificial Sequence: Synthetic oligonucleotide
ggcgcggcacaguggcggc

SEQ ID NO: 1485835 - RNA, 19 nt, Artificial Sequence
  Description of Artificial Sequence: Synthetic oligonucleotide
gcagacgguuuggcagagg

SEQ ID NO: 1485836 - RNA, 19 nt, Artificial Sequence
  Description of Artificial Sequence: Synthetic oligonucleotide
ggugguccaguuggaggca

SEQ ID NO: 1485837 - RNA, 19 nt, Artificial Sequence
  Description of Artificial Sequence: Synthetic oligonucleotide
gcguacacacacacacaca

SEQ ID NO: 1485838 - RNA, 19 nt, Artificial Sequence
  Description of Artificial Sequence: Synthetic oligonucleotide
cgaugaguccaaagagaca

SEQ ID NO: 1485839 - RNA, 19 nt, Artificial Sequence
  Description of Artificial Sequence: Synthetic oligonucleotide
gagaucgauauggcauauu

SEQ ID NO: 1485840 - RNA, 19 nt, Artificial Sequence
  Description of Artificial Sequence: Synthetic oligonucleotide
caauagccauuuguauuau

SEQ ID NO: 1485841 - RNA, 19 nt, Artificial Sequence
  Description of Artificial Sequence: Synthetic oligonucleotide
ggcguagcauauggcccug

SEQ ID NO: 1485842 - RNA, 19 nt, Artificial Sequence
  Description of Artificial Sequence: Synthetic oligonucleotide
gcuaucccuuugauuucca

SEQ ID NO: 1485843 - RNA, 19 nt, Artificial Sequence
  Description of Artificial Sequence: Synthetic oligonucleotide
gcacaguggcggcgaugag

SEQ ID NO: 1485844 - RNA, 19 nt, Artificial Sequence
  Description of Artificial Sequence: Synthetic oligonucleotide
auauggcccuggagaucga

SEQ ID NO: 1485845 - RNA, 19 nt, Artificial Sequence
  Description of Artificial Sequence: Synthetic oligonucleotide
cccuuuaccaauagccauu

SEQ ID NO: 1485846 - RNA, 19 nt, Artificial Sequence
  Description of Artificial Sequence: Synthetic oligonucleotide
guggcggcgaugaguccaa

SEQ ID NO: 1485847 - RNA, 19 nt, Artificial Sequence
  Description of Artificial Sequence: Synthetic oligonucleotide
gcagugcaucugccaacga

SEQ ID NO: 1485848 - RNA, 19 nt, Artificial Sequence
  Description of Artificial Sequence: Synthetic oligonucleotide
ggagaucgauauggcauau

SEQ ID NO: 1485849 - RNA, 19 nt, Artificial Sequence
  Description of Artificial Sequence: Synthetic oligonucleotide
gguuuggcagaggacgguu

SEQ ID NO: 1485850 - RNA, 19 nt, Artificial Sequence
  Description of Artificial Sequence: Synthetic oligonucleotide
gggguccuggcgugggaua

SEQ ID NO: 1485851 - RNA, 19 nt, Artificial Sequence
  Description of Artificial Sequence: Synthetic oligonucleotide
ccuaaaguaccagcuggau

SEQ ID NO: 1485852 - RNA, 19 nt, Artificial Sequence
  Description of Artificial Sequence: Synthetic oligonucleotide
uggcggcgaugaguccaaa

SEQ ID NO: 1485853 - RNA, 19 nt, Artificial Sequence
  Description of Artificial Sequence: Synthetic oligonucleotide
gcgcggcacaguggcggcg

SEQ ID NO: 1485854 - RNA, 19 nt, Artificial Sequence
  Description of Artificial Sequence: Synthetic oligonucleotide
ggcacuugguaaggauuau

SEQ ID NO: 1485855 - RNA, 19 nt, Artificial Sequence
  Description of Artificial Sequence: Synthetic oligonucleotide
ggcacaguaggggcuggau

SEQ ID NO: 1485856 - RNA, 19 nt, Artificial Sequence
  Description of Artificial Sequence: Synthetic oligonucleotide
cgagcccuaggcgcggcac

SEQ ID NO: 1485857 - RNA, 19 nt, Artificial Sequence
  Description of Artificial Sequence: Synthetic oligonucleotide
cccuuugauuuccacucuu

SEQ ID NO: 1485858 - RNA, 19 nt, Artificial Sequence
  Description of Artificial Sequence: Synthetic oligonucleotide
ggauccccauggaccuaaa

SEQ ID NO: 1485859 - RNA, 19 nt, Artificial Sequence
  Description of Artificial Sequence: Synthetic oligonucleotide
ccauacggccuagguagcu

SEQ ID NO: 1485860 - RNA, 19 nt, Artificial Sequence
  Description of Artificial Sequence: Synthetic oligonucleotide
ccggcaggauccgagcccu

SEQ ID NO: 1485861 - RNA, 19 nt, Artificial Sequence
  Description of Artificial Sequence: Synthetic oligonucleotide
guggagcacuuggguuacu

SEQ ID NO: 1485862 - RNA, 19 nt, Artificial Sequence
  Description of Artificial Sequence: Synthetic oligonucleotide
ccgagcccuaggcgcggca

SEQ ID NO: 1485863 - RNA, 19 nt, Artificial Sequence
  Description of Artificial Sequence: Synthetic oligonucleotide
cgcggcacaguggcggcga

SEQ ID NO: 1485864 - RNA, 19 nt, Artificial Sequence
  Description of Artificial Sequence: Synthetic oligonucleotide
cggcacaguggcggcgaug

SEQ ID NO: 1485865 - RNA, 19 nt, Artificial Sequence
  Description of Artificial Sequence: Synthetic oligonucleotide
gcguagcauauggcccugu

SEQ ID NO: 1485866 - RNA, 19 nt, Artificial Sequence
  Description of Artificial Sequence: Synthetic oligonucleotide
cgguuuggcagaggacggu

SEQ ID NO: 1485867 - RNA, 19 nt, Artificial Sequence
  Description of Artificial Sequence: Synthetic oligonucleotide
gcccuaggcgcggcacagu

SEQ ID NO: 1485868 - RNA, 19 nt, Artificial Sequence
  Description of Artificial Sequence: Synthetic oligonucleotide
gcggcacaguggcggcgau

SEQ ID NO: 1485869 - RNA, 19 nt, Artificial Sequence
  Description of Artificial Sequence: Synthetic oligonucleotide
aauaauuccacuguugggc

SEQ ID NO: 1485870 - RNA, 19 nt, Artificial Sequence
  Description of Artificial Sequence: Synthetic oligonucleotide
ucuuauuaaaaccacaaag

SEQ ID NO: 1485871 - RNA, 19 nt, Artificial Sequence
  Description of Artificial Sequence: Synthetic oligonucleotide
aauccauuaauucaucagg

SEQ ID NO: 1485872 - RNA, 19 nt, Artificial Sequence
  Description of Artificial Sequence: Synthetic oligonucleotide
uaaaucauauuucaagagg

SEQ ID NO: 1485873 - RNA, 19 nt, Artificial Sequence
  Description of Artificial Sequence: Synthetic oligonucleotide
aaaacacacuuuucuaucc

SEQ ID NO: 1485874 - RNA, 19 nt, Artificial Sequence
  Description of Artificial Sequence: Synthetic oligonucleotide
aacacuaugcgguuuuggc

SEQ ID NO: 1485875 - RNA, 19 nt, Artificial Sequence
  Description of Artificial Sequence: Synthetic oligonucleotide
aacucagucaacaaacugc

SEQ ID NO: 1485876 - RNA, 19 nt, Artificial Sequence
  Description of Artificial Sequence: Synthetic oligonucleotide
uguagcauuacugaaacag

SEQ ID NO: 1485877 - RNA, 19 nt, Artificial Sequence
  Description of Artificial Sequence: Synthetic oligonucleotide
uuuucuaaccguaagagau

SEQ ID NO: 1485878 - RNA, 19 nt, Artificial Sequence
  Description of Artificial Sequence: Synthetic oligonucleotide
auuuagaauccauuaauuc

SEQ ID NO: 1485879 - RNA, 19 nt, Artificial Sequence
  Description of Artificial Sequence: Synthetic oligonucleotide
aagucuuaagccuucaucu

SEQ ID NO: 1485880 - RNA, 19 nt, Artificial Sequence
  Description of Artificial Sequence: Synthetic oligonucleotide
uaucugaaauauuuggugg

SEQ ID NO: 1485881 - RNA, 19 nt, Artificial Sequence
  Description of Artificial Sequence: Synthetic oligonucleotide
uuugcuagguuccauauca

SEQ ID NO: 1485882 - RNA, 19 nt, Artificial Sequence
  Description of Artificial Sequence: Synthetic oligonucleotide
caacagauaaaauuuaaag

SEQ ID NO: 1485883 - RNA, 19 nt, Artificial Sequence
  Description of Artificial Sequence: Synthetic oligonucleotide
aagucucuuacacucuucc

SEQ ID NO: 1485884 - RNA, 19 nt, Artificial Sequence
  Description of Artificial Sequence: Synthetic oligonucleotide
uauguuaaauaccauggga

SEQ ID NO: 1485885 - RNA, 19 nt, Artificial Sequence
  Description of Artificial Sequence: Synthetic oligonucleotide
agaacuagcacucugcaug

SEQ ID NO: 1485886 - RNA, 19 nt, Artificial Sequence
  Description of Artificial Sequence: Synthetic oligonucleotide
accuuucuaagucuuaagc

SEQ ID NO: 1485887 - RNA, 19 nt, Artificial Sequence
  Description of Artificial Sequence: Synthetic oligonucleotide
uuuggaugcauucagugga

SEQ ID NO: 1485888 - RNA, 19 nt, Artificial Sequence
  Description of Artificial Sequence: Synthetic oligonucleotide
auaaaucauauuucaagag

SEQ ID NO: 1485889 - RNA, 19 nt, Artificial Sequence
  Description of Artificial Sequence: Synthetic oligonucleotide
uuagaauccauuaauucau

SEQ ID NO: 1485890 - RNA, 19 nt, Artificial Sequence
  Description of Artificial Sequence: Synthetic oligonucleotide
uguacaauuuguccagggg

SEQ ID NO: 1485891 - RNA, 19 nt, Artificial Sequence
  Description of Artificial Sequence: Synthetic oligonucleotide
auaauuccacuguugggcc

SEQ ID NO: 1485892 - RNA, 19 nt, Artificial Sequence
  Description of Artificial Sequence: Synthetic oligonucleotide
aaugagugagauuagcaau

SEQ ID NO: 1485893 - RNA, 19 nt, Artificial Sequence
  Description of Artificial Sequence: Synthetic oligonucleotide
aaaucauauuucaagaggu

SEQ ID NO: 1485894 - RNA, 19 nt, Artificial Sequence
  Description of Artificial Sequence: Synthetic oligonucleotide
guuuccguaucauugagag

SEQ ID NO: 1485895 - RNA, 19 nt, Artificial Sequence
  Description of Artificial Sequence: Synthetic oligonucleotide
uguuuucuaaccguaagag

SEQ ID NO: 1485896 - RNA, 19 nt, Artificial Sequence
  Description of Artificial Sequence: Synthetic oligonucleotide
auguuaaauaccaugggac

SEQ ID NO: 1485897 - RNA, 19 nt, Artificial Sequence
  Description of Artificial Sequence: Synthetic oligonucleotide
cuaccaaugaaaugguagg

SEQ ID NO: 1485898 - RNA, 19 nt, Artificial Sequence
  Description of Artificial Sequence: Synthetic oligonucleotide
guaagagaucauuaaaggc

SEQ ID NO: 1485899 - RNA, 19 nt, Artificial Sequence
  Description of Artificial Sequence: Synthetic oligonucleotide
uauaugacgcuguacacac

SEQ ID NO: 1485900 - RNA, 19 nt, Artificial Sequence
  Description of Artificial Sequence: Synthetic oligonucleotide
agaaugugcaacugacacc

SEQ ID NO: 1485901 - RNA, 19 nt, Artificial Sequence
  Description of Artificial Sequence: Synthetic oligonucleotide
agaucauuaaaggcaaagc

SEQ ID NO: 1485902 - RNA, 19 nt, Artificial Sequence
  Description of Artificial Sequence: Synthetic oligonucleotide
uguuaaauaccaugggaca

SEQ ID NO: 1485903 - RNA, 19 nt, Artificial Sequence
  Description of Artificial Sequence: Synthetic oligonucleotide
uacaauuuguccaggggcc

SEQ ID NO: 1485904 - RNA, 19 nt, Artificial Sequence
  Description of Artificial Sequence: Synthetic oligonucleotide
uuccguaucauugagagaa

SEQ ID NO: 1485905 - RNA, 19 nt, Artificial Sequence
  Description of Artificial Sequence: Synthetic oligonucleotide
ucuacaagaugaauuuccc

SEQ ID NO: 1485906 - RNA, 19 nt, Artificial Sequence
  Description of Artificial Sequence: Synthetic oligonucleotide
ugaaugagugagauuagca

SEQ ID NO: 1485907 - RNA, 19 nt, Artificial Sequence
  Description of Artificial Sequence: Synthetic oligonucleotide
aauuugaggucggagggcg

SEQ ID NO: 1485908 - RNA, 19 nt, Artificial Sequence
  Description of Artificial Sequence: Synthetic oligonucleotide
uguguuuucuaaccguaag

SEQ ID NO: 1485909 - RNA, 19 nt, Artificial Sequence
  Description of Artificial Sequence: Synthetic oligonucleotide
uuaucauuuucauucggca

SEQ ID NO: 1485910 - RNA, 19 nt, Artificial Sequence
  Description of Artificial Sequence: Synthetic oligonucleotide
aaacucagucaacaaacug

SEQ ID NO: 1485911 - RNA, 19 nt, Artificial Sequence
  Description of Artificial Sequence: Synthetic oligonucleotide
aaaggacagaaugugcaac

SEQ ID NO: 1485912 - RNA, 19 nt, Artificial Sequence
  Description of Artificial Sequence: Synthetic oligonucleotide
uuaaauaccaugggacagg

SEQ ID NO: 1485913 - RNA, 19 nt, Artificial Sequence
  Description of Artificial Sequence: Synthetic oligonucleotide
aaaauugucuguaccauga

SEQ ID NO: 1485914 - RNA, 19 nt, Artificial Sequence
  Description of Artificial Sequence: Synthetic oligonucleotide
acuacaucugugaaggggc

SEQ ID NO: 1485915 - RNA, 19 nt, Artificial Sequence
  Description of Artificial Sequence: Synthetic oligonucleotide
uuuucuauccgauggauuu

SEQ ID NO: 1485916 - RNA, 19 nt, Artificial Sequence
  Description of Artificial Sequence: Synthetic oligonucleotide
gagauuagcaaucuaaaua

SEQ ID NO: 1485917 - RNA, 19 nt, Artificial Sequence
  Description of Artificial Sequence: Synthetic oligonucleotide
aaugguagguaaacaaauc

SEQ ID NO: 1485918 - RNA, 19 nt, Artificial Sequence
  Description of Artificial Sequence: Synthetic oligonucleotide
guacaauuuguccaggggc

SEQ ID NO: 1485919 - RNA, 19 nt, Artificial Sequence
  Description of Artificial Sequence: Synthetic oligonucleotide
uacaagacugaacaauucu

SEQ ID NO: 1485920 - RNA, 19 nt, Artificial Sequence
  Description of Artificial Sequence: Synthetic oligonucleotide
aagggauuauuaaaauaac

SEQ ID NO: 1485921 - RNA, 19 nt, Artificial Sequence
  Description of Artificial Sequence: Synthetic oligonucleotide
aaagaacuagcacucugca

SEQ ID NO: 1485922 - RNA, 19 nt, Artificial Sequence
  Description of Artificial Sequence: Synthetic oligonucleotide
ugaugaucugguaauguac

SEQ ID NO: 1485923 - RNA, 19 nt, Artificial Sequence
  Description of Artificial Sequence: Synthetic oligonucleotide
uggauuucgcaauuuaaga

SEQ ID NO: 1485924 - RNA, 19 nt, Artificial Sequence
  Description of Artificial Sequence: Synthetic oligonucleotide
acaagaugaauuucccuag

SEQ ID NO: 1485925 - RNA, 19 nt, Artificial Sequence
  Description of Artificial Sequence: Synthetic oligonucleotide
uguagugacuacaucugug

SEQ ID NO: 1485926 - RNA, 19 nt, Artificial Sequence
  Description of Artificial Sequence: Synthetic oligonucleotide
uuuaagauuuguagugacu

SEQ ID NO: 1485927 - RNA, 19 nt, Artificial Sequence
  Description of Artificial Sequence: Synthetic oligonucleotide
guaucauugagagaaacac

SEQ ID NO: 1485928 - RNA, 19 nt, Artificial Sequence
  Description of Artificial Sequence: Synthetic oligonucleotide
uaagucuuaagccuucauc

SEQ ID NO: 1485929 - RNA, 19 nt, Artificial Sequence
  Description of Artificial Sequence: Synthetic oligonucleotide
uccauaucugaaauauuug

SEQ ID NO: 1485930 - RNA, 19 nt, Artificial Sequence
  Description of Artificial Sequence: Synthetic oligonucleotide
gacgccaucggagacagcg

SEQ ID NO: 1485931 - RNA, 19 nt, Artificial Sequence
  Description of Artificial Sequence: Synthetic oligonucleotide
aaugcgcuaccuuucuaag

SEQ ID NO: 1485932 - RNA, 19 nt, Artificial Sequence
  Description of Artificial Sequence: Synthetic oligonucleotide
agugacuacaucugugaag

SEQ ID NO: 1485933 - RNA, 19 nt, Artificial Sequence
  Description of Artificial Sequence: Synthetic oligonucleotide
aagaacaauucuuuauuua

SEQ ID NO: 1485934 - RNA, 19 nt, Artificial Sequence
  Description of Artificial Sequence: Synthetic oligonucleotide
acugaacaauucuugaacu

SEQ ID NO: 1485935 - RNA, 19 nt, Artificial Sequence
  Description of Artificial Sequence: Synthetic oligonucleotide
cagaaugugcaacugacac

SEQ ID NO: 1485936 - RNA, 19 nt, Artificial Sequence
  Description of Artificial Sequence: Synthetic oligonucleotide
gugacacucucccugaagg

SEQ ID NO: 1485937 - RNA, 19 nt, Artificial Sequence
  Description of Artificial Sequence: Synthetic oligonucleotide
ugaacaauucuugaacucu

SEQ ID NO: 1485938 - RNA, 19 nt, Artificial Sequence
  Description of Artificial Sequence: Synthetic oligonucleotide
cuuguuuggaugcauucag

SEQ ID NO: 1485939 - RNA, 19 nt, Artificial Sequence
  Description of Artificial Sequence: Synthetic oligonucleotide
agcaagaaucuguuaacag

SEQ ID NO: 1485940 - RNA, 19 nt, Artificial Sequence
  Description of Artificial Sequence: Synthetic oligonucleotide
uuuccgagcaagaaucugu

SEQ ID NO: 1485941 - RNA, 19 nt, Artificial Sequence
  Description of Artificial Sequence: Synthetic oligonucleotide
gucgguuuucuucugacag

SEQ ID NO: 1485942 - RNA, 19 nt, Artificial Sequence
  Description of Artificial Sequence: Synthetic oligonucleotide
uaugacgcuguacacacaa

SEQ ID NO: 1485943 - RNA, 19 nt, Artificial Sequence
  Description of Artificial Sequence: Synthetic oligonucleotide
cacuaugcgguuuuggcag

SEQ ID NO: 1485944 - RNA, 19 nt, Artificial Sequence
  Description of Artificial Sequence: Synthetic oligonucleotide
agagaaaauuuacacagua

SEQ ID NO: 1485945 - RNA, 19 nt, Artificial Sequence
  Description of Artificial Sequence: Synthetic oligonucleotide
gaaaauuuacacaguaaga

SEQ ID NO: 1485946 - RNA, 19 nt, Artificial Sequence
  Description of Artificial Sequence: Synthetic oligonucleotide
ugaacuuauguuuacucuu

SEQ ID NO: 1485947 - RNA, 19 nt, Artificial Sequence
  Description of Artificial Sequence: Synthetic oligonucleotide
augaacuuauguuuacucu

SEQ ID NO: 1485948 - RNA, 19 nt, Artificial Sequence
  Description of Artificial Sequence: Synthetic oligonucleotide
caauaauuccacuguuggg

SEQ ID NO: 1485949 - RNA, 19 nt, Artificial Sequence
  Description of Artificial Sequence: Synthetic oligonucleotide
ugcgcuaccuuucuaaguc

SEQ ID NO: 1485950 - RNA, 19 nt, Artificial Sequence
  Description of Artificial Sequence: Synthetic oligonucleotide
aaccucuuggcauuuccug

SEQ ID NO: 1485951 - RNA, 19 nt, Artificial Sequence
  Description of Artificial Sequence: Synthetic oligonucleotide
ucgugcuucgccauggccc

SEQ ID NO: 1485952 - RNA, 19 nt, Artificial Sequence
  Description of Artificial Sequence: Synthetic oligonucleotide
ucacucuacaagaugaauu

SEQ ID NO: 1485953 - RNA, 19 nt, Artificial Sequence
  Description of Artificial Sequence: Synthetic oligonucleotide
uagcauuacugaaacaguc

SEQ ID NO: 1485954 - RNA, 19 nt, Artificial Sequence
  Description of Artificial Sequence: Synthetic oligonucleotide
agggaaagagaaaauuuac

SEQ ID NO: 1485955 - RNA, 19 nt, Artificial Sequence
  Description of Artificial Sequence: Synthetic oligonucleotide
uauccgauggauuucgcaa

SEQ ID NO: 1485956 - RNA, 19 nt, Artificial Sequence
  Description of Artificial Sequence: Synthetic oligonucleotide
gaaugagugagauuagcaa

SEQ ID NO: 1485957 - RNA, 19 nt, Artificial Sequence
  Description of Artificial Sequence: Synthetic oligonucleotide
aauuuagaauccauuaauu

SEQ ID NO: 1485958 - RNA, 19 nt, Artificial Sequence
  Description of Artificial Sequence: Synthetic oligonucleotide
cauugagagaaacacuaug

SEQ ID NO: 1485959 - RNA, 19 nt, Artificial Sequence
  Description of Artificial Sequence: Synthetic oligonucleotide
aaucuguuaacaguuuuau

SEQ ID NO: 1485960 - RNA, 19 nt, Artificial Sequence
  Description of Artificial Sequence: Synthetic oligonucleotide
gauuacaaccagaagagaa

SEQ ID NO: 1485961 - RNA, 19 nt, Artificial Sequence
  Description of Artificial Sequence: Synthetic oligonucleotide
aucauuaaaggcaaagccu

SEQ ID NO: 1485962 - RNA, 19 nt, Artificial Sequence
  Description of Artificial Sequence: Synthetic oligonucleotide
ccauaucugaaauauuugg

SEQ ID NO: 1485963 - RNA, 19 nt, Artificial Sequence
  Description of Artificial Sequence: Synthetic oligonucleotide
agucuuaagccuucaucuc

SEQ ID NO: 1485964 - RNA, 19 nt, Artificial Sequence
  Description of Artificial Sequence: Synthetic oligonucleotide
uucuauccgauggauuucg

SEQ ID NO: 1485965 - RNA, 19 nt, Artificial Sequence
  Description of Artificial Sequence: Synthetic oligonucleotide
aaacacuaugcgguuuugg

SEQ ID NO: 1485966 - RNA, 19 nt, Artificial Sequence
  Description of Artificial Sequence: Synthetic oligonucleotide
aucugaaauauuuggugga

SEQ ID NO: 1485967 - RNA, 19 nt, Artificial Sequence
  Description of Artificial Sequence: Synthetic oligonucleotide
ugagauuagcaaucuaaau

SEQ ID NO: 1485968 - RNA, 19 nt, Artificial Sequence
  Description of Artificial Sequence: Synthetic oligonucleotide
ucgaggaucaggaucugcu

SEQ ID NO: 1485969 - RNA, 19 nt, Artificial Sequence
  Description of Artificial Sequence: Synthetic oligonucleotide
aaccguaagagaucauuaa

SEQ ID NO: 1485970 - RNA, 19 nt, Artificial Sequence
  Description of Artificial Sequence: Synthetic oligonucleotide
agaauccauuaauucauca

SEQ ID NO: 1485971 - RNA, 19 nt, Artificial Sequence
  Description of Artificial Sequence: Synthetic oligonucleotide
ugacgcuguacacacaaaa

SEQ ID NO: 1485972 - RNA, 19 nt, Artificial Sequence
  Description of Artificial Sequence: Synthetic oligonucleotide
ucucaauuuagaauccauu

SEQ ID NO: 1485973 - RNA, 19 nt, Artificial Sequence
  Description of Artificial Sequence: Synthetic oligonucleotide
auggauuucgcaauuuaag

SEQ ID NO: 1485974 - RNA, 19 nt, Artificial Sequence
  Description of Artificial Sequence: Synthetic oligonucleotide
aaauucugccaugauauua

SEQ ID NO: 1485975 - RNA, 19 nt, Artificial Sequence
  Description of Artificial Sequence: Synthetic oligonucleotide
uuguuuccguaucauugag

SEQ ID NO: 1485976 - RNA, 19 nt, Artificial Sequence
  Description of Artificial Sequence: Synthetic oligonucleotide
uaagauuuguagugacuac

SEQ ID NO: 1485977 - RNA, 19 nt, Artificial Sequence
  Description of Artificial Sequence: Synthetic oligonucleotide
uucuaaccguaagagauca

SEQ ID NO: 1485978 - RNA, 19 nt, Artificial Sequence
  Description of Artificial Sequence: Synthetic oligonucleotide
cauuuccugaaugagugag

SEQ ID NO: 1485979 - RNA, 19 nt, Artificial Sequence
  Description of Artificial Sequence: Synthetic oligonucleotide
gaacuagcacucugcaugc

SEQ ID NO: 1485980 - RNA, 19 nt, Artificial Sequence
  Description of Artificial Sequence: Synthetic oligonucleotide
ucauuuggaucauaaucaa

SEQ ID NO: 1485981 - RNA, 19 nt, Artificial Sequence
  Description of Artificial Sequence: Synthetic oligonucleotide
gacagaaugugcaacugac

SEQ ID NO: 1485982 - RNA, 19 nt, Artificial Sequence
  Description of Artificial Sequence: Synthetic oligonucleotide
uaaccguaagagaucauua

SEQ ID NO: 1485983 - RNA, 19 nt, Artificial Sequence
  Description of Artificial Sequence: Synthetic oligonucleotide
ucaaauggcuguagcauua

SEQ ID NO: 1485984 - RNA, 19 nt, Artificial Sequence
  Description of Artificial Sequence: Synthetic oligonucleotide
aagggaaagagaaaauuua

SEQ ID NO: 1485985 - RNA, 19 nt, Artificial Sequence
  Description of Artificial Sequence: Synthetic oligonucleotide
ugacacucucccugaaggg

SEQ ID NO: 1485986 - RNA, 19 nt, Artificial Sequence
  Description of Artificial Sequence: Synthetic oligonucleotide
cucaauuuagaauccauua

SEQ ID NO: 1485987 - RNA, 19 nt, Artificial Sequence
  Description of Artificial Sequence: Synthetic oligonucleotide
agauaaaauuuaaagggau

SEQ ID NO: 1485988 - RNA, 19 nt, Artificial Sequence
  Description of Artificial Sequence: Synthetic oligonucleotide
gacaggaucguaaggauga

SEQ ID NO: 1485989 - RNA, 19 nt, Artificial Sequence
  Description of Artificial Sequence: Synthetic oligonucleotide
uuucuaaccguaagagauc

SEQ ID NO: 1485990 - RNA, 19 nt, Artificial Sequence
  Description of Artificial Sequence: Synthetic oligonucleotide
aaaacucagucaacaaacu

SEQ ID NO: 1485991 - RNA, 19 nt, Artificial Sequence
  Description of Artificial Sequence: Synthetic oligonucleotide
ucuuaagccuucaucucuc

SEQ ID NO: 1485992 - RNA, 19 nt, Artificial Sequence
  Description of Artificial Sequence: Synthetic oligonucleotide
gaugaucugguaauguaca

SEQ ID NO: 1485993 - RNA, 19 nt, Artificial Sequence
  Description of Artificial Sequence: Synthetic oligonucleotide
guggaucccgguuuguccg

SEQ ID NO: 1485994 - RNA, 19 nt, Artificial Sequence
  Description of Artificial Sequence: Synthetic oligonucleotide
aucauugagagaaacacua

SEQ ID NO: 1485995 - RNA, 19 nt, Artificial Sequence
  Description of Artificial Sequence: Synthetic oligonucleotide
ucauucggcauuucaaaua

SEQ ID NO: 1485996 - RNA, 19 nt, Artificial Sequence
  Description of Artificial Sequence: Synthetic oligonucleotide
uguuuccguaucauugaga

SEQ ID NO: 1485997 - RNA, 19 nt, Artificial Sequence
  Description of Artificial Sequence: Synthetic oligonucleotide
cguaagagaucauuaaagg

SEQ ID NO: 1485998 - RNA, 19 nt, Artificial Sequence
  Description of Artificial Sequence: Synthetic oligonucleotide
uucgcaauuuaagauuugu

SEQ ID NO: 1485999 - RNA, 19 nt, Artificial Sequence
  Description of Artificial Sequence: Synthetic oligonucleotide
guagugacuacaucuguga

SEQ ID NO: 1486000 - RNA, 19 nt, Artificial Sequence
  Description of Artificial Sequence: Synthetic oligonucleotide
acaauuuguccaggggccc

SEQ ID NO: 1486001 - RNA, 19 nt, Artificial Sequence
  Description of Artificial Sequence: Synthetic oligonucleotide
uuguagugacuacaucugu

SEQ ID NO: 1486002 - RNA, 19 nt, Artificial Sequence
  Description of Artificial Sequence: Synthetic oligonucleotide
acacuaugcgguuuuggca

SEQ ID NO: 1486003 - RNA, 19 nt, Artificial Sequence
  Description of Artificial Sequence: Synthetic oligonucleotide
uaccaugaacuuauguuua

SEQ ID NO: 1486004 - RNA, 19 nt, Artificial Sequence
  Description of Artificial Sequence: Synthetic oligonucleotide
uguugggccucacacagua

SEQ ID NO: 1486005 - RNA, 19 nt, Artificial Sequence
  Description of Artificial Sequence: Synthetic oligonucleotide
ucggcauuucaaauacaca

SEQ ID NO: 1486006 - RNA, 19 nt, Artificial Sequence
  Description of Artificial Sequence: Synthetic oligonucleotide
acugaaacagucacaguug

SEQ ID NO: 1486007 - RNA, 19 nt, Artificial Sequence
  Description of Artificial Sequence: Synthetic oligonucleotide
ccaacaguguguuucauug

SEQ ID NO: 1486008 - RNA, 19 nt, Artificial Sequence
  Description of Artificial Sequence: Synthetic oligonucleotide
aagaacuagcacucugcau

SEQ ID NO: 1486009 - RNA, 19 nt, Artificial Sequence
  Description of Artificial Sequence: Synthetic oligonucleotide
uaccuuucuaagucuuaag

SEQ ID NO: 1486010 - RNA, 19 nt, Artificial Sequence
  Description of Artificial Sequence: Synthetic oligonucleotide
uucauucggcauuucaaau

SEQ ID NO: 1486011 - RNA, 19 nt, Artificial Sequence
  Description of Artificial Sequence: Synthetic oligonucleotide
aaagccuauaugacgcugu

SEQ ID NO: 1486012 - RNA, 19 nt, Artificial Sequence
  Description of Artificial Sequence: Synthetic oligonucleotide
ccguaagagaucauuaaag

SEQ ID NO: 1486013 - RNA, 19 nt, Artificial Sequence
  Description of Artificial Sequence: Synthetic oligonucleotide
gaaugcgcuaccuuucuaa

SEQ ID NO: 1486014 - RNA, 19 nt, Artificial Sequence
  Description of Artificial Sequence: Synthetic oligonucleotide
gauuucgcaauuuaagauu

SEQ ID NO: 1486015 - RNA, 19 nt, Artificial Sequence
  Description of Artificial Sequence: Synthetic oligonucleotide
accguaagagaucauuaaa

SEQ ID NO: 1486016 - RNA, 19 nt, Artificial Sequence
  Description of Artificial Sequence: Synthetic oligonucleotide
gauuuguagugacuacauc

SEQ ID NO: 1486017 - RNA, 19 nt, Artificial Sequence
  Description of Artificial Sequence: Synthetic oligonucleotide
ucauugagagaaacacuau

SEQ ID NO: 1486018 - RNA, 19 nt, Artificial Sequence
  Description of Artificial Sequence: Synthetic oligonucleotide
uucaguggaacagcuuugc

SEQ ID NO: 1486019 - RNA, 19 nt, Artificial Sequence
  Description of Artificial Sequence: Synthetic oligonucleotide
ggcaaagccuauaugacgc

SEQ ID NO: 1486020 - RNA, 19 nt, Artificial Sequence
  Description of Artificial Sequence: Synthetic oligonucleotide
ucgguuuucuucugacagc

SEQ ID NO: 1486021 - RNA, 19 nt, Artificial Sequence
  Description of Artificial Sequence: Synthetic oligonucleotide
uuucgcaauuuaagauuug

SEQ ID NO: 1486022 - RNA, 19 nt, Artificial Sequence
  Description of Artificial Sequence: Synthetic oligonucleotide
agaaacacuaugcgguuuu

SEQ ID NO: 1486023 - RNA, 19 nt, Artificial Sequence
  Description of Artificial Sequence: Synthetic oligonucleotide
aacuuauguuuacucuuuu

SEQ ID NO: 1486024 - RNA, 19 nt, Artificial Sequence
  Description of Artificial Sequence: Synthetic oligonucleotide
ugagguggaucccgguuug

SEQ ID NO: 1486025 - RNA, 19 nt, Artificial Sequence
  Description of Artificial Sequence: Synthetic oligonucleotide
aggaucguaaggaugaaaa

SEQ ID NO: 1486026 - RNA, 19 nt, Artificial Sequence
  Description of Artificial Sequence: Synthetic oligonucleotide
cugaaauauuugguggagc

SEQ ID NO: 1486027 - RNA, 19 nt, Artificial Sequence
  Description of Artificial Sequence: Synthetic oligonucleotide
uagaauccauuaauucauc

SEQ ID NO: 1486028 - RNA, 19 nt, Artificial Sequence
  Description of Artificial Sequence: Synthetic oligonucleotide
ucgcaauuuaagauuugua

SEQ ID NO: 1486029 - RNA, 19 nt, Artificial Sequence
  Description of Artificial Sequence: Synthetic oligonucleotide
cugaaugagugagauuagc

SEQ ID NO: 1486030 - RNA, 19 nt, Artificial Sequence
  Description of Artificial Sequence: Synthetic oligonucleotide
aucaaauggcuguagcauu

SEQ ID NO: 1486031 - RNA, 19 nt, Artificial Sequence
  Description of Artificial Sequence: Synthetic oligonucleotide
uuuuccgagcaagaaucug

SEQ ID NO: 1486032 - RNA, 19 nt, Artificial Sequence
  Description of Artificial Sequence: Synthetic oligonucleotide
aaauggucaccgcgggcca

SEQ ID NO: 1486033 - RNA, 19 nt, Artificial Sequence
  Description of Artificial Sequence: Synthetic oligonucleotide
gccuauaugacgcuguaca

SEQ ID NO: 1486034 - RNA, 19 nt, Artificial Sequence
  Description of Artificial Sequence: Synthetic oligonucleotide
gaauuugaggucggagggc

SEQ ID NO: 1486035 - RNA, 19 nt, Artificial Sequence
  Description of Artificial Sequence: Synthetic oligonucleotide
aaucauauuucaagaggua

SEQ ID NO: 1486036 - RNA, 19 nt, Artificial Sequence
  Description of Artificial Sequence: Synthetic oligonucleotide
gcauuacugaaacagucac

SEQ ID NO: 1486037 - RNA, 19 nt, Artificial Sequence
  Description of Artificial Sequence: Synthetic oligonucleotide
gauggauuucgcaauuuaa

SEQ ID NO: 1486038 - RNA, 19 nt, Artificial Sequence
  Description of Artificial Sequence: Synthetic oligonucleotide
uaccaaugaaaugguaggu

SEQ ID NO: 1486039 - RNA, 19 nt, Artificial Sequence
  Description of Artificial Sequence: Synthetic oligonucleotide
cuacaucugugaaggggcc

SEQ ID NO: 1486040 - RNA, 19 nt, Artificial Sequence
  Description of Artificial Sequence: Synthetic oligonucleotide
acuaugcgguuuuggcagg

SEQ ID NO: 1486041 - RNA, 19 nt, Artificial Sequence
  Description of Artificial Sequence: Synthetic oligonucleotide
ggggccuuugaauuugagg

SEQ ID NO: 1486042 - RNA, 19 nt, Artificial Sequence
  Description of Artificial Sequence: Synthetic oligonucleotide
ucccuagaaagaauccaau

SEQ ID NO: 1486043 - RNA, 19 nt, Artificial Sequence
  Description of Artificial Sequence: Synthetic oligonucleotide
ugucgguuuucuucugaca

SEQ ID NO: 1486044 - RNA, 19 nt, Artificial Sequence
  Description of Artificial Sequence: Synthetic oligonucleotide
gccuuugaauuugaggucg

SEQ ID NO: 1486045 - RNA, 19 nt, Artificial Sequence
  Description of Artificial Sequence: Synthetic oligonucleotide
cucauaaaggacagaaugu

SEQ ID NO: 1486046 - RNA, 19 nt, Artificial Sequence
  Description of Artificial Sequence: Synthetic oligonucleotide
uugacccugggucaauaau

SEQ ID NO: 1486047 - RNA, 19 nt, Artificial Sequence
  Description of Artificial Sequence: Synthetic oligonucleotide
uccgaaugcgcuaccuuuc

SEQ ID NO: 1486048 - RNA, 19 nt, Artificial Sequence
  Description of Artificial Sequence: Synthetic oligonucleotide
agcauuacugaaacaguca

SEQ ID NO: 1486049 - RNA, 19 nt, Artificial Sequence
  Description of Artificial Sequence: Synthetic oligonucleotide
guccgucuuguuuggaugc

SEQ ID NO: 1486050 - RNA, 19 nt, Artificial Sequence
  Description of Artificial Sequence: Synthetic oligonucleotide
uuugaggucggagggcggc

SEQ ID NO: 1486051 - RNA, 19 nt, Artificial Sequence
  Description of Artificial Sequence: Synthetic oligonucleotide
aacugccuccucacaaggg

SEQ ID NO: 1486052 - RNA, 19 nt, Artificial Sequence
  Description of Artificial Sequence: Synthetic oligonucleotide
ugaucugguaauguacaau

SEQ ID NO: 1486053 - RNA, 19 nt, Artificial Sequence
  Description of Artificial Sequence: Synthetic oligonucleotide
uccucacaagggauaagaa

SEQ ID NO: 1486054 - RNA, 19 nt, Artificial Sequence
  Description of Artificial Sequence: Synthetic oligonucleotide
aacugacaccugcuaguga

SEQ ID NO: 1486055 - RNA, 19 nt, Artificial Sequence
  Description of Artificial Sequence: Synthetic oligonucleotide
ucuauccgauggauuucgc

SEQ ID NO: 1486056 - RNA, 19 nt, Artificial Sequence
  Description of Artificial Sequence: Synthetic oligonucleotide
cuauaugacgcuguacaca

SEQ ID NO: 1486057 - RNA, 19 nt, Artificial Sequence
  Description of Artificial Sequence: Synthetic oligonucleotide
caagaaucuguuaacaguu

SEQ ID NO: 1486058 - RNA, 19 nt, Artificial Sequence
  Description of Artificial Sequence: Synthetic oligonucleotide
gagcaagaaucuguuaaca

SEQ ID NO: 1486059 - RNA, 19 nt, Artificial Sequence
  Description of Artificial Sequence: Synthetic oligonucleotide
aaaccucuuggcauuuccu

SEQ ID NO: 1486060 - RNA, 19 nt, Artificial Sequence
  Description of Artificial Sequence: Synthetic oligonucleotide
agucucuuacacucuucca

SEQ ID NO: 1486061 - RNA, 19 nt, Artificial Sequence
  Description of Artificial Sequence: Synthetic oligonucleotide
ucuaagucuuaagccuuca

SEQ ID NO: 1486062 - RNA, 19 nt, Artificial Sequence
  Description of Artificial Sequence: Synthetic oligonucleotide
ugcucgugcuucgccaugg

SEQ ID NO: 1486063 - RNA, 19 nt, Artificial Sequence
  Description of Artificial Sequence: Synthetic oligonucleotide
agucacaguugacccuggg

SEQ ID NO: 1486064 - RNA, 19 nt, Artificial Sequence
  Description of Artificial Sequence: Synthetic oligonucleotide
uuuguccgaaugcgcuacc

SEQ ID NO: 1486065 - RNA, 19 nt, Artificial Sequence
  Description of Artificial Sequence: Synthetic oligonucleotide
cugaaacagucacaguuga

SEQ ID NO: 1486066 - RNA, 19 nt, Artificial Sequence
  Description of Artificial Sequence: Synthetic oligonucleotide
agauuuguagugacuacau

SEQ ID NO: 1486067 - RNA, 19 nt, Artificial Sequence
  Description of Artificial Sequence: Synthetic oligonucleotide
gaggcggacgccaucggag

SEQ ID NO: 1486068 - RNA, 19 nt, Artificial Sequence
  Description of Artificial Sequence: Synthetic oligonucleotide
uucacucuacaagaugaau

SEQ ID NO: 1486069 - RNA, 19 nt, Artificial Sequence
  Description of Artificial Sequence: Synthetic oligonucleotide
uuccgagcaagaaucuguu

SEQ ID NO: 1486070 - RNA, 19 nt, Artificial Sequence
  Description of Artificial Sequence: Synthetic oligonucleotide
gcuagugaugaucugguaa

SEQ ID NO: 1486071 - RNA, 19 nt, Artificial Sequence
  Description of Artificial Sequence: Synthetic oligonucleotide
auccgauggauuucgcaau

SEQ ID NO: 1486072 - RNA, 19 nt, Artificial Sequence
  Description of Artificial Sequence: Synthetic oligonucleotide
uacuaccaaugaaauggua

SEQ ID NO: 1486073 - RNA, 19 nt, Artificial Sequence
  Description of Artificial Sequence: Synthetic oligonucleotide
ccugcuagugaugaucugg

SEQ ID NO: 1486074 - RNA, 19 nt, Artificial Sequence
  Description of Artificial Sequence: Synthetic oligonucleotide
ugcuagguuccauaucauu

SEQ ID NO: 1486075 - RNA, 19 nt, Artificial Sequence
  Description of Artificial Sequence: Synthetic oligonucleotide
aagccuauaugacgcugua

SEQ ID NO: 1486076 - RNA, 19 nt, Artificial Sequence
  Description of Artificial Sequence: Synthetic oligonucleotide
acuuuucuauccgauggau

SEQ ID NO: 1486077 - RNA, 19 nt, Artificial Sequence
  Description of Artificial Sequence: Synthetic oligonucleotide
uuucuauccgauggauuuc

SEQ ID NO: 1486078 - RNA, 19 nt, Artificial Sequence
  Description of Artificial Sequence: Synthetic oligonucleotide
cuagugaugaucugguaau

SEQ ID NO: 1486079 - RNA, 19 nt, Artificial Sequence
  Description of Artificial Sequence: Synthetic oligonucleotide
cuauccgauggauuucgca

SEQ ID NO: 1486080 - RNA, 19 nt, Artificial Sequence
  Description of Artificial Sequence: Synthetic oligonucleotide
agccuauaugacgcuguac

SEQ ID NO: 1486081 - RNA, 19 nt, Artificial Sequence
  Description of Artificial Sequence: Synthetic oligonucleotide
cucuuacacucuuccauca

SEQ ID NO: 1486082 - RNA, 19 nt, Artificial Sequence
  Description of Artificial Sequence: Synthetic oligonucleotide
aagaggcaccaguucccca

SEQ ID NO: 1486083 - RNA, 19 nt, Artificial Sequence
  Description of Artificial Sequence: Synthetic oligonucleotide
augcgcuaccuuucuaagu

SEQ ID NO: 1486084 - RNA, 19 nt, Artificial Sequence
  Description of Artificial Sequence: Synthetic oligonucleotide
caaagccuauaugacgcug

SEQ ID NO: 1486085 - RNA, 19 nt, Artificial Sequence
  Description of Artificial Sequence: Synthetic oligonucleotide
accaaugaaaugguaggua

SEQ ID NO: 1486086 - RNA, 19 nt, Artificial Sequence
  Description of Artificial Sequence: Synthetic oligonucleotide
guuuguccgaaugcgcuac

SEQ ID NO: 1486087 - RNA, 19 nt, Artificial Sequence
  Description of Artificial Sequence: Synthetic oligonucleotide
gucuuaagccuucaucucu

SEQ ID NO: 1486088 - RNA, 19 nt, Artificial Sequence
  Description of Artificial Sequence: Synthetic oligonucleotide
ugcaugcuucacucuacaa

SEQ ID NO: 1486089 - RNA, 19 nt, Artificial Sequence
  Description of Artificial Sequence: Synthetic oligonucleotide
gugucgguuuucuucugac

SEQ ID NO: 1486090 - RNA, 19 nt, Artificial Sequence
  Description of Artificial Sequence: Synthetic oligonucleotide
gguccgucuuguuuggaug

SEQ ID NO: 1486091 - RNA, 19 nt, Artificial Sequence
  Description of Artificial Sequence: Synthetic oligonucleotide
agggguccgucuuguuugg

SEQ ID NO: 1486092 - RNA, 19 nt, Artificial Sequence
  Description of Artificial Sequence: Synthetic oligonucleotide
caguggaacagcuuugcua

SEQ ID NO: 1486093 - RNA, 19 nt, Artificial Sequence
  Description of Artificial Sequence: Synthetic oligonucleotide
uguccgaaugcgcuaccuu

SEQ ID NO: 1486094 - RNA, 19 nt, Artificial Sequence
  Description of Artificial Sequence: Synthetic oligonucleotide
acagaaugugcaacugaca

SEQ ID NO: 1486095 - RNA, 19 nt, Artificial Sequence
  Description of Artificial Sequence: Synthetic oligonucleotide
ggaugcauucaguggaaca

SEQ ID NO: 1486096 - RNA, 19 nt, Artificial Sequence
  Description of Artificial Sequence: Synthetic oligonucleotide
ccuauaugacgcuguacac

SEQ ID NO: 1486097 - RNA, 19 nt, Artificial Sequence
  Description of Artificial Sequence: Synthetic oligonucleotide
ggugacacucucccugaag

SEQ ID NO: 1486098 - RNA, 19 nt, Artificial Sequence
  Description of Artificial Sequence: Synthetic oligonucleotide
ggauuucgcaauuuaagau

SEQ ID NO: 1486099 - RNA, 19 nt, Artificial Sequence
  Description of Artificial Sequence: Synthetic oligonucleotide
gucaccgcgggccauacua

SEQ ID NO: 1486100 - RNA, 19 nt, Artificial Sequence
  Description of Artificial Sequence: Synthetic oligonucleotide
acacucucccugaagggug

SEQ ID NO: 1486101 - RNA, 19 nt, Artificial Sequence
  Description of Artificial Sequence: Synthetic oligonucleotide
uccguaucauugagagaaa

SEQ ID NO: 1486102 - RNA, 19 nt, Artificial Sequence
  Description of Artificial Sequence: Synthetic oligonucleotide
agguggaucccgguuuguc

SEQ ID NO: 1486103 - RNA, 19 nt, Artificial Sequence
  Description of Artificial Sequence: Synthetic oligonucleotide
ucaccgcgggccauacuac

SEQ ID NO: 1486104 - RNA, 19 nt, Artificial Sequence
  Description of Artificial Sequence: Synthetic oligonucleotide
uugcuagguuccauaucau

SEQ ID NO: 1486105 - RNA, 19 nt, Artificial Sequence
  Description of Artificial Sequence: Synthetic oligonucleotide
gaagucucuuacacucuuc

SEQ ID NO: 1486106 - RNA, 19 nt, Artificial Sequence
  Description of Artificial Sequence: Synthetic oligonucleotide
ucuaaccguaagagaucau

SEQ ID NO: 1486107 - RNA, 19 nt, Artificial Sequence
  Description of Artificial Sequence: Synthetic oligonucleotide
ccauacuaccaaugaaaug

SEQ ID NO: 1486108 - RNA, 19 nt, Artificial Sequence
  Description of Artificial Sequence: Synthetic oligonucleotide
cuaugcgguuuuggcaggg

SEQ ID NO: 1486109 - RNA, 19 nt, Artificial Sequence
  Description of Artificial Sequence: Synthetic oligonucleotide
caaauggcuguagcauuac

SEQ ID NO: 1486110 - RNA, 19 nt, Artificial Sequence
  Description of Artificial Sequence: Synthetic oligonucleotide
ggccauacuaccaaugaaa

SEQ ID NO: 1486111 - RNA, 19 nt, Artificial Sequence
  Description of Artificial Sequence: Synthetic oligonucleotide
caucggagacagcgcagag

SEQ ID NO: 1486112 - RNA, 19 nt, Artificial Sequence
  Description of Artificial Sequence: Synthetic oligonucleotide
cuuaagccuucaucucuca

SEQ ID NO: 1486113 - RNA, 19 nt, Artificial Sequence
  Description of Artificial Sequence: Synthetic oligonucleotide
uggcugcgauuacaaccag

SEQ ID NO: 1486114 - RNA, 19 nt, Artificial Sequence
  Description of Artificial Sequence: Synthetic oligonucleotide
aucucauaaaggacagaau

SEQ ID NO: 1486115 - RNA, 19 nt, Artificial Sequence
  Description of Artificial Sequence: Synthetic oligonucleotide
uuguccgaaugcgcuaccu

SEQ ID NO: 1486116 - RNA, 19 nt, Artificial Sequence
  Description of Artificial Sequence: Synthetic oligonucleotide
uggaugcauucaguggaac

SEQ ID NO: 1486117 - RNA, 19 nt, Artificial Sequence
  Description of Artificial Sequence: Synthetic oligonucleotide
gcugcgauuacaaccagaa

SEQ ID NO: 1486118 - RNA, 19 nt, Artificial Sequence
  Description of Artificial Sequence: Synthetic oligonucleotide
guagcauuacugaaacagu

SEQ ID NO: 1486119 - RNA, 19 nt, Artificial Sequence
  Description of Artificial Sequence: Synthetic oligonucleotide
ugcuagugaugaucuggua

SEQ ID NO: 1486120 - RNA, 19 nt, Artificial Sequence
  Description of Artificial Sequence: Synthetic oligonucleotide
auuuguccaggggcccaac

SEQ ID NO: 1486121 - RNA, 19 nt, Artificial Sequence
  Description of Artificial Sequence: Synthetic oligonucleotide
caccgcgggccauacuacc

SEQ ID NO: 1486122 - RNA, 19 nt, Artificial Sequence
  Description of Artificial Sequence: Synthetic oligonucleotide
accggcgaggugcuguggu

SEQ ID NO: 1486123 - RNA, 19 nt, Artificial Sequence
  Description of Artificial Sequence: Synthetic oligonucleotide
ggacaggaucguaaggaug

SEQ ID NO: 1486124 - RNA, 19 nt, Artificial Sequence
  Description of Artificial Sequence: Synthetic oligonucleotide
gucggagggcggcucgagg

SEQ ID NO: 1486125 - RNA, 19 nt, Artificial Sequence
  Description of Artificial Sequence: Synthetic oligonucleotide
uccgagcaagaaucuguua

SEQ ID NO: 1486126 - RNA, 19 nt, Artificial Sequence
  Description of Artificial Sequence: Synthetic oligonucleotide
gguaacagcaacagauaaa

SEQ ID NO: 1486127 - RNA, 19 nt, Artificial Sequence
  Description of Artificial Sequence: Synthetic oligonucleotide
uggaucccgguuuguccga

SEQ ID NO: 1486128 - RNA, 19 nt, Artificial Sequence
  Description of Artificial Sequence: Synthetic oligonucleotide
gaacuuauguuuacucuuu

SEQ ID NO: 1486129 - RNA, 19 nt, Artificial Sequence
  Description of Artificial Sequence: Synthetic oligonucleotide
acgccaucggagacagcgc

SEQ ID NO: 1486130 - RNA, 19 nt, Artificial Sequence
  Description of Artificial Sequence: Synthetic oligonucleotide
gacacucucccugaagggu

SEQ ID NO: 1486131 - RNA, 19 nt, Artificial Sequence
  Description of Artificial Sequence: Synthetic oligonucleotide
aacuagcacucugcaugcu

SEQ ID NO: 1486132 - RNA, 19 nt, Artificial Sequence
  Description of Artificial Sequence: Synthetic oligonucleotide
cacuguugggccucacaca

SEQ ID NO: 1486133 - RNA, 19 nt, Artificial Sequence
  Description of Artificial Sequence: Synthetic oligonucleotide
aggcggacgccaucggaga

SEQ ID NO: 1486134 - RNA, 19 nt, Artificial Sequence
  Description of Artificial Sequence: Synthetic oligonucleotide
accugcuagugaugaucug

SEQ ID NO: 1486135 - RNA, 19 nt, Artificial Sequence
  Description of Artificial Sequence: Synthetic oligonucleotide
uaccaugggacaggaucgu

SEQ ID NO: 1486136 - RNA, 19 nt, Artificial Sequence
  Description of Artificial Sequence: Synthetic oligonucleotide
cgagcaagaaucuguuaac

SEQ ID NO: 1486137 - RNA, 19 nt, Artificial Sequence
  Description of Artificial Sequence: Synthetic oligonucleotide
ccgagcaagaaucuguuaa

SEQ ID NO: 1486138 - RNA, 19 nt, Artificial Sequence
  Description of Artificial Sequence: Synthetic oligonucleotide
gaaaaccucuuggcauuuc

SEQ ID NO: 1486139 - RNA, 19 nt, Artificial Sequence
  Description of Artificial Sequence: Synthetic oligonucleotide
cccgguuuguccgaaugcg

SEQ ID NO: 1486140 - RNA, 19 nt, Artificial Sequence
  Description of Artificial Sequence: Synthetic oligonucleotide
gguagguaaacaaaucuuu

SEQ ID NO: 1486141 - RNA, 19 nt, Artificial Sequence
  Description of Artificial Sequence: Synthetic oligonucleotide
acacaguaccggcgaggug

SEQ ID NO: 1486142 - RNA, 19 nt, Artificial Sequence
  Description of Artificial Sequence: Synthetic oligonucleotide
gagugagauuagcaaucua

SEQ ID NO: 1486143 - RNA, 19 nt, Artificial Sequence
  Description of Artificial Sequence: Synthetic oligonucleotide
aaauaccaugggacaggau

SEQ ID NO: 1486144 - RNA, 19 nt, Artificial Sequence
  Description of Artificial Sequence: Synthetic oligonucleotide
cugcuagugaugaucuggu

SEQ ID NO: 1486145 - RNA, 19 nt, Artificial Sequence
  Description of Artificial Sequence: Synthetic oligonucleotide
cuaaccguaagagaucauu

SEQ ID NO: 1486146 - RNA, 19 nt, Artificial Sequence
  Description of Artificial Sequence: Synthetic oligonucleotide
ccauaucauucauuuuauc

SEQ ID NO: 1486147 - RNA, 19 nt, Artificial Sequence
  Description of Artificial Sequence: Synthetic oligonucleotide
caccugcuagugaugaucu

SEQ ID NO: 1486148 - RNA, 19 nt, Artificial Sequence
  Description of Artificial Sequence: Synthetic oligonucleotide
aauggucaccgcgggccau

SEQ ID NO: 1486149 - RNA, 19 nt, Artificial Sequence
  Description of Artificial Sequence: Synthetic oligonucleotide
ggugucgguuuucuucuga

SEQ ID NO: 1486150 - RNA, 19 nt, Artificial Sequence
  Description of Artificial Sequence: Synthetic oligonucleotide
aaggggccuuugaauuuga

SEQ ID NO: 1486151 - RNA, 19 nt, Artificial Sequence
  Description of Artificial Sequence: Synthetic oligonucleotide
ccgguuuguccgaaugcgc

SEQ ID NO: 1486152 - RNA, 19 nt, Artificial Sequence
  Description of Artificial Sequence: Synthetic oligonucleotide
ccauuaauucaucagguuu

SEQ ID NO: 1486153 - RNA, 19 nt, Artificial Sequence
  Description of Artificial Sequence: Synthetic oligonucleotide
uugaggucggagggcggcu

SEQ ID NO: 1486154 - RNA, 19 nt, Artificial Sequence
  Description of Artificial Sequence: Synthetic oligonucleotide
agaggacuggugacacucu

SEQ ID NO: 1486155 - RNA, 19 nt, Artificial Sequence
  Description of Artificial Sequence: Synthetic oligonucleotide
caauuuguccaggggccca

SEQ ID NO: 1486156 - RNA, 19 nt, Artificial Sequence
  Description of Artificial Sequence: Synthetic oligonucleotide
gagggcggcucgaggauca

SEQ ID NO: 1486157 - RNA, 19 nt, Artificial Sequence
  Description of Artificial Sequence: Synthetic oligonucleotide
cgugcuucgccauggcccc

SEQ ID NO: 1486158 - RNA, 19 nt, Artificial Sequence
  Description of Artificial Sequence: Synthetic oligonucleotide
caguguguuucauuguguu

SEQ ID NO: 1486159 - RNA, 19 nt, Artificial Sequence
  Description of Artificial Sequence: Synthetic oligonucleotide
ccguaucauugagagaaac

SEQ ID NO: 1486160 - RNA, 19 nt, Artificial Sequence
  Description of Artificial Sequence: Synthetic oligonucleotide
ugaggucggagggcggcuc

SEQ ID NO: 1486161 - RNA, 19 nt, Artificial Sequence
  Description of Artificial Sequence: Synthetic oligonucleotide
accgcgggccauggucacc

SEQ ID NO: 1486162 - RNA, 19 nt, Artificial Sequence
  Description of Artificial Sequence: Synthetic oligonucleotide
uaccggcgaggugcugugg

SEQ ID NO: 1486163 - RNA, 19 nt, Artificial Sequence
  Description of Artificial Sequence: Synthetic oligonucleotide
gguuuguccgaaugcgcua

SEQ ID NO: 1486164 - RNA, 19 nt, Artificial Sequence
  Description of Artificial Sequence: Synthetic oligonucleotide
auaugacgcuguacacaca

SEQ ID NO: 1486165 - RNA, 19 nt, Artificial Sequence
  Description of Artificial Sequence: Synthetic oligonucleotide
gggccauacuaccaaugaa

SEQ ID NO: 1486166 - RNA, 19 nt, Artificial Sequence
  Description of Artificial Sequence: Synthetic oligonucleotide
acaggaucguaaggaugaa

SEQ ID NO: 1486167 - RNA, 19 nt, Artificial Sequence
  Description of Artificial Sequence: Synthetic oligonucleotide
ggcccaacaguguguuuca

SEQ ID NO: 1486168 - RNA, 19 nt, Artificial Sequence
  Description of Artificial Sequence: Synthetic oligonucleotide
accgcgggccauacuacca

SEQ ID NO: 1486169 - RNA, 19 nt, Artificial Sequence
  Description of Artificial Sequence: Synthetic oligonucleotide
cugagguggaucccgguuu

SEQ ID NO: 1486170 - RNA, 19 nt, Artificial Sequence
  Description of Artificial Sequence: Synthetic oligonucleotide
gagaaacacuaugcgguuu

SEQ ID NO: 1486171 - RNA, 19 nt, Artificial Sequence
  Description of Artificial Sequence: Synthetic oligonucleotide
aggggcccaacaguguguu

SEQ ID NO: 1486172 - RNA, 19 nt, Artificial Sequence
  Description of Artificial Sequence: Synthetic oligonucleotide
caggaucguaaggaugaaa

SEQ ID NO: 1486173 - RNA, 19 nt, Artificial Sequence
  Description of Artificial Sequence: Synthetic oligonucleotide
cucagucaacaaacugccu

SEQ ID NO: 1486174 - RNA, 19 nt, Artificial Sequence
  Description of Artificial Sequence: Synthetic oligonucleotide
gccauacuaccaaugaaau

SEQ ID NO: 1486175 - RNA, 19 nt, Artificial Sequence
  Description of Artificial Sequence: Synthetic oligonucleotide
uggucaccgcgggccauac

SEQ ID NO: 1486176 - RNA, 19 nt, Artificial Sequence
  Description of Artificial Sequence: Synthetic oligonucleotide
augacgcuguacacacaaa

SEQ ID NO: 1486177 - RNA, 19 nt, Artificial Sequence
  Description of Artificial Sequence: Synthetic oligonucleotide
caccgcgggccauggucac

SEQ ID NO: 1486178 - RNA, 19 nt, Artificial Sequence
  Description of Artificial Sequence: Synthetic oligonucleotide
ggcggacgccaucggagac

SEQ ID NO: 1486179 - RNA, 19 nt, Artificial Sequence
  Description of Artificial Sequence: Synthetic oligonucleotide
gccaucggagacagcgcag

SEQ ID NO: 1486180 - RNA, 19 nt, Artificial Sequence
  Description of Artificial Sequence: Synthetic oligonucleotide
ccgcgggccauggucaccg

SEQ ID NO: 1486181 - RNA, 19 nt, Artificial Sequence
  Description of Artificial Sequence: Synthetic oligonucleotide
ggcugcgauuacaaccaga

SEQ ID NO: 1486182 - RNA, 19 nt, Artificial Sequence
  Description of Artificial Sequence: Synthetic oligonucleotide
gcuaccuuucuaagucuua

SEQ ID NO: 1486183 - RNA, 19 nt, Artificial Sequence
  Description of Artificial Sequence: Synthetic oligonucleotide
aggucggagggcggcucga

SEQ ID NO: 1486184 - RNA, 19 nt, Artificial Sequence
  Description of Artificial Sequence: Synthetic oligonucleotide
gaucccgguuuguccgaau

SEQ ID NO: 1486185 - RNA, 19 nt, Artificial Sequence
  Description of Artificial Sequence: Synthetic oligonucleotide
ggucggagggcggcucgag

SEQ ID NO: 1486186 - RNA, 19 nt, Artificial Sequence
  Description of Artificial Sequence: Synthetic oligonucleotide
caucucucaggugucgguu

SEQ ID NO: 1486187 - RNA, 19 nt, Artificial Sequence
  Description of Artificial Sequence: Synthetic oligonucleotide
ccaucggagacagcgcaga

SEQ ID NO: 1486188 - RNA, 19 nt, Artificial Sequence
  Description of Artificial Sequence: Synthetic oligonucleotide
ggguccgucuuguuuggau

SEQ ID NO: 1486189 - RNA, 19 nt, Artificial Sequence
  Description of Artificial Sequence: Synthetic oligonucleotide
agggcggcucgaggaucag

SEQ ID NO: 1486190 - RNA, 19 nt, Artificial Sequence
  Description of Artificial Sequence: Synthetic oligonucleotide
ggagggcggcucgaggauc

SEQ ID NO: 1486191 - RNA, 19 nt, Artificial Sequence
  Description of Artificial Sequence: Synthetic oligonucleotide
cuguugggccucacacagu

SEQ ID NO: 1486192 - RNA, 19 nt, Artificial Sequence
  Description of Artificial Sequence: Synthetic oligonucleotide
gcgcuaccuuucuaagucu

SEQ ID NO: 1486193 - RNA, 19 nt, Artificial Sequence
  Description of Artificial Sequence: Synthetic oligonucleotide
gcggacgccaucggagaca

SEQ ID NO: 1486194 - RNA, 19 nt, Artificial Sequence
  Description of Artificial Sequence: Synthetic oligonucleotide
gagguggaucccgguuugu

SEQ ID NO: 1486195 - RNA, 19 nt, Artificial Sequence
  Description of Artificial Sequence: Synthetic oligonucleotide
cgguuuguccgaaugcgcu

SEQ ID NO: 1486196 - RNA, 19 nt, Artificial Sequence
  Description of Artificial Sequence: Synthetic oligonucleotide
cgccaucggagacagcgca

SEQ ID NO: 1486197 - RNA, 19 nt, Artificial Sequence
  Description of Artificial Sequence: Synthetic oligonucleotide
ccggcgaggugcugugguc

SEQ ID NO: 1486198 - RNA, 19 nt, Artificial Sequence
  Description of Artificial Sequence: Synthetic oligonucleotide
ccgcgggccauacuaccaa

SEQ ID NO: 1486199 - RNA, 19 nt, Artificial Sequence
  Description of Artificial Sequence: Synthetic oligonucleotide
gggguccgucuuguuugga

SEQ ID NO: 1486200 - RNA, 19 nt, Artificial Sequence
  Description of Artificial Sequence: Synthetic oligonucleotide
cccggaggcggacgccauc

SEQ ID NO: 1486201 - RNA, 19 nt, Artificial Sequence
  Description of Artificial Sequence: Synthetic oligonucleotide
cauggucaccgcgggccau

SEQ ID NO: 1486202 - RNA, 19 nt, Artificial Sequence
  Description of Artificial Sequence: Synthetic oligonucleotide
cgaaugcgcuaccuuucua

SEQ ID NO: 1486203 - RNA, 19 nt, Artificial Sequence
  Description of Artificial Sequence: Synthetic oligonucleotide
gcggcucgaggaucaggau

SEQ ID NO: 1486204 - RNA, 19 nt, Artificial Sequence
  Description of Artificial Sequence: Synthetic oligonucleotide
caguugacccugggucaau

SEQ ID NO: 1486205 - RNA, 19 nt, Artificial Sequence
  Description of Artificial Sequence: Synthetic oligonucleotide
ggucaccgcgggccauacu

SEQ ID NO: 1486206 - RNA, 19 nt, Artificial Sequence
  Description of Artificial Sequence: Synthetic oligonucleotide
ccgucuuguuuggaugcau

SEQ ID NO: 1486207 - RNA, 19 nt, Artificial Sequence
  Description of Artificial Sequence: Synthetic oligonucleotide
cggcgaggugcuguggucu

SEQ ID NO: 1486208 - RNA, 19 nt, Artificial Sequence
  Description of Artificial Sequence: Synthetic oligonucleotide
cgcgggccauacuaccaau

SEQ ID NO: 1486209 - RNA, 19 nt, Artificial Sequence
  Description of Artificial Sequence: Synthetic oligonucleotide
cggagggcggcucgaggau

SEQ ID NO: 1486210 - RNA, 19 nt, Artificial Sequence
  Description of Artificial Sequence: Synthetic oligonucleotide
ccccggaggcggacgccau

SEQ ID NO: 1486211 - RNA, 19 nt, Artificial Sequence
  Description of Artificial Sequence: Synthetic oligonucleotide
aaguaaaagauauauagcc

SEQ ID NO: 1486212 - RNA, 19 nt, Artificial Sequence
  Description of Artificial Sequence: Synthetic oligonucleotide
aaucuuagcauccugagac

SEQ ID NO: 1486213 - RNA, 19 nt, Artificial Sequence
  Description of Artificial Sequence: Synthetic oligonucleotide
aauaaugcgauugacacac

SEQ ID NO: 1486214 - RNA, 19 nt, Artificial Sequence
  Description of Artificial Sequence: Synthetic oligonucleotide
caaaauaaagugcugaccg

SEQ ID NO: 1486215 - RNA, 19 nt, Artificial Sequence
  Description of Artificial Sequence: Synthetic oligonucleotide
aauacuagaagagaacuag

SEQ ID NO: 1486216 - RNA, 19 nt, Artificial Sequence
  Description of Artificial Sequence: Synthetic oligonucleotide
aaguauucugccuaaucac

SEQ ID NO: 1486217 - RNA, 19 nt, Artificial Sequence
  Description of Artificial Sequence: Synthetic oligonucleotide
aauacauaguuuugauuac

SEQ ID NO: 1486218 - RNA, 19 nt, Artificial Sequence
  Description of Artificial Sequence: Synthetic oligonucleotide
uaaucacaaauucauauga

SEQ ID NO: 1486219 - RNA, 19 nt, Artificial Sequence
  Description of Artificial Sequence: Synthetic oligonucleotide
uccuauuuggccuauaaga

SEQ ID NO: 1486220 - RNA, 19 nt, Artificial Sequence
  Description of Artificial Sequence: Synthetic oligonucleotide
uccuauguguucaaaaugc

SEQ ID NO: 1486221 - RNA, 19 nt, Artificial Sequence
  Description of Artificial Sequence: Synthetic oligonucleotide
uguaauaaugcgauugaca

SEQ ID NO: 1486222 - RNA, 19 nt, Artificial Sequence
  Description of Artificial Sequence: Synthetic oligonucleotide
uucauaugaaaagagaaca

SEQ ID NO: 1486223 - RNA, 19 nt, Artificial Sequence
  Description of Artificial Sequence: Synthetic oligonucleotide
uuuucuguaauaaugcgau

SEQ ID NO: 1486224 - RNA, 19 nt, Artificial Sequence
  Description of Artificial Sequence: Synthetic oligonucleotide
agugauaaacgcucaauuc

SEQ ID NO: 1486225 - RNA, 19 nt, Artificial Sequence
  Description of Artificial Sequence: Synthetic oligonucleotide
uauaaggcgauguacauaa

SEQ ID NO: 1486226 - RNA, 19 nt, Artificial Sequence
  Description of Artificial Sequence: Synthetic oligonucleotide
uaaucauugcgaaugauuc

SEQ ID NO: 1486227 - RNA, 19 nt, Artificial Sequence
  Description of Artificial Sequence: Synthetic oligonucleotide
uguacauaaaucuuuggaa

SEQ ID NO: 1486228 - RNA, 19 nt, Artificial Sequence
  Description of Artificial Sequence: Synthetic oligonucleotide
uauuuuauggguugauucc

SEQ ID NO: 1486229 - RNA, 19 nt, Artificial Sequence
  Description of Artificial Sequence: Synthetic oligonucleotide
aaagugcugaccguuaaac

SEQ ID NO: 1486230 - RNA, 19 nt, Artificial Sequence
  Description of Artificial Sequence: Synthetic oligonucleotide
uuuguuguauuuuaugggu

SEQ ID NO: 1486231 - RNA, 19 nt, Artificial Sequence
  Description of Artificial Sequence: Synthetic oligonucleotide
uuuggacugaugaaguugc

SEQ ID NO: 1486232 - RNA, 19 nt, Artificial Sequence
  Description of Artificial Sequence: Synthetic oligonucleotide
uuuuagaggguauggaccc

SEQ ID NO: 1486233 - RNA, 19 nt, Artificial Sequence
  Description of Artificial Sequence: Synthetic oligonucleotide
gaugaacagucauauuugg

SEQ ID NO: 1486234 - RNA, 19 nt, Artificial Sequence
  Description of Artificial Sequence: Synthetic oligonucleotide
aacuagucgaaacuucuug

SEQ ID NO: 1486235 - RNA, 19 nt, Artificial Sequence
  Description of Artificial Sequence: Synthetic oligonucleotide
aacagucauauuuggacug

SEQ ID NO: 1486236 - RNA, 19 nt, Artificial Sequence
  Description of Artificial Sequence: Synthetic oligonucleotide
ugugcauuucccuuggcag

SEQ ID NO: 1486237 - RNA, 19 nt, Artificial Sequence
  Description of Artificial Sequence: Synthetic oligonucleotide
aagagaacuagucgaaacu

SEQ ID NO: 1486238 - RNA, 19 nt, Artificial Sequence
  Description of Artificial Sequence: Synthetic oligonucleotide
aauccuauguguucaaaau

SEQ ID NO: 1486239 - RNA, 19 nt, Artificial Sequence
  Description of Artificial Sequence: Synthetic oligonucleotide
acuuugaagaugaacaguc

SEQ ID NO: 1486240 - RNA, 19 nt, Artificial Sequence
  Description of Artificial Sequence: Synthetic oligonucleotide
auaaguuuuggugaaacug

SEQ ID NO: 1486241 - RNA, 19 nt, Artificial Sequence
  Description of Artificial Sequence: Synthetic oligonucleotide
auugcgaaugauucaucgc

SEQ ID NO: 1486242 - RNA, 19 nt, Artificial Sequence
  Description of Artificial Sequence: Synthetic oligonucleotide
cauauuuggacugaugaag

SEQ ID NO: 1486243 - RNA, 19 nt, Artificial Sequence
  Description of Artificial Sequence: Synthetic oligonucleotide
uggccuauaagaagugugg

SEQ ID NO: 1486244 - RNA, 19 nt, Artificial Sequence
  Description of Artificial Sequence: Synthetic oligonucleotide
uaucccuauacccaaauua

SEQ ID NO: 1486245 - RNA, 19 nt, Artificial Sequence
  Description of Artificial Sequence: Synthetic oligonucleotide
aaggcgauguacauaaauc

SEQ ID NO: 1486246 - RNA, 19 nt, Artificial Sequence
  Description of Artificial Sequence: Synthetic oligonucleotide
auguacauaaaucuuugga

SEQ ID NO: 1486247 - RNA, 19 nt, Artificial Sequence
  Description of Artificial Sequence: Synthetic oligonucleotide
uuuacugugcagacaacca

SEQ ID NO: 1486248 - RNA, 19 nt, Artificial Sequence
  Description of Artificial Sequence: Synthetic oligonucleotide
uugcgaaugauucaucgcu

SEQ ID NO: 1486249 - RNA, 19 nt, Artificial Sequence
  Description of Artificial Sequence: Synthetic oligonucleotide
cauugcgaaugauucaucg

SEQ ID NO: 1486250 - RNA, 19 nt, Artificial Sequence
  Description of Artificial Sequence: Synthetic oligonucleotide
ucugccuaaucacaaauuc

SEQ ID NO: 1486251 - RNA, 19 nt, Artificial Sequence
  Description of Artificial Sequence: Synthetic oligonucleotide
aaaauaaagugcugaccgu

SEQ ID NO: 1486252 - RNA, 19 nt, Artificial Sequence
  Description of Artificial Sequence: Synthetic oligonucleotide
guauuuuauggguugauuc

SEQ ID NO: 1486253 - RNA, 19 nt, Artificial Sequence
  Description of Artificial Sequence: Synthetic oligonucleotide
uauacccaaauuagcauac

SEQ ID NO: 1486254 - RNA, 19 nt, Artificial Sequence
  Description of Artificial Sequence: Synthetic oligonucleotide
uuuuacugugcagacaacc

SEQ ID NO: 1486255 - RNA, 19 nt, Artificial Sequence
  Description of Artificial Sequence: Synthetic oligonucleotide
aaaugauccaaugucuaca

SEQ ID NO: 1486256 - RNA, 19 nt, Artificial Sequence
  Description of Artificial Sequence: Synthetic oligonucleotide
ggaacuggauacuaaaucc

SEQ ID NO: 1486257 - RNA, 19 nt, Artificial Sequence
  Description of Artificial Sequence: Synthetic oligonucleotide
uuagcauccugagacaaag

SEQ ID NO: 1486258 - RNA, 19 nt, Artificial Sequence
  Description of Artificial Sequence: Synthetic oligonucleotide
cuuucggagugauaaacgc

SEQ ID NO: 1486259 - RNA, 19 nt, Artificial Sequence
  Description of Artificial Sequence: Synthetic oligonucleotide
gaaaagagaacagucuaug

SEQ ID NO: 1486260 - RNA, 19 nt, Artificial Sequence
  Description of Artificial Sequence: Synthetic oligonucleotide
gaggguauggacccaaacc

SEQ ID NO: 1486261 - RNA, 19 nt, Artificial Sequence
  Description of Artificial Sequence: Synthetic oligonucleotide
uccuaacauuguuagauug

SEQ ID NO: 1486262 - RNA, 19 nt, Artificial Sequence
  Description of Artificial Sequence: Synthetic oligonucleotide
ugcacauuggcaaauugaa

SEQ ID NO: 1486263 - RNA, 19 nt, Artificial Sequence
  Description of Artificial Sequence: Synthetic oligonucleotide
gauacuaaauccauagcuc

SEQ ID NO: 1486264 - RNA, 19 nt, Artificial Sequence
  Description of Artificial Sequence: Synthetic oligonucleotide
uggaacuggauacuaaauc

SEQ ID NO: 1486265 - RNA, 19 nt, Artificial Sequence
  Description of Artificial Sequence: Synthetic oligonucleotide
aauuagcauacaugccauc

SEQ ID NO: 1486266 - RNA, 19 nt, Artificial Sequence
  Description of Artificial Sequence: Synthetic oligonucleotide
uguucaaaaugcaaucuua

SEQ ID NO: 1486267 - RNA, 19 nt, Artificial Sequence
  Description of Artificial Sequence: Synthetic oligonucleotide
aaaucacguuuccugcccg

SEQ ID NO: 1486268 - RNA, 19 nt, Artificial Sequence
  Description of Artificial Sequence: Synthetic oligonucleotide
uacuagaagagaacuaguc

SEQ ID NO: 1486269 - RNA, 19 nt, Artificial Sequence
  Description of Artificial Sequence: Synthetic oligonucleotide
acaguaacuguuuccuuuc

SEQ ID NO: 1486270 - RNA, 19 nt, Artificial Sequence
  Description of Artificial Sequence: Synthetic oligonucleotide
ugaagaugaacagucauau

SEQ ID NO: 1486271 - RNA, 19 nt, Artificial Sequence
  Description of Artificial Sequence: Synthetic oligonucleotide
agagacauuccuguuugcc

SEQ ID NO: 1486272 - RNA, 19 nt, Artificial Sequence
  Description of Artificial Sequence: Synthetic oligonucleotide
ugggguauccuauuuggcc

SEQ ID NO: 1486273 - RNA, 19 nt, Artificial Sequence
  Description of Artificial Sequence: Synthetic oligonucleotide
uucggagugauaaacgcuc

SEQ ID NO: 1486274 - RNA, 19 nt, Artificial Sequence
  Description of Artificial Sequence: Synthetic oligonucleotide
uugcuccuaacauuguuag

SEQ ID NO: 1486275 - RNA, 19 nt, Artificial Sequence
  Description of Artificial Sequence: Synthetic oligonucleotide
guccacgucaaacacaccc

SEQ ID NO: 1486276 - RNA, 19 nt, Artificial Sequence
  Description of Artificial Sequence: Synthetic oligonucleotide
ugaaaagagaacagucuau

SEQ ID NO: 1486277 - RNA, 19 nt, Artificial Sequence
  Description of Artificial Sequence: Synthetic oligonucleotide
aacgcucaauucuuuucuc

SEQ ID NO: 1486278 - RNA, 19 nt, Artificial Sequence
  Description of Artificial Sequence: Synthetic oligonucleotide
aaaggucuacuccauacuu

SEQ ID NO: 1486279 - RNA, 19 nt, Artificial Sequence
  Description of Artificial Sequence: Synthetic oligonucleotide
uaaugcgauugacacacug

SEQ ID NO: 1486280 - RNA, 19 nt, Artificial Sequence
  Description of Artificial Sequence: Synthetic oligonucleotide
gauuuugugugcauuuccc

SEQ ID NO: 1486281 - RNA, 19 nt, Artificial Sequence
  Description of Artificial Sequence: Synthetic oligonucleotide
aggcgauguacauaaaucu

SEQ ID NO: 1486282 - RNA, 19 nt, Artificial Sequence
  Description of Artificial Sequence: Synthetic oligonucleotide
uauggguugauuccuuccu

SEQ ID NO: 1486283 - RNA, 19 nt, Artificial Sequence
  Description of Artificial Sequence: Synthetic oligonucleotide
acuugcauugcuccuaaca

SEQ ID NO: 1486284 - RNA, 19 nt, Artificial Sequence
  Description of Artificial Sequence: Synthetic oligonucleotide
auaguuuugauuacugaca

SEQ ID NO: 1486285 - RNA, 19 nt, Artificial Sequence
  Description of Artificial Sequence: Synthetic oligonucleotide
uaauaaugcgauugacaca

SEQ ID NO: 1486286 - RNA, 19 nt, Artificial Sequence
  Description of Artificial Sequence: Synthetic oligonucleotide
accguuaaacucccucacc

SEQ ID NO: 1486287 - RNA, 19 nt, Artificial Sequence
  Description of Artificial Sequence: Synthetic oligonucleotide
ugauaaacgcucaauucuu

SEQ ID NO: 1486288 - RNA, 19 nt, Artificial Sequence
  Description of Artificial Sequence: Synthetic oligonucleotide
aaucacguuuccugcccgg

SEQ ID NO: 1486289 - RNA, 19 nt, Artificial Sequence
  Description of Artificial Sequence: Synthetic oligonucleotide
agcauccugagacaaaggu

SEQ ID NO: 1486290 - RNA, 19 nt, Artificial Sequence
  Description of Artificial Sequence: Synthetic oligonucleotide
ugcauuggcauaaguuuug

SEQ ID NO: 1486291 - RNA, 19 nt, Artificial Sequence
  Description of Artificial Sequence: Synthetic oligonucleotide
uaaggcgauguacauaaau

SEQ ID NO: 1486292 - RNA, 19 nt, Artificial Sequence
  Description of Artificial Sequence: Synthetic oligonucleotide
uuauggguugauuccuucc

SEQ ID NO: 1486293 - RNA, 19 nt, Artificial Sequence
  Description of Artificial Sequence: Synthetic oligonucleotide
cuguuugccuucuuugggg

SEQ ID NO: 1486294 - RNA, 19 nt, Artificial Sequence
  Description of Artificial Sequence: Synthetic oligonucleotide
acuagucgaaacuucuugu

SEQ ID NO: 1486295 - RNA, 19 nt, Artificial Sequence
  Description of Artificial Sequence: Synthetic oligonucleotide
uugaagaugaacagucaua

SEQ ID NO: 1486296 - RNA, 19 nt, Artificial Sequence
  Description of Artificial Sequence: Synthetic oligonucleotide
uuagcauacaugccauccu

SEQ ID NO: 1486297 - RNA, 19 nt, Artificial Sequence
  Description of Artificial Sequence: Synthetic oligonucleotide
uuucggagugauaaacgcu

SEQ ID NO: 1486298 - RNA, 19 nt, Artificial Sequence
  Description of Artificial Sequence: Synthetic oligonucleotide
acuaaauccauagcuccuc

SEQ ID NO: 1486299 - RNA, 19 nt, Artificial Sequence
  Description of Artificial Sequence: Synthetic oligonucleotide
uuagggugcagagacauuc

SEQ ID NO: 1486300 - RNA, 19 nt, Artificial Sequence
  Description of Artificial Sequence: Synthetic oligonucleotide
cuaacauuguuagauugac

SEQ ID NO: 1486301 - RNA, 19 nt, Artificial Sequence
  Description of Artificial Sequence: Synthetic oligonucleotide
uccuucuuguaccaggguc

SEQ ID NO: 1486302 - RNA, 19 nt, Artificial Sequence
  Description of Artificial Sequence: Synthetic oligonucleotide
agucgaaacuucuuguuaa

SEQ ID NO: 1486303 - RNA, 19 nt, Artificial Sequence
  Description of Artificial Sequence: Synthetic oligonucleotide
aaauaaagugcugaccguu

SEQ ID NO: 1486304 - RNA, 19 nt, Artificial Sequence
  Description of Artificial Sequence: Synthetic oligonucleotide
uauccuauuuggccuauaa

SEQ ID NO: 1486305 - RNA, 19 nt, Artificial Sequence
  Description of Artificial Sequence: Synthetic oligonucleotide
caaaugauccaaugucuac

SEQ ID NO: 1486306 - RNA, 19 nt, Artificial Sequence
  Description of Artificial Sequence: Synthetic oligonucleotide
aaacacacccuuuucugua

SEQ ID NO: 1486307 - RNA, 19 nt, Artificial Sequence
  Description of Artificial Sequence: Synthetic oligonucleotide
augcgauugacacacugcu

SEQ ID NO: 1486308 - RNA, 19 nt, Artificial Sequence
  Description of Artificial Sequence: Synthetic oligonucleotide
uagaagagaacuagucgaa

SEQ ID NO: 1486309 - RNA, 19 nt, Artificial Sequence
  Description of Artificial Sequence: Synthetic oligonucleotide
uugugugcauuucccuugg

SEQ ID NO: 1486310 - RNA, 19 nt, Artificial Sequence
  Description of Artificial Sequence: Synthetic oligonucleotide
aaggucuacuccauacuuc

SEQ ID NO: 1486311 - RNA, 19 nt, Artificial Sequence
  Description of Artificial Sequence: Synthetic oligonucleotide
ucccuauacccaaauuagc

SEQ ID NO: 1486312 - RNA, 19 nt, Artificial Sequence
  Description of Artificial Sequence: Synthetic oligonucleotide
ugcgaaugauucaucgcug

SEQ ID NO: 1486313 - RNA, 19 nt, Artificial Sequence
  Description of Artificial Sequence: Synthetic oligonucleotide
uuucacuuugaagaugaac

SEQ ID NO: 1486314 - RNA, 19 nt, Artificial Sequence
  Description of Artificial Sequence: Synthetic oligonucleotide
aucccuauacccaaauuag

SEQ ID NO: 1486315 - RNA, 19 nt, Artificial Sequence
  Description of Artificial Sequence: Synthetic oligonucleotide
ugugauugcuuccuccaaa

SEQ ID NO: 1486316 - RNA, 19 nt, Artificial Sequence
  Description of Artificial Sequence: Synthetic oligonucleotide
uuuuggaacuggauacuaa

SEQ ID NO: 1486317 - RNA, 19 nt, Artificial Sequence
  Description of Artificial Sequence: Synthetic oligonucleotide
uggacccaaacccaagacu

SEQ ID NO: 1486318 - RNA, 19 nt, Artificial Sequence
  Description of Artificial Sequence: Synthetic oligonucleotide
gucaucaacagucaggccu

SEQ ID NO: 1486319 - RNA, 19 nt, Artificial Sequence
  Description of Artificial Sequence: Synthetic oligonucleotide
aucgcuggagaagaaagag

SEQ ID NO: 1486320 - RNA, 19 nt, Artificial Sequence
  Description of Artificial Sequence: Synthetic oligonucleotide
gauucaucgcuggagaaga

SEQ ID NO: 1486321 - RNA, 19 nt, Artificial Sequence
  Description of Artificial Sequence: Synthetic oligonucleotide
auacuucaaguugaaaucu

SEQ ID NO: 1486322 - RNA, 19 nt, Artificial Sequence
  Description of Artificial Sequence: Synthetic oligonucleotide
auccuauuuggccuauaag

SEQ ID NO: 1486323 - RNA, 19 nt, Artificial Sequence
  Description of Artificial Sequence: Synthetic oligonucleotide
uuggaauguggauaucuuc

SEQ ID NO: 1486324 - RNA, 19 nt, Artificial Sequence
  Description of Artificial Sequence: Synthetic oligonucleotide
aacucccucaccucucgug

SEQ ID NO: 1486325 - RNA, 19 nt, Artificial Sequence
  Description of Artificial Sequence: Synthetic oligonucleotide
uaaauccauagcuccuccc

SEQ ID NO: 1486326 - RNA, 19 nt, Artificial Sequence
  Description of Artificial Sequence: Synthetic oligonucleotide
cuaaauccauagcuccucc

SEQ ID NO: 1486327 - RNA, 19 nt, Artificial Sequence
  Description of Artificial Sequence: Synthetic oligonucleotide
uugaugauccgcucccuga

SEQ ID NO: 1486328 - RNA, 19 nt, Artificial Sequence
  Description of Artificial Sequence: Synthetic oligonucleotide
gugauaaacgcucaauucu

SEQ ID NO: 1486329 - RNA, 19 nt, Artificial Sequence
  Description of Artificial Sequence: Synthetic oligonucleotide
guaccagggucccauaccc

SEQ ID NO: 1486330 - RNA, 19 nt, Artificial Sequence
  Description of Artificial Sequence: Synthetic oligonucleotide
ugauuacugacacccuuuc

SEQ ID NO: 1486331 - RNA, 19 nt, Artificial Sequence
  Description of Artificial Sequence: Synthetic oligonucleotide
ugacacacugcuuucccgu

SEQ ID NO: 1486332 - RNA, 19 nt, Artificial Sequence
  Description of Artificial Sequence: Synthetic oligonucleotide
aaugcuccauggugaccac

SEQ ID NO: 1486333 - RNA, 19 nt, Artificial Sequence
  Description of Artificial Sequence: Synthetic oligonucleotide
cauccugagacaaaggucu

SEQ ID NO: 1486334 - RNA, 19 nt, Artificial Sequence
  Description of Artificial Sequence: Synthetic oligonucleotide
cuggcuuuagggugcagag

SEQ ID NO: 1486335 - RNA, 19 nt, Artificial Sequence
  Description of Artificial Sequence: Synthetic oligonucleotide
uacccaaauuagcauacau

SEQ ID NO: 1486336 - RNA, 19 nt, Artificial Sequence
  Description of Artificial Sequence: Synthetic oligonucleotide
cauggugaccaccacuuug

SEQ ID NO: 1486337 - RNA, 19 nt, Artificial Sequence
  Description of Artificial Sequence: Synthetic oligonucleotide
uagucgaaacuucuuguua

SEQ ID NO: 1486338 - RNA, 19 nt, Artificial Sequence
  Description of Artificial Sequence: Synthetic oligonucleotide
aaacuugcauugcuccuaa

SEQ ID NO: 1486339 - RNA, 19 nt, Artificial Sequence
  Description of Artificial Sequence: Synthetic oligonucleotide
ugaugauccgcucccugac

SEQ ID NO: 1486340 - RNA, 19 nt, Artificial Sequence
  Description of Artificial Sequence: Synthetic oligonucleotide
ggauacuaaauccauagcu

SEQ ID NO: 1486341 - RNA, 19 nt, Artificial Sequence
  Description of Artificial Sequence: Synthetic oligonucleotide
uccacgucaaacacacccu

SEQ ID NO: 1486342 - RNA, 19 nt, Artificial Sequence
  Description of Artificial Sequence: Synthetic oligonucleotide
auauuuggacugaugaagu

SEQ ID NO: 1486343 - RNA, 19 nt, Artificial Sequence
  Description of Artificial Sequence: Synthetic oligonucleotide
uugggguauccuauuuggc

SEQ ID NO: 1486344 - RNA, 19 nt, Artificial Sequence
  Description of Artificial Sequence: Synthetic oligonucleotide
gguaucauccaguuggcca

SEQ ID NO: 1486345 - RNA, 19 nt, Artificial Sequence
  Description of Artificial Sequence: Synthetic oligonucleotide
agaacuagucgaaacuucu

SEQ ID NO: 1486346 - RNA, 19 nt, Artificial Sequence
  Description of Artificial Sequence: Synthetic oligonucleotide
aucauugcgaaugauucau

SEQ ID NO: 1486347 - RNA, 19 nt, Artificial Sequence
  Description of Artificial Sequence: Synthetic oligonucleotide
guacauaaaucuuuggaau

SEQ ID NO: 1486348 - RNA, 19 nt, Artificial Sequence
  Description of Artificial Sequence: Synthetic oligonucleotide
ucaucaacagucaggccuu

SEQ ID NO: 1486349 - RNA, 19 nt, Artificial Sequence
  Description of Artificial Sequence: Synthetic oligonucleotide
uccugugauugcuuccucc

SEQ ID NO: 1486350 - RNA, 19 nt, Artificial Sequence
  Description of Artificial Sequence: Synthetic oligonucleotide
cuuugggguauccuauuug

SEQ ID NO: 1486351 - RNA, 19 nt, Artificial Sequence
  Description of Artificial Sequence: Synthetic oligonucleotide
uccuuucggagugauaaac

SEQ ID NO: 1486352 - RNA, 19 nt, Artificial Sequence
  Description of Artificial Sequence: Synthetic oligonucleotide
uguuugccuucuuuggggu

SEQ ID NO: 1486353 - RNA, 19 nt, Artificial Sequence
  Description of Artificial Sequence: Synthetic oligonucleotide
gaacuggauacuaaaucca

SEQ ID NO: 1486354 - RNA, 19 nt, Artificial Sequence
  Description of Artificial Sequence: Synthetic oligonucleotide
aguauucugccuaaucaca

SEQ ID NO: 1486355 - RNA, 19 nt, Artificial Sequence
  Description of Artificial Sequence: Synthetic oligonucleotide
gaacagucauauuuggacu

SEQ ID NO: 1486356 - RNA, 19 nt, Artificial Sequence
  Description of Artificial Sequence: Synthetic oligonucleotide
uggggcaaaugauccaaug

SEQ ID NO: 1486357 - RNA, 19 nt, Artificial Sequence
  Description of Artificial Sequence: Synthetic oligonucleotide
uccauagcuccucccauuc

SEQ ID NO: 1486358 - RNA, 19 nt, Artificial Sequence
  Description of Artificial Sequence: Synthetic oligonucleotide
cuuccuuucggagugauaa

SEQ ID NO: 1486359 - RNA, 19 nt, Artificial Sequence
  Description of Artificial Sequence: Synthetic oligonucleotide
aguugcuggccaaaagagg

SEQ ID NO: 1486360 - RNA, 19 nt, Artificial Sequence
  Description of Artificial Sequence: Synthetic oligonucleotide
accucucguggcuugcugg

SEQ ID NO: 1486361 - RNA, 19 nt, Artificial Sequence
  Description of Artificial Sequence: Synthetic oligonucleotide
auacauaguuuugauuacu

SEQ ID NO: 1486362 - RNA, 19 nt, Artificial Sequence
  Description of Artificial Sequence: Synthetic oligonucleotide
acuccauacuucaaguuga

SEQ ID NO: 1486363 - RNA, 19 nt, Artificial Sequence
  Description of Artificial Sequence: Synthetic oligonucleotide
ucugcuuuccaagcuuuca

SEQ ID NO: 1486364 - RNA, 19 nt, Artificial Sequence
  Description of Artificial Sequence: Synthetic oligonucleotide
auaaacgcucaauucuuuu

SEQ ID NO: 1486365 - RNA, 19 nt, Artificial Sequence
  Description of Artificial Sequence: Synthetic oligonucleotide
aacuggauacuaaauccau

SEQ ID NO: 1486366 - RNA, 19 nt, Artificial Sequence
  Description of Artificial Sequence: Synthetic oligonucleotide
gaaaucugcugcauuggca

SEQ ID NO: 1486367 - RNA, 19 nt, Artificial Sequence
  Description of Artificial Sequence: Synthetic oligonucleotide
aaacuccagagccgcccuc

SEQ ID NO: 1486368 - RNA, 19 nt, Artificial Sequence
  Description of Artificial Sequence: Synthetic oligonucleotide
cagauuuggcuuuuccauc

SEQ ID NO: 1486369 - RNA, 19 nt, Artificial Sequence
  Description of Artificial Sequence: Synthetic oligonucleotide
gaccguuaaacucccucac

SEQ ID NO: 1486370 - RNA, 19 nt, Artificial Sequence
  Description of Artificial Sequence: Synthetic oligonucleotide
ucccuuuauaaggcgaugu

SEQ ID NO: 1486371 - RNA, 19 nt, Artificial Sequence
  Description of Artificial Sequence: Synthetic oligonucleotide
uggcauaaguuuuggugaa

SEQ ID NO: 1486372 - RNA, 19 nt, Artificial Sequence
  Description of Artificial Sequence: Synthetic oligonucleotide
uucugccuaaucacaaauu

SEQ ID NO: 1486373 - RNA, 19 nt, Artificial Sequence
  Description of Artificial Sequence: Synthetic oligonucleotide
ucggagugauaaacgcuca

SEQ ID NO: 1486374 - RNA, 19 nt, Artificial Sequence
  Description of Artificial Sequence: Synthetic oligonucleotide
uuauaaggcgauguacaua

SEQ ID NO: 1486375 - RNA, 19 nt, Artificial Sequence
  Description of Artificial Sequence: Synthetic oligonucleotide
ucuugcacuuuuccugaaa

SEQ ID NO: 1486376 - RNA, 19 nt, Artificial Sequence
  Description of Artificial Sequence: Synthetic oligonucleotide
ccucuaaucauugcgaaug

SEQ ID NO: 1486377 - RNA, 19 nt, Artificial Sequence
  Description of Artificial Sequence: Synthetic oligonucleotide
cugaccguuaaacucccuc

SEQ ID NO: 1486378 - RNA, 19 nt, Artificial Sequence
  Description of Artificial Sequence: Synthetic oligonucleotide
uuuggccuauaagaagugu

SEQ ID NO: 1486379 - RNA, 19 nt, Artificial Sequence
  Description of Artificial Sequence: Synthetic oligonucleotide
agagaacuagucgaaacuu

SEQ ID NO: 1486380 - RNA, 19 nt, Artificial Sequence
  Description of Artificial Sequence: Synthetic oligonucleotide
gagaacuagucgaaacuuc

SEQ ID NO: 1486381 - RNA, 19 nt, Artificial Sequence
  Description of Artificial Sequence: Synthetic oligonucleotide
ucguguuuuagaggguaug

SEQ ID NO: 1486382 - RNA, 19 nt, Artificial Sequence
  Description of Artificial Sequence: Synthetic oligonucleotide
cuccuggaagaacaguaac

SEQ ID NO: 1486383 - RNA, 19 nt, Artificial Sequence
  Description of Artificial Sequence: Synthetic oligonucleotide
ccuuucggagugauaaacg

SEQ ID NO: 1486384 - RNA, 19 nt, Artificial Sequence
  Description of Artificial Sequence: Synthetic oligonucleotide
agguaucauccaguuggcc

SEQ ID NO: 1486385 - RNA, 19 nt, Artificial Sequence
  Description of Artificial Sequence: Synthetic oligonucleotide
acgcucaauucuuuucuca

SEQ ID NO: 1486386 - RNA, 19 nt, Artificial Sequence
  Description of Artificial Sequence: Synthetic oligonucleotide
gcgaaugauucaucgcugg

SEQ ID NO: 1486387 - RNA, 19 nt, Artificial Sequence
  Description of Artificial Sequence: Synthetic oligonucleotide
cugccuaaucacaaauuca

SEQ ID NO: 1486388 - RNA, 19 nt, Artificial Sequence
  Description of Artificial Sequence: Synthetic oligonucleotide
agacaaccaagcuguccag

SEQ ID NO: 1486389 - RNA, 19 nt, Artificial Sequence
  Description of Artificial Sequence: Synthetic oligonucleotide
acgucaaacacacccuuuu

SEQ ID NO: 1486390 - RNA, 19 nt, Artificial Sequence
  Description of Artificial Sequence: Synthetic oligonucleotide
aucuuagcauccugagaca

SEQ ID NO: 1486391 - RNA, 19 nt, Artificial Sequence
  Description of Artificial Sequence: Synthetic oligonucleotide
cagcuuugcacauuggcaa

SEQ ID NO: 1486392 - RNA, 19 nt, Artificial Sequence
  Description of Artificial Sequence: Synthetic oligonucleotide
uggcuacacaaauccagaa

SEQ ID NO: 1486393 - RNA, 19 nt, Artificial Sequence
  Description of Artificial Sequence: Synthetic oligonucleotide
cagcuucguguuuuagagg

SEQ ID NO: 1486394 - RNA, 19 nt, Artificial Sequence
  Description of Artificial Sequence: Synthetic oligonucleotide
cugagacaaaggucuacuc

SEQ ID NO: 1486395 - RNA, 19 nt, Artificial Sequence
  Description of Artificial Sequence: Synthetic oligonucleotide
uucguguuuuagaggguau

SEQ ID NO: 1486396 - RNA, 19 nt, Artificial Sequence
  Description of Artificial Sequence: Synthetic oligonucleotide
cagguaucauccaguuggc

SEQ ID NO: 1486397 - RNA, 19 nt, Artificial Sequence
  Description of Artificial Sequence: Synthetic oligonucleotide
gaacagucuauggcuacac

SEQ ID NO: 1486398 - RNA, 19 nt, Artificial Sequence
  Description of Artificial Sequence: Synthetic oligonucleotide
gagugauaaacgcucaauu

SEQ ID NO: 1486399 - RNA, 19 nt, Artificial Sequence
  Description of Artificial Sequence: Synthetic oligonucleotide
uucccuuggcagaaugcuc

SEQ ID NO: 1486400 - RNA, 19 nt, Artificial Sequence
  Description of Artificial Sequence: Synthetic oligonucleotide
ggugcucuucuuuauguca

SEQ ID NO: 1486401 - RNA, 19 nt, Artificial Sequence
  Description of Artificial Sequence: Synthetic oligonucleotide
ucuaaucauugcgaaugau

SEQ ID NO: 1486402 - RNA, 19 nt, Artificial Sequence
  Description of Artificial Sequence: Synthetic oligonucleotide
auacuagaagagaacuagu

SEQ ID NO: 1486403 - RNA, 19 nt, Artificial Sequence
  Description of Artificial Sequence: Synthetic oligonucleotide
ucgaaacuucuuguuaaau

SEQ ID NO: 1486404 - RNA, 19 nt, Artificial Sequence
  Description of Artificial Sequence: Synthetic oligonucleotide
cuaaucauugcgaaugauu

SEQ ID NO: 1486405 - RNA, 19 nt, Artificial Sequence
  Description of Artificial Sequence: Synthetic oligonucleotide
ucucguggcuugcuggcaa

SEQ ID NO: 1486406 - RNA, 19 nt, Artificial Sequence
  Description of Artificial Sequence: Synthetic oligonucleotide
gugugcauuucccuuggca

SEQ ID NO: 1486407 - RNA, 19 nt, Artificial Sequence
  Description of Artificial Sequence: Synthetic oligonucleotide
uucccgucagugguaaugu

SEQ ID NO: 1486408 - RNA, 19 nt, Artificial Sequence
  Description of Artificial Sequence: Synthetic oligonucleotide
uuagaggguauggacccaa

SEQ ID NO: 1486409 - RNA, 19 nt, Artificial Sequence
  Description of Artificial Sequence: Synthetic oligonucleotide
uggcagaaugcuccauggu

SEQ ID NO: 1486410 - RNA, 19 nt, Artificial Sequence
  Description of Artificial Sequence: Synthetic oligonucleotide
ugcuccuaacauuguuaga

SEQ ID NO: 1486411 - RNA, 19 nt, Artificial Sequence
  Description of Artificial Sequence: Synthetic oligonucleotide
cagucuauggcuacacaaa

SEQ ID NO: 1486412 - RNA, 19 nt, Artificial Sequence
  Description of Artificial Sequence: Synthetic oligonucleotide
agucauauuuggacugaug

SEQ ID NO: 1486413 - RNA, 19 nt, Artificial Sequence
  Description of Artificial Sequence: Synthetic oligonucleotide
uuguauuuuauggguugau

SEQ ID NO: 1486414 - RNA, 19 nt, Artificial Sequence
  Description of Artificial Sequence: Synthetic oligonucleotide
auggcuacacaaauccaga

SEQ ID NO: 1486415 - RNA, 19 nt, Artificial Sequence
  Description of Artificial Sequence: Synthetic oligonucleotide
gacauuccuguuugccuuc

SEQ ID NO: 1486416 - RNA, 19 nt, Artificial Sequence
  Description of Artificial Sequence: Synthetic oligonucleotide
uuuagaggguauggaccca

SEQ ID NO: 1486417 - RNA, 19 nt, Artificial Sequence
  Description of Artificial Sequence: Synthetic oligonucleotide
agaacagucuauggcuaca

SEQ ID NO: 1486418 - RNA, 19 nt, Artificial Sequence
  Description of Artificial Sequence: Synthetic oligonucleotide
uggccaggucaccauauuu

SEQ ID NO: 1486419 - RNA, 19 nt, Artificial Sequence
  Description of Artificial Sequence: Synthetic oligonucleotide
ccuauuuggccuauaagaa

SEQ ID NO: 1486420 - RNA, 19 nt, Artificial Sequence
  Description of Artificial Sequence: Synthetic oligonucleotide
aaacucccucaccucucgu

SEQ ID NO: 1486421 - RNA, 19 nt, Artificial Sequence
  Description of Artificial Sequence: Synthetic oligonucleotide
auuuggccuauaagaagug

SEQ ID NO: 1486422 - RNA, 19 nt, Artificial Sequence
  Description of Artificial Sequence: Synthetic oligonucleotide
acagucauauuuggacuga

SEQ ID NO: 1486423 - RNA, 19 nt, Artificial Sequence
  Description of Artificial Sequence: Synthetic oligonucleotide
cccuauacccaaauuagca

SEQ ID NO: 1486424 - RNA, 19 nt, Artificial Sequence
  Description of Artificial Sequence: Synthetic oligonucleotide
caccauuuucccagguauc

SEQ ID NO: 1486425 - RNA, 19 nt, Artificial Sequence
  Description of Artificial Sequence: Synthetic oligonucleotide
ugugugcauuucccuuggc

SEQ ID NO: 1486426 - RNA, 19 nt, Artificial Sequence
  Description of Artificial Sequence: Synthetic oligonucleotide
guauucugccuaaucacaa

SEQ ID NO: 1486427 - RNA, 19 nt, Artificial Sequence
  Description of Artificial Sequence: Synthetic oligonucleotide
ccagagcucaaucaguguc

SEQ ID NO: 1486428 - RNA, 19 nt, Artificial Sequence
  Description of Artificial Sequence: Synthetic oligonucleotide
guauggacccaaacccaag

SEQ ID NO: 1486429 - RNA, 19 nt, Artificial Sequence
  Description of Artificial Sequence: Synthetic oligonucleotide
cucuaaucauugcgaauga

SEQ ID NO: 1486430 - RNA, 19 nt, Artificial Sequence
  Description of Artificial Sequence: Synthetic oligonucleotide
uccugagacaaaggucuac

SEQ ID NO: 1486431 - RNA, 19 nt, Artificial Sequence
  Description of Artificial Sequence: Synthetic oligonucleotide
cauaaguuuuggugaaacu

SEQ ID NO: 1486432 - RNA, 19 nt, Artificial Sequence
  Description of Artificial Sequence: Synthetic oligonucleotide
uuccuuucggagugauaaa

SEQ ID NO: 1486433 - RNA, 19 nt, Artificial Sequence
  Description of Artificial Sequence: Synthetic oligonucleotide
caccaaagcaaaaucuccu

SEQ ID NO: 1486434 - RNA, 19 nt, Artificial Sequence
  Description of Artificial Sequence: Synthetic oligonucleotide
ccuaaucacaaauucauau

SEQ ID NO: 1486435 - RNA, 19 nt, Artificial Sequence
  Description of Artificial Sequence: Synthetic oligonucleotide
ccauacuucaaguugaaau

SEQ ID NO: 1486436 - RNA, 19 nt, Artificial Sequence
  Description of Artificial Sequence: Synthetic oligonucleotide
caugauuuugugugcauuu

SEQ ID NO: 1486437 - RNA, 19 nt, Artificial Sequence
  Description of Artificial Sequence: Synthetic oligonucleotide
caccacuuugguuuuggaa

SEQ ID NO: 1486438 - RNA, 19 nt, Artificial Sequence
  Description of Artificial Sequence: Synthetic oligonucleotide
gaggcuccuggaagaacag

SEQ ID NO: 1486439 - RNA, 19 nt, Artificial Sequence
  Description of Artificial Sequence: Synthetic oligonucleotide
gucgaaacuucuuguuaaa

SEQ ID NO: 1486440 - RNA, 19 nt, Artificial Sequence
  Description of Artificial Sequence: Synthetic oligonucleotide
agagaacagucuauggcua

SEQ ID NO: 1486441 - RNA, 19 nt, Artificial Sequence
  Description of Artificial Sequence: Synthetic oligonucleotide
uaccagggucccauacccu

SEQ ID NO: 1486442 - RNA, 19 nt, Artificial Sequence
  Description of Artificial Sequence: Synthetic oligonucleotide
auggguugauuccuuccuu

SEQ ID NO: 1486443 - RNA, 19 nt, Artificial Sequence
  Description of Artificial Sequence: Synthetic oligonucleotide
cguguuuuagaggguaugg

SEQ ID NO: 1486444 - RNA, 19 nt, Artificial Sequence
  Description of Artificial Sequence: Synthetic oligonucleotide
gcauuggcauaaguuuugg

SEQ ID NO: 1486445 - RNA, 19 nt, Artificial Sequence
  Description of Artificial Sequence: Synthetic oligonucleotide
acccaagacuccauuuuca

SEQ ID NO: 1486446 - RNA, 19 nt, Artificial Sequence
  Description of Artificial Sequence: Synthetic oligonucleotide
ccaggcuuaccagauuugg

SEQ ID NO: 1486447 - RNA, 19 nt, Artificial Sequence
  Description of Artificial Sequence: Synthetic oligonucleotide
cccgucagugguaauguac

SEQ ID NO: 1486448 - RNA, 19 nt, Artificial Sequence
  Description of Artificial Sequence: Synthetic oligonucleotide
ggcuacacaaauccagaaa

SEQ ID NO: 1486449 - RNA, 19 nt, Artificial Sequence
  Description of Artificial Sequence: Synthetic oligonucleotide
uagaggguauggacccaaa

SEQ ID NO: 1486450 - RNA, 19 nt, Artificial Sequence
  Description of Artificial Sequence: Synthetic oligonucleotide
auacccaaauuagcauaca

SEQ ID NO: 1486451 - RNA, 19 nt, Artificial Sequence
  Description of Artificial Sequence: Synthetic oligonucleotide
acuggauacuaaauccaua

SEQ ID NO: 1486452 - RNA, 19 nt, Artificial Sequence
  Description of Artificial Sequence: Synthetic oligonucleotide
gauccgcucccugacaucu

SEQ ID NO: 1486453 - RNA, 19 nt, Artificial Sequence
  Description of Artificial Sequence: Synthetic oligonucleotide
guuuuggaacuggauacua

SEQ ID NO: 1486454 - RNA, 19 nt, Artificial Sequence
  Description of Artificial Sequence: Synthetic oligonucleotide
cugacacccuuucaauuaa

SEQ ID NO: 1486455 - RNA, 19 nt, Artificial Sequence
  Description of Artificial Sequence: Synthetic oligonucleotide
caaaggucuacuccauacu

SEQ ID NO: 1486456 - RNA, 19 nt, Artificial Sequence
  Description of Artificial Sequence: Synthetic oligonucleotide
gcuccuaacauuguuagau

SEQ ID NO: 1486457 - RNA, 19 nt, Artificial Sequence
  Description of Artificial Sequence: Synthetic oligonucleotide
caaaagagguaucccuaua

SEQ ID NO: 1486458 - RNA, 19 nt, Artificial Sequence
  Description of Artificial Sequence: Synthetic oligonucleotide
gggguauccuauuuggccu

SEQ ID NO: 1486459 - RNA, 19 nt, Artificial Sequence
  Description of Artificial Sequence: Synthetic oligonucleotide
ggccaaaagagguaucccu

SEQ ID NO: 1486460 - RNA, 19 nt, Artificial Sequence
  Description of Artificial Sequence: Synthetic oligonucleotide
ucuuuggaauguggauauc

SEQ ID NO: 1486461 - RNA, 19 nt, Artificial Sequence
  Description of Artificial Sequence: Synthetic oligonucleotide
gcagacaaccaagcugucc

SEQ ID NO: 1486462 - RNA, 19 nt, Artificial Sequence
  Description of Artificial Sequence: Synthetic oligonucleotide
gcauccugagacaaagguc

SEQ ID NO: 1486463 - RNA, 19 nt, Artificial Sequence
  Description of Artificial Sequence: Synthetic oligonucleotide
aucacguuuccugcccggu

SEQ ID NO: 1486464 - RNA, 19 nt, Artificial Sequence
  Description of Artificial Sequence: Synthetic oligonucleotide
gauaaacgcucaauucuuu

SEQ ID NO: 1486465 - RNA, 19 nt, Artificial Sequence
  Description of Artificial Sequence: Synthetic oligonucleotide
ccgucagugguaauguaca

SEQ ID NO: 1486466 - RNA, 19 nt, Artificial Sequence
  Description of Artificial Sequence: Synthetic oligonucleotide
gacacccuuucaauuaaau

SEQ ID NO: 1486467 - RNA, 19 nt, Artificial Sequence
  Description of Artificial Sequence: Synthetic oligonucleotide
gcgauugacacacugcuuu

SEQ ID NO: 1486468 - RNA, 19 nt, Artificial Sequence
  Description of Artificial Sequence: Synthetic oligonucleotide
gcaaaugauccaaugucua

SEQ ID NO: 1486469 - RNA, 19 nt, Artificial Sequence
  Description of Artificial Sequence: Synthetic oligonucleotide
gguauggacccaaacccaa

SEQ ID NO: 1486470 - RNA, 19 nt, Artificial Sequence
  Description of Artificial Sequence: Synthetic oligonucleotide
caaacccaagacuccauuu

SEQ ID NO: 1486471 - RNA, 19 nt, Artificial Sequence
  Description of Artificial Sequence: Synthetic oligonucleotide
ccucucguggcuugcuggc

SEQ ID NO: 1486472 - RNA, 19 nt, Artificial Sequence
  Description of Artificial Sequence: Synthetic oligonucleotide
caccucucguggcuugcug

SEQ ID NO: 1486473 - RNA, 19 nt, Artificial Sequence
  Description of Artificial Sequence: Synthetic oligonucleotide
ggccuauaagaagugugga

SEQ ID NO: 1486474 - RNA, 19 nt, Artificial Sequence
  Description of Artificial Sequence: Synthetic oligonucleotide
ucaccucucguggcuugcu

SEQ ID NO: 1486475 - RNA, 19 nt, Artificial Sequence
  Description of Artificial Sequence: Synthetic oligonucleotide
gccggugcucuucuuuaug

SEQ ID NO: 1486476 - RNA, 19 nt, Artificial Sequence
  Description of Artificial Sequence: Synthetic oligonucleotide
gaacuagucgaaacuucuu

SEQ ID NO: 1486477 - RNA, 19 nt, Artificial Sequence
  Description of Artificial Sequence: Synthetic oligonucleotide
cguuaaacucccucaccuc

SEQ ID NO: 1486478 - RNA, 19 nt, Artificial Sequence
  Description of Artificial Sequence: Synthetic oligonucleotide
cauugcuccuaacauuguu

SEQ ID NO: 1486479 - RNA, 19 nt, Artificial Sequence
  Description of Artificial Sequence: Synthetic oligonucleotide
auaaugcgauugacacacu

SEQ ID NO: 1486480 - RNA, 19 nt, Artificial Sequence
  Description of Artificial Sequence: Synthetic oligonucleotide
ggccaggucaccauauuua

SEQ ID NO: 1486481 - RNA, 19 nt, Artificial Sequence
  Description of Artificial Sequence: Synthetic oligonucleotide
ccuauacccaaauuagcau

SEQ ID NO: 1486482 - RNA, 19 nt, Artificial Sequence
  Description of Artificial Sequence: Synthetic oligonucleotide
guaucccuauacccaaauu

SEQ ID NO: 1486483 - RNA, 19 nt, Artificial Sequence
  Description of Artificial Sequence: Synthetic oligonucleotide
gguaucccuauacccaaau

SEQ ID NO: 1486484 - RNA, 19 nt, Artificial Sequence
  Description of Artificial Sequence: Synthetic oligonucleotide
ccguuaaacucccucaccu

SEQ ID NO: 1486485 - RNA, 19 nt, Artificial Sequence
  Description of Artificial Sequence: Synthetic oligonucleotide
auucaucgcuggagaagaa

SEQ ID NO: 1486486 - RNA, 19 nt, Artificial Sequence
  Description of Artificial Sequence: Synthetic oligonucleotide
caaacuccagagccgcccu

SEQ ID NO: 1486487 - RNA, 19 nt, Artificial Sequence
  Description of Artificial Sequence: Synthetic oligonucleotide
ggagugauaaacgcucaau

SEQ ID NO: 1486488 - RNA, 19 nt, Artificial Sequence
  Description of Artificial Sequence: Synthetic oligonucleotide
gucagugguaauguacauu

SEQ ID NO: 1486489 - RNA, 19 nt, Artificial Sequence
  Description of Artificial Sequence: Synthetic oligonucleotide
cgauugacacacugcuuuc

SEQ ID NO: 1486490 - RNA, 19 nt, Artificial Sequence
  Description of Artificial Sequence: Synthetic oligonucleotide
gcgauguacauaaaucuuu

SEQ ID NO: 1486491 - RNA, 19 nt, Artificial Sequence
  Description of Artificial Sequence: Synthetic oligonucleotide
ggguauccuauuuggccua

SEQ ID NO: 1486492 - RNA, 19 nt, Artificial Sequence
  Description of Artificial Sequence: Synthetic oligonucleotide
auaaggcgauguacauaaa

SEQ ID NO: 1486493 - RNA, 19 nt, Artificial Sequence
  Description of Artificial Sequence: Synthetic oligonucleotide
agguaucccuauacccaaa

SEQ ID NO: 1486494 - RNA, 19 nt, Artificial Sequence
  Description of Artificial Sequence: Synthetic oligonucleotide
ggcuuaccagauuuggcuu

SEQ ID NO: 1486495 - RNA, 19 nt, Artificial Sequence
  Description of Artificial Sequence: Synthetic oligonucleotide
ggcgauguacauaaaucuu

SEQ ID NO: 1486496 - RNA, 19 nt, Artificial Sequence
  Description of Artificial Sequence: Synthetic oligonucleotide
ccaagacuccauuuucacu

SEQ ID NO: 1486497 - RNA, 19 nt, Artificial Sequence
  Description of Artificial Sequence: Synthetic oligonucleotide
auccugagacaaaggucua

SEQ ID NO: 1486498 - RNA, 19 nt, Artificial Sequence
  Description of Artificial Sequence: Synthetic oligonucleotide
gguugauuccuuccuucuu

SEQ ID NO: 1486499 - RNA, 19 nt, Artificial Sequence
  Description of Artificial Sequence: Synthetic oligonucleotide
guuuccugcccggucugcu

SEQ ID NO: 1486500 - RNA, 19 nt, Artificial Sequence
  Description of Artificial Sequence: Synthetic oligonucleotide
cacgucaaacacacccuuu

SEQ ID NO: 1486501 - RNA, 19 nt, Artificial Sequence
  Description of Artificial Sequence: Synthetic oligonucleotide
cucucguggcuugcuggca

SEQ ID NO: 1486502 - RNA, 19 nt, Artificial Sequence
  Description of Artificial Sequence: Synthetic oligonucleotide
ccucaccucucguggcuug

SEQ ID NO: 1486503 - RNA, 19 nt, Artificial Sequence
  Description of Artificial Sequence: Synthetic oligonucleotide
cgaaugauucaucgcugga

SEQ ID NO: 1486504 - RNA, 19 nt, Artificial Sequence
  Description of Artificial Sequence: Synthetic oligonucleotide
ccccucuaaucauugcgaa

SEQ ID NO: 1486505 - RNA, 19 nt, Artificial Sequence
  Description of Artificial Sequence: Synthetic oligonucleotide
cuuaccagauuuggcuuuu

SEQ ID NO: 1486506 - RNA, 19 nt, Artificial Sequence
  Description of Artificial Sequence: Synthetic oligonucleotide
ccugagacaaaggucuacu

SEQ ID NO: 1486507 - RNA, 19 nt, Artificial Sequence
  Description of Artificial Sequence: Synthetic oligonucleotide
cggugcucuucuuuauguc

SEQ ID NO: 1486508 - RNA, 19 nt, Artificial Sequence
  Description of Artificial Sequence: Synthetic oligonucleotide
guauccuauuuggccuaua

SEQ ID NO: 1486509 - RNA, 19 nt, Artificial Sequence
  Description of Artificial Sequence: Synthetic oligonucleotide
ccggugcucuucuuuaugu

SEQ ID NO: 1486510 - RNA, 19 nt, Artificial Sequence
  Description of Artificial Sequence: Synthetic oligonucleotide
ggucuacuccauacuucaa

SEQ ID NO: 1486511 - RNA, 19 nt, Artificial Sequence
  Description of Artificial Sequence: Synthetic oligonucleotide
cgcucccugacaucuucuc

SEQ ID NO: 1486512 - RNA, 19 nt, Artificial Sequence
  Description of Artificial Sequence: Synthetic oligonucleotide
cccuuggcagaaugcucca

SEQ ID NO: 1486513 - RNA, 19 nt, Artificial Sequence
  Description of Artificial Sequence: Synthetic oligonucleotide
cccucuaaucauugcgaau

SEQ ID NO: 1486514 - RNA, 19 nt, Artificial Sequence
  Description of Artificial Sequence: Synthetic oligonucleotide
gguauccuauuuggccuau

SEQ ID NO: 1486515 - RNA, 19 nt, Artificial Sequence
  Description of Artificial Sequence: Synthetic oligonucleotide
auccgcucccugacaucuu

SEQ ID NO: 1486516 - RNA, 19 nt, Artificial Sequence
  Description of Artificial Sequence: Synthetic oligonucleotide
ccaugauuuugugugcauu

SEQ ID NO: 1486517 - RNA, 19 nt, Artificial Sequence
  Description of Artificial Sequence: Synthetic oligonucleotide
ccggucugcuuuccaagcu

SEQ ID NO: 1486518 - RNA, 19 nt, Artificial Sequence
  Description of Artificial Sequence: Synthetic oligonucleotide
gcugaccguuaaacucccu

SEQ ID NO: 1486519 - RNA, 19 nt, Artificial Sequence
  Description of Artificial Sequence: Synthetic oligonucleotide
cggucugcuuuccaagcuu

SEQ ID NO: 1486520 - RNA, 19 nt, Artificial Sequence
  Description of Artificial Sequence: Synthetic oligonucleotide
agagucaacaaucacaagc

SEQ ID NO: 1486521 - RNA, 19 nt, Artificial Sequence
  Description of Artificial Sequence: Synthetic oligonucleotide
acaauuaacaaucugaugu

SEQ ID NO: 1486522 - RNA, 19 nt, Artificial Sequence
  Description of Artificial Sequence: Synthetic oligonucleotide
caaauuauuauuauggcug

SEQ ID NO: 1486523 - RNA, 19 nt, Artificial Sequence
  Description of Artificial Sequence: Synthetic oligonucleotide
uuucauaaguuccaguggg

SEQ ID NO: 1486524 - RNA, 19 nt, Artificial Sequence
  Description of Artificial Sequence: Synthetic oligonucleotide
aaggguaguagacaggaac

SEQ ID NO: 1486525 - RNA, 19 nt, Artificial Sequence
  Description of Artificial Sequence: Synthetic oligonucleotide
uuuacugcucaucaaaagc

SEQ ID NO: 1486526 - RNA, 19 nt, Artificial Sequence
  Description of Artificial Sequence: Synthetic oligonucleotide
cuugugauaaaccuacucg

SEQ ID NO: 1486527 - RNA, 19 nt, Artificial Sequence
  Description of Artificial Sequence: Synthetic oligonucleotide
uggacaauacuuuauucgg

SEQ ID NO: 1486528 - RNA, 19 nt, Artificial Sequence
  Description of Artificial Sequence: Synthetic oligonucleotide
aucuuuauaucauaggcug

SEQ ID NO: 1486529 - RNA, 19 nt, Artificial Sequence
  Description of Artificial Sequence: Synthetic oligonucleotide
acaguuaccaucucaacag

SEQ ID NO: 1486530 - RNA, 19 nt, Artificial Sequence
  Description of Artificial Sequence: Synthetic oligonucleotide
ugaacuuuacugcucauca

SEQ ID NO: 1486531 - RNA, 19 nt, Artificial Sequence
  Description of Artificial Sequence: Synthetic oligonucleotide
aaaauagaguggaaaacgg

SEQ ID NO: 1486532 - RNA, 19 nt, Artificial Sequence
  Description of Artificial Sequence: Synthetic oligonucleotide
aauagagucaacaaucaca

SEQ ID NO: 1486533 - RNA, 19 nt, Artificial Sequence
  Description of Artificial Sequence: Synthetic oligonucleotide
acuuucauaaguuccagug

SEQ ID NO: 1486534 - RNA, 19 nt, Artificial Sequence
  Description of Artificial Sequence: Synthetic oligonucleotide
auuaauccucauuauauug

SEQ ID NO: 1486535 - RNA, 19 nt, Artificial Sequence
  Description of Artificial Sequence: Synthetic oligonucleotide
uguguuaaaauagagugga

SEQ ID NO: 1486536 - RNA, 19 nt, Artificial Sequence
  Description of Artificial Sequence: Synthetic oligonucleotide
ucaauauacacgacagucc

SEQ ID NO: 1486537 - RNA, 19 nt, Artificial Sequence
  Description of Artificial Sequence: Synthetic oligonucleotide
aaccaauuaauccucauua

SEQ ID NO: 1486538 - RNA, 19 nt, Artificial Sequence
  Description of Artificial Sequence: Synthetic oligonucleotide
uuacaaaucuuguuagucc

SEQ ID NO: 1486539 - RNA, 19 nt, Artificial Sequence
  Description of Artificial Sequence: Synthetic oligonucleotide
cuggacaauacuuuauucg

SEQ ID NO: 1486540 - RNA, 19 nt, Artificial Sequence
  Description of Artificial Sequence: Synthetic oligonucleotide
aaauuauuauuauggcugu

SEQ ID NO: 1486541 - RNA, 19 nt, Artificial Sequence
  Description of Artificial Sequence: Synthetic oligonucleotide
aucucaacagcaaucaacc

SEQ ID NO: 1486542 - RNA, 19 nt, Artificial Sequence
  Description of Artificial Sequence: Synthetic oligonucleotide
ucuaauccucccauguugg

SEQ ID NO: 1486543 - RNA, 19 nt, Artificial Sequence
  Description of Artificial Sequence: Synthetic oligonucleotide
aucuuguuaguccuccucc

SEQ ID NO: 1486544 - RNA, 19 nt, Artificial Sequence
  Description of Artificial Sequence: Synthetic oligonucleotide
aagauucaagccuuugcag

SEQ ID NO: 1486545 - RNA, 19 nt, Artificial Sequence
  Description of Artificial Sequence: Synthetic oligonucleotide
auuacaaaucuuguuaguc

SEQ ID NO: 1486546 - RNA, 19 nt, Artificial Sequence
  Description of Artificial Sequence: Synthetic oligonucleotide
uauaucauaggcuguuugc

SEQ ID NO: 1486547 - RNA, 19 nt, Artificial Sequence
  Description of Artificial Sequence: Synthetic oligonucleotide
aaucuuguuaguccuccuc

SEQ ID NO: 1486548 - RNA, 19 nt, Artificial Sequence
  Description of Artificial Sequence: Synthetic oligonucleotide
aacaaucugaugucugcuc

SEQ ID NO: 1486549 - RNA, 19 nt, Artificial Sequence
  Description of Artificial Sequence: Synthetic oligonucleotide
auuauuauggcuguugaca

SEQ ID NO: 1486550 - RNA, 19 nt, Artificial Sequence
  Description of Artificial Sequence: Synthetic oligonucleotide
acagcaaucaaccaauuaa

SEQ ID NO: 1486551 - RNA, 19 nt, Artificial Sequence
  Description of Artificial Sequence: Synthetic oligonucleotide
uuaacaaucugaugucugc

SEQ ID NO: 1486552 - RNA, 19 nt, Artificial Sequence
  Description of Artificial Sequence: Synthetic oligonucleotide
aaaacgggauucugcaauc

SEQ ID NO: 1486553 - RNA, 19 nt, Artificial Sequence
  Description of Artificial Sequence: Synthetic oligonucleotide
caauauacacgacaguccc

SEQ ID NO: 1486554 - RNA, 19 nt, Artificial Sequence
  Description of Artificial Sequence: Synthetic oligonucleotide
uucuaauccucccauguug

SEQ ID NO: 1486555 - RNA, 19 nt, Artificial Sequence
  Description of Artificial Sequence: Synthetic oligonucleotide
auuugauucgucaagauaa

SEQ ID NO: 1486556 - RNA, 19 nt, Artificial Sequence
  Description of Artificial Sequence: Synthetic oligonucleotide
augggucguaauuugauuc

SEQ ID NO: 1486557 - RNA, 19 nt, Artificial Sequence
  Description of Artificial Sequence: Synthetic oligonucleotide
ugagucaagguacuggaga

SEQ ID NO: 1486558 - RNA, 19 nt, Artificial Sequence
  Description of Artificial Sequence: Synthetic oligonucleotide
uuauaucauaggcuguuug

SEQ ID NO: 1486559 - RNA, 19 nt, Artificial Sequence
  Description of Artificial Sequence: Synthetic oligonucleotide
aauuacaaaucuuguuagu

SEQ ID NO: 1486560 - RNA, 19 nt, Artificial Sequence
  Description of Artificial Sequence: Synthetic oligonucleotide
aauuaauccucauuauauu

SEQ ID NO: 1486561 - RNA, 19 nt, Artificial Sequence
  Description of Artificial Sequence: Synthetic oligonucleotide
aauuugauucgucaagaua

SEQ ID NO: 1486562 - RNA, 19 nt, Artificial Sequence
  Description of Artificial Sequence: Synthetic oligonucleotide
uaguagacaggaacgcugg

SEQ ID NO: 1486563 - RNA, 19 nt, Artificial Sequence
  Description of Artificial Sequence: Synthetic oligonucleotide
uacaaaucuuguuaguccu

SEQ ID NO: 1486564 - RNA, 19 nt, Artificial Sequence
  Description of Artificial Sequence: Synthetic oligonucleotide
cuagagaguggacaaaggc

SEQ ID NO: 1486565 - RNA, 19 nt, Artificial Sequence
  Description of Artificial Sequence: Synthetic oligonucleotide
aaucaucagccggagacac

SEQ ID NO: 1486566 - RNA, 19 nt, Artificial Sequence
  Description of Artificial Sequence: Synthetic oligonucleotide
cuuucauaaguuccagugg

SEQ ID NO: 1486567 - RNA, 19 nt, Artificial Sequence
  Description of Artificial Sequence: Synthetic oligonucleotide
agucuuucagcaguaaacg

SEQ ID NO: 1486568 - RNA, 19 nt, Artificial Sequence
  Description of Artificial Sequence: Synthetic oligonucleotide
ugagcgauccacaagccac

SEQ ID NO: 1486569 - RNA, 19 nt, Artificial Sequence
  Description of Artificial Sequence: Synthetic oligonucleotide
accuacucgucuuaguuuc

SEQ ID NO: 1486570 - RNA, 19 nt, Artificial Sequence
  Description of Artificial Sequence: Synthetic oligonucleotide
cuuucagcaguaaacgcag

SEQ ID NO: 1486571 - RNA, 19 nt, Artificial Sequence
  Description of Artificial Sequence: Synthetic oligonucleotide
caauguagcuaaaacacuc

SEQ ID NO: 1486572 - RNA, 19 nt, Artificial Sequence
  Description of Artificial Sequence: Synthetic oligonucleotide
augguauagaugaaggagg

SEQ ID NO: 1486573 - RNA, 19 nt, Artificial Sequence
  Description of Artificial Sequence: Synthetic oligonucleotide
aaucacaguuaccaucuca

SEQ ID NO: 1486574 - RNA, 19 nt, Artificial Sequence
  Description of Artificial Sequence: Synthetic oligonucleotide
ucgucaagauaacugggag

SEQ ID NO: 1486575 - RNA, 19 nt, Artificial Sequence
  Description of Artificial Sequence: Synthetic oligonucleotide
caaucacaagcuuaacucc

SEQ ID NO: 1486576 - RNA, 19 nt, Artificial Sequence
  Description of Artificial Sequence: Synthetic oligonucleotide
gucaagauaacugggagug

SEQ ID NO: 1486577 - RNA, 19 nt, Artificial Sequence
  Description of Artificial Sequence: Synthetic oligonucleotide
ugggucguaauuugauucg

SEQ ID NO: 1486578 - RNA, 19 nt, Artificial Sequence
  Description of Artificial Sequence: Synthetic oligonucleotide
uucccggugaagaugaacu

SEQ ID NO: 1486579 - RNA, 19 nt, Artificial Sequence
  Description of Artificial Sequence: Synthetic oligonucleotide
acucaggccagucacuuuc

SEQ ID NO: 1486580 - RNA, 19 nt, Artificial Sequence
  Description of Artificial Sequence: Synthetic oligonucleotide
uuauuauggcuguugacau

SEQ ID NO: 1486581 - RNA, 19 nt, Artificial Sequence
  Description of Artificial Sequence: Synthetic oligonucleotide
aaaccuacucgucuuaguu

SEQ ID NO: 1486582 - RNA, 19 nt, Artificial Sequence
  Description of Artificial Sequence: Synthetic oligonucleotide
cuuaguuucuuguugcuca

SEQ ID NO: 1486583 - RNA, 19 nt, Artificial Sequence
  Description of Artificial Sequence: Synthetic oligonucleotide
ucauuauauuggcuuccgg

SEQ ID NO: 1486584 - RNA, 19 nt, Artificial Sequence
  Description of Artificial Sequence: Synthetic oligonucleotide
ucgucuuaguuucuuguug

SEQ ID NO: 1486585 - RNA, 19 nt, Artificial Sequence
  Description of Artificial Sequence: Synthetic oligonucleotide
uauguaagugcaaauuauu

SEQ ID NO: 1486586 - RNA, 19 nt, Artificial Sequence
  Description of Artificial Sequence: Synthetic oligonucleotide
ucuugugauaaaccuacuc

SEQ ID NO: 1486587 - RNA, 19 nt, Artificial Sequence
  Description of Artificial Sequence: Synthetic oligonucleotide
uuuauucggaaauguuccc

SEQ ID NO: 1486588 - RNA, 19 nt, Artificial Sequence
  Description of Artificial Sequence: Synthetic oligonucleotide
caucauuauacaaaacuga

SEQ ID NO: 1486589 - RNA, 19 nt, Artificial Sequence
  Description of Artificial Sequence: Synthetic oligonucleotide
guauagaugaaggagguga

SEQ ID NO: 1486590 - RNA, 19 nt, Artificial Sequence
  Description of Artificial Sequence: Synthetic oligonucleotide
aacgggauucugcaaucuc

SEQ ID NO: 1486591 - RNA, 19 nt, Artificial Sequence
  Description of Artificial Sequence: Synthetic oligonucleotide
uucgucaagauaacuggga

SEQ ID NO: 1486592 - RNA, 19 nt, Artificial Sequence
  Description of Artificial Sequence: Synthetic oligonucleotide
ugggcaauguagcuaaaac

SEQ ID NO: 1486593 - RNA, 19 nt, Artificial Sequence
  Description of Artificial Sequence: Synthetic oligonucleotide
uuccaguggggaaagaccu

SEQ ID NO: 1486594 - RNA, 19 nt, Artificial Sequence
  Description of Artificial Sequence: Synthetic oligonucleotide
cuuuacugcucaucaaaag

SEQ ID NO: 1486595 - RNA, 19 nt, Artificial Sequence
  Description of Artificial Sequence: Synthetic oligonucleotide
ugugauaaaccuacucguc

SEQ ID NO: 1486596 - RNA, 19 nt, Artificial Sequence
  Description of Artificial Sequence: Synthetic oligonucleotide
cuaccacacagcuggaucc

SEQ ID NO: 1486597 - RNA, 19 nt, Artificial Sequence
  Description of Artificial Sequence: Synthetic oligonucleotide
agaguggaaaacgggauuc

SEQ ID NO: 1486598 - RNA, 19 nt, Artificial Sequence
  Description of Artificial Sequence: Synthetic oligonucleotide
ucauuucacaaaucacacc

SEQ ID NO: 1486599 - RNA, 19 nt, Artificial Sequence
  Description of Artificial Sequence: Synthetic oligonucleotide
agaagcaauagagucaaca

SEQ ID NO: 1486600 - RNA, 19 nt, Artificial Sequence
  Description of Artificial Sequence: Synthetic oligonucleotide
uaccccuccacaucuagag

SEQ ID NO: 1486601 - RNA, 19 nt, Artificial Sequence
  Description of Artificial Sequence: Synthetic oligonucleotide
aguaaacgcagacucggug

SEQ ID NO: 1486602 - RNA, 19 nt, Artificial Sequence
  Description of Artificial Sequence: Synthetic oligonucleotide
aagugcaaauuauuauuau

SEQ ID NO: 1486603 - RNA, 19 nt, Artificial Sequence
  Description of Artificial Sequence: Synthetic oligonucleotide
ugguauagaugaaggaggu

SEQ ID NO: 1486604 - RNA, 19 nt, Artificial Sequence
  Description of Artificial Sequence: Synthetic oligonucleotide
uauuauuauggcuguugac

SEQ ID NO: 1486605 - RNA, 19 nt, Artificial Sequence
  Description of Artificial Sequence: Synthetic oligonucleotide
gcggcuaccacacagcugg

SEQ ID NO: 1486606 - RNA, 19 nt, Artificial Sequence
  Description of Artificial Sequence: Synthetic oligonucleotide
gugucaauauacacgacag

SEQ ID NO: 1486607 - RNA, 19 nt, Artificial Sequence
  Description of Artificial Sequence: Synthetic oligonucleotide
uucagcaguaaacgcagac

SEQ ID NO: 1486608 - RNA, 19 nt, Artificial Sequence
  Description of Artificial Sequence: Synthetic oligonucleotide
uuugauucgucaagauaac

SEQ ID NO: 1486609 - RNA, 19 nt, Artificial Sequence
  Description of Artificial Sequence: Synthetic oligonucleotide
ucuuuauaucauaggcugu

SEQ ID NO: 1486610 - RNA, 19 nt, Artificial Sequence
  Description of Artificial Sequence: Synthetic oligonucleotide
auggugguaaagucccuac

SEQ ID NO: 1486611 - RNA, 19 nt, Artificial Sequence
  Description of Artificial Sequence: Synthetic oligonucleotide
auaacugggagugaaaauu

SEQ ID NO: 1486612 - RNA, 19 nt, Artificial Sequence
  Description of Artificial Sequence: Synthetic oligonucleotide
agugaaaauuccucagcca

SEQ ID NO: 1486613 - RNA, 19 nt, Artificial Sequence
  Description of Artificial Sequence: Synthetic oligonucleotide
aauguagcuaaaacacuca

SEQ ID NO: 1486614 - RNA, 19 nt, Artificial Sequence
  Description of Artificial Sequence: Synthetic oligonucleotide
accuguaaucucugugagc

SEQ ID NO: 1486615 - RNA, 19 nt, Artificial Sequence
  Description of Artificial Sequence: Synthetic oligonucleotide
acaaucugaugucugcuca

SEQ ID NO: 1486616 - RNA, 19 nt, Artificial Sequence
  Description of Artificial Sequence: Synthetic oligonucleotide
uuucugaccacagaagcaa

SEQ ID NO: 1486617 - RNA, 19 nt, Artificial Sequence
  Description of Artificial Sequence: Synthetic oligonucleotide
uccacaucuagagagugga

SEQ ID NO: 1486618 - RNA, 19 nt, Artificial Sequence
  Description of Artificial Sequence: Synthetic oligonucleotide
uauauuggcuuccgguccu

SEQ ID NO: 1486619 - RNA, 19 nt, Artificial Sequence
  Description of Artificial Sequence: Synthetic oligonucleotide
agggacaaaucaucagccg

SEQ ID NO: 1486620 - RNA, 19 nt, Artificial Sequence
  Description of Artificial Sequence: Synthetic oligonucleotide
gacagggacaaaucaucag

SEQ ID NO: 1486621 - RNA, 19 nt, Artificial Sequence
  Description of Artificial Sequence: Synthetic oligonucleotide
aggguaguagacaggaacg

SEQ ID NO: 1486622 - RNA, 19 nt, Artificial Sequence
  Description of Artificial Sequence: Synthetic oligonucleotide
ucaucagccggagacacca

SEQ ID NO: 1486623 - RNA, 19 nt, Artificial Sequence
  Description of Artificial Sequence: Synthetic oligonucleotide
gggacaaaucaucagccgg

SEQ ID NO: 1486624 - RNA, 19 nt, Artificial Sequence
  Description of Artificial Sequence: Synthetic oligonucleotide
uaaucucugugagcgaucc

SEQ ID NO: 1486625 - RNA, 19 nt, Artificial Sequence
  Description of Artificial Sequence: Synthetic oligonucleotide
gaucgaacuccuuucugac

SEQ ID NO: 1486626 - RNA, 19 nt, Artificial Sequence
  Description of Artificial Sequence: Synthetic oligonucleotide
agacucggugucaauauac

SEQ ID NO: 1486627 - RNA, 19 nt, Artificial Sequence
  Description of Artificial Sequence: Synthetic oligonucleotide
ucauaaguuccagugggga

SEQ ID NO: 1486628 - RNA, 19 nt, Artificial Sequence
  Description of Artificial Sequence: Synthetic oligonucleotide
ggugguaaagucccuaccc

SEQ ID NO: 1486629 - RNA, 19 nt, Artificial Sequence
  Description of Artificial Sequence: Synthetic oligonucleotide
aucuagagaguggacaaag

SEQ ID NO: 1486630 - RNA, 19 nt, Artificial Sequence
  Description of Artificial Sequence: Synthetic oligonucleotide
ugaggaucgaacuccuuuc

SEQ ID NO: 1486631 - RNA, 19 nt, Artificial Sequence
  Description of Artificial Sequence: Synthetic oligonucleotide
auucggaaauguucccuuc

SEQ ID NO: 1486632 - RNA, 19 nt, Artificial Sequence
  Description of Artificial Sequence: Synthetic oligonucleotide
cagcaguaaacgcagacuc

SEQ ID NO: 1486633 - RNA, 19 nt, Artificial Sequence
  Description of Artificial Sequence: Synthetic oligonucleotide
agcaaucaaccaauuaauc

SEQ ID NO: 1486634 - RNA, 19 nt, Artificial Sequence
  Description of Artificial Sequence: Synthetic oligonucleotide
ucguaauuugauucgucaa

SEQ ID NO: 1486635 - RNA, 19 nt, Artificial Sequence
  Description of Artificial Sequence: Synthetic oligonucleotide
gaaaucacaguuaccaucu

SEQ ID NO: 1486636 - RNA, 19 nt, Artificial Sequence
  Description of Artificial Sequence: Synthetic oligonucleotide
gucguaauuugauucguca

SEQ ID NO: 1486637 - RNA, 19 nt, Artificial Sequence
  Description of Artificial Sequence: Synthetic oligonucleotide
uucggaaauguucccuucu

SEQ ID NO: 1486638 - RNA, 19 nt, Artificial Sequence
  Description of Artificial Sequence: Synthetic oligonucleotide
caauuaauccucauuauau

SEQ ID NO: 1486639 - RNA, 19 nt, Artificial Sequence
  Description of Artificial Sequence: Synthetic oligonucleotide
ugauaaaccuacucgucuu

SEQ ID NO: 1486640 - RNA, 19 nt, Artificial Sequence
  Description of Artificial Sequence: Synthetic oligonucleotide
gagacaccaggucugcuug

SEQ ID NO: 1486641 - RNA, 19 nt, Artificial Sequence
  Description of Artificial Sequence: Synthetic oligonucleotide
guaguagacaggaacgcug

SEQ ID NO: 1486642 - RNA, 19 nt, Artificial Sequence
  Description of Artificial Sequence: Synthetic oligonucleotide
auaucauaggcuguuugca

SEQ ID NO: 1486643 - RNA, 19 nt, Artificial Sequence
  Description of Artificial Sequence: Synthetic oligonucleotide
aagggagggcuccacucag

SEQ ID NO: 1486644 - RNA, 19 nt, Artificial Sequence
  Description of Artificial Sequence: Synthetic oligonucleotide
gcugaccauauacagaagc

SEQ ID NO: 1486645 - RNA, 19 nt, Artificial Sequence
  Description of Artificial Sequence: Synthetic oligonucleotide
uuauucggaaauguucccu

SEQ ID NO: 1486646 - RNA, 19 nt, Artificial Sequence
  Description of Artificial Sequence: Synthetic oligonucleotide
guaauuugauucgucaaga

SEQ ID NO: 1486647 - RNA, 19 nt, Artificial Sequence
  Description of Artificial Sequence: Synthetic oligonucleotide
uguaaucucugugagcgau

SEQ ID NO: 1486648 - RNA, 19 nt, Artificial Sequence
  Description of Artificial Sequence: Synthetic oligonucleotide
ggauucugcaaucucgacc

SEQ ID NO: 1486649 - RNA, 19 nt, Artificial Sequence
  Description of Artificial Sequence: Synthetic oligonucleotide
aaaucaucagccggagaca

SEQ ID NO: 1486650 - RNA, 19 nt, Artificial Sequence
  Description of Artificial Sequence: Synthetic oligonucleotide
uaccaucucaacagcaauc

SEQ ID NO: 1486651 - RNA, 19 nt, Artificial Sequence
  Description of Artificial Sequence: Synthetic oligonucleotide
caaacggucacacagcucu

SEQ ID NO: 1486652 - RNA, 19 nt, Artificial Sequence
  Description of Artificial Sequence: Synthetic oligonucleotide
cugcugaccauauacagaa

SEQ ID NO: 1486653 - RNA, 19 nt, Artificial Sequence
  Description of Artificial Sequence: Synthetic oligonucleotide
ggugucaauauacacgaca

SEQ ID NO: 1486654 - RNA, 19 nt, Artificial Sequence
  Description of Artificial Sequence: Synthetic oligonucleotide
ucuuguuaguccuccuccu

SEQ ID NO: 1486655 - RNA, 19 nt, Artificial Sequence
  Description of Artificial Sequence: Synthetic oligonucleotide
ucugcucaaacggucacac

SEQ ID NO: 1486656 - RNA, 19 nt, Artificial Sequence
  Description of Artificial Sequence: Synthetic oligonucleotide
uccucauuauauuggcuuc

SEQ ID NO: 1486657 - RNA, 19 nt, Artificial Sequence
  Description of Artificial Sequence: Synthetic oligonucleotide
uaaacgcagacucgguguc

SEQ ID NO: 1486658 - RNA, 19 nt, Artificial Sequence
  Description of Artificial Sequence: Synthetic oligonucleotide
aucagccggguguucacac

SEQ ID NO: 1486659 - RNA, 19 nt, Artificial Sequence
  Description of Artificial Sequence: Synthetic oligonucleotide
aaccuacucgucuuaguuu

SEQ ID NO: 1486660 - RNA, 19 nt, Artificial Sequence
  Description of Artificial Sequence: Synthetic oligonucleotide
cuguugacaucccauggug

SEQ ID NO: 1486661 - RNA, 19 nt, Artificial Sequence
  Description of Artificial Sequence: Synthetic oligonucleotide
cugggagugaaaauuccuc

SEQ ID NO: 1486662 - RNA, 19 nt, Artificial Sequence
  Description of Artificial Sequence: Synthetic oligonucleotide
ugugagcgauccacaagcc

SEQ ID NO: 1486663 - RNA, 19 nt, Artificial Sequence
  Description of Artificial Sequence: Synthetic oligonucleotide
cacaguuaccaucucaaca

SEQ ID NO: 1486664 - RNA, 19 nt, Artificial Sequence
  Description of Artificial Sequence: Synthetic oligonucleotide
uggugguaaagucccuacc

SEQ ID NO: 1486665 - RNA, 19 nt, Artificial Sequence
  Description of Artificial Sequence: Synthetic oligonucleotide
accaauuaauccucauuau

SEQ ID NO: 1486666 - RNA, 19 nt, Artificial Sequence
  Description of Artificial Sequence: Synthetic oligonucleotide
caauagagucaacaaucac

SEQ ID NO: 1486667 - RNA, 19 nt, Artificial Sequence
  Description of Artificial Sequence: Synthetic oligonucleotide
uauggcuguugacauccca

SEQ ID NO: 1486668 - RNA, 19 nt, Artificial Sequence
  Description of Artificial Sequence: Synthetic oligonucleotide
acgggauucugcaaucucg

SEQ ID NO: 1486669 - RNA, 19 nt, Artificial Sequence
  Description of Artificial Sequence: Synthetic oligonucleotide
cucauuauauuggcuuccg

SEQ ID NO: 1486670 - RNA, 19 nt, Artificial Sequence
  Description of Artificial Sequence: Synthetic oligonucleotide
uaauccucccauguuggug

SEQ ID NO: 1486671 - RNA, 19 nt, Artificial Sequence
  Description of Artificial Sequence: Synthetic oligonucleotide
uuaacuccuuuggaaauaa

SEQ ID NO: 1486672 - RNA, 19 nt, Artificial Sequence
  Description of Artificial Sequence: Synthetic oligonucleotide
accuccgcaucuuuauauc

SEQ ID NO: 1486673 - RNA, 19 nt, Artificial Sequence
  Description of Artificial Sequence: Synthetic oligonucleotide
aucagccggagacaccagg

SEQ ID NO: 1486674 - RNA, 19 nt, Artificial Sequence
  Description of Artificial Sequence: Synthetic oligonucleotide
gaaaacgggauucugcaau

SEQ ID NO: 1486675 - RNA, 19 nt, Artificial Sequence
  Description of Artificial Sequence: Synthetic oligonucleotide
auaaguuccaguggggaaa

SEQ ID NO: 1486676 - RNA, 19 nt, Artificial Sequence
  Description of Artificial Sequence: Synthetic oligonucleotide
cauuauauuggcuuccggu

SEQ ID NO: 1486677 - RNA, 19 nt, Artificial Sequence
  Description of Artificial Sequence: Synthetic oligonucleotide
ugcuugagaagggagggcu

SEQ ID NO: 1486678 - RNA, 19 nt, Artificial Sequence
  Description of Artificial Sequence: Synthetic oligonucleotide
guaaagucccuaccccucc

SEQ ID NO: 1486679 - RNA, 19 nt, Artificial Sequence
  Description of Artificial Sequence: Synthetic oligonucleotide
auaaaccuacucgucuuag

SEQ ID NO: 1486680 - RNA, 19 nt, Artificial Sequence
  Description of Artificial Sequence: Synthetic oligonucleotide
uaaaccuacucgucuuagu

SEQ ID NO: 1486681 - RNA, 19 nt, Artificial Sequence
  Description of Artificial Sequence: Synthetic oligonucleotide
auacacgacagucccuucu

SEQ ID NO: 1486682 - RNA, 19 nt, Artificial Sequence
  Description of Artificial Sequence: Synthetic oligonucleotide
ggagugaaaauuccucagc

SEQ ID NO: 1486683 - RNA, 19 nt, Artificial Sequence
  Description of Artificial Sequence: Synthetic oligonucleotide
gacaaaucaucagccggag

SEQ ID NO: 1486684 - RNA, 19 nt, Artificial Sequence
  Description of Artificial Sequence: Synthetic oligonucleotide
agauaacugggagugaaaa

SEQ ID NO: 1486685 - RNA, 19 nt, Artificial Sequence
  Description of Artificial Sequence: Synthetic oligonucleotide
aguggggaaagaccuaaaa

SEQ ID NO: 1486686 - RNA, 19 nt, Artificial Sequence
  Description of Artificial Sequence: Synthetic oligonucleotide
cuuccgguccuuuucccag

SEQ ID NO: 1486687 - RNA, 19 nt, Artificial Sequence
  Description of Artificial Sequence: Synthetic oligonucleotide
auguagcuaaaacacucau

SEQ ID NO: 1486688 - RNA, 19 nt, Artificial Sequence
  Description of Artificial Sequence: Synthetic oligonucleotide
ucucaacagcaaucaacca

SEQ ID NO: 1486689 - RNA, 19 nt, Artificial Sequence
  Description of Artificial Sequence: Synthetic oligonucleotide
aauauacacgacagucccu

SEQ ID NO: 1486690 - RNA, 19 nt, Artificial Sequence
  Description of Artificial Sequence: Synthetic oligonucleotide
agugcggcuaccacacagc

SEQ ID NO: 1486691 - RNA, 19 nt, Artificial Sequence
  Description of Artificial Sequence: Synthetic oligonucleotide
gaugucugcucaaacgguc

SEQ ID NO: 1486692 - RNA, 19 nt, Artificial Sequence
  Description of Artificial Sequence: Synthetic oligonucleotide
gagucaacaaucacaagcu

SEQ ID NO: 1486693 - RNA, 19 nt, Artificial Sequence
  Description of Artificial Sequence: Synthetic oligonucleotide
uauuauggcuguugacauc

SEQ ID NO: 1486694 - RNA, 19 nt, Artificial Sequence
  Description of Artificial Sequence: Synthetic oligonucleotide
auucaagccuuugcagaac

SEQ ID NO: 1486695 - RNA, 19 nt, Artificial Sequence
  Description of Artificial Sequence: Synthetic oligonucleotide
ucuuaguuucuuguugcuc

SEQ ID NO: 1486696 - RNA, 19 nt, Artificial Sequence
  Description of Artificial Sequence: Synthetic oligonucleotide
ucucgaccagucuuucagc

SEQ ID NO: 1486697 - RNA, 19 nt, Artificial Sequence
  Description of Artificial Sequence: Synthetic oligonucleotide
uacucgucuuaguuucuug

SEQ ID NO: 1486698 - RNA, 19 nt, Artificial Sequence
  Description of Artificial Sequence: Synthetic oligonucleotide
aaccuggcggaccuguaau

SEQ ID NO: 1486699 - RNA, 19 nt, Artificial Sequence
  Description of Artificial Sequence: Synthetic oligonucleotide
ucaaccaauuaauccucau

SEQ ID NO: 1486700 - RNA, 19 nt, Artificial Sequence
  Description of Artificial Sequence: Synthetic oligonucleotide
caucagcucuagacaaagg

SEQ ID NO: 1486701 - RNA, 19 nt, Artificial Sequence
  Description of Artificial Sequence: Synthetic oligonucleotide
ucacaguuaccaucucaac

SEQ ID NO: 1486702 - RNA, 19 nt, Artificial Sequence
  Description of Artificial Sequence: Synthetic oligonucleotide
ucccuaccccuccacaucu

SEQ ID NO: 1486703 - RNA, 19 nt, Artificial Sequence
  Description of Artificial Sequence: Synthetic oligonucleotide
uggcggaccuguaaucucu

SEQ ID NO: 1486704 - RNA, 19 nt, Artificial Sequence
  Description of Artificial Sequence: Synthetic oligonucleotide
uugauucgucaagauaacu

SEQ ID NO: 1486705 - RNA, 19 nt, Artificial Sequence
  Description of Artificial Sequence: Synthetic oligonucleotide
auauacacgacagucccuu

SEQ ID NO: 1486706 - RNA, 19 nt, Artificial Sequence
  Description of Artificial Sequence: Synthetic oligonucleotide
ccaugaguuucccagugcg

SEQ ID NO: 1486707 - RNA, 19 nt, Artificial Sequence
  Description of Artificial Sequence: Synthetic oligonucleotide
ugucugcucaaacggucac

SEQ ID NO: 1486708 - RNA, 19 nt, Artificial Sequence
  Description of Artificial Sequence: Synthetic oligonucleotide
gggcaauguagcuaaaaca

SEQ ID NO: 1486709 - RNA, 19 nt, Artificial Sequence
  Description of Artificial Sequence: Synthetic oligonucleotide
aggaucgaacuccuuucug

SEQ ID NO: 1486710 - RNA, 19 nt, Artificial Sequence
  Description of Artificial Sequence: Synthetic oligonucleotide
aguuucccagugcggcuac

SEQ ID NO: 1486711 - RNA, 19 nt, Artificial Sequence
  Description of Artificial Sequence: Synthetic oligonucleotide
ugaguuucccagugcggcu

SEQ ID NO: 1486712 - RNA, 19 nt, Artificial Sequence
  Description of Artificial Sequence: Synthetic oligonucleotide
gaaaauuccucagccaggu

SEQ ID NO: 1486713 - RNA, 19 nt, Artificial Sequence
  Description of Artificial Sequence: Synthetic oligonucleotide
aauuauuauuauggcuguu

SEQ ID NO: 1486714 - RNA, 19 nt, Artificial Sequence
  Description of Artificial Sequence: Synthetic oligonucleotide
cguaauuugauucgucaag

SEQ ID NO: 1486715 - RNA, 19 nt, Artificial Sequence
  Description of Artificial Sequence: Synthetic oligonucleotide
gauaaaccuacucgucuua

SEQ ID NO: 1486716 - RNA, 19 nt, Artificial Sequence
  Description of Artificial Sequence: Synthetic oligonucleotide
gugauaaaccuacucgucu

SEQ ID NO: 1486717 - RNA, 19 nt, Artificial Sequence
  Description of Artificial Sequence: Synthetic oligonucleotide
guaaacgcagacucggugu

SEQ ID NO: 1486718 - RNA, 19 nt, Artificial Sequence
  Description of Artificial Sequence: Synthetic oligonucleotide
aaacgggauucugcaaucu

SEQ ID NO: 1486719 - RNA, 19 nt, Artificial Sequence
  Description of Artificial Sequence: Synthetic oligonucleotide
uacacgacagucccuucua

SEQ ID NO: 1486720 - RNA, 19 nt, Artificial Sequence
  Description of Artificial Sequence: Synthetic oligonucleotide
agccggagacaccaggucu

SEQ ID NO: 1486721 - RNA, 19 nt, Artificial Sequence
  Description of Artificial Sequence: Synthetic oligonucleotide
gcucuugugauaaaccuac

SEQ ID NO: 1486722 - RNA, 19 nt, Artificial Sequence
  Description of Artificial Sequence: Synthetic oligonucleotide
auagaguggaaaacgggau

SEQ ID NO: 1486723 - RNA, 19 nt, Artificial Sequence
  Description of Artificial Sequence: Synthetic oligonucleotide
caguuaccaucucaacagc

SEQ ID NO: 1486724 - RNA, 19 nt, Artificial Sequence
  Description of Artificial Sequence: Synthetic oligonucleotide
ggaccuguaaucucuguga

SEQ ID NO: 1486725 - RNA, 19 nt, Artificial Sequence
  Description of Artificial Sequence: Synthetic oligonucleotide
cuauguaagugcaaauuau

SEQ ID NO: 1486726 - RNA, 19 nt, Artificial Sequence
  Description of Artificial Sequence: Synthetic oligonucleotide
ggaucgaacuccuuucuga

SEQ ID NO: 1486727 - RNA, 19 nt, Artificial Sequence
  Description of Artificial Sequence: Synthetic oligonucleotide
agaaucagccggguguuca

SEQ ID NO: 1486728 - RNA, 19 nt, Artificial Sequence
  Description of Artificial Sequence: Synthetic oligonucleotide
accuggcggaccuguaauc

SEQ ID NO: 1486729 - RNA, 19 nt, Artificial Sequence
  Description of Artificial Sequence: Synthetic oligonucleotide
gaguucccggugaagauga

SEQ ID NO: 1486730 - RNA, 19 nt, Artificial Sequence
  Description of Artificial Sequence: Synthetic oligonucleotide
gugguugaaaggugcuaug

SEQ ID NO: 1486731 - RNA, 19 nt, Artificial Sequence
  Description of Artificial Sequence: Synthetic oligonucleotide
cauaaguuccaguggggaa

SEQ ID NO: 1486732 - RNA, 19 nt, Artificial Sequence
  Description of Artificial Sequence: Synthetic oligonucleotide
ucaaacggucacacagcuc

SEQ ID NO: 1486733 - RNA, 19 nt, Artificial Sequence
  Description of Artificial Sequence: Synthetic oligonucleotide
gaacuuuacugcucaucaa

SEQ ID NO: 1486734 - RNA, 19 nt, Artificial Sequence
  Description of Artificial Sequence: Synthetic oligonucleotide
gucaacaaucacaagcuua

SEQ ID NO: 1486735 - RNA, 19 nt, Artificial Sequence
  Description of Artificial Sequence: Synthetic oligonucleotide
ucaagauaacugggaguga

SEQ ID NO: 1486736 - RNA, 19 nt, Artificial Sequence
  Description of Artificial Sequence: Synthetic oligonucleotide
acaaaucaucagccggaga

SEQ ID NO: 1486737 - RNA, 19 nt, Artificial Sequence
  Description of Artificial Sequence: Synthetic oligonucleotide
aaaauuccucagccaggua

SEQ ID NO: 1486738 - RNA, 19 nt, Artificial Sequence
  Description of Artificial Sequence: Synthetic oligonucleotide
guugacaucccaugguggu

SEQ ID NO: 1486739 - RNA, 19 nt, Artificial Sequence
  Description of Artificial Sequence: Synthetic oligonucleotide
agucccuaccccuccacau

SEQ ID NO: 1486740 - RNA, 19 nt, Artificial Sequence
  Description of Artificial Sequence: Synthetic oligonucleotide
uccuggacaccuccauaac

SEQ ID NO: 1486741 - RNA, 19 nt, Artificial Sequence
  Description of Artificial Sequence: Synthetic oligonucleotide
caagauaacugggagugaa

SEQ ID NO: 1486742 - RNA, 19 nt, Artificial Sequence
  Description of Artificial Sequence: Synthetic oligonucleotide
cuggggagaguucagcaga

SEQ ID NO: 1486743 - RNA, 19 nt, Artificial Sequence
  Description of Artificial Sequence: Synthetic oligonucleotide
agucaacaaucacaagcuu

SEQ ID NO: 1486744 - RNA, 19 nt, Artificial Sequence
  Description of Artificial Sequence: Synthetic oligonucleotide
cgucuuaguuucuuguugc

SEQ ID NO: 1486745 - RNA, 19 nt, Artificial Sequence
  Description of Artificial Sequence: Synthetic oligonucleotide
ggaaauguucccuucugua

SEQ ID NO: 1486746 - RNA, 19 nt, Artificial Sequence
  Description of Artificial Sequence: Synthetic oligonucleotide
cugaccauauacagaagcu

SEQ ID NO: 1486747 - RNA, 19 nt, Artificial Sequence
  Description of Artificial Sequence: Synthetic oligonucleotide
aaucagccggguguucaca

SEQ ID NO: 1486748 - RNA, 19 nt, Artificial Sequence
  Description of Artificial Sequence: Synthetic oligonucleotide
uccgguccuuuucccagca

SEQ ID NO: 1486749 - RNA, 19 nt, Artificial Sequence
  Description of Artificial Sequence: Synthetic oligonucleotide
cagucccuucuaauccucc

SEQ ID NO: 1486750 - RNA, 19 nt, Artificial Sequence
  Description of Artificial Sequence: Synthetic oligonucleotide
agccagaggugacuuggca

SEQ ID NO: 1486751 - RNA, 19 nt, Artificial Sequence
  Description of Artificial Sequence: Synthetic oligonucleotide
aaacgcagacucgguguca

SEQ ID NO: 1486752 - RNA, 19 nt, Artificial Sequence
  Description of Artificial Sequence: Synthetic oligonucleotide
uauacacgacagucccuuc

SEQ ID NO: 1486753 - RNA, 19 nt, Artificial Sequence
  Description of Artificial Sequence: Synthetic oligonucleotide
agaggugacuuggcaauga

SEQ ID NO: 1486754 - RNA, 19 nt, Artificial Sequence
  Description of Artificial Sequence: Synthetic oligonucleotide
agaugggucguaauuugau

SEQ ID NO: 1486755 - RNA, 19 nt, Artificial Sequence
  Description of Artificial Sequence: Synthetic oligonucleotide
gcuggggagaguucagcag

SEQ ID NO: 1486756 - RNA, 19 nt, Artificial Sequence
  Description of Artificial Sequence: Synthetic oligonucleotide
gacagucccuucuaauccu

SEQ ID NO: 1486757 - RNA, 19 nt, Artificial Sequence
  Description of Artificial Sequence: Synthetic oligonucleotide
ucagccggguguucacaca

SEQ ID NO: 1486758 - RNA, 19 nt, Artificial Sequence
  Description of Artificial Sequence: Synthetic oligonucleotide
gcuaccacacagcuggauc

SEQ ID NO: 1486759 - RNA, 19 nt, Artificial Sequence
  Description of Artificial Sequence: Synthetic oligonucleotide
gcaauagagucaacaauca

SEQ ID NO: 1486760 - RNA, 19 nt, Artificial Sequence
  Description of Artificial Sequence: Synthetic oligonucleotide
ugacuccaugaguuuccca

SEQ ID NO: 1486761 - RNA, 19 nt, Artificial Sequence
  Description of Artificial Sequence: Synthetic oligonucleotide
caccuccauaacucaggcc

SEQ ID NO: 1486762 - RNA, 19 nt, Artificial Sequence
  Description of Artificial Sequence: Synthetic oligonucleotide
gaugcuuguuuggccaaga

SEQ ID NO: 1486763 - RNA, 19 nt, Artificial Sequence
  Description of Artificial Sequence: Synthetic oligonucleotide
acagucccuucuaauccuc

SEQ ID NO: 1486764 - RNA, 19 nt, Artificial Sequence
  Description of Artificial Sequence: Synthetic oligonucleotide
cacagcugaguucccggug

SEQ ID NO: 1486765 - RNA, 19 nt, Artificial Sequence
  Description of Artificial Sequence: Synthetic oligonucleotide
aucaaccaauuaauccuca

SEQ ID NO: 1486766 - RNA, 19 nt, Artificial Sequence
  Description of Artificial Sequence: Synthetic oligonucleotide
gugagcgauccacaagcca

SEQ ID NO: 1486767 - RNA, 19 nt, Artificial Sequence
  Description of Artificial Sequence: Synthetic oligonucleotide
cccugcugaccauauacag

SEQ ID NO: 1486768 - RNA, 19 nt, Artificial Sequence
  Description of Artificial Sequence: Synthetic oligonucleotide
ccgcaucuuuauaucauag

SEQ ID NO: 1486769 - RNA, 19 nt, Artificial Sequence
  Description of Artificial Sequence: Synthetic oligonucleotide
ggacaaaucaucagccgga

SEQ ID NO: 1486770 - RNA, 19 nt, Artificial Sequence
  Description of Artificial Sequence: Synthetic oligonucleotide
ugccuucagacagggacaa

SEQ ID NO: 1486771 - RNA, 19 nt, Artificial Sequence
  Description of Artificial Sequence: Synthetic oligonucleotide
gaugggucguaauuugauu

SEQ ID NO: 1486772 - RNA, 19 nt, Artificial Sequence
  Description of Artificial Sequence: Synthetic oligonucleotide
cagcucuugugauaaaccu

SEQ ID NO: 1486773 - RNA, 19 nt, Artificial Sequence
  Description of Artificial Sequence: Synthetic oligonucleotide
gaccuccgcaucuuuauau

SEQ ID NO: 1486774 - RNA, 19 nt, Artificial Sequence
  Description of Artificial Sequence: Synthetic oligonucleotide
aggaacgcuggggagaguu

SEQ ID NO: 1486775 - RNA, 19 nt, Artificial Sequence
  Description of Artificial Sequence: Synthetic oligonucleotide
gaggaucgaacuccuuucu

SEQ ID NO: 1486776 - RNA, 19 nt, Artificial Sequence
  Description of Artificial Sequence: Synthetic oligonucleotide
gagaguggacaaaggcuuc

SEQ ID NO: 1486777 - RNA, 19 nt, Artificial Sequence
  Description of Artificial Sequence: Synthetic oligonucleotide
uggauccagaagugccuuc

SEQ ID NO: 1486778 - RNA, 19 nt, Artificial Sequence
  Description of Artificial Sequence: Synthetic oligonucleotide
cugccucacagcugaguuc

SEQ ID NO: 1486779 - RNA, 19 nt, Artificial Sequence
  Description of Artificial Sequence: Synthetic oligonucleotide
cuggcggaccuguaaucuc

SEQ ID NO: 1486780 - RNA, 19 nt, Artificial Sequence
  Description of Artificial Sequence: Synthetic oligonucleotide
ucccggugaagaugaacuu

SEQ ID NO: 1486781 - RNA, 19 nt, Artificial Sequence
  Description of Artificial Sequence: Synthetic oligonucleotide
ccucauuauauuggcuucc

SEQ ID NO: 1486782 - RNA, 19 nt, Artificial Sequence
  Description of Artificial Sequence: Synthetic oligonucleotide
caaucugaugucugcucaa

SEQ ID NO: 1486783 - RNA, 19 nt, Artificial Sequence
  Description of Artificial Sequence: Synthetic oligonucleotide
gguaaagucccuaccccuc

SEQ ID NO: 1486784 - RNA, 19 nt, Artificial Sequence
  Description of Artificial Sequence: Synthetic oligonucleotide
cccggcuuggucuuguuuc

SEQ ID NO: 1486785 - RNA, 19 nt, Artificial Sequence
  Description of Artificial Sequence: Synthetic oligonucleotide
cagccagaggugacuuggc

SEQ ID NO: 1486786 - RNA, 19 nt, Artificial Sequence
  Description of Artificial Sequence: Synthetic oligonucleotide
ccaauuaauccucauuaua

SEQ ID NO: 1486787 - RNA, 19 nt, Artificial Sequence
  Description of Artificial Sequence: Synthetic oligonucleotide
aggugacuuggcaaugaga

SEQ ID NO: 1486788 - RNA, 19 nt, Artificial Sequence
  Description of Artificial Sequence: Synthetic oligonucleotide
guucccggugaagaugaac

SEQ ID NO: 1486789 - RNA, 19 nt, Artificial Sequence
  Description of Artificial Sequence: Synthetic oligonucleotide
acacgacagucccuucuaa

SEQ ID NO: 1486790 - RNA, 19 nt, Artificial Sequence
  Description of Artificial Sequence: Synthetic oligonucleotide
guaaucucugugagcgauc

SEQ ID NO: 1486791 - RNA, 19 nt, Artificial Sequence
  Description of Artificial Sequence: Synthetic oligonucleotide
gagcgauccacaagccaca

SEQ ID NO: 1486792 - RNA, 19 nt, Artificial Sequence
  Description of Artificial Sequence: Synthetic oligonucleotide
gucccuaccccuccacauc

SEQ ID NO: 1486793 - RNA, 19 nt, Artificial Sequence
  Description of Artificial Sequence: Synthetic oligonucleotide
agaccuccgcaucuuuaua

SEQ ID NO: 1486794 - RNA, 19 nt, Artificial Sequence
  Description of Artificial Sequence: Synthetic oligonucleotide
gccggguguucacacagug

SEQ ID NO: 1486795 - RNA, 19 nt, Artificial Sequence
  Description of Artificial Sequence: Synthetic oligonucleotide
cuaaaacacucaucauuau

SEQ ID NO: 1486796 - RNA, 19 nt, Artificial Sequence
  Description of Artificial Sequence: Synthetic oligonucleotide
cuaccccuccacaucuaga

SEQ ID NO: 1486797 - RNA, 19 nt, Artificial Sequence
  Description of Artificial Sequence: Synthetic oligonucleotide
gcccugaagcugaggaucg

SEQ ID NO: 1486798 - RNA, 19 nt, Artificial Sequence
  Description of Artificial Sequence: Synthetic oligonucleotide
cugaggaucgaacuccuuu

SEQ ID NO: 1486799 - RNA, 19 nt, Artificial Sequence
  Description of Artificial Sequence: Synthetic oligonucleotide
caucagccggagacaccag

SEQ ID NO: 1486800 - RNA, 19 nt, Artificial Sequence
  Description of Artificial Sequence: Synthetic oligonucleotide
aggaucccuauggccuuuc

SEQ ID NO: 1486801 - RNA, 19 nt, Artificial Sequence
  Description of Artificial Sequence: Synthetic oligonucleotide
caaccaauuaauccucauu

SEQ ID NO: 1486802 - RNA, 19 nt, Artificial Sequence
  Description of Artificial Sequence: Synthetic oligonucleotide
ucccauguuggugggcaau

SEQ ID NO: 1486803 - RNA, 19 nt, Artificial Sequence
  Description of Artificial Sequence: Synthetic oligonucleotide
guguuaaaauagaguggaa

SEQ ID NO: 1486804 - RNA, 19 nt, Artificial Sequence
  Description of Artificial Sequence: Synthetic oligonucleotide
gaguuucccagugcggcua

SEQ ID NO: 1486805 - RNA, 19 nt, Artificial Sequence
  Description of Artificial Sequence: Synthetic oligonucleotide
ccuaccccuccacaucuag

SEQ ID NO: 1486806 - RNA, 19 nt, Artificial Sequence
  Description of Artificial Sequence: Synthetic oligonucleotide
cucucugagucaagguacu

SEQ ID NO: 1486807 - RNA, 19 nt, Artificial Sequence
  Description of Artificial Sequence: Synthetic oligonucleotide
ggucguaauuugauucguc

SEQ ID NO: 1486808 - RNA, 19 nt, Artificial Sequence
  Description of Artificial Sequence: Synthetic oligonucleotide
ggaugcuuguuuggccaag

SEQ ID NO: 1486809 - RNA, 19 nt, Artificial Sequence
  Description of Artificial Sequence: Synthetic oligonucleotide
gucugcucaaacggucaca

SEQ ID NO: 1486810 - RNA, 19 nt, Artificial Sequence
  Description of Artificial Sequence: Synthetic oligonucleotide
gcuuaacuccuuuggaaau

SEQ ID NO: 1486811 - RNA, 19 nt, Artificial Sequence
  Description of Artificial Sequence: Synthetic oligonucleotide
gagaaucagccggguguuc

SEQ ID NO: 1486812 - RNA, 19 nt, Artificial Sequence
  Description of Artificial Sequence: Synthetic oligonucleotide
aaacggucacacagcucuu

SEQ ID NO: 1486813 - RNA, 19 nt, Artificial Sequence
  Description of Artificial Sequence: Synthetic oligonucleotide
ccuccgcaucuuuauauca

SEQ ID NO: 1486814 - RNA, 19 nt, Artificial Sequence
  Description of Artificial Sequence: Synthetic oligonucleotide
ccuucuaauccucccaugu

SEQ ID NO: 1486815 - RNA, 19 nt, Artificial Sequence
  Description of Artificial Sequence: Synthetic oligonucleotide
cuaauccucccauguuggu

SEQ ID NO: 1486816 - RNA, 19 nt, Artificial Sequence
  Description of Artificial Sequence: Synthetic oligonucleotide
cucgucuuaguuucuuguu

SEQ ID NO: 1486817 - RNA, 19 nt, Artificial Sequence
  Description of Artificial Sequence: Synthetic oligonucleotide
cuucuaauccucccauguu

SEQ ID NO: 1486818 - RNA, 19 nt, Artificial Sequence
  Description of Artificial Sequence: Synthetic oligonucleotide
caggccagucacuuucaua

SEQ ID NO: 1486819 - RNA, 19 nt, Artificial Sequence
  Description of Artificial Sequence: Synthetic oligonucleotide
cagaccuccgcaucuuuau

SEQ ID NO: 1486820 - RNA, 19 nt, Artificial Sequence
  Description of Artificial Sequence: Synthetic oligonucleotide
cugcucaaacggucacaca

SEQ ID NO: 1486821 - RNA, 19 nt, Artificial Sequence
  Description of Artificial Sequence: Synthetic oligonucleotide
guucagcagaccuccgcau

SEQ ID NO: 1486822 - RNA, 19 nt, Artificial Sequence
  Description of Artificial Sequence: Synthetic oligonucleotide
acccggcuuggucuuguuu

SEQ ID NO: 1486823 - RNA, 19 nt, Artificial Sequence
  Description of Artificial Sequence: Synthetic oligonucleotide
cagacucggugucaauaua

SEQ ID NO: 1486824 - RNA, 19 nt, Artificial Sequence
  Description of Artificial Sequence: Synthetic oligonucleotide
gugcggcuaccacacagcu

SEQ ID NO: 1486825 - RNA, 19 nt, Artificial Sequence
  Description of Artificial Sequence: Synthetic oligonucleotide
gcagacucggugucaauau

SEQ ID NO: 1486826 - RNA, 19 nt, Artificial Sequence
  Description of Artificial Sequence: Synthetic oligonucleotide
ggcuccacucagauggguc

SEQ ID NO: 1486827 - RNA, 19 nt, Artificial Sequence
  Description of Artificial Sequence: Synthetic oligonucleotide
caguaaacgcagacucggu

SEQ ID NO: 1486828 - RNA, 19 nt, Artificial Sequence
  Description of Artificial Sequence: Synthetic oligonucleotide
ggagacaccaggucugcuu

SEQ ID NO: 1486829 - RNA, 19 nt, Artificial Sequence
  Description of Artificial Sequence: Synthetic oligonucleotide
caguggggaaagaccuaaa

SEQ ID NO: 1486830 - RNA, 19 nt, Artificial Sequence
  Description of Artificial Sequence: Synthetic oligonucleotide
acgcagacucggugucaau

SEQ ID NO: 1486831 - RNA, 19 nt, Artificial Sequence
  Description of Artificial Sequence: Synthetic oligonucleotide
ggcggaccuguaaucucug

SEQ ID NO: 1486832 - RNA, 19 nt, Artificial Sequence
  Description of Artificial Sequence: Synthetic oligonucleotide
ccuggacaccuccauaacu

SEQ ID NO: 1486833 - RNA, 19 nt, Artificial Sequence
  Description of Artificial Sequence: Synthetic oligonucleotide
cacucagaugggucguaau

SEQ ID NO: 1486834 - RNA, 19 nt, Artificial Sequence
  Description of Artificial Sequence: Synthetic oligonucleotide
ggaacgcuggggagaguuc

SEQ ID NO: 1486835 - RNA, 19 nt, Artificial Sequence
  Description of Artificial Sequence: Synthetic oligonucleotide
agccggguguucacacagu

SEQ ID NO: 1486836 - RNA, 19 nt, Artificial Sequence
  Description of Artificial Sequence: Synthetic oligonucleotide
cucccauguuggugggcaa

SEQ ID NO: 1486837 - RNA, 19 nt, Artificial Sequence
  Description of Artificial Sequence: Synthetic oligonucleotide
agcacccggcuuggucuug

SEQ ID NO: 1486838 - RNA, 19 nt, Artificial Sequence
  Description of Artificial Sequence: Synthetic oligonucleotide
ccggcuuggucuuguuuca

SEQ ID NO: 1486839 - RNA, 19 nt, Artificial Sequence
  Description of Artificial Sequence: Synthetic oligonucleotide
cagcugaguucccggugaa

SEQ ID NO: 1486840 - RNA, 19 nt, Artificial Sequence
  Description of Artificial Sequence: Synthetic oligonucleotide
gggucguaauuugauucgu

SEQ ID NO: 1486841 - RNA, 19 nt, Artificial Sequence
  Description of Artificial Sequence: Synthetic oligonucleotide
ccggguguucacacaguga

SEQ ID NO: 1486842 - RNA, 19 nt, Artificial Sequence
  Description of Artificial Sequence: Synthetic oligonucleotide
gcaaucucgaccagucuuu

SEQ ID NO: 1486843 - RNA, 19 nt, Artificial Sequence
  Description of Artificial Sequence: Synthetic oligonucleotide
cgucaagauaacugggagu

SEQ ID NO: 1486844 - RNA, 19 nt, Artificial Sequence
  Description of Artificial Sequence: Synthetic oligonucleotide
gggagggcuccacucagau

SEQ ID NO: 1486845 - RNA, 19 nt, Artificial Sequence
  Description of Artificial Sequence: Synthetic oligonucleotide
cccaucagcucuagacaaa

SEQ ID NO: 1486846 - RNA, 19 nt, Artificial Sequence
  Description of Artificial Sequence: Synthetic oligonucleotide
ggagaaucagccggguguu

SEQ ID NO: 1486847 - RNA, 19 nt, Artificial Sequence
  Description of Artificial Sequence: Synthetic oligonucleotide
cgaccagucuuucagcagu

SEQ ID NO: 1486848 - RNA, 19 nt, Artificial Sequence
  Description of Artificial Sequence: Synthetic oligonucleotide
cggugucaauauacacgac

SEQ ID NO: 1486849 - RNA, 19 nt, Artificial Sequence
  Description of Artificial Sequence: Synthetic oligonucleotide
ggggugguugaaaggugcu

SEQ ID NO: 1486850 - RNA, 19 nt, Artificial Sequence
  Description of Artificial Sequence: Synthetic oligonucleotide
caggcccugcugaccauau

SEQ ID NO: 1486851 - RNA, 19 nt, Artificial Sequence
  Description of Artificial Sequence: Synthetic oligonucleotide
ggaucccuauggccuuucu

SEQ ID NO: 1486852 - RNA, 19 nt, Artificial Sequence
  Description of Artificial Sequence: Synthetic oligonucleotide
cccuccacaucuagagagu

SEQ ID NO: 1486853 - RNA, 19 nt, Artificial Sequence
  Description of Artificial Sequence: Synthetic oligonucleotide
ccuacucgucuuaguuucu

SEQ ID NO: 1486854 - RNA, 19 nt, Artificial Sequence
  Description of Artificial Sequence: Synthetic oligonucleotide
ggugggcaauguagcuaaa

SEQ ID NO: 1486855 - RNA, 19 nt, Artificial Sequence
  Description of Artificial Sequence: Synthetic oligonucleotide
ccacucagaugggucguaa

SEQ ID NO: 1486856 - RNA, 19 nt, Artificial Sequence
  Description of Artificial Sequence: Synthetic oligonucleotide
ggcuaccacacagcuggau

SEQ ID NO: 1486857 - RNA, 19 nt, Artificial Sequence
  Description of Artificial Sequence: Synthetic oligonucleotide
cccggugaagaugaacuuu

SEQ ID NO: 1486858 - RNA, 19 nt, Artificial Sequence
  Description of Artificial Sequence: Synthetic oligonucleotide
gggcuccacucagaugggu

SEQ ID NO: 1486859 - RNA, 19 nt, Artificial Sequence
  Description of Artificial Sequence: Synthetic oligonucleotide
gccuucagacagggacaaa

SEQ ID NO: 1486860 - RNA, 19 nt, Artificial Sequence
  Description of Artificial Sequence: Synthetic oligonucleotide
caggaucccuauggccuuu

SEQ ID NO: 1486861 - RNA, 19 nt, Artificial Sequence
  Description of Artificial Sequence: Synthetic oligonucleotide
cacccggcuuggucuuguu

SEQ ID NO: 1486862 - RNA, 19 nt, Artificial Sequence
  Description of Artificial Sequence: Synthetic oligonucleotide
cggcuaccacacagcugga

SEQ ID NO: 1486863 - RNA, 19 nt, Artificial Sequence
  Description of Artificial Sequence: Synthetic oligonucleotide
uuuauuauaaauuaccgaa

SEQ ID NO: 1486864 - RNA, 19 nt, Artificial Sequence
  Description of Artificial Sequence: Synthetic oligonucleotide
uuauaaaagugauugaggc

SEQ ID NO: 1486865 - RNA, 19 nt, Artificial Sequence
  Description of Artificial Sequence: Synthetic oligonucleotide
aaacuuuuguuguuuuccc

SEQ ID NO: 1486866 - RNA, 19 nt, Artificial Sequence
  Description of Artificial Sequence: Synthetic oligonucleotide
cauaggagaaacaaaagag

SEQ ID NO: 1486867 - RNA, 19 nt, Artificial Sequence
  Description of Artificial Sequence: Synthetic oligonucleotide
cuauccaugggacagaggg

SEQ ID NO: 1486868 - RNA, 19 nt, Artificial Sequence
  Description of Artificial Sequence: Synthetic oligonucleotide
aaauauaugugcaaagucu

SEQ ID NO: 1486869 - RNA, 19 nt, Artificial Sequence
  Description of Artificial Sequence: Synthetic oligonucleotide
auugaggcaaauuguaaac

SEQ ID NO: 1486870 - RNA, 19 nt, Artificial Sequence
  Description of Artificial Sequence: Synthetic oligonucleotide
aacuuuuguuguuuucccc

SEQ ID NO: 1486871 - RNA, 19 nt, Artificial Sequence
  Description of Artificial Sequence: Synthetic oligonucleotide
ugacauaggagaaacaaaa

SEQ ID NO: 1486872 - RNA, 19 nt, Artificial Sequence
  Description of Artificial Sequence: Synthetic oligonucleotide
ucugaguauaaauauaaau

SEQ ID NO: 1486873 - RNA, 19 nt, Artificial Sequence
  Description of Artificial Sequence: Synthetic oligonucleotide
aauauaugugcaaagucug

SEQ ID NO: 1486874 - RNA, 19 nt, Artificial Sequence
  Description of Artificial Sequence: Synthetic oligonucleotide
ucaagcaucuucaaacagc

SEQ ID NO: 1486875 - RNA, 19 nt, Artificial Sequence
  Description of Artificial Sequence: Synthetic oligonucleotide
ugugcuugugcuaugugcc

SEQ ID NO: 1486876 - RNA, 19 nt, Artificial Sequence
  Description of Artificial Sequence: Synthetic oligonucleotide
accaagaagugccuaagac

SEQ ID NO: 1486877 - RNA, 19 nt, Artificial Sequence
  Description of Artificial Sequence: Synthetic oligonucleotide
aaagguggccaacugacca

SEQ ID NO: 1486878 - RNA, 19 nt, Artificial Sequence
  Description of Artificial Sequence: Synthetic oligonucleotide
gauguaguaagcucucuug

SEQ ID NO: 1486879 - RNA, 19 nt, Artificial Sequence
  Description of Artificial Sequence: Synthetic oligonucleotide
auaaaagugauugaggcaa

SEQ ID NO: 1486880 - RNA, 19 nt, Artificial Sequence
  Description of Artificial Sequence: Synthetic oligonucleotide
agauagaugaauguuucuc

SEQ ID NO: 1486881 - RNA, 19 nt, Artificial Sequence
  Description of Artificial Sequence: Synthetic oligonucleotide
ugggauuugguuuugaguu

SEQ ID NO: 1486882 - RNA, 19 nt, Artificial Sequence
  Description of Artificial Sequence: Synthetic oligonucleotide
aaacaagaccaguuccagg

SEQ ID NO: 1486883 - RNA, 19 nt, Artificial Sequence
  Description of Artificial Sequence: Synthetic oligonucleotide
guaguaagcucucuugggg

SEQ ID NO: 1486884 - RNA, 19 nt, Artificial Sequence
  Description of Artificial Sequence: Synthetic oligonucleotide
ucuuuaaaggggagcauca

SEQ ID NO: 1486885 - RNA, 19 nt, Artificial Sequence
  Description of Artificial Sequence: Synthetic oligonucleotide
aaauagugcucuuuauuau

SEQ ID NO: 1486886 - RNA, 19 nt, Artificial Sequence
  Description of Artificial Sequence: Synthetic oligonucleotide
uaaggcaagucuccuagcc

SEQ ID NO: 1486887 - RNA, 19 nt, Artificial Sequence
  Description of Artificial Sequence: Synthetic oligonucleotide
uauaugugcaaagucugag

SEQ ID NO: 1486888 - RNA, 19 nt, Artificial Sequence
  Description of Artificial Sequence: Synthetic oligonucleotide
aggagaaacaaaagagucc

SEQ ID NO: 1486889 - RNA, 19 nt, Artificial Sequence
  Description of Artificial Sequence: Synthetic oligonucleotide
auaaauauaugugcaaagu

SEQ ID NO: 1486890 - RNA, 19 nt, Artificial Sequence
  Description of Artificial Sequence: Synthetic oligonucleotide
gaauagauguaguaagcuc

SEQ ID NO: 1486891 - RNA, 19 nt, Artificial Sequence
  Description of Artificial Sequence: Synthetic oligonucleotide
agcggaaucuucucgcccc

SEQ ID NO: 1486892 - RNA, 19 nt, Artificial Sequence
  Description of Artificial Sequence: Synthetic oligonucleotide
aauagugcucuuuauuaua

SEQ ID NO: 1486893 - RNA, 19 nt, Artificial Sequence
  Description of Artificial Sequence: Synthetic oligonucleotide
uucaagcaucuucaaacag

SEQ ID NO: 1486894 - RNA, 19 nt, Artificial Sequence
  Description of Artificial Sequence: Synthetic oligonucleotide
uuucaagcaucuucaaaca

SEQ ID NO: 1486895 - RNA, 19 nt, Artificial Sequence
  Description of Artificial Sequence: Synthetic oligonucleotide
  modified_base (2)..(2): a, c, u, g, unknown or other
cncuugagagagaagcugg

SEQ ID NO: 1486896 - RNA, 19 nt, Artificial Sequence
  Description of Artificial Sequence: Synthetic oligonucleotide
  modified_base (5)..(5): a, c, u, g, unknown or other
cuccncuugagagagaagc

SEQ ID NO: 1486897 - RNA, 19 nt, Artificial Sequence
  Description of Artificial Sequence: Synthetic oligonucleotide
agagaggucggcucaguac

SEQ ID NO: 1486898 - RNA, 19 nt, Artificial Sequence
  Description of Artificial Sequence: Synthetic oligonucleotide
aaccugggcuccaagaugg

SEQ ID NO: 1486899 - RNA, 19 nt, Artificial Sequence
  Description of Artificial Sequence: Synthetic oligonucleotide
accagcggaaucuucucgc

SEQ ID NO: 1486900 - RNA, 19 nt, Artificial Sequence
  Description of Artificial Sequence: Synthetic oligonucleotide
gagaggucggcucaguacc

SEQ ID NO: 1486901 - RNA, 19 nt, Artificial Sequence
  Description of Artificial Sequence: Synthetic oligonucleotide
cagaauagauguaguaagc

SEQ ID NO: 1486902 - RNA, 19 nt, Artificial Sequence
  Description of Artificial Sequence: Synthetic oligonucleotide
uugugcuugugcuaugugc

SEQ ID NO: 1486903 - RNA, 19 nt, Artificial Sequence
  Description of Artificial Sequence: Synthetic oligonucleotide
aaaccugggcuccaagaug

SEQ ID NO: 1486904 - RNA, 19 nt, Artificial Sequence
  Description of Artificial Sequence: Synthetic oligonucleotide
aacugaccagcccuauccg

SEQ ID NO: 1486905 - RNA, 19 nt, Artificial Sequence
  Description of Artificial Sequence: Synthetic oligonucleotide
ggagcuaccgaccauuggg

SEQ ID NO: 1486906 - RNA, 19 nt, Artificial Sequence
  Description of Artificial Sequence: Synthetic oligonucleotide
uauugucccaccaggccag

SEQ ID NO: 1486907 - RNA, 19 nt, Artificial Sequence
  Description of Artificial Sequence: Synthetic oligonucleotide
augcuauugucccaccagg

SEQ ID NO: 1486908 - RNA, 19 nt, Artificial Sequence
  Description of Artificial Sequence: Synthetic oligonucleotide
ugcuaugugccgacggagg

SEQ ID NO: 1486909 - RNA, 19 nt, Artificial Sequence
  Description of Artificial Sequence: Synthetic oligonucleotide
ggacagagggcauuuaagg

SEQ ID NO: 1486910 - RNA, 19 nt, Artificial Sequence
  Description of Artificial Sequence: Synthetic oligonucleotide
aagugccuaagacuggcca

SEQ ID NO: 1486911 - RNA, 19 nt, Artificial Sequence
  Description of Artificial Sequence: Synthetic oligonucleotide
uugugcuaugugccgacgg

SEQ ID NO: 1486912 - RNA, 19 nt, Artificial Sequence
  Description of Artificial Sequence: Synthetic oligonucleotide
ucauacugguccaggaacu

SEQ ID NO: 1486913 - RNA, 19 nt, Artificial Sequence
  Description of Artificial Sequence: Synthetic oligonucleotide
ugcucuuuaaaggggagca

SEQ ID NO: 1486914 - RNA, 19 nt, Artificial Sequence
  Description of Artificial Sequence: Synthetic oligonucleotide
agaguccacuugucaaugc

SEQ ID NO: 1486915 - RNA, 19 nt, Artificial Sequence
  Description of Artificial Sequence: Synthetic oligonucleotide
gacauaggagaaacaaaag

SEQ ID NO: 1486916 - RNA, 19 nt, Artificial Sequence
  Description of Artificial Sequence: Synthetic oligonucleotide
cucccuagagccaggagcc

SEQ ID NO: 1486917 - RNA, 19 nt, Artificial Sequence
  Description of Artificial Sequence: Synthetic oligonucleotide
ucgccccugaccaagaagu

SEQ ID NO: 1486918 - RNA, 19 nt, Artificial Sequence
  Description of Artificial Sequence: Synthetic oligonucleotide
ucaucuguucaccugucuc

SEQ ID NO: 1486919 - RNA, 19 nt, Artificial Sequence
  Description of Artificial Sequence: Synthetic oligonucleotide
ccagaauagauguaguaag

SEQ ID NO: 1486920 - RNA, 19 nt, Artificial Sequence
  Description of Artificial Sequence: Synthetic oligonucleotide
ugaacugggauuugguuuu

SEQ ID NO: 1486921 - RNA, 19 nt, Artificial Sequence
  Description of Artificial Sequence: Synthetic oligonucleotide
ugaauggggaaaggggagg

SEQ ID NO: 1486922 - RNA, 19 nt, Artificial Sequence
  Description of Artificial Sequence: Synthetic oligonucleotide
aggcgaccgacccaggccc

SEQ ID NO: 1486923 - RNA, 19 nt, Artificial Sequence
  Description of Artificial Sequence: Synthetic oligonucleotide
ucaggagucuccugcaugu

SEQ ID NO: 1486924 - RNA, 19 nt, Artificial Sequence
  Description of Artificial Sequence: Synthetic oligonucleotide
uuccagguaauuccauggc

SEQ ID NO: 1486925 - RNA, 19 nt, Artificial Sequence
  Description of Artificial Sequence: Synthetic oligonucleotide
ugcuauugucccaccaggc

SEQ ID NO: 1486926 - RNA, 19 nt, Artificial Sequence
  Description of Artificial Sequence: Synthetic oligonucleotide
cugggcgggaagcagaggg

SEQ ID NO: 1486927 - RNA, 19 nt, Artificial Sequence
  Description of Artificial Sequence: Synthetic oligonucleotide
gugaucuuuauaaaaguga

SEQ ID NO: 1486928 - RNA, 19 nt, Artificial Sequence
  Description of Artificial Sequence: Synthetic oligonucleotide
uccucaccuaggcugggcg

SEQ ID NO: 1486929 - RNA, 19 nt, Artificial Sequence
  Description of Artificial Sequence: Synthetic oligonucleotide
ugugcuaugugccgacgga

SEQ ID NO: 1486930 - RNA, 19 nt, Artificial Sequence
  Description of Artificial Sequence: Synthetic oligonucleotide
auggcagauagaugaaugu

SEQ ID NO: 1486931 - RNA, 19 nt, Artificial Sequence
  Description of Artificial Sequence: Synthetic oligonucleotide
uugaggcaaauuguaaaca

SEQ ID NO: 1486932 - RNA, 19 nt, Artificial Sequence
  Description of Artificial Sequence: Synthetic oligonucleotide
agcuaccgaccauuggggc

SEQ ID NO: 1486933 - RNA, 19 nt, Artificial Sequence
  Description of Artificial Sequence: Synthetic oligonucleotide
aaucccuauccaugggaca

SEQ ID NO: 1486934 - RNA, 19 nt, Artificial Sequence
  Description of Artificial Sequence: Synthetic oligonucleotide
uccgucucccucccaaggg

SEQ ID NO: 1486935 - RNA, 19 nt, Artificial Sequence
  Description of Artificial Sequence: Synthetic oligonucleotide
agugauugaggcaaauugu

SEQ ID NO: 1486936 - RNA, 19 nt, Artificial Sequence
  Description of Artificial Sequence: Synthetic oligonucleotide
cagguaauuccauggcugc

SEQ ID NO: 1486937 - RNA, 19 nt, Artificial Sequence
  Description of Artificial Sequence: Synthetic oligonucleotide
ucaugugccaaucccuauc

SEQ ID NO: 1486938 - RNA, 19 nt, Artificial Sequence
  Description of Artificial Sequence: Synthetic oligonucleotide
agccugacauaggagaaac

SEQ ID NO: 1486939 - RNA, 19 nt, Artificial Sequence
  Description of Artificial Sequence: Synthetic oligonucleotide
ucuccuagccugacauagg

SEQ ID NO: 1486940 - RNA, 19 nt, Artificial Sequence
  Description of Artificial Sequence: Synthetic oligonucleotide
auaggaguccagguggccg

SEQ ID NO: 1486941 - RNA, 19 nt, Artificial Sequence
  Description of Artificial Sequence: Synthetic oligonucleotide
gacucacuucgccaagccg

SEQ ID NO: 1486942 - RNA, 19 nt, Artificial Sequence
  Description of Artificial Sequence: Synthetic oligonucleotide
agaggcgaccgacccaggc

SEQ ID NO: 1486943 - RNA, 19 nt, Artificial Sequence
  Description of Artificial Sequence: Synthetic oligonucleotide
cacuucgccaagccgaggg

SEQ ID NO: 1486944 - RNA, 19 nt, Artificial Sequence
  Description of Artificial Sequence: Synthetic oligonucleotide
acggucuuccugcagaggu

SEQ ID NO: 1486945 - RNA, 19 nt, Artificial Sequence
  Description of Artificial Sequence: Synthetic oligonucleotide
uccucaugugccaaucccu

SEQ ID NO: 1486946 - RNA, 19 nt, Artificial Sequence
  Description of Artificial Sequence: Synthetic oligonucleotide
ugugccaaucccuauccau

SEQ ID NO: 1486947 - RNA, 19 nt, Artificial Sequence
  Description of Artificial Sequence: Synthetic oligonucleotide
gaguugaacugggauuugg

SEQ ID NO: 1486948 - RNA, 19 nt, Artificial Sequence
  Description of Artificial Sequence: Synthetic oligonucleotide
agcccuauccgucucccuc

SEQ ID NO: 1486949 - RNA, 19 nt, Artificial Sequence
  Description of Artificial Sequence: Synthetic oligonucleotide
caaucccuauccaugggac

SEQ ID NO: 1486950 - RNA, 19 nt, Artificial Sequence
  Description of Artificial Sequence: Synthetic oligonucleotide
cuuggcuguguuuggcucc

SEQ ID NO: 1486951 - RNA, 19 nt, Artificial Sequence
  Description of Artificial Sequence: Synthetic oligonucleotide
ugacucacuucgccaagcc

SEQ ID NO: 1486952 - RNA, 19 nt, Artificial Sequence
  Description of Artificial Sequence: Synthetic oligonucleotide
caugucagggucuccuccc

SEQ ID NO: 1486953 - RNA, 19 nt, Artificial Sequence
  Description of Artificial Sequence: Synthetic oligonucleotide
cuucccagugaucacucag

SEQ ID NO: 1486954 - RNA, 19 nt, Artificial Sequence
  Description of Artificial Sequence: Synthetic oligonucleotide
aucccuauccaugggacag

SEQ ID NO: 1486955 - RNA, 19 nt, Artificial Sequence
  Description of Artificial Sequence: Synthetic oligonucleotide
uuaccgaaauguuucuuuu

SEQ ID NO: 1486956 - RNA, 19 nt, Artificial Sequence
  Description of Artificial Sequence: Synthetic oligonucleotide
uuaaggcaagucuccuagc

SEQ ID NO: 1486957 - RNA, 19 nt, Artificial Sequence
  Description of Artificial Sequence: Synthetic oligonucleotide
agaauggcucucuucgggu

SEQ ID NO: 1486958 - RNA, 19 nt, Artificial Sequence
  Description of Artificial Sequence: Synthetic oligonucleotide
ggugaucuuuauaaaagug

SEQ ID NO: 1486959 - RNA, 19 nt, Artificial Sequence
  Description of Artificial Sequence: Synthetic oligonucleotide
aagaagugccuaagacugg

SEQ ID NO: 1486960 - RNA, 19 nt, Artificial Sequence
  Description of Artificial Sequence: Synthetic oligonucleotide
agggcauuuaaggcaaguc

SEQ ID NO: 1486961 - RNA, 19 nt, Artificial Sequence
  Description of Artificial Sequence: Synthetic oligonucleotide
ugaccaagaagugccuaag

SEQ ID NO: 1486962 - RNA, 19 nt, Artificial Sequence
  Description of Artificial Sequence: Synthetic oligonucleotide
uaaaggggagcaucauacu

SEQ ID NO: 1486963 - RNA, 19 nt, Artificial Sequence
  Description of Artificial Sequence: Synthetic oligonucleotide
gagcuaccgaccauugggg

SEQ ID NO: 1486964 - RNA, 19 nt, Artificial Sequence
  Description of Artificial Sequence: Synthetic oligonucleotide
uuuugugcuugugcuaugu

SEQ ID NO: 1486965 - RNA, 19 nt, Artificial Sequence
  Description of Artificial Sequence: Synthetic oligonucleotide
uaugugccgacggaggaga

SEQ ID NO: 1486966 - RNA, 19 nt, Artificial Sequence
  Description of Artificial Sequence: Synthetic oligonucleotide
uccuagccugacauaggag

SEQ ID NO: 1486967 - RNA, 19 nt, Artificial Sequence
  Description of Artificial Sequence: Synthetic oligonucleotide
aguaccagcggaaucuucu

SEQ ID NO: 1486968 - RNA, 19 nt, Artificial Sequence
  Description of Artificial Sequence: Synthetic oligonucleotide
aggcaaauuguaaacauua

SEQ ID NO: 1486969 - RNA, 19 nt, Artificial Sequence
  Description of Artificial Sequence: Synthetic oligonucleotide
acucacuucgccaagccga

SEQ ID NO: 1486970 - RNA, 19 nt, Artificial Sequence
  Description of Artificial Sequence: Synthetic oligonucleotide
aggaacucccgaauggguc

SEQ ID NO: 1486971 - RNA, 19 nt, Artificial Sequence
  Description of Artificial Sequence: Synthetic oligonucleotide
ucccgaauggguccaggca

SEQ ID NO: 1486972 - RNA, 19 nt, Artificial Sequence
  Description of Artificial Sequence: Synthetic oligonucleotide
agauguaguaagcucucuu

SEQ ID NO: 1486973 - RNA, 19 nt, Artificial Sequence
  Description of Artificial Sequence: Synthetic oligonucleotide
cuucgggucaccccuugcc

SEQ ID NO: 1486974 - RNA, 19 nt, Artificial Sequence
  Description of Artificial Sequence: Synthetic oligonucleotide
uucgccaagccgaggggcc

SEQ ID NO: 1486975 - RNA, 19 nt, Artificial Sequence
  Description of Artificial Sequence: Synthetic oligonucleotide
ugacggucuuccugcagag

SEQ ID NO: 1486976 - RNA, 19 nt, Artificial Sequence
  Description of Artificial Sequence: Synthetic oligonucleotide
  modified_base (9)..(9): a, c, u, g, unknown or other
cuggcuccncuugagagag

SEQ ID NO: 1486977 - RNA, 19 nt, Artificial Sequence
  Description of Artificial Sequence: Synthetic oligonucleotide
aggucggcucaguaccagc

SEQ ID NO: 1486978 - RNA, 19 nt, Artificial Sequence
  Description of Artificial Sequence: Synthetic oligonucleotide
ugucaaugcuauuguccca

SEQ ID NO: 1486979 - RNA, 19 nt, Artificial Sequence
  Description of Artificial Sequence: Synthetic oligonucleotide
gucaaugcuauugucccac

SEQ ID NO: 1486980 - RNA, 19 nt, Artificial Sequence
  Description of Artificial Sequence: Synthetic oligonucleotide
uaccgaaauguuucuuuuc

SEQ ID NO: 1486981 - RNA, 19 nt, Artificial Sequence
  Description of Artificial Sequence: Synthetic oligonucleotide
uucgggucaccccuugccu

SEQ ID NO: 1486982 - RNA, 19 nt, Artificial Sequence
  Description of Artificial Sequence: Synthetic oligonucleotide
acuucgccaagccgagggg

SEQ ID NO: 1486983 - RNA, 19 nt, Artificial Sequence
  Description of Artificial Sequence: Synthetic oligonucleotide
auagugcucuuuauuauaa

SEQ ID NO: 1486984 - RNA, 19 nt, Artificial Sequence
  Description of Artificial Sequence: Synthetic oligonucleotide
ucaaugcuauugucccacc

SEQ ID NO: 1486985 - RNA, 19 nt, Artificial Sequence
  Description of Artificial Sequence: Synthetic oligonucleotide
cuguguuuggcuccucaug

SEQ ID NO: 1486986 - RNA, 19 nt, Artificial Sequence
  Description of Artificial Sequence: Synthetic oligonucleotide
guuuuccccaaaacaagac

SEQ ID NO: 1486987 - RNA, 19 nt, Artificial Sequence
  Description of Artificial Sequence: Synthetic oligonucleotide
gaaagguggccaacugacc

SEQ ID NO: 1486988 - RNA, 19 nt, Artificial Sequence
  Description of Artificial Sequence: Synthetic oligonucleotide
cagugaucacucaggaguc

SEQ ID NO: 1486989 - RNA, 19 nt, Artificial Sequence
  Description of Artificial Sequence: Synthetic oligonucleotide
agugccuaagacuggccaa

SEQ ID NO: 1486990 - RNA, 19 nt, Artificial Sequence
  Description of Artificial Sequence: Synthetic oligonucleotide
cucacuucgccaagccgag

SEQ ID NO: 1486991 - RNA, 19 nt, Artificial Sequence
  Description of Artificial Sequence: Synthetic oligonucleotide
ccccuuugcucuuuaaagg

SEQ ID NO: 1486992 - RNA, 19 nt, Artificial Sequence
  Description of Artificial Sequence: Synthetic oligonucleotide
cugaccagcccuauccguc

SEQ ID NO: 1486993 - RNA, 19 nt, Artificial Sequence
  Description of Artificial Sequence: Synthetic oligonucleotide
ggaggugaucuuuauaaaa

SEQ ID NO: 1486994 - RNA, 19 nt, Artificial Sequence
  Description of Artificial Sequence: Synthetic oligonucleotide
gcuauugucccaccaggcc

SEQ ID NO: 1486995 - RNA, 19 nt, Artificial Sequence
  Description of Artificial Sequence: Synthetic oligonucleotide
auauaugugcaaagucuga

SEQ ID NO: 1486996 - RNA, 19 nt, Artificial Sequence
  Description of Artificial Sequence: Synthetic oligonucleotide
ggcauuuaaggcaagucuc

SEQ ID NO: 1486997 - RNA, 19 nt, Artificial Sequence
  Description of Artificial Sequence: Synthetic oligonucleotide
aaaggccugaauggggaaa

SEQ ID NO: 1486998 - RNA, 19 nt, Artificial Sequence
  Description of Artificial Sequence: Synthetic oligonucleotide
cugacauaggagaaacaaa

SEQ ID NO: 1486999 - RNA, 19 nt, Artificial Sequence
  Description of Artificial Sequence: Synthetic oligonucleotide
cauuccaggucccaccuga

SEQ ID NO: 1487000 - RNA, 19 nt, Artificial Sequence
  Description of Artificial Sequence: Synthetic oligonucleotide
acugaccagcccuauccgu

SEQ ID NO: 1487001 - RNA, 19 nt, Artificial Sequence
  Description of Artificial Sequence: Synthetic oligonucleotide
uaggaguccagguggccgu

SEQ ID NO: 1487002 - RNA, 19 nt, Artificial Sequence
  Description of Artificial Sequence: Synthetic oligonucleotide
ugggagcuaccgaccauug

SEQ ID NO: 1487003 - RNA, 19 nt, Artificial Sequence
  Description of Artificial Sequence: Synthetic oligonucleotide
gguaauuccauggcugcug

SEQ ID NO: 1487004 - RNA, 19 nt, Artificial Sequence
  Description of Artificial Sequence: Synthetic oligonucleotide
uggccguugacggucuucc

SEQ ID NO: 1487005 - RNA, 19 nt, Artificial Sequence
  Description of Artificial Sequence: Synthetic oligonucleotide
agaagagaggagaguccac

SEQ ID NO: 1487006 - RNA, 19 nt, Artificial Sequence
  Description of Artificial Sequence: Synthetic oligonucleotide
guccagguggccguugacg

SEQ ID NO: 1487007 - RNA, 19 nt, Artificial Sequence
  Description of Artificial Sequence: Synthetic oligonucleotide
ugaccagcccuauccgucu

SEQ ID NO: 1487008 - RNA, 19 nt, Artificial Sequence
  Description of Artificial Sequence: Synthetic oligonucleotide
ugcauuccugugaguggcc

SEQ ID NO: 1487009 - RNA, 19 nt, Artificial Sequence
  Description of Artificial Sequence: Synthetic oligonucleotide
gugccaaucccuauccaug

SEQ ID NO: 1487010 - RNA, 19 nt, Artificial Sequence
  Description of Artificial Sequence: Synthetic oligonucleotide
gugccgacggaggagaggc

SEQ ID NO: 1487011 - RNA, 19 nt, Artificial Sequence
  Description of Artificial Sequence: Synthetic oligonucleotide
ugugccgacggaggagagg

SEQ ID NO: 1487012 - RNA, 19 nt, Artificial Sequence
  Description of Artificial Sequence: Synthetic oligonucleotide
ccuaagacuggccaauuuc

SEQ ID NO: 1487013 - RNA, 19 nt, Artificial Sequence
  Description of Artificial Sequence: Synthetic oligonucleotide
gccugaauggggaaagggg

SEQ ID NO: 1487014 - RNA, 19 nt, Artificial Sequence
  Description of Artificial Sequence: Synthetic oligonucleotide
cucaccuaggcugggcggg

SEQ ID NO: 1487015 - RNA, 19 nt, Artificial Sequence
  Description of Artificial Sequence: Synthetic oligonucleotide
gucggcucaguaccagcgg

SEQ ID NO: 1487016 - RNA, 19 nt, Artificial Sequence
  Description of Artificial Sequence: Synthetic oligonucleotide
gcauuuaaggcaagucucc

SEQ ID NO: 1487017 - RNA, 19 nt, Artificial Sequence
  Description of Artificial Sequence: Synthetic oligonucleotide
ucuucgggucaccccuugc

SEQ ID NO: 1487018 - RNA, 19 nt, Artificial Sequence
  Description of Artificial Sequence: Synthetic oligonucleotide
ugucagggucuccucccug

SEQ ID NO: 1487019 - RNA, 19 nt, Artificial Sequence
  Description of Artificial Sequence: Synthetic oligonucleotide
ccccugaccaagaagugcc

SEQ ID NO: 1487020 - RNA, 19 nt, Artificial Sequence
  Description of Artificial Sequence: Synthetic oligonucleotide
guucaccugucucccuccg

SEQ ID NO: 1487021 - RNA, 19 nt, Artificial Sequence
  Description of Artificial Sequence: Synthetic oligonucleotide
guugacggucuuccugcag

SEQ ID NO: 1487022 - RNA, 19 nt, Artificial Sequence
  Description of Artificial Sequence: Synthetic oligonucleotide
ccuagccugacauaggaga

SEQ ID NO: 1487023 - RNA, 19 nt, Artificial Sequence
  Description of Artificial Sequence: Synthetic oligonucleotide
cuucgccaagccgaggggc

SEQ ID NO: 1487024 - RNA, 19 nt, Artificial Sequence
  Description of Artificial Sequence: Synthetic oligonucleotide
cuaugugccgacggaggag

SEQ ID NO: 1487025 - RNA, 19 nt, Artificial Sequence
  Description of Artificial Sequence: Synthetic oligonucleotide
gaccccuuugcucuuuaaa

SEQ ID NO: 1487026 - RNA, 19 nt, Artificial Sequence
  Description of Artificial Sequence: Synthetic oligonucleotide
cuccuagccugacauagga

SEQ ID NO: 1487027 - RNA, 19 nt, Artificial Sequence
  Description of Artificial Sequence: Synthetic oligonucleotide
gaagugccuaagacuggcc

SEQ ID NO: 1487028 - RNA, 19 nt, Artificial Sequence
  Description of Artificial Sequence: Synthetic oligonucleotide
ccagugaucacucaggagu

SEQ ID NO: 1487029 - RNA, 19 nt, Artificial Sequence
  Description of Artificial Sequence: Synthetic oligonucleotide
ccugaauggggaaagggga

SEQ ID NO: 1487030 - RNA, 19 nt, Artificial Sequence
  Description of Artificial Sequence: Synthetic oligonucleotide
uccugccucgccccugacc

SEQ ID NO: 1487031 - RNA, 19 nt, Artificial Sequence
  Description of Artificial Sequence: Synthetic oligonucleotide
cagcggaaucuucucgccc

SEQ ID NO: 1487032 - RNA, 19 nt, Artificial Sequence
  Description of Artificial Sequence: Synthetic oligonucleotide
cugacucacuucgccaagc

SEQ ID NO: 1487033 - RNA, 19 nt, Artificial Sequence
  Description of Artificial Sequence: Synthetic oligonucleotide
gugcuaugugccgacggag

SEQ ID NO: 1487034 - RNA, 19 nt, Artificial Sequence
  Description of Artificial Sequence: Synthetic oligonucleotide
caagaccaguuccagguaa

SEQ ID NO: 1487035 - RNA, 19 nt, Artificial Sequence
  Description of Artificial Sequence: Synthetic oligonucleotide
cccgaauggguccaggcag

SEQ ID NO: 1487036 - RNA, 19 nt, Artificial Sequence
  Description of Artificial Sequence: Synthetic oligonucleotide
cuugugcuaugugccgacg

SEQ ID NO: 1487037 - RNA, 19 nt, Artificial Sequence
  Description of Artificial Sequence: Synthetic oligonucleotide
accccaacacacagcugcc

SEQ ID NO: 1487038 - RNA, 19 nt, Artificial Sequence
  Description of Artificial Sequence: Synthetic oligonucleotide
aagaccaguuccagguaau

SEQ ID NO: 1487039 - RNA, 19 nt, Artificial Sequence
  Description of Artificial Sequence: Synthetic oligonucleotide
cugaccaagaagugccuaa

SEQ ID NO: 1487040 - RNA, 19 nt, Artificial Sequence
  Description of Artificial Sequence: Synthetic oligonucleotide
ccguugacggucuuccugc

SEQ ID NO: 1487041 - RNA, 19 nt, Artificial Sequence
  Description of Artificial Sequence: Synthetic oligonucleotide
ggucggcucaguaccagcg

SEQ ID NO: 1487042 - RNA, 19 nt, Artificial Sequence
  Description of Artificial Sequence: Synthetic oligonucleotide
cucgccccugaccaagaag

SEQ ID NO: 1487043 - RNA, 19 nt, Artificial Sequence
  Description of Artificial Sequence: Synthetic oligonucleotide
cucaguaccagcggaaucu

SEQ ID NO: 1487044 - RNA, 19 nt, Artificial Sequence
  Description of Artificial Sequence: Synthetic oligonucleotide
guggccaacuccccucccc

SEQ ID NO: 1487045 - RNA, 19 nt, Artificial Sequence
  Description of Artificial Sequence: Synthetic oligonucleotide
guggaauggcagauagaug

SEQ ID NO: 1487046 - RNA, 19 nt, Artificial Sequence
  Description of Artificial Sequence: Synthetic oligonucleotide
caaugcuauugucccacca

SEQ ID NO: 1487047 - RNA, 19 nt, Artificial Sequence
  Description of Artificial Sequence: Synthetic oligonucleotide
ugcaugucagggucuccuc

SEQ ID NO: 1487048 - RNA, 19 nt, Artificial Sequence
  Description of Artificial Sequence: Synthetic oligonucleotide
ucgggucaccccuugccuc

SEQ ID NO: 1487049 - RNA, 19 nt, Artificial Sequence
  Description of Artificial Sequence: Synthetic oligonucleotide
ggagcgccugggcaggugg

SEQ ID NO: 1487050 - RNA, 19 nt, Artificial Sequence
  Description of Artificial Sequence: Synthetic oligonucleotide
ucaccccuugccucucucu

SEQ ID NO: 1487051 - RNA, 19 nt, Artificial Sequence
  Description of Artificial Sequence: Synthetic oligonucleotide
gggcauuuaaggcaagucu

SEQ ID NO: 1487052 - RNA, 19 nt, Artificial Sequence
  Description of Artificial Sequence: Synthetic oligonucleotide
gacggucuuccugcagagg

SEQ ID NO: 1487053 - RNA, 19 nt, Artificial Sequence
  Description of Artificial Sequence: Synthetic oligonucleotide
guaccagcggaaucuucuc

SEQ ID NO: 1487054 - RNA, 19 nt, Artificial Sequence
  Description of Artificial Sequence: Synthetic oligonucleotide
acaagaccaguuccaggua

SEQ ID NO: 1487055 - RNA, 19 nt, Artificial Sequence
  Description of Artificial Sequence: Synthetic oligonucleotide
acauuccaggucccaccug

SEQ ID NO: 1487056 - RNA, 19 nt, Artificial Sequence
  Description of Artificial Sequence: Synthetic oligonucleotide
gaccauuggggcuggauuu

SEQ ID NO: 1487057 - RNA, 19 nt, Artificial Sequence
  Description of Artificial Sequence: Synthetic oligonucleotide
uucagccacugggugaauc

SEQ ID NO: 1487058 - RNA, 19 nt, Artificial Sequence
  Description of Artificial Sequence: Synthetic oligonucleotide
auuccaggucccaccugac

SEQ ID NO: 1487059 - RNA, 19 nt, Artificial Sequence
  Description of Artificial Sequence: Synthetic oligonucleotide
gguguugggaaagguggcc

SEQ ID NO: 1487060 - RNA, 19 nt, Artificial Sequence
  Description of Artificial Sequence: Synthetic oligonucleotide
agugaucacucaggagucu

SEQ ID NO: 1487061 - RNA, 19 nt, Artificial Sequence
  Description of Artificial Sequence: Synthetic oligonucleotide
ugccgacggaggagaggcg

SEQ ID NO: 1487062 - RNA, 19 nt, Artificial Sequence
  Description of Artificial Sequence: Synthetic oligonucleotide
auugucccaccaggccagc

SEQ ID NO: 1487063 - RNA, 19 nt, Artificial Sequence
  Description of Artificial Sequence: Synthetic oligonucleotide
cuauccgucucccucccaa

SEQ ID NO: 1487064 - RNA, 19 nt, Artificial Sequence
  Description of Artificial Sequence: Synthetic oligonucleotide
uagccugacauaggagaaa

SEQ ID NO: 1487065 - RNA, 19 nt, Artificial Sequence
  Description of Artificial Sequence: Synthetic oligonucleotide
agguaauuccauggcugcu

SEQ ID NO: 1487066 - RNA, 19 nt, Artificial Sequence
  Description of Artificial Sequence: Synthetic oligonucleotide
uccugugaguggccacugu

SEQ ID NO: 1487067 - RNA, 19 nt, Artificial Sequence
  Description of Artificial Sequence: Synthetic oligonucleotide
agccaccccaacacacagc

SEQ ID NO: 1487068 - RNA, 19 nt, Artificial Sequence
  Description of Artificial Sequence: Synthetic oligonucleotide
gaggucggcucaguaccag

SEQ ID NO: 1487069 - RNA, 19 nt, Artificial Sequence
  Description of Artificial Sequence: Synthetic oligonucleotide
  modified_base (10)..(10): a, c, u, g, unknown or other
gcuggcuccncuugagaga

SEQ ID NO: 1487070 - RNA, 19 nt, Artificial Sequence
  Description of Artificial Sequence: Synthetic oligonucleotide
uggcucacugggagcuacc

SEQ ID NO: 1487071 - RNA, 19 nt, Artificial Sequence
  Description of Artificial Sequence: Synthetic oligonucleotide
gguacucccggggagcgcc

SEQ ID NO: 1487072 - RNA, 19 nt, Artificial Sequence
  Description of Artificial Sequence: Synthetic oligonucleotide
  modified_base (3)..(3): a, c, u, g, unknown or other
ccncuugagagagaagcug

SEQ ID NO: 1487073 - RNA, 19 nt, Artificial Sequence
  Description of Artificial Sequence: Synthetic oligonucleotide
gggagcuaccgaccauugg

SEQ ID NO: 1487074 - RNA, 19 nt, Artificial Sequence
  Description of Artificial Sequence: Synthetic oligonucleotide
ucacuucgccaagccgagg

SEQ ID NO: 1487075 - RNA, 19 nt, Artificial Sequence
  Description of Artificial Sequence: Synthetic oligonucleotide
aggagaggcgaccgaccca

SEQ ID NO: 1487076 - RNA, 19 nt, Artificial Sequence
  Description of Artificial Sequence: Synthetic oligonucleotide
caccugacucacuucgcca

SEQ ID NO: 1487077 - RNA, 19 nt, Artificial Sequence
  Description of Artificial Sequence: Synthetic oligonucleotide
gccacgcuggaggagagag

SEQ ID NO: 1487078 - RNA, 19 nt, Artificial Sequence
  Description of Artificial Sequence: Synthetic oligonucleotide
cucucucccuagagccagg

SEQ ID NO: 1487079 - RNA, 19 nt, Artificial Sequence
  Description of Artificial Sequence: Synthetic oligonucleotide
uccaugggacagagggcau

SEQ ID NO: 1487080 - RNA, 19 nt, Artificial Sequence
  Description of Artificial Sequence: Synthetic oligonucleotide
cucucuucgggucaccccu

SEQ ID NO: 1487081 - RNA, 19 nt, Artificial Sequence
  Description of Artificial Sequence: Synthetic oligonucleotide
gagagaggucggcucagua

SEQ ID NO: 1487082 - RNA, 19 nt, Artificial Sequence
  Description of Artificial Sequence: Synthetic oligonucleotide
cagguggccguugacgguc

SEQ ID NO: 1487083 - RNA, 19 nt, Artificial Sequence
  Description of Artificial Sequence: Synthetic oligonucleotide
ccaccugacucacuucgcc

SEQ ID NO: 1487084 - RNA, 19 nt, Artificial Sequence
  Description of Artificial Sequence: Synthetic oligonucleotide
gcuaugugccgacggagga

SEQ ID NO: 1487085 - RNA, 19 nt, Artificial Sequence
  Description of Artificial Sequence: Synthetic oligonucleotide
ucccuauccaugggacaga

SEQ ID NO: 1487086 - RNA, 19 nt, Artificial Sequence
  Description of Artificial Sequence: Synthetic oligonucleotide
caguaccagcggaaucuuc

SEQ ID NO: 1487087 - RNA, 19 nt, Artificial Sequence
  Description of Artificial Sequence: Synthetic oligonucleotide
aacucccgaauggguccag

SEQ ID NO: 1487088 - RNA, 19 nt, Artificial Sequence
  Description of Artificial Sequence: Synthetic oligonucleotide
agccccaucccugacucaa

SEQ ID NO: 1487089 - RNA, 19 nt, Artificial Sequence
  Description of Artificial Sequence: Synthetic oligonucleotide
  modified_base (2)..(2): a, c, u, g, unknown or other
cngggaaagcagguggcca

SEQ ID NO: 1487090 - RNA, 19 nt, Artificial Sequence
  Description of Artificial Sequence: Synthetic oligonucleotide
cacugggagcuaccgacca

SEQ ID NO: 1487091 - RNA, 19 nt, Artificial Sequence
  Description of Artificial Sequence: Synthetic oligonucleotide
ugaccccuuugcucuuuaa

SEQ ID NO: 1487092 - RNA, 19 nt, Artificial Sequence
  Description of Artificial Sequence: Synthetic oligonucleotide
caagucuccuagccugaca

SEQ ID NO: 1487093 - RNA, 19 nt, Artificial Sequence
  Description of Artificial Sequence: Synthetic oligonucleotide
ccagcggaaucuucucgcc

SEQ ID NO: 1487094 - RNA, 19 nt, Artificial Sequence
  Description of Artificial Sequence: Synthetic oligonucleotide
  modified_base (7)..(7): a, c, u, g, unknown or other
ggcuccncuugagagagaa

SEQ ID NO: 1487095 - RNA, 19 nt, Artificial Sequence
  Description of Artificial Sequence: Synthetic oligonucleotide
  modified_base (9)..(9): a, c, u, g, unknown or other
gcuggggcngggaaagcag

SEQ ID NO: 1487096 - RNA, 19 nt, Artificial Sequence
  Description of Artificial Sequence: Synthetic oligonucleotide
gcccuauccgucucccucc

SEQ ID NO: 1487097 - RNA, 19 nt, Artificial Sequence
  Description of Artificial Sequence: Synthetic oligonucleotide
gcuccucaugugccaaucc

SEQ ID NO: 1487098 - RNA, 19 nt, Artificial Sequence
  Description of Artificial Sequence: Synthetic oligonucleotide
cucuucgggucaccccuug

SEQ ID NO: 1487099 - RNA, 19 nt, Artificial Sequence
  Description of Artificial Sequence: Synthetic oligonucleotide
ccugccucgccccugacca

SEQ ID NO: 1487100 - RNA, 19 nt, Artificial Sequence
  Description of Artificial Sequence: Synthetic oligonucleotide
caccugucucccuccggug

SEQ ID NO: 1487101 - RNA, 19 nt, Artificial Sequence
  Description of Artificial Sequence: Synthetic oligonucleotide
ugccccauccagccccauc

SEQ ID NO: 1487102 - RNA, 19 nt, Artificial Sequence
  Description of Artificial Sequence: Synthetic oligonucleotide
cucaaaacuuuuguuguuu

SEQ ID NO: 1487103 - RNA, 19 nt, Artificial Sequence
  Description of Artificial Sequence: Synthetic oligonucleotide
gcucucuucgggucacccc

SEQ ID NO: 1487104 - RNA, 19 nt, Artificial Sequence
  Description of Artificial Sequence: Synthetic oligonucleotide
ccucaccuaggcugggcgg

SEQ ID NO: 1487105 - RNA, 19 nt, Artificial Sequence
  Description of Artificial Sequence: Synthetic oligonucleotide
acggaggagaggcgaccga

SEQ ID NO: 1487106 - RNA, 19 nt, Artificial Sequence
  Description of Artificial Sequence: Synthetic oligonucleotide
caaaggccugaauggggaa

SEQ ID NO: 1487107 - RNA, 19 nt, Artificial Sequence
  Description of Artificial Sequence: Synthetic oligonucleotide
ucaccuaggcugggcggga

SEQ ID NO: 1487108 - RNA, 19 nt, Artificial Sequence
  Description of Artificial Sequence: Synthetic oligonucleotide
  modified_base (3)..(3): a, c, u, g, unknown or other
gcngggaaagcagguggcc

SEQ ID NO: 1487109 - RNA, 19 nt, Artificial Sequence
  Description of Artificial Sequence: Synthetic oligonucleotide
agucugaguugaacuggga

SEQ ID NO: 1487110 - RNA, 19 nt, Artificial Sequence
  Description of Artificial Sequence: Synthetic oligonucleotide
ccaaucccuauccauggga

SEQ ID NO: 1487111 - RNA, 19 nt, Artificial Sequence
  Description of Artificial Sequence: Synthetic oligonucleotide
acuccucaccuaggcuggg

SEQ ID NO: 1487112 - RNA, 19 nt, Artificial Sequence
  Description of Artificial Sequence: Synthetic oligonucleotide
ggaggagaggcgaccgacc

SEQ ID NO: 1487113 - RNA, 19 nt, Artificial Sequence
  Description of Artificial Sequence: Synthetic oligonucleotide
ccuauccaugggacagagg

SEQ ID NO: 1487114 - RNA, 19 nt, Artificial Sequence
  Description of Artificial Sequence: Synthetic oligonucleotide
gcucaguaccagcggaauc

SEQ ID NO: 1487115 - RNA, 19 nt, Artificial Sequence
  Description of Artificial Sequence: Synthetic oligonucleotide
cuccucaccuaggcugggc

SEQ ID NO: 1487116 - RNA, 19 nt, Artificial Sequence
  Description of Artificial Sequence: Synthetic oligonucleotide
cucccuccgguguugggaa

SEQ ID NO: 1487117 - RNA, 19 nt, Artificial Sequence
  Description of Artificial Sequence: Synthetic oligonucleotide
gaccagcccuauccgucuc

SEQ ID NO: 1487118 - RNA, 19 nt, Artificial Sequence
  Description of Artificial Sequence: Synthetic oligonucleotide
gagggcauuuaaggcaagu

SEQ ID NO: 1487119 - RNA, 19 nt, Artificial Sequence
  Description of Artificial Sequence: Synthetic oligonucleotide
ucccuagagccaggagcca

SEQ ID NO: 1487120 - RNA, 19 nt, Artificial Sequence
  Description of Artificial Sequence: Synthetic oligonucleotide
caggaacucccgaaugggu

SEQ ID NO: 1487121 - RNA, 19 nt, Artificial Sequence
  Description of Artificial Sequence: Synthetic oligonucleotide
ggaggagccuggcaccaga

SEQ ID NO: 1487122 - RNA, 19 nt, Artificial Sequence
  Description of Artificial Sequence: Synthetic oligonucleotide
ccugacucacuucgccaag

SEQ ID NO: 1487123 - RNA, 19 nt, Artificial Sequence
  Description of Artificial Sequence: Synthetic oligonucleotide
gggguacucccggggagcg

SEQ ID NO: 1487124 - RNA, 19 nt, Artificial Sequence
  Description of Artificial Sequence: Synthetic oligonucleotide
cccaucccugacucaaaac

SEQ ID NO: 1487125 - RNA, 19 nt, Artificial Sequence
  Description of Artificial Sequence: Synthetic oligonucleotide
cugcacccacuuccccugc

SEQ ID NO: 1487126 - RNA, 19 nt, Artificial Sequence
  Description of Artificial Sequence: Synthetic oligonucleotide
  modified_base (8)..(8): a, c, u, g, unknown or other
uggcuccncuugagagaga

SEQ ID NO: 1487127 - RNA, 19 nt, Artificial Sequence
  Description of Artificial Sequence: Synthetic oligonucleotide
caccucggaggaggguucc

SEQ ID NO: 1487128 - RNA, 19 nt, Artificial Sequence
  Description of Artificial Sequence: Synthetic oligonucleotide
cuaggcugggcgggaagca

SEQ ID NO: 1487129 - RNA, 19 nt, Artificial Sequence
  Description of Artificial Sequence: Synthetic oligonucleotide
gagaggcgaccgacccagg

SEQ ID NO: 1487130 - RNA, 19 nt, Artificial Sequence
  Description of Artificial Sequence: Synthetic oligonucleotide
gcuaccgaccauuggggcu

SEQ ID NO: 1487131 - RNA, 19 nt, Artificial Sequence
  Description of Artificial Sequence: Synthetic oligonucleotide
gucaccccuugccucucuc

SEQ ID NO: 1487132 - RNA, 19 nt, Artificial Sequence
  Description of Artificial Sequence: Synthetic oligonucleotide
cugucucccuccgguguug

SEQ ID NO: 1487133 - RNA, 19 nt, Artificial Sequence
  Description of Artificial Sequence: Synthetic oligonucleotide
cucccucccaagggaggag

SEQ ID NO: 1487134 - RNA, 19 nt, Artificial Sequence
  Description of Artificial Sequence: Synthetic oligonucleotide
gaggagccuggcaccagaa

SEQ ID NO: 1487135 - RNA, 19 nt, Artificial Sequence
  Description of Artificial Sequence: Synthetic oligonucleotide
cgguguugggaaagguggc

SEQ ID NO: 1487136 - RNA, 19 nt, Artificial Sequence
  Description of Artificial Sequence: Synthetic oligonucleotide
ccggggagcgccugggcag

SEQ ID NO: 1487137 - RNA, 19 nt, Artificial Sequence
  Description of Artificial Sequence: Synthetic oligonucleotide
cccuauccaugggacagag

SEQ ID NO: 1487138 - RNA, 19 nt, Artificial Sequence
  Description of Artificial Sequence: Synthetic oligonucleotide
cuuuaaaggggagcaucau

SEQ ID NO: 1487139 - RNA, 19 nt, Artificial Sequence
  Description of Artificial Sequence: Synthetic oligonucleotide
gcuggaggugaucuuuaua

SEQ ID NO: 1487140 - RNA, 19 nt, Artificial Sequence
  Description of Artificial Sequence: Synthetic oligonucleotide
acgcuggaggagagagguc

SEQ ID NO: 1487141 - RNA, 19 nt, Artificial Sequence
  Description of Artificial Sequence: Synthetic oligonucleotide
augugccgacggaggagag

SEQ ID NO: 1487142 - RNA, 19 nt, Artificial Sequence
  Description of Artificial Sequence: Synthetic oligonucleotide
agccgaggggcccgaggaa

SEQ ID NO: 1487143 - RNA, 19 nt, Artificial Sequence
  Description of Artificial Sequence: Synthetic oligonucleotide
cuggcaccagaauggcucu

SEQ ID NO: 1487144 - RNA, 19 nt, Artificial Sequence
  Description of Artificial Sequence: Synthetic oligonucleotide
gguggccaacugaccagcc

SEQ ID NO: 1487145 - RNA, 19 nt, Artificial Sequence
  Description of Artificial Sequence: Synthetic oligonucleotide
ccaacugaccagcccuauc

SEQ ID NO: 1487146 - RNA, 19 nt, Artificial Sequence
  Description of Artificial Sequence: Synthetic oligonucleotide
gcucacugggagcuaccga

SEQ ID NO: 1487147 - RNA, 19 nt, Artificial Sequence
  Description of Artificial Sequence: Synthetic oligonucleotide
cucaugugccaaucccuau

SEQ ID NO: 1487148 - RNA, 19 nt, Artificial Sequence
  Description of Artificial Sequence: Synthetic oligonucleotide
ggucccaccugacucacuu

SEQ ID NO: 1487149 - RNA, 19 nt, Artificial Sequence
  Description of Artificial Sequence: Synthetic oligonucleotide
gguggccaacuccccuccc

SEQ ID NO: 1487150 - RNA, 19 nt, Artificial Sequence
  Description of Artificial Sequence: Synthetic oligonucleotide
ccucaugugccaaucccua

SEQ ID NO: 1487151 - RNA, 19 nt, Artificial Sequence
  Description of Artificial Sequence: Synthetic oligonucleotide
guggccguugacggucuuc

SEQ ID NO: 1487152 - RNA, 19 nt, Artificial Sequence
  Description of Artificial Sequence: Synthetic oligonucleotide
uggcaccagaauggcucuc

SEQ ID NO: 1487153 - RNA, 19 nt, Artificial Sequence
  Description of Artificial Sequence: Synthetic oligonucleotide
ccccagaauagauguagua

SEQ ID NO: 1487154 - RNA, 19 nt, Artificial Sequence
  Description of Artificial Sequence: Synthetic oligonucleotide
gugccuaagacuggccaau

SEQ ID NO: 1487155 - RNA, 19 nt, Artificial Sequence
  Description of Artificial Sequence: Synthetic oligonucleotide
  modified_base (6)..(6): a, c, u, g, unknown or other
gcuccncuugagagagaag

SEQ ID NO: 1487156 - RNA, 19 nt, Artificial Sequence
  Description of Artificial Sequence: Synthetic oligonucleotide
ggcccgaggaagaagccua

SEQ ID NO: 1487157 - RNA, 19 nt, Artificial Sequence
  Description of Artificial Sequence: Synthetic oligonucleotide
cccuauccgucucccuccc

SEQ ID NO: 1487158 - RNA, 19 nt, Artificial Sequence
  Description of Artificial Sequence: Synthetic oligonucleotide
gcaagucuccuagccugac

SEQ ID NO: 1487159 - RNA, 19 nt, Artificial Sequence
  Description of Artificial Sequence: Synthetic oligonucleotide
ccgacggaggagaggcgac

SEQ ID NO: 1487160 - RNA, 19 nt, Artificial Sequence
  Description of Artificial Sequence: Synthetic oligonucleotide
gccgacggaggagaggcga

SEQ ID NO: 1487161 - RNA, 19 nt, Artificial Sequence
  Description of Artificial Sequence: Synthetic oligonucleotide
ccgaggaagaagccuaccu

SEQ ID NO: 1487162 - RNA, 19 nt, Artificial Sequence
  Description of Artificial Sequence: Synthetic oligonucleotide
caugggacagagggcauuu

SEQ ID NO: 1487163 - RNA, 19 nt, Artificial Sequence
  Description of Artificial Sequence: Synthetic oligonucleotide
cggucuuccugcagaggug

SEQ ID NO: 1487164 - RNA, 19 nt, Artificial Sequence
  Description of Artificial Sequence: Synthetic oligonucleotide
gcuguguuuggcuccucau

SEQ ID NO: 1487165 - RNA, 19 nt, Artificial Sequence
  Description of Artificial Sequence: Synthetic oligonucleotide
agguggccguugacggucu

SEQ ID NO: 1487166 - RNA, 19 nt, Artificial Sequence
  Description of Artificial Sequence: Synthetic oligonucleotide
cugggagcuaccgaccauu

SEQ ID NO: 1487167 - RNA, 19 nt, Artificial Sequence
  Description of Artificial Sequence: Synthetic oligonucleotide
ggggcccgaggaagaagcc

SEQ ID NO: 1487168 - RNA, 19 nt, Artificial Sequence
  Description of Artificial Sequence: Synthetic oligonucleotide
cugaccccuuugcucuuua

SEQ ID NO: 1487169 - RNA, 19 nt, Artificial Sequence
  Description of Artificial Sequence: Synthetic oligonucleotide
ccgucucccucccaaggga

SEQ ID NO: 1487170 - RNA, 19 nt, Artificial Sequence
  Description of Artificial Sequence: Synthetic oligonucleotide
gccugacauaggagaaaca

SEQ ID NO: 1487171 - RNA, 19 nt, Artificial Sequence
  Description of Artificial Sequence: Synthetic oligonucleotide
cggaggagaggcgaccgac

SEQ ID NO: 1487172 - RNA, 19 nt, Artificial Sequence
  Description of Artificial Sequence: Synthetic oligonucleotide
gggaggagccuggcaccag

SEQ ID NO: 1487173 - RNA, 19 nt, Artificial Sequence
  Description of Artificial Sequence: Synthetic oligonucleotide
ccaagauggcucaucuguu

SEQ ID NO: 1487174 - RNA, 19 nt, Artificial Sequence
  Description of Artificial Sequence: Synthetic oligonucleotide
gguggcugcucuggcaccu

SEQ ID NO: 1487175 - RNA, 19 nt, Artificial Sequence
  Description of Artificial Sequence: Synthetic oligonucleotide
cagccccaucccugacuca

SEQ ID NO: 1487176 - RNA, 19 nt, Artificial Sequence
  Description of Artificial Sequence: Synthetic oligonucleotide
aggucccaccugacucacu

SEQ ID NO: 1487177 - RNA, 19 nt, Artificial Sequence
  Description of Artificial Sequence: Synthetic oligonucleotide
cgccccugaccaagaagug

SEQ ID NO: 1487178 - RNA, 19 nt, Artificial Sequence
  Description of Artificial Sequence: Synthetic oligonucleotide
gccuaagacuggccaauuu

SEQ ID NO: 1487179 - RNA, 19 nt, Artificial Sequence
  Description of Artificial Sequence: Synthetic oligonucleotide
ggguacucccggggagcgc

SEQ ID NO: 1487180 - RNA, 19 nt, Artificial Sequence
  Description of Artificial Sequence: Synthetic oligonucleotide
ggcgaccgacccaggcccc

SEQ ID NO: 1487181 - RNA, 19 nt, Artificial Sequence
  Description of Artificial Sequence: Synthetic oligonucleotide
ggggagcaucauacugguc

SEQ ID NO: 1487182 - RNA, 19 nt, Artificial Sequence
  Description of Artificial Sequence: Synthetic oligonucleotide
cugccucgccccugaccaa

SEQ ID NO: 1487183 - RNA, 19 nt, Artificial Sequence
  Description of Artificial Sequence: Synthetic oligonucleotide
ggccaacugaccagcccua

SEQ ID NO: 1487184 - RNA, 19 nt, Artificial Sequence
  Description of Artificial Sequence: Synthetic oligonucleotide
gggcccgaggaagaagccu

SEQ ID NO: 1487185 - RNA, 19 nt, Artificial Sequence
  Description of Artificial Sequence: Synthetic oligonucleotide
cguugacggucuuccugca

SEQ ID NO: 1487186 - RNA, 19 nt, Artificial Sequence
  Description of Artificial Sequence: Synthetic oligonucleotide
cagcccuauccgucucccu

SEQ ID NO: 1487187 - RNA, 19 nt, Artificial Sequence
  Description of Artificial Sequence: Synthetic oligonucleotide
cgccaagccgaggggcccg

SEQ ID NO: 1487188 - RNA, 19 nt, Artificial Sequence
  Description of Artificial Sequence: Synthetic oligonucleotide
cggggagcgccugggcagg

SEQ ID NO: 1487189 - RNA, 19 nt, Artificial Sequence
  Description of Artificial Sequence: Synthetic oligonucleotide
ccuauccgucucccuccca

SEQ ID NO: 1487190 - RNA, 19 nt, Artificial Sequence
  Description of Artificial Sequence: Synthetic oligonucleotide
cgaccauuggggcuggauu

SEQ ID NO: 1487191 - RNA, 19 nt, Artificial Sequence
  Description of Artificial Sequence: Synthetic oligonucleotide
ggucaccccuugccucucu

SEQ ID NO: 1487192 - RNA, 19 nt, Artificial Sequence
  Description of Artificial Sequence: Synthetic oligonucleotide
cccugaccaagaagugccu

SEQ ID NO: 1487193 - RNA, 19 nt, Artificial Sequence
  Description of Artificial Sequence: Synthetic oligonucleotide
guacucccggggagcgccu

SEQ ID NO: 1487194 - RNA, 19 nt, Artificial Sequence
  Description of Artificial Sequence: Synthetic oligonucleotide
ccaagccgaggggcccgag

SEQ ID NO: 1487195 - RNA, 19 nt, Artificial Sequence
  Description of Artificial Sequence: Synthetic oligonucleotide
cccugcccuucagccacug

SEQ ID NO: 1487196 - RNA, 19 nt, Artificial Sequence
  Description of Artificial Sequence: Synthetic oligonucleotide
gccaacugaccagcccuau

SEQ ID NO: 1487197 - RNA, 19 nt, Artificial Sequence
  Description of Artificial Sequence: Synthetic oligonucleotide
ccucgccccugaccaagaa

SEQ ID NO: 1487198 - RNA, 19 nt, Artificial Sequence
  Description of Artificial Sequence: Synthetic oligonucleotide
gccaagccgaggggcccga

SEQ ID NO: 1487199 - RNA, 19 nt, Artificial Sequence
  Description of Artificial Sequence: Synthetic oligonucleotide
ccgaccauuggggcuggau

SEQ ID NO: 1487200 - RNA, 19 nt, Artificial Sequence
  Description of Artificial Sequence: Synthetic oligonucleotide
gguggccguugacggucuu

SEQ ID NO: 1487201 - RNA, 19 nt, Artificial Sequence
  Description of Artificial Sequence: Synthetic oligonucleotide
ggggagcgccugggcaggu

SEQ ID NO: 1487202 - RNA, 19 nt, Artificial Sequence
  Description of Artificial Sequence: Synthetic oligonucleotide
cugccccauccagccccau

SEQ ID NO: 1487203 - RNA, 19 nt, Artificial Sequence
  Description of Artificial Sequence: Synthetic oligonucleotide
aaugagaugauucuccucc

SEQ ID NO: 1487204 - RNA, 19 nt, Artificial Sequence
  Description of Artificial Sequence: Synthetic oligonucleotide
ugaaaguucuccaauauag

SEQ ID NO: 1487205 - RNA, 19 nt, Artificial Sequence
  Description of Artificial Sequence: Synthetic oligonucleotide
uuauauacgucgaugagag

SEQ ID NO: 1487206 - RNA, 19 nt, Artificial Sequence
  Description of Artificial Sequence: Synthetic oligonucleotide
aagguuuucacacuucaac

SEQ ID NO: 1487207 - RNA, 19 nt, Artificial Sequence
  Description of Artificial Sequence: Synthetic oligonucleotide
uuuaucuaaacauuguuac

SEQ ID NO: 1487208 - RNA, 19 nt, Artificial Sequence
  Description of Artificial Sequence: Synthetic oligonucleotide
aacaguuucagacaacuug

SEQ ID NO: 1487209 - RNA, 19 nt, Artificial Sequence
  Description of Artificial Sequence: Synthetic oligonucleotide
acuauucucacuuucauug

SEQ ID NO: 1487210 - RNA, 19 nt, Artificial Sequence
  Description of Artificial Sequence: Synthetic oligonucleotide
agcugaaacaguuucagac

SEQ ID NO: 1487211 - RNA, 19 nt, Artificial Sequence
  Description of Artificial Sequence: Synthetic oligonucleotide
aagcauacccuuuaguuuc

SEQ ID NO: 1487212 - RNA, 19 nt, Artificial Sequence
  Description of Artificial Sequence: Synthetic oligonucleotide
cugaguuuuauauacgucg

SEQ ID NO: 1487213 - RNA, 19 nt, Artificial Sequence
  Description of Artificial Sequence: Synthetic oligonucleotide
uauuagguuauuuucaugu

SEQ ID NO: 1487214 - RNA, 19 nt, Artificial Sequence
  Description of Artificial Sequence: Synthetic oligonucleotide
uuuuaauuugcaaagcccu

SEQ ID NO: 1487215 - RNA, 19 nt, Artificial Sequence
  Description of Artificial Sequence: Synthetic oligonucleotide
ucaugcacuacuuugacug

SEQ ID NO: 1487216 - RNA, 19 nt, Artificial Sequence
  Description of Artificial Sequence: Synthetic oligonucleotide
aaguguuucagccuuuguc

SEQ ID NO: 1487217 - RNA, 19 nt, Artificial Sequence
  Description of Artificial Sequence: Synthetic oligonucleotide
ucuaauauuuuaauuugca

SEQ ID NO: 1487218 - RNA, 19 nt, Artificial Sequence
  Description of Artificial Sequence: Synthetic oligonucleotide
caaagugucaagcauaccc

SEQ ID NO: 1487219 - RNA, 19 nt, Artificial Sequence
  Description of Artificial Sequence: Synthetic oligonucleotide
aagauuacuauucucacuu

SEQ ID NO: 1487220 - RNA, 19 nt, Artificial Sequence
  Description of Artificial Sequence: Synthetic oligonucleotide
uguuacauaggaaaucuga

SEQ ID NO: 1487221 - RNA, 19 nt, Artificial Sequence
  Description of Artificial Sequence: Synthetic oligonucleotide
aaaagauuaacaauuugcu

SEQ ID NO: 1487222 - RNA, 19 nt, Artificial Sequence
  Description of Artificial Sequence: Synthetic oligonucleotide
auuuuaauuugcaaagccc

SEQ ID NO: 1487223 - RNA, 19 nt, Artificial Sequence
  Description of Artificial Sequence: Synthetic oligonucleotide
uuuugcauuguuucgaucu

SEQ ID NO: 1487224 - RNA, 19 nt, Artificial Sequence
  Description of Artificial Sequence: Synthetic oligonucleotide
uucuuuaagguuuucacac

SEQ ID NO: 1487225 - RNA, 19 nt, Artificial Sequence
  Description of Artificial Sequence: Synthetic oligonucleotide
uuagguuauuuucauguag

SEQ ID NO: 1487226 - RNA, 19 nt, Artificial Sequence
  Description of Artificial Sequence: Synthetic oligonucleotide
agaucuaauauuuuaauuu

SEQ ID NO: 1487227 - RNA, 19 nt, Artificial Sequence
  Description of Artificial Sequence: Synthetic oligonucleotide
uuaccauuuucucauaaug

SEQ ID NO: 1487228 - RNA, 19 nt, Artificial Sequence
  Description of Artificial Sequence: Synthetic oligonucleotide
ucaguggucaauaaauuca

SEQ ID NO: 1487229 - RNA, 19 nt, Artificial Sequence
  Description of Artificial Sequence: Synthetic oligonucleotide
ucuauuaccauuuucucau

SEQ ID NO: 1487230 - RNA, 19 nt, Artificial Sequence
  Description of Artificial Sequence: Synthetic oligonucleotide
agguauaacaaucaguggu

SEQ ID NO: 1487231 - RNA, 19 nt, Artificial Sequence
  Description of Artificial Sequence: Synthetic oligonucleotide
uuuaacuuaucauucucug

SEQ ID NO: 1487232 - RNA, 19 nt, Artificial Sequence
  Description of Artificial Sequence: Synthetic oligonucleotide
auuuucaccugcaaguucc

SEQ ID NO: 1487233 - RNA, 19 nt, Artificial Sequence
  Description of Artificial Sequence: Synthetic oligonucleotide
ugucuguaaacuuuggaug

SEQ ID NO: 1487234 - RNA, 19 nt, Artificial Sequence
  Description of Artificial Sequence: Synthetic oligonucleotide
acaaggcuugguuagaagg

SEQ ID NO: 1487235 - RNA, 19 nt, Artificial Sequence
  Description of Artificial Sequence: Synthetic oligonucleotide
uuuuauauacgucgaugag

SEQ ID NO: 1487236 - RNA, 19 nt, Artificial Sequence
  Description of Artificial Sequence: Synthetic oligonucleotide
acuacuuugacugacugag

SEQ ID NO: 1487237 - RNA, 19 nt, Artificial Sequence
  Description of Artificial Sequence: Synthetic oligonucleotide
auuucuuucagcaaaauau

SEQ ID NO: 1487238 - RNA, 19 nt, Artificial Sequence
  Description of Artificial Sequence: Synthetic oligonucleotide
uuuacuguucauuuugcca

SEQ ID NO: 1487239 - RNA, 19 nt, Artificial Sequence
  Description of Artificial Sequence: Synthetic oligonucleotide
uuacauaggaaaucugaag

SEQ ID NO: 1487240 - RNA, 19 nt, Artificial Sequence
  Description of Artificial Sequence: Synthetic oligonucleotide
aauuuaucuaaacauuguu

SEQ ID NO: 1487241 - RNA, 19 nt, Artificial Sequence
  Description of Artificial Sequence: Synthetic oligonucleotide
aaaccuuuugccucccuuc

SEQ ID NO: 1487242 - RNA, 19 nt, Artificial Sequence
  Description of Artificial Sequence: Synthetic oligonucleotide
uuuuaacuuaucauucucu

SEQ ID NO: 1487243 - RNA, 19 nt, Artificial Sequence
  Description of Artificial Sequence: Synthetic oligonucleotide
uagguuauuuucauguagc

SEQ ID NO: 1487244 - RNA, 19 nt, Artificial Sequence
  Description of Artificial Sequence: Synthetic oligonucleotide
cauaaugacuuuuccaggc

SEQ ID NO: 1487245 - RNA, 19 nt, Artificial Sequence
  Description of Artificial Sequence: Synthetic oligonucleotide
cuaaacauuguuacauagg

SEQ ID NO: 1487246 - RNA, 19 nt, Artificial Sequence
  Description of Artificial Sequence: Synthetic oligonucleotide
ugcaaguaguucuuaaugc

SEQ ID NO: 1487247 - RNA, 19 nt, Artificial Sequence
  Description of Artificial Sequence: Synthetic oligonucleotide
uaaggaucucaucacauga

SEQ ID NO: 1487248 - RNA, 19 nt, Artificial Sequence
  Description of Artificial Sequence: Synthetic oligonucleotide
aagguauaacaaucagugg

SEQ ID NO: 1487249 - RNA, 19 nt, Artificial Sequence
  Description of Artificial Sequence: Synthetic oligonucleotide
cuuaaugcucucauuuugg

SEQ ID NO: 1487250 - RNA, 19 nt, Artificial Sequence
  Description of Artificial Sequence: Synthetic oligonucleotide
ucuuucuaagcucaguuuc

SEQ ID NO: 1487251 - RNA, 19 nt, Artificial Sequence
  Description of Artificial Sequence: Synthetic oligonucleotide
ucuagcuuuucuuuaaggu

SEQ ID NO: 1487252 - RNA, 19 nt, Artificial Sequence
  Description of Artificial Sequence: Synthetic oligonucleotide
ucauaagguauaacaauca

SEQ ID NO: 1487253 - RNA, 19 nt, Artificial Sequence
  Description of Artificial Sequence: Synthetic oligonucleotide
ucauaaugacuuuuccagg

SEQ ID NO: 1487254 - RNA, 19 nt, Artificial Sequence
  Description of Artificial Sequence: Synthetic oligonucleotide
aucaguggucaauaaauuc

SEQ ID NO: 1487255 - RNA, 19 nt, Artificial Sequence
  Description of Artificial Sequence: Synthetic oligonucleotide
uuuauauacgucgaugaga

SEQ ID NO: 1487256 - RNA, 19 nt, Artificial Sequence
  Description of Artificial Sequence: Synthetic oligonucleotide
aauucuacgagcucauuuu

SEQ ID NO: 1487257 - RNA, 19 nt, Artificial Sequence
  Description of Artificial Sequence: Synthetic oligonucleotide
uuaagguuuucacacuuca

SEQ ID NO: 1487258 - RNA, 19 nt, Artificial Sequence
  Description of Artificial Sequence: Synthetic oligonucleotide
ugugcuguauuucuuucag

SEQ ID NO: 1487259 - RNA, 19 nt, Artificial Sequence
  Description of Artificial Sequence: Synthetic oligonucleotide
uggucaauaaauucaacaa

SEQ ID NO: 1487260 - RNA, 19 nt, Artificial Sequence
  Description of Artificial Sequence: Synthetic oligonucleotide
aaaauauccuggugcuggg

SEQ ID NO: 1487261 - RNA, 19 nt, Artificial Sequence
  Description of Artificial Sequence: Synthetic oligonucleotide
aaagauuaacaauuugcuu

SEQ ID NO: 1487262 - RNA, 19 nt, Artificial Sequence
  Description of Artificial Sequence: Synthetic oligonucleotide
aucauaagguauaacaauc

SEQ ID NO: 1487263 - RNA, 19 nt, Artificial Sequence
  Description of Artificial Sequence: Synthetic oligonucleotide
uuacuguucauuuugccaa

SEQ ID NO: 1487264 - RNA, 19 nt, Artificial Sequence
  Description of Artificial Sequence: Synthetic oligonucleotide
uuaagauuacuauucucac

SEQ ID NO: 1487265 - RNA, 19 nt, Artificial Sequence
  Description of Artificial Sequence: Synthetic oligonucleotide
uaccauuuucucauaauga

SEQ ID NO: 1487266 - RNA, 19 nt, Artificial Sequence
  Description of Artificial Sequence: Synthetic oligonucleotide
cugaaugagaugauucucc

SEQ ID NO: 1487267 - RNA, 19 nt, Artificial Sequence
  Description of Artificial Sequence: Synthetic oligonucleotide
acauucucaauguuuagca

SEQ ID NO: 1487268 - RNA, 19 nt, Artificial Sequence
  Description of Artificial Sequence: Synthetic oligonucleotide
cuucuuguaauucuacgag

SEQ ID NO: 1487269 - RNA, 19 nt, Artificial Sequence
  Description of Artificial Sequence: Synthetic oligonucleotide
uacuucuuguaauucuacg

SEQ ID NO: 1487270 - RNA, 19 nt, Artificial Sequence
  Description of Artificial Sequence: Synthetic oligonucleotide
agugagguguucaaugucc

SEQ ID NO: 1487271 - RNA, 19 nt, Artificial Sequence
  Description of Artificial Sequence: Synthetic oligonucleotide
uuaacuuaucauucucugc

SEQ ID NO: 1487272 - RNA, 19 nt, Artificial Sequence
  Description of Artificial Sequence: Synthetic oligonucleotide
acccuuuaguuucacauuc

SEQ ID NO: 1487273 - RNA, 19 nt, Artificial Sequence
  Description of Artificial Sequence: Synthetic oligonucleotide
aaaucauaagguauaacaa

SEQ ID NO: 1487274 - RNA, 19 nt, Artificial Sequence
  Description of Artificial Sequence: Synthetic oligonucleotide
uacgagcucauuuucaaca

SEQ ID NO: 1487275 - RNA, 19 nt, Artificial Sequence
  Description of Artificial Sequence: Synthetic oligonucleotide
aucuaauauuuuaauuugc

SEQ ID NO: 1487276 - RNA, 19 nt, Artificial Sequence
  Description of Artificial Sequence: Synthetic oligonucleotide
uucaaagugucaagcauac

SEQ ID NO: 1487277 - RNA, 19 nt, Artificial Sequence
  Description of Artificial Sequence: Synthetic oligonucleotide
acaauuuaucuaaacauug

SEQ ID NO: 1487278 - RNA, 19 nt, Artificial Sequence
  Description of Artificial Sequence: Synthetic oligonucleotide
uucacacuucaacugaaug

SEQ ID NO: 1487279 - RNA, 19 nt, Artificial Sequence
  Description of Artificial Sequence: Synthetic oligonucleotide
ucaagcauacccuuuaguu

SEQ ID NO: 1487280 - RNA, 19 nt, Artificial Sequence
  Description of Artificial Sequence: Synthetic oligonucleotide
auuguuacauaggaaaucu

SEQ ID NO: 1487281 - RNA, 19 nt, Artificial Sequence
  Description of Artificial Sequence: Synthetic oligonucleotide
acaguuucagacaacuugg

SEQ ID NO: 1487282 - RNA, 19 nt, Artificial Sequence
  Description of Artificial Sequence: Synthetic oligonucleotide
guaccugaguuuuauauac

SEQ ID NO: 1487283 - RNA, 19 nt, Artificial Sequence
  Description of Artificial Sequence: Synthetic oligonucleotide
ucuaagcucaguuuccaga

SEQ ID NO: 1487284 - RNA, 19 nt, Artificial Sequence
  Description of Artificial Sequence: Synthetic oligonucleotide
gucuguaaacuuuggaugc

SEQ ID NO: 1487285 - RNA, 19 nt, Artificial Sequence
  Description of Artificial Sequence: Synthetic oligonucleotide
ugacauuuucucuacuucu

SEQ ID NO: 1487286 - RNA, 19 nt, Artificial Sequence
  Description of Artificial Sequence: Synthetic oligonucleotide
ucuacuucuucagaaaccu

SEQ ID NO: 1487287 - RNA, 19 nt, Artificial Sequence
  Description of Artificial Sequence: Synthetic oligonucleotide
uucucauaaugacuuuucc

SEQ ID NO: 1487288 - RNA, 19 nt, Artificial Sequence
  Description of Artificial Sequence: Synthetic oligonucleotide
cauaagguauaacaaucag

SEQ ID NO: 1487289 - RNA, 19 nt, Artificial Sequence
  Description of Artificial Sequence: Synthetic oligonucleotide
uuaucuaaacauuguuaca

SEQ ID NO: 1487290 - RNA, 19 nt, Artificial Sequence
  Description of Artificial Sequence: Synthetic oligonucleotide
auuauuagguuauuuucau

SEQ ID NO: 1487291 - RNA, 19 nt, Artificial Sequence
  Description of Artificial Sequence: Synthetic oligonucleotide
gucgcugugcuucagauac

SEQ ID NO: 1487292 - RNA, 19 nt, Artificial Sequence
  Description of Artificial Sequence: Synthetic oligonucleotide
gaagcugaaacaguuucag

SEQ ID NO: 1487293 - RNA, 19 nt, Artificial Sequence
  Description of Artificial Sequence: Synthetic oligonucleotide
uucagaaaccuuuugccuc

SEQ ID NO: 1487294 - RNA, 19 nt, Artificial Sequence
  Description of Artificial Sequence: Synthetic oligonucleotide
auacccuuuaguuucacau

SEQ ID NO: 1487295 - RNA, 19 nt, Artificial Sequence
  Description of Artificial Sequence: Synthetic oligonucleotide
ucaauguuuagcaguuugu

SEQ ID NO: 1487296 - RNA, 19 nt, Artificial Sequence
  Description of Artificial Sequence: Synthetic oligonucleotide
uuccuuuuaagauuacuau

SEQ ID NO: 1487297 - RNA, 19 nt, Artificial Sequence
  Description of Artificial Sequence: Synthetic oligonucleotide
ucagaaaccuuuugccucc

SEQ ID NO: 1487298 - RNA, 19 nt, Artificial Sequence
  Description of Artificial Sequence: Synthetic oligonucleotide
cuuucuaagcucaguuucc

SEQ ID NO: 1487299 - RNA, 19 nt, Artificial Sequence
  Description of Artificial Sequence: Synthetic oligonucleotide
cugagguccuucaacaagc

SEQ ID NO: 1487300 - RNA, 19 nt, Artificial Sequence
  Description of Artificial Sequence: Synthetic oligonucleotide
aacaauuuaucuaaacauu

SEQ ID NO: 1487301 - RNA, 19 nt, Artificial Sequence
  Description of Artificial Sequence: Synthetic oligonucleotide
auuguuucgaucugaacuu

SEQ ID NO: 1487302 - RNA, 19 nt, Artificial Sequence
  Description of Artificial Sequence: Synthetic oligonucleotide
uaagauuacuauucucacu

SEQ ID NO: 1487303 - RNA, 19 nt, Artificial Sequence
  Description of Artificial Sequence: Synthetic oligonucleotide
gauuacuauucucacuuuc

SEQ ID NO: 1487304 - RNA, 19 nt, Artificial Sequence
  Description of Artificial Sequence: Synthetic oligonucleotide
cuuauucauuuucaccugc

SEQ ID NO: 1487305 - RNA, 19 nt, Artificial Sequence
  Description of Artificial Sequence: Synthetic oligonucleotide
cuaagcuauaaaucauaag

SEQ ID NO: 1487306 - RNA, 19 nt, Artificial Sequence
  Description of Artificial Sequence: Synthetic oligonucleotide
uuucgaucugaacuuccag

SEQ ID NO: 1487307 - RNA, 19 nt, Artificial Sequence
  Description of Artificial Sequence: Synthetic oligonucleotide
ugugaaguguuucagccuu

SEQ ID NO: 1487308 - RNA, 19 nt, Artificial Sequence
  Description of Artificial Sequence: Synthetic oligonucleotide
uaauucuacgagcucauuu

SEQ ID NO: 1487309 - RNA, 19 nt, Artificial Sequence
  Description of Artificial Sequence: Synthetic oligonucleotide
uuucuaaggaucucaucac

SEQ ID NO: 1487310 - RNA, 19 nt, Artificial Sequence
  Description of Artificial Sequence: Synthetic oligonucleotide
aaagcccucucucuagaug

SEQ ID NO: 1487311 - RNA, 19 nt, Artificial Sequence
  Description of Artificial Sequence: Synthetic oligonucleotide
uugaaacagacaugaaagu

SEQ ID NO: 1487312 - RNA, 19 nt, Artificial Sequence
  Description of Artificial Sequence: Synthetic oligonucleotide
auaaaucauaagguauaac

SEQ ID NO: 1487313 - RNA, 19 nt, Artificial Sequence
  Description of Artificial Sequence: Synthetic oligonucleotide
ucuaaggaucucaucacau

SEQ ID NO: 1487314 - RNA, 19 nt, Artificial Sequence
  Description of Artificial Sequence: Synthetic oligonucleotide
ugcucuuuuaacuuaucau

SEQ ID NO: 1487315 - RNA, 19 nt, Artificial Sequence
  Description of Artificial Sequence: Synthetic oligonucleotide
aaagugucaagcauacccu

SEQ ID NO: 1487316 - RNA, 19 nt, Artificial Sequence
  Description of Artificial Sequence: Synthetic oligonucleotide
ucuacuucuuguaauucua

SEQ ID NO: 1487317 - RNA, 19 nt, Artificial Sequence
  Description of Artificial Sequence: Synthetic oligonucleotide
aaauauccuggugcugggc

SEQ ID NO: 1487318 - RNA, 19 nt, Artificial Sequence
  Description of Artificial Sequence: Synthetic oligonucleotide
uuucaaagcgcuuuccuuu

SEQ ID NO: 1487319 - RNA, 19 nt, Artificial Sequence
  Description of Artificial Sequence: Synthetic oligonucleotide
uuccaagcccuucaugugc

SEQ ID NO: 1487320 - RNA, 19 nt, Artificial Sequence
  Description of Artificial Sequence: Synthetic oligonucleotide
aacacugcuaagcuauaaa

SEQ ID NO: 1487321 - RNA, 19 nt, Artificial Sequence
  Description of Artificial Sequence: Synthetic oligonucleotide
auucuacgagcucauuuuc

SEQ ID NO: 1487322 - RNA, 19 nt, Artificial Sequence
  Description of Artificial Sequence: Synthetic oligonucleotide
guuuucgucuucaagugag

SEQ ID NO: 1487323 - RNA, 19 nt, Artificial Sequence
  Description of Artificial Sequence: Synthetic oligonucleotide
agugagugaaguuuucuaa

SEQ ID NO: 1487324 - RNA, 19 nt, Artificial Sequence
  Description of Artificial Sequence: Synthetic oligonucleotide
aaguaguucuuaaugcucu

SEQ ID NO: 1487325 - RNA, 19 nt, Artificial Sequence
  Description of Artificial Sequence: Synthetic oligonucleotide
ugaacuuccaguucacuuu

SEQ ID NO: 1487326 - RNA, 19 nt, Artificial Sequence
  Description of Artificial Sequence: Synthetic oligonucleotide
aguucuccaauauaggcuu

SEQ ID NO: 1487327 - RNA, 19 nt, Artificial Sequence
  Description of Artificial Sequence: Synthetic oligonucleotide
auauacgucgaugagaguu

SEQ ID NO: 1487328 - RNA, 19 nt, Artificial Sequence
  Description of Artificial Sequence: Synthetic oligonucleotide
uccuuuucauuuugaaaca

SEQ ID NO: 1487329 - RNA, 19 nt, Artificial Sequence
  Description of Artificial Sequence: Synthetic oligonucleotide
uaccugaguuuuauauacg

SEQ ID NO: 1487330 - RNA, 19 nt, Artificial Sequence
  Description of Artificial Sequence: Synthetic oligonucleotide
uauaaaucauaagguauaa

SEQ ID NO: 1487331 - RNA, 19 nt, Artificial Sequence
  Description of Artificial Sequence: Synthetic oligonucleotide
gaugauucuccuccucaag

SEQ ID NO: 1487332 - RNA, 19 nt, Artificial Sequence
  Description of Artificial Sequence: Synthetic oligonucleotide
uguuucgaucugaacuucc

SEQ ID NO: 1487333 - RNA, 19 nt, Artificial Sequence
  Description of Artificial Sequence: Synthetic oligonucleotide
cucuagcuuuucuuuaagg

SEQ ID NO: 1487334 - RNA, 19 nt, Artificial Sequence
  Description of Artificial Sequence: Synthetic oligonucleotide
cugcaaguaguucuuaaug

SEQ ID NO: 1487335 - RNA, 19 nt, Artificial Sequence
  Description of Artificial Sequence: Synthetic oligonucleotide
uuuugguucucugacuucu

SEQ ID NO: 1487336 - RNA, 19 nt, Artificial Sequence
  Description of Artificial Sequence: Synthetic oligonucleotide
uuaaugcucucauuuuggu

SEQ ID NO: 1487337 - RNA, 19 nt, Artificial Sequence
  Description of Artificial Sequence: Synthetic oligonucleotide
uuacuauucucacuuucau

SEQ ID NO: 1487338 - RNA, 19 nt, Artificial Sequence
  Description of Artificial Sequence: Synthetic oligonucleotide
agaaaaccgguuugcuuuc

SEQ ID NO: 1487339 - RNA, 19 nt, Artificial Sequence
  Description of Artificial Sequence: Synthetic oligonucleotide
uucaagugagugaaguuuu

SEQ ID NO: 1487340 - RNA, 19 nt, Artificial Sequence
  Description of Artificial Sequence: Synthetic oligonucleotide
acggucaugcacuacuuug

SEQ ID NO: 1487341 - RNA, 19 nt, Artificial Sequence
  Description of Artificial Sequence: Synthetic oligonucleotide
ugaaucuggaggugcagac

SEQ ID NO: 1487342 - RNA, 19 nt, Artificial Sequence
  Description of Artificial Sequence: Synthetic oligonucleotide
ucauccuucaaagugucaa

SEQ ID NO: 1487343 - RNA, 19 nt, Artificial Sequence
  Description of Artificial Sequence: Synthetic oligonucleotide
uccaucaaccuucucuaac

SEQ ID NO: 1487344 - RNA, 19 nt, Artificial Sequence
  Description of Artificial Sequence: Synthetic oligonucleotide
ugacuucucaagacugugc

SEQ ID NO: 1487345 - RNA, 19 nt, Artificial Sequence
  Description of Artificial Sequence: Synthetic oligonucleotide
uucucugacuucucaagac

SEQ ID NO: 1487346 - RNA, 19 nt, Artificial Sequence
  Description of Artificial Sequence: Synthetic oligonucleotide
uguaauucuacgagcucau

SEQ ID NO: 1487347 - RNA, 19 nt, Artificial Sequence
  Description of Artificial Sequence: Synthetic oligonucleotide
ucuacgagcucauuuucaa

SEQ ID NO: 1487348 - RNA, 19 nt, Artificial Sequence
  Description of Artificial Sequence: Synthetic oligonucleotide
agaagcaacuucauccuuc

SEQ ID NO: 1487349 - RNA, 19 nt, Artificial Sequence
  Description of Artificial Sequence: Synthetic oligonucleotide
uguuuucgucuucaaguga

SEQ ID NO: 1487350 - RNA, 19 nt, Artificial Sequence
  Description of Artificial Sequence: Synthetic oligonucleotide
augauucuccuccucaaga

SEQ ID NO: 1487351 - RNA, 19 nt, Artificial Sequence
  Description of Artificial Sequence: Synthetic oligonucleotide
cuaaggaucucaucacaug

SEQ ID NO: 1487352 - RNA, 19 nt, Artificial Sequence
  Description of Artificial Sequence: Synthetic oligonucleotide
ugaucucggaucugggcag

SEQ ID NO: 1487353 - RNA, 19 nt, Artificial Sequence
  Description of Artificial Sequence: Synthetic oligonucleotide
gacugacugagaaaaccgg

SEQ ID NO: 1487354 - RNA, 19 nt, Artificial Sequence
  Description of Artificial Sequence: Synthetic oligonucleotide
uuugauggcuacagccacc

SEQ ID NO: 1487355 - RNA, 19 nt, Artificial Sequence
  Description of Artificial Sequence: Synthetic oligonucleotide
uuagcaguuuguuuucguc

SEQ ID NO: 1487356 - RNA, 19 nt, Artificial Sequence
  Description of Artificial Sequence: Synthetic oligonucleotide
uucgucuucaagugaguga

SEQ ID NO: 1487357 - RNA, 19 nt, Artificial Sequence
  Description of Artificial Sequence: Synthetic oligonucleotide
ucuuuaagguuuucacacu

SEQ ID NO: 1487358 - RNA, 19 nt, Artificial Sequence
  Description of Artificial Sequence: Synthetic oligonucleotide
uucuacgagcucauuuuca

SEQ ID NO: 1487359 - RNA, 19 nt, Artificial Sequence
  Description of Artificial Sequence: Synthetic oligonucleotide
uguaccugaguuuuauaua

SEQ ID NO: 1487360 - RNA, 19 nt, Artificial Sequence
  Description of Artificial Sequence: Synthetic oligonucleotide
cacugcuaagcuauaaauc

SEQ ID NO: 1487361 - RNA, 19 nt, Artificial Sequence
  Description of Artificial Sequence: Synthetic oligonucleotide
cauucucaauguuuagcag

SEQ ID NO: 1487362 - RNA, 19 nt, Artificial Sequence
  Description of Artificial Sequence: Synthetic oligonucleotide
acacugcuaagcuauaaau

SEQ ID NO: 1487363 - RNA, 19 nt, Artificial Sequence
  Description of Artificial Sequence: Synthetic oligonucleotide
uuaucauucucugcuuccc

SEQ ID NO: 1487364 - RNA, 19 nt, Artificial Sequence
  Description of Artificial Sequence: Synthetic oligonucleotide
acuuucauugucacugagg

SEQ ID NO: 1487365 - RNA, 19 nt, Artificial Sequence
  Description of Artificial Sequence: Synthetic oligonucleotide
ugucaagcauacccuuuag

SEQ ID NO: 1487366 - RNA, 19 nt, Artificial Sequence
  Description of Artificial Sequence: Synthetic oligonucleotide
uagaugacauuuucucuac

SEQ ID NO: 1487367 - RNA, 19 nt, Artificial Sequence
  Description of Artificial Sequence: Synthetic oligonucleotide
auuuaucuaaacauuguua

SEQ ID NO: 1487368 - RNA, 19 nt, Artificial Sequence
  Description of Artificial Sequence: Synthetic oligonucleotide
uaaugacuuuuccaggcau

SEQ ID NO: 1487369 - RNA, 19 nt, Artificial Sequence
  Description of Artificial Sequence: Synthetic oligonucleotide
uuguuacauaggaaaucug

SEQ ID NO: 1487370 - RNA, 19 nt, Artificial Sequence
  Description of Artificial Sequence: Synthetic oligonucleotide
aacaaucaguggucaauaa

SEQ ID NO: 1487371 - RNA, 19 nt, Artificial Sequence
  Description of Artificial Sequence: Synthetic oligonucleotide
ucgucuucaagugagugaa

SEQ ID NO: 1487372 - RNA, 19 nt, Artificial Sequence
  Description of Artificial Sequence: Synthetic oligonucleotide
uuuccaagcccuucaugug

SEQ ID NO: 1487373 - RNA, 19 nt, Artificial Sequence
  Description of Artificial Sequence: Synthetic oligonucleotide
auuaccauuuucucauaau

SEQ ID NO: 1487374 - RNA, 19 nt, Artificial Sequence
  Description of Artificial Sequence: Synthetic oligonucleotide
uuuagcaguuuguuuucgu

SEQ ID NO: 1487375 - RNA, 19 nt, Artificial Sequence
  Description of Artificial Sequence: Synthetic oligonucleotide
ucgaugagaguuuucuguc

SEQ ID NO: 1487376 - RNA, 19 nt, Artificial Sequence
  Description of Artificial Sequence: Synthetic oligonucleotide
uaauuugcaaagcccucuc

SEQ ID NO: 1487377 - RNA, 19 nt, Artificial Sequence
  Description of Artificial Sequence: Synthetic oligonucleotide
aacugcaaguaguucuuaa

SEQ ID NO: 1487378 - RNA, 19 nt, Artificial Sequence
  Description of Artificial Sequence: Synthetic oligonucleotide
agguuauuuucauguagca

SEQ ID NO: 1487379 - RNA, 19 nt, Artificial Sequence
  Description of Artificial Sequence: Synthetic oligonucleotide
acaaucaguggucaauaaa

SEQ ID NO: 1487380 - RNA, 19 nt, Artificial Sequence
  Description of Artificial Sequence: Synthetic oligonucleotide
acgagcucauuuucaacag

SEQ ID NO: 1487381 - RNA, 19 nt, Artificial Sequence
  Description of Artificial Sequence: Synthetic oligonucleotide
cuagaugacauuuucucua

SEQ ID NO: 1487382 - RNA, 19 nt, Artificial Sequence
  Description of Artificial Sequence: Synthetic oligonucleotide
cuuugauggcuacagccac

SEQ ID NO: 1487383 - RNA, 19 nt, Artificial Sequence
  Description of Artificial Sequence: Synthetic oligonucleotide
ggaaaucugaagaaacugc

SEQ ID NO: 1487384 - RNA, 19 nt, Artificial Sequence
  Description of Artificial Sequence: Synthetic oligonucleotide
uauacgucgaugagaguuu

SEQ ID NO: 1487385 - RNA, 19 nt, Artificial Sequence
  Description of Artificial Sequence: Synthetic oligonucleotide
gaaucuggaggugcagacg

SEQ ID NO: 1487386 - RNA, 19 nt, Artificial Sequence
  Description of Artificial Sequence: Synthetic oligonucleotide
uuucgucuucaagugagug

SEQ ID NO: 1487387 - RNA, 19 nt, Artificial Sequence
  Description of Artificial Sequence: Synthetic oligonucleotide
gagaaaaccgguuugcuuu

SEQ ID NO: 1487388 - RNA, 19 nt, Artificial Sequence
  Description of Artificial Sequence: Synthetic oligonucleotide
cauuguuacauaggaaauc

SEQ ID NO: 1487389 - RNA, 19 nt, Artificial Sequence
  Description of Artificial Sequence: Synthetic oligonucleotide
uucuaagcucaguuuccag

SEQ ID NO: 1487390 - RNA, 19 nt, Artificial Sequence
  Description of Artificial Sequence: Synthetic oligonucleotide
uuugccucccuucuuccaa

SEQ ID NO: 1487391 - RNA, 19 nt, Artificial Sequence
  Description of Artificial Sequence: Synthetic oligonucleotide
aagcugaaacaguuucaga

SEQ ID NO: 1487392 - RNA, 19 nt, Artificial Sequence
  Description of Artificial Sequence: Synthetic oligonucleotide
ugaaacaguuucagacaac

SEQ ID NO: 1487393 - RNA, 19 nt, Artificial Sequence
  Description of Artificial Sequence: Synthetic oligonucleotide
acaugaaaguucuccaaua

SEQ ID NO: 1487394 - RNA, 19 nt, Artificial Sequence
  Description of Artificial Sequence: Synthetic oligonucleotide
ugcauuguuucgaucugaa

SEQ ID NO: 1487395 - RNA, 19 nt, Artificial Sequence
  Description of Artificial Sequence: Synthetic oligonucleotide
ugagaaaaccgguuugcuu

SEQ ID NO: 1487396 - RNA, 19 nt, Artificial Sequence
  Description of Artificial Sequence: Synthetic oligonucleotide
uuucuaagcucaguuucca

SEQ ID NO: 1487397 - RNA, 19 nt, Artificial Sequence
  Description of Artificial Sequence: Synthetic oligonucleotide
guucauuuugccaacaagu

SEQ ID NO: 1487398 - RNA, 19 nt, Artificial Sequence
  Description of Artificial Sequence: Synthetic oligonucleotide
aacuuaucauucucugcuu

SEQ ID NO: 1487399 - RNA, 19 nt, Artificial Sequence
  Description of Artificial Sequence: Synthetic oligonucleotide
cagggcuguaguuuucugc

SEQ ID NO: 1487400 - RNA, 19 nt, Artificial Sequence
  Description of Artificial Sequence: Synthetic oligonucleotide
aaagcgcuuuccuuuucau

SEQ ID NO: 1487401 - RNA, 19 nt, Artificial Sequence
  Description of Artificial Sequence: Synthetic oligonucleotide
auuagguuauuuucaugua

SEQ ID NO: 1487402 - RNA, 19 nt, Artificial Sequence
  Description of Artificial Sequence: Synthetic oligonucleotide
agacaugaaaguucuccaa

SEQ ID NO: 1487403 - RNA, 19 nt, Artificial Sequence
  Description of Artificial Sequence: Synthetic oligonucleotide
ugcacuacuuugacugacu

SEQ ID NO: 1487404 - RNA, 19 nt, Artificial Sequence
  Description of Artificial Sequence: Synthetic oligonucleotide
aguuccacuuggcuauuug

SEQ ID NO: 1487405 - RNA, 19 nt, Artificial Sequence
  Description of Artificial Sequence: Synthetic oligonucleotide
uucuuucuaagcucaguuu

SEQ ID NO: 1487406 - RNA, 19 nt, Artificial Sequence
  Description of Artificial Sequence: Synthetic oligonucleotide
gucacugagguccuucaac

SEQ ID NO: 1487407 - RNA, 19 nt, Artificial Sequence
  Description of Artificial Sequence: Synthetic oligonucleotide
uuuucgucuucaagugagu

SEQ ID NO: 1487408 - RNA, 19 nt, Artificial Sequence
  Description of Artificial Sequence: Synthetic oligonucleotide
caaucaguggucaauaaau

SEQ ID NO: 1487409 - RNA, 19 nt, Artificial Sequence
  Description of Artificial Sequence: Synthetic oligonucleotide
aaucaguggucaauaaauu

SEQ ID NO: 1487410 - RNA, 19 nt, Artificial Sequence
  Description of Artificial Sequence: Synthetic oligonucleotide
agacaacuugguuuccuga

SEQ ID NO: 1487411 - RNA, 19 nt, Artificial Sequence
  Description of Artificial Sequence: Synthetic oligonucleotide
gaaugagaugauucuccuc

SEQ ID NO: 1487412 - RNA, 19 nt, Artificial Sequence
  Description of Artificial Sequence: Synthetic oligonucleotide
cuucaaagugucaagcaua

SEQ ID NO: 1487413 - RNA, 19 nt, Artificial Sequence
  Description of Artificial Sequence: Synthetic oligonucleotide
uaacaaucaguggucaaua

SEQ ID NO: 1487414 - RNA, 19 nt, Artificial Sequence
  Description of Artificial Sequence: Synthetic oligonucleotide
aauguccccugugaagugu

SEQ ID NO: 1487415 - RNA, 19 nt, Artificial Sequence
  Description of Artificial Sequence: Synthetic oligonucleotide
uuucuacuucuuguaauuc

SEQ ID NO: 1487416 - RNA, 19 nt, Artificial Sequence
  Description of Artificial Sequence: Synthetic oligonucleotide
ugcucuagcuuuucuuuaa

SEQ ID NO: 1487417 - RNA, 19 nt, Artificial Sequence
  Description of Artificial Sequence: Synthetic oligonucleotide
guuacauaggaaaucugaa

SEQ ID NO: 1487418 - RNA, 19 nt, Artificial Sequence
  Description of Artificial Sequence: Synthetic oligonucleotide
ugaaguguuucagccuuug

SEQ ID NO: 1487419 - RNA, 19 nt, Artificial Sequence
  Description of Artificial Sequence: Synthetic oligonucleotide
cuuguaauucuacgagcuc

SEQ ID NO: 1487420 - RNA, 19 nt, Artificial Sequence
  Description of Artificial Sequence: Synthetic oligonucleotide
uccaagcccuucaugugcu

SEQ ID NO: 1487421 - RNA, 19 nt, Artificial Sequence
  Description of Artificial Sequence: Synthetic oligonucleotide
uucaaguaccuuccuuuua

SEQ ID NO: 1487422 - RNA, 19 nt, Artificial Sequence
  Description of Artificial Sequence: Synthetic oligonucleotide
ggcagugagguguucaaug

SEQ ID NO: 1487423 - RNA, 19 nt, Artificial Sequence
  Description of Artificial Sequence: Synthetic oligonucleotide
augcacuacuuugacugac

SEQ ID NO: 1487424 - RNA, 19 nt, Artificial Sequence
  Description of Artificial Sequence: Synthetic oligonucleotide
cugaaacaguuucagacaa

SEQ ID NO: 1487425 - RNA, 19 nt, Artificial Sequence
  Description of Artificial Sequence: Synthetic oligonucleotide
aguggucaauaaauucaac

SEQ ID NO: 1487426 - RNA, 19 nt, Artificial Sequence
  Description of Artificial Sequence: Synthetic oligonucleotide
aaaaccgguuugcuuucaa

SEQ ID NO: 1487427 - RNA, 19 nt, Artificial Sequence
  Description of Artificial Sequence: Synthetic oligonucleotide
guguuucagccuuugucug

SEQ ID NO: 1487428 - RNA, 19 nt, Artificial Sequence
  Description of Artificial Sequence: Synthetic oligonucleotide
ucaacugaaugagaugauu

SEQ ID NO: 1487429 - RNA, 19 nt, Artificial Sequence
  Description of Artificial Sequence: Synthetic oligonucleotide
uugguuuccugaucucgga

SEQ ID NO: 1487430 - RNA, 19 nt, Artificial Sequence
  Description of Artificial Sequence: Synthetic oligonucleotide
cagacaugaaaguucucca

SEQ ID NO: 1487431 - RNA, 19 nt, Artificial Sequence
  Description of Artificial Sequence: Synthetic oligonucleotide
acgucgaugagaguuuucu

SEQ ID NO: 1487432 - RNA, 19 nt, Artificial Sequence
  Description of Artificial Sequence: Synthetic oligonucleotide
ccgguuugcuuucaaagcg

SEQ ID NO: 1487433 - RNA, 19 nt, Artificial Sequence
  Description of Artificial Sequence: Synthetic oligonucleotide
gucgaugagaguuuucugu

SEQ ID NO: 1487434 - RNA, 19 nt, Artificial Sequence
  Description of Artificial Sequence: Synthetic oligonucleotide
gaugagaguuuucugucgu

SEQ ID NO: 1487435 - RNA, 19 nt, Artificial Sequence
  Description of Artificial Sequence: Synthetic oligonucleotide
gguauaacaaucagugguc

SEQ ID NO: 1487436 - RNA, 19 nt, Artificial Sequence
  Description of Artificial Sequence: Synthetic oligonucleotide
uccccugugaaguguuuca

SEQ ID NO: 1487437 - RNA, 19 nt, Artificial Sequence
  Description of Artificial Sequence: Synthetic oligonucleotide
ugcuucccuuuucugaauc

SEQ ID NO: 1487438 - RNA, 19 nt, Artificial Sequence
  Description of Artificial Sequence: Synthetic oligonucleotide
agguguucaauguccccug

SEQ ID NO: 1487439 - RNA, 19 nt, Artificial Sequence
  Description of Artificial Sequence: Synthetic oligonucleotide
agcucuuuauucucagcau

SEQ ID NO: 1487440 - RNA, 19 nt, Artificial Sequence
  Description of Artificial Sequence: Synthetic oligonucleotide
uacuguucauuuugccaac

SEQ ID NO: 1487441 - RNA, 19 nt, Artificial Sequence
  Description of Artificial Sequence: Synthetic oligonucleotide
uugcuuucaaagcgcuuuc

SEQ ID NO: 1487442 - RNA, 19 nt, Artificial Sequence
  Description of Artificial Sequence: Synthetic oligonucleotide
uuagaaggcugugguuucc

SEQ ID NO: 1487443 - RNA, 19 nt, Artificial Sequence
  Description of Artificial Sequence: Synthetic oligonucleotide
cuacgagcucauuuucaac

SEQ ID NO: 1487444 - RNA, 19 nt, Artificial Sequence
  Description of Artificial Sequence: Synthetic oligonucleotide
guauaacaaucagugguca

SEQ ID NO: 1487445 - RNA, 19 nt, Artificial Sequence
  Description of Artificial Sequence: Synthetic oligonucleotide
cuccuccucaagacaaggc

SEQ ID NO: 1487446 - RNA, 19 nt, Artificial Sequence
  Description of Artificial Sequence: Synthetic oligonucleotide
uuuuaccacuucagcugcu

SEQ ID NO: 1487447 - RNA, 19 nt, Artificial Sequence
  Description of Artificial Sequence: Synthetic oligonucleotide
acugacugagaaaaccggu

SEQ ID NO: 1487448 - RNA, 19 nt, Artificial Sequence
  Description of Artificial Sequence: Synthetic oligonucleotide
gacaugaaaguucuccaau

SEQ ID NO: 1487449 - RNA, 19 nt, Artificial Sequence
  Description of Artificial Sequence: Synthetic oligonucleotide
ucucucuagaugacauuuu

SEQ ID NO: 1487450 - RNA, 19 nt, Artificial Sequence
  Description of Artificial Sequence: Synthetic oligonucleotide
uugcauuguuucgaucuga

SEQ ID NO: 1487451 - RNA, 19 nt, Artificial Sequence
  Description of Artificial Sequence: Synthetic oligonucleotide
ccaaaagauuaacaauuug

SEQ ID NO: 1487452 - RNA, 19 nt, Artificial Sequence
  Description of Artificial Sequence: Synthetic oligonucleotide
ugcuuucaaagcgcuuucc

SEQ ID NO: 1487453 - RNA, 19 nt, Artificial Sequence
  Description of Artificial Sequence: Synthetic oligonucleotide
uuugguucucugacuucuc

SEQ ID NO: 1487454 - RNA, 19 nt, Artificial Sequence
  Description of Artificial Sequence: Synthetic oligonucleotide
cacuuucauugucacugag

SEQ ID NO: 1487455 - RNA, 19 nt, Artificial Sequence
  Description of Artificial Sequence: Synthetic oligonucleotide
ucaaagugucaagcauacc

SEQ ID NO: 1487456 - RNA, 19 nt, Artificial Sequence
  Description of Artificial Sequence: Synthetic oligonucleotide
ugguuuccugaucucggau

SEQ ID NO: 1487457 - RNA, 19 nt, Artificial Sequence
  Description of Artificial Sequence: Synthetic oligonucleotide
aucugaacuuccaguucac

SEQ ID NO: 1487458 - RNA, 19 nt, Artificial Sequence
  Description of Artificial Sequence: Synthetic oligonucleotide
ucagggcuguaguuuucug

SEQ ID NO: 1487459 - RNA, 19 nt, Artificial Sequence
  Description of Artificial Sequence: Synthetic oligonucleotide
guuuccagaucuaauauuu

SEQ ID NO: 1487460 - RNA, 19 nt, Artificial Sequence
  Description of Artificial Sequence: Synthetic oligonucleotide
uauauacgucgaugagagu

SEQ ID NO: 1487461 - RNA, 19 nt, Artificial Sequence
  Description of Artificial Sequence: Synthetic oligonucleotide
guuuccugaucucggaucu

SEQ ID NO: 1487462 - RNA, 19 nt, Artificial Sequence
  Description of Artificial Sequence: Synthetic oligonucleotide
cccuucuuccaaaagcggc

SEQ ID NO: 1487463 - RNA, 19 nt, Artificial Sequence
  Description of Artificial Sequence: Synthetic oligonucleotide
gcugugguuuccaucaacc

SEQ ID NO: 1487464 - RNA, 19 nt, Artificial Sequence
  Description of Artificial Sequence: Synthetic oligonucleotide
cuugcuucuuugauggcua

SEQ ID NO: 1487465 - RNA, 19 nt, Artificial Sequence
  Description of Artificial Sequence: Synthetic oligonucleotide
uggcuauuuggguuuccaa

SEQ ID NO: 1487466 - RNA, 19 nt, Artificial Sequence
  Description of Artificial Sequence: Synthetic oligonucleotide
gguuuccugaucucggauc

SEQ ID NO: 1487467 - RNA, 19 nt, Artificial Sequence
  Description of Artificial Sequence: Synthetic oligonucleotide
agauuacuauucucacuuu

SEQ ID NO: 1487468 - RNA, 19 nt, Artificial Sequence
  Description of Artificial Sequence: Synthetic oligonucleotide
uauuuucauguagcaaauu

SEQ ID NO: 1487469 - RNA, 19 nt, Artificial Sequence
  Description of Artificial Sequence: Synthetic oligonucleotide
cacuucaacugaaugagau

SEQ ID NO: 1487470 - RNA, 19 nt, Artificial Sequence
  Description of Artificial Sequence: Synthetic oligonucleotide
uggaggugcagacggucau

SEQ ID NO: 1487471 - RNA, 19 nt, Artificial Sequence
  Description of Artificial Sequence: Synthetic oligonucleotide
agccuuugucuguaaacuu

SEQ ID NO: 1487472 - RNA, 19 nt, Artificial Sequence
  Description of Artificial Sequence: Synthetic oligonucleotide
ggucaauaaauucaacaau

SEQ ID NO: 1487473 - RNA, 19 nt, Artificial Sequence
  Description of Artificial Sequence: Synthetic oligonucleotide
uuguuucgaucugaacuuc

SEQ ID NO: 1487474 - RNA, 19 nt, Artificial Sequence
  Description of Artificial Sequence: Synthetic oligonucleotide
cagugagguguucaauguc

SEQ ID NO: 1487475 - RNA, 19 nt, Artificial Sequence
  Description of Artificial Sequence: Synthetic oligonucleotide
caauguccccugugaagug

SEQ ID NO: 1487476 - RNA, 19 nt, Artificial Sequence
  Description of Artificial Sequence: Synthetic oligonucleotide
aggucgcugugcuucagau

SEQ ID NO: 1487477 - RNA, 19 nt, Artificial Sequence
  Description of Artificial Sequence: Synthetic oligonucleotide
gcuauaaaucauaagguau

SEQ ID NO: 1487478 - RNA, 19 nt, Artificial Sequence
  Description of Artificial Sequence: Synthetic oligonucleotide
uuccaucaaccuucucuaa

SEQ ID NO: 1487479 - RNA, 19 nt, Artificial Sequence
  Description of Artificial Sequence: Synthetic oligonucleotide
cacuacuuugacugacuga

SEQ ID NO: 1487480 - RNA, 19 nt, Artificial Sequence
  Description of Artificial Sequence: Synthetic oligonucleotide
ggucaugcacuacuuugac

SEQ ID NO: 1487481 - RNA, 19 nt, Artificial Sequence
  Description of Artificial Sequence: Synthetic oligonucleotide
cagaucuaauauuuuaauu

SEQ ID NO: 1487482 - RNA, 19 nt, Artificial Sequence
  Description of Artificial Sequence: Synthetic oligonucleotide
caugaaaguucuccaauau

SEQ ID NO: 1487483 - RNA, 19 nt, Artificial Sequence
  Description of Artificial Sequence: Synthetic oligonucleotide
gcacuacuuugacugacug

SEQ ID NO: 1487484 - RNA, 19 nt, Artificial Sequence
  Description of Artificial Sequence: Synthetic oligonucleotide
caagcauacccuuuaguuu

SEQ ID NO: 1487485 - RNA, 19 nt, Artificial Sequence
  Description of Artificial Sequence: Synthetic oligonucleotide
ccugaucucggaucugggc

SEQ ID NO: 1487486 - RNA, 19 nt, Artificial Sequence
  Description of Artificial Sequence: Synthetic oligonucleotide
uguacucugcagccuucuu

SEQ ID NO: 1487487 - RNA, 19 nt, Artificial Sequence
  Description of Artificial Sequence: Synthetic oligonucleotide
gguuauuuucauguagcaa

SEQ ID NO: 1487488 - RNA, 19 nt, Artificial Sequence
  Description of Artificial Sequence: Synthetic oligonucleotide
auuuugccaacaaguuggu

SEQ ID NO: 1487489 - RNA, 19 nt, Artificial Sequence
  Description of Artificial Sequence: Synthetic oligonucleotide
gucuucaagugagugaagu

SEQ ID NO: 1487490 - RNA, 19 nt, Artificial Sequence
  Description of Artificial Sequence: Synthetic oligonucleotide
ucucaagacugugcuguau

SEQ ID NO: 1487491 - RNA, 19 nt, Artificial Sequence
  Description of Artificial Sequence: Synthetic oligonucleotide
uacgucgaugagaguuuuc

SEQ ID NO: 1487492 - RNA, 19 nt, Artificial Sequence
  Description of Artificial Sequence: Synthetic oligonucleotide
augagaguuuucugucguu

SEQ ID NO: 1487493 - RNA, 19 nt, Artificial Sequence
  Description of Artificial Sequence: Synthetic oligonucleotide
uccaggucgcugugcuuca

SEQ ID NO: 1487494 - RNA, 19 nt, Artificial Sequence
  Description of Artificial Sequence: Synthetic oligonucleotide
agaaaccuuuugccucccu

SEQ ID NO: 1487495 - RNA, 19 nt, Artificial Sequence
  Description of Artificial Sequence: Synthetic oligonucleotide
uucucaagacugugcugua

SEQ ID NO: 1487496 - RNA, 19 nt, Artificial Sequence
  Description of Artificial Sequence: Synthetic oligonucleotide
gcaaguuccacuuggcuau

SEQ ID NO: 1487497 - RNA, 19 nt, Artificial Sequence
  Description of Artificial Sequence: Synthetic oligonucleotide
gaacuuccaguucacuuuu

SEQ ID NO: 1487498 - RNA, 19 nt, Artificial Sequence
  Description of Artificial Sequence: Synthetic oligonucleotide
gcuaagcuauaaaucauaa

SEQ ID NO: 1487499 - RNA, 19 nt, Artificial Sequence
  Description of Artificial Sequence: Synthetic oligonucleotide
agacaaggcuugguuagaa

SEQ ID NO: 1487500 - RNA, 19 nt, Artificial Sequence
  Description of Artificial Sequence: Synthetic oligonucleotide
augugcucuuuuaacuuau

SEQ ID NO: 1487501 - RNA, 19 nt, Artificial Sequence
  Description of Artificial Sequence: Synthetic oligonucleotide
cuacuuugacugacugaga

SEQ ID NO: 1487502 - RNA, 19 nt, Artificial Sequence
  Description of Artificial Sequence: Synthetic oligonucleotide
cugaaucuggaggugcaga

SEQ ID NO: 1487503 - RNA, 19 nt, Artificial Sequence
  Description of Artificial Sequence: Synthetic oligonucleotide
cuggaggugcagacgguca

SEQ ID NO: 1487504 - RNA, 19 nt, Artificial Sequence
  Description of Artificial Sequence: Synthetic oligonucleotide
cagacggucaugcacuacu

SEQ ID NO: 1487505 - RNA, 19 nt, Artificial Sequence
  Description of Artificial Sequence: Synthetic oligonucleotide
gucaagcauacccuuuagu

SEQ ID NO: 1487506 - RNA, 19 nt, Artificial Sequence
  Description of Artificial Sequence: Synthetic oligonucleotide
ggaagcugaaacaguuuca

SEQ ID NO: 1487507 - RNA, 19 nt, Artificial Sequence
  Description of Artificial Sequence: Synthetic oligonucleotide
agugucaagcauacccuuu

SEQ ID NO: 1487508 - RNA, 19 nt, Artificial Sequence
  Description of Artificial Sequence: Synthetic oligonucleotide
gaaaaccgguuugcuuuca

SEQ ID NO: 1487509 - RNA, 19 nt, Artificial Sequence
  Description of Artificial Sequence: Synthetic oligonucleotide
gcauuguuucgaucugaac

SEQ ID NO: 1487510 - RNA, 19 nt, Artificial Sequence
  Description of Artificial Sequence: Synthetic oligonucleotide
aggcuugguuagaaggcug

SEQ ID NO: 1487511 - RNA, 19 nt, Artificial Sequence
  Description of Artificial Sequence: Synthetic oligonucleotide
acacuucaacugaaugaga

SEQ ID NO: 1487512 - RNA, 19 nt, Artificial Sequence
  Description of Artificial Sequence: Synthetic oligonucleotide
ugcagacggucaugcacua

SEQ ID NO: 1487513 - RNA, 19 nt, Artificial Sequence
  Description of Artificial Sequence: Synthetic oligonucleotide
ugccaacaaguugguuuug

SEQ ID NO: 1487514 - RNA, 19 nt, Artificial Sequence
  Description of Artificial Sequence: Synthetic oligonucleotide
gcaaaauauccuggugcug

SEQ ID NO: 1487515 - RNA, 19 nt, Artificial Sequence
  Description of Artificial Sequence: Synthetic oligonucleotide
cgguuugcuuucaaagcgc

SEQ ID NO: 1487516 - RNA, 19 nt, Artificial Sequence
  Description of Artificial Sequence: Synthetic oligonucleotide
accuuccuuuuaagauuac

SEQ ID NO: 1487517 - RNA, 19 nt, Artificial Sequence
  Description of Artificial Sequence: Synthetic oligonucleotide
ggcugugguuuccaucaac

SEQ ID NO: 1487518 - RNA, 19 nt, Artificial Sequence
  Description of Artificial Sequence: Synthetic oligonucleotide
cugugaaguguuucagccu

SEQ ID NO: 1487519 - RNA, 19 nt, Artificial Sequence
  Description of Artificial Sequence: Synthetic oligonucleotide
cuauuaccauuuucucaua

SEQ ID NO: 1487520 - RNA, 19 nt, Artificial Sequence
  Description of Artificial Sequence: Synthetic oligonucleotide
gcuuucaaagcgcuuuccu

SEQ ID NO: 1487521 - RNA, 19 nt, Artificial Sequence
  Description of Artificial Sequence: Synthetic oligonucleotide
gugcagacggucaugcacu

SEQ ID NO: 1487522 - RNA, 19 nt, Artificial Sequence
  Description of Artificial Sequence: Synthetic oligonucleotide
auacgucgaugagaguuuu

SEQ ID NO: 1487523 - RNA, 19 nt, Artificial Sequence
  Description of Artificial Sequence: Synthetic oligonucleotide
cucaagacugugcuguauu

SEQ ID NO: 1487524 - RNA, 19 nt, Artificial Sequence
  Description of Artificial Sequence: Synthetic oligonucleotide
gcaaagcccucucucuaga

SEQ ID NO: 1487525 - RNA, 19 nt, Artificial Sequence
  Description of Artificial Sequence: Synthetic oligonucleotide
guccccugugaaguguuuc

SEQ ID NO: 1487526 - RNA, 19 nt, Artificial Sequence
  Description of Artificial Sequence: Synthetic oligonucleotide
cacuuuucucuauuaccau

SEQ ID NO: 1487527 - RNA, 19 nt, Artificial Sequence
  Description of Artificial Sequence: Synthetic oligonucleotide
caguuucagacaacuuggu

SEQ ID NO: 1487528 - RNA, 19 nt, Artificial Sequence
  Description of Artificial Sequence: Synthetic oligonucleotide
gcuugguuagaaggcugug

SEQ ID NO: 1487529 - RNA, 19 nt, Artificial Sequence
  Description of Artificial Sequence: Synthetic oligonucleotide
cugagaaaaccgguuugcu

SEQ ID NO: 1487530 - RNA, 19 nt, Artificial Sequence
  Description of Artificial Sequence: Synthetic oligonucleotide
agacggucaugcacuacuu

SEQ ID NO: 1487531 - RNA, 19 nt, Artificial Sequence
  Description of Artificial Sequence: Synthetic oligonucleotide
gacggucaugcacuacuuu

SEQ ID NO: 1487532 - RNA, 19 nt, Artificial Sequence
  Description of Artificial Sequence: Synthetic oligonucleotide
aggcugugguuuccaucaa

SEQ ID NO: 1487533 - RNA, 19 nt, Artificial Sequence
  Description of Artificial Sequence: Synthetic oligonucleotide
ucugggcagugagguguuc

SEQ ID NO: 1487534 - RNA, 19 nt, Artificial Sequence
  Description of Artificial Sequence: Synthetic oligonucleotide
cggucaugcacuacuuuga

SEQ ID NO: 1487535 - RNA, 19 nt, Artificial Sequence
  Description of Artificial Sequence: Synthetic oligonucleotide
caaagcccucucucuagau

SEQ ID NO: 1487536 - RNA, 19 nt, Artificial Sequence
  Description of Artificial Sequence: Synthetic oligonucleotide
gaucucggaucugggcagu

SEQ ID NO: 1487537 - RNA, 19 nt, Artificial Sequence
  Description of Artificial Sequence: Synthetic oligonucleotide
cuacuucuucagaaaccuu

SEQ ID NO: 1487538 - RNA, 19 nt, Artificial Sequence
  Description of Artificial Sequence: Synthetic oligonucleotide
ggucgcugugcuucagaua

SEQ ID NO: 1487539 - RNA, 19 nt, Artificial Sequence
  Description of Artificial Sequence: Synthetic oligonucleotide
gguguucaauguccccugu

SEQ ID NO: 1487540 - RNA, 19 nt, Artificial Sequence
  Description of Artificial Sequence: Synthetic oligonucleotide
cgucuucaagugagugaag

SEQ ID NO: 1487541 - RNA, 19 nt, Artificial Sequence
  Description of Artificial Sequence: Synthetic oligonucleotide
ccaggcauuggaagcugaa

SEQ ID NO: 1487542 - RNA, 19 nt, Artificial Sequence
  Description of Artificial Sequence: Synthetic oligonucleotide
gccaacaaguugguuuugu

SEQ ID NO: 1487543 - RNA, 19 nt, Artificial Sequence
  Description of Artificial Sequence: Synthetic oligonucleotide
guaauucuacgagcucauu

SEQ ID NO: 1487544 - RNA, 19 nt, Artificial Sequence
  Description of Artificial Sequence: Synthetic oligonucleotide
guuugcuuucaaagcgcuu

SEQ ID NO: 1487545 - RNA, 19 nt, Artificial Sequence
  Description of Artificial Sequence: Synthetic oligonucleotide
ccuccucaagacaaggcuu

SEQ ID NO: 1487546 - RNA, 19 nt, Artificial Sequence
  Description of Artificial Sequence: Synthetic oligonucleotide
ccaagcccuucaugugcuc

SEQ ID NO: 1487547 - RNA, 19 nt, Artificial Sequence
  Description of Artificial Sequence: Synthetic oligonucleotide
gugaaguguuucagccuuu

SEQ ID NO: 1487548 - RNA, 19 nt, Artificial Sequence
  Description of Artificial Sequence: Synthetic oligonucleotide
gcgcuuuccuuuucauuuu

SEQ ID NO: 1487549 - RNA, 19 nt, Artificial Sequence
  Description of Artificial Sequence: Synthetic oligonucleotide
caaguuccacuuggcuauu

SEQ ID NO: 1487550 - RNA, 19 nt, Artificial Sequence
  Description of Artificial Sequence: Synthetic oligonucleotide
aaccauuaacccuaaaggc

SEQ ID NO: 1487551 - RNA, 19 nt, Artificial Sequence
  Description of Artificial Sequence: Synthetic oligonucleotide
uauuuugccguuaagacag

SEQ ID NO: 1487552 - RNA, 19 nt, Artificial Sequence
  Description of Artificial Sequence: Synthetic oligonucleotide
uuaaggaauaauaaacacg

SEQ ID NO: 1487553 - RNA, 19 nt, Artificial Sequence
  Description of Artificial Sequence: Synthetic oligonucleotide
aaagcugucgcuaugauag

SEQ ID NO: 1487554 - RNA, 19 nt, Artificial Sequence
  Description of Artificial Sequence: Synthetic oligonucleotide
aauguguggacacuaaaag

SEQ ID NO: 1487555 - RNA, 19 nt, Artificial Sequence
  Description of Artificial Sequence: Synthetic oligonucleotide
uucuuaaggaauaauaaac

SEQ ID NO: 1487556 - RNA, 19 nt, Artificial Sequence
  Description of Artificial Sequence: Synthetic oligonucleotide
uuaaugguuacauauuugc

SEQ ID NO: 1487557 - RNA, 19 nt, Artificial Sequence
  Description of Artificial Sequence: Synthetic oligonucleotide
aagaaacuaacaucaacuc

SEQ ID NO: 1487558 - RNA, 19 nt, Artificial Sequence
  Description of Artificial Sequence: Synthetic oligonucleotide
aauacugaagagcugcaag

SEQ ID NO: 1487559 - RNA, 19 nt, Artificial Sequence
  Description of Artificial Sequence: Synthetic oligonucleotide
ucuuaaggaauaauaaaca

SEQ ID NO: 1487560 - RNA, 19 nt, Artificial Sequence
  Description of Artificial Sequence: Synthetic oligonucleotide
aaagaaacuaacaucaacu

SEQ ID NO: 1487561 - RNA, 19 nt, Artificial Sequence
  Description of Artificial Sequence: Synthetic oligonucleotide
uugauuuagagcaucaagu

SEQ ID NO: 1487562 - RNA, 19 nt, Artificial Sequence
  Description of Artificial Sequence: Synthetic oligonucleotide
cauaagucagcaaauacag

SEQ ID NO: 1487563 - RNA, 19 nt, Artificial Sequence
  Description of Artificial Sequence: Synthetic oligonucleotide
aaaauggugaagagaaccc

SEQ ID NO: 1487564 - RNA, 19 nt, Artificial Sequence
  Description of Artificial Sequence: Synthetic oligonucleotide
auucauuuaacagacacag

SEQ ID NO: 1487565 - RNA, 19 nt, Artificial Sequence
  Description of Artificial Sequence: Synthetic oligonucleotide
ucagaauccaaacaaacaa

SEQ ID NO: 1487566 - RNA, 19 nt, Artificial Sequence
  Description of Artificial Sequence: Synthetic oligonucleotide
aauuauuuugccguuaaga

SEQ ID NO: 1487567 - RNA, 19 nt, Artificial Sequence
  Description of Artificial Sequence: Synthetic oligonucleotide
caaccauuaacccuaaagg

SEQ ID NO: 1487568 - RNA, 19 nt, Artificial Sequence
  Description of Artificial Sequence: Synthetic oligonucleotide
ucuacgaaagcacaaagaa

SEQ ID NO: 1487569 - RNA, 19 nt, Artificial Sequence
  Description of Artificial Sequence: Synthetic oligonucleotide
aaagaccuauaaaacaagc

SEQ ID NO: 1487570 - RNA, 19 nt, Artificial Sequence
  Description of Artificial Sequence: Synthetic oligonucleotide
gacacuaaaaguaucacug

SEQ ID NO: 1487571 - RNA, 19 nt, Artificial Sequence
  Description of Artificial Sequence: Synthetic oligonucleotide
aaauccuacauugauuuag

SEQ ID NO: 1487572 - RNA, 19 nt, Artificial Sequence
  Description of Artificial Sequence: Synthetic oligonucleotide
uuguaaaggccuuaaaggc

SEQ ID NO: 1487573 - RNA, 19 nt, Artificial Sequence
  Description of Artificial Sequence: Synthetic oligonucleotide
accaucuagcaguaaaucc

SEQ ID NO: 1487574 - RNA, 19 nt, Artificial Sequence
  Description of Artificial Sequence: Synthetic oligonucleotide
gaaacuaacaucaacucac

SEQ ID NO: 1487575 - RNA, 19 nt, Artificial Sequence
  Description of Artificial Sequence: Synthetic oligonucleotide
auuuagagcaucaagucac

SEQ ID NO: 1487576 - RNA, 19 nt, Artificial Sequence
  Description of Artificial Sequence: Synthetic oligonucleotide
aagauuucuacgaaagcac

SEQ ID NO: 1487577 - RNA, 19 nt, Artificial Sequence
  Description of Artificial Sequence: Synthetic oligonucleotide
uauaacacagacuucuucu

SEQ ID NO: 1487578 - RNA, 19 nt, Artificial Sequence
  Description of Artificial Sequence: Synthetic oligonucleotide
auugauuuagagcaucaag

SEQ ID NO: 1487579 - RNA, 19 nt, Artificial Sequence
  Description of Artificial Sequence: Synthetic oligonucleotide
aaaaucuaggccaaugaag

SEQ ID NO: 1487580 - RNA, 19 nt, Artificial Sequence
  Description of Artificial Sequence: Synthetic oligonucleotide
gaaaauggugaagagaacc

SEQ ID NO: 1487581 - RNA, 19 nt, Artificial Sequence
  Description of Artificial Sequence: Synthetic oligonucleotide
aaaaguaccuuucuggcua

SEQ ID NO: 1487582 - RNA, 19 nt, Artificial Sequence
  Description of Artificial Sequence: Synthetic oligonucleotide
aaaaccaucuagcaguaaa

SEQ ID NO: 1487583 - RNA, 19 nt, Artificial Sequence
  Description of Artificial Sequence: Synthetic oligonucleotide
acuaacaucaacucacucu

SEQ ID NO: 1487584 - RNA, 19 nt, Artificial Sequence
  Description of Artificial Sequence: Synthetic oligonucleotide
cauauuugcaucauuagga

SEQ ID NO: 1487585 - RNA, 19 nt, Artificial Sequence
  Description of Artificial Sequence: Synthetic oligonucleotide
uuucuggcuacacacauga

SEQ ID NO: 1487586 - RNA, 19 nt, Artificial Sequence
  Description of Artificial Sequence: Synthetic oligonucleotide
aggaauaauaaacacgaga

SEQ ID NO: 1487587 - RNA, 19 nt, Artificial Sequence
  Description of Artificial Sequence: Synthetic oligonucleotide
ugagauauuguuuccuaag

SEQ ID NO: 1487588 - RNA, 19 nt, Artificial Sequence
  Description of Artificial Sequence: Synthetic oligonucleotide
augguuacauauuugcauc

SEQ ID NO: 1487589 - RNA, 19 nt, Artificial Sequence
  Description of Artificial Sequence: Synthetic oligonucleotide
uaccauaauuauuuugccg

SEQ ID NO: 1487590 - RNA, 19 nt, Artificial Sequence
  Description of Artificial Sequence: Synthetic oligonucleotide
aaaucuaggccaaugaaga

SEQ ID NO: 1487591 - RNA, 19 nt, Artificial Sequence
  Description of Artificial Sequence: Synthetic oligonucleotide
uuugaaacuguucgguuug

SEQ ID NO: 1487592 - RNA, 19 nt, Artificial Sequence
  Description of Artificial Sequence: Synthetic oligonucleotide
aguaucacuguuuucugag

SEQ ID NO: 1487593 - RNA, 19 nt, Artificial Sequence
  Description of Artificial Sequence: Synthetic oligonucleotide
caaaagaucuaaucugccg

SEQ ID NO: 1487594 - RNA, 19 nt, Artificial Sequence
  Description of Artificial Sequence: Synthetic oligonucleotide
uaacccuaaaggcaaaaug

SEQ ID NO: 1487595 - RNA, 19 nt, Artificial Sequence
  Description of Artificial Sequence: Synthetic oligonucleotide
uuauuuugccguuaagaca

SEQ ID NO: 1487596 - RNA, 19 nt, Artificial Sequence
  Description of Artificial Sequence: Synthetic oligonucleotide
gaagagaacccucaaaaga

SEQ ID NO: 1487597 - RNA, 19 nt, Artificial Sequence
  Description of Artificial Sequence: Synthetic oligonucleotide
uuugccguuaagacagugg

SEQ ID NO: 1487598 - RNA, 19 nt, Artificial Sequence
  Description of Artificial Sequence: Synthetic oligonucleotide
uuucuacgaaagcacaaag

SEQ ID NO: 1487599 - RNA, 19 nt, Artificial Sequence
  Description of Artificial Sequence: Synthetic oligonucleotide
aaagcgagcgagccgacag

SEQ ID NO: 1487600 - RNA, 19 nt, Artificial Sequence
  Description of Artificial Sequence: Synthetic oligonucleotide
gguaaacaugcuuacacgg

SEQ ID NO: 1487601 - RNA, 19 nt, Artificial Sequence
  Description of Artificial Sequence: Synthetic oligonucleotide
uccuacauugauuuagagc

SEQ ID NO: 1487602 - RNA, 19 nt, Artificial Sequence
  Description of Artificial Sequence: Synthetic oligonucleotide
agaccuauaaaacaagcaa

SEQ ID NO: 1487603 - RNA, 19 nt, Artificial Sequence
  Description of Artificial Sequence: Synthetic oligonucleotide
ccuacauugauuuagagca

SEQ ID NO: 1487604 - RNA, 19 nt, Artificial Sequence
  Description of Artificial Sequence: Synthetic oligonucleotide
ggaauaauaaacacgagac

SEQ ID NO: 1487605 - RNA, 19 nt, Artificial Sequence
  Description of Artificial Sequence: Synthetic oligonucleotide
uuccuguuguaaaacaggc

SEQ ID NO: 1487606 - RNA, 19 nt, Artificial Sequence
  Description of Artificial Sequence: Synthetic oligonucleotide
ugaccuugcagaguaaggg

SEQ ID NO: 1487607 - RNA, 19 nt, Artificial Sequence
  Description of Artificial Sequence: Synthetic oligonucleotide
ugauuuagagcaucaaguc

SEQ ID NO: 1487608 - RNA, 19 nt, Artificial Sequence
  Description of Artificial Sequence: Synthetic oligonucleotide
ccuaacacugcuuacacgg

SEQ ID NO: 1487609 - RNA, 19 nt, Artificial Sequence
  Description of Artificial Sequence: Synthetic oligonucleotide
agguaaacaugcuuacacg

SEQ ID NO: 1487610 - RNA, 19 nt, Artificial Sequence
  Description of Artificial Sequence: Synthetic oligonucleotide
gugguaauauaacacagac

SEQ ID NO: 1487611 - RNA, 19 nt, Artificial Sequence
  Description of Artificial Sequence: Synthetic oligonucleotide
agaagaugcgggaaaaugg

SEQ ID NO: 1487612 - RNA, 19 nt, Artificial Sequence
  Description of Artificial Sequence: Synthetic oligonucleotide
uuuagcacugaaagguccc

SEQ ID NO: 1487613 - RNA, 19 nt, Artificial Sequence
  Description of Artificial Sequence: Synthetic oligonucleotide
agaaacuaacaucaacuca

SEQ ID NO: 1487614 - RNA, 19 nt, Artificial Sequence
  Description of Artificial Sequence: Synthetic oligonucleotide
uacaguuuucuuuccauga

SEQ ID NO: 1487615 - RNA, 19 nt, Artificial Sequence
  Description of Artificial Sequence: Synthetic oligonucleotide
cuaaguacagguaagggaa

SEQ ID NO: 1487616 - RNA, 19 nt, Artificial Sequence
  Description of Artificial Sequence: Synthetic oligonucleotide
cuaauuauccccaagauuu

SEQ ID NO: 1487617 - RNA, 19 nt, Artificial Sequence
  Description of Artificial Sequence: Synthetic oligonucleotide
aaaagaccuauaaaacaag

SEQ ID NO: 1487618 - RNA, 19 nt, Artificial Sequence
  Description of Artificial Sequence: Synthetic oligonucleotide
ucugccgcaaaaucuaggc

SEQ ID NO: 1487619 - RNA, 19 nt, Artificial Sequence
  Description of Artificial Sequence: Synthetic oligonucleotide
uuaccauaauuauuuugcc

SEQ ID NO: 1487620 - RNA, 19 nt, Artificial Sequence
  Description of Artificial Sequence: Synthetic oligonucleotide
aacacugcuuacacggacc

SEQ ID NO: 1487621 - RNA, 19 nt, Artificial Sequence
  Description of Artificial Sequence: Synthetic oligonucleotide
aaacacgagacuuguauuu

SEQ ID NO: 1487622 - RNA, 19 nt, Artificial Sequence
  Description of Artificial Sequence: Synthetic oligonucleotide
gacgagugaauacugaaga

SEQ ID NO: 1487623 - RNA, 19 nt, Artificial Sequence
  Description of Artificial Sequence: Synthetic oligonucleotide
gauuuagagcaucaaguca

SEQ ID NO: 1487624 - RNA, 19 nt, Artificial Sequence
  Description of Artificial Sequence: Synthetic oligonucleotide
ugccgcaaaaucuaggcca

SEQ ID NO: 1487625 - RNA, 19 nt, Artificial Sequence
  Description of Artificial Sequence: Synthetic oligonucleotide
aaacuguucgguuuguguu

SEQ ID NO: 1487626 - RNA, 19 nt, Artificial Sequence
  Description of Artificial Sequence: Synthetic oligonucleotide
uucuacgaaagcacaaaga

SEQ ID NO: 1487627 - RNA, 19 nt, Artificial Sequence
  Description of Artificial Sequence: Synthetic oligonucleotide
aaacaagcaaaagggccac

SEQ ID NO: 1487628 - RNA, 19 nt, Artificial Sequence
  Description of Artificial Sequence: Synthetic oligonucleotide
cuuuagcacugaaaggucc

SEQ ID NO: 1487629 - RNA, 19 nt, Artificial Sequence
  Description of Artificial Sequence: Synthetic oligonucleotide
aaccaucuagcaguaaauc

SEQ ID NO: 1487630 - RNA, 19 nt, Artificial Sequence
  Description of Artificial Sequence: Synthetic oligonucleotide
aauguagacgaguggugcu

SEQ ID NO: 1487631 - RNA, 19 nt, Artificial Sequence
  Description of Artificial Sequence: Synthetic oligonucleotide
cagguaaacaugcuuacac

SEQ ID NO: 1487632 - RNA, 19 nt, Artificial Sequence
  Description of Artificial Sequence: Synthetic oligonucleotide
uccaacuuguucaaauuuc

SEQ ID NO: 1487633 - RNA, 19 nt, Artificial Sequence
  Description of Artificial Sequence: Synthetic oligonucleotide
caugcuuacacggacugcg

SEQ ID NO: 1487634 - RNA, 19 nt, Artificial Sequence
  Description of Artificial Sequence: Synthetic oligonucleotide
uuacacagaagauuggauu

SEQ ID NO: 1487635 - RNA, 19 nt, Artificial Sequence
  Description of Artificial Sequence: Synthetic oligonucleotide
acagauaugaggugacaug

SEQ ID NO: 1487636 - RNA, 19 nt, Artificial Sequence
  Description of Artificial Sequence: Synthetic oligonucleotide
agacgaguggugcuucucc

SEQ ID NO: 1487637 - RNA, 19 nt, Artificial Sequence
  Description of Artificial Sequence: Synthetic oligonucleotide
gacaaacagaagaugcggg

SEQ ID NO: 1487638 - RNA, 19 nt, Artificial Sequence
  Description of Artificial Sequence: Synthetic oligonucleotide
gugaauacugaagagcugc

SEQ ID NO: 1487639 - RNA, 19 nt, Artificial Sequence
  Description of Artificial Sequence: Synthetic oligonucleotide
uacaugacauucauuuaac

SEQ ID NO: 1487640 - RNA, 19 nt, Artificial Sequence
  Description of Artificial Sequence: Synthetic oligonucleotide
uugccguuaagacaguggu

SEQ ID NO: 1487641 - RNA, 19 nt, Artificial Sequence
  Description of Artificial Sequence: Synthetic oligonucleotide
acgagacuuguauuuuacc

SEQ ID NO: 1487642 - RNA, 19 nt, Artificial Sequence
  Description of Artificial Sequence: Synthetic oligonucleotide
gauuaauauugaaucgggc

SEQ ID NO: 1487643 - RNA, 19 nt, Artificial Sequence
  Description of Artificial Sequence: Synthetic oligonucleotide
aagacgagugaauacugaa

SEQ ID NO: 1487644 - RNA, 19 nt, Artificial Sequence
  Description of Artificial Sequence: Synthetic oligonucleotide
uucuaauuauccccaagau

SEQ ID NO: 1487645 - RNA, 19 nt, Artificial Sequence
  Description of Artificial Sequence: Synthetic oligonucleotide
acugcgggaaucuucaggu

SEQ ID NO: 1487646 - RNA, 19 nt, Artificial Sequence
  Description of Artificial Sequence: Synthetic oligonucleotide
uaccuuucuggcuacacac

SEQ ID NO: 1487647 - RNA, 19 nt, Artificial Sequence
  Description of Artificial Sequence: Synthetic oligonucleotide
gauaugaggugacaugguc

SEQ ID NO: 1487648 - RNA, 19 nt, Artificial Sequence
  Description of Artificial Sequence: Synthetic oligonucleotide
uaggccaaugaagaaaacc

SEQ ID NO: 1487649 - RNA, 19 nt, Artificial Sequence
  Description of Artificial Sequence: Synthetic oligonucleotide
cagugguaauauaacacag

SEQ ID NO: 1487650 - RNA, 19 nt, Artificial Sequence
  Description of Artificial Sequence: Synthetic oligonucleotide
aauuuccucucuaaguaca

SEQ ID NO: 1487651 - RNA, 19 nt, Artificial Sequence
  Description of Artificial Sequence: Synthetic oligonucleotide
ugguaauauaacacagacu

SEQ ID NO: 1487652 - RNA, 19 nt, Artificial Sequence
  Description of Artificial Sequence: Synthetic oligonucleotide
acauaagucagcaaauaca

SEQ ID NO: 1487653 - RNA, 19 nt, Artificial Sequence
  Description of Artificial Sequence: Synthetic oligonucleotide
ucuagcaguaaauccuaca

SEQ ID NO: 1487654 - RNA, 19 nt, Artificial Sequence
  Description of Artificial Sequence: Synthetic oligonucleotide
aauauugaaucgggcuuuc

SEQ ID NO: 1487655 - RNA, 19 nt, Artificial Sequence
  Description of Artificial Sequence: Synthetic oligonucleotide
gacccguggauuaauauug

SEQ ID NO: 1487656 - RNA, 19 nt, Artificial Sequence
  Description of Artificial Sequence: Synthetic oligonucleotide
gagauauuguuuccuaaga

SEQ ID NO: 1487657 - RNA, 19 nt, Artificial Sequence
  Description of Artificial Sequence: Synthetic oligonucleotide
aaguaucacuguuuucuga

SEQ ID NO: 1487658 - RNA, 19 nt, Artificial Sequence
  Description of Artificial Sequence: Synthetic oligonucleotide
uauccccaagauuucuacg

SEQ ID NO: 1487659 - RNA, 19 nt, Artificial Sequence
  Description of Artificial Sequence: Synthetic oligonucleotide
aaggcaaaauguguggaca

SEQ ID NO: 1487660 - RNA, 19 nt, Artificial Sequence
  Description of Artificial Sequence: Synthetic oligonucleotide
ucuucucaacagcugaccu

SEQ ID NO: 1487661 - RNA, 19 nt, Artificial Sequence
  Description of Artificial Sequence: Synthetic oligonucleotide
aaauguguggacacuaaaa

SEQ ID NO: 1487662 - RNA, 19 nt, Artificial Sequence
  Description of Artificial Sequence: Synthetic oligonucleotide
cuuacacggaccuguaaac

SEQ ID NO: 1487663 - RNA, 19 nt, Artificial Sequence
  Description of Artificial Sequence: Synthetic oligonucleotide
auugaaucgggcuuucaau

SEQ ID NO: 1487664 - RNA, 19 nt, Artificial Sequence
  Description of Artificial Sequence: Synthetic oligonucleotide
ugaaaagaaauaugacaua

SEQ ID NO: 1487665 - RNA, 19 nt, Artificial Sequence
  Description of Artificial Sequence: Synthetic oligonucleotide
gucgcuaugauaggaagag

SEQ ID NO: 1487666 - RNA, 19 nt, Artificial Sequence
  Description of Artificial Sequence: Synthetic oligonucleotide
ugcuuacacggacugcggg

SEQ ID NO: 1487667 - RNA, 19 nt, Artificial Sequence
  Description of Artificial Sequence: Synthetic oligonucleotide
agcaaaagggccacagccc

SEQ ID NO: 1487668 - RNA, 19 nt, Artificial Sequence
  Description of Artificial Sequence: Synthetic oligonucleotide
gacugcgggaaucuucagg

SEQ ID NO: 1487669 - RNA, 19 nt, Artificial Sequence
  Description of Artificial Sequence: Synthetic oligonucleotide
ucuaagagguggcaugauc

SEQ ID NO: 1487670 - RNA, 19 nt, Artificial Sequence
  Description of Artificial Sequence: Synthetic oligonucleotide
aauuauccccaagauuucu

SEQ ID NO: 1487671 - RNA, 19 nt, Artificial Sequence
  Description of Artificial Sequence: Synthetic oligonucleotide
ugucgcuaugauaggaaga

SEQ ID NO: 1487672 - RNA, 19 nt, Artificial Sequence
  Description of Artificial Sequence: Synthetic oligonucleotide
ugcgggaaaauggugaaga

SEQ ID NO: 1487673 - RNA, 19 nt, Artificial Sequence
  Description of Artificial Sequence: Synthetic oligonucleotide
ggauuaauauugaaucggg

SEQ ID NO: 1487674 - RNA, 19 nt, Artificial Sequence
  Description of Artificial Sequence: Synthetic oligonucleotide
aacaggcuuaauucuaauu

SEQ ID NO: 1487675 - RNA, 19 nt, Artificial Sequence
  Description of Artificial Sequence: Synthetic oligonucleotide
acgagugaauacugaagag

SEQ ID NO: 1487676 - RNA, 19 nt, Artificial Sequence
  Description of Artificial Sequence: Synthetic oligonucleotide
ugaauacugaagagcugca

SEQ ID NO: 1487677 - RNA, 19 nt, Artificial Sequence
  Description of Artificial Sequence: Synthetic oligonucleotide
accauuaacccuaaaggca

SEQ ID NO: 1487678 - RNA, 19 nt, Artificial Sequence
  Description of Artificial Sequence: Synthetic oligonucleotide
cagguuugaaacuguucgg

SEQ ID NO: 1487679 - RNA, 19 nt, Artificial Sequence
  Description of Artificial Sequence: Synthetic oligonucleotide
uucgguuuguguuguguug

SEQ ID NO: 1487680 - RNA, 19 nt, Artificial Sequence
  Description of Artificial Sequence: Synthetic oligonucleotide
acagaaagcgagcgagccg

SEQ ID NO: 1487681 - RNA, 19 nt, Artificial Sequence
  Description of Artificial Sequence: Synthetic oligonucleotide
augauaggaagaggaaggg

SEQ ID NO: 1487682 - RNA, 19 nt, Artificial Sequence
  Description of Artificial Sequence: Synthetic oligonucleotide
uuuacaugacauucauuua

SEQ ID NO: 1487683 - RNA, 19 nt, Artificial Sequence
  Description of Artificial Sequence: Synthetic oligonucleotide
cguggauuaauauugaauc

SEQ ID NO: 1487684 - RNA, 19 nt, Artificial Sequence
  Description of Artificial Sequence: Synthetic oligonucleotide
uaacacugcuuacacggac

SEQ ID NO: 1487685 - RNA, 19 nt, Artificial Sequence
  Description of Artificial Sequence: Synthetic oligonucleotide
uguucaaauuuccucucua

SEQ ID NO: 1487686 - RNA, 19 nt, Artificial Sequence
  Description of Artificial Sequence: Synthetic oligonucleotide
gcaaguguuucucagaauc

SEQ ID NO: 1487687 - RNA, 19 nt, Artificial Sequence
  Description of Artificial Sequence: Synthetic oligonucleotide
uuuagagcaucaagucacu

SEQ ID NO: 1487688 - RNA, 19 nt, Artificial Sequence
  Description of Artificial Sequence: Synthetic oligonucleotide
caauguagacgaguggugc

SEQ ID NO: 1487689 - RNA, 19 nt, Artificial Sequence
  Description of Artificial Sequence: Synthetic oligonucleotide
guaagggauggcaauguag

SEQ ID NO: 1487690 - RNA, 19 nt, Artificial Sequence
  Description of Artificial Sequence: Synthetic oligonucleotide
uugaaucgggcuuucaauu

SEQ ID NO: 1487691 - RNA, 19 nt, Artificial Sequence
  Description of Artificial Sequence: Synthetic oligonucleotide
gaauaauaaacacgagacu

SEQ ID NO: 1487692 - RNA, 19 nt, Artificial Sequence
  Description of Artificial Sequence: Synthetic oligonucleotide
cauaucagcggcagccugc

SEQ ID NO: 1487693 - RNA, 19 nt, Artificial Sequence
  Description of Artificial Sequence: Synthetic oligonucleotide
ccuaaaggcaaaaugugug

SEQ ID NO: 1487694 - RNA, 19 nt, Artificial Sequence
  Description of Artificial Sequence: Synthetic oligonucleotide
aaucuaggccaaugaagaa

SEQ ID NO: 1487695 - RNA, 19 nt, Artificial Sequence
  Description of Artificial Sequence: Synthetic oligonucleotide
aauccuacauugauuuaga

SEQ ID NO: 1487696 - RNA, 19 nt, Artificial Sequence
  Description of Artificial Sequence: Synthetic oligonucleotide
aagggccacagccccguac

SEQ ID NO: 1487697 - RNA, 19 nt, Artificial Sequence
  Description of Artificial Sequence: Synthetic oligonucleotide
uaauuauccccaagauuuc

SEQ ID NO: 1487698 - RNA, 19 nt, Artificial Sequence
  Description of Artificial Sequence: Synthetic oligonucleotide
acaacaaaccaaaacccca

SEQ ID NO: 1487699 - RNA, 19 nt, Artificial Sequence
  Description of Artificial Sequence: Synthetic oligonucleotide
aggaagacgagugaauacu

SEQ ID NO: 1487700 - RNA, 19 nt, Artificial Sequence
  Description of Artificial Sequence: Synthetic oligonucleotide
aaaacaggcuuaauucuaa

SEQ ID NO: 1487701 - RNA, 19 nt, Artificial Sequence
  Description of Artificial Sequence: Synthetic oligonucleotide
ccaaccauuaacccuaaag

SEQ ID NO: 1487702 - RNA, 19 nt, Artificial Sequence
  Description of Artificial Sequence: Synthetic oligonucleotide
uacugaagagcugcaagug

SEQ ID NO: 1487703 - RNA, 19 nt, Artificial Sequence
  Description of Artificial Sequence: Synthetic oligonucleotide
augggucacaaucacaauu

SEQ ID NO: 1487704 - RNA, 19 nt, Artificial Sequence
  Description of Artificial Sequence: Synthetic oligonucleotide
uaaacacgagacuuguauu

SEQ ID NO: 1487705 - RNA, 19 nt, Artificial Sequence
  Description of Artificial Sequence: Synthetic oligonucleotide
cagacacagaaagcgagcg

SEQ ID NO: 1487706 - RNA, 19 nt, Artificial Sequence
  Description of Artificial Sequence: Synthetic oligonucleotide
cuguugacuuauuuuagca

SEQ ID NO: 1487707 - RNA, 19 nt, Artificial Sequence
  Description of Artificial Sequence: Synthetic oligonucleotide
uacacacaugaucagcuuu

SEQ ID NO: 1487708 - RNA, 19 nt, Artificial Sequence
  Description of Artificial Sequence: Synthetic oligonucleotide
gguggcaugaucucuaaga

SEQ ID NO: 1487709 - RNA, 19 nt, Artificial Sequence
  Description of Artificial Sequence: Synthetic oligonucleotide
ccguacaagaaacagcagg

SEQ ID NO: 1487710 - RNA, 19 nt, Artificial Sequence
  Description of Artificial Sequence: Synthetic oligonucleotide
auaucagcggcagccugcc

SEQ ID NO: 1487711 - RNA, 19 nt, Artificial Sequence
  Description of Artificial Sequence: Synthetic oligonucleotide
accuaacacugcuuacacg

SEQ ID NO: 1487712 - RNA, 19 nt, Artificial Sequence
  Description of Artificial Sequence: Synthetic oligonucleotide
agccgacagguaaacaugc

SEQ ID NO: 1487713 - RNA, 19 nt, Artificial Sequence
  Description of Artificial Sequence: Synthetic oligonucleotide
aaacaggcuuaauucuaau

SEQ ID NO: 1487714 - RNA, 19 nt, Artificial Sequence
  Description of Artificial Sequence: Synthetic oligonucleotide
aguaccuuucuggcuacac

SEQ ID NO: 1487715 - RNA, 19 nt, Artificial Sequence
  Description of Artificial Sequence: Synthetic oligonucleotide
aagcgagcgagccgacagg

SEQ ID NO: 1487716 - RNA, 19 nt, Artificial Sequence
  Description of Artificial Sequence: Synthetic oligonucleotide
uaauauugaaucgggcuuu

SEQ ID NO: 1487717 - RNA, 19 nt, Artificial Sequence
  Description of Artificial Sequence: Synthetic oligonucleotide
ggaagggugacagauauga

SEQ ID NO: 1487718 - RNA, 19 nt, Artificial Sequence
  Description of Artificial Sequence: Synthetic oligonucleotide
aggcuuaauucuaauuauc

SEQ ID NO: 1487719 - RNA, 19 nt, Artificial Sequence
  Description of Artificial Sequence: Synthetic oligonucleotide
cugucgcuaugauaggaag

SEQ ID NO: 1487720 - RNA, 19 nt, Artificial Sequence
  Description of Artificial Sequence: Synthetic oligonucleotide
caguuauucaguucugaga

SEQ ID NO: 1487721 - RNA, 19 nt, Artificial Sequence
  Description of Artificial Sequence: Synthetic oligonucleotide
aagcugucgcuaugauagg

SEQ ID NO: 1487722 - RNA, 19 nt, Artificial Sequence
  Description of Artificial Sequence: Synthetic oligonucleotide
augagauauuguuuccuaa

SEQ ID NO: 1487723 - RNA, 19 nt, Artificial Sequence
  Description of Artificial Sequence: Synthetic oligonucleotide
auaugaggugacauggucu

SEQ ID NO: 1487724 - RNA, 19 nt, Artificial Sequence
  Description of Artificial Sequence: Synthetic oligonucleotide
aacucacucuccaugagua

SEQ ID NO: 1487725 - RNA, 19 nt, Artificial Sequence
  Description of Artificial Sequence: Synthetic oligonucleotide
agaguaagggauggcaaug

SEQ ID NO: 1487726 - RNA, 19 nt, Artificial Sequence
  Description of Artificial Sequence: Synthetic oligonucleotide
uuacacggaccuguaaaca

SEQ ID NO: 1487727 - RNA, 19 nt, Artificial Sequence
  Description of Artificial Sequence: Synthetic oligonucleotide
cacgagacuuguauuuuac

SEQ ID NO: 1487728 - RNA, 19 nt, Artificial Sequence
  Description of Artificial Sequence: Synthetic oligonucleotide
cacagaaagcgagcgagcc

SEQ ID NO: 1487729 - RNA, 19 nt, Artificial Sequence
  Description of Artificial Sequence: Synthetic oligonucleotide
aguggugcuucuccauauc

SEQ ID NO: 1487730 - RNA, 19 nt, Artificial Sequence
  Description of Artificial Sequence: Synthetic oligonucleotide
ugcgggaaucuucagguuu

SEQ ID NO: 1487731 - RNA, 19 nt, Artificial Sequence
  Description of Artificial Sequence: Synthetic oligonucleotide
agacgagugaauacugaag

SEQ ID NO: 1487732 - RNA, 19 nt, Artificial Sequence
  Description of Artificial Sequence: Synthetic oligonucleotide
ugaaucgggcuuucaauuu

SEQ ID NO: 1487733 - RNA, 19 nt, Artificial Sequence
  Description of Artificial Sequence: Synthetic oligonucleotide
auuucuacgaaagcacaaa

SEQ ID NO: 1487734 - RNA, 19 nt, Artificial Sequence
  Description of Artificial Sequence: Synthetic oligonucleotide
gcaguuauucaguucugag

SEQ ID NO: 1487735 - RNA, 19 nt, Artificial Sequence
  Description of Artificial Sequence: Synthetic oligonucleotide
uaauucuaauuauccccaa

SEQ ID NO: 1487736 - RNA, 19 nt, Artificial Sequence
  Description of Artificial Sequence: Synthetic oligonucleotide
agaugcgggaaaaugguga

SEQ ID NO: 1487737 - RNA, 19 nt, Artificial Sequence
  Description of Artificial Sequence: Synthetic oligonucleotide
uuggauuuguaaaggccuu

SEQ ID NO: 1487738 - RNA, 19 nt, Artificial Sequence
  Description of Artificial Sequence: Synthetic oligonucleotide
gaccuugcagaguaaggga

SEQ ID NO: 1487739 - RNA, 19 nt, Artificial Sequence
  Description of Artificial Sequence: Synthetic oligonucleotide
agguuugaaacuguucggu

SEQ ID NO: 1487740 - RNA, 19 nt, Artificial Sequence
  Description of Artificial Sequence: Synthetic oligonucleotide
ucagcuuaaugguuacaua

SEQ ID NO: 1487741 - RNA, 19 nt, Artificial Sequence
  Description of Artificial Sequence: Synthetic oligonucleotide
uggacacuaaaaguaucac

SEQ ID NO: 1487742 - RNA, 19 nt, Artificial Sequence
  Description of Artificial Sequence: Synthetic oligonucleotide
caaaaucuaggccaaugaa

SEQ ID NO: 1487743 - RNA, 19 nt, Artificial Sequence
  Description of Artificial Sequence: Synthetic oligonucleotide
aagaugcgggaaaauggug

SEQ ID NO: 1487744 - RNA, 19 nt, Artificial Sequence
  Description of Artificial Sequence: Synthetic oligonucleotide
ucuuuccaugagauauugu

SEQ ID NO: 1487745 - RNA, 19 nt, Artificial Sequence
  Description of Artificial Sequence: Synthetic oligonucleotide
aaaagggccacagccccgu

SEQ ID NO: 1487746 - RNA, 19 nt, Artificial Sequence
  Description of Artificial Sequence: Synthetic oligonucleotide
agauuucuacgaaagcaca

SEQ ID NO: 1487747 - RNA, 19 nt, Artificial Sequence
  Description of Artificial Sequence: Synthetic oligonucleotide
ucgguuuguguuguguugu

SEQ ID NO: 1487748 - RNA, 19 nt, Artificial Sequence
  Description of Artificial Sequence: Synthetic oligonucleotide
uauucaguucugagacacu

SEQ ID NO: 1487749 - RNA, 19 nt, Artificial Sequence
  Description of Artificial Sequence: Synthetic oligonucleotide
ucgggcuuucaauuuagua

SEQ ID NO: 1487750 - RNA, 19 nt, Artificial Sequence
  Description of Artificial Sequence: Synthetic oligonucleotide
uuaacccuaaaggcaaaau

SEQ ID NO: 1487751 - RNA, 19 nt, Artificial Sequence
  Description of Artificial Sequence: Synthetic oligonucleotide
ugacauaagucagcaaaua

SEQ ID NO: 1487752 - RNA, 19 nt, Artificial Sequence
  Description of Artificial Sequence: Synthetic oligonucleotide
uuagcacugaaaggucccc

SEQ ID NO: 1487753 - RNA, 19 nt, Artificial Sequence
  Description of Artificial Sequence: Synthetic oligonucleotide
gaugcgggaaaauggugaa

SEQ ID NO: 1487754 - RNA, 19 nt, Artificial Sequence
  Description of Artificial Sequence: Synthetic oligonucleotide
uuagagcaucaagucacug

SEQ ID NO: 1487755 - RNA, 19 nt, Artificial Sequence
  Description of Artificial Sequence: Synthetic oligonucleotide
cuacgaaagcacaaagaaa

SEQ ID NO: 1487756 - RNA, 19 nt, Artificial Sequence
  Description of Artificial Sequence: Synthetic oligonucleotide
acacagaaagcgagcgagc

SEQ ID NO: 1487757 - RNA, 19 nt, Artificial Sequence
  Description of Artificial Sequence: Synthetic oligonucleotide
gauuucuacgaaagcacaa

SEQ ID NO: 1487758 - RNA, 19 nt, Artificial Sequence
  Description of Artificial Sequence: Synthetic oligonucleotide
caacagcugaccuugcaga

SEQ ID NO: 1487759 - RNA, 19 nt, Artificial Sequence
  Description of Artificial Sequence: Synthetic oligonucleotide
guggacacuaaaaguauca

SEQ ID NO: 1487760 - RNA, 19 nt, Artificial Sequence
  Description of Artificial Sequence: Synthetic oligonucleotide
caaaagggccacagccccg

SEQ ID NO: 1487761 - RNA, 19 nt, Artificial Sequence
  Description of Artificial Sequence: Synthetic oligonucleotide
guaaacaugcuuacacgga

SEQ ID NO: 1487762 - RNA, 19 nt, Artificial Sequence
  Description of Artificial Sequence: Synthetic oligonucleotide
gagccgacagguaaacaug

SEQ ID NO: 1487763 - RNA, 19 nt, Artificial Sequence
  Description of Artificial Sequence: Synthetic oligonucleotide
acacagaagauuggauuug

SEQ ID NO: 1487764 - RNA, 19 nt, Artificial Sequence
  Description of Artificial Sequence: Synthetic oligonucleotide
uuuugccguuaagacagug

SEQ ID NO: 1487765 - RNA, 19 nt, Artificial Sequence
  Description of Artificial Sequence: Synthetic oligonucleotide
gccaaugaagaaaaccugc

SEQ ID NO: 1487766 - RNA, 19 nt, Artificial Sequence
  Description of Artificial Sequence: Synthetic oligonucleotide
aacacgagacuuguauuuu

SEQ ID NO: 1487767 - RNA, 19 nt, Artificial Sequence
  Description of Artificial Sequence: Synthetic oligonucleotide
gcaaaaucuaggccaauga

SEQ ID NO: 1487768 - RNA, 19 nt, Artificial Sequence
  Description of Artificial Sequence: Synthetic oligonucleotide
ugaaacuguucgguuugug

SEQ ID NO: 1487769 - RNA, 19 nt, Artificial Sequence
  Description of Artificial Sequence: Synthetic oligonucleotide
ucgcuaugauaggaagagg

SEQ ID NO: 1487770 - RNA, 19 nt, Artificial Sequence
  Description of Artificial Sequence: Synthetic oligonucleotide
gaggaagggugacagauau

SEQ ID NO: 1487771 - RNA, 19 nt, Artificial Sequence
  Description of Artificial Sequence: Synthetic oligonucleotide
gaagacgagugaauacuga

SEQ ID NO: 1487772 - RNA, 19 nt, Artificial Sequence
  Description of Artificial Sequence: Synthetic oligonucleotide
acauugauuuagagcauca

SEQ ID NO: 1487773 - RNA, 19 nt, Artificial Sequence
  Description of Artificial Sequence: Synthetic oligonucleotide
gaagggugacagauaugag

SEQ ID NO: 1487774 - RNA, 19 nt, Artificial Sequence
  Description of Artificial Sequence: Synthetic oligonucleotide
gaagaugcgggaaaauggu

SEQ ID NO: 1487775 - RNA, 19 nt, Artificial Sequence
  Description of Artificial Sequence: Synthetic oligonucleotide
uggaccuaacacugcuuac

SEQ ID NO: 1487776 - RNA, 19 nt, Artificial Sequence
  Description of Artificial Sequence: Synthetic oligonucleotide
augacauaagucagcaaau

SEQ ID NO: 1487777 - RNA, 19 nt, Artificial Sequence
  Description of Artificial Sequence: Synthetic oligonucleotide
acaaccacauucugcuuua

SEQ ID NO: 1487778 - RNA, 19 nt, Artificial Sequence
  Description of Artificial Sequence: Synthetic oligonucleotide
gaaucgggcuuucaauuua

SEQ ID NO: 1487779 - RNA, 19 nt, Artificial Sequence
  Description of Artificial Sequence: Synthetic oligonucleotide
agacacagaaagcgagcga

SEQ ID NO: 1487780 - RNA, 19 nt, Artificial Sequence
  Description of Artificial Sequence: Synthetic oligonucleotide
cagcuuaaugguuacauau

SEQ ID NO: 1487781 - RNA, 19 nt, Artificial Sequence
  Description of Artificial Sequence: Synthetic oligonucleotide
agacacuguugacuuauuu

SEQ ID NO: 1487782 - RNA, 19 nt, Artificial Sequence
  Description of Artificial Sequence: Synthetic oligonucleotide
agugaauacugaagagcug

SEQ ID NO: 1487783 - RNA, 19 nt, Artificial Sequence
  Description of Artificial Sequence: Synthetic oligonucleotide
cagaaagcgagcgagccga

SEQ ID NO: 1487784 - RNA, 19 nt, Artificial Sequence
  Description of Artificial Sequence: Synthetic oligonucleotide
aagaucuaaucugccgcaa

SEQ ID NO: 1487785 - RNA, 19 nt, Artificial Sequence
  Description of Artificial Sequence: Synthetic oligonucleotide
guaaaggccuuaaaggccu

SEQ ID NO: 1487786 - RNA, 19 nt, Artificial Sequence
  Description of Artificial Sequence: Synthetic oligonucleotide
ugacagauaugaggugaca

SEQ ID NO: 1487787 - RNA, 19 nt, Artificial Sequence
  Description of Artificial Sequence: Synthetic oligonucleotide
guaccuuucuggcuacaca

SEQ ID NO: 1487788 - RNA, 19 nt, Artificial Sequence
  Description of Artificial Sequence: Synthetic oligonucleotide
uggguguucagugguaaua

SEQ ID NO: 1487789 - RNA, 19 nt, Artificial Sequence
  Description of Artificial Sequence: Synthetic oligonucleotide
gaucucuaagaaggccaag

SEQ ID NO: 1487790 - RNA, 19 nt, Artificial Sequence
  Description of Artificial Sequence: Synthetic oligonucleotide
auaugacauaagucagcaa

SEQ ID NO: 1487791 - RNA, 19 nt, Artificial Sequence
  Description of Artificial Sequence: Synthetic oligonucleotide
gacgaguggugcuucucca

SEQ ID NO: 1487792 - RNA, 19 nt, Artificial Sequence
  Description of Artificial Sequence: Synthetic oligonucleotide
aggugacauggucucuaag

SEQ ID NO: 1487793 - RNA, 19 nt, Artificial Sequence
  Description of Artificial Sequence: Synthetic oligonucleotide
aguaagggauggcaaugua

SEQ ID NO: 1487794 - RNA, 19 nt, Artificial Sequence
  Description of Artificial Sequence: Synthetic oligonucleotide
acagguaaacaugcuuaca

SEQ ID NO: 1487795 - RNA, 19 nt, Artificial Sequence
  Description of Artificial Sequence: Synthetic oligonucleotide
agcgagccgacagguaaac

SEQ ID NO: 1487796 - RNA, 19 nt, Artificial Sequence
  Description of Artificial Sequence: Synthetic oligonucleotide
guuugaaacuguucgguuu

SEQ ID NO: 1487797 - RNA, 19 nt, Artificial Sequence
  Description of Artificial Sequence: Synthetic oligonucleotide
gagaacccucaaaagaucu

SEQ ID NO: 1487798 - RNA, 19 nt, Artificial Sequence
  Description of Artificial Sequence: Synthetic oligonucleotide
ucucaacagcugaccuugc

SEQ ID NO: 1487799 - RNA, 19 nt, Artificial Sequence
  Description of Artificial Sequence: Synthetic oligonucleotide
guucaagacccguggauua

SEQ ID NO: 1487800 - RNA, 19 nt, Artificial Sequence
  Description of Artificial Sequence: Synthetic oligonucleotide
ugacuuauuuuagcauuua

SEQ ID NO: 1487801 - RNA, 19 nt, Artificial Sequence
  Description of Artificial Sequence: Synthetic oligonucleotide
aucugccgcaaaaucuagg

SEQ ID NO: 1487802 - RNA, 19 nt, Artificial Sequence
  Description of Artificial Sequence: Synthetic oligonucleotide
uugcaucauuaggaugucc

SEQ ID NO: 1487803 - RNA, 19 nt, Artificial Sequence
  Description of Artificial Sequence: Synthetic oligonucleotide
gauggcaauguagacgagu

SEQ ID NO: 1487804 - RNA, 19 nt, Artificial Sequence
  Description of Artificial Sequence: Synthetic oligonucleotide
ccccguacaagaaacagca

SEQ ID NO: 1487805 - RNA, 19 nt, Artificial Sequence
  Description of Artificial Sequence: Synthetic oligonucleotide
acacgagacuuguauuuua

SEQ ID NO: 1487806 - RNA, 19 nt, Artificial Sequence
  Description of Artificial Sequence: Synthetic oligonucleotide
uguagacgaguggugcuuc

SEQ ID NO: 1487807 - RNA, 19 nt, Artificial Sequence
  Description of Artificial Sequence: Synthetic oligonucleotide
gcuuacacggaccuguaaa

SEQ ID NO: 1487808 - RNA, 19 nt, Artificial Sequence
  Description of Artificial Sequence: Synthetic oligonucleotide
cgagugaauacugaagagc

SEQ ID NO: 1487809 - RNA, 19 nt, Artificial Sequence
  Description of Artificial Sequence: Synthetic oligonucleotide
gaauacugaagagcugcaa

SEQ ID NO: 1487810 - RNA, 19 nt, Artificial Sequence
  Description of Artificial Sequence: Synthetic oligonucleotide
cuguuguaaaacaggcuua

SEQ ID NO: 1487811 - RNA, 19 nt, Artificial Sequence
  Description of Artificial Sequence: Synthetic oligonucleotide
ugcuuacacggaccuguaa

SEQ ID NO: 1487812 - RNA, 19 nt, Artificial Sequence
  Description of Artificial Sequence: Synthetic oligonucleotide
acuguucgguuuguguugu

SEQ ID NO: 1487813 - RNA, 19 nt, Artificial Sequence
  Description of Artificial Sequence: Synthetic oligonucleotide
cuaacacugcuuacacgga

SEQ ID NO: 1487814 - RNA, 19 nt, Artificial Sequence
  Description of Artificial Sequence: Synthetic oligonucleotide
uucaagacccguggauuaa

SEQ ID NO: 1487815 - RNA, 19 nt, Artificial Sequence
  Description of Artificial Sequence: Synthetic oligonucleotide
acggacugcgggaaucuuc

SEQ ID NO: 1487816 - RNA, 19 nt, Artificial Sequence
  Description of Artificial Sequence: Synthetic oligonucleotide
cacacaugaucagcuuuag

SEQ ID NO: 1487817 - RNA, 19 nt, Artificial Sequence
  Description of Artificial Sequence: Synthetic oligonucleotide
ccauuaacccuaaaggcaa

SEQ ID NO: 1487818 - RNA, 19 nt, Artificial Sequence
  Description of Artificial Sequence: Synthetic oligonucleotide
agauaugaggugacauggu

SEQ ID NO: 1487819 - RNA, 19 nt, Artificial Sequence
  Description of Artificial Sequence: Synthetic oligonucleotide
cacugcaguuauucaguuc

SEQ ID NO: 1487820 - RNA, 19 nt, Artificial Sequence
  Description of Artificial Sequence: Synthetic oligonucleotide
gacagauaugaggugacau

SEQ ID NO: 1487821 - RNA, 19 nt, Artificial Sequence
  Description of Artificial Sequence: Synthetic oligonucleotide
uggucucuaagagguggca

SEQ ID NO: 1487822 - RNA, 19 nt, Artificial Sequence
  Description of Artificial Sequence: Synthetic oligonucleotide
uacacggacugcgggaauc

SEQ ID NO: 1487823 - RNA, 19 nt, Artificial Sequence
  Description of Artificial Sequence: Synthetic oligonucleotide
accccaaccauuaacccua

SEQ ID NO: 1487824 - RNA, 19 nt, Artificial Sequence
  Description of Artificial Sequence: Synthetic oligonucleotide
acacggaccuguaaacaca

SEQ ID NO: 1487825 - RNA, 19 nt, Artificial Sequence
  Description of Artificial Sequence: Synthetic oligonucleotide
ggaucagcuuaaugguuac

SEQ ID NO: 1487826 - RNA, 19 nt, Artificial Sequence
  Description of Artificial Sequence: Synthetic oligonucleotide
cgagacuuguauuuuacca

SEQ ID NO: 1487827 - RNA, 19 nt, Artificial Sequence
  Description of Artificial Sequence: Synthetic oligonucleotide
agcugucgcuaugauagga

SEQ ID NO: 1487828 - RNA, 19 nt, Artificial Sequence
  Description of Artificial Sequence: Synthetic oligonucleotide
augcuuacacggacugcgg

SEQ ID NO: 1487829 - RNA, 19 nt, Artificial Sequence
  Description of Artificial Sequence: Synthetic oligonucleotide
ucaagacccguggauuaau

SEQ ID NO: 1487830 - RNA, 19 nt, Artificial Sequence
  Description of Artificial Sequence: Synthetic oligonucleotide
ggcuacacacaugaucagc

SEQ ID NO: 1487831 - RNA, 19 nt, Artificial Sequence
  Description of Artificial Sequence: Synthetic oligonucleotide
gccuuaaaggccuguggac

SEQ ID NO: 1487832 - RNA, 19 nt, Artificial Sequence
  Description of Artificial Sequence: Synthetic oligonucleotide
auuauccccaagauuucua

SEQ ID NO: 1487833 - RNA, 19 nt, Artificial Sequence
  Description of Artificial Sequence: Synthetic oligonucleotide
cgcuaugauaggaagagga

SEQ ID NO: 1487834 - RNA, 19 nt, Artificial Sequence
  Description of Artificial Sequence: Synthetic oligonucleotide
caggcuuaauucuaauuau

SEQ ID NO: 1487835 - RNA, 19 nt, Artificial Sequence
  Description of Artificial Sequence: Synthetic oligonucleotide
ccaucuagcaguaaauccu

SEQ ID NO: 1487836 - RNA, 19 nt, Artificial Sequence
  Description of Artificial Sequence: Synthetic oligonucleotide
ggaccuaacacugcuuaca

SEQ ID NO: 1487837 - RNA, 19 nt, Artificial Sequence
  Description of Artificial Sequence: Synthetic oligonucleotide
auauugaaucgggcuuuca

SEQ ID NO: 1487838 - RNA, 19 nt, Artificial Sequence
  Description of Artificial Sequence: Synthetic oligonucleotide
gcgggaaaauggugaagag

SEQ ID NO: 1487839 - RNA, 19 nt, Artificial Sequence
  Description of Artificial Sequence: Synthetic oligonucleotide
acgaguggugcuucuccau

SEQ ID NO: 1487840 - RNA, 19 nt, Artificial Sequence
  Description of Artificial Sequence: Synthetic oligonucleotide
augcgggaaaauggugaag

SEQ ID NO: 1487841 - RNA, 19 nt, Artificial Sequence
  Description of Artificial Sequence: Synthetic oligonucleotide
uuacacggacugcgggaau

SEQ ID NO: 1487842 - RNA, 19 nt, Artificial Sequence
  Description of Artificial Sequence: Synthetic oligonucleotide
gaucagcuuuagcacugaa

SEQ ID NO: 1487843 - RNA, 19 nt, Artificial Sequence
  Description of Artificial Sequence: Synthetic oligonucleotide
gccuguggaccuaacacug

SEQ ID NO: 1487844 - RNA, 19 nt, Artificial Sequence
  Description of Artificial Sequence: Synthetic oligonucleotide
gaguaagggauggcaaugu

SEQ ID NO: 1487845 - RNA, 19 nt, Artificial Sequence
  Description of Artificial Sequence: Synthetic oligonucleotide
cauugauuuagagcaucaa

SEQ ID NO: 1487846 - RNA, 19 nt, Artificial Sequence
  Description of Artificial Sequence: Synthetic oligonucleotide
agcgagcgagccgacaggu

SEQ ID NO: 1487847 - RNA, 19 nt, Artificial Sequence
  Description of Artificial Sequence: Synthetic oligonucleotide
cuuacacggacugcgggaa

SEQ ID NO: 1487848 - RNA, 19 nt, Artificial Sequence
  Description of Artificial Sequence: Synthetic oligonucleotide
cccucaaaagaucuaaucu

SEQ ID NO: 1487849 - RNA, 19 nt, Artificial Sequence
  Description of Artificial Sequence: Synthetic oligonucleotide
agaaagcgagcgagccgac

SEQ ID NO: 1487850 - RNA, 19 nt, Artificial Sequence
  Description of Artificial Sequence: Synthetic oligonucleotide
auguagacgaguggugcuu

SEQ ID NO: 1487851 - RNA, 19 nt, Artificial Sequence
  Description of Artificial Sequence: Synthetic oligonucleotide
cauuaacccuaaaggcaaa

SEQ ID NO: 1487852 - RNA, 19 nt, Artificial Sequence
  Description of Artificial Sequence: Synthetic oligonucleotide
aaguaccuuucuggcuaca

SEQ ID NO: 1487853 - RNA, 19 nt, Artificial Sequence
  Description of Artificial Sequence: Synthetic oligonucleotide
accuuucuggcuacacaca

SEQ ID NO: 1487854 - RNA, 19 nt, Artificial Sequence
  Description of Artificial Sequence: Synthetic oligonucleotide
gagguggcaugaucucuaa

SEQ ID NO: 1487855 - RNA, 19 nt, Artificial Sequence
  Description of Artificial Sequence: Synthetic oligonucleotide
acacggacugcgggaaucu

SEQ ID NO: 1487856 - RNA, 19 nt, Artificial Sequence
  Description of Artificial Sequence: Synthetic oligonucleotide
gaaagcgagcgagccgaca

SEQ ID NO: 1487857 - RNA, 19 nt, Artificial Sequence
  Description of Artificial Sequence: Synthetic oligonucleotide
agaacccucaaaagaucua

SEQ ID NO: 1487858 - RNA, 19 nt, Artificial Sequence
  Description of Artificial Sequence: Synthetic oligonucleotide
caacucacucuccaugagu

SEQ ID NO: 1487859 - RNA, 19 nt, Artificial Sequence
  Description of Artificial Sequence: Synthetic oligonucleotide
gcgggaaucuucagguuug

SEQ ID NO: 1487860 - RNA, 19 nt, Artificial Sequence
  Description of Artificial Sequence: Synthetic oligonucleotide
gcuuuagcacugaaagguc

SEQ ID NO: 1487861 - RNA, 19 nt, Artificial Sequence
  Description of Artificial Sequence: Synthetic oligonucleotide
gcaguaaauccuacauuga

SEQ ID NO: 1487862 - RNA, 19 nt, Artificial Sequence
  Description of Artificial Sequence: Synthetic oligonucleotide
acagaagauuggauuugua

SEQ ID NO: 1487863 - RNA, 19 nt, Artificial Sequence
  Description of Artificial Sequence: Synthetic oligonucleotide
aggaagggugacagauaug

SEQ ID NO: 1487864 - RNA, 19 nt, Artificial Sequence
  Description of Artificial Sequence: Synthetic oligonucleotide
acccguggauuaauauuga

SEQ ID NO: 1487865 - RNA, 19 nt, Artificial Sequence
  Description of Artificial Sequence: Synthetic oligonucleotide
cugcuuuauuggguguuca

SEQ ID NO: 1487866 - RNA, 19 nt, Artificial Sequence
  Description of Artificial Sequence: Synthetic oligonucleotide
gccccguacaagaaacagc

SEQ ID NO: 1487867 - RNA, 19 nt, Artificial Sequence
  Description of Artificial Sequence: Synthetic oligonucleotide
cuacauugauuuagagcau

SEQ ID NO: 1487868 - RNA, 19 nt, Artificial Sequence
  Description of Artificial Sequence: Synthetic oligonucleotide
aucgggcuuucaauuuagu

SEQ ID NO: 1487869 - RNA, 19 nt, Artificial Sequence
  Description of Artificial Sequence: Synthetic oligonucleotide
gguguucagugguaauaua

SEQ ID NO: 1487870 - RNA, 19 nt, Artificial Sequence
  Description of Artificial Sequence: Synthetic oligonucleotide
caguucaagacccguggau

SEQ ID NO: 1487871 - RNA, 19 nt, Artificial Sequence
  Description of Artificial Sequence: Synthetic oligonucleotide
gguuugaaacuguucgguu

SEQ ID NO: 1487872 - RNA, 19 nt, Artificial Sequence
  Description of Artificial Sequence: Synthetic oligonucleotide
auuuugccguuaagacagu

SEQ ID NO: 1487873 - RNA, 19 nt, Artificial Sequence
  Description of Artificial Sequence: Synthetic oligonucleotide
cacggaccuguaaacacau

SEQ ID NO: 1487874 - RNA, 19 nt, Artificial Sequence
  Description of Artificial Sequence: Synthetic oligonucleotide
cccuaaaggcaaaaugugu

SEQ ID NO: 1487875 - RNA, 19 nt, Artificial Sequence
  Description of Artificial Sequence: Synthetic oligonucleotide
cccguacaagaaacagcag

SEQ ID NO: 1487876 - RNA, 19 nt, Artificial Sequence
  Description of Artificial Sequence: Synthetic oligonucleotide
cacugcuuacacggaccug

SEQ ID NO: 1487877 - RNA, 19 nt, Artificial Sequence
  Description of Artificial Sequence: Synthetic oligonucleotide
guagacgaguggugcuucu

SEQ ID NO: 1487878 - RNA, 19 nt, Artificial Sequence
  Description of Artificial Sequence: Synthetic oligonucleotide
cgggcuuucaauuuaguau

SEQ ID NO: 1487879 - RNA, 19 nt, Artificial Sequence
  Description of Artificial Sequence: Synthetic oligonucleotide
gagcgagccgacagguaaa

SEQ ID NO: 1487880 - RNA, 19 nt, Artificial Sequence
  Description of Artificial Sequence: Synthetic oligonucleotide
ggacugcgggaaucuucag

SEQ ID NO: 1487881 - RNA, 19 nt, Artificial Sequence
  Description of Artificial Sequence: Synthetic oligonucleotide
gcugucgcuaugauaggaa

SEQ ID NO: 1487882 - RNA, 19 nt, Artificial Sequence
  Description of Artificial Sequence: Synthetic oligonucleotide
ccguggauuaauauugaau

SEQ ID NO: 1487883 - RNA, 19 nt, Artificial Sequence
  Description of Artificial Sequence: Synthetic oligonucleotide
cggacugcgggaaucuuca

SEQ ID NO: 1487884 - RNA, 19 nt, Artificial Sequence
  Description of Artificial Sequence: Synthetic oligonucleotide
ggguguucagugguaauau

SEQ ID NO: 1487885 - RNA, 19 nt, Artificial Sequence
  Description of Artificial Sequence: Synthetic oligonucleotide
ggccaagcauucaauuugu

SEQ ID NO: 1487886 - RNA, 19 nt, Artificial Sequence
  Description of Artificial Sequence: Synthetic oligonucleotide
gccgcaaaaucuaggccaa

SEQ ID NO: 1487887 - RNA, 19 nt, Artificial Sequence
  Description of Artificial Sequence: Synthetic oligonucleotide
cgggaaaauggugaagaga

SEQ ID NO: 1487888 - RNA, 19 nt, Artificial Sequence
  Description of Artificial Sequence: Synthetic oligonucleotide
cgagcgagccgacagguaa

SEQ ID NO: 1487889 - RNA, 19 nt, Artificial Sequence
  Description of Artificial Sequence: Synthetic oligonucleotide
cgagccgacagguaaacau

SEQ ID NO: 1487890 - RNA, 19 nt, Artificial Sequence
  Description of Artificial Sequence: Synthetic oligonucleotide
cccguggauuaauauugaa

SEQ ID NO: 1487891 - RNA, 19 nt, Artificial Sequence
  Description of Artificial Sequence: Synthetic oligonucleotide
agcugaccuugcagaguaa

SEQ ID NO: 1487892 - RNA, 19 nt, Artificial Sequence
  Description of Artificial Sequence: Synthetic oligonucleotide
cggaccuguaaacacauuu

SEQ ID NO: 1487893 - RNA, 19 nt, Artificial Sequence
  Description of Artificial Sequence: Synthetic oligonucleotide
acggaccuguaaacacauu

SEQ ID NO: 1487894 - RNA, 19 nt, Artificial Sequence
  Description of Artificial Sequence: Synthetic oligonucleotide
cgaguggugcuucuccaua

SEQ ID NO: 1487895 - RNA, 19 nt, Artificial Sequence
  Description of Artificial Sequence: Synthetic oligonucleotide
gcgagccgacagguaaaca

SEQ ID NO: 1487896 - RNA, 19 nt, Artificial Sequence
  Description of Artificial Sequence: Synthetic oligonucleotide
gccgacagguaaacaugcu

SEQ ID NO: 1487897 - RNA, 19 nt, Artificial Sequence
  Description of Artificial Sequence: Synthetic oligonucleotide
ccccaaccauuaacccuaa

SEQ ID NO: 1487898 - RNA, 19 nt, Artificial Sequence
  Description of Artificial Sequence: Synthetic oligonucleotide
gcgagcgagccgacaggua

SEQ ID NO: 1487899 - RNA, 19 nt, Artificial Sequence
  Description of Artificial Sequence: Synthetic oligonucleotide
cacggacugcgggaaucuu

SEQ ID NO: 1487900 - RNA, 19 nt, Artificial Sequence
  Description of Artificial Sequence: Synthetic oligonucleotide
cgguuuguguuguguuguu

SEQ ID NO: 1487901 - RNA, 19 nt, Artificial Sequence
  Description of Artificial Sequence: Synthetic oligonucleotide
ccgcaaaaucuaggccaau

SEQ ID NO: 1487902 - RNA, 19 nt, Artificial Sequence
  Description of Artificial Sequence: Synthetic oligonucleotide
ucaaacugaacagaaagcg

SEQ ID NO: 1487903 - RNA, 19 nt, Artificial Sequence
  Description of Artificial Sequence: Synthetic oligonucleotide
acuaacuguugguaaaucc

SEQ ID NO: 1487904 - RNA, 19 nt, Artificial Sequence
  Description of Artificial Sequence: Synthetic oligonucleotide
auaacuuccgugcaaacag

SEQ ID NO: 1487905 - RNA, 19 nt, Artificial Sequence
  Description of Artificial Sequence: Synthetic oligonucleotide
  modified_base (7)..(7): a, c, u, g, unknown or other
agagcunucagacaugaca

SEQ ID NO: 1487906 - RNA, 19 nt, Artificial Sequence
  Description of Artificial Sequence: Synthetic oligonucleotide
ucuaaagacuucacggagg

SEQ ID NO: 1487907 - RNA, 19 nt, Artificial Sequence
  Description of Artificial Sequence: Synthetic oligonucleotide
ugacaugaagccaaucagg

SEQ ID NO: 1487908 - RNA, 19 nt, Artificial Sequence
  Description of Artificial Sequence: Synthetic oligonucleotide
gaugaaaauuucuggagug

SEQ ID NO: 1487909 - RNA, 19 nt, Artificial Sequence
  Description of Artificial Sequence: Synthetic oligonucleotide
acacaguugauccagaagu

SEQ ID NO: 1487910 - RNA, 19 nt, Artificial Sequence
  Description of Artificial Sequence: Synthetic oligonucleotide
ucgacuuauuucuuuaucc

SEQ ID NO: 1487911 - RNA, 19 nt, Artificial Sequence
  Description of Artificial Sequence: Synthetic oligonucleotide
uaaagcuggcgaaagcugg

SEQ ID NO: 1487912 - RNA, 19 nt, Artificial Sequence
  Description of Artificial Sequence: Synthetic oligonucleotide
agaggaucgacuuauuucu

SEQ ID NO: 1487913 - RNA, 19 nt, Artificial Sequence
  Description of Artificial Sequence: Synthetic oligonucleotide
ugaauuuucgucuggcgug

SEQ ID NO: 1487914 - RNA, 19 nt, Artificial Sequence
  Description of Artificial Sequence: Synthetic oligonucleotide
uagaagauauuccaugccu

SEQ ID NO: 1487915 - RNA, 19 nt, Artificial Sequence
  Description of Artificial Sequence: Synthetic oligonucleotide
agugacaugaagccaauca

SEQ ID NO: 1487916 - RNA, 19 nt, Artificial Sequence
  Description of Artificial Sequence: Synthetic oligonucleotide
gacuggauaacuuccgugc

SEQ ID NO: 1487917 - RNA, 19 nt, Artificial Sequence
  Description of Artificial Sequence: Synthetic oligonucleotide
gauuugucggagcuugugg

SEQ ID NO: 1487918 - RNA, 19 nt, Artificial Sequence
  Description of Artificial Sequence: Synthetic oligonucleotide
uacucgauacacuuccacg

SEQ ID NO: 1487919 - RNA, 19 nt, Artificial Sequence
  Description of Artificial Sequence: Synthetic oligonucleotide
uuuaaagcuggcgaaagcu

SEQ ID NO: 1487920 - RNA, 19 nt, Artificial Sequence
  Description of Artificial Sequence: Synthetic oligonucleotide
uucuuuauccccgaaauuc

SEQ ID NO: 1487921 - RNA, 19 nt, Artificial Sequence
  Description of Artificial Sequence: Synthetic oligonucleotide
gaagcugucuguuuccgag

SEQ ID NO: 1487922 - RNA, 19 nt, Artificial Sequence
  Description of Artificial Sequence: Synthetic oligonucleotide
auuucuuuauccccgaaau

SEQ ID NO: 1487923 - RNA, 19 nt, Artificial Sequence
  Description of Artificial Sequence: Synthetic oligonucleotide
ucaucgucacucuuuggcg

SEQ ID NO: 1487924 - RNA, 19 nt, Artificial Sequence
  Description of Artificial Sequence: Synthetic oligonucleotide
uguggcaagugacaugaag

SEQ ID NO: 1487925 - RNA, 19 nt, Artificial Sequence
  Description of Artificial Sequence: Synthetic oligonucleotide
uuccacgacgccuagaaga

SEQ ID NO: 1487926 - RNA, 19 nt, Artificial Sequence
  Description of Artificial Sequence: Synthetic oligonucleotide
uuuauccccgaaauucucc

SEQ ID NO: 1487927 - RNA, 19 nt, Artificial Sequence
  Description of Artificial Sequence: Synthetic oligonucleotide
augucuuuaaagcuggcga

SEQ ID NO: 1487928 - RNA, 19 nt, Artificial Sequence
  Description of Artificial Sequence: Synthetic oligonucleotide
cauuuaaggugucauuugc

SEQ ID NO: 1487929 - RNA, 19 nt, Artificial Sequence
  Description of Artificial Sequence: Synthetic oligonucleotide
uuguacuugucucggauga

SEQ ID NO: 1487930 - RNA, 19 nt, Artificial Sequence
  Description of Artificial Sequence: Synthetic oligonucleotide
cuaaagacuucacggaggc

SEQ ID NO: 1487931 - RNA, 19 nt, Artificial Sequence
  Description of Artificial Sequence: Synthetic oligonucleotide
agugaauuuucgucuggcg

SEQ ID NO: 1487932 - RNA, 19 nt, Artificial Sequence
  Description of Artificial Sequence: Synthetic oligonucleotide
uuggaacggucucugaaag

SEQ ID NO: 1487933 - RNA, 19 nt, Artificial Sequence
  Description of Artificial Sequence: Synthetic oligonucleotide
  modified_base (9)..(9): a, c, u, g, unknown or other
aaagagcunucagacauga

SEQ ID NO: 1487934 - RNA, 19 nt, Artificial Sequence
  Description of Artificial Sequence: Synthetic oligonucleotide
ucgauacacuuccacgacg

SEQ ID NO: 1487935 - RNA, 19 nt, Artificial Sequence
  Description of Artificial Sequence: Synthetic oligonucleotide
ugagcguucuuaaucccag

SEQ ID NO: 1487936 - RNA, 19 nt, Artificial Sequence
  Description of Artificial Sequence: Synthetic oligonucleotide
aucgacuuauuucuuuauc

SEQ ID NO: 1487937 - RNA, 19 nt, Artificial Sequence
  Description of Artificial Sequence: Synthetic oligonucleotide
gagaggaucgacuuauuuc

SEQ ID NO: 1487938 - RNA, 19 nt, Artificial Sequence
  Description of Artificial Sequence: Synthetic oligonucleotide
uggcaagugacaugaagcc

SEQ ID NO: 1487939 - RNA, 19 nt, Artificial Sequence
  Description of Artificial Sequence: Synthetic oligonucleotide
acgcguaucucucauuuuc

SEQ ID NO: 1487940 - RNA, 19 nt, Artificial Sequence
  Description of Artificial Sequence: Synthetic oligonucleotide
uccugagcguucuuaaucc

SEQ ID NO: 1487941 - RNA, 19 nt, Artificial Sequence
  Description of Artificial Sequence: Synthetic oligonucleotide
ugcuaaugccauuuaaggu

SEQ ID NO: 1487942 - RNA, 19 nt, Artificial Sequence
  Description of Artificial Sequence: Synthetic oligonucleotide
uauuucuuuauccccgaaa

SEQ ID NO: 1487943 - RNA, 19 nt, Artificial Sequence
  Description of Artificial Sequence: Synthetic oligonucleotide
uuuucgucuggcgugagug

SEQ ID NO: 1487944 - RNA, 19 nt, Artificial Sequence
  Description of Artificial Sequence: Synthetic oligonucleotide
ggccguaacauacaggagg

SEQ ID NO: 1487945 - RNA, 19 nt, Artificial Sequence
  Description of Artificial Sequence: Synthetic oligonucleotide
cuuuccggcuccuagaguc

SEQ ID NO: 1487946 - RNA, 19 nt, Artificial Sequence
  Description of Artificial Sequence: Synthetic oligonucleotide
cauuuaagagacacacccc

SEQ ID NO: 1487947 - RNA, 19 nt, Artificial Sequence
  Description of Artificial Sequence: Synthetic oligonucleotide
acucgauacacuuccacga

SEQ ID NO: 1487948 - RNA, 19 nt, Artificial Sequence
  Description of Artificial Sequence: Synthetic oligonucleotide
uuucagagcagaucuggca

SEQ ID NO: 1487949 - RNA, 19 nt, Artificial Sequence
  Description of Artificial Sequence: Synthetic oligonucleotide
gguuacucgauacacuucc

SEQ ID NO: 1487950 - RNA, 19 nt, Artificial Sequence
  Description of Artificial Sequence: Synthetic oligonucleotide
uggaguuucucacugcaaa

SEQ ID NO: 1487951 - RNA, 19 nt, Artificial Sequence
  Description of Artificial Sequence: Synthetic oligonucleotide
uaacuguugguaaauccaa

SEQ ID NO: 1487952 - RNA, 19 nt, Artificial Sequence
  Description of Artificial Sequence: Synthetic oligonucleotide
uuaauccccagcuccacac

SEQ ID NO: 1487953 - RNA, 19 nt, Artificial Sequence
  Description of Artificial Sequence: Synthetic oligonucleotide
ccgaaauucuccaaagucg

SEQ ID NO: 1487954 - RNA, 19 nt, Artificial Sequence
  Description of Artificial Sequence: Synthetic oligonucleotide
gaaguuggcacagcuggcg

SEQ ID NO: 1487955 - RNA, 19 nt, Artificial Sequence
  Description of Artificial Sequence: Synthetic oligonucleotide
uuaagaucgccucccacau

SEQ ID NO: 1487956 - RNA, 19 nt, Artificial Sequence
  Description of Artificial Sequence: Synthetic oligonucleotide
guuucaugagaagugacac

SEQ ID NO: 1487957 - RNA, 19 nt, Artificial Sequence
  Description of Artificial Sequence: Synthetic oligonucleotide
cacucagaguguuggaacg

SEQ ID NO: 1487958 - RNA, 19 nt, Artificial Sequence
  Description of Artificial Sequence: Synthetic oligonucleotide
auuugucggagcuugugga

SEQ ID NO: 1487959 - RNA, 19 nt, Artificial Sequence
  Description of Artificial Sequence: Synthetic oligonucleotide
cuguuuccgaguugaaugc

SEQ ID NO: 1487960 - RNA, 19 nt, Artificial Sequence
  Description of Artificial Sequence: Synthetic oligonucleotide
uuacucgauacacuuccac

SEQ ID NO: 1487961 - RNA, 19 nt, Artificial Sequence
  Description of Artificial Sequence: Synthetic oligonucleotide
cuuaagaucgccucccaca

SEQ ID NO: 1487962 - RNA, 19 nt, Artificial Sequence
  Description of Artificial Sequence: Synthetic oligonucleotide
uuccgugcaaacagcacug

SEQ ID NO: 1487963 - RNA, 19 nt, Artificial Sequence
  Description of Artificial Sequence: Synthetic oligonucleotide
guggcaagugacaugaagc

SEQ ID NO: 1487964 - RNA, 19 nt, Artificial Sequence
  Description of Artificial Sequence: Synthetic oligonucleotide
uuauccccgaaauucucca

SEQ ID NO: 1487965 - RNA, 19 nt, Artificial Sequence
  Description of Artificial Sequence: Synthetic oligonucleotide
caucgucacucuuuggcgg

SEQ ID NO: 1487966 - RNA, 19 nt, Artificial Sequence
  Description of Artificial Sequence: Synthetic oligonucleotide
aaucagguuguuccacacu

SEQ ID NO: 1487967 - RNA, 19 nt, Artificial Sequence
  Description of Artificial Sequence: Synthetic oligonucleotide
ggaggggagaucuaaagac

SEQ ID NO: 1487968 - RNA, 19 nt, Artificial Sequence
  Description of Artificial Sequence: Synthetic oligonucleotide
acgccuagaagauauucca

SEQ ID NO: 1487969 - RNA, 19 nt, Artificial Sequence
  Description of Artificial Sequence: Synthetic oligonucleotide
uuaaucccaggccguaaca

SEQ ID NO: 1487970 - RNA, 19 nt, Artificial Sequence
  Description of Artificial Sequence: Synthetic oligonucleotide
uuucaugagaagugacacu

SEQ ID NO: 1487971 - RNA, 19 nt, Artificial Sequence
  Description of Artificial Sequence: Synthetic oligonucleotide
gauaacuuccgugcaaaca

SEQ ID NO: 1487972 - RNA, 19 nt, Artificial Sequence
  Description of Artificial Sequence: Synthetic oligonucleotide
  modified_base (2)..(2): a, c, u, g, unknown or other
unucagacaugacaugcuu

SEQ ID NO: 1487973 - RNA, 19 nt, Artificial Sequence
  Description of Artificial Sequence: Synthetic oligonucleotide
cuugucucggaugacgggc

SEQ ID NO: 1487974 - RNA, 19 nt, Artificial Sequence
  Description of Artificial Sequence: Synthetic oligonucleotide
ccuagaagauauuccaugc

SEQ ID NO: 1487975 - RNA, 19 nt, Artificial Sequence
  Description of Artificial Sequence: Synthetic oligonucleotide
gacgccuagaagauauucc

SEQ ID NO: 1487976 - RNA, 19 nt, Artificial Sequence
  Description of Artificial Sequence: Synthetic oligonucleotide
aaugccauuuaagguguca

SEQ ID NO: 1487977 - RNA, 19 nt, Artificial Sequence
  Description of Artificial Sequence: Synthetic oligonucleotide
uccccgaaauucuccaaag

SEQ ID NO: 1487978 - RNA, 19 nt, Artificial Sequence
  Description of Artificial Sequence: Synthetic oligonucleotide
acgccugguuacucgauac

SEQ ID NO: 1487979 - RNA, 19 nt, Artificial Sequence
  Description of Artificial Sequence: Synthetic oligonucleotide
guacuugucucggaugacg

SEQ ID NO: 1487980 - RNA, 19 nt, Artificial Sequence
  Description of Artificial Sequence: Synthetic oligonucleotide
uggaacggucucugaaagg

SEQ ID NO: 1487981 - RNA, 19 nt, Artificial Sequence
  Description of Artificial Sequence: Synthetic oligonucleotide
cugguaguccccacuuucg

SEQ ID NO: 1487982 - RNA, 19 nt, Artificial Sequence
  Description of Artificial Sequence: Synthetic oligonucleotide
ucggaugacgggcagcgcu

SEQ ID NO: 1487983 - RNA, 19 nt, Artificial Sequence
  Description of Artificial Sequence: Synthetic oligonucleotide
  modified_base (10)..(10): a, c, u, g, unknown or other
caaagagcunucagacaug

SEQ ID NO: 1487984 - RNA, 19 nt, Artificial Sequence
  Description of Artificial Sequence: Synthetic oligonucleotide
acuuccacgacgccuagaa

SEQ ID NO: 1487985 - RNA, 19 nt, Artificial Sequence
  Description of Artificial Sequence: Synthetic oligonucleotide
  modified_base (4)..(4): a, c, u, g, unknown or other
gcunucagacaugacaugc

SEQ ID NO: 1487986 - RNA, 19 nt, Artificial Sequence
  Description of Artificial Sequence: Synthetic oligonucleotide
cuuaaucccaggccguaac

SEQ ID NO: 1487987 - RNA, 19 nt, Artificial Sequence
  Description of Artificial Sequence: Synthetic oligonucleotide
cucuuuggcggaaggagug

SEQ ID NO: 1487988 - RNA, 19 nt, Artificial Sequence
  Description of Artificial Sequence: Synthetic oligonucleotide
uguuggaguuucucacugc

SEQ ID NO: 1487989 - RNA, 19 nt, Artificial Sequence
  Description of Artificial Sequence: Synthetic oligonucleotide
ucuggcgugaguguggcaa

SEQ ID NO: 1487990 - RNA, 19 nt, Artificial Sequence
  Description of Artificial Sequence: Synthetic oligonucleotide
aucccaggccguaacauac

SEQ ID NO: 1487991 - RNA, 19 nt, Artificial Sequence
  Description of Artificial Sequence: Synthetic oligonucleotide
agguccuuccuugagaagu

SEQ ID NO: 1487992 - RNA, 19 nt, Artificial Sequence
  Description of Artificial Sequence: Synthetic oligonucleotide
guaacauacaggaggaaaa

SEQ ID NO: 1487993 - RNA, 19 nt, Artificial Sequence
  Description of Artificial Sequence: Synthetic oligonucleotide
ggaacggucucugaaaggc

SEQ ID NO: 1487994 - RNA, 19 nt, Artificial Sequence
  Description of Artificial Sequence: Synthetic oligonucleotide
auacgcguaucucucauuu

SEQ ID NO: 1487995 - RNA, 19 nt, Artificial Sequence
  Description of Artificial Sequence: Synthetic oligonucleotide
acuggauaacuuccgugca

SEQ ID NO: 1487996 - RNA, 19 nt, Artificial Sequence
  Description of Artificial Sequence: Synthetic oligonucleotide
ucucugccacucauacgcg

SEQ ID NO: 1487997 - RNA, 19 nt, Artificial Sequence
  Description of Artificial Sequence: Synthetic oligonucleotide
agggauuugucggagcuug

SEQ ID NO: 1487998 - RNA, 19 nt, Artificial Sequence
  Description of Artificial Sequence: Synthetic oligonucleotide
aaguccugguaguccccac

SEQ ID NO: 1487999 - RNA, 19 nt, Artificial Sequence
  Description of Artificial Sequence: Synthetic oligonucleotide
ugucggagcuuguggauga

SEQ ID NO: 1488000 - RNA, 19 nt, Artificial Sequence
  Description of Artificial Sequence: Synthetic oligonucleotide
uuagaagaucugagguggu

SEQ ID NO: 1488001 - RNA, 19 nt, Artificial Sequence
  Description of Artificial Sequence: Synthetic oligonucleotide
ucgucuggcgugagugugg

SEQ ID NO: 1488002 - RNA, 19 nt, Artificial Sequence
  Description of Artificial Sequence: Synthetic oligonucleotide
cuuuauccccgaaauucuc

SEQ ID NO: 1488003 - RNA, 19 nt, Artificial Sequence
  Description of Artificial Sequence: Synthetic oligonucleotide
cacucuuuggcggaaggag

SEQ ID NO: 1488004 - RNA, 19 nt, Artificial Sequence
  Description of Artificial Sequence: Synthetic oligonucleotide
  modified_base (5)..(5): a, c, u, g, unknown or other
agcunucagacaugacaug

SEQ ID NO: 1488005 - RNA, 19 nt, Artificial Sequence
  Description of Artificial Sequence: Synthetic oligonucleotide
ucauacgcguaucucucau

SEQ ID NO: 1488006 - RNA, 19 nt, Artificial Sequence
  Description of Artificial Sequence: Synthetic oligonucleotide
uggauaacuuccgugcaaa

SEQ ID NO: 1488007 - RNA, 19 nt, Artificial Sequence
  Description of Artificial Sequence: Synthetic oligonucleotide
uuauuucuuuauccccgaa

SEQ ID NO: 1488008 - RNA, 19 nt, Artificial Sequence
  Description of Artificial Sequence: Synthetic oligonucleotide
aguggucuggggcaucaug

SEQ ID NO: 1488009 - RNA, 19 nt, Artificial Sequence
  Description of Artificial Sequence: Synthetic oligonucleotide
uucguucuacugugggcag

SEQ ID NO: 1488010 - RNA, 19 nt, Artificial Sequence
  Description of Artificial Sequence: Synthetic oligonucleotide
cuucguucuacugugggca

SEQ ID NO: 1488011 - RNA, 19 nt, Artificial Sequence
  Description of Artificial Sequence: Synthetic oligonucleotide
gaugcuggccacuaacugu

SEQ ID NO: 1488012 - RNA, 19 nt, Artificial Sequence
  Description of Artificial Sequence: Synthetic oligonucleotide
aagugacaugaagccaauc

SEQ ID NO: 1488013 - RNA, 19 nt, Artificial Sequence
  Description of Artificial Sequence: Synthetic oligonucleotide
uccguaggccagcuugaag

SEQ ID NO: 1488014 - RNA, 19 nt, Artificial Sequence
  Description of Artificial Sequence: Synthetic oligonucleotide
ucuuuguacuugucucgga

SEQ ID NO: 1488015 - RNA, 19 nt, Artificial Sequence
  Description of Artificial Sequence: Synthetic oligonucleotide
aguguuggaacggucucug

SEQ ID NO: 1488016 - RNA, 19 nt, Artificial Sequence
  Description of Artificial Sequence: Synthetic oligonucleotide
uagaagaucugagguggug

SEQ ID NO: 1488017 - RNA, 19 nt, Artificial Sequence
  Description of Artificial Sequence: Synthetic oligonucleotide
ccuugagaaguccugguag

SEQ ID NO: 1488018 - RNA, 19 nt, Artificial Sequence
  Description of Artificial Sequence: Synthetic oligonucleotide
uuugucggagcuuguggau

SEQ ID NO: 1488019 - RNA, 19 nt, Artificial Sequence
  Description of Artificial Sequence: Synthetic oligonucleotide
cucgauacacuuccacgac

SEQ ID NO: 1488020 - RNA, 19 nt, Artificial Sequence
  Description of Artificial Sequence: Synthetic oligonucleotide
ggagagagaugacauggug

SEQ ID NO: 1488021 - RNA, 19 nt, Artificial Sequence
  Description of Artificial Sequence: Synthetic oligonucleotide
  modified_base (8)..(8): a, c, u, g, unknown or other
aagagcunucagacaugac

SEQ ID NO: 1488022 - RNA, 19 nt, Artificial Sequence
  Description of Artificial Sequence: Synthetic oligonucleotide
ugguaguccccacuuucgu

SEQ ID NO: 1488023 - RNA, 19 nt, Artificial Sequence
  Description of Artificial Sequence: Synthetic oligonucleotide
gagcguucuuaaucccagg

SEQ ID NO: 1488024 - RNA, 19 nt, Artificial Sequence
  Description of Artificial Sequence: Synthetic oligonucleotide
gaaagcugggaagggaguc

SEQ ID NO: 1488025 - RNA, 19 nt, Artificial Sequence
  Description of Artificial Sequence: Synthetic oligonucleotide
uuuccgaguugaaugcguu

SEQ ID NO: 1488026 - RNA, 19 nt, Artificial Sequence
  Description of Artificial Sequence: Synthetic oligonucleotide
ccuagaguccacauuuaag

SEQ ID NO: 1488027 - RNA, 19 nt, Artificial Sequence
  Description of Artificial Sequence: Synthetic oligonucleotide
ucugccacucauacgcgua

SEQ ID NO: 1488028 - RNA, 19 nt, Artificial Sequence
  Description of Artificial Sequence: Synthetic oligonucleotide
ucaccggucaggucuuugu

SEQ ID NO: 1488029 - RNA, 19 nt, Artificial Sequence
  Description of Artificial Sequence: Synthetic oligonucleotide
ugguuacucgauacacuuc

SEQ ID NO: 1488030 - RNA, 19 nt, Artificial Sequence
  Description of Artificial Sequence: Synthetic oligonucleotide
gaauuuucgucuggcguga

SEQ ID NO: 1488031 - RNA, 19 nt, Artificial Sequence
  Description of Artificial Sequence: Synthetic oligonucleotide
ugcuuaagaucgccuccca

SEQ ID NO: 1488032 - RNA, 19 nt, Artificial Sequence
  Description of Artificial Sequence: Synthetic oligonucleotide
ugggcugacuggauaacuu

SEQ ID NO: 1488033 - RNA, 19 nt, Artificial Sequence
  Description of Artificial Sequence: Synthetic oligonucleotide
cacuuucguacucuuucug

SEQ ID NO: 1488034 - RNA, 19 nt, Artificial Sequence
  Description of Artificial Sequence: Synthetic oligonucleotide
gaucgccucccacauccgc

SEQ ID NO: 1488035 - RNA, 19 nt, Artificial Sequence
  Description of Artificial Sequence: Synthetic oligonucleotide
uccgaguugaaugcguuuu

SEQ ID NO: 1488036 - RNA, 19 nt, Artificial Sequence
  Description of Artificial Sequence: Synthetic oligonucleotide
cgacuuauuucuuuauccc

SEQ ID NO: 1488037 - RNA, 19 nt, Artificial Sequence
  Description of Artificial Sequence: Synthetic oligonucleotide
aucgucacucuuuggcgga

SEQ ID NO: 1488038 - RNA, 19 nt, Artificial Sequence
  Description of Artificial Sequence: Synthetic oligonucleotide
uaaucccaggccguaacau

SEQ ID NO: 1488039 - RNA, 19 nt, Artificial Sequence
  Description of Artificial Sequence: Synthetic oligonucleotide
cccgaaauucuccaaaguc

SEQ ID NO: 1488040 - RNA, 19 nt, Artificial Sequence
  Description of Artificial Sequence: Synthetic oligonucleotide
aggaucgacuuauuucuuu

SEQ ID NO: 1488041 - RNA, 19 nt, Artificial Sequence
  Description of Artificial Sequence: Synthetic oligonucleotide
ggcuucguucuacuguggg

SEQ ID NO: 1488042 - RNA, 19 nt, Artificial Sequence
  Description of Artificial Sequence: Synthetic oligonucleotide
ggaguuucucacugcaaac

SEQ ID NO: 1488043 - RNA, 19 nt, Artificial Sequence
  Description of Artificial Sequence: Synthetic oligonucleotide
aguccccacuuucguacuc

SEQ ID NO: 1488044 - RNA, 19 nt, Artificial Sequence
  Description of Artificial Sequence: Synthetic oligonucleotide
ugaacagaaagcgcaucuu

SEQ ID NO: 1488045 - RNA, 19 nt, Artificial Sequence
  Description of Artificial Sequence: Synthetic oligonucleotide
aauuuucgucuggcgugag

SEQ ID NO: 1488046 - RNA, 19 nt, Artificial Sequence
  Description of Artificial Sequence: Synthetic oligonucleotide
ucguucuacugugggcagg

SEQ ID NO: 1488047 - RNA, 19 nt, Artificial Sequence
  Description of Artificial Sequence: Synthetic oligonucleotide
  modified_base (6)..(6): a, c, u, g, unknown or other
gagcunucagacaugacau

SEQ ID NO: 1488048 - RNA, 19 nt, Artificial Sequence
  Description of Artificial Sequence: Synthetic oligonucleotide
guuccuuuggagagagaug

SEQ ID NO: 1488049 - RNA, 19 nt, Artificial Sequence
  Description of Artificial Sequence: Synthetic oligonucleotide
ggaugcuggccacuaacug

SEQ ID NO: 1488050 - RNA, 19 nt, Artificial Sequence
  Description of Artificial Sequence: Synthetic oligonucleotide
cugagcguucuuaauccca

SEQ ID NO: 1488051 - RNA, 19 nt, Artificial Sequence
  Description of Artificial Sequence: Synthetic oligonucleotide
cuuucguacucuuucugcu

SEQ ID NO: 1488052 - RNA, 19 nt, Artificial Sequence
  Description of Artificial Sequence: Synthetic oligonucleotide
agccaaucagguuguucca

SEQ ID NO: 1488053 - RNA, 19 nt, Artificial Sequence
  Description of Artificial Sequence: Synthetic oligonucleotide
gacauguggucucuuggcu

SEQ ID NO: 1488054 - RNA, 19 nt, Artificial Sequence
  Description of Artificial Sequence: Synthetic oligonucleotide
gcguucuuaaucccaggcc

SEQ ID NO: 1488055 - RNA, 19 nt, Artificial Sequence
  Description of Artificial Sequence: Synthetic oligonucleotide
cuuuaauccccagcuccac

SEQ ID NO: 1488056 - RNA, 19 nt, Artificial Sequence
  Description of Artificial Sequence: Synthetic oligonucleotide
cgauacacuuccacgacgc

SEQ ID NO: 1488057 - RNA, 19 nt, Artificial Sequence
  Description of Artificial Sequence: Synthetic oligonucleotide
gaaagcgcaucuucagagu

SEQ ID NO: 1488058 - RNA, 19 nt, Artificial Sequence
  Description of Artificial Sequence: Synthetic oligonucleotide
ucuuaaucccaggccguaa

SEQ ID NO: 1488059 - RNA, 19 nt, Artificial Sequence
  Description of Artificial Sequence: Synthetic oligonucleotide
uguacuugucucggaugac

SEQ ID NO: 1488060 - RNA, 19 nt, Artificial Sequence
  Description of Artificial Sequence: Synthetic oligonucleotide
uggcgaaagcugggaaggg

SEQ ID NO: 1488061 - RNA, 19 nt, Artificial Sequence
  Description of Artificial Sequence: Synthetic oligonucleotide
uaagaucgccucccacauc

SEQ ID NO: 1488062 - RNA, 19 nt, Artificial Sequence
  Description of Artificial Sequence: Synthetic oligonucleotide
augccauuuaaggugucau

SEQ ID NO: 1488063 - RNA, 19 nt, Artificial Sequence
  Description of Artificial Sequence: Synthetic oligonucleotide
gcuucguucuacugugggc

SEQ ID NO: 1488064 - RNA, 19 nt, Artificial Sequence
  Description of Artificial Sequence: Synthetic oligonucleotide
auccagaaguuggcacagc

SEQ ID NO: 1488065 - RNA, 19 nt, Artificial Sequence
  Description of Artificial Sequence: Synthetic oligonucleotide
ucuuuggcggaaggagugu

SEQ ID NO: 1488066 - RNA, 19 nt, Artificial Sequence
  Description of Artificial Sequence: Synthetic oligonucleotide
cacucauacgcguaucucu

SEQ ID NO: 1488067 - RNA, 19 nt, Artificial Sequence
  Description of Artificial Sequence: Synthetic oligonucleotide
cuuccacgacgccuagaag

SEQ ID NO: 1488068 - RNA, 19 nt, Artificial Sequence
  Description of Artificial Sequence: Synthetic oligonucleotide
  modified_base (3)..(3): a, c, u, g, unknown or other
cunucagacaugacaugcu

SEQ ID NO: 1488069 - RNA, 19 nt, Artificial Sequence
  Description of Artificial Sequence: Synthetic oligonucleotide
gcaagugacaugaagccaa

SEQ ID NO: 1488070 - RNA, 19 nt, Artificial Sequence
  Description of Artificial Sequence: Synthetic oligonucleotide
gggagaucuaaagacuuca

SEQ ID NO: 1488071 - RNA, 19 nt, Artificial Sequence
  Description of Artificial Sequence: Synthetic oligonucleotide
gagaaggagaggaucgacu

SEQ ID NO: 1488072 - RNA, 19 nt, Artificial Sequence
  Description of Artificial Sequence: Synthetic oligonucleotide
gcgaaagcugggaagggag

SEQ ID NO: 1488073 - RNA, 19 nt, Artificial Sequence
  Description of Artificial Sequence: Synthetic oligonucleotide
uucuuaaucccaggccgua

SEQ ID NO: 1488074 - RNA, 19 nt, Artificial Sequence
  Description of Artificial Sequence: Synthetic oligonucleotide
ugggcagguccuuccuuga

SEQ ID NO: 1488075 - RNA, 19 nt, Artificial Sequence
  Description of Artificial Sequence: Synthetic oligonucleotide
uuccgaguugaaugcguuu

SEQ ID NO: 1488076 - RNA, 19 nt, Artificial Sequence
  Description of Artificial Sequence: Synthetic oligonucleotide
aggggagaucuaaagacuu

SEQ ID NO: 1488077 - RNA, 19 nt, Artificial Sequence
  Description of Artificial Sequence: Synthetic oligonucleotide
ucccagggauuugucggag

SEQ ID NO: 1488078 - RNA, 19 nt, Artificial Sequence
  Description of Artificial Sequence: Synthetic oligonucleotide
ugacauccagggcgcuccc

SEQ ID NO: 1488079 - RNA, 19 nt, Artificial Sequence
  Description of Artificial Sequence: Synthetic oligonucleotide
cacuaacuguugguaaauc

SEQ ID NO: 1488080 - RNA, 19 nt, Artificial Sequence
  Description of Artificial Sequence: Synthetic oligonucleotide
uggccacuaacuguuggua

SEQ ID NO: 1488081 - RNA, 19 nt, Artificial Sequence
  Description of Artificial Sequence: Synthetic oligonucleotide
cugguuacucgauacacuu

SEQ ID NO: 1488082 - RNA, 19 nt, Artificial Sequence
  Description of Artificial Sequence: Synthetic oligonucleotide
uccgugcaaacagcacugc

SEQ ID NO: 1488083 - RNA, 19 nt, Artificial Sequence
  Description of Artificial Sequence: Synthetic oligonucleotide
ugacgggcagcgcugucuu

SEQ ID NO: 1488084 - RNA, 19 nt, Artificial Sequence
  Description of Artificial Sequence: Synthetic oligonucleotide
ggaucgacuuauuucuuua

SEQ ID NO: 1488085 - RNA, 19 nt, Artificial Sequence
  Description of Artificial Sequence: Synthetic oligonucleotide
gucuuuaaagcuggcgaaa

SEQ ID NO: 1488086 - RNA, 19 nt, Artificial Sequence
  Description of Artificial Sequence: Synthetic oligonucleotide
agcuugaagcugucuguuu

SEQ ID NO: 1488087 - RNA, 19 nt, Artificial Sequence
  Description of Artificial Sequence: Synthetic oligonucleotide
augacgggcagcgcugucu

SEQ ID NO: 1488088 - RNA, 19 nt, Artificial Sequence
  Description of Artificial Sequence: Synthetic oligonucleotide
cucauacgcguaucucuca

SEQ ID NO: 1488089 - RNA, 19 nt, Artificial Sequence
  Description of Artificial Sequence: Synthetic oligonucleotide
cacgacgccuagaagauau

SEQ ID NO: 1488090 - RNA, 19 nt, Artificial Sequence
  Description of Artificial Sequence: Synthetic oligonucleotide
cuggauaacuuccgugcaa

SEQ ID NO: 1488091 - RNA, 19 nt, Artificial Sequence
  Description of Artificial Sequence: Synthetic oligonucleotide
ggauuugucggagcuugug

SEQ ID NO: 1488092 - RNA, 19 nt, Artificial Sequence
  Description of Artificial Sequence: Synthetic oligonucleotide
ggauaacuuccgugcaaac

SEQ ID NO: 1488093 - RNA, 19 nt, Artificial Sequence
  Description of Artificial Sequence: Synthetic oligonucleotide
uacgcguaucucucauuuu

SEQ ID NO: 1488094 - RNA, 19 nt, Artificial Sequence
  Description of Artificial Sequence: Synthetic oligonucleotide
  modified_base (11)..(11): a, c, u, g, unknown or other
ccaaagagcunucagacau

SEQ ID NO: 1488095 - RNA, 19 nt, Artificial Sequence
  Description of Artificial Sequence: Synthetic oligonucleotide
cacugaaagcugggcuugg

SEQ ID NO: 1488096 - RNA, 19 nt, Artificial Sequence
  Description of Artificial Sequence: Synthetic oligonucleotide
auguggucucuuggcuucg

SEQ ID NO: 1488097 - RNA, 19 nt, Artificial Sequence
  Description of Artificial Sequence: Synthetic oligonucleotide
ggagaucuaaagacuucac

SEQ ID NO: 1488098 - RNA, 19 nt, Artificial Sequence
  Description of Artificial Sequence: Synthetic oligonucleotide
ccugguaguccccacuuuc

SEQ ID NO: 1488099 - RNA, 19 nt, Artificial Sequence
  Description of Artificial Sequence: Synthetic oligonucleotide
gcuuaagaucgccucccac

SEQ ID NO: 1488100 - RNA, 19 nt, Artificial Sequence
  Description of Artificial Sequence: Synthetic oligonucleotide
gccacuaacuguugguaaa

SEQ ID NO: 1488101 - RNA, 19 nt, Artificial Sequence
  Description of Artificial Sequence: Synthetic oligonucleotide
guuacucgauacacuucca

SEQ ID NO: 1488102 - RNA, 19 nt, Artificial Sequence
  Description of Artificial Sequence: Synthetic oligonucleotide
cacacgccugguuacucga

SEQ ID NO: 1488103 - RNA, 19 nt, Artificial Sequence
  Description of Artificial Sequence: Synthetic oligonucleotide
ccaggccguaacauacagg

SEQ ID NO: 1488104 - RNA, 19 nt, Artificial Sequence
  Description of Artificial Sequence: Synthetic oligonucleotide
ccacacgccugguuacucg

SEQ ID NO: 1488105 - RNA, 19 nt, Artificial Sequence
  Description of Artificial Sequence: Synthetic oligonucleotide
cagcgcugucuucucacuc

SEQ ID NO: 1488106 - RNA, 19 nt, Artificial Sequence
  Description of Artificial Sequence: Synthetic oligonucleotide
gccguaacauacaggagga

SEQ ID NO: 1488107 - RNA, 19 nt, Artificial Sequence
  Description of Artificial Sequence: Synthetic oligonucleotide
gggguuucaugagaaguga

SEQ ID NO: 1488108 - RNA, 19 nt, Artificial Sequence
  Description of Artificial Sequence: Synthetic oligonucleotide
ggagaguguccucgcuugc

SEQ ID NO: 1488109 - RNA, 19 nt, Artificial Sequence
  Description of Artificial Sequence: Synthetic oligonucleotide
cucccagggauuugucgga

SEQ ID NO: 1488110 - RNA, 19 nt, Artificial Sequence
  Description of Artificial Sequence: Synthetic oligonucleotide
uccacacgccugguuacuc

SEQ ID NO: 1488111 - RNA, 19 nt, Artificial Sequence
  Description of Artificial Sequence: Synthetic oligonucleotide
guggucuggggcaucaugu

SEQ ID NO: 1488112 - RNA, 19 nt, Artificial Sequence
  Description of Artificial Sequence: Synthetic oligonucleotide
aggccguaacauacaggag

SEQ ID NO: 1488113 - RNA, 19 nt, Artificial Sequence
  Description of Artificial Sequence: Synthetic oligonucleotide
gaguggaagucagcaaagu

SEQ ID NO: 1488114 - RNA, 19 nt, Artificial Sequence
  Description of Artificial Sequence: Synthetic oligonucleotide
gaugacgggcagcgcuguc

SEQ ID NO: 1488115 - RNA, 19 nt, Artificial Sequence
  Description of Artificial Sequence: Synthetic oligonucleotide
guuuccgaguugaaugcgu

SEQ ID NO: 1488116 - RNA, 19 nt, Artificial Sequence
  Description of Artificial Sequence: Synthetic oligonucleotide
agaucgccucccacauccg

SEQ ID NO: 1488117 - RNA, 19 nt, Artificial Sequence
  Description of Artificial Sequence: Synthetic oligonucleotide
uguggucucuuggcuucgu

SEQ ID NO: 1488118 - RNA, 19 nt, Artificial Sequence
  Description of Artificial Sequence: Synthetic oligonucleotide
ggccacuaacuguugguaa

SEQ ID NO: 1488119 - RNA, 19 nt, Artificial Sequence
  Description of Artificial Sequence: Synthetic oligonucleotide
gguacugguggccuccgua

SEQ ID NO: 1488120 - RNA, 19 nt, Artificial Sequence
  Description of Artificial Sequence: Synthetic oligonucleotide
gaguccccuggagaguguc

SEQ ID NO: 1488121 - RNA, 19 nt, Artificial Sequence
  Description of Artificial Sequence: Synthetic oligonucleotide
guucuuaaucccaggccgu

SEQ ID NO: 1488122 - RNA, 19 nt, Artificial Sequence
  Description of Artificial Sequence: Synthetic oligonucleotide
gccguuccuuuggagagag

SEQ ID NO: 1488123 - RNA, 19 nt, Artificial Sequence
  Description of Artificial Sequence: Synthetic oligonucleotide
ugccacucauacgcguauc

SEQ ID NO: 1488124 - RNA, 19 nt, Artificial Sequence
  Description of Artificial Sequence: Synthetic oligonucleotide
ccaaucagguuguuccaca

SEQ ID NO: 1488125 - RNA, 19 nt, Artificial Sequence
  Description of Artificial Sequence: Synthetic oligonucleotide
cacagcuggcgugguacug

SEQ ID NO: 1488126 - RNA, 19 nt, Artificial Sequence
  Description of Artificial Sequence: Synthetic oligonucleotide
cugacuggauaacuuccgu

SEQ ID NO: 1488127 - RNA, 19 nt, Artificial Sequence
  Description of Artificial Sequence: Synthetic oligonucleotide
uccccacuuucguacucuu

SEQ ID NO: 1488128 - RNA, 19 nt, Artificial Sequence
  Description of Artificial Sequence: Synthetic oligonucleotide
ugccuugggcugacuggau

SEQ ID NO: 1488129 - RNA, 19 nt, Artificial Sequence
  Description of Artificial Sequence: Synthetic oligonucleotide
guguuggaacggucucuga

SEQ ID NO: 1488130 - RNA, 19 nt, Artificial Sequence
  Description of Artificial Sequence: Synthetic oligonucleotide
gaacggucucugaaaggcu

SEQ ID NO: 1488131 - RNA, 19 nt, Artificial Sequence
  Description of Artificial Sequence: Synthetic oligonucleotide
gcgugaguguggcaaguga

SEQ ID NO: 1488132 - RNA, 19 nt, Artificial Sequence
  Description of Artificial Sequence: Synthetic oligonucleotide
gccauuuaaggugucauuu

SEQ ID NO: 1488133 - RNA, 19 nt, Artificial Sequence
  Description of Artificial Sequence: Synthetic oligonucleotide
cucaccggucaggucuuug

SEQ ID NO: 1488134 - RNA, 19 nt, Artificial Sequence
  Description of Artificial Sequence: Synthetic oligonucleotide
gccaaucagguuguuccac

SEQ ID NO: 1488135 - RNA, 19 nt, Artificial Sequence
  Description of Artificial Sequence: Synthetic oligonucleotide
ggggagaucuaaagacuuc

SEQ ID NO: 1488136 - RNA, 19 nt, Artificial Sequence
  Description of Artificial Sequence: Synthetic oligonucleotide
ccuuggcgugucugaaagc

SEQ ID NO: 1488137 - RNA, 19 nt, Artificial Sequence
  Description of Artificial Sequence: Synthetic oligonucleotide
ucgucacucuuuggcggaa

SEQ ID NO: 1488138 - RNA, 19 nt, Artificial Sequence
  Description of Artificial Sequence: Synthetic oligonucleotide
cuucacggaggcagagucu

SEQ ID NO: 1488139 - RNA, 19 nt, Artificial Sequence
  Description of Artificial Sequence: Synthetic oligonucleotide
gucuguuuccgaguugaau

SEQ ID NO: 1488140 - RNA, 19 nt, Artificial Sequence
  Description of Artificial Sequence: Synthetic oligonucleotide
ggcgaaagcugggaaggga

SEQ ID NO: 1488141 - RNA, 19 nt, Artificial Sequence
  Description of Artificial Sequence: Synthetic oligonucleotide
ggagaggaucgacuuauuu

SEQ ID NO: 1488142 - RNA, 19 nt, Artificial Sequence
  Description of Artificial Sequence: Synthetic oligonucleotide
cugccaccgaugggagggg

SEQ ID NO: 1488143 - RNA, 19 nt, Artificial Sequence
  Description of Artificial Sequence: Synthetic oligonucleotide
gacuucacggaggcagagu

SEQ ID NO: 1488144 - RNA, 19 nt, Artificial Sequence
  Description of Artificial Sequence: Synthetic oligonucleotide
ggcggaaggaguguucucu

SEQ ID NO: 1488145 - RNA, 19 nt, Artificial Sequence
  Description of Artificial Sequence: Synthetic oligonucleotide
cucggaugacgggcagcgc

SEQ ID NO: 1488146 - RNA, 19 nt, Artificial Sequence
  Description of Artificial Sequence: Synthetic oligonucleotide
ccaguccagaccaaucucu

SEQ ID NO: 1488147 - RNA, 19 nt, Artificial Sequence
  Description of Artificial Sequence: Synthetic oligonucleotide
cucugccacucauacgcgu

SEQ ID NO: 1488148 - RNA, 19 nt, Artificial Sequence
  Description of Artificial Sequence: Synthetic oligonucleotide
gucugaaagccaccacuuu

SEQ ID NO: 1488149 - RNA, 19 nt, Artificial Sequence
  Description of Artificial Sequence: Synthetic oligonucleotide
cuugccaaggccguuccuu

SEQ ID NO: 1488150 - RNA, 19 nt, Artificial Sequence
  Description of Artificial Sequence: Synthetic oligonucleotide
caagugacaugaagccaau

SEQ ID NO: 1488151 - RNA, 19 nt, Artificial Sequence
  Description of Artificial Sequence: Synthetic oligonucleotide
gacgggcagcgcugucuuc

SEQ ID NO: 1488152 - RNA, 19 nt, Artificial Sequence
  Description of Artificial Sequence: Synthetic oligonucleotide
gcguaucucucauuuuccu

SEQ ID NO: 1488153 - RNA, 19 nt, Artificial Sequence
  Description of Artificial Sequence: Synthetic oligonucleotide
cacgccugguuacucgaua

SEQ ID NO: 1488154 - RNA, 19 nt, Artificial Sequence
  Description of Artificial Sequence: Synthetic oligonucleotide
ggcgugucugaaagccacc

SEQ ID NO: 1488155 - RNA, 19 nt, Artificial Sequence
  Description of Artificial Sequence: Synthetic oligonucleotide
caccggucaggucuuugua

SEQ ID NO: 1488156 - RNA, 19 nt, Artificial Sequence
  Description of Artificial Sequence: Synthetic oligonucleotide
caaagucaucgucacucuu

SEQ ID NO: 1488157 - RNA, 19 nt, Artificial Sequence
  Description of Artificial Sequence: Synthetic oligonucleotide
gccacucauacgcguaucu

SEQ ID NO: 1488158 - RNA, 19 nt, Artificial Sequence
  Description of Artificial Sequence: Synthetic oligonucleotide
cccuggagaguguccucgc

SEQ ID NO: 1488159 - RNA, 19 nt, Artificial Sequence
  Description of Artificial Sequence: Synthetic oligonucleotide
ccacucauacgcguaucuc

SEQ ID NO: 1488160 - RNA, 19 nt, Artificial Sequence
  Description of Artificial Sequence: Synthetic oligonucleotide
agucgucugcacacucuuu

SEQ ID NO: 1488161 - RNA, 19 nt, Artificial Sequence
  Description of Artificial Sequence: Synthetic oligonucleotide
cgugucugaaagccaccac

SEQ ID NO: 1488162 - RNA, 19 nt, Artificial Sequence
  Description of Artificial Sequence: Synthetic oligonucleotide
cauacgcguaucucucauu

SEQ ID NO: 1488163 - RNA, 19 nt, Artificial Sequence
  Description of Artificial Sequence: Synthetic oligonucleotide
cgacgccuagaagauauuc

SEQ ID NO: 1488164 - RNA, 19 nt, Artificial Sequence
  Description of Artificial Sequence: Synthetic oligonucleotide
ccagggauuugucggagcu

SEQ ID NO: 1488165 - RNA, 19 nt, Artificial Sequence
  Description of Artificial Sequence: Synthetic oligonucleotide
gaggaucgacuuauuucuu

SEQ ID NO: 1488166 - RNA, 19 nt, Artificial Sequence
  Description of Artificial Sequence: Synthetic oligonucleotide
ccacuuucguacucuuucu

SEQ ID NO: 1488167 - RNA, 19 nt, Artificial Sequence
  Description of Artificial Sequence: Synthetic oligonucleotide
cugccacucauacgcguau

SEQ ID NO: 1488168 - RNA, 19 nt, Artificial Sequence
  Description of Artificial Sequence: Synthetic oligonucleotide
cguuccuuuggagagagau

SEQ ID NO: 1488169 - RNA, 19 nt, Artificial Sequence
  Description of Artificial Sequence: Synthetic oligonucleotide
accucaccggucaggucuu

SEQ ID NO: 1488170 - RNA, 19 nt, Artificial Sequence
  Description of Artificial Sequence: Synthetic oligonucleotide
caacgcugcugccaccgau

SEQ ID NO: 1488171 - RNA, 19 nt, Artificial Sequence
  Description of Artificial Sequence: Synthetic oligonucleotide
cuuuggcggaaggaguguu

SEQ ID NO: 1488172 - RNA, 19 nt, Artificial Sequence
  Description of Artificial Sequence: Synthetic oligonucleotide
cgucuggcgugaguguggc

SEQ ID NO: 1488173 - RNA, 19 nt, Artificial Sequence
  Description of Artificial Sequence: Synthetic oligonucleotide
acgacgccuagaagauauu

SEQ ID NO: 1488174 - RNA, 19 nt, Artificial Sequence
  Description of Artificial Sequence: Synthetic oligonucleotide
cuccguaggccagcuugaa

SEQ ID NO: 1488175 - RNA, 19 nt, Artificial Sequence
  Description of Artificial Sequence: Synthetic oligonucleotide
cacuuccacgacgccuaga

SEQ ID NO: 1488176 - RNA, 19 nt, Artificial Sequence
  Description of Artificial Sequence: Synthetic oligonucleotide
ccaaggccguuccuuugga

SEQ ID NO: 1488177 - RNA, 19 nt, Artificial Sequence
  Description of Artificial Sequence: Synthetic oligonucleotide
gcgugguacugguggccuc

SEQ ID NO: 1488178 - RNA, 19 nt, Artificial Sequence
  Description of Artificial Sequence: Synthetic oligonucleotide
guggucucuuggcuucguu

SEQ ID NO: 1488179 - RNA, 19 nt, Artificial Sequence
  Description of Artificial Sequence: Synthetic oligonucleotide
gucggagcuuguggaugaa

SEQ ID NO: 1488180 - RNA, 19 nt, Artificial Sequence
  Description of Artificial Sequence: Synthetic oligonucleotide
ggcgugguacugguggccu

SEQ ID NO: 1488181 - RNA, 19 nt, Artificial Sequence
  Description of Artificial Sequence: Synthetic oligonucleotide
ccccgaaauucuccaaagu

SEQ ID NO: 1488182 - RNA, 19 nt, Artificial Sequence
  Description of Artificial Sequence: Synthetic oligonucleotide
cuccacacgccugguuacu

SEQ ID NO: 1488183 - RNA, 19 nt, Artificial Sequence
  Description of Artificial Sequence: Synthetic oligonucleotide
cuggggcaucaugucuuua

SEQ ID NO: 1488184 - RNA, 19 nt, Artificial Sequence
  Description of Artificial Sequence: Synthetic oligonucleotide
ccacuaacuguugguaaau

SEQ ID NO: 1488185 - RNA, 19 nt, Artificial Sequence
  Description of Artificial Sequence: Synthetic oligonucleotide
ccgugcaaacagcacugcu

SEQ ID NO: 1488186 - RNA, 19 nt, Artificial Sequence
  Description of Artificial Sequence: Synthetic oligonucleotide
ggaugacgggcagcgcugu

SEQ ID NO: 1488187 - RNA, 19 nt, Artificial Sequence
  Description of Artificial Sequence: Synthetic oligonucleotide
cagggauuugucggagcuu

SEQ ID NO: 1488188 - RNA, 19 nt, Artificial Sequence
  Description of Artificial Sequence: Synthetic oligonucleotide
cgccugguuacucgauaca

SEQ ID NO: 1488189 - RNA, 19 nt, Artificial Sequence
  Description of Artificial Sequence: Synthetic oligonucleotide
caccgaugggaggggagau

SEQ ID NO: 1488190 - RNA, 19 nt, Artificial Sequence
  Description of Artificial Sequence: Synthetic oligonucleotide
gggauuugucggagcuugu

SEQ ID NO: 1488191 - RNA, 19 nt, Artificial Sequence
  Description of Artificial Sequence: Synthetic oligonucleotide
ccuggagaguguccucgcu

SEQ ID NO: 1488192 - RNA, 19 nt, Artificial Sequence
  Description of Artificial Sequence: Synthetic oligonucleotide
ccgccaguuucaugucaaa

SEQ ID NO: 1488193 - RNA, 19 nt, Artificial Sequence
  Description of Artificial Sequence: Synthetic oligonucleotide
ccaacgcugcugccaccga

SEQ ID NO: 1488194 - RNA, 19 nt, Artificial Sequence
  Description of Artificial Sequence: Synthetic oligonucleotide
cgccuagaagauauuccau

SEQ ID NO: 1488195 - RNA, 19 nt, Artificial Sequence
  Description of Artificial Sequence: Synthetic oligonucleotide
ccagaccaaucucuugcuu

SEQ ID NO: 1488196 - RNA, 19 nt, Artificial Sequence
  Description of Artificial Sequence: Synthetic oligonucleotide
ccguaacauacaggaggaa

SEQ ID NO: 1488197 - RNA, 19 nt, Artificial Sequence
  Description of Artificial Sequence: Synthetic oligonucleotide
gggcgcuccccaggcaucu

SEQ ID NO: 1488198 - RNA, 19 nt, Artificial Sequence
  Description of Artificial Sequence: Synthetic oligonucleotide
cguacucuuucugcucagu

SEQ ID NO: 1488199 - RNA, 19 nt, Artificial Sequence
  Description of Artificial Sequence: Synthetic oligonucleotide
cgaugggaggggagaucua

SEQ ID NO: 1488200 - RNA, 19 nt, Artificial Sequence
  Description of Artificial Sequence: Synthetic oligonucleotide
ggccuccguaggccagcuu

SEQ ID NO: 1488201 - RNA, 19 nt, Artificial Sequence
  Description of Artificial Sequence: Synthetic oligonucleotide
ccucaccggucaggucuuu

SEQ ID NO: 1488202 - RNA, 19 nt, Artificial Sequence
  Description of Artificial Sequence: Synthetic oligonucleotide
aaugcaauugucuagaacc

SEQ ID NO: 1488203 - RNA, 19 nt, Artificial Sequence
  Description of Artificial Sequence: Synthetic oligonucleotide
aaauccucguccuauaguc

SEQ ID NO: 1488204 - RNA, 19 nt, Artificial Sequence
  Description of Artificial Sequence: Synthetic oligonucleotide
aauauggucucccuuuugg

SEQ ID NO: 1488205 - RNA, 19 nt, Artificial Sequence
  Description of Artificial Sequence: Synthetic oligonucleotide
uuugacaucaguugguagg

SEQ ID NO: 1488206 - RNA, 19 nt, Artificial Sequence
  Description of Artificial Sequence: Synthetic oligonucleotide
agacaagucaacuuaggac

SEQ ID NO: 1488207 - RNA, 19 nt, Artificial Sequence
  Description of Artificial Sequence: Synthetic oligonucleotide
uuuuggaugcaauaaaccu

SEQ ID NO: 1488208 - RNA, 19 nt, Artificial Sequence
  Description of Artificial Sequence: Synthetic oligonucleotide
uuuggaugcaauaaaccug

SEQ ID NO: 1488209 - RNA, 19 nt, Artificial Sequence
  Description of Artificial Sequence: Synthetic oligonucleotide
gacaagucaacuuaggaca

SEQ ID NO: 1488210 - RNA, 19 nt, Artificial Sequence
  Description of Artificial Sequence: Synthetic oligonucleotide
uaugauacacugcagcuca

SEQ ID NO: 1488211 - RNA, 19 nt, Artificial Sequence
  Description of Artificial Sequence: Synthetic oligonucleotide
ucuagaaccagggaguggg

SEQ ID NO: 1488212 - RNA, 19 nt, Artificial Sequence
  Description of Artificial Sequence: Synthetic oligonucleotide
uuauccaccaucuuauuaa

SEQ ID NO: 1488213 - RNA, 19 nt, Artificial Sequence
  Description of Artificial Sequence: Synthetic oligonucleotide
cuuuuggaugcaauaaacc

SEQ ID NO: 1488214 - RNA, 19 nt, Artificial Sequence
  Description of Artificial Sequence: Synthetic oligonucleotide
agccaaacaccauucagac

SEQ ID NO: 1488215 - RNA, 19 nt, Artificial Sequence
  Description of Artificial Sequence: Synthetic oligonucleotide
aaguacucggagcauauga

SEQ ID NO: 1488216 - RNA, 19 nt, Artificial Sequence
  Description of Artificial Sequence: Synthetic oligonucleotide
ucaagacaagucaacuuag

SEQ ID NO: 1488217 - RNA, 19 nt, Artificial Sequence
  Description of Artificial Sequence: Synthetic oligonucleotide
auccucacgaucuucuucg

SEQ ID NO: 1488218 - RNA, 19 nt, Artificial Sequence
  Description of Artificial Sequence: Synthetic oligonucleotide
uccaagcugaauauggucu

SEQ ID NO: 1488219 - RNA, 19 nt, Artificial Sequence
  Description of Artificial Sequence: Synthetic oligonucleotide
ugaccuuuggaagaguagg

SEQ ID NO: 1488220 - RNA, 19 nt, Artificial Sequence
  Description of Artificial Sequence: Synthetic oligonucleotide
aguagggcaagcaugaguc

SEQ ID NO: 1488221 - RNA, 19 nt, Artificial Sequence
  Description of Artificial Sequence: Synthetic oligonucleotide
aucuuauuaaugcaauugu

SEQ ID NO: 1488222 - RNA, 19 nt, Artificial Sequence
  Description of Artificial Sequence: Synthetic oligonucleotide
caauugucuagaaccaggg

SEQ ID NO: 1488223 - RNA, 19 nt, Artificial Sequence
  Description of Artificial Sequence: Synthetic oligonucleotide
gucaacuuaggacacaaac

SEQ ID NO: 1488224 - RNA, 19 nt, Artificial Sequence
  Description of Artificial Sequence: Synthetic oligonucleotide
ugagcucagauuauccacc

SEQ ID NO: 1488225 - RNA, 19 nt, Artificial Sequence
  Description of Artificial Sequence: Synthetic oligonucleotide
cacuccaagcugaauaugg

SEQ ID NO: 1488226 - RNA, 19 nt, Artificial Sequence
  Description of Artificial Sequence: Synthetic oligonucleotide
acgaucuucuucgagcucc

SEQ ID NO: 1488227 - RNA, 19 nt, Artificial Sequence
  Description of Artificial Sequence: Synthetic oligonucleotide
uugucuagaaccagggagu

SEQ ID NO: 1488228 - RNA, 19 nt, Artificial Sequence
  Description of Artificial Sequence: Synthetic oligonucleotide
uacucggagcauaugauac

SEQ ID NO: 1488229 - RNA, 19 nt, Artificial Sequence
  Description of Artificial Sequence: Synthetic oligonucleotide
gacucaauauccuuucgac

SEQ ID NO: 1488230 - RNA, 19 nt, Artificial Sequence
  Description of Artificial Sequence: Synthetic oligonucleotide
auuaaugcaauugucuaga

SEQ ID NO: 1488231 - RNA, 19 nt, Artificial Sequence
  Description of Artificial Sequence: Synthetic oligonucleotide
aauccucuagaccacucca

SEQ ID NO: 1488232 - RNA, 19 nt, Artificial Sequence
  Description of Artificial Sequence: Synthetic oligonucleotide
cuguaauggugccagacgc

SEQ ID NO: 1488233 - RNA, 19 nt, Artificial Sequence
  Description of Artificial Sequence: Synthetic oligonucleotide
aaacugugggcgcaguuca

SEQ ID NO: 1488234 - RNA, 19 nt, Artificial Sequence
  Description of Artificial Sequence: Synthetic oligonucleotide
auagucaccucacucgcag

SEQ ID NO: 1488235 - RNA, 19 nt, Artificial Sequence
  Description of Artificial Sequence: Synthetic oligonucleotide
acuucacuggcucaaauaa

SEQ ID NO: 1488236 - RNA, 19 nt, Artificial Sequence
  Description of Artificial Sequence: Synthetic oligonucleotide
cagcacgucguucacaugg

SEQ ID NO: 1488237 - RNA, 19 nt, Artificial Sequence
  Description of Artificial Sequence: Synthetic oligonucleotide
cucaauauccuuucgacaa

SEQ ID NO: 1488238 - RNA, 19 nt, Artificial Sequence
  Description of Artificial Sequence: Synthetic oligonucleotide
gaagaguagggcaagcaug

SEQ ID NO: 1488239 - RNA, 19 nt, Artificial Sequence
  Description of Artificial Sequence: Synthetic oligonucleotide
aucaucagagggcauaccu

SEQ ID NO: 1488240 - RNA, 19 nt, Artificial Sequence
  Description of Artificial Sequence: Synthetic oligonucleotide
auccucguccuauagucac

SEQ ID NO: 1488241 - RNA, 19 nt, Artificial Sequence
  Description of Artificial Sequence: Synthetic oligonucleotide
uaggacacaaacaucccaa

SEQ ID NO: 1488242 - RNA, 19 nt, Artificial Sequence
  Description of Artificial Sequence: Synthetic oligonucleotide
agcaugaccuucaugacag

SEQ ID NO: 1488243 - RNA, 19 nt, Artificial Sequence
  Description of Artificial Sequence: Synthetic oligonucleotide
ucguccuauagucaccuca

SEQ ID NO: 1488244 - RNA, 19 nt, Artificial Sequence
  Description of Artificial Sequence: Synthetic oligonucleotide
auaugauacacugcagcuc

SEQ ID NO: 1488245 - RNA, 19 nt, Artificial Sequence
  Description of Artificial Sequence: Synthetic oligonucleotide
agacgcucucuguucagcc

SEQ ID NO: 1488246 - RNA, 19 nt, Artificial Sequence
  Description of Artificial Sequence: Synthetic oligonucleotide
caugauuguccacuguccc

SEQ ID NO: 1488247 - RNA, 19 nt, Artificial Sequence
  Description of Artificial Sequence: Synthetic oligonucleotide
cuauagucaccucacucgc

SEQ ID NO: 1488248 - RNA, 19 nt, Artificial Sequence
  Description of Artificial Sequence: Synthetic oligonucleotide
ccuauagucaccucacucg

SEQ ID NO: 1488249 - RNA, 19 nt, Artificial Sequence
  Description of Artificial Sequence: Synthetic oligonucleotide
caagacaagucaacuuagg

SEQ ID NO: 1488250 - RNA, 19 nt, Artificial Sequence
  Description of Artificial Sequence: Synthetic oligonucleotide
uccacugucccucaggguu

SEQ ID NO: 1488251 - RNA, 19 nt, Artificial Sequence
  Description of Artificial Sequence: Synthetic oligonucleotide
ucuagaccacuccaaggug

SEQ ID NO: 1488252 - RNA, 19 nt, Artificial Sequence
  Description of Artificial Sequence: Synthetic oligonucleotide
uccuauagucaccucacuc

SEQ ID NO: 1488253 - RNA, 19 nt, Artificial Sequence
  Description of Artificial Sequence: Synthetic oligonucleotide
gccucaaugaaguacucgg

SEQ ID NO: 1488254 - RNA, 19 nt, Artificial Sequence
  Description of Artificial Sequence: Synthetic oligonucleotide
gaauccucuagaccacucc

SEQ ID NO: 1488255 - RNA, 19 nt, Artificial Sequence
  Description of Artificial Sequence: Synthetic oligonucleotide
aacuuaggacacaaacauc

SEQ ID NO: 1488256 - RNA, 19 nt, Artificial Sequence
  Description of Artificial Sequence: Synthetic oligonucleotide
uucaccuuaaacagcucaa

SEQ ID NO: 1488257 - RNA, 19 nt, Artificial Sequence
  Description of Artificial Sequence: Synthetic oligonucleotide
uccauucacugauacagaa

SEQ ID NO: 1488258 - RNA, 19 nt, Artificial Sequence
  Description of Artificial Sequence: Synthetic oligonucleotide
acucaauauccuuucgaca

SEQ ID NO: 1488259 - RNA, 19 nt, Artificial Sequence
  Description of Artificial Sequence: Synthetic oligonucleotide
aacuucacuggcucaaaua

SEQ ID NO: 1488260 - RNA, 19 nt, Artificial Sequence
  Description of Artificial Sequence: Synthetic oligonucleotide
uguaauggugccagacgcu

SEQ ID NO: 1488261 - RNA, 19 nt, Artificial Sequence
  Description of Artificial Sequence: Synthetic oligonucleotide
uuuggaagaguagggcaag

SEQ ID NO: 1488262 - RNA, 19 nt, Artificial Sequence
  Description of Artificial Sequence: Synthetic oligonucleotide
uccauuagagcccgaugcu

SEQ ID NO: 1488263 - RNA, 19 nt, Artificial Sequence
  Description of Artificial Sequence: Synthetic oligonucleotide
ucagagggcauaccuuuga

SEQ ID NO: 1488264 - RNA, 19 nt, Artificial Sequence
  Description of Artificial Sequence: Synthetic oligonucleotide
agauuauccaccaucuuau

SEQ ID NO: 1488265 - RNA, 19 nt, Artificial Sequence
  Description of Artificial Sequence: Synthetic oligonucleotide
ucuugcugcgauuuagcuc

SEQ ID NO: 1488266 - RNA, 19 nt, Artificial Sequence
  Description of Artificial Sequence: Synthetic oligonucleotide
ccgaauaaagcugagacug

SEQ ID NO: 1488267 - RNA, 19 nt, Artificial Sequence
  Description of Artificial Sequence: Synthetic oligonucleotide
agggaguggguuuuggacu

SEQ ID NO: 1488268 - RNA, 19 nt, Artificial Sequence
  Description of Artificial Sequence: Synthetic oligonucleotide
uauggucucccuuuuggau

SEQ ID NO: 1488269 - RNA, 19 nt, Artificial Sequence
  Description of Artificial Sequence: Synthetic oligonucleotide
ugaaguacucggagcauau

SEQ ID NO: 1488270 - RNA, 19 nt, Artificial Sequence
  Description of Artificial Sequence: Synthetic oligonucleotide
acaagucaacuuaggacac

SEQ ID NO: 1488271 - RNA, 19 nt, Artificial Sequence
  Description of Artificial Sequence: Synthetic oligonucleotide
uagaccacuccaaggugcc

SEQ ID NO: 1488272 - RNA, 19 nt, Artificial Sequence
  Description of Artificial Sequence: Synthetic oligonucleotide
aacccuggaggugaugcuc

SEQ ID NO: 1488273 - RNA, 19 nt, Artificial Sequence
  Description of Artificial Sequence: Synthetic oligonucleotide
gaauccuggacauguucac

SEQ ID NO: 1488274 - RNA, 19 nt, Artificial Sequence
  Description of Artificial Sequence: Synthetic oligonucleotide
auacacugcagcucauucu

SEQ ID NO: 1488275 - RNA, 19 nt, Artificial Sequence
  Description of Artificial Sequence: Synthetic oligonucleotide
gacagccucaaugaaguac

SEQ ID NO: 1488276 - RNA, 19 nt, Artificial Sequence
  Description of Artificial Sequence: Synthetic oligonucleotide
ugcaauugucuagaaccag

SEQ ID NO: 1488277 - RNA, 19 nt, Artificial Sequence
  Description of Artificial Sequence: Synthetic oligonucleotide
accuguaauggugccagac

SEQ ID NO: 1488278 - RNA, 19 nt, Artificial Sequence
  Description of Artificial Sequence: Synthetic oligonucleotide
agaugauguccggagcggc

SEQ ID NO: 1488279 - RNA, 19 nt, Artificial Sequence
  Description of Artificial Sequence: Synthetic oligonucleotide
aauaaagcugagacuguaa

SEQ ID NO: 1488280 - RNA, 19 nt, Artificial Sequence
  Description of Artificial Sequence: Synthetic oligonucleotide
auccuuucgacaaauggga

SEQ ID NO: 1488281 - RNA, 19 nt, Artificial Sequence
  Description of Artificial Sequence: Synthetic oligonucleotide
uugacaucaguugguaggu

SEQ ID NO: 1488282 - RNA, 19 nt, Artificial Sequence
  Description of Artificial Sequence: Synthetic oligonucleotide
uauagucaccucacucgca

SEQ ID NO: 1488283 - RNA, 19 nt, Artificial Sequence
  Description of Artificial Sequence: Synthetic oligonucleotide
guuuccguuucauccauuc

SEQ ID NO: 1488284 - RNA, 19 nt, Artificial Sequence
  Description of Artificial Sequence: Synthetic oligonucleotide
acaucaguugguaggugac

SEQ ID NO: 1488285 - RNA, 19 nt, Artificial Sequence
  Description of Artificial Sequence: Synthetic oligonucleotide
acagccucaaugaaguacu

SEQ ID NO: 1488286 - RNA, 19 nt, Artificial Sequence
  Description of Artificial Sequence: Synthetic oligonucleotide
auauggucucccuuuugga

SEQ ID NO: 1488287 - RNA, 19 nt, Artificial Sequence
  Description of Artificial Sequence: Synthetic oligonucleotide
uccgcauucuccuuauuuu

SEQ ID NO: 1488288 - RNA, 19 nt, Artificial Sequence
  Description of Artificial Sequence: Synthetic oligonucleotide
ugauuguccacugucccuc

SEQ ID NO: 1488289 - RNA, 19 nt, Artificial Sequence
  Description of Artificial Sequence: Synthetic oligonucleotide
agagggcauaccuuugaca

SEQ ID NO: 1488290 - RNA, 19 nt, Artificial Sequence
  Description of Artificial Sequence: Synthetic oligonucleotide
agaauccuggacauguuca

SEQ ID NO: 1488291 - RNA, 19 nt, Artificial Sequence
  Description of Artificial Sequence: Synthetic oligonucleotide
uugccucaagacaagucaa

SEQ ID NO: 1488292 - RNA, 19 nt, Artificial Sequence
  Description of Artificial Sequence: Synthetic oligonucleotide
gagcaugaccuucaugaca

SEQ ID NO: 1488293 - RNA, 19 nt, Artificial Sequence
  Description of Artificial Sequence: Synthetic oligonucleotide
cuaguuuccguuucaucca

SEQ ID NO: 1488294 - RNA, 19 nt, Artificial Sequence
  Description of Artificial Sequence: Synthetic oligonucleotide
uccagggaauccucuagac

SEQ ID NO: 1488295 - RNA, 19 nt, Artificial Sequence
  Description of Artificial Sequence: Synthetic oligonucleotide
uuaaugcaauugucuagaa

SEQ ID NO: 1488296 - RNA, 19 nt, Artificial Sequence
  Description of Artificial Sequence: Synthetic oligonucleotide
ugaauauggucucccuuuu

SEQ ID NO: 1488297 - RNA, 19 nt, Artificial Sequence
  Description of Artificial Sequence: Synthetic oligonucleotide
ugcuucuuaggguagcguu

SEQ ID NO: 1488298 - RNA, 19 nt, Artificial Sequence
  Description of Artificial Sequence: Synthetic oligonucleotide
gaaacugugggcgcaguuc

SEQ ID NO: 1488299 - RNA, 19 nt, Artificial Sequence
  Description of Artificial Sequence: Synthetic oligonucleotide
uagcguucgaugaccuuug

SEQ ID NO: 1488300 - RNA, 19 nt, Artificial Sequence
  Description of Artificial Sequence: Synthetic oligonucleotide
gcaauugucuagaaccagg

SEQ ID NO: 1488301 - RNA, 19 nt, Artificial Sequence
  Description of Artificial Sequence: Synthetic oligonucleotide
gucacuugccucaagacaa

SEQ ID NO: 1488302 - RNA, 19 nt, Artificial Sequence
  Description of Artificial Sequence: Synthetic oligonucleotide
cacuggcucaaauaacuuc

SEQ ID NO: 1488303 - RNA, 19 nt, Artificial Sequence
  Description of Artificial Sequence: Synthetic oligonucleotide
ucaucagagggcauaccuu

SEQ ID NO: 1488304 - RNA, 19 nt, Artificial Sequence
  Description of Artificial Sequence: Synthetic oligonucleotide
accacucccgguccauccc

SEQ ID NO: 1488305 - RNA, 19 nt, Artificial Sequence
  Description of Artificial Sequence: Synthetic oligonucleotide
acuguaaauccugcagcuc

SEQ ID NO: 1488306 - RNA, 19 nt, Artificial Sequence
  Description of Artificial Sequence: Synthetic oligonucleotide
gagaaggacacuccggugu

SEQ ID NO: 1488307 - RNA, 19 nt, Artificial Sequence
  Description of Artificial Sequence: Synthetic oligonucleotide
cagauuauccaccaucuua

SEQ ID NO: 1488308 - RNA, 19 nt, Artificial Sequence
  Description of Artificial Sequence: Synthetic oligonucleotide
cuccaagcugaauaugguc

SEQ ID NO: 1488309 - RNA, 19 nt, Artificial Sequence
  Description of Artificial Sequence: Synthetic oligonucleotide
ucgcccauagcccgcucgg

SEQ ID NO: 1488310 - RNA, 19 nt, Artificial Sequence
  Description of Artificial Sequence: Synthetic oligonucleotide
ucgagcuccccuuucgggu

SEQ ID NO: 1488311 - RNA, 19 nt, Artificial Sequence
  Description of Artificial Sequence: Synthetic oligonucleotide
ugccucaagacaagucaac

SEQ ID NO: 1488312 - RNA, 19 nt, Artificial Sequence
  Description of Artificial Sequence: Synthetic oligonucleotide
gacuguaaauccugcagcu

SEQ ID NO: 1488313 - RNA, 19 nt, Artificial Sequence
  Description of Artificial Sequence: Synthetic oligonucleotide
uaggguagcguucgaugac

SEQ ID NO: 1488314 - RNA, 19 nt, Artificial Sequence
  Description of Artificial Sequence: Synthetic oligonucleotide
aaggacacuccgguguucu

SEQ ID NO: 1488315 - RNA, 19 nt, Artificial Sequence
  Description of Artificial Sequence: Synthetic oligonucleotide
uucucgugcaucuggguuu

SEQ ID NO: 1488316 - RNA, 19 nt, Artificial Sequence
  Description of Artificial Sequence: Synthetic oligonucleotide
ugggacacucuaguuuccg

SEQ ID NO: 1488317 - RNA, 19 nt, Artificial Sequence
  Description of Artificial Sequence: Synthetic oligonucleotide
cacacggcuucccagauga

SEQ ID NO: 1488318 - RNA, 19 nt, Artificial Sequence
  Description of Artificial Sequence: Synthetic oligonucleotide
ucgucacuugccucaagac

SEQ ID NO: 1488319 - RNA, 19 nt, Artificial Sequence
  Description of Artificial Sequence: Synthetic oligonucleotide
ucacgcucaggacagccau

SEQ ID NO: 1488320 - RNA, 19 nt, Artificial Sequence
  Description of Artificial Sequence: Synthetic oligonucleotide
agccucaaugaaguacucg

SEQ ID NO: 1488321 - RNA, 19 nt, Artificial Sequence
  Description of Artificial Sequence: Synthetic oligonucleotide
gagccugcuccgaauaaag

SEQ ID NO: 1488322 - RNA, 19 nt, Artificial Sequence
  Description of Artificial Sequence: Synthetic oligonucleotide
ucccugagaaggacacucc

SEQ ID NO: 1488323 - RNA, 19 nt, Artificial Sequence
  Description of Artificial Sequence: Synthetic oligonucleotide
uaacuucacuggcucaaau

SEQ ID NO: 1488324 - RNA, 19 nt, Artificial Sequence
  Description of Artificial Sequence: Synthetic oligonucleotide
guuccgggaaaucaucaga

SEQ ID NO: 1488325 - RNA, 19 nt, Artificial Sequence
  Description of Artificial Sequence: Synthetic oligonucleotide
acuugccucaagacaaguc

SEQ ID NO: 1488326 - RNA, 19 nt, Artificial Sequence
  Description of Artificial Sequence: Synthetic oligonucleotide
gaugauguccggagcggcc

SEQ ID NO: 1488327 - RNA, 19 nt, Artificial Sequence
  Description of Artificial Sequence: Synthetic oligonucleotide
uaauggugccagacgcucu

SEQ ID NO: 1488328 - RNA, 19 nt, Artificial Sequence
  Description of Artificial Sequence: Synthetic oligonucleotide
agcucaaggcugcucugag

SEQ ID NO: 1488329 - RNA, 19 nt, Artificial Sequence
  Description of Artificial Sequence: Synthetic oligonucleotide
ggguuuuggacucaauauc

SEQ ID NO: 1488330 - RNA, 19 nt, Artificial Sequence
  Description of Artificial Sequence: Synthetic oligonucleotide
gcaagcaccagcuccggcc

SEQ ID NO: 1488331 - RNA, 19 nt, Artificial Sequence
  Description of Artificial Sequence: Synthetic oligonucleotide
acucggagcauaugauaca

SEQ ID NO: 1488332 - RNA, 19 nt, Artificial Sequence
  Description of Artificial Sequence: Synthetic oligonucleotide
gacacuccgguguucuuuc

SEQ ID NO: 1488333 - RNA, 19 nt, Artificial Sequence
  Description of Artificial Sequence: Synthetic oligonucleotide
ggcucaaauaacuucauau

SEQ ID NO: 1488334 - RNA, 19 nt, Artificial Sequence
  Description of Artificial Sequence: Synthetic oligonucleotide
cauaccuuugacaucaguu

SEQ ID NO: 1488335 - RNA, 19 nt, Artificial Sequence
  Description of Artificial Sequence: Synthetic oligonucleotide
aauccucguccuauaguca

SEQ ID NO: 1488336 - RNA, 19 nt, Artificial Sequence
  Description of Artificial Sequence: Synthetic oligonucleotide
uccucguccuauagucacc

SEQ ID NO: 1488337 - RNA, 19 nt, Artificial Sequence
  Description of Artificial Sequence: Synthetic oligonucleotide
uaguuuccguuucauccau

SEQ ID NO: 1488338 - RNA, 19 nt, Artificial Sequence
  Description of Artificial Sequence: Synthetic oligonucleotide
guaggugacaccaaauccu

SEQ ID NO: 1488339 - RNA, 19 nt, Artificial Sequence
  Description of Artificial Sequence: Synthetic oligonucleotide
guugguaggugacaccaaa

SEQ ID NO: 1488340 - RNA, 19 nt, Artificial Sequence
  Description of Artificial Sequence: Synthetic oligonucleotide
acccuggaggugaugcucc

SEQ ID NO: 1488341 - RNA, 19 nt, Artificial Sequence
  Description of Artificial Sequence: Synthetic oligonucleotide
ucuuccauuagagcccgau

SEQ ID NO: 1488342 - RNA, 19 nt, Artificial Sequence
  Description of Artificial Sequence: Synthetic oligonucleotide
agcacgucguucacauggc

SEQ ID NO: 1488343 - RNA, 19 nt, Artificial Sequence
  Description of Artificial Sequence: Synthetic oligonucleotide
ccaugauuguccacugucc

SEQ ID NO: 1488344 - RNA, 19 nt, Artificial Sequence
  Description of Artificial Sequence: Synthetic oligonucleotide
guaauggugccagacgcuc

SEQ ID NO: 1488345 - RNA, 19 nt, Artificial Sequence
  Description of Artificial Sequence: Synthetic oligonucleotide
caccaucuuauuaaugcaa

SEQ ID NO: 1488346 - RNA, 19 nt, Artificial Sequence
  Description of Artificial Sequence: Synthetic oligonucleotide
gaaccuccuccuucugagc

SEQ ID NO: 1488347 - RNA, 19 nt, Artificial Sequence
  Description of Artificial Sequence: Synthetic oligonucleotide
cucuagaccacuccaaggu

SEQ ID NO: 1488348 - RNA, 19 nt, Artificial Sequence
  Description of Artificial Sequence: Synthetic oligonucleotide
guagggcaagcaugagucc

SEQ ID NO: 1488349 - RNA, 19 nt, Artificial Sequence
  Description of Artificial Sequence: Synthetic oligonucleotide
uuggaagaguagggcaagc

SEQ ID NO: 1488350 - RNA, 19 nt, Artificial Sequence
  Description of Artificial Sequence: Synthetic oligonucleotide
aguacucggagcauaugau

SEQ ID NO: 1488351 - RNA, 19 nt, Artificial Sequence
  Description of Artificial Sequence: Synthetic oligonucleotide
ucuuaggguagcguucgau

SEQ ID NO: 1488352 - RNA, 19 nt, Artificial Sequence
  Description of Artificial Sequence: Synthetic oligonucleotide
ggacucaauauccuuucga

SEQ ID NO: 1488353 - RNA, 19 nt, Artificial Sequence
  Description of Artificial Sequence: Synthetic oligonucleotide
cucgucacuugccucaaga

SEQ ID NO: 1488354 - RNA, 19 nt, Artificial Sequence
  Description of Artificial Sequence: Synthetic oligonucleotide
gaaguacucggagcauaug

SEQ ID NO: 1488355 - RNA, 19 nt, Artificial Sequence
  Description of Artificial Sequence: Synthetic oligonucleotide
cucgcccauagcccgcucg

SEQ ID NO: 1488356 - RNA, 19 nt, Artificial Sequence
  Description of Artificial Sequence: Synthetic oligonucleotide
ccucuagaccacuccaagg

SEQ ID NO: 1488357 - RNA, 19 nt, Artificial Sequence
  Description of Artificial Sequence: Synthetic oligonucleotide
ugagccugcuccgaauaaa

SEQ ID NO: 1488358 - RNA, 19 nt, Artificial Sequence
  Description of Artificial Sequence: Synthetic oligonucleotide
ucagaauccuggacauguu

SEQ ID NO: 1488359 - RNA, 19 nt, Artificial Sequence
  Description of Artificial Sequence: Synthetic oligonucleotide
uguccggagcggccugagg

SEQ ID NO: 1488360 - RNA, 19 nt, Artificial Sequence
  Description of Artificial Sequence: Synthetic oligonucleotide
gucccaguggccucgucac

SEQ ID NO: 1488361 - RNA, 19 nt, Artificial Sequence
  Description of Artificial Sequence: Synthetic oligonucleotide
cgggaaaucaucagagggc

SEQ ID NO: 1488362 - RNA, 19 nt, Artificial Sequence
  Description of Artificial Sequence: Synthetic oligonucleotide
uggugccagacgcucucug

SEQ ID NO: 1488363 - RNA, 19 nt, Artificial Sequence
  Description of Artificial Sequence: Synthetic oligonucleotide
ugauguccggagcggccug

SEQ ID NO: 1488364 - RNA, 19 nt, Artificial Sequence
  Description of Artificial Sequence: Synthetic oligonucleotide
agcguucgaugaccuuugg

SEQ ID NO: 1488365 - RNA, 19 nt, Artificial Sequence
  Description of Artificial Sequence: Synthetic oligonucleotide
augggacacucuaguuucc

SEQ ID NO: 1488366 - RNA, 19 nt, Artificial Sequence
  Description of Artificial Sequence: Synthetic oligonucleotide
cagagggcauaccuuugac

SEQ ID NO: 1488367 - RNA, 19 nt, Artificial Sequence
  Description of Artificial Sequence: Synthetic oligonucleotide
cucugcggcagcacacggc

SEQ ID NO: 1488368 - RNA, 19 nt, Artificial Sequence
  Description of Artificial Sequence: Synthetic oligonucleotide
cacuccaaggugccauccc

SEQ ID NO: 1488369 - RNA, 19 nt, Artificial Sequence
  Description of Artificial Sequence: Synthetic oligonucleotide
ggagcauaugauacacugc

SEQ ID NO: 1488370 - RNA, 19 nt, Artificial Sequence
  Description of Artificial Sequence: Synthetic oligonucleotide
cccaaguaacuucacuggc

SEQ ID NO: 1488371 - RNA, 19 nt, Artificial Sequence
  Description of Artificial Sequence: Synthetic oligonucleotide
guacucggagcauaugaua

SEQ ID NO: 1488372 - RNA, 19 nt, Artificial Sequence
  Description of Artificial Sequence: Synthetic oligonucleotide
auacuccgcauucuccuua

SEQ ID NO: 1488373 - RNA, 19 nt, Artificial Sequence
  Description of Artificial Sequence: Synthetic oligonucleotide
ugacagucucuuugcuuuc

SEQ ID NO: 1488374 - RNA, 19 nt, Artificial Sequence
  Description of Artificial Sequence: Synthetic oligonucleotide
aaccuguaauggugccaga

SEQ ID NO: 1488375 - RNA, 19 nt, Artificial Sequence
  Description of Artificial Sequence: Synthetic oligonucleotide
acuccaagcugaauauggu

SEQ ID NO: 1488376 - RNA, 19 nt, Artificial Sequence
  Description of Artificial Sequence: Synthetic oligonucleotide
cugcuccgaauaaagcuga

SEQ ID NO: 1488377 - RNA, 19 nt, Artificial Sequence
  Description of Artificial Sequence: Synthetic oligonucleotide
gucucugcggcagcacacg

SEQ ID NO: 1488378 - RNA, 19 nt, Artificial Sequence
  Description of Artificial Sequence: Synthetic oligonucleotide
ugacaucaguugguaggug

SEQ ID NO: 1488379 - RNA, 19 nt, Artificial Sequence
  Description of Artificial Sequence: Synthetic oligonucleotide
acagugguuccgggaaauc

SEQ ID NO: 1488380 - RNA, 19 nt, Artificial Sequence
  Description of Artificial Sequence: Synthetic oligonucleotide
uucuuaggguagcguucga

SEQ ID NO: 1488381 - RNA, 19 nt, Artificial Sequence
  Description of Artificial Sequence: Synthetic oligonucleotide
ccagggaauccucuagacc

SEQ ID NO: 1488382 - RNA, 19 nt, Artificial Sequence
  Description of Artificial Sequence: Synthetic oligonucleotide
ccuuaaacagcucaaggcu

SEQ ID NO: 1488383 - RNA, 19 nt, Artificial Sequence
  Description of Artificial Sequence: Synthetic oligonucleotide
cucccauguccuuggagca

SEQ ID NO: 1488384 - RNA, 19 nt, Artificial Sequence
  Description of Artificial Sequence: Synthetic oligonucleotide
uuagagcccgaugcuccug

SEQ ID NO: 1488385 - RNA, 19 nt, Artificial Sequence
  Description of Artificial Sequence: Synthetic oligonucleotide
cacuccgguguucuuucac

SEQ ID NO: 1488386 - RNA, 19 nt, Artificial Sequence
  Description of Artificial Sequence: Synthetic oligonucleotide
cugcaaccacucccggucc

SEQ ID NO: 1488387 - RNA, 19 nt, Artificial Sequence
  Description of Artificial Sequence: Synthetic oligonucleotide
accagggaguggguuuugg

SEQ ID NO: 1488388 - RNA, 19 nt, Artificial Sequence
  Description of Artificial Sequence: Synthetic oligonucleotide
ccaaauccucguccuauag

SEQ ID NO: 1488389 - RNA, 19 nt, Artificial Sequence
  Description of Artificial Sequence: Synthetic oligonucleotide
uccguucccugagaaggac

SEQ ID NO: 1488390 - RNA, 19 nt, Artificial Sequence
  Description of Artificial Sequence: Synthetic oligonucleotide
gggaguggguuuuggacuc

SEQ ID NO: 1488391 - RNA, 19 nt, Artificial Sequence
  Description of Artificial Sequence: Synthetic oligonucleotide
ccaagcugaauauggucuc

SEQ ID NO: 1488392 - RNA, 19 nt, Artificial Sequence
  Description of Artificial Sequence: Synthetic oligonucleotide
uagaaccagggaguggguu

SEQ ID NO: 1488393 - RNA, 19 nt, Artificial Sequence
  Description of Artificial Sequence: Synthetic oligonucleotide
auccauucacugauacaga

SEQ ID NO: 1488394 - RNA, 19 nt, Artificial Sequence
  Description of Artificial Sequence: Synthetic oligonucleotide
cagugguuccgggaaauca

SEQ ID NO: 1488395 - RNA, 19 nt, Artificial Sequence
  Description of Artificial Sequence: Synthetic oligonucleotide
ugcugagccugcuccgaau

SEQ ID NO: 1488396 - RNA, 19 nt, Artificial Sequence
  Description of Artificial Sequence: Synthetic oligonucleotide
caucagagggcauaccuuu

SEQ ID NO: 1488397 - RNA, 19 nt, Artificial Sequence
  Description of Artificial Sequence: Synthetic oligonucleotide
gccgcaagcaccagcuccg

SEQ ID NO: 1488398 - RNA, 19 nt, Artificial Sequence
  Description of Artificial Sequence: Synthetic oligonucleotide
caaauccucguccuauagu

SEQ ID NO: 1488399 - RNA, 19 nt, Artificial Sequence
  Description of Artificial Sequence: Synthetic oligonucleotide
ggaggugaugcuccucuuc

SEQ ID NO: 1488400 - RNA, 19 nt, Artificial Sequence
  Description of Artificial Sequence: Synthetic oligonucleotide
cguccuauagucaccucac

SEQ ID NO: 1488401 - RNA, 19 nt, Artificial Sequence
  Description of Artificial Sequence: Synthetic oligonucleotide
cacucuaguuuccguuuca

SEQ ID NO: 1488402 - RNA, 19 nt, Artificial Sequence
  Description of Artificial Sequence: Synthetic oligonucleotide
acuucugagcucagauuau

SEQ ID NO: 1488403 - RNA, 19 nt, Artificial Sequence
  Description of Artificial Sequence: Synthetic oligonucleotide
guagcguucgaugaccuuu

SEQ ID NO: 1488404 - RNA, 19 nt, Artificial Sequence
  Description of Artificial Sequence: Synthetic oligonucleotide
agggcaagcaugaguccca

SEQ ID NO: 1488405 - RNA, 19 nt, Artificial Sequence
  Description of Artificial Sequence: Synthetic oligonucleotide
ucucgugcaucuggguuuu

SEQ ID NO: 1488406 - RNA, 19 nt, Artificial Sequence
  Description of Artificial Sequence: Synthetic oligonucleotide
ccguuucauccauucacug

SEQ ID NO: 1488407 - RNA, 19 nt, Artificial Sequence
  Description of Artificial Sequence: Synthetic oligonucleotide
caucaguugguaggugaca

SEQ ID NO: 1488408 - RNA, 19 nt, Artificial Sequence
  Description of Artificial Sequence: Synthetic oligonucleotide
cccagaugauguccggagc

SEQ ID NO: 1488409 - RNA, 19 nt, Artificial Sequence
  Description of Artificial Sequence: Synthetic oligonucleotide
auccucuagaccacuccaa

SEQ ID NO: 1488410 - RNA, 19 nt, Artificial Sequence
  Description of Artificial Sequence: Synthetic oligonucleotide
ggccucgucacuugccuca

SEQ ID NO: 1488411 - RNA, 19 nt, Artificial Sequence
  Description of Artificial Sequence: Synthetic oligonucleotide
uggccucgucacuugccuc

SEQ ID NO: 1488412 - RNA, 19 nt, Artificial Sequence
  Description of Artificial Sequence: Synthetic oligonucleotide
acacuccgguguucuuuca

SEQ ID NO: 1488413 - RNA, 19 nt, Artificial Sequence
  Description of Artificial Sequence: Synthetic oligonucleotide
guaacuucacuggcucaaa

SEQ ID NO: 1488414 - RNA, 19 nt, Artificial Sequence
  Description of Artificial Sequence: Synthetic oligonucleotide
caaaugggacacucuaguu

SEQ ID NO: 1488415 - RNA, 19 nt, Artificial Sequence
  Description of Artificial Sequence: Synthetic oligonucleotide
gguccauccccagccgccg

SEQ ID NO: 1488416 - RNA, 19 nt, Artificial Sequence
  Description of Artificial Sequence: Synthetic oligonucleotide
ccuccucacgcucaggaca

SEQ ID NO: 1488417 - RNA, 19 nt, Artificial Sequence
  Description of Artificial Sequence: Synthetic oligonucleotide
cucgcagccuccagcugca

SEQ ID NO: 1488418 - RNA, 19 nt, Artificial Sequence
  Description of Artificial Sequence: Synthetic oligonucleotide
gcccgaugcuccugcagag

SEQ ID NO: 1488419 - RNA, 19 nt, Artificial Sequence
  Description of Artificial Sequence: Synthetic oligonucleotide
cauguccuuggagcaugac

SEQ ID NO: 1488420 - RNA, 19 nt, Artificial Sequence
  Description of Artificial Sequence: Synthetic oligonucleotide
gcccgcucggcacuggggc

SEQ ID NO: 1488421 - RNA, 19 nt, Artificial Sequence
  Description of Artificial Sequence: Synthetic oligonucleotide
cguuucauccauucacuga

SEQ ID NO: 1488422 - RNA, 19 nt, Artificial Sequence
  Description of Artificial Sequence: Synthetic oligonucleotide
cccauagcccgcucggcac

SEQ ID NO: 1488423 - RNA, 19 nt, Artificial Sequence
  Description of Artificial Sequence: Synthetic oligonucleotide
ggcacuccaagcugaauau

SEQ ID NO: 1488424 - RNA, 19 nt, Artificial Sequence
  Description of Artificial Sequence: Synthetic oligonucleotide
cauagcccgcucggcacug

SEQ ID NO: 1488425 - RNA, 19 nt, Artificial Sequence
  Description of Artificial Sequence: Synthetic oligonucleotide
aguugguaggugacaccaa

SEQ ID NO: 1488426 - RNA, 19 nt, Artificial Sequence
  Description of Artificial Sequence: Synthetic oligonucleotide
ccauuagagcccgaugcuc

SEQ ID NO: 1488427 - RNA, 19 nt, Artificial Sequence
  Description of Artificial Sequence: Synthetic oligonucleotide
guggccucgucacuugccu

SEQ ID NO: 1488428 - RNA, 19 nt, Artificial Sequence
  Description of Artificial Sequence: Synthetic oligonucleotide
agucaacuuaggacacaaa

SEQ ID NO: 1488429 - RNA, 19 nt, Artificial Sequence
  Description of Artificial Sequence: Synthetic oligonucleotide
cucguccuauagucaccuc

SEQ ID NO: 1488430 - RNA, 19 nt, Artificial Sequence
  Description of Artificial Sequence: Synthetic oligonucleotide
auagcccgcucggcacugg

SEQ ID NO: 1488431 - RNA, 19 nt, Artificial Sequence
  Description of Artificial Sequence: Synthetic oligonucleotide
ccaaguaacuucacuggcu

SEQ ID NO: 1488432 - RNA, 19 nt, Artificial Sequence
  Description of Artificial Sequence: Synthetic oligonucleotide
gauguccggagcggccuga

SEQ ID NO: 1488433 - RNA, 19 nt, Artificial Sequence
  Description of Artificial Sequence: Synthetic oligonucleotide
ggguccggcucgcccauag

SEQ ID NO: 1488434 - RNA, 19 nt, Artificial Sequence
  Description of Artificial Sequence: Synthetic oligonucleotide
gccagacgcucucuguuca

SEQ ID NO: 1488435 - RNA, 19 nt, Artificial Sequence
  Description of Artificial Sequence: Synthetic oligonucleotide
cuccgcauucuccuuauuu

SEQ ID NO: 1488436 - RNA, 19 nt, Artificial Sequence
  Description of Artificial Sequence: Synthetic oligonucleotide
gucguucacauggcugaga

SEQ ID NO: 1488437 - RNA, 19 nt, Artificial Sequence
  Description of Artificial Sequence: Synthetic oligonucleotide
auguccggagcggccugag

SEQ ID NO: 1488438 - RNA, 19 nt, Artificial Sequence
  Description of Artificial Sequence: Synthetic oligonucleotide
gcguucgaugaccuuugga

SEQ ID NO: 1488439 - RNA, 19 nt, Artificial Sequence
  Description of Artificial Sequence: Synthetic oligonucleotide
guccuauagucaccucacu

SEQ ID NO: 1488440 - RNA, 19 nt, Artificial Sequence
  Description of Artificial Sequence: Synthetic oligonucleotide
ccgcgagcugccccgagcc

SEQ ID NO: 1488441 - RNA, 19 nt, Artificial Sequence
  Description of Artificial Sequence: Synthetic oligonucleotide
ccacucccgguccaucccc

SEQ ID NO: 1488442 - RNA, 19 nt, Artificial Sequence
  Description of Artificial Sequence: Synthetic oligonucleotide
gcugagccugcuccgaaua

SEQ ID NO: 1488443 - RNA, 19 nt, Artificial Sequence
  Description of Artificial Sequence: Synthetic oligonucleotide
caaccacucccgguccauc

SEQ ID NO: 1488444 - RNA, 19 nt, Artificial Sequence
  Description of Artificial Sequence: Synthetic oligonucleotide
guccaugauuguccacugu

SEQ ID NO: 1488445 - RNA, 19 nt, Artificial Sequence
  Description of Artificial Sequence: Synthetic oligonucleotide
gcugaauauggucucccuu

SEQ ID NO: 1488446 - RNA, 19 nt, Artificial Sequence
  Description of Artificial Sequence: Synthetic oligonucleotide
gcaugagucccaguggccu

SEQ ID NO: 1488447 - RNA, 19 nt, Artificial Sequence
  Description of Artificial Sequence: Synthetic oligonucleotide
gcggccugagggaauccag

SEQ ID NO: 1488448 - RNA, 19 nt, Artificial Sequence
  Description of Artificial Sequence: Synthetic oligonucleotide
gagcggccugagggaaucc

SEQ ID NO: 1488449 - RNA, 19 nt, Artificial Sequence
  Description of Artificial Sequence: Synthetic oligonucleotide
ggagcggccugagggaauc

SEQ ID NO: 1488450 - RNA, 19 nt, Artificial Sequence
  Description of Artificial Sequence: Synthetic oligonucleotide
cccuagagucucucccaug

SEQ ID NO: 1488451 - RNA, 19 nt, Artificial Sequence
  Description of Artificial Sequence: Synthetic oligonucleotide
cauacuccgcauucuccuu

SEQ ID NO: 1488452 - RNA, 19 nt, Artificial Sequence
  Description of Artificial Sequence: Synthetic oligonucleotide
gcauaccuuugacaucagu

SEQ ID NO: 1488453 - RNA, 19 nt, Artificial Sequence
  Description of Artificial Sequence: Synthetic oligonucleotide
gccaaacaccauucagacu

SEQ ID NO: 1488454 - RNA, 19 nt, Artificial Sequence
  Description of Artificial Sequence: Synthetic oligonucleotide
ccuuugacaucaguuggua

SEQ ID NO: 1488455 - RNA, 19 nt, Artificial Sequence
  Description of Artificial Sequence: Synthetic oligonucleotide
ccgguguucuuucacuucu

SEQ ID NO: 1488456 - RNA, 19 nt, Artificial Sequence
  Description of Artificial Sequence: Synthetic oligonucleotide
ccucaagacaagucaacuu

SEQ ID NO: 1488457 - RNA, 19 nt, Artificial Sequence
  Description of Artificial Sequence: Synthetic oligonucleotide
uccggccgcccgcgagcug

SEQ ID NO: 1488458 - RNA, 19 nt, Artificial Sequence
  Description of Artificial Sequence: Synthetic oligonucleotide
ccgcccgcgagcugccccg

SEQ ID NO: 1488459 - RNA, 19 nt, Artificial Sequence
  Description of Artificial Sequence: Synthetic oligonucleotide
cugcuucuuaggguagcgu

SEQ ID NO: 1488460 - RNA, 19 nt, Artificial Sequence
  Description of Artificial Sequence: Synthetic oligonucleotide
cuucuucgagcuccccuuu

SEQ ID NO: 1488461 - RNA, 19 nt, Artificial Sequence
  Description of Artificial Sequence: Synthetic oligonucleotide
ggacacuccgguguucuuu

SEQ ID NO: 1488462 - RNA, 19 nt, Artificial Sequence
  Description of Artificial Sequence: Synthetic oligonucleotide
gcacgucguucacauggcu

SEQ ID NO: 1488463 - RNA, 19 nt, Artificial Sequence
  Description of Artificial Sequence: Synthetic oligonucleotide
ggaaaucaucagagggcau

SEQ ID NO: 1488464 - RNA, 19 nt, Artificial Sequence
  Description of Artificial Sequence: Synthetic oligonucleotide
ccgcaagcaccagcuccgg

SEQ ID NO: 1488465 - RNA, 19 nt, Artificial Sequence
  Description of Artificial Sequence: Synthetic oligonucleotide
cagccgccgcaagcaccag

SEQ ID NO: 1488466 - RNA, 19 nt, Artificial Sequence
  Description of Artificial Sequence: Synthetic oligonucleotide
ccccagccgccgcaagcac

SEQ ID NO: 1488467 - RNA, 19 nt, Artificial Sequence
  Description of Artificial Sequence: Synthetic oligonucleotide
ccacucgggcuugcugcug

SEQ ID NO: 1488468 - RNA, 19 nt, Artificial Sequence
  Description of Artificial Sequence: Synthetic oligonucleotide
gcccgcgagcugccccgag

SEQ ID NO: 1488469 - RNA, 19 nt, Artificial Sequence
  Description of Artificial Sequence: Synthetic oligonucleotide
cgcccauagcccgcucggc

SEQ ID NO: 1488470 - RNA, 19 nt, Artificial Sequence
  Description of Artificial Sequence: Synthetic oligonucleotide
gcucgcccauagcccgcuc

SEQ ID NO: 1488471 - RNA, 19 nt, Artificial Sequence
  Description of Artificial Sequence: Synthetic oligonucleotide
ccgccgcaagcaccagcuc

SEQ ID NO: 1488472 - RNA, 19 nt, Artificial Sequence
  Description of Artificial Sequence: Synthetic oligonucleotide
cgaugcuccugcagagccu

SEQ ID NO: 1488473 - RNA, 19 nt, Artificial Sequence
  Description of Artificial Sequence: Synthetic oligonucleotide
ccggagcggccugagggaa

SEQ ID NO: 1488474 - RNA, 19 nt, Artificial Sequence
  Description of Artificial Sequence: Synthetic oligonucleotide
ggcucgcccauagcccgcu

SEQ ID NO: 1488475 - RNA, 19 nt, Artificial Sequence
  Description of Artificial Sequence: Synthetic oligonucleotide
cgaugaccuuuggaagagu

SEQ ID NO: 1488476 - RNA, 19 nt, Artificial Sequence
  Description of Artificial Sequence: Synthetic oligonucleotide
gggguccggcucgcccaua

SEQ ID NO: 1488477 - RNA, 19 nt, Artificial Sequence
  Description of Artificial Sequence: Synthetic oligonucleotide
cggagcggccugagggaau

SEQ ID NO: 1488478 - RNA, 19 nt, Artificial Sequence
  Description of Artificial Sequence: Synthetic oligonucleotide
uaagacuucaaucacacag

SEQ ID NO: 1488479 - RNA, 19 nt, Artificial Sequence
  Description of Artificial Sequence: Synthetic oligonucleotide
uuuaguaagacuucaauca

SEQ ID NO: 1488480 - RNA, 19 nt, Artificial Sequence
  Description of Artificial Sequence: Synthetic oligonucleotide
aauacgagguguaagauuc

SEQ ID NO: 1488481 - RNA, 19 nt, Artificial Sequence
  Description of Artificial Sequence: Synthetic oligonucleotide
ugauaauguagucaaauca

SEQ ID NO: 1488482 - RNA, 19 nt, Artificial Sequence
  Description of Artificial Sequence: Synthetic oligonucleotide
auugauuuugcauuuauca

SEQ ID NO: 1488483 - RNA, 19 nt, Artificial Sequence
  Description of Artificial Sequence: Synthetic oligonucleotide
auaaaugcugaacaaacuc

SEQ ID NO: 1488484 - RNA, 19 nt, Artificial Sequence
  Description of Artificial Sequence: Synthetic oligonucleotide
uugaugaucaguaaagaug

SEQ ID NO: 1488485 - RNA, 19 nt, Artificial Sequence
  Description of Artificial Sequence: Synthetic oligonucleotide
ugaugaucaguaaagauga

SEQ ID NO: 1488486 - RNA, 19 nt, Artificial Sequence
  Description of Artificial Sequence: Synthetic oligonucleotide
ucuccuauugauuaaagug

SEQ ID NO: 1488487 - RNA, 19 nt, Artificial Sequence
  Description of Artificial Sequence: Synthetic oligonucleotide
cauuacauagccuaggcag

SEQ ID NO: 1488488 - RNA, 19 nt, Artificial Sequence
  Description of Artificial Sequence: Synthetic oligonucleotide
uguacaauacaccucuucc

SEQ ID NO: 1488489 - RNA, 19 nt, Artificial Sequence
  Description of Artificial Sequence: Synthetic oligonucleotide
uguagucaaaucaugaagu

SEQ ID NO: 1488490 - RNA, 19 nt, Artificial Sequence
  Description of Artificial Sequence: Synthetic oligonucleotide
acuuauggcaaucuccacc

SEQ ID NO: 1488491 - RNA, 19 nt, Artificial Sequence
  Description of Artificial Sequence: Synthetic oligonucleotide
uccucuagaauacugagga

SEQ ID NO: 1488492 - RNA, 19 nt, Artificial Sequence
  Description of Artificial Sequence: Synthetic oligonucleotide
ucuugaaaacgccaaaagc

SEQ ID NO: 1488493 - RNA, 19 nt, Artificial Sequence
  Description of Artificial Sequence: Synthetic oligonucleotide
uuugguuugagcaggaccu

SEQ ID NO: 1488494 - RNA, 19 nt, Artificial Sequence
  Description of Artificial Sequence: Synthetic oligonucleotide
caaagcuuggcuaacacag

SEQ ID NO: 1488495 - RNA, 19 nt, Artificial Sequence
  Description of Artificial Sequence: Synthetic oligonucleotide
ugaauacuuucucaaauug

SEQ ID NO: 1488496 - RNA, 19 nt, Artificial Sequence
  Description of Artificial Sequence: Synthetic oligonucleotide
agaagaauguuuauuauag

SEQ ID NO: 1488497 - RNA, 19 nt, Artificial Sequence
  Description of Artificial Sequence: Synthetic oligonucleotide
cagaacagaguucauaucc

SEQ ID NO: 1488498 - RNA, 19 nt, Artificial Sequence
  Description of Artificial Sequence: Synthetic oligonucleotide
gauugacuguacuugauug

SEQ ID NO: 1488499 - RNA, 19 nt, Artificial Sequence
  Description of Artificial Sequence: Synthetic oligonucleotide
acaaguauaaagccaccac

SEQ ID NO: 1488500 - RNA, 19 nt, Artificial Sequence
  Description of Artificial Sequence: Synthetic oligonucleotide
uaauguagucaaaucauga

SEQ ID NO: 1488501 - RNA, 19 nt, Artificial Sequence
  Description of Artificial Sequence: Synthetic oligonucleotide
aaacucauggcuaaauguc

SEQ ID NO: 1488502 - RNA, 19 nt, Artificial Sequence
  Description of Artificial Sequence: Synthetic oligonucleotide
auguagucaaaucaugaag

SEQ ID NO: 1488503 - RNA, 19 nt, Artificial Sequence
  Description of Artificial Sequence: Synthetic oligonucleotide
aauguagucaaaucaugaa

SEQ ID NO: 1488504 - RNA, 19 nt, Artificial Sequence
  Description of Artificial Sequence: Synthetic oligonucleotide
uuugcauuaagguccaggu

SEQ ID NO: 1488505 - RNA, 19 nt, Artificial Sequence
  Description of Artificial Sequence: Synthetic oligonucleotide
uuucgugacaguuacuaug

SEQ ID NO: 1488506 - RNA, 19 nt, Artificial Sequence
  Description of Artificial Sequence: Synthetic oligonucleotide
uacacaaaauuugugaaga

SEQ ID NO: 1488507 - RNA, 19 nt, Artificial Sequence
  Description of Artificial Sequence: Synthetic oligonucleotide
aguaagacuucaaucacac

SEQ ID NO: 1488508 - RNA, 19 nt, Artificial Sequence
  Description of Artificial Sequence: Synthetic oligonucleotide
uauuagagcaagcacuuuc

SEQ ID NO: 1488509 - RNA, 19 nt, Artificial Sequence
  Description of Artificial Sequence: Synthetic oligonucleotide
uuaguaagacuucaaucac

SEQ ID NO: 1488510 - RNA, 19 nt, Artificial Sequence
  Description of Artificial Sequence: Synthetic oligonucleotide
ucugcauggacuguguuag

SEQ ID NO: 1488511 - RNA, 19 nt, Artificial Sequence
  Description of Artificial Sequence: Synthetic oligonucleotide
aauacugaggaugggaggu

SEQ ID NO: 1488512 - RNA, 19 nt, Artificial Sequence
  Description of Artificial Sequence: Synthetic oligonucleotide
uuagguaggcaucugcaca

SEQ ID NO: 1488513 - RNA, 19 nt, Artificial Sequence
  Description of Artificial Sequence: Synthetic oligonucleotide
aacgccaaaagcuuugcau

SEQ ID NO: 1488514 - RNA, 19 nt, Artificial Sequence
  Description of Artificial Sequence: Synthetic oligonucleotide
ugauugaauacuuucucaa

SEQ ID NO: 1488515 - RNA, 19 nt, Artificial Sequence
  Description of Artificial Sequence: Synthetic oligonucleotide
ggcuucuagagccagagcg

SEQ ID NO: 1488516 - RNA, 19 nt, Artificial Sequence
  Description of Artificial Sequence: Synthetic oligonucleotide
aaagaugagggaauacgag

SEQ ID NO: 1488517 - RNA, 19 nt, Artificial Sequence
  Description of Artificial Sequence: Synthetic oligonucleotide
gaauacugaggaugggagg

SEQ ID NO: 1488518 - RNA, 19 nt, Artificial Sequence
  Description of Artificial Sequence: Synthetic oligonucleotide
aaaacgccaaaagcuuugc

SEQ ID NO: 1488519 - RNA, 19 nt, Artificial Sequence
  Description of Artificial Sequence: Synthetic oligonucleotide
uaucuuggugucuugaaaa

SEQ ID NO: 1488520 - RNA, 19 nt, Artificial Sequence
  Description of Artificial Sequence: Synthetic oligonucleotide
ugaauacagaaguauuacu

SEQ ID NO: 1488521 - RNA, 19 nt, Artificial Sequence
  Description of Artificial Sequence: Synthetic oligonucleotide
uucgugacaguuacuaugu

SEQ ID NO: 1488522 - RNA, 19 nt, Artificial Sequence
  Description of Artificial Sequence: Synthetic oligonucleotide
acuuuguuaauucuccuau

SEQ ID NO: 1488523 - RNA, 19 nt, Artificial Sequence
  Description of Artificial Sequence: Synthetic oligonucleotide
augaucaguaaagaugagg

SEQ ID NO: 1488524 - RNA, 19 nt, Artificial Sequence
  Description of Artificial Sequence: Synthetic oligonucleotide
gauuaaaguguuccauagc

SEQ ID NO: 1488525 - RNA, 19 nt, Artificial Sequence
  Description of Artificial Sequence: Synthetic oligonucleotide
acucuaguaagcuguuaac

SEQ ID NO: 1488526 - RNA, 19 nt, Artificial Sequence
  Description of Artificial Sequence: Synthetic oligonucleotide
uacucuaguaagcuguuaa

SEQ ID NO: 1488527 - RNA, 19 nt, Artificial Sequence
  Description of Artificial Sequence: Synthetic oligonucleotide
auugaugaucaguaaagau

SEQ ID NO: 1488528 - RNA, 19 nt, Artificial Sequence
  Description of Artificial Sequence: Synthetic oligonucleotide
gaacucauuacauagccua

SEQ ID NO: 1488529 - RNA, 19 nt, Artificial Sequence
  Description of Artificial Sequence: Synthetic oligonucleotide
uucugagacgcccucucgg

SEQ ID NO: 1488530 - RNA, 19 nt, Artificial Sequence
  Description of Artificial Sequence: Synthetic oligonucleotide
aagcacuuucacccacucc

SEQ ID NO: 1488531 - RNA, 19 nt, Artificial Sequence
  Description of Artificial Sequence: Synthetic oligonucleotide
uaaaacacugauugacugu

SEQ ID NO: 1488532 - RNA, 19 nt, Artificial Sequence
  Description of Artificial Sequence: Synthetic oligonucleotide
cuagaacucauuacauagc

SEQ ID NO: 1488533 - RNA, 19 nt, Artificial Sequence
  Description of Artificial Sequence: Synthetic oligonucleotide
uaguaagacuucaaucaca

SEQ ID NO: 1488534 - RNA, 19 nt, Artificial Sequence
  Description of Artificial Sequence: Synthetic oligonucleotide
cuaacacagagacacuggc

SEQ ID NO: 1488535 - RNA, 19 nt, Artificial Sequence
  Description of Artificial Sequence: Synthetic oligonucleotide
uugaaaacgccaaaagcuu

SEQ ID NO: 1488536 - RNA, 19 nt, Artificial Sequence
  Description of Artificial Sequence: Synthetic oligonucleotide
ccuagaacucauuacauag

SEQ ID NO: 1488537 - RNA, 19 nt, Artificial Sequence
  Description of Artificial Sequence: Synthetic oligonucleotide
aaguuacuuuaauauuugu

SEQ ID NO: 1488538 - RNA, 19 nt, Artificial Sequence
  Description of Artificial Sequence: Synthetic oligonucleotide
gguucuguauguuacaaac

SEQ ID NO: 1488539 - RNA, 19 nt, Artificial Sequence
  Description of Artificial Sequence: Synthetic oligonucleotide
uuugguuuaguaagacuuc

SEQ ID NO: 1488540 - RNA, 19 nt, Artificial Sequence
  Description of Artificial Sequence: Synthetic oligonucleotide
uuccauagccugauaaugu

SEQ ID NO: 1488541 - RNA, 19 nt, Artificial Sequence
  Description of Artificial Sequence: Synthetic oligonucleotide
agaguucauauccggggac

SEQ ID NO: 1488542 - RNA, 19 nt, Artificial Sequence
  Description of Artificial Sequence: Synthetic oligonucleotide
guaagauucugagauauca

SEQ ID NO: 1488543 - RNA, 19 nt, Artificial Sequence
  Description of Artificial Sequence: Synthetic oligonucleotide
uguuaaccuaaguuuuccc

SEQ ID NO: 1488544 - RNA, 19 nt, Artificial Sequence
  Description of Artificial Sequence: Synthetic oligonucleotide
ucauuacauagccuaggca

SEQ ID NO: 1488545 - RNA, 19 nt, Artificial Sequence
  Description of Artificial Sequence: Synthetic oligonucleotide
gucuugaaaacgccaaaag

SEQ ID NO: 1488546 - RNA, 19 nt, Artificial Sequence
  Description of Artificial Sequence: Synthetic oligonucleotide
aaguauaaagccaccacaa

SEQ ID NO: 1488547 - RNA, 19 nt, Artificial Sequence
  Description of Artificial Sequence: Synthetic oligonucleotide
uagagcaagcacuuucacc

SEQ ID NO: 1488548 - RNA, 19 nt, Artificial Sequence
  Description of Artificial Sequence: Synthetic oligonucleotide
cucauuacauagccuaggc

SEQ ID NO: 1488549 - RNA, 19 nt, Artificial Sequence
  Description of Artificial Sequence: Synthetic oligonucleotide
cucuaguaagcuguuaacc

SEQ ID NO: 1488550 - RNA, 19 nt, Artificial Sequence
  Description of Artificial Sequence: Synthetic oligonucleotide
uugauuaaaguguuccaua

SEQ ID NO: 1488551 - RNA, 19 nt, Artificial Sequence
  Description of Artificial Sequence: Synthetic oligonucleotide
caauacaccucuucccagg

SEQ ID NO: 1488552 - RNA, 19 nt, Artificial Sequence
  Description of Artificial Sequence: Synthetic oligonucleotide
uuaaccuaaguuuucccuu

SEQ ID NO: 1488553 - RNA, 19 nt, Artificial Sequence
  Description of Artificial Sequence: Synthetic oligonucleotide
aauacaccucuucccaggu

SEQ ID NO: 1488554 - RNA, 19 nt, Artificial Sequence
  Description of Artificial Sequence: Synthetic oligonucleotide
uaguaagcuguuaaccuaa

SEQ ID NO: 1488555 - RNA, 19 nt, Artificial Sequence
  Description of Artificial Sequence: Synthetic oligonucleotide
gagauaucaguauguuccc

SEQ ID NO: 1488556 - RNA, 19 nt, Artificial Sequence
  Description of Artificial Sequence: Synthetic oligonucleotide
ugaaugucaaaagugccuc

SEQ ID NO: 1488557 - RNA, 19 nt, Artificial Sequence
  Description of Artificial Sequence: Synthetic oligonucleotide
uacaaguuacuuuaauauu

SEQ ID NO: 1488558 - RNA, 19 nt, Artificial Sequence
  Description of Artificial Sequence: Synthetic oligonucleotide
uccuccuacgacuccaaag

SEQ ID NO: 1488559 - RNA, 19 nt, Artificial Sequence
  Description of Artificial Sequence: Synthetic oligonucleotide
uccgugugacagaacagag

SEQ ID NO: 1488560 - RNA, 19 nt, Artificial Sequence
  Description of Artificial Sequence: Synthetic oligonucleotide
ucuagagccagagcgccgg

SEQ ID NO: 1488561 - RNA, 19 nt, Artificial Sequence
  Description of Artificial Sequence: Synthetic oligonucleotide
ucuuucgugacaguuacua

SEQ ID NO: 1488562 - RNA, 19 nt, Artificial Sequence
  Description of Artificial Sequence: Synthetic oligonucleotide
aaccccuacucuaguaagc

SEQ ID NO: 1488563 - RNA, 19 nt, Artificial Sequence
  Description of Artificial Sequence: Synthetic oligonucleotide
agguauuagagcaagcacu

SEQ ID NO: 1488564 - RNA, 19 nt, Artificial Sequence
  Description of Artificial Sequence: Synthetic oligonucleotide
agacuucaaucacacagug

SEQ ID NO: 1488565 - RNA, 19 nt, Artificial Sequence
  Description of Artificial Sequence: Synthetic oligonucleotide
auugacuguacuugauuga

SEQ ID NO: 1488566 - RNA, 19 nt, Artificial Sequence
  Description of Artificial Sequence: Synthetic oligonucleotide
agaacagaguucauauccg

SEQ ID NO: 1488567 - RNA, 19 nt, Artificial Sequence
  Description of Artificial Sequence: Synthetic oligonucleotide
guaucuuguaucuuggugu

SEQ ID NO: 1488568 - RNA, 19 nt, Artificial Sequence
  Description of Artificial Sequence: Synthetic oligonucleotide
gaaccccuacucuaguaag

SEQ ID NO: 1488569 - RNA, 19 nt, Artificial Sequence
  Description of Artificial Sequence: Synthetic oligonucleotide
uucuccuauugauuaaagu

SEQ ID NO: 1488570 - RNA, 19 nt, Artificial Sequence
  Description of Artificial Sequence: Synthetic oligonucleotide
uugagcaggaccucacucu

SEQ ID NO: 1488571 - RNA, 19 nt, Artificial Sequence
  Description of Artificial Sequence: Synthetic oligonucleotide
ugagacgcccucucggcgg

SEQ ID NO: 1488572 - RNA, 19 nt, Artificial Sequence
  Description of Artificial Sequence: Synthetic oligonucleotide
gaagcucaagcugaccuag

SEQ ID NO: 1488573 - RNA, 19 nt, Artificial Sequence
  Description of Artificial Sequence: Synthetic oligonucleotide
uuauagcauuguuucugag

SEQ ID NO: 1488574 - RNA, 19 nt, Artificial Sequence
  Description of Artificial Sequence: Synthetic oligonucleotide
gacuguacuugauugaaua

SEQ ID NO: 1488575 - RNA, 19 nt, Artificial Sequence
  Description of Artificial Sequence: Synthetic oligonucleotide
uacaugaccucugaauaca

SEQ ID NO: 1488576 - RNA, 19 nt, Artificial Sequence
  Description of Artificial Sequence: Synthetic oligonucleotide
uccuauugauuaaaguguu

SEQ ID NO: 1488577 - RNA, 19 nt, Artificial Sequence
  Description of Artificial Sequence: Synthetic oligonucleotide
cugaccuagaacucauuac

SEQ ID NO: 1488578 - RNA, 19 nt, Artificial Sequence
  Description of Artificial Sequence: Synthetic oligonucleotide
uaucuuguaucuugguguc

SEQ ID NO: 1488579 - RNA, 19 nt, Artificial Sequence
  Description of Artificial Sequence: Synthetic oligonucleotide
gaugggaggugcugaaccc

SEQ ID NO: 1488580 - RNA, 19 nt, Artificial Sequence
  Description of Artificial Sequence: Synthetic oligonucleotide
cucaagcugaccuagaacu

SEQ ID NO: 1488581 - RNA, 19 nt, Artificial Sequence
  Description of Artificial Sequence: Synthetic oligonucleotide
acaauacaccucuucccag

SEQ ID NO: 1488582 - RNA, 19 nt, Artificial Sequence
  Description of Artificial Sequence: Synthetic oligonucleotide
guuacuauguguuguuuaa

SEQ ID NO: 1488583 - RNA, 19 nt, Artificial Sequence
  Description of Artificial Sequence: Synthetic oligonucleotide
acucauuacauagccuagg

SEQ ID NO: 1488584 - RNA, 19 nt, Artificial Sequence
  Description of Artificial Sequence: Synthetic oligonucleotide
cuacaaguuacuuuaauau

SEQ ID NO: 1488585 - RNA, 19 nt, Artificial Sequence
  Description of Artificial Sequence: Synthetic oligonucleotide
aacucauggcuaaauguca

SEQ ID NO: 1488586 - RNA, 19 nt, Artificial Sequence
  Description of Artificial Sequence: Synthetic oligonucleotide
aggugcugaaccccuacuc

SEQ ID NO: 1488587 - RNA, 19 nt, Artificial Sequence
  Description of Artificial Sequence: Synthetic oligonucleotide
aacucauuacauagccuag

SEQ ID NO: 1488588 - RNA, 19 nt, Artificial Sequence
  Description of Artificial Sequence: Synthetic oligonucleotide
ugaaaacgccaaaagcuuu

SEQ ID NO: 1488589 - RNA, 19 nt, Artificial Sequence
  Description of Artificial Sequence: Synthetic oligonucleotide
gaacuaccgcgccaguccg

SEQ ID NO: 1488590 - RNA, 19 nt, Artificial Sequence
  Description of Artificial Sequence: Synthetic oligonucleotide
uuagagcaagcacuuucac

SEQ ID NO: 1488591 - RNA, 19 nt, Artificial Sequence
  Description of Artificial Sequence: Synthetic oligonucleotide
agcugcucaaauuguuguc

SEQ ID NO: 1488592 - RNA, 19 nt, Artificial Sequence
  Description of Artificial Sequence: Synthetic oligonucleotide
uucauauccggggacugcc

SEQ ID NO: 1488593 - RNA, 19 nt, Artificial Sequence
  Description of Artificial Sequence: Synthetic oligonucleotide
aaagccaaacucauggcua

SEQ ID NO: 1488594 - RNA, 19 nt, Artificial Sequence
  Description of Artificial Sequence: Synthetic oligonucleotide
aguuacuauguguuguuua

SEQ ID NO: 1488595 - RNA, 19 nt, Artificial Sequence
  Description of Artificial Sequence: Synthetic oligonucleotide
ugacaguuacuauguguug

SEQ ID NO: 1488596 - RNA, 19 nt, Artificial Sequence
  Description of Artificial Sequence: Synthetic oligonucleotide
cagguauuagagcaagcac

SEQ ID NO: 1488597 - RNA, 19 nt, Artificial Sequence
  Description of Artificial Sequence: Synthetic oligonucleotide
uugcuuuacaugaccucug

SEQ ID NO: 1488598 - RNA, 19 nt, Artificial Sequence
  Description of Artificial Sequence: Synthetic oligonucleotide
uggugucuugaaaacgcca

SEQ ID NO: 1488599 - RNA, 19 nt, Artificial Sequence
  Description of Artificial Sequence: Synthetic oligonucleotide
aagccaaacucauggcuaa

SEQ ID NO: 1488600 - RNA, 19 nt, Artificial Sequence
  Description of Artificial Sequence: Synthetic oligonucleotide
ucugagacgcccucucggc

SEQ ID NO: 1488601 - RNA, 19 nt, Artificial Sequence
  Description of Artificial Sequence: Synthetic oligonucleotide
gacuucaaucacacagugg

SEQ ID NO: 1488602 - RNA, 19 nt, Artificial Sequence
  Description of Artificial Sequence: Synthetic oligonucleotide
cuguuaaccuaaguuuucc

SEQ ID NO: 1488603 - RNA, 19 nt, Artificial Sequence
  Description of Artificial Sequence: Synthetic oligonucleotide
uugacuguacuugauugaa

SEQ ID NO: 1488604 - RNA, 19 nt, Artificial Sequence
  Description of Artificial Sequence: Synthetic oligonucleotide
uaucauugaugaucaguaa

SEQ ID NO: 1488605 - RNA, 19 nt, Artificial Sequence
  Description of Artificial Sequence: Synthetic oligonucleotide
guuagguaggcaucugcac

SEQ ID NO: 1488606 - RNA, 19 nt, Artificial Sequence
  Description of Artificial Sequence: Synthetic oligonucleotide
cugagauaucaguauguuc

SEQ ID NO: 1488607 - RNA, 19 nt, Artificial Sequence
  Description of Artificial Sequence: Synthetic oligonucleotide
auuagagcaagcacuuuca

SEQ ID NO: 1488608 - RNA, 19 nt, Artificial Sequence
  Description of Artificial Sequence: Synthetic oligonucleotide
aaacgccaaaagcuuugca

SEQ ID NO: 1488609 - RNA, 19 nt, Artificial Sequence
  Description of Artificial Sequence: Synthetic oligonucleotide
uguaagauucugagauauc

SEQ ID NO: 1488610 - RNA, 19 nt, Artificial Sequence
  Description of Artificial Sequence: Synthetic oligonucleotide
uucuagagccagagcgccg

SEQ ID NO: 1488611 - RNA, 19 nt, Artificial Sequence
  Description of Artificial Sequence: Synthetic oligonucleotide
aaacaucaaauuguugcuu

SEQ ID NO: 1488612 - RNA, 19 nt, Artificial Sequence
  Description of Artificial Sequence: Synthetic oligonucleotide
gcagaccuugaacuuaugg

SEQ ID NO: 1488613 - RNA, 19 nt, Artificial Sequence
  Description of Artificial Sequence: Synthetic oligonucleotide
aaccuaaguuuucccuucu

SEQ ID NO: 1488614 - RNA, 19 nt, Artificial Sequence
  Description of Artificial Sequence: Synthetic oligonucleotide
guuaaccuaaguuuucccu

SEQ ID NO: 1488615 - RNA, 19 nt, Artificial Sequence
  Description of Artificial Sequence: Synthetic oligonucleotide
cuaaaugucacaacugaau

SEQ ID NO: 1488616 - RNA, 19 nt, Artificial Sequence
  Description of Artificial Sequence: Synthetic oligonucleotide
ggaacuaccgcgccagucc

SEQ ID NO: 1488617 - RNA, 19 nt, Artificial Sequence
  Description of Artificial Sequence: Synthetic oligonucleotide
cuucuagagccagagcgcc

SEQ ID NO: 1488618 - RNA, 19 nt, Artificial Sequence
  Description of Artificial Sequence: Synthetic oligonucleotide
uccuacgacuccaaagcau

SEQ ID NO: 1488619 - RNA, 19 nt, Artificial Sequence
  Description of Artificial Sequence: Synthetic oligonucleotide
auuuaucauugaugaucag

SEQ ID NO: 1488620 - RNA, 19 nt, Artificial Sequence
  Description of Artificial Sequence: Synthetic oligonucleotide
gacuccaaagcauguaucu

SEQ ID NO: 1488621 - RNA, 19 nt, Artificial Sequence
  Description of Artificial Sequence: Synthetic oligonucleotide
ccuccuacgacuccaaagc

SEQ ID NO: 1488622 - RNA, 19 nt, Artificial Sequence
  Description of Artificial Sequence: Synthetic oligonucleotide
guguuagguaggcaucugc

SEQ ID NO: 1488623 - RNA, 19 nt, Artificial Sequence
  Description of Artificial Sequence: Synthetic oligonucleotide
cuuauggcaaucuccaccu

SEQ ID NO: 1488624 - RNA, 19 nt, Artificial Sequence
  Description of Artificial Sequence: Synthetic oligonucleotide
ucggcgcacgcgcagugcg

SEQ ID NO: 1488625 - RNA, 19 nt, Artificial Sequence
  Description of Artificial Sequence: Synthetic oligonucleotide
gagccgacgggagagaaac

SEQ ID NO: 1488626 - RNA, 19 nt, Artificial Sequence
  Description of Artificial Sequence: Synthetic oligonucleotide
acuuucacccacuccccug

SEQ ID NO: 1488627 - RNA, 19 nt, Artificial Sequence
  Description of Artificial Sequence: Synthetic oligonucleotide
auauccggggacugccuag

SEQ ID NO: 1488628 - RNA, 19 nt, Artificial Sequence
  Description of Artificial Sequence: Synthetic oligonucleotide
acgccaaaagcuuugcauu

SEQ ID NO: 1488629 - RNA, 19 nt, Artificial Sequence
  Description of Artificial Sequence: Synthetic oligonucleotide
acgacuccaaagcauguau

SEQ ID NO: 1488630 - RNA, 19 nt, Artificial Sequence
  Description of Artificial Sequence: Synthetic oligonucleotide
ugagggaauacgaggugua

SEQ ID NO: 1488631 - RNA, 19 nt, Artificial Sequence
  Description of Artificial Sequence: Synthetic oligonucleotide
ggcuaaaugucacaacuga

SEQ ID NO: 1488632 - RNA, 19 nt, Artificial Sequence
  Description of Artificial Sequence: Synthetic oligonucleotide
ugaagcucaagcugaccua

SEQ ID NO: 1488633 - RNA, 19 nt, Artificial Sequence
  Description of Artificial Sequence: Synthetic oligonucleotide
uugcauuaagguccaggua

SEQ ID NO: 1488634 - RNA, 19 nt, Artificial Sequence
  Description of Artificial Sequence: Synthetic oligonucleotide
ugaggaugggaggugcuga

SEQ ID NO: 1488635 - RNA, 19 nt, Artificial Sequence
  Description of Artificial Sequence: Synthetic oligonucleotide
cuaguaagcuguuaaccua

SEQ ID NO: 1488636 - RNA, 19 nt, Artificial Sequence
  Description of Artificial Sequence: Synthetic oligonucleotide
augagggaauacgaggugu

SEQ ID NO: 1488637 - RNA, 19 nt, Artificial Sequence
  Description of Artificial Sequence: Synthetic oligonucleotide
acacagugguucuguaugu

SEQ ID NO: 1488638 - RNA, 19 nt, Artificial Sequence
  Description of Artificial Sequence: Synthetic oligonucleotide
ugacuguacuugauugaau

SEQ ID NO: 1488639 - RNA, 19 nt, Artificial Sequence
  Description of Artificial Sequence: Synthetic oligonucleotide
accuagaacucauuacaua

SEQ ID NO: 1488640 - RNA, 19 nt, Artificial Sequence
  Description of Artificial Sequence: Synthetic oligonucleotide
gacggagccgacgggagag

SEQ ID NO: 1488641 - RNA, 19 nt, Artificial Sequence
  Description of Artificial Sequence: Synthetic oligonucleotide
aaagcuuggcuaacacaga

SEQ ID NO: 1488642 - RNA, 19 nt, Artificial Sequence
  Description of Artificial Sequence: Synthetic oligonucleotide
ccuacgacuccaaagcaug

SEQ ID NO: 1488643 - RNA, 19 nt, Artificial Sequence
  Description of Artificial Sequence: Synthetic oligonucleotide
auuugugaagaaaccccug

SEQ ID NO: 1488644 - RNA, 19 nt, Artificial Sequence
  Description of Artificial Sequence: Synthetic oligonucleotide
acgggagagaaaccagcug

SEQ ID NO: 1488645 - RNA, 19 nt, Artificial Sequence
  Description of Artificial Sequence: Synthetic oligonucleotide
gacaguuacuauguguugu

SEQ ID NO: 1488646 - RNA, 19 nt, Artificial Sequence
  Description of Artificial Sequence: Synthetic oligonucleotide
guauuacugugacauuuaa

SEQ ID NO: 1488647 - RNA, 19 nt, Artificial Sequence
  Description of Artificial Sequence: Synthetic oligonucleotide
gcuacaaguuacuuuaaua

SEQ ID NO: 1488648 - RNA, 19 nt, Artificial Sequence
  Description of Artificial Sequence: Synthetic oligonucleotide
uaccgcgccaguccgugug

SEQ ID NO: 1488649 - RNA, 19 nt, Artificial Sequence
  Description of Artificial Sequence: Synthetic oligonucleotide
cgagguguaagauucugag

SEQ ID NO: 1488650 - RNA, 19 nt, Artificial Sequence
  Description of Artificial Sequence: Synthetic oligonucleotide
ucauauccggggacugccu

SEQ ID NO: 1488651 - RNA, 19 nt, Artificial Sequence
  Description of Artificial Sequence: Synthetic oligonucleotide
cuguauguuacaaacuuuu

SEQ ID NO: 1488652 - RNA, 19 nt, Artificial Sequence
  Description of Artificial Sequence: Synthetic oligonucleotide
uuguuucugagacgcccuc

SEQ ID NO: 1488653 - RNA, 19 nt, Artificial Sequence
  Description of Artificial Sequence: Synthetic oligonucleotide
agguagaagaauguuuauu

SEQ ID NO: 1488654 - RNA, 19 nt, Artificial Sequence
  Description of Artificial Sequence: Synthetic oligonucleotide
ucgugacaguuacuaugug

SEQ ID NO: 1488655 - RNA, 19 nt, Artificial Sequence
  Description of Artificial Sequence: Synthetic oligonucleotide
cugagacgcccucucggcg

SEQ ID NO: 1488656 - RNA, 19 nt, Artificial Sequence
  Description of Artificial Sequence: Synthetic oligonucleotide
aggggaacuaccgcgccag

SEQ ID NO: 1488657 - RNA, 19 nt, Artificial Sequence
  Description of Artificial Sequence: Synthetic oligonucleotide
acgcgcagugcggagcucc

SEQ ID NO: 1488658 - RNA, 19 nt, Artificial Sequence
  Description of Artificial Sequence: Synthetic oligonucleotide
gaauacgagguguaagauu

SEQ ID NO: 1488659 - RNA, 19 nt, Artificial Sequence
  Description of Artificial Sequence: Synthetic oligonucleotide
cugaagcucaagcugaccu

SEQ ID NO: 1488660 - RNA, 19 nt, Artificial Sequence
  Description of Artificial Sequence: Synthetic oligonucleotide
uacauagccuaggcagacc

SEQ ID NO: 1488661 - RNA, 19 nt, Artificial Sequence
  Description of Artificial Sequence: Synthetic oligonucleotide
agauaucaguauguucccu

SEQ ID NO: 1488662 - RNA, 19 nt, Artificial Sequence
  Description of Artificial Sequence: Synthetic oligonucleotide
aguauuacugugacauuua

SEQ ID NO: 1488663 - RNA, 19 nt, Artificial Sequence
  Description of Artificial Sequence: Synthetic oligonucleotide
cuaaguuuucccuucucau

SEQ ID NO: 1488664 - RNA, 19 nt, Artificial Sequence
  Description of Artificial Sequence: Synthetic oligonucleotide
ggcuaacacagagacacug

SEQ ID NO: 1488665 - RNA, 19 nt, Artificial Sequence
  Description of Artificial Sequence: Synthetic oligonucleotide
cagaguucauauccgggga

SEQ ID NO: 1488666 - RNA, 19 nt, Artificial Sequence
  Description of Artificial Sequence: Synthetic oligonucleotide
aguaagcuguuaaccuaag

SEQ ID NO: 1488667 - RNA, 19 nt, Artificial Sequence
  Description of Artificial Sequence: Synthetic oligonucleotide
accccuacucuaguaagcu

SEQ ID NO: 1488668 - RNA, 19 nt, Artificial Sequence
  Description of Artificial Sequence: Synthetic oligonucleotide
uagccuaggcagaccuuga

SEQ ID NO: 1488669 - RNA, 19 nt, Artificial Sequence
  Description of Artificial Sequence: Synthetic oligonucleotide
uauccggggacugccuagc

SEQ ID NO: 1488670 - RNA, 19 nt, Artificial Sequence
  Description of Artificial Sequence: Synthetic oligonucleotide
guucauauccggggacugc

SEQ ID NO: 1488671 - RNA, 19 nt, Artificial Sequence
  Description of Artificial Sequence: Synthetic oligonucleotide
guguaagauucugagauau

SEQ ID NO: 1488672 - RNA, 19 nt, Artificial Sequence
  Description of Artificial Sequence: Synthetic oligonucleotide
guaagacuucaaucacaca

SEQ ID NO: 1488673 - RNA, 19 nt, Artificial Sequence
  Description of Artificial Sequence: Synthetic oligonucleotide
guccgugugacagaacaga

SEQ ID NO: 1488674 - RNA, 19 nt, Artificial Sequence
  Description of Artificial Sequence: Synthetic oligonucleotide
cuguacuugauugaauacu

SEQ ID NO: 1488675 - RNA, 19 nt, Artificial Sequence
  Description of Artificial Sequence: Synthetic oligonucleotide
gagacggagccgacgggag

SEQ ID NO: 1488676 - RNA, 19 nt, Artificial Sequence
  Description of Artificial Sequence: Synthetic oligonucleotide
gugacaguuacuauguguu

SEQ ID NO: 1488677 - RNA, 19 nt, Artificial Sequence
  Description of Artificial Sequence: Synthetic oligonucleotide
guagucaaaucaugaaguu

SEQ ID NO: 1488678 - RNA, 19 nt, Artificial Sequence
  Description of Artificial Sequence: Synthetic oligonucleotide
uugcaccaucucuuucgug

SEQ ID NO: 1488679 - RNA, 19 nt, Artificial Sequence
  Description of Artificial Sequence: Synthetic oligonucleotide
uacgacuccaaagcaugua

SEQ ID NO: 1488680 - RNA, 19 nt, Artificial Sequence
  Description of Artificial Sequence: Synthetic oligonucleotide
acuaccgcgccaguccgug

SEQ ID NO: 1488681 - RNA, 19 nt, Artificial Sequence
  Description of Artificial Sequence: Synthetic oligonucleotide
caccaggggcuucuagagc

SEQ ID NO: 1488682 - RNA, 19 nt, Artificial Sequence
  Description of Artificial Sequence: Synthetic oligonucleotide
ccuauugauuaaaguguuc

SEQ ID NO: 1488683 - RNA, 19 nt, Artificial Sequence
  Description of Artificial Sequence: Synthetic oligonucleotide
ccggggacugccuagcuac

SEQ ID NO: 1488684 - RNA, 19 nt, Artificial Sequence
  Description of Artificial Sequence: Synthetic oligonucleotide
gagacgcccucucggcggc

SEQ ID NO: 1488685 - RNA, 19 nt, Artificial Sequence
  Description of Artificial Sequence: Synthetic oligonucleotide
augucacaacugaauguca

SEQ ID NO: 1488686 - RNA, 19 nt, Artificial Sequence
  Description of Artificial Sequence: Synthetic oligonucleotide
cucgggagcagucugcugu

SEQ ID NO: 1488687 - RNA, 19 nt, Artificial Sequence
  Description of Artificial Sequence: Synthetic oligonucleotide
guaagcuguuaaccuaagu

SEQ ID NO: 1488688 - RNA, 19 nt, Artificial Sequence
  Description of Artificial Sequence: Synthetic oligonucleotide
gcugaccuagaacucauua

SEQ ID NO: 1488689 - RNA, 19 nt, Artificial Sequence
  Description of Artificial Sequence: Synthetic oligonucleotide
cuccuacgacuccaaagca

SEQ ID NO: 1488690 - RNA, 19 nt, Artificial Sequence
  Description of Artificial Sequence: Synthetic oligonucleotide
uuccuccuacgacuccaaa

SEQ ID NO: 1488691 - RNA, 19 nt, Artificial Sequence
  Description of Artificial Sequence: Synthetic oligonucleotide
uccggggacugccuagcua

SEQ ID NO: 1488692 - RNA, 19 nt, Artificial Sequence
  Description of Artificial Sequence: Synthetic oligonucleotide
gugcugaaccccuacucua

SEQ ID NO: 1488693 - RNA, 19 nt, Artificial Sequence
  Description of Artificial Sequence: Synthetic oligonucleotide
agacggagccgacgggaga

SEQ ID NO: 1488694 - RNA, 19 nt, Artificial Sequence
  Description of Artificial Sequence: Synthetic oligonucleotide
agcuuggcuaacacagaga

SEQ ID NO: 1488695 - RNA, 19 nt, Artificial Sequence
  Description of Artificial Sequence: Synthetic oligonucleotide
cagggagacggagccgacg

SEQ ID NO: 1488696 - RNA, 19 nt, Artificial Sequence
  Description of Artificial Sequence: Synthetic oligonucleotide
gaaguauuacugugacauu

SEQ ID NO: 1488697 - RNA, 19 nt, Artificial Sequence
  Description of Artificial Sequence: Synthetic oligonucleotide
gagggaauacgagguguaa

SEQ ID NO: 1488698 - RNA, 19 nt, Artificial Sequence
  Description of Artificial Sequence: Synthetic oligonucleotide
gguguaagauucugagaua

SEQ ID NO: 1488699 - RNA, 19 nt, Artificial Sequence
  Description of Artificial Sequence: Synthetic oligonucleotide
ggugcugaaccccuacucu

SEQ ID NO: 1488700 - RNA, 19 nt, Artificial Sequence
  Description of Artificial Sequence: Synthetic oligonucleotide
gcuacuccucucuggcagc

SEQ ID NO: 1488701 - RNA, 19 nt, Artificial Sequence
  Description of Artificial Sequence: Synthetic oligonucleotide
gcgccaguccgugugacag

SEQ ID NO: 1488702 - RNA, 19 nt, Artificial Sequence
  Description of Artificial Sequence: Synthetic oligonucleotide
agccgacgggagagaaacc

SEQ ID NO: 1488703 - RNA, 19 nt, Artificial Sequence
  Description of Artificial Sequence: Synthetic oligonucleotide
auacgagguguaagauucu

SEQ ID NO: 1488704 - RNA, 19 nt, Artificial Sequence
  Description of Artificial Sequence: Synthetic oligonucleotide
cgacgggagagaaaccagc

SEQ ID NO: 1488705 - RNA, 19 nt, Artificial Sequence
  Description of Artificial Sequence: Synthetic oligonucleotide
gguauuagagcaagcacuu

SEQ ID NO: 1488706 - RNA, 19 nt, Artificial Sequence
  Description of Artificial Sequence: Synthetic oligonucleotide
cugaaccccuacucuagua

SEQ ID NO: 1488707 - RNA, 19 nt, Artificial Sequence
  Description of Artificial Sequence: Synthetic oligonucleotide
cacccacuccccugcuuug

SEQ ID NO: 1488708 - RNA, 19 nt, Artificial Sequence
  Description of Artificial Sequence: Synthetic oligonucleotide
cuuucgugacaguuacuau

SEQ ID NO: 1488709 - RNA, 19 nt, Artificial Sequence
  Description of Artificial Sequence: Synthetic oligonucleotide
cauauccggggacugccua

SEQ ID NO: 1488710 - RNA, 19 nt, Artificial Sequence
  Description of Artificial Sequence: Synthetic oligonucleotide
aacuaccgcgccaguccgu

SEQ ID NO: 1488711 - RNA, 19 nt, Artificial Sequence
  Description of Artificial Sequence: Synthetic oligonucleotide
cccuacucuaguaagcugu

SEQ ID NO: 1488712 - RNA, 19 nt, Artificial Sequence
  Description of Artificial Sequence: Synthetic oligonucleotide
cucucggcggcaggggaac

SEQ ID NO: 1488713 - RNA, 19 nt, Artificial Sequence
  Description of Artificial Sequence: Synthetic oligonucleotide
ccgacgggagagaaaccag

SEQ ID NO: 1488714 - RNA, 19 nt, Artificial Sequence
  Description of Artificial Sequence: Synthetic oligonucleotide
gccgacgggagagaaacca

SEQ ID NO: 1488715 - RNA, 19 nt, Artificial Sequence
  Description of Artificial Sequence: Synthetic oligonucleotide
auccggggacugccuagcu

SEQ ID NO: 1488716 - RNA, 19 nt, Artificial Sequence
  Description of Artificial Sequence: Synthetic oligonucleotide
gggagacggagccgacggg

SEQ ID NO: 1488717 - RNA, 19 nt, Artificial Sequence
  Description of Artificial Sequence: Synthetic oligonucleotide
gacgcccucucggcggcag

SEQ ID NO: 1488718 - RNA, 19 nt, Artificial Sequence
  Description of Artificial Sequence: Synthetic oligonucleotide
cuacgacuccaaagcaugu

SEQ ID NO: 1488719 - RNA, 19 nt, Artificial Sequence
  Description of Artificial Sequence: Synthetic oligonucleotide
gcauggacuguguuaggua

SEQ ID NO: 1488720 - RNA, 19 nt, Artificial Sequence
  Description of Artificial Sequence: Synthetic oligonucleotide
accgcgccaguccguguga

SEQ ID NO: 1488721 - RNA, 19 nt, Artificial Sequence
  Description of Artificial Sequence: Synthetic oligonucleotide
acgcccucucggcggcagg

SEQ ID NO: 1488722 - RNA, 19 nt, Artificial Sequence
  Description of Artificial Sequence: Synthetic oligonucleotide
caggggaacuaccgcgcca

SEQ ID NO: 1488723 - RNA, 19 nt, Artificial Sequence
  Description of Artificial Sequence: Synthetic oligonucleotide
gccuagcuacuccucucug

SEQ ID NO: 1488724 - RNA, 19 nt, Artificial Sequence
  Description of Artificial Sequence: Synthetic oligonucleotide
ggcuacaaguuacuuuaau

SEQ ID NO: 1488725 - RNA, 19 nt, Artificial Sequence
  Description of Artificial Sequence: Synthetic oligonucleotide
ggaauacgagguguaagau

SEQ ID NO: 1488726 - RNA, 19 nt, Artificial Sequence
  Description of Artificial Sequence: Synthetic oligonucleotide
gggaacuaccgcgccaguc

SEQ ID NO: 1488727 - RNA, 19 nt, Artificial Sequence
  Description of Artificial Sequence: Synthetic oligonucleotide
cagugcggagcuccaggga

SEQ ID NO: 1488728 - RNA, 19 nt, Artificial Sequence
  Description of Artificial Sequence: Synthetic oligonucleotide
ccccuacucuaguaagcug

SEQ ID NO: 1488729 - RNA, 19 nt, Artificial Sequence
  Description of Artificial Sequence: Synthetic oligonucleotide
cgugacaguuacuaugugu

SEQ ID NO: 1488730 - RNA, 19 nt, Artificial Sequence
  Description of Artificial Sequence: Synthetic oligonucleotide
ggcgucggcgcacgcgcag

SEQ ID NO: 1488731 - RNA, 19 nt, Artificial Sequence
  Description of Artificial Sequence: Synthetic oligonucleotide
cuacucuaguaagcuguua

SEQ ID NO: 1488732 - RNA, 19 nt, Artificial Sequence
  Description of Artificial Sequence: Synthetic oligonucleotide
gguccagguagaagaaugu

SEQ ID NO: 1488733 - RNA, 19 nt, Artificial Sequence
  Description of Artificial Sequence: Synthetic oligonucleotide
caugaaguucaaguuucuu

SEQ ID NO: 1488734 - RNA, 19 nt, Artificial Sequence
  Description of Artificial Sequence: Synthetic oligonucleotide
ggacugccuagcuacuccu

SEQ ID NO: 1488735 - RNA, 19 nt, Artificial Sequence
  Description of Artificial Sequence: Synthetic oligonucleotide
gcucaaauuguugucuguu

SEQ ID NO: 1488736 - RNA, 19 nt, Artificial Sequence
  Description of Artificial Sequence: Synthetic oligonucleotide
aggggcuucuagagccaga

SEQ ID NO: 1488737 - RNA, 19 nt, Artificial Sequence
  Description of Artificial Sequence: Synthetic oligonucleotide
gccaguccgugugacagaa

SEQ ID NO: 1488738 - RNA, 19 nt, Artificial Sequence
  Description of Artificial Sequence: Synthetic oligonucleotide
guauuagagcaagcacuuu

SEQ ID NO: 1488739 - RNA, 19 nt, Artificial Sequence
  Description of Artificial Sequence: Synthetic oligonucleotide
cucuuucgugacaguuacu

SEQ ID NO: 1488740 - RNA, 19 nt, Artificial Sequence
  Description of Artificial Sequence: Synthetic oligonucleotide
gcugaaccccuacucuagu

SEQ ID NO: 1488741 - RNA, 19 nt, Artificial Sequence
  Description of Artificial Sequence: Synthetic oligonucleotide
acggagccgacgggagaga

SEQ ID NO: 1488742 - RNA, 19 nt, Artificial Sequence
  Description of Artificial Sequence: Synthetic oligonucleotide
ggggacugccuagcuacuc

SEQ ID NO: 1488743 - RNA, 19 nt, Artificial Sequence
  Description of Artificial Sequence: Synthetic oligonucleotide
gggagcagucugcuguccu

SEQ ID NO: 1488744 - RNA, 19 nt, Artificial Sequence
  Description of Artificial Sequence: Synthetic oligonucleotide
ggacuguguuagguaggca

SEQ ID NO: 1488745 - RNA, 19 nt, Artificial Sequence
  Description of Artificial Sequence: Synthetic oligonucleotide
cauagccuaggcagaccuu

SEQ ID NO: 1488746 - RNA, 19 nt, Artificial Sequence
  Description of Artificial Sequence: Synthetic oligonucleotide
gccggcgucggcgcacgcg

SEQ ID NO: 1488747 - RNA, 19 nt, Artificial Sequence
  Description of Artificial Sequence: Synthetic oligonucleotide
cgccaaaagcuuugcauua

SEQ ID NO: 1488748 - RNA, 19 nt, Artificial Sequence
  Description of Artificial Sequence: Synthetic oligonucleotide
caguuacuauguguuguuu

SEQ ID NO: 1488749 - RNA, 19 nt, Artificial Sequence
  Description of Artificial Sequence: Synthetic oligonucleotide
ccaggggcuucuagagcca

SEQ ID NO: 1488750 - RNA, 19 nt, Artificial Sequence
  Description of Artificial Sequence: Synthetic oligonucleotide
gcacgcgcagugcggagcu

SEQ ID NO: 1488751 - RNA, 19 nt, Artificial Sequence
  Description of Artificial Sequence: Synthetic oligonucleotide
gugccuccaggagaugcau

SEQ ID NO: 1488752 - RNA, 19 nt, Artificial Sequence
  Description of Artificial Sequence: Synthetic oligonucleotide
ccuacucuaguaagcuguu

SEQ ID NO: 1488753 - RNA, 19 nt, Artificial Sequence
  Description of Artificial Sequence: Synthetic oligonucleotide
ccucucggcggcaggggaa

SEQ ID NO: 1488754 - RNA, 19 nt, Artificial Sequence
  Description of Artificial Sequence: Synthetic oligonucleotide
ccucuagaauacugaggau

SEQ ID NO: 1488755 - RNA, 19 nt, Artificial Sequence
  Description of Artificial Sequence: Synthetic oligonucleotide
cggcgcacgcgcagugcgg

SEQ ID NO: 1488756 - RNA, 19 nt, Artificial Sequence
  Description of Artificial Sequence: Synthetic oligonucleotide
cacgcgcagugcggagcuc

SEQ ID NO: 1488757 - RNA, 19 nt, Artificial Sequence
  Description of Artificial Sequence: Synthetic oligonucleotide
cuaccgcgccaguccgugu

SEQ ID NO: 1488758 - RNA, 19 nt, Artificial Sequence
  Description of Artificial Sequence: Synthetic oligonucleotide
gcacagccauggggcucgg

SEQ ID NO: 1488759 - RNA, 19 nt, Artificial Sequence
  Description of Artificial Sequence: Synthetic oligonucleotide
ggggaacuaccgcgccagu

SEQ ID NO: 1488760 - RNA, 19 nt, Artificial Sequence
  Description of Artificial Sequence: Synthetic oligonucleotide
ccgcgccaguccgugugac

SEQ ID NO: 1488761 - RNA, 19 nt, Artificial Sequence
  Description of Artificial Sequence: Synthetic oligonucleotide
cgccaguccgugugacaga

SEQ ID NO: 1488762 - RNA, 19 nt, Artificial Sequence
  Description of Artificial Sequence: Synthetic oligonucleotide
cgcgccaguccgugugaca

SEQ ID NO: 1488763 - RNA, 19 nt, Artificial Sequence
  Description of Artificial Sequence: Synthetic oligonucleotide
ccaccacaacuggcuacaa

SEQ ID NO: 1488764 - RNA, 19 nt, Artificial Sequence
  Description of Artificial Sequence: Synthetic oligonucleotide
cggggacugccuagcuacu

SEQ ID NO: 1488765 - RNA, 19 nt, Artificial Sequence
  Description of Artificial Sequence: Synthetic oligonucleotide
cggcgucggcgcacgcgca

SEQ ID NO: 1488766 - RNA, 19 nt, Artificial Sequence
  Description of Artificial Sequence: Synthetic oligonucleotide
uuuaagugauuacucaggg

SEQ ID NO: 1488767 - RNA, 19 nt, Artificial Sequence
  Description of Artificial Sequence: Synthetic oligonucleotide
aaguuggccacuuccaugg

SEQ ID NO: 1488768 - RNA, 19 nt, Artificial Sequence
  Description of Artificial Sequence: Synthetic oligonucleotide
aaaacaaaacaaaacaaaa

SEQ ID NO: 1488769 - RNA, 19 nt, Artificial Sequence
  Description of Artificial Sequence: Synthetic oligonucleotide
acuuuaaugcucgaaacgg

SEQ ID NO: 1488770 - RNA, 19 nt, Artificial Sequence
  Description of Artificial Sequence: Synthetic oligonucleotide
uggcuuuuaaacauucucc

SEQ ID NO: 1488771 - RNA, 19 nt, Artificial Sequence
  Description of Artificial Sequence: Synthetic oligonucleotide
aaguccugaacccgggcgc

SEQ ID NO: 1488772 - RNA, 19 nt, Artificial Sequence
  Description of Artificial Sequence: Synthetic oligonucleotide
uucacuuuaaugcucgaaa

SEQ ID NO: 1488773 - RNA, 19 nt, Artificial Sequence
  Description of Artificial Sequence: Synthetic oligonucleotide
uccaaguugcgcaucuugg

SEQ ID NO: 1488774 - RNA, 19 nt, Artificial Sequence
  Description of Artificial Sequence: Synthetic oligonucleotide
cucgaaacggaaaagguuc

SEQ ID NO: 1488775 - RNA, 19 nt, Artificial Sequence
  Description of Artificial Sequence: Synthetic oligonucleotide
cacuuuaaugcucgaaacg

SEQ ID NO: 1488776 - RNA, 19 nt, Artificial Sequence
  Description of Artificial Sequence: Synthetic oligonucleotide
uaaugcucgaaacggaaaa

SEQ ID NO: 1488777 - RNA, 19 nt, Artificial Sequence
  Description of Artificial Sequence: Synthetic oligonucleotide
agguucucaaaauauacau

SEQ ID NO: 1488778 - RNA, 19 nt, Artificial Sequence
  Description of Artificial Sequence: Synthetic oligonucleotide
gacaguuacacguguguug

SEQ ID NO: 1488779 - RNA, 19 nt, Artificial Sequence
  Description of Artificial Sequence: Synthetic oligonucleotide
uguuguugcgcucgcgccg

SEQ ID NO: 1488780 - RNA, 19 nt, Artificial Sequence
  Description of Artificial Sequence: Synthetic oligonucleotide
ucacuuuaaugcucgaaac

SEQ ID NO: 1488781 - RNA, 19 nt, Artificial Sequence
  Description of Artificial Sequence: Synthetic oligonucleotide
uagucgucggcgaagaggu

SEQ ID NO: 1488782 - RNA, 19 nt, Artificial Sequence
  Description of Artificial Sequence: Synthetic oligonucleotide
gauguuguugcgcucgcgc

SEQ ID NO: 1488783 - RNA, 19 nt, Artificial Sequence
  Description of Artificial Sequence: Synthetic oligonucleotide
uuaagugauuacucagggc

SEQ ID NO: 1488784 - RNA, 19 nt, Artificial Sequence
  Description of Artificial Sequence: Synthetic oligonucleotide
agcagugacccgccgaggc

SEQ ID NO: 1488785 - RNA, 19 nt, Artificial Sequence
  Description of Artificial Sequence: Synthetic oligonucleotide
cucacguaacuguagucgg

SEQ ID NO: 1488786 - RNA, 19 nt, Artificial Sequence
  Description of Artificial Sequence: Synthetic oligonucleotide
auguuguugcgcucgcgcc

SEQ ID NO: 1488787 - RNA, 19 nt, Artificial Sequence
  Description of Artificial Sequence: Synthetic oligonucleotide
aaugcucgaaacggaaaag

SEQ ID NO: 1488788 - RNA, 19 nt, Artificial Sequence
  Description of Artificial Sequence: Synthetic oligonucleotide
ugcuugaacaaguuccgca

SEQ ID NO: 1488789 - RNA, 19 nt, Artificial Sequence
  Description of Artificial Sequence: Synthetic oligonucleotide
acggaaaagguucucaaaa

SEQ ID NO: 1488790 - RNA, 19 nt, Artificial Sequence
  Description of Artificial Sequence: Synthetic oligonucleotide
guacucgucgcucagcuug

SEQ ID NO: 1488791 - RNA, 19 nt, Artificial Sequence
  Description of Artificial Sequence: Synthetic oligonucleotide
auccggauugcaucaaguc

SEQ ID NO: 1488792 - RNA, 19 nt, Artificial Sequence
  Description of Artificial Sequence: Synthetic oligonucleotide
acguguguugcgucagucc

SEQ ID NO: 1488793 - RNA, 19 nt, Artificial Sequence
  Description of Artificial Sequence: Synthetic oligonucleotide
uguugcgucagucccgugu

SEQ ID NO: 1488794 - RNA, 19 nt, Artificial Sequence
  Description of Artificial Sequence: Synthetic oligonucleotide
ucagccacguuugauccgg

SEQ ID NO: 1488795 - RNA, 19 nt, Artificial Sequence
  Description of Artificial Sequence: Synthetic oligonucleotide
caucaaguccugaacccgg

SEQ ID NO: 1488796 - RNA, 19 nt, Artificial Sequence
  Description of Artificial Sequence: Synthetic oligonucleotide
guuugauccggauugcauc

SEQ ID NO: 1488797 - RNA, 19 nt, Artificial Sequence
  Description of Artificial Sequence: Synthetic oligonucleotide
uuguacucgucgcucagcu

SEQ ID NO: 1488798 - RNA, 19 nt, Artificial Sequence
  Description of Artificial Sequence: Synthetic oligonucleotide
acauacgccucuuuucuca

SEQ ID NO: 1488799 - RNA, 19 nt, Artificial Sequence
  Description of Artificial Sequence: Synthetic oligonucleotide
augcucgaaacggaaaagg

SEQ ID NO: 1488800 - RNA, 19 nt, Artificial Sequence
  Description of Artificial Sequence: Synthetic oligonucleotide
gaagccggccgccauggcg

SEQ ID NO: 1488801 - RNA, 19 nt, Artificial Sequence
  Description of Artificial Sequence: Synthetic oligonucleotide
guagucgucggcgaagagg

SEQ ID NO: 1488802 - RNA, 19 nt, Artificial Sequence
  Description of Artificial Sequence: Synthetic oligonucleotide
aagaggucggaaggaaguc

SEQ ID NO: 1488803 - RNA, 19 nt, Artificial Sequence
  Description of Artificial Sequence: Synthetic oligonucleotide
ucggcgaagaggucggaag

SEQ ID NO: 1488804 - RNA, 19 nt, Artificial Sequence
  Description of Artificial Sequence: Synthetic oligonucleotide
cuugucgcggcucuugcgc

SEQ ID NO: 1488805 - RNA, 19 nt, Artificial Sequence
  Description of Artificial Sequence: Synthetic oligonucleotide
auuacucagggcccggcug

SEQ ID NO: 1488806 - RNA, 19 nt, Artificial Sequence
  Description of Artificial Sequence: Synthetic oligonucleotide
agugauuacucagggcccg

SEQ ID NO: 1488807 - RNA, 19 nt, Artificial Sequence
  Description of Artificial Sequence: Synthetic oligonucleotide
ugggucuaaaggcggcggg

SEQ ID NO: 1488808 - RNA, 19 nt, Artificial Sequence
  Description of Artificial Sequence: Synthetic oligonucleotide
ucgugcucgccgauggccg

SEQ ID NO: 1488809 - RNA, 19 nt, Artificial Sequence
  Description of Artificial Sequence: Synthetic oligonucleotide
uuccgcagggugcugagcu

SEQ ID NO: 1488810 - RNA, 19 nt, Artificial Sequence
  Description of Artificial Sequence: Synthetic oligonucleotide
ucgggcucguaguagaagu

SEQ ID NO: 1488811 - RNA, 19 nt, Artificial Sequence
  Description of Artificial Sequence: Synthetic oligonucleotide
cuagcagugacccgccgag

SEQ ID NO: 1488812 - RNA, 19 nt, Artificial Sequence
  Description of Artificial Sequence: Synthetic oligonucleotide
ucacguaacuguagucggc

SEQ ID NO: 1488813 - RNA, 19 nt, Artificial Sequence
  Description of Artificial Sequence: Synthetic oligonucleotide
ucgaaacggaaaagguucu

SEQ ID NO: 1488814 - RNA, 19 nt, Artificial Sequence
  Description of Artificial Sequence: Synthetic oligonucleotide
uuacacguguguugcguca

SEQ ID NO: 1488815 - RNA, 19 nt, Artificial Sequence
  Description of Artificial Sequence: Synthetic oligonucleotide
cacgguguccccucggugc

SEQ ID NO: 1488816 - RNA, 19 nt, Artificial Sequence
  Description of Artificial Sequence: Synthetic oligonucleotide
cuuuaaugcucgaaacgga

SEQ ID NO: 1488817 - RNA, 19 nt, Artificial Sequence
  Description of Artificial Sequence: Synthetic oligonucleotide
ucggaaggaagucguggug

SEQ ID NO: 1488818 - RNA, 19 nt, Artificial Sequence
  Description of Artificial Sequence: Synthetic oligonucleotide
caguccgcggguucgaagc

SEQ ID NO: 1488819 - RNA, 19 nt, Artificial Sequence
  Description of Artificial Sequence: Synthetic oligonucleotide
gacgacgacguggacaggc

SEQ ID NO: 1488820 - RNA, 19 nt, Artificial Sequence
  Description of Artificial Sequence: Synthetic oligonucleotide
ucgucggcgaagaggucgg

SEQ ID NO: 1488821 - RNA, 19 nt, Artificial Sequence
  Description of Artificial Sequence: Synthetic oligonucleotide
cuggacgacgacgacgugg

SEQ ID NO: 1488822 - RNA, 19 nt, Artificial Sequence
  Description of Artificial Sequence: Synthetic oligonucleotide
cuuggcgccguagucgucg

SEQ ID NO: 1488823 - RNA, 19 nt, Artificial Sequence
  Description of Artificial Sequence: Synthetic oligonucleotide
accgcgauguuguugcgcu

SEQ ID NO: 1488824 - RNA, 19 nt, Artificial Sequence
  Description of Artificial Sequence: Synthetic oligonucleotide
acguaacuguagucggccg

SEQ ID NO: 1488825 - RNA, 19 nt, Artificial Sequence
  Description of Artificial Sequence: Synthetic oligonucleotide
uccgcggguucgaagcccg

SEQ ID NO: 1488826 - RNA, 19 nt, Artificial Sequence
  Description of Artificial Sequence: Synthetic oligonucleotide
aguccgcggguucgaagcc

SEQ ID NO: 1488827 - RNA, 19 nt, Artificial Sequence
  Description of Artificial Sequence: Synthetic oligonucleotide
cacguaacuguagucggcc

SEQ ID NO: 1488828 - RNA, 19 nt, Artificial Sequence
  Description of Artificial Sequence: Synthetic oligonucleotide
aaguccgauggcgcgcucg

SEQ ID NO: 1488829 - RNA, 19 nt, Artificial Sequence
  Description of Artificial Sequence: Synthetic oligonucleotide
aguuacacguguguugcgu

SEQ ID NO: 1488830 - RNA, 19 nt, Artificial Sequence
  Description of Artificial Sequence: Synthetic oligonucleotide
ucuaaaggcggcgggcggc

SEQ ID NO: 1488831 - RNA, 19 nt, Artificial Sequence
  Description of Artificial Sequence: Synthetic oligonucleotide
ccacguuugauccggauug

SEQ ID NO: 1488832 - RNA, 19 nt, Artificial Sequence
  Description of Artificial Sequence: Synthetic oligonucleotide
guaacuguagucggccggc

SEQ ID NO: 1488833 - RNA, 19 nt, Artificial Sequence
  Description of Artificial Sequence: Synthetic oligonucleotide
gaagucguggugcgcgggc

SEQ ID NO: 1488834 - RNA, 19 nt, Artificial Sequence
  Description of Artificial Sequence: Synthetic oligonucleotide
gacgacguggacaggcugc

SEQ ID NO: 1488835 - RNA, 19 nt, Artificial Sequence
  Description of Artificial Sequence: Synthetic oligonucleotide
aagucguggugcgcgggcg

SEQ ID NO: 1488836 - RNA, 19 nt, Artificial Sequence
  Description of Artificial Sequence: Synthetic oligonucleotide
cccggcuccgccuugagcg

SEQ ID NO: 1488837 - RNA, 19 nt, Artificial Sequence
  Description of Artificial Sequence: Synthetic oligonucleotide
gcugaaguccgauggcgcg

SEQ ID NO: 1488838 - RNA, 19 nt, Artificial Sequence
  Description of Artificial Sequence: Synthetic oligonucleotide
agucggccggcuucuuggc

SEQ ID NO: 1488839 - RNA, 19 nt, Artificial Sequence
  Description of Artificial Sequence: Synthetic oligonucleotide
uacacguguguugcgucag

SEQ ID NO: 1488840 - RNA, 19 nt, Artificial Sequence
  Description of Artificial Sequence: Synthetic oligonucleotide
acgacguggacaggcugcc

SEQ ID NO: 1488841 - RNA, 19 nt, Artificial Sequence
  Description of Artificial Sequence: Synthetic oligonucleotide
gucuaaaggcggcgggcgg

SEQ ID NO: 1488842 - RNA, 19 nt, Artificial Sequence
  Description of Artificial Sequence: Synthetic oligonucleotide
uguguugcgucagucccgu

SEQ ID NO: 1488843 - RNA, 19 nt, Artificial Sequence
  Description of Artificial Sequence: Synthetic oligonucleotide
guuacacguguguugcguc

SEQ ID NO: 1488844 - RNA, 19 nt, Artificial Sequence
  Description of Artificial Sequence: Synthetic oligonucleotide
aggcucacguaacuguagu

SEQ ID NO: 1488845 - RNA, 19 nt, Artificial Sequence
  Description of Artificial Sequence: Synthetic oligonucleotide
augaacgcggggcccgcgg

SEQ ID NO: 1488846 - RNA, 19 nt, Artificial Sequence
  Description of Artificial Sequence: Synthetic oligonucleotide
guugcgucagucccguguc

SEQ ID NO: 1488847 - RNA, 19 nt, Artificial Sequence
  Description of Artificial Sequence: Synthetic oligonucleotide
gaggcucacguaacuguag

SEQ ID NO: 1488848 - RNA, 19 nt, Artificial Sequence
  Description of Artificial Sequence: Synthetic oligonucleotide
ucucgcgacagcugcucca

SEQ ID NO: 1488849 - RNA, 19 nt, Artificial Sequence
  Description of Artificial Sequence: Synthetic oligonucleotide
ggucggaaggaagucgugg

SEQ ID NO: 1488850 - RNA, 19 nt, Artificial Sequence
  Description of Artificial Sequence: Synthetic oligonucleotide
aguuccgcagggugcugag

SEQ ID NO: 1488851 - RNA, 19 nt, Artificial Sequence
  Description of Artificial Sequence: Synthetic oligonucleotide
ucccguguccacacgcgcu

SEQ ID NO: 1488852 - RNA, 19 nt, Artificial Sequence
  Description of Artificial Sequence: Synthetic oligonucleotide
ugauuacucagggcccggc

SEQ ID NO: 1488853 - RNA, 19 nt, Artificial Sequence
  Description of Artificial Sequence: Synthetic oligonucleotide
ccggcugacagacaguuac

SEQ ID NO: 1488854 - RNA, 19 nt, Artificial Sequence
  Description of Artificial Sequence: Synthetic oligonucleotide
ccaaguugcgcaucuuggc

SEQ ID NO: 1488855 - RNA, 19 nt, Artificial Sequence
  Description of Artificial Sequence: Synthetic oligonucleotide
caggcggugcaugaacgcg

SEQ ID NO: 1488856 - RNA, 19 nt, Artificial Sequence
  Description of Artificial Sequence: Synthetic oligonucleotide
cuuguacucgucgcucagc

SEQ ID NO: 1488857 - RNA, 19 nt, Artificial Sequence
  Description of Artificial Sequence: Synthetic oligonucleotide
uaggggcugaaguccgaug

SEQ ID NO: 1488858 - RNA, 19 nt, Artificial Sequence
  Description of Artificial Sequence: Synthetic oligonucleotide
ugaaguccgauggcgcgcu

SEQ ID NO: 1488859 - RNA, 19 nt, Artificial Sequence
  Description of Artificial Sequence: Synthetic oligonucleotide
uacucgucgcucagcuugu

SEQ ID NO: 1488860 - RNA, 19 nt, Artificial Sequence
  Description of Artificial Sequence: Synthetic oligonucleotide
uaggcgcgcagggcgaacg

SEQ ID NO: 1488861 - RNA, 19 nt, Artificial Sequence
  Description of Artificial Sequence: Synthetic oligonucleotide
acagacaguuacacgugug

SEQ ID NO: 1488862 - RNA, 19 nt, Artificial Sequence
  Description of Artificial Sequence: Synthetic oligonucleotide
aacuguagucggccggcuu

SEQ ID NO: 1488863 - RNA, 19 nt, Artificial Sequence
  Description of Artificial Sequence: Synthetic oligonucleotide
cuaaaggcggcgggcggcg

SEQ ID NO: 1488864 - RNA, 19 nt, Artificial Sequence
  Description of Artificial Sequence: Synthetic oligonucleotide
caguuacacguguguugcg

SEQ ID NO: 1488865 - RNA, 19 nt, Artificial Sequence
  Description of Artificial Sequence: Synthetic oligonucleotide
ugcgcgcggggcacgcucg

SEQ ID NO: 1488866 - RNA, 19 nt, Artificial Sequence
  Description of Artificial Sequence: Synthetic oligonucleotide
ucguccgcgcgcuugcagu

SEQ ID NO: 1488867 - RNA, 19 nt, Artificial Sequence
  Description of Artificial Sequence: Synthetic oligonucleotide
uugucgcggcucuugcgca

SEQ ID NO: 1488868 - RNA, 19 nt, Artificial Sequence
  Description of Artificial Sequence: Synthetic oligonucleotide
aggugcgugcgcgcggugc

SEQ ID NO: 1488869 - RNA, 19 nt, Artificial Sequence
  Description of Artificial Sequence: Synthetic oligonucleotide
ugcgucagucccgugucca

SEQ ID NO: 1488870 - RNA, 19 nt, Artificial Sequence
  Description of Artificial Sequence: Synthetic oligonucleotide
cugaaguccgauggcgcgc

SEQ ID NO: 1488871 - RNA, 19 nt, Artificial Sequence
  Description of Artificial Sequence: Synthetic oligonucleotide
gaaggaagucguggugcgc

SEQ ID NO: 1488872 - RNA, 19 nt, Artificial Sequence
  Description of Artificial Sequence: Synthetic oligonucleotide
cucgccgauggccggcucg

SEQ ID NO: 1488873 - RNA, 19 nt, Artificial Sequence
  Description of Artificial Sequence: Synthetic oligonucleotide
aggcggugcaugaacgcgg

SEQ ID NO: 1488874 - RNA, 19 nt, Artificial Sequence
  Description of Artificial Sequence: Synthetic oligonucleotide
ucgcgccgcaucuuguacu

SEQ ID NO: 1488875 - RNA, 19 nt, Artificial Sequence
  Description of Artificial Sequence: Synthetic oligonucleotide
uugcgucagucccgugucc

SEQ ID NO: 1488876 - RNA, 19 nt, Artificial Sequence
  Description of Artificial Sequence: Synthetic oligonucleotide
gaggcaugcugcgucccag

SEQ ID NO: 1488877 - RNA, 19 nt, Artificial Sequence
  Description of Artificial Sequence: Synthetic oligonucleotide
ggccccguaggccaggcag

SEQ ID NO: 1488878 - RNA, 19 nt, Artificial Sequence
  Description of Artificial Sequence: Synthetic oligonucleotide
agucccguguccacacgcg

SEQ ID NO: 1488879 - RNA, 19 nt, Artificial Sequence
  Description of Artificial Sequence: Synthetic oligonucleotide
guuguugcgcucgcgccgc

SEQ ID NO: 1488880 - RNA, 19 nt, Artificial Sequence
  Description of Artificial Sequence: Synthetic oligonucleotide
agacaguuacacguguguu

SEQ ID NO: 1488881 - RNA, 19 nt, Artificial Sequence
  Description of Artificial Sequence: Synthetic oligonucleotide
uuggcgccguagucgucgg

SEQ ID NO: 1488882 - RNA, 19 nt, Artificial Sequence
  Description of Artificial Sequence: Synthetic oligonucleotide
ggacgcacggugcccacgg

SEQ ID NO: 1488883 - RNA, 19 nt, Artificial Sequence
  Description of Artificial Sequence: Synthetic oligonucleotide
uugcgcucgcgccgcaucu

SEQ ID NO: 1488884 - RNA, 19 nt, Artificial Sequence
  Description of Artificial Sequence: Synthetic oligonucleotide
gauuacucagggcccggcu

SEQ ID NO: 1488885 - RNA, 19 nt, Artificial Sequence
  Description of Artificial Sequence: Synthetic oligonucleotide
aguugcgcaucuuggccuu

SEQ ID NO: 1488886 - RNA, 19 nt, Artificial Sequence
  Description of Artificial Sequence: Synthetic oligonucleotide
ucgccgauggccggcucgg

SEQ ID NO: 1488887 - RNA, 19 nt, Artificial Sequence
  Description of Artificial Sequence: Synthetic oligonucleotide
gugauuacucagggcccgg

SEQ ID NO: 1488888 - RNA, 19 nt, Artificial Sequence
  Description of Artificial Sequence: Synthetic oligonucleotide
cguaacuguagucggccgg

SEQ ID NO: 1488889 - RNA, 19 nt, Artificial Sequence
  Description of Artificial Sequence: Synthetic oligonucleotide
uagcagugacccgccgagg

SEQ ID NO: 1488890 - RNA, 19 nt, Artificial Sequence
  Description of Artificial Sequence: Synthetic oligonucleotide
caacaaccccgcaggaaca

SEQ ID NO: 1488891 - RNA, 19 nt, Artificial Sequence
  Description of Artificial Sequence: Synthetic oligonucleotide
acaaccccgcaggaacauc

SEQ ID NO: 1488892 - RNA, 19 nt, Artificial Sequence
  Description of Artificial Sequence: Synthetic oligonucleotide
acgguguccccucggugca

SEQ ID NO: 1488893 - RNA, 19 nt, Artificial Sequence
  Description of Artificial Sequence: Synthetic oligonucleotide
ggcgccguagucgucggcg

SEQ ID NO: 1488894 - RNA, 19 nt, Artificial Sequence
  Description of Artificial Sequence: Synthetic oligonucleotide
gucggaaggaagucguggu

SEQ ID NO: 1488895 - RNA, 19 nt, Artificial Sequence
  Description of Artificial Sequence: Synthetic oligonucleotide
ugaacccgggcgcgcggug

SEQ ID NO: 1488896 - RNA, 19 nt, Artificial Sequence
  Description of Artificial Sequence: Synthetic oligonucleotide
gucccguguccacacgcgc

SEQ ID NO: 1488897 - RNA, 19 nt, Artificial Sequence
  Description of Artificial Sequence: Synthetic oligonucleotide
uaguagaaguuggccacuu

SEQ ID NO: 1488898 - RNA, 19 nt, Artificial Sequence
  Description of Artificial Sequence: Synthetic oligonucleotide
cagacaguuacacgugugu

SEQ ID NO: 1488899 - RNA, 19 nt, Artificial Sequence
  Description of Artificial Sequence: Synthetic oligonucleotide
cucucgcgacagcugcucc

SEQ ID NO: 1488900 - RNA, 19 nt, Artificial Sequence
  Description of Artificial Sequence: Synthetic oligonucleotide
cucgcgccgcaucuuguac

SEQ ID NO: 1488901 - RNA, 19 nt, Artificial Sequence
  Description of Artificial Sequence: Synthetic oligonucleotide
ggcgcgcuagcagugaccc

SEQ ID NO: 1488902 - RNA, 19 nt, Artificial Sequence
  Description of Artificial Sequence: Synthetic oligonucleotide
gauccggauugcaucaagu

SEQ ID NO: 1488903 - RNA, 19 nt, Artificial Sequence
  Description of Artificial Sequence: Synthetic oligonucleotide
gucgggcucguaguagaag

SEQ ID NO: 1488904 - RNA, 19 nt, Artificial Sequence
  Description of Artificial Sequence: Synthetic oligonucleotide
aacccgggcgcgcggugca

SEQ ID NO: 1488905 - RNA, 19 nt, Artificial Sequence
  Description of Artificial Sequence: Synthetic oligonucleotide
acguuugauccggauugca

SEQ ID NO: 1488906 - RNA, 19 nt, Artificial Sequence
  Description of Artificial Sequence: Synthetic oligonucleotide
uguacucgucgcucagcuu

SEQ ID NO: 1488907 - RNA, 19 nt, Artificial Sequence
  Description of Artificial Sequence: Synthetic oligonucleotide
uaacuguagucggccggcu

SEQ ID NO: 1488908 - RNA, 19 nt, Artificial Sequence
  Description of Artificial Sequence: Synthetic oligonucleotide
cucgcgacagcugcuccac

SEQ ID NO: 1488909 - RNA, 19 nt, Artificial Sequence
  Description of Artificial Sequence: Synthetic oligonucleotide
acacguguguugcgucagu

SEQ ID NO: 1488910 - RNA, 19 nt, Artificial Sequence
  Description of Artificial Sequence: Synthetic oligonucleotide
ucgccugguagcccaggua

SEQ ID NO: 1488911 - RNA, 19 nt, Artificial Sequence
  Description of Artificial Sequence: Synthetic oligonucleotide
gaggucggaaggaagucgu

SEQ ID NO: 1488912 - RNA, 19 nt, Artificial Sequence
  Description of Artificial Sequence: Synthetic oligonucleotide
gguucgaagcccggcuccg

SEQ ID NO: 1488913 - RNA, 19 nt, Artificial Sequence
  Description of Artificial Sequence: Synthetic oligonucleotide
cacguguguugcgucaguc

SEQ ID NO: 1488914 - RNA, 19 nt, Artificial Sequence
  Description of Artificial Sequence: Synthetic oligonucleotide
gggcuggacgacgacgacg

SEQ ID NO: 1488915 - RNA, 19 nt, Artificial Sequence
  Description of Artificial Sequence: Synthetic oligonucleotide
gaacgggaagccggccgcc

SEQ ID NO: 1488916 - RNA, 19 nt, Artificial Sequence
  Description of Artificial Sequence: Synthetic oligonucleotide
cagggcgaacgggaagccg

SEQ ID NO: 1488917 - RNA, 19 nt, Artificial Sequence
  Description of Artificial Sequence: Synthetic oligonucleotide
guugcgcucgcgccgcauc

SEQ ID NO: 1488918 - RNA, 19 nt, Artificial Sequence
  Description of Artificial Sequence: Synthetic oligonucleotide
gucguggugcgcgggcgcg

SEQ ID NO: 1488919 - RNA, 19 nt, Artificial Sequence
  Description of Artificial Sequence: Synthetic oligonucleotide
gaacccgggcgcgcggugc

SEQ ID NO: 1488920 - RNA, 19 nt, Artificial Sequence
  Description of Artificial Sequence: Synthetic oligonucleotide
cucggugcgcgcgcgcgcg

SEQ ID NO: 1488921 - RNA, 19 nt, Artificial Sequence
  Description of Artificial Sequence: Synthetic oligonucleotide
gucggccggcuucuuggcc

SEQ ID NO: 1488922 - RNA, 19 nt, Artificial Sequence
  Description of Artificial Sequence: Synthetic oligonucleotide
cccgccgaggccagcagcg

SEQ ID NO: 1488923 - RNA, 19 nt, Artificial Sequence
  Description of Artificial Sequence: Synthetic oligonucleotide
agccacguuugauccggau

SEQ ID NO: 1488924 - RNA, 19 nt, Artificial Sequence
  Description of Artificial Sequence: Synthetic oligonucleotide
ggugcgugcgcgcggugcc

SEQ ID NO: 1488925 - RNA, 19 nt, Artificial Sequence
  Description of Artificial Sequence: Synthetic oligonucleotide
aggacgcacggugcccacg

SEQ ID NO: 1488926 - RNA, 19 nt, Artificial Sequence
  Description of Artificial Sequence: Synthetic oligonucleotide
gaagcccggcuccgccuug

SEQ ID NO: 1488927 - RNA, 19 nt, Artificial Sequence
  Description of Artificial Sequence: Synthetic oligonucleotide
gcuagcagugacccgccga

SEQ ID NO: 1488928 - RNA, 19 nt, Artificial Sequence
  Description of Artificial Sequence: Synthetic oligonucleotide
acgccucuuuucucauaga

SEQ ID NO: 1488929 - RNA, 19 nt, Artificial Sequence
  Description of Artificial Sequence: Synthetic oligonucleotide
gggucuaaaggcggcgggc

SEQ ID NO: 1488930 - RNA, 19 nt, Artificial Sequence
  Description of Artificial Sequence: Synthetic oligonucleotide
acgcgcucagccacguuug

SEQ ID NO: 1488931 - RNA, 19 nt, Artificial Sequence
  Description of Artificial Sequence: Synthetic oligonucleotide
ggcggugcaugaacgcggg

SEQ ID NO: 1488932 - RNA, 19 nt, Artificial Sequence
  Description of Artificial Sequence: Synthetic oligonucleotide
gucggcggggcucggcgug

SEQ ID NO: 1488933 - RNA, 19 nt, Artificial Sequence
  Description of Artificial Sequence: Synthetic oligonucleotide
cgcgcuugcaguccgcggg

SEQ ID NO: 1488934 - RNA, 19 nt, Artificial Sequence
  Description of Artificial Sequence: Synthetic oligonucleotide
ggcgggcuggacgacgacg

SEQ ID NO: 1488935 - RNA, 19 nt, Artificial Sequence
  Description of Artificial Sequence: Synthetic oligonucleotide
caugaacgcggggcccgcg

SEQ ID NO: 1488936 - RNA, 19 nt, Artificial Sequence
  Description of Artificial Sequence: Synthetic oligonucleotide
gacccgccgaggccagcag

SEQ ID NO: 1488937 - RNA, 19 nt, Artificial Sequence
  Description of Artificial Sequence: Synthetic oligonucleotide
cuugagcgcggcgggcagc

SEQ ID NO: 1488938 - RNA, 19 nt, Artificial Sequence
  Description of Artificial Sequence: Synthetic oligonucleotide
gagcggcuccagguagggg

SEQ ID NO: 1488939 - RNA, 19 nt, Artificial Sequence
  Description of Artificial Sequence: Synthetic oligonucleotide
ucguggugcgcgggcgcgg

SEQ ID NO: 1488940 - RNA, 19 nt, Artificial Sequence
  Description of Artificial Sequence: Synthetic oligonucleotide
cgcgcuagcagugacccgc

SEQ ID NO: 1488941 - RNA, 19 nt, Artificial Sequence
  Description of Artificial Sequence: Synthetic oligonucleotide
guguccacacgcgcucagc

SEQ ID NO: 1488942 - RNA, 19 nt, Artificial Sequence
  Description of Artificial Sequence: Synthetic oligonucleotide
cagugacccgccgaggcca

SEQ ID NO: 1488943 - RNA, 19 nt, Artificial Sequence
  Description of Artificial Sequence: Synthetic oligonucleotide
ugcgugcgcgcggugcccc

SEQ ID NO: 1488944 - RNA, 19 nt, Artificial Sequence
  Description of Artificial Sequence: Synthetic oligonucleotide
gcaguccgcggguucgaag

SEQ ID NO: 1488945 - RNA, 19 nt, Artificial Sequence
  Description of Artificial Sequence: Synthetic oligonucleotide
cggcgaagaggucggaagg

SEQ ID NO: 1488946 - RNA, 19 nt, Artificial Sequence
  Description of Artificial Sequence: Synthetic oligonucleotide
acgacgacguggacaggcu

SEQ ID NO: 1488947 - RNA, 19 nt, Artificial Sequence
  Description of Artificial Sequence: Synthetic oligonucleotide
guucgaagcccggcuccgc

SEQ ID NO: 1488948 - RNA, 19 nt, Artificial Sequence
  Description of Artificial Sequence: Synthetic oligonucleotide
aaguccgcggcgggcgcga

SEQ ID NO: 1488949 - RNA, 19 nt, Artificial Sequence
  Description of Artificial Sequence: Synthetic oligonucleotide
gcgggcgcggcgaaguccg

SEQ ID NO: 1488950 - RNA, 19 nt, Artificial Sequence
  Description of Artificial Sequence: Synthetic oligonucleotide
uacucagggcccggcugac

SEQ ID NO: 1488951 - RNA, 19 nt, Artificial Sequence
  Description of Artificial Sequence: Synthetic oligonucleotide
acucgucgcucagcuuguc

SEQ ID NO: 1488952 - RNA, 19 nt, Artificial Sequence
  Description of Artificial Sequence: Synthetic oligonucleotide
aagcccggcuccgccuuga

SEQ ID NO: 1488953 - RNA, 19 nt, Artificial Sequence
  Description of Artificial Sequence: Synthetic oligonucleotide
cggugcaugaacgcggggc

SEQ ID NO: 1488954 - RNA, 19 nt, Artificial Sequence
  Description of Artificial Sequence: Synthetic oligonucleotide
guuccgcagggugcugagc

SEQ ID NO: 1488955 - RNA, 19 nt, Artificial Sequence
  Description of Artificial Sequence: Synthetic oligonucleotide
uuguugcgcucgcgccgca

SEQ ID NO: 1488956 - RNA, 19 nt, Artificial Sequence
  Description of Artificial Sequence: Synthetic oligonucleotide
ggcgaagaggucggaagga

SEQ ID NO: 1488957 - RNA, 19 nt, Artificial Sequence
  Description of Artificial Sequence: Synthetic oligonucleotide
guagcccagguaggcgcgc

SEQ ID NO: 1488958 - RNA, 19 nt, Artificial Sequence
  Description of Artificial Sequence: Synthetic oligonucleotide
uggcgccguagucgucggc

SEQ ID NO: 1488959 - RNA, 19 nt, Artificial Sequence
  Description of Artificial Sequence: Synthetic oligonucleotide
gcgggaggcaugcugcguc

SEQ ID NO: 1488960 - RNA, 19 nt, Artificial Sequence
  Description of Artificial Sequence: Synthetic oligonucleotide
cgaacgggaagccggccgc

SEQ ID NO: 1488961 - RNA, 19 nt, Artificial Sequence
  Description of Artificial Sequence: Synthetic oligonucleotide
acgggaagccggccgccau

SEQ ID NO: 1488962 - RNA, 19 nt, Artificial Sequence
  Description of Artificial Sequence: Synthetic oligonucleotide
agugacccgccgaggccag

SEQ ID NO: 1488963 - RNA, 19 nt, Artificial Sequence
  Description of Artificial Sequence: Synthetic oligonucleotide
gccguagucgucggcgaag

SEQ ID NO: 1488964 - RNA, 19 nt, Artificial Sequence
  Description of Artificial Sequence: Synthetic oligonucleotide
aaccccgcaggaacaucuu

SEQ ID NO: 1488965 - RNA, 19 nt, Artificial Sequence
  Description of Artificial Sequence: Synthetic oligonucleotide
cuuggccggcuuggcgccg

SEQ ID NO: 1488966 - RNA, 19 nt, Artificial Sequence
  Description of Artificial Sequence: Synthetic oligonucleotide
caggacgcacggugcccac

SEQ ID NO: 1488967 - RNA, 19 nt, Artificial Sequence
  Description of Artificial Sequence: Synthetic oligonucleotide
ugcaguccgcggguucgaa

SEQ ID NO: 1488968 - RNA, 19 nt, Artificial Sequence
  Description of Artificial Sequence: Synthetic oligonucleotide
ucggugcgcgcgcgcgcgc

SEQ ID NO: 1488969 - RNA, 19 nt, Artificial Sequence
  Description of Artificial Sequence: Synthetic oligonucleotide
gaaguccgauggcgcgcuc

SEQ ID NO: 1488970 - RNA, 19 nt, Artificial Sequence
  Description of Artificial Sequence: Synthetic oligonucleotide
ugcucgccgauggccggcu

SEQ ID NO: 1488971 - RNA, 19 nt, Artificial Sequence
  Description of Artificial Sequence: Synthetic oligonucleotide
agguaggcgcgcagggcga

SEQ ID NO: 1488972 - RNA, 19 nt, Artificial Sequence
  Description of Artificial Sequence: Synthetic oligonucleotide
agcccggcuccgccuugag

SEQ ID NO: 1488973 - RNA, 19 nt, Artificial Sequence
  Description of Artificial Sequence: Synthetic oligonucleotide
agucgggcucguaguagaa

SEQ ID NO: 1488974 - RNA, 19 nt, Artificial Sequence
  Description of Artificial Sequence: Synthetic oligonucleotide
ccacacgcgcucagccacg

SEQ ID NO: 1488975 - RNA, 19 nt, Artificial Sequence
  Description of Artificial Sequence: Synthetic oligonucleotide
uguugcgcucgcgccgcau

SEQ ID NO: 1488976 - RNA, 19 nt, Artificial Sequence
  Description of Artificial Sequence: Synthetic oligonucleotide
cacgcgcucagccacguuu

SEQ ID NO: 1488977 - RNA, 19 nt, Artificial Sequence
  Description of Artificial Sequence: Synthetic oligonucleotide
gugcgcgcggggcacgcuc

SEQ ID NO: 1488978 - RNA, 19 nt, Artificial Sequence
  Description of Artificial Sequence: Synthetic oligonucleotide
gcuugcaguccgcggguuc

SEQ ID NO: 1488979 - RNA, 19 nt, Artificial Sequence
  Description of Artificial Sequence: Synthetic oligonucleotide
ugcgcgcgcgcgcgcgcgc

SEQ ID NO: 1488980 - RNA, 19 nt, Artificial Sequence
  Description of Artificial Sequence: Synthetic oligonucleotide
gcggggcacgcucggugcg

SEQ ID NO: 1488981 - RNA, 19 nt, Artificial Sequence
  Description of Artificial Sequence: Synthetic oligonucleotide
gcucggcgucgccugguag

SEQ ID NO: 1488982 - RNA, 19 nt, Artificial Sequence
  Description of Artificial Sequence: Synthetic oligonucleotide
gcgagcggcuccagguagg

SEQ ID NO: 1488983 - RNA, 19 nt, Artificial Sequence
  Description of Artificial Sequence: Synthetic oligonucleotide
uuggccggcuuggcgccgu

SEQ ID NO: 1488984 - RNA, 19 nt, Artificial Sequence
  Description of Artificial Sequence: Synthetic oligonucleotide
ggccuugucgcggcucuug

SEQ ID NO: 1488985 - RNA, 19 nt, Artificial Sequence
  Description of Artificial Sequence: Synthetic oligonucleotide
guccugaacccgggcgcgc

SEQ ID NO: 1488986 - RNA, 19 nt, Artificial Sequence
  Description of Artificial Sequence: Synthetic oligonucleotide
gcgcccgaggcucacguaa

SEQ ID NO: 1488987 - RNA, 19 nt, Artificial Sequence
  Description of Artificial Sequence: Synthetic oligonucleotide
cucggccgucagcuccagc

SEQ ID NO: 1488988 - RNA, 19 nt, Artificial Sequence
  Description of Artificial Sequence: Synthetic oligonucleotide
ugcgcaccgcgauguuguu

SEQ ID NO: 1488989 - RNA, 19 nt, Artificial Sequence
  Description of Artificial Sequence: Synthetic oligonucleotide
ggcgaaguccgcggcgggc

SEQ ID NO: 1488990 - RNA, 19 nt, Artificial Sequence
  Description of Artificial Sequence: Synthetic oligonucleotide
cccgcaggaacaucuuuaa

SEQ ID NO: 1488991 - RNA, 19 nt, Artificial Sequence
  Description of Artificial Sequence: Synthetic oligonucleotide
cggcuuggcgccguagucg

SEQ ID NO: 1488992 - RNA, 19 nt, Artificial Sequence
  Description of Artificial Sequence: Synthetic oligonucleotide
gugcucgccgauggccggc

SEQ ID NO: 1488993 - RNA, 19 nt, Artificial Sequence
  Description of Artificial Sequence: Synthetic oligonucleotide
ggcuuggcgccguagucgu

SEQ ID NO: 1488994 - RNA, 19 nt, Artificial Sequence
  Description of Artificial Sequence: Synthetic oligonucleotide
ggcagucgggcucguagua

SEQ ID NO: 1488995 - RNA, 19 nt, Artificial Sequence
  Description of Artificial Sequence: Synthetic oligonucleotide
ccugaacccgggcgcgcgg

SEQ ID NO: 1488996 - RNA, 19 nt, Artificial Sequence
  Description of Artificial Sequence: Synthetic oligonucleotide
ggggcacgcucggugcgcg

SEQ ID NO: 1488997 - RNA, 19 nt, Artificial Sequence
  Description of Artificial Sequence: Synthetic oligonucleotide
gcggugcaugaacgcgggg

SEQ ID NO: 1488998 - RNA, 19 nt, Artificial Sequence
  Description of Artificial Sequence: Synthetic oligonucleotide
gcgaagaggucggaaggaa

SEQ ID NO: 1488999 - RNA, 19 nt, Artificial Sequence
  Description of Artificial Sequence: Synthetic oligonucleotide
gcgucguccgcgcgcuugc

SEQ ID NO: 1489000 - RNA, 19 nt, Artificial Sequence
  Description of Artificial Sequence: Synthetic oligonucleotide
gcgucagucccguguccac

SEQ ID NO: 1489001 - RNA, 19 nt, Artificial Sequence
  Description of Artificial Sequence: Synthetic oligonucleotide
guguugcgucagucccgug

SEQ ID NO: 1489002 - RNA, 19 nt, Artificial Sequence
  Description of Artificial Sequence: Synthetic oligonucleotide
ggauugcaucaaguccuga

SEQ ID NO: 1489003 - RNA, 19 nt, Artificial Sequence
  Description of Artificial Sequence: Synthetic oligonucleotide
gcgcucgcgccgcaucuug

SEQ ID NO: 1489004 - RNA, 19 nt, Artificial Sequence
  Description of Artificial Sequence: Synthetic oligonucleotide
ccgccuugagcgcggcggg

SEQ ID NO: 1489005 - RNA, 19 nt, Artificial Sequence
  Description of Artificial Sequence: Synthetic oligonucleotide
caggugcgcgcggggcacg

SEQ ID NO: 1489006 - RNA, 19 nt, Artificial Sequence
  Description of Artificial Sequence: Synthetic oligonucleotide
gugcgcgcgcgcgcgcgcg

SEQ ID NO: 1489007 - RNA, 19 nt, Artificial Sequence
  Description of Artificial Sequence: Synthetic oligonucleotide
gggcgcgucguccgcgcgc

SEQ ID NO: 1489008 - RNA, 19 nt, Artificial Sequence
  Description of Artificial Sequence: Synthetic oligonucleotide
cgcgagcggcuccagguag

SEQ ID NO: 1489009 - RNA, 19 nt, Artificial Sequence
  Description of Artificial Sequence: Synthetic oligonucleotide
gccacguuugauccggauu

SEQ ID NO: 1489010 - RNA, 19 nt, Artificial Sequence
  Description of Artificial Sequence: Synthetic oligonucleotide
gcucucgcgacagcugcuc

SEQ ID NO: 1489011 - RNA, 19 nt, Artificial Sequence
  Description of Artificial Sequence: Synthetic oligonucleotide
guaggcgcgcagggcgaac

SEQ ID NO: 1489012 - RNA, 19 nt, Artificial Sequence
  Description of Artificial Sequence: Synthetic oligonucleotide
gugcgugcgcgcggugccc

SEQ ID NO: 1489013 - RNA, 19 nt, Artificial Sequence
  Description of Artificial Sequence: Synthetic oligonucleotide
guccgauggcgcgcucgug

SEQ ID NO: 1489014 - RNA, 19 nt, Artificial Sequence
  Description of Artificial Sequence: Synthetic oligonucleotide
ccgaggcucacguaacugu

SEQ ID NO: 1489015 - RNA, 19 nt, Artificial Sequence
  Description of Artificial Sequence: Synthetic oligonucleotide
ccggcuuggcgccguaguc

SEQ ID NO: 1489016 - RNA, 19 nt, Artificial Sequence
  Description of Artificial Sequence: Synthetic oligonucleotide
gcgcgcuagcagugacccg

SEQ ID NO: 1489017 - RNA, 19 nt, Artificial Sequence
  Description of Artificial Sequence: Synthetic oligonucleotide
ugcgcucgcgccgcaucuu

SEQ ID NO: 1489018 - RNA, 19 nt, Artificial Sequence
  Description of Artificial Sequence: Synthetic oligonucleotide
gcacgcucggugcgcgcgc

SEQ ID NO: 1489019 - RNA, 19 nt, Artificial Sequence
  Description of Artificial Sequence: Synthetic oligonucleotide
ggcgcggccuuggcgucgg

SEQ ID NO: 1489020 - RNA, 19 nt, Artificial Sequence
  Description of Artificial Sequence: Synthetic oligonucleotide
gggcgcgcggcgcggcgcg

SEQ ID NO: 1489021 - RNA, 19 nt, Artificial Sequence
  Description of Artificial Sequence: Synthetic oligonucleotide
cgacgacguggacaggcug

SEQ ID NO: 1489022 - RNA, 19 nt, Artificial Sequence
  Description of Artificial Sequence: Synthetic oligonucleotide
ggcgcggccuuggcgcccg

SEQ ID NO: 1489023 - RNA, 19 nt, Artificial Sequence
  Description of Artificial Sequence: Synthetic oligonucleotide
cagccacguuugauccgga

SEQ ID NO: 1489024 - RNA, 19 nt, Artificial Sequence
  Description of Artificial Sequence: Synthetic oligonucleotide
gcucggugcgcgcgcgcgc

SEQ ID NO: 1489025 - RNA, 19 nt, Artificial Sequence
  Description of Artificial Sequence: Synthetic oligonucleotide
gcggguucgaagcccggcu

SEQ ID NO: 1489026 - RNA, 19 nt, Artificial Sequence
  Description of Artificial Sequence: Synthetic oligonucleotide
cagcgggcgcggccuuggc

SEQ ID NO: 1489027 - RNA, 19 nt, Artificial Sequence
  Description of Artificial Sequence: Synthetic oligonucleotide
augcugcgucccaggccag

SEQ ID NO: 1489028 - RNA, 19 nt, Artificial Sequence
  Description of Artificial Sequence: Synthetic oligonucleotide
gcaugaacgcggggcccgc

SEQ ID NO: 1489029 - RNA, 19 nt, Artificial Sequence
  Description of Artificial Sequence: Synthetic oligonucleotide
caggugcgugcgcgcggug

SEQ ID NO: 1489030 - RNA, 19 nt, Artificial Sequence
  Description of Artificial Sequence: Synthetic oligonucleotide
acacgcgcucagccacguu

SEQ ID NO: 1489031 - RNA, 19 nt, Artificial Sequence
  Description of Artificial Sequence: Synthetic oligonucleotide
cguagucgucggcgaagag

SEQ ID NO: 1489032 - RNA, 19 nt, Artificial Sequence
  Description of Artificial Sequence: Synthetic oligonucleotide
gcaggugcgcgcggggcac

SEQ ID NO: 1489033 - RNA, 19 nt, Artificial Sequence
  Description of Artificial Sequence: Synthetic oligonucleotide
gcgcaccgcgauguuguug

SEQ ID NO: 1489034 - RNA, 19 nt, Artificial Sequence
  Description of Artificial Sequence: Synthetic oligonucleotide
gcgccgcaucuuguacucg

SEQ ID NO: 1489035 - RNA, 19 nt, Artificial Sequence
  Description of Artificial Sequence: Synthetic oligonucleotide
ggugcgcgcgcgcgcgcgc

SEQ ID NO: 1489036 - RNA, 19 nt, Artificial Sequence
  Description of Artificial Sequence: Synthetic oligonucleotide
gacgcacggugcccacggu

SEQ ID NO: 1489037 - RNA, 19 nt, Artificial Sequence
  Description of Artificial Sequence: Synthetic oligonucleotide
gcgcuagcagugacccgcc

SEQ ID NO: 1489038 - RNA, 19 nt, Artificial Sequence
  Description of Artificial Sequence: Synthetic oligonucleotide
cccgcgaagcaggcagcgg

SEQ ID NO: 1489039 - RNA, 19 nt, Artificial Sequence
  Description of Artificial Sequence: Synthetic oligonucleotide
cguuugauccggauugcau

SEQ ID NO: 1489040 - RNA, 19 nt, Artificial Sequence
  Description of Artificial Sequence: Synthetic oligonucleotide
gccuuggcgcccgcgcgcc

SEQ ID NO: 1489041 - RNA, 19 nt, Artificial Sequence
  Description of Artificial Sequence: Synthetic oligonucleotide
gcgcgcagggcgaacggga

SEQ ID NO: 1489042 - RNA, 19 nt, Artificial Sequence
  Description of Artificial Sequence: Synthetic oligonucleotide
cggguucgaagcccggcuc

SEQ ID NO: 1489043 - RNA, 19 nt, Artificial Sequence
  Description of Artificial Sequence: Synthetic oligonucleotide
gcgggcgcgucguccgcgc

SEQ ID NO: 1489044 - RNA, 19 nt, Artificial Sequence
  Description of Artificial Sequence: Synthetic oligonucleotide
cggcgcgcuagcagugacc

SEQ ID NO: 1489045 - RNA, 19 nt, Artificial Sequence
  Description of Artificial Sequence: Synthetic oligonucleotide
cgcccgaggcucacguaac

SEQ ID NO: 1489046 - RNA, 19 nt, Artificial Sequence
  Description of Artificial Sequence: Synthetic oligonucleotide
ccggcgcgcuagcagugac

SEQ ID NO: 1489047 - RNA, 19 nt, Artificial Sequence
  Description of Artificial Sequence: Synthetic oligonucleotide
cguccgcgcgcuugcaguc

SEQ ID NO: 1489048 - RNA, 19 nt, Artificial Sequence
  Description of Artificial Sequence: Synthetic oligonucleotide
gcggcgcggccuuggcgcc

SEQ ID NO: 1489049 - RNA, 19 nt, Artificial Sequence
  Description of Artificial Sequence: Synthetic oligonucleotide
cgcuagcagugacccgccg

SEQ ID NO: 1489050 - RNA, 19 nt, Artificial Sequence
  Description of Artificial Sequence: Synthetic oligonucleotide
gccggcuuggcgccguagu

SEQ ID NO: 1489051 - RNA, 19 nt, Artificial Sequence
  Description of Artificial Sequence: Synthetic oligonucleotide
ccgggcgggcuggacgacg

SEQ ID NO: 1489052 - RNA, 19 nt, Artificial Sequence
  Description of Artificial Sequence: Synthetic oligonucleotide
ccgcggguucgaagcccgg

SEQ ID NO: 1489053 - RNA, 19 nt, Artificial Sequence
  Description of Artificial Sequence: Synthetic oligonucleotide
ccccggcgcgcuagcagug

SEQ ID NO: 1489054 - RNA, 19 nt, Artificial Sequence
  Description of Artificial Sequence: Synthetic oligonucleotide
gguaggcgcgcagggcgaa

SEQ ID NO: 1489055 - RNA, 19 nt, Artificial Sequence
  Description of Artificial Sequence: Synthetic oligonucleotide
ccgcgauguuguugcgcuc

SEQ ID NO: 1489056 - RNA, 19 nt, Artificial Sequence
  Description of Artificial Sequence: Synthetic oligonucleotide
gcgcucgugcucgccgaug

SEQ ID NO: 1489057 - RNA, 19 nt, Artificial Sequence
  Description of Artificial Sequence: Synthetic oligonucleotide
cugaacccgggcgcgcggu

SEQ ID NO: 1489058 - RNA, 19 nt, Artificial Sequence
  Description of Artificial Sequence: Synthetic oligonucleotide
gcccgaggcucacguaacu

SEQ ID NO: 1489059 - RNA, 19 nt, Artificial Sequence
  Description of Artificial Sequence: Synthetic oligonucleotide
gcccgcgcgcccgaggcuc

SEQ ID NO: 1489060 - RNA, 19 nt, Artificial Sequence
  Description of Artificial Sequence: Synthetic oligonucleotide
gcgcuugcaguccgcgggu

SEQ ID NO: 1489061 - RNA, 19 nt, Artificial Sequence
  Description of Artificial Sequence: Synthetic oligonucleotide
gggcgggcuggacgacgac

SEQ ID NO: 1489062 - RNA, 19 nt, Artificial Sequence
  Description of Artificial Sequence: Synthetic oligonucleotide
cgcgacagcugcuccaccu

SEQ ID NO: 1489063 - RNA, 19 nt, Artificial Sequence
  Description of Artificial Sequence: Synthetic oligonucleotide
cgcgggcgcggcgaagucc

SEQ ID NO: 1489064 - RNA, 19 nt, Artificial Sequence
  Description of Artificial Sequence: Synthetic oligonucleotide
cgcgcggugcaggugcgug

SEQ ID NO: 1489065 - RNA, 19 nt, Artificial Sequence
  Description of Artificial Sequence: Synthetic oligonucleotide
gcgucgccugguagcccag

SEQ ID NO: 1489066 - RNA, 19 nt, Artificial Sequence
  Description of Artificial Sequence: Synthetic oligonucleotide
ccgauggcgcgcucgugcu

SEQ ID NO: 1489067 - RNA, 19 nt, Artificial Sequence
  Description of Artificial Sequence: Synthetic oligonucleotide
cgucgccugguagcccagg

SEQ ID NO: 1489068 - RNA, 19 nt, Artificial Sequence
  Description of Artificial Sequence: Synthetic oligonucleotide
ccuuggcgcccgcgcgccc

SEQ ID NO: 1489069 - RNA, 19 nt, Artificial Sequence
  Description of Artificial Sequence: Synthetic oligonucleotide
ggcgcgggcgcggcgaagu

SEQ ID NO: 1489070 - RNA, 19 nt, Artificial Sequence
  Description of Artificial Sequence: Synthetic oligonucleotide
gcggcuccagguaggggcu

SEQ ID NO: 1489071 - RNA, 19 nt, Artificial Sequence
  Description of Artificial Sequence: Synthetic oligonucleotide
cgccgcaucuuguacucgu

SEQ ID NO: 1489072 - RNA, 19 nt, Artificial Sequence
  Description of Artificial Sequence: Synthetic oligonucleotide
gcgcgcgcgcgcgcgcgcg

SEQ ID NO: 1489073 - RNA, 19 nt, Artificial Sequence
  Description of Artificial Sequence: Synthetic oligonucleotide
ggccggcggccccgcgaag

SEQ ID NO: 1489074 - RNA, 19 nt, Artificial Sequence
  Description of Artificial Sequence: Synthetic oligonucleotide
cgauggcgcgcucgugcuc

SEQ ID NO: 1489075 - RNA, 19 nt, Artificial Sequence
  Description of Artificial Sequence: Synthetic oligonucleotide
ggcgcgucguccgcgcgcu

SEQ ID NO: 1489076 - RNA, 19 nt, Artificial Sequence
  Description of Artificial Sequence: Synthetic oligonucleotide
gcgcgcggcgcggcgcggg

SEQ ID NO: 1489077 - RNA, 19 nt, Artificial Sequence
  Description of Artificial Sequence: Synthetic oligonucleotide
gcgcgcgcgcgcgcgcggg

SEQ ID NO: 1489078 - RNA, 19 nt, Artificial Sequence
  Description of Artificial Sequence: Synthetic oligonucleotide
gcucgccgauggccggcuc

SEQ ID NO: 1489079 - RNA, 19 nt, Artificial Sequence
  Description of Artificial Sequence: Synthetic oligonucleotide
ccggcggccccgcgaagca

SEQ ID NO: 1489080 - RNA, 19 nt, Artificial Sequence
  Description of Artificial Sequence: Synthetic oligonucleotide
gcuuggcgccguagucguc

SEQ ID NO: 1489081 - RNA, 19 nt, Artificial Sequence
  Description of Artificial Sequence: Synthetic oligonucleotide
gcgggcgcgagcggcucca

SEQ ID NO: 1489082 - RNA, 19 nt, Artificial Sequence
  Description of Artificial Sequence: Synthetic oligonucleotide
cggggcacgcucggugcgc

SEQ ID NO: 1489083 - RNA, 19 nt, Artificial Sequence
  Description of Artificial Sequence: Synthetic oligonucleotide
ggcgggaggcaugcugcgu

SEQ ID NO: 1489084 - RNA, 19 nt, Artificial Sequence
  Description of Artificial Sequence: Synthetic oligonucleotide
cggcgugccgggcgggcug

SEQ ID NO: 1489085 - RNA, 19 nt, Artificial Sequence
  Description of Artificial Sequence: Synthetic oligonucleotide
gcgcgggcgcggcgaaguc

SEQ ID NO: 1489086 - RNA, 19 nt, Artificial Sequence
  Description of Artificial Sequence: Synthetic oligonucleotide
cgccuugagcgcggcgggc

SEQ ID NO: 1489087 - RNA, 19 nt, Artificial Sequence
  Description of Artificial Sequence: Synthetic oligonucleotide
ccgcugugucccggauccc

SEQ ID NO: 1489088 - RNA, 19 nt, Artificial Sequence
  Description of Artificial Sequence: Synthetic oligonucleotide
cggugcgcgcgcgcgcgcg

SEQ ID NO: 1489089 - RNA, 19 nt, Artificial Sequence
  Description of Artificial Sequence: Synthetic oligonucleotide
ggcgcgcggcgcggcgcgg

SEQ ID NO: 1489090 - RNA, 19 nt, Artificial Sequence
  Description of Artificial Sequence: Synthetic oligonucleotide
cgggcgcgucguccgcgcg

SEQ ID NO: 1489091 - RNA, 19 nt, Artificial Sequence
  Description of Artificial Sequence: Synthetic oligonucleotide
gcgcgcgcgcgcgcggggc

SEQ ID NO: 1489092 - RNA, 19 nt, Artificial Sequence
  Description of Artificial Sequence: Synthetic oligonucleotide
gcgcgcgcgcgcggggcag

SEQ ID NO: 1489093 - RNA, 19 nt, Artificial Sequence
  Description of Artificial Sequence: Synthetic oligonucleotide
gccgcucguucucggccgu

SEQ ID NO: 1489094 - RNA, 19 nt, Artificial Sequence
  Description of Artificial Sequence: Synthetic oligonucleotide
gcgcucagccacguuugau

SEQ ID NO: 1489095 - RNA, 19 nt, Artificial Sequence
  Description of Artificial Sequence: Synthetic oligonucleotide
gggcgcgggcgcggcgaag

SEQ ID NO: 1489096 - RNA, 19 nt, Artificial Sequence
  Description of Artificial Sequence: Synthetic oligonucleotide
cgcgcucagccacguuuga

SEQ ID NO: 1489097 - RNA, 19 nt, Artificial Sequence
  Description of Artificial Sequence: Synthetic oligonucleotide
cccggcgcgcuagcaguga

SEQ ID NO: 1489098 - RNA, 19 nt, Artificial Sequence
  Description of Artificial Sequence: Synthetic oligonucleotide
cgccguagucgucggcgaa

SEQ ID NO: 1489099 - RNA, 19 nt, Artificial Sequence
  Description of Artificial Sequence: Synthetic oligonucleotide
cgcgcgcgcgcgcgcgggg

SEQ ID NO: 1489100 - RNA, 19 nt, Artificial Sequence
  Description of Artificial Sequence: Synthetic oligonucleotide
cgggcucguaguagaaguu

SEQ ID NO: 1489101 - RNA, 19 nt, Artificial Sequence
  Description of Artificial Sequence: Synthetic oligonucleotide
gccgggcgggcuggacgac

SEQ ID NO: 1489102 - RNA, 19 nt, Artificial Sequence
  Description of Artificial Sequence: Synthetic oligonucleotide
cgcgcgcgcgcgcgcgcgg

SEQ ID NO: 1489103 - RNA, 19 nt, Artificial Sequence
  Description of Artificial Sequence: Synthetic oligonucleotide
cgcgcgcgcgcggggcagg

SEQ ID NO: 1489104 - RNA, 19 nt, Artificial Sequence
  Description of Artificial Sequence: Synthetic oligonucleotide
cgaagcccggcuccgccuu

SEQ ID NO: 1489105 - RNA, 19 nt, Artificial Sequence
  Description of Artificial Sequence: Synthetic oligonucleotide
cgcucgcgccgcaucuugu

SEQ ID NO: 1489106 - RNA, 19 nt, Artificial Sequence
  Description of Artificial Sequence: Synthetic oligonucleotide
cgcucggcgucgccuggua

SEQ ID NO: 1489107 - RNA, 19 nt, Artificial Sequence
  Description of Artificial Sequence: Synthetic oligonucleotide
cgucggcggggcucggcgu

SEQ ID NO: 1489108 - RNA, 19 nt, Artificial Sequence
  Description of Artificial Sequence: Synthetic oligonucleotide
cgcgcgcgcgcgcggggca

SEQ ID NO: 1489109 - RNA, 19 nt, Artificial Sequence
  Description of Artificial Sequence: Synthetic oligonucleotide
gggccgccuuggccccgua

SEQ ID NO: 1489110 - RNA, 19 nt, Artificial Sequence
  Description of Artificial Sequence: Synthetic oligonucleotide
cgcuugcaguccgcggguu

SEQ ID NO: 1489111 - RNA, 19 nt, Artificial Sequence
  Description of Artificial Sequence: Synthetic oligonucleotide
uuuacuuucaaaaggauga

SEQ ID NO: 1489112 - RNA, 19 nt, Artificial Sequence
  Description of Artificial Sequence: Synthetic oligonucleotide
aguaauuucaucuuacauc

SEQ ID NO: 1489113 - RNA, 19 nt, Artificial Sequence
  Description of Artificial Sequence: Synthetic oligonucleotide
aaugcuauggcgcuugaac

SEQ ID NO: 1489114 - RNA, 19 nt, Artificial Sequence
  Description of Artificial Sequence: Synthetic oligonucleotide
aaguuugacguuuaaaacu

SEQ ID NO: 1489115 - RNA, 19 nt, Artificial Sequence
  Description of Artificial Sequence: Synthetic oligonucleotide
aauugcaaugcuauggcgc

SEQ ID NO: 1489116 - RNA, 19 nt, Artificial Sequence
  Description of Artificial Sequence: Synthetic oligonucleotide
aagugcuucacuuucuggg

SEQ ID NO: 1489117 - RNA, 19 nt, Artificial Sequence
  Description of Artificial Sequence: Synthetic oligonucleotide
uguagcaaaccacuugucg

SEQ ID NO: 1489118 - RNA, 19 nt, Artificial Sequence
  Description of Artificial Sequence: Synthetic oligonucleotide
acaacaaaucugaaaaugc

SEQ ID NO: 1489119 - RNA, 19 nt, Artificial Sequence
  Description of Artificial Sequence: Synthetic oligonucleotide
ucuucuaaggaauccaggc

SEQ ID NO: 1489120 - RNA, 19 nt, Artificial Sequence
  Description of Artificial Sequence: Synthetic oligonucleotide
uuuuacuacuuucuguagc

SEQ ID NO: 1489121 - RNA, 19 nt, Artificial Sequence
  Description of Artificial Sequence: Synthetic oligonucleotide
ucauccuucgaacacaaga

SEQ ID NO: 1489122 - RNA, 19 nt, Artificial Sequence
  Description of Artificial Sequence: Synthetic oligonucleotide
ucuucgguagacgagacgg

SEQ ID NO: 1489123 - RNA, 19 nt, Artificial Sequence
  Description of Artificial Sequence: Synthetic oligonucleotide
ucgaacacaagaugcaccg

SEQ ID NO: 1489124 - RNA, 19 nt, Artificial Sequence
  Description of Artificial Sequence: Synthetic oligonucleotide
acaaguuugacguuuaaaa

SEQ ID NO: 1489125 - RNA, 19 nt, Artificial Sequence
  Description of Artificial Sequence: Synthetic oligonucleotide
agaaaugucaccaaccgag

SEQ ID NO: 1489126 - RNA, 19 nt, Artificial Sequence
  Description of Artificial Sequence: Synthetic oligonucleotide
aagaucgacgacucccugc

SEQ ID NO: 1489127 - RNA, 19 nt, Artificial Sequence
  Description of Artificial Sequence: Synthetic oligonucleotide
aaaauacugacaacggcuc

SEQ ID NO: 1489128 - RNA, 19 nt, Artificial Sequence
  Description of Artificial Sequence: Synthetic oligonucleotide
aacggcucaacauuuuaag

SEQ ID NO: 1489129 - RNA, 19 nt, Artificial Sequence
  Description of Artificial Sequence: Synthetic oligonucleotide
uaauuguccaucagaaaug

SEQ ID NO: 1489130 - RNA, 19 nt, Artificial Sequence
  Description of Artificial Sequence: Synthetic oligonucleotide
aucacaauuggccucacug

SEQ ID NO: 1489131 - RNA, 19 nt, Artificial Sequence
  Description of Artificial Sequence: Synthetic oligonucleotide
aaaucuguagaggugccgg

SEQ ID NO: 1489132 - RNA, 19 nt, Artificial Sequence
  Description of Artificial Sequence: Synthetic oligonucleotide
uggaaaggcuuccucagcg

SEQ ID NO: 1489133 - RNA, 19 nt, Artificial Sequence
  Description of Artificial Sequence: Synthetic oligonucleotide
gaacacaagaugcaccggg

SEQ ID NO: 1489134 - RNA, 19 nt, Artificial Sequence
  Description of Artificial Sequence: Synthetic oligonucleotide
ucgcagaugagccacacgc

SEQ ID NO: 1489135 - RNA, 19 nt, Artificial Sequence
  Description of Artificial Sequence: Synthetic oligonucleotide
uccuucgaacacaagaugc

SEQ ID NO: 1489136 - RNA, 19 nt, Artificial Sequence
  Description of Artificial Sequence: Synthetic oligonucleotide
uuaauaacaucucuuugau

SEQ ID NO: 1489137 - RNA, 19 nt, Artificial Sequence
  Description of Artificial Sequence: Synthetic oligonucleotide
augcuauggcgcuugaacc

SEQ ID NO: 1489138 - RNA, 19 nt, Artificial Sequence
  Description of Artificial Sequence: Synthetic oligonucleotide
aaagagaagugcuucacuu

SEQ ID NO: 1489139 - RNA, 19 nt, Artificial Sequence
  Description of Artificial Sequence: Synthetic oligonucleotide
uguuuaagcagauccuugc

SEQ ID NO: 1489140 - RNA, 19 nt, Artificial Sequence
  Description of Artificial Sequence: Synthetic oligonucleotide
acuaauuugacggcaaaag

SEQ ID NO: 1489141 - RNA, 19 nt, Artificial Sequence
  Description of Artificial Sequence: Synthetic oligonucleotide
uuuaagcagauccuugcca

SEQ ID NO: 1489142 - RNA, 19 nt, Artificial Sequence
  Description of Artificial Sequence: Synthetic oligonucleotide
ucaccaaccgagcagcuag

SEQ ID NO: 1489143 - RNA, 19 nt, Artificial Sequence
  Description of Artificial Sequence: Synthetic oligonucleotide
aacgucugaaccaucagag

SEQ ID NO: 1489144 - RNA, 19 nt, Artificial Sequence
  Description of Artificial Sequence: Synthetic oligonucleotide
uugucguccaagaucgacg

SEQ ID NO: 1489145 - RNA, 19 nt, Artificial Sequence
  Description of Artificial Sequence: Synthetic oligonucleotide
ucacaauuggccucacugg

SEQ ID NO: 1489146 - RNA, 19 nt, Artificial Sequence
  Description of Artificial Sequence: Synthetic oligonucleotide
uuugacguuuaaaacuucu

SEQ ID NO: 1489147 - RNA, 19 nt, Artificial Sequence
  Description of Artificial Sequence: Synthetic oligonucleotide
ugacguuuaaaacuucuuc

SEQ ID NO: 1489148 - RNA, 19 nt, Artificial Sequence
  Description of Artificial Sequence: Synthetic oligonucleotide
uuccucaggacuaauuuga

SEQ ID NO: 1489149 - RNA, 19 nt, Artificial Sequence
  Description of Artificial Sequence: Synthetic oligonucleotide
aacagcugcgguuugggcu

SEQ ID NO: 1489150 - RNA, 19 nt, Artificial Sequence
  Description of Artificial Sequence: Synthetic oligonucleotide
aguaguuuaugacuuggca

SEQ ID NO: 1489151 - RNA, 19 nt, Artificial Sequence
  Description of Artificial Sequence: Synthetic oligonucleotide
aaggagacaacaaaucuga

SEQ ID NO: 1489152 - RNA, 19 nt, Artificial Sequence
  Description of Artificial Sequence: Synthetic oligonucleotide
aaacgucugaaccaucaga

SEQ ID NO: 1489153 - RNA, 19 nt, Artificial Sequence
  Description of Artificial Sequence: Synthetic oligonucleotide
uucaggguaagauuucuga

SEQ ID NO: 1489154 - RNA, 19 nt, Artificial Sequence
  Description of Artificial Sequence: Synthetic oligonucleotide
ugaggucucuaaaacucgg

SEQ ID NO: 1489155 - RNA, 19 nt, Artificial Sequence
  Description of Artificial Sequence: Synthetic oligonucleotide
caaguuugacguuuaaaac

SEQ ID NO: 1489156 - RNA, 19 nt, Artificial Sequence
  Description of Artificial Sequence: Synthetic oligonucleotide
ucaaucacgugauucuuca

SEQ ID NO: 1489157 - RNA, 19 nt, Artificial Sequence
  Description of Artificial Sequence: Synthetic oligonucleotide
ucaguaguuuaugacuugg

SEQ ID NO: 1489158 - RNA, 19 nt, Artificial Sequence
  Description of Artificial Sequence: Synthetic oligonucleotide
aaaacgucugaaccaucag

SEQ ID NO: 1489159 - RNA, 19 nt, Artificial Sequence
  Description of Artificial Sequence: Synthetic oligonucleotide
acuacuuucuguagcaaac

SEQ ID NO: 1489160 - RNA, 19 nt, Artificial Sequence
  Description of Artificial Sequence: Synthetic oligonucleotide
uuucaguaguuuaugacuu

SEQ ID NO: 1489161 - RNA, 19 nt, Artificial Sequence
  Description of Artificial Sequence: Synthetic oligonucleotide
uucgaacacaagaugcacc

SEQ ID NO: 1489162 - RNA, 19 nt, Artificial Sequence
  Description of Artificial Sequence: Synthetic oligonucleotide
aauuugacggcaaaaggaa

SEQ ID NO: 1489163 - RNA, 19 nt, Artificial Sequence
  Description of Artificial Sequence: Synthetic oligonucleotide
uucuguagcaaaccacuug

SEQ ID NO: 1489164 - RNA, 19 nt, Artificial Sequence
  Description of Artificial Sequence: Synthetic oligonucleotide
acacuauacacauuaugga

SEQ ID NO: 1489165 - RNA, 19 nt, Artificial Sequence
  Description of Artificial Sequence: Synthetic oligonucleotide
gaguugacaaguuugacgu

SEQ ID NO: 1489166 - RNA, 19 nt, Artificial Sequence
  Description of Artificial Sequence: Synthetic oligonucleotide
uuuuaagagucagaucacc

SEQ ID NO: 1489167 - RNA, 19 nt, Artificial Sequence
  Description of Artificial Sequence: Synthetic oligonucleotide
aaaugucaccaaccgagca

SEQ ID NO: 1489168 - RNA, 19 nt, Artificial Sequence
  Description of Artificial Sequence: Synthetic oligonucleotide
uaguuuaugacuuggcauu

SEQ ID NO: 1489169 - RNA, 19 nt, Artificial Sequence
  Description of Artificial Sequence: Synthetic oligonucleotide
auuuuacuacuuucuguag

SEQ ID NO: 1489170 - RNA, 19 nt, Artificial Sequence
  Description of Artificial Sequence: Synthetic oligonucleotide
uccaagaucgacgacuccc

SEQ ID NO: 1489171 - RNA, 19 nt, Artificial Sequence
  Description of Artificial Sequence: Synthetic oligonucleotide
uuaagcagauccuugccau

SEQ ID NO: 1489172 - RNA, 19 nt, Artificial Sequence
  Description of Artificial Sequence: Synthetic oligonucleotide
caacgugacauccauauca

SEQ ID NO: 1489173 - RNA, 19 nt, Artificial Sequence
  Description of Artificial Sequence: Synthetic oligonucleotide
ugaaaugguuggaaaggcu

SEQ ID NO: 1489174 - RNA, 19 nt, Artificial Sequence
  Description of Artificial Sequence: Synthetic oligonucleotide
ugacuuggcauucuucaac

SEQ ID NO: 1489175 - RNA, 19 nt, Artificial Sequence
  Description of Artificial Sequence: Synthetic oligonucleotide
cuagcaacucaucuaaguc

SEQ ID NO: 1489176 - RNA, 19 nt, Artificial Sequence
  Description of Artificial Sequence: Synthetic oligonucleotide
uagacgagacggcaagcgg

SEQ ID NO: 1489177 - RNA, 19 nt, Artificial Sequence
  Description of Artificial Sequence: Synthetic oligonucleotide
gaaguaauuucaucuuaca

SEQ ID NO: 1489178 - RNA, 19 nt, Artificial Sequence
  Description of Artificial Sequence: Synthetic oligonucleotide
accaucagagugcgggugc

SEQ ID NO: 1489179 - RNA, 19 nt, Artificial Sequence
  Description of Artificial Sequence: Synthetic oligonucleotide
gacguuuaaaacuucuucu

SEQ ID NO: 1489180 - RNA, 19 nt, Artificial Sequence
  Description of Artificial Sequence: Synthetic oligonucleotide
gacucuucgcagaugagcc

SEQ ID NO: 1489181 - RNA, 19 nt, Artificial Sequence
  Description of Artificial Sequence: Synthetic oligonucleotide
auccauaucagcuccugga

SEQ ID NO: 1489182 - RNA, 19 nt, Artificial Sequence
  Description of Artificial Sequence: Synthetic oligonucleotide
aacucaucuaagucuacuu

SEQ ID NO: 1489183 - RNA, 19 nt, Artificial Sequence
  Description of Artificial Sequence: Synthetic oligonucleotide
cuuuggauauggcuucagg

SEQ ID NO: 1489184 - RNA, 19 nt, Artificial Sequence
  Description of Artificial Sequence: Synthetic oligonucleotide
uucucugaaacuccauuau

SEQ ID NO: 1489185 - RNA, 19 nt, Artificial Sequence
  Description of Artificial Sequence: Synthetic oligonucleotide
auuuuaagagucagaucac

SEQ ID NO: 1489186 - RNA, 19 nt, Artificial Sequence
  Description of Artificial Sequence: Synthetic oligonucleotide
accgggaaaacgucugaac

SEQ ID NO: 1489187 - RNA, 19 nt, Artificial Sequence
  Description of Artificial Sequence: Synthetic oligonucleotide
gguaggaaaucguuccugg

SEQ ID NO: 1489188 - RNA, 19 nt, Artificial Sequence
  Description of Artificial Sequence: Synthetic oligonucleotide
cacucuggaaauuuaauaa

SEQ ID NO: 1489189 - RNA, 19 nt, Artificial Sequence
  Description of Artificial Sequence: Synthetic oligonucleotide
guuccugguagacuucagg

SEQ ID NO: 1489190 - RNA, 19 nt, Artificial Sequence
  Description of Artificial Sequence: Synthetic oligonucleotide
acugacaacggcucaacau

SEQ ID NO: 1489191 - RNA, 19 nt, Artificial Sequence
  Description of Artificial Sequence: Synthetic oligonucleotide
ugcuauggcgcuugaacca

SEQ ID NO: 1489192 - RNA, 19 nt, Artificial Sequence
  Description of Artificial Sequence: Synthetic oligonucleotide
ugucguccaagaucgacga

SEQ ID NO: 1489193 - RNA, 19 nt, Artificial Sequence
  Description of Artificial Sequence: Synthetic oligonucleotide
gaaaacgucugaaccauca

SEQ ID NO: 1489194 - RNA, 19 nt, Artificial Sequence
  Description of Artificial Sequence: Synthetic oligonucleotide
aagaugcaccgggaaaacg

SEQ ID NO: 1489195 - RNA, 19 nt, Artificial Sequence
  Description of Artificial Sequence: Synthetic oligonucleotide
aauacugacaacggcucaa

SEQ ID NO: 1489196 - RNA, 19 nt, Artificial Sequence
  Description of Artificial Sequence: Synthetic oligonucleotide
gaaaucuguagaggugccg

SEQ ID NO: 1489197 - RNA, 19 nt, Artificial Sequence
  Description of Artificial Sequence: Synthetic oligonucleotide
agaucgacgacucccugcu

SEQ ID NO: 1489198 - RNA, 19 nt, Artificial Sequence
  Description of Artificial Sequence: Synthetic oligonucleotide
uuaugacuuggcauucuuc

SEQ ID NO: 1489199 - RNA, 19 nt, Artificial Sequence
  Description of Artificial Sequence: Synthetic oligonucleotide
uucaguaguuuaugacuug

SEQ ID NO: 1489200 - RNA, 19 nt, Artificial Sequence
  Description of Artificial Sequence: Synthetic oligonucleotide
aguuuaugacuuggcauuc

SEQ ID NO: 1489201 - RNA, 19 nt, Artificial Sequence
  Description of Artificial Sequence: Synthetic oligonucleotide
auauucagaaaggaaguaa

SEQ ID NO: 1489202 - RNA, 19 nt, Artificial Sequence
  Description of Artificial Sequence: Synthetic oligonucleotide
ucuugugaagugccuggug

SEQ ID NO: 1489203 - RNA, 19 nt, Artificial Sequence
  Description of Artificial Sequence: Synthetic oligonucleotide
guagacgagacggcaagcg

SEQ ID NO: 1489204 - RNA, 19 nt, Artificial Sequence
  Description of Artificial Sequence: Synthetic oligonucleotide
uuuaugacuuggcauucuu

SEQ ID NO: 1489205 - RNA, 19 nt, Artificial Sequence
  Description of Artificial Sequence: Synthetic oligonucleotide
ccgguugucuucaaaaucc

SEQ ID NO: 1489206 - RNA, 19 nt, Artificial Sequence
  Description of Artificial Sequence: Synthetic oligonucleotide
ucucuuugauacaggggcu

SEQ ID NO: 1489207 - RNA, 19 nt, Artificial Sequence
  Description of Artificial Sequence: Synthetic oligonucleotide
uguuguagacuuccagauc

SEQ ID NO: 1489208 - RNA, 19 nt, Artificial Sequence
  Description of Artificial Sequence: Synthetic oligonucleotide
aaucuguagaggugccggu

SEQ ID NO: 1489209 - RNA, 19 nt, Artificial Sequence
  Description of Artificial Sequence: Synthetic oligonucleotide
aucgacgacucccugcuug

SEQ ID NO: 1489210 - RNA, 19 nt, Artificial Sequence
  Description of Artificial Sequence: Synthetic oligonucleotide
aaaucguuccugguagacu

SEQ ID NO: 1489211 - RNA, 19 nt, Artificial Sequence
  Description of Artificial Sequence: Synthetic oligonucleotide
gcuccugagagccauacgc

SEQ ID NO: 1489212 - RNA, 19 nt, Artificial Sequence
  Description of Artificial Sequence: Synthetic oligonucleotide
ugcgguuugggcuuggguu

SEQ ID NO: 1489213 - RNA, 19 nt, Artificial Sequence
  Description of Artificial Sequence: Synthetic oligonucleotide
aaaggaaggcgcagacaac

SEQ ID NO: 1489214 - RNA, 19 nt, Artificial Sequence
  Description of Artificial Sequence: Synthetic oligonucleotide
uauauucagaaaggaagua

SEQ ID NO: 1489215 - RNA, 19 nt, Artificial Sequence
  Description of Artificial Sequence: Synthetic oligonucleotide
auccuucgaacacaagaug

SEQ ID NO: 1489216 - RNA, 19 nt, Artificial Sequence
  Description of Artificial Sequence: Synthetic oligonucleotide
uagcaaaccacuugucguc

SEQ ID NO: 1489217 - RNA, 19 nt, Artificial Sequence
  Description of Artificial Sequence: Synthetic oligonucleotide
caucucagaauucaucaca

SEQ ID NO: 1489218 - RNA, 19 nt, Artificial Sequence
  Description of Artificial Sequence: Synthetic oligonucleotide
acgugacauccauaucagc

SEQ ID NO: 1489219 - RNA, 19 nt, Artificial Sequence
  Description of Artificial Sequence: Synthetic oligonucleotide
gugauaauguuguagacuu

SEQ ID NO: 1489220 - RNA, 19 nt, Artificial Sequence
  Description of Artificial Sequence: Synthetic oligonucleotide
aguuugacguuuaaaacuu

SEQ ID NO: 1489221 - RNA, 19 nt, Artificial Sequence
  Description of Artificial Sequence: Synthetic oligonucleotide
cacacgcucuucuauggag

SEQ ID NO: 1489222 - RNA, 19 nt, Artificial Sequence
  Description of Artificial Sequence: Synthetic oligonucleotide
agacgagacggcaagcggg

SEQ ID NO: 1489223 - RNA, 19 nt, Artificial Sequence
  Description of Artificial Sequence: Synthetic oligonucleotide
caguaguuuaugacuuggc

SEQ ID NO: 1489224 - RNA, 19 nt, Artificial Sequence
  Description of Artificial Sequence: Synthetic oligonucleotide
cucuaaaacucggucacug

SEQ ID NO: 1489225 - RNA, 19 nt, Artificial Sequence
  Description of Artificial Sequence: Synthetic oligonucleotide
uucgcagaugagccacacg

SEQ ID NO: 1489226 - RNA, 19 nt, Artificial Sequence
  Description of Artificial Sequence: Synthetic oligonucleotide
uguuggagaguuuggcauc

SEQ ID NO: 1489227 - RNA, 19 nt, Artificial Sequence
  Description of Artificial Sequence: Synthetic oligonucleotide
gagugcgggugccaaagcc

SEQ ID NO: 1489228 - RNA, 19 nt, Artificial Sequence
  Description of Artificial Sequence: Synthetic oligonucleotide
ucucugaaacuccauuauu

SEQ ID NO: 1489229 - RNA, 19 nt, Artificial Sequence
  Description of Artificial Sequence: Synthetic oligonucleotide
aaggcgcagacaacgugac

SEQ ID NO: 1489230 - RNA, 19 nt, Artificial Sequence
  Description of Artificial Sequence: Synthetic oligonucleotide
caccucuccaauugcaaug

SEQ ID NO: 1489231 - RNA, 19 nt, Artificial Sequence
  Description of Artificial Sequence: Synthetic oligonucleotide
gacucaaaacugucucuac

SEQ ID NO: 1489232 - RNA, 19 nt, Artificial Sequence
  Description of Artificial Sequence: Synthetic oligonucleotide
ugcuucaauugccauuuua

SEQ ID NO: 1489233 - RNA, 19 nt, Artificial Sequence
  Description of Artificial Sequence: Synthetic oligonucleotide
gaaaucguuccugguagac

SEQ ID NO: 1489234 - RNA, 19 nt, Artificial Sequence
  Description of Artificial Sequence: Synthetic oligonucleotide
acggcucaacauuuuaaga

SEQ ID NO: 1489235 - RNA, 19 nt, Artificial Sequence
  Description of Artificial Sequence: Synthetic oligonucleotide
auacugacaacggcucaac

SEQ ID NO: 1489236 - RNA, 19 nt, Artificial Sequence
  Description of Artificial Sequence: Synthetic oligonucleotide
ugcaaugcuauggcgcuug

SEQ ID NO: 1489237 - RNA, 19 nt, Artificial Sequence
  Description of Artificial Sequence: Synthetic oligonucleotide
agagugcgggugccaaagc

SEQ ID NO: 1489238 - RNA, 19 nt, Artificial Sequence
  Description of Artificial Sequence: Synthetic oligonucleotide
guagcaaaccacuugucgu

SEQ ID NO: 1489239 - RNA, 19 nt, Artificial Sequence
  Description of Artificial Sequence: Synthetic oligonucleotide
uucacuuucugggguagga

SEQ ID NO: 1489240 - RNA, 19 nt, Artificial Sequence
  Description of Artificial Sequence: Synthetic oligonucleotide
ugauaauguuguagacuuc

SEQ ID NO: 1489241 - RNA, 19 nt, Artificial Sequence
  Description of Artificial Sequence: Synthetic oligonucleotide
ggugccaaagccaucacac

SEQ ID NO: 1489242 - RNA, 19 nt, Artificial Sequence
  Description of Artificial Sequence: Synthetic oligonucleotide
gaaggcgcagacaacguga

SEQ ID NO: 1489243 - RNA, 19 nt, Artificial Sequence
  Description of Artificial Sequence: Synthetic oligonucleotide
agcugucuucgguagacga

SEQ ID NO: 1489244 - RNA, 19 nt, Artificial Sequence
  Description of Artificial Sequence: Synthetic oligonucleotide
ugacggcaaaaggaaggcg

SEQ ID NO: 1489245 - RNA, 19 nt, Artificial Sequence
  Description of Artificial Sequence: Synthetic oligonucleotide
aacacaagaugcaccggga

SEQ ID NO: 1489246 - RNA, 19 nt, Artificial Sequence
  Description of Artificial Sequence: Synthetic oligonucleotide
uugaaccacaucucagaau

SEQ ID NO: 1489247 - RNA, 19 nt, Artificial Sequence
  Description of Artificial Sequence: Synthetic oligonucleotide
uucgguagacgagacggca

SEQ ID NO: 1489248 - RNA, 19 nt, Artificial Sequence
  Description of Artificial Sequence: Synthetic oligonucleotide
ggucucuaaaacucgguca

SEQ ID NO: 1489249 - RNA, 19 nt, Artificial Sequence
  Description of Artificial Sequence: Synthetic oligonucleotide
cuucaggguaagauuucug

SEQ ID NO: 1489250 - RNA, 19 nt, Artificial Sequence
  Description of Artificial Sequence: Synthetic oligonucleotide
cuucgaacacaagaugcac

SEQ ID NO: 1489251 - RNA, 19 nt, Artificial Sequence
  Description of Artificial Sequence: Synthetic oligonucleotide
uccucaggacuaauuugac

SEQ ID NO: 1489252 - RNA, 19 nt, Artificial Sequence
  Description of Artificial Sequence: Synthetic oligonucleotide
uuacuuucaaaaggaugaa

SEQ ID NO: 1489253 - RNA, 19 nt, Artificial Sequence
  Description of Artificial Sequence: Synthetic oligonucleotide
uacugacaacggcucaaca

SEQ ID NO: 1489254 - RNA, 19 nt, Artificial Sequence
  Description of Artificial Sequence: Synthetic oligonucleotide
gauauggcuucagggguug

SEQ ID NO: 1489255 - RNA, 19 nt, Artificial Sequence
  Description of Artificial Sequence: Synthetic oligonucleotide
gaucaccugacugauucuc

SEQ ID NO: 1489256 - RNA, 19 nt, Artificial Sequence
  Description of Artificial Sequence: Synthetic oligonucleotide
ucaaauuccucaggacuaa

SEQ ID NO: 1489257 - RNA, 19 nt, Artificial Sequence
  Description of Artificial Sequence: Synthetic oligonucleotide
agcaaggcugccaagggcu

SEQ ID NO: 1489258 - RNA, 19 nt, Artificial Sequence
  Description of Artificial Sequence: Synthetic oligonucleotide
agcgguggcaucucuuugu

SEQ ID NO: 1489259 - RNA, 19 nt, Artificial Sequence
  Description of Artificial Sequence: Synthetic oligonucleotide
agccacacgcucuucuaug

SEQ ID NO: 1489260 - RNA, 19 nt, Artificial Sequence
  Description of Artificial Sequence: Synthetic oligonucleotide
cuugucguccaagaucgac

SEQ ID NO: 1489261 - RNA, 19 nt, Artificial Sequence
  Description of Artificial Sequence: Synthetic oligonucleotide
ugucuucgguagacgagac

SEQ ID NO: 1489262 - RNA, 19 nt, Artificial Sequence
  Description of Artificial Sequence: Synthetic oligonucleotide
ucgacgacucccugcuugc

SEQ ID NO: 1489263 - RNA, 19 nt, Artificial Sequence
  Description of Artificial Sequence: Synthetic oligonucleotide
ccgggaaaacgucugaacc

SEQ ID NO: 1489264 - RNA, 19 nt, Artificial Sequence
  Description of Artificial Sequence: Synthetic oligonucleotide
ugauucucugaaacuccau

SEQ ID NO: 1489265 - RNA, 19 nt, Artificial Sequence
  Description of Artificial Sequence: Synthetic oligonucleotide
cuucgguagacgagacggc

SEQ ID NO: 1489266 - RNA, 19 nt, Artificial Sequence
  Description of Artificial Sequence: Synthetic oligonucleotide
uucauccuucgaacacaag

SEQ ID NO: 1489267 - RNA, 19 nt, Artificial Sequence
  Description of Artificial Sequence: Synthetic oligonucleotide
ucggucagcugucuucggu

SEQ ID NO: 1489268 - RNA, 19 nt, Artificial Sequence
  Description of Artificial Sequence: Synthetic oligonucleotide
gcuugcugacacuauacac

SEQ ID NO: 1489269 - RNA, 19 nt, Artificial Sequence
  Description of Artificial Sequence: Synthetic oligonucleotide
agccauacgcccuuuggua

SEQ ID NO: 1489270 - RNA, 19 nt, Artificial Sequence
  Description of Artificial Sequence: Synthetic oligonucleotide
cggcucaacauuuuaagag

SEQ ID NO: 1489271 - RNA, 19 nt, Artificial Sequence
  Description of Artificial Sequence: Synthetic oligonucleotide
cauaucagcuccuggauau

SEQ ID NO: 1489272 - RNA, 19 nt, Artificial Sequence
  Description of Artificial Sequence: Synthetic oligonucleotide
gacaaguuugacguuuaaa

SEQ ID NO: 1489273 - RNA, 19 nt, Artificial Sequence
  Description of Artificial Sequence: Synthetic oligonucleotide
gucuucgguagacgagacg

SEQ ID NO: 1489274 - RNA, 19 nt, Artificial Sequence
  Description of Artificial Sequence: Synthetic oligonucleotide
aucucagaauucaucacaa

SEQ ID NO: 1489275 - RNA, 19 nt, Artificial Sequence
  Description of Artificial Sequence: Synthetic oligonucleotide
uggacucuucgcagaugag

SEQ ID NO: 1489276 - RNA, 19 nt, Artificial Sequence
  Description of Artificial Sequence: Synthetic oligonucleotide
ucgguagacgagacggcaa

SEQ ID NO: 1489277 - RNA, 19 nt, Artificial Sequence
  Description of Artificial Sequence: Synthetic oligonucleotide
gacgagacggcaagcgggc

SEQ ID NO: 1489278 - RNA, 19 nt, Artificial Sequence
  Description of Artificial Sequence: Synthetic oligonucleotide
gacuaauuugacggcaaaa

SEQ ID NO: 1489279 - RNA, 19 nt, Artificial Sequence
  Description of Artificial Sequence: Synthetic oligonucleotide
acacaagaugcaccgggaa

SEQ ID NO: 1489280 - RNA, 19 nt, Artificial Sequence
  Description of Artificial Sequence: Synthetic oligonucleotide
uguuuucaggaggcagaag

SEQ ID NO: 1489281 - RNA, 19 nt, Artificial Sequence
  Description of Artificial Sequence: Synthetic oligonucleotide
gaaaugguuggaaaggcuu

SEQ ID NO: 1489282 - RNA, 19 nt, Artificial Sequence
  Description of Artificial Sequence: Synthetic oligonucleotide
auuggccucacuggaauau

SEQ ID NO: 1489283 - RNA, 19 nt, Artificial Sequence
  Description of Artificial Sequence: Synthetic oligonucleotide
ugccgguugucuucaaaau

SEQ ID NO: 1489284 - RNA, 19 nt, Artificial Sequence
  Description of Artificial Sequence: Synthetic oligonucleotide
acacauuauggaugaugaa

SEQ ID NO: 1489285 - RNA, 19 nt, Artificial Sequence
  Description of Artificial Sequence: Synthetic oligonucleotide
uggcaucucuuuguuuaag

SEQ ID NO: 1489286 - RNA, 19 nt, Artificial Sequence
  Description of Artificial Sequence: Synthetic oligonucleotide
ccucaggacuaauuugacg

SEQ ID NO: 1489287 - RNA, 19 nt, Artificial Sequence
  Description of Artificial Sequence: Synthetic oligonucleotide
acgucugaaccaucagagu

SEQ ID NO: 1489288 - RNA, 19 nt, Artificial Sequence
  Description of Artificial Sequence: Synthetic oligonucleotide
agaucaccugacugauucu

SEQ ID NO: 1489289 - RNA, 19 nt, Artificial Sequence
  Description of Artificial Sequence: Synthetic oligonucleotide
cagagugcgggugccaaag

SEQ ID NO: 1489290 - RNA, 19 nt, Artificial Sequence
  Description of Artificial Sequence: Synthetic oligonucleotide
cagcaaggcugccaagggc

SEQ ID NO: 1489291 - RNA, 19 nt, Artificial Sequence
  Description of Artificial Sequence: Synthetic oligonucleotide
gagacggcaagcgggcacc

SEQ ID NO: 1489292 - RNA, 19 nt, Artificial Sequence
  Description of Artificial Sequence: Synthetic oligonucleotide
ggacucuucgcagaugagc

SEQ ID NO: 1489293 - RNA, 19 nt, Artificial Sequence
  Description of Artificial Sequence: Synthetic oligonucleotide
cauccuucgaacacaagau

SEQ ID NO: 1489294 - RNA, 19 nt, Artificial Sequence
  Description of Artificial Sequence: Synthetic oligonucleotide
ucucuaaaacucggucacu

SEQ ID NO: 1489295 - RNA, 19 nt, Artificial Sequence
  Description of Artificial Sequence: Synthetic oligonucleotide
cuauggaggucugcagggc

SEQ ID NO: 1489296 - RNA, 19 nt, Artificial Sequence
  Description of Artificial Sequence: Synthetic oligonucleotide
cuguagcaaaccacuuguc

SEQ ID NO: 1489297 - RNA, 19 nt, Artificial Sequence
  Description of Artificial Sequence: Synthetic oligonucleotide
ucggucacuguaucacauc

SEQ ID NO: 1489298 - RNA, 19 nt, Artificial Sequence
  Description of Artificial Sequence: Synthetic oligonucleotide
ggaaaggcuuccucagcgc

SEQ ID NO: 1489299 - RNA, 19 nt, Artificial Sequence
  Description of Artificial Sequence: Synthetic oligonucleotide
agaugagccacacgcucuu

SEQ ID NO: 1489300 - RNA, 19 nt, Artificial Sequence
  Description of Artificial Sequence: Synthetic oligonucleotide
gugccgguugucuucaaaa

SEQ ID NO: 1489301 - RNA, 19 nt, Artificial Sequence
  Description of Artificial Sequence: Synthetic oligonucleotide
cugucuucgguagacgaga

SEQ ID NO: 1489302 - RNA, 19 nt, Artificial Sequence
  Description of Artificial Sequence: Synthetic oligonucleotide
ggucacuguaucacauccg

SEQ ID NO: 1489303 - RNA, 19 nt, Artificial Sequence
  Description of Artificial Sequence: Synthetic oligonucleotide
caacggcucaacauuuuaa

SEQ ID NO: 1489304 - RNA, 19 nt, Artificial Sequence
  Description of Artificial Sequence: Synthetic oligonucleotide
cacaagaugcaccgggaaa

SEQ ID NO: 1489305 - RNA, 19 nt, Artificial Sequence
  Description of Artificial Sequence: Synthetic oligonucleotide
ggcucaacauuuuaagagu

SEQ ID NO: 1489306 - RNA, 19 nt, Artificial Sequence
  Description of Artificial Sequence: Synthetic oligonucleotide
cuucacuuucugggguagg

SEQ ID NO: 1489307 - RNA, 19 nt, Artificial Sequence
  Description of Artificial Sequence: Synthetic oligonucleotide
caagaucgacgacucccug

SEQ ID NO: 1489308 - RNA, 19 nt, Artificial Sequence
  Description of Artificial Sequence: Synthetic oligonucleotide
aagcgggcaccucuccaau

SEQ ID NO: 1489309 - RNA, 19 nt, Artificial Sequence
  Description of Artificial Sequence: Synthetic oligonucleotide
aauugccauuuuacuacuu

SEQ ID NO: 1489310 - RNA, 19 nt, Artificial Sequence
  Description of Artificial Sequence: Synthetic oligonucleotide
aguugacaaguuugacguu

SEQ ID NO: 1489311 - RNA, 19 nt, Artificial Sequence
  Description of Artificial Sequence: Synthetic oligonucleotide
cugucucuaccacugaggu

SEQ ID NO: 1489312 - RNA, 19 nt, Artificial Sequence
  Description of Artificial Sequence: Synthetic oligonucleotide
aucaccugacugauucucu

SEQ ID NO: 1489313 - RNA, 19 nt, Artificial Sequence
  Description of Artificial Sequence: Synthetic oligonucleotide
ucagagugcgggugccaaa

SEQ ID NO: 1489314 - RNA, 19 nt, Artificial Sequence
  Description of Artificial Sequence: Synthetic oligonucleotide
caccaaccgagcagcuagc

SEQ ID NO: 1489315 - RNA, 19 nt, Artificial Sequence
  Description of Artificial Sequence: Synthetic oligonucleotide
guugacaaguuugacguuu

SEQ ID NO: 1489316 - RNA, 19 nt, Artificial Sequence
  Description of Artificial Sequence: Synthetic oligonucleotide
ugaccccauuuuccuuuga

SEQ ID NO: 1489317 - RNA, 19 nt, Artificial Sequence
  Description of Artificial Sequence: Synthetic oligonucleotide
guuugacguuuaaaacuuc

SEQ ID NO: 1489318 - RNA, 19 nt, Artificial Sequence
  Description of Artificial Sequence: Synthetic oligonucleotide
cugaaccaucagagugcgg

SEQ ID NO: 1489319 - RNA, 19 nt, Artificial Sequence
  Description of Artificial Sequence: Synthetic oligonucleotide
gccgguugucuucaaaauc

SEQ ID NO: 1489320 - RNA, 19 nt, Artificial Sequence
  Description of Artificial Sequence: Synthetic oligonucleotide
uacgcccuuugguauucaa

SEQ ID NO: 1489321 - RNA, 19 nt, Artificial Sequence
  Description of Artificial Sequence: Synthetic oligonucleotide
gaauccaggccaaggauuu

SEQ ID NO: 1489322 - RNA, 19 nt, Artificial Sequence
  Description of Artificial Sequence: Synthetic oligonucleotide
guaggaaaucguuccuggu

SEQ ID NO: 1489323 - RNA, 19 nt, Artificial Sequence
  Description of Artificial Sequence: Synthetic oligonucleotide
agcuagcaacucaucuaag

SEQ ID NO: 1489324 - RNA, 19 nt, Artificial Sequence
  Description of Artificial Sequence: Synthetic oligonucleotide
ggguaggaaaucguuccug

SEQ ID NO: 1489325 - RNA, 19 nt, Artificial Sequence
  Description of Artificial Sequence: Synthetic oligonucleotide
cugacucaaaacugucucu

SEQ ID NO: 1489326 - RNA, 19 nt, Artificial Sequence
  Description of Artificial Sequence: Synthetic oligonucleotide
ccuucgaacacaagaugca

SEQ ID NO: 1489327 - RNA, 19 nt, Artificial Sequence
  Description of Artificial Sequence: Synthetic oligonucleotide
gcagcuagcaacucaucua

SEQ ID NO: 1489328 - RNA, 19 nt, Artificial Sequence
  Description of Artificial Sequence: Synthetic oligonucleotide
gcgggcaccucuccaauug

SEQ ID NO: 1489329 - RNA, 19 nt, Artificial Sequence
  Description of Artificial Sequence: Synthetic oligonucleotide
gcugucuucgguagacgag

SEQ ID NO: 1489330 - RNA, 19 nt, Artificial Sequence
  Description of Artificial Sequence: Synthetic oligonucleotide
ccccauuuuccuuugaugu

SEQ ID NO: 1489331 - RNA, 19 nt, Artificial Sequence
  Description of Artificial Sequence: Synthetic oligonucleotide
ccacucuggaaauuuaaua

SEQ ID NO: 1489332 - RNA, 19 nt, Artificial Sequence
  Description of Artificial Sequence: Synthetic oligonucleotide
aucuguagaggugccgguu

SEQ ID NO: 1489333 - RNA, 19 nt, Artificial Sequence
  Description of Artificial Sequence: Synthetic oligonucleotide
ggcuccugagagccauacg

SEQ ID NO: 1489334 - RNA, 19 nt, Artificial Sequence
  Description of Artificial Sequence: Synthetic oligonucleotide
cuaagucuacuucauccuu

SEQ ID NO: 1489335 - RNA, 19 nt, Artificial Sequence
  Description of Artificial Sequence: Synthetic oligonucleotide
ccuggauauuuuaucugga

SEQ ID NO: 1489336 - RNA, 19 nt, Artificial Sequence
  Description of Artificial Sequence: Synthetic oligonucleotide
auuccacucuggaaauuua

SEQ ID NO: 1489337 - RNA, 19 nt, Artificial Sequence
  Description of Artificial Sequence: Synthetic oligonucleotide
caaaccacuugucguccaa

SEQ ID NO: 1489338 - RNA, 19 nt, Artificial Sequence
  Description of Artificial Sequence: Synthetic oligonucleotide
gcuauggcgcuugaaccac

SEQ ID NO: 1489339 - RNA, 19 nt, Artificial Sequence
  Description of Artificial Sequence: Synthetic oligonucleotide
ggacuaauuugacggcaaa

SEQ ID NO: 1489340 - RNA, 19 nt, Artificial Sequence
  Description of Artificial Sequence: Synthetic oligonucleotide
cuauggcgcuugaaccaca

SEQ ID NO: 1489341 - RNA, 19 nt, Artificial Sequence
  Description of Artificial Sequence: Synthetic oligonucleotide
gaggucucuaaaacucggu

SEQ ID NO: 1489342 - RNA, 19 nt, Artificial Sequence
  Description of Artificial Sequence: Synthetic oligonucleotide
guagaggugccgguugucu

SEQ ID NO: 1489343 - RNA, 19 nt, Artificial Sequence
  Description of Artificial Sequence: Synthetic oligonucleotide
ggcgcagacaacgugacau

SEQ ID NO: 1489344 - RNA, 19 nt, Artificial Sequence
  Description of Artificial Sequence: Synthetic oligonucleotide
aggcgcagacaacgugaca

SEQ ID NO: 1489345 - RNA, 19 nt, Artificial Sequence
  Description of Artificial Sequence: Synthetic oligonucleotide
cgggaaaacgucugaacca

SEQ ID NO: 1489346 - RNA, 19 nt, Artificial Sequence
  Description of Artificial Sequence: Synthetic oligonucleotide
gucagaucaccugacugau

SEQ ID NO: 1489347 - RNA, 19 nt, Artificial Sequence
  Description of Artificial Sequence: Synthetic oligonucleotide
gccucggucagcugucuuc

SEQ ID NO: 1489348 - RNA, 19 nt, Artificial Sequence
  Description of Artificial Sequence: Synthetic oligonucleotide
acgcccuuugguauucaaa

SEQ ID NO: 1489349 - RNA, 19 nt, Artificial Sequence
  Description of Artificial Sequence: Synthetic oligonucleotide
cacgcucuucuauggaggu

SEQ ID NO: 1489350 - RNA, 19 nt, Artificial Sequence
  Description of Artificial Sequence: Synthetic oligonucleotide
gagccacacgcucuucuau

SEQ ID NO: 1489351 - RNA, 19 nt, Artificial Sequence
  Description of Artificial Sequence: Synthetic oligonucleotide
cgcagacaacgugacaucc

SEQ ID NO: 1489352 - RNA, 19 nt, Artificial Sequence
  Description of Artificial Sequence: Synthetic oligonucleotide
ggcaagcgggcaccucucc

SEQ ID NO: 1489353 - RNA, 19 nt, Artificial Sequence
  Description of Artificial Sequence: Synthetic oligonucleotide
caaccuugacugacucaaa

SEQ ID NO: 1489354 - RNA, 19 nt, Artificial Sequence
  Description of Artificial Sequence: Synthetic oligonucleotide
agcgggcaccucuccaauu

SEQ ID NO: 1489355 - RNA, 19 nt, Artificial Sequence
  Description of Artificial Sequence: Synthetic oligonucleotide
ccggaaacuucuuguucuc

SEQ ID NO: 1489356 - RNA, 19 nt, Artificial Sequence
  Description of Artificial Sequence: Synthetic oligonucleotide
caucacacagcgguggcau

SEQ ID NO: 1489357 - RNA, 19 nt, Artificial Sequence
  Description of Artificial Sequence: Synthetic oligonucleotide
gggaaaacgucugaaccau

SEQ ID NO: 1489358 - RNA, 19 nt, Artificial Sequence
  Description of Artificial Sequence: Synthetic oligonucleotide
ccauuuuccuuugaugucu

SEQ ID NO: 1489359 - RNA, 19 nt, Artificial Sequence
  Description of Artificial Sequence: Synthetic oligonucleotide
ggaaaacgucugaaccauc

SEQ ID NO: 1489360 - RNA, 19 nt, Artificial Sequence
  Description of Artificial Sequence: Synthetic oligonucleotide
ggccaaggauuuucuguaa

SEQ ID NO: 1489361 - RNA, 19 nt, Artificial Sequence
  Description of Artificial Sequence: Synthetic oligonucleotide
gcgcagacaacgugacauc

SEQ ID NO: 1489362 - RNA, 19 nt, Artificial Sequence
  Description of Artificial Sequence: Synthetic oligonucleotide
caccgggaaaacgucugaa

SEQ ID NO: 1489363 - RNA, 19 nt, Artificial Sequence
  Description of Artificial Sequence: Synthetic oligonucleotide
ggugccgguugucuucaaa

SEQ ID NO: 1489364 - RNA, 19 nt, Artificial Sequence
  Description of Artificial Sequence: Synthetic oligonucleotide
ggcaccucuccaauugcaa

SEQ ID NO: 1489365 - RNA, 19 nt, Artificial Sequence
  Description of Artificial Sequence: Synthetic oligonucleotide
gucaccaaccgagcagcua

SEQ ID NO: 1489366 - RNA, 19 nt, Artificial Sequence
  Description of Artificial Sequence: Synthetic oligonucleotide
gcaacucaucuaagucuac

SEQ ID NO: 1489367 - RNA, 19 nt, Artificial Sequence
  Description of Artificial Sequence: Synthetic oligonucleotide
gccauacgcccuuugguau

SEQ ID NO: 1489368 - RNA, 19 nt, Artificial Sequence
  Description of Artificial Sequence: Synthetic oligonucleotide
ccauaucagcuccuggaua

SEQ ID NO: 1489369 - RNA, 19 nt, Artificial Sequence
  Description of Artificial Sequence: Synthetic oligonucleotide
gcaccgggaaaacgucuga

SEQ ID NO: 1489370 - RNA, 19 nt, Artificial Sequence
  Description of Artificial Sequence: Synthetic oligonucleotide
caucagagugcgggugcca

SEQ ID NO: 1489371 - RNA, 19 nt, Artificial Sequence
  Description of Artificial Sequence: Synthetic oligonucleotide
ccaagaucgacgacucccu

SEQ ID NO: 1489372 - RNA, 19 nt, Artificial Sequence
  Description of Artificial Sequence: Synthetic oligonucleotide
guaucacauccggaaacuu

SEQ ID NO: 1489373 - RNA, 19 nt, Artificial Sequence
  Description of Artificial Sequence: Synthetic oligonucleotide
cucuuugauacaggggcuu

SEQ ID NO: 1489374 - RNA, 19 nt, Artificial Sequence
  Description of Artificial Sequence: Synthetic oligonucleotide
agacggcaagcgggcaccu

SEQ ID NO: 1489375 - RNA, 19 nt, Artificial Sequence
  Description of Artificial Sequence: Synthetic oligonucleotide
ccucagcgcccacaugaac

SEQ ID NO: 1489376 - RNA, 19 nt, Artificial Sequence
  Description of Artificial Sequence: Synthetic oligonucleotide
cgagacggcaagcgggcac

SEQ ID NO: 1489377 - RNA, 19 nt, Artificial Sequence
  Description of Artificial Sequence: Synthetic oligonucleotide
gacggcaagcgggcaccuc

SEQ ID NO: 1489378 - RNA, 19 nt, Artificial Sequence
  Description of Artificial Sequence: Synthetic oligonucleotide
gcaccucuccaauugcaau

SEQ ID NO: 1489379 - RNA, 19 nt, Artificial Sequence
  Description of Artificial Sequence: Synthetic oligonucleotide
gcaaugcuauggcgcuuga

SEQ ID NO: 1489380 - RNA, 19 nt, Artificial Sequence
  Description of Artificial Sequence: Synthetic oligonucleotide
cgcccuuugguauucaaau

SEQ ID NO: 1489381 - RNA, 19 nt, Artificial Sequence
  Description of Artificial Sequence: Synthetic oligonucleotide
ccaaccgagcagcuagcaa

SEQ ID NO: 1489382 - RNA, 19 nt, Artificial Sequence
  Description of Artificial Sequence: Synthetic oligonucleotide
cgggcaccucuccaauugc

SEQ ID NO: 1489383 - RNA, 19 nt, Artificial Sequence
  Description of Artificial Sequence: Synthetic oligonucleotide
ccacacgcucuucuaugga

SEQ ID NO: 1489384 - RNA, 19 nt, Artificial Sequence
  Description of Artificial Sequence: Synthetic oligonucleotide
aggugccgguugucuucaa

SEQ ID NO: 1489385 - RNA, 19 nt, Artificial Sequence
  Description of Artificial Sequence: Synthetic oligonucleotide
gcgcccacaugaacagcug

SEQ ID NO: 1489386 - RNA, 19 nt, Artificial Sequence
  Description of Artificial Sequence: Synthetic oligonucleotide
gaucgacgacucccugcuu

SEQ ID NO: 1489387 - RNA, 19 nt, Artificial Sequence
  Description of Artificial Sequence: Synthetic oligonucleotide
ccagaggaacuuucagaau

SEQ ID NO: 1489388 - RNA, 19 nt, Artificial Sequence
  Description of Artificial Sequence: Synthetic oligonucleotide
cgacucccugcuugcugac

SEQ ID NO: 1489389 - RNA, 19 nt, Artificial Sequence
  Description of Artificial Sequence: Synthetic oligonucleotide
gcgguggcaucucuuuguu

SEQ ID NO: 1489390 - RNA, 19 nt, Artificial Sequence
  Description of Artificial Sequence: Synthetic oligonucleotide
cggcaagcgggcaccucuc

SEQ ID NO: 1489391 - RNA, 19 nt, Artificial Sequence
  Description of Artificial Sequence: Synthetic oligonucleotide
cucuaccacugaggucucu

SEQ ID NO: 1489392 - RNA, 19 nt, Artificial Sequence
  Description of Artificial Sequence: Synthetic oligonucleotide
ggccucggucagcugucuu

SEQ ID NO: 1489393 - RNA, 19 nt, Artificial Sequence
  Description of Artificial Sequence: Synthetic oligonucleotide
cgacgacucccugcuugcu

SEQ ID NO: 1489394 - RNA, 19 nt, Artificial Sequence
  Description of Artificial Sequence: Synthetic oligonucleotide
ugugauauaaacaaagucu

SEQ ID NO: 1489395 - RNA, 19 nt, Artificial Sequence
  Description of Artificial Sequence: Synthetic oligonucleotide
ugugaaguaaacuagagua

SEQ ID NO: 1489396 - RNA, 19 nt, Artificial Sequence
  Description of Artificial Sequence: Synthetic oligonucleotide
agaaggauccuuuggagcc

SEQ ID NO: 1489397 - RNA, 19 nt, Artificial Sequence
  Description of Artificial Sequence: Synthetic oligonucleotide
uauuuggaagccaagagca

SEQ ID NO: 1489398 - RNA, 19 nt, Artificial Sequence
  Description of Artificial Sequence: Synthetic oligonucleotide
aagucuucgauauuuggag

SEQ ID NO: 1489399 - RNA, 19 nt, Artificial Sequence
  Description of Artificial Sequence: Synthetic oligonucleotide
aacuucuuccggcagaccg

SEQ ID NO: 1489400 - RNA, 19 nt, Artificial Sequence
  Description of Artificial Sequence: Synthetic oligonucleotide
aagaaguguggguugauag

SEQ ID NO: 1489401 - RNA, 19 nt, Artificial Sequence
  Description of Artificial Sequence: Synthetic oligonucleotide
aguguguuguuccacgucc

SEQ ID NO: 1489402 - RNA, 19 nt, Artificial Sequence
  Description of Artificial Sequence: Synthetic oligonucleotide
aaauuauucugagaagagg

SEQ ID NO: 1489403 - RNA, 19 nt, Artificial Sequence
  Description of Artificial Sequence: Synthetic oligonucleotide
aaaacugcccgccggauag

SEQ ID NO: 1489404 - RNA, 19 nt, Artificial Sequence
  Description of Artificial Sequence: Synthetic oligonucleotide
ugaacugguauuuuggugu

SEQ ID NO: 1489405 - RNA, 19 nt, Artificial Sequence
  Description of Artificial Sequence: Synthetic oligonucleotide
uuagcuuuaggauuaacuc

SEQ ID NO: 1489406 - RNA, 19 nt, Artificial Sequence
  Description of Artificial Sequence: Synthetic oligonucleotide
gaagccuaaacuuggaaug

SEQ ID NO: 1489407 - RNA, 19 nt, Artificial Sequence
  Description of Artificial Sequence: Synthetic oligonucleotide
ucuauauccucaaucuugc

SEQ ID NO: 1489408 - RNA, 19 nt, Artificial Sequence
  Description of Artificial Sequence: Synthetic oligonucleotide
uuuuccucaauaaacaauu

SEQ ID NO: 1489409 - RNA, 19 nt, Artificial Sequence
  Description of Artificial Sequence: Synthetic oligonucleotide
uucguuaucuauauccuca

SEQ ID NO: 1489410 - RNA, 19 nt, Artificial Sequence
  Description of Artificial Sequence: Synthetic oligonucleotide
ugagggaucgugcugaucu

SEQ ID NO: 1489411 - RNA, 19 nt, Artificial Sequence
  Description of Artificial Sequence: Synthetic oligonucleotide
agaagggugauaaugcacc

SEQ ID NO: 1489412 - RNA, 19 nt, Artificial Sequence
  Description of Artificial Sequence: Synthetic oligonucleotide
aaucacuggacaccgucgg

SEQ ID NO: 1489413 - RNA, 19 nt, Artificial Sequence
  Description of Artificial Sequence: Synthetic oligonucleotide
aaucagaugugcacgacgg

SEQ ID NO: 1489414 - RNA, 19 nt, Artificial Sequence
  Description of Artificial Sequence: Synthetic oligonucleotide
ucaauagucuucaaaucac

SEQ ID NO: 1489415 - RNA, 19 nt, Artificial Sequence
  Description of Artificial Sequence: Synthetic oligonucleotide
uugauagacugcaaaaccu

SEQ ID NO: 1489416 - RNA, 19 nt, Artificial Sequence
  Description of Artificial Sequence: Synthetic oligonucleotide
agucacauggcucuuagcu

SEQ ID NO: 1489417 - RNA, 19 nt, Artificial Sequence
  Description of Artificial Sequence: Synthetic oligonucleotide
ucgaauuucagcucuuuca

SEQ ID NO: 1489418 - RNA, 19 nt, Artificial Sequence
  Description of Artificial Sequence: Synthetic oligonucleotide
uucaaaucacuggacaccg

SEQ ID NO: 1489419 - RNA, 19 nt, Artificial Sequence
  Description of Artificial Sequence: Synthetic oligonucleotide
uaaacuagaguauguacaa

SEQ ID NO: 1489420 - RNA, 19 nt, Artificial Sequence
  Description of Artificial Sequence: Synthetic oligonucleotide
gaaucagaugugcacgacg

SEQ ID NO: 1489421 - RNA, 19 nt, Artificial Sequence
  Description of Artificial Sequence: Synthetic oligonucleotide
ucugugauauaaacaaagu

SEQ ID NO: 1489422 - RNA, 19 nt, Artificial Sequence
  Description of Artificial Sequence: Synthetic oligonucleotide
guauuuggaagccaagagc

SEQ ID NO: 1489423 - RNA, 19 nt, Artificial Sequence
  Description of Artificial Sequence: Synthetic oligonucleotide
ucacucuccauguauccgg

SEQ ID NO: 1489424 - RNA, 19 nt, Artificial Sequence
  Description of Artificial Sequence: Synthetic oligonucleotide
aguacuucacucuccaugu

SEQ ID NO: 1489425 - RNA, 19 nt, Artificial Sequence
  Description of Artificial Sequence: Synthetic oligonucleotide
gauacuuggcuaaagugug

SEQ ID NO: 1489426 - RNA, 19 nt, Artificial Sequence
  Description of Artificial Sequence: Synthetic oligonucleotide
gucaauagucuucaaauca

SEQ ID NO: 1489427 - RNA, 19 nt, Artificial Sequence
  Description of Artificial Sequence: Synthetic oligonucleotide
cauacguccauuuauaucu

SEQ ID NO: 1489428 - RNA, 19 nt, Artificial Sequence
  Description of Artificial Sequence: Synthetic oligonucleotide
aacaaagucuucgauauuu

SEQ ID NO: 1489429 - RNA, 19 nt, Artificial Sequence
  Description of Artificial Sequence: Synthetic oligonucleotide
acuuggaccagccagucca

SEQ ID NO: 1489430 - RNA, 19 nt, Artificial Sequence
  Description of Artificial Sequence: Synthetic oligonucleotide
ugugucaauagucuucaaa

SEQ ID NO: 1489431 - RNA, 19 nt, Artificial Sequence
  Description of Artificial Sequence: Synthetic oligonucleotide
guugacauuugucacuuug

SEQ ID NO: 1489432 - RNA, 19 nt, Artificial Sequence
  Description of Artificial Sequence: Synthetic oligonucleotide
ucgauauuuggagaaaaca

SEQ ID NO: 1489433 - RNA, 19 nt, Artificial Sequence
  Description of Artificial Sequence: Synthetic oligonucleotide
gaucgugcugaucuugagg

SEQ ID NO: 1489434 - RNA, 19 nt, Artificial Sequence
  Description of Artificial Sequence: Synthetic oligonucleotide
aaaaucagaaucagaugug

SEQ ID NO: 1489435 - RNA, 19 nt, Artificial Sequence
  Description of Artificial Sequence: Synthetic oligonucleotide
guacagguuucacagaggc

SEQ ID NO: 1489436 - RNA, 19 nt, Artificial Sequence
  Description of Artificial Sequence: Synthetic oligonucleotide
aucgugcugaucuugagga

SEQ ID NO: 1489437 - RNA, 19 nt, Artificial Sequence
  Description of Artificial Sequence: Synthetic oligonucleotide
ucuugcagagcaaagcauc

SEQ ID NO: 1489438 - RNA, 19 nt, Artificial Sequence
  Description of Artificial Sequence: Synthetic oligonucleotide
acgacgggagcccagcugc

SEQ ID NO: 1489439 - RNA, 19 nt, Artificial Sequence
  Description of Artificial Sequence: Synthetic oligonucleotide
ugguucuaacuuuauuucc

SEQ ID NO: 1489440 - RNA, 19 nt, Artificial Sequence
  Description of Artificial Sequence: Synthetic oligonucleotide
cuagaguauguacaaaauc

SEQ ID NO: 1489441 - RNA, 19 nt, Artificial Sequence
  Description of Artificial Sequence: Synthetic oligonucleotide
uagucgaugagugucagcu

SEQ ID NO: 1489442 - RNA, 19 nt, Artificial Sequence
  Description of Artificial Sequence: Synthetic oligonucleotide
uguauccgguguaauacug

SEQ ID NO: 1489443 - RNA, 19 nt, Artificial Sequence
  Description of Artificial Sequence: Synthetic oligonucleotide
cauugucugugauauaaac

SEQ ID NO: 1489444 - RNA, 19 nt, Artificial Sequence
  Description of Artificial Sequence: Synthetic oligonucleotide
ugauagacugcaaaaccuc

SEQ ID NO: 1489445 - RNA, 19 nt, Artificial Sequence
  Description of Artificial Sequence: Synthetic oligonucleotide
ugaggcucgccuuaagaag

SEQ ID NO: 1489446 - RNA, 19 nt, Artificial Sequence
  Description of Artificial Sequence: Synthetic oligonucleotide
aagccuaaacuuggaaugg

SEQ ID NO: 1489447 - RNA, 19 nt, Artificial Sequence
  Description of Artificial Sequence: Synthetic oligonucleotide
uguacagguuucacagagg

SEQ ID NO: 1489448 - RNA, 19 nt, Artificial Sequence
  Description of Artificial Sequence: Synthetic oligonucleotide
gugauaaugcaccauguca

SEQ ID NO: 1489449 - RNA, 19 nt, Artificial Sequence
  Description of Artificial Sequence: Synthetic oligonucleotide
ugacauuugucacuuuggu

SEQ ID NO: 1489450 - RNA, 19 nt, Artificial Sequence
  Description of Artificial Sequence: Synthetic oligonucleotide
guaaacuagaguauguaca

SEQ ID NO: 1489451 - RNA, 19 nt, Artificial Sequence
  Description of Artificial Sequence: Synthetic oligonucleotide
aguguggguugauagacug

SEQ ID NO: 1489452 - RNA, 19 nt, Artificial Sequence
  Description of Artificial Sequence: Synthetic oligonucleotide
uuugaggcucgccuuaaga

SEQ ID NO: 1489453 - RNA, 19 nt, Artificial Sequence
  Description of Artificial Sequence: Synthetic oligonucleotide
agaagccuaaacuuggaau

SEQ ID NO: 1489454 - RNA, 19 nt, Artificial Sequence
  Description of Artificial Sequence: Synthetic oligonucleotide
ucuaaaacugcccgccgga

SEQ ID NO: 1489455 - RNA, 19 nt, Artificial Sequence
  Description of Artificial Sequence: Synthetic oligonucleotide
gaagccaagagcagagccg

SEQ ID NO: 1489456 - RNA, 19 nt, Artificial Sequence
  Description of Artificial Sequence: Synthetic oligonucleotide
cauguauccgguguaauac

SEQ ID NO: 1489457 - RNA, 19 nt, Artificial Sequence
  Description of Artificial Sequence: Synthetic oligonucleotide
ugauauaaacaaagucuuc

SEQ ID NO: 1489458 - RNA, 19 nt, Artificial Sequence
  Description of Artificial Sequence: Synthetic oligonucleotide
uucgauauuuggagaaaac

SEQ ID NO: 1489459 - RNA, 19 nt, Artificial Sequence
  Description of Artificial Sequence: Synthetic oligonucleotide
guuucacagaggcuguagg

SEQ ID NO: 1489460 - RNA, 19 nt, Artificial Sequence
  Description of Artificial Sequence: Synthetic oligonucleotide
uuccucaauaaacaauuau

SEQ ID NO: 1489461 - RNA, 19 nt, Artificial Sequence
  Description of Artificial Sequence: Synthetic oligonucleotide
agggugauaaugcaccaug

SEQ ID NO: 1489462 - RNA, 19 nt, Artificial Sequence
  Description of Artificial Sequence: Synthetic oligonucleotide
agaguauguacaaaaucag

SEQ ID NO: 1489463 - RNA, 19 nt, Artificial Sequence
  Description of Artificial Sequence: Synthetic oligonucleotide
uaggauuaacuccuguguc

SEQ ID NO: 1489464 - RNA, 19 nt, Artificial Sequence
  Description of Artificial Sequence: Synthetic oligonucleotide
ucauagucgaugaguguca

SEQ ID NO: 1489465 - RNA, 19 nt, Artificial Sequence
  Description of Artificial Sequence: Synthetic oligonucleotide
gucgaugagugucagcucc

SEQ ID NO: 1489466 - RNA, 19 nt, Artificial Sequence
  Description of Artificial Sequence: Synthetic oligonucleotide
cugccugagauacugguag

SEQ ID NO: 1489467 - RNA, 19 nt, Artificial Sequence
  Description of Artificial Sequence: Synthetic oligonucleotide
cugguucuaacuuuauuuc

SEQ ID NO: 1489468 - RNA, 19 nt, Artificial Sequence
  Description of Artificial Sequence: Synthetic oligonucleotide
aggauuaacuccuguguca

SEQ ID NO: 1489469 - RNA, 19 nt, Artificial Sequence
  Description of Artificial Sequence: Synthetic oligonucleotide
uuugggaacugguguaagc

SEQ ID NO: 1489470 - RNA, 19 nt, Artificial Sequence
  Description of Artificial Sequence: Synthetic oligonucleotide
agagccgugaucccaacca

SEQ ID NO: 1489471 - RNA, 19 nt, Artificial Sequence
  Description of Artificial Sequence: Synthetic oligonucleotide
ugcacauguacagaguuuc

SEQ ID NO: 1489472 - RNA, 19 nt, Artificial Sequence
  Description of Artificial Sequence: Synthetic oligonucleotide
gaugguuuuggaguucagc

SEQ ID NO: 1489473 - RNA, 19 nt, Artificial Sequence
  Description of Artificial Sequence: Synthetic oligonucleotide
augagggccgcgcugggac

SEQ ID NO: 1489474 - RNA, 19 nt, Artificial Sequence
  Description of Artificial Sequence: Synthetic oligonucleotide
uauccgguguaauacugcu

SEQ ID NO: 1489475 - RNA, 19 nt, Artificial Sequence
  Description of Artificial Sequence: Synthetic oligonucleotide
ucagaugugcacgacggga

SEQ ID NO: 1489476 - RNA, 19 nt, Artificial Sequence
  Description of Artificial Sequence: Synthetic oligonucleotide
aucuaagaaguguggguug

SEQ ID NO: 1489477 - RNA, 19 nt, Artificial Sequence
  Description of Artificial Sequence: Synthetic oligonucleotide
auagucgaugagugucagc

SEQ ID NO: 1489478 - RNA, 19 nt, Artificial Sequence
  Description of Artificial Sequence: Synthetic oligonucleotide
agaaguguggguugauaga

SEQ ID NO: 1489479 - RNA, 19 nt, Artificial Sequence
  Description of Artificial Sequence: Synthetic oligonucleotide
cuuuggugggcugaacugg

SEQ ID NO: 1489480 - RNA, 19 nt, Artificial Sequence
  Description of Artificial Sequence: Synthetic oligonucleotide
acguagucacugcagagcu

SEQ ID NO: 1489481 - RNA, 19 nt, Artificial Sequence
  Description of Artificial Sequence: Synthetic oligonucleotide
aggaucucgcugcuucccc

SEQ ID NO: 1489482 - RNA, 19 nt, Artificial Sequence
  Description of Artificial Sequence: Synthetic oligonucleotide
uggaguucagcugagggau

SEQ ID NO: 1489483 - RNA, 19 nt, Artificial Sequence
  Description of Artificial Sequence: Synthetic oligonucleotide
gacugcaaaaccucaagcu

SEQ ID NO: 1489484 - RNA, 19 nt, Artificial Sequence
  Description of Artificial Sequence: Synthetic oligonucleotide
cuguuuguugacauuuguc

SEQ ID NO: 1489485 - RNA, 19 nt, Artificial Sequence
  Description of Artificial Sequence: Synthetic oligonucleotide
aaguaaacuagaguaugua

SEQ ID NO: 1489486 - RNA, 19 nt, Artificial Sequence
  Description of Artificial Sequence: Synthetic oligonucleotide
gggacguacggacucagcg

SEQ ID NO: 1489487 - RNA, 19 nt, Artificial Sequence
  Description of Artificial Sequence: Synthetic oligonucleotide
cauuucucggauuugggaa

SEQ ID NO: 1489488 - RNA, 19 nt, Artificial Sequence
  Description of Artificial Sequence: Synthetic oligonucleotide
caaaggccggcccaacucg

SEQ ID NO: 1489489 - RNA, 19 nt, Artificial Sequence
  Description of Artificial Sequence: Synthetic oligonucleotide
acggacucagcgcugccac

SEQ ID NO: 1489490 - RNA, 19 nt, Artificial Sequence
  Description of Artificial Sequence: Synthetic oligonucleotide
cucgccuuaagaaguggag

SEQ ID NO: 1489491 - RNA, 19 nt, Artificial Sequence
  Description of Artificial Sequence: Synthetic oligonucleotide
ugucugugauauaaacaaa

SEQ ID NO: 1489492 - RNA, 19 nt, Artificial Sequence
  Description of Artificial Sequence: Synthetic oligonucleotide
gucauagucgaugaguguc

SEQ ID NO: 1489493 - RNA, 19 nt, Artificial Sequence
  Description of Artificial Sequence: Synthetic oligonucleotide
ugagccuguaggaaccggu

SEQ ID NO: 1489494 - RNA, 19 nt, Artificial Sequence
  Description of Artificial Sequence: Synthetic oligonucleotide
uggacuuggaccagccagu

SEQ ID NO: 1489495 - RNA, 19 nt, Artificial Sequence
  Description of Artificial Sequence: Synthetic oligonucleotide
gauagacugcaaaaccuca

SEQ ID NO: 1489496 - RNA, 19 nt, Artificial Sequence
  Description of Artificial Sequence: Synthetic oligonucleotide
cuucuaaaacugcccgccg

SEQ ID NO: 1489497 - RNA, 19 nt, Artificial Sequence
  Description of Artificial Sequence: Synthetic oligonucleotide
agucuucgauauuuggaga

SEQ ID NO: 1489498 - RNA, 19 nt, Artificial Sequence
  Description of Artificial Sequence: Synthetic oligonucleotide
gaccggcugagccuguagg

SEQ ID NO: 1489499 - RNA, 19 nt, Artificial Sequence
  Description of Artificial Sequence: Synthetic oligonucleotide
cuucguuaucuauauccuc

SEQ ID NO: 1489500 - RNA, 19 nt, Artificial Sequence
  Description of Artificial Sequence: Synthetic oligonucleotide
aggaaccgguccaugaugg

SEQ ID NO: 1489501 - RNA, 19 nt, Artificial Sequence
  Description of Artificial Sequence: Synthetic oligonucleotide
ucucggauuugggaacugg

SEQ ID NO: 1489502 - RNA, 19 nt, Artificial Sequence
  Description of Artificial Sequence: Synthetic oligonucleotide
uguaagcauugucugugau

SEQ ID NO: 1489503 - RNA, 19 nt, Artificial Sequence
  Description of Artificial Sequence: Synthetic oligonucleotide
aucagaugugcacgacggg

SEQ ID NO: 1489504 - RNA, 19 nt, Artificial Sequence
  Description of Artificial Sequence: Synthetic oligonucleotide
cuuucacuacguucuuggc

SEQ ID NO: 1489505 - RNA, 19 nt, Artificial Sequence
  Description of Artificial Sequence: Synthetic oligonucleotide
gguguaagcauugucugug

SEQ ID NO: 1489506 - RNA, 19 nt, Artificial Sequence
  Description of Artificial Sequence: Synthetic oligonucleotide
auguauccgguguaauacu

SEQ ID NO: 1489507 - RNA, 19 nt, Artificial Sequence
  Description of Artificial Sequence: Synthetic oligonucleotide
ugggagacucaggaucucg

SEQ ID NO: 1489508 - RNA, 19 nt, Artificial Sequence
  Description of Artificial Sequence: Synthetic oligonucleotide
acuuagugagguuuucauu

SEQ ID NO: 1489509 - RNA, 19 nt, Artificial Sequence
  Description of Artificial Sequence: Synthetic oligonucleotide
uccauuuguacagguuuca

SEQ ID NO: 1489510 - RNA, 19 nt, Artificial Sequence
  Description of Artificial Sequence: Synthetic oligonucleotide
auuugucacuuuggugggc

SEQ ID NO: 1489511 - RNA, 19 nt, Artificial Sequence
  Description of Artificial Sequence: Synthetic oligonucleotide
agucgaugagugucagcuc

SEQ ID NO: 1489512 - RNA, 19 nt, Artificial Sequence
  Description of Artificial Sequence: Synthetic oligonucleotide
uaacuccugugucaauagu

SEQ ID NO: 1489513 - RNA, 19 nt, Artificial Sequence
  Description of Artificial Sequence: Synthetic oligonucleotide
ucguuaucuauauccucaa

SEQ ID NO: 1489514 - RNA, 19 nt, Artificial Sequence
  Description of Artificial Sequence: Synthetic oligonucleotide
agguuuugugaaguaaacu

SEQ ID NO: 1489515 - RNA, 19 nt, Artificial Sequence
  Description of Artificial Sequence: Synthetic oligonucleotide
acuuggcuaaaguguguug

SEQ ID NO: 1489516 - RNA, 19 nt, Artificial Sequence
  Description of Artificial Sequence: Synthetic oligonucleotide
agagguuuugugaaguaaa

SEQ ID NO: 1489517 - RNA, 19 nt, Artificial Sequence
  Description of Artificial Sequence: Synthetic oligonucleotide
cuaaaguguguuguuccac

SEQ ID NO: 1489518 - RNA, 19 nt, Artificial Sequence
  Description of Artificial Sequence: Synthetic oligonucleotide
cucguauuuggaagccaag

SEQ ID NO: 1489519 - RNA, 19 nt, Artificial Sequence
  Description of Artificial Sequence: Synthetic oligonucleotide
aaacuagaguauguacaaa

SEQ ID NO: 1489520 - RNA, 19 nt, Artificial Sequence
  Description of Artificial Sequence: Synthetic oligonucleotide
aacugguauuuugguguuc

SEQ ID NO: 1489521 - RNA, 19 nt, Artificial Sequence
  Description of Artificial Sequence: Synthetic oligonucleotide
gaugugcacgacgggagcc

SEQ ID NO: 1489522 - RNA, 19 nt, Artificial Sequence
  Description of Artificial Sequence: Synthetic oligonucleotide
aucagauacuuggcuaaag

SEQ ID NO: 1489523 - RNA, 19 nt, Artificial Sequence
  Description of Artificial Sequence: Synthetic oligonucleotide
gguugauagacugcaaaac

SEQ ID NO: 1489524 - RNA, 19 nt, Artificial Sequence
  Description of Artificial Sequence: Synthetic oligonucleotide
uccguggcgccguugggag

SEQ ID NO: 1489525 - RNA, 19 nt, Artificial Sequence
  Description of Artificial Sequence: Synthetic oligonucleotide
cauggcucuuagcuuuagg

SEQ ID NO: 1489526 - RNA, 19 nt, Artificial Sequence
  Description of Artificial Sequence: Synthetic oligonucleotide
ugaugguuuuggaguucag

SEQ ID NO: 1489527 - RNA, 19 nt, Artificial Sequence
  Description of Artificial Sequence: Synthetic oligonucleotide
caugauggcaaugcacaug

SEQ ID NO: 1489528 - RNA, 19 nt, Artificial Sequence
  Description of Artificial Sequence: Synthetic oligonucleotide
ggaagcggcagcugcaacc

SEQ ID NO: 1489529 - RNA, 19 nt, Artificial Sequence
  Description of Artificial Sequence: Synthetic oligonucleotide
gagacauccucaggggcag

SEQ ID NO: 1489530 - RNA, 19 nt, Artificial Sequence
  Description of Artificial Sequence: Synthetic oligonucleotide
cuaaacuuggaauggacuu

SEQ ID NO: 1489531 - RNA, 19 nt, Artificial Sequence
  Description of Artificial Sequence: Synthetic oligonucleotide
acuacguucuuggccaugu

SEQ ID NO: 1489532 - RNA, 19 nt, Artificial Sequence
  Description of Artificial Sequence: Synthetic oligonucleotide
cuuaagaaguggaguggca

SEQ ID NO: 1489533 - RNA, 19 nt, Artificial Sequence
  Description of Artificial Sequence: Synthetic oligonucleotide
gaugaacuuagugagguuu

SEQ ID NO: 1489534 - RNA, 19 nt, Artificial Sequence
  Description of Artificial Sequence: Synthetic oligonucleotide
auuugggaacugguguaag

SEQ ID NO: 1489535 - RNA, 19 nt, Artificial Sequence
  Description of Artificial Sequence: Synthetic oligonucleotide
cucgaauuucagcucuuuc

SEQ ID NO: 1489536 - RNA, 19 nt, Artificial Sequence
  Description of Artificial Sequence: Synthetic oligonucleotide
gaaguaaacuagaguaugu

SEQ ID NO: 1489537 - RNA, 19 nt, Artificial Sequence
  Description of Artificial Sequence: Synthetic oligonucleotide
aacugcccgccggauaguc

SEQ ID NO: 1489538 - RNA, 19 nt, Artificial Sequence
  Description of Artificial Sequence: Synthetic oligonucleotide
gugauauaaacaaagucuu

SEQ ID NO: 1489539 - RNA, 19 nt, Artificial Sequence
  Description of Artificial Sequence: Synthetic oligonucleotide
guaagcauugucugugaua

SEQ ID NO: 1489540 - RNA, 19 nt, Artificial Sequence
  Description of Artificial Sequence: Synthetic oligonucleotide
uggcuguuuguugacauuu

SEQ ID NO: 1489541 - RNA, 19 nt, Artificial Sequence
  Description of Artificial Sequence: Synthetic oligonucleotide
guauccgguguaauacugc

SEQ ID NO: 1489542 - RNA, 19 nt, Artificial Sequence
  Description of Artificial Sequence: Synthetic oligonucleotide
guuuuggcuguuuguugac

SEQ ID NO: 1489543 - RNA, 19 nt, Artificial Sequence
  Description of Artificial Sequence: Synthetic oligonucleotide
auccucaaucuugcagagc

SEQ ID NO: 1489544 - RNA, 19 nt, Artificial Sequence
  Description of Artificial Sequence: Synthetic oligonucleotide
ucgugcugaucuugaggag

SEQ ID NO: 1489545 - RNA, 19 nt, Artificial Sequence
  Description of Artificial Sequence: Synthetic oligonucleotide
cauuagaggggaggcgagg

SEQ ID NO: 1489546 - RNA, 19 nt, Artificial Sequence
  Description of Artificial Sequence: Synthetic oligonucleotide
uuagaggggaggcgagguc

SEQ ID NO: 1489547 - RNA, 19 nt, Artificial Sequence
  Description of Artificial Sequence: Synthetic oligonucleotide
ggugauaaugcaccauguc

SEQ ID NO: 1489548 - RNA, 19 nt, Artificial Sequence
  Description of Artificial Sequence: Synthetic oligonucleotide
aaccucaagcugccugaga

SEQ ID NO: 1489549 - RNA, 19 nt, Artificial Sequence
  Description of Artificial Sequence: Synthetic oligonucleotide
gggucgccgauucaaauac

SEQ ID NO: 1489550 - RNA, 19 nt, Artificial Sequence
  Description of Artificial Sequence: Synthetic oligonucleotide
aaccgguccaugauggcaa

SEQ ID NO: 1489551 - RNA, 19 nt, Artificial Sequence
  Description of Artificial Sequence: Synthetic oligonucleotide
gacguacggacucagcgcu

SEQ ID NO: 1489552 - RNA, 19 nt, Artificial Sequence
  Description of Artificial Sequence: Synthetic oligonucleotide
aggaagcggcagcugcaac

SEQ ID NO: 1489553 - RNA, 19 nt, Artificial Sequence
  Description of Artificial Sequence: Synthetic oligonucleotide
agcugagggaucgugcuga

SEQ ID NO: 1489554 - RNA, 19 nt, Artificial Sequence
  Description of Artificial Sequence: Synthetic oligonucleotide
cauagucgaugagugucag

SEQ ID NO: 1489555 - RNA, 19 nt, Artificial Sequence
  Description of Artificial Sequence: Synthetic oligonucleotide
aaguguggguugauagacu

SEQ ID NO: 1489556 - RNA, 19 nt, Artificial Sequence
  Description of Artificial Sequence: Synthetic oligonucleotide
gacuuggaccagccagucc

SEQ ID NO: 1489557 - RNA, 19 nt, Artificial Sequence
  Description of Artificial Sequence: Synthetic oligonucleotide
ggacguacggacucagcgc

SEQ ID NO: 1489558 - RNA, 19 nt, Artificial Sequence
  Description of Artificial Sequence: Synthetic oligonucleotide
cugcaaccugagaagggug

SEQ ID NO: 1489559 - RNA, 19 nt, Artificial Sequence
  Description of Artificial Sequence: Synthetic oligonucleotide
auacguccauuuauaucuc

SEQ ID NO: 1489560 - RNA, 19 nt, Artificial Sequence
  Description of Artificial Sequence: Synthetic oligonucleotide
uacuuggcuaaaguguguu

SEQ ID NO: 1489561 - RNA, 19 nt, Artificial Sequence
  Description of Artificial Sequence: Synthetic oligonucleotide
caccuccccagcuuuugag

SEQ ID NO: 1489562 - RNA, 19 nt, Artificial Sequence
  Description of Artificial Sequence: Synthetic oligonucleotide
ccgccggauagucacaugg

SEQ ID NO: 1489563 - RNA, 19 nt, Artificial Sequence
  Description of Artificial Sequence: Synthetic oligonucleotide
cucgcugcuuccccacucc

SEQ ID NO: 1489564 - RNA, 19 nt, Artificial Sequence
  Description of Artificial Sequence: Synthetic oligonucleotide
auagacugcaaaaccucaa

SEQ ID NO: 1489565 - RNA, 19 nt, Artificial Sequence
  Description of Artificial Sequence: Synthetic oligonucleotide
uggaguggcaaaggccggc

SEQ ID NO: 1489566 - RNA, 19 nt, Artificial Sequence
  Description of Artificial Sequence: Synthetic oligonucleotide
uuucccagucuucguuauc

SEQ ID NO: 1489567 - RNA, 19 nt, Artificial Sequence
  Description of Artificial Sequence: Synthetic oligonucleotide
ugggacguacggacucagc

SEQ ID NO: 1489568 - RNA, 19 nt, Artificial Sequence
  Description of Artificial Sequence: Synthetic oligonucleotide
ggguugauagacugcaaaa

SEQ ID NO: 1489569 - RNA, 19 nt, Artificial Sequence
  Description of Artificial Sequence: Synthetic oligonucleotide
cuccucguauuuggaagcc

SEQ ID NO: 1489570 - RNA, 19 nt, Artificial Sequence
  Description of Artificial Sequence: Synthetic oligonucleotide
gcuaaaguguguuguucca

SEQ ID NO: 1489571 - RNA, 19 nt, Artificial Sequence
  Description of Artificial Sequence: Synthetic oligonucleotide
uccucguauuuggaagcca

SEQ ID NO: 1489572 - RNA, 19 nt, Artificial Sequence
  Description of Artificial Sequence: Synthetic oligonucleotide
guguaagcauugucuguga

SEQ ID NO: 1489573 - RNA, 19 nt, Artificial Sequence
  Description of Artificial Sequence: Synthetic oligonucleotide
guucagcugagggaucgug

SEQ ID NO: 1489574 - RNA, 19 nt, Artificial Sequence
  Description of Artificial Sequence: Synthetic oligonucleotide
gguuucacagaggcuguag

SEQ ID NO: 1489575 - RNA, 19 nt, Artificial Sequence
  Description of Artificial Sequence: Synthetic oligonucleotide
cuuggccaugugcugcaug

SEQ ID NO: 1489576 - RNA, 19 nt, Artificial Sequence
  Description of Artificial Sequence: Synthetic oligonucleotide
ugcacgacgggagcccagc

SEQ ID NO: 1489577 - RNA, 19 nt, Artificial Sequence
  Description of Artificial Sequence: Synthetic oligonucleotide
uacggacucagcgcugcca

SEQ ID NO: 1489578 - RNA, 19 nt, Artificial Sequence
  Description of Artificial Sequence: Synthetic oligonucleotide
agggaucgugcugaucuug

SEQ ID NO: 1489579 - RNA, 19 nt, Artificial Sequence
  Description of Artificial Sequence: Synthetic oligonucleotide
agccuaaacuuggaaugga

SEQ ID NO: 1489580 - RNA, 19 nt, Artificial Sequence
  Description of Artificial Sequence: Synthetic oligonucleotide
gccguugggagacucagga

SEQ ID NO: 1489581 - RNA, 19 nt, Artificial Sequence
  Description of Artificial Sequence: Synthetic oligonucleotide
cagagccgugaucccaacc

SEQ ID NO: 1489582 - RNA, 19 nt, Artificial Sequence
  Description of Artificial Sequence: Synthetic oligonucleotide
uuggcuguuuguugacauu

SEQ ID NO: 1489583 - RNA, 19 nt, Artificial Sequence
  Description of Artificial Sequence: Synthetic oligonucleotide
cuauauccucaaucuugca

SEQ ID NO: 1489584 - RNA, 19 nt, Artificial Sequence
  Description of Artificial Sequence: Synthetic oligonucleotide
cagcgcugccaccugaguc

SEQ ID NO: 1489585 - RNA, 19 nt, Artificial Sequence
  Description of Artificial Sequence: Synthetic oligonucleotide
gaggcucgccuuaagaagu

SEQ ID NO: 1489586 - RNA, 19 nt, Artificial Sequence
  Description of Artificial Sequence: Synthetic oligonucleotide
caacucgaauuucagcucu

SEQ ID NO: 1489587 - RNA, 19 nt, Artificial Sequence
  Description of Artificial Sequence: Synthetic oligonucleotide
uccauguauccgguguaau

SEQ ID NO: 1489588 - RNA, 19 nt, Artificial Sequence
  Description of Artificial Sequence: Synthetic oligonucleotide
ggaucgugcugaucuugag

SEQ ID NO: 1489589 - RNA, 19 nt, Artificial Sequence
  Description of Artificial Sequence: Synthetic oligonucleotide
gucggagcagcgccaugag

SEQ ID NO: 1489590 - RNA, 19 nt, Artificial Sequence
  Description of Artificial Sequence: Synthetic oligonucleotide
auacuuggcuaaagugugu

SEQ ID NO: 1489591 - RNA, 19 nt, Artificial Sequence
  Description of Artificial Sequence: Synthetic oligonucleotide
gugaaguaaacuagaguau

SEQ ID NO: 1489592 - RNA, 19 nt, Artificial Sequence
  Description of Artificial Sequence: Synthetic oligonucleotide
cacgacgggagcccagcug

SEQ ID NO: 1489593 - RNA, 19 nt, Artificial Sequence
  Description of Artificial Sequence: Synthetic oligonucleotide
gugcugaucuugaggaguc

SEQ ID NO: 1489594 - RNA, 19 nt, Artificial Sequence
  Description of Artificial Sequence: Synthetic oligonucleotide
ugugcacgacgggagccca

SEQ ID NO: 1489595 - RNA, 19 nt, Artificial Sequence
  Description of Artificial Sequence: Synthetic oligonucleotide
ccggauagucacauggcuc

SEQ ID NO: 1489596 - RNA, 19 nt, Artificial Sequence
  Description of Artificial Sequence: Synthetic oligonucleotide
ggaauggacuuggaccagc

SEQ ID NO: 1489597 - RNA, 19 nt, Artificial Sequence
  Description of Artificial Sequence: Synthetic oligonucleotide
cagaagccuaaacuuggaa

SEQ ID NO: 1489598 - RNA, 19 nt, Artificial Sequence
  Description of Artificial Sequence: Synthetic oligonucleotide
cuuuaggauuaacuccugu

SEQ ID NO: 1489599 - RNA, 19 nt, Artificial Sequence
  Description of Artificial Sequence: Synthetic oligonucleotide
ggauuaacuccugugucaa

SEQ ID NO: 1489600 - RNA, 19 nt, Artificial Sequence
  Description of Artificial Sequence: Synthetic oligonucleotide
gaagcggcagcugcaaccu

SEQ ID NO: 1489601 - RNA, 19 nt, Artificial Sequence
  Description of Artificial Sequence: Synthetic oligonucleotide
guguaauacugcugcuuua

SEQ ID NO: 1489602 - RNA, 19 nt, Artificial Sequence
  Description of Artificial Sequence: Synthetic oligonucleotide
gguguaauacugcugcuuu

SEQ ID NO: 1489603 - RNA, 19 nt, Artificial Sequence
  Description of Artificial Sequence: Synthetic oligonucleotide
caucuaagaaguguggguu

SEQ ID NO: 1489604 - RNA, 19 nt, Artificial Sequence
  Description of Artificial Sequence: Synthetic oligonucleotide
cacgcauacguccauuuau

SEQ ID NO: 1489605 - RNA, 19 nt, Artificial Sequence
  Description of Artificial Sequence: Synthetic oligonucleotide
cagucuucguuaucuauau

SEQ ID NO: 1489606 - RNA, 19 nt, Artificial Sequence
  Description of Artificial Sequence: Synthetic oligonucleotide
ccuagagccuguccauuag

SEQ ID NO: 1489607 - RNA, 19 nt, Artificial Sequence
  Description of Artificial Sequence: Synthetic oligonucleotide
gacaccgucgggcgucgga

SEQ ID NO: 1489608 - RNA, 19 nt, Artificial Sequence
  Description of Artificial Sequence: Synthetic oligonucleotide
cguccauuuauaucucuuc

SEQ ID NO: 1489609 - RNA, 19 nt, Artificial Sequence
  Description of Artificial Sequence: Synthetic oligonucleotide
auccgguguaauacugcug

SEQ ID NO: 1489610 - RNA, 19 nt, Artificial Sequence
  Description of Artificial Sequence: Synthetic oligonucleotide
cuacguucuuggccaugug

SEQ ID NO: 1489611 - RNA, 19 nt, Artificial Sequence
  Description of Artificial Sequence: Synthetic oligonucleotide
acgcauacguccauuuaua

SEQ ID NO: 1489612 - RNA, 19 nt, Artificial Sequence
  Description of Artificial Sequence: Synthetic oligonucleotide
guaggaaccgguccaugau

SEQ ID NO: 1489613 - RNA, 19 nt, Artificial Sequence
  Description of Artificial Sequence: Synthetic oligonucleotide
aacucgaauuucagcucuu

SEQ ID NO: 1489614 - RNA, 19 nt, Artificial Sequence
  Description of Artificial Sequence: Synthetic oligonucleotide
ugcugaucuugaggagucu

SEQ ID NO: 1489615 - RNA, 19 nt, Artificial Sequence
  Description of Artificial Sequence: Synthetic oligonucleotide
gccuaaacuuggaauggac

SEQ ID NO: 1489616 - RNA, 19 nt, Artificial Sequence
  Description of Artificial Sequence: Synthetic oligonucleotide
ccggcagaccggcugagcc

SEQ ID NO: 1489617 - RNA, 19 nt, Artificial Sequence
  Description of Artificial Sequence: Synthetic oligonucleotide
cuuccggcagaccggcuga

SEQ ID NO: 1489618 - RNA, 19 nt, Artificial Sequence
  Description of Artificial Sequence: Synthetic oligonucleotide
cgauauuuggagaaaacau

SEQ ID NO: 1489619 - RNA, 19 nt, Artificial Sequence
  Description of Artificial Sequence: Synthetic oligonucleotide
ucacuacguucuuggccau

SEQ ID NO: 1489620 - RNA, 19 nt, Artificial Sequence
  Description of Artificial Sequence: Synthetic oligonucleotide
aaacugcccgccggauagu

SEQ ID NO: 1489621 - RNA, 19 nt, Artificial Sequence
  Description of Artificial Sequence: Synthetic oligonucleotide
accugagaagggugauaau

SEQ ID NO: 1489622 - RNA, 19 nt, Artificial Sequence
  Description of Artificial Sequence: Synthetic oligonucleotide
cugggacguacggacucag

SEQ ID NO: 1489623 - RNA, 19 nt, Artificial Sequence
  Description of Artificial Sequence: Synthetic oligonucleotide
acguccaccuccccagcuu

SEQ ID NO: 1489624 - RNA, 19 nt, Artificial Sequence
  Description of Artificial Sequence: Synthetic oligonucleotide
cugcuggcauacuuguucu

SEQ ID NO: 1489625 - RNA, 19 nt, Artificial Sequence
  Description of Artificial Sequence: Synthetic oligonucleotide
guacggacucagcgcugcc

SEQ ID NO: 1489626 - RNA, 19 nt, Artificial Sequence
  Description of Artificial Sequence: Synthetic oligonucleotide
cuguaggaaccgguccaug

SEQ ID NO: 1489627 - RNA, 19 nt, Artificial Sequence
  Description of Artificial Sequence: Synthetic oligonucleotide
guguguuguuccacgucca

SEQ ID NO: 1489628 - RNA, 19 nt, Artificial Sequence
  Description of Artificial Sequence: Synthetic oligonucleotide
gauuaacuccugugucaau

SEQ ID NO: 1489629 - RNA, 19 nt, Artificial Sequence
  Description of Artificial Sequence: Synthetic oligonucleotide
caccgucgggcgucggagc

SEQ ID NO: 1489630 - RNA, 19 nt, Artificial Sequence
  Description of Artificial Sequence: Synthetic oligonucleotide
ccaccugaguccguggcgc

SEQ ID NO: 1489631 - RNA, 19 nt, Artificial Sequence
  Description of Artificial Sequence: Synthetic oligonucleotide
ggaucucgcugcuucccca

SEQ ID NO: 1489632 - RNA, 19 nt, Artificial Sequence
  Description of Artificial Sequence: Synthetic oligonucleotide
ugcccgccggauagucaca

SEQ ID NO: 1489633 - RNA, 19 nt, Artificial Sequence
  Description of Artificial Sequence: Synthetic oligonucleotide
ccucguauuuggaagccaa

SEQ ID NO: 1489634 - RNA, 19 nt, Artificial Sequence
  Description of Artificial Sequence: Synthetic oligonucleotide
aggcucgccuuaagaagug

SEQ ID NO: 1489635 - RNA, 19 nt, Artificial Sequence
  Description of Artificial Sequence: Synthetic oligonucleotide
ccauuuauaucucuuccau

SEQ ID NO: 1489636 - RNA, 19 nt, Artificial Sequence
  Description of Artificial Sequence: Synthetic oligonucleotide
gucacuuuggugggcugaa

SEQ ID NO: 1489637 - RNA, 19 nt, Artificial Sequence
  Description of Artificial Sequence: Synthetic oligonucleotide
aggccggcccaacucgaau

SEQ ID NO: 1489638 - RNA, 19 nt, Artificial Sequence
  Description of Artificial Sequence: Synthetic oligonucleotide
uccggcagaccggcugagc

SEQ ID NO: 1489639 - RNA, 19 nt, Artificial Sequence
  Description of Artificial Sequence: Synthetic oligonucleotide
acgggagcccagcugccua

SEQ ID NO: 1489640 - RNA, 19 nt, Artificial Sequence
  Description of Artificial Sequence: Synthetic oligonucleotide
ugccuagagccuguccauu

SEQ ID NO: 1489641 - RNA, 19 nt, Artificial Sequence
  Description of Artificial Sequence: Synthetic oligonucleotide
gcuuuaggauuaacuccug

SEQ ID NO: 1489642 - RNA, 19 nt, Artificial Sequence
  Description of Artificial Sequence: Synthetic oligonucleotide
cuuuugaggcucgccuuaa

SEQ ID NO: 1489643 - RNA, 19 nt, Artificial Sequence
  Description of Artificial Sequence: Synthetic oligonucleotide
gcugcucugguucuaacuu

SEQ ID NO: 1489644 - RNA, 19 nt, Artificial Sequence
  Description of Artificial Sequence: Synthetic oligonucleotide
gcuuuugaggcucgccuua

SEQ ID NO: 1489645 - RNA, 19 nt, Artificial Sequence
  Description of Artificial Sequence: Synthetic oligonucleotide
ggagacucaggaucucgcu

SEQ ID NO: 1489646 - RNA, 19 nt, Artificial Sequence
  Description of Artificial Sequence: Synthetic oligonucleotide
cacuacguucuuggccaug

SEQ ID NO: 1489647 - RNA, 19 nt, Artificial Sequence
  Description of Artificial Sequence: Synthetic oligonucleotide
ggcuguagguuuuggcugu

SEQ ID NO: 1489648 - RNA, 19 nt, Artificial Sequence
  Description of Artificial Sequence: Synthetic oligonucleotide
ccauguauccgguguaaua

SEQ ID NO: 1489649 - RNA, 19 nt, Artificial Sequence
  Description of Artificial Sequence: Synthetic oligonucleotide
aggcgaggucuuugauggu

SEQ ID NO: 1489650 - RNA, 19 nt, Artificial Sequence
  Description of Artificial Sequence: Synthetic oligonucleotide
guccguggcgccguuggga

SEQ ID NO: 1489651 - RNA, 19 nt, Artificial Sequence
  Description of Artificial Sequence: Synthetic oligonucleotide
aaggccggcccaacucgaa

SEQ ID NO: 1489652 - RNA, 19 nt, Artificial Sequence
  Description of Artificial Sequence: Synthetic oligonucleotide
gggaucgugcugaucuuga

SEQ ID NO: 1489653 - RNA, 19 nt, Artificial Sequence
  Description of Artificial Sequence: Synthetic oligonucleotide
gcugcaaccugagaagggu

SEQ ID NO: 1489654 - RNA, 19 nt, Artificial Sequence
  Description of Artificial Sequence: Synthetic oligonucleotide
ggucgccgauucaaauacc

SEQ ID NO: 1489655 - RNA, 19 nt, Artificial Sequence
  Description of Artificial Sequence: Synthetic oligonucleotide
cugaggguuuucccagucu

SEQ ID NO: 1489656 - RNA, 19 nt, Artificial Sequence
  Description of Artificial Sequence: Synthetic oligonucleotide
gcucgccuuaagaagugga

SEQ ID NO: 1489657 - RNA, 19 nt, Artificial Sequence
  Description of Artificial Sequence: Synthetic oligonucleotide
cacauggcucuuagcuuua

SEQ ID NO: 1489658 - RNA, 19 nt, Artificial Sequence
  Description of Artificial Sequence: Synthetic oligonucleotide
cacucuccauguauccggu

SEQ ID NO: 1489659 - RNA, 19 nt, Artificial Sequence
  Description of Artificial Sequence: Synthetic oligonucleotide
ccacuccacggccgggucg

SEQ ID NO: 1489660 - RNA, 19 nt, Artificial Sequence
  Description of Artificial Sequence: Synthetic oligonucleotide
gcgccguugggagacucag

SEQ ID NO: 1489661 - RNA, 19 nt, Artificial Sequence
  Description of Artificial Sequence: Synthetic oligonucleotide
cugagggaucgugcugauc

SEQ ID NO: 1489662 - RNA, 19 nt, Artificial Sequence
  Description of Artificial Sequence: Synthetic oligonucleotide
ggacuuggaccagccaguc

SEQ ID NO: 1489663 - RNA, 19 nt, Artificial Sequence
  Description of Artificial Sequence: Synthetic oligonucleotide
cgccggauagucacauggc

SEQ ID NO: 1489664 - RNA, 19 nt, Artificial Sequence
  Description of Artificial Sequence: Synthetic oligonucleotide
uggcacgcauacguccauu

SEQ ID NO: 1489665 - RNA, 19 nt, Artificial Sequence
  Description of Artificial Sequence: Synthetic oligonucleotide
acguacggacucagcgcug

SEQ ID NO: 1489666 - RNA, 19 nt, Artificial Sequence
  Description of Artificial Sequence: Synthetic oligonucleotide
cggauagucacauggcucu

SEQ ID NO: 1489667 - RNA, 19 nt, Artificial Sequence
  Description of Artificial Sequence: Synthetic oligonucleotide
cguacggacucagcgcugc

SEQ ID NO: 1489668 - RNA, 19 nt, Artificial Sequence
  Description of Artificial Sequence: Synthetic oligonucleotide
agguuucacagaggcugua

SEQ ID NO: 1489669 - RNA, 19 nt, Artificial Sequence
  Description of Artificial Sequence: Synthetic oligonucleotide
gccuagagccuguccauua

SEQ ID NO: 1489670 - RNA, 19 nt, Artificial Sequence
  Description of Artificial Sequence: Synthetic oligonucleotide
gggugauaaugcaccaugu

SEQ ID NO: 1489671 - RNA, 19 nt, Artificial Sequence
  Description of Artificial Sequence: Synthetic oligonucleotide
cugugucaauagucuucaa

SEQ ID NO: 1489672 - RNA, 19 nt, Artificial Sequence
  Description of Artificial Sequence: Synthetic oligonucleotide
cugcucugguucuaacuuu

SEQ ID NO: 1489673 - RNA, 19 nt, Artificial Sequence
  Description of Artificial Sequence: Synthetic oligonucleotide
gugcacgacgggagcccag

SEQ ID NO: 1489674 - RNA, 19 nt, Artificial Sequence
  Description of Artificial Sequence: Synthetic oligonucleotide
gagggaucgugcugaucuu

SEQ ID NO: 1489675 - RNA, 19 nt, Artificial Sequence
  Description of Artificial Sequence: Synthetic oligonucleotide
cugccuagagccuguccau

SEQ ID NO: 1489676 - RNA, 19 nt, Artificial Sequence
  Description of Artificial Sequence: Synthetic oligonucleotide
gcgcugccaccugaguccg

SEQ ID NO: 1489677 - RNA, 19 nt, Artificial Sequence
  Description of Artificial Sequence: Synthetic oligonucleotide
cccagcugccuagagccug

SEQ ID NO: 1489678 - RNA, 19 nt, Artificial Sequence
  Description of Artificial Sequence: Synthetic oligonucleotide
cuaaaacugcccgccggau

SEQ ID NO: 1489679 - RNA, 19 nt, Artificial Sequence
  Description of Artificial Sequence: Synthetic oligonucleotide
gcacgcauacguccauuua

SEQ ID NO: 1489680 - RNA, 19 nt, Artificial Sequence
  Description of Artificial Sequence: Synthetic oligonucleotide
gccgugaucccaaccagcu

SEQ ID NO: 1489681 - RNA, 19 nt, Artificial Sequence
  Description of Artificial Sequence: Synthetic oligonucleotide
ccgugaucccaaccagcug

SEQ ID NO: 1489682 - RNA, 19 nt, Artificial Sequence
  Description of Artificial Sequence: Synthetic oligonucleotide
gcagagccgugaucccaac

SEQ ID NO: 1489683 - RNA, 19 nt, Artificial Sequence
  Description of Artificial Sequence: Synthetic oligonucleotide
gucgggcgucggagcagcg

SEQ ID NO: 1489684 - RNA, 19 nt, Artificial Sequence
  Description of Artificial Sequence: Synthetic oligonucleotide
cuaagaaguguggguugau

SEQ ID NO: 1489685 - RNA, 19 nt, Artificial Sequence
  Description of Artificial Sequence: Synthetic oligonucleotide
gcugccugagauacuggua

SEQ ID NO: 1489686 - RNA, 19 nt, Artificial Sequence
  Description of Artificial Sequence: Synthetic oligonucleotide
gcugggacguacggacuca

SEQ ID NO: 1489687 - RNA, 19 nt, Artificial Sequence
  Description of Artificial Sequence: Synthetic oligonucleotide
ggcacgcauacguccauuu

SEQ ID NO: 1489688 - RNA, 19 nt, Artificial Sequence
  Description of Artificial Sequence: Synthetic oligonucleotide
cgcugggacguacggacuc

SEQ ID NO: 1489689 - RNA, 19 nt, Artificial Sequence
  Description of Artificial Sequence: Synthetic oligonucleotide
ggccgcgcugggacguacg

SEQ ID NO: 1489690 - RNA, 19 nt, Artificial Sequence
  Description of Artificial Sequence: Synthetic oligonucleotide
ggcgaggucuuugaugguu

SEQ ID NO: 1489691 - RNA, 19 nt, Artificial Sequence
  Description of Artificial Sequence: Synthetic oligonucleotide
ggccgggucgccgauucaa

SEQ ID NO: 1489692 - RNA, 19 nt, Artificial Sequence
  Description of Artificial Sequence: Synthetic oligonucleotide
cgucggagcagcgccauga

SEQ ID NO: 1489693 - RNA, 19 nt, Artificial Sequence
  Description of Artificial Sequence: Synthetic oligonucleotide
ggccggcccaacucgaauu

SEQ ID NO: 1489694 - RNA, 19 nt, Artificial Sequence
  Description of Artificial Sequence: Synthetic oligonucleotide
cgacgggagcccagcugcc

SEQ ID NO: 1489695 - RNA, 19 nt, Artificial Sequence
  Description of Artificial Sequence: Synthetic oligonucleotide
cgucgggcgucggagcagc

SEQ ID NO: 1489696 - RNA, 19 nt, Artificial Sequence
  Description of Artificial Sequence: Synthetic oligonucleotide
cgggucgccgauucaaaua

SEQ ID NO: 1489697 - RNA, 19 nt, Artificial Sequence
  Description of Artificial Sequence: Synthetic oligonucleotide
cccgccggauagucacaug

SEQ ID NO: 1489698 - RNA, 19 nt, Artificial Sequence
  Description of Artificial Sequence: Synthetic oligonucleotide
ggcgccguugggagacuca

SEQ ID NO: 1489699 - RNA, 19 nt, Artificial Sequence
  Description of Artificial Sequence: Synthetic oligonucleotide
ccgguccaugauggcaaug

SEQ ID NO: 1489700 - RNA, 19 nt, Artificial Sequence
  Description of Artificial Sequence: Synthetic oligonucleotide
gcgucggagcagcgccaug

SEQ ID NO: 1489701 - RNA, 19 nt, Artificial Sequence
  Description of Artificial Sequence: Synthetic oligonucleotide
ccggcugagccuguaggaa

SEQ ID NO: 1489702 - RNA, 19 nt, Artificial Sequence
  Description of Artificial Sequence: Synthetic oligonucleotide
ccggcccaacucgaauuuc

SEQ ID NO: 1489703 - RNA, 19 nt, Artificial Sequence
  Description of Artificial Sequence: Synthetic oligonucleotide
cgcauacguccauuuauau

SEQ ID NO: 1489704 - RNA, 19 nt, Artificial Sequence
  Description of Artificial Sequence: Synthetic oligonucleotide
gggaggcgaggucuuugau

SEQ ID NO: 1489705 - RNA, 19 nt, Artificial Sequence
  Description of Artificial Sequence: Synthetic oligonucleotide
gccggcccaacucgaauuu

SEQ ID NO: 1489706 - RNA, 19 nt, Artificial Sequence
  Description of Artificial Sequence: Synthetic oligonucleotide
ggacaccgucgggcgucgg

SEQ ID NO: 1489707 - RNA, 19 nt, Artificial Sequence
  Description of Artificial Sequence: Synthetic oligonucleotide
gcgaggucuuugaugguuu

SEQ ID NO: 1489708 - RNA, 19 nt, Artificial Sequence
  Description of Artificial Sequence: Synthetic oligonucleotide
cagaccggcugagccugua

SEQ ID NO: 1489709 - RNA, 19 nt, Artificial Sequence
  Description of Artificial Sequence: Synthetic oligonucleotide
ccgguguaauacugcugcu

SEQ ID NO: 1489710 - RNA, 19 nt, Artificial Sequence
  Description of Artificial Sequence: Synthetic oligonucleotide
gccgggucgccgauucaaa

SEQ ID NO: 1489711 - RNA, 19 nt, Artificial Sequence
  Description of Artificial Sequence: Synthetic oligonucleotide
gggcgucggagcagcgcca

SEQ ID NO: 1489712 - RNA, 19 nt, Artificial Sequence
  Description of Artificial Sequence: Synthetic oligonucleotide
gcacgacgggagcccagcu

SEQ ID NO: 1489713 - RNA, 19 nt, Artificial Sequence
  Description of Artificial Sequence: Synthetic oligonucleotide
agggccgcgcugggacgua

SEQ ID NO: 1489714 - RNA, 19 nt, Artificial Sequence
  Description of Artificial Sequence: Synthetic oligonucleotide
ccgggucgccgauucaaau

SEQ ID NO: 1489715 - RNA, 19 nt, Artificial Sequence
  Description of Artificial Sequence: Synthetic oligonucleotide
gggccgcgcugggacguac

SEQ ID NO: 1489716 - RNA, 19 nt, Artificial Sequence
  Description of Artificial Sequence: Synthetic oligonucleotide
ccgcgcugggacguacgga

SEQ ID NO: 1489717 - RNA, 19 nt, Artificial Sequence
  Description of Artificial Sequence: Synthetic oligonucleotide
gcccgccggauagucacau

SEQ ID NO: 1489718 - RNA, 19 nt, Artificial Sequence
  Description of Artificial Sequence: Synthetic oligonucleotide
gcgcugggacguacggacu

SEQ ID NO: 1489719 - RNA, 19 nt, Artificial Sequence
  Description of Artificial Sequence: Synthetic oligonucleotide
cgaggucuuugaugguuuu

SEQ ID NO: 1489720 - RNA, 19 nt, Artificial Sequence
  Description of Artificial Sequence: Synthetic oligonucleotide
gcagaccggcugagccugu

SEQ ID NO: 1489721 - RNA, 19 nt, Artificial Sequence
  Description of Artificial Sequence: Synthetic oligonucleotide
cacggccgggucgccgauu

SEQ ID NO: 1489722 - RNA, 19 nt, Artificial Sequence
  Description of Artificial Sequence: Synthetic oligonucleotide
cggccgggucgccgauuca

SEQ ID NO: 1489723 - RNA, 19 nt, Artificial Sequence
  Description of Artificial Sequence: Synthetic oligonucleotide
auugauaaaauacagaugu

SEQ ID NO: 1489724 - RNA, 19 nt, Artificial Sequence
  Description of Artificial Sequence: Synthetic oligonucleotide
aauacaacagcacuggaag

SEQ ID NO: 1489725 - RNA, 19 nt, Artificial Sequence
  Description of Artificial Sequence: Synthetic oligonucleotide
ucauaguucacugagagcc

SEQ ID NO: 1489726 - RNA, 19 nt, Artificial Sequence
  Description of Artificial Sequence: Synthetic oligonucleotide
acagcaauugcuuccaacc

SEQ ID NO: 1489727 - RNA, 19 nt, Artificial Sequence
  Description of Artificial Sequence: Synthetic oligonucleotide
augaccaggcuacagaacc

SEQ ID NO: 1489728 - RNA, 19 nt, Artificial Sequence
  Description of Artificial Sequence: Synthetic oligonucleotide
aacucaucucgcuugcucc

SEQ ID NO: 1489729 - RNA, 19 nt, Artificial Sequence
  Description of Artificial Sequence: Synthetic oligonucleotide
ugucccagaacucaucucg

SEQ ID NO: 1489730 - RNA, 19 nt, Artificial Sequence
  Description of Artificial Sequence: Synthetic oligonucleotide
auugcuuccaacccugagc

SEQ ID NO: 1489731 - RNA, 19 nt, Artificial Sequence
  Description of Artificial Sequence: Synthetic oligonucleotide
ucauagcauucacagaggg

SEQ ID NO: 1489732 - RNA, 19 nt, Artificial Sequence
  Description of Artificial Sequence: Synthetic oligonucleotide
ugauaaaauacagaugugu

SEQ ID NO: 1489733 - RNA, 19 nt, Artificial Sequence
  Description of Artificial Sequence: Synthetic oligonucleotide
cuuucagugggaauucucg

SEQ ID NO: 1489734 - RNA, 19 nt, Artificial Sequence
  Description of Artificial Sequence: Synthetic oligonucleotide
ugugugacuggcaagcagc

SEQ ID NO: 1489735 - RNA, 19 nt, Artificial Sequence
  Description of Artificial Sequence: Synthetic oligonucleotide
aaagccuggcuaucuggcc

SEQ ID NO: 1489736 - RNA, 19 nt, Artificial Sequence
  Description of Artificial Sequence: Synthetic oligonucleotide
gauccagugcccuggaagg

SEQ ID NO: 1489737 - RNA, 19 nt, Artificial Sequence
  Description of Artificial Sequence: Synthetic oligonucleotide
gauaaaauacagauguguc

SEQ ID NO: 1489738 - RNA, 19 nt, Artificial Sequence
  Description of Artificial Sequence: Synthetic oligonucleotide
ugugcggucuguaagcagc

SEQ ID NO: 1489739 - RNA, 19 nt, Artificial Sequence
  Description of Artificial Sequence: Synthetic oligonucleotide
auagaugggcaguugguag

SEQ ID NO: 1489740 - RNA, 19 nt, Artificial Sequence
  Description of Artificial Sequence: Synthetic oligonucleotide
uuucagugggaauucucgg

SEQ ID NO: 1489741 - RNA, 19 nt, Artificial Sequence
  Description of Artificial Sequence: Synthetic oligonucleotide
agcacagcaggccugcccc

SEQ ID NO: 1489742 - RNA, 19 nt, Artificial Sequence
  Description of Artificial Sequence: Synthetic oligonucleotide
cacuuuuccacuugagccg

SEQ ID NO: 1489743 - RNA, 19 nt, Artificial Sequence
  Description of Artificial Sequence: Synthetic oligonucleotide
aauugcuuccaacccugag

SEQ ID NO: 1489744 - RNA, 19 nt, Artificial Sequence
  Description of Artificial Sequence: Synthetic oligonucleotide
uacacagggcccuacuggg

SEQ ID NO: 1489745 - RNA, 19 nt, Artificial Sequence
  Description of Artificial Sequence: Synthetic oligonucleotide
uugauaaaauacagaugug

SEQ ID NO: 1489746 - RNA, 19 nt, Artificial Sequence
  Description of Artificial Sequence: Synthetic oligonucleotide
auagcauucacagaggguu

SEQ ID NO: 1489747 - RNA, 19 nt, Artificial Sequence
  Description of Artificial Sequence: Synthetic oligonucleotide
gauugugcugggugcaggg

SEQ ID NO: 1489748 - RNA, 19 nt, Artificial Sequence
  Description of Artificial Sequence: Synthetic oligonucleotide
gaagaaccaucucugccag

SEQ ID NO: 1489749 - RNA, 19 nt, Artificial Sequence
  Description of Artificial Sequence: Synthetic oligonucleotide
acagaggguuccaugaggc

SEQ ID NO: 1489750 - RNA, 19 nt, Artificial Sequence
  Description of Artificial Sequence: Synthetic oligonucleotide
gagcaaaaggcuuuauuga

SEQ ID NO: 1489751 - RNA, 19 nt, Artificial Sequence
  Description of Artificial Sequence: Synthetic oligonucleotide
uucagugggaauucucggc

SEQ ID NO: 1489752 - RNA, 19 nt, Artificial Sequence
  Description of Artificial Sequence: Synthetic oligonucleotide
gauucccuccccuccaggg

SEQ ID NO: 1489753 - RNA, 19 nt, Artificial Sequence
  Description of Artificial Sequence: Synthetic oligonucleotide
ugugucccagaacucaucu

SEQ ID NO: 1489754 - RNA, 19 nt, Artificial Sequence
  Description of Artificial Sequence: Synthetic oligonucleotide
acaggcaauagaugggcag

SEQ ID NO: 1489755 - RNA, 19 nt, Artificial Sequence
  Description of Artificial Sequence: Synthetic oligonucleotide
gagaggcgcacuuucagug

SEQ ID NO: 1489756 - RNA, 19 nt, Artificial Sequence
  Description of Artificial Sequence: Synthetic oligonucleotide
gaaucuugguuuccuggag

SEQ ID NO: 1489757 - RNA, 19 nt, Artificial Sequence
  Description of Artificial Sequence: Synthetic oligonucleotide
uuagcuucagccgcauagg

SEQ ID NO: 1489758 - RNA, 19 nt, Artificial Sequence
  Description of Artificial Sequence: Synthetic oligonucleotide
agcaaaaggcuuuauugau

SEQ ID NO: 1489759 - RNA, 19 nt, Artificial Sequence
  Description of Artificial Sequence: Synthetic oligonucleotide
cuggagugagcacagcagg

SEQ ID NO: 1489760 - RNA, 19 nt, Artificial Sequence
  Description of Artificial Sequence: Synthetic oligonucleotide
agugcuaggugccuuuucu

SEQ ID NO: 1489761 - RNA, 19 nt, Artificial Sequence
  Description of Artificial Sequence: Synthetic oligonucleotide
uucucggcgcacacuaggg

SEQ ID NO: 1489762 - RNA, 19 nt, Artificial Sequence
  Description of Artificial Sequence: Synthetic oligonucleotide
ugucuccccacgcaguugc

SEQ ID NO: 1489763 - RNA, 19 nt, Artificial Sequence
  Description of Artificial Sequence: Synthetic oligonucleotide
uucauaguucacugagagc

SEQ ID NO: 1489764 - RNA, 19 nt, Artificial Sequence
  Description of Artificial Sequence: Synthetic oligonucleotide
agcaauugcuuccaacccu

SEQ ID NO: 1489765 - RNA, 19 nt, Artificial Sequence
  Description of Artificial Sequence: Synthetic oligonucleotide
ugagagccauacagcaggg

SEQ ID NO: 1489766 - RNA, 19 nt, Artificial Sequence
  Description of Artificial Sequence: Synthetic oligonucleotide
ugacaggcaauagaugggc

SEQ ID NO: 1489767 - RNA, 19 nt, Artificial Sequence
  Description of Artificial Sequence: Synthetic oligonucleotide
uagaugggcaguugguagc

SEQ ID NO: 1489768 - RNA, 19 nt, Artificial Sequence
  Description of Artificial Sequence: Synthetic oligonucleotide
caggcuacagaacccaccc

SEQ ID NO: 1489769 - RNA, 19 nt, Artificial Sequence
  Description of Artificial Sequence: Synthetic oligonucleotide
acuggaaggcgucaguccu

SEQ ID NO: 1489770 - RNA, 19 nt, Artificial Sequence
  Description of Artificial Sequence: Synthetic oligonucleotide
agcuucccagagaagaacc

SEQ ID NO: 1489771 - RNA, 19 nt, Artificial Sequence
  Description of Artificial Sequence: Synthetic oligonucleotide
ucacuggugauucccuccc

SEQ ID NO: 1489772 - RNA, 19 nt, Artificial Sequence
  Description of Artificial Sequence: Synthetic oligonucleotide
cugcccgucagucaugggg

SEQ ID NO: 1489773 - RNA, 19 nt, Artificial Sequence
  Description of Artificial Sequence: Synthetic oligonucleotide
ucaccucaagcucuccaag

SEQ ID NO: 1489774 - RNA, 19 nt, Artificial Sequence
  Description of Artificial Sequence: Synthetic oligonucleotide
gcuucagccgcauaggcag

SEQ ID NO: 1489775 - RNA, 19 nt, Artificial Sequence
  Description of Artificial Sequence: Synthetic oligonucleotide
ugacuggcaagcagcacug

SEQ ID NO: 1489776 - RNA, 19 nt, Artificial Sequence
  Description of Artificial Sequence: Synthetic oligonucleotide
auuucguccugcucgcuug

SEQ ID NO: 1489777 - RNA, 19 nt, Artificial Sequence
  Description of Artificial Sequence: Synthetic oligonucleotide
aauagaugggcaguuggua

SEQ ID NO: 1489778 - RNA, 19 nt, Artificial Sequence
  Description of Artificial Sequence: Synthetic oligonucleotide
guugguagcgauugcccag

SEQ ID NO: 1489779 - RNA, 19 nt, Artificial Sequence
  Description of Artificial Sequence: Synthetic oligonucleotide
uggagugagcacagcaggc

SEQ ID NO: 1489780 - RNA, 19 nt, Artificial Sequence
  Description of Artificial Sequence: Synthetic oligonucleotide
uggcaagcagcacugcccc

SEQ ID NO: 1489781 - RNA, 19 nt, Artificial Sequence
  Description of Artificial Sequence: Synthetic oligonucleotide
guuacaguuggggauggcc

SEQ ID NO: 1489782 - RNA, 19 nt, Artificial Sequence
  Description of Artificial Sequence: Synthetic oligonucleotide
ucucggcgcacacuagggg

SEQ ID NO: 1489783 - RNA, 19 nt, Artificial Sequence
  Description of Artificial Sequence: Synthetic oligonucleotide
cagaugugucuguacacag

SEQ ID NO: 1489784 - RNA, 19 nt, Artificial Sequence
  Description of Artificial Sequence: Synthetic oligonucleotide
cuccuugcggcccucaaag

SEQ ID NO: 1489785 - RNA, 19 nt, Artificial Sequence
  Description of Artificial Sequence: Synthetic oligonucleotide
agcagaaaacuggagugag

SEQ ID NO: 1489786 - RNA, 19 nt, Artificial Sequence
  Description of Artificial Sequence: Synthetic oligonucleotide
aguugguagcgauugccca

SEQ ID NO: 1489787 - RNA, 19 nt, Artificial Sequence
  Description of Artificial Sequence: Synthetic oligonucleotide
gaauucucggcgcacacua

SEQ ID NO: 1489788 - RNA, 19 nt, Artificial Sequence
  Description of Artificial Sequence: Synthetic oligonucleotide
ugccauaaagccuggcuau

SEQ ID NO: 1489789 - RNA, 19 nt, Artificial Sequence
  Description of Artificial Sequence: Synthetic oligonucleotide
agccauacagcaggguggc

SEQ ID NO: 1489790 - RNA, 19 nt, Artificial Sequence
  Description of Artificial Sequence: Synthetic oligonucleotide
ucggcuucgccacaaacuu

SEQ ID NO: 1489791 - RNA, 19 nt, Artificial Sequence
  Description of Artificial Sequence: Synthetic oligonucleotide
cucauuucguccugcucgc

SEQ ID NO: 1489792 - RNA, 19 nt, Artificial Sequence
  Description of Artificial Sequence: Synthetic oligonucleotide
gagucauggugagggaugg

SEQ ID NO: 1489793 - RNA, 19 nt, Artificial Sequence
  Description of Artificial Sequence: Synthetic oligonucleotide
cagcaauugcuuccaaccc

SEQ ID NO: 1489794 - RNA, 19 nt, Artificial Sequence
  Description of Artificial Sequence: Synthetic oligonucleotide
cugccuggguuacaguugg

SEQ ID NO: 1489795 - RNA, 19 nt, Artificial Sequence
  Description of Artificial Sequence: Synthetic oligonucleotide
cagaccccugccauaaagc

SEQ ID NO: 1489796 - RNA, 19 nt, Artificial Sequence
  Description of Artificial Sequence: Synthetic oligonucleotide
uggcucgaugcccuccugg

SEQ ID NO: 1489797 - RNA, 19 nt, Artificial Sequence
  Description of Artificial Sequence: Synthetic oligonucleotide
uccaaccugugguggagag

SEQ ID NO: 1489798 - RNA, 19 nt, Artificial Sequence
  Description of Artificial Sequence: Synthetic oligonucleotide
ugcccgucagucauggggu

SEQ ID NO: 1489799 - RNA, 19 nt, Artificial Sequence
  Description of Artificial Sequence: Synthetic oligonucleotide
ugauucccuccccuccagg

SEQ ID NO: 1489800 - RNA, 19 nt, Artificial Sequence
  Description of Artificial Sequence: Synthetic oligonucleotide
ugggguagucacuuuucca

SEQ ID NO: 1489801 - RNA, 19 nt, Artificial Sequence
  Description of Artificial Sequence: Synthetic oligonucleotide
cacgcaguugcccaugcug

SEQ ID NO: 1489802 - RNA, 19 nt, Artificial Sequence
  Description of Artificial Sequence: Synthetic oligonucleotide
ugauugugcugggugcagg

SEQ ID NO: 1489803 - RNA, 19 nt, Artificial Sequence
  Description of Artificial Sequence: Synthetic oligonucleotide
caucgggagauccuggauc

SEQ ID NO: 1489804 - RNA, 19 nt, Artificial Sequence
  Description of Artificial Sequence: Synthetic oligonucleotide
ugguggagagugcuaggug

SEQ ID NO: 1489805 - RNA, 19 nt, Artificial Sequence
  Description of Artificial Sequence: Synthetic oligonucleotide
agaugggcaguugguagcg

SEQ ID NO: 1489806 - RNA, 19 nt, Artificial Sequence
  Description of Artificial Sequence: Synthetic oligonucleotide
ucguccugcucgcuugcgg

SEQ ID NO: 1489807 - RNA, 19 nt, Artificial Sequence
  Description of Artificial Sequence: Synthetic oligonucleotide
cacgcugcugcccggaacc

SEQ ID NO: 1489808 - RNA, 19 nt, Artificial Sequence
  Description of Artificial Sequence: Synthetic oligonucleotide
cucgaugcccuccuggcug

SEQ ID NO: 1489809 - RNA, 19 nt, Artificial Sequence
  Description of Artificial Sequence: Synthetic oligonucleotide
agccucacguccuugccug

SEQ ID NO: 1489810 - RNA, 19 nt, Artificial Sequence
  Description of Artificial Sequence: Synthetic oligonucleotide
aucucgcuugcuccgcaac

SEQ ID NO: 1489811 - RNA, 19 nt, Artificial Sequence
  Description of Artificial Sequence: Synthetic oligonucleotide
cuugccuguggagaggcgc

SEQ ID NO: 1489812 - RNA, 19 nt, Artificial Sequence
  Description of Artificial Sequence: Synthetic oligonucleotide
agucccuucauaguucacu

SEQ ID NO: 1489813 - RNA, 19 nt, Artificial Sequence
  Description of Artificial Sequence: Synthetic oligonucleotide
caucgcaccggagacggcg

SEQ ID NO: 1489814 - RNA, 19 nt, Artificial Sequence
  Description of Artificial Sequence: Synthetic oligonucleotide
ggcuacagaacccacccug

SEQ ID NO: 1489815 - RNA, 19 nt, Artificial Sequence
  Description of Artificial Sequence: Synthetic oligonucleotide
ucucgcuugcuccgcaacu

SEQ ID NO: 1489816 - RNA, 19 nt, Artificial Sequence
  Description of Artificial Sequence: Synthetic oligonucleotide
ucacagguggugacaggca

SEQ ID NO: 1489817 - RNA, 19 nt, Artificial Sequence
  Description of Artificial Sequence: Synthetic oligonucleotide
ggucguuagcuucagccgc

SEQ ID NO: 1489818 - RNA, 19 nt, Artificial Sequence
  Description of Artificial Sequence: Synthetic oligonucleotide
gggacuggcacuuugccca

SEQ ID NO: 1489819 - RNA, 19 nt, Artificial Sequence
  Description of Artificial Sequence: Synthetic oligonucleotide
uucccuccccuccagggga

SEQ ID NO: 1489820 - RNA, 19 nt, Artificial Sequence
  Description of Artificial Sequence: Synthetic oligonucleotide
caucccagaucuccuugcg

SEQ ID NO: 1489821 - RNA, 19 nt, Artificial Sequence
  Description of Artificial Sequence: Synthetic oligonucleotide
gggucaacggcucucgcag

SEQ ID NO: 1489822 - RNA, 19 nt, Artificial Sequence
  Description of Artificial Sequence: Synthetic oligonucleotide
caugggguagucacuuuuc

SEQ ID NO: 1489823 - RNA, 19 nt, Artificial Sequence
  Description of Artificial Sequence: Synthetic oligonucleotide
cuacagaacccacccugcc

SEQ ID NO: 1489824 - RNA, 19 nt, Artificial Sequence
  Description of Artificial Sequence: Synthetic oligonucleotide
uuugcccagggcagaguca

SEQ ID NO: 1489825 - RNA, 19 nt, Artificial Sequence
  Description of Artificial Sequence: Synthetic oligonucleotide
uugcggcccucaaaggcag

SEQ ID NO: 1489826 - RNA, 19 nt, Artificial Sequence
  Description of Artificial Sequence: Synthetic oligonucleotide
cucgcagcccgacaucggg

SEQ ID NO: 1489827 - RNA, 19 nt, Artificial Sequence
  Description of Artificial Sequence: Synthetic oligonucleotide
ucagccgguccccaucgca

SEQ ID NO: 1489828 - RNA, 19 nt, Artificial Sequence
  Description of Artificial Sequence: Synthetic oligonucleotide
agggcagagucauggugag

SEQ ID NO: 1489829 - RNA, 19 nt, Artificial Sequence
  Description of Artificial Sequence: Synthetic oligonucleotide
agccgguccccaucgcacc

SEQ ID NO: 1489830 - RNA, 19 nt, Artificial Sequence
  Description of Artificial Sequence: Synthetic oligonucleotide
gucaacggcucucgcagcc

SEQ ID NO: 1489831 - RNA, 19 nt, Artificial Sequence
  Description of Artificial Sequence: Synthetic oligonucleotide
agagucauggugagggaug

SEQ ID NO: 1489832 - RNA, 19 nt, Artificial Sequence
  Description of Artificial Sequence: Synthetic oligonucleotide
uugguagcgauugcccagc

SEQ ID NO: 1489833 - RNA, 19 nt, Artificial Sequence
  Description of Artificial Sequence: Synthetic oligonucleotide
ucggcgcacacuaggggug

SEQ ID NO: 1489834 - RNA, 19 nt, Artificial Sequence
  Description of Artificial Sequence: Synthetic oligonucleotide
aagggcucauuucguccug

SEQ ID NO: 1489835 - RNA, 19 nt, Artificial Sequence
  Description of Artificial Sequence: Synthetic oligonucleotide
caugaccaggcuacagaac

SEQ ID NO: 1489836 - RNA, 19 nt, Artificial Sequence
  Description of Artificial Sequence: Synthetic oligonucleotide
cuugcggcccucaaaggca

SEQ ID NO: 1489837 - RNA, 19 nt, Artificial Sequence
  Description of Artificial Sequence: Synthetic oligonucleotide
ucucgcagcccgacaucgg

SEQ ID NO: 1489838 - RNA, 19 nt, Artificial Sequence
  Description of Artificial Sequence: Synthetic oligonucleotide
ucgcuugcuccgcaacugc

SEQ ID NO: 1489839 - RNA, 19 nt, Artificial Sequence
  Description of Artificial Sequence: Synthetic oligonucleotide
cccugaagaauacaacagc

SEQ ID NO: 1489840 - RNA, 19 nt, Artificial Sequence
  Description of Artificial Sequence: Synthetic oligonucleotide
cucucgcagcccgacaucg

SEQ ID NO: 1489841 - RNA, 19 nt, Artificial Sequence
  Description of Artificial Sequence: Synthetic oligonucleotide
aauucucggcgcacacuag

SEQ ID NO: 1489842 - RNA, 19 nt, Artificial Sequence
  Description of Artificial Sequence: Synthetic oligonucleotide
ugucuguacacagggcccu

SEQ ID NO: 1489843 - RNA, 19 nt, Artificial Sequence
  Description of Artificial Sequence: Synthetic oligonucleotide
gacaucgggagauccugga

SEQ ID NO: 1489844 - RNA, 19 nt, Artificial Sequence
  Description of Artificial Sequence: Synthetic oligonucleotide
caccccugaagaauacaac

SEQ ID NO: 1489845 - RNA, 19 nt, Artificial Sequence
  Description of Artificial Sequence: Synthetic oligonucleotide
aguugcccaugcuggcuuc

SEQ ID NO: 1489846 - RNA, 19 nt, Artificial Sequence
  Description of Artificial Sequence: Synthetic oligonucleotide
cucauggucguuagcuuca

SEQ ID NO: 1489847 - RNA, 19 nt, Artificial Sequence
  Description of Artificial Sequence: Synthetic oligonucleotide
uccgcaacugcccgucagu

SEQ ID NO: 1489848 - RNA, 19 nt, Artificial Sequence
  Description of Artificial Sequence: Synthetic oligonucleotide
ucaucucgcuugcuccgca

SEQ ID NO: 1489849 - RNA, 19 nt, Artificial Sequence
  Description of Artificial Sequence: Synthetic oligonucleotide
gagcagaaaacuggaguga

SEQ ID NO: 1489850 - RNA, 19 nt, Artificial Sequence
  Description of Artificial Sequence: Synthetic oligonucleotide
gguggugacaggcaauaga

SEQ ID NO: 1489851 - RNA, 19 nt, Artificial Sequence
  Description of Artificial Sequence: Synthetic oligonucleotide
ccccugaagaauacaacag

SEQ ID NO: 1489852 - RNA, 19 nt, Artificial Sequence
  Description of Artificial Sequence: Synthetic oligonucleotide
uggcuccaaccuguggugg

SEQ ID NO: 1489853 - RNA, 19 nt, Artificial Sequence
  Description of Artificial Sequence: Synthetic oligonucleotide
uucucagccgguccccauc

SEQ ID NO: 1489854 - RNA, 19 nt, Artificial Sequence
  Description of Artificial Sequence: Synthetic oligonucleotide
aggcccgugugugacuggc

SEQ ID NO: 1489855 - RNA, 19 nt, Artificial Sequence
  Description of Artificial Sequence: Synthetic oligonucleotide
agucacuuuuccacuugag

SEQ ID NO: 1489856 - RNA, 19 nt, Artificial Sequence
  Description of Artificial Sequence: Synthetic oligonucleotide
caacggcucucgcagcccg

SEQ ID NO: 1489857 - RNA, 19 nt, Artificial Sequence
  Description of Artificial Sequence: Synthetic oligonucleotide
caggacgcaccccugaaga

SEQ ID NO: 1489858 - RNA, 19 nt, Artificial Sequence
  Description of Artificial Sequence: Synthetic oligonucleotide
aggcaagucccuucauagu

SEQ ID NO: 1489859 - RNA, 19 nt, Artificial Sequence
  Description of Artificial Sequence: Synthetic oligonucleotide
agggcucauuucguccugc

SEQ ID NO: 1489860 - RNA, 19 nt, Artificial Sequence
  Description of Artificial Sequence: Synthetic oligonucleotide
ggcuucgccacaaacuuug

SEQ ID NO: 1489861 - RNA, 19 nt, Artificial Sequence
  Description of Artificial Sequence: Synthetic oligonucleotide
cauaguucacugagagcca

SEQ ID NO: 1489862 - RNA, 19 nt, Artificial Sequence
  Description of Artificial Sequence: Synthetic oligonucleotide
gucuguaagcagcuuccca

SEQ ID NO: 1489863 - RNA, 19 nt, Artificial Sequence
  Description of Artificial Sequence: Synthetic oligonucleotide
aaggcccgugugugacugg

SEQ ID NO: 1489864 - RNA, 19 nt, Artificial Sequence
  Description of Artificial Sequence: Synthetic oligonucleotide
auaguucacugagagccau

SEQ ID NO: 1489865 - RNA, 19 nt, Artificial Sequence
  Description of Artificial Sequence: Synthetic oligonucleotide
ggcgcugugucccagaacu

SEQ ID NO: 1489866 - RNA, 19 nt, Artificial Sequence
  Description of Artificial Sequence: Synthetic oligonucleotide
aagucccuucauaguucac

SEQ ID NO: 1489867 - RNA, 19 nt, Artificial Sequence
  Description of Artificial Sequence: Synthetic oligonucleotide
ucauggucguuagcuucag

SEQ ID NO: 1489868 - RNA, 19 nt, Artificial Sequence
  Description of Artificial Sequence: Synthetic oligonucleotide
gcaauugcuuccaacccug

SEQ ID NO: 1489869 - RNA, 19 nt, Artificial Sequence
  Description of Artificial Sequence: Synthetic oligonucleotide
agcacuggaaggcgucagu

SEQ ID NO: 1489870 - RNA, 19 nt, Artificial Sequence
  Description of Artificial Sequence: Synthetic oligonucleotide
uuccuggagccgugugcgg

SEQ ID NO: 1489871 - RNA, 19 nt, Artificial Sequence
  Description of Artificial Sequence: Synthetic oligonucleotide
uggggcucacuggugauuc

SEQ ID NO: 1489872 - RNA, 19 nt, Artificial Sequence
  Description of Artificial Sequence: Synthetic oligonucleotide
ccuugcggcccucaaaggc

SEQ ID NO: 1489873 - RNA, 19 nt, Artificial Sequence
  Description of Artificial Sequence: Synthetic oligonucleotide
ugugcagaccccugccaua

SEQ ID NO: 1489874 - RNA, 19 nt, Artificial Sequence
  Description of Artificial Sequence: Synthetic oligonucleotide
uucagccgcauaggcagca

SEQ ID NO: 1489875 - RNA, 19 nt, Artificial Sequence
  Description of Artificial Sequence: Synthetic oligonucleotide
ucucccggcgcugucuccc

SEQ ID NO: 1489876 - RNA, 19 nt, Artificial Sequence
  Description of Artificial Sequence: Synthetic oligonucleotide
aacccacccugccuggguu

SEQ ID NO: 1489877 - RNA, 19 nt, Artificial Sequence
  Description of Artificial Sequence: Synthetic oligonucleotide
ggagugagcacagcaggcc

SEQ ID NO: 1489878 - RNA, 19 nt, Artificial Sequence
  Description of Artificial Sequence: Synthetic oligonucleotide
ugguggauccagugcccug

SEQ ID NO: 1489879 - RNA, 19 nt, Artificial Sequence
  Description of Artificial Sequence: Synthetic oligonucleotide
cuggugauucccuccccuc

SEQ ID NO: 1489880 - RNA, 19 nt, Artificial Sequence
  Description of Artificial Sequence: Synthetic oligonucleotide
cuucagccgcauaggcagc

SEQ ID NO: 1489881 - RNA, 19 nt, Artificial Sequence
  Description of Artificial Sequence: Synthetic oligonucleotide
cucaccucaagcucuccaa

SEQ ID NO: 1489882 - RNA, 19 nt, Artificial Sequence
  Description of Artificial Sequence: Synthetic oligonucleotide
ucaacggcucucgcagccc

SEQ ID NO: 1489883 - RNA, 19 nt, Artificial Sequence
  Description of Artificial Sequence: Synthetic oligonucleotide
gugugcggucuguaagcag

SEQ ID NO: 1489884 - RNA, 19 nt, Artificial Sequence
  Description of Artificial Sequence: Synthetic oligonucleotide
gaccaggcuacagaaccca

SEQ ID NO: 1489885 - RNA, 19 nt, Artificial Sequence
  Description of Artificial Sequence: Synthetic oligonucleotide
gcucauggucguuagcuuc

SEQ ID NO: 1489886 - RNA, 19 nt, Artificial Sequence
  Description of Artificial Sequence: Synthetic oligonucleotide
ucgcaccggagacggcggg

SEQ ID NO: 1489887 - RNA, 19 nt, Artificial Sequence
  Description of Artificial Sequence: Synthetic oligonucleotide
cucgcuugcuccgcaacug

SEQ ID NO: 1489888 - RNA, 19 nt, Artificial Sequence
  Description of Artificial Sequence: Synthetic oligonucleotide
agcucauggucguuagcuu

SEQ ID NO: 1489889 - RNA, 19 nt, Artificial Sequence
  Description of Artificial Sequence: Synthetic oligonucleotide
aggcgcugugucccagaac

SEQ ID NO: 1489890 - RNA, 19 nt, Artificial Sequence
  Description of Artificial Sequence: Synthetic oligonucleotide
cauggucguuagcuucagc

SEQ ID NO: 1489891 - RNA, 19 nt, Artificial Sequence
  Description of Artificial Sequence: Synthetic oligonucleotide
aggauggcucgaugcccuc

SEQ ID NO: 1489892 - RNA, 19 nt, Artificial Sequence
  Description of Artificial Sequence: Synthetic oligonucleotide
gagugagcacagcaggccu

SEQ ID NO: 1489893 - RNA, 19 nt, Artificial Sequence
  Description of Artificial Sequence: Synthetic oligonucleotide
cacguccuugccuguggag

SEQ ID NO: 1489894 - RNA, 19 nt, Artificial Sequence
  Description of Artificial Sequence: Synthetic oligonucleotide
caaggcccgugugugacug

SEQ ID NO: 1489895 - RNA, 19 nt, Artificial Sequence
  Description of Artificial Sequence: Synthetic oligonucleotide
accugugguggagagugcu

SEQ ID NO: 1489896 - RNA, 19 nt, Artificial Sequence
  Description of Artificial Sequence: Synthetic oligonucleotide
uucguccugcucgcuugcg

SEQ ID NO: 1489897 - RNA, 19 nt, Artificial Sequence
  Description of Artificial Sequence: Synthetic oligonucleotide
gccgugugcggucuguaag

SEQ ID NO: 1489898 - RNA, 19 nt, Artificial Sequence
  Description of Artificial Sequence: Synthetic oligonucleotide
gccuggguuacaguugggg

SEQ ID NO: 1489899 - RNA, 19 nt, Artificial Sequence
  Description of Artificial Sequence: Synthetic oligonucleotide
agaacccacccugccuggg

SEQ ID NO: 1489900 - RNA, 19 nt, Artificial Sequence
  Description of Artificial Sequence: Synthetic oligonucleotide
ggggccaugaccaggcuac

SEQ ID NO: 1489901 - RNA, 19 nt, Artificial Sequence
  Description of Artificial Sequence: Synthetic oligonucleotide
ggcccucaaaggcaggcgc

SEQ ID NO: 1489902 - RNA, 19 nt, Artificial Sequence
  Description of Artificial Sequence: Synthetic oligonucleotide
cuccgcaacugcccgucag

SEQ ID NO: 1489903 - RNA, 19 nt, Artificial Sequence
  Description of Artificial Sequence: Synthetic oligonucleotide
cauagcauucacagagggu

SEQ ID NO: 1489904 - RNA, 19 nt, Artificial Sequence
  Description of Artificial Sequence: Synthetic oligonucleotide
cugauugugcugggugcag

SEQ ID NO: 1489905 - RNA, 19 nt, Artificial Sequence
  Description of Artificial Sequence: Synthetic oligonucleotide
ggcucgaugcccuccuggc

SEQ ID NO: 1489906 - RNA, 19 nt, Artificial Sequence
  Description of Artificial Sequence: Synthetic oligonucleotide
cucaucucgcuugcuccgc

SEQ ID NO: 1489907 - RNA, 19 nt, Artificial Sequence
  Description of Artificial Sequence: Synthetic oligonucleotide
cacacuaggggugggcuca

SEQ ID NO: 1489908 - RNA, 19 nt, Artificial Sequence
  Description of Artificial Sequence: Synthetic oligonucleotide
cuggguuacaguuggggau

SEQ ID NO: 1489909 - RNA, 19 nt, Artificial Sequence
  Description of Artificial Sequence: Synthetic oligonucleotide
cagcucaucauagcauuca

SEQ ID NO: 1489910 - RNA, 19 nt, Artificial Sequence
  Description of Artificial Sequence: Synthetic oligonucleotide
gacgcaccccugaagaaua

SEQ ID NO: 1489911 - RNA, 19 nt, Artificial Sequence
  Description of Artificial Sequence: Synthetic oligonucleotide
aggcuacagaacccacccu

SEQ ID NO: 1489912 - RNA, 19 nt, Artificial Sequence
  Description of Artificial Sequence: Synthetic oligonucleotide
ggagacggcgggccggccg

SEQ ID NO: 1489913 - RNA, 19 nt, Artificial Sequence
  Description of Artificial Sequence: Synthetic oligonucleotide
cccuacuggggccaugacc

SEQ ID NO: 1489914 - RNA, 19 nt, Artificial Sequence
  Description of Artificial Sequence: Synthetic oligonucleotide
guucacugagagccauaca

SEQ ID NO: 1489915 - RNA, 19 nt, Artificial Sequence
  Description of Artificial Sequence: Synthetic oligonucleotide
aggacgcaccccugaagaa

SEQ ID NO: 1489916 - RNA, 19 nt, Artificial Sequence
  Description of Artificial Sequence: Synthetic oligonucleotide
ugguagcgauugcccagcu

SEQ ID NO: 1489917 - RNA, 19 nt, Artificial Sequence
  Description of Artificial Sequence: Synthetic oligonucleotide
cacuggugauucccucccc

SEQ ID NO: 1489918 - RNA, 19 nt, Artificial Sequence
  Description of Artificial Sequence: Synthetic oligonucleotide
gugagggaugguggugggg

SEQ ID NO: 1489919 - RNA, 19 nt, Artificial Sequence
  Description of Artificial Sequence: Synthetic oligonucleotide
caagggcucauuucguccu

SEQ ID NO: 1489920 - RNA, 19 nt, Artificial Sequence
  Description of Artificial Sequence: Synthetic oligonucleotide
gaggcucaccucaagcucu

SEQ ID NO: 1489921 - RNA, 19 nt, Artificial Sequence
  Description of Artificial Sequence: Synthetic oligonucleotide
aucgcaccggagacggcgg

SEQ ID NO: 1489922 - RNA, 19 nt, Artificial Sequence
  Description of Artificial Sequence: Synthetic oligonucleotide
cggucuguaagcagcuucc

SEQ ID NO: 1489923 - RNA, 19 nt, Artificial Sequence
  Description of Artificial Sequence: Synthetic oligonucleotide
gugaugcuggcuccaucca

SEQ ID NO: 1489924 - RNA, 19 nt, Artificial Sequence
  Description of Artificial Sequence: Synthetic oligonucleotide
ccgugugugacuggcaagc

SEQ ID NO: 1489925 - RNA, 19 nt, Artificial Sequence
  Description of Artificial Sequence: Synthetic oligonucleotide
acggcucucgcagcccgac

SEQ ID NO: 1489926 - RNA, 19 nt, Artificial Sequence
  Description of Artificial Sequence: Synthetic oligonucleotide
uggcaaggcccguguguga

SEQ ID NO: 1489927 - RNA, 19 nt, Artificial Sequence
  Description of Artificial Sequence: Synthetic oligonucleotide
acugcccgucagucauggg

SEQ ID NO: 1489928 - RNA, 19 nt, Artificial Sequence
  Description of Artificial Sequence: Synthetic oligonucleotide
aggcgucaguccuggggug

SEQ ID NO: 1489929 - RNA, 19 nt, Artificial Sequence
  Description of Artificial Sequence: Synthetic oligonucleotide
cuccccacgcaguugccca

SEQ ID NO: 1489930 - RNA, 19 nt, Artificial Sequence
  Description of Artificial Sequence: Synthetic oligonucleotide
uggggugcgcucugcccga

SEQ ID NO: 1489931 - RNA, 19 nt, Artificial Sequence
  Description of Artificial Sequence: Synthetic oligonucleotide
cauggugagggaugguggu

SEQ ID NO: 1489932 - RNA, 19 nt, Artificial Sequence
  Description of Artificial Sequence: Synthetic oligonucleotide
ugcuccgcaacugcccguc

SEQ ID NO: 1489933 - RNA, 19 nt, Artificial Sequence
  Description of Artificial Sequence: Synthetic oligonucleotide
gcggucuguaagcagcuuc

SEQ ID NO: 1489934 - RNA, 19 nt, Artificial Sequence
  Description of Artificial Sequence: Synthetic oligonucleotide
accggagacggcgggccgg

SEQ ID NO: 1489935 - RNA, 19 nt, Artificial Sequence
  Description of Artificial Sequence: Synthetic oligonucleotide
gccagcucauggucguuag

SEQ ID NO: 1489936 - RNA, 19 nt, Artificial Sequence
  Description of Artificial Sequence: Synthetic oligonucleotide
ucugcccgacgucggcuuc

SEQ ID NO: 1489937 - RNA, 19 nt, Artificial Sequence
  Description of Artificial Sequence: Synthetic oligonucleotide
caacccugagcagaaaacu

SEQ ID NO: 1489938 - RNA, 19 nt, Artificial Sequence
  Description of Artificial Sequence: Synthetic oligonucleotide
gcaggacgcaccccugaag

SEQ ID NO: 1489939 - RNA, 19 nt, Artificial Sequence
  Description of Artificial Sequence: Synthetic oligonucleotide
gucggcuucgccacaaacu

SEQ ID NO: 1489940 - RNA, 19 nt, Artificial Sequence
  Description of Artificial Sequence: Synthetic oligonucleotide
caauugcuuccaacccuga

SEQ ID NO: 1489941 - RNA, 19 nt, Artificial Sequence
  Description of Artificial Sequence: Synthetic oligonucleotide
cagcucauggucguuagcu

SEQ ID NO: 1489942 - RNA, 19 nt, Artificial Sequence
  Description of Artificial Sequence: Synthetic oligonucleotide
cuucaagggcucauuucgu

SEQ ID NO: 1489943 - RNA, 19 nt, Artificial Sequence
  Description of Artificial Sequence: Synthetic oligonucleotide
gucguuagcuucagccgca

SEQ ID NO: 1489944 - RNA, 19 nt, Artificial Sequence
  Description of Artificial Sequence: Synthetic oligonucleotide
cagccggccucucccggcg

SEQ ID NO: 1489945 - RNA, 19 nt, Artificial Sequence
  Description of Artificial Sequence: Synthetic oligonucleotide
cagaggguuccaugaggca

SEQ ID NO: 1489946 - RNA, 19 nt, Artificial Sequence
  Description of Artificial Sequence: Synthetic oligonucleotide
cucggcgcacacuaggggu

SEQ ID NO: 1489947 - RNA, 19 nt, Artificial Sequence
  Description of Artificial Sequence: Synthetic oligonucleotide
ucauuucguccugcucgcu

SEQ ID NO: 1489948 - RNA, 19 nt, Artificial Sequence
  Description of Artificial Sequence: Synthetic oligonucleotide
caguccugggguggugggg

SEQ ID NO: 1489949 - RNA, 19 nt, Artificial Sequence
  Description of Artificial Sequence: Synthetic oligonucleotide
cguccugcucgcuugcggg

SEQ ID NO: 1489950 - RNA, 19 nt, Artificial Sequence
  Description of Artificial Sequence: Synthetic oligonucleotide
gcuugcuccgcaacugccc

SEQ ID NO: 1489951 - RNA, 19 nt, Artificial Sequence
  Description of Artificial Sequence: Synthetic oligonucleotide
ggcaguugguagcgauugc

SEQ ID NO: 1489952 - RNA, 19 nt, Artificial Sequence
  Description of Artificial Sequence: Synthetic oligonucleotide
cccagaucuccuugcggcc

SEQ ID NO: 1489953 - RNA, 19 nt, Artificial Sequence
  Description of Artificial Sequence: Synthetic oligonucleotide
gagccucacguccuugccu

SEQ ID NO: 1489954 - RNA, 19 nt, Artificial Sequence
  Description of Artificial Sequence: Synthetic oligonucleotide
agccgugugcggucuguaa

SEQ ID NO: 1489955 - RNA, 19 nt, Artificial Sequence
  Description of Artificial Sequence: Synthetic oligonucleotide
acgcaccccugaagaauac

SEQ ID NO: 1489956 - RNA, 19 nt, Artificial Sequence
  Description of Artificial Sequence: Synthetic oligonucleotide
aggcucaccucaagcucuc

SEQ ID NO: 1489957 - RNA, 19 nt, Artificial Sequence
  Description of Artificial Sequence: Synthetic oligonucleotide
gcaaaaggcuuuauugaua

SEQ ID NO: 1489958 - RNA, 19 nt, Artificial Sequence
  Description of Artificial Sequence: Synthetic oligonucleotide
ccaugaccaggcuacagaa

SEQ ID NO: 1489959 - RNA, 19 nt, Artificial Sequence
  Description of Artificial Sequence: Synthetic oligonucleotide
ggcgucaguccuggggugg

SEQ ID NO: 1489960 - RNA, 19 nt, Artificial Sequence
  Description of Artificial Sequence: Synthetic oligonucleotide
uggcccugugcagaccccu

SEQ ID NO: 1489961 - RNA, 19 nt, Artificial Sequence
  Description of Artificial Sequence: Synthetic oligonucleotide
ugugucgggcaggcuggca

SEQ ID NO: 1489962 - RNA, 19 nt, Artificial Sequence
  Description of Artificial Sequence: Synthetic oligonucleotide
gugggaauucucggcgcac

SEQ ID NO: 1489963 - RNA, 19 nt, Artificial Sequence
  Description of Artificial Sequence: Synthetic oligonucleotide
ccgacgucggcuucgccac

SEQ ID NO: 1489964 - RNA, 19 nt, Artificial Sequence
  Description of Artificial Sequence: Synthetic oligonucleotide
ggucaacggcucucgcagc

SEQ ID NO: 1489965 - RNA, 19 nt, Artificial Sequence
  Description of Artificial Sequence: Synthetic oligonucleotide
gggcucacuggugauuccc

SEQ ID NO: 1489966 - RNA, 19 nt, Artificial Sequence
  Description of Artificial Sequence: Synthetic oligonucleotide
ugcagaccccugccauaaa

SEQ ID NO: 1489967 - RNA, 19 nt, Artificial Sequence
  Description of Artificial Sequence: Synthetic oligonucleotide
ugguuuccuggagccgugu

SEQ ID NO: 1489968 - RNA, 19 nt, Artificial Sequence
  Description of Artificial Sequence: Synthetic oligonucleotide
acagguggugacaggcaau

SEQ ID NO: 1489969 - RNA, 19 nt, Artificial Sequence
  Description of Artificial Sequence: Synthetic oligonucleotide
gcucaucauagcauucaca

SEQ ID NO: 1489970 - RNA, 19 nt, Artificial Sequence
  Description of Artificial Sequence: Synthetic oligonucleotide
cugcccgacgucggcuucg

SEQ ID NO: 1489971 - RNA, 19 nt, Artificial Sequence
  Description of Artificial Sequence: Synthetic oligonucleotide
gugcagaccccugccauaa

SEQ ID NO: 1489972 - RNA, 19 nt, Artificial Sequence
  Description of Artificial Sequence: Synthetic oligonucleotide
cguccuugccuguggagag

SEQ ID NO: 1489973 - RNA, 19 nt, Artificial Sequence
  Description of Artificial Sequence: Synthetic oligonucleotide
uggagccgugugcggucug

SEQ ID NO: 1489974 - RNA, 19 nt, Artificial Sequence
  Description of Artificial Sequence: Synthetic oligonucleotide
cagugcccuggaaggcaag

SEQ ID NO: 1489975 - RNA, 19 nt, Artificial Sequence
  Description of Artificial Sequence: Synthetic oligonucleotide
ggcaaggcccgugugugac

SEQ ID NO: 1489976 - RNA, 19 nt, Artificial Sequence
  Description of Artificial Sequence: Synthetic oligonucleotide
caggauggcucgaugcccu

SEQ ID NO: 1489977 - RNA, 19 nt, Artificial Sequence
  Description of Artificial Sequence: Synthetic oligonucleotide
caccggagacggcgggccg

SEQ ID NO: 1489978 - RNA, 19 nt, Artificial Sequence
  Description of Artificial Sequence: Synthetic oligonucleotide
guggagaggcgcacuuuca

SEQ ID NO: 1489979 - RNA, 19 nt, Artificial Sequence
  Description of Artificial Sequence: Synthetic oligonucleotide
gaugggcaguugguagcga

SEQ ID NO: 1489980 - RNA, 19 nt, Artificial Sequence
  Description of Artificial Sequence: Synthetic oligonucleotide
gcucaccucaagcucucca

SEQ ID NO: 1489981 - RNA, 19 nt, Artificial Sequence
  Description of Artificial Sequence: Synthetic oligonucleotide
gcugauugugcugggugca

SEQ ID NO: 1489982 - RNA, 19 nt, Artificial Sequence
  Description of Artificial Sequence: Synthetic oligonucleotide
caaggugaugcuggcucca

SEQ ID NO: 1489983 - RNA, 19 nt, Artificial Sequence
  Description of Artificial Sequence: Synthetic oligonucleotide
ugccuguggagaggcgcac

SEQ ID NO: 1489984 - RNA, 19 nt, Artificial Sequence
  Description of Artificial Sequence: Synthetic oligonucleotide
acgcugcugcccggaaccg

SEQ ID NO: 1489985 - RNA, 19 nt, Artificial Sequence
  Description of Artificial Sequence: Synthetic oligonucleotide
agcccgacaucgggagauc

SEQ ID NO: 1489986 - RNA, 19 nt, Artificial Sequence
  Description of Artificial Sequence: Synthetic oligonucleotide
cccugagcagaaaacugga

SEQ ID NO: 1489987 - RNA, 19 nt, Artificial Sequence
  Description of Artificial Sequence: Synthetic oligonucleotide
caggcaauagaugggcagu

SEQ ID NO: 1489988 - RNA, 19 nt, Artificial Sequence
  Description of Artificial Sequence: Synthetic oligonucleotide
gccgguccccaucgcaccg

SEQ ID NO: 1489989 - RNA, 19 nt, Artificial Sequence
  Description of Artificial Sequence: Synthetic oligonucleotide
cagguggugacaggcaaua

SEQ ID NO: 1489990 - RNA, 19 nt, Artificial Sequence
  Description of Artificial Sequence: Synthetic oligonucleotide
ucguuagcuucagccgcau

SEQ ID NO: 1489991 - RNA, 19 nt, Artificial Sequence
  Description of Artificial Sequence: Synthetic oligonucleotide
aggcaaggugaugcuggcu

SEQ ID NO: 1489992 - RNA, 19 nt, Artificial Sequence
  Description of Artificial Sequence: Synthetic oligonucleotide
gcacuuucagugggaauuc

SEQ ID NO: 1489993 - RNA, 19 nt, Artificial Sequence
  Description of Artificial Sequence: Synthetic oligonucleotide
gcaccccugaagaauacaa

SEQ ID NO: 1489994 - RNA, 19 nt, Artificial Sequence
  Description of Artificial Sequence: Synthetic oligonucleotide
ccgacaucgggagauccug

SEQ ID NO: 1489995 - RNA, 19 nt, Artificial Sequence
  Description of Artificial Sequence: Synthetic oligonucleotide
acacuaggggugggcucag

SEQ ID NO: 1489996 - RNA, 19 nt, Artificial Sequence
  Description of Artificial Sequence: Synthetic oligonucleotide
uccccacgcaguugcccau

SEQ ID NO: 1489997 - RNA, 19 nt, Artificial Sequence
  Description of Artificial Sequence: Synthetic oligonucleotide
aacggcucucgcagcccga

SEQ ID NO: 1489998 - RNA, 19 nt, Artificial Sequence
  Description of Artificial Sequence: Synthetic oligonucleotide
cucccggcgcugucucccc

SEQ ID NO: 1489999 - RNA, 19 nt, Artificial Sequence
  Description of Artificial Sequence: Synthetic oligonucleotide
ggauggcucgaugcccucc

SEQ ID NO: 1490000 - RNA, 19 nt, Artificial Sequence
  Description of Artificial Sequence: Synthetic oligonucleotide
ggcuccaaccuguggugga

SEQ ID NO: 1490001 - RNA, 19 nt, Artificial Sequence
  Description of Artificial Sequence: Synthetic oligonucleotide
gacgucggcuucgccacaa

SEQ ID NO: 1490002 - RNA, 19 nt, Artificial Sequence
  Description of Artificial Sequence: Synthetic oligonucleotide
ucccggcgcugucucccca

SEQ ID NO: 1490003 - RNA, 19 nt, Artificial Sequence
  Description of Artificial Sequence: Synthetic oligonucleotide
cccgugugugacuggcaag

SEQ ID NO: 1490004 - RNA, 19 nt, Artificial Sequence
  Description of Artificial Sequence: Synthetic oligonucleotide
cccgacgucggcuucgcca

SEQ ID NO: 1490005 - RNA, 19 nt, Artificial Sequence
  Description of Artificial Sequence: Synthetic oligonucleotide
ccaggggacuggcacuuug

SEQ ID NO: 1490006 - RNA, 19 nt, Artificial Sequence
  Description of Artificial Sequence: Synthetic oligonucleotide
ggggauggcccugugcaga

SEQ ID NO: 1490007 - RNA, 19 nt, Artificial Sequence
  Description of Artificial Sequence: Synthetic oligonucleotide
ggaucuccccuggggugcg

SEQ ID NO: 1490008 - RNA, 19 nt, Artificial Sequence
  Description of Artificial Sequence: Synthetic oligonucleotide
cgggagauccuggaucucc

SEQ ID NO: 1490009 - RNA, 19 nt, Artificial Sequence
  Description of Artificial Sequence: Synthetic oligonucleotide
caucucgcuugcuccgcaa

SEQ ID NO: 1490010 - RNA, 19 nt, Artificial Sequence
  Description of Artificial Sequence: Synthetic oligonucleotide
ugcccggaaccgcggcguc

SEQ ID NO: 1490011 - RNA, 19 nt, Artificial Sequence
  Description of Artificial Sequence: Synthetic oligonucleotide
cagucaugggguagucacu

SEQ ID NO: 1490012 - RNA, 19 nt, Artificial Sequence
  Description of Artificial Sequence: Synthetic oligonucleotide
ccagcucauggucguuagc

SEQ ID NO: 1490013 - RNA, 19 nt, Artificial Sequence
  Description of Artificial Sequence: Synthetic oligonucleotide
cacuaggggugggcucagg

SEQ ID NO: 1490014 - RNA, 19 nt, Artificial Sequence
  Description of Artificial Sequence: Synthetic oligonucleotide
guggcaggacgcaccccug

SEQ ID NO: 1490015 - RNA, 19 nt, Artificial Sequence
  Description of Artificial Sequence: Synthetic oligonucleotide
ggagaggcagggaggcuca

SEQ ID NO: 1490016 - RNA, 19 nt, Artificial Sequence
  Description of Artificial Sequence: Synthetic oligonucleotide
gcaccggagacggcgggcc

SEQ ID NO: 1490017 - RNA, 19 nt, Artificial Sequence
  Description of Artificial Sequence: Synthetic oligonucleotide
cugugcagaccccugccau

SEQ ID NO: 1490018 - RNA, 19 nt, Artificial Sequence
  Description of Artificial Sequence: Synthetic oligonucleotide
gcuggcaaggcccgugugu

SEQ ID NO: 1490019 - RNA, 19 nt, Artificial Sequence
  Description of Artificial Sequence: Synthetic oligonucleotide
gcccgugugugacuggcaa

SEQ ID NO: 1490020 - RNA, 19 nt, Artificial Sequence
  Description of Artificial Sequence: Synthetic oligonucleotide
ugcggucuguaagcagcuu

SEQ ID NO: 1490021 - RNA, 19 nt, Artificial Sequence
  Description of Artificial Sequence: Synthetic oligonucleotide
cagagucauggugagggau

SEQ ID NO: 1490022 - RNA, 19 nt, Artificial Sequence
  Description of Artificial Sequence: Synthetic oligonucleotide
cuccaaccugugguggaga

SEQ ID NO: 1490023 - RNA, 19 nt, Artificial Sequence
  Description of Artificial Sequence: Synthetic oligonucleotide
ggcuggcaaggcccgugug

SEQ ID NO: 1490024 - RNA, 19 nt, Artificial Sequence
  Description of Artificial Sequence: Synthetic oligonucleotide
ggugcgcucugcccgacgu

SEQ ID NO: 1490025 - RNA, 19 nt, Artificial Sequence
  Description of Artificial Sequence: Synthetic oligonucleotide
caggcgcugugucccagaa

SEQ ID NO: 1490026 - RNA, 19 nt, Artificial Sequence
  Description of Artificial Sequence: Synthetic oligonucleotide
cccacgcaguugcccaugc

SEQ ID NO: 1490027 - RNA, 19 nt, Artificial Sequence
  Description of Artificial Sequence: Synthetic oligonucleotide
gaucuccccuggggugcgc

SEQ ID NO: 1490028 - RNA, 19 nt, Artificial Sequence
  Description of Artificial Sequence: Synthetic oligonucleotide
aggcgcacuuucaguggga

SEQ ID NO: 1490029 - RNA, 19 nt, Artificial Sequence
  Description of Artificial Sequence: Synthetic oligonucleotide
cccgggucaacggcucucg

SEQ ID NO: 1490030 - RNA, 19 nt, Artificial Sequence
  Description of Artificial Sequence: Synthetic oligonucleotide
gggugcgcucugcccgacg

SEQ ID NO: 1490031 - RNA, 19 nt, Artificial Sequence
  Description of Artificial Sequence: Synthetic oligonucleotide
gcccgacaucgggagaucc

SEQ ID NO: 1490032 - RNA, 19 nt, Artificial Sequence
  Description of Artificial Sequence: Synthetic oligonucleotide
acgucggcuucgccacaaa

SEQ ID NO: 1490033 - RNA, 19 nt, Artificial Sequence
  Description of Artificial Sequence: Synthetic oligonucleotide
ggcucucgcagcccgacau

SEQ ID NO: 1490034 - RNA, 19 nt, Artificial Sequence
  Description of Artificial Sequence: Synthetic oligonucleotide
gcuccacgcugcugcccgg

SEQ ID NO: 1490035 - RNA, 19 nt, Artificial Sequence
  Description of Artificial Sequence: Synthetic oligonucleotide
cccggaaccgcggcguccc

SEQ ID NO: 1490036 - RNA, 19 nt, Artificial Sequence
  Description of Artificial Sequence: Synthetic oligonucleotide
ggaauucucggcgcacacu

SEQ ID NO: 1490037 - RNA, 19 nt, Artificial Sequence
  Description of Artificial Sequence: Synthetic oligonucleotide
cgucggcuucgccacaaac

SEQ ID NO: 1490038 - RNA, 19 nt, Artificial Sequence
  Description of Artificial Sequence: Synthetic oligonucleotide
cauucacagaggguuccau

SEQ ID NO: 1490039 - RNA, 19 nt, Artificial Sequence
  Description of Artificial Sequence: Synthetic oligonucleotide
gcucucgcagcccgacauc

SEQ ID NO: 1490040 - RNA, 19 nt, Artificial Sequence
  Description of Artificial Sequence: Synthetic oligonucleotide
ggcgcacuuucagugggaa

SEQ ID NO: 1490041 - RNA, 19 nt, Artificial Sequence
  Description of Artificial Sequence: Synthetic oligonucleotide
ggauggcccugugcagacc

SEQ ID NO: 1490042 - RNA, 19 nt, Artificial Sequence
  Description of Artificial Sequence: Synthetic oligonucleotide
gaggagcaaaaggcuuuau

SEQ ID NO: 1490043 - RNA, 19 nt, Artificial Sequence
  Description of Artificial Sequence: Synthetic oligonucleotide
ggcgcacacuagggguggg

SEQ ID NO: 1490044 - RNA, 19 nt, Artificial Sequence
  Description of Artificial Sequence: Synthetic oligonucleotide
gugcggucuguaagcagcu

SEQ ID NO: 1490045 - RNA, 19 nt, Artificial Sequence
  Description of Artificial Sequence: Synthetic oligonucleotide
ccccaucgcaccggagacg

SEQ ID NO: 1490046 - RNA, 19 nt, Artificial Sequence
  Description of Artificial Sequence: Synthetic oligonucleotide
cagcccgacaucgggagau

SEQ ID NO: 1490047 - RNA, 19 nt, Artificial Sequence
  Description of Artificial Sequence: Synthetic oligonucleotide
ccggcgcugucuccccacg

SEQ ID NO: 1490048 - RNA, 19 nt, Artificial Sequence
  Description of Artificial Sequence: Synthetic oligonucleotide
ggcaggcgcugugucccag

SEQ ID NO: 1490049 - RNA, 19 nt, Artificial Sequence
  Description of Artificial Sequence: Synthetic oligonucleotide
gagccgugugcggucugua

SEQ ID NO: 1490050 - RNA, 19 nt, Artificial Sequence
  Description of Artificial Sequence: Synthetic oligonucleotide
gcgcacacuaggggugggc

SEQ ID NO: 1490051 - RNA, 19 nt, Artificial Sequence
  Description of Artificial Sequence: Synthetic oligonucleotide
ggcucaccucaagcucucc

SEQ ID NO: 1490052 - RNA, 19 nt, Artificial Sequence
  Description of Artificial Sequence: Synthetic oligonucleotide
ccucucccggcgcugucuc

SEQ ID NO: 1490053 - RNA, 19 nt, Artificial Sequence
  Description of Artificial Sequence: Synthetic oligonucleotide
gcagcccgacaucgggaga

SEQ ID NO: 1490054 - RNA, 19 nt, Artificial Sequence
  Description of Artificial Sequence: Synthetic oligonucleotide
cuucucagccgguccccau

SEQ ID NO: 1490055 - RNA, 19 nt, Artificial Sequence
  Description of Artificial Sequence: Synthetic oligonucleotide
cgggucaacggcucucgca

SEQ ID NO: 1490056 - RNA, 19 nt, Artificial Sequence
  Description of Artificial Sequence: Synthetic oligonucleotide
gggcucauuucguccugcu

SEQ ID NO: 1490057 - RNA, 19 nt, Artificial Sequence
  Description of Artificial Sequence: Synthetic oligonucleotide
ccgggucaacggcucucgc

SEQ ID NO: 1490058 - RNA, 19 nt, Artificial Sequence
  Description of Artificial Sequence: Synthetic oligonucleotide
cccggcgcugucuccccac

SEQ ID NO: 1490059 - RNA, 19 nt, Artificial Sequence
  Description of Artificial Sequence: Synthetic oligonucleotide
ccaucgcaccggagacggc

SEQ ID NO: 1490060 - RNA, 19 nt, Artificial Sequence
  Description of Artificial Sequence: Synthetic oligonucleotide
gccggccggcugcuccacg

SEQ ID NO: 1490061 - RNA, 19 nt, Artificial Sequence
  Description of Artificial Sequence: Synthetic oligonucleotide
cccacccugccuggguuac

SEQ ID NO: 1490062 - RNA, 19 nt, Artificial Sequence
  Description of Artificial Sequence: Synthetic oligonucleotide
ccgguccccaucgcaccgg

SEQ ID NO: 1490063 - RNA, 19 nt, Artificial Sequence
  Description of Artificial Sequence: Synthetic oligonucleotide
cucugccaggauggcucga

SEQ ID NO: 1490064 - RNA, 19 nt, Artificial Sequence
  Description of Artificial Sequence: Synthetic oligonucleotide
cggcccucaaaggcaggcg

SEQ ID NO: 1490065 - RNA, 19 nt, Artificial Sequence
  Description of Artificial Sequence: Synthetic oligonucleotide
gcccuacuggggccaugac

SEQ ID NO: 1490066 - RNA, 19 nt, Artificial Sequence
  Description of Artificial Sequence: Synthetic oligonucleotide
gcccggaaccgcggcgucc

SEQ ID NO: 1490067 - RNA, 19 nt, Artificial Sequence
  Description of Artificial Sequence: Synthetic oligonucleotide
cgugugcggucuguaagca

SEQ ID NO: 1490068 - RNA, 19 nt, Artificial Sequence
  Description of Artificial Sequence: Synthetic oligonucleotide
gcaaggcccgugugugacu

SEQ ID NO: 1490069 - RNA, 19 nt, Artificial Sequence
  Description of Artificial Sequence: Synthetic oligonucleotide
gggccggccggcugcucca

SEQ ID NO: 1490070 - RNA, 19 nt, Artificial Sequence
  Description of Artificial Sequence: Synthetic oligonucleotide
cgggccggccggcugcucc

SEQ ID NO: 1490071 - RNA, 19 nt, Artificial Sequence
  Description of Artificial Sequence: Synthetic oligonucleotide
ccggagacggcgggccggc

SEQ ID NO: 1490072 - RNA, 19 nt, Artificial Sequence
  Description of Artificial Sequence: Synthetic oligonucleotide
ggagagugcuaggugccuu

SEQ ID NO: 1490073 - RNA, 19 nt, Artificial Sequence
  Description of Artificial Sequence: Synthetic oligonucleotide
caguuggggauggcccugu

SEQ ID NO: 1490074 - RNA, 19 nt, Artificial Sequence
  Description of Artificial Sequence: Synthetic oligonucleotide
cggaaccgcggcguccccg

SEQ ID NO: 1490075 - RNA, 19 nt, Artificial Sequence
  Description of Artificial Sequence: Synthetic oligonucleotide
agggcccuacuggggccau

SEQ ID NO: 1490076 - RNA, 19 nt, Artificial Sequence
  Description of Artificial Sequence: Synthetic oligonucleotide
cccgacaucgggagauccu

SEQ ID NO: 1490077 - RNA, 19 nt, Artificial Sequence
  Description of Artificial Sequence: Synthetic oligonucleotide
gcccucaaaggcaggcgcu

SEQ ID NO: 1490078 - RNA, 19 nt, Artificial Sequence
  Description of Artificial Sequence: Synthetic oligonucleotide
ggcccgugugugacuggca

SEQ ID NO: 1490079 - RNA, 19 nt, Artificial Sequence
  Description of Artificial Sequence: Synthetic oligonucleotide
gcccgucagucauggggua

SEQ ID NO: 1490080 - RNA, 19 nt, Artificial Sequence
  Description of Artificial Sequence: Synthetic oligonucleotide
cgugugugacuggcaagca

SEQ ID NO: 1490081 - RNA, 19 nt, Artificial Sequence
  Description of Artificial Sequence: Synthetic oligonucleotide
cgcaccggagacggcgggc

SEQ ID NO: 1490082 - RNA, 19 nt, Artificial Sequence
  Description of Artificial Sequence: Synthetic oligonucleotide
cggcgcugucuccccacgc

SEQ ID NO: 1490083 - RNA, 19 nt, Artificial Sequence
  Description of Artificial Sequence: Synthetic oligonucleotide
gcgcacuuucagugggaau

SEQ ID NO: 1490084 - RNA, 19 nt, Artificial Sequence
  Description of Artificial Sequence: Synthetic oligonucleotide
ccuguggagaggcgcacuu

SEQ ID NO: 1490085 - RNA, 19 nt, Artificial Sequence
  Description of Artificial Sequence: Synthetic oligonucleotide
gcccgacgucggcuucgcc

SEQ ID NO: 1490086 - RNA, 19 nt, Artificial Sequence
  Description of Artificial Sequence: Synthetic oligonucleotide
ggccucucccggcgcuguc

SEQ ID NO: 1490087 - RNA, 19 nt, Artificial Sequence
  Description of Artificial Sequence: Synthetic oligonucleotide
ccccgggucaacggcucuc

SEQ ID NO: 1490088 - RNA, 19 nt, Artificial Sequence
  Description of Artificial Sequence: Synthetic oligonucleotide
cggcguccccgggucaacg

SEQ ID NO: 1490089 - RNA, 19 nt, Artificial Sequence
  Description of Artificial Sequence: Synthetic oligonucleotide
caaggcuggcaaggcccgu

SEQ ID NO: 1490090 - RNA, 19 nt, Artificial Sequence
  Description of Artificial Sequence: Synthetic oligonucleotide
gcucugcccgacgucggcu

SEQ ID NO: 1490091 - RNA, 19 nt, Artificial Sequence
  Description of Artificial Sequence: Synthetic oligonucleotide
ccggaaccgcggcgucccc

SEQ ID NO: 1490092 - RNA, 19 nt, Artificial Sequence
  Description of Artificial Sequence: Synthetic oligonucleotide
cgcaccccugaagaauaca

SEQ ID NO: 1490093 - RNA, 19 nt, Artificial Sequence
  Description of Artificial Sequence: Synthetic oligonucleotide
gacggcgggccggccggcu

SEQ ID NO: 1490094 - RNA, 19 nt, Artificial Sequence
  Description of Artificial Sequence: Synthetic oligonucleotide
ccgcauaggcagcagccuu

SEQ ID NO: 1490095 - RNA, 19 nt, Artificial Sequence
  Description of Artificial Sequence: Synthetic oligonucleotide
gccuguggagaggcgcacu

SEQ ID NO: 1490096 - RNA, 19 nt, Artificial Sequence
  Description of Artificial Sequence: Synthetic oligonucleotide
ccaaccugugguggagagu

SEQ ID NO: 1490097 - RNA, 19 nt, Artificial Sequence
  Description of Artificial Sequence: Synthetic oligonucleotide
gcgucaguccugggguggu

SEQ ID NO: 1490098 - RNA, 19 nt, Artificial Sequence
  Description of Artificial Sequence: Synthetic oligonucleotide
cguccccgggucaacggcu

SEQ ID NO: 1490099 - RNA, 19 nt, Artificial Sequence
  Description of Artificial Sequence: Synthetic oligonucleotide
gcggcguccccgggucaac

SEQ ID NO: 1490100 - RNA, 19 nt, Artificial Sequence
  Description of Artificial Sequence: Synthetic oligonucleotide
cgauugcccagcucaucau

SEQ ID NO: 1490101 - RNA, 19 nt, Artificial Sequence
  Description of Artificial Sequence: Synthetic oligonucleotide
cguuagcuucagccgcaua

SEQ ID NO: 1490102 - RNA, 19 nt, Artificial Sequence
  Description of Artificial Sequence: Synthetic oligonucleotide
ccacccugccuggguuaca

SEQ ID NO: 1490103 - RNA, 19 nt, Artificial Sequence
  Description of Artificial Sequence: Synthetic oligonucleotide
cgacgucggcuucgccaca

SEQ ID NO: 1490104 - RNA, 19 nt, Artificial Sequence
  Description of Artificial Sequence: Synthetic oligonucleotide
cggagacggcgggccggcc

SEQ ID NO: 1490105 - RNA, 19 nt, Artificial Sequence
  Description of Artificial Sequence: Synthetic oligonucleotide
cggcuucgccacaaacuuu

SEQ ID NO: 1490106 - RNA, 19 nt, Artificial Sequence
  Description of Artificial Sequence: Synthetic oligonucleotide
ccggagcagccggccucuc

SEQ ID NO: 1490107 - RNA, 19 nt, Artificial Sequence
  Description of Artificial Sequence: Synthetic oligonucleotide
ccgcggcguccccggguca

SEQ ID NO: 1490108 - RNA, 19 nt, Artificial Sequence
  Description of Artificial Sequence: Synthetic oligonucleotide
cgcggcguccccgggucaa

SEQ ID NO: 1490109 - RNA, 19 nt, Artificial Sequence
  Description of Artificial Sequence: Synthetic oligonucleotide
ggcgggccggccggcugcu

SEQ ID NO: 1490110 - RNA, 19 nt, Artificial Sequence
  Description of Artificial Sequence: Synthetic oligonucleotide
ccaagcccuggggcucacu

SEQ ID NO: 1490111 - RNA, 19 nt, Artificial Sequence
  Description of Artificial Sequence: Synthetic oligonucleotide
cggccucucccggcgcugu

SEQ ID NO: 1490112 - RNA, 19 nt, Artificial Sequence
  Description of Artificial Sequence: Synthetic oligonucleotide
aaauuuauuucacagggcc

SEQ ID NO: 1490113 - RNA, 19 nt, Artificial Sequence
  Description of Artificial Sequence: Synthetic oligonucleotide
aaugcuagaauacaggaga

SEQ ID NO: 1490114 - RNA, 19 nt, Artificial Sequence
  Description of Artificial Sequence: Synthetic oligonucleotide
aagaaauuuauuucacagg

SEQ ID NO: 1490115 - RNA, 19 nt, Artificial Sequence
  Description of Artificial Sequence: Synthetic oligonucleotide
ucuuguuugauccaucuag

SEQ ID NO: 1490116 - RNA, 19 nt, Artificial Sequence
  Description of Artificial Sequence: Synthetic oligonucleotide
gaauauaaggugcaggucc

SEQ ID NO: 1490117 - RNA, 19 nt, Artificial Sequence
  Description of Artificial Sequence: Synthetic oligonucleotide
aaaacuaggagccuaggcu

SEQ ID NO: 1490118 - RNA, 19 nt, Artificial Sequence
  Description of Artificial Sequence: Synthetic oligonucleotide
uguaugauaagccucagua

SEQ ID NO: 1490119 - RNA, 19 nt, Artificial Sequence
  Description of Artificial Sequence: Synthetic oligonucleotide
agucaugcuagauaggcac

SEQ ID NO: 1490120 - RNA, 19 nt, Artificial Sequence
  Description of Artificial Sequence: Synthetic oligonucleotide
aaguucaacagucccagag

SEQ ID NO: 1490121 - RNA, 19 nt, Artificial Sequence
  Description of Artificial Sequence: Synthetic oligonucleotide
aaguaaucuuuucaccaac

SEQ ID NO: 1490122 - RNA, 19 nt, Artificial Sequence
  Description of Artificial Sequence: Synthetic oligonucleotide
cugaaggaaaacuaggagc

SEQ ID NO: 1490123 - RNA, 19 nt, Artificial Sequence
  Description of Artificial Sequence: Synthetic oligonucleotide
ucuucuugauaucacagca

SEQ ID NO: 1490124 - RNA, 19 nt, Artificial Sequence
  Description of Artificial Sequence: Synthetic oligonucleotide
gaucccaagucccaaaggg

SEQ ID NO: 1490125 - RNA, 19 nt, Artificial Sequence
  Description of Artificial Sequence: Synthetic oligonucleotide
uaugauaagccucaguaau

SEQ ID NO: 1490126 - RNA, 19 nt, Artificial Sequence
  Description of Artificial Sequence: Synthetic oligonucleotide
uuugacuuuauccuugcac

SEQ ID NO: 1490127 - RNA, 19 nt, Artificial Sequence
  Description of Artificial Sequence: Synthetic oligonucleotide
caauugacaggcaagacug

SEQ ID NO: 1490128 - RNA, 19 nt, Artificial Sequence
  Description of Artificial Sequence: Synthetic oligonucleotide
agacacacagauauaaugc

SEQ ID NO: 1490129 - RNA, 19 nt, Artificial Sequence
  Description of Artificial Sequence: Synthetic oligonucleotide
uuggguucgaauauaaggu

SEQ ID NO: 1490130 - RNA, 19 nt, Artificial Sequence
  Description of Artificial Sequence: Synthetic oligonucleotide
uauaaugcagccauacuaa

SEQ ID NO: 1490131 - RNA, 19 nt, Artificial Sequence
  Description of Artificial Sequence: Synthetic oligonucleotide
cuugauaucacagcaauug

SEQ ID NO: 1490132 - RNA, 19 nt, Artificial Sequence
  Description of Artificial Sequence: Synthetic oligonucleotide
gauccaucuaguaaguagg

SEQ ID NO: 1490133 - RNA, 19 nt, Artificial Sequence
  Description of Artificial Sequence: Synthetic oligonucleotide
aguucaacagucccagagc

SEQ ID NO: 1490134 - RNA, 19 nt, Artificial Sequence
  Description of Artificial Sequence: Synthetic oligonucleotide
uagauaggcacuuugcuga

SEQ ID NO: 1490135 - RNA, 19 nt, Artificial Sequence
  Description of Artificial Sequence: Synthetic oligonucleotide
aauacaggagaucccaagu

SEQ ID NO: 1490136 - RNA, 19 nt, Artificial Sequence
  Description of Artificial Sequence: Synthetic oligonucleotide
acagucaugcuagauaggc

SEQ ID NO: 1490137 - RNA, 19 nt, Artificial Sequence
  Description of Artificial Sequence: Synthetic oligonucleotide
acagauauaaugcagccau

SEQ ID NO: 1490138 - RNA, 19 nt, Artificial Sequence
  Description of Artificial Sequence: Synthetic oligonucleotide
uaacuggaggcauagagga

SEQ ID NO: 1490139 - RNA, 19 nt, Artificial Sequence
  Description of Artificial Sequence: Synthetic oligonucleotide
ugcacucuaugauagcugg

SEQ ID NO: 1490140 - RNA, 19 nt, Artificial Sequence
  Description of Artificial Sequence: Synthetic oligonucleotide
uaaugcuagaauacaggag

SEQ ID NO: 1490141 - RNA, 19 nt, Artificial Sequence
  Description of Artificial Sequence: Synthetic oligonucleotide
uuuucaccaacaaaccaug

SEQ ID NO: 1490142 - RNA, 19 nt, Artificial Sequence
  Description of Artificial Sequence: Synthetic oligonucleotide
agauauaaugcagccauac

SEQ ID NO: 1490143 - RNA, 19 nt, Artificial Sequence
  Description of Artificial Sequence: Synthetic oligonucleotide
ucgaauauaaggugcaggu

SEQ ID NO: 1490144 - RNA, 19 nt, Artificial Sequence
  Description of Artificial Sequence: Synthetic oligonucleotide
auauaaugcagccauacua

SEQ ID NO: 1490145 - RNA, 19 nt, Artificial Sequence
  Description of Artificial Sequence: Synthetic oligonucleotide
agcaugaagaaauuuauuu

SEQ ID NO: 1490146 - RNA, 19 nt, Artificial Sequence
  Description of Artificial Sequence: Synthetic oligonucleotide
cuaacuggaggcauagagg

SEQ ID NO: 1490147 - RNA, 19 nt, Artificial Sequence
  Description of Artificial Sequence: Synthetic oligonucleotide
uaucacagcaauugacagg

SEQ ID NO: 1490148 - RNA, 19 nt, Artificial Sequence
  Description of Artificial Sequence: Synthetic oligonucleotide
ugauaucacagcaauugac

SEQ ID NO: 1490149 - RNA, 19 nt, Artificial Sequence
  Description of Artificial Sequence: Synthetic oligonucleotide
uuguauacagaggugugcg

SEQ ID NO: 1490150 - RNA, 19 nt, Artificial Sequence
  Description of Artificial Sequence: Synthetic oligonucleotide
ucuaugauagcugggcggg

SEQ ID NO: 1490151 - RNA, 19 nt, Artificial Sequence
  Description of Artificial Sequence: Synthetic oligonucleotide
ucuuuucaccaacaaacca

SEQ ID NO: 1490152 - RNA, 19 nt, Artificial Sequence
  Description of Artificial Sequence: Synthetic oligonucleotide
uacaggagaucccaagucc

SEQ ID NO: 1490153 - RNA, 19 nt, Artificial Sequence
  Description of Artificial Sequence: Synthetic oligonucleotide
aguaaugcuagaauacagg

SEQ ID NO: 1490154 - RNA, 19 nt, Artificial Sequence
  Description of Artificial Sequence: Synthetic oligonucleotide
agaaaagaggacccaugac

SEQ ID NO: 1490155 - RNA, 19 nt, Artificial Sequence
  Description of Artificial Sequence: Synthetic oligonucleotide
gaaaacuaggagccuaggc

SEQ ID NO: 1490156 - RNA, 19 nt, Artificial Sequence
  Description of Artificial Sequence: Synthetic oligonucleotide
gauucuggcuuacuccugg

SEQ ID NO: 1490157 - RNA, 19 nt, Artificial Sequence
  Description of Artificial Sequence: Synthetic oligonucleotide
cugugaggcuaucagaugg

SEQ ID NO: 1490158 - RNA, 19 nt, Artificial Sequence
  Description of Artificial Sequence: Synthetic oligonucleotide
gacucuagccagcugauug

SEQ ID NO: 1490159 - RNA, 19 nt, Artificial Sequence
  Description of Artificial Sequence: Synthetic oligonucleotide
cucaguaaugcuagaauac

SEQ ID NO: 1490160 - RNA, 19 nt, Artificial Sequence
  Description of Artificial Sequence: Synthetic oligonucleotide
ugcuuauccaacgagaguc

SEQ ID NO: 1490161 - RNA, 19 nt, Artificial Sequence
  Description of Artificial Sequence: Synthetic oligonucleotide
uucgaauauaaggugcagg

SEQ ID NO: 1490162 - RNA, 19 nt, Artificial Sequence
  Description of Artificial Sequence: Synthetic oligonucleotide
gaauacaggagaucccaag

SEQ ID NO: 1490163 - RNA, 19 nt, Artificial Sequence
  Description of Artificial Sequence: Synthetic oligonucleotide
auacaggagaucccaaguc

SEQ ID NO: 1490164 - RNA, 19 nt, Artificial Sequence
  Description of Artificial Sequence: Synthetic oligonucleotide
uccuugcacucuaugauag

SEQ ID NO: 1490165 - RNA, 19 nt, Artificial Sequence
  Description of Artificial Sequence: Synthetic oligonucleotide
ucagguuugggaauguguc

SEQ ID NO: 1490166 - RNA, 19 nt, Artificial Sequence
  Description of Artificial Sequence: Synthetic oligonucleotide
auaaugcagccauacuaac

SEQ ID NO: 1490167 - RNA, 19 nt, Artificial Sequence
  Description of Artificial Sequence: Synthetic oligonucleotide
aacucuucuugauaucaca

SEQ ID NO: 1490168 - RNA, 19 nt, Artificial Sequence
  Description of Artificial Sequence: Synthetic oligonucleotide
aaacuaggagccuaggcuu

SEQ ID NO: 1490169 - RNA, 19 nt, Artificial Sequence
  Description of Artificial Sequence: Synthetic oligonucleotide
accaacaaaccaugucugc

SEQ ID NO: 1490170 - RNA, 19 nt, Artificial Sequence
  Description of Artificial Sequence: Synthetic oligonucleotide
ggagccuaggcuuuaaagg

SEQ ID NO: 1490171 - RNA, 19 nt, Artificial Sequence
  Description of Artificial Sequence: Synthetic oligonucleotide
uucuugauaucacagcaau

SEQ ID NO: 1490172 - RNA, 19 nt, Artificial Sequence
  Description of Artificial Sequence: Synthetic oligonucleotide
uccggguugagcaacuuug

SEQ ID NO: 1490173 - RNA, 19 nt, Artificial Sequence
  Description of Artificial Sequence: Synthetic oligonucleotide
gauggaaggaagugccagg

SEQ ID NO: 1490174 - RNA, 19 nt, Artificial Sequence
  Description of Artificial Sequence: Synthetic oligonucleotide
gaggauucuggcuuacucc

SEQ ID NO: 1490175 - RNA, 19 nt, Artificial Sequence
  Description of Artificial Sequence: Synthetic oligonucleotide
guaaugcuagaauacagga

SEQ ID NO: 1490176 - RNA, 19 nt, Artificial Sequence
  Description of Artificial Sequence: Synthetic oligonucleotide
auuucacagggccucacag

SEQ ID NO: 1490177 - RNA, 19 nt, Artificial Sequence
  Description of Artificial Sequence: Synthetic oligonucleotide
uugauaucacagcaauuga

SEQ ID NO: 1490178 - RNA, 19 nt, Artificial Sequence
  Description of Artificial Sequence: Synthetic oligonucleotide
ugugaggcuaucagauggg

SEQ ID NO: 1490179 - RNA, 19 nt, Artificial Sequence
  Description of Artificial Sequence: Synthetic oligonucleotide
cucuaugauagcugggcgg

SEQ ID NO: 1490180 - RNA, 19 nt, Artificial Sequence
  Description of Artificial Sequence: Synthetic oligonucleotide
guucaacagucccagagcc

SEQ ID NO: 1490181 - RNA, 19 nt, Artificial Sequence
  Description of Artificial Sequence: Synthetic oligonucleotide
ucagauggggucaggaagu

SEQ ID NO: 1490182 - RNA, 19 nt, Artificial Sequence
  Description of Artificial Sequence: Synthetic oligonucleotide
aaggguagggacuggguga

SEQ ID NO: 1490183 - RNA, 19 nt, Artificial Sequence
  Description of Artificial Sequence: Synthetic oligonucleotide
aaaagaggacccaugacau

SEQ ID NO: 1490184 - RNA, 19 nt, Artificial Sequence
  Description of Artificial Sequence: Synthetic oligonucleotide
ugcuagauaggcacuuugc

SEQ ID NO: 1490185 - RNA, 19 nt, Artificial Sequence
  Description of Artificial Sequence: Synthetic oligonucleotide
ggacagucaugcuagauag

SEQ ID NO: 1490186 - RNA, 19 nt, Artificial Sequence
  Description of Artificial Sequence: Synthetic oligonucleotide
uccaggauaucauaagcaa

SEQ ID NO: 1490187 - RNA, 19 nt, Artificial Sequence
  Description of Artificial Sequence: Synthetic oligonucleotide
ucccuuugagccuucagca

SEQ ID NO: 1490188 - RNA, 19 nt, Artificial Sequence
  Description of Artificial Sequence: Synthetic oligonucleotide
aaccccugcuuauccaacg

SEQ ID NO: 1490189 - RNA, 19 nt, Artificial Sequence
  Description of Artificial Sequence: Synthetic oligonucleotide
cagagagaagggauuaacc

SEQ ID NO: 1490190 - RNA, 19 nt, Artificial Sequence
  Description of Artificial Sequence: Synthetic oligonucleotide
uaaugcagccauacuaacu

SEQ ID NO: 1490191 - RNA, 19 nt, Artificial Sequence
  Description of Artificial Sequence: Synthetic oligonucleotide
uccaacgagagucccaacu

SEQ ID NO: 1490192 - RNA, 19 nt, Artificial Sequence
  Description of Artificial Sequence: Synthetic oligonucleotide
uucagguuugggaaugugu

SEQ ID NO: 1490193 - RNA, 19 nt, Artificial Sequence
  Description of Artificial Sequence: Synthetic oligonucleotide
acucuaugauagcugggcg

SEQ ID NO: 1490194 - RNA, 19 nt, Artificial Sequence
  Description of Artificial Sequence: Synthetic oligonucleotide
ggacccaugacauucuggg

SEQ ID NO: 1490195 - RNA, 19 nt, Artificial Sequence
  Description of Artificial Sequence: Synthetic oligonucleotide
gaaauuuauuucacagggc

SEQ ID NO: 1490196 - RNA, 19 nt, Artificial Sequence
  Description of Artificial Sequence: Synthetic oligonucleotide
gcuagaauacaggagaucc

SEQ ID NO: 1490197 - RNA, 19 nt, Artificial Sequence
  Description of Artificial Sequence: Synthetic oligonucleotide
cuagaauacaggagauccc

SEQ ID NO: 1490198 - RNA, 19 nt, Artificial Sequence
  Description of Artificial Sequence: Synthetic oligonucleotide
gaggcauagaggauucugg

SEQ ID NO: 1490199 - RNA, 19 nt, Artificial Sequence
  Description of Artificial Sequence: Synthetic oligonucleotide
agagaagggauuaaccaag

SEQ ID NO: 1490200 - RNA, 19 nt, Artificial Sequence
  Description of Artificial Sequence: Synthetic oligonucleotide
ucccaagucccaaagggcu

SEQ ID NO: 1490201 - RNA, 19 nt, Artificial Sequence
  Description of Artificial Sequence: Synthetic oligonucleotide
uucaccaacaaaccauguc

SEQ ID NO: 1490202 - RNA, 19 nt, Artificial Sequence
  Description of Artificial Sequence: Synthetic oligonucleotide
gagaccuguaugauaagcc

SEQ ID NO: 1490203 - RNA, 19 nt, Artificial Sequence
  Description of Artificial Sequence: Synthetic oligonucleotide
acaaaccaugucugcuucc

SEQ ID NO: 1490204 - RNA, 19 nt, Artificial Sequence
  Description of Artificial Sequence: Synthetic oligonucleotide
uggguucgaauauaaggug

SEQ ID NO: 1490205 - RNA, 19 nt, Artificial Sequence
  Description of Artificial Sequence: Synthetic oligonucleotide
aggcaagacugucaagugg

SEQ ID NO: 1490206 - RNA, 19 nt, Artificial Sequence
  Description of Artificial Sequence: Synthetic oligonucleotide
uauugaaagcaugaagaaa

SEQ ID NO: 1490207 - RNA, 19 nt, Artificial Sequence
  Description of Artificial Sequence: Synthetic oligonucleotide
cucuucuugauaucacagc

SEQ ID NO: 1490208 - RNA, 19 nt, Artificial Sequence
  Description of Artificial Sequence: Synthetic oligonucleotide
acccaugacauucuggggu

SEQ ID NO: 1490209 - RNA, 19 nt, Artificial Sequence
  Description of Artificial Sequence: Synthetic oligonucleotide
aauauaaggugcaggucca

SEQ ID NO: 1490210 - RNA, 19 nt, Artificial Sequence
  Description of Artificial Sequence: Synthetic oligonucleotide
agaccuguaugauaagccu

SEQ ID NO: 1490211 - RNA, 19 nt, Artificial Sequence
  Description of Artificial Sequence: Synthetic oligonucleotide
acaggcaagacugucaagu

SEQ ID NO: 1490212 - RNA, 19 nt, Artificial Sequence
  Description of Artificial Sequence: Synthetic oligonucleotide
acaggagaucccaaguccc

SEQ ID NO: 1490213 - RNA, 19 nt, Artificial Sequence
  Description of Artificial Sequence: Synthetic oligonucleotide
aggagccuaggcuuuaaag

SEQ ID NO: 1490214 - RNA, 19 nt, Artificial Sequence
  Description of Artificial Sequence: Synthetic oligonucleotide
gauuaaccaaggugguccc

SEQ ID NO: 1490215 - RNA, 19 nt, Artificial Sequence
  Description of Artificial Sequence: Synthetic oligonucleotide
ucacccgagaccuguauga

SEQ ID NO: 1490216 - RNA, 19 nt, Artificial Sequence
  Description of Artificial Sequence: Synthetic oligonucleotide
gcuguaacagacucuagcc

SEQ ID NO: 1490217 - RNA, 19 nt, Artificial Sequence
  Description of Artificial Sequence: Synthetic oligonucleotide
ggauuaaccaagguggucc

SEQ ID NO: 1490218 - RNA, 19 nt, Artificial Sequence
  Description of Artificial Sequence: Synthetic oligonucleotide
aaggaagugccagggcuac

SEQ ID NO: 1490219 - RNA, 19 nt, Artificial Sequence
  Description of Artificial Sequence: Synthetic oligonucleotide
cucccuuugagccuucagc

SEQ ID NO: 1490220 - RNA, 19 nt, Artificial Sequence
  Description of Artificial Sequence: Synthetic oligonucleotide
gagaucccaagucccaaag

SEQ ID NO: 1490221 - RNA, 19 nt, Artificial Sequence
  Description of Artificial Sequence: Synthetic oligonucleotide
aucucuggugaccaggaca

SEQ ID NO: 1490222 - RNA, 19 nt, Artificial Sequence
  Description of Artificial Sequence: Synthetic oligonucleotide
gagagaagggauuaaccaa

SEQ ID NO: 1490223 - RNA, 19 nt, Artificial Sequence
  Description of Artificial Sequence: Synthetic oligonucleotide
cuuguauacagaggugugc

SEQ ID NO: 1490224 - RNA, 19 nt, Artificial Sequence
  Description of Artificial Sequence: Synthetic oligonucleotide
ugaaagaaaagaggaccca

SEQ ID NO: 1490225 - RNA, 19 nt, Artificial Sequence
  Description of Artificial Sequence: Synthetic oligonucleotide
agaucccaagucccaaagg

SEQ ID NO: 1490226 - RNA, 19 nt, Artificial Sequence
  Description of Artificial Sequence: Synthetic oligonucleotide
uggagacacacagauauaa

SEQ ID NO: 1490227 - RNA, 19 nt, Artificial Sequence
  Description of Artificial Sequence: Synthetic oligonucleotide
aggacaggauacuccaaag

SEQ ID NO: 1490228 - RNA, 19 nt, Artificial Sequence
  Description of Artificial Sequence: Synthetic oligonucleotide
ucauucucaccuccugccc

SEQ ID NO: 1490229 - RNA, 19 nt, Artificial Sequence
  Description of Artificial Sequence: Synthetic oligonucleotide
auugacaggcaagacuguc

SEQ ID NO: 1490230 - RNA, 19 nt, Artificial Sequence
  Description of Artificial Sequence: Synthetic oligonucleotide
cacucuaugauagcugggc

SEQ ID NO: 1490231 - RNA, 19 nt, Artificial Sequence
  Description of Artificial Sequence: Synthetic oligonucleotide
uuauccaacgagaguccca

SEQ ID NO: 1490232 - RNA, 19 nt, Artificial Sequence
  Description of Artificial Sequence: Synthetic oligonucleotide
uauuucacagggccucaca

SEQ ID NO: 1490233 - RNA, 19 nt, Artificial Sequence
  Description of Artificial Sequence: Synthetic oligonucleotide
auggaaggaagugccaggg

SEQ ID NO: 1490234 - RNA, 19 nt, Artificial Sequence
  Description of Artificial Sequence: Synthetic oligonucleotide
uuaaccaagguggucccca

SEQ ID NO: 1490235 - RNA, 19 nt, Artificial Sequence
  Description of Artificial Sequence: Synthetic oligonucleotide
caaagggcucccuuugagc

SEQ ID NO: 1490236 - RNA, 19 nt, Artificial Sequence
  Description of Artificial Sequence: Synthetic oligonucleotide
aaggggauggaaggaagug

SEQ ID NO: 1490237 - RNA, 19 nt, Artificial Sequence
  Description of Artificial Sequence: Synthetic oligonucleotide
gacauccauagccugguuc

SEQ ID NO: 1490238 - RNA, 19 nt, Artificial Sequence
  Description of Artificial Sequence: Synthetic oligonucleotide
acuccaaaggcaucagaga

SEQ ID NO: 1490239 - RNA, 19 nt, Artificial Sequence
  Description of Artificial Sequence: Synthetic oligonucleotide
uuucacagggccucacaga

SEQ ID NO: 1490240 - RNA, 19 nt, Artificial Sequence
  Description of Artificial Sequence: Synthetic oligonucleotide
aucccaagucccaaagggc

SEQ ID NO: 1490241 - RNA, 19 nt, Artificial Sequence
  Description of Artificial Sequence: Synthetic oligonucleotide
gauuggagacauccauagc

SEQ ID NO: 1490242 - RNA, 19 nt, Artificial Sequence
  Description of Artificial Sequence: Synthetic oligonucleotide
acagcaauugacaggcaag

SEQ ID NO: 1490243 - RNA, 19 nt, Artificial Sequence
  Description of Artificial Sequence: Synthetic oligonucleotide
auacuaacuggaggcauag

SEQ ID NO: 1490244 - RNA, 19 nt, Artificial Sequence
  Description of Artificial Sequence: Synthetic oligonucleotide
uaugauagcugggcggggc

SEQ ID NO: 1490245 - RNA, 19 nt, Artificial Sequence
  Description of Artificial Sequence: Synthetic oligonucleotide
cagguugaauuucucacuc

SEQ ID NO: 1490246 - RNA, 19 nt, Artificial Sequence
  Description of Artificial Sequence: Synthetic oligonucleotide
gacccaugacauucugggg

SEQ ID NO: 1490247 - RNA, 19 nt, Artificial Sequence
  Description of Artificial Sequence: Synthetic oligonucleotide
ugaggcuaucagauggggu

SEQ ID NO: 1490248 - RNA, 19 nt, Artificial Sequence
  Description of Artificial Sequence: Synthetic oligonucleotide
augcuagauaggcacuuug

SEQ ID NO: 1490249 - RNA, 19 nt, Artificial Sequence
  Description of Artificial Sequence: Synthetic oligonucleotide
agcaauugacaggcaagac

SEQ ID NO: 1490250 - RNA, 19 nt, Artificial Sequence
  Description of Artificial Sequence: Synthetic oligonucleotide
uuucaccaacaaaccaugu

SEQ ID NO: 1490251 - RNA, 19 nt, Artificial Sequence
  Description of Artificial Sequence: Synthetic oligonucleotide
uaucagauggggucaggaa

SEQ ID NO: 1490252 - RNA, 19 nt, Artificial Sequence
  Description of Artificial Sequence: Synthetic oligonucleotide
uauccaacgagagucccaa

SEQ ID NO: 1490253 - RNA, 19 nt, Artificial Sequence
  Description of Artificial Sequence: Synthetic oligonucleotide
gguccaggauaucauaagc

SEQ ID NO: 1490254 - RNA, 19 nt, Artificial Sequence
  Description of Artificial Sequence: Synthetic oligonucleotide
auuaaccaagguggucccc

SEQ ID NO: 1490255 - RNA, 19 nt, Artificial Sequence
  Description of Artificial Sequence: Synthetic oligonucleotide
aaggaaaacuaggagccua

SEQ ID NO: 1490256 - RNA, 19 nt, Artificial Sequence
  Description of Artificial Sequence: Synthetic oligonucleotide
guaugauaagccucaguaa

SEQ ID NO: 1490257 - RNA, 19 nt, Artificial Sequence
  Description of Artificial Sequence: Synthetic oligonucleotide
aaccaaggugguccccauc

SEQ ID NO: 1490258 - RNA, 19 nt, Artificial Sequence
  Description of Artificial Sequence: Synthetic oligonucleotide
guaaucuuuucaccaacaa

SEQ ID NO: 1490259 - RNA, 19 nt, Artificial Sequence
  Description of Artificial Sequence: Synthetic oligonucleotide
uuuauuucacagggccuca

SEQ ID NO: 1490260 - RNA, 19 nt, Artificial Sequence
  Description of Artificial Sequence: Synthetic oligonucleotide
aguaaucuuuucaccaaca

SEQ ID NO: 1490261 - RNA, 19 nt, Artificial Sequence
  Description of Artificial Sequence: Synthetic oligonucleotide
ucuugauaucacagcaauu

SEQ ID NO: 1490262 - RNA, 19 nt, Artificial Sequence
  Description of Artificial Sequence: Synthetic oligonucleotide
cuggcuuacuccuggggac

SEQ ID NO: 1490263 - RNA, 19 nt, Artificial Sequence
  Description of Artificial Sequence: Synthetic oligonucleotide
gucguccugacgcuacacg

SEQ ID NO: 1490264 - RNA, 19 nt, Artificial Sequence
  Description of Artificial Sequence: Synthetic oligonucleotide
ggcaagacugucaaguggc

SEQ ID NO: 1490265 - RNA, 19 nt, Artificial Sequence
  Description of Artificial Sequence: Synthetic oligonucleotide
gaagagcuucaucauucca

SEQ ID NO: 1490266 - RNA, 19 nt, Artificial Sequence
  Description of Artificial Sequence: Synthetic oligonucleotide
agggcuugaaaggguaggg

SEQ ID NO: 1490267 - RNA, 19 nt, Artificial Sequence
  Description of Artificial Sequence: Synthetic oligonucleotide
uugagcaacuuugacuuua

SEQ ID NO: 1490268 - RNA, 19 nt, Artificial Sequence
  Description of Artificial Sequence: Synthetic oligonucleotide
auccaucuaguaaguaggg

SEQ ID NO: 1490269 - RNA, 19 nt, Artificial Sequence
  Description of Artificial Sequence: Synthetic oligonucleotide
ugggcuguaacagacucua

SEQ ID NO: 1490270 - RNA, 19 nt, Artificial Sequence
  Description of Artificial Sequence: Synthetic oligonucleotide
uccugacgcuacacgcucg

SEQ ID NO: 1490271 - RNA, 19 nt, Artificial Sequence
  Description of Artificial Sequence: Synthetic oligonucleotide
guacucugccuucaguuuc

SEQ ID NO: 1490272 - RNA, 19 nt, Artificial Sequence
  Description of Artificial Sequence: Synthetic oligonucleotide
ugcuuccccaggaacugug

SEQ ID NO: 1490273 - RNA, 19 nt, Artificial Sequence
  Description of Artificial Sequence: Synthetic oligonucleotide
ggcuugaaaggguagggac

SEQ ID NO: 1490274 - RNA, 19 nt, Artificial Sequence
  Description of Artificial Sequence: Synthetic oligonucleotide
cagggcuacaggaaguuca

SEQ ID NO: 1490275 - RNA, 19 nt, Artificial Sequence
  Description of Artificial Sequence: Synthetic oligonucleotide
acacgcucggccccgcaac

SEQ ID NO: 1490276 - RNA, 19 nt, Artificial Sequence
  Description of Artificial Sequence: Synthetic oligonucleotide
ccugcuuauccaacgagag

SEQ ID NO: 1490277 - RNA, 19 nt, Artificial Sequence
  Description of Artificial Sequence: Synthetic oligonucleotide
ugagcaacuuugacuuuau

SEQ ID NO: 1490278 - RNA, 19 nt, Artificial Sequence
  Description of Artificial Sequence: Synthetic oligonucleotide
aacugugagaagagcuuca

SEQ ID NO: 1490279 - RNA, 19 nt, Artificial Sequence
  Description of Artificial Sequence: Synthetic oligonucleotide
cuaggcuuuaaagggcuug

SEQ ID NO: 1490280 - RNA, 19 nt, Artificial Sequence
  Description of Artificial Sequence: Synthetic oligonucleotide
aggaaaacuaggagccuag

SEQ ID NO: 1490281 - RNA, 19 nt, Artificial Sequence
  Description of Artificial Sequence: Synthetic oligonucleotide
accuguaugauaagccuca

SEQ ID NO: 1490282 - RNA, 19 nt, Artificial Sequence
  Description of Artificial Sequence: Synthetic oligonucleotide
ccaggauaucauaagcaag

SEQ ID NO: 1490283 - RNA, 19 nt, Artificial Sequence
  Description of Artificial Sequence: Synthetic oligonucleotide
uggguccucacccgagacc

SEQ ID NO: 1490284 - RNA, 19 nt, Artificial Sequence
  Description of Artificial Sequence: Synthetic oligonucleotide
uguggccacccuuguauac

SEQ ID NO: 1490285 - RNA, 19 nt, Artificial Sequence
  Description of Artificial Sequence: Synthetic oligonucleotide
auagaggauucuggcuuac

SEQ ID NO: 1490286 - RNA, 19 nt, Artificial Sequence
  Description of Artificial Sequence: Synthetic oligonucleotide
gacagucaugcuagauagg

SEQ ID NO: 1490287 - RNA, 19 nt, Artificial Sequence
  Description of Artificial Sequence: Synthetic oligonucleotide
gcaaggaaauccacaaaag

SEQ ID NO: 1490288 - RNA, 19 nt, Artificial Sequence
  Description of Artificial Sequence: Synthetic oligonucleotide
caggcaagacugucaagug

SEQ ID NO: 1490289 - RNA, 19 nt, Artificial Sequence
  Description of Artificial Sequence: Synthetic oligonucleotide
acuggaggcauagaggauu

SEQ ID NO: 1490290 - RNA, 19 nt, Artificial Sequence
  Description of Artificial Sequence: Synthetic oligonucleotide
ucacagagagaagggauua

SEQ ID NO: 1490291 - RNA, 19 nt, Artificial Sequence
  Description of Artificial Sequence: Synthetic oligonucleotide
ggagcaagcgaauggcaug

SEQ ID NO: 1490292 - RNA, 19 nt, Artificial Sequence
  Description of Artificial Sequence: Synthetic oligonucleotide
gaccuguaugauaagccuc

SEQ ID NO: 1490293 - RNA, 19 nt, Artificial Sequence
  Description of Artificial Sequence: Synthetic oligonucleotide
guccaggauaucauaagca

SEQ ID NO: 1490294 - RNA, 19 nt, Artificial Sequence
  Description of Artificial Sequence: Synthetic oligonucleotide
guucgaauauaaggugcag

SEQ ID NO: 1490295 - RNA, 19 nt, Artificial Sequence
  Description of Artificial Sequence: Synthetic oligonucleotide
gaggugugcggaggaagcg

SEQ ID NO: 1490296 - RNA, 19 nt, Artificial Sequence
  Description of Artificial Sequence: Synthetic oligonucleotide
uaacagacucuagccagcu

SEQ ID NO: 1490297 - RNA, 19 nt, Artificial Sequence
  Description of Artificial Sequence: Synthetic oligonucleotide
aggaaguucaacaguccca

SEQ ID NO: 1490298 - RNA, 19 nt, Artificial Sequence
  Description of Artificial Sequence: Synthetic oligonucleotide
cccagguugaauuucucac

SEQ ID NO: 1490299 - RNA, 19 nt, Artificial Sequence
  Description of Artificial Sequence: Synthetic oligonucleotide
cccggugucguccugacgc

SEQ ID NO: 1490300 - RNA, 19 nt, Artificial Sequence
  Description of Artificial Sequence: Synthetic oligonucleotide
ggguucgaauauaaggugc

SEQ ID NO: 1490301 - RNA, 19 nt, Artificial Sequence
  Description of Artificial Sequence: Synthetic oligonucleotide
ggucaggaagucccaaacc

SEQ ID NO: 1490302 - RNA, 19 nt, Artificial Sequence
  Description of Artificial Sequence: Synthetic oligonucleotide
gacacuuggguucgaauau

SEQ ID NO: 1490303 - RNA, 19 nt, Artificial Sequence
  Description of Artificial Sequence: Synthetic oligonucleotide
acgcuacacgcucggcccc

SEQ ID NO: 1490304 - RNA, 19 nt, Artificial Sequence
  Description of Artificial Sequence: Synthetic oligonucleotide
gugaggcuaucagaugggg

SEQ ID NO: 1490305 - RNA, 19 nt, Artificial Sequence
  Description of Artificial Sequence: Synthetic oligonucleotide
uauugccccauguggccac

SEQ ID NO: 1490306 - RNA, 19 nt, Artificial Sequence
  Description of Artificial Sequence: Synthetic oligonucleotide
gagcaagcgaauggcauga

SEQ ID NO: 1490307 - RNA, 19 nt, Artificial Sequence
  Description of Artificial Sequence: Synthetic oligonucleotide
cuuacuccuggggacuccc

SEQ ID NO: 1490308 - RNA, 19 nt, Artificial Sequence
  Description of Artificial Sequence: Synthetic oligonucleotide
ugcuagaauacaggagauc

SEQ ID NO: 1490309 - RNA, 19 nt, Artificial Sequence
  Description of Artificial Sequence: Synthetic oligonucleotide
gacugaguccacuggccuc

SEQ ID NO: 1490310 - RNA, 19 nt, Artificial Sequence
  Description of Artificial Sequence: Synthetic oligonucleotide
gguagggacugggugaaag

SEQ ID NO: 1490311 - RNA, 19 nt, Artificial Sequence
  Description of Artificial Sequence: Synthetic oligonucleotide
ucaugcuagauaggcacuu

SEQ ID NO: 1490312 - RNA, 19 nt, Artificial Sequence
  Description of Artificial Sequence: Synthetic oligonucleotide
augacauucuggggucagg

SEQ ID NO: 1490313 - RNA, 19 nt, Artificial Sequence
  Description of Artificial Sequence: Synthetic oligonucleotide
guagggacugggugaaaga

SEQ ID NO: 1490314 - RNA, 19 nt, Artificial Sequence
  Description of Artificial Sequence: Synthetic oligonucleotide
acgagagucccaacucuuc

SEQ ID NO: 1490315 - RNA, 19 nt, Artificial Sequence
  Description of Artificial Sequence: Synthetic oligonucleotide
cucccaccagccugggucc

SEQ ID NO: 1490316 - RNA, 19 nt, Artificial Sequence
  Description of Artificial Sequence: Synthetic oligonucleotide
cucacccgagaccuguaug

SEQ ID NO: 1490317 - RNA, 19 nt, Artificial Sequence
  Description of Artificial Sequence: Synthetic oligonucleotide
cauacuaacuggaggcaua

SEQ ID NO: 1490318 - RNA, 19 nt, Artificial Sequence
  Description of Artificial Sequence: Synthetic oligonucleotide
gcaauugacaggcaagacu

SEQ ID NO: 1490319 - RNA, 19 nt, Artificial Sequence
  Description of Artificial Sequence: Synthetic oligonucleotide
ggauacuccaaaggcauca

SEQ ID NO: 1490320 - RNA, 19 nt, Artificial Sequence
  Description of Artificial Sequence: Synthetic oligonucleotide
caugacauucuggggucag

SEQ ID NO: 1490321 - RNA, 19 nt, Artificial Sequence
  Description of Artificial Sequence: Synthetic oligonucleotide
uccccaucucuggugacca

SEQ ID NO: 1490322 - RNA, 19 nt, Artificial Sequence
  Description of Artificial Sequence: Synthetic oligonucleotide
ggaaaacuaggagccuagg

SEQ ID NO: 1490323 - RNA, 19 nt, Artificial Sequence
  Description of Artificial Sequence: Synthetic oligonucleotide
ggaggcauagaggauucug

SEQ ID NO: 1490324 - RNA, 19 nt, Artificial Sequence
  Description of Artificial Sequence: Synthetic oligonucleotide
cacuuugcugaaggaaaac

SEQ ID NO: 1490325 - RNA, 19 nt, Artificial Sequence
  Description of Artificial Sequence: Synthetic oligonucleotide
cuaucagauggggucagga

SEQ ID NO: 1490326 - RNA, 19 nt, Artificial Sequence
  Description of Artificial Sequence: Synthetic oligonucleotide
gguucgaauauaaggugca

SEQ ID NO: 1490327 - RNA, 19 nt, Artificial Sequence
  Description of Artificial Sequence: Synthetic oligonucleotide
aagccucaguaaugcuaga

SEQ ID NO: 1490328 - RNA, 19 nt, Artificial Sequence
  Description of Artificial Sequence: Synthetic oligonucleotide
aggauacuccaaaggcauc

SEQ ID NO: 1490329 - RNA, 19 nt, Artificial Sequence
  Description of Artificial Sequence: Synthetic oligonucleotide
ccuuguauacagaggugug

SEQ ID NO: 1490330 - RNA, 19 nt, Artificial Sequence
  Description of Artificial Sequence: Synthetic oligonucleotide
cagguccaggauaucauaa

SEQ ID NO: 1490331 - RNA, 19 nt, Artificial Sequence
  Description of Artificial Sequence: Synthetic oligonucleotide
cuaugauagcugggcgggg

SEQ ID NO: 1490332 - RNA, 19 nt, Artificial Sequence
  Description of Artificial Sequence: Synthetic oligonucleotide
gugguccccaucucuggug

SEQ ID NO: 1490333 - RNA, 19 nt, Artificial Sequence
  Description of Artificial Sequence: Synthetic oligonucleotide
gacuuuauccuugcacucu

SEQ ID NO: 1490334 - RNA, 19 nt, Artificial Sequence
  Description of Artificial Sequence: Synthetic oligonucleotide
uaggagccuaggcuuuaaa

SEQ ID NO: 1490335 - RNA, 19 nt, Artificial Sequence
  Description of Artificial Sequence: Synthetic oligonucleotide
cagcaauugacaggcaaga

SEQ ID NO: 1490336 - RNA, 19 nt, Artificial Sequence
  Description of Artificial Sequence: Synthetic oligonucleotide
aucuaguaaguagggcaga

SEQ ID NO: 1490337 - RNA, 19 nt, Artificial Sequence
  Description of Artificial Sequence: Synthetic oligonucleotide
caggacaggauacuccaaa

SEQ ID NO: 1490338 - RNA, 19 nt, Artificial Sequence
  Description of Artificial Sequence: Synthetic oligonucleotide
cuugcacucuaugauagcu

SEQ ID NO: 1490339 - RNA, 19 nt, Artificial Sequence
  Description of Artificial Sequence: Synthetic oligonucleotide
accccugcuuauccaacga

SEQ ID NO: 1490340 - RNA, 19 nt, Artificial Sequence
  Description of Artificial Sequence: Synthetic oligonucleotide
cagucaugcuagauaggca

SEQ ID NO: 1490341 - RNA, 19 nt, Artificial Sequence
  Description of Artificial Sequence: Synthetic oligonucleotide
agggauuaaccaagguggu

SEQ ID NO: 1490342 - RNA, 19 nt, Artificial Sequence
  Description of Artificial Sequence: Synthetic oligonucleotide
gaaggaagugccagggcua

SEQ ID NO: 1490343 - RNA, 19 nt, Artificial Sequence
  Description of Artificial Sequence: Synthetic oligonucleotide
guccugacgcuacacgcuc

SEQ ID NO: 1490344 - RNA, 19 nt, Artificial Sequence
  Description of Artificial Sequence: Synthetic oligonucleotide
cauagaggauucuggcuua

SEQ ID NO: 1490345 - RNA, 19 nt, Artificial Sequence
  Description of Artificial Sequence: Synthetic oligonucleotide
agucccaaagggcucccuu

SEQ ID NO: 1490346 - RNA, 19 nt, Artificial Sequence
  Description of Artificial Sequence: Synthetic oligonucleotide
ggguugagcaacuuugacu

SEQ ID NO: 1490347 - RNA, 19 nt, Artificial Sequence
  Description of Artificial Sequence: Synthetic oligonucleotide
uccuggagacacacagaua

SEQ ID NO: 1490348 - RNA, 19 nt, Artificial Sequence
  Description of Artificial Sequence: Synthetic oligonucleotide
ggcacuuugcugaaggaaa

SEQ ID NO: 1490349 - RNA, 19 nt, Artificial Sequence
  Description of Artificial Sequence: Synthetic oligonucleotide
uggcuuacuccuggggacu

SEQ ID NO: 1490350 - RNA, 19 nt, Artificial Sequence
  Description of Artificial Sequence: Synthetic oligonucleotide
ccacccuuguauacagagg

SEQ ID NO: 1490351 - RNA, 19 nt, Artificial Sequence
  Description of Artificial Sequence: Synthetic oligonucleotide
augucugcuuccccaggaa

SEQ ID NO: 1490352 - RNA, 19 nt, Artificial Sequence
  Description of Artificial Sequence: Synthetic oligonucleotide
gggugaaagaaaagaggac

SEQ ID NO: 1490353 - RNA, 19 nt, Artificial Sequence
  Description of Artificial Sequence: Synthetic oligonucleotide
ccaacgagagucccaacuc

SEQ ID NO: 1490354 - RNA, 19 nt, Artificial Sequence
  Description of Artificial Sequence: Synthetic oligonucleotide
gcagccauacuaacuggag

SEQ ID NO: 1490355 - RNA, 19 nt, Artificial Sequence
  Description of Artificial Sequence: Synthetic oligonucleotide
uaaccaaggugguccccau

SEQ ID NO: 1490356 - RNA, 19 nt, Artificial Sequence
  Description of Artificial Sequence: Synthetic oligonucleotide
agccucaguaaugcuagaa

SEQ ID NO: 1490357 - RNA, 19 nt, Artificial Sequence
  Description of Artificial Sequence: Synthetic oligonucleotide
gggacugggugaaagaaaa

SEQ ID NO: 1490358 - RNA, 19 nt, Artificial Sequence
  Description of Artificial Sequence: Synthetic oligonucleotide
gcuagauaggcacuuugcu

SEQ ID NO: 1490359 - RNA, 19 nt, Artificial Sequence
  Description of Artificial Sequence: Synthetic oligonucleotide
augcuagaauacaggagau

SEQ ID NO: 1490360 - RNA, 19 nt, Artificial Sequence
  Description of Artificial Sequence: Synthetic oligonucleotide
gcuuauccaacgagagucc

SEQ ID NO: 1490361 - RNA, 19 nt, Artificial Sequence
  Description of Artificial Sequence: Synthetic oligonucleotide
cccaaaccccugcuuaucc

SEQ ID NO: 1490362 - RNA, 19 nt, Artificial Sequence
  Description of Artificial Sequence: Synthetic oligonucleotide
caggagaucccaaguccca

SEQ ID NO: 1490363 - RNA, 19 nt, Artificial Sequence
  Description of Artificial Sequence: Synthetic oligonucleotide
uagaggauucuggcuuacu

SEQ ID NO: 1490364 - RNA, 19 nt, Artificial Sequence
  Description of Artificial Sequence: Synthetic oligonucleotide
ccucaguaaugcuagaaua

SEQ ID NO: 1490365 - RNA, 19 nt, Artificial Sequence
  Description of Artificial Sequence: Synthetic oligonucleotide
caggaagucccaaaccccu

SEQ ID NO: 1490366 - RNA, 19 nt, Artificial Sequence
  Description of Artificial Sequence: Synthetic oligonucleotide
ugugcggaggaagcggcua

SEQ ID NO: 1490367 - RNA, 19 nt, Artificial Sequence
  Description of Artificial Sequence: Synthetic oligonucleotide
uacuaacuggaggcauaga

SEQ ID NO: 1490368 - RNA, 19 nt, Artificial Sequence
  Description of Artificial Sequence: Synthetic oligonucleotide
cugcaggacagucaugcua

SEQ ID NO: 1490369 - RNA, 19 nt, Artificial Sequence
  Description of Artificial Sequence: Synthetic oligonucleotide
ugucguccugacgcuacac

SEQ ID NO: 1490370 - RNA, 19 nt, Artificial Sequence
  Description of Artificial Sequence: Synthetic oligonucleotide
gggacucccaccagccugg

SEQ ID NO: 1490371 - RNA, 19 nt, Artificial Sequence
  Description of Artificial Sequence: Synthetic oligonucleotide
gaaggggauggaaggaagu

SEQ ID NO: 1490372 - RNA, 19 nt, Artificial Sequence
  Description of Artificial Sequence: Synthetic oligonucleotide
guuugggaauguguccaga

SEQ ID NO: 1490373 - RNA, 19 nt, Artificial Sequence
  Description of Artificial Sequence: Synthetic oligonucleotide
agaggacccaugacauucu

SEQ ID NO: 1490374 - RNA, 19 nt, Artificial Sequence
  Description of Artificial Sequence: Synthetic oligonucleotide
gaaggaaaacuaggagccu

SEQ ID NO: 1490375 - RNA, 19 nt, Artificial Sequence
  Description of Artificial Sequence: Synthetic oligonucleotide
gggacugaguccacuggcc

SEQ ID NO: 1490376 - RNA, 19 nt, Artificial Sequence
  Description of Artificial Sequence: Synthetic oligonucleotide
aggaagucccaaaccccug

SEQ ID NO: 1490377 - RNA, 19 nt, Artificial Sequence
  Description of Artificial Sequence: Synthetic oligonucleotide
ccugacgcuacacgcucgg

SEQ ID NO: 1490378 - RNA, 19 nt, Artificial Sequence
  Description of Artificial Sequence: Synthetic oligonucleotide
agggacugggugaaagaaa

SEQ ID NO: 1490379 - RNA, 19 nt, Artificial Sequence
  Description of Artificial Sequence: Synthetic oligonucleotide
guggccacccuuguauaca

SEQ ID NO: 1490380 - RNA, 19 nt, Artificial Sequence
  Description of Artificial Sequence: Synthetic oligonucleotide
caacgagagucccaacucu

SEQ ID NO: 1490381 - RNA, 19 nt, Artificial Sequence
  Description of Artificial Sequence: Synthetic oligonucleotide
aggguagggacugggugaa

SEQ ID NO: 1490382 - RNA, 19 nt, Artificial Sequence
  Description of Artificial Sequence: Synthetic oligonucleotide
agcaagcgaauggcaugag

SEQ ID NO: 1490383 - RNA, 19 nt, Artificial Sequence
  Description of Artificial Sequence: Synthetic oligonucleotide
cgagaccuguaugauaagc

SEQ ID NO: 1490384 - RNA, 19 nt, Artificial Sequence
  Description of Artificial Sequence: Synthetic oligonucleotide
ugggcggggcuugcgcccg

SEQ ID NO: 1490385 - RNA, 19 nt, Artificial Sequence
  Description of Artificial Sequence: Synthetic oligonucleotide
cauucucaccuccugcccu

SEQ ID NO: 1490386 - RNA, 19 nt, Artificial Sequence
  Description of Artificial Sequence: Synthetic oligonucleotide
ccuugcacucuaugauagc

SEQ ID NO: 1490387 - RNA, 19 nt, Artificial Sequence
  Description of Artificial Sequence: Synthetic oligonucleotide
cagauauaaugcagccaua

SEQ ID NO: 1490388 - RNA, 19 nt, Artificial Sequence
  Description of Artificial Sequence: Synthetic oligonucleotide
caaggugguccccaucucu

SEQ ID NO: 1490389 - RNA, 19 nt, Artificial Sequence
  Description of Artificial Sequence: Synthetic oligonucleotide
gcacucuaugauagcuggg

SEQ ID NO: 1490390 - RNA, 19 nt, Artificial Sequence
  Description of Artificial Sequence: Synthetic oligonucleotide
ugauagcugggcggggcuu

SEQ ID NO: 1490391 - RNA, 19 nt, Artificial Sequence
  Description of Artificial Sequence: Synthetic oligonucleotide
acgcucggccccgcaacac

SEQ ID NO: 1490392 - RNA, 19 nt, Artificial Sequence
  Description of Artificial Sequence: Synthetic oligonucleotide
cccugcuuauccaacgaga

SEQ ID NO: 1490393 - RNA, 19 nt, Artificial Sequence
  Description of Artificial Sequence: Synthetic oligonucleotide
cagauggggucaggaaguc

SEQ ID NO: 1490394 - RNA, 19 nt, Artificial Sequence
  Description of Artificial Sequence: Synthetic oligonucleotide
gacccagguugaauuucuc

SEQ ID NO: 1490395 - RNA, 19 nt, Artificial Sequence
  Description of Artificial Sequence: Synthetic oligonucleotide
gggauuaaccaaggugguc

SEQ ID NO: 1490396 - RNA, 19 nt, Artificial Sequence
  Description of Artificial Sequence: Synthetic oligonucleotide
ggugucguccugacgcuac

SEQ ID NO: 1490397 - RNA, 19 nt, Artificial Sequence
  Description of Artificial Sequence: Synthetic oligonucleotide
ggagaucccaagucccaaa

SEQ ID NO: 1490398 - RNA, 19 nt, Artificial Sequence
  Description of Artificial Sequence: Synthetic oligonucleotide
gcugggcggggcuugcgcc

SEQ ID NO: 1490399 - RNA, 19 nt, Artificial Sequence
  Description of Artificial Sequence: Synthetic oligonucleotide
uccucacccgagaccugua

SEQ ID NO: 1490400 - RNA, 19 nt, Artificial Sequence
  Description of Artificial Sequence: Synthetic oligonucleotide
gcuaucagauggggucagg

SEQ ID NO: 1490401 - RNA, 19 nt, Artificial Sequence
  Description of Artificial Sequence: Synthetic oligonucleotide
cuguaugauaagccucagu

SEQ ID NO: 1490402 - RNA, 19 nt, Artificial Sequence
  Description of Artificial Sequence: Synthetic oligonucleotide
cugacgcuacacgcucggc

SEQ ID NO: 1490403 - RNA, 19 nt, Artificial Sequence
  Description of Artificial Sequence: Synthetic oligonucleotide
ccaugucugcuuccccagg

SEQ ID NO: 1490404 - RNA, 19 nt, Artificial Sequence
  Description of Artificial Sequence: Synthetic oligonucleotide
uggccuccggguugagcaa

SEQ ID NO: 1490405 - RNA, 19 nt, Artificial Sequence
  Description of Artificial Sequence: Synthetic oligonucleotide
ggcuaucagauggggucag

SEQ ID NO: 1490406 - RNA, 19 nt, Artificial Sequence
  Description of Artificial Sequence: Synthetic oligonucleotide
ggauucuggcuuacuccug

SEQ ID NO: 1490407 - RNA, 19 nt, Artificial Sequence
  Description of Artificial Sequence: Synthetic oligonucleotide
acuaggagccuaggcuuua

SEQ ID NO: 1490408 - RNA, 19 nt, Artificial Sequence
  Description of Artificial Sequence: Synthetic oligonucleotide
cugcuuauccaacgagagu

SEQ ID NO: 1490409 - RNA, 19 nt, Artificial Sequence
  Description of Artificial Sequence: Synthetic oligonucleotide
ccccugcuuauccaacgag

SEQ ID NO: 1490410 - RNA, 19 nt, Artificial Sequence
  Description of Artificial Sequence: Synthetic oligonucleotide
gugucguccugacgcuaca

SEQ ID NO: 1490411 - RNA, 19 nt, Artificial Sequence
  Description of Artificial Sequence: Synthetic oligonucleotide
gccauacuaacuggaggca

SEQ ID NO: 1490412 - RNA, 19 nt, Artificial Sequence
  Description of Artificial Sequence: Synthetic oligonucleotide
ccaucucuggugaccagga

SEQ ID NO: 1490413 - RNA, 19 nt, Artificial Sequence
  Description of Artificial Sequence: Synthetic oligonucleotide
uugcgcccggugucguccu

SEQ ID NO: 1490414 - RNA, 19 nt, Artificial Sequence
  Description of Artificial Sequence: Synthetic oligonucleotide
ggggcuugcgcccgguguc

SEQ ID NO: 1490415 - RNA, 19 nt, Artificial Sequence
  Description of Artificial Sequence: Synthetic oligonucleotide
uugccccauguggccaccc

SEQ ID NO: 1490416 - RNA, 19 nt, Artificial Sequence
  Description of Artificial Sequence: Synthetic oligonucleotide
cacagagagaagggauuaa

SEQ ID NO: 1490417 - RNA, 19 nt, Artificial Sequence
  Description of Artificial Sequence: Synthetic oligonucleotide
gccucaguaaugcuagaau

SEQ ID NO: 1490418 - RNA, 19 nt, Artificial Sequence
  Description of Artificial Sequence: Synthetic oligonucleotide
ggacugaguccacuggccu

SEQ ID NO: 1490419 - RNA, 19 nt, Artificial Sequence
  Description of Artificial Sequence: Synthetic oligonucleotide
gcagguccaggauaucaua

SEQ ID NO: 1490420 - RNA, 19 nt, Artificial Sequence
  Description of Artificial Sequence: Synthetic oligonucleotide
ugccagggacugaguccac

SEQ ID NO: 1490421 - RNA, 19 nt, Artificial Sequence
  Description of Artificial Sequence: Synthetic oligonucleotide
gggcuugaaaggguaggga

SEQ ID NO: 1490422 - RNA, 19 nt, Artificial Sequence
  Description of Artificial Sequence: Synthetic oligonucleotide
cuuuauccuugcacucuau

SEQ ID NO: 1490423 - RNA, 19 nt, Artificial Sequence
  Description of Artificial Sequence: Synthetic oligonucleotide
gucccaaaccccugcuuau

SEQ ID NO: 1490424 - RNA, 19 nt, Artificial Sequence
  Description of Artificial Sequence: Synthetic oligonucleotide
cugggcuguaacagacucu

SEQ ID NO: 1490425 - RNA, 19 nt, Artificial Sequence
  Description of Artificial Sequence: Synthetic oligonucleotide
agacucuagccagcugauu

SEQ ID NO: 1490426 - RNA, 19 nt, Artificial Sequence
  Description of Artificial Sequence: Synthetic oligonucleotide
gucccaaagggcucccuuu

SEQ ID NO: 1490427 - RNA, 19 nt, Artificial Sequence
  Description of Artificial Sequence: Synthetic oligonucleotide
ugcgcccggugucguccug

SEQ ID NO: 1490428 - RNA, 19 nt, Artificial Sequence
  Description of Artificial Sequence: Synthetic oligonucleotide
gggcuugcgcccggugucg

SEQ ID NO: 1490429 - RNA, 19 nt, Artificial Sequence
  Description of Artificial Sequence: Synthetic oligonucleotide
ccaacaaaccaugucugcu

SEQ ID NO: 1490430 - RNA, 19 nt, Artificial Sequence
  Description of Artificial Sequence: Synthetic oligonucleotide
cacgcucggccccgcaaca

SEQ ID NO: 1490431 - RNA, 19 nt, Artificial Sequence
  Description of Artificial Sequence: Synthetic oligonucleotide
gcuuacuccuggggacucc

SEQ ID NO: 1490432 - RNA, 19 nt, Artificial Sequence
  Description of Artificial Sequence: Synthetic oligonucleotide
cuaggagccuaggcuuuaa

SEQ ID NO: 1490433 - RNA, 19 nt, Artificial Sequence
  Description of Artificial Sequence: Synthetic oligonucleotide
cccuacuuauugccccaug

SEQ ID NO: 1490434 - RNA, 19 nt, Artificial Sequence
  Description of Artificial Sequence: Synthetic oligonucleotide
ccggguugagcaacuuuga

SEQ ID NO: 1490435 - RNA, 19 nt, Artificial Sequence
  Description of Artificial Sequence: Synthetic oligonucleotide
cuaguaaguagggcagauu

SEQ ID NO: 1490436 - RNA, 19 nt, Artificial Sequence
  Description of Artificial Sequence: Synthetic oligonucleotide
ggagacacacagauauaau

SEQ ID NO: 1490437 - RNA, 19 nt, Artificial Sequence
  Description of Artificial Sequence: Synthetic oligonucleotide
gggcuguaacagacucuag

SEQ ID NO: 1490438 - RNA, 19 nt, Artificial Sequence
  Description of Artificial Sequence: Synthetic oligonucleotide
ggugguccccaucucuggu

SEQ ID NO: 1490439 - RNA, 19 nt, Artificial Sequence
  Description of Artificial Sequence: Synthetic oligonucleotide
ccaaggugguccccaucuc

SEQ ID NO: 1490440 - RNA, 19 nt, Artificial Sequence
  Description of Artificial Sequence: Synthetic oligonucleotide
gcucggccccgcaacacac

SEQ ID NO: 1490441 - RNA, 19 nt, Artificial Sequence
  Description of Artificial Sequence: Synthetic oligonucleotide
gcccggugucguccugacg

SEQ ID NO: 1490442 - RNA, 19 nt, Artificial Sequence
  Description of Artificial Sequence: Synthetic oligonucleotide
cuacacgcucggccccgca

SEQ ID NO: 1490443 - RNA, 19 nt, Artificial Sequence
  Description of Artificial Sequence: Synthetic oligonucleotide
ggccuccggguugagcaac

SEQ ID NO: 1490444 - RNA, 19 nt, Artificial Sequence
  Description of Artificial Sequence: Synthetic oligonucleotide
ggacucccaccagccuggg

SEQ ID NO: 1490445 - RNA, 19 nt, Artificial Sequence
  Description of Artificial Sequence: Synthetic oligonucleotide
caugcuagauaggcacuuu

SEQ ID NO: 1490446 - RNA, 19 nt, Artificial Sequence
  Description of Artificial Sequence: Synthetic oligonucleotide
ccagggcuacaggaaguuc

SEQ ID NO: 1490447 - RNA, 19 nt, Artificial Sequence
  Description of Artificial Sequence: Synthetic oligonucleotide
cugccugcugugaggcuau

SEQ ID NO: 1490448 - RNA, 19 nt, Artificial Sequence
  Description of Artificial Sequence: Synthetic oligonucleotide
cuccggguugagcaacuuu

SEQ ID NO: 1490449 - RNA, 19 nt, Artificial Sequence
  Description of Artificial Sequence: Synthetic oligonucleotide
gccugcugugaggcuauca

SEQ ID NO: 1490450 - RNA, 19 nt, Artificial Sequence
  Description of Artificial Sequence: Synthetic oligonucleotide
gguccucacccgagaccug

SEQ ID NO: 1490451 - RNA, 19 nt, Artificial Sequence
  Description of Artificial Sequence: Synthetic oligonucleotide
ccauacuaacuggaggcau

SEQ ID NO: 1490452 - RNA, 19 nt, Artificial Sequence
  Description of Artificial Sequence: Synthetic oligonucleotide
cgcuacacgcucggccccg

SEQ ID NO: 1490453 - RNA, 19 nt, Artificial Sequence
  Description of Artificial Sequence: Synthetic oligonucleotide
cguccugacgcuacacgcu

SEQ ID NO: 1490454 - RNA, 19 nt, Artificial Sequence
  Description of Artificial Sequence: Synthetic oligonucleotide
ccagacccagguugaauuu

SEQ ID NO: 1490455 - RNA, 19 nt, Artificial Sequence
  Description of Artificial Sequence: Synthetic oligonucleotide
cacuggccuccggguugag

SEQ ID NO: 1490456 - RNA, 19 nt, Artificial Sequence
  Description of Artificial Sequence: Synthetic oligonucleotide
gcggggcuugcgcccggug

SEQ ID NO: 1490457 - RNA, 19 nt, Artificial Sequence
  Description of Artificial Sequence: Synthetic oligonucleotide
gccagggacugaguccacu

SEQ ID NO: 1490458 - RNA, 19 nt, Artificial Sequence
  Description of Artificial Sequence: Synthetic oligonucleotide
cgcccggugucguccugac

SEQ ID NO: 1490459 - RNA, 19 nt, Artificial Sequence
  Description of Artificial Sequence: Synthetic oligonucleotide
cgcucggccccgcaacaca

SEQ ID NO: 1490460 - RNA, 19 nt, Artificial Sequence
  Description of Artificial Sequence: Synthetic oligonucleotide
gcgcccggugucguccuga

SEQ ID NO: 1490461 - RNA, 19 nt, Artificial Sequence
  Description of Artificial Sequence: Synthetic oligonucleotide
ccuaggcuuuaaagggcuu

SEQ ID NO: 1490462 - RNA, 19 nt, Artificial Sequence
  Description of Artificial Sequence: Synthetic oligonucleotide
cccaccagccuggguccuc

SEQ ID NO: 1490463 - RNA, 19 nt, Artificial Sequence
  Description of Artificial Sequence: Synthetic oligonucleotide
ccucacccgagaccuguau

SEQ ID NO: 1490464 - RNA, 19 nt, Artificial Sequence
  Description of Artificial Sequence: Synthetic oligonucleotide
gccuccggguugagcaacu
